United States Patent Application Publication US 2005/0255487 A1 - sequence listing, part 76

SEQ ID NO: 2087685 - RNA, 19 nt, Homo sapiens
  misc_RNA (1)...(19): siRNA sense strand
ccacagcaauucccagguu

SEQ ID NO: 2087686 - RNA, 19 nt, Homo sapiens
  misc_RNA (1)...(19): siRNA sense strand
ggucaaacuauccauauga

SEQ ID NO: 2087687 - RNA, 19 nt, Homo sapiens
  misc_RNA (1)...(19): siRNA sense strand
gaaagaaauggaacaggau

SEQ ID NO: 2087688 - RNA, 19 nt, Homo sapiens
  misc_RNA (1)...(19): siRNA sense strand
caguuggacucucuugaaa

SEQ ID NO: 2087689 - RNA, 19 nt, Homo sapiens
  misc_RNA (1)...(19): siRNA sense strand
cauaugagccugucugucu

SEQ ID NO: 2087690 - RNA, 19 nt, Homo sapiens
  misc_RNA (1)...(19): siRNA sense strand
gcaagugugccaaaauaua

SEQ ID NO: 2087691 - RNA, 19 nt, Homo sapiens
  misc_RNA (1)...(19): siRNA sense strand
acaaagaaauacugcuuac

SEQ ID NO: 2087692 - RNA, 19 nt, Homo sapiens
  misc_RNA (1)...(19): siRNA sense strand
gcuagucauagaaacaaua

SEQ ID NO: 2087693 - RNA, 19 nt, Homo sapiens
  misc_RNA (1)...(19): siRNA sense strand
gaaauacugcuuacuacac

SEQ ID NO: 2087694 - RNA, 19 nt, Homo sapiens
  misc_RNA (1)...(19): siRNA sense strand
cuacacaguuggacucucu

SEQ ID NO: 2087695 - RNA, 19 nt, Homo sapiens
  misc_RNA (1)...(19): siRNA sense strand
aagcaagugugccaaaaua

SEQ ID NO: 2087696 - RNA, 19 nt, Homo sapiens
  misc_RNA (1)...(19): siRNA sense strand
aaauacugcuuacuacaca

SEQ ID NO: 2087697 - RNA, 19 nt, Homo sapiens
  misc_RNA (1)...(19): siRNA sense strand
aagaaauacugcuuacuac

SEQ ID NO: 2087698 - RNA, 19 nt, Homo sapiens
  misc_RNA (1)...(19): siRNA sense strand
caacuaggaaugcagaaag

SEQ ID NO: 2087699 - RNA, 19 nt, Homo sapiens
  misc_RNA (1)...(19): siRNA sense strand
aagaagcacuugccucaac

SEQ ID NO: 2087700 - RNA, 19 nt, Homo sapiens
  misc_RNA (1)...(19): siRNA sense strand
gaagcacuugccucaacua

SEQ ID NO: 2087701 - RNA, 19 nt, Homo sapiens
  misc_RNA (1)...(19): siRNA sense strand
ggaagcaagugugccaaaa

SEQ ID NO: 2087702 - RNA, 19 nt, Homo sapiens
  misc_RNA (1)...(19): siRNA sense strand
caagugugccaaaauauaa

SEQ ID NO: 2087703 - RNA, 19 nt, Homo sapiens
  misc_RNA (1)...(19): siRNA sense strand
uguuguagaugaauuagca

SEQ ID NO: 2087704 - RNA, 19 nt, Homo sapiens
  misc_RNA (1)...(19): siRNA sense strand
gaaugcagaaagaaaugga

SEQ ID NO: 2087705 - RNA, 19 nt, Homo sapiens
  misc_RNA (1)...(19): siRNA sense strand
cuaggaaugcagaaagaaa

SEQ ID NO: 2087706 - RNA, 19 nt, Homo sapiens
  misc_RNA (1)...(19): siRNA sense strand
gagacucugcaacucauga

SEQ ID NO: 2087707 - RNA, 19 nt, Homo sapiens
  misc_RNA (1)...(19): siRNA sense strand
ucacaaaagagcugaaauu

SEQ ID NO: 2087708 - RNA, 19 nt, Homo sapiens
  misc_RNA (1)...(19): siRNA sense strand
gucaaacuauccauaugag

SEQ ID NO: 2087709 - RNA, 19 nt, Homo sapiens
  misc_RNA (1)...(19): siRNA sense strand
acaguuggacucucuugaa

SEQ ID NO: 2087710 - RNA, 19 nt, Homo sapiens
  misc_RNA (1)...(19): siRNA sense strand
aacuaggaaugcagaaaga

SEQ ID NO: 2087711 - RNA, 19 nt, Homo sapiens
  misc_RNA (1)...(19): siRNA sense strand
auaugagccugucugucua

SEQ ID NO: 2087712 - RNA, 19 nt, Homo sapiens
  misc_RNA (1)...(19): siRNA sense strand
uaggaaugcagaaagaaau

SEQ ID NO: 2087713 - RNA, 19 nt, Homo sapiens
  misc_RNA (1)...(19): siRNA sense strand
gcagaaagaaauggaacag

SEQ ID NO: 2087714 - RNA, 19 nt, Homo sapiens
  misc_RNA (1)...(19): siRNA sense strand
uagaaacaauauggaagca

SEQ ID NO: 2087715 - RNA, 19 nt, Homo sapiens
  misc_RNA (1)...(19): siRNA sense strand
gaggaaagagagcuuauuc

SEQ ID NO: 2087716 - RNA, 19 nt, Homo sapiens
  misc_RNA (1)...(19): siRNA sense strand
caccaaccaugccaucauu

SEQ ID NO: 2087717 - RNA, 19 nt, Homo sapiens
  misc_RNA (1)...(19): siRNA sense strand
gcagaggaaagagagcuua

SEQ ID NO: 2087718 - RNA, 19 nt, Homo sapiens
  misc_RNA (1)...(19): siRNA sense strand
ccgcaccacuucaugaugu

SEQ ID NO: 2087719 - RNA, 19 nt, Homo sapiens
  misc_RNA (1)...(19): siRNA sense strand
gcgagggccuuugcgacuu

SEQ ID NO: 2087720 - RNA, 19 nt, Homo sapiens
  misc_RNA (1)...(19): siRNA sense strand
cgagggccuuugcgacuuc

SEQ ID NO: 2087721 - RNA, 19 nt, Homo sapiens
  misc_RNA (1)...(19): siRNA sense strand
ggacuucuccgccguugcu

SEQ ID NO: 2087722 - RNA, 19 nt, Homo sapiens
  misc_RNA (1)...(19): siRNA sense strand
ccaaccaugccaucauuca

SEQ ID NO: 2087723 - RNA, 19 nt, Homo sapiens
  misc_RNA (1)...(19): siRNA sense strand
caagcaauacgaggacaug

SEQ ID NO: 2087724 - RNA, 19 nt, Homo sapiens
  misc_RNA (1)...(19): siRNA sense strand
agacgcugcucaacuccau

SEQ ID NO: 2087725 - RNA, 19 nt, Homo sapiens
  misc_RNA (1)...(19): siRNA sense strand
gaggaaagagagcuuauuc

SEQ ID NO: 2087726 - RNA, 19 nt, Homo sapiens
  misc_RNA (1)...(19): siRNA sense strand
caccaaccaugccaucauu

SEQ ID NO: 2087727 - RNA, 19 nt, Homo sapiens
  misc_RNA (1)...(19): siRNA sense strand
gcagaggaaagagagcuua

SEQ ID NO: 2087728 - RNA, 19 nt, Homo sapiens
  misc_RNA (1)...(19): siRNA sense strand
ccgcaccacuucaugaugu

SEQ ID NO: 2087729 - RNA, 19 nt, Homo sapiens
  misc_RNA (1)...(19): siRNA sense strand
gcgagggccuuugcgacuu

SEQ ID NO: 2087730 - RNA, 19 nt, Homo sapiens
  misc_RNA (1)...(19): siRNA sense strand
cgagggccuuugcgacuuc

SEQ ID NO: 2087731 - RNA, 19 nt, Homo sapiens
  misc_RNA (1)...(19): siRNA sense strand
ggacuucuccgccguugcu

SEQ ID NO: 2087732 - RNA, 19 nt, Homo sapiens
  misc_RNA (1)...(19): siRNA sense strand
ccaaccaugccaucauuca

SEQ ID NO: 2087733 - RNA, 19 nt, Homo sapiens
  misc_RNA (1)...(19): siRNA sense strand
caagcaauacgaggacaug

SEQ ID NO: 2087734 - RNA, 19 nt, Homo sapiens
  misc_RNA (1)...(19): siRNA sense strand
agacgcugcucaacuccau

SEQ ID NO: 2087735 - RNA, 19 nt, Homo sapiens
  misc_RNA (1)...(19): siRNA sense strand
gaacagaucuucaugaaug

SEQ ID NO: 2087736 - RNA, 19 nt, Homo sapiens
  misc_RNA (1)...(19): siRNA sense strand
gaaguuagaugacgaugga

SEQ ID NO: 2087737 - RNA, 19 nt, Homo sapiens
  misc_RNA (1)...(19): siRNA sense strand
ggacaauccugauaguuug

SEQ ID NO: 2087738 - RNA, 19 nt, Homo sapiens
  misc_RNA (1)...(19): siRNA sense strand
ucauaggagugguuuauua

SEQ ID NO: 2087739 - RNA, 19 nt, Homo sapiens
  misc_RNA (1)...(19): siRNA sense strand
uaucagcgcuuacgccaua

SEQ ID NO: 2087740 - RNA, 19 nt, Homo sapiens
  misc_RNA (1)...(19): siRNA sense strand
gacgauggauugccguuua

SEQ ID NO: 2087741 - RNA, 19 nt, Homo sapiens
  misc_RNA (1)...(19): siRNA sense strand
ggucagcucuuccuuaugu

SEQ ID NO: 2087742 - RNA, 19 nt, Homo sapiens
  misc_RNA (1)...(19): siRNA sense strand
gaagaugccaugauuguga

SEQ ID NO: 2087743 - RNA, 19 nt, Homo sapiens
  misc_RNA (1)...(19): siRNA sense strand
cuacaagucugaguucaua

SEQ ID NO: 2087744 - RNA, 19 nt, Homo sapiens
  misc_RNA (1)...(19): siRNA sense strand
gaacuuagcauugggcaaa

SEQ ID NO: 2087745 - RNA, 19 nt, Homo sapiens
  misc_RNA (1)...(19): siRNA sense strand
caugaacacugacaauuug

SEQ ID NO: 2087746 - RNA, 19 nt, Homo sapiens
  misc_RNA (1)...(19): siRNA sense strand
gacccuccauguaugauua

SEQ ID NO: 2087747 - RNA, 19 nt, Homo sapiens
  misc_RNA (1)...(19): siRNA sense strand
ccaccuaacugccguaugu

SEQ ID NO: 2087748 - RNA, 19 nt, Homo sapiens
  misc_RNA (1)...(19): siRNA sense strand
gaacucggccuuagaauac

SEQ ID NO: 2087749 - RNA, 19 nt, Homo sapiens
  misc_RNA (1)...(19): siRNA sense strand
gaacauuccgcugucaaua

SEQ ID NO: 2087750 - RNA, 19 nt, Homo sapiens
  misc_RNA (1)...(19): siRNA sense strand
gcuuuccacuucucacuua

SEQ ID NO: 2087751 - RNA, 19 nt, Homo sapiens
  misc_RNA (1)...(19): siRNA sense strand
ucucagauguuaaggauug

SEQ ID NO: 2087752 - RNA, 19 nt, Homo sapiens
  misc_RNA (1)...(19): siRNA sense strand
cagauucucuucgucauuu

SEQ ID NO: 2087753 - RNA, 19 nt, Homo sapiens
  misc_RNA (1)...(19): siRNA sense strand
gaacccaacuaucggagau

SEQ ID NO: 2087754 - RNA, 19 nt, Homo sapiens
  misc_RNA (1)...(19): siRNA sense strand
gcuaugaacaucaaaguga

SEQ ID NO: 2087755 - RNA, 19 nt, Homo sapiens
  misc_RNA (1)...(19): siRNA sense strand
ccauugggauguuaauuga

SEQ ID NO: 2087756 - RNA, 19 nt, Homo sapiens
  misc_RNA (1)...(19): siRNA sense strand
gaucauacagugagugcua

SEQ ID NO: 2087757 - RNA, 19 nt, Homo sapiens
  misc_RNA (1)...(19): siRNA sense strand
ggagaacucggccuuagaa

SEQ ID NO: 2087758 - RNA, 19 nt, Homo sapiens
  misc_RNA (1)...(19): siRNA sense strand
ggauggaagugguccuuau

SEQ ID NO: 2087759 - RNA, 19 nt, Homo sapiens
  misc_RNA (1)...(19): siRNA sense strand
gauaguagccugguguuug

SEQ ID NO: 2087760 - RNA, 19 nt, Homo sapiens
  misc_RNA (1)...(19): siRNA sense strand
gaaugucgcuaucuuugag

SEQ ID NO: 2087761 - RNA, 19 nt, Homo sapiens
  misc_RNA (1)...(19): siRNA sense strand
gauaagaaggcucagaaga

SEQ ID NO: 2087762 - RNA, 19 nt, Homo sapiens
  misc_RNA (1)...(19): siRNA sense strand
gcaccgagagguuauauag

SEQ ID NO: 2087763 - RNA, 19 nt, Homo sapiens
  misc_RNA (1)...(19): siRNA sense strand
caaagaagagcuaauugga

SEQ ID NO: 2087764 - RNA, 19 nt, Homo sapiens
  misc_RNA (1)...(19): siRNA sense strand
gcucagaagaccaguguuu

SEQ ID NO: 2087765 - RNA, 19 nt, Homo sapiens
  misc_RNA (1)...(19): siRNA sense strand
gaagaacauuccgcuguca

SEQ ID NO: 2087766 - RNA, 19 nt, Homo sapiens
  misc_RNA (1)...(19): siRNA sense strand
ggugagacccuccauguau

SEQ ID NO: 2087767 - RNA, 19 nt, Homo sapiens
  misc_RNA (1)...(19): siRNA sense strand
gauggaagugguccuuaua

SEQ ID NO: 2087768 - RNA, 19 nt, Homo sapiens
  misc_RNA (1)...(19): siRNA sense strand
gaagguugguuagugucua

SEQ ID NO: 2087769 - RNA, 19 nt, Homo sapiens
  misc_RNA (1)...(19): siRNA sense strand
uggaacagaucuucaugaa

SEQ ID NO: 2087770 - RNA, 19 nt, Homo sapiens
  misc_RNA (1)...(19): siRNA sense strand
gcaaagaagagcuaauugg

SEQ ID NO: 2087771 - RNA, 19 nt, Homo sapiens
  misc_RNA (1)...(19): siRNA sense strand
ccaugaacacugacaauuu

SEQ ID NO: 2087772 - RNA, 19 nt, Homo sapiens
  misc_RNA (1)...(19): siRNA sense strand
gcacuuaaggcacuuguca

SEQ ID NO: 2087773 - RNA, 19 nt, Homo sapiens
  misc_RNA (1)...(19): siRNA sense strand
ggauguuaauugagaguau

SEQ ID NO: 2087774 - RNA, 19 nt, Homo sapiens
  misc_RNA (1)...(19): siRNA sense strand
gaucggauaacaaacugua

SEQ ID NO: 2087775 - RNA, 19 nt, Homo sapiens
  misc_RNA (1)...(19): siRNA sense strand
gaagagcuaauuggaacua

SEQ ID NO: 2087776 - RNA, 19 nt, Homo sapiens
  misc_RNA (1)...(19): siRNA sense strand
gggcaaagaagagcuaauu

SEQ ID NO: 2087777 - RNA, 19 nt, Homo sapiens
  misc_RNA (1)...(19): siRNA sense strand
cggcaucuauuccagcuuu

SEQ ID NO: 2087778 - RNA, 19 nt, Homo sapiens
  misc_RNA (1)...(19): siRNA sense strand
gagagugcauggaggacaa

SEQ ID NO: 2087779 - RNA, 19 nt, Homo sapiens
  misc_RNA (1)...(19): siRNA sense strand
gaggagaacucggccuuag

SEQ ID NO: 2087780 - RNA, 19 nt, Homo sapiens
  misc_RNA (1)...(19): siRNA sense strand
guuaaggauuguaauggaa

SEQ ID NO: 2087781 - RNA, 19 nt, Homo sapiens
  misc_RNA (1)...(19): siRNA sense strand
ugugaaguguggcaguuua

SEQ ID NO: 2087782 - RNA, 19 nt, Homo sapiens
  misc_RNA (1)...(19): siRNA sense strand
agacaaauuucaaguaagg

SEQ ID NO: 2087783 - RNA, 19 nt, Homo sapiens
  misc_RNA (1)...(19): siRNA sense strand
gaugaggaccaccacagua

SEQ ID NO: 2087784 - RNA, 19 nt, Homo sapiens
  misc_RNA (1)...(19): siRNA sense strand
gaacacugacaauuugaug

SEQ ID NO: 2087785 - RNA, 19 nt, Homo sapiens
  misc_RNA (1)...(19): siRNA sense strand
uaaggcacuugucagcuuu

SEQ ID NO: 2087786 - RNA, 19 nt, Homo sapiens
  misc_RNA (1)...(19): siRNA sense strand
uaggagugguuuauuauca

SEQ ID NO: 2087787 - RNA, 19 nt, Homo sapiens
  misc_RNA (1)...(19): siRNA sense strand
gcacagaggggcugauuuu

SEQ ID NO: 2087788 - RNA, 19 nt, Homo sapiens
  misc_RNA (1)...(19): siRNA sense strand
cugcggaguuccuguuuaa

SEQ ID NO: 2087789 - RNA, 19 nt, Homo sapiens
  misc_RNA (1)...(19): siRNA sense strand
gcugcggaguuccuguuua

SEQ ID NO: 2087790 - RNA, 19 nt, Homo sapiens
  misc_RNA (1)...(19): siRNA sense strand
cuacaagauucuggacuuu

SEQ ID NO: 2087791 - RNA, 19 nt, Homo sapiens
  misc_RNA (1)...(19): siRNA sense strand
gcuggacggugucaugguu

SEQ ID NO: 2087792 - RNA, 19 nt, Homo sapiens
  misc_RNA (1)...(19): siRNA sense strand
auacuuuggugagauguua

SEQ ID NO: 2087793 - RNA, 19 nt, Homo sapiens
  misc_RNA (1)...(19): siRNA sense strand
gauuaugccucggagaaau

SEQ ID NO: 2087794 - RNA, 19 nt, Homo sapiens
  misc_RNA (1)...(19): siRNA sense strand
caagaccgaucggauaaca

SEQ ID NO: 2087795 - RNA, 19 nt, Homo sapiens
  misc_RNA (1)...(19): siRNA sense strand
gugcagaacuuagcauugg

SEQ ID NO: 2087796 - RNA, 19 nt, Homo sapiens
  misc_RNA (1)...(19): siRNA sense strand
uauaugcuuugucucauga

SEQ ID NO: 2087797 - RNA, 19 nt, Homo sapiens
  misc_RNA (1)...(19): siRNA sense strand
gugcaucuguauccacuug

SEQ ID NO: 2087798 - RNA, 19 nt, Homo sapiens
  misc_RNA (1)...(19): siRNA sense strand
gcaucuguauccacuugaa

SEQ ID NO: 2087799 - RNA, 19 nt, Homo sapiens
  misc_RNA (1)...(19): siRNA sense strand
ggaacgggaugcgcuuuua

SEQ ID NO: 2087800 - RNA, 19 nt, Homo sapiens
  misc_RNA (1)...(19): siRNA sense strand
uuaaggcacuugucagcuu

SEQ ID NO: 2087801 - RNA, 19 nt, Homo sapiens
  misc_RNA (1)...(19): siRNA sense strand
acuaugggcuuuccacuuc

SEQ ID NO: 2087802 - RNA, 19 nt, Homo sapiens
  misc_RNA (1)...(19): siRNA sense strand
uacgcuaccucucccauuu

SEQ ID NO: 2087803 - RNA, 19 nt, Homo sapiens
  misc_RNA (1)...(19): siRNA sense strand
aauccaagcuuugcaacuu

SEQ ID NO: 2087804 - RNA, 19 nt, Homo sapiens
  misc_RNA (1)...(19): siRNA sense strand
gaacaucaaagugaaacug

SEQ ID NO: 2087805 - RNA, 19 nt, Homo sapiens
  misc_RNA (1)...(19): siRNA sense strand
gaacuggcagcuaugaaca

SEQ ID NO: 2087806 - RNA, 19 nt, Homo sapiens
  misc_RNA (1)...(19): siRNA sense strand
gacacuaucgauacuguuu

SEQ ID NO: 2087807 - RNA, 19 nt, Homo sapiens
  misc_RNA (1)...(19): siRNA sense strand
gcaguuucuuggcuauguu

SEQ ID NO: 2087808 - RNA, 19 nt, Homo sapiens
  misc_RNA (1)...(19): siRNA sense strand
guugguuagugucuauuaa

SEQ ID NO: 2087809 - RNA, 19 nt, Homo sapiens
  misc_RNA (1)...(19): siRNA sense strand
gaguuucaaugcacugugu

SEQ ID NO: 2087810 - RNA, 19 nt, Homo sapiens
  misc_RNA (1)...(19): siRNA sense strand
agaacucggccuuagaaua

SEQ ID NO: 2087811 - RNA, 19 nt, Homo sapiens
  misc_RNA (1)...(19): siRNA sense strand
cgggaagucugcagcuuug

SEQ ID NO: 2087812 - RNA, 19 nt, Homo sapiens
  misc_RNA (1)...(19): siRNA sense strand
gccuaaagcacuugacuga

SEQ ID NO: 2087813 - RNA, 19 nt, Homo sapiens
  misc_RNA (1)...(19): siRNA sense strand
ucauagaccucucugaaaa

SEQ ID NO: 2087814 - RNA, 19 nt, Homo sapiens
  misc_RNA (1)...(19): siRNA sense strand
ucguugcugugauuucuua

SEQ ID NO: 2087815 - RNA, 19 nt, Homo sapiens
  misc_RNA (1)...(19): siRNA sense strand
gugagacccuccauguaug

SEQ ID NO: 2087816 - RNA, 19 nt, Homo sapiens
  misc_RNA (1)...(19): siRNA sense strand
caaaaggaaucauuaagca

SEQ ID NO: 2087817 - RNA, 19 nt, Homo sapiens
  misc_RNA (1)...(19): siRNA sense strand
ccuacaagauucuggacuu

SEQ ID NO: 2087818 - RNA, 19 nt, Homo sapiens
  misc_RNA (1)...(19): siRNA sense strand
cgggucagcucuuccuuau

SEQ ID NO: 2087819 - RNA, 19 nt, Homo sapiens
  misc_RNA (1)...(19): siRNA sense strand
ucaauguuccugacuggua

SEQ ID NO: 2087820 - RNA, 19 nt, Homo sapiens
  misc_RNA (1)...(19): siRNA sense strand
ccuuugggauuugcacuua

SEQ ID NO: 2087821 - RNA, 19 nt, Homo sapiens
  misc_RNA (1)...(19): siRNA sense strand
gauguuaauugagaguaug

SEQ ID NO: 2087822 - RNA, 19 nt, Homo sapiens
  misc_RNA (1)...(19): siRNA sense strand
ggcagugaauggaaucuca

SEQ ID NO: 2087823 - RNA, 19 nt, Homo sapiens
  misc_RNA (1)...(19): siRNA sense strand
aaagucauccgaauguuga

SEQ ID NO: 2087824 - RNA, 19 nt, Homo sapiens
  misc_RNA (1)...(19): siRNA sense strand
aaagaagagcuaauuggaa

SEQ ID NO: 2087825 - RNA, 19 nt, Homo sapiens
  misc_RNA (1)...(19): siRNA sense strand
acaaugggcauagaccuua

SEQ ID NO: 2087826 - RNA, 19 nt, Homo sapiens
  misc_RNA (1)...(19): siRNA sense strand
gauguuaaggauuguaaug

SEQ ID NO: 2087827 - RNA, 19 nt, Homo sapiens
  misc_RNA (1)...(19): siRNA sense strand
gggcauagaccuuacaaaa

SEQ ID NO: 2087828 - RNA, 19 nt, Homo sapiens
  misc_RNA (1)...(19): siRNA sense strand
gacaauuugaugaggauuu

SEQ ID NO: 2087829 - RNA, 19 nt, Homo sapiens
  misc_RNA (1)...(19): siRNA sense strand
ugagcaagcugcggaguuc

SEQ ID NO: 2087830 - RNA, 19 nt, Homo sapiens
  misc_RNA (1)...(19): siRNA sense strand
ugagugugauugccaacuu

SEQ ID NO: 2087831 - RNA, 19 nt, Homo sapiens
  misc_RNA (1)...(19): siRNA sense strand
cuaugaacaucaaagugaa

SEQ ID NO: 2087832 - RNA, 19 nt, Homo sapiens
  misc_RNA (1)...(19): siRNA sense strand
cauaggagugguuuauuau

SEQ ID NO: 2087833 - RNA, 19 nt, Homo sapiens
  misc_RNA (1)...(19): siRNA sense strand
agaauacuuuggugagaug

SEQ ID NO: 2087834 - RNA, 19 nt, Homo sapiens
  misc_RNA (1)...(19): siRNA sense strand
caugaccauugggauguua

SEQ ID NO: 2087835 - RNA, 19 nt, Homo sapiens
  misc_RNA (1)...(19): siRNA sense strand
gaacagaucuucaugaaug

SEQ ID NO: 2087836 - RNA, 19 nt, Homo sapiens
  misc_RNA (1)...(19): siRNA sense strand
gaaguuagaugacgaugga

SEQ ID NO: 2087837 - RNA, 19 nt, Homo sapiens
  misc_RNA (1)...(19): siRNA sense strand
ggacaauccugauaguuug

SEQ ID NO: 2087838 - RNA, 19 nt, Homo sapiens
  misc_RNA (1)...(19): siRNA sense strand
ucauaggagugguuuauua

SEQ ID NO: 2087839 - RNA, 19 nt, Homo sapiens
  misc_RNA (1)...(19): siRNA sense strand
uaucagcgcuuacgccaua

SEQ ID NO: 2087840 - RNA, 19 nt, Homo sapiens
  misc_RNA (1)...(19): siRNA sense strand
gacgauggauugccguuua

SEQ ID NO: 2087841 - RNA, 19 nt, Homo sapiens
  misc_RNA (1)...(19): siRNA sense strand
ggucagcucuuccuuaugu

SEQ ID NO: 2087842 - RNA, 19 nt, Homo sapiens
  misc_RNA (1)...(19): siRNA sense strand
gaagaugccaugauuguga

SEQ ID NO: 2087843 - RNA, 19 nt, Homo sapiens
  misc_RNA (1)...(19): siRNA sense strand
cuacaagucugaguucaua

SEQ ID NO: 2087844 - RNA, 19 nt, Homo sapiens
  misc_RNA (1)...(19): siRNA sense strand
gaacuuagcauugggcaaa

SEQ ID NO: 2087845 - RNA, 19 nt, Homo sapiens
  misc_RNA (1)...(19): siRNA sense strand
caugaacacugacaauuug

SEQ ID NO: 2087846 - RNA, 19 nt, Homo sapiens
  misc_RNA (1)...(19): siRNA sense strand
gacccuccauguaugauua

SEQ ID NO: 2087847 - RNA, 19 nt, Homo sapiens
  misc_RNA (1)...(19): siRNA sense strand
ccaccuaacugccguaugu

SEQ ID NO: 2087848 - RNA, 19 nt, Homo sapiens
  misc_RNA (1)...(19): siRNA sense strand
gaacucggccuuagaauac

SEQ ID NO: 2087849 - RNA, 19 nt, Homo sapiens
  misc_RNA (1)...(19): siRNA sense strand
gaacauuccgcugucaaua

SEQ ID NO: 2087850 - RNA, 19 nt, Homo sapiens
  misc_RNA (1)...(19): siRNA sense strand
gcuuuccacuucucacuua

SEQ ID NO: 2087851 - RNA, 19 nt, Homo sapiens
  misc_RNA (1)...(19): siRNA sense strand
ucucagauguuaaggauug

SEQ ID NO: 2087852 - RNA, 19 nt, Homo sapiens
  misc_RNA (1)...(19): siRNA sense strand
cagauucucuucgucauuu

SEQ ID NO: 2087853 - RNA, 19 nt, Homo sapiens
  misc_RNA (1)...(19): siRNA sense strand
gaacccaacuaucggagau

SEQ ID NO: 2087854 - RNA, 19 nt, Homo sapiens
  misc_RNA (1)...(19): siRNA sense strand
gcuaugaacaucaaaguga

SEQ ID NO: 2087855 - RNA, 19 nt, Homo sapiens
  misc_RNA (1)...(19): siRNA sense strand
ccauugggauguuaauuga

SEQ ID NO: 2087856 - RNA, 19 nt, Homo sapiens
  misc_RNA (1)...(19): siRNA sense strand
gaucauacagugagugcua

SEQ ID NO: 2087857 - RNA, 19 nt, Homo sapiens
  misc_RNA (1)...(19): siRNA sense strand
ggagaacucggccuuagaa

SEQ ID NO: 2087858 - RNA, 19 nt, Homo sapiens
  misc_RNA (1)...(19): siRNA sense strand
ggauggaagugguccuuau

SEQ ID NO: 2087859 - RNA, 19 nt, Homo sapiens
  misc_RNA (1)...(19): siRNA sense strand
gauaguagccugguguuug

SEQ ID NO: 2087860 - RNA, 19 nt, Homo sapiens
  misc_RNA (1)...(19): siRNA sense strand
gaaugucgcuaucuuugag

SEQ ID NO: 2087861 - RNA, 19 nt, Homo sapiens
  misc_RNA (1)...(19): siRNA sense strand
gauaagaaggcucagaaga

SEQ ID NO: 2087862 - RNA, 19 nt, Homo sapiens
  misc_RNA (1)...(19): siRNA sense strand
gcaccgagagguuauauag

SEQ ID NO: 2087863 - RNA, 19 nt, Homo sapiens
  misc_RNA (1)...(19): siRNA sense strand
caaagaagagcuaauugga

SEQ ID NO: 2087864 - RNA, 19 nt, Homo sapiens
  misc_RNA (1)...(19): siRNA sense strand
gcucagaagaccaguguuu

SEQ ID NO: 2087865 - RNA, 19 nt, Homo sapiens
  misc_RNA (1)...(19): siRNA sense strand
gaagaacauuccgcuguca

SEQ ID NO: 2087866 - RNA, 19 nt, Homo sapiens
  misc_RNA (1)...(19): siRNA sense strand
ggugagacccuccauguau

SEQ ID NO: 2087867 - RNA, 19 nt, Homo sapiens
  misc_RNA (1)...(19): siRNA sense strand
gauggaagugguccuuaua

SEQ ID NO: 2087868 - RNA, 19 nt, Homo sapiens
  misc_RNA (1)...(19): siRNA sense strand
gaagguugguuagugucua

SEQ ID NO: 2087869 - RNA, 19 nt, Homo sapiens
  misc_RNA (1)...(19): siRNA sense strand
uggaacagaucuucaugaa

SEQ ID NO: 2087870 - RNA, 19 nt, Homo sapiens
  misc_RNA (1)...(19): siRNA sense strand
gcaaagaagagcuaauugg

SEQ ID NO: 2087871 - RNA, 19 nt, Homo sapiens
  misc_RNA (1)...(19): siRNA sense strand
ccaugaacacugacaauuu

SEQ ID NO: 2087872 - RNA, 19 nt, Homo sapiens
  misc_RNA (1)...(19): siRNA sense strand
gcacuuaaggcacuuguca

SEQ ID NO: 2087873 - RNA, 19 nt, Homo sapiens
  misc_RNA (1)...(19): siRNA sense strand
ggauguuaauugagaguau

SEQ ID NO: 2087874 - RNA, 19 nt, Homo sapiens
  misc_RNA (1)...(19): siRNA sense strand
gaucggauaacaaacugua

SEQ ID NO: 2087875 - RNA, 19 nt, Homo sapiens
  misc_RNA (1)...(19): siRNA sense strand
gaagagcuaauuggaacua

SEQ ID NO: 2087876 - RNA, 19 nt, Homo sapiens
  misc_RNA (1)...(19): siRNA sense strand
gggcaaagaagagcuaauu

SEQ ID NO: 2087877 - RNA, 19 nt, Homo sapiens
  misc_RNA (1)...(19): siRNA sense strand
cggcaucuauuccagcuuu

SEQ ID NO: 2087878 - RNA, 19 nt, Homo sapiens
  misc_RNA (1)...(19): siRNA sense strand
gagagugcauggaggacaa

SEQ ID NO: 2087879 - RNA, 19 nt, Homo sapiens
  misc_RNA (1)...(19): siRNA sense strand
gaggagaacucggccuuag

SEQ ID NO: 2087880 - RNA, 19 nt, Homo sapiens
  misc_RNA (1)...(19): siRNA sense strand
guuaaggauuguaauggaa

SEQ ID NO: 2087881 - RNA, 19 nt, Homo sapiens
  misc_RNA (1)...(19): siRNA sense strand
ugugaaguguggcaguuua

SEQ ID NO: 2087882 - RNA, 19 nt, Homo sapiens
  misc_RNA (1)...(19): siRNA sense strand
agacaaauuucaaguaagg

SEQ ID NO: 2087883 - RNA, 19 nt, Homo sapiens
  misc_RNA (1)...(19): siRNA sense strand
gaugaggaccaccacagua

SEQ ID NO: 2087884 - RNA, 19 nt, Homo sapiens
  misc_RNA (1)...(19): siRNA sense strand
gaacacugacaauuugaug

SEQ ID NO: 2087885 - RNA, 19 nt, Homo sapiens
  misc_RNA (1)...(19): siRNA sense strand
uaaggcacuugucagcuuu

SEQ ID NO: 2087886 - RNA, 19 nt, Homo sapiens
  misc_RNA (1)...(19): siRNA sense strand
uaggagugguuuauuauca

SEQ ID NO: 2087887 - RNA, 19 nt, Homo sapiens
  misc_RNA (1)...(19): siRNA sense strand
gcacagaggggcugauuuu

SEQ ID NO: 2087888 - RNA, 19 nt, Homo sapiens
  misc_RNA (1)...(19): siRNA sense strand
cugcggaguuccuguuuaa

SEQ ID NO: 2087889 - RNA, 19 nt, Homo sapiens
  misc_RNA (1)...(19): siRNA sense strand
gcugcggaguuccuguuua

SEQ ID NO: 2087890 - RNA, 19 nt, Homo sapiens
  misc_RNA (1)...(19): siRNA sense strand
cuacaagauucuggacuuu

SEQ ID NO: 2087891 - RNA, 19 nt, Homo sapiens
  misc_RNA (1)...(19): siRNA sense strand
gcuggacggugucaugguu

SEQ ID NO: 2087892 - RNA, 19 nt, Homo sapiens
  misc_RNA (1)...(19): siRNA sense strand
auacuuuggugagauguua

SEQ ID NO: 2087893 - RNA, 19 nt, Homo sapiens
  misc_RNA (1)...(19): siRNA sense strand
gauuaugccucggagaaau

SEQ ID NO: 2087894 - RNA, 19 nt, Homo sapiens
  misc_RNA (1)...(19): siRNA sense strand
caagaccgaucggauaaca

SEQ ID NO: 2087895 - RNA, 19 nt, Homo sapiens
  misc_RNA (1)...(19): siRNA sense strand
gugcagaacuuagcauugg

SEQ ID NO: 2087896 - RNA, 19 nt, Homo sapiens
  misc_RNA (1)...(19): siRNA sense strand
uauaugcuuugucucauga

SEQ ID NO: 2087897 - RNA, 19 nt, Homo sapiens
  misc_RNA (1)...(19): siRNA sense strand
gugcaucuguauccacuug

SEQ ID NO: 2087898 - RNA, 19 nt, Homo sapiens
  misc_RNA (1)...(19): siRNA sense strand
gcaucuguauccacuugaa

SEQ ID NO: 2087899 - RNA, 19 nt, Homo sapiens
  misc_RNA (1)...(19): siRNA sense strand
ggaacgggaugcgcuuuua

SEQ ID NO: 2087900 - RNA, 19 nt, Homo sapiens
  misc_RNA (1)...(19): siRNA sense strand
uuaaggcacuugucagcuu

SEQ ID NO: 2087901 - RNA, 19 nt, Homo sapiens
  misc_RNA (1)...(19): siRNA sense strand
acuaugggcuuuccacuuc

SEQ ID NO: 2087902 - RNA, 19 nt, Homo sapiens
  misc_RNA (1)...(19): siRNA sense strand
uacgcuaccucucccauuu

SEQ ID NO: 2087903 - RNA, 19 nt, Homo sapiens
  misc_RNA (1)...(19): siRNA sense strand
aauccaagcuuugcaacuu

SEQ ID NO: 2087904 - RNA, 19 nt, Homo sapiens
  misc_RNA (1)...(19): siRNA sense strand
gaacaucaaagugaaacug

SEQ ID NO: 2087905 - RNA, 19 nt, Homo sapiens
  misc_RNA (1)...(19): siRNA sense strand
gaacuggcagcuaugaaca

SEQ ID NO: 2087906 - RNA, 19 nt, Homo sapiens
  misc_RNA (1)...(19): siRNA sense strand
gacacuaucgauacuguuu

SEQ ID NO: 2087907 - RNA, 19 nt, Homo sapiens
  misc_RNA (1)...(19): siRNA sense strand
gcaguuucuuggcuauguu

SEQ ID NO: 2087908 - RNA, 19 nt, Homo sapiens
  misc_RNA (1)...(19): siRNA sense strand
guugguuagugucuauuaa

SEQ ID NO: 2087909 - RNA, 19 nt, Homo sapiens
  misc_RNA (1)...(19): siRNA sense strand
gaguuucaaugcacugugu

SEQ ID NO: 2087910 - RNA, 19 nt, Homo sapiens
  misc_RNA (1)...(19): siRNA sense strand
agaacucggccuuagaaua

SEQ ID NO: 2087911 - RNA, 19 nt, Homo sapiens
  misc_RNA (1)...(19): siRNA sense strand
cgggaagucugcagcuuug

SEQ ID NO: 2087912 - RNA, 19 nt, Homo sapiens
  misc_RNA (1)...(19): siRNA sense strand
gccuaaagcacuugacuga

SEQ ID NO: 2087913 - RNA, 19 nt, Homo sapiens
  misc_RNA (1)...(19): siRNA sense strand
ucauagaccucucugaaaa

SEQ ID NO: 2087914 - RNA, 19 nt, Homo sapiens
  misc_RNA (1)...(19): siRNA sense strand
ucguugcugugauuucuua

SEQ ID NO: 2087915 - RNA, 19 nt, Homo sapiens
  misc_RNA (1)...(19): siRNA sense strand
gugagacccuccauguaug

SEQ ID NO: 2087916 - RNA, 19 nt, Homo sapiens
  misc_RNA (1)...(19): siRNA sense strand
caaaaggaaucauuaagca

SEQ ID NO: 2087917 - RNA, 19 nt, Homo sapiens
  misc_RNA (1)...(19): siRNA sense strand
ccuacaagauucuggacuu

SEQ ID NO: 2087918 - RNA, 19 nt, Homo sapiens
  misc_RNA (1)...(19): siRNA sense strand
cgggucagcucuuccuuau

SEQ ID NO: 2087919 - RNA, 19 nt, Homo sapiens
  misc_RNA (1)...(19): siRNA sense strand
ucaauguuccugacuggua

SEQ ID NO: 2087920 - RNA, 19 nt, Homo sapiens
  misc_RNA (1)...(19): siRNA sense strand
ccuuugggauuugcacuua

SEQ ID NO: 2087921 - RNA, 19 nt, Homo sapiens
  misc_RNA (1)...(19): siRNA sense strand
gauguuaauugagaguaug

SEQ ID NO: 2087922 - RNA, 19 nt, Homo sapiens
  misc_RNA (1)...(19): siRNA sense strand
ggcagugaauggaaucuca

SEQ ID NO: 2087923 - RNA, 19 nt, Homo sapiens
  misc_RNA (1)...(19): siRNA sense strand
aaagucauccgaauguuga

SEQ ID NO: 2087924 - RNA, 19 nt, Homo sapiens
  misc_RNA (1)...(19): siRNA sense strand
aaagaagagcuaauuggaa

SEQ ID NO: 2087925 - RNA, 19 nt, Homo sapiens
  misc_RNA (1)...(19): siRNA sense strand
acaaugggcauagaccuua

SEQ ID NO: 2087926 - RNA, 19 nt, Homo sapiens
  misc_RNA (1)...(19): siRNA sense strand
gauguuaaggauuguaaug

SEQ ID NO: 2087927 - RNA, 19 nt, Homo sapiens
  misc_RNA (1)...(19): siRNA sense strand
gggcauagaccuuacaaaa

SEQ ID NO: 2087928 - RNA, 19 nt, Homo sapiens
  misc_RNA (1)...(19): siRNA sense strand
gacaauuugaugaggauuu

SEQ ID NO: 2087929 - RNA, 19 nt, Homo sapiens
  misc_RNA (1)...(19): siRNA sense strand
ugagcaagcugcggaguuc

SEQ ID NO: 2087930 - RNA, 19 nt, Homo sapiens
  misc_RNA (1)...(19): siRNA sense strand
ugagugugauugccaacuu

SEQ ID NO: 2087931 - RNA, 19 nt, Homo sapiens
  misc_RNA (1)...(19): siRNA sense strand
cuaugaacaucaaagugaa

SEQ ID NO: 2087932 - RNA, 19 nt, Homo sapiens
  misc_RNA (1)...(19): siRNA sense strand
cauaggagugguuuauuau

SEQ ID NO: 2087933 - RNA, 19 nt, Homo sapiens
  misc_RNA (1)...(19): siRNA sense strand
agaauacuuuggugagaug

SEQ ID NO: 2087934 - RNA, 19 nt, Homo sapiens
  misc_RNA (1)...(19): siRNA sense strand
caugaccauugggauguua

SEQ ID NO: 2087935 - RNA, 19 nt, Homo sapiens
  misc_RNA (1)...(19): siRNA sense strand
ggaaagaaccauuaugaca

SEQ ID NO: 2087936 - RNA, 19 nt, Homo sapiens
  misc_RNA (1)...(19): siRNA sense strand
ccacagagcucccagaacu

SEQ ID NO: 2087937 - RNA, 19 nt, Homo sapiens
  misc_RNA (1)...(19): siRNA sense strand
gaaagaaccauuaugacau

SEQ ID NO: 2087938 - RNA, 19 nt, Homo sapiens
  misc_RNA (1)...(19): siRNA sense strand
aaagaaccauuaugacaug

SEQ ID NO: 2087939 - RNA, 19 nt, Homo sapiens
  misc_RNA (1)...(19): siRNA sense strand
gcaaagacagcaaggaaag

SEQ ID NO: 2087940 - RNA, 19 nt, Homo sapiens
  misc_RNA (1)...(19): siRNA sense strand
uaauaagccaggauuguuu

SEQ ID NO: 2087941 - RNA, 19 nt, Homo sapiens
  misc_RNA (1)...(19): siRNA sense strand
gaccuggacuuguguaacu

SEQ ID NO: 2087942 - RNA, 19 nt, Homo sapiens
  misc_RNA (1)...(19): siRNA sense strand
guaacucgacccaguggua

SEQ ID NO: 2087943 - RNA, 19 nt, Homo sapiens
  misc_RNA (1)...(19): siRNA sense strand
cugcucaccuuccuuggua

SEQ ID NO: 2087944 - RNA, 19 nt, Homo sapiens
  misc_RNA (1)...(19): siRNA sense strand
gcaaggaaagcgccugugu

SEQ ID NO: 2087945 - RNA, 19 nt, Homo sapiens
  misc_RNA (1)...(19): siRNA sense strand
gcucauagaggucuugaag

SEQ ID NO: 2087946 - RNA, 19 nt, Homo sapiens
  misc_RNA (1)...(19): siRNA sense strand
gugcaaagacagcaaggaa

SEQ ID NO: 2087947 - RNA, 19 nt, Homo sapiens
  misc_RNA (1)...(19): siRNA sense strand
ggcccuaucugaacuggau

SEQ ID NO: 2087948 - RNA, 19 nt, Homo sapiens
  misc_RNA (1)...(19): siRNA sense strand
caagggcagugcauguaca

SEQ ID NO: 2087949 - RNA, 19 nt, Homo sapiens
  misc_RNA (1)...(19): siRNA sense strand
ccaccuacacccucaucua

SEQ ID NO: 2087950 - RNA, 19 nt, Homo sapiens
  misc_RNA (1)...(19): siRNA sense strand
gcuaauaagccaggauugu

SEQ ID NO: 2087951 - RNA, 19 nt, Homo sapiens
  misc_RNA (1)...(19): siRNA sense strand
cuaauaagccaggauuguu

SEQ ID NO: 2087952 - RNA, 19 nt, Homo sapiens
  misc_RNA (1)...(19): siRNA sense strand
acggaaagaaccauuauga

SEQ ID NO: 2087953 - RNA, 19 nt, Homo sapiens
  misc_RNA (1)...(19): siRNA sense strand
gaccacagagcucccagaa

SEQ ID NO: 2087954 - RNA, 19 nt, Homo sapiens
  misc_RNA (1)...(19): siRNA sense strand
ccaccuggcccuaucugaa

SEQ ID NO: 2087955 - RNA, 19 nt, Homo sapiens
  misc_RNA (1)...(19): siRNA sense strand
gauugguucuaacgcuuug

SEQ ID NO: 2087956 - RNA, 19 nt, Homo sapiens
  misc_RNA (1)...(19): siRNA sense strand
cgacggaaagaaccauuau

SEQ ID NO: 2087957 - RNA, 19 nt, Homo sapiens
  misc_RNA (1)...(19): siRNA sense strand
ucaucgaccuggacuugug

SEQ ID NO: 2087958 - RNA, 19 nt, Homo sapiens
  misc_RNA (1)...(19): siRNA sense strand
cgacccagugguacaauga

SEQ ID NO: 2087959 - RNA, 19 nt, Homo sapiens
  misc_RNA (1)...(19): siRNA sense strand
ccucucaugugcaaagaca

SEQ ID NO: 2087960 - RNA, 19 nt, Homo sapiens
  misc_RNA (1)...(19): siRNA sense strand
gauggaggcacguguggau

SEQ ID NO: 2087961 - RNA, 19 nt, Homo sapiens
  misc_RNA (1)...(19): siRNA sense strand
ggauguggucugacuguag

SEQ ID NO: 2087962 - RNA, 19 nt, Homo sapiens
  misc_RNA (1)...(19): siRNA sense strand
gcaagggcagugcauguac

SEQ ID NO: 2087963 - RNA, 19 nt, Homo sapiens
  misc_RNA (1)...(19): siRNA sense strand
cugcuuggauguggucuga

SEQ ID NO: 2087964 - RNA, 19 nt, Homo sapiens
  misc_RNA (1)...(19): siRNA sense strand
ucaccuuccuugguauuuc

SEQ ID NO: 2087965 - RNA, 19 nt, Homo sapiens
  misc_RNA (1)...(19): siRNA sense strand
acagagcucccagaacuga

SEQ ID NO: 2087966 - RNA, 19 nt, Homo sapiens
  misc_RNA (1)...(19): siRNA sense strand
ccgacggaaagaaccauua

SEQ ID NO: 2087967 - RNA, 19 nt, Homo sapiens
  misc_RNA (1)...(19): siRNA sense strand
gcuuggauguggucugacu

SEQ ID NO: 2087968 - RNA, 19 nt, Homo sapiens
  misc_RNA (1)...(19): siRNA sense strand
gcgccuacagcagcucaua

SEQ ID NO: 2087969 - RNA, 19 nt, Homo sapiens
  misc_RNA (1)...(19): siRNA sense strand
gcucaccuuccuugguauu

SEQ ID NO: 2087970 - RNA, 19 nt, Homo sapiens
  misc_RNA (1)...(19): siRNA sense strand
gccuacagcagcucauaga

SEQ ID NO: 2087971 - RNA, 19 nt, Homo sapiens
  misc_RNA (1)...(19): siRNA sense strand
ccuacacccucaucuacca

SEQ ID NO: 2087972 - RNA, 19 nt, Homo sapiens
  misc_RNA (1)...(19): siRNA sense strand
gcacauaaaucaaagacaa

SEQ ID NO: 2087973 - RNA, 19 nt, Homo sapiens
  misc_RNA (1)...(19): siRNA sense strand
ggaccaaacuguaaaggaa

SEQ ID NO: 2087974 - RNA, 19 nt, Homo sapiens
  misc_RNA (1)...(19): siRNA sense strand
cuacaaagcuaaucccauu

SEQ ID NO: 2087975 - RNA, 19 nt, Homo sapiens
  misc_RNA (1)...(19): siRNA sense strand
caaaugaacuuguguugag

SEQ ID NO: 2087976 - RNA, 19 nt, Homo sapiens
  misc_RNA (1)...(19): siRNA sense strand
uuucaaaccuguaguguau

SEQ ID NO: 2087977 - RNA, 19 nt, Homo sapiens
  misc_RNA (1)...(19): siRNA sense strand
gaagacagcacucugaaag

SEQ ID NO: 2087978 - RNA, 19 nt, Homo sapiens
  misc_RNA (1)...(19): siRNA sense strand
gaaagacuccugcugaaag

SEQ ID NO: 2087979 - RNA, 19 nt, Homo sapiens
  misc_RNA (1)...(19): siRNA sense strand
ccaccaccauucagaaauu

SEQ ID NO: 2087980 - RNA, 19 nt, Homo sapiens
  misc_RNA (1)...(19): siRNA sense strand
gaacaucgcaauuucaaac

SEQ ID NO: 2087981 - RNA, 19 nt, Homo sapiens
  misc_RNA (1)...(19): siRNA sense strand
gcacuaaagauuauucauc

SEQ ID NO: 2087982 - RNA, 19 nt, Homo sapiens
  misc_RNA (1)...(19): siRNA sense strand
aaagacuccugcugaaaga

SEQ ID NO: 2087983 - RNA, 19 nt, Homo sapiens
  misc_RNA (1)...(19): siRNA sense strand
ucaaaccuguaguguauca

SEQ ID NO: 2087984 - RNA, 19 nt, Homo sapiens
  misc_RNA (1)...(19): siRNA sense strand
caccaccauucagaaauua

SEQ ID NO: 2087985 - RNA, 19 nt, Homo sapiens
  misc_RNA (1)...(19): siRNA sense strand
ccucauccguuccuuugaa

SEQ ID NO: 2087986 - RNA, 19 nt, Homo sapiens
  misc_RNA (1)...(19): siRNA sense strand
caaagcuaaucccauuuca

SEQ ID NO: 2087987 - RNA, 19 nt, Homo sapiens
  misc_RNA (1)...(19): siRNA sense strand
aaagaagacagcacucuga

SEQ ID NO: 2087988 - RNA, 19 nt, Homo sapiens
  misc_RNA (1)...(19): siRNA sense strand
uuuggaagaugacgaaaga

SEQ ID NO: 2087989 - RNA, 19 nt, Homo sapiens
  misc_RNA (1)...(19): siRNA sense strand
caucacaguucgccucauc

SEQ ID NO: 2087990 - RNA, 19 nt, Homo sapiens
  misc_RNA (1)...(19): siRNA sense strand
ugaaauugcauucuucugu

SEQ ID NO: 2087991 - RNA, 19 nt, Homo sapiens
  misc_RNA (1)...(19): siRNA sense strand
ccaccauucagaaauuaua

SEQ ID NO: 2087992 - RNA, 19 nt, Homo sapiens
  misc_RNA (1)...(19): siRNA sense strand
aaauugcauucuucuguga

SEQ ID NO: 2087993 - RNA, 19 nt, Homo sapiens
  misc_RNA (1)...(19): siRNA sense strand
agacagcacucugaaagca

SEQ ID NO: 2087994 - RNA, 19 nt, Homo sapiens
  misc_RNA (1)...(19): siRNA sense strand
cgaaagacuccugcugaaa

SEQ ID NO: 2087995 - RNA, 19 nt, Homo sapiens
  misc_RNA (1)...(19): siRNA sense strand
ucaagcacauaaaucaaag

SEQ ID NO: 2087996 - RNA, 19 nt, Homo sapiens
  misc_RNA (1)...(19): siRNA sense strand
acgaaagacuccugcugaa

SEQ ID NO: 2087997 - RNA, 19 nt, Homo sapiens
  misc_RNA (1)...(19): siRNA sense strand
ucaucaagcacauaaauca

SEQ ID NO: 2087998 - RNA, 19 nt, Homo sapiens
  misc_RNA (1)...(19): siRNA sense strand
aagcuaaucccauuucauc

SEQ ID NO: 2087999 - RNA, 19 nt, Homo sapiens
  misc_RNA (1)...(19): siRNA sense strand
caaccugccaccaccauuc

SEQ ID NO: 2088000 - RNA, 19 nt, Homo sapiens
  misc_RNA (1)...(19): siRNA sense strand
ucaaagacaaaugaacuug

SEQ ID NO: 2088001 - RNA, 19 nt, Homo sapiens
  misc_RNA (1)...(19): siRNA sense strand
gauuauucaucaagcacau

SEQ ID NO: 2088002 - RNA, 19 nt, Homo sapiens
  misc_RNA (1)...(19): siRNA sense strand
gaccaaacuguaaaggaau

SEQ ID NO: 2088003 - RNA, 19 nt, Homo sapiens
  misc_RNA (1)...(19): siRNA sense strand
accaaacuguaaaggaauu

SEQ ID NO: 2088004 - RNA, 19 nt, Homo sapiens
  misc_RNA (1)...(19): siRNA sense strand
acaaagcuaaucccauuuc

SEQ ID NO: 2088005 - RNA, 19 nt, Homo sapiens
  misc_RNA (1)...(19): siRNA sense strand
gaguuuggaagaugacgaa

SEQ ID NO: 2088006 - RNA, 19 nt, Homo sapiens
  misc_RNA (1)...(19): siRNA sense strand
caucaagcacauaaaucaa

SEQ ID NO: 2088007 - RNA, 19 nt, Homo sapiens
  misc_RNA (1)...(19): siRNA sense strand
ucugaaagcagcuggaauc

SEQ ID NO: 2088008 - RNA, 19 nt, Homo sapiens
  misc_RNA (1)...(19): siRNA sense strand
cuuugaacaucgcaauuuc

SEQ ID NO: 2088009 - RNA, 19 nt, Homo sapiens
  misc_RNA (1)...(19): siRNA sense strand
agaagacagcacucugaaa

SEQ ID NO: 2088010 - RNA, 19 nt, Homo sapiens
  misc_RNA (1)...(19): siRNA sense strand
ccuuugaacaucgcaauuu

SEQ ID NO: 2088011 - RNA, 19 nt, Homo sapiens
  misc_RNA (1)...(19): siRNA sense strand
caauuucaaaccuguagug

SEQ ID NO: 2088012 - RNA, 19 nt, Homo sapiens
  misc_RNA (1)...(19): siRNA sense strand
guguugaguuuggaagaug

SEQ ID NO: 2088013 - RNA, 19 nt, Homo sapiens
  misc_RNA (1)...(19): siRNA sense strand
gaaacugaaauugcauucu

SEQ ID NO: 2088014 - RNA, 19 nt, Homo sapiens
  misc_RNA (1)...(19): siRNA sense strand
gacuccugcugaaagaaga

SEQ ID NO: 2088015 - RNA, 19 nt, Homo sapiens
  misc_RNA (1)...(19): siRNA sense strand
aagaagacagcacucugaa

SEQ ID NO: 2088016 - RNA, 19 nt, Homo sapiens
  misc_RNA (1)...(19): siRNA sense strand
gugaaacugaaauugcauu

SEQ ID NO: 2088017 - RNA, 19 nt, Homo sapiens
  misc_RNA (1)...(19): siRNA sense strand
gaugcacuaaagauuauuc

SEQ ID NO: 2088018 - RNA, 19 nt, Homo sapiens
  misc_RNA (1)...(19): siRNA sense strand
ucguauuucuaaagcaaga

SEQ ID NO: 2088019 - RNA, 19 nt, Homo sapiens
  misc_RNA (1)...(19): siRNA sense strand
ucacaggucuucuuaauua

SEQ ID NO: 2088020 - RNA, 19 nt, Homo sapiens
  misc_RNA (1)...(19): siRNA sense strand
gaaagcaugguuagaauug

SEQ ID NO: 2088021 - RNA, 19 nt, Homo sapiens
  misc_RNA (1)...(19): siRNA sense strand
gagauuauggccuauuaua

SEQ ID NO: 2088022 - RNA, 19 nt, Homo sapiens
  misc_RNA (1)...(19): siRNA sense strand
guaagaaccauaacuuuga

SEQ ID NO: 2088023 - RNA, 19 nt, Homo sapiens
  misc_RNA (1)...(19): siRNA sense strand
guacagugaucaccaagga

SEQ ID NO: 2088024 - RNA, 19 nt, Homo sapiens
  misc_RNA (1)...(19): siRNA sense strand
cacgagaccucacuuuauu

SEQ ID NO: 2088025 - RNA, 19 nt, Homo sapiens
  misc_RNA (1)...(19): siRNA sense strand
caaccacacuguccauuuc

SEQ ID NO: 2088026 - RNA, 19 nt, Homo sapiens
  misc_RNA (1)...(19): siRNA sense strand
gaaagacucaucaggauca

SEQ ID NO: 2088027 - RNA, 19 nt, Homo sapiens
  misc_RNA (1)...(19): siRNA sense strand
gaacguggaauaucucaug

SEQ ID NO: 2088028 - RNA, 19 nt, Homo sapiens
  misc_RNA (1)...(19): siRNA sense strand
gaauaacagcgacuugauu

SEQ ID NO: 2088029 - RNA, 19 nt, Homo sapiens
  misc_RNA (1)...(19): siRNA sense strand
ccaaugacuuugcccugua

SEQ ID NO: 2088030 - RNA, 19 nt, Homo sapiens
  misc_RNA (1)...(19): siRNA sense strand
uauaggagcaugacaauga

SEQ ID NO: 2088031 - RNA, 19 nt, Homo sapiens
  misc_RNA (1)...(19): siRNA sense strand
agaagaagaugaggagaaa

SEQ ID NO: 2088032 - RNA, 19 nt, Homo sapiens
  misc_RNA (1)...(19): siRNA sense strand
ugucugagauguacgcuaa

SEQ ID NO: 2088033 - RNA, 19 nt, Homo sapiens
  misc_RNA (1)...(19): siRNA sense strand
ggagaacggccgaaaauua

SEQ ID NO: 2088034 - RNA, 19 nt, Homo sapiens
  misc_RNA (1)...(19): siRNA sense strand
gcucucaaauaacuacgua

SEQ ID NO: 2088035 - RNA, 19 nt, Homo sapiens
  misc_RNA (1)...(19): siRNA sense strand
uggaauaucucaugaugga

SEQ ID NO: 2088036 - RNA, 19 nt, Homo sapiens
  misc_RNA (1)...(19): siRNA sense strand
gaacaucaccauccacaag

SEQ ID NO: 2088037 - RNA, 19 nt, Homo sapiens
  misc_RNA (1)...(19): siRNA sense strand
gaccucacuuuauuauuug

SEQ ID NO: 2088038 - RNA, 19 nt, Homo sapiens
  misc_RNA (1)...(19): siRNA sense strand
gaacaggauauucagagaa

SEQ ID NO: 2088039 - RNA, 19 nt, Homo sapiens
  misc_RNA (1)...(19): siRNA sense strand
ucaacgaugugcucacuga

SEQ ID NO: 2088040 - RNA, 19 nt, Homo sapiens
  misc_RNA (1)...(19): siRNA sense strand
gguuagaauugcuguaaga

SEQ ID NO: 2088041 - RNA, 19 nt, Homo sapiens
  misc_RNA (1)...(19): siRNA sense strand
cuacguaaauucuaucauc

SEQ ID NO: 2088042 - RNA, 19 nt, Homo sapiens
  misc_RNA (1)...(19): siRNA sense strand
aaacugcuguuccuuacuu

SEQ ID NO: 2088043 - RNA, 19 nt, Homo sapiens
  misc_RNA (1)...(19): siRNA sense strand
ggacauguuugaagaugag

SEQ ID NO: 2088044 - RNA, 19 nt, Homo sapiens
  misc_RNA (1)...(19): siRNA sense strand
aaagagacccaacuacaaa

SEQ ID NO: 2088045 - RNA, 19 nt, Homo sapiens
  misc_RNA (1)...(19): siRNA sense strand
ggagaagaauauguuuguu

SEQ ID NO: 2088046 - RNA, 19 nt, Homo sapiens
  misc_RNA (1)...(19): siRNA sense strand
agaaaguguucaccuugua

SEQ ID NO: 2088047 - RNA, 19 nt, Homo sapiens
  misc_RNA (1)...(19): siRNA sense strand
ugccaugucucauaauaaa

SEQ ID NO: 2088048 - RNA, 19 nt, Homo sapiens
  misc_RNA (1)...(19): siRNA sense strand
gagcagacccuuccuggau

SEQ ID NO: 2088049 - RNA, 19 nt, Homo sapiens
  misc_RNA (1)...(19): siRNA sense strand
auaaugagcacaccaauga

SEQ ID NO: 2088050 - RNA, 19 nt, Homo sapiens
  misc_RNA (1)...(19): siRNA sense strand
cacagaagccaucaaguuu

SEQ ID NO: 2088051 - RNA, 19 nt, Homo sapiens
  misc_RNA (1)...(19): siRNA sense strand
guacagagggugguucaaa

SEQ ID NO: 2088052 - RNA, 19 nt, Homo sapiens
  misc_RNA (1)...(19): siRNA sense strand
gcacuacauccgagauaaa

SEQ ID NO: 2088053 - RNA, 19 nt, Homo sapiens
  misc_RNA (1)...(19): siRNA sense strand
agaagaaaguguucaccuu

SEQ ID NO: 2088054 - RNA, 19 nt, Homo sapiens
  misc_RNA (1)...(19): siRNA sense strand
gcagacccuuccuggauau

SEQ ID NO: 2088055 - RNA, 19 nt, Homo sapiens
  misc_RNA (1)...(19): siRNA sense strand
gugaagagaucgagauggu

SEQ ID NO: 2088056 - RNA, 19 nt, Homo sapiens
  misc_RNA (1)...(19): siRNA sense strand
acacagaagccaucaaguu

SEQ ID NO: 2088057 - RNA, 19 nt, Homo sapiens
  misc_RNA (1)...(19): siRNA sense strand
gaggaggaccugaucaaga

SEQ ID NO: 2088058 - RNA, 19 nt, Homo sapiens
  misc_RNA (1)...(19): siRNA sense strand
cgagaaggcuaaagguaca

SEQ ID NO: 2088059 - RNA, 19 nt, Homo sapiens
  misc_RNA (1)...(19): siRNA sense strand
gaaccauaacuuugaaugu

SEQ ID NO: 2088060 - RNA, 19 nt, Homo sapiens
  misc_RNA (1)...(19): siRNA sense strand
gaaugucuauaaaguggau

SEQ ID NO: 2088061 - RNA, 19 nt, Homo sapiens
  misc_RNA (1)...(19): siRNA sense strand
aggagauuauggccuauua

SEQ ID NO: 2088062 - RNA, 19 nt, Homo sapiens
  misc_RNA (1)...(19): siRNA sense strand
aaacggaagcagacucuaa

SEQ ID NO: 2088063 - RNA, 19 nt, Homo sapiens
  misc_RNA (1)...(19): siRNA sense strand
ccacucagcaccugccuuu

SEQ ID NO: 2088064 - RNA, 19 nt, Homo sapiens
  misc_RNA (1)...(19): siRNA sense strand
caaguuugcaggccuauug

SEQ ID NO: 2088065 - RNA, 19 nt, Homo sapiens
  misc_RNA (1)...(19): siRNA sense strand
uagcugaagucauucugaa

SEQ ID NO: 2088066 - RNA, 19 nt, Homo sapiens
  misc_RNA (1)...(19): siRNA sense strand
ugucacaggucuucuuaau

SEQ ID NO: 2088067 - RNA, 19 nt, Homo sapiens
  misc_RNA (1)...(19): siRNA sense strand
cucguuagcugaagucauu

SEQ ID NO: 2088068 - RNA, 19 nt, Homo sapiens
  misc_RNA (1)...(19): siRNA sense strand
gaugauguccuggaucuga

SEQ ID NO: 2088069 - RNA, 19 nt, Homo sapiens
  misc_RNA (1)...(19): siRNA sense strand
gugcagcgcuccguguuug

SEQ ID NO: 2088070 - RNA, 19 nt, Homo sapiens
  misc_RNA (1)...(19): siRNA sense strand
guggauauuuaccagauga

SEQ ID NO: 2088071 - RNA, 19 nt, Homo sapiens
  misc_RNA (1)...(19): siRNA sense strand
ucacgagaccucacuuuau

SEQ ID NO: 2088072 - RNA, 19 nt, Homo sapiens
  misc_RNA (1)...(19): siRNA sense strand
ucgaaucgcugacccuugu

SEQ ID NO: 2088073 - RNA, 19 nt, Homo sapiens
  misc_RNA (1)...(19): siRNA sense strand
ggacagcccggaugaugau

SEQ ID NO: 2088074 - RNA, 19 nt, Homo sapiens
  misc_RNA (1)...(19): siRNA sense strand
caccgaggaugcccaagaa

SEQ ID NO: 2088075 - RNA, 19 nt, Homo sapiens
  misc_RNA (1)...(19): siRNA sense strand
gauguacgcuaagacugaa

SEQ ID NO: 2088076 - RNA, 19 nt, Homo sapiens
  misc_RNA (1)...(19): siRNA sense strand
ugaacauccucuuugagaa

SEQ ID NO: 2088077 - RNA, 19 nt, Homo sapiens
  misc_RNA (1)...(19): siRNA sense strand
ccaugaacguggaauaucu

SEQ ID NO: 2088078 - RNA, 19 nt, Homo sapiens
  misc_RNA (1)...(19): siRNA sense strand
gaacauccucuuugagaac

SEQ ID NO: 2088079 - RNA, 19 nt, Homo sapiens
  misc_RNA (1)...(19): siRNA sense strand
cguaaauucuaucaucguu

SEQ ID NO: 2088080 - RNA, 19 nt, Homo sapiens
  misc_RNA (1)...(19): siRNA sense strand
gaccacauccgcugcauca

SEQ ID NO: 2088081 - RNA, 19 nt, Homo sapiens
  misc_RNA (1)...(19): siRNA sense strand
ccauaacuuugaaugucua

SEQ ID NO: 2088082 - RNA, 19 nt, Homo sapiens
  misc_RNA (1)...(19): siRNA sense strand
cguggaauaucucaugaug

SEQ ID NO: 2088083 - RNA, 19 nt, Homo sapiens
  misc_RNA (1)...(19): siRNA sense strand
guuccuuacuucuccaauu

SEQ ID NO: 2088084 - RNA, 19 nt, Homo sapiens
  misc_RNA (1)...(19): siRNA sense strand
gaaagggcccaccgaggau

SEQ ID NO: 2088085 - RNA, 19 nt, Homo sapiens
  misc_RNA (1)...(19): siRNA sense strand
ucaccuuccugaccaguug

SEQ ID NO: 2088086 - RNA, 19 nt, Homo sapiens
  misc_RNA (1)...(19): siRNA sense strand
gcuguaagaaccauaacuu

SEQ ID NO: 2088087 - RNA, 19 nt, Homo sapiens
  misc_RNA (1)...(19): siRNA sense strand
ccuugaacauccucuuuga

SEQ ID NO: 2088088 - RNA, 19 nt, Homo sapiens
  misc_RNA (1)...(19): siRNA sense strand
gauauuuaccagaugaguu

SEQ ID NO: 2088089 - RNA, 19 nt, Homo sapiens
  misc_RNA (1)...(19): siRNA sense strand
caaugaagcccaugaacgu

SEQ ID NO: 2088090 - RNA, 19 nt, Homo sapiens
  misc_RNA (1)...(19): siRNA sense strand
ccaagaagacgccgagaag

SEQ ID NO: 2088091 - RNA, 19 nt, Homo sapiens
  misc_RNA (1)...(19): siRNA sense strand
uguaagaaccauaacuuug

SEQ ID NO: 2088092 - RNA, 19 nt, Homo sapiens
  misc_RNA (1)...(19): siRNA sense strand
gucacgagaccucacuuua

SEQ ID NO: 2088093 - RNA, 19 nt, Homo sapiens
  misc_RNA (1)...(19): siRNA sense strand
caauccagcccaccacuga

SEQ ID NO: 2088094 - RNA, 19 nt, Homo sapiens
  misc_RNA (1)...(19): siRNA sense strand
gaguauaggagcaugacaa

SEQ ID NO: 2088095 - RNA, 19 nt, Homo sapiens
  misc_RNA (1)...(19): siRNA sense strand
gagaccauccguuccauca

SEQ ID NO: 2088096 - RNA, 19 nt, Homo sapiens
  misc_RNA (1)...(19): siRNA sense strand
gcuaagacugaacaggaua

SEQ ID NO: 2088097 - RNA, 19 nt, Homo sapiens
  misc_RNA (1)...(19): siRNA sense strand
aauuuggucugguucauug

SEQ ID NO: 2088098 - RNA, 19 nt, Homo sapiens
  misc_RNA (1)...(19): siRNA sense strand
uuccuuacuucuccaauuu

SEQ ID NO: 2088099 - RNA, 19 nt, Homo sapiens
  misc_RNA (1)...(19): siRNA sense strand
guacacagaagccaucaag

SEQ ID NO: 2088100 - RNA, 19 nt, Homo sapiens
  misc_RNA (1)...(19): siRNA sense strand
ccacacuguccauuucuuu

SEQ ID NO: 2088101 - RNA, 19 nt, Homo sapiens
  misc_RNA (1)...(19): siRNA sense strand
ggcaagacuucccgcaaca

SEQ ID NO: 2088102 - RNA, 19 nt, Homo sapiens
  misc_RNA (1)...(19): siRNA sense strand
gaccuugaacauccucuuu

SEQ ID NO: 2088103 - RNA, 19 nt, Homo sapiens
  misc_RNA (1)...(19): siRNA sense strand
gccggugucucuuuaucuu

SEQ ID NO: 2088104 - RNA, 19 nt, Homo sapiens
  misc_RNA (1)...(19): siRNA sense strand
cugaaagcaugguuagaau

SEQ ID NO: 2088105 - RNA, 19 nt, Homo sapiens
  misc_RNA (1)...(19): siRNA sense strand
aauaacagcgacuugauug

SEQ ID NO: 2088106 - RNA, 19 nt, Homo sapiens
  misc_RNA (1)...(19): siRNA sense strand
ccaacaggcacgccacuga

SEQ ID NO: 2088107 - RNA, 19 nt, Homo sapiens
  misc_RNA (1)...(19): siRNA sense strand
cgagaccucacuuuauuau

SEQ ID NO: 2088108 - RNA, 19 nt, Homo sapiens
  misc_RNA (1)...(19): siRNA sense strand
aagaaaguguucaccuugu

SEQ ID NO: 2088109 - RNA, 19 nt, Homo sapiens
  misc_RNA (1)...(19): siRNA sense strand
caccugcacuaucucaaug

SEQ ID NO: 2088110 - RNA, 19 nt, Homo sapiens
  misc_RNA (1)...(19): siRNA sense strand
gaccauccguuccaucacu

SEQ ID NO: 2088111 - RNA, 19 nt, Homo sapiens
  misc_RNA (1)...(19): siRNA sense strand
ccugaaagcaugguuagaa

SEQ ID NO: 2088112 - RNA, 19 nt, Homo sapiens
  misc_RNA (1)...(19): siRNA sense strand
aaacaccacagucacagaa

SEQ ID NO: 2088113 - RNA, 19 nt, Homo sapiens
  misc_RNA (1)...(19): siRNA sense strand
ugaaagcaugguuagaauu

SEQ ID NO: 2088114 - RNA, 19 nt, Homo sapiens
  misc_RNA (1)...(19): siRNA sense strand
ccgagaagaccaccuacaa

SEQ ID NO: 2088115 - RNA, 19 nt, Homo sapiens
  misc_RNA (1)...(19): siRNA sense strand
ccaccuucaucuucucaga

SEQ ID NO: 2088116 - RNA, 19 nt, Homo sapiens
  misc_RNA (1)...(19): siRNA sense strand
cauguacagugaucaccaa

SEQ ID NO: 2088117 - RNA, 19 nt, Homo sapiens
  misc_RNA (1)...(19): siRNA sense strand
cgacuugauugcauguaca

SEQ ID NO: 2088118 - RNA, 19 nt, Homo sapiens
  misc_RNA (1)...(19): siRNA sense strand
ggagggugcgagagaagaa

SEQ ID NO: 2088119 - RNA, 19 nt, Homo sapiens
  misc_RNA (1)...(19): siRNA sense strand
ggaagcagcuggauaaaga

SEQ ID NO: 2088120 - RNA, 19 nt, Homo sapiens
  misc_RNA (1)...(19): siRNA sense strand
gaagaaaccugaaucaaag

SEQ ID NO: 2088121 - RNA, 19 nt, Homo sapiens
  misc_RNA (1)...(19): siRNA sense strand
ggaacagucuuaaacauuu

SEQ ID NO: 2088122 - RNA, 19 nt, Homo sapiens
  misc_RNA (1)...(19): siRNA sense strand
gaaagaagacuccagcuaa

SEQ ID NO: 2088123 - RNA, 19 nt, Homo sapiens
  misc_RNA (1)...(19): siRNA sense strand
ggaaagaagucuccagcaa

SEQ ID NO: 2088124 - RNA, 19 nt, Homo sapiens
  misc_RNA (1)...(19): siRNA sense strand
gaaagaaaguuccaguauc

SEQ ID NO: 2088125 - RNA, 19 nt, Homo sapiens
  misc_RNA (1)...(19): siRNA sense strand
gaaagaagucuccagcaaa

SEQ ID NO: 2088126 - RNA, 19 nt, Homo sapiens
  misc_RNA (1)...(19): siRNA sense strand
ugaagaaaccugaaucaaa

SEQ ID NO: 2088127 - RNA, 19 nt, Homo sapiens
  misc_RNA (1)...(19): siRNA sense strand
agauugaccuugccucaua

SEQ ID NO: 2088128 - RNA, 19 nt, Homo sapiens
  misc_RNA (1)...(19): siRNA sense strand
ggaaagaagacuccagcua

SEQ ID NO: 2088129 - RNA, 19 nt, Homo sapiens
  misc_RNA (1)...(19): siRNA sense strand
gaccuugccucauaguauu

SEQ ID NO: 2088130 - RNA, 19 nt, Homo sapiens
  misc_RNA (1)...(19): siRNA sense strand
gaacagucuuaaacauuuc

SEQ ID NO: 2088131 - RNA, 19 nt, Homo sapiens
  misc_RNA (1)...(19): siRNA sense strand
aaagaaaguuccaguaucu

SEQ ID NO: 2088132 - RNA, 19 nt, Homo sapiens
  misc_RNA (1)...(19): siRNA sense strand
agagaucaaugacuguaua

SEQ ID NO: 2088133 - RNA, 19 nt, Homo sapiens
  misc_RNA (1)...(19): siRNA sense strand
gcucuuacccucacucauu

SEQ ID NO: 2088134 - RNA, 19 nt, Homo sapiens
  misc_RNA (1)...(19): siRNA sense strand
gcaaauugagcacaucauu

SEQ ID NO: 2088135 - RNA, 19 nt, Homo sapiens
  misc_RNA (1)...(19): siRNA sense strand
gaaaguuccaguaucugua

SEQ ID NO: 2088136 - RNA, 19 nt, Homo sapiens
  misc_RNA (1)...(19): siRNA sense strand
ggagacauuucuaucaaag

SEQ ID NO: 2088137 - RNA, 19 nt, Homo sapiens
  misc_RNA (1)...(19): siRNA sense strand
gggagacauuucuaucaaa

SEQ ID NO: 2088138 - RNA, 19 nt, Homo sapiens
  misc_RNA (1)...(19): siRNA sense strand
aaagaagacuccagcuaau

SEQ ID NO: 2088139 - RNA, 19 nt, Homo sapiens
  misc_RNA (1)...(19): siRNA sense strand
gcacggaagcagcuggaua

SEQ ID NO: 2088140 - RNA, 19 nt, Homo sapiens
  misc_RNA (1)...(19): siRNA sense strand
ccaagaauuuaucaagaga

SEQ ID NO: 2088141 - RNA, 19 nt, Homo sapiens
  misc_RNA (1)...(19): siRNA sense strand
gcacaucauugaaaacauu

SEQ ID NO: 2088142 - RNA, 19 nt, Homo sapiens
  misc_RNA (1)...(19): siRNA sense strand
aaagaagucuccagcaaag

SEQ ID NO: 2088143 - RNA, 19 nt, Homo sapiens
  misc_RNA (1)...(19): siRNA sense strand
cugcaucaguucuuaguaa

SEQ ID NO: 2088144 - RNA, 19 nt, Homo sapiens
  misc_RNA (1)...(19): siRNA sense strand
caaguuaaagcaacaaaug

SEQ ID NO: 2088145 - RNA, 19 nt, Homo sapiens
  misc_RNA (1)...(19): siRNA sense strand
gaucagauucagaagauau

SEQ ID NO: 2088146 - RNA, 19 nt, Homo sapiens
  misc_RNA (1)...(19): siRNA sense strand
gaagaggcagugaaggaaa

SEQ ID NO: 2088147 - RNA, 19 nt, Homo sapiens
  misc_RNA (1)...(19): siRNA sense strand
aaauugagcacaucauuga

SEQ ID NO: 2088148 - RNA, 19 nt, Homo sapiens
  misc_RNA (1)...(19): siRNA sense strand
caacaaaugaauccgaaga

SEQ ID NO: 2088149 - RNA, 19 nt, Homo sapiens
  misc_RNA (1)...(19): siRNA sense strand
guccaagaauuuaucaaga

SEQ ID NO: 2088150 - RNA, 19 nt, Homo sapiens
  misc_RNA (1)...(19): siRNA sense strand
gaccuaaagucagugauuc

SEQ ID NO: 2088151 - RNA, 19 nt, Homo sapiens
  misc_RNA (1)...(19): siRNA sense strand
gaaugcaaauugagcacau

SEQ ID NO: 2088152 - RNA, 19 nt, Homo sapiens
  misc_RNA (1)...(19): siRNA sense strand
ugauucaacuggaaggaaa

SEQ ID NO: 2088153 - RNA, 19 nt, Homo sapiens
  misc_RNA (1)...(19): siRNA sense strand
caaauugagcacaucauug

SEQ ID NO: 2088154 - RNA, 19 nt, Homo sapiens
  misc_RNA (1)...(19): siRNA sense strand
gaagugggagagcgugaaa

SEQ ID NO: 2088155 - RNA, 19 nt, Homo sapiens
  misc_RNA (1)...(19): siRNA sense strand
uaaagucagugauucaacu

SEQ ID NO: 2088156 - RNA, 19 nt, Homo sapiens
  misc_RNA (1)...(19): siRNA sense strand
agaaagaaaguuccaguau

SEQ ID NO: 2088157 - RNA, 19 nt, Homo sapiens
  misc_RNA (1)...(19): siRNA sense strand
caaagaagaggcagugaag

SEQ ID NO: 2088158 - RNA, 19 nt, Homo sapiens
  misc_RNA (1)...(19): siRNA sense strand
gaauuuaucaagagagauc

SEQ ID NO: 2088159 - RNA, 19 nt, Homo sapiens
  misc_RNA (1)...(19): siRNA sense strand
ugaaaguggugauacuaca

SEQ ID NO: 2088160 - RNA, 19 nt, Homo sapiens
  misc_RNA (1)...(19): siRNA sense strand
ggauaaagaacagguuaga

SEQ ID NO: 2088161 - RNA, 19 nt, Homo sapiens
  misc_RNA (1)...(19): siRNA sense strand
cauaguauucgaucagauu

SEQ ID NO: 2088162 - RNA, 19 nt, Homo sapiens
  misc_RNA (1)...(19): siRNA sense strand
gaagacuccagcuaaugaa

SEQ ID NO: 2088163 - RNA, 19 nt, Homo sapiens
  misc_RNA (1)...(19): siRNA sense strand
gaucaaugacuguauaggu

SEQ ID NO: 2088164 - RNA, 19 nt, Homo sapiens
  misc_RNA (1)...(19): siRNA sense strand
ucgaucagauucagaagau

SEQ ID NO: 2088165 - RNA, 19 nt, Homo sapiens
  misc_RNA (1)...(19): siRNA sense strand
gcaguggacgcucucuuga

SEQ ID NO: 2088166 - RNA, 19 nt, Homo sapiens
  misc_RNA (1)...(19): siRNA sense strand
agaagacuccagcuaauga

SEQ ID NO: 2088167 - RNA, 19 nt, Homo sapiens
  misc_RNA (1)...(19): siRNA sense strand
aaaugaauccgaagacgaa

SEQ ID NO: 2088168 - RNA, 19 nt, Homo sapiens
  misc_RNA (1)...(19): siRNA sense strand
uaucaagagagaucaauga

SEQ ID NO: 2088169 - RNA, 19 nt, Homo sapiens
  misc_RNA (1)...(19): siRNA sense strand
gauaaagaacagguuagaa

SEQ ID NO: 2088170 - RNA, 19 nt, Homo sapiens
  misc_RNA (1)...(19): siRNA sense strand
gccaagcuccgccuucuga

SEQ ID NO: 2088171 - RNA, 19 nt, Homo sapiens
  misc_RNA (1)...(19): siRNA sense strand
ccuccaaacucuaaagaag

SEQ ID NO: 2088172 - RNA, 19 nt, Homo sapiens
  misc_RNA (1)...(19): siRNA sense strand
cacggaagcagcuggauaa

SEQ ID NO: 2088173 - RNA, 19 nt, Homo sapiens
  misc_RNA (1)...(19): siRNA sense strand
ccuaguaaaucugugagaa

SEQ ID NO: 2088174 - RNA, 19 nt, Homo sapiens
  misc_RNA (1)...(19): siRNA sense strand
cgaaaucccacagcuggua

SEQ ID NO: 2088175 - RNA, 19 nt, Homo sapiens
  misc_RNA (1)...(19): siRNA sense strand
gacgcucucuugacgcauu

SEQ ID NO: 2088176 - RNA, 19 nt, Homo sapiens
  misc_RNA (1)...(19): siRNA sense strand
gaugauguggcaccugaaa

SEQ ID NO: 2088177 - RNA, 19 nt, Homo sapiens
  misc_RNA (1)...(19): siRNA sense strand
uccaguaucuguaaaccuu

SEQ ID NO: 2088178 - RNA, 19 nt, Homo sapiens
  misc_RNA (1)...(19): siRNA sense strand
ugggagacauuucuaucaa

SEQ ID NO: 2088179 - RNA, 19 nt, Homo sapiens
  misc_RNA (1)...(19): siRNA sense strand
gcccagagaagaagccaaa

SEQ ID NO: 2088180 - RNA, 19 nt, Homo sapiens
  misc_RNA (1)...(19): siRNA sense strand
gcacaccucgugggaagaa

SEQ ID NO: 2088181 - RNA, 19 nt, Homo sapiens
  misc_RNA (1)...(19): siRNA sense strand
cauuguugcugucaccaaa

SEQ ID NO: 2088182 - RNA, 19 nt, Homo sapiens
  misc_RNA (1)...(19): siRNA sense strand
uaaagaacagguuagaaag

SEQ ID NO: 2088183 - RNA, 19 nt, Homo sapiens
  misc_RNA (1)...(19): siRNA sense strand
aaaguuccaguaucuguaa

SEQ ID NO: 2088184 - RNA, 19 nt, Homo sapiens
  misc_RNA (1)...(19): siRNA sense strand
aaacaugccacaggaaaga

SEQ ID NO: 2088185 - RNA, 19 nt, Homo sapiens
  misc_RNA (1)...(19): siRNA sense strand
cgaccuaaagucagugauu

SEQ ID NO: 2088186 - RNA, 19 nt, Homo sapiens
  misc_RNA (1)...(19): siRNA sense strand
ggaaaagcccagagaagaa

SEQ ID NO: 2088187 - RNA, 19 nt, Homo sapiens
  misc_RNA (1)...(19): siRNA sense strand
uccaaacucuaaagaagga

SEQ ID NO: 2088188 - RNA, 19 nt, Homo sapiens
  misc_RNA (1)...(19): siRNA sense strand
guggaacagucuuaaacau

SEQ ID NO: 2088189 - RNA, 19 nt, Homo sapiens
  misc_RNA (1)...(19): siRNA sense strand
ugagaaaucggcugcacuu

SEQ ID NO: 2088190 - RNA, 19 nt, Homo sapiens
  misc_RNA (1)...(19): siRNA sense strand
ggaaggaaaccucaaugcu

SEQ ID NO: 2088191 - RNA, 19 nt, Homo sapiens
  misc_RNA (1)...(19): siRNA sense strand
ucaaagaagaggcagugaa

SEQ ID NO: 2088192 - RNA, 19 nt, Homo sapiens
  misc_RNA (1)...(19): siRNA sense strand
gcagcuggauaaagaacag

SEQ ID NO: 2088193 - RNA, 19 nt, Homo sapiens
  misc_RNA (1)...(19): siRNA sense strand
cuaguaaaucugugagaaa

SEQ ID NO: 2088194 - RNA, 19 nt, Homo sapiens
  misc_RNA (1)...(19): siRNA sense strand
uuucaccacuccuaguaaa

SEQ ID NO: 2088195 - RNA, 19 nt, Homo sapiens
  misc_RNA (1)...(19): siRNA sense strand
aaacaauuauggguugcuu

SEQ ID NO: 2088196 - RNA, 19 nt, Homo sapiens
  misc_RNA (1)...(19): siRNA sense strand
gaagcagcuggauaaagaa

SEQ ID NO: 2088197 - RNA, 19 nt, Homo sapiens
  misc_RNA (1)...(19): siRNA sense strand
cggcugcacuucccaucuu

SEQ ID NO: 2088198 - RNA, 19 nt, Homo sapiens
  misc_RNA (1)...(19): siRNA sense strand
uggaacagucuuaaacauu

SEQ ID NO: 2088199 - RNA, 19 nt, Homo sapiens
  misc_RNA (1)...(19): siRNA sense strand
cuguaaaccuucuguccaa

SEQ ID NO: 2088200 - RNA, 19 nt, Homo sapiens
  misc_RNA (1)...(19): siRNA sense strand
cgaaggaugaacccaauuc

SEQ ID NO: 2088201 - RNA, 19 nt, Homo sapiens
  misc_RNA (1)...(19): siRNA sense strand
ugaccuugccucauaguau

SEQ ID NO: 2088202 - RNA, 19 nt, Homo sapiens
  misc_RNA (1)...(19): siRNA sense strand
guaaaccuucuguccaaga

SEQ ID NO: 2088203 - RNA, 19 nt, Homo sapiens
  misc_RNA (1)...(19): siRNA sense strand
gauuaucucccuccaaacu

SEQ ID NO: 2088204 - RNA, 19 nt, Homo sapiens
  misc_RNA (1)...(19): siRNA sense strand
aagaaagaaaguuccagua

SEQ ID NO: 2088205 - RNA, 19 nt, Homo sapiens
  misc_RNA (1)...(19): siRNA sense strand
ugaaaagacagaacaguuu

SEQ ID NO: 2088206 - RNA, 19 nt, Homo sapiens
  misc_RNA (1)...(19): siRNA sense strand
aagaagaggcagugaagga

SEQ ID NO: 2088207 - RNA, 19 nt, Homo sapiens
  misc_RNA (1)...(19): siRNA sense strand
gaggaaaagcccaaguuaa

SEQ ID NO: 2088208 - RNA, 19 nt, Homo sapiens
  misc_RNA (1)...(19): siRNA sense strand
gauugaccuugccucauag

SEQ ID NO: 2088209 - RNA, 19 nt, Homo sapiens
  misc_RNA (1)...(19): siRNA sense strand
ggcaguggacgcucucuug

SEQ ID NO: 2088210 - RNA, 19 nt, Homo sapiens
  misc_RNA (1)...(19): siRNA sense strand
ggaugaagccaccaaaaga

SEQ ID NO: 2088211 - RNA, 19 nt, Homo sapiens
  misc_RNA (1)...(19): siRNA sense strand
uugcagugcuauacguauu

SEQ ID NO: 2088212 - RNA, 19 nt, Homo sapiens
  misc_RNA (1)...(19): siRNA sense strand
uacgaaggaugaacccaau

SEQ ID NO: 2088213 - RNA, 19 nt, Homo sapiens
  misc_RNA (1)...(19): siRNA sense strand
gagagaucaaugacuguau

SEQ ID NO: 2088214 - RNA, 19 nt, Homo sapiens
  misc_RNA (1)...(19): siRNA sense strand
ugcaucaguucuuaguaaa

SEQ ID NO: 2088215 - RNA, 19 nt, Homo sapiens
  misc_RNA (1)...(19): siRNA sense strand
uccaagaauuuaucaagag

SEQ ID NO: 2088216 - RNA, 19 nt, Homo sapiens
  misc_RNA (1)...(19): siRNA sense strand
gcagugcuauacguauugg

SEQ ID NO: 2088217 - RNA, 19 nt, Homo sapiens
  misc_RNA (1)...(19): siRNA sense strand
gguggaacagucuuaaaca

SEQ ID NO: 2088218 - RNA, 19 nt, Homo sapiens
  misc_RNA (1)...(19): siRNA sense strand
aaagccagaggccaaguuu

SEQ ID NO: 2088219 - RNA, 19 nt, Homo sapiens
  misc_RNA (1)...(19): siRNA sense strand
gaagguguuuggaggaguu

SEQ ID NO: 2088220 - RNA, 19 nt, Homo sapiens
  misc_RNA (1)...(19): siRNA sense strand
cauaugugcucaagacagu

SEQ ID NO: 2088221 - RNA, 19 nt, Homo sapiens
  misc_RNA (1)...(19): siRNA sense strand
gacgcauccuauccucaua

SEQ ID NO: 2088222 - RNA, 19 nt, Homo sapiens
  misc_RNA (1)...(19): siRNA sense strand
ccucauaugugcucaagac

SEQ ID NO: 2088223 - RNA, 19 nt, Homo sapiens
  misc_RNA (1)...(19): siRNA sense strand
uggaggaguuggugcaguu

SEQ ID NO: 2088224 - RNA, 19 nt, Homo sapiens
  misc_RNA (1)...(19): siRNA sense strand
ggacgcauccuauccucau

SEQ ID NO: 2088225 - RNA, 19 nt, Homo sapiens
  misc_RNA (1)...(19): siRNA sense strand
gcacccagggcuuccuuga

SEQ ID NO: 2088226 - RNA, 19 nt, Homo sapiens
  misc_RNA (1)...(19): siRNA sense strand
cauccuauccucauaugug

SEQ ID NO: 2088227 - RNA, 19 nt, Homo sapiens
  misc_RNA (1)...(19): siRNA sense strand
gaguuggugcaguuccuua

SEQ ID NO: 2088228 - RNA, 19 nt, Homo sapiens
  misc_RNA (1)...(19): siRNA sense strand
ucaagugccugcaguugcu

SEQ ID NO: 2088229 - RNA, 19 nt, Homo sapiens
  misc_RNA (1)...(19): siRNA sense strand
gagauggggucuuccuugu

SEQ ID NO: 2088230 - RNA, 19 nt, Homo sapiens
  misc_RNA (1)...(19): siRNA sense strand
uuaaggcucugcgcgaucu

SEQ ID NO: 2088231 - RNA, 19 nt, Homo sapiens
  misc_RNA (1)...(19): siRNA sense strand
uaaagacacucuccaguua

SEQ ID NO: 2088232 - RNA, 19 nt, Homo sapiens
  misc_RNA (1)...(19): siRNA sense strand
gcaagccucugauauaaug

SEQ ID NO: 2088233 - RNA, 19 nt, Homo sapiens
  misc_RNA (1)...(19): siRNA sense strand
gaacggcugcuuccuguua

SEQ ID NO: 2088234 - RNA, 19 nt, Homo sapiens
  misc_RNA (1)...(19): siRNA sense strand
caagaaagauagaguuugu

SEQ ID NO: 2088235 - RNA, 19 nt, Homo sapiens
  misc_RNA (1)...(19): siRNA sense strand
gggauuaacuugcaugguu

SEQ ID NO: 2088236 - RNA, 19 nt, Homo sapiens
  misc_RNA (1)...(19): siRNA sense strand
cagaacagcucaccaagga

SEQ ID NO: 2088237 - RNA, 19 nt, Homo sapiens
  misc_RNA (1)...(19): siRNA sense strand
ggauuaacuugcaugguuu

SEQ ID NO: 2088238 - RNA, 19 nt, Homo sapiens
  misc_RNA (1)...(19): siRNA sense strand
gaaacgggauuaacuugca

SEQ ID NO: 2088239 - RNA, 19 nt, Homo sapiens
  misc_RNA (1)...(19): siRNA sense strand
uauggaaccuugggcauua

SEQ ID NO: 2088240 - RNA, 19 nt, Homo sapiens
  misc_RNA (1)...(19): siRNA sense strand
agcaggaucuuuccaguua

SEQ ID NO: 2088241 - RNA, 19 nt, Homo sapiens
  misc_RNA (1)...(19): siRNA sense strand
caagacagcagccaacauu

SEQ ID NO: 2088242 - RNA, 19 nt, Homo sapiens
  misc_RNA (1)...(19): siRNA sense strand
guucaucucuugccaaagu

SEQ ID NO: 2088243 - RNA, 19 nt, Homo sapiens
  misc_RNA (1)...(19): siRNA sense strand
gcacauuuguucaucucuu

SEQ ID NO: 2088244 - RNA, 19 nt, Homo sapiens
  misc_RNA (1)...(19): siRNA sense strand
uaacuugcaugguuuccaa

SEQ ID NO: 2088245 - RNA, 19 nt, Homo sapiens
  misc_RNA (1)...(19): siRNA sense strand
gacaaggaguggaagaugu

SEQ ID NO: 2088246 - RNA, 19 nt, Homo sapiens
  misc_RNA (1)...(19): siRNA sense strand
cugcaagccucugauauaa

SEQ ID NO: 2088247 - RNA, 19 nt, Homo sapiens
  misc_RNA (1)...(19): siRNA sense strand
gagagguggugaaggcauu

SEQ ID NO: 2088248 - RNA, 19 nt, Homo sapiens
  misc_RNA (1)...(19): siRNA sense strand
gauggguauuuccaguuua

SEQ ID NO: 2088249 - RNA, 19 nt, Homo sapiens
  misc_RNA (1)...(19): siRNA sense strand
gguagagaaugcacugaug

SEQ ID NO: 2088250 - RNA, 19 nt, Homo sapiens
  misc_RNA (1)...(19): siRNA sense strand
caaguacccaagaaagaua

SEQ ID NO: 2088251 - RNA, 19 nt, Homo sapiens
  misc_RNA (1)...(19): siRNA sense strand
agauagaguuugucuugaa

SEQ ID NO: 2088252 - RNA, 19 nt, Homo sapiens
  misc_RNA (1)...(19): siRNA sense strand
caucuucucuggcuaugug

SEQ ID NO: 2088253 - RNA, 19 nt, Homo sapiens
  misc_RNA (1)...(19): siRNA sense strand
gacacagguuggauacuga

SEQ ID NO: 2088254 - RNA, 19 nt, Homo sapiens
  misc_RNA (1)...(19): siRNA sense strand
ggacauccgagaauccuau

SEQ ID NO: 2088255 - RNA, 19 nt, Homo sapiens
  misc_RNA (1)...(19): siRNA sense strand
caacauucgaggagacuuu

SEQ ID NO: 2088256 - RNA, 19 nt, Homo sapiens
  misc_RNA (1)...(19): siRNA sense strand
ggacaaucccgacaagaca

SEQ ID NO: 2088257 - RNA, 19 nt, Homo sapiens
  misc_RNA (1)...(19): siRNA sense strand
gaacaucuugugcucacuu

SEQ ID NO: 2088258 - RNA, 19 nt, Homo sapiens
  misc_RNA (1)...(19): siRNA sense strand
guuaugauguacagguuau

SEQ ID NO: 2088259 - RNA, 19 nt, Homo sapiens
  misc_RNA (1)...(19): siRNA sense strand
ggacuggacauccgagaau

SEQ ID NO: 2088260 - RNA, 19 nt, Homo sapiens
  misc_RNA (1)...(19): siRNA sense strand
cuaaagacacucuccaguu

SEQ ID NO: 2088261 - RNA, 19 nt, Homo sapiens
  misc_RNA (1)...(19): siRNA sense strand
ccugcaagccucugauaua

SEQ ID NO: 2088262 - RNA, 19 nt, Homo sapiens
  misc_RNA (1)...(19): siRNA sense strand
ccauacaaguacccaagaa

SEQ ID NO: 2088263 - RNA, 19 nt, Homo sapiens
  misc_RNA (1)...(19): siRNA sense strand
guuauccaaucaagaguau

SEQ ID NO: 2088264 - RNA, 19 nt, Homo sapiens
  misc_RNA (1)...(19): siRNA sense strand
agauggguauuuccaguuu

SEQ ID NO: 2088265 - RNA, 19 nt, Homo sapiens
  misc_RNA (1)...(19): siRNA sense strand
guacagguuauagaugaua

SEQ ID NO: 2088266 - RNA, 19 nt, Homo sapiens
  misc_RNA (1)...(19): siRNA sense strand
gauagaguuugucuugaac

SEQ ID NO: 2088267 - RNA, 19 nt, Homo sapiens
  misc_RNA (1)...(19): siRNA sense strand
aaucaaaccaggauacaug

SEQ ID NO: 2088268 - RNA, 19 nt, Homo sapiens
  misc_RNA (1)...(19): siRNA sense strand
uuaggagcaugcacauuug

SEQ ID NO: 2088269 - RNA, 19 nt, Homo sapiens
  misc_RNA (1)...(19): siRNA sense strand
gaaggagacauuggcauca

SEQ ID NO: 2088270 - RNA, 19 nt, Homo sapiens
  misc_RNA (1)...(19): siRNA sense strand
gcacagaaggagacauugg

SEQ ID NO: 2088271 - RNA, 19 nt, Homo sapiens
  misc_RNA (1)...(19): siRNA sense strand
agacacagguuggauacug

SEQ ID NO: 2088272 - RNA, 19 nt, Homo sapiens
  misc_RNA (1)...(19): siRNA sense strand
cacauuuguucaucucuug

SEQ ID NO: 2088273 - RNA, 19 nt, Homo sapiens
  misc_RNA (1)...(19): siRNA sense strand
aguggaagauguccggaaa

SEQ ID NO: 2088274 - RNA, 19 nt, Homo sapiens
  misc_RNA (1)...(19): siRNA sense strand
ccagacagaaacgggauua

SEQ ID NO: 2088275 - RNA, 19 nt, Homo sapiens
  misc_RNA (1)...(19): siRNA sense strand
cagaaacgggauuaacuug

SEQ ID NO: 2088276 - RNA, 19 nt, Homo sapiens
  misc_RNA (1)...(19): siRNA sense strand
uaauguggaccauaucaga

SEQ ID NO: 2088277 - RNA, 19 nt, Homo sapiens
  misc_RNA (1)...(19): siRNA sense strand
caaagaugaagauggguau

SEQ ID NO: 2088278 - RNA, 19 nt, Homo sapiens
  misc_RNA (1)...(19): siRNA sense strand
auuaggagcaugcacauuu

SEQ ID NO: 2088279 - RNA, 19 nt, Homo sapiens
  misc_RNA (1)...(19): siRNA sense strand
gcagcagcaugugaaguca

SEQ ID NO: 2088280 - RNA, 19 nt, Homo sapiens
  misc_RNA (1)...(19): siRNA sense strand
agaugaagauggguauuuc

SEQ ID NO: 2088281 - RNA, 19 nt, Homo sapiens
  misc_RNA (1)...(19): siRNA sense strand
gggaaucaaagaugaagau

SEQ ID NO: 2088282 - RNA, 19 nt, Homo sapiens
  misc_RNA (1)...(19): siRNA sense strand
gacagaaacgggauuaacu

SEQ ID NO: 2088283 - RNA, 19 nt, Homo sapiens
  misc_RNA (1)...(19): siRNA sense strand
uauccaaucaagaguauga

SEQ ID NO: 2088284 - RNA, 19 nt, Homo sapiens
  misc_RNA (1)...(19): siRNA sense strand
gcaugcacauuuguucauc

SEQ ID NO: 2088285 - RNA, 19 nt, Homo sapiens
  misc_RNA (1)...(19): siRNA sense strand
gagcaugcacauuuguuca

SEQ ID NO: 2088286 - RNA, 19 nt, Homo sapiens
  misc_RNA (1)...(19): siRNA sense strand
gcugcuuccuguuaugaug

SEQ ID NO: 2088287 - RNA, 19 nt, Homo sapiens
  misc_RNA (1)...(19): siRNA sense strand
ggagcaugcacauuuguuc

SEQ ID NO: 2088288 - RNA, 19 nt, Homo sapiens
  misc_RNA (1)...(19): siRNA sense strand
ccaguuauccaaucaagag

SEQ ID NO: 2088289 - RNA, 19 nt, Homo sapiens
  misc_RNA (1)...(19): siRNA sense strand
ccacugguuauucuaaaga

SEQ ID NO: 2088290 - RNA, 19 nt, Homo sapiens
  misc_RNA (1)...(19): siRNA sense strand
gauguacagguuauagaug

SEQ ID NO: 2088291 - RNA, 19 nt, Homo sapiens
  misc_RNA (1)...(19): siRNA sense strand
gacccacugguuauucuaa

SEQ ID NO: 2088292 - RNA, 19 nt, Homo sapiens
  misc_RNA (1)...(19): siRNA sense strand
aacaucuugugcucacuua

SEQ ID NO: 2088293 - RNA, 19 nt, Homo sapiens
  misc_RNA (1)...(19): siRNA sense strand
guuggauacugaacaucuu

SEQ ID NO: 2088294 - RNA, 19 nt, Homo sapiens
  misc_RNA (1)...(19): siRNA sense strand
cauacaaguacccaagaaa

SEQ ID NO: 2088295 - RNA, 19 nt, Homo sapiens
  misc_RNA (1)...(19): siRNA sense strand
acagaaacgggauuaacuu

SEQ ID NO: 2088296 - RNA, 19 nt, Homo sapiens
  misc_RNA (1)...(19): siRNA sense strand
caggaucuuuccaguuaca

SEQ ID NO: 2088297 - RNA, 19 nt, Homo sapiens
  misc_RNA (1)...(19): siRNA sense strand
auguacagguuauagauga

SEQ ID NO: 2088298 - RNA, 19 nt, Homo sapiens
  misc_RNA (1)...(19): siRNA sense strand
ccaagaaagauagaguuug

SEQ ID NO: 2088299 - RNA, 19 nt, Homo sapiens
  misc_RNA (1)...(19): siRNA sense strand
uacaaguacccaagaaaga

SEQ ID NO: 2088300 - RNA, 19 nt, Homo sapiens
  misc_RNA (1)...(19): siRNA sense strand
ucaaacccaucaggccuau

SEQ ID NO: 2088301 - RNA, 19 nt, Homo sapiens
  misc_RNA (1)...(19): siRNA sense strand
cggcacagaaggagacauu

SEQ ID NO: 2088302 - RNA, 19 nt, Homo sapiens
  misc_RNA (1)...(19): siRNA sense strand
aagacacucuccaguuauc

SEQ ID NO: 2088303 - RNA, 19 nt, Homo sapiens
  misc_RNA (1)...(19): siRNA sense strand
cagguuggauacugaacau

SEQ ID NO: 2088304 - RNA, 19 nt, Homo sapiens
  misc_RNA (1)...(19): siRNA sense strand
aagaugaagauggguauuu

SEQ ID NO: 2088305 - RNA, 19 nt, Homo sapiens
  misc_RNA (1)...(19): siRNA sense strand
caucuugugcucacuuaug

SEQ ID NO: 2088306 - RNA, 19 nt, Homo sapiens
  misc_RNA (1)...(19): siRNA sense strand
gaucuuuccaguuacaagu

SEQ ID NO: 2088307 - RNA, 19 nt, Homo sapiens
  misc_RNA (1)...(19): siRNA sense strand
cccaagaaagauagaguuu

SEQ ID NO: 2088308 - RNA, 19 nt, Homo sapiens
  misc_RNA (1)...(19): siRNA sense strand
aaguuugacccacugguua

SEQ ID NO: 2088309 - RNA, 19 nt, Homo sapiens
  misc_RNA (1)...(19): siRNA sense strand
ccaagacaaugaaaaucaa

SEQ ID NO: 2088310 - RNA, 19 nt, Homo sapiens
  misc_RNA (1)...(19): siRNA sense strand
ggccugcaagccucugaua

SEQ ID NO: 2088311 - RNA, 19 nt, Homo sapiens
  misc_RNA (1)...(19): siRNA sense strand
aaacccaucaggccuauag

SEQ ID NO: 2088312 - RNA, 19 nt, Homo sapiens
  misc_RNA (1)...(19): siRNA sense strand
cagcaggaucuuuccaguu

SEQ ID NO: 2088313 - RNA, 19 nt, Homo sapiens
  misc_RNA (1)...(19): siRNA sense strand
ugacagccccauacaagua

SEQ ID NO: 2088314 - RNA, 19 nt, Homo sapiens
  misc_RNA (1)...(19): siRNA sense strand
ggaaucaaagaugaagaug

SEQ ID NO: 2088315 - RNA, 19 nt, Homo sapiens
  misc_RNA (1)...(19): siRNA sense strand
gacagcagccaacauucga

SEQ ID NO: 2088316 - RNA, 19 nt, Homo sapiens
  misc_RNA (1)...(19): siRNA sense strand
aaagacacucuccaguuau

SEQ ID NO: 2088317 - RNA, 19 nt, Homo sapiens
  misc_RNA (1)...(19): siRNA sense strand
gaaaaucaaaccaggauac

SEQ ID NO: 2088318 - RNA, 19 nt, Homo sapiens
  misc_RNA (1)...(19): siRNA sense strand
agaauccuauggccagaca

SEQ ID NO: 2088319 - RNA, 19 nt, Homo sapiens
  misc_RNA (1)...(19): siRNA sense strand
gcaggaucuuuccaguuac

SEQ ID NO: 2088320 - RNA, 19 nt, Homo sapiens
  misc_RNA (1)...(19): siRNA sense strand
aaaguuugacccacugguu

SEQ ID NO: 2088321 - RNA, 19 nt, Homo sapiens
  misc_RNA (1)...(19): siRNA sense strand
gagacaaggaguggaagau

SEQ ID NO: 2088322 - RNA, 19 nt, Homo sapiens
  misc_RNA (1)...(19): siRNA sense strand
cagcaugugaagucaguga

SEQ ID NO: 2088323 - RNA, 19 nt, Homo sapiens
  misc_RNA (1)...(19): siRNA sense strand
ggacgggcaaaugauauca

SEQ ID NO: 2088324 - RNA, 19 nt, Homo sapiens
  misc_RNA (1)...(19): siRNA sense strand
uauaauguggaccauauca

SEQ ID NO: 2088325 - RNA, 19 nt, Homo sapiens
  misc_RNA (1)...(19): siRNA sense strand
uugcaugguuuccaagaca

SEQ ID NO: 2088326 - RNA, 19 nt, Homo sapiens
  misc_RNA (1)...(19): siRNA sense strand
acaaguacccaagaaagau

SEQ ID NO: 2088327 - RNA, 19 nt, Homo sapiens
  misc_RNA (1)...(19): siRNA sense strand
aaacgggauuaacuugcau

SEQ ID NO: 2088328 - RNA, 19 nt, Homo sapiens
  misc_RNA (1)...(19): siRNA sense strand
agaaagauagaguuugucu

SEQ ID NO: 2088329 - RNA, 19 nt, Homo sapiens
  misc_RNA (1)...(19): siRNA sense strand
uuguucaucucuugccaaa

SEQ ID NO: 2088330 - RNA, 19 nt, Homo sapiens
  misc_RNA (1)...(19): siRNA sense strand
ccucacagcugaaacuuua

SEQ ID NO: 2088331 - RNA, 19 nt, Homo sapiens
  misc_RNA (1)...(19): siRNA sense strand
gggcugagguccauuugua

SEQ ID NO: 2088332 - RNA, 19 nt, Homo sapiens
  misc_RNA (1)...(19): siRNA sense strand
gcagaggacuaccacaaau

SEQ ID NO: 2088333 - RNA, 19 nt, Homo sapiens
  misc_RNA (1)...(19): siRNA sense strand
gcggaggccugagcaauaa

SEQ ID NO: 2088334 - RNA, 19 nt, Homo sapiens
  misc_RNA (1)...(19): siRNA sense strand
ugaggaagguuaucaauac

SEQ ID NO: 2088335 - RNA, 19 nt, Homo sapiens
  misc_RNA (1)...(19): siRNA sense strand
ggaaguccuugguuacaug

SEQ ID NO: 2088336 - RNA, 19 nt, Homo sapiens
  misc_RNA (1)...(19): siRNA sense strand
ugaaagacgucauuacucu

SEQ ID NO: 2088337 - RNA, 19 nt, Homo sapiens
  misc_RNA (1)...(19): siRNA sense strand
gagggucggugauguggaa

SEQ ID NO: 2088338 - RNA, 19 nt, Homo sapiens
  misc_RNA (1)...(19): siRNA sense strand
agaggaaggugacaacgaa

SEQ ID NO: 2088339 - RNA, 19 nt, Homo sapiens
  misc_RNA (1)...(19): siRNA sense strand
ggccugagcaauaagaaua

SEQ ID NO: 2088340 - RNA, 19 nt, Homo sapiens
  misc_RNA (1)...(19): siRNA sense strand
gagggucggugacguggaa

SEQ ID NO: 2088341 - RNA, 19 nt, Homo sapiens
  misc_RNA (1)...(19): siRNA sense strand
ggaagguuaucaauacucu

SEQ ID NO: 2088342 - RNA, 19 nt, Homo sapiens
  misc_RNA (1)...(19): siRNA sense strand
caagacaccucccuuagcu

SEQ ID NO: 2088343 - RNA, 19 nt, Homo sapiens
  misc_RNA (1)...(19): siRNA sense strand
gaaagacgucauuacucua

SEQ ID NO: 2088344 - RNA, 19 nt, Homo sapiens
  misc_RNA (1)...(19): siRNA sense strand
caacucaacaacauucuau

SEQ ID NO: 2088345 - RNA, 19 nt, Homo sapiens
  misc_RNA (1)...(19): siRNA sense strand
gaaauaaaauuggccugaa

SEQ ID NO: 2088346 - RNA, 19 nt, Homo sapiens
  misc_RNA (1)...(19): siRNA sense strand
aaccgaacaucaaagaauu

SEQ ID NO: 2088347 - RNA, 19 nt, Homo sapiens
  misc_RNA (1)...(19): siRNA sense strand
ggacuaccacaaaugcaaa

SEQ ID NO: 2088348 - RNA, 19 nt, Homo sapiens
  misc_RNA (1)...(19): siRNA sense strand
ggcggaggccugagcaaua

SEQ ID NO: 2088349 - RNA, 19 nt, Homo sapiens
  misc_RNA (1)...(19): siRNA sense strand
gaauaaaaccgaacaucaa

SEQ ID NO: 2088350 - RNA, 19 nt, Homo sapiens
  misc_RNA (1)...(19): siRNA sense strand
ugguggaaguccuugguua

SEQ ID NO: 2088351 - RNA, 19 nt, Homo sapiens
  misc_RNA (1)...(19): siRNA sense strand
gauaaucucaagacaccuu

SEQ ID NO: 2088352 - RNA, 19 nt, Homo sapiens
  misc_RNA (1)...(19): siRNA sense strand
gauaaucucaagacaccuu

SEQ ID NO: 2088353 - RNA, 19 nt, Homo sapiens
  misc_RNA (1)...(19): siRNA sense strand
ccgacaaguuauaaaguug

SEQ ID NO: 2088354 - RNA, 19 nt, Homo sapiens
  misc_RNA (1)...(19): siRNA sense strand
ucucaagacaccucccuua

SEQ ID NO: 2088355 - RNA, 19 nt, Homo sapiens
  misc_RNA (1)...(19): siRNA sense strand
agaggaagaccgccagaaa

SEQ ID NO: 2088356 - RNA, 19 nt, Homo sapiens
  misc_RNA (1)...(19): siRNA sense strand
aaaccgaacaucaaagaau

SEQ ID NO: 2088357 - RNA, 19 nt, Homo sapiens
  misc_RNA (1)...(19): siRNA sense strand
ggaugauaaucucaagaca

SEQ ID NO: 2088358 - RNA, 19 nt, Homo sapiens
  misc_RNA (1)...(19): siRNA sense strand
ggaugauaaucucaagaca

SEQ ID NO: 2088359 - RNA, 19 nt, Homo sapiens
  misc_RNA (1)...(19): siRNA sense strand
ggaugauaaucucaagaca

SEQ ID NO: 2088360 - RNA, 19 nt, Homo sapiens
  misc_RNA (1)...(19): siRNA sense strand
ggaugauaaucucaagaca

SEQ ID NO: 2088361 - RNA, 19 nt, Homo sapiens
  misc_RNA (1)...(19): siRNA sense strand
gggacugacuuugguggaa

SEQ ID NO: 2088362 - RNA, 19 nt, Homo sapiens
  misc_RNA (1)...(19): siRNA sense strand
gaggaagguuaucaauacu

SEQ ID NO: 2088363 - RNA, 19 nt, Homo sapiens
  misc_RNA (1)...(19): siRNA sense strand
uccgacaaguuauaaaguu

SEQ ID NO: 2088364 - RNA, 19 nt, Homo sapiens
  misc_RNA (1)...(19): siRNA sense strand
gaaacaaaaguuagagcua

SEQ ID NO: 2088365 - RNA, 19 nt, Homo sapiens
  misc_RNA (1)...(19): siRNA sense strand
ucacagcugaaacuuuaaa

SEQ ID NO: 2088366 - RNA, 19 nt, Homo sapiens
  misc_RNA (1)...(19): siRNA sense strand
ugucauuacccucuggaua

SEQ ID NO: 2088367 - RNA, 19 nt, Homo sapiens
  misc_RNA (1)...(19): siRNA sense strand
ccucagcagaugauaauau

SEQ ID NO: 2088368 - RNA, 19 nt, Homo sapiens
  misc_RNA (1)...(19): siRNA sense strand
ccucagcagaugauaauau

SEQ ID NO: 2088369 - RNA, 19 nt, Homo sapiens
  misc_RNA (1)...(19): siRNA sense strand
ccucagcagaugauaauau

SEQ ID NO: 2088370 - RNA, 19 nt, Homo sapiens
  misc_RNA (1)...(19): siRNA sense strand
ccucagcagaugauaauau

SEQ ID NO: 2088371 - RNA, 19 nt, Homo sapiens
  misc_RNA (1)...(19): siRNA sense strand
ccucagcagaugauaauau

SEQ ID NO: 2088372 - RNA, 19 nt, Homo sapiens
  misc_RNA (1)...(19): siRNA sense strand
ccucagcagaugauaauau

SEQ ID NO: 2088373 - RNA, 19 nt, Homo sapiens
  misc_RNA (1)...(19): siRNA sense strand
ccucagcagaugauaauau

SEQ ID NO: 2088374 - RNA, 19 nt, Homo sapiens
  misc_RNA (1)...(19): siRNA sense strand
ccucagcagaugauaauau

SEQ ID NO: 2088375 - RNA, 19 nt, Homo sapiens
  misc_RNA (1)...(19): siRNA sense strand
ccucagcagaugauaauau

SEQ ID NO: 2088376 - RNA, 19 nt, Homo sapiens
  misc_RNA (1)...(19): siRNA sense strand
ccucagcagaugauaauau

SEQ ID NO: 2088377 - RNA, 19 nt, Homo sapiens
  misc_RNA (1)...(19): siRNA sense strand
ccucagcagaugauaauau

SEQ ID NO: 2088378 - RNA, 19 nt, Homo sapiens
  misc_RNA (1)...(19): siRNA sense strand
ccucagcagaugauaauau

SEQ ID NO: 2088379 - RNA, 19 nt, Homo sapiens
  misc_RNA (1)...(19): siRNA sense strand
ccucagcagaugauaauau

SEQ ID NO: 2088380 - RNA, 19 nt, Homo sapiens
  misc_RNA (1)...(19): siRNA sense strand
ccucagcagaugauaauau

SEQ ID NO: 2088381 - RNA, 19 nt, Homo sapiens
  misc_RNA (1)...(19): siRNA sense strand
cugaggaagguuaucaaua

SEQ ID NO: 2088382 - RNA, 19 nt, Homo sapiens
  misc_RNA (1)...(19): siRNA sense strand
cuucuggucucgaaaugga

SEQ ID NO: 2088383 - RNA, 19 nt, Homo sapiens
  misc_RNA (1)...(19): siRNA sense strand
gguuacaugucauuauugc

SEQ ID NO: 2088384 - RNA, 19 nt, Homo sapiens
  misc_RNA (1)...(19): siRNA sense strand
gcuccacccucagcagaug

SEQ ID NO: 2088385 - RNA, 19 nt, Homo sapiens
  misc_RNA (1)...(19): siRNA sense strand
gcuccacccucagcagaug

SEQ ID NO: 2088386 - RNA, 19 nt, Homo sapiens
  misc_RNA (1)...(19): siRNA sense strand
gcuccacccucagcagaug

SEQ ID NO: 2088387 - RNA, 19 nt, Homo sapiens
  misc_RNA (1)...(19): siRNA sense strand
gcuccacccucagcagaug

SEQ ID NO: 2088388 - RNA, 19 nt, Homo sapiens
  misc_RNA (1)...(19): siRNA sense strand
gcuccacccucagcagaug

SEQ ID NO: 2088389 - RNA, 19 nt, Homo sapiens
  misc_RNA (1)...(19): siRNA sense strand
gcuccacccucagcagaug

SEQ ID NO: 2088390 - RNA, 19 nt, Homo sapiens
  misc_RNA (1)...(19): siRNA sense strand
gcuccacccucagcagaug

SEQ ID NO: 2088391 - RNA, 19 nt, Homo sapiens
  misc_RNA (1)...(19): siRNA sense strand
gcuccacccucagcagaug

SEQ ID NO: 2088392 - RNA, 19 nt, Homo sapiens
  misc_RNA (1)...(19): siRNA sense strand
gcuccacccucagcagaug

SEQ ID NO: 2088393 - RNA, 19 nt, Homo sapiens
  misc_RNA (1)...(19): siRNA sense strand
gcuccacccucagcagaug

SEQ ID NO: 2088394 - RNA, 19 nt, Homo sapiens
  misc_RNA (1)...(19): siRNA sense strand
gcuccacccucagcagaug

SEQ ID NO: 2088395 - RNA, 19 nt, Homo sapiens
  misc_RNA (1)...(19): siRNA sense strand
gcuccacccucagcagaug

SEQ ID NO: 2088396 - RNA, 19 nt, Homo sapiens
  misc_RNA (1)...(19): siRNA sense strand
gucauuacccucuggauag

SEQ ID NO: 2088397 - RNA, 19 nt, Homo sapiens
  misc_RNA (1)...(19): siRNA sense strand
cuggauaguuuaccuuugg

SEQ ID NO: 2088398 - RNA, 19 nt, Homo sapiens
  misc_RNA (1)...(19): siRNA sense strand
gaugaucucaagacaccuu

SEQ ID NO: 2088399 - RNA, 19 nt, Homo sapiens
  misc_RNA (1)...(19): siRNA sense strand
ugacguggaaccaucauca

SEQ ID NO: 2088400 - RNA, 19 nt, Homo sapiens
  misc_RNA (1)...(19): siRNA sense strand
ccugagcaauaagaauaaa

SEQ ID NO: 2088401 - RNA, 19 nt, Homo sapiens
  misc_RNA (1)...(19): siRNA sense strand
ggaggccugagcaauaaga

SEQ ID NO: 2088402 - RNA, 19 nt, Homo sapiens
  misc_RNA (1)...(19): siRNA sense strand
ugacguggaaccaucauca

SEQ ID NO: 2088403 - RNA, 19 nt, Homo sapiens
  misc_RNA (1)...(19): siRNA sense strand
gcugagguccauuuguaug

SEQ ID NO: 2088404 - RNA, 19 nt, Homo sapiens
  misc_RNA (1)...(19): siRNA sense strand
uugcguuuccgacaaguua

SEQ ID NO: 2088405 - RNA, 19 nt, Homo sapiens
  misc_RNA (1)...(19): siRNA sense strand
gaggaagaccgccagaaaa

SEQ ID NO: 2088406 - RNA, 19 nt, Homo sapiens
  misc_RNA (1)...(19): siRNA sense strand
ggccugaaagacgucauua

SEQ ID NO: 2088407 - RNA, 19 nt, Homo sapiens
  misc_RNA (1)...(19): siRNA sense strand
gcguuuccgacaaguuaua

SEQ ID NO: 2088408 - RNA, 19 nt, Homo sapiens
  misc_RNA (1)...(19): siRNA sense strand
cgagucggaugauaaucuc

SEQ ID NO: 2088409 - RNA, 19 nt, Homo sapiens
  misc_RNA (1)...(19): siRNA sense strand
ccaacucaacaacauucua

SEQ ID NO: 2088410 - RNA, 19 nt, Homo sapiens
  misc_RNA (1)...(19): siRNA sense strand
gaggaaggugacaacgaaa

SEQ ID NO: 2088411 - RNA, 19 nt, Homo sapiens
  misc_RNA (1)...(19): siRNA sense strand
gaaguccuugguuacaugu

SEQ ID NO: 2088412 - RNA, 19 nt, Homo sapiens
  misc_RNA (1)...(19): siRNA sense strand
gcugagcgucugcggauuc

SEQ ID NO: 2088413 - RNA, 19 nt, Homo sapiens
  misc_RNA (1)...(19): siRNA sense strand
cagaggacuaccacaaaug

SEQ ID NO: 2088414 - RNA, 19 nt, Homo sapiens
  misc_RNA (1)...(19): siRNA sense strand
guaagaggaaggugacaac

SEQ ID NO: 2088415 - RNA, 19 nt, Homo sapiens
  misc_RNA (1)...(19): siRNA sense strand
aaaccacgcaaacccaaga

SEQ ID NO: 2088416 - RNA, 19 nt, Homo sapiens
  misc_RNA (1)...(19): siRNA sense strand
cgaugauaaucucaagaca

SEQ ID NO: 2088417 - RNA, 19 nt, Homo sapiens
  misc_RNA (1)...(19): siRNA sense strand
auuacccucuggauaguuu

SEQ ID NO: 2088418 - RNA, 19 nt, Homo sapiens
  misc_RNA (1)...(19): siRNA sense strand
cgaaauggacaugauggau

SEQ ID NO: 2088419 - RNA, 19 nt, Homo sapiens
  misc_RNA (1)...(19): siRNA sense strand
gccugagcaauaagaauaa

SEQ ID NO: 2088420 - RNA, 19 nt, Homo sapiens
  misc_RNA (1)...(19): siRNA sense strand
acaugucauuauugcguuu

SEQ ID NO: 2088421 - RNA, 19 nt, Homo sapiens
  misc_RNA (1)...(19): siRNA sense strand
uaaaaccgaacaucaaaga

SEQ ID NO: 2088422 - RNA, 19 nt, Homo sapiens
  misc_RNA (1)...(19): siRNA sense strand
ccucaggcagaugauaaua

SEQ ID NO: 2088423 - RNA, 19 nt, Homo sapiens
  misc_RNA (1)...(19): siRNA sense strand
ccucagcggaugauaaucu

SEQ ID NO: 2088424 - RNA, 19 nt, Homo sapiens
  misc_RNA (1)...(19): siRNA sense strand
ccucagcggaugauaaucu

SEQ ID NO: 2088425 - RNA, 19 nt, Homo sapiens
  misc_RNA (1)...(19): siRNA sense strand
ccucagcggaugauaaucu

SEQ ID NO: 2088426 - RNA, 19 nt, Homo sapiens
  misc_RNA (1)...(19): siRNA sense strand
ccucagcggaugauaaucu

SEQ ID NO: 2088427 - RNA, 19 nt, Homo sapiens
  misc_RNA (1)...(19): siRNA sense strand
ccucagcggaugauaaucu

SEQ ID NO: 2088428 - RNA, 19 nt, Homo sapiens
  misc_RNA (1)...(19): siRNA sense strand
ccucagcggaugauaaucu

SEQ ID NO: 2088429 - RNA, 19 nt, Homo sapiens
  misc_RNA (1)...(19): siRNA sense strand
ccucagcggaugauaaucu

SEQ ID NO: 2088430 - RNA, 19 nt, Homo sapiens
  misc_RNA (1)...(19): siRNA sense strand
ggaaauagaugaacagaga

SEQ ID NO: 2088431 - RNA, 19 nt, Homo sapiens
  misc_RNA (1)...(19): siRNA sense strand
uuaaggagaucuuuaguug

SEQ ID NO: 2088432 - RNA, 19 nt, Homo sapiens
  misc_RNA (1)...(19): siRNA sense strand
gaacuucuacggcagauga

SEQ ID NO: 2088433 - RNA, 19 nt, Homo sapiens
  misc_RNA (1)...(19): siRNA sense strand
ggaauaugggcucguguua

SEQ ID NO: 2088434 - RNA, 19 nt, Homo sapiens
  misc_RNA (1)...(19): siRNA sense strand
cuacaacaccuccagaaua

SEQ ID NO: 2088435 - RNA, 19 nt, Homo sapiens
  misc_RNA (1)...(19): siRNA sense strand
aauaugggcucguguuaaa

SEQ ID NO: 2088436 - RNA, 19 nt, Homo sapiens
  misc_RNA (1)...(19): siRNA sense strand
gaacaacaugcaaagguuu

SEQ ID NO: 2088437 - RNA, 19 nt, Homo sapiens
  misc_RNA (1)...(19): siRNA sense strand
ggugaaguaugaagaguug

SEQ ID NO: 2088438 - RNA, 19 nt, Homo sapiens
  misc_RNA (1)...(19): siRNA sense strand
gagccugacugaaacgauu

SEQ ID NO: 2088439 - RNA, 19 nt, Homo sapiens
  misc_RNA (1)...(19): siRNA sense strand
aaacuaagcaggaaauaga

SEQ ID NO: 2088440 - RNA, 19 nt, Homo sapiens
  misc_RNA (1)...(19): siRNA sense strand
gaagaagugccaagaggaa

SEQ ID NO: 2088441 - RNA, 19 nt, Homo sapiens
  misc_RNA (1)...(19): siRNA sense strand
caagggaacuggaagaaac

SEQ ID NO: 2088442 - RNA, 19 nt, Homo sapiens
  misc_RNA (1)...(19): siRNA sense strand
ccagcaagaucuucaacuu

SEQ ID NO: 2088443 - RNA, 19 nt, Homo sapiens
  misc_RNA (1)...(19): siRNA sense strand
cgaacaacaugcaaagguu

SEQ ID NO: 2088444 - RNA, 19 nt, Homo sapiens
  misc_RNA (1)...(19): siRNA sense strand
gcagucagagcauccauuu

SEQ ID NO: 2088445 - RNA, 19 nt, Homo sapiens
  misc_RNA (1)...(19): siRNA sense strand
gcagauguauacaaccaau

SEQ ID NO: 2088446 - RNA, 19 nt, Homo sapiens
  misc_RNA (1)...(19): siRNA sense strand
guagaggaguuugagauga

SEQ ID NO: 2088447 - RNA, 19 nt, Homo sapiens
  misc_RNA (1)...(19): siRNA sense strand
gaucauguguucgcugaga

SEQ ID NO: 2088448 - RNA, 19 nt, Homo sapiens
  misc_RNA (1)...(19): siRNA sense strand
gcagagaugcgacagaugu

SEQ ID NO: 2088449 - RNA, 19 nt, Homo sapiens
  misc_RNA (1)...(19): siRNA sense strand
uagaggaguuugagaugaa

SEQ ID NO: 2088450 - RNA, 19 nt, Homo sapiens
  misc_RNA (1)...(19): siRNA sense strand
gaauaugggcucguguuaa

SEQ ID NO: 2088451 - RNA, 19 nt, Homo sapiens
  misc_RNA (1)...(19): siRNA sense strand
gaacgaacaacaugcaaag

SEQ ID NO: 2088452 - RNA, 19 nt, Homo sapiens
  misc_RNA (1)...(19): siRNA sense strand
gcugggaacuggccucugu

SEQ ID NO: 2088453 - RNA, 19 nt, Homo sapiens
  misc_RNA (1)...(19): siRNA sense strand
gaaagugugaccaggagaa

SEQ ID NO: 2088454 - RNA, 19 nt, Homo sapiens
  misc_RNA (1)...(19): siRNA sense strand
gaaaccggcacccagcuuu

SEQ ID NO: 2088455 - RNA, 19 nt, Homo sapiens
  misc_RNA (1)...(19): siRNA sense strand
gcaaagguuuaugaacaau

SEQ ID NO: 2088456 - RNA, 19 nt, Homo sapiens
  misc_RNA (1)...(19): siRNA sense strand
uggaggagcugaagucauc

SEQ ID NO: 2088457 - RNA, 19 nt, Homo sapiens
  misc_RNA (1)...(19): siRNA sense strand
ggaccugacuggagugaac

SEQ ID NO: 2088458 - RNA, 19 nt, Homo sapiens
  misc_RNA (1)...(19): siRNA sense strand
caaccaaucaggagcaguu

SEQ ID NO: 2088459 - RNA, 19 nt, Homo sapiens
  misc_RNA (1)...(19): siRNA sense strand
caacaccuccagaauacaa

SEQ ID NO: 2088460 - RNA, 19 nt, Homo sapiens
  misc_RNA (1)...(19): siRNA sense strand
uacaacaccuccagaauac

SEQ ID NO: 2088461 - RNA, 19 nt, Homo sapiens
  misc_RNA (1)...(19): siRNA sense strand
gcacccagcuuugcauguc

SEQ ID NO: 2088462 - RNA, 19 nt, Homo sapiens
  misc_RNA (1)...(19): siRNA sense strand
gaacuggaagaaacaaauc

SEQ ID NO: 2088463 - RNA, 19 nt, Homo sapiens
  misc_RNA (1)...(19): siRNA sense strand
caggagcaguuacaggaaa

SEQ ID NO: 2088464 - RNA, 19 nt, Homo sapiens
  misc_RNA (1)...(19): siRNA sense strand
ugacugaaacgauugaaug

SEQ ID NO: 2088465 - RNA, 19 nt, Homo sapiens
  misc_RNA (1)...(19): siRNA sense strand
uaugaagaguugcugaaga

SEQ ID NO: 2088466 - RNA, 19 nt, Homo sapiens
  misc_RNA (1)...(19): siRNA sense strand
gccaagcccugaugaagag

SEQ ID NO: 2088467 - RNA, 19 nt, Homo sapiens
  misc_RNA (1)...(19): siRNA sense strand
gcaagggaacuggaagaaa

SEQ ID NO: 2088468 - RNA, 19 nt, Homo sapiens
  misc_RNA (1)...(19): siRNA sense strand
cgaucacucuccucucauu

SEQ ID NO: 2088469 - RNA, 19 nt, Homo sapiens
  misc_RNA (1)...(19): siRNA sense strand
gaucuuuaguugcaucaag

SEQ ID NO: 2088470 - RNA, 19 nt, Homo sapiens
  misc_RNA (1)...(19): siRNA sense strand
aaggagaucuuuaguugca

SEQ ID NO: 2088471 - RNA, 19 nt, Homo sapiens
  misc_RNA (1)...(19): siRNA sense strand
augaagaguugcugaagaa

SEQ ID NO: 2088472 - RNA, 19 nt, Homo sapiens
  misc_RNA (1)...(19): siRNA sense strand
gcagaugaacgaacaacau

SEQ ID NO: 2088473 - RNA, 19 nt, Homo sapiens
  misc_RNA (1)...(19): siRNA sense strand
aagaguugcugaagaagug

SEQ ID NO: 2088474 - RNA, 19 nt, Homo sapiens
  misc_RNA (1)...(19): siRNA sense strand
gaaaaugagcacuugaaaa

SEQ ID NO: 2088475 - RNA, 19 nt, Homo sapiens
  misc_RNA (1)...(19): siRNA sense strand
ggaacuggaagaaacaaau

SEQ ID NO: 2088476 - RNA, 19 nt, Homo sapiens
  misc_RNA (1)...(19): siRNA sense strand
cagcaaggccucacagcaa

SEQ ID NO: 2088477 - RNA, 19 nt, Homo sapiens
  misc_RNA (1)...(19): siRNA sense strand
gaaauagaugaacagagaa

SEQ ID NO: 2088478 - RNA, 19 nt, Homo sapiens
  misc_RNA (1)...(19): siRNA sense strand
cccugaaggugaaguauga

SEQ ID NO: 2088479 - RNA, 19 nt, Homo sapiens
  misc_RNA (1)...(19): siRNA sense strand
ggcagaagcgggugacuau

SEQ ID NO: 2088480 - RNA, 19 nt, Homo sapiens
  misc_RNA (1)...(19): siRNA sense strand
cagcagauguauacaacca

SEQ ID NO: 2088481 - RNA, 19 nt, Homo sapiens
  misc_RNA (1)...(19): siRNA sense strand
augcaaagguuuaugaaca

SEQ ID NO: 2088482 - RNA, 19 nt, Homo sapiens
  misc_RNA (1)...(19): siRNA sense strand
uacaggaaauugaguaucu

SEQ ID NO: 2088483 - RNA, 19 nt, Homo sapiens
  misc_RNA (1)...(19): siRNA sense strand
gaagaguugcugaagaagu

SEQ ID NO: 2088484 - RNA, 19 nt, Homo sapiens
  misc_RNA (1)...(19): siRNA sense strand
gacagauguugcagucaga

SEQ ID NO: 2088485 - RNA, 19 nt, Homo sapiens
  misc_RNA (1)...(19): siRNA sense strand
ucaacuugcugcugagcuu

SEQ ID NO: 2088486 - RNA, 19 nt, Homo sapiens
  misc_RNA (1)...(19): siRNA sense strand
ucacauagaaagccucuca

SEQ ID NO: 2088487 - RNA, 19 nt, Homo sapiens
  misc_RNA (1)...(19): siRNA sense strand
gugccggaaucacauagaa

SEQ ID NO: 2088488 - RNA, 19 nt, Homo sapiens
  misc_RNA (1)...(19): siRNA sense strand
acucuccucucauucuuaa

SEQ ID NO: 2088489 - RNA, 19 nt, Homo sapiens
  misc_RNA (1)...(19): siRNA sense strand
ggaacuggccucugucaac

SEQ ID NO: 2088490 - RNA, 19 nt, Homo sapiens
  misc_RNA (1)...(19): siRNA sense strand
ugcaaagguuuaugaacaa

SEQ ID NO: 2088491 - RNA, 19 nt, Homo sapiens
  misc_RNA (1)...(19): siRNA sense strand
caagaaaacuaagcaggaa

SEQ ID NO: 2088492 - RNA, 19 nt, Homo sapiens
  misc_RNA (1)...(19): siRNA sense strand
ugacuauggaggaggaaua

SEQ ID NO: 2088493 - RNA, 19 nt, Homo sapiens
  misc_RNA (1)...(19): siRNA sense strand
gaaggugaaguaugaagag

SEQ ID NO: 2088494 - RNA, 19 nt, Homo sapiens
  misc_RNA (1)...(19): siRNA sense strand
uugaguaucugacgaagca

SEQ ID NO: 2088495 - RNA, 19 nt, Homo sapiens
  misc_RNA (1)...(19): siRNA sense strand
gagugaacgcccagucuga

SEQ ID NO: 2088496 - RNA, 19 nt, Homo sapiens
  misc_RNA (1)...(19): siRNA sense strand
gaaguggacacgcaguaca

SEQ ID NO: 2088497 - RNA, 19 nt, Homo sapiens
  misc_RNA (1)...(19): siRNA sense strand
uugaaugccugcaaaccaa

SEQ ID NO: 2088498 - RNA, 19 nt, Homo sapiens
  misc_RNA (1)...(19): siRNA sense strand
auucugagccugacugaaa

SEQ ID NO: 2088499 - RNA, 19 nt, Homo sapiens
  misc_RNA (1)...(19): siRNA sense strand
gggccaaggcugugaaaca

SEQ ID NO: 2088500 - RNA, 19 nt, Homo sapiens
  misc_RNA (1)...(19): siRNA sense strand
gguagaggaguuugagaug

SEQ ID NO: 2088501 - RNA, 19 nt, Homo sapiens
  misc_RNA (1)...(19): siRNA sense strand
agucagagcauccauuugu

SEQ ID NO: 2088502 - RNA, 19 nt, Homo sapiens
  misc_RNA (1)...(19): siRNA sense strand
uagaugaacagagaacaaa

SEQ ID NO: 2088503 - RNA, 19 nt, Homo sapiens
  misc_RNA (1)...(19): siRNA sense strand
cagaugaacgaacaacaug

SEQ ID NO: 2088504 - RNA, 19 nt, Homo sapiens
  misc_RNA (1)...(19): siRNA sense strand
ucacucuccucucauucuu

SEQ ID NO: 2088505 - RNA, 19 nt, Homo sapiens
  misc_RNA (1)...(19): siRNA sense strand
ugaauggaguugagaagcu

SEQ ID NO: 2088506 - RNA, 19 nt, Homo sapiens
  misc_RNA (1)...(19): siRNA sense strand
agaagcgggugacuaugga

SEQ ID NO: 2088507 - RNA, 19 nt, Homo sapiens
  misc_RNA (1)...(19): siRNA sense strand
agcaaggccucacagcaaa

SEQ ID NO: 2088508 - RNA, 19 nt, Homo sapiens
  misc_RNA (1)...(19): siRNA sense strand
ucagagcauccauuuguga

SEQ ID NO: 2088509 - RNA, 19 nt, Homo sapiens
  misc_RNA (1)...(19): siRNA sense strand
ggaaaaugagcacuugaaa

SEQ ID NO: 2088510 - RNA, 19 nt, Homo sapiens
  misc_RNA (1)...(19): siRNA sense strand
gcaguuacaggaaauugag

SEQ ID NO: 2088511 - RNA, 19 nt, Homo sapiens
  misc_RNA (1)...(19): siRNA sense strand
uggcagagaugcgacagau

SEQ ID NO: 2088512 - RNA, 19 nt, Homo sapiens
  misc_RNA (1)...(19): siRNA sense strand
accaggaccuccagcaaga

SEQ ID NO: 2088513 - RNA, 19 nt, Homo sapiens
  misc_RNA (1)...(19): siRNA sense strand
gaugaacgaacaacaugca

SEQ ID NO: 2088514 - RNA, 19 nt, Homo sapiens
  misc_RNA (1)...(19): siRNA sense strand
cuaagcaggaaauagauga

SEQ ID NO: 2088515 - RNA, 19 nt, Homo sapiens
  misc_RNA (1)...(19): siRNA sense strand
gagcaguuacaggaaauug

SEQ ID NO: 2088516 - RNA, 19 nt, Homo sapiens
  misc_RNA (1)...(19): siRNA sense strand
cguguaugaucauguguuc

SEQ ID NO: 2088517 - RNA, 19 nt, Homo sapiens
  misc_RNA (1)...(19): siRNA sense strand
ugaacgaacaacaugcaaa

SEQ ID NO: 2088518 - RNA, 19 nt, Homo sapiens
  misc_RNA (1)...(19): siRNA sense strand
acgauugaaugccugcaaa

SEQ ID NO: 2088519 - RNA, 19 nt, Homo sapiens
  misc_RNA (1)...(19): siRNA sense strand
ggaagaaacaaaucaaaag

SEQ ID NO: 2088520 - RNA, 19 nt, Homo sapiens
  misc_RNA (1)...(19): siRNA sense strand
aacaacaugcaaagguuua

SEQ ID NO: 2088521 - RNA, 19 nt, Homo sapiens
  misc_RNA (1)...(19): siRNA sense strand
guucagcagauguauacaa

SEQ ID NO: 2088522 - RNA, 19 nt, Homo sapiens
  misc_RNA (1)...(19): siRNA sense strand
ccaaucaggagcaguuaca

SEQ ID NO: 2088523 - RNA, 19 nt, Homo sapiens
  misc_RNA (1)...(19): siRNA sense strand
caauuagacgucacagcaa

SEQ ID NO: 2088524 - RNA, 19 nt, Homo sapiens
  misc_RNA (1)...(19): siRNA sense strand
ucuguauguuccuuucaaa

SEQ ID NO: 2088525 - RNA, 19 nt, Homo sapiens
  misc_RNA (1)...(19): siRNA sense strand
cagaagcgggugacuaugg

SEQ ID NO: 2088526 - RNA, 19 nt, Homo sapiens
  misc_RNA (1)...(19): siRNA sense strand
uguaugaccuccgccaaca

SEQ ID NO: 2088527 - RNA, 19 nt, Homo sapiens
  misc_RNA (1)...(19): siRNA sense strand
gaaaacuaagcaggaaaua

SEQ ID NO: 2088528 - RNA, 19 nt, Homo sapiens
  misc_RNA (1)...(19): siRNA sense strand
ugaaggugaaguaugaaga

SEQ ID NO: 2088529 - RNA, 19 nt, Homo sapiens
  misc_RNA (1)...(19): siRNA sense strand
acccagagcccgugaguuc

SEQ ID NO: 2088530 - RNA, 19 nt, Homo sapiens
  misc_RNA (1)...(19): siRNA sense strand
gaaccaagcgacagucaua

SEQ ID NO: 2088531 - RNA, 19 nt, Homo sapiens
  misc_RNA (1)...(19): siRNA sense strand
uggagaagaugaaguauuu

SEQ ID NO: 2088532 - RNA, 19 nt, Homo sapiens
  misc_RNA (1)...(19): siRNA sense strand
ccucaaaccugcacuuuau

SEQ ID NO: 2088533 - RNA, 19 nt, Homo sapiens
  misc_RNA (1)...(19): siRNA sense strand
cagcauacauccucuucua

SEQ ID NO: 2088534 - RNA, 19 nt, Homo sapiens
  misc_RNA (1)...(19): siRNA sense strand
ggacagccaucccgucaug

SEQ ID NO: 2088535 - RNA, 19 nt, Homo sapiens
  misc_RNA (1)...(19): siRNA sense strand
cuaaaccacuugaaauuug

SEQ ID NO: 2088536 - RNA, 19 nt, Homo sapiens
  misc_RNA (1)...(19): siRNA sense strand
ggagaugacuggagaaagg

SEQ ID NO: 2088537 - RNA, 19 nt, Homo sapiens
  misc_RNA (1)...(19): siRNA sense strand
gcacugcucaugugaaauu

SEQ ID NO: 2088538 - RNA, 19 nt, Homo sapiens
  misc_RNA (1)...(19): siRNA sense strand
ggucaguguuguuggaaua

SEQ ID NO: 2088539 - RNA, 19 nt, Homo sapiens
  misc_RNA (1)...(19): siRNA sense strand
gacaauagcuugggaccuu

SEQ ID NO: 2088540 - RNA, 19 nt, Homo sapiens
  misc_RNA (1)...(19): siRNA sense strand
gaaggaauucucagucaaa

SEQ ID NO: 2088541 - RNA, 19 nt, Homo sapiens
  misc_RNA (1)...(19): siRNA sense strand
gaagcagugucuauggaaa

SEQ ID NO: 2088542 - RNA, 19 nt, Homo sapiens
  misc_RNA (1)...(19): siRNA sense strand
cagauuguguuaacagaaa

SEQ ID NO: 2088543 - RNA, 19 nt, Homo sapiens
  misc_RNA (1)...(19): siRNA sense strand
gagaaaggagugaagauga

SEQ ID NO: 2088544 - RNA, 19 nt, Homo sapiens
  misc_RNA (1)...(19): siRNA sense strand
gcagggaagcauuacguua

SEQ ID NO: 2088545 - RNA, 19 nt, Homo sapiens
  misc_RNA (1)...(19): siRNA sense strand
gcacuuagagaagacaaua

SEQ ID NO: 2088546 - RNA, 19 nt, Homo sapiens
  misc_RNA (1)...(19): siRNA sense strand
agaaggaaaucuuggagaa

SEQ ID NO: 2088547 - RNA, 19 nt, Homo sapiens
  misc_RNA (1)...(19): siRNA sense strand
aaacaaagauccccacuga

SEQ ID NO: 2088548 - RNA, 19 nt, Homo sapiens
  misc_RNA (1)...(19): siRNA sense strand
caaccuaaaccacuugaaa

SEQ ID NO: 2088549 - RNA, 19 nt, Homo sapiens
  misc_RNA (1)...(19): siRNA sense strand
guauauuccugaugcagaa

SEQ ID NO: 2088550 - RNA, 19 nt, Homo sapiens
  misc_RNA (1)...(19): siRNA sense strand
gacaaggucuccaucucuu

SEQ ID NO: 2088551 - RNA, 19 nt, Homo sapiens
  misc_RNA (1)...(19): siRNA sense strand
ugaagaugauggaggcuuu

SEQ ID NO: 2088552 - RNA, 19 nt, Homo sapiens
  misc_RNA (1)...(19): siRNA sense strand
gaaggagacaggcgcauga

SEQ ID NO: 2088553 - RNA, 19 nt, Homo sapiens
  misc_RNA (1)...(19): siRNA sense strand
caugaaagcgacugcauuu

SEQ ID NO: 2088554 - RNA, 19 nt, Homo sapiens
  misc_RNA (1)...(19): siRNA sense strand
gaaaguguucgucugcaaa

SEQ ID NO: 2088555 - RNA, 19 nt, Homo sapiens
  misc_RNA (1)...(19): siRNA sense strand
gagacucccgaaauauuua

SEQ ID NO: 2088556 - RNA, 19 nt, Homo sapiens
  misc_RNA (1)...(19): siRNA sense strand
cauggucccugucugcuaa

SEQ ID NO: 2088557 - RNA, 19 nt, Homo sapiens
  misc_RNA (1)...(19): siRNA sense strand
caugacaccucacgugguu

SEQ ID NO: 2088558 - RNA, 19 nt, Homo sapiens
  misc_RNA (1)...(19): siRNA sense strand
gaaauuuggcuuggauuau

SEQ ID NO: 2088559 - RNA, 19 nt, Homo sapiens
  misc_RNA (1)...(19): siRNA sense strand
gggaagcagugucuaugga

SEQ ID NO: 2088560 - RNA, 19 nt, Homo sapiens
  misc_RNA (1)...(19): siRNA sense strand
acagaaauguacuaugaug

SEQ ID NO: 2088561 - RNA, 19 nt, Homo sapiens
  misc_RNA (1)...(19): siRNA sense strand
ggaccgaguucaugaagac

SEQ ID NO: 2088562 - RNA, 19 nt, Homo sapiens
  misc_RNA (1)...(19): siRNA sense strand
ugaaauuuggcuuggauua

SEQ ID NO: 2088563 - RNA, 19 nt, Homo sapiens
  misc_RNA (1)...(19): siRNA sense strand
gaaagggcauuaaaaucuu

SEQ ID NO: 2088564 - RNA, 19 nt, Homo sapiens
  misc_RNA (1)...(19): siRNA sense strand
cagggaagcauuacguuaa

SEQ ID NO: 2088565 - RNA, 19 nt, Homo sapiens
  misc_RNA (1)...(19): siRNA sense strand
gcauucagguguguccauu

SEQ ID NO: 2088566 - RNA, 19 nt, Homo sapiens
  misc_RNA (1)...(19): siRNA sense strand
ggagaaaggagugaagaug

SEQ ID NO: 2088567 - RNA, 19 nt, Homo sapiens
  misc_RNA (1)...(19): siRNA sense strand
ggaauucucagucaaagag

SEQ ID NO: 2088568 - RNA, 19 nt, Homo sapiens
  misc_RNA (1)...(19): siRNA sense strand
agacuauugugucaaagaa

SEQ ID NO: 2088569 - RNA, 19 nt, Homo sapiens
  misc_RNA (1)...(19): siRNA sense strand
gcaggcagcgacaagauug

SEQ ID NO: 2088570 - RNA, 19 nt, Homo sapiens
  misc_RNA (1)...(19): siRNA sense strand
cuuugagacucccgaaaua

SEQ ID NO: 2088571 - RNA, 19 nt, Homo sapiens
  misc_RNA (1)...(19): siRNA sense strand
uggaaggcguguucaaaga

SEQ ID NO: 2088572 - RNA, 19 nt, Homo sapiens
  misc_RNA (1)...(19): siRNA sense strand
agaaaggagugaagaugau

SEQ ID NO: 2088573 - RNA, 19 nt, Homo sapiens
  misc_RNA (1)...(19): siRNA sense strand
ggaguuugccaucgcauug

SEQ ID NO: 2088574 - RNA, 19 nt, Homo sapiens
  misc_RNA (1)...(19): siRNA sense strand
augaagaccucaaccauuc

SEQ ID NO: 2088575 - RNA, 19 nt, Homo sapiens
  misc_RNA (1)...(19): siRNA sense strand
uggcuuggauuaucauaga

SEQ ID NO: 2088576 - RNA, 19 nt, Homo sapiens
  misc_RNA (1)...(19): siRNA sense strand
ggaagcagugucuauggaa

SEQ ID NO: 2088577 - RNA, 19 nt, Homo sapiens
  misc_RNA (1)...(19): siRNA sense strand
aaagggagcgucaucauca

SEQ ID NO: 2088578 - RNA, 19 nt, Homo sapiens
  misc_RNA (1)...(19): siRNA sense strand
ccacugaucagauuguguu

SEQ ID NO: 2088579 - RNA, 19 nt, Homo sapiens
  misc_RNA (1)...(19): siRNA sense strand
cagacgaccuggaaacagu

SEQ ID NO: 2088580 - RNA, 19 nt, Homo sapiens
  misc_RNA (1)...(19): siRNA sense strand
gaaccuuucuagcaguuac

SEQ ID NO: 2088581 - RNA, 19 nt, Homo sapiens
  misc_RNA (1)...(19): siRNA sense strand
uggcacugcucaugugaaa

SEQ ID NO: 2088582 - RNA, 19 nt, Homo sapiens
  misc_RNA (1)...(19): siRNA sense strand
ugagacucccgaaauauuu

SEQ ID NO: 2088583 - RNA, 19 nt, Homo sapiens
  misc_RNA (1)...(19): siRNA sense strand
ggaaacaguccaugaaagc

SEQ ID NO: 2088584 - RNA, 19 nt, Homo sapiens
  misc_RNA (1)...(19): siRNA sense strand
cagagcagcuggaguuugc

SEQ ID NO: 2088585 - RNA, 19 nt, Homo sapiens
  misc_RNA (1)...(19): siRNA sense strand
acaacaaccuaaaccacuu

SEQ ID NO: 2088586 - RNA, 19 nt, Homo sapiens
  misc_RNA (1)...(19): siRNA sense strand
ugaaggaauucucagucaa

SEQ ID NO: 2088587 - RNA, 19 nt, Homo sapiens
  misc_RNA (1)...(19): siRNA sense strand
aaagagauuucggcaggaa

SEQ ID NO: 2088588 - RNA, 19 nt, Homo sapiens
  misc_RNA (1)...(19): siRNA sense strand
cagaugcgcuccaauucuc

SEQ ID NO: 2088589 - RNA, 19 nt, Homo sapiens
  misc_RNA (1)...(19): siRNA sense strand
cagugucuauggaaacaaa

SEQ ID NO: 2088590 - RNA, 19 nt, Homo sapiens
  misc_RNA (1)...(19): siRNA sense strand
gaccucaaccauucaguga

SEQ ID NO: 2088591 - RNA, 19 nt, Homo sapiens
  misc_RNA (1)...(19): siRNA sense strand
gaaaggagugaagaugaug

SEQ ID NO: 2088592 - RNA, 19 nt, Homo sapiens
  misc_RNA (1)...(19): siRNA sense strand
uucagaacauggucaaauu

SEQ ID NO: 2088593 - RNA, 19 nt, Homo sapiens
  misc_RNA (1)...(19): siRNA sense strand
caugaagaccucaaccauu

SEQ ID NO: 2088594 - RNA, 19 nt, Homo sapiens
  misc_RNA (1)...(19): siRNA sense strand
ggacaaggagacaagagau

SEQ ID NO: 2088595 - RNA, 19 nt, Homo sapiens
  misc_RNA (1)...(19): siRNA sense strand
ccuaaaccacuugaaauuu

SEQ ID NO: 2088596 - RNA, 19 nt, Homo sapiens
  misc_RNA (1)...(19): siRNA sense strand
cgaaauauuuaggccugaa

SEQ ID NO: 2088597 - RNA, 19 nt, Homo sapiens
  misc_RNA (1)...(19): siRNA sense strand
caaggcaaauguucucacu

SEQ ID NO: 2088598 - RNA, 19 nt, Homo sapiens
  misc_RNA (1)...(19): siRNA sense strand
ucaacucgaccauuuguga

SEQ ID NO: 2088599 - RNA, 19 nt, Homo sapiens
  misc_RNA (1)...(19): siRNA sense strand
gacaggcgcaugaaacuuc

SEQ ID NO: 2088600 - RNA, 19 nt, Homo sapiens
  misc_RNA (1)...(19): siRNA sense strand
gcaaagggagcgucaucau

SEQ ID NO: 2088601 - RNA, 19 nt, Homo sapiens
  misc_RNA (1)...(19): siRNA sense strand
gacaaggagacaagagauu

SEQ ID NO: 2088602 - RNA, 19 nt, Homo sapiens
  misc_RNA (1)...(19): siRNA sense strand
aaauuuggcuuggauuauc

SEQ ID NO: 2088603 - RNA, 19 nt, Homo sapiens
  misc_RNA (1)...(19): siRNA sense strand
agucaaagaggaauucauu

SEQ ID NO: 2088604 - RNA, 19 nt, Homo sapiens
  misc_RNA (1)...(19): siRNA sense strand
ugccugaugugcuuauuau

SEQ ID NO: 2088605 - RNA, 19 nt, Homo sapiens
  misc_RNA (1)...(19): siRNA sense strand
ggaggcagcagaugacaag

SEQ ID NO: 2088606 - RNA, 19 nt, Homo sapiens
  misc_RNA (1)...(19): siRNA sense strand
caucguuccuuuugugaua

SEQ ID NO: 2088607 - RNA, 19 nt, Homo sapiens
  misc_RNA (1)...(19): siRNA sense strand
ccaauucuccaucccgauu

SEQ ID NO: 2088608 - RNA, 19 nt, Homo sapiens
  misc_RNA (1)...(19): siRNA sense strand
uguaguguaucaaggcaaa

SEQ ID NO: 2088609 - RNA, 19 nt, Homo sapiens
  misc_RNA (1)...(19): siRNA sense strand
ggagacaggcgcaugaaac

SEQ ID NO: 2088610 - RNA, 19 nt, Homo sapiens
  misc_RNA (1)...(19): siRNA sense strand
acaaggagacaagagauuu

SEQ ID NO: 2088611 - RNA, 19 nt, Homo sapiens
  misc_RNA (1)...(19): siRNA sense strand
gcaaauguucucacugcau

SEQ ID NO: 2088612 - RNA, 19 nt, Homo sapiens
  misc_RNA (1)...(19): siRNA sense strand
gcacgcagacagcauacau

SEQ ID NO: 2088613 - RNA, 19 nt, Homo sapiens
  misc_RNA (1)...(19): siRNA sense strand
ugacaccucacgugguuaa

SEQ ID NO: 2088614 - RNA, 19 nt, Homo sapiens
  misc_RNA (1)...(19): siRNA sense strand
uaaaccacuugaaauuugg

SEQ ID NO: 2088615 - RNA, 19 nt, Homo sapiens
  misc_RNA (1)...(19): siRNA sense strand
agaaaguguucgucugcaa

SEQ ID NO: 2088616 - RNA, 19 nt, Homo sapiens
  misc_RNA (1)...(19): siRNA sense strand
gcagaugcgcuccaauucu

SEQ ID NO: 2088617 - RNA, 19 nt, Homo sapiens
  misc_RNA (1)...(19): siRNA sense strand
gaaaauugcaugagaccuu

SEQ ID NO: 2088618 - RNA, 19 nt, Homo sapiens
  misc_RNA (1)...(19): siRNA sense strand
caaguucuucccuguguga

SEQ ID NO: 2088619 - RNA, 19 nt, Homo sapiens
  misc_RNA (1)...(19): siRNA sense strand
caacaaccuaaaccacuug

SEQ ID NO: 2088620 - RNA, 19 nt, Homo sapiens
  misc_RNA (1)...(19): siRNA sense strand
cugaugugcuuauuauaca

SEQ ID NO: 2088621 - RNA, 19 nt, Homo sapiens
  misc_RNA (1)...(19): siRNA sense strand
caaagggagcgucaucauc

SEQ ID NO: 2088622 - RNA, 19 nt, Homo sapiens
  misc_RNA (1)...(19): siRNA sense strand
gccucaaaccugcacuuua

SEQ ID NO: 2088623 - RNA, 19 nt, Homo sapiens
  misc_RNA (1)...(19): siRNA sense strand
cgucagaguuugucaucca

SEQ ID NO: 2088624 - RNA, 19 nt, Homo sapiens
  misc_RNA (1)...(19): siRNA sense strand
acuauugugucaaagaaug

SEQ ID NO: 2088625 - RNA, 19 nt, Homo sapiens
  misc_RNA (1)...(19): siRNA sense strand
guagaaagggcauuaaaau

SEQ ID NO: 2088626 - RNA, 19 nt, Homo sapiens
  misc_RNA (1)...(19): siRNA sense strand
gaccauuugugagaagugu

SEQ ID NO: 2088627 - RNA, 19 nt, Homo sapiens
  misc_RNA (1)...(19): siRNA sense strand
ggaugaguauauuccugau

SEQ ID NO: 2088628 - RNA, 19 nt, Homo sapiens
  misc_RNA (1)...(19): siRNA sense strand
ccaauucacagcucugcuu

SEQ ID NO: 2088629 - RNA, 19 nt, Homo sapiens
  misc_RNA (1)...(19): siRNA sense strand
ccugaggacuacaucuaug

SEQ ID NO: 2088630 - RNA, 19 nt, Homo sapiens
  misc_RNA (1)...(19): siRNA sense strand
gaaccaagcgacagucaua

SEQ ID NO: 2088631 - RNA, 19 nt, Homo sapiens
  misc_RNA (1)...(19): siRNA sense strand
uggagaagaugaaguauuu

SEQ ID NO: 2088632 - RNA, 19 nt, Homo sapiens
  misc_RNA (1)...(19): siRNA sense strand
gagcaaacauucagcacaa

SEQ ID NO: 2088633 - RNA, 19 nt, Homo sapiens
  misc_RNA (1)...(19): siRNA sense strand
guagacagcucuccaguca

SEQ ID NO: 2088634 - RNA, 19 nt, Homo sapiens
  misc_RNA (1)...(19): siRNA sense strand
ccucaaaccugcacuuuau

SEQ ID NO: 2088635 - RNA, 19 nt, Homo sapiens
  misc_RNA (1)...(19): siRNA sense strand
cagcauacauccucuucua

SEQ ID NO: 2088636 - RNA, 19 nt, Homo sapiens
  misc_RNA (1)...(19): siRNA sense strand
ggacagccaucccgucaug

SEQ ID NO: 2088637 - RNA, 19 nt, Homo sapiens
  misc_RNA (1)...(19): siRNA sense strand
cuaaaccacuugaaauuug

SEQ ID NO: 2088638 - RNA, 19 nt, Homo sapiens
  misc_RNA (1)...(19): siRNA sense strand
agacagcucuccagucaaa

SEQ ID NO: 2088639 - RNA, 19 nt, Homo sapiens
  misc_RNA (1)...(19): siRNA sense strand
ggagaugacuggagaaagg

SEQ ID NO: 2088640 - RNA, 19 nt, Homo sapiens
  misc_RNA (1)...(19): siRNA sense strand
gcacugcucaugugaaauu

SEQ ID NO: 2088641 - RNA, 19 nt, Homo sapiens
  misc_RNA (1)...(19): siRNA sense strand
ggucaguguuguuggaaua

SEQ ID NO: 2088642 - RNA, 19 nt, Homo sapiens
  misc_RNA (1)...(19): siRNA sense strand
gacaauagcuugggaccuu

SEQ ID NO: 2088643 - RNA, 19 nt, Homo sapiens
  misc_RNA (1)...(19): siRNA sense strand
agagagggcuccagacaaa

SEQ ID NO: 2088644 - RNA, 19 nt, Homo sapiens
  misc_RNA (1)...(19): siRNA sense strand
gaaggaauucucagucaaa

SEQ ID NO: 2088645 - RNA, 19 nt, Homo sapiens
  misc_RNA (1)...(19): siRNA sense strand
gaccacagcuugaguagag

SEQ ID NO: 2088646 - RNA, 19 nt, Homo sapiens
  misc_RNA (1)...(19): siRNA sense strand
gaagcagugucuauggaaa

SEQ ID NO: 2088647 - RNA, 19 nt, Homo sapiens
  misc_RNA (1)...(19): siRNA sense strand
ccagagagcacaacuaaga

SEQ ID NO: 2088648 - RNA, 19 nt, Homo sapiens
  misc_RNA (1)...(19): siRNA sense strand
gaacuccagugucguagau

SEQ ID NO: 2088649 - RNA, 19 nt, Homo sapiens
  misc_RNA (1)...(19): siRNA sense strand
acaauaaucagaucgcuua

SEQ ID NO: 2088650 - RNA, 19 nt, Homo sapiens
  misc_RNA (1)...(19): siRNA sense strand
cagauuguguuaacagaaa

SEQ ID NO: 2088651 - RNA, 19 nt, Homo sapiens
  misc_RNA (1)...(19): siRNA sense strand
ucagaucgcuuauguggau

SEQ ID NO: 2088652 - RNA, 19 nt, Homo sapiens
  misc_RNA (1)...(19): siRNA sense strand
gagaaaggagugaagauga

SEQ ID NO: 2088653 - RNA, 19 nt, Homo sapiens
  misc_RNA (1)...(19): siRNA sense strand
gcagggaagcauuacguua

SEQ ID NO: 2088654 - RNA, 19 nt, Homo sapiens
  misc_RNA (1)...(19): siRNA sense strand
gcacuuagagaagacaaua

SEQ ID NO: 2088655 - RNA, 19 nt, Homo sapiens
  misc_RNA (1)...(19): siRNA sense strand
agaaggaaaucuuggagaa

SEQ ID NO: 2088656 - RNA, 19 nt, Homo sapiens
  misc_RNA (1)...(19): siRNA sense strand
aaacaaagauccccacuga

SEQ ID NO: 2088657 - RNA, 19 nt, Homo sapiens
  misc_RNA (1)...(19): siRNA sense strand
caaccuaaaccacuugaaa

SEQ ID NO: 2088658 - RNA, 19 nt, Homo sapiens
  misc_RNA (1)...(19): siRNA sense strand
guauauuccugaugcagaa

SEQ ID NO: 2088659 - RNA, 19 nt, Homo sapiens
  misc_RNA (1)...(19): siRNA sense strand
agacagccuugcucucuaa

SEQ ID NO: 2088660 - RNA, 19 nt, Homo sapiens
  misc_RNA (1)...(19): siRNA sense strand
gacaaggucuccaucucuu

SEQ ID NO: 2088661 - RNA, 19 nt, Homo sapiens
  misc_RNA (1)...(19): siRNA sense strand
ugaagaugauggaggcuuu

SEQ ID NO: 2088662 - RNA, 19 nt, Homo sapiens
  misc_RNA (1)...(19): siRNA sense strand
gaaggagacaggcgcauga

SEQ ID NO: 2088663 - RNA, 19 nt, Homo sapiens
  misc_RNA (1)...(19): siRNA sense strand
caugaaagcgacugcauuu

SEQ ID NO: 2088664 - RNA, 19 nt, Homo sapiens
  misc_RNA (1)...(19): siRNA sense strand
gaaaguguucgucugcaaa

SEQ ID NO: 2088665 - RNA, 19 nt, Homo sapiens
  misc_RNA (1)...(19): siRNA sense strand
gagacucccgaaauauuua

SEQ ID NO: 2088666 - RNA, 19 nt, Homo sapiens
  misc_RNA (1)...(19): siRNA sense strand
ggacccugcuucugccaaa

SEQ ID NO: 2088667 - RNA, 19 nt, Homo sapiens
  misc_RNA (1)...(19): siRNA sense strand
ggugggagcucuguuaagu

SEQ ID NO: 2088668 - RNA, 19 nt, Homo sapiens
  misc_RNA (1)...(19): siRNA sense strand
gcaaagcagauucuucuuc

SEQ ID NO: 2088669 - RNA, 19 nt, Homo sapiens
  misc_RNA (1)...(19): siRNA sense strand
cauggucccugucugcuaa

SEQ ID NO: 2088670 - RNA, 19 nt, Homo sapiens
  misc_RNA (1)...(19): siRNA sense strand
caugacaccucacgugguu

SEQ ID NO: 2088671 - RNA, 19 nt, Homo sapiens
  misc_RNA (1)...(19): siRNA sense strand
gaaauuuggcuuggauuau

SEQ ID NO: 2088672 - RNA, 19 nt, Homo sapiens
  misc_RNA (1)...(19): siRNA sense strand
agacaaagcuuggguucug

SEQ ID NO: 2088673 - RNA, 19 nt, Homo sapiens
  misc_RNA (1)...(19): siRNA sense strand
gggaagcagugucuaugga

SEQ ID NO: 2088674 - RNA, 19 nt, Homo sapiens
  misc_RNA (1)...(19): siRNA sense strand
acagaaauguacuaugaug

SEQ ID NO: 2088675 - RNA, 19 nt, Homo sapiens
  misc_RNA (1)...(19): siRNA sense strand
ugaaauuuggcuuggauua

SEQ ID NO: 2088676 - RNA, 19 nt, Homo sapiens
  misc_RNA (1)...(19): siRNA sense strand
ggaccgaguucaugaagac

SEQ ID NO: 2088677 - RNA, 19 nt, Homo sapiens
  misc_RNA (1)...(19): siRNA sense strand
gaaagggcauuaaaaucuu

SEQ ID NO: 2088678 - RNA, 19 nt, Homo sapiens
  misc_RNA (1)...(19): siRNA sense strand
ggagcucuguuaagucugu

SEQ ID NO: 2088679 - RNA, 19 nt, Homo sapiens
  misc_RNA (1)...(19): siRNA sense strand
cagggaagcauuacguuaa

SEQ ID NO: 2088680 - RNA, 19 nt, Homo sapiens
  misc_RNA (1)...(19): siRNA sense strand
gcauucagguguguccauu

SEQ ID NO: 2088681 - RNA, 19 nt, Homo sapiens
  misc_RNA (1)...(19): siRNA sense strand
gggcuguccuucuucaaau

SEQ ID NO: 2088682 - RNA, 19 nt, Homo sapiens
  misc_RNA (1)...(19): siRNA sense strand
ggagaaaggagugaagaug

SEQ ID NO: 2088683 - RNA, 19 nt, Homo sapiens
  misc_RNA (1)...(19): siRNA sense strand
ggaauucucagucaaagag

SEQ ID NO: 2088684 - RNA, 19 nt, Homo sapiens
  misc_RNA (1)...(19): siRNA sense strand
aagagcagcuugucaccaa

SEQ ID NO: 2088685 - RNA, 19 nt, Homo sapiens
  misc_RNA (1)...(19): siRNA sense strand
gcagccaaaugcaaauaca

SEQ ID NO: 2088686 - RNA, 19 nt, Homo sapiens
  misc_RNA (1)...(19): siRNA sense strand
agacuauugugucaaagaa

SEQ ID NO: 2088687 - RNA, 19 nt, Homo sapiens
  misc_RNA (1)...(19): siRNA sense strand
gcaggcagcgacaagauug

SEQ ID NO: 2088688 - RNA, 19 nt, Homo sapiens
  misc_RNA (1)...(19): siRNA sense strand
augaagaccucaaccauuc

SEQ ID NO: 2088689 - RNA, 19 nt, Homo sapiens
  misc_RNA (1)...(19): siRNA sense strand
uggaaggcguguucaaaga

SEQ ID NO: 2088690 - RNA, 19 nt, Homo sapiens
  misc_RNA (1)...(19): siRNA sense strand
agaaaggagugaagaugau

SEQ ID NO: 2088691 - RNA, 19 nt, Homo sapiens
  misc_RNA (1)...(19): siRNA sense strand
ggaguuugccaucgcauug

SEQ ID NO: 2088692 - RNA, 19 nt, Homo sapiens
  misc_RNA (1)...(19): siRNA sense strand
uggcuuggauuaucauaga

SEQ ID NO: 2088693 - RNA, 19 nt, Homo sapiens
  misc_RNA (1)...(19): siRNA sense strand
cuuugagacucccgaaaua

SEQ ID NO: 2088694 - RNA, 19 nt, Homo sapiens
  misc_RNA (1)...(19): siRNA sense strand
ggaagcagugucuauggaa

SEQ ID NO: 2088695 - RNA, 19 nt, Homo sapiens
  misc_RNA (1)...(19): siRNA sense strand
ggacgacgaggcagagaga

SEQ ID NO: 2088696 - RNA, 19 nt, Homo sapiens
  misc_RNA (1)...(19): siRNA sense strand
ggagucaucccuuucaagu

SEQ ID NO: 2088697 - RNA, 19 nt, Homo sapiens
  misc_RNA (1)...(19): siRNA sense strand
aaagggagcgucaucauca

SEQ ID NO: 2088698 - RNA, 19 nt, Homo sapiens
  misc_RNA (1)...(19): siRNA sense strand
ccacugaucagauuguguu

SEQ ID NO: 2088699 - RNA, 19 nt, Homo sapiens
  misc_RNA (1)...(19): siRNA sense strand
cagacgaccuggaaacagu

SEQ ID NO: 2088700 - RNA, 19 nt, Homo sapiens
  misc_RNA (1)...(19): siRNA sense strand
gcuggugggagcucuguua

SEQ ID NO: 2088701 - RNA, 19 nt, Homo sapiens
  misc_RNA (1)...(19): siRNA sense strand
gaagagggacagcaagucu

SEQ ID NO: 2088702 - RNA, 19 nt, Homo sapiens
  misc_RNA (1)...(19): siRNA sense strand
gacaaagcuuggguucuga

SEQ ID NO: 2088703 - RNA, 19 nt, Homo sapiens
  misc_RNA (1)...(19): siRNA sense strand
gaaccuuucuagcaguuac

SEQ ID NO: 2088704 - RNA, 19 nt, Homo sapiens
  misc_RNA (1)...(19): siRNA sense strand
uggcacugcucaugugaaa

SEQ ID NO: 2088705 - RNA, 19 nt, Homo sapiens
  misc_RNA (1)...(19): siRNA sense strand
ugagacucccgaaauauuu

SEQ ID NO: 2088706 - RNA, 19 nt, Homo sapiens
  misc_RNA (1)...(19): siRNA sense strand
ggaaacaguccaugaaagc

SEQ ID NO: 2088707 - RNA, 19 nt, Homo sapiens
  misc_RNA (1)...(19): siRNA sense strand
caggcucacucgcaaagaa

SEQ ID NO: 2088708 - RNA, 19 nt, Homo sapiens
  misc_RNA (1)...(19): siRNA sense strand
cagagcagcuggaguuugc

SEQ ID NO: 2088709 - RNA, 19 nt, Homo sapiens
  misc_RNA (1)...(19): siRNA sense strand
acaacaaccuaaaccacuu

SEQ ID NO: 2088710 - RNA, 19 nt, Homo sapiens
  misc_RNA (1)...(19): siRNA sense strand
ugaaggaauucucagucaa

SEQ ID NO: 2088711 - RNA, 19 nt, Homo sapiens
  misc_RNA (1)...(19): siRNA sense strand
aaagagauuucggcaggaa

SEQ ID NO: 2088712 - RNA, 19 nt, Homo sapiens
  misc_RNA (1)...(19): siRNA sense strand
cagaugcgcuccaauucuc

SEQ ID NO: 2088713 - RNA, 19 nt, Homo sapiens
  misc_RNA (1)...(19): siRNA sense strand
cagugucuauggaaacaaa

SEQ ID NO: 2088714 - RNA, 19 nt, Homo sapiens
  misc_RNA (1)...(19): siRNA sense strand
gaccucaaccauucaguga

SEQ ID NO: 2088715 - RNA, 19 nt, Homo sapiens
  misc_RNA (1)...(19): siRNA sense strand
gaaaggagugaagaugaug

SEQ ID NO: 2088716 - RNA, 19 nt, Homo sapiens
  misc_RNA (1)...(19): siRNA sense strand
uucagaacauggucaaauu

SEQ ID NO: 2088717 - RNA, 19 nt, Homo sapiens
  misc_RNA (1)...(19): siRNA sense strand
caugaagaccucaaccauu

SEQ ID NO: 2088718 - RNA, 19 nt, Homo sapiens
  misc_RNA (1)...(19): siRNA sense strand
ggacaaggagacaagagau

SEQ ID NO: 2088719 - RNA, 19 nt, Homo sapiens
  misc_RNA (1)...(19): siRNA sense strand
ccuaaaccacuugaaauuu

SEQ ID NO: 2088720 - RNA, 19 nt, Homo sapiens
  misc_RNA (1)...(19): siRNA sense strand
cgaaauauuuaggccugaa

SEQ ID NO: 2088721 - RNA, 19 nt, Homo sapiens
  misc_RNA (1)...(19): siRNA sense strand
aaauuuggcuuggauuauc

SEQ ID NO: 2088722 - RNA, 19 nt, Homo sapiens
  misc_RNA (1)...(19): siRNA sense strand
uuaagucugucuguaagaa

SEQ ID NO: 2088723 - RNA, 19 nt, Homo sapiens
  misc_RNA (1)...(19): siRNA sense strand
cagcaaagcagauucuucu

SEQ ID NO: 2088724 - RNA, 19 nt, Homo sapiens
  misc_RNA (1)...(19): siRNA sense strand
aaccagagagcacaacuaa

SEQ ID NO: 2088725 - RNA, 19 nt, Homo sapiens
  misc_RNA (1)...(19): siRNA sense strand
ucaacucgaccauuuguga

SEQ ID NO: 2088726 - RNA, 19 nt, Homo sapiens
  misc_RNA (1)...(19): siRNA sense strand
caaggcaaauguucucacu

SEQ ID NO: 2088727 - RNA, 19 nt, Homo sapiens
  misc_RNA (1)...(19): siRNA sense strand
gacaggcgcaugaaacuuc

SEQ ID NO: 2088728 - RNA, 19 nt, Homo sapiens
  misc_RNA (1)...(19): siRNA sense strand
gcaaagggagcgucaucau

SEQ ID NO: 2088729 - RNA, 19 nt, Homo sapiens
  misc_RNA (1)...(19): siRNA sense strand
gacaaggagacaagagauu

SEQ ID NO: 2088730 - RNA, 19 nt, Homo sapiens
  misc_RNA (1)...(19): siRNA sense strand
ggaagagggugauaaauga

SEQ ID NO: 2088731 - RNA, 19 nt, Homo sapiens
  misc_RNA (1)...(19): siRNA sense strand
ggaaagcgguuguagaaaa

SEQ ID NO: 2088732 - RNA, 19 nt, Homo sapiens
  misc_RNA (1)...(19): siRNA sense strand
cuacaaacccuucaacuug

SEQ ID NO: 2088733 - RNA, 19 nt, Homo sapiens
  misc_RNA (1)...(19): siRNA sense strand
gaaaugugaugcccaagac

SEQ ID NO: 2088734 - RNA, 19 nt, Homo sapiens
  misc_RNA (1)...(19): siRNA sense strand
ucaaacguguugugacuga

SEQ ID NO: 2088735 - RNA, 19 nt, Homo sapiens
  misc_RNA (1)...(19): siRNA sense strand
ggaaauggccaaaguacag

SEQ ID NO: 2088736 - RNA, 19 nt, Homo sapiens
  misc_RNA (1)...(19): siRNA sense strand
gaacaggaagagggugaua

SEQ ID NO: 2088737 - RNA, 19 nt, Homo sapiens
  misc_RNA (1)...(19): siRNA sense strand
ggacucauccucgcauuga

SEQ ID NO: 2088738 - RNA, 19 nt, Homo sapiens
  misc_RNA (1)...(19): siRNA sense strand
gcaaauaaccauggagaag

SEQ ID NO: 2088739 - RNA, 19 nt, Homo sapiens
  misc_RNA (1)...(19): siRNA sense strand
caaauaaccauggagaaga

SEQ ID NO: 2088740 - RNA, 19 nt, Homo sapiens
  misc_RNA (1)...(19): siRNA sense strand
gaacuccguuaguggcaau

SEQ ID NO: 2088741 - RNA, 19 nt, Homo sapiens
  misc_RNA (1)...(19): siRNA sense strand
gagcaaaggucggacucau

SEQ ID NO: 2088742 - RNA, 19 nt, Homo sapiens
  misc_RNA (1)...(19): siRNA sense strand
ggcgguggcuggaaagaug

SEQ ID NO: 2088743 - RNA, 19 nt, Homo sapiens
  misc_RNA (1)...(19): siRNA sense strand
ccagggccaucucugacua

SEQ ID NO: 2088744 - RNA, 19 nt, Homo sapiens
  misc_RNA (1)...(19): siRNA sense strand
gccaaggacaucaaacuga

SEQ ID NO: 2088745 - RNA, 19 nt, Homo sapiens
  misc_RNA (1)...(19): siRNA sense strand
ugggaaagcgguuguagaa

SEQ ID NO: 2088746 - RNA, 19 nt, Homo sapiens
  misc_RNA (1)...(19): siRNA sense strand
gcguagagccgcacuucuu

SEQ ID NO: 2088747 - RNA, 19 nt, Homo sapiens
  misc_RNA (1)...(19): siRNA sense strand
aucaggagcuucaagagaa

SEQ ID NO: 2088748 - RNA, 19 nt, Homo sapiens
  misc_RNA (1)...(19): siRNA sense strand
ugauugugguggugagaaa

SEQ ID NO: 2088749 - RNA, 19 nt, Homo sapiens
  misc_RNA (1)...(19): siRNA sense strand
gagaugaucacggcucaga

SEQ ID NO: 2088750 - RNA, 19 nt, Homo sapiens
  misc_RNA (1)...(19): siRNA sense strand
gaaagcgguuguagaaaag

SEQ ID NO: 2088751 - RNA, 19 nt, Homo sapiens
  misc_RNA (1)...(19): siRNA sense strand
uggccaaaguacaggauuu

SEQ ID NO: 2088752 - RNA, 19 nt, Homo sapiens
  misc_RNA (1)...(19): siRNA sense strand
ccucaaacguguugugacu

SEQ ID NO: 2088753 - RNA, 19 nt, Homo sapiens
  misc_RNA (1)...(19): siRNA sense strand
caucaggagcuucaagaga

SEQ ID NO: 2088754 - RNA, 19 nt, Homo sapiens
  misc_RNA (1)...(19): siRNA sense strand
acaggaagagggugauaaa

SEQ ID NO: 2088755 - RNA, 19 nt, Homo sapiens
  misc_RNA (1)...(19): siRNA sense strand
gagaagacuccaaguuacu

SEQ ID NO: 2088756 - RNA, 19 nt, Homo sapiens
  misc_RNA (1)...(19): siRNA sense strand
aggaagagggugauaaaug

SEQ ID NO: 2088757 - RNA, 19 nt, Homo sapiens
  misc_RNA (1)...(19): siRNA sense strand
ggguuggagugguacagaa

SEQ ID NO: 2088758 - RNA, 19 nt, Homo sapiens
  misc_RNA (1)...(19): siRNA sense strand
gaccgaaggcaggaggaua

SEQ ID NO: 2088759 - RNA, 19 nt, Homo sapiens
  misc_RNA (1)...(19): siRNA sense strand
aaaagggguuggaguggua

SEQ ID NO: 2088760 - RNA, 19 nt, Homo sapiens
  misc_RNA (1)...(19): siRNA sense strand
ugaccagggccaucucuga

SEQ ID NO: 2088761 - RNA, 19 nt, Homo sapiens
  misc_RNA (1)...(19): siRNA sense strand
ugugugcaccugugauuaa

SEQ ID NO: 2088762 - RNA, 19 nt, Homo sapiens
  misc_RNA (1)...(19): siRNA sense strand
aaauaaccauggagaagac

SEQ ID NO: 2088763 - RNA, 19 nt, Homo sapiens
  misc_RNA (1)...(19): siRNA sense strand
ucccagauccucuuuguca

SEQ ID NO: 2088764 - RNA, 19 nt, Homo sapiens
  misc_RNA (1)...(19): siRNA sense strand
ggagugccauucgaauagg

SEQ ID NO: 2088765 - RNA, 19 nt, Homo sapiens
  misc_RNA (1)...(19): siRNA sense strand
caaaguacaggauuuucua

SEQ ID NO: 2088766 - RNA, 19 nt, Homo sapiens
  misc_RNA (1)...(19): siRNA sense strand
ucuacaaacccuucaacuu

SEQ ID NO: 2088767 - RNA, 19 nt, Homo sapiens
  misc_RNA (1)...(19): siRNA sense strand
gggaaagcgguuguagaaa

SEQ ID NO: 2088768 - RNA, 19 nt, Homo sapiens
  misc_RNA (1)...(19): siRNA sense strand
ccgaggugcuuaggcaaga

SEQ ID NO: 2088769 - RNA, 19 nt, Homo sapiens
  misc_RNA (1)...(19): siRNA sense strand
agaaaugugaugcccaaga

SEQ ID NO: 2088770 - RNA, 19 nt, Homo sapiens
  misc_RNA (1)...(19): siRNA sense strand
ggagugguacagaaaugug

SEQ ID NO: 2088771 - RNA, 19 nt, Homo sapiens
  misc_RNA (1)...(19): siRNA sense strand
ccaagcgcauucacuccau

SEQ ID NO: 2088772 - RNA, 19 nt, Homo sapiens
  misc_RNA (1)...(19): siRNA sense strand
cugaggaaauucuacaaac

SEQ ID NO: 2088773 - RNA, 19 nt, Homo sapiens
  misc_RNA (1)...(19): siRNA sense strand
ucucccagauccucuuugu

SEQ ID NO: 2088774 - RNA, 19 nt, Homo sapiens
  misc_RNA (1)...(19): siRNA sense strand
gguuggagugguacagaaa

SEQ ID NO: 2088775 - RNA, 19 nt, Homo sapiens
  misc_RNA (1)...(19): siRNA sense strand
cuaaagaagccagaagaca

SEQ ID NO: 2088776 - RNA, 19 nt, Homo sapiens
  misc_RNA (1)...(19): siRNA sense strand
gccuaaagaagccagaaga

SEQ ID NO: 2088777 - RNA, 19 nt, Homo sapiens
  misc_RNA (1)...(19): siRNA sense strand
gagugguacagaaauguga

SEQ ID NO: 2088778 - RNA, 19 nt, Homo sapiens
  misc_RNA (1)...(19): siRNA sense strand
ggcaaauaaccauggagaa

SEQ ID NO: 2088779 - RNA, 19 nt, Homo sapiens
  misc_RNA (1)...(19): siRNA sense strand
gggaaauggccaaaguaca

SEQ ID NO: 2088780 - RNA, 19 nt, Homo sapiens
  misc_RNA (1)...(19): siRNA sense strand
cgaagaggcgcaggugugu

SEQ ID NO: 2088781 - RNA, 19 nt, Homo sapiens
  misc_RNA (1)...(19): siRNA sense strand
uccacagacugaggaaauu

SEQ ID NO: 2088782 - RNA, 19 nt, Homo sapiens
  misc_RNA (1)...(19): siRNA sense strand
cuggagugccauucgaaua

SEQ ID NO: 2088783 - RNA, 19 nt, Homo sapiens
  misc_RNA (1)...(19): siRNA sense strand
ugaggaaauucuacaaacc

SEQ ID NO: 2088784 - RNA, 19 nt, Homo sapiens
  misc_RNA (1)...(19): siRNA sense strand
gaagcagaaaguguuguca

SEQ ID NO: 2088785 - RNA, 19 nt, Homo sapiens
  misc_RNA (1)...(19): siRNA sense strand
ggccaaggacaucaaacug

SEQ ID NO: 2088786 - RNA, 19 nt, Homo sapiens
  misc_RNA (1)...(19): siRNA sense strand
gcuggaaagauggaaguug

SEQ ID NO: 2088787 - RNA, 19 nt, Homo sapiens
  misc_RNA (1)...(19): siRNA sense strand
gugaugggacagagggaaa

SEQ ID NO: 2088788 - RNA, 19 nt, Homo sapiens
  misc_RNA (1)...(19): siRNA sense strand
ccacagacugaggaaauuc

SEQ ID NO: 2088789 - RNA, 19 nt, Homo sapiens
  misc_RNA (1)...(19): siRNA sense strand
ggguucccuugccuaaaga

SEQ ID NO: 2088790 - RNA, 19 nt, Homo sapiens
  misc_RNA (1)...(19): siRNA sense strand
gaacuuagcuggcaagaaa

SEQ ID NO: 2088791 - RNA, 19 nt, Homo sapiens
  misc_RNA (1)...(19): siRNA sense strand
gaaaggauccucuuaacua

SEQ ID NO: 2088792 - RNA, 19 nt, Homo sapiens
  misc_RNA (1)...(19): siRNA sense strand
ggaaagcuauucacucuga

SEQ ID NO: 2088793 - RNA, 19 nt, Homo sapiens
  misc_RNA (1)...(19): siRNA sense strand
ccaagaacgugaagcuuua

SEQ ID NO: 2088794 - RNA, 19 nt, Homo sapiens
  misc_RNA (1)...(19): siRNA sense strand
ggacagcgcuuggucauug

SEQ ID NO: 2088795 - RNA, 19 nt, Homo sapiens
  misc_RNA (1)...(19): siRNA sense strand
gaagaagccuggaacuuag

SEQ ID NO: 2088796 - RNA, 19 nt, Homo sapiens
  misc_RNA (1)...(19): siRNA sense strand
gaaaggaauuugucugcaa

SEQ ID NO: 2088797 - RNA, 19 nt, Homo sapiens
  misc_RNA (1)...(19): siRNA sense strand
caucuucaauggcaaguua

SEQ ID NO: 2088798 - RNA, 19 nt, Homo sapiens
  misc_RNA (1)...(19): siRNA sense strand
gugcagauuucaaacauaa

SEQ ID NO: 2088799 - RNA, 19 nt, Homo sapiens
  misc_RNA (1)...(19): siRNA sense strand
ugagaaacaugaugaguau

SEQ ID NO: 2088800 - RNA, 19 nt, Homo sapiens
  misc_RNA (1)...(19): siRNA sense strand
gaaggacaaugcugagguu

SEQ ID NO: 2088801 - RNA, 19 nt, Homo sapiens
  misc_RNA (1)...(19): siRNA sense strand
gcagaggaaccggauauua

SEQ ID NO: 2088802 - RNA, 19 nt, Homo sapiens
  misc_RNA (1)...(19): siRNA sense strand
uaaaugagcuccccgagua

SEQ ID NO: 2088803 - RNA, 19 nt, Homo sapiens
  misc_RNA (1)...(19): siRNA sense strand
agaagaagccuggaacuua

SEQ ID NO: 2088804 - RNA, 19 nt, Homo sapiens
  misc_RNA (1)...(19): siRNA sense strand
ugaucaaacuguggaauua

SEQ ID NO: 2088805 - RNA, 19 nt, Homo sapiens
  misc_RNA (1)...(19): siRNA sense strand
aaacaacacuucugaggau

SEQ ID NO: 2088806 - RNA, 19 nt, Homo sapiens
  misc_RNA (1)...(19): siRNA sense strand
gcacacacuucacgaguca

SEQ ID NO: 2088807 - RNA, 19 nt, Homo sapiens
  misc_RNA (1)...(19): siRNA sense strand
caacagaaaccucaucuuc

SEQ ID NO: 2088808 - RNA, 19 nt, Homo sapiens
  misc_RNA (1)...(19): siRNA sense strand
ugacagacuuugaugagaa

SEQ ID NO: 2088809 - RNA, 19 nt, Homo sapiens
  misc_RNA (1)...(19): siRNA sense strand
ggacaucacaaugcuguua

SEQ ID NO: 2088810 - RNA, 19 nt, Homo sapiens
  misc_RNA (1)...(19): siRNA sense strand
cagaggaaccggauauuaa

SEQ ID NO: 2088811 - RNA, 19 nt, Homo sapiens
  misc_RNA (1)...(19): siRNA sense strand
acagaaaccucaucuucaa

SEQ ID NO: 2088812 - RNA, 19 nt, Homo sapiens
  misc_RNA (1)...(19): siRNA sense strand
gcaaagcuuucuucacaag

SEQ ID NO: 2088813 - RNA, 19 nt, Homo sapiens
  misc_RNA (1)...(19): siRNA sense strand
gacacgaucuuauucacaa

SEQ ID NO: 2088814 - RNA, 19 nt, Homo sapiens
  misc_RNA (1)...(19): siRNA sense strand
ggaucaagauguccagaug

SEQ ID NO: 2088815 - RNA, 19 nt, Homo sapiens
  misc_RNA (1)...(19): siRNA sense strand
gcaccaacaucaccaugga

SEQ ID NO: 2088816 - RNA, 19 nt, Homo sapiens
  misc_RNA (1)...(19): siRNA sense strand
gcggaaagcuauucacucu

SEQ ID NO: 2088817 - RNA, 19 nt, Homo sapiens
  misc_RNA (1)...(19): siRNA sense strand
ccaccaaaguccacaguga

SEQ ID NO: 2088818 - RNA, 19 nt, Homo sapiens
  misc_RNA (1)...(19): siRNA sense strand
gaacuuaguguaaaucuac

SEQ ID NO: 2088819 - RNA, 19 nt, Homo sapiens
  misc_RNA (1)...(19): siRNA sense strand
ggaacuuaguguaaaucua

SEQ ID NO: 2088820 - RNA, 19 nt, Homo sapiens
  misc_RNA (1)...(19): siRNA sense strand
ggacuauucugaugauuuu

SEQ ID NO: 2088821 - RNA, 19 nt, Homo sapiens
  misc_RNA (1)...(19): siRNA sense strand
gcaacugccacuuugauuu

SEQ ID NO: 2088822 - RNA, 19 nt, Homo sapiens
  misc_RNA (1)...(19): siRNA sense strand
gaagugcccuccuguccau

SEQ ID NO: 2088823 - RNA, 19 nt, Homo sapiens
  misc_RNA (1)...(19): siRNA sense strand
caauaaaucucggauacau

SEQ ID NO: 2088824 - RNA, 19 nt, Homo sapiens
  misc_RNA (1)...(19): siRNA sense strand
gagcaagguuucucugucu

SEQ ID NO: 2088825 - RNA, 19 nt, Homo sapiens
  misc_RNA (1)...(19): siRNA sense strand
caagauguccagaugauga

SEQ ID NO: 2088826 - RNA, 19 nt, Homo sapiens
  misc_RNA (1)...(19): siRNA sense strand
cuaaggacauggugacaga

SEQ ID NO: 2088827 - RNA, 19 nt, Homo sapiens
  misc_RNA (1)...(19): siRNA sense strand
aaacacaccaccaucagua

SEQ ID NO: 2088828 - RNA, 19 nt, Homo sapiens
  misc_RNA (1)...(19): siRNA sense strand
gagaagagcgagcaacuag

SEQ ID NO: 2088829 - RNA, 19 nt, Homo sapiens
  misc_RNA (1)...(19): siRNA sense strand
agaucaagguucggaauua

SEQ ID NO: 2088830 - RNA, 19 nt, Homo sapiens
  misc_RNA (1)...(19): siRNA sense strand
ugaaugacacaaagcuuua

SEQ ID NO: 2088831 - RNA, 19 nt, Homo sapiens
  misc_RNA (1)...(19): siRNA sense strand
ggacgaagaacucuguuuc

SEQ ID NO: 2088832 - RNA, 19 nt, Homo sapiens
  misc_RNA (1)...(19): siRNA sense strand
gacagacuuugaugagaaa

SEQ ID NO: 2088833 - RNA, 19 nt, Homo sapiens
  misc_RNA (1)...(19): siRNA sense strand
ggacauggugacagacuuu

SEQ ID NO: 2088834 - RNA, 19 nt, Homo sapiens
  misc_RNA (1)...(19): siRNA sense strand
aaaggauccucuuaacuau

SEQ ID NO: 2088835 - RNA, 19 nt, Homo sapiens
  misc_RNA (1)...(19): siRNA sense strand
caaaggcacccaugagaug

SEQ ID NO: 2088836 - RNA, 19 nt, Homo sapiens
  misc_RNA (1)...(19): siRNA sense strand
gccaagaacgugaagcuuu

SEQ ID NO: 2088837 - RNA, 19 nt, Homo sapiens
  misc_RNA (1)...(19): siRNA sense strand
cacaaccgaugaugacauu

SEQ ID NO: 2088838 - RNA, 19 nt, Homo sapiens
  misc_RNA (1)...(19): siRNA sense strand
gaucagaauuuggaacuac

SEQ ID NO: 2088839 - RNA, 19 nt, Homo sapiens
  misc_RNA (1)...(19): siRNA sense strand
ccaguuagaggaauauuug

SEQ ID NO: 2088840 - RNA, 19 nt, Homo sapiens
  misc_RNA (1)...(19): siRNA sense strand
uaacuucucccuucugaau

SEQ ID NO: 2088841 - RNA, 19 nt, Homo sapiens
  misc_RNA (1)...(19): siRNA sense strand
ggaagcagagcguuguuga

SEQ ID NO: 2088842 - RNA, 19 nt, Homo sapiens
  misc_RNA (1)...(19): siRNA sense strand
gagaaacacaccaccauca

SEQ ID NO: 2088843 - RNA, 19 nt, Homo sapiens
  misc_RNA (1)...(19): siRNA sense strand
gaugagcuccugcagcaaa

SEQ ID NO: 2088844 - RNA, 19 nt, Homo sapiens
  misc_RNA (1)...(19): siRNA sense strand
caagcagcguggacaaaga

SEQ ID NO: 2088845 - RNA, 19 nt, Homo sapiens
  misc_RNA (1)...(19): siRNA sense strand
augcaaagcuuucuucaca

SEQ ID NO: 2088846 - RNA, 19 nt, Homo sapiens
  misc_RNA (1)...(19): siRNA sense strand
guaugacucuauugaggaa

SEQ ID NO: 2088847 - RNA, 19 nt, Homo sapiens
  misc_RNA (1)...(19): siRNA sense strand
gaaaucaucaccgcggaaa

SEQ ID NO: 2088848 - RNA, 19 nt, Homo sapiens
  misc_RNA (1)...(19): siRNA sense strand
ggugcagauuucaaacaua

SEQ ID NO: 2088849 - RNA, 19 nt, Homo sapiens
  misc_RNA (1)...(19): siRNA sense strand
ugauggcgaucuugacauu

SEQ ID NO: 2088850 - RNA, 19 nt, Homo sapiens
  misc_RNA (1)...(19): siRNA sense strand
gaggacaaacagagaauga

SEQ ID NO: 2088851 - RNA, 19 nt, Homo sapiens
  misc_RNA (1)...(19): siRNA sense strand
ccaaggagcaaguaucaga

SEQ ID NO: 2088852 - RNA, 19 nt, Homo sapiens
  misc_RNA (1)...(19): siRNA sense strand
gcagaaggaccaccagcaa

SEQ ID NO: 2088853 - RNA, 19 nt, Homo sapiens
  misc_RNA (1)...(19): siRNA sense strand
cgacuggacucagaaagau

SEQ ID NO: 2088854 - RNA, 19 nt, Homo sapiens
  misc_RNA (1)...(19): siRNA sense strand
gaggauggcaccagaaauc

SEQ ID NO: 2088855 - RNA, 19 nt, Homo sapiens
  misc_RNA (1)...(19): siRNA sense strand
ccaagcuccugcuguauuc

SEQ ID NO: 2088856 - RNA, 19 nt, Homo sapiens
  misc_RNA (1)...(19): siRNA sense strand
gaagagcgagcaacuagag

SEQ ID NO: 2088857 - RNA, 19 nt, Homo sapiens
  misc_RNA (1)...(19): siRNA sense strand
gaggaucguccgcaggaua

SEQ ID NO: 2088858 - RNA, 19 nt, Homo sapiens
  misc_RNA (1)...(19): siRNA sense strand
gcaaaggcacccaugagau

SEQ ID NO: 2088859 - RNA, 19 nt, Homo sapiens
  misc_RNA (1)...(19): siRNA sense strand
gaaaccucaucuucaaugg

SEQ ID NO: 2088860 - RNA, 19 nt, Homo sapiens
  misc_RNA (1)...(19): siRNA sense strand
gaucaagguucggaauuac

SEQ ID NO: 2088861 - RNA, 19 nt, Homo sapiens
  misc_RNA (1)...(19): siRNA sense strand
gggcagacgagaucaaaga

SEQ ID NO: 2088862 - RNA, 19 nt, Homo sapiens
  misc_RNA (1)...(19): siRNA sense strand
ccaccaaaccugagccaaa

SEQ ID NO: 2088863 - RNA, 19 nt, Homo sapiens
  misc_RNA (1)...(19): siRNA sense strand
guaaucaggccgaggauca

SEQ ID NO: 2088864 - RNA, 19 nt, Homo sapiens
  misc_RNA (1)...(19): siRNA sense strand
uacaauaaaucucggauac

SEQ ID NO: 2088865 - RNA, 19 nt, Homo sapiens
  misc_RNA (1)...(19): siRNA sense strand
ccucaacggaauagaaaua

SEQ ID NO: 2088866 - RNA, 19 nt, Homo sapiens
  misc_RNA (1)...(19): siRNA sense strand
ccucuuaacuauucaggau

SEQ ID NO: 2088867 - RNA, 19 nt, Homo sapiens
  misc_RNA (1)...(19): siRNA sense strand
ucaccggccuggagcugua

SEQ ID NO: 2088868 - RNA, 19 nt, Homo sapiens
  misc_RNA (1)...(19): siRNA sense strand
gugcaucuuugaaggagaa

SEQ ID NO: 2088869 - RNA, 19 nt, Homo sapiens
  misc_RNA (1)...(19): siRNA sense strand
gugaaccggugcagauuuc

SEQ ID NO: 2088870 - RNA, 19 nt, Homo sapiens
  misc_RNA (1)...(19): siRNA sense strand
ggaaccggauauuaaagca

SEQ ID NO: 2088871 - RNA, 19 nt, Homo sapiens
  misc_RNA (1)...(19): siRNA sense strand
ggaaaugugucuggcaaaa

SEQ ID NO: 2088872 - RNA, 19 nt, Homo sapiens
  misc_RNA (1)...(19): siRNA sense strand
ugacuugaaugacacaaag

SEQ ID NO: 2088873 - RNA, 19 nt, Homo sapiens
  misc_RNA (1)...(19): siRNA sense strand
gagaagaagccuggaacuu

SEQ ID NO: 2088874 - RNA, 19 nt, Homo sapiens
  misc_RNA (1)...(19): siRNA sense strand
aggaagacauacucucuga

SEQ ID NO: 2088875 - RNA, 19 nt, Homo sapiens
  misc_RNA (1)...(19): siRNA sense strand
gaucaagauguccagauga

SEQ ID NO: 2088876 - RNA, 19 nt, Homo sapiens
  misc_RNA (1)...(19): siRNA sense strand
ggagacacgaucuuauuca

SEQ ID NO: 2088877 - RNA, 19 nt, Homo sapiens
  misc_RNA (1)...(19): siRNA sense strand
ccaaaucucccaccaguac

SEQ ID NO: 2088878 - RNA, 19 nt, Homo sapiens
  misc_RNA (1)...(19): siRNA sense strand
uggacgaccugcuugugua

SEQ ID NO: 2088879 - RNA, 19 nt, Homo sapiens
  misc_RNA (1)...(19): siRNA sense strand
aagcagacccucccgauau

SEQ ID NO: 2088880 - RNA, 19 nt, Homo sapiens
  misc_RNA (1)...(19): siRNA sense strand
gcaaggaccccgugcaauu

SEQ ID NO: 2088881 - RNA, 19 nt, Homo sapiens
  misc_RNA (1)...(19): siRNA sense strand
gaggaauauuugagacugu

SEQ ID NO: 2088882 - RNA, 19 nt, Homo sapiens
  misc_RNA (1)...(19): siRNA sense strand
ggacaaugcugagguuuuc

SEQ ID NO: 2088883 - RNA, 19 nt, Homo sapiens
  misc_RNA (1)...(19): siRNA sense strand
aaccggauauuaaagcauu

SEQ ID NO: 2088884 - RNA, 19 nt, Homo sapiens
  misc_RNA (1)...(19): siRNA sense strand
ccagagcacuuuggagaca

SEQ ID NO: 2088885 - RNA, 19 nt, Homo sapiens
  misc_RNA (1)...(19): siRNA sense strand
ggagcccucucucauccaa

SEQ ID NO: 2088886 - RNA, 19 nt, Homo sapiens
  misc_RNA (1)...(19): siRNA sense strand
caaguuagacaaaggagau

SEQ ID NO: 2088887 - RNA, 19 nt, Homo sapiens
  misc_RNA (1)...(19): siRNA sense strand
ccaaaaccccucuggcuua

SEQ ID NO: 2088888 - RNA, 19 nt, Homo sapiens
  misc_RNA (1)...(19): siRNA sense strand
gaaacacaccaccaucagu

SEQ ID NO: 2088889 - RNA, 19 nt, Homo sapiens
  misc_RNA (1)...(19): siRNA sense strand
gugcaagcauggacuacga

SEQ ID NO: 2088890 - RNA, 19 nt, Homo sapiens
  misc_RNA (1)...(19): siRNA sense strand
uagaggagcuucuuaauaa

SEQ ID NO: 2088891 - RNA, 19 nt, Homo sapiens
  misc_RNA (1)...(19): siRNA sense strand
ggacacagguugaacauca

SEQ ID NO: 2088892 - RNA, 19 nt, Homo sapiens
  misc_RNA (1)...(19): siRNA sense strand
gcaaguguaucccaucauu

SEQ ID NO: 2088893 - RNA, 19 nt, Homo sapiens
  misc_RNA (1)...(19): siRNA sense strand
ggaacaagcucugcaaagu

SEQ ID NO: 2088894 - RNA, 19 nt, Homo sapiens
  misc_RNA (1)...(19): siRNA sense strand
aacaagcucugcaaaguua

SEQ ID NO: 2088895 - RNA, 19 nt, Homo sapiens
  misc_RNA (1)...(19): siRNA sense strand
gcaccaagguccaagacaa

SEQ ID NO: 2088896 - RNA, 19 nt, Homo sapiens
  misc_RNA (1)...(19): siRNA sense strand
gaaugacuauguaaugaug

SEQ ID NO: 2088897 - RNA, 19 nt, Homo sapiens
  misc_RNA (1)...(19): siRNA sense strand
ggccaaaccuuccagagaa

SEQ ID NO: 2088898 - RNA, 19 nt, Homo sapiens
  misc_RNA (1)...(19): siRNA sense strand
cgacuuugauggcuucuuu

SEQ ID NO: 2088899 - RNA, 19 nt, Homo sapiens
  misc_RNA (1)...(19): siRNA sense strand
gaacaagcucugcaaaguu

SEQ ID NO: 2088900 - RNA, 19 nt, Homo sapiens
  misc_RNA (1)...(19): siRNA sense strand
gaaagauggcgucaguuaa

SEQ ID NO: 2088901 - RNA, 19 nt, Homo sapiens
  misc_RNA (1)...(19): siRNA sense strand
uagaagauauuguggagaa

SEQ ID NO: 2088902 - RNA, 19 nt, Homo sapiens
  misc_RNA (1)...(19): siRNA sense strand
gaaagaugccacuggauga

SEQ ID NO: 2088903 - RNA, 19 nt, Homo sapiens
  misc_RNA (1)...(19): siRNA sense strand
cagccaaacuguugaauca

SEQ ID NO: 2088904 - RNA, 19 nt, Homo sapiens
  misc_RNA (1)...(19): siRNA sense strand
ucacagagguguugaaucg

SEQ ID NO: 2088905 - RNA, 19 nt, Homo sapiens
  misc_RNA (1)...(19): siRNA sense strand
gaugacaccaaacugauua

SEQ ID NO: 2088906 - RNA, 19 nt, Homo sapiens
  misc_RNA (1)...(19): siRNA sense strand
cagaaaguauucaacagaa

SEQ ID NO: 2088907 - RNA, 19 nt, Homo sapiens
  misc_RNA (1)...(19): siRNA sense strand
gaacucauguccaagaacu

SEQ ID NO: 2088908 - RNA, 19 nt, Homo sapiens
  misc_RNA (1)...(19): siRNA sense strand
gauguacaguuuaacaguu

SEQ ID NO: 2088909 - RNA, 19 nt, Homo sapiens
  misc_RNA (1)...(19): siRNA sense strand
uggacuaucugacaaguaa

SEQ ID NO: 2088910 - RNA, 19 nt, Homo sapiens
  misc_RNA (1)...(19): siRNA sense strand
ccagaaagauggcgucagu

SEQ ID NO: 2088911 - RNA, 19 nt, Homo sapiens
  misc_RNA (1)...(19): siRNA sense strand
agaaagauggcgucaguua

SEQ ID NO: 2088912 - RNA, 19 nt, Homo sapiens
  misc_RNA (1)...(19): siRNA sense strand
gagcaaaucauacagacuu

SEQ ID NO: 2088913 - RNA, 19 nt, Homo sapiens
  misc_RNA (1)...(19): siRNA sense strand
caccaagucucgacagauu

SEQ ID NO: 2088914 - RNA, 19 nt, Homo sapiens
  misc_RNA (1)...(19): siRNA sense strand
gcaaucacaccucuaauca

SEQ ID NO: 2088915 - RNA, 19 nt, Homo sapiens
  misc_RNA (1)...(19): siRNA sense strand
gcagaaaguauucaacaga

SEQ ID NO: 2088916 - RNA, 19 nt, Homo sapiens
  misc_RNA (1)...(19): siRNA sense strand
ggaauuugaggaguauuua

SEQ ID NO: 2088917 - RNA, 19 nt, Homo sapiens
  misc_RNA (1)...(19): siRNA sense strand
gcacuaggaaugacuaugu

SEQ ID NO: 2088918 - RNA, 19 nt, Homo sapiens
  misc_RNA (1)...(19): siRNA sense strand
gagcaaguguaucccauca

SEQ ID NO: 2088919 - RNA, 19 nt, Homo sapiens
  misc_RNA (1)...(19): siRNA sense strand
ucaggacaauuuagaaguu

SEQ ID NO: 2088920 - RNA, 19 nt, Homo sapiens
  misc_RNA (1)...(19): siRNA sense strand
guacaaccaaugaaagaaa

SEQ ID NO: 2088921 - RNA, 19 nt, Homo sapiens
  misc_RNA (1)...(19): siRNA sense strand
gauauuggacgucaggauu

SEQ ID NO: 2088922 - RNA, 19 nt, Homo sapiens
  misc_RNA (1)...(19): siRNA sense strand
ggcuuacucucacugguua

SEQ ID NO: 2088923 - RNA, 19 nt, Homo sapiens
  misc_RNA (1)...(19): siRNA sense strand
aagcaguucucaacaggua

SEQ ID NO: 2088924 - RNA, 19 nt, Homo sapiens
  misc_RNA (1)...(19): siRNA sense strand
gcccaucucuucaguugga

SEQ ID NO: 2088925 - RNA, 19 nt, Homo sapiens
  misc_RNA (1)...(19): siRNA sense strand
ucaacgaccugcgcuacua

SEQ ID NO: 2088926 - RNA, 19 nt, Homo sapiens
  misc_RNA (1)...(19): siRNA sense strand
gaugcaaucacaccucuaa

SEQ ID NO: 2088927 - RNA, 19 nt, Homo sapiens
  misc_RNA (1)...(19): siRNA sense strand
ggaguuggaugaugagacu

SEQ ID NO: 2088928 - RNA, 19 nt, Homo sapiens
  misc_RNA (1)...(19): siRNA sense strand
ggauaacaaugcccacaca

SEQ ID NO: 2088929 - RNA, 19 nt, Homo sapiens
  misc_RNA (1)...(19): siRNA sense strand
gagauagaggagcuucuua

SEQ ID NO: 2088930 - RNA, 19 nt, Homo sapiens
  misc_RNA (1)...(19): siRNA sense strand
gagagugaguauaucuguu

SEQ ID NO: 2088931 - RNA, 19 nt, Homo sapiens
  misc_RNA (1)...(19): siRNA sense strand
uggaggaguuggaugauga

SEQ ID NO: 2088932 - RNA, 19 nt, Homo sapiens
  misc_RNA (1)...(19): siRNA sense strand
aagguuacuucucuuguuu

SEQ ID NO: 2088933 - RNA, 19 nt, Homo sapiens
  misc_RNA (1)...(19): siRNA sense strand
ccacaagucccaugaucuu

SEQ ID NO: 2088934 - RNA, 19 nt, Homo sapiens
  misc_RNA (1)...(19): siRNA sense strand
aggagcagauggagaauga

SEQ ID NO: 2088935 - RNA, 19 nt, Homo sapiens
  misc_RNA (1)...(19): siRNA sense strand
gcacaguauugcagugaag

SEQ ID NO: 2088936 - RNA, 19 nt, Homo sapiens
  misc_RNA (1)...(19): siRNA sense strand
uuacuucucuuguuuggau

SEQ ID NO: 2088937 - RNA, 19 nt, Homo sapiens
  misc_RNA (1)...(19): siRNA sense strand
gggcugaucauguugaaga

SEQ ID NO: 2088938 - RNA, 19 nt, Homo sapiens
  misc_RNA (1)...(19): siRNA sense strand
agacuuuccucaacauguu

SEQ ID NO: 2088939 - RNA, 19 nt, Homo sapiens
  misc_RNA (1)...(19): siRNA sense strand
auugaaaccugaccucauu

SEQ ID NO: 2088940 - RNA, 19 nt, Homo sapiens
  misc_RNA (1)...(19): siRNA sense strand
acagagguguugaaucgaa

SEQ ID NO: 2088941 - RNA, 19 nt, Homo sapiens
  misc_RNA (1)...(19): siRNA sense strand
agagcuauaucgagaaguu

SEQ ID NO: 2088942 - RNA, 19 nt, Homo sapiens
  misc_RNA (1)...(19): siRNA sense strand
gggauuacaacaguuuaua

SEQ ID NO: 2088943 - RNA, 19 nt, Homo sapiens
  misc_RNA (1)...(19): siRNA sense strand
aaccuuaccuuacuuuauc

SEQ ID NO: 2088944 - RNA, 19 nt, Homo sapiens
  misc_RNA (1)...(19): siRNA sense strand
cagaagcuguaccacaaga

SEQ ID NO: 2088945 - RNA, 19 nt, Homo sapiens
  misc_RNA (1)...(19): siRNA sense strand
ccaguucagugccaucaug

SEQ ID NO: 2088946 - RNA, 19 nt, Homo sapiens
  misc_RNA (1)...(19): siRNA sense strand
gcuaucugcgugccacuua

SEQ ID NO: 2088947 - RNA, 19 nt, Homo sapiens
  misc_RNA (1)...(19): siRNA sense strand
ucacagucguggaaagguu

SEQ ID NO: 2088948 - RNA, 19 nt, Homo sapiens
  misc_RNA (1)...(19): siRNA sense strand
caggacaauuuagaaguuu

SEQ ID NO: 2088949 - RNA, 19 nt, Homo sapiens
  misc_RNA (1)...(19): siRNA sense strand
cuauggaauuugaggagua

SEQ ID NO: 2088950 - RNA, 19 nt, Homo sapiens
  misc_RNA (1)...(19): siRNA sense strand
auagaggagcuucuuaaua

SEQ ID NO: 2088951 - RNA, 19 nt, Homo sapiens
  misc_RNA (1)...(19): siRNA sense strand
gauagaggagcuucuuaau

SEQ ID NO: 2088952 - RNA, 19 nt, Homo sapiens
  misc_RNA (1)...(19): siRNA sense strand
ggagcuucuuaauaacuuu

SEQ ID NO: 2088953 - RNA, 19 nt, Homo sapiens
  misc_RNA (1)...(19): siRNA sense strand
ggaugacaccaaacugauu

SEQ ID NO: 2088954 - RNA, 19 nt, Homo sapiens
  misc_RNA (1)...(19): siRNA sense strand
gagauucugccuguacuuu

SEQ ID NO: 2088955 - RNA, 19 nt, Homo sapiens
  misc_RNA (1)...(19): siRNA sense strand
aaccugaccucauugaugu

SEQ ID NO: 2088956 - RNA, 19 nt, Homo sapiens
  misc_RNA (1)...(19): siRNA sense strand
aggaaugacuauguaauga

SEQ ID NO: 2088957 - RNA, 19 nt, Homo sapiens
  misc_RNA (1)...(19): siRNA sense strand
ggacugccaugcuguucca

SEQ ID NO: 2088958 - RNA, 19 nt, Homo sapiens
  misc_RNA (1)...(19): siRNA sense strand
gaauccaguucagauacaa

SEQ ID NO: 2088959 - RNA, 19 nt, Homo sapiens
  misc_RNA (1)...(19): siRNA sense strand
caagaacugugugccuaug

SEQ ID NO: 2088960 - RNA, 19 nt, Homo sapiens
  misc_RNA (1)...(19): siRNA sense strand
cacuaggaaugacuaugua

SEQ ID NO: 2088961 - RNA, 19 nt, Homo sapiens
  misc_RNA (1)...(19): siRNA sense strand
caagacaagcugcugcuau

SEQ ID NO: 2088962 - RNA, 19 nt, Homo sapiens
  misc_RNA (1)...(19): siRNA sense strand
acacucaucucuacuacca

SEQ ID NO: 2088963 - RNA, 19 nt, Homo sapiens
  misc_RNA (1)...(19): siRNA sense strand
gaaagguuggucaaaguca

SEQ ID NO: 2088964 - RNA, 19 nt, Homo sapiens
  misc_RNA (1)...(19): siRNA sense strand
ggaaugacuauguaaugau

SEQ ID NO: 2088965 - RNA, 19 nt, Homo sapiens
  misc_RNA (1)...(19): siRNA sense strand
ggagagugaguauaucugu

SEQ ID NO: 2088966 - RNA, 19 nt, Homo sapiens
  misc_RNA (1)...(19): siRNA sense strand
uaccauggaugcaaucaca

SEQ ID NO: 2088967 - RNA, 19 nt, Homo sapiens
  misc_RNA (1)...(19): siRNA sense strand
gcugcacgguucaaugaug

SEQ ID NO: 2088968 - RNA, 19 nt, Homo sapiens
  misc_RNA (1)...(19): siRNA sense strand
caaggaagcaguucucaac

SEQ ID NO: 2088969 - RNA, 19 nt, Homo sapiens
  misc_RNA (1)...(19): siRNA sense strand
gaacugugugccuauggaa

SEQ ID NO: 2088970 - RNA, 19 nt, Homo sapiens
  misc_RNA (1)...(19): siRNA sense strand
cgaauccaguucagauaca

SEQ ID NO: 2088971 - RNA, 19 nt, Homo sapiens
  misc_RNA (1)...(19): siRNA sense strand
gccaugcuguuccaguuug

SEQ ID NO: 2088972 - RNA, 19 nt, Homo sapiens
  misc_RNA (1)...(19): siRNA sense strand
gccacuggaugacaccaaa

SEQ ID NO: 2088973 - RNA, 19 nt, Homo sapiens
  misc_RNA (1)...(19): siRNA sense strand
ugaaacugcugugccauca

SEQ ID NO: 2088974 - RNA, 19 nt, Homo sapiens
  misc_RNA (1)...(19): siRNA sense strand
ggaguggcagcgguacuua

SEQ ID NO: 2088975 - RNA, 19 nt, Homo sapiens
  misc_RNA (1)...(19): siRNA sense strand
gccauguccugcaucaaug

SEQ ID NO: 2088976 - RNA, 19 nt, Homo sapiens
  misc_RNA (1)...(19): siRNA sense strand
agcagaagcuguaccacaa

SEQ ID NO: 2088977 - RNA, 19 nt, Homo sapiens
  misc_RNA (1)...(19): siRNA sense strand
acaccaagcagaagcugua

SEQ ID NO: 2088978 - RNA, 19 nt, Homo sapiens
  misc_RNA (1)...(19): siRNA sense strand
caucacaacuggagguacu

SEQ ID NO: 2088979 - RNA, 19 nt, Homo sapiens
  misc_RNA (1)...(19): siRNA sense strand
auacagacuuuccucaaca

SEQ ID NO: 2088980 - RNA, 19 nt, Homo sapiens
  misc_RNA (1)...(19): siRNA sense strand
cugaugagaugcugagcuu

SEQ ID NO: 2088981 - RNA, 19 nt, Homo sapiens
  misc_RNA (1)...(19): siRNA sense strand
agaugugacugaugagaug

SEQ ID NO: 2088982 - RNA, 19 nt, Homo sapiens
  misc_RNA (1)...(19): siRNA sense strand
aagacaagcugcugcuauc

SEQ ID NO: 2088983 - RNA, 19 nt, Homo sapiens
  misc_RNA (1)...(19): siRNA sense strand
guucaaugaugcccucaca

SEQ ID NO: 2088984 - RNA, 19 nt, Homo sapiens
  misc_RNA (1)...(19): siRNA sense strand
gaagagcaggcuagaagag

SEQ ID NO: 2088985 - RNA, 19 nt, Homo sapiens
  misc_RNA (1)...(19): siRNA sense strand
gugaagagcaggcuagaag

SEQ ID NO: 2088986 - RNA, 19 nt, Homo sapiens
  misc_RNA (1)...(19): siRNA sense strand
cuacuaccauggaugcaau

SEQ ID NO: 2088987 - RNA, 19 nt, Homo sapiens
  misc_RNA (1)...(19): siRNA sense strand
ucacugagcaaaucauaca

SEQ ID NO: 2088988 - RNA, 19 nt, Homo sapiens
  misc_RNA (1)...(19): siRNA sense strand
acaccaaacugauuaucca

SEQ ID NO: 2088989 - RNA, 19 nt, Homo sapiens
  misc_RNA (1)...(19): siRNA sense strand
gccaaaccuuccagagaau

SEQ ID NO: 2088990 - RNA, 19 nt, Homo sapiens
  misc_RNA (1)...(19): siRNA sense strand
uaaaugaacuggaaucuga

SEQ ID NO: 2088991 - RNA, 19 nt, Homo sapiens
  misc_RNA (1)...(19): siRNA sense strand
caagaagccugucauauau

SEQ ID NO: 2088992 - RNA, 19 nt, Homo sapiens
  misc_RNA (1)...(19): siRNA sense strand
gagaaggacuugcaaagau

SEQ ID NO: 2088993 - RNA, 19 nt, Homo sapiens
  misc_RNA (1)...(19): siRNA sense strand
acaagaagccugucauaua

SEQ ID NO: 2088994 - RNA, 19 nt, Homo sapiens
  misc_RNA (1)...(19): siRNA sense strand
gaacuggaaucugaccuaa

SEQ ID NO: 2088995 - RNA, 19 nt, Homo sapiens
  misc_RNA (1)...(19): siRNA sense strand
gauaagagcaguuugaaau

SEQ ID NO: 2088996 - RNA, 19 nt, Homo sapiens
  misc_RNA (1)...(19): siRNA sense strand
gcucagauccgguguuuaa

SEQ ID NO: 2088997 - RNA, 19 nt, Homo sapiens
  misc_RNA (1)...(19): siRNA sense strand
gcggugaucuucauaguug

SEQ ID NO: 2088998 - RNA, 19 nt, Homo sapiens
  misc_RNA (1)...(19): siRNA sense strand
uccaagagcuccagcauuu

SEQ ID NO: 2088999 - RNA, 19 nt, Homo sapiens
  misc_RNA (1)...(19): siRNA sense strand
ccacagaacccauauaugu

SEQ ID NO: 2089000 - RNA, 19 nt, Homo sapiens
  misc_RNA (1)...(19): siRNA sense strand
caaauaagcccacagacaa

SEQ ID NO: 2089001 - RNA, 19 nt, Homo sapiens
  misc_RNA (1)...(19): siRNA sense strand
caacuaggauacuuucaga

SEQ ID NO: 2089002 - RNA, 19 nt, Homo sapiens
  misc_RNA (1)...(19): siRNA sense strand
gccaauaccuuuguaauca

SEQ ID NO: 2089003 - RNA, 19 nt, Homo sapiens
  misc_RNA (1)...(19): siRNA sense strand
gagcuuauauuucaacucu

SEQ ID NO: 2089004 - RNA, 19 nt, Homo sapiens
  misc_RNA (1)...(19): siRNA sense strand
cagcaggucuccuauaugu

SEQ ID NO: 2089005 - RNA, 19 nt, Homo sapiens
  misc_RNA (1)...(19): siRNA sense strand
gcucguagccugcauagaa

SEQ ID NO: 2089006 - RNA, 19 nt, Homo sapiens
  misc_RNA (1)...(19): siRNA sense strand
caacauuggcucuggguua

SEQ ID NO: 2089007 - RNA, 19 nt, Homo sapiens
  misc_RNA (1)...(19): siRNA sense strand
uggagaaacugauuaaaga

SEQ ID NO: 2089008 - RNA, 19 nt, Homo sapiens
  misc_RNA (1)...(19): siRNA sense strand
agaaggacuugcaaagaua

SEQ ID NO: 2089009 - RNA, 19 nt, Homo sapiens
  misc_RNA (1)...(19): siRNA sense strand
gagaagaacagaagaggaa

SEQ ID NO: 2089010 - RNA, 19 nt, Homo sapiens
  misc_RNA (1)...(19): siRNA sense strand
aaucugaccuaaccuuuaa

SEQ ID NO: 2089011 - RNA, 19 nt, Homo sapiens
  misc_RNA (1)...(19): siRNA sense strand
gaaucugaccuaaccuuua

SEQ ID NO: 2089012 - RNA, 19 nt, Homo sapiens
  misc_RNA (1)...(19): siRNA sense strand
gguaugaacaugcuaauga

SEQ ID NO: 2089013 - RNA, 19 nt, Homo sapiens
  misc_RNA (1)...(19): siRNA sense strand
gacauagucugggagcuua

SEQ ID NO: 2089014 - RNA, 19 nt, Homo sapiens
  misc_RNA (1)...(19): siRNA sense strand
gggaagaacuuuuaacuug

SEQ ID NO: 2089015 - RNA, 19 nt, Homo sapiens
  misc_RNA (1)...(19): siRNA sense strand
ucagagagcugcaggaucu

SEQ ID NO: 2089016 - RNA, 19 nt, Homo sapiens
  misc_RNA (1)...(19): siRNA sense strand
gaaaaugggugugcuuauu

SEQ ID NO: 2089017 - RNA, 19 nt, Homo sapiens
  misc_RNA (1)...(19): siRNA sense strand
gauaccaccuuauggcuau

SEQ ID NO: 2089018 - RNA, 19 nt, Homo sapiens
  misc_RNA (1)...(19): siRNA sense strand
gcaggucuccuauauguug

SEQ ID NO: 2089019 - RNA, 19 nt, Homo sapiens
  misc_RNA (1)...(19): siRNA sense strand
uaacaagaagccugucaua

SEQ ID NO: 2089020 - RNA, 19 nt, Homo sapiens
  misc_RNA (1)...(19): siRNA sense strand
gugguuaucuuuacaauac

SEQ ID NO: 2089021 - RNA, 19 nt, Homo sapiens
  misc_RNA (1)...(19): siRNA sense strand
gcagaaggcaagugaagaa

SEQ ID NO: 2089022 - RNA, 19 nt, Homo sapiens
  misc_RNA (1)...(19): siRNA sense strand
guggauggcuucaaugugu

SEQ ID NO: 2089023 - RNA, 19 nt, Homo sapiens
  misc_RNA (1)...(19): siRNA sense strand
aaauaggcccugaguauaa

SEQ ID NO: 2089024 - RNA, 19 nt, Homo sapiens
  misc_RNA (1)...(19): siRNA sense strand
gaauagggguugucaggua

SEQ ID NO: 2089025 - RNA, 19 nt, Homo sapiens
  misc_RNA (1)...(19): siRNA sense strand
ucugggagcuuauauuuca

SEQ ID NO: 2089026 - RNA, 19 nt, Homo sapiens
  misc_RNA (1)...(19): siRNA sense strand
uaagagcaguuugaaauca

SEQ ID NO: 2089027 - RNA, 19 nt, Homo sapiens
  misc_RNA (1)...(19): siRNA sense strand
ccacaguacucguuguaga

SEQ ID NO: 2089028 - RNA, 19 nt, Homo sapiens
  misc_RNA (1)...(19): siRNA sense strand
cagaggagcugguggucuu

SEQ ID NO: 2089029 - RNA, 19 nt, Homo sapiens
  misc_RNA (1)...(19): siRNA sense strand
gaugauaagagcaguuuga

SEQ ID NO: 2089030 - RNA, 19 nt, Homo sapiens
  misc_RNA (1)...(19): siRNA sense strand
ggauguggaucagcucgua

SEQ ID NO: 2089031 - RNA, 19 nt, Homo sapiens
  misc_RNA (1)...(19): siRNA sense strand
gaucaagcaugccugucaa

SEQ ID NO: 2089032 - RNA, 19 nt, Homo sapiens
  misc_RNA (1)...(19): siRNA sense strand
gcauggagaugaagaugag

SEQ ID NO: 2089033 - RNA, 19 nt, Homo sapiens
  misc_RNA (1)...(19): siRNA sense strand
caacagcaggucuccuaua

SEQ ID NO: 2089034 - RNA, 19 nt, Homo sapiens
  misc_RNA (1)...(19): siRNA sense strand
ggaaagagaaggacuugca

SEQ ID NO: 2089035 - RNA, 19 nt, Homo sapiens
  misc_RNA (1)...(19): siRNA sense strand
acaaagagaagcugagaaa

SEQ ID NO: 2089036 - RNA, 19 nt, Homo sapiens
  misc_RNA (1)...(19): siRNA sense strand
ggaggugguucucugugaa

SEQ ID NO: 2089037 - RNA, 19 nt, Homo sapiens
  misc_RNA (1)...(19): siRNA sense strand
augaagagcugccuuuaug

SEQ ID NO: 2089038 - RNA, 19 nt, Homo sapiens
  misc_RNA (1)...(19): siRNA sense strand
gaccuaaccuuuaaaauag

SEQ ID NO: 2089039 - RNA, 19 nt, Homo sapiens
  misc_RNA (1)...(19): siRNA sense strand
gugugaaucuggcaacauu

SEQ ID NO: 2089040 - RNA, 19 nt, Homo sapiens
  misc_RNA (1)...(19): siRNA sense strand
gaagaauaaaggugugauu

SEQ ID NO: 2089041 - RNA, 19 nt, Homo sapiens
  misc_RNA (1)...(19): siRNA sense strand
gaccgaggccuuccagaaa

SEQ ID NO: 2089042 - RNA, 19 nt, Homo sapiens
  misc_RNA (1)...(19): siRNA sense strand
uuucaacucuggacaaaga

SEQ ID NO: 2089043 - RNA, 19 nt, Homo sapiens
  misc_RNA (1)...(19): siRNA sense strand
guucagaugcuuugaguga

SEQ ID NO: 2089044 - RNA, 19 nt, Homo sapiens
  misc_RNA (1)...(19): siRNA sense strand
ggaagaacuuuuaacuuga

SEQ ID NO: 2089045 - RNA, 19 nt, Homo sapiens
  misc_RNA (1)...(19): siRNA sense strand
gaacaugcuaaugaugaua

SEQ ID NO: 2089046 - RNA, 19 nt, Homo sapiens
  misc_RNA (1)...(19): siRNA sense strand
uauguaggcuugccauuca

SEQ ID NO: 2089047 - RNA, 19 nt, Homo sapiens
  misc_RNA (1)...(19): siRNA sense strand
caggagagcauguaauaga

SEQ ID NO: 2089048 - RNA, 19 nt, Homo sapiens
  misc_RNA (1)...(19): siRNA sense strand
gcacgaagggcacaaaguc

SEQ ID NO: 2089049 - RNA, 19 nt, Homo sapiens
  misc_RNA (1)...(19): siRNA sense strand
gaaacgaugacuccauugu

SEQ ID NO: 2089050 - RNA, 19 nt, Homo sapiens
  misc_RNA (1)...(19): siRNA sense strand
gguccaggcuuuacagaag

SEQ ID NO: 2089051 - RNA, 19 nt, Homo sapiens
  misc_RNA (1)...(19): siRNA sense strand
guaugaacaugcuaaugau

SEQ ID NO: 2089052 - RNA, 19 nt, Homo sapiens
  misc_RNA (1)...(19): siRNA sense strand
cagacaagauugggagauu

SEQ ID NO: 2089053 - RNA, 19 nt, Homo sapiens
  misc_RNA (1)...(19): siRNA sense strand
gagaaacugauuaaagaug

SEQ ID NO: 2089054 - RNA, 19 nt, Homo sapiens
  misc_RNA (1)...(19): siRNA sense strand
ccacgaagaggaaagagaa

SEQ ID NO: 2089055 - RNA, 19 nt, Homo sapiens
  misc_RNA (1)...(19): siRNA sense strand
acccauauaugucuacaaa

SEQ ID NO: 2089056 - RNA, 19 nt, Homo sapiens
  misc_RNA (1)...(19): siRNA sense strand
ggaaucugaccuaaccuuu

SEQ ID NO: 2089057 - RNA, 19 nt, Homo sapiens
  misc_RNA (1)...(19): siRNA sense strand
ggacacacagacaagauug

SEQ ID NO: 2089058 - RNA, 19 nt, Homo sapiens
  misc_RNA (1)...(19): siRNA sense strand
ggacuugcaaagauaugua

SEQ ID NO: 2089059 - RNA, 19 nt, Homo sapiens
  misc_RNA (1)...(19): siRNA sense strand
gaaagagaaggacuugcaa

SEQ ID NO: 2089060 - RNA, 19 nt, Homo sapiens
  misc_RNA (1)...(19): siRNA sense strand
ggacaaagagaagcugaga

SEQ ID NO: 2089061 - RNA, 19 nt, Homo sapiens
  misc_RNA (1)...(19): siRNA sense strand
gcuccgugcugaauugguu

SEQ ID NO: 2089062 - RNA, 19 nt, Homo sapiens
  misc_RNA (1)...(19): siRNA sense strand
aaacaugacagaagugguu

SEQ ID NO: 2089063 - RNA, 19 nt, Homo sapiens
  misc_RNA (1)...(19): siRNA sense strand
gcaugaagagcugccuuua

SEQ ID NO: 2089064 - RNA, 19 nt, Homo sapiens
  misc_RNA (1)...(19): siRNA sense strand
uuauggcuaugcagaauuu

SEQ ID NO: 2089065 - RNA, 19 nt, Homo sapiens
  misc_RNA (1)...(19): siRNA sense strand
ggaggacagucagagaaga

SEQ ID NO: 2089066 - RNA, 19 nt, Homo sapiens
  misc_RNA (1)...(19): siRNA sense strand
gugcuuauuuccacgaaga

SEQ ID NO: 2089067 - RNA, 19 nt, Homo sapiens
  misc_RNA (1)...(19): siRNA sense strand
ucagugaucuucauuucca

SEQ ID NO: 2089068 - RNA, 19 nt, Homo sapiens
  misc_RNA (1)...(19): siRNA sense strand
gaagagcugccuuuauguc

SEQ ID NO: 2089069 - RNA, 19 nt, Homo sapiens
  misc_RNA (1)...(19): siRNA sense strand
ugagaaaacuuacaacuag

SEQ ID NO: 2089070 - RNA, 19 nt, Homo sapiens
  misc_RNA (1)...(19): siRNA sense strand
ggacauagucugggagcuu

SEQ ID NO: 2089071 - RNA, 19 nt, Homo sapiens
  misc_RNA (1)...(19): siRNA sense strand
ggugagcauccuccaguua

SEQ ID NO: 2089072 - RNA, 19 nt, Homo sapiens
  misc_RNA (1)...(19): siRNA sense strand
gaaggaggcagugaagaug

SEQ ID NO: 2089073 - RNA, 19 nt, Homo sapiens
  misc_RNA (1)...(19): siRNA sense strand
uaauagagcgucagguuca

SEQ ID NO: 2089074 - RNA, 19 nt, Homo sapiens
  misc_RNA (1)...(19): siRNA sense strand
ccauauaugucuacaaagc

SEQ ID NO: 2089075 - RNA, 19 nt, Homo sapiens
  misc_RNA (1)...(19): siRNA sense strand
aggaaacgaugacuccauu

SEQ ID NO: 2089076 - RNA, 19 nt, Homo sapiens
  misc_RNA (1)...(19): siRNA sense strand
gauauggucguucuuguag

SEQ ID NO: 2089077 - RNA, 19 nt, Homo sapiens
  misc_RNA (1)...(19): siRNA sense strand
ccaguugcgugaagaguuc

SEQ ID NO: 2089078 - RNA, 19 nt, Homo sapiens
  misc_RNA (1)...(19): siRNA sense strand
gacccugccuugacuuuag

SEQ ID NO: 2089079 - RNA, 19 nt, Homo sapiens
  misc_RNA (1)...(19): siRNA sense strand
ggcaagauauggugagcau

SEQ ID NO: 2089080 - RNA, 19 nt, Homo sapiens
  misc_RNA (1)...(19): siRNA sense strand
ucagaugcuuugagugaga

SEQ ID NO: 2089081 - RNA, 19 nt, Homo sapiens
  misc_RNA (1)...(19): siRNA sense strand
ggaguccacagaacccaua

SEQ ID NO: 2089082 - RNA, 19 nt, Homo sapiens
  misc_RNA (1)...(19): siRNA sense strand
uaaaauaggcccugaguau

SEQ ID NO: 2089083 - RNA, 19 nt, Homo sapiens
  misc_RNA (1)...(19): siRNA sense strand
aacagcaggucuccuauau

SEQ ID NO: 2089084 - RNA, 19 nt, Homo sapiens
  misc_RNA (1)...(19): siRNA sense strand
gggagaggcacucguguga

SEQ ID NO: 2089085 - RNA, 19 nt, Homo sapiens
  misc_RNA (1)...(19): siRNA sense strand
uuacaauacuugggacuug

SEQ ID NO: 2089086 - RNA, 19 nt, Homo sapiens
  misc_RNA (1)...(19): siRNA sense strand
uugcuggucuuacaucaaa

SEQ ID NO: 2089087 - RNA, 19 nt, Homo sapiens
  misc_RNA (1)...(19): siRNA sense strand
ugugauagcaugacgauga

SEQ ID NO: 2089088 - RNA, 19 nt, Homo sapiens
  misc_RNA (1)...(19): siRNA sense strand
gaaggacuugcaaagauau

SEQ ID NO: 2089089 - RNA, 19 nt, Homo sapiens
  misc_RNA (1)...(19): siRNA sense strand
cccagaagaugaccacuca

SEQ ID NO: 2089090 - RNA, 19 nt, Homo sapiens
  misc_RNA (1)...(19): siRNA sense strand
ggauauggcuuuaaaguug

SEQ ID NO: 2089091 - RNA, 19 nt, Homo sapiens
  misc_RNA (1)...(19): siRNA sense strand
gaaauaaccugacugugau

SEQ ID NO: 2089092 - RNA, 19 nt, Homo sapiens
  misc_RNA (1)...(19): siRNA sense strand
ggucauagauugagugcua

SEQ ID NO: 2089093 - RNA, 19 nt, Homo sapiens
  misc_RNA (1)...(19): siRNA sense strand
gaaccaaauuucacauuga

SEQ ID NO: 2089094 - RNA, 19 nt, Homo sapiens
  misc_RNA (1)...(19): siRNA sense strand
gcacagaguuuaucauucu

SEQ ID NO: 2089095 - RNA, 19 nt, Homo sapiens
  misc_RNA (1)...(19): siRNA sense strand
gcacauugauaacaacauu

SEQ ID NO: 2089096 - RNA, 19 nt, Homo sapiens
  misc_RNA (1)...(19): siRNA sense strand
caaguaaguuaguggauaa

SEQ ID NO: 2089097 - RNA, 19 nt, Homo sapiens
  misc_RNA (1)...(19): siRNA sense strand
gaauuaaacucaccaaggu

SEQ ID NO: 2089098 - RNA, 19 nt, Homo sapiens
  misc_RNA (1)...(19): siRNA sense strand
guagaaaucucccaagcaa

SEQ ID NO: 2089099 - RNA, 19 nt, Homo sapiens
  misc_RNA (1)...(19): siRNA sense strand
ggacaucaccagucucaua

SEQ ID NO: 2089100 - RNA, 19 nt, Homo sapiens
  misc_RNA (1)...(19): siRNA sense strand
gaaagaggcaauagaacua

SEQ ID NO: 2089101 - RNA, 19 nt, Homo sapiens
  misc_RNA (1)...(19): siRNA sense strand
caacagcuccuggaauuua

SEQ ID NO: 2089102 - RNA, 19 nt, Homo sapiens
  misc_RNA (1)...(19): siRNA sense strand
ccacaucgguccucgguaa

SEQ ID NO: 2089103 - RNA, 19 nt, Homo sapiens
  misc_RNA (1)...(19): siRNA sense strand
gggccucucucgacauuua

SEQ ID NO: 2089104 - RNA, 19 nt, Homo sapiens
  misc_RNA (1)...(19): siRNA sense strand
ucaaguaccucuaguagga

SEQ ID NO: 2089105 - RNA, 19 nt, Homo sapiens
  misc_RNA (1)...(19): siRNA sense strand
gcucugaguuuguauuuau

SEQ ID NO: 2089106 - RNA, 19 nt, Homo sapiens
  misc_RNA (1)...(19): siRNA sense strand
ugaaggauauggcuuuaaa

SEQ ID NO: 2089107 - RNA, 19 nt, Homo sapiens
  misc_RNA (1)...(19): siRNA sense strand
gaggagaccuucaccuaga

SEQ ID NO: 2089108 - RNA, 19 nt, Homo sapiens
  misc_RNA (1)...(19): siRNA sense strand
gaaaguaagcaacguagaa

SEQ ID NO: 2089109 - RNA, 19 nt, Homo sapiens
  misc_RNA (1)...(19): siRNA sense strand
gagaaucguugguauuuca

SEQ ID NO: 2089110 - RNA, 19 nt, Homo sapiens
  misc_RNA (1)...(19): siRNA sense strand
gaggaacguuucauagauu

SEQ ID NO: 2089111 - RNA, 19 nt, Homo sapiens
  misc_RNA (1)...(19): siRNA sense strand
aaacucagcugacguggaa

SEQ ID NO: 2089112 - RNA, 19 nt, Homo sapiens
  misc_RNA (1)...(19): siRNA sense strand
gaaacccaguucauuagaa

SEQ ID NO: 2089113 - RNA, 19 nt, Homo sapiens
  misc_RNA (1)...(19): siRNA sense strand
caauugaguuggcuauaaa

SEQ ID NO: 2089114 - RNA, 19 nt, Homo sapiens
  misc_RNA (1)...(19): siRNA sense strand
ggcaauagaacuacaauaa

SEQ ID NO: 2089115 - RNA, 19 nt, Homo sapiens
  misc_RNA (1)...(19): siRNA sense strand
ucacacagccuucauaaga

SEQ ID NO: 2089116 - RNA, 19 nt, Homo sapiens
  misc_RNA (1)...(19): siRNA sense strand
agaaagaaaucccaacaga

SEQ ID NO: 2089117 - RNA, 19 nt, Homo sapiens
  misc_RNA (1)...(19): siRNA sense strand
gaaauuccuccuuaugaaa

SEQ ID NO: 2089118 - RNA, 19 nt, Homo sapiens
  misc_RNA (1)...(19): siRNA sense strand
agaaauaaccugacuguga

SEQ ID NO: 2089119 - RNA, 19 nt, Homo sapiens
  misc_RNA (1)...(19): siRNA sense strand
ggagacgguuuaucaauag

SEQ ID NO: 2089120 - RNA, 19 nt, Homo sapiens
  misc_RNA (1)...(19): siRNA sense strand
gaagaaacgauuacuuuag

SEQ ID NO: 2089121 - RNA, 19 nt, Homo sapiens
  misc_RNA (1)...(19): siRNA sense strand
gcacuuuccucacgagaau

SEQ ID NO: 2089122 - RNA, 19 nt, Homo sapiens
  misc_RNA (1)...(19): siRNA sense strand
ucaaucaucgguaacauua

SEQ ID NO: 2089123 - RNA, 19 nt, Homo sapiens
  misc_RNA (1)...(19): siRNA sense strand
gaacacaagaucuaccaaa

SEQ ID NO: 2089124 - RNA, 19 nt, Homo sapiens
  misc_RNA (1)...(19): siRNA sense strand
uacaacagcuccuggaauu

SEQ ID NO: 2089125 - RNA, 19 nt, Homo sapiens
  misc_RNA (1)...(19): siRNA sense strand
cagcaaaccagucuuaauu

SEQ ID NO: 2089126 - RNA, 19 nt, Homo sapiens
  misc_RNA (1)...(19): siRNA sense strand
uuuggaagcucaaggaaua

SEQ ID NO: 2089127 - RNA, 19 nt, Homo sapiens
  misc_RNA (1)...(19): siRNA sense strand
caucauccaugcacauuga

SEQ ID NO: 2089128 - RNA, 19 nt, Homo sapiens
  misc_RNA (1)...(19): siRNA sense strand
gcaaacacaaguugacaaa

SEQ ID NO: 2089129 - RNA, 19 nt, Homo sapiens
  misc_RNA (1)...(19): siRNA sense strand
ccuggcagcucuacugaua

SEQ ID NO: 2089130 - RNA, 19 nt, Homo sapiens
  misc_RNA (1)...(19): siRNA sense strand
ugaaaugucucaagugaag

SEQ ID NO: 2089131 - RNA, 19 nt, Homo sapiens
  misc_RNA (1)...(19): siRNA sense strand
ucagaucaaucaucgguaa

SEQ ID NO: 2089132 - RNA, 19 nt, Homo sapiens
  misc_RNA (1)...(19): siRNA sense strand
aauaaugagugcacuguuu

SEQ ID NO: 2089133 - RNA, 19 nt, Homo sapiens
  misc_RNA (1)...(19): siRNA sense strand
gcaaaccagucuuaauucu

SEQ ID NO: 2089134 - RNA, 19 nt, Homo sapiens
  misc_RNA (1)...(19): siRNA sense strand
gccaaugcuucuagagaua

SEQ ID NO: 2089135 - RNA, 19 nt, Homo sapiens
  misc_RNA (1)...(19): siRNA sense strand
ugaaaucaguggauacuca

SEQ ID NO: 2089136 - RNA, 19 nt, Homo sapiens
  misc_RNA (1)...(19): siRNA sense strand
aaaccagucuuaauucuuc

SEQ ID NO: 2089137 - RNA, 19 nt, Homo sapiens
  misc_RNA (1)...(19): siRNA sense strand
caggacaacuucaaauuca

SEQ ID NO: 2089138 - RNA, 19 nt, Homo sapiens
  misc_RNA (1)...(19): siRNA sense strand
ggacaaggaacaacugaga

SEQ ID NO: 2089139 - RNA, 19 nt, Homo sapiens
  misc_RNA (1)...(19): siRNA sense strand
cacuugaaauuuccacuua

SEQ ID NO: 2089140 - RNA, 19 nt, Homo sapiens
  misc_RNA (1)...(19): siRNA sense strand
gagucaaacuuacugcaaa

SEQ ID NO: 2089141 - RNA, 19 nt, Homo sapiens
  misc_RNA (1)...(19): siRNA sense strand
uaucauaggagacgguuua

SEQ ID NO: 2089142 - RNA, 19 nt, Homo sapiens
  misc_RNA (1)...(19): siRNA sense strand
gaaagccacaggaagauga

SEQ ID NO: 2089143 - RNA, 19 nt, Homo sapiens
  misc_RNA (1)...(19): siRNA sense strand
gcuauaacgguacacuuua

SEQ ID NO: 2089144 - RNA, 19 nt, Homo sapiens
  misc_RNA (1)...(19): siRNA sense strand
acaaguaaguuaguggaua

SEQ ID NO: 2089145 - RNA, 19 nt, Homo sapiens
  misc_RNA (1)...(19): siRNA sense strand
aaagaaaucccaacagaug

SEQ ID NO: 2089146 - RNA, 19 nt, Homo sapiens
  misc_RNA (1)...(19): siRNA sense strand
gaacuggcucuguauauca

SEQ ID NO: 2089147 - RNA, 19 nt, Homo sapiens
  misc_RNA (1)...(19): siRNA sense strand
ggaacuggcucuguauauc

SEQ ID NO: 2089148 - RNA, 19 nt, Homo sapiens
  misc_RNA (1)...(19): siRNA sense strand
ugaguaagguggcaaagau

SEQ ID NO: 2089149 - RNA, 19 nt, Homo sapiens
  misc_RNA (1)...(19): siRNA sense strand
ugaucaugcugcaacauua

SEQ ID NO: 2089150 - RNA, 19 nt, Homo sapiens
  misc_RNA (1)...(19): siRNA sense strand
aaauucaggucauagauug

SEQ ID NO: 2089151 - RNA, 19 nt, Homo sapiens
  misc_RNA (1)...(19): siRNA sense strand
cagaagaagagauuacuuu

SEQ ID NO: 2089152 - RNA, 19 nt, Homo sapiens
  misc_RNA (1)...(19): siRNA sense strand
aggagacgguuuaucaaua

SEQ ID NO: 2089153 - RNA, 19 nt, Homo sapiens
  misc_RNA (1)...(19): siRNA sense strand
gaauuaggcaacaccagua

SEQ ID NO: 2089154 - RNA, 19 nt, Homo sapiens
  misc_RNA (1)...(19): siRNA sense strand
gaaagaaaucccaacagau

SEQ ID NO: 2089155 - RNA, 19 nt, Homo sapiens
  misc_RNA (1)...(19): siRNA sense strand
uagaagccauggacaaaga

SEQ ID NO: 2089156 - RNA, 19 nt, Homo sapiens
  misc_RNA (1)...(19): siRNA sense strand
caaggugacuaguauaucu

SEQ ID NO: 2089157 - RNA, 19 nt, Homo sapiens
  misc_RNA (1)...(19): siRNA sense strand
gaacauuuaagguagagaa

SEQ ID NO: 2089158 - RNA, 19 nt, Homo sapiens
  misc_RNA (1)...(19): siRNA sense strand
ugagaacacuagaauuuca

SEQ ID NO: 2089159 - RNA, 19 nt, Homo sapiens
  misc_RNA (1)...(19): siRNA sense strand
guaaauacagaccuucaaa

SEQ ID NO: 2089160 - RNA, 19 nt, Homo sapiens
  misc_RNA (1)...(19): siRNA sense strand
cuauaacgguacacuuuaa

SEQ ID NO: 2089161 - RNA, 19 nt, Homo sapiens
  misc_RNA (1)...(19): siRNA sense strand
ggaaggccauuugaucuca

SEQ ID NO: 2089162 - RNA, 19 nt, Homo sapiens
  misc_RNA (1)...(19): siRNA sense strand
gagagaaucuagacagacu

SEQ ID NO: 2089163 - RNA, 19 nt, Homo sapiens
  misc_RNA (1)...(19): siRNA sense strand
gaagaagagauuacuuuag

SEQ ID NO: 2089164 - RNA, 19 nt, Homo sapiens
  misc_RNA (1)...(19): siRNA sense strand
caacaaggagguaccagaa

SEQ ID NO: 2089165 - RNA, 19 nt, Homo sapiens
  misc_RNA (1)...(19): siRNA sense strand
aaacacaaguugacaaagg

SEQ ID NO: 2089166 - RNA, 19 nt, Homo sapiens
  misc_RNA (1)...(19): siRNA sense strand
gagaauacaggacaacuuc

SEQ ID NO: 2089167 - RNA, 19 nt, Homo sapiens
  misc_RNA (1)...(19): siRNA sense strand
uuccucaacugaaauguua

SEQ ID NO: 2089168 - RNA, 19 nt, Homo sapiens
  misc_RNA (1)...(19): siRNA sense strand
caaacacgcuggcaagcau

SEQ ID NO: 2089169 - RNA, 19 nt, Homo sapiens
  misc_RNA (1)...(19): siRNA sense strand
caucaccagucucauagaa

SEQ ID NO: 2089170 - RNA, 19 nt, Homo sapiens
  misc_RNA (1)...(19): siRNA sense strand
cauaggagacgguuuauca

SEQ ID NO: 2089171 - RNA, 19 nt, Homo sapiens
  misc_RNA (1)...(19): siRNA sense strand
gguauuugguguuggaguu

SEQ ID NO: 2089172 - RNA, 19 nt, Homo sapiens
  misc_RNA (1)...(19): siRNA sense strand
gaaaccaccuaagaagcaa

SEQ ID NO: 2089173 - RNA, 19 nt, Homo sapiens
  misc_RNA (1)...(19): siRNA sense strand
aaacugcuccucagaagaa

SEQ ID NO: 2089174 - RNA, 19 nt, Homo sapiens
  misc_RNA (1)...(19): siRNA sense strand
gucagaagaugugcgauuu

SEQ ID NO: 2089175 - RNA, 19 nt, Homo sapiens
  misc_RNA (1)...(19): siRNA sense strand
ggaaagaggcaauagaacu

SEQ ID NO: 2089176 - RNA, 19 nt, Homo sapiens
  misc_RNA (1)...(19): siRNA sense strand
caauuuaccuuacuaacac

SEQ ID NO: 2089177 - RNA, 19 nt, Homo sapiens
  misc_RNA (1)...(19): siRNA sense strand
cccgaauagucaagaauua

SEQ ID NO: 2089178 - RNA, 19 nt, Homo sapiens
  misc_RNA (1)...(19): siRNA sense strand
ggauccaaaucacgaaaug

SEQ ID NO: 2089179 - RNA, 19 nt, Homo sapiens
  misc_RNA (1)...(19): siRNA sense strand
cauuagaacuaccauauac

SEQ ID NO: 2089180 - RNA, 19 nt, Homo sapiens
  misc_RNA (1)...(19): siRNA sense strand
aaagugaaaugucucaagu

SEQ ID NO: 2089181 - RNA, 19 nt, Homo sapiens
  misc_RNA (1)...(19): siRNA sense strand
aaacaagccaugccugaaa

SEQ ID NO: 2089182 - RNA, 19 nt, Homo sapiens
  misc_RNA (1)...(19): siRNA sense strand
ucacagcaauagaaacuca

SEQ ID NO: 2089183 - RNA, 19 nt, Homo sapiens
  misc_RNA (1)...(19): siRNA sense strand
gaaaagaaaucugucaaag

SEQ ID NO: 2089184 - RNA, 19 nt, Homo sapiens
  misc_RNA (1)...(19): siRNA sense strand
ggacaggaauaaaggaaaa

SEQ ID NO: 2089185 - RNA, 19 nt, Homo sapiens
  misc_RNA (1)...(19): siRNA sense strand
gaugugcgauuuuacuaua

SEQ ID NO: 2089186 - RNA, 19 nt, Homo sapiens
  misc_RNA (1)...(19): siRNA sense strand
gaaggacucuuuggcugau

SEQ ID NO: 2089187 - RNA, 19 nt, Homo sapiens
  misc_RNA (1)...(19): siRNA sense strand
gauauggcuuuaaaguugu

SEQ ID NO: 2089188 - RNA, 19 nt, Homo sapiens
  misc_RNA (1)...(19): siRNA sense strand
ccauugaaaucaguggaua

SEQ ID NO: 2089189 - RNA, 19 nt, Homo sapiens
  misc_RNA (1)...(19): siRNA sense strand
ugaaguaaauacagaccuu

SEQ ID NO: 2089190 - RNA, 19 nt, Homo sapiens
  misc_RNA (1)...(19): siRNA sense strand
ggacagaaaugauuacuaa

SEQ ID NO: 2089191 - RNA, 19 nt, Homo sapiens
  misc_RNA (1)...(19): siRNA sense strand
gugcaaagguucaacauuu

SEQ ID NO: 2089192 - RNA, 19 nt, Homo sapiens
  misc_RNA (1)...(19): siRNA sense strand
ucacgaugcugauggauua

SEQ ID NO: 2089193 - RNA, 19 nt, Homo sapiens
  misc_RNA (1)...(19): siRNA sense strand
ccaaagagacauaguauuu

SEQ ID NO: 2089194 - RNA, 19 nt, Homo sapiens
  misc_RNA (1)...(19): siRNA sense strand
gaugagagauguaguuuua

SEQ ID NO: 2089195 - RNA, 19 nt, Homo sapiens
  misc_RNA (1)...(19): siRNA sense strand
gaagacagcuccagaacuc

SEQ ID NO: 2089196 - RNA, 19 nt, Homo sapiens
  misc_RNA (1)...(19): siRNA sense strand
ggaagagaauguuguuuua

SEQ ID NO: 2089197 - RNA, 19 nt, Homo sapiens
  misc_RNA (1)...(19): siRNA sense strand
guggaaaccuggugcuaua

SEQ ID NO: 2089198 - RNA, 19 nt, Homo sapiens
  misc_RNA (1)...(19): siRNA sense strand
aaacccagcucaucuuuga

SEQ ID NO: 2089199 - RNA, 19 nt, Homo sapiens
  misc_RNA (1)...(19): siRNA sense strand
cauaaucagucuccaaaga

SEQ ID NO: 2089200 - RNA, 19 nt, Homo sapiens
  misc_RNA (1)...(19): siRNA sense strand
ucuaaugacuccuuucuug

SEQ ID NO: 2089201 - RNA, 19 nt, Homo sapiens
  misc_RNA (1)...(19): siRNA sense strand
caacauggcagcucuaagu

SEQ ID NO: 2089202 - RNA, 19 nt, Homo sapiens
  misc_RNA (1)...(19): siRNA sense strand
gacauaguauuucucauuc

SEQ ID NO: 2089203 - RNA, 19 nt, Homo sapiens
  misc_RNA (1)...(19): siRNA sense strand
gcagggcauuccaauauca

SEQ ID NO: 2089204 - RNA, 19 nt, Homo sapiens
  misc_RNA (1)...(19): siRNA sense strand
caacauaccagcaaaggau

SEQ ID NO: 2089205 - RNA, 19 nt, Homo sapiens
  misc_RNA (1)...(19): siRNA sense strand
gcugauggauuaugaaguc

SEQ ID NO: 2089206 - RNA, 19 nt, Homo sapiens
  misc_RNA (1)...(19): siRNA sense strand
gaccauuuguggacagaaa

SEQ ID NO: 2089207 - RNA, 19 nt, Homo sapiens
  misc_RNA (1)...(19): siRNA sense strand
gaaguccuccauaaucauu

SEQ ID NO: 2089208 - RNA, 19 nt, Homo sapiens
  misc_RNA (1)...(19): siRNA sense strand
guucaucacggguacaaua

SEQ ID NO: 2089209 - RNA, 19 nt, Homo sapiens
  misc_RNA (1)...(19): siRNA sense strand
gaaacggagccaauuguuc

SEQ ID NO: 2089210 - RNA, 19 nt, Homo sapiens
  misc_RNA (1)...(19): siRNA sense strand
gcauuccaauaucacagua

SEQ ID NO: 2089211 - RNA, 19 nt, Homo sapiens
  misc_RNA (1)...(19): siRNA sense strand
caucacggguacaauaugu

SEQ ID NO: 2089212 - RNA, 19 nt, Homo sapiens
  misc_RNA (1)...(19): siRNA sense strand
caaaucagaggaagagaau

SEQ ID NO: 2089213 - RNA, 19 nt, Homo sapiens
  misc_RNA (1)...(19): siRNA sense strand
ucagaagccucuccaaagg

SEQ ID NO: 2089214 - RNA, 19 nt, Homo sapiens
  misc_RNA (1)...(19): siRNA sense strand
gauuucaccuuuccggaau

SEQ ID NO: 2089215 - RNA, 19 nt, Homo sapiens
  misc_RNA (1)...(19): siRNA sense strand
ccucuauuguaacgacuua

SEQ ID NO: 2089216 - RNA, 19 nt, Homo sapiens
  misc_RNA (1)...(19): siRNA sense strand
gcaaagguucaacauuuca

SEQ ID NO: 2089217 - RNA, 19 nt, Homo sapiens
  misc_RNA (1)...(19): siRNA sense strand
uguguaaaguuucaagaga

SEQ ID NO: 2089218 - RNA, 19 nt, Homo sapiens
  misc_RNA (1)...(19): siRNA sense strand
ugaccaacauaccagcaaa

SEQ ID NO: 2089219 - RNA, 19 nt, Homo sapiens
  misc_RNA (1)...(19): siRNA sense strand
cgaugcugauggauuauga

SEQ ID NO: 2089220 - RNA, 19 nt, Homo sapiens
  misc_RNA (1)...(19): siRNA sense strand
cauucucgcucaccuucua

SEQ ID NO: 2089221 - RNA, 19 nt, Homo sapiens
  misc_RNA (1)...(19): siRNA sense strand
caaagagacauaguauuuc

SEQ ID NO: 2089222 - RNA, 19 nt, Homo sapiens
  misc_RNA (1)...(19): siRNA sense strand
gccauaaucagucuccaaa

SEQ ID NO: 2089223 - RNA, 19 nt, Homo sapiens
  misc_RNA (1)...(19): siRNA sense strand
cagagucgcucaaccucau

SEQ ID NO: 2089224 - RNA, 19 nt, Homo sapiens
  misc_RNA (1)...(19): siRNA sense strand
ccagaaacggagccaauug

SEQ ID NO: 2089225 - RNA, 19 nt, Homo sapiens
  misc_RNA (1)...(19): siRNA sense strand
ggagccaauuguuccugaa

SEQ ID NO: 2089226 - RNA, 19 nt, Homo sapiens
  misc_RNA (1)...(19): siRNA sense strand
uguuguagaucaugcaaug

SEQ ID NO: 2089227 - RNA, 19 nt, Homo sapiens
  misc_RNA (1)...(19): siRNA sense strand
gagagucaaaucagaggaa

SEQ ID NO: 2089228 - RNA, 19 nt, Homo sapiens
  misc_RNA (1)...(19): siRNA sense strand
caacauuucaagccauaau

SEQ ID NO: 2089229 - RNA, 19 nt, Homo sapiens
  misc_RNA (1)...(19): siRNA sense strand
ucaaaucagaggaagagaa

SEQ ID NO: 2089230 - RNA, 19 nt, Homo sapiens
  misc_RNA (1)...(19): siRNA sense strand
cugcagggcauuccaauau

SEQ ID NO: 2089231 - RNA, 19 nt, Homo sapiens
  misc_RNA (1)...(19): siRNA sense strand
agaagaaugugcagcaaaa

SEQ ID NO: 2089232 - RNA, 19 nt, Homo sapiens
  misc_RNA (1)...(19): siRNA sense strand
gcuauacacaggagugguu

SEQ ID NO: 2089233 - RNA, 19 nt, Homo sapiens
  misc_RNA (1)...(19): siRNA sense strand
uaagcuguguaaaguuuca

SEQ ID NO: 2089234 - RNA, 19 nt, Homo sapiens
  misc_RNA (1)...(19): siRNA sense strand
gcucuaagucgugcucauu

SEQ ID NO: 2089235 - RNA, 19 nt, Homo sapiens
  misc_RNA (1)...(19): siRNA sense strand
ccucacagcacaucucaga

SEQ ID NO: 2089236 - RNA, 19 nt, Homo sapiens
  misc_RNA (1)...(19): siRNA sense strand
cauaguauuucucauucuc

SEQ ID NO: 2089237 - RNA, 19 nt, Homo sapiens
  misc_RNA (1)...(19): siRNA sense strand
guauuucucauucuccaaa

SEQ ID NO: 2089238 - RNA, 19 nt, Homo sapiens
  misc_RNA (1)...(19): siRNA sense strand
ugcaaagguucaacauuuc

SEQ ID NO: 2089239 - RNA, 19 nt, Homo sapiens
  misc_RNA (1)...(19): siRNA sense strand
gccucuggaugacuaugua

SEQ ID NO: 2089240 - RNA, 19 nt, Homo sapiens
  misc_RNA (1)...(19): siRNA sense strand
guaauucuaaugacuccuu

SEQ ID NO: 2089241 - RNA, 19 nt, Homo sapiens
  misc_RNA (1)...(19): siRNA sense strand
cgacuuaugaugcuguuca

SEQ ID NO: 2089242 - RNA, 19 nt, Homo sapiens
  misc_RNA (1)...(19): siRNA sense strand
caaaauggaacauaaggaa

SEQ ID NO: 2089243 - RNA, 19 nt, Homo sapiens
  misc_RNA (1)...(19): siRNA sense strand
ggaaaccuggugcuauaca

SEQ ID NO: 2089244 - RNA, 19 nt, Homo sapiens
  misc_RNA (1)...(19): siRNA sense strand
gagaagacagcuccagaac

SEQ ID NO: 2089245 - RNA, 19 nt, Homo sapiens
  misc_RNA (1)...(19): siRNA sense strand
gaaaccuggugcuauacac

SEQ ID NO: 2089246 - RNA, 19 nt, Homo sapiens
  misc_RNA (1)...(19): siRNA sense strand
ucucagaagccucuccaaa

SEQ ID NO: 2089247 - RNA, 19 nt, Homo sapiens
  misc_RNA (1)...(19): siRNA sense strand
gaacuguguauugaccauu

SEQ ID NO: 2089248 - RNA, 19 nt, Homo sapiens
  misc_RNA (1)...(19): siRNA sense strand
aaucagaggaagagaaugu

SEQ ID NO: 2089249 - RNA, 19 nt, Homo sapiens
  misc_RNA (1)...(19): siRNA sense strand
cagaaacggagccaauugu

SEQ ID NO: 2089250 - RNA, 19 nt, Homo sapiens
  misc_RNA (1)...(19): siRNA sense strand
caccuucuauuuccaacau

SEQ ID NO: 2089251 - RNA, 19 nt, Homo sapiens
  misc_RNA (1)...(19): siRNA sense strand
uuucaccuuuccggaauua

SEQ ID NO: 2089252 - RNA, 19 nt, Homo sapiens
  misc_RNA (1)...(19): siRNA sense strand
ucacagcacaucucagaag

SEQ ID NO: 2089253 - RNA, 19 nt, Homo sapiens
  misc_RNA (1)...(19): siRNA sense strand
gauggauuaugaagucaac

SEQ ID NO: 2089254 - RNA, 19 nt, Homo sapiens
  misc_RNA (1)...(19): siRNA sense strand
ucacggguacaauauguug

SEQ ID NO: 2089255 - RNA, 19 nt, Homo sapiens
  misc_RNA (1)...(19): siRNA sense strand
uuccugaacuguguauuga

SEQ ID NO: 2089256 - RNA, 19 nt, Homo sapiens
  misc_RNA (1)...(19): siRNA sense strand
uucaacauuucaagccaua

SEQ ID NO: 2089257 - RNA, 19 nt, Homo sapiens
  misc_RNA (1)...(19): siRNA sense strand
gacuuaugaugcuguucaa

SEQ ID NO: 2089258 - RNA, 19 nt, Homo sapiens
  misc_RNA (1)...(19): siRNA sense strand
cagugucccucugugcuuu

SEQ ID NO: 2089259 - RNA, 19 nt, Homo sapiens
  misc_RNA (1)...(19): siRNA sense strand
uguaaaguuucaagagagu

SEQ ID NO: 2089260 - RNA, 19 nt, Homo sapiens
  misc_RNA (1)...(19): siRNA sense strand
gaggaagagaauguuguuu

SEQ ID NO: 2089261 - RNA, 19 nt, Homo sapiens
  misc_RNA (1)...(19): siRNA sense strand
ggugcaaagguucaacauu

SEQ ID NO: 2089262 - RNA, 19 nt, Homo sapiens
  misc_RNA (1)...(19): siRNA sense strand
agagaagacagcuccagaa

SEQ ID NO: 2089263 - RNA, 19 nt, Homo sapiens
  misc_RNA (1)...(19): siRNA sense strand
aacuguguauugaccauuu

SEQ ID NO: 2089264 - RNA, 19 nt, Homo sapiens
  misc_RNA (1)...(19): siRNA sense strand
caaagguucaacauuucaa

SEQ ID NO: 2089265 - RNA, 19 nt, Homo sapiens
  misc_RNA (1)...(19): siRNA sense strand
cuggaugacuauguaaaug

SEQ ID NO: 2089266 - RNA, 19 nt, Homo sapiens
  misc_RNA (1)...(19): siRNA sense strand
ucucauucuccaaauagua

SEQ ID NO: 2089267 - RNA, 19 nt, Homo sapiens
  misc_RNA (1)...(19): siRNA sense strand
gugguucuucuacuucuuu

SEQ ID NO: 2089268 - RNA, 19 nt, Homo sapiens
  misc_RNA (1)...(19): siRNA sense strand
ggaacauaaggaagugguu

SEQ ID NO: 2089269 - RNA, 19 nt, Homo sapiens
  misc_RNA (1)...(19): siRNA sense strand
aaauggaacauaaggaagu

SEQ ID NO: 2089270 - RNA, 19 nt, Homo sapiens
  misc_RNA (1)...(19): siRNA sense strand
gauuaugaagucaacaaca

SEQ ID NO: 2089271 - RNA, 19 nt, Homo sapiens
  misc_RNA (1)...(19): siRNA sense strand
agaaacggagccaauuguu

SEQ ID NO: 2089272 - RNA, 19 nt, Homo sapiens
  misc_RNA (1)...(19): siRNA sense strand
guaaaguuucaagagagua

SEQ ID NO: 2089273 - RNA, 19 nt, Homo sapiens
  misc_RNA (1)...(19): siRNA sense strand
uccaauaucacaguaaaga

SEQ ID NO: 2089274 - RNA, 19 nt, Homo sapiens
  misc_RNA (1)...(19): siRNA sense strand
cagaagccucuccaaagga

SEQ ID NO: 2089275 - RNA, 19 nt, Homo sapiens
  misc_RNA (1)...(19): siRNA sense strand
uaggaugagagauguaguu

SEQ ID NO: 2089276 - RNA, 19 nt, Homo sapiens
  misc_RNA (1)...(19): siRNA sense strand
cucauucuccaaauaguaa

SEQ ID NO: 2089277 - RNA, 19 nt, Homo sapiens
  misc_RNA (1)...(19): siRNA sense strand
gagauuccccugugauuuc

SEQ ID NO: 2089278 - RNA, 19 nt, Homo sapiens
  misc_RNA (1)...(19): siRNA sense strand
gucccaaaauggaacauaa

SEQ ID NO: 2089279 - RNA, 19 nt, Homo sapiens
  misc_RNA (1)...(19): siRNA sense strand
agaggaagagaauguuguu

SEQ ID NO: 2089280 - RNA, 19 nt, Homo sapiens
  misc_RNA (1)...(19): siRNA sense strand
cagcucaucuuugauucag

SEQ ID NO: 2089281 - RNA, 19 nt, Homo sapiens
  misc_RNA (1)...(19): siRNA sense strand
gauaaaacccagcucaucu

SEQ ID NO: 2089282 - RNA, 19 nt, Homo sapiens
  misc_RNA (1)...(19): siRNA sense strand
ucagaggaagagaauguug

SEQ ID NO: 2089283 - RNA, 19 nt, Homo sapiens
  misc_RNA (1)...(19): siRNA sense strand
caccagaaacggagccaau

SEQ ID NO: 2089284 - RNA, 19 nt, Homo sapiens
  misc_RNA (1)...(19): siRNA sense strand
uaaugacuccuuucuugca

SEQ ID NO: 2089285 - RNA, 19 nt, Homo sapiens
  misc_RNA (1)...(19): siRNA sense strand
cagaggaagagaauguugu

SEQ ID NO: 2089286 - RNA, 19 nt, Homo sapiens
  misc_RNA (1)...(19): siRNA sense strand
gcucaccuucuauuuccaa

SEQ ID NO: 2089287 - RNA, 19 nt, Homo sapiens
  misc_RNA (1)...(19): siRNA sense strand
ggagauuccccugugauuu

SEQ ID NO: 2089288 - RNA, 19 nt, Homo sapiens
  misc_RNA (1)...(19): siRNA sense strand
uguaacgacuuaugaugcu

SEQ ID NO: 2089289 - RNA, 19 nt, Homo sapiens
  misc_RNA (1)...(19): siRNA sense strand
gacacagacucaaguauua

SEQ ID NO: 2089290 - RNA, 19 nt, Homo sapiens
  misc_RNA (1)...(19): siRNA sense strand
caagaaaucucguggaaca

SEQ ID NO: 2089291 - RNA, 19 nt, Homo sapiens
  misc_RNA (1)...(19): siRNA sense strand
caagauggcgugcuucaua

SEQ ID NO: 2089292 - RNA, 19 nt, Homo sapiens
  misc_RNA (1)...(19): siRNA sense strand
ggacagccuuggagaagaa

SEQ ID NO: 2089293 - RNA, 19 nt, Homo sapiens
  misc_RNA (1)...(19): siRNA sense strand
ggaacaagauggcgugcuu

SEQ ID NO: 2089294 - RNA, 19 nt, Homo sapiens
  misc_RNA (1)...(19): siRNA sense strand
gcccaagacuccaaagaaa

SEQ ID NO: 2089295 - RNA, 19 nt, Homo sapiens
  misc_RNA (1)...(19): siRNA sense strand
ugaaggcccuggcggcaua

SEQ ID NO: 2089296 - RNA, 19 nt, Homo sapiens
  misc_RNA (1)...(19): siRNA sense strand
gaaccagauugucacauca

SEQ ID NO: 2089297 - RNA, 19 nt, Homo sapiens
  misc_RNA (1)...(19): siRNA sense strand
gggccagccucguuucuaa

SEQ ID NO: 2089298 - RNA, 19 nt, Homo sapiens
  misc_RNA (1)...(19): siRNA sense strand
gaaaucucguggaacaaga

SEQ ID NO: 2089299 - RNA, 19 nt, Homo sapiens
  misc_RNA (1)...(19): siRNA sense strand
ugaagaggaugcugaugaa

SEQ ID NO: 2089300 - RNA, 19 nt, Homo sapiens
  misc_RNA (1)...(19): siRNA sense strand
ggaccucccuuccauuaca

SEQ ID NO: 2089301 - RNA, 19 nt, Homo sapiens
  misc_RNA (1)...(19): siRNA sense strand
aaagaaagaucccaaugag

SEQ ID NO: 2089302 - RNA, 19 nt, Homo sapiens
  misc_RNA (1)...(19): siRNA sense strand
gaucagagccacacacaag

SEQ ID NO: 2089303 - RNA, 19 nt, Homo sapiens
  misc_RNA (1)...(19): siRNA sense strand
acacacaggcugcaauuaa

SEQ ID NO: 2089304 - RNA, 19 nt, Homo sapiens
  misc_RNA (1)...(19): siRNA sense strand
caacaugcccucgaacauu

SEQ ID NO: 2089305 - RNA, 19 nt, Homo sapiens
  misc_RNA (1)...(19): siRNA sense strand
cacacaggcugcaauuaaa

SEQ ID NO: 2089306 - RNA, 19 nt, Homo sapiens
  misc_RNA (1)...(19): siRNA sense strand
cccaaacccuuaaccauga

SEQ ID NO: 2089307 - RNA, 19 nt, Homo sapiens
  misc_RNA (1)...(19): siRNA sense strand
ccauuacaaucucaagaaa

SEQ ID NO: 2089308 - RNA, 19 nt, Homo sapiens
  misc_RNA (1)...(19): siRNA sense strand
gcaguggguugcauaugga

SEQ ID NO: 2089309 - RNA, 19 nt, Homo sapiens
  misc_RNA (1)...(19): siRNA sense strand
ccaaaugcaucagcaaauc

SEQ ID NO: 2089310 - RNA, 19 nt, Homo sapiens
  misc_RNA (1)...(19): siRNA sense strand
acagcaaguuuggaaauaa

SEQ ID NO: 2089311 - RNA, 19 nt, Homo sapiens
  misc_RNA (1)...(19): siRNA sense strand
gaacaaaagcagguauaua

SEQ ID NO: 2089312 - RNA, 19 nt, Homo sapiens
  misc_RNA (1)...(19): siRNA sense strand
cagcaaguuuggaaauaau

SEQ ID NO: 2089313 - RNA, 19 nt, Homo sapiens
  misc_RNA (1)...(19): siRNA sense strand
caacaacagaugcaacaga

SEQ ID NO: 2089314 - RNA, 19 nt, Homo sapiens
  misc_RNA (1)...(19): siRNA sense strand
uacagcaaguuuggaaaua

SEQ ID NO: 2089315 - RNA, 19 nt, Homo sapiens
  misc_RNA (1)...(19): siRNA sense strand
agacacagacucaaguauu

SEQ ID NO: 2089316 - RNA, 19 nt, Homo sapiens
  misc_RNA (1)...(19): siRNA sense strand
gucagcauaugcccuguuu

SEQ ID NO: 2089317 - RNA, 19 nt, Homo sapiens
  misc_RNA (1)...(19): siRNA sense strand
agaagccagugucagcaua

SEQ ID NO: 2089318 - RNA, 19 nt, Homo sapiens
  misc_RNA (1)...(19): siRNA sense strand
ugaaccagauugucacauc

SEQ ID NO: 2089319 - RNA, 19 nt, Homo sapiens
  misc_RNA (1)...(19): siRNA sense strand
gcagguauauaaaaggaaa

SEQ ID NO: 2089320 - RNA, 19 nt, Homo sapiens
  misc_RNA (1)...(19): siRNA sense strand
uaaggcugcugcugaguca

SEQ ID NO: 2089321 - RNA, 19 nt, Homo sapiens
  misc_RNA (1)...(19): siRNA sense strand
gaaaacagaagcugccaaa

SEQ ID NO: 2089322 - RNA, 19 nt, Homo sapiens
  misc_RNA (1)...(19): siRNA sense strand
ccugucgccucucagauaa

SEQ ID NO: 2089323 - RNA, 19 nt, Homo sapiens
  misc_RNA (1)...(19): siRNA sense strand
cagccaacaugcccucgaa

SEQ ID NO: 2089324 - RNA, 19 nt, Homo sapiens
  misc_RNA (1)...(19): siRNA sense strand
aacaugcccucgaacauug

SEQ ID NO: 2089325 - RNA, 19 nt, Homo sapiens
  misc_RNA (1)...(19): siRNA sense strand
ucacaucagucaccauugc

SEQ ID NO: 2089326 - RNA, 19 nt, Homo sapiens
  misc_RNA (1)...(19): siRNA sense strand
caucuccagcagcaaauua

SEQ ID NO: 2089327 - RNA, 19 nt, Homo sapiens
  misc_RNA (1)...(19): siRNA sense strand
cucaagaaaucucguggaa

SEQ ID NO: 2089328 - RNA, 19 nt, Homo sapiens
  misc_RNA (1)...(19): siRNA sense strand
ccagcuccaucaaugaaga

SEQ ID NO: 2089329 - RNA, 19 nt, Homo sapiens
  misc_RNA (1)...(19): siRNA sense strand
ucucaacacuccacugucu

SEQ ID NO: 2089330 - RNA, 19 nt, Homo sapiens
  misc_RNA (1)...(19): siRNA sense strand
gaagccagugucagcauau

SEQ ID NO: 2089331 - RNA, 19 nt, Homo sapiens
  misc_RNA (1)...(19): siRNA sense strand
cagcaccagucgcaaauac

SEQ ID NO: 2089332 - RNA, 19 nt, Homo sapiens
  misc_RNA (1)...(19): siRNA sense strand
acacuccacugucucaaca

SEQ ID NO: 2089333 - RNA, 19 nt, Homo sapiens
  misc_RNA (1)...(19): siRNA sense strand
aacaacagaugcaacagau

SEQ ID NO: 2089334 - RNA, 19 nt, Homo sapiens
  misc_RNA (1)...(19): siRNA sense strand
caguaugccucacacaucu

SEQ ID NO: 2089335 - RNA, 19 nt, Homo sapiens
  misc_RNA (1)...(19): siRNA sense strand
gcaaauccagcagcagaug

SEQ ID NO: 2089336 - RNA, 19 nt, Homo sapiens
  misc_RNA (1)...(19): siRNA sense strand
gcagcaacaacaacagaug

SEQ ID NO: 2089337 - RNA, 19 nt, Homo sapiens
  misc_RNA (1)...(19): siRNA sense strand
gggacagccuuggagaaga

SEQ ID NO: 2089338 - RNA, 19 nt, Homo sapiens
  misc_RNA (1)...(19): siRNA sense strand
gaagccaacagagccauug

SEQ ID NO: 2089339 - RNA, 19 nt, Homo sapiens
  misc_RNA (1)...(19): siRNA sense strand
cagcaucuccagcagcaaa

SEQ ID NO: 2089340 - RNA, 19 nt, Homo sapiens
  misc_RNA (1)...(19): siRNA sense strand
ggauguacugcuacccuuu

SEQ ID NO: 2089341 - RNA, 19 nt, Homo sapiens
  misc_RNA (1)...(19): siRNA sense strand
cauccucucuccuucucaa

SEQ ID NO: 2089342 - RNA, 19 nt, Homo sapiens
  misc_RNA (1)...(19): siRNA sense strand
cagagccauuggagagaaa

SEQ ID NO: 2089343 - RNA, 19 nt, Homo sapiens
  misc_RNA (1)...(19): siRNA sense strand
gcagcaaauuaaucaacag

SEQ ID NO: 2089344 - RNA, 19 nt, Homo sapiens
  misc_RNA (1)...(19): siRNA sense strand
gcaccagucucagccuucu

SEQ ID NO: 2089345 - RNA, 19 nt, Homo sapiens
  misc_RNA (1)...(19): siRNA sense strand
gaccucccuuccauuacaa

SEQ ID NO: 2089346 - RNA, 19 nt, Homo sapiens
  misc_RNA (1)...(19): siRNA sense strand
ucagacacagacucaagua

SEQ ID NO: 2089347 - RNA, 19 nt, Homo sapiens
  misc_RNA (1)...(19): siRNA sense strand
gcagcaccagucgcaaaua

SEQ ID NO: 2089348 - RNA, 19 nt, Homo sapiens
  misc_RNA (1)...(19): siRNA sense strand
cauuggggcuccacugaua

SEQ ID NO: 2089349 - RNA, 19 nt, Homo sapiens
  misc_RNA (1)...(19): siRNA sense strand
gaccauccguucuguucag

SEQ ID NO: 2089350 - RNA, 19 nt, Homo sapiens
  misc_RNA (1)...(19): siRNA sense strand
guacugcuacccuuucaag

SEQ ID NO: 2089351 - RNA, 19 nt, Homo sapiens
  misc_RNA (1)...(19): siRNA sense strand
cagcagcaccagucgcaaa

SEQ ID NO: 2089352 - RNA, 19 nt, Homo sapiens
  misc_RNA (1)...(19): siRNA sense strand
cagauugucacaucaguca

SEQ ID NO: 2089353 - RNA, 19 nt, Homo sapiens
  misc_RNA (1)...(19): siRNA sense strand
cagcaucaccucagacucu

SEQ ID NO: 2089354 - RNA, 19 nt, Homo sapiens
  misc_RNA (1)...(19): siRNA sense strand
aagauggcgugcuucauag

SEQ ID NO: 2089355 - RNA, 19 nt, Homo sapiens
  misc_RNA (1)...(19): siRNA sense strand
uauuaucgcaggucaguau

SEQ ID NO: 2089356 - RNA, 19 nt, Homo sapiens
  misc_RNA (1)...(19): siRNA sense strand
gacacacaggcugcaauua

SEQ ID NO: 2089357 - RNA, 19 nt, Homo sapiens
  misc_RNA (1)...(19): siRNA sense strand
agacacacaggcugcaauu

SEQ ID NO: 2089358 - RNA, 19 nt, Homo sapiens
  misc_RNA (1)...(19): siRNA sense strand
acagagccauuggagagaa

SEQ ID NO: 2089359 - RNA, 19 nt, Homo sapiens
  misc_RNA (1)...(19): siRNA sense strand
cauagcaguggguugcaua

SEQ ID NO: 2089360 - RNA, 19 nt, Homo sapiens
  misc_RNA (1)...(19): siRNA sense strand
cuacggcuacagcaaguuu

SEQ ID NO: 2089361 - RNA, 19 nt, Homo sapiens
  misc_RNA (1)...(19): siRNA sense strand
caccaaaugcaucagcaaa

SEQ ID NO: 2089362 - RNA, 19 nt, Homo sapiens
  misc_RNA (1)...(19): siRNA sense strand
gcaccaaaugcaucagcaa

SEQ ID NO: 2089363 - RNA, 19 nt, Homo sapiens
  misc_RNA (1)...(19): siRNA sense strand
caugccggauguacugcua

SEQ ID NO: 2089364 - RNA, 19 nt, Homo sapiens
  misc_RNA (1)...(19): siRNA sense strand
cuacagcaaguuuggaaau

SEQ ID NO: 2089365 - RNA, 19 nt, Homo sapiens
  misc_RNA (1)...(19): siRNA sense strand
ccaguaugccucacacauc

SEQ ID NO: 2089366 - RNA, 19 nt, Homo sapiens
  misc_RNA (1)...(19): siRNA sense strand
gauguacugcuacccuuuc

SEQ ID NO: 2089367 - RNA, 19 nt, Homo sapiens
  misc_RNA (1)...(19): siRNA sense strand
ucuaacauccucucuccuu

SEQ ID NO: 2089368 - RNA, 19 nt, Homo sapiens
  misc_RNA (1)...(19): siRNA sense strand
ggucaaaaccccaaugcaa

SEQ ID NO: 2089369 - RNA, 19 nt, Homo sapiens
  misc_RNA (1)...(19): siRNA sense strand
ccuuccagcuccaucaaug

SEQ ID NO: 2089370 - RNA, 19 nt, Homo sapiens
  misc_RNA (1)...(19): siRNA sense strand
aaaagaaagaucccaauga

SEQ ID NO: 2089371 - RNA, 19 nt, Homo sapiens
  misc_RNA (1)...(19): siRNA sense strand
gcaacaacaacagaugcaa

SEQ ID NO: 2089372 - RNA, 19 nt, Homo sapiens
  misc_RNA (1)...(19): siRNA sense strand
cagcagcaacaacaacaga

SEQ ID NO: 2089373 - RNA, 19 nt, Homo sapiens
  misc_RNA (1)...(19): siRNA sense strand
ccagugagcagacauucca

SEQ ID NO: 2089374 - RNA, 19 nt, Homo sapiens
  misc_RNA (1)...(19): siRNA sense strand
gcaccagucgcaaauacag

SEQ ID NO: 2089375 - RNA, 19 nt, Homo sapiens
  misc_RNA (1)...(19): siRNA sense strand
ugucacaucagucaccauu

SEQ ID NO: 2089376 - RNA, 19 nt, Homo sapiens
  misc_RNA (1)...(19): siRNA sense strand
auacagggccagccucguu

SEQ ID NO: 2089377 - RNA, 19 nt, Homo sapiens
  misc_RNA (1)...(19): siRNA sense strand
gcccagcucaccaccauca

SEQ ID NO: 2089378 - RNA, 19 nt, Homo sapiens
  misc_RNA (1)...(19): siRNA sense strand
ucgcaaauacagucucaga

SEQ ID NO: 2089379 - RNA, 19 nt, Homo sapiens
  misc_RNA (1)...(19): siRNA sense strand
augaagaggaugcugauga

SEQ ID NO: 2089380 - RNA, 19 nt, Homo sapiens
  misc_RNA (1)...(19): siRNA sense strand
caaugaagaggaugcugau

SEQ ID NO: 2089381 - RNA, 19 nt, Homo sapiens
  misc_RNA (1)...(19): siRNA sense strand
aaacccagcagcaucagau

SEQ ID NO: 2089382 - RNA, 19 nt, Homo sapiens
  misc_RNA (1)...(19): siRNA sense strand
gcauuuccagcaccacaug

SEQ ID NO: 2089383 - RNA, 19 nt, Homo sapiens
  misc_RNA (1)...(19): siRNA sense strand
caacuccagcagcaccaaa

SEQ ID NO: 2089384 - RNA, 19 nt, Homo sapiens
  misc_RNA (1)...(19): siRNA sense strand
gcagcagcagcaacaacaa

SEQ ID NO: 2089385 - RNA, 19 nt, Homo sapiens
  misc_RNA (1)...(19): siRNA sense strand
cagcagaagcccagaccau

SEQ ID NO: 2089386 - RNA, 19 nt, Homo sapiens
  misc_RNA (1)...(19): siRNA sense strand
uaucgcaggucaguauuuu

SEQ ID NO: 2089387 - RNA, 19 nt, Homo sapiens
  misc_RNA (1)...(19): siRNA sense strand
cccugucgccucucagaua

SEQ ID NO: 2089388 - RNA, 19 nt, Homo sapiens
  misc_RNA (1)...(19): siRNA sense strand
gcacccuccacccaaguga

SEQ ID NO: 2089389 - RNA, 19 nt, Homo sapiens
  misc_RNA (1)...(19): siRNA sense strand
gaacagccuuuacaauugu

SEQ ID NO: 2089390 - RNA, 19 nt, Homo sapiens
  misc_RNA (1)...(19): siRNA sense strand
ucacuacgcucacaacaaa

SEQ ID NO: 2089391 - RNA, 19 nt, Homo sapiens
  misc_RNA (1)...(19): siRNA sense strand
guaagcauauuugggauua

SEQ ID NO: 2089392 - RNA, 19 nt, Homo sapiens
  misc_RNA (1)...(19): siRNA sense strand
gguuaaagguucuaugaaa

SEQ ID NO: 2089393 - RNA, 19 nt, Homo sapiens
  misc_RNA (1)...(19): siRNA sense strand
ugacagaaaucaccuaugu

SEQ ID NO: 2089394 - RNA, 19 nt, Homo sapiens
  misc_RNA (1)...(19): siRNA sense strand
gaagcaaucugaagaagag

SEQ ID NO: 2089395 - RNA, 19 nt, Homo sapiens
  misc_RNA (1)...(19): siRNA sense strand
gaagaugacugauuuugaa

SEQ ID NO: 2089396 - RNA, 19 nt, Homo sapiens
  misc_RNA (1)...(19): siRNA sense strand
ugaacagccuuuacaauug

SEQ ID NO: 2089397 - RNA, 19 nt, Homo sapiens
  misc_RNA (1)...(19): siRNA sense strand
guucuugcaucuaaucaua

SEQ ID NO: 2089398 - RNA, 19 nt, Homo sapiens
  misc_RNA (1)...(19): siRNA sense strand
gcaagaaucuacucagcau

SEQ ID NO: 2089399 - RNA, 19 nt, Homo sapiens
  misc_RNA (1)...(19): siRNA sense strand
caagauaauucaagucaca

SEQ ID NO: 2089400 - RNA, 19 nt, Homo sapiens
  misc_RNA (1)...(19): siRNA sense strand
gaaaucaccuauguuuaca

SEQ ID NO: 2089401 - RNA, 19 nt, Homo sapiens
  misc_RNA (1)...(19): siRNA sense strand
ggaguuggcauucaucauu

SEQ ID NO: 2089402 - RNA, 19 nt, Homo sapiens
  misc_RNA (1)...(19): siRNA sense strand
gugaacagccuuuacaauu

SEQ ID NO: 2089403 - RNA, 19 nt, Homo sapiens
  misc_RNA (1)...(19): siRNA sense strand
ucagacagcuacuaccauu

SEQ ID NO: 2089404 - RNA, 19 nt, Homo sapiens
  misc_RNA (1)...(19): siRNA sense strand
gaguuggcauucaucauuu

SEQ ID NO: 2089405 - RNA, 19 nt, Homo sapiens
  misc_RNA (1)...(19): siRNA sense strand
uaacacggccuucugauau

SEQ ID NO: 2089406 - RNA, 19 nt, Homo sapiens
  misc_RNA (1)...(19): siRNA sense strand
ggacauauacuaaguugca

SEQ ID NO: 2089407 - RNA, 19 nt, Homo sapiens
  misc_RNA (1)...(19): siRNA sense strand
ggaccuguuucacuaguug

SEQ ID NO: 2089408 - RNA, 19 nt, Homo sapiens
  misc_RNA (1)...(19): siRNA sense strand
ucacaacagucuauuucaa

SEQ ID NO: 2089409 - RNA, 19 nt, Homo sapiens
  misc_RNA (1)...(19): siRNA sense strand
uguagaaacuaauggcuuu

SEQ ID NO: 2089410 - RNA, 19 nt, Homo sapiens
  misc_RNA (1)...(19): siRNA sense strand
gaauucagcuccuuuaccu

SEQ ID NO: 2089411 - RNA, 19 nt, Homo sapiens
  misc_RNA (1)...(19): siRNA sense strand
gaagaagagguuaaagguu

SEQ ID NO: 2089412 - RNA, 19 nt, Homo sapiens
  misc_RNA (1)...(19): siRNA sense strand
acagaaaucaccuauguuu

SEQ ID NO: 2089413 - RNA, 19 nt, Homo sapiens
  misc_RNA (1)...(19): siRNA sense strand
guaacacggccuucugaua

SEQ ID NO: 2089414 - RNA, 19 nt, Homo sapiens
  misc_RNA (1)...(19): siRNA sense strand
gagguuaaagguucuauga

SEQ ID NO: 2089415 - RNA, 19 nt, Homo sapiens
  misc_RNA (1)...(19): siRNA sense strand
gaacuucccagauccuguu

SEQ ID NO: 2089416 - RNA, 19 nt, Homo sapiens
  misc_RNA (1)...(19): siRNA sense strand
ccaugacuuugccuuauuu

SEQ ID NO: 2089417 - RNA, 19 nt, Homo sapiens
  misc_RNA (1)...(19): siRNA sense strand
ucagaaagcaagcaagaaa

SEQ ID NO: 2089418 - RNA, 19 nt, Homo sapiens
  misc_RNA (1)...(19): siRNA sense strand
caucacauccucaggguaa

SEQ ID NO: 2089419 - RNA, 19 nt, Homo sapiens
  misc_RNA (1)...(19): siRNA sense strand
ccaaauaugacuucuuguu

SEQ ID NO: 2089420 - RNA, 19 nt, Homo sapiens
  misc_RNA (1)...(19): siRNA sense strand
uagaagguuugucagauga

SEQ ID NO: 2089421 - RNA, 19 nt, Homo sapiens
  misc_RNA (1)...(19): siRNA sense strand
caaguggaaucucaaacug

SEQ ID NO: 2089422 - RNA, 19 nt, Homo sapiens
  misc_RNA (1)...(19): siRNA sense strand
ucuccacacucucaguuua

SEQ ID NO: 2089423 - RNA, 19 nt, Homo sapiens
  misc_RNA (1)...(19): siRNA sense strand
caaauaugacuucuuguuc

SEQ ID NO: 2089424 - RNA, 19 nt, Homo sapiens
  misc_RNA (1)...(19): siRNA sense strand
uaucagaggccauagcaaa

SEQ ID NO: 2089425 - RNA, 19 nt, Homo sapiens
  misc_RNA (1)...(19): siRNA sense strand
gcacaugaacuucccagau

SEQ ID NO: 2089426 - RNA, 19 nt, Homo sapiens
  misc_RNA (1)...(19): siRNA sense strand
agaaaaggcuaaucguaua

SEQ ID NO: 2089427 - RNA, 19 nt, Homo sapiens
  misc_RNA (1)...(19): siRNA sense strand
cacaugaacuucccagauc

SEQ ID NO: 2089428 - RNA, 19 nt, Homo sapiens
  misc_RNA (1)...(19): siRNA sense strand
gacaagauaauucaaguca

SEQ ID NO: 2089429 - RNA, 19 nt, Homo sapiens
  misc_RNA (1)...(19): siRNA sense strand
cagaaaucaccuauguuua

SEQ ID NO: 2089430 - RNA, 19 nt, Homo sapiens
  misc_RNA (1)...(19): siRNA sense strand
ucucaaacgucaaauccuu

SEQ ID NO: 2089431 - RNA, 19 nt, Homo sapiens
  misc_RNA (1)...(19): siRNA sense strand
agaaugagucuucagauga

SEQ ID NO: 2089432 - RNA, 19 nt, Homo sapiens
  misc_RNA (1)...(19): siRNA sense strand
ggucaugucugagaagaag

SEQ ID NO: 2089433 - RNA, 19 nt, Homo sapiens
  misc_RNA (1)...(19): siRNA sense strand
gaagguuugucagaugaug

SEQ ID NO: 2089434 - RNA, 19 nt, Homo sapiens
  misc_RNA (1)...(19): siRNA sense strand
caaggacauucacacucua

SEQ ID NO: 2089435 - RNA, 19 nt, Homo sapiens
  misc_RNA (1)...(19): siRNA sense strand
ggaagcaaucugaagaaga

SEQ ID NO: 2089436 - RNA, 19 nt, Homo sapiens
  misc_RNA (1)...(19): siRNA sense strand
gaaaagaaagguagaagga

SEQ ID NO: 2089437 - RNA, 19 nt, Homo sapiens
  misc_RNA (1)...(19): siRNA sense strand
auacuaaguugcagaauac

SEQ ID NO: 2089438 - RNA, 19 nt, Homo sapiens
  misc_RNA (1)...(19): siRNA sense strand
gaucauguagaaacuaaug

SEQ ID NO: 2089439 - RNA, 19 nt, Homo sapiens
  misc_RNA (1)...(19): siRNA sense strand
ccaaauauugcauucauca

SEQ ID NO: 2089440 - RNA, 19 nt, Homo sapiens
  misc_RNA (1)...(19): siRNA sense strand
uauaauaucagaggccaua

SEQ ID NO: 2089441 - RNA, 19 nt, Homo sapiens
  misc_RNA (1)...(19): siRNA sense strand
gucagaugaugcauuugua

SEQ ID NO: 2089442 - RNA, 19 nt, Homo sapiens
  misc_RNA (1)...(19): siRNA sense strand
ugacuaaugcaucuaauuc

SEQ ID NO: 2089443 - RNA, 19 nt, Homo sapiens
  misc_RNA (1)...(19): siRNA sense strand
ucagauggcaguccaaugu

SEQ ID NO: 2089444 - RNA, 19 nt, Homo sapiens
  misc_RNA (1)...(19): siRNA sense strand
uuagaagguuugucagaug

SEQ ID NO: 2089445 - RNA, 19 nt, Homo sapiens
  misc_RNA (1)...(19): siRNA sense strand
acaaggacauucacacucu

SEQ ID NO: 2089446 - RNA, 19 nt, Homo sapiens
  misc_RNA (1)...(19): siRNA sense strand
caccacagaugacuaaugc

SEQ ID NO: 2089447 - RNA, 19 nt, Homo sapiens
  misc_RNA (1)...(19): siRNA sense strand
uuugucagaugaugcauuu

SEQ ID NO: 2089448 - RNA, 19 nt, Homo sapiens
  misc_RNA (1)...(19): siRNA sense strand
caucagcauuuacaugaca

SEQ ID NO: 2089449 - RNA, 19 nt, Homo sapiens
  misc_RNA (1)...(19): siRNA sense strand
caacauucggacaagauaa

SEQ ID NO: 2089450 - RNA, 19 nt, Homo sapiens
  misc_RNA (1)...(19): siRNA sense strand
cuacucagcauauccuaaa

SEQ ID NO: 2089451 - RNA, 19 nt, Homo sapiens
  misc_RNA (1)...(19): siRNA sense strand
acaacagucuauuucaaug

SEQ ID NO: 2089452 - RNA, 19 nt, Homo sapiens
  misc_RNA (1)...(19): siRNA sense strand
cuauuucaaugcagcaauu

SEQ ID NO: 2089453 - RNA, 19 nt, Homo sapiens
  misc_RNA (1)...(19): siRNA sense strand
gaagggaagcaaucugaag

SEQ ID NO: 2089454 - RNA, 19 nt, Homo sapiens
  misc_RNA (1)...(19): siRNA sense strand
gaagaucaaaucgacaaau

SEQ ID NO: 2089455 - RNA, 19 nt, Homo sapiens
  misc_RNA (1)...(19): siRNA sense strand
guucugggacauauacuaa

SEQ ID NO: 2089456 - RNA, 19 nt, Homo sapiens
  misc_RNA (1)...(19): siRNA sense strand
gcucggaguuggcauucau

SEQ ID NO: 2089457 - RNA, 19 nt, Homo sapiens
  misc_RNA (1)...(19): siRNA sense strand
guguagcagucaucaagaa

SEQ ID NO: 2089458 - RNA, 19 nt, Homo sapiens
  misc_RNA (1)...(19): siRNA sense strand
agaaaucaccuauguuuac

SEQ ID NO: 2089459 - RNA, 19 nt, Homo sapiens
  misc_RNA (1)...(19): siRNA sense strand
cagcuacuaccauuucaaa

SEQ ID NO: 2089460 - RNA, 19 nt, Homo sapiens
  misc_RNA (1)...(19): siRNA sense strand
gaccuugaucggcaguuua

SEQ ID NO: 2089461 - RNA, 19 nt, Homo sapiens
  misc_RNA (1)...(19): siRNA sense strand
gcagucaucaagaaggaaa

SEQ ID NO: 2089462 - RNA, 19 nt, Homo sapiens
  misc_RNA (1)...(19): siRNA sense strand
gcaucuaauucacaacagu

SEQ ID NO: 2089463 - RNA, 19 nt, Homo sapiens
  misc_RNA (1)...(19): siRNA sense strand
caccaugacuuugccuuau

SEQ ID NO: 2089464 - RNA, 19 nt, Homo sapiens
  misc_RNA (1)...(19): siRNA sense strand
guacuucacuacgcucaca

SEQ ID NO: 2089465 - RNA, 19 nt, Homo sapiens
  misc_RNA (1)...(19): siRNA sense strand
uagaagggaagcaaucuga

SEQ ID NO: 2089466 - RNA, 19 nt, Homo sapiens
  misc_RNA (1)...(19): siRNA sense strand
uagcccagcugaacaugug

SEQ ID NO: 2089467 - RNA, 19 nt, Homo sapiens
  misc_RNA (1)...(19): siRNA sense strand
aaagguagaaggaugaaau

SEQ ID NO: 2089468 - RNA, 19 nt, Homo sapiens
  misc_RNA (1)...(19): siRNA sense strand
gaaaaggcuaaucguauaa

SEQ ID NO: 2089469 - RNA, 19 nt, Homo sapiens
  misc_RNA (1)...(19): siRNA sense strand
ggaaucagaaagcaagcaa

SEQ ID NO: 2089470 - RNA, 19 nt, Homo sapiens
  misc_RNA (1)...(19): siRNA sense strand
gaaucaagcaagaaucuac

SEQ ID NO: 2089471 - RNA, 19 nt, Homo sapiens
  misc_RNA (1)...(19): siRNA sense strand
auagaggaaucaagcaaga

SEQ ID NO: 2089472 - RNA, 19 nt, Homo sapiens
  misc_RNA (1)...(19): siRNA sense strand
uagcagucaucaagaagga

SEQ ID NO: 2089473 - RNA, 19 nt, Homo sapiens
  misc_RNA (1)...(19): siRNA sense strand
ccaaacagucuacuucagu

SEQ ID NO: 2089474 - RNA, 19 nt, Homo sapiens
  misc_RNA (1)...(19): siRNA sense strand
aaacuuuccuacugcuuca

SEQ ID NO: 2089475 - RNA, 19 nt, Homo sapiens
  misc_RNA (1)...(19): siRNA sense strand
ccaaugaacaacaaacaca

SEQ ID NO: 2089476 - RNA, 19 nt, Homo sapiens
  misc_RNA (1)...(19): siRNA sense strand
ugaagaagagguuaaaggu

SEQ ID NO: 2089477 - RNA, 19 nt, Homo sapiens
  misc_RNA (1)...(19): siRNA sense strand
gggaagcaaucugaagaag

SEQ ID NO: 2089478 - RNA, 19 nt, Homo sapiens
  misc_RNA (1)...(19): siRNA sense strand
gaaccguugcacauagauu

SEQ ID NO: 2089479 - RNA, 19 nt, Homo sapiens
  misc_RNA (1)...(19): siRNA sense strand
cgaguaaugagcccugaaa

SEQ ID NO: 2089480 - RNA, 19 nt, Homo sapiens
  misc_RNA (1)...(19): siRNA sense strand
caauauuccacgaguaaug

SEQ ID NO: 2089481 - RNA, 19 nt, Homo sapiens
  misc_RNA (1)...(19): siRNA sense strand
gagaauuuacuucaucaag

SEQ ID NO: 2089482 - RNA, 19 nt, Homo sapiens
  misc_RNA (1)...(19): siRNA sense strand
ggaaucaagcaagaaucua

SEQ ID NO: 2089483 - RNA, 19 nt, Homo sapiens
  misc_RNA (1)...(19): siRNA sense strand
caacaaggacauucacacu

SEQ ID NO: 2089484 - RNA, 19 nt, Homo sapiens
  misc_RNA (1)...(19): siRNA sense strand
gaugaugcauuuguacaac

SEQ ID NO: 2089485 - RNA, 19 nt, Homo sapiens
  misc_RNA (1)...(19): siRNA sense strand
cagcauacauuaaaagauc

SEQ ID NO: 2089486 - RNA, 19 nt, Homo sapiens
  misc_RNA (1)...(19): siRNA sense strand
ucaccaaacagucuacuuc

SEQ ID NO: 2089487 - RNA, 19 nt, Homo sapiens
  misc_RNA (1)...(19): siRNA sense strand
cgcaauauuccacgaguaa

SEQ ID NO: 2089488 - RNA, 19 nt, Homo sapiens
  misc_RNA (1)...(19): siRNA sense strand
ugaccuugaucggcaguuu

SEQ ID NO: 2089489 - RNA, 19 nt, Homo sapiens
  misc_RNA (1)...(19): siRNA sense strand
gaucaaaggucaaauauuc

SEQ ID NO: 2089490 - RNA, 19 nt, Homo sapiens
  misc_RNA (1)...(19): siRNA sense strand
gaacaaagcuuggcaucuu

SEQ ID NO: 2089491 - RNA, 19 nt, Homo sapiens
  misc_RNA (1)...(19): siRNA sense strand
gcaaagaacucucagaauc

SEQ ID NO: 2089492 - RNA, 19 nt, Homo sapiens
  misc_RNA (1)...(19): siRNA sense strand
gaagagcaauggaaguuaa

SEQ ID NO: 2089493 - RNA, 19 nt, Homo sapiens
  misc_RNA (1)...(19): siRNA sense strand
gaaauugaguuaucucuuc

SEQ ID NO: 2089494 - RNA, 19 nt, Homo sapiens
  misc_RNA (1)...(19): siRNA sense strand
gaagguaucuuucguggau

SEQ ID NO: 2089495 - RNA, 19 nt, Homo sapiens
  misc_RNA (1)...(19): siRNA sense strand
gguccuaucuccaagaaua

SEQ ID NO: 2089496 - RNA, 19 nt, Homo sapiens
  misc_RNA (1)...(19): siRNA sense strand
gcaagcaacucaugcagaa

SEQ ID NO: 2089497 - RNA, 19 nt, Homo sapiens
  misc_RNA (1)...(19): siRNA sense strand
gaagcucuccuacuuauaa

SEQ ID NO: 2089498 - RNA, 19 nt, Homo sapiens
  misc_RNA (1)...(19): siRNA sense strand
gcaccaagcaguacaaauu

SEQ ID NO: 2089499 - RNA, 19 nt, Homo sapiens
  misc_RNA (1)...(19): siRNA sense strand
gaauauaacuucacuucuc

SEQ ID NO: 2089500 - RNA, 19 nt, Homo sapiens
  misc_RNA (1)...(19): siRNA sense strand
uaaacuagaagcccaauua

SEQ ID NO: 2089501 - RNA, 19 nt, Homo sapiens
  misc_RNA (1)...(19): siRNA sense strand
ggaaauggaagaaaugauu

SEQ ID NO: 2089502 - RNA, 19 nt, Homo sapiens
  misc_RNA (1)...(19): siRNA sense strand
gaauacugguuccgauuaa

SEQ ID NO: 2089503 - RNA, 19 nt, Homo sapiens
  misc_RNA (1)...(19): siRNA sense strand
gcaagauuaugaacucaaa

SEQ ID NO: 2089504 - RNA, 19 nt, Homo sapiens
  misc_RNA (1)...(19): siRNA sense strand
uagaagagcugcaggauag

SEQ ID NO: 2089505 - RNA, 19 nt, Homo sapiens
  misc_RNA (1)...(19): siRNA sense strand
gcaaugauccacaguuuga

SEQ ID NO: 2089506 - RNA, 19 nt, Homo sapiens
  misc_RNA (1)...(19): siRNA sense strand
gaugaugugucuuuacuau

SEQ ID NO: 2089507 - RNA, 19 nt, Homo sapiens
  misc_RNA (1)...(19): siRNA sense strand
ggacuuggaucgauaccuu

SEQ ID NO: 2089508 - RNA, 19 nt, Homo sapiens
  misc_RNA (1)...(19): siRNA sense strand
gagugaagcucuccuacuu

SEQ ID NO: 2089509 - RNA, 19 nt, Homo sapiens
  misc_RNA (1)...(19): siRNA sense strand
ggcagugggucuacuauaa

SEQ ID NO: 2089510 - RNA, 19 nt, Homo sapiens
  misc_RNA (1)...(19): siRNA sense strand
gaaauuugcuuaccuucca

SEQ ID NO: 2089511 - RNA, 19 nt, Homo sapiens
  misc_RNA (1)...(19): siRNA sense strand
ccaaguggaucaauaacaa

SEQ ID NO: 2089512 - RNA, 19 nt, Homo sapiens
  misc_RNA (1)...(19): siRNA sense strand
uaauacggcuaguuaauga

SEQ ID NO: 2089513 - RNA, 19 nt, Homo sapiens
  misc_RNA (1)...(19): siRNA sense strand
uaaaggauauugccuaugg

SEQ ID NO: 2089514 - RNA, 19 nt, Homo sapiens
  misc_RNA (1)...(19): siRNA sense strand
gaagcccaauuaaaggaua

SEQ ID NO: 2089515 - RNA, 19 nt, Homo sapiens
  misc_RNA (1)...(19): siRNA sense strand
caagagaugccuaauagaa

SEQ ID NO: 2089516 - RNA, 19 nt, Homo sapiens
  misc_RNA (1)...(19): siRNA sense strand
aaggagacaucccaaauuu

SEQ ID NO: 2089517 - RNA, 19 nt, Homo sapiens
  misc_RNA (1)...(19): siRNA sense strand
gcaacaacuugaugaacuu

SEQ ID NO: 2089518 - RNA, 19 nt, Homo sapiens
  misc_RNA (1)...(19): siRNA sense strand
acaagaaacuucaacaaca

SEQ ID NO: 2089519 - RNA, 19 nt, Homo sapiens
  misc_RNA (1)...(19): siRNA sense strand
ccaggagaauauuuacaua

SEQ ID NO: 2089520 - RNA, 19 nt, Homo sapiens
  misc_RNA (1)...(19): siRNA sense strand
gcacguauccauaaacuag

SEQ ID NO: 2089521 - RNA, 19 nt, Homo sapiens
  misc_RNA (1)...(19): siRNA sense strand
aaacaagagaugccuaaua

SEQ ID NO: 2089522 - RNA, 19 nt, Homo sapiens
  misc_RNA (1)...(19): siRNA sense strand
gccagaaguuguucaaaga

SEQ ID NO: 2089523 - RNA, 19 nt, Homo sapiens
  misc_RNA (1)...(19): siRNA sense strand
caccauccauguuauauug

SEQ ID NO: 2089524 - RNA, 19 nt, Homo sapiens
  misc_RNA (1)...(19): siRNA sense strand
uagcaaugauccacaguuu

SEQ ID NO: 2089525 - RNA, 19 nt, Homo sapiens
  misc_RNA (1)...(19): siRNA sense strand
gaaacaugcuaauuaugca

SEQ ID NO: 2089526 - RNA, 19 nt, Homo sapiens
  misc_RNA (1)...(19): siRNA sense strand
uaacaccuguagauaagaa

SEQ ID NO: 2089527 - RNA, 19 nt, Homo sapiens
  misc_RNA (1)...(19): siRNA sense strand
guaccuaugcuuucuauga

SEQ ID NO: 2089528 - RNA, 19 nt, Homo sapiens
  misc_RNA (1)...(19): siRNA sense strand
gcagcaagauuaugaacuc

SEQ ID NO: 2089529 - RNA, 19 nt, Homo sapiens
  misc_RNA (1)...(19): siRNA sense strand
auaaacagcuaguagagaa

SEQ ID NO: 2089530 - RNA, 19 nt, Homo sapiens
  misc_RNA (1)...(19): siRNA sense strand
ggagaauauuuacauagga

SEQ ID NO: 2089531 - RNA, 19 nt, Homo sapiens
  misc_RNA (1)...(19): siRNA sense strand
gagcauaugcagucguuaa

SEQ ID NO: 2089532 - RNA, 19 nt, Homo sapiens
  misc_RNA (1)...(19): siRNA sense strand
gaucaagcaauucgacuuu

SEQ ID NO: 2089533 - RNA, 19 nt, Homo sapiens
  misc_RNA (1)...(19): siRNA sense strand
gugaagcucuccuacuuau

SEQ ID NO: 2089534 - RNA, 19 nt, Homo sapiens
  misc_RNA (1)...(19): siRNA sense strand
aagaauggccaccaaguua

SEQ ID NO: 2089535 - RNA, 19 nt, Homo sapiens
  misc_RNA (1)...(19): siRNA sense strand
aacaagagaugccuaauag

SEQ ID NO: 2089536 - RNA, 19 nt, Homo sapiens
  misc_RNA (1)...(19): siRNA sense strand
caacaacacggacaaugaa

SEQ ID NO: 2089537 - RNA, 19 nt, Homo sapiens
  misc_RNA (1)...(19): siRNA sense strand
ggucuaaaccucuuuggaa

SEQ ID NO: 2089538 - RNA, 19 nt, Homo sapiens
  misc_RNA (1)...(19): siRNA sense strand
caaacuccauacaauaaug

SEQ ID NO: 2089539 - RNA, 19 nt, Homo sapiens
  misc_RNA (1)...(19): siRNA sense strand
ggcaaacuccauacaauaa

SEQ ID NO: 2089540 - RNA, 19 nt, Homo sapiens
  misc_RNA (1)...(19): siRNA sense strand
ggaacuggaagacagauuu

SEQ ID NO: 2089541 - RNA, 19 nt, Homo sapiens
  misc_RNA (1)...(19): siRNA sense strand
ucaagagaauagagaacua

SEQ ID NO: 2089542 - RNA, 19 nt, Homo sapiens
  misc_RNA (1)...(19): siRNA sense strand
gaaauggaagaaaugauug

SEQ ID NO: 2089543 - RNA, 19 nt, Homo sapiens
  misc_RNA (1)...(19): siRNA sense strand
gcuaguuaaugacaagaaa

SEQ ID NO: 2089544 - RNA, 19 nt, Homo sapiens
  misc_RNA (1)...(19): siRNA sense strand
gcacagaauaugaaacaau

SEQ ID NO: 2089545 - RNA, 19 nt, Homo sapiens
  misc_RNA (1)...(19): siRNA sense strand
gagcugcaggauagaauua

SEQ ID NO: 2089546 - RNA, 19 nt, Homo sapiens
  misc_RNA (1)...(19): siRNA sense strand
caaagaacucucagaauca

SEQ ID NO: 2089547 - RNA, 19 nt, Homo sapiens
  misc_RNA (1)...(19): siRNA sense strand
ccacagauggcaacuuaaa

SEQ ID NO: 2089548 - RNA, 19 nt, Homo sapiens
  misc_RNA (1)...(19): siRNA sense strand
gcacaugacagguguaucu

SEQ ID NO: 2089549 - RNA, 19 nt, Homo sapiens
  misc_RNA (1)...(19): siRNA sense strand
caaugaauauggacuugga

SEQ ID NO: 2089550 - RNA, 19 nt, Homo sapiens
  misc_RNA (1)...(19): siRNA sense strand
gacgagauguggaaaugga

SEQ ID NO: 2089551 - RNA, 19 nt, Homo sapiens
  misc_RNA (1)...(19): siRNA sense strand
gaagaggacaugucagcuu

SEQ ID NO: 2089552 - RNA, 19 nt, Homo sapiens
  misc_RNA (1)...(19): siRNA sense strand
gcaccaagaccuaaaccaa

SEQ ID NO: 2089553 - RNA, 19 nt, Homo sapiens
  misc_RNA (1)...(19): siRNA sense strand
ugacucuguugaugaauuu

SEQ ID NO: 2089554 - RNA, 19 nt, Homo sapiens
  misc_RNA (1)...(19): siRNA sense strand
gaagaagccagaggagaaa

SEQ ID NO: 2089555 - RNA, 19 nt, Homo sapiens
  misc_RNA (1)...(19): siRNA sense strand
ggucaaauauucgggacaa

SEQ ID NO: 2089556 - RNA, 19 nt, Homo sapiens
  misc_RNA (1)...(19): siRNA sense strand
uuccacagauggcaacuua

SEQ ID NO: 2089557 - RNA, 19 nt, Homo sapiens
  misc_RNA (1)...(19): siRNA sense strand
ggacaauguagaaaugauu

SEQ ID NO: 2089558 - RNA, 19 nt, Homo sapiens
  misc_RNA (1)...(19): siRNA sense strand
gaacagcaagcuacagauc

SEQ ID NO: 2089559 - RNA, 19 nt, Homo sapiens
  misc_RNA (1)...(19): siRNA sense strand
gcaauacagagaugacuug

SEQ ID NO: 2089560 - RNA, 19 nt, Homo sapiens
  misc_RNA (1)...(19): siRNA sense strand
caacugaagacuuaggaaa

SEQ ID NO: 2089561 - RNA, 19 nt, Homo sapiens
  misc_RNA (1)...(19): siRNA sense strand
gauggcaacuuaaaugaac

SEQ ID NO: 2089562 - RNA, 19 nt, Homo sapiens
  misc_RNA (1)...(19): siRNA sense strand
agagaaaguucaugagcuu

SEQ ID NO: 2089563 - RNA, 19 nt, Homo sapiens
  misc_RNA (1)...(19): siRNA sense strand
cucaauaucuuguucaugu

SEQ ID NO: 2089564 - RNA, 19 nt, Homo sapiens
  misc_RNA (1)...(19): siRNA sense strand
ccaggagaaugauauuaau

SEQ ID NO: 2089565 - RNA, 19 nt, Homo sapiens
  misc_RNA (1)...(19): siRNA sense strand
gagaacagcaagcuacaga

SEQ ID NO: 2089566 - RNA, 19 nt, Homo sapiens
  misc_RNA (1)...(19): siRNA sense strand
gaagccagaggagaaauaa

SEQ ID NO: 2089567 - RNA, 19 nt, Homo sapiens
  misc_RNA (1)...(19): siRNA sense strand
gggacgagauguggaaaug

SEQ ID NO: 2089568 - RNA, 19 nt, Homo sapiens
  misc_RNA (1)...(19): siRNA sense strand
ccuuaaugauucucaagua

SEQ ID NO: 2089569 - RNA, 19 nt, Homo sapiens
  misc_RNA (1)...(19): siRNA sense strand
agugaugacuguauuauuc

SEQ ID NO: 2089570 - RNA, 19 nt, Homo sapiens
  misc_RNA (1)...(19): siRNA sense strand
ucaagcaauucgacuuuau

SEQ ID NO: 2089571 - RNA, 19 nt, Homo sapiens
  misc_RNA (1)...(19): siRNA sense strand
ugaaacaauugcagcaugu

SEQ ID NO: 2089572 - RNA, 19 nt, Homo sapiens
  misc_RNA (1)...(19): siRNA sense strand
acagacaacucccguagug

SEQ ID NO: 2089573 - RNA, 19 nt, Homo sapiens
  misc_RNA (1)...(19): siRNA sense strand
ccuaugcuuucuaugauuu

SEQ ID NO: 2089574 - RNA, 19 nt, Homo sapiens
  misc_RNA (1)...(19): siRNA sense strand
gaacaaaagcaacaacuug

SEQ ID NO: 2089575 - RNA, 19 nt, Homo sapiens
  misc_RNA (1)...(19): siRNA sense strand
ugaagaagccagaggagaa

SEQ ID NO: 2089576 - RNA, 19 nt, Homo sapiens
  misc_RNA (1)...(19): siRNA sense strand
uuauucagcuucaagagaa

SEQ ID NO: 2089577 - RNA, 19 nt, Homo sapiens
  misc_RNA (1)...(19): siRNA sense strand
agaauacuaucacccuuga

SEQ ID NO: 2089578 - RNA, 19 nt, Homo sapiens
  misc_RNA (1)...(19): siRNA sense strand
ccaagcaguacaaauuuaa

SEQ ID NO: 2089579 - RNA, 19 nt, Homo sapiens
  misc_RNA (1)...(19): siRNA sense strand
uaucagggcugcacguauc

SEQ ID NO: 2089580 - RNA, 19 nt, Homo sapiens
  misc_RNA (1)...(19): siRNA sense strand
gcaacaguuuacuugaaga

SEQ ID NO: 2089581 - RNA, 19 nt, Homo sapiens
  misc_RNA (1)...(19): siRNA sense strand
gagcagauggugaagguau

SEQ ID NO: 2089582 - RNA, 19 nt, Homo sapiens
  misc_RNA (1)...(19): siRNA sense strand
ccuccagcauccucuguua

SEQ ID NO: 2089583 - RNA, 19 nt, Homo sapiens
  misc_RNA (1)...(19): siRNA sense strand
gcgaagagccagaaguugu

SEQ ID NO: 2089584 - RNA, 19 nt, Homo sapiens
  misc_RNA (1)...(19): siRNA sense strand
gcuggcaccauccauguua

SEQ ID NO: 2089585 - RNA, 19 nt, Homo sapiens
  misc_RNA (1)...(19): siRNA sense strand
ccagaaaucaugccagaug

SEQ ID NO: 2089586 - RNA, 19 nt, Homo sapiens
  misc_RNA (1)...(19): siRNA sense strand
gcucgagacugccuugaag

SEQ ID NO: 2089587 - RNA, 19 nt, Homo sapiens
  misc_RNA (1)...(19): siRNA sense strand
gauuaagaguucccaugga

SEQ ID NO: 2089588 - RNA, 19 nt, Homo sapiens
  misc_RNA (1)...(19): siRNA sense strand
gggcugcacguauccauaa

SEQ ID NO: 2089589 - RNA, 19 nt, Homo sapiens
  misc_RNA (1)...(19): siRNA sense strand
gcaaagaaguguaaacuga

SEQ ID NO: 2089590 - RNA, 19 nt, Homo sapiens
  misc_RNA (1)...(19): siRNA sense strand
gugaaagggucuaauauaa

SEQ ID NO: 2089591 - RNA, 19 nt, Homo sapiens
  misc_RNA (1)...(19): siRNA sense strand
gcagugagcuggcaucaug

SEQ ID NO: 2089592 - RNA, 19 nt, Homo sapiens
  misc_RNA (1)...(19): siRNA sense strand
gcugaaauauccuaaacua

SEQ ID NO: 2089593 - RNA, 19 nt, Homo sapiens
  misc_RNA (1)...(19): siRNA sense strand
gaaacaaggagaagaaauu

SEQ ID NO: 2089594 - RNA, 19 nt, Homo sapiens
  misc_RNA (1)...(19): siRNA sense strand
caacaggaaccuuggauua

SEQ ID NO: 2089595 - RNA, 19 nt, Homo sapiens
  misc_RNA (1)...(19): siRNA sense strand
gcagagugcucaacaggaa

SEQ ID NO: 2089596 - RNA, 19 nt, Homo sapiens
  misc_RNA (1)...(19): siRNA sense strand
gaugaugucucuuugaaau

SEQ ID NO: 2089597 - RNA, 19 nt, Homo sapiens
  misc_RNA (1)...(19): siRNA sense strand
caaaugcugugcuucauga

SEQ ID NO: 2089598 - RNA, 19 nt, Homo sapiens
  misc_RNA (1)...(19): siRNA sense strand
ggaagaacuugcugccaaa

SEQ ID NO: 2089599 - RNA, 19 nt, Homo sapiens
  misc_RNA (1)...(19): siRNA sense strand
caacguaacuuugcugaau

SEQ ID NO: 2089600 - RNA, 19 nt, Homo sapiens
  misc_RNA (1)...(19): siRNA sense strand
ccaaagagaaggcuaauga

SEQ ID NO: 2089601 - RNA, 19 nt, Homo sapiens
  misc_RNA (1)...(19): siRNA sense strand
ucacagacaucguuucaga

SEQ ID NO: 2089602 - RNA, 19 nt, Homo sapiens
  misc_RNA (1)...(19): siRNA sense strand
gaacauuaccugcugauca

SEQ ID NO: 2089603 - RNA, 19 nt, Homo sapiens
  misc_RNA (1)...(19): siRNA sense strand
caaggagacugcuauuuca

SEQ ID NO: 2089604 - RNA, 19 nt, Homo sapiens
  misc_RNA (1)...(19): siRNA sense strand
acaaaggaaugaaaucuug

SEQ ID NO: 2089605 - RNA, 19 nt, Homo sapiens
  misc_RNA (1)...(19): siRNA sense strand
ugaaagaggaaccuuauuu

SEQ ID NO: 2089606 - RNA, 19 nt, Homo sapiens
  misc_RNA (1)...(19): siRNA sense strand
aagaugaaguggacauuaa

SEQ ID NO: 2089607 - RNA, 19 nt, Homo sapiens
  misc_RNA (1)...(19): siRNA sense strand
ggucagcgguggcagugua

SEQ ID NO: 2089608 - RNA, 19 nt, Homo sapiens
  misc_RNA (1)...(19): siRNA sense strand
gugagcagcuugauguauu

SEQ ID NO: 2089609 - RNA, 19 nt, Homo sapiens
  misc_RNA (1)...(19): siRNA sense strand
auaaugaggucgaguuuga

SEQ ID NO: 2089610 - RNA, 19 nt, Homo sapiens
  misc_RNA (1)...(19): siRNA sense strand
acaggaaccuuggauuaua

SEQ ID NO: 2089611 - RNA, 19 nt, Homo sapiens
  misc_RNA (1)...(19): siRNA sense strand
cugaggagcuccauaaaga

SEQ ID NO: 2089612 - RNA, 19 nt, Homo sapiens
  misc_RNA (1)...(19): siRNA sense strand
gaagcacuguggaagaaga

SEQ ID NO: 2089613 - RNA, 19 nt, Homo sapiens
  misc_RNA (1)...(19): siRNA sense strand
ccaaagaugaugaauucua

SEQ ID NO: 2089614 - RNA, 19 nt, Homo sapiens
  misc_RNA (1)...(19): siRNA sense strand
ggagaagaaauucauaaug

SEQ ID NO: 2089615 - RNA, 19 nt, Homo sapiens
  misc_RNA (1)...(19): siRNA sense strand
ugaaggcccugaagaggaa

SEQ ID NO: 2089616 - RNA, 19 nt, Homo sapiens
  misc_RNA (1)...(19): siRNA sense strand
ugaaauagccgcugcuugu

SEQ ID NO: 2089617 - RNA, 19 nt, Homo sapiens
  misc_RNA (1)...(19): siRNA sense strand
acacuuggcucccuuaucu

SEQ ID NO: 2089618 - RNA, 19 nt, Homo sapiens
  misc_RNA (1)...(19): siRNA sense strand
gaacaaaggaaugaaaucu

SEQ ID NO: 2089619 - RNA, 19 nt, Homo sapiens
  misc_RNA (1)...(19): siRNA sense strand
uagaaaccauccaggcuuu

SEQ ID NO: 2089620 - RNA, 19 nt, Homo sapiens
  misc_RNA (1)...(19): siRNA sense strand
ccagugaaagggucuaaua

SEQ ID NO: 2089621 - RNA, 19 nt, Homo sapiens
  misc_RNA (1)...(19): siRNA sense strand
gugacgauguggacaauga

SEQ ID NO: 2089622 - RNA, 19 nt, Homo sapiens
  misc_RNA (1)...(19): siRNA sense strand
cagcauacaacguaacuuu

SEQ ID NO: 2089623 - RNA, 19 nt, Homo sapiens
  misc_RNA (1)...(19): siRNA sense strand
ccaaggagacugcuauuuc

SEQ ID NO: 2089624 - RNA, 19 nt, Homo sapiens
  misc_RNA (1)...(19): siRNA sense strand
gaaugucugugacgaugug

SEQ ID NO: 2089625 - RNA, 19 nt, Homo sapiens
  misc_RNA (1)...(19): siRNA sense strand
caagaugaaguggacauua

SEQ ID NO: 2089626 - RNA, 19 nt, Homo sapiens
  misc_RNA (1)...(19): siRNA sense strand
ucaaggcaaucgauacaga

SEQ ID NO: 2089627 - RNA, 19 nt, Homo sapiens
  misc_RNA (1)...(19): siRNA sense strand
gaaaaugccauaccugaaa

SEQ ID NO: 2089628 - RNA, 19 nt, Homo sapiens
  misc_RNA (1)...(19): siRNA sense strand
caggaaccuuggauuauau

SEQ ID NO: 2089629 - RNA, 19 nt, Homo sapiens
  misc_RNA (1)...(19): siRNA sense strand
ccauaaagagguucaagaa

SEQ ID NO: 2089630 - RNA, 19 nt, Homo sapiens
  misc_RNA (1)...(19): siRNA sense strand
gaaagaggaaccuuauuuu

SEQ ID NO: 2089631 - RNA, 19 nt, Homo sapiens
  misc_RNA (1)...(19): siRNA sense strand
gagcagagcagcauacaac

SEQ ID NO: 2089632 - RNA, 19 nt, Homo sapiens
  misc_RNA (1)...(19): siRNA sense strand
gaagauggagggugugaca

SEQ ID NO: 2089633 - RNA, 19 nt, Homo sapiens
  misc_RNA (1)...(19): siRNA sense strand
cagagcagcauacaacgua

SEQ ID NO: 2089634 - RNA, 19 nt, Homo sapiens
  misc_RNA (1)...(19): siRNA sense strand
acgaauugcccgaacauua

SEQ ID NO: 2089635 - RNA, 19 nt, Homo sapiens
  misc_RNA (1)...(19): siRNA sense strand
ggcaaucgauacagaaagu

SEQ ID NO: 2089636 - RNA, 19 nt, Homo sapiens
  misc_RNA (1)...(19): siRNA sense strand
caaugaugaugucucuuug

SEQ ID NO: 2089637 - RNA, 19 nt, Homo sapiens
  misc_RNA (1)...(19): siRNA sense strand
uaagaucucaugggacaua

SEQ ID NO: 2089638 - RNA, 19 nt, Homo sapiens
  misc_RNA (1)...(19): siRNA sense strand
ccugauauuuggcauguug

SEQ ID NO: 2089639 - RNA, 19 nt, Homo sapiens
  misc_RNA (1)...(19): siRNA sense strand
ugacagcaaagaaguguaa

SEQ ID NO: 2089640 - RNA, 19 nt, Homo sapiens
  misc_RNA (1)...(19): siRNA sense strand
gcugugccauuguguaugu

SEQ ID NO: 2089641 - RNA, 19 nt, Homo sapiens
  misc_RNA (1)...(19): siRNA sense strand
uaucugaggagcuccauaa

SEQ ID NO: 2089642 - RNA, 19 nt, Homo sapiens
  misc_RNA (1)...(19): siRNA sense strand
ugagcagcuugauguauuu

SEQ ID NO: 2089643 - RNA, 19 nt, Homo sapiens
  misc_RNA (1)...(19): siRNA sense strand
acaaugaugaugucucuuu

SEQ ID NO: 2089644 - RNA, 19 nt, Homo sapiens
  misc_RNA (1)...(19): siRNA sense strand
acacaccgaggcugaaaua

SEQ ID NO: 2089645 - RNA, 19 nt, Homo sapiens
  misc_RNA (1)...(19): siRNA sense strand
caacggacaagaugaagug

SEQ ID NO: 2089646 - RNA, 19 nt, Homo sapiens
  misc_RNA (1)...(19): siRNA sense strand
agagaaggcuaaugaggau

SEQ ID NO: 2089647 - RNA, 19 nt, Homo sapiens
  misc_RNA (1)...(19): siRNA sense strand
guguaugucugcagauuuc

SEQ ID NO: 2089648 - RNA, 19 nt, Homo sapiens
  misc_RNA (1)...(19): siRNA sense strand
gccagaaccugaggagaga

SEQ ID NO: 2089649 - RNA, 19 nt, Homo sapiens
  misc_RNA (1)...(19): siRNA sense strand
caaggagaagaaauucaua

SEQ ID NO: 2089650 - RNA, 19 nt, Homo sapiens
  misc_RNA (1)...(19): siRNA sense strand
gaacuugcugccaaagaga

SEQ ID NO: 2089651 - RNA, 19 nt, Homo sapiens
  misc_RNA (1)...(19): siRNA sense strand
gauggagggugugacaaau

SEQ ID NO: 2089652 - RNA, 19 nt, Homo sapiens
  misc_RNA (1)...(19): siRNA sense strand
uaggagagcugaggcuuca

SEQ ID NO: 2089653 - RNA, 19 nt, Homo sapiens
  misc_RNA (1)...(19): siRNA sense strand
ggagcuccauaaagagguu

SEQ ID NO: 2089654 - RNA, 19 nt, Homo sapiens
  misc_RNA (1)...(19): siRNA sense strand
ugacaaaugcugugcuuca

SEQ ID NO: 2089655 - RNA, 19 nt, Homo sapiens
  misc_RNA (1)...(19): siRNA sense strand
uggaagcacuguggaagaa

SEQ ID NO: 2089656 - RNA, 19 nt, Homo sapiens
  misc_RNA (1)...(19): siRNA sense strand
ucaguuggcucugcagaau

SEQ ID NO: 2089657 - RNA, 19 nt, Homo sapiens
  misc_RNA (1)...(19): siRNA sense strand
agugaaagggucuaauaua

SEQ ID NO: 2089658 - RNA, 19 nt, Homo sapiens
  misc_RNA (1)...(19): siRNA sense strand
agacugcuauuucaugcuu

SEQ ID NO: 2089659 - RNA, 19 nt, Homo sapiens
  misc_RNA (1)...(19): siRNA sense strand
cagcugaaauauccuaaac

SEQ ID NO: 2089660 - RNA, 19 nt, Homo sapiens
  misc_RNA (1)...(19): siRNA sense strand
acccauggcucaacuggaa

SEQ ID NO: 2089661 - RNA, 19 nt, Homo sapiens
  misc_RNA (1)...(19): siRNA sense strand
cgguggcaguguacaguua

SEQ ID NO: 2089662 - RNA, 19 nt, Homo sapiens
  misc_RNA (1)...(19): siRNA sense strand
aaucuugacugccauccuu

SEQ ID NO: 2089663 - RNA, 19 nt, Homo sapiens
  misc_RNA (1)...(19): siRNA sense strand
agacaucguuucagaacuc

SEQ ID NO: 2089664 - RNA, 19 nt, Homo sapiens
  misc_RNA (1)...(19): siRNA sense strand
cgaugccucugccguuuga

SEQ ID NO: 2089665 - RNA, 19 nt, Homo sapiens
  misc_RNA (1)...(19): siRNA sense strand
gaaauagccgcugcuugug

SEQ ID NO: 2089666 - RNA, 19 nt, Homo sapiens
  misc_RNA (1)...(19): siRNA sense strand
ggaacaaaggaaugaaauc

SEQ ID NO: 2089667 - RNA, 19 nt, Homo sapiens
  misc_RNA (1)...(19): siRNA sense strand
ugaggaugcugugccauug

SEQ ID NO: 2089668 - RNA, 19 nt, Homo sapiens
  misc_RNA (1)...(19): siRNA sense strand
cgagaagccagcaguguau

SEQ ID NO: 2089669 - RNA, 19 nt, Homo sapiens
  misc_RNA (1)...(19): siRNA sense strand
gaucugcucacuccgguau

SEQ ID NO: 2089670 - RNA, 19 nt, Homo sapiens
  misc_RNA (1)...(19): siRNA sense strand
caaaggaaugaaaucuuga

SEQ ID NO: 2089671 - RNA, 19 nt, Homo sapiens
  misc_RNA (1)...(19): siRNA sense strand
gacaaaugcugugcuucau

SEQ ID NO: 2089672 - RNA, 19 nt, Homo sapiens
  misc_RNA (1)...(19): siRNA sense strand
gcaccuacaaguaccugaa

SEQ ID NO: 2089673 - RNA, 19 nt, Homo sapiens
  misc_RNA (1)...(19): siRNA sense strand
cgaauugcccgaacauuac

SEQ ID NO: 2089674 - RNA, 19 nt, Homo sapiens
  misc_RNA (1)...(19): siRNA sense strand
ccgagaagccagcagugua

SEQ ID NO: 2089675 - RNA, 19 nt, Homo sapiens
  misc_RNA (1)...(19): siRNA sense strand
ggaaagugaggaugacucu

SEQ ID NO: 2089676 - RNA, 19 nt, Homo sapiens
  misc_RNA (1)...(19): siRNA sense strand
gaugaaguggacauuaaga

SEQ ID NO: 2089677 - RNA, 19 nt, Homo sapiens
  misc_RNA (1)...(19): siRNA sense strand
cuacaacggacaagaugaa

SEQ ID NO: 2089678 - RNA, 19 nt, Homo sapiens
  misc_RNA (1)...(19): siRNA sense strand
cugaacaccaggcucuuua

SEQ ID NO: 2089679 - RNA, 19 nt, Homo sapiens
  misc_RNA (1)...(19): siRNA sense strand
ucucgcauccucauuggua

SEQ ID NO: 2089680 - RNA, 19 nt, Homo sapiens
  misc_RNA (1)...(19): siRNA sense strand
ccccaaagaugaugaauuc

SEQ ID NO: 2089681 - RNA, 19 nt, Homo sapiens
  misc_RNA (1)...(19): siRNA sense strand
acguaacuuugcugaauuu

SEQ ID NO: 2089682 - RNA, 19 nt, Homo sapiens
  misc_RNA (1)...(19): siRNA sense strand
caagugugacagcaaagaa

SEQ ID NO: 2089683 - RNA, 19 nt, Homo sapiens
  misc_RNA (1)...(19): siRNA sense strand
caaugacuaccugcagaua

SEQ ID NO: 2089684 - RNA, 19 nt, Homo sapiens
  misc_RNA (1)...(19): siRNA sense strand
augaugaugucucuuugaa

SEQ ID NO: 2089685 - RNA, 19 nt, Homo sapiens
  misc_RNA (1)...(19): siRNA sense strand
acauagagacaccugguuu

SEQ ID NO: 2089686 - RNA, 19 nt, Homo sapiens
  misc_RNA (1)...(19): siRNA sense strand
guggcaguguacaguuaua

SEQ ID NO: 2089687 - RNA, 19 nt, Homo sapiens
  misc_RNA (1)...(19): siRNA sense strand
caaggcaaucgauacagaa

SEQ ID NO: 2089688 - RNA, 19 nt, Homo sapiens
  misc_RNA (1)...(19): siRNA sense strand
gaucagaagccagaauguc

SEQ ID NO: 2089689 - RNA, 19 nt, Homo sapiens
  misc_RNA (1)...(19): siRNA sense strand
ggagaucgauuuggagaac

SEQ ID NO: 2089690 - RNA, 19 nt, Homo sapiens
  misc_RNA (1)...(19): siRNA sense strand
gcacugacgaggagggaaa

SEQ ID NO: 2089691 - RNA, 19 nt, Homo sapiens
  misc_RNA (1)...(19): siRNA sense strand
agauagcucugagggcuua

SEQ ID NO: 2089692 - RNA, 19 nt, Homo sapiens
  misc_RNA (1)...(19): siRNA sense strand
ggacgaggagaucgauuug

SEQ ID NO: 2089693 - RNA, 19 nt, Homo sapiens
  misc_RNA (1)...(19): siRNA sense strand
ucaagaaggagaauaagau

SEQ ID NO: 2089694 - RNA, 19 nt, Homo sapiens
  misc_RNA (1)...(19): siRNA sense strand
ggacgaggaggacggcaaa

SEQ ID NO: 2089695 - RNA, 19 nt, Homo sapiens
  misc_RNA (1)...(19): siRNA sense strand
caagaaggagaauaagaug

SEQ ID NO: 2089696 - RNA, 19 nt, Homo sapiens
  misc_RNA (1)...(19): siRNA sense strand
aauagcgacucggaagaua

SEQ ID NO: 2089697 - RNA, 19 nt, Homo sapiens
  misc_RNA (1)...(19): siRNA sense strand
uaucggcucucuccucauc

SEQ ID NO: 2089698 - RNA, 19 nt, Homo sapiens
  misc_RNA (1)...(19): siRNA sense strand
ggacggcaaacgcgagcua

SEQ ID NO: 2089699 - RNA, 19 nt, Homo sapiens
  misc_RNA (1)...(19): siRNA sense strand
acgaggagaucgauuugga

SEQ ID NO: 2089700 - RNA, 19 nt, Homo sapiens
  misc_RNA (1)...(19): siRNA sense strand
cagcugggauaccaauaca

SEQ ID NO: 2089701 - RNA, 19 nt, Homo sapiens
  misc_RNA (1)...(19): siRNA sense strand
gaaggagaauaagaugacu

SEQ ID NO: 2089702 - RNA, 19 nt, Homo sapiens
  misc_RNA (1)...(19): siRNA sense strand
ucaacgagcaccgcaagaa

SEQ ID NO: 2089703 - RNA, 19 nt, Homo sapiens
  misc_RNA (1)...(19): siRNA sense strand
gccucaagaaggagaauaa

SEQ ID NO: 2089704 - RNA, 19 nt, Homo sapiens
  misc_RNA (1)...(19): siRNA sense strand
gaucgauuuggagaacuua

SEQ ID NO: 2089705 - RNA, 19 nt, Homo sapiens
  misc_RNA (1)...(19): siRNA sense strand
gcugggauaccaauacauc

SEQ ID NO: 2089706 - RNA, 19 nt, Homo sapiens
  misc_RNA (1)...(19): siRNA sense strand
gcgaggaggaagacgaaga

SEQ ID NO: 2089707 - RNA, 19 nt, Homo sapiens
  misc_RNA (1)...(19): siRNA sense strand
ccaccaagggcgagaagau

SEQ ID NO: 2089708 - RNA, 19 nt, Homo sapiens
  misc_RNA (1)...(19): siRNA sense strand
gcgcgaggaggaagacgaa

SEQ ID NO: 2089709 - RNA, 19 nt, Homo sapiens
  misc_RNA (1)...(19): siRNA sense strand
gcccgaaggcggaacagau

SEQ ID NO: 2089710 - RNA, 19 nt, Homo sapiens
  misc_RNA (1)...(19): siRNA sense strand
gaucaugcuggccaucauc

SEQ ID NO: 2089711 - RNA, 19 nt, Homo sapiens
  misc_RNA (1)...(19): siRNA sense strand
caacgagcaccgcaagaac

SEQ ID NO: 2089712 - RNA, 19 nt, Homo sapiens
  misc_RNA (1)...(19): siRNA sense strand
acgaggagggaaacgcuua

SEQ ID NO: 2089713 - RNA, 19 nt, Homo sapiens
  misc_RNA (1)...(19): siRNA sense strand
agaucgauuuggagaacuu

SEQ ID NO: 2089714 - RNA, 19 nt, Homo sapiens
  misc_RNA (1)...(19): siRNA sense strand
aagaaggagaauaagauga

SEQ ID NO: 2089715 - RNA, 19 nt, Homo sapiens
  misc_RNA (1)...(19): siRNA sense strand
aggagaauaagaugacuug

SEQ ID NO: 2089716 - RNA, 19 nt, Homo sapiens
  misc_RNA (1)...(19): siRNA sense strand
cgacgagucuuccugcaua

SEQ ID NO: 2089717 - RNA, 19 nt, Homo sapiens
  misc_RNA (1)...(19): siRNA sense strand
uggaagaccuggaggaaga

SEQ ID NO: 2089718 - RNA, 19 nt, Homo sapiens
  misc_RNA (1)...(19): siRNA sense strand
gggacaggcugacggaguu

SEQ ID NO: 2089719 - RNA, 19 nt, Homo sapiens
  misc_RNA (1)...(19): siRNA sense strand
gaauccacaguaugaauuu

SEQ ID NO: 2089720 - RNA, 19 nt, Homo sapiens
  misc_RNA (1)...(19): siRNA sense strand
ccuaacugcugacaccaaa

SEQ ID NO: 2089721 - RNA, 19 nt, Homo sapiens
  misc_RNA (1)...(19): siRNA sense strand
ccacuaagggugagaagau

SEQ ID NO: 2089722 - RNA, 19 nt, Homo sapiens
  misc_RNA (1)...(19): siRNA sense strand
gagccuauuaucccuauga

SEQ ID NO: 2089723 - RNA, 19 nt, Homo sapiens
  misc_RNA (1)...(19): siRNA sense strand
uaacugcugacaccaaaga

SEQ ID NO: 2089724 - RNA, 19 nt, Homo sapiens
  misc_RNA (1)...(19): siRNA sense strand
gcugacaccaaagaaguua

SEQ ID NO: 2089725 - RNA, 19 nt, Homo sapiens
  misc_RNA (1)...(19): siRNA sense strand
ugaauccacaguaugaauu

SEQ ID NO: 2089726 - RNA, 19 nt, Homo sapiens
  misc_RNA (1)...(19): siRNA sense strand
gcacaaccaggagccuauu

SEQ ID NO: 2089727 - RNA, 19 nt, Homo sapiens
  misc_RNA (1)...(19): siRNA sense strand
gaggagcgagccuguagug

SEQ ID NO: 2089728 - RNA, 19 nt, Homo sapiens
  misc_RNA (1)...(19): siRNA sense strand
ggaggaggaggaagcugaa

SEQ ID NO: 2089729 - RNA, 19 nt, Homo sapiens
  misc_RNA (1)...(19): siRNA sense strand
caagaaagagaacaaaaug

SEQ ID NO: 2089730 - RNA, 19 nt, Homo sapiens
  misc_RNA (1)...(19): siRNA sense strand
acaggcagcccuagguuga

SEQ ID NO: 2089731 - RNA, 19 nt, Homo sapiens
  misc_RNA (1)...(19): siRNA sense strand
guauggcgcaguggaauug

SEQ ID NO: 2089732 - RNA, 19 nt, Homo sapiens
  misc_RNA (1)...(19): siRNA sense strand
gagaccaccaguacacuca

SEQ ID NO: 2089733 - RNA, 19 nt, Homo sapiens
  misc_RNA (1)...(19): siRNA sense strand
caaccaggagccuauuauc

SEQ ID NO: 2089734 - RNA, 19 nt, Homo sapiens
  misc_RNA (1)...(19): siRNA sense strand
cuggcuaccugcccuauag

SEQ ID NO: 2089735 - RNA, 19 nt, Homo sapiens
  misc_RNA (1)...(19): siRNA sense strand
agccagcgcuguugaaggu

SEQ ID NO: 2089736 - RNA, 19 nt, Homo sapiens
  misc_RNA (1)...(19): siRNA sense strand
gaggagaggaggacucacu

SEQ ID NO: 2089737 - RNA, 19 nt, Homo sapiens
  misc_RNA (1)...(19): siRNA sense strand
gguauggcgcaguggaauu

SEQ ID NO: 2089738 - RNA, 19 nt, Homo sapiens
  misc_RNA (1)...(19): siRNA sense strand
cacaaccaggagccuauua

SEQ ID NO: 2089739 - RNA, 19 nt, Homo sapiens
  misc_RNA (1)...(19): siRNA sense strand
gaccaccaguacacucaag

SEQ ID NO: 2089740 - RNA, 19 nt, Homo sapiens
  misc_RNA (1)...(19): siRNA sense strand
aguccugagugccguauga

SEQ ID NO: 2089741 - RNA, 19 nt, Homo sapiens
  misc_RNA (1)...(19): siRNA sense strand
gaucggaagaagcugacuu

SEQ ID NO: 2089742 - RNA, 19 nt, Homo sapiens
  misc_RNA (1)...(19): siRNA sense strand
caaguuccagcaccacaug

SEQ ID NO: 2089743 - RNA, 19 nt, Homo sapiens
  misc_RNA (1)...(19): siRNA sense strand
ggagaggaggacucacuag

SEQ ID NO: 2089744 - RNA, 19 nt, Homo sapiens
  misc_RNA (1)...(19): siRNA sense strand
gagacaggcagcccuaggu

SEQ ID NO: 2089745 - RNA, 19 nt, Homo sapiens
  misc_RNA (1)...(19): siRNA sense strand
ccugagugccguaugauuc

SEQ ID NO: 2089746 - RNA, 19 nt, Homo sapiens
  misc_RNA (1)...(19): siRNA sense strand
gaucaugcuggccaucauc

SEQ ID NO: 2089747 - RNA, 19 nt, Homo sapiens
  misc_RNA (1)...(19): siRNA sense strand
ggaggaggaggaggaggaa

SEQ ID NO: 2089748 - RNA, 19 nt, Homo sapiens
  misc_RNA (1)...(19): siRNA sense strand
gcaaguuccagcaccacau

SEQ ID NO: 2089749 - RNA, 19 nt, Homo sapiens
  misc_RNA (1)...(19): siRNA sense strand
gcccuagguugaccaugca

SEQ ID NO: 2089750 - RNA, 19 nt, Homo sapiens
  misc_RNA (1)...(19): siRNA sense strand
gcagggaguuuuacaucca

SEQ ID NO: 2089751 - RNA, 19 nt, Homo sapiens
  misc_RNA (1)...(19): siRNA sense strand
ggaggaggaagcugaagac

SEQ ID NO: 2089752 - RNA, 19 nt, Homo sapiens
  misc_RNA (1)...(19): siRNA sense strand
gggaggagaggaggacuca

SEQ ID NO: 2089753 - RNA, 19 nt, Homo sapiens
  misc_RNA (1)...(19): siRNA sense strand
gaaagagaacaaaaugaca

SEQ ID NO: 2089754 - RNA, 19 nt, Homo sapiens
  misc_RNA (1)...(19): siRNA sense strand
auacaacccugacccauua

SEQ ID NO: 2089755 - RNA, 19 nt, Homo sapiens
  misc_RNA (1)...(19): siRNA sense strand
ccagggauguguuugcaaa

SEQ ID NO: 2089756 - RNA, 19 nt, Homo sapiens
  misc_RNA (1)...(19): siRNA sense strand
gcaaagggacacugacaag

SEQ ID NO: 2089757 - RNA, 19 nt, Homo sapiens
  misc_RNA (1)...(19): siRNA sense strand
gaaguagaaaguguacaaa

SEQ ID NO: 2089758 - RNA, 19 nt, Homo sapiens
  misc_RNA (1)...(19): siRNA sense strand
caacccugacccauuagua

SEQ ID NO: 2089759 - RNA, 19 nt, Homo sapiens
  misc_RNA (1)...(19): siRNA sense strand
cauacaacccugacccauu

SEQ ID NO: 2089760 - RNA, 19 nt, Homo sapiens
  misc_RNA (1)...(19): siRNA sense strand
agaaguagaaaguguacaa

SEQ ID NO: 2089761 - RNA, 19 nt, Homo sapiens
  misc_RNA (1)...(19): siRNA sense strand
gaaagcuguguucccagaa

SEQ ID NO: 2089762 - RNA, 19 nt, Homo sapiens
  misc_RNA (1)...(19): siRNA sense strand
ucccagaaguagaaagugu

SEQ ID NO: 2089763 - RNA, 19 nt, Homo sapiens
  misc_RNA (1)...(19): siRNA sense strand
gcccagggauguguuugca

SEQ ID NO: 2089764 - RNA, 19 nt, Homo sapiens
  misc_RNA (1)...(19): siRNA sense strand
caaagggacacugacaagu

SEQ ID NO: 2089765 - RNA, 19 nt, Homo sapiens
  misc_RNA (1)...(19): siRNA sense strand
cauuaguacauuuggguuu

SEQ ID NO: 2089766 - RNA, 19 nt, Homo sapiens
  misc_RNA (1)...(19): siRNA sense strand
ccugacccauuaguacauu

SEQ ID NO: 2089767 - RNA, 19 nt, Homo sapiens
  misc_RNA (1)...(19): siRNA sense strand
guagaaaguguacaaaccu

SEQ ID NO: 2089768 - RNA, 19 nt, Homo sapiens
  misc_RNA (1)...(19): siRNA sense strand
aaagcuguguucccagaag

SEQ ID NO: 2089769 - RNA, 19 nt, Homo sapiens
  misc_RNA (1)...(19): siRNA sense strand
caagugugcccagggaugu

SEQ ID NO: 2089770 - RNA, 19 nt, Homo sapiens
  misc_RNA (1)...(19): siRNA sense strand
caccagcuccugcaaaugc

SEQ ID NO: 2089771 - RNA, 19 nt, Homo sapiens
  misc_RNA (1)...(19): siRNA sense strand
gaacacaucugcaguccua

SEQ ID NO: 2089772 - RNA, 19 nt, Homo sapiens
  misc_RNA (1)...(19): siRNA sense strand
guagacagcugaccuauga

SEQ ID NO: 2089773 - RNA, 19 nt, Homo sapiens
  misc_RNA (1)...(19): siRNA sense strand
gcaaauuccucaaucauga

SEQ ID NO: 2089774 - RNA, 19 nt, Homo sapiens
  misc_RNA (1)...(19): siRNA sense strand
gcacauagcccacuuccua

SEQ ID NO: 2089775 - RNA, 19 nt, Homo sapiens
  misc_RNA (1)...(19): siRNA sense strand
gaucucaccucauggcuua

SEQ ID NO: 2089776 - RNA, 19 nt, Homo sapiens
  misc_RNA (1)...(19): siRNA sense strand
gaaccucccuauucaauga

SEQ ID NO: 2089777 - RNA, 19 nt, Homo sapiens
  misc_RNA (1)...(19): siRNA sense strand
gaaagaaggagauacagua

SEQ ID NO: 2089778 - RNA, 19 nt, Homo sapiens
  misc_RNA (1)...(19): siRNA sense strand
gcaaugaugucagcgagua

SEQ ID NO: 2089779 - RNA, 19 nt, Homo sapiens
  misc_RNA (1)...(19): siRNA sense strand
gaaguaagccucacauaca

SEQ ID NO: 2089780 - RNA, 19 nt, Homo sapiens
  misc_RNA (1)...(19): siRNA sense strand
gagcuuagacaaucucuuu

SEQ ID NO: 2089781 - RNA, 19 nt, Homo sapiens
  misc_RNA (1)...(19): siRNA sense strand
ucagacagauuucucauau

SEQ ID NO: 2089782 - RNA, 19 nt, Homo sapiens
  misc_RNA (1)...(19): siRNA sense strand
gcacuuaucgcacuggaaa

SEQ ID NO: 2089783 - RNA, 19 nt, Homo sapiens
  misc_RNA (1)...(19): siRNA sense strand
gaaaacugcuguucccuuu

SEQ ID NO: 2089784 - RNA, 19 nt, Homo sapiens
  misc_RNA (1)...(19): siRNA sense strand
guuguccagucuuuaauua

SEQ ID NO: 2089785 - RNA, 19 nt, Homo sapiens
  misc_RNA (1)...(19): siRNA sense strand
gagcaaaaccauucaaaua

SEQ ID NO: 2089786 - RNA, 19 nt, Homo sapiens
  misc_RNA (1)...(19): siRNA sense strand
aagaugcacuccagaaauu

SEQ ID NO: 2089787 - RNA, 19 nt, Homo sapiens
  misc_RNA (1)...(19): siRNA sense strand
gcaagucaguauccgagaa

SEQ ID NO: 2089788 - RNA, 19 nt, Homo sapiens
  misc_RNA (1)...(19): siRNA sense strand
gcaguaauacggacucuug

SEQ ID NO: 2089789 - RNA, 19 nt, Homo sapiens
  misc_RNA (1)...(19): siRNA sense strand
gaaggaugguuggauguug

SEQ ID NO: 2089790 - RNA, 19 nt, Homo sapiens
  misc_RNA (1)...(19): siRNA sense strand
ucaggaaccucccuauuca

SEQ ID NO: 2089791 - RNA, 19 nt, Homo sapiens
  misc_RNA (1)...(19): siRNA sense strand
cagcuaguuucaugucaua

SEQ ID NO: 2089792 - RNA, 19 nt, Homo sapiens
  misc_RNA (1)...(19): siRNA sense strand
gccggcagcugauuuggua

SEQ ID NO: 2089793 - RNA, 19 nt, Homo sapiens
  misc_RNA (1)...(19): siRNA sense strand
ggacucuuguagauaauga

SEQ ID NO: 2089794 - RNA, 19 nt, Homo sapiens
  misc_RNA (1)...(19): siRNA sense strand
ucaaauacccaccaucuau

SEQ ID NO: 2089795 - RNA, 19 nt, Homo sapiens
  misc_RNA (1)...(19): siRNA sense strand
gcuacagugucugaaguua

SEQ ID NO: 2089796 - RNA, 19 nt, Homo sapiens
  misc_RNA (1)...(19): siRNA sense strand
agaaggagauacaguagga

SEQ ID NO: 2089797 - RNA, 19 nt, Homo sapiens
  misc_RNA (1)...(19): siRNA sense strand
cugaagaucucaccucaug

SEQ ID NO: 2089798 - RNA, 19 nt, Homo sapiens
  misc_RNA (1)...(19): siRNA sense strand
gaacuugaguagcauuagg

SEQ ID NO: 2089799 - RNA, 19 nt, Homo sapiens
  misc_RNA (1)...(19): siRNA sense strand
gauguuguccagucuuuaa

SEQ ID NO: 2089800 - RNA, 19 nt, Homo sapiens
  misc_RNA (1)...(19): siRNA sense strand
uacggacucuuguagauaa

SEQ ID NO: 2089801 - RNA, 19 nt, Homo sapiens
  misc_RNA (1)...(19): siRNA sense strand
ccaaggagaaagaaacaaa

SEQ ID NO: 2089802 - RNA, 19 nt, Homo sapiens
  misc_RNA (1)...(19): siRNA sense strand
gcuguucccuuuguuguga

SEQ ID NO: 2089803 - RNA, 19 nt, Homo sapiens
  misc_RNA (1)...(19): siRNA sense strand
aaacugcuguucccuuugu

SEQ ID NO: 2089804 - RNA, 19 nt, Homo sapiens
  misc_RNA (1)...(19): siRNA sense strand
caugucauaucaacaaugu

SEQ ID NO: 2089805 - RNA, 19 nt, Homo sapiens
  misc_RNA (1)...(19): siRNA sense strand
cagcugauuugguacaaug

SEQ ID NO: 2089806 - RNA, 19 nt, Homo sapiens
  misc_RNA (1)...(19): siRNA sense strand
gcgaguaccugaagaucuc

SEQ ID NO: 2089807 - RNA, 19 nt, Homo sapiens
  misc_RNA (1)...(19): siRNA sense strand
caggaauacuggaauacuu

SEQ ID NO: 2089808 - RNA, 19 nt, Homo sapiens
  misc_RNA (1)...(19): siRNA sense strand
uaaagaugcacuccagaaa

SEQ ID NO: 2089809 - RNA, 19 nt, Homo sapiens
  misc_RNA (1)...(19): siRNA sense strand
gaucaggaaccucccuauu

SEQ ID NO: 2089810 - RNA, 19 nt, Homo sapiens
  misc_RNA (1)...(19): siRNA sense strand
caccaucuaugaaauuuag

SEQ ID NO: 2089811 - RNA, 19 nt, Homo sapiens
  misc_RNA (1)...(19): siRNA sense strand
cgaaauggcagaaacagau

SEQ ID NO: 2089812 - RNA, 19 nt, Homo sapiens
  misc_RNA (1)...(19): siRNA sense strand
cuccagaaauugacugaaa

SEQ ID NO: 2089813 - RNA, 19 nt, Homo sapiens
  misc_RNA (1)...(19): siRNA sense strand
ugacuacgccuuccuaaca

SEQ ID NO: 2089814 - RNA, 19 nt, Homo sapiens
  misc_RNA (1)...(19): siRNA sense strand
gacagcaaauuccucaauc

SEQ ID NO: 2089815 - RNA, 19 nt, Homo sapiens
  misc_RNA (1)...(19): siRNA sense strand
gcacagacaagugaaaaua

SEQ ID NO: 2089816 - RNA, 19 nt, Homo sapiens
  misc_RNA (1)...(19): siRNA sense strand
gguagcagacacacaauug

SEQ ID NO: 2089817 - RNA, 19 nt, Homo sapiens
  misc_RNA (1)...(19): siRNA sense strand
ggauuucuguuagacuuga

SEQ ID NO: 2089818 - RNA, 19 nt, Homo sapiens
  misc_RNA (1)...(19): siRNA sense strand
caugaaggcuacggcauug

SEQ ID NO: 2089819 - RNA, 19 nt, Homo sapiens
  misc_RNA (1)...(19): siRNA sense strand
gcugugaugccuccucuuu

SEQ ID NO: 2089820 - RNA, 19 nt, Homo sapiens
  misc_RNA (1)...(19): siRNA sense strand
gaaauggcagaaacagaug

SEQ ID NO: 2089821 - RNA, 19 nt, Homo sapiens
  misc_RNA (1)...(19): siRNA sense strand
ggaaagaaggagauacagu

SEQ ID NO: 2089822 - RNA, 19 nt, Homo sapiens
  misc_RNA (1)...(19): siRNA sense strand
ggucacuucuggcgucaug

SEQ ID NO: 2089823 - RNA, 19 nt, Homo sapiens
  misc_RNA (1)...(19): siRNA sense strand
uaucugaaacgucaaguug

SEQ ID NO: 2089824 - RNA, 19 nt, Homo sapiens
  misc_RNA (1)...(19): siRNA sense strand
caaauacccaccaucuaug

SEQ ID NO: 2089825 - RNA, 19 nt, Homo sapiens
  misc_RNA (1)...(19): siRNA sense strand
ggagauacaguaggauuuc

SEQ ID NO: 2089826 - RNA, 19 nt, Homo sapiens
  misc_RNA (1)...(19): siRNA sense strand
gcagcuaguuucaugucau

SEQ ID NO: 2089827 - RNA, 19 nt, Homo sapiens
  misc_RNA (1)...(19): siRNA sense strand
caucuacuguaucuggauu

SEQ ID NO: 2089828 - RNA, 19 nt, Homo sapiens
  misc_RNA (1)...(19): siRNA sense strand
guaauacggacucuuguag

SEQ ID NO: 2089829 - RNA, 19 nt, Homo sapiens
  misc_RNA (1)...(19): siRNA sense strand
cagacagauuucucauauu

SEQ ID NO: 2089830 - RNA, 19 nt, Homo sapiens
  misc_RNA (1)...(19): siRNA sense strand
uguccagucuuuaauuaga

SEQ ID NO: 2089831 - RNA, 19 nt, Homo sapiens
  misc_RNA (1)...(19): siRNA sense strand
uaggauuucuguuagacuu

SEQ ID NO: 2089832 - RNA, 19 nt, Homo sapiens
  misc_RNA (1)...(19): siRNA sense strand
ucaacaaugugaguucaau

SEQ ID NO: 2089833 - RNA, 19 nt, Homo sapiens
  misc_RNA (1)...(19): siRNA sense strand
cuaguuucaugucauauca

SEQ ID NO: 2089834 - RNA, 19 nt, Homo sapiens
  misc_RNA (1)...(19): siRNA sense strand
ugucauaucaacaauguga

SEQ ID NO: 2089835 - RNA, 19 nt, Homo sapiens
  misc_RNA (1)...(19): siRNA sense strand
cuaaagaugcacuccagaa

SEQ ID NO: 2089836 - RNA, 19 nt, Homo sapiens
  misc_RNA (1)...(19): siRNA sense strand
cccauugugucguaaagaa

SEQ ID NO: 2089837 - RNA, 19 nt, Homo sapiens
  misc_RNA (1)...(19): siRNA sense strand
cuggagaccugcccauugu

SEQ ID NO: 2089838 - RNA, 19 nt, Homo sapiens
  misc_RNA (1)...(19): siRNA sense strand
caagucaguauccgagaaa

SEQ ID NO: 2089839 - RNA, 19 nt, Homo sapiens
  misc_RNA (1)...(19): siRNA sense strand
caacaaugugaguucaauu

SEQ ID NO: 2089840 - RNA, 19 nt, Homo sapiens
  misc_RNA (1)...(19): siRNA sense strand
ggcagaaacagaugaagga

SEQ ID NO: 2089841 - RNA, 19 nt, Homo sapiens
  misc_RNA (1)...(19): siRNA sense strand
ugagguagcagacacacaa

SEQ ID NO: 2089842 - RNA, 19 nt, Homo sapiens
  misc_RNA (1)...(19): siRNA sense strand
gguacaaugccagaaguaa

SEQ ID NO: 2089843 - RNA, 19 nt, Homo sapiens
  misc_RNA (1)...(19): siRNA sense strand
acagcaaauuccucaauca

SEQ ID NO: 2089844 - RNA, 19 nt, Homo sapiens
  misc_RNA (1)...(19): siRNA sense strand
caguggagcuuagacaauc

SEQ ID NO: 2089845 - RNA, 19 nt, Homo sapiens
  misc_RNA (1)...(19): siRNA sense strand
uacagugucugaaguuaca

SEQ ID NO: 2089846 - RNA, 19 nt, Homo sapiens
  misc_RNA (1)...(19): siRNA sense strand
aauacggacucuuguagau

SEQ ID NO: 2089847 - RNA, 19 nt, Homo sapiens
  misc_RNA (1)...(19): siRNA sense strand
cuguuagacuugaaugaaa

SEQ ID NO: 2089848 - RNA, 19 nt, Homo sapiens
  misc_RNA (1)...(19): siRNA sense strand
guccauugcccacuaaaga

SEQ ID NO: 2089849 - RNA, 19 nt, Homo sapiens
  misc_RNA (1)...(19): siRNA sense strand
gaugcacuccagaaauuga

SEQ ID NO: 2089850 - RNA, 19 nt, Homo sapiens
  misc_RNA (1)...(19): siRNA sense strand
gcuggagaccugcccauug

SEQ ID NO: 2089851 - RNA, 19 nt, Homo sapiens
  misc_RNA (1)...(19): siRNA sense strand
guagcagacacacaauuga

SEQ ID NO: 2089852 - RNA, 19 nt, Homo sapiens
  misc_RNA (1)...(19): siRNA sense strand
cagaaguaagccucacaua

SEQ ID NO: 2089853 - RNA, 19 nt, Homo sapiens
  misc_RNA (1)...(19): siRNA sense strand
caaauuccucaaucaugaa

SEQ ID NO: 2089854 - RNA, 19 nt, Homo sapiens
  misc_RNA (1)...(19): siRNA sense strand
ggaaaaguuugcacagaca

SEQ ID NO: 2089855 - RNA, 19 nt, Homo sapiens
  misc_RNA (1)...(19): siRNA sense strand
ggaauacuugcuacagugu

SEQ ID NO: 2089856 - RNA, 19 nt, Homo sapiens
  misc_RNA (1)...(19): siRNA sense strand
ggagaaagaaacaaaaugu

SEQ ID NO: 2089857 - RNA, 19 nt, Homo sapiens
  misc_RNA (1)...(19): siRNA sense strand
uagcagacacacaauugaa

SEQ ID NO: 2089858 - RNA, 19 nt, Homo sapiens
  misc_RNA (1)...(19): siRNA sense strand
gaugacaguggaacagaug

SEQ ID NO: 2089859 - RNA, 19 nt, Homo sapiens
  misc_RNA (1)...(19): siRNA sense strand
uaucaacaaugugaguuca

SEQ ID NO: 2089860 - RNA, 19 nt, Homo sapiens
  misc_RNA (1)...(19): siRNA sense strand
aagcaagucuuuucaucua

SEQ ID NO: 2089861 - RNA, 19 nt, Homo sapiens
  misc_RNA (1)...(19): siRNA sense strand
uuacuuagcccaggaauac

SEQ ID NO: 2089862 - RNA, 19 nt, Homo sapiens
  misc_RNA (1)...(19): siRNA sense strand
aaagaugcacuccagaaau

SEQ ID NO: 2089863 - RNA, 19 nt, Homo sapiens
  misc_RNA (1)...(19): siRNA sense strand
caagccauccugccaaaca

SEQ ID NO: 2089864 - RNA, 19 nt, Homo sapiens
  misc_RNA (1)...(19): siRNA sense strand
ggagaccugcccauugugu

SEQ ID NO: 2089865 - RNA, 19 nt, Homo sapiens
  misc_RNA (1)...(19): siRNA sense strand
caguaggauuucuguuaga

SEQ ID NO: 2089866 - RNA, 19 nt, Homo sapiens
  misc_RNA (1)...(19): siRNA sense strand
guacaaugccagaaguaag

SEQ ID NO: 2089867 - RNA, 19 nt, Homo sapiens
  misc_RNA (1)...(19): siRNA sense strand
uuagggccaugcugaauag

SEQ ID NO: 2089868 - RNA, 19 nt, Homo sapiens
  misc_RNA (1)...(19): siRNA sense strand
cagcugaccuaugagaaag

SEQ ID NO: 2089869 - RNA, 19 nt, Homo sapiens
  misc_RNA (1)...(19): siRNA sense strand
gcaacaggccgagaacagu

SEQ ID NO: 2089870 - RNA, 19 nt, Homo sapiens
  misc_RNA (1)...(19): siRNA sense strand
aaauacccaccaucuauga

SEQ ID NO: 2089871 - RNA, 19 nt, Homo sapiens
  misc_RNA (1)...(19): siRNA sense strand
caacagagcuggugaugau

SEQ ID NO: 2089872 - RNA, 19 nt, Homo sapiens
  misc_RNA (1)...(19): siRNA sense strand
ggacuccucuccagacuuu

SEQ ID NO: 2089873 - RNA, 19 nt, Homo sapiens
  misc_RNA (1)...(19): siRNA sense strand
ugagaaugcugaucccaua

SEQ ID NO: 2089874 - RNA, 19 nt, Homo sapiens
  misc_RNA (1)...(19): siRNA sense strand
gggcuaaggucuucagaug

SEQ ID NO: 2089875 - RNA, 19 nt, Homo sapiens
  misc_RNA (1)...(19): siRNA sense strand
ggauggcagugagcuaaua

SEQ ID NO: 2089876 - RNA, 19 nt, Homo sapiens
  misc_RNA (1)...(19): siRNA sense strand
gauccagagucuucucauu

SEQ ID NO: 2089877 - RNA, 19 nt, Homo sapiens
  misc_RNA (1)...(19): siRNA sense strand
gcuaaggucuucagaugag

SEQ ID NO: 2089878 - RNA, 19 nt, Homo sapiens
  misc_RNA (1)...(19): siRNA sense strand
gcagcagccucccaacuca

SEQ ID NO: 2089879 - RNA, 19 nt, Homo sapiens
  misc_RNA (1)...(19): siRNA sense strand
gaacuugacaggucuaaac

SEQ ID NO: 2089880 - RNA, 19 nt, Homo sapiens
  misc_RNA (1)...(19): siRNA sense strand
uggaugacauguggcauua

SEQ ID NO: 2089881 - RNA, 19 nt, Homo sapiens
  misc_RNA (1)...(19): siRNA sense strand
gcagacccauucucaaguc

SEQ ID NO: 2089882 - RNA, 19 nt, Homo sapiens
  misc_RNA (1)...(19): siRNA sense strand
gacggcagcccuugaguuu

SEQ ID NO: 2089883 - RNA, 19 nt, Homo sapiens
  misc_RNA (1)...(19): siRNA sense strand
ggaggaggacuaugaaagu

SEQ ID NO: 2089884 - RNA, 19 nt, Homo sapiens
  misc_RNA (1)...(19): siRNA sense strand
gaaaccagacugagaaugc

SEQ ID NO: 2089885 - RNA, 19 nt, Homo sapiens
  misc_RNA (1)...(19): siRNA sense strand
gaggaggacuaugaaagug

SEQ ID NO: 2089886 - RNA, 19 nt, Homo sapiens
  misc_RNA (1)...(19): siRNA sense strand
cggcagcccuugaguuugu

SEQ ID NO: 2089887 - RNA, 19 nt, Homo sapiens
  misc_RNA (1)...(19): siRNA sense strand
cagugacgcucaagaacuu

SEQ ID NO: 2089888 - RNA, 19 nt, Homo sapiens
  misc_RNA (1)...(19): siRNA sense strand
agcagaagcugguacaguu

SEQ ID NO: 2089889 - RNA, 19 nt, Homo sapiens
  misc_RNA (1)...(19): siRNA sense strand
ccacugauuuuaacuggua

SEQ ID NO: 2089890 - RNA, 19 nt, Homo sapiens
  misc_RNA (1)...(19): siRNA sense strand
ucaaguccauugccaaguc

SEQ ID NO: 2089891 - RNA, 19 nt, Homo sapiens
  misc_RNA (1)...(19): siRNA sense strand
ccugagggaugcaguggaa

SEQ ID NO: 2089892 - RNA, 19 nt, Homo sapiens
  misc_RNA (1)...(19): siRNA sense strand
ggaggaggaggacuaugaa

SEQ ID NO: 2089893 - RNA, 19 nt, Homo sapiens
  misc_RNA (1)...(19): siRNA sense strand
gaggaagacagaccaguuc

SEQ ID NO: 2089894 - RNA, 19 nt, Homo sapiens
  misc_RNA (1)...(19): siRNA sense strand
gaaggauggcagugagcua

SEQ ID NO: 2089895 - RNA, 19 nt, Homo sapiens
  misc_RNA (1)...(19): siRNA sense strand
cgacgugcccgcuuccaaa

SEQ ID NO: 2089896 - RNA, 19 nt, Homo sapiens
  misc_RNA (1)...(19): siRNA sense strand
gaaugcugaucccauacau

SEQ ID NO: 2089897 - RNA, 19 nt, Homo sapiens
  misc_RNA (1)...(19): siRNA sense strand
gcgaggaggaggaggacua

SEQ ID NO: 2089898 - RNA, 19 nt, Homo sapiens
  misc_RNA (1)...(19): siRNA sense strand
gcagaagcugguacaguug

SEQ ID NO: 2089899 - RNA, 19 nt, Homo sapiens
  misc_RNA (1)...(19): siRNA sense strand
guggaaaccagacugagaa

SEQ ID NO: 2089900 - RNA, 19 nt, Homo sapiens
  misc_RNA (1)...(19): siRNA sense strand
cagcagugacgcucaagaa

SEQ ID NO: 2089901 - RNA, 19 nt, Homo sapiens
  misc_RNA (1)...(19): siRNA sense strand
gaugacauguggcauuacg

SEQ ID NO: 2089902 - RNA, 19 nt, Homo sapiens
  misc_RNA (1)...(19): siRNA sense strand
gagcuaauacugcauuuug

SEQ ID NO: 2089903 - RNA, 19 nt, Homo sapiens
  misc_RNA (1)...(19): siRNA sense strand
uccagagucuucucauuca

SEQ ID NO: 2089904 - RNA, 19 nt, Homo sapiens
  misc_RNA (1)...(19): siRNA sense strand
gagcagaagcugguacagu

SEQ ID NO: 2089905 - RNA, 19 nt, Homo sapiens
  misc_RNA (1)...(19): siRNA sense strand
gcagugacgcucaagaacu

SEQ ID NO: 2089906 - RNA, 19 nt, Homo sapiens
  misc_RNA (1)...(19): siRNA sense strand
gaggaggaggacuaugaaa

SEQ ID NO: 2089907 - RNA, 19 nt, Homo sapiens
  misc_RNA (1)...(19): siRNA sense strand
gugcagcagugacgcucaa

SEQ ID NO: 2089908 - RNA, 19 nt, Homo sapiens
  misc_RNA (1)...(19): siRNA sense strand
gcugccaucuacaacacaa

SEQ ID NO: 2089909 - RNA, 19 nt, Homo sapiens
  misc_RNA (1)...(19): siRNA sense strand
gugagcuaauacugcauuu

SEQ ID NO: 2089910 - RNA, 19 nt, Homo sapiens
  misc_RNA (1)...(19): siRNA sense strand
gguuaaugaugcaaugaac

SEQ ID NO: 2089911 - RNA, 19 nt, Homo sapiens
  misc_RNA (1)...(19): siRNA sense strand
caugcucccucacaacauc

SEQ ID NO: 2089912 - RNA, 19 nt, Homo sapiens
  misc_RNA (1)...(19): siRNA sense strand
cggagaagaggaagacaga

SEQ ID NO: 2089913 - RNA, 19 nt, Homo sapiens
  misc_RNA (1)...(19): siRNA sense strand
aggaggaggaggacuauga

SEQ ID NO: 2089914 - RNA, 19 nt, Homo sapiens
  misc_RNA (1)...(19): siRNA sense strand
ggaaaccagacugagaaug

SEQ ID NO: 2089915 - RNA, 19 nt, Homo sapiens
  misc_RNA (1)...(19): siRNA sense strand
ggucuucagaugagcagaa

SEQ ID NO: 2089916 - RNA, 19 nt, Homo sapiens
  misc_RNA (1)...(19): siRNA sense strand
ggcagucgcagacccauuc

SEQ ID NO: 2089917 - RNA, 19 nt, Homo sapiens
  misc_RNA (1)...(19): siRNA sense strand
augcugaucccauacauug

SEQ ID NO: 2089918 - RNA, 19 nt, Homo sapiens
  misc_RNA (1)...(19): siRNA sense strand
ggacagcagaggcgauugc

SEQ ID NO: 2089919 - RNA, 19 nt, Homo sapiens
  misc_RNA (1)...(19): siRNA sense strand
guggaugacauguggcauu

SEQ ID NO: 2089920 - RNA, 19 nt, Homo sapiens
  misc_RNA (1)...(19): siRNA sense strand
agaggaagacagaccaguu

SEQ ID NO: 2089921 - RNA, 19 nt, Homo sapiens
  misc_RNA (1)...(19): siRNA sense strand
ugacggcagcccuugaguu

SEQ ID NO: 2089922 - RNA, 19 nt, Homo sapiens
  misc_RNA (1)...(19): siRNA sense strand
uuugugacccagugcaaua

SEQ ID NO: 2089923 - RNA, 19 nt, Homo sapiens
  misc_RNA (1)...(19): siRNA sense strand
gcagccucccaacucauuu

SEQ ID NO: 2089924 - RNA, 19 nt, Homo sapiens
  misc_RNA (1)...(19): siRNA sense strand
gacccauucucaaguccau

SEQ ID NO: 2089925 - RNA, 19 nt, Homo sapiens
  misc_RNA (1)...(19): siRNA sense strand
ggguuaaugaugcaaugaa

SEQ ID NO: 2089926 - RNA, 19 nt, Homo sapiens
  misc_RNA (1)...(19): siRNA sense strand
ggcuaaggucuucagauga

SEQ ID NO: 2089927 - RNA, 19 nt, Homo sapiens
  misc_RNA (1)...(19): siRNA sense strand
ugaaagugaggagcaguug

SEQ ID NO: 2089928 - RNA, 19 nt, Homo sapiens
  misc_RNA (1)...(19): siRNA sense strand
gcagcagugacgcucaaga

SEQ ID NO: 2089929 - RNA, 19 nt, Homo sapiens
  misc_RNA (1)...(19): siRNA sense strand
gcgagaaacgcuucaagua

SEQ ID NO: 2089930 - RNA, 19 nt, Homo sapiens
  misc_RNA (1)...(19): siRNA sense strand
caagaugggcuucucacua

SEQ ID NO: 2089931 - RNA, 19 nt, Homo sapiens
  misc_RNA (1)...(19): siRNA sense strand
gcgagaagcccuacaagug

SEQ ID NO: 2089932 - RNA, 19 nt, Homo sapiens
  misc_RNA (1)...(19): siRNA sense strand
gggagcaucucaacaagca

SEQ ID NO: 2089933 - RNA, 19 nt, Homo sapiens
  misc_RNA (1)...(19): siRNA sense strand
ggugaaguguuccaucugu

SEQ ID NO: 2089934 - RNA, 19 nt, Homo sapiens
  misc_RNA (1)...(19): siRNA sense strand
gugagaagcccuacaagug

SEQ ID NO: 2089935 - RNA, 19 nt, Homo sapiens
  misc_RNA (1)...(19): siRNA sense strand
ccgaggagcccuucaaaug

SEQ ID NO: 2089936 - RNA, 19 nt, Homo sapiens
  misc_RNA (1)...(19): siRNA sense strand
aagaugggcuucucacuac

SEQ ID NO: 2089937 - RNA, 19 nt, Homo sapiens
  misc_RNA (1)...(19): siRNA sense strand
cacagugucucaagaucuu

SEQ ID NO: 2089938 - RNA, 19 nt, Homo sapiens
  misc_RNA (1)...(19): siRNA sense strand
acaguggccuggugaagug

SEQ ID NO: 2089939 - RNA, 19 nt, Homo sapiens
  misc_RNA (1)...(19): siRNA sense strand
gcgagcagcaguucaagug

SEQ ID NO: 2089940 - RNA, 19 nt, Homo sapiens
  misc_RNA (1)...(19): siRNA sense strand
gaaguguuccaucugugaa

SEQ ID NO: 2089941 - RNA, 19 nt, Homo sapiens
  misc_RNA (1)...(19): siRNA sense strand
ucaaaugcggccuauguga

SEQ ID NO: 2089942 - RNA, 19 nt, Homo sapiens
  misc_RNA (1)...(19): siRNA sense strand
cgagaaacgcuucaaguac

SEQ ID NO: 2089943 - RNA, 19 nt, Homo sapiens
  misc_RNA (1)...(19): siRNA sense strand
gcgaguugcauuucaagga

SEQ ID NO: 2089944 - RNA, 19 nt, Homo sapiens
  misc_RNA (1)...(19): siRNA sense strand
gaccgaggagcccuucaaa

SEQ ID NO: 2089945 - RNA, 19 nt, Homo sapiens
  misc_RNA (1)...(19): siRNA sense strand
gcaguucaaguguguaugg

SEQ ID NO: 2089946 - RNA, 19 nt, Homo sapiens
  misc_RNA (1)...(19): siRNA sense strand
ugaaguguuccaucuguga

SEQ ID NO: 2089947 - RNA, 19 nt, Homo sapiens
  misc_RNA (1)...(19): siRNA sense strand
ucaagugcccugugugcaa

SEQ ID NO: 2089948 - RNA, 19 nt, Homo sapiens
  misc_RNA (1)...(19): siRNA sense strand
ggugagaagcccuacaagu

SEQ ID NO: 2089949 - RNA, 19 nt, Homo sapiens
  misc_RNA (1)...(19): siRNA sense strand
acaagugcacgcuguguga

SEQ ID NO: 2089950 - RNA, 19 nt, Homo sapiens
  misc_RNA (1)...(19): siRNA sense strand
gcgggagcaucucaacaag

SEQ ID NO: 2089951 - RNA, 19 nt, Homo sapiens
  misc_RNA (1)...(19): siRNA sense strand
gcgacaaggccuucaagca

SEQ ID NO: 2089952 - RNA, 19 nt, Homo sapiens
  misc_RNA (1)...(19): siRNA sense strand
cuucaaaugcggccuaugu

SEQ ID NO: 2089953 - RNA, 19 nt, Homo sapiens
  misc_RNA (1)...(19): siRNA sense strand
gauccacaccggugagaag

SEQ ID NO: 2089954 - RNA, 19 nt, Homo sapiens
  misc_RNA (1)...(19): siRNA sense strand
gcugcaacgugugcgaguu

SEQ ID NO: 2089955 - RNA, 19 nt, Homo sapiens
  misc_RNA (1)...(19): siRNA sense strand
cuucuccucuuccgaguuc

SEQ ID NO: 2089956 - RNA, 19 nt, Homo sapiens
  misc_RNA (1)...(19): siRNA sense strand
ccagccaccugcucuacca

SEQ ID NO: 2089957 - RNA, 19 nt, Homo sapiens
  misc_RNA (1)...(19): siRNA sense strand
aaaugcggccuaugugaga

SEQ ID NO: 2089958 - RNA, 19 nt, Homo sapiens
  misc_RNA (1)...(19): siRNA sense strand
ggagcucucucggcaugag

SEQ ID NO: 2089959 - RNA, 19 nt, Homo sapiens
  misc_RNA (1)...(19): siRNA sense strand
ccugggcugugccgucuau

SEQ ID NO: 2089960 - RNA, 19 nt, Homo sapiens
  misc_RNA (1)...(19): siRNA sense strand
ucaagcagcgggagcaucu

SEQ ID NO: 2089961 - RNA, 19 nt, Homo sapiens
  misc_RNA (1)...(19): siRNA sense strand
cgaggagcccuucaaaugc

SEQ ID NO: 2089962 - RNA, 19 nt, Homo sapiens
  misc_RNA (1)...(19): siRNA sense strand
gcaccacagcucccacagu

SEQ ID NO: 2089963 - RNA, 19 nt, Homo sapiens
  misc_RNA (1)...(19): siRNA sense strand
gugcccagacugcgagaaa

SEQ ID NO: 2089964 - RNA, 19 nt, Homo sapiens
  misc_RNA (1)...(19): siRNA sense strand
gagcugcugcggcacaagu

SEQ ID NO: 2089965 - RNA, 19 nt, Homo sapiens
  misc_RNA (1)...(19): siRNA sense strand
gccaaaagcccuucaagca

SEQ ID NO: 2089966 - RNA, 19 nt, Homo sapiens
  misc_RNA (1)...(19): siRNA sense strand
cagcaguucaaguguguau

SEQ ID NO: 2089967 - RNA, 19 nt, Homo sapiens
  misc_RNA (1)...(19): siRNA sense strand
cagcaugagcgcacacaca

SEQ ID NO: 2089968 - RNA, 19 nt, Homo sapiens
  misc_RNA (1)...(19): siRNA sense strand
ccuacucgcugacugauuc

SEQ ID NO: 2089969 - RNA, 19 nt, Homo sapiens
  misc_RNA (1)...(19): siRNA sense strand
ggauggcaccuccgacuca

SEQ ID NO: 2089970 - RNA, 19 nt, Homo sapiens
  misc_RNA (1)...(19): siRNA sense strand
gggccacucagcuguaugu

SEQ ID NO: 2089971 - RNA, 19 nt, Homo sapiens
  misc_RNA (1)...(19): siRNA sense strand
gaacagcauugccacauug

SEQ ID NO: 2089972 - RNA, 19 nt, Homo sapiens
  misc_RNA (1)...(19): siRNA sense strand
gcagauaaaugaagugcuu

SEQ ID NO: 2089973 - RNA, 19 nt, Homo sapiens
  misc_RNA (1)...(19): siRNA sense strand
gaaagcagagucccaaauu

SEQ ID NO: 2089974 - RNA, 19 nt, Homo sapiens
  misc_RNA (1)...(19): siRNA sense strand
caacagaggaagaugauuu

SEQ ID NO: 2089975 - RNA, 19 nt, Homo sapiens
  misc_RNA (1)...(19): siRNA sense strand
gaaguggaguaaagaguug

SEQ ID NO: 2089976 - RNA, 19 nt, Homo sapiens
  misc_RNA (1)...(19): siRNA sense strand
gcaaaccaauggacugaug

SEQ ID NO: 2089977 - RNA, 19 nt, Homo sapiens
  misc_RNA (1)...(19): siRNA sense strand
ggaacagcauugccacauu

SEQ ID NO: 2089978 - RNA, 19 nt, Homo sapiens
  misc_RNA (1)...(19): siRNA sense strand
ccagguaugucucaaauag

SEQ ID NO: 2089979 - RNA, 19 nt, Homo sapiens
  misc_RNA (1)...(19): siRNA sense strand
gaagaagcauuaauguacu

SEQ ID NO: 2089980 - RNA, 19 nt, Homo sapiens
  misc_RNA (1)...(19): siRNA sense strand
guacagggaugauaucacu

SEQ ID NO: 2089981 - RNA, 19 nt, Homo sapiens
  misc_RNA (1)...(19): siRNA sense strand
gcccugagcagauaaauga

SEQ ID NO: 2089982 - RNA, 19 nt, Homo sapiens
  misc_RNA (1)...(19): siRNA sense strand
aagaugaggugacaaggaa

SEQ ID NO: 2089983 - RNA, 19 nt, Homo sapiens
  misc_RNA (1)...(19): siRNA sense strand
ccagagacccgccaacuug

SEQ ID NO: 2089984 - RNA, 19 nt, Homo sapiens
  misc_RNA (1)...(19): siRNA sense strand
cgagacaacccacaagauu

SEQ ID NO: 2089985 - RNA, 19 nt, Homo sapiens
  misc_RNA (1)...(19): siRNA sense strand
cagaaucaaucggugcaua

SEQ ID NO: 2089986 - RNA, 19 nt, Homo sapiens
  misc_RNA (1)...(19): siRNA sense strand
gagacuggauucugacauc

SEQ ID NO: 2089987 - RNA, 19 nt, Homo sapiens
  misc_RNA (1)...(19): siRNA sense strand
gaagaugaggugacaagga

SEQ ID NO: 2089988 - RNA, 19 nt, Homo sapiens
  misc_RNA (1)...(19): siRNA sense strand
ggacuaagcauugaagaag

SEQ ID NO: 2089989 - RNA, 19 nt, Homo sapiens
  misc_RNA (1)...(19): siRNA sense strand
cagcugaaguggaguaaag

SEQ ID NO: 2089990 - RNA, 19 nt, Homo sapiens
  misc_RNA (1)...(19): siRNA sense strand
ggaagaugauuuucacuug

SEQ ID NO: 2089991 - RNA, 19 nt, Homo sapiens
  misc_RNA (1)...(19): siRNA sense strand
ugaagaagcauuaauguac

SEQ ID NO: 2089992 - RNA, 19 nt, Homo sapiens
  misc_RNA (1)...(19): siRNA sense strand
ggacaggacgaucaucaug

SEQ ID NO: 2089993 - RNA, 19 nt, Homo sapiens
  misc_RNA (1)...(19): siRNA sense strand
ccuacuggaucuuaaauuc

SEQ ID NO: 2089994 - RNA, 19 nt, Homo sapiens
  misc_RNA (1)...(19): siRNA sense strand
ccacgcggcugaucagaca

SEQ ID NO: 2089995 - RNA, 19 nt, Homo sapiens
  misc_RNA (1)...(19): siRNA sense strand
gcacauggagggagcuaug

SEQ ID NO: 2089996 - RNA, 19 nt, Homo sapiens
  misc_RNA (1)...(19): siRNA sense strand
gcaccuggcugaggcagau

SEQ ID NO: 2089997 - RNA, 19 nt, Homo sapiens
  misc_RNA (1)...(19): siRNA sense strand
gagcaaugaggacguggua

SEQ ID NO: 2089998 - RNA, 19 nt, Homo sapiens
  misc_RNA (1)...(19): siRNA sense strand
ggagggagcuauggaaagc

SEQ ID NO: 2089999 - RNA, 19 nt, Homo sapiens
  misc_RNA (1)...(19): siRNA sense strand
ccacgaggcugaccaaaau

SEQ ID NO: 2090000 - RNA, 19 nt, Homo sapiens
  misc_RNA (1)...(19): siRNA sense strand
gggacaguaucuacaagga

SEQ ID NO: 2090001 - RNA, 19 nt, Homo sapiens
  misc_RNA (1)...(19): siRNA sense strand
gagacaacccacaagauuc

SEQ ID NO: 2090002 - RNA, 19 nt, Homo sapiens
  misc_RNA (1)...(19): siRNA sense strand
ucugacaucucgcuggaaa

SEQ ID NO: 2090003 - RNA, 19 nt, Homo sapiens
  misc_RNA (1)...(19): siRNA sense strand
aagcauugaagaagcauua

SEQ ID NO: 2090004 - RNA, 19 nt, Homo sapiens
  misc_RNA (1)...(19): siRNA sense strand
aaagcagagucccaaauuc

SEQ ID NO: 2090005 - RNA, 19 nt, Homo sapiens
  misc_RNA (1)...(19): siRNA sense strand
gaaucaaucggugcauauu

SEQ ID NO: 2090006 - RNA, 19 nt, Homo sapiens
  misc_RNA (1)...(19): siRNA sense strand
ggauguacagggaugauau

SEQ ID NO: 2090007 - RNA, 19 nt, Homo sapiens
  misc_RNA (1)...(19): siRNA sense strand
gcaaugaggacgugguaag

SEQ ID NO: 2090008 - RNA, 19 nt, Homo sapiens
  misc_RNA (1)...(19): siRNA sense strand
gagcugucccggcuaaaga

SEQ ID NO: 2090009 - RNA, 19 nt, Homo sapiens
  misc_RNA (1)...(19): siRNA sense strand
aaucaaucggugcauauua

SEQ ID NO: 2090010 - RNA, 19 nt, Homo sapiens
  misc_RNA (1)...(19): siRNA sense strand
ugugguggcuuuacucugu

SEQ ID NO: 2090011 - RNA, 19 nt, Homo sapiens
  misc_RNA (1)...(19): siRNA sense strand
ccucaacauuuaccaguuc

SEQ ID NO: 2090012 - RNA, 19 nt, Homo sapiens
  misc_RNA (1)...(19): siRNA sense strand
gcacauggaaaugggacua

SEQ ID NO: 2090013 - RNA, 19 nt, Homo sapiens
  misc_RNA (1)...(19): siRNA sense strand
cagauuggcacaagacaga

SEQ ID NO: 2090014 - RNA, 19 nt, Homo sapiens
  misc_RNA (1)...(19): siRNA sense strand
gcuucgagcuggcgagaca

SEQ ID NO: 2090015 - RNA, 19 nt, Homo sapiens
  misc_RNA (1)...(19): siRNA sense strand
ucacugugguguauuuuaa

SEQ ID NO: 2090016 - RNA, 19 nt, Homo sapiens
  misc_RNA (1)...(19): siRNA sense strand
acaggacgaucaucaugga

SEQ ID NO: 2090017 - RNA, 19 nt, Homo sapiens
  misc_RNA (1)...(19): siRNA sense strand
gaggacaggacgaucauca

SEQ ID NO: 2090018 - RNA, 19 nt, Homo sapiens
  misc_RNA (1)...(19): siRNA sense strand
gacaauggcauguggucuu

SEQ ID NO: 2090019 - RNA, 19 nt, Homo sapiens
  misc_RNA (1)...(19): siRNA sense strand
ugaaguggaguaaagaguu

SEQ ID NO: 2090020 - RNA, 19 nt, Homo sapiens
  misc_RNA (1)...(19): siRNA sense strand
acaauggcauguggucuug

SEQ ID NO: 2090021 - RNA, 19 nt, Homo sapiens
  misc_RNA (1)...(19): siRNA sense strand
ccacccacccuaaacaguu

SEQ ID NO: 2090022 - RNA, 19 nt, Homo sapiens
  misc_RNA (1)...(19): siRNA sense strand
ggagcuauggaaagcauga

SEQ ID NO: 2090023 - RNA, 19 nt, Homo sapiens
  misc_RNA (1)...(19): siRNA sense strand
gacaugccaucgggaacaa

SEQ ID NO: 2090024 - RNA, 19 nt, Homo sapiens
  misc_RNA (1)...(19): siRNA sense strand
gggacuaagcauugaagaa

SEQ ID NO: 2090025 - RNA, 19 nt, Homo sapiens
  misc_RNA (1)...(19): siRNA sense strand
aagcagagucccaaauuca

SEQ ID NO: 2090026 - RNA, 19 nt, Homo sapiens
  misc_RNA (1)...(19): siRNA sense strand
agguaugucucaaauagga

SEQ ID NO: 2090027 - RNA, 19 nt, Homo sapiens
  misc_RNA (1)...(19): siRNA sense strand
ggacaguaucuacaaggau

SEQ ID NO: 2090028 - RNA, 19 nt, Homo sapiens
  misc_RNA (1)...(19): siRNA sense strand
gaggcagauuggcacaaga

SEQ ID NO: 2090029 - RNA, 19 nt, Homo sapiens
  misc_RNA (1)...(19): siRNA sense strand
gcagagucccaaauucagu

SEQ ID NO: 2090030 - RNA, 19 nt, Homo sapiens
  misc_RNA (1)...(19): siRNA sense strand
cagaggacuuggcgaggau

SEQ ID NO: 2090031 - RNA, 19 nt, Homo sapiens
  misc_RNA (1)...(19): siRNA sense strand
aagcauuaauguacuccuu

SEQ ID NO: 2090032 - RNA, 19 nt, Homo sapiens
  misc_RNA (1)...(19): siRNA sense strand
ccaccuccgugucuauugg

SEQ ID NO: 2090033 - RNA, 19 nt, Homo sapiens
  misc_RNA (1)...(19): siRNA sense strand
gauuuucacuugcaacuca

SEQ ID NO: 2090034 - RNA, 19 nt, Homo sapiens
  misc_RNA (1)...(19): siRNA sense strand
ugacauugccagaggacuu

SEQ ID NO: 2090035 - RNA, 19 nt, Homo sapiens
  misc_RNA (1)...(19): siRNA sense strand
gcauugaagaagcauuaau

SEQ ID NO: 2090036 - RNA, 19 nt, Homo sapiens
  misc_RNA (1)...(19): siRNA sense strand
cuacagacacacaucaaca

SEQ ID NO: 2090037 - RNA, 19 nt, Homo sapiens
  misc_RNA (1)...(19): siRNA sense strand
ugaaagcagagucccaaau

SEQ ID NO: 2090038 - RNA, 19 nt, Homo sapiens
  misc_RNA (1)...(19): siRNA sense strand
ucagaggacaggacgauca

SEQ ID NO: 2090039 - RNA, 19 nt, Homo sapiens
  misc_RNA (1)...(19): siRNA sense strand
acacacaucaacagaggaa

SEQ ID NO: 2090040 - RNA, 19 nt, Homo sapiens
  misc_RNA (1)...(19): siRNA sense strand
gcgagacaacccacaagau

SEQ ID NO: 2090041 - RNA, 19 nt, Homo sapiens
  misc_RNA (1)...(19): siRNA sense strand
ccuccugccugcaaaccaa

SEQ ID NO: 2090042 - RNA, 19 nt, Homo sapiens
  misc_RNA (1)...(19): siRNA sense strand
acacaucaacagaggaaga

SEQ ID NO: 2090043 - RNA, 19 nt, Homo sapiens
  misc_RNA (1)...(19): siRNA sense strand
ugacaucucgcuggaaauc

SEQ ID NO: 2090044 - RNA, 19 nt, Homo sapiens
  misc_RNA (1)...(19): siRNA sense strand
guagccuccugccugcaaa

SEQ ID NO: 2090045 - RNA, 19 nt, Homo sapiens
  misc_RNA (1)...(19): siRNA sense strand
agucccaaauucaguguug

SEQ ID NO: 2090046 - RNA, 19 nt, Homo sapiens
  misc_RNA (1)...(19): siRNA sense strand
caacauuuaccaguucaca

SEQ ID NO: 2090047 - RNA, 19 nt, Homo sapiens
  misc_RNA (1)...(19): siRNA sense strand
agacaacccacaagauucu

SEQ ID NO: 2090048 - RNA, 19 nt, Homo sapiens
  misc_RNA (1)...(19): siRNA sense strand
agaaucaaucggugcauau

SEQ ID NO: 2090049 - RNA, 19 nt, Homo sapiens
  misc_RNA (1)...(19): siRNA sense strand
ggacuuggcgaggauguac

SEQ ID NO: 2090050 - RNA, 19 nt, Homo sapiens
  misc_RNA (1)...(19): siRNA sense strand
gacauugccagaggacuug

SEQ ID NO: 2090051 - RNA, 19 nt, Homo sapiens
  misc_RNA (1)...(19): siRNA sense strand
ccuuacacgugaccacaau

SEQ ID NO: 2090052 - RNA, 19 nt, Homo sapiens
  misc_RNA (1)...(19): siRNA sense strand
ccuggaagaugaggugaca

SEQ ID NO: 2090053 - RNA, 19 nt, Homo sapiens
  misc_RNA (1)...(19): siRNA sense strand
cacccacccuaaacaguuc

SEQ ID NO: 2090054 - RNA, 19 nt, Homo sapiens
  misc_RNA (1)...(19): siRNA sense strand
cuccagguaugucucaaau

SEQ ID NO: 2090055 - RNA, 19 nt, Homo sapiens
  misc_RNA (1)...(19): siRNA sense strand
gcaugugcccaagcaguga

SEQ ID NO: 2090056 - RNA, 19 nt, Homo sapiens
  misc_RNA (1)...(19): siRNA sense strand
caucgggaacaaugaguau

SEQ ID NO: 2090057 - RNA, 19 nt, Homo sapiens
  misc_RNA (1)...(19): siRNA sense strand
ugaggcagauuggcacaag

SEQ ID NO: 2090058 - RNA, 19 nt, Homo sapiens
  misc_RNA (1)...(19): siRNA sense strand
gaccaccuccgugucuauu

SEQ ID NO: 2090059 - RNA, 19 nt, Homo sapiens
  misc_RNA (1)...(19): siRNA sense strand
cugagcagauaaaugaagu

SEQ ID NO: 2090060 - RNA, 19 nt, Homo sapiens
  misc_RNA (1)...(19): siRNA sense strand
ucacugucacuguggugua

SEQ ID NO: 2090061 - RNA, 19 nt, Homo sapiens
  misc_RNA (1)...(19): siRNA sense strand
ugcaaagccuacagacaca

SEQ ID NO: 2090062 - RNA, 19 nt, Homo sapiens
  misc_RNA (1)...(19): siRNA sense strand
acuaagcauugaagaagca

SEQ ID NO: 2090063 - RNA, 19 nt, Homo sapiens
  misc_RNA (1)...(19): siRNA sense strand
cgauggacaugguggucau

SEQ ID NO: 2090064 - RNA, 19 nt, Homo sapiens
  misc_RNA (1)...(19): siRNA sense strand
cugucacugugguguauuu

SEQ ID NO: 2090065 - RNA, 19 nt, Homo sapiens
  misc_RNA (1)...(19): siRNA sense strand
gauguacagggaugauauc

SEQ ID NO: 2090066 - RNA, 19 nt, Homo sapiens
  misc_RNA (1)...(19): siRNA sense strand
aauguacuccuuccagaga

SEQ ID NO: 2090067 - RNA, 19 nt, Homo sapiens
  misc_RNA (1)...(19): siRNA sense strand
caagaggacaauggcaugu

SEQ ID NO: 2090068 - RNA, 19 nt, Homo sapiens
  misc_RNA (1)...(19): siRNA sense strand
ccaucgggaacaaugagua

SEQ ID NO: 2090069 - RNA, 19 nt, Homo sapiens
  misc_RNA (1)...(19): siRNA sense strand
uggcuuuacucugugcaaa

SEQ ID NO: 2090070 - RNA, 19 nt, Homo sapiens
  misc_RNA (1)...(19): siRNA sense strand
cagauggccugugggacau

SEQ ID NO: 2090071 - RNA, 19 nt, Homo sapiens
  misc_RNA (1)...(19): siRNA sense strand
ggacaaggcugacgagcua

SEQ ID NO: 2090072 - RNA, 19 nt, Homo sapiens
  misc_RNA (1)...(19): siRNA sense strand
ugacauggcugaagcaaga

SEQ ID NO: 2090073 - RNA, 19 nt, Homo sapiens
  misc_RNA (1)...(19): siRNA sense strand
ggacuuacccugugucuga

SEQ ID NO: 2090074 - RNA, 19 nt, Homo sapiens
  misc_RNA (1)...(19): siRNA sense strand
gagcccagcugacugaauu

SEQ ID NO: 2090075 - RNA, 19 nt, Homo sapiens
  misc_RNA (1)...(19): siRNA sense strand
ggagacccuuuaucagaaa

SEQ ID NO: 2090076 - RNA, 19 nt, Homo sapiens
  misc_RNA (1)...(19): siRNA sense strand
ucagagaucucgucccaau

SEQ ID NO: 2090077 - RNA, 19 nt, Homo sapiens
  misc_RNA (1)...(19): siRNA sense strand
gaauacaggcccuagaguu

SEQ ID NO: 2090078 - RNA, 19 nt, Homo sapiens
  misc_RNA (1)...(19): siRNA sense strand
uacaagcgcuccuucaaga

SEQ ID NO: 2090079 - RNA, 19 nt, Homo sapiens
  misc_RNA (1)...(19): siRNA sense strand
gcuaguugaugcccgaauu

SEQ ID NO: 2090080 - RNA, 19 nt, Homo sapiens
  misc_RNA (1)...(19): siRNA sense strand
gcuggaagcucuacuacag

SEQ ID NO: 2090081 - RNA, 19 nt, Homo sapiens
  misc_RNA (1)...(19): siRNA sense strand
gcacgcugcugaaggaagu

SEQ ID NO: 2090082 - RNA, 19 nt, Homo sapiens
  misc_RNA (1)...(19): siRNA sense strand
ccacggagcgggaguaugu

SEQ ID NO: 2090083 - RNA, 19 nt, Homo sapiens
  misc_RNA (1)...(19): siRNA sense strand
ggaggucggucagcugcua

SEQ ID NO: 2090084 - RNA, 19 nt, Homo sapiens
  misc_RNA (1)...(19): siRNA sense strand
agacagagguccugaugca

SEQ ID NO: 2090085 - RNA, 19 nt, Homo sapiens
  misc_RNA (1)...(19): siRNA sense strand
ucaacuauguccugaagug

SEQ ID NO: 2090086 - RNA, 19 nt, Homo sapiens
  misc_RNA (1)...(19): siRNA sense strand
gcagagcaaccagcgaaua

SEQ ID NO: 2090087 - RNA, 19 nt, Homo sapiens
  misc_RNA (1)...(19): siRNA sense strand
gcagacagagguccugaug

SEQ ID NO: 2090088 - RNA, 19 nt, Homo sapiens
  misc_RNA (1)...(19): siRNA sense strand
uggagacccuuuaucagaa

SEQ ID NO: 2090089 - RNA, 19 nt, Homo sapiens
  misc_RNA (1)...(19): siRNA sense strand
ccacagggguugacacauu

SEQ ID NO: 2090090 - RNA, 19 nt, Homo sapiens
  misc_RNA (1)...(19): siRNA sense strand
ggacuuccacugccacuuc

SEQ ID NO: 2090091 - RNA, 19 nt, Homo sapiens
  misc_RNA (1)...(19): siRNA sense strand
gaauuugugcuccaaguuc

SEQ ID NO: 2090092 - RNA, 19 nt, Homo sapiens
  misc_RNA (1)...(19): siRNA sense strand
gcugugauguuaaccucaa

SEQ ID NO: 2090093 - RNA, 19 nt, Homo sapiens
  misc_RNA (1)...(19): siRNA sense strand
gauuugcugugugcaguuu

SEQ ID NO: 2090094 - RNA, 19 nt, Homo sapiens
  misc_RNA (1)...(19): siRNA sense strand
uggaagcucuacuacagaa

SEQ ID NO: 2090095 - RNA, 19 nt, Homo sapiens
  misc_RNA (1)...(19): siRNA sense strand
gcccugaugucaagcuaug

SEQ ID NO: 2090096 - RNA, 19 nt, Homo sapiens
  misc_RNA (1)...(19): siRNA sense strand
auccagggcugugauguua

SEQ ID NO: 2090097 - RNA, 19 nt, Homo sapiens
  misc_RNA (1)...(19): siRNA sense strand
ugacacauuugccuacaag

SEQ ID NO: 2090098 - RNA, 19 nt, Homo sapiens
  misc_RNA (1)...(19): siRNA sense strand
gcucagccaacuacaagaa

SEQ ID NO: 2090099 - RNA, 19 nt, Homo sapiens
  misc_RNA (1)...(19): siRNA sense strand
acacuauggagaacuauuu

SEQ ID NO: 2090100 - RNA, 19 nt, Homo sapiens
  misc_RNA (1)...(19): siRNA sense strand
gcucuagaguacacuaugg

SEQ ID NO: 2090101 - RNA, 19 nt, Homo sapiens
  misc_RNA (1)...(19): siRNA sense strand
ggacugcaccagauugaag

SEQ ID NO: 2090102 - RNA, 19 nt, Homo sapiens
  misc_RNA (1)...(19): siRNA sense strand
ugaauucucuagggcuuug

SEQ ID NO: 2090103 - RNA, 19 nt, Homo sapiens
  misc_RNA (1)...(19): siRNA sense strand
ugacaucucccaccugcuu

SEQ ID NO: 2090104 - RNA, 19 nt, Homo sapiens
  misc_RNA (1)...(19): siRNA sense strand
gcuccucaguccugucaga

SEQ ID NO: 2090105 - RNA, 19 nt, Homo sapiens
  misc_RNA (1)...(19): siRNA sense strand
guacaggcacugggacuga

SEQ ID NO: 2090106 - RNA, 19 nt, Homo sapiens
  misc_RNA (1)...(19): siRNA sense strand
uagaguacacuauggagaa

SEQ ID NO: 2090107 - RNA, 19 nt, Homo sapiens
  misc_RNA (1)...(19): siRNA sense strand
ccagcugacugaauucucu

SEQ ID NO: 2090108 - RNA, 19 nt, Homo sapiens
  misc_RNA (1)...(19): siRNA sense strand
gagcugcuggccaguggua

SEQ ID NO: 2090109 - RNA, 19 nt, Homo sapiens
  misc_RNA (1)...(19): siRNA sense strand
cgucaacuauguccugaag

SEQ ID NO: 2090110 - RNA, 19 nt, Homo sapiens
  misc_RNA (1)...(19): siRNA sense strand
gccauagggugcaguuugg

SEQ ID NO: 2090111 - RNA, 19 nt, Homo sapiens
  misc_RNA (1)...(19): siRNA sense strand
gagcaguugccuucucaga

SEQ ID NO: 2090112 - RNA, 19 nt, Homo sapiens
  misc_RNA (1)...(19): siRNA sense strand
gacuggagauuugcugugu

SEQ ID NO: 2090113 - RNA, 19 nt, Homo sapiens
  misc_RNA (1)...(19): siRNA sense strand
cgaccgcaccgucaacuau

SEQ ID NO: 2090114 - RNA, 19 nt, Homo sapiens
  misc_RNA (1)...(19): siRNA sense strand
caagcgcuccuucaagaug

SEQ ID NO: 2090115 - RNA, 19 nt, Homo sapiens
  misc_RNA (1)...(19): siRNA sense strand
gccaccgacuggagauuug

SEQ ID NO: 2090116 - RNA, 19 nt, Homo sapiens
  misc_RNA (1)...(19): siRNA sense strand
ggcaggccguccacaacaa

SEQ ID NO: 2090117 - RNA, 19 nt, Homo sapiens
  misc_RNA (1)...(19): siRNA sense strand
gcuaugggcacaccuucuu

SEQ ID NO: 2090118 - RNA, 19 nt, Homo sapiens
  misc_RNA (1)...(19): siRNA sense strand
uggagaagcugcgggacuu

SEQ ID NO: 2090119 - RNA, 19 nt, Homo sapiens
  misc_RNA (1)...(19): siRNA sense strand
gacccuuuaucagaaauau

SEQ ID NO: 2090120 - RNA, 19 nt, Homo sapiens
  misc_RNA (1)...(19): siRNA sense strand
cuucccagaugcacguuaa

SEQ ID NO: 2090121 - RNA, 19 nt, Homo sapiens
  misc_RNA (1)...(19): siRNA sense strand
ccgaugcccugaugucaag

SEQ ID NO: 2090122 - RNA, 19 nt, Homo sapiens
  misc_RNA (1)...(19): siRNA sense strand
gaagaggaggaaccugcuu

SEQ ID NO: 2090123 - RNA, 19 nt, Homo sapiens
  misc_RNA (1)...(19): siRNA sense strand
gcgaggaagccaucaacga

SEQ ID NO: 2090124 - RNA, 19 nt, Homo sapiens
  misc_RNA (1)...(19): siRNA sense strand
aauacaggcccuagaguug

SEQ ID NO: 2090125 - RNA, 19 nt, Homo sapiens
  misc_RNA (1)...(19): siRNA sense strand
aacaaggccuuccgagaca

SEQ ID NO: 2090126 - RNA, 19 nt, Homo sapiens
  misc_RNA (1)...(19): siRNA sense strand
gcgcucuacagcaagaaua

SEQ ID NO: 2090127 - RNA, 19 nt, Homo sapiens
  misc_RNA (1)...(19): siRNA sense strand
aguacacuauggagaacua

SEQ ID NO: 2090128 - RNA, 19 nt, Homo sapiens
  misc_RNA (1)...(19): siRNA sense strand
ugaggaaggccuacagcuu

SEQ ID NO: 2090129 - RNA, 19 nt, Homo sapiens
  misc_RNA (1)...(19): siRNA sense strand
aaagcggacugcaccagau

SEQ ID NO: 2090130 - RNA, 19 nt, Homo sapiens
  misc_RNA (1)...(19): siRNA sense strand
ggauugcugcaccaacuga

SEQ ID NO: 2090131 - RNA, 19 nt, Homo sapiens
  misc_RNA (1)...(19): siRNA sense strand
gggcagagucucagugaac

SEQ ID NO: 2090132 - RNA, 19 nt, Homo sapiens
  misc_RNA (1)...(19): siRNA sense strand
uccaaguucuucccucuuc

SEQ ID NO: 2090133 - RNA, 19 nt, Homo sapiens
  misc_RNA (1)...(19): siRNA sense strand
gcacagggugagagugaca

SEQ ID NO: 2090134 - RNA, 19 nt, Homo sapiens
  misc_RNA (1)...(19): siRNA sense strand
gcgacaggaugaguuugug

SEQ ID NO: 2090135 - RNA, 19 nt, Homo sapiens
  misc_RNA (1)...(19): siRNA sense strand
ggugcgacaggaugaguuu

SEQ ID NO: 2090136 - RNA, 19 nt, Homo sapiens
  misc_RNA (1)...(19): siRNA sense strand
gggugcaguuugggaugua

SEQ ID NO: 2090137 - RNA, 19 nt, Homo sapiens
  misc_RNA (1)...(19): siRNA sense strand
gcgaauacaggcccuagag

SEQ ID NO: 2090138 - RNA, 19 nt, Homo sapiens
  misc_RNA (1)...(19): siRNA sense strand
guugaugcccgaauuugug

SEQ ID NO: 2090139 - RNA, 19 nt, Homo sapiens
  misc_RNA (1)...(19): siRNA sense strand
cuggagacccugccucuug

SEQ ID NO: 2090140 - RNA, 19 nt, Homo sapiens
  misc_RNA (1)...(19): siRNA sense strand
ccagggcugugauguuaac

SEQ ID NO: 2090141 - RNA, 19 nt, Homo sapiens
  misc_RNA (1)...(19): siRNA sense strand
ccagagccuugugcacuuc

SEQ ID NO: 2090142 - RNA, 19 nt, Homo sapiens
  misc_RNA (1)...(19): siRNA sense strand
ucagcgugcccaccucuuu

SEQ ID NO: 2090143 - RNA, 19 nt, Homo sapiens
  misc_RNA (1)...(19): siRNA sense strand
uggagcaguugccuucuca

SEQ ID NO: 2090144 - RNA, 19 nt, Homo sapiens
  misc_RNA (1)...(19): siRNA sense strand
cgaauuugugcuccaaguu

SEQ ID NO: 2090145 - RNA, 19 nt, Homo sapiens
  misc_RNA (1)...(19): siRNA sense strand
guccugaagugccgagaag

SEQ ID NO: 2090146 - RNA, 19 nt, Homo sapiens
  misc_RNA (1)...(19): siRNA sense strand
uuggagacccuuuaucaga

SEQ ID NO: 2090147 - RNA, 19 nt, Homo sapiens
  misc_RNA (1)...(19): siRNA sense strand
cccagagccuugugcacuu

SEQ ID NO: 2090148 - RNA, 19 nt, Homo sapiens
  misc_RNA (1)...(19): siRNA sense strand
gaagcucuacuacagaacu

SEQ ID NO: 2090149 - RNA, 19 nt, Homo sapiens
  misc_RNA (1)...(19): siRNA sense strand
acaaggcugacgagcuaua

SEQ ID NO: 2090150 - RNA, 19 nt, Homo sapiens
  misc_RNA (1)...(19): siRNA sense strand
uguccgggcucuagaguac

SEQ ID NO: 2090151 - RNA, 19 nt, Homo sapiens
  misc_RNA (1)...(19): siRNA sense strand
ccuuggagacccuuuauca

SEQ ID NO: 2090152 - RNA, 19 nt, Homo sapiens
  misc_RNA (1)...(19): siRNA sense strand
ccgaauuugugcuccaagu

SEQ ID NO: 2090153 - RNA, 19 nt, Homo sapiens
  misc_RNA (1)...(19): siRNA sense strand
gagacccuuuaucagaaau

SEQ ID NO: 2090154 - RNA, 19 nt, Homo sapiens
  misc_RNA (1)...(19): siRNA sense strand
caccaugcggccacuauug

SEQ ID NO: 2090155 - RNA, 19 nt, Homo sapiens
  misc_RNA (1)...(19): siRNA sense strand
cagcuucgaucggaaucug

SEQ ID NO: 2090156 - RNA, 19 nt, Homo sapiens
  misc_RNA (1)...(19): siRNA sense strand
gcggacugcaccagauuga

SEQ ID NO: 2090157 - RNA, 19 nt, Homo sapiens
  misc_RNA (1)...(19): siRNA sense strand
uggcuggcauggcuacaau

SEQ ID NO: 2090158 - RNA, 19 nt, Homo sapiens
  misc_RNA (1)...(19): siRNA sense strand
cuaguugaugcccgaauuu

SEQ ID NO: 2090159 - RNA, 19 nt, Homo sapiens
  misc_RNA (1)...(19): siRNA sense strand
gaggugcgcauggcugaga

SEQ ID NO: 2090160 - RNA, 19 nt, Homo sapiens
  misc_RNA (1)...(19): siRNA sense strand
uggcacagggugagaguga

SEQ ID NO: 2090161 - RNA, 19 nt, Homo sapiens
  misc_RNA (1)...(19): siRNA sense strand
gggccuuggagacccuuua

SEQ ID NO: 2090162 - RNA, 19 nt, Homo sapiens
  misc_RNA (1)...(19): siRNA sense strand
gagcaaccagcgaauacag

SEQ ID NO: 2090163 - RNA, 19 nt, Homo sapiens
  misc_RNA (1)...(19): siRNA sense strand
ccugaagugccgagaaguu

SEQ ID NO: 2090164 - RNA, 19 nt, Homo sapiens
  misc_RNA (1)...(19): siRNA sense strand
gaccgcaccgucaacuaug

SEQ ID NO: 2090165 - RNA, 19 nt, Homo sapiens
  misc_RNA (1)...(19): siRNA sense strand
caaccugcgcuucgagauc

SEQ ID NO: 2090166 - RNA, 19 nt, Homo sapiens
  misc_RNA (1)...(19): siRNA sense strand
cgccauagggugcaguuug

SEQ ID NO: 2090167 - RNA, 19 nt, Homo sapiens
  misc_RNA (1)...(19): siRNA sense strand
ccugcccacuuccgaaaga

SEQ ID NO: 2090168 - RNA, 19 nt, Homo sapiens
  misc_RNA (1)...(19): siRNA sense strand
cuacaagcgcuccuucaag

SEQ ID NO: 2090169 - RNA, 19 nt, Homo sapiens
  misc_RNA (1)...(19): siRNA sense strand
gaaaggccccuggagaaug

SEQ ID NO: 2090170 - RNA, 19 nt, Homo sapiens
  misc_RNA (1)...(19): siRNA sense strand
caaggccuuccgagacauu

SEQ ID NO: 2090171 - RNA, 19 nt, Homo sapiens
  misc_RNA (1)...(19): siRNA sense strand
gaacaggcguccauaaaga

SEQ ID NO: 2090172 - RNA, 19 nt, Homo sapiens
  misc_RNA (1)...(19): siRNA sense strand
gaaaggaucauucuguuug

SEQ ID NO: 2090173 - RNA, 19 nt, Homo sapiens
  misc_RNA (1)...(19): siRNA sense strand
gcaaacagaaccacaguaa

SEQ ID NO: 2090174 - RNA, 19 nt, Homo sapiens
  misc_RNA (1)...(19): siRNA sense strand
cuacaaaggucauggcaaa

SEQ ID NO: 2090175 - RNA, 19 nt, Homo sapiens
  misc_RNA (1)...(19): siRNA sense strand
gaacaugguuucaucuuac

SEQ ID NO: 2090176 - RNA, 19 nt, Homo sapiens
  misc_RNA (1)...(19): siRNA sense strand
ggacaaauacaacuacauu

SEQ ID NO: 2090177 - RNA, 19 nt, Homo sapiens
  misc_RNA (1)...(19): siRNA sense strand
ggacaaacauuccuauggu

SEQ ID NO: 2090178 - RNA, 19 nt, Homo sapiens
  misc_RNA (1)...(19): siRNA sense strand
caaccaggcugccacagaa

SEQ ID NO: 2090179 - RNA, 19 nt, Homo sapiens
  misc_RNA (1)...(19): siRNA sense strand
caucuuaccucgugcauca

SEQ ID NO: 2090180 - RNA, 19 nt, Homo sapiens
  misc_RNA (1)...(19): siRNA sense strand
gaagaacaggcguccauaa

SEQ ID NO: 2090181 - RNA, 19 nt, Homo sapiens
  misc_RNA (1)...(19): siRNA sense strand
gagcaggccuggguucuug

SEQ ID NO: 2090182 - RNA, 19 nt, Homo sapiens
  misc_RNA (1)...(19): siRNA sense strand
gcaaaggaagagaugguua

SEQ ID NO: 2090183 - RNA, 19 nt, Homo sapiens
  misc_RNA (1)...(19): siRNA sense strand
agaacaugguuucaucuua

SEQ ID NO: 2090184 - RNA, 19 nt, Homo sapiens
  misc_RNA (1)...(19): siRNA sense strand
aaacagaaccacaguaaau

SEQ ID NO: 2090185 - RNA, 19 nt, Homo sapiens
  misc_RNA (1)...(19): siRNA sense strand
gcucaaggcgucaacauga

SEQ ID NO: 2090186 - RNA, 19 nt, Homo sapiens
  misc_RNA (1)...(19): siRNA sense strand
cagcagcccuuccuguuug

SEQ ID NO: 2090187 - RNA, 19 nt, Homo sapiens
  misc_RNA (1)...(19): siRNA sense strand
gacaaacauuccuaugguu

SEQ ID NO: 2090188 - RNA, 19 nt, Homo sapiens
  misc_RNA (1)...(19): siRNA sense strand
aggaagagaugguuacaug

SEQ ID NO: 2090189 - RNA, 19 nt, Homo sapiens
  misc_RNA (1)...(19): siRNA sense strand
gggaguacggcaagaauuu

SEQ ID NO: 2090190 - RNA, 19 nt, Homo sapiens
  misc_RNA (1)...(19): siRNA sense strand
acagugagguccgaaguuu

SEQ ID NO: 2090191 - RNA, 19 nt, Homo sapiens
  misc_RNA (1)...(19): siRNA sense strand
cagaguugaugacuacuug

SEQ ID NO: 2090192 - RNA, 19 nt, Homo sapiens
  misc_RNA (1)...(19): siRNA sense strand
gcagcagcccuuccuguuu

SEQ ID NO: 2090193 - RNA, 19 nt, Homo sapiens
  misc_RNA (1)...(19): siRNA sense strand
acaaacauuccuaugguua

SEQ ID NO: 2090194 - RNA, 19 nt, Homo sapiens
  misc_RNA (1)...(19): siRNA sense strand
ggaagaacaggcguccaua

SEQ ID NO: 2090195 - RNA, 19 nt, Homo sapiens
  misc_RNA (1)...(19): siRNA sense strand
acagugagauggagaugga

SEQ ID NO: 2090196 - RNA, 19 nt, Homo sapiens
  misc_RNA (1)...(19): siRNA sense strand
gauuguggacgccaacuuu

SEQ ID NO: 2090197 - RNA, 19 nt, Homo sapiens
  misc_RNA (1)...(19): siRNA sense strand
gugaucggcugcuguguca

SEQ ID NO: 2090198 - RNA, 19 nt, Homo sapiens
  misc_RNA (1)...(19): siRNA sense strand
ccaaggacaaauacaacua

SEQ ID NO: 2090199 - RNA, 19 nt, Homo sapiens
  misc_RNA (1)...(19): siRNA sense strand
caccacagcaguaccagua

SEQ ID NO: 2090200 - RNA, 19 nt, Homo sapiens
  misc_RNA (1)...(19): siRNA sense strand
ugaaugggacggacaguga

SEQ ID NO: 2090201 - RNA, 19 nt, Homo sapiens
  misc_RNA (1)...(19): siRNA sense strand
gcaccugcuucuacaccaa

SEQ ID NO: 2090202 - RNA, 19 nt, Homo sapiens
  misc_RNA (1)...(19): siRNA sense strand
gcaaccaggcugccacaga

SEQ ID NO: 2090203 - RNA, 19 nt, Homo sapiens
  misc_RNA (1)...(19): siRNA sense strand
gaagauugucagcaaagga

SEQ ID NO: 2090204 - RNA, 19 nt, Homo sapiens
  misc_RNA (1)...(19): siRNA sense strand
caaacagaaccacaguaaa

SEQ ID NO: 2090205 - RNA, 19 nt, Homo sapiens
  misc_RNA (1)...(19): siRNA sense strand
aagaacaggcguccauaaa

SEQ ID NO: 2090206 - RNA, 19 nt, Homo sapiens
  misc_RNA (1)...(19): siRNA sense strand
ucaacagacuccaccaagu

SEQ ID NO: 2090207 - RNA, 19 nt, Homo sapiens
  misc_RNA (1)...(19): siRNA sense strand
caacacaggagcagacagu

SEQ ID NO: 2090208 - RNA, 19 nt, Homo sapiens
  misc_RNA (1)...(19): siRNA sense strand
ccaccaagagcaaacagaa

SEQ ID NO: 2090209 - RNA, 19 nt, Homo sapiens
  misc_RNA (1)...(19): siRNA sense strand
gcacccagcuccucauccu

SEQ ID NO: 2090210 - RNA, 19 nt, Homo sapiens
  misc_RNA (1)...(19): siRNA sense strand
gcagacaccuggggagauu

SEQ ID NO: 2090211 - RNA, 19 nt, Homo sapiens
  misc_RNA (1)...(19): siRNA sense strand
caaauacaacuacauuggu

SEQ ID NO: 2090212 - RNA, 19 nt, Homo sapiens
  misc_RNA (1)...(19): siRNA sense strand
gacaaauacaacuacauug

SEQ ID NO: 2090213 - RNA, 19 nt, Homo sapiens
  misc_RNA (1)...(19): siRNA sense strand
ggccacagccuugguauag

SEQ ID NO: 2090214 - RNA, 19 nt, Homo sapiens
  misc_RNA (1)...(19): siRNA sense strand
cccagaaccugccaaagca

SEQ ID NO: 2090215 - RNA, 19 nt, Homo sapiens
  misc_RNA (1)...(19): siRNA sense strand
ggaguacggcaagaauuug

SEQ ID NO: 2090216 - RNA, 19 nt, Homo sapiens
  misc_RNA (1)...(19): siRNA sense strand
ccuguggcauuuauuacuu

SEQ ID NO: 2090217 - RNA, 19 nt, Homo sapiens
  misc_RNA (1)...(19): siRNA sense strand
cgacauggccccaguaguu

SEQ ID NO: 2090218 - RNA, 19 nt, Homo sapiens
  misc_RNA (1)...(19): siRNA sense strand
gcucaagugccggcaguuu

SEQ ID NO: 2090219 - RNA, 19 nt, Homo sapiens
  misc_RNA (1)...(19): siRNA sense strand
aagugaagauugucagcaa

SEQ ID NO: 2090220 - RNA, 19 nt, Homo sapiens
  misc_RNA (1)...(19): siRNA sense strand
aacagaaccacaguaaaua

SEQ ID NO: 2090221 - RNA, 19 nt, Homo sapiens
  misc_RNA (1)...(19): siRNA sense strand
gcccuauggucccacauuc

SEQ ID NO: 2090222 - RNA, 19 nt, Homo sapiens
  misc_RNA (1)...(19): siRNA sense strand
gggacaaacauuccuaugg

SEQ ID NO: 2090223 - RNA, 19 nt, Homo sapiens
  misc_RNA (1)...(19): siRNA sense strand
ccuggguucuugcuccuuu

SEQ ID NO: 2090224 - RNA, 19 nt, Homo sapiens
  misc_RNA (1)...(19): siRNA sense strand
ggcauugagugagcaguug

SEQ ID NO: 2090225 - RNA, 19 nt, Homo sapiens
  misc_RNA (1)...(19): siRNA sense strand
gaccagcgacagugagaug

SEQ ID NO: 2090226 - RNA, 19 nt, Homo sapiens
  misc_RNA (1)...(19): siRNA sense strand
uguuugacauugaggacua

SEQ ID NO: 2090227 - RNA, 19 nt, Homo sapiens
  misc_RNA (1)...(19): siRNA sense strand
caaaggaagagaugguuac

SEQ ID NO: 2090228 - RNA, 19 nt, Homo sapiens
  misc_RNA (1)...(19): siRNA sense strand
gagcaaacagaaccacagu

SEQ ID NO: 2090229 - RNA, 19 nt, Homo sapiens
  misc_RNA (1)...(19): siRNA sense strand
agucccagcuguagcaaug

SEQ ID NO: 2090230 - RNA, 19 nt, Homo sapiens
  misc_RNA (1)...(19): siRNA sense strand
gacaaaagauccagaagcu

SEQ ID NO: 2090231 - RNA, 19 nt, Homo sapiens
  misc_RNA (1)...(19): siRNA sense strand
acaaauacaacuacauugg

SEQ ID NO: 2090232 - RNA, 19 nt, Homo sapiens
  misc_RNA (1)...(19): siRNA sense strand
ccucgugcaucauggguau

SEQ ID NO: 2090233 - RNA, 19 nt, Homo sapiens
  misc_RNA (1)...(19): siRNA sense strand
gugucaaccucaucaaugg

SEQ ID NO: 2090234 - RNA, 19 nt, Homo sapiens
  misc_RNA (1)...(19): siRNA sense strand
ugacauugaggacuacaug

SEQ ID NO: 2090235 - RNA, 19 nt, Homo sapiens
  misc_RNA (1)...(19): siRNA sense strand
acaaagaugcggccucagu

SEQ ID NO: 2090236 - RNA, 19 nt, Homo sapiens
  misc_RNA (1)...(19): siRNA sense strand
ugccagaguugaugacuac

SEQ ID NO: 2090237 - RNA, 19 nt, Homo sapiens
  misc_RNA (1)...(19): siRNA sense strand
gagaccagcgacagugaga

SEQ ID NO: 2090238 - RNA, 19 nt, Homo sapiens
  misc_RNA (1)...(19): siRNA sense strand
guaguucccacaugcacaa

SEQ ID NO: 2090239 - RNA, 19 nt, Homo sapiens
  misc_RNA (1)...(19): siRNA sense strand
ggcagcagcccuuccuguu

SEQ ID NO: 2090240 - RNA, 19 nt, Homo sapiens
  misc_RNA (1)...(19): siRNA sense strand
ccagagggaaccugugugu

SEQ ID NO: 2090241 - RNA, 19 nt, Homo sapiens
  misc_RNA (1)...(19): siRNA sense strand
ugcagaacaugguuucauc

SEQ ID NO: 2090242 - RNA, 19 nt, Homo sapiens
  misc_RNA (1)...(19): siRNA sense strand
aaaggaucauucuguuugg

SEQ ID NO: 2090243 - RNA, 19 nt, Homo sapiens
  misc_RNA (1)...(19): siRNA sense strand
ccacagcaguaccaguaac

SEQ ID NO: 2090244 - RNA, 19 nt, Homo sapiens
  misc_RNA (1)...(19): siRNA sense strand
gacagugagguccgaaguu

SEQ ID NO: 2090245 - RNA, 19 nt, Homo sapiens
  misc_RNA (1)...(19): siRNA sense strand
gcagaacaugguuucaucu

SEQ ID NO: 2090246 - RNA, 19 nt, Homo sapiens
  misc_RNA (1)...(19): siRNA sense strand
gccgcgaguugcaggcauu

SEQ ID NO: 2090247 - RNA, 19 nt, Homo sapiens
  misc_RNA (1)...(19): siRNA sense strand
ucaagugccggcaguuugu

SEQ ID NO: 2090248 - RNA, 19 nt, Homo sapiens
  misc_RNA (1)...(19): siRNA sense strand
cucaaggcgucaacaugaa

SEQ ID NO: 2090249 - RNA, 19 nt, Homo sapiens
  misc_RNA (1)...(19): siRNA sense strand
cagaacaugguuucaucuu

SEQ ID NO: 2090250 - RNA, 19 nt, Homo sapiens
  misc_RNA (1)...(19): siRNA sense strand
caauggcaccugcuucuac

SEQ ID NO: 2090251 - RNA, 19 nt, Homo sapiens
  misc_RNA (1)...(19): siRNA sense strand
gugaugaugggcauucguu

SEQ ID NO: 2090252 - RNA, 19 nt, Homo sapiens
  misc_RNA (1)...(19): siRNA sense strand
agugagguccgaaguuuga

SEQ ID NO: 2090253 - RNA, 19 nt, Homo sapiens
  misc_RNA (1)...(19): siRNA sense strand
caaggacaaauacaacuac

SEQ ID NO: 2090254 - RNA, 19 nt, Homo sapiens
  misc_RNA (1)...(19): siRNA sense strand
aagauugucagcaaaggaa

SEQ ID NO: 2090255 - RNA, 19 nt, Homo sapiens
  misc_RNA (1)...(19): siRNA sense strand
agugaagauugucagcaaa

SEQ ID NO: 2090256 - RNA, 19 nt, Homo sapiens
  misc_RNA (1)...(19): siRNA sense strand
gggccaggcaucugagugu

SEQ ID NO: 2090257 - RNA, 19 nt, Homo sapiens
  misc_RNA (1)...(19): siRNA sense strand
caacagcgccauuuuagag

SEQ ID NO: 2090258 - RNA, 19 nt, Homo sapiens
  misc_RNA (1)...(19): siRNA sense strand
aagcauguccacacgcauu

SEQ ID NO: 2090259 - RNA, 19 nt, Homo sapiens
  misc_RNA (1)...(19): siRNA sense strand
caaacauuccuaugguuac

SEQ ID NO: 2090260 - RNA, 19 nt, Homo sapiens
  misc_RNA (1)...(19): siRNA sense strand
gaugaugggcauucguucu

SEQ ID NO: 2090261 - RNA, 19 nt, Homo sapiens
  misc_RNA (1)...(19): siRNA sense strand
agaauuuggcccacacaga

SEQ ID NO: 2090262 - RNA, 19 nt, Homo sapiens
  misc_RNA (1)...(19): siRNA sense strand
cuguggcauuuauuacuuu

SEQ ID NO: 2090263 - RNA, 19 nt, Homo sapiens
  misc_RNA (1)...(19): siRNA sense strand
gcggucaaccagcaagaga

SEQ ID NO: 2090264 - RNA, 19 nt, Homo sapiens
  misc_RNA (1)...(19): siRNA sense strand
cauccuccgucaauuacuc

SEQ ID NO: 2090265 - RNA, 19 nt, Homo sapiens
  misc_RNA (1)...(19): siRNA sense strand
agaacaggcguccauaaag

SEQ ID NO: 2090266 - RNA, 19 nt, Homo sapiens
  misc_RNA (1)...(19): siRNA sense strand
aauggcaccugcuucuaca

SEQ ID NO: 2090267 - RNA, 19 nt, Homo sapiens
  misc_RNA (1)...(19): siRNA sense strand
ccucaacagcgccauuuua

SEQ ID NO: 2090268 - RNA, 19 nt, Homo sapiens
  misc_RNA (1)...(19): siRNA sense strand
gaacauggcugcuggcuuu

SEQ ID NO: 2090269 - RNA, 19 nt, Homo sapiens
  misc_RNA (1)...(19): siRNA sense strand
gaucaucgcuuacuaaaca

SEQ ID NO: 2090270 - RNA, 19 nt, Homo sapiens
  misc_RNA (1)...(19): siRNA sense strand
gaaaguauccgcugacaaa

SEQ ID NO: 2090271 - RNA, 19 nt, Homo sapiens
  misc_RNA (1)...(19): siRNA sense strand
gaacagaucaaggaauuua

SEQ ID NO: 2090272 - RNA, 19 nt, Homo sapiens
  misc_RNA (1)...(19): siRNA sense strand
gaagugaaauccuaccauu

SEQ ID NO: 2090273 - RNA, 19 nt, Homo sapiens
  misc_RNA (1)...(19): siRNA sense strand
gaagucaaaucaucacauu

SEQ ID NO: 2090274 - RNA, 19 nt, Homo sapiens
  misc_RNA (1)...(19): siRNA sense strand
gagaaacccuaucaaugua

SEQ ID NO: 2090275 - RNA, 19 nt, Homo sapiens
  misc_RNA (1)...(19): siRNA sense strand
gagaaacccuaucgaugua

SEQ ID NO: 2090276 - RNA, 19 nt, Homo sapiens
  misc_RNA (1)...(19): siRNA sense strand
gcacaucccucacucaaca

SEQ ID NO: 2090277 - RNA, 19 nt, Homo sapiens
  misc_RNA (1)...(19): siRNA sense strand
gaagacuccugggauguua

SEQ ID NO: 2090278 - RNA, 19 nt, Homo sapiens
  misc_RNA (1)...(19): siRNA sense strand
gaaagaaacaccaugaaug

SEQ ID NO: 2090279 - RNA, 19 nt, Homo sapiens
  misc_RNA (1)...(19): siRNA sense strand
gagaaacccuaucagugua

SEQ ID NO: 2090280 - RNA, 19 nt, Homo sapiens
  misc_RNA (1)...(19): siRNA sense strand
gagcaucacagaauucaua

SEQ ID NO: 2090281 - RNA, 19 nt, Homo sapiens
  misc_RNA (1)...(19): siRNA sense strand
gaccaggccugaagucaaa

SEQ ID NO: 2090282 - RNA, 19 nt, Homo sapiens
  misc_RNA (1)...(19): siRNA sense strand
gaagagacaucugggauca

SEQ ID NO: 2090283 - RNA, 19 nt, Homo sapiens
  misc_RNA (1)...(19): siRNA sense strand
ucucuuacaugcuacauua

SEQ ID NO: 2090284 - RNA, 19 nt, Homo sapiens
  misc_RNA (1)...(19): siRNA sense strand
ggucagagcccaucccuuu

SEQ ID NO: 2090285 - RNA, 19 nt, Homo sapiens
  misc_RNA (1)...(19): siRNA sense strand
gcucaucgcuuacucaaca

SEQ ID NO: 2090286 - RNA, 19 nt, Homo sapiens
  misc_RNA (1)...(19): siRNA sense strand
gagaaacccuaugaaugua

SEQ ID NO: 2090287 - RNA, 19 nt, Homo sapiens
  misc_RNA (1)...(19): siRNA sense strand
gaaguucagcucuuacuaa

SEQ ID NO: 2090288 - RNA, 19 nt, Homo sapiens
  misc_RNA (1)...(19): siRNA sense strand
gagagaagcccuaugaaug

SEQ ID NO: 2090289 - RNA, 19 nt, Homo sapiens
  misc_RNA (1)...(19): siRNA sense strand
gagaaacccuaugaaugua

SEQ ID NO: 2090290 - RNA, 19 nt, Homo sapiens
  misc_RNA (1)...(19): siRNA sense strand
aggcauagcucaucucuug

SEQ ID NO: 2090291 - RNA, 19 nt, Homo sapiens
  misc_RNA (1)...(19): siRNA sense strand
gagaagcccuaugaaugua

SEQ ID NO: 2090292 - RNA, 19 nt, Homo sapiens
  misc_RNA (1)...(19): siRNA sense strand
ggaagcaauuugggacaua

SEQ ID NO: 2090293 - RNA, 19 nt, Homo sapiens
  misc_RNA (1)...(19): siRNA sense strand
auucauagaucaucgcuua

SEQ ID NO: 2090294 - RNA, 19 nt, Homo sapiens
  misc_RNA (1)...(19): siRNA sense strand
gaagcaauuugggacauaa

SEQ ID NO: 2090295 - RNA, 19 nt, Homo sapiens
  misc_RNA (1)...(19): siRNA sense strand
gaggugaucuucaaauugg

SEQ ID NO: 2090296 - RNA, 19 nt, Homo sapiens
  misc_RNA (1)...(19): siRNA sense strand
gaucaucagagaauucaua

SEQ ID NO: 2090297 - RNA, 19 nt, Homo sapiens
  misc_RNA (1)...(19): siRNA sense strand
gaaacccuaugaauguauu

SEQ ID NO: 2090298 - RNA, 19 nt, Homo sapiens
  misc_RNA (1)...(19): siRNA sense strand
gagagaaacccuaucaaug

SEQ ID NO: 2090299 - RNA, 19 nt, Homo sapiens
  misc_RNA (1)...(19): siRNA sense strand
gagagaaacccuaugaaug

SEQ ID NO: 2090300 - RNA, 19 nt, Homo sapiens
  misc_RNA (1)...(19): siRNA sense strand
gagagaaacccuaugaaug

SEQ ID NO: 2090301 - RNA, 19 nt, Homo sapiens
  misc_RNA (1)...(19): siRNA sense strand
gaauuuauccuggaaagaa

SEQ ID NO: 2090302 - RNA, 19 nt, Homo sapiens
  misc_RNA (1)...(19): siRNA sense strand
guucagcucuuacuaaaca

SEQ ID NO: 2090303 - RNA, 19 nt, Homo sapiens
  misc_RNA (1)...(19): siRNA sense strand
aaaccaaccugcaugauca

SEQ ID NO: 2090304 - RNA, 19 nt, Homo sapiens
  misc_RNA (1)...(19): siRNA sense strand
gcagcaggauguaucagaa

SEQ ID NO: 2090305 - RNA, 19 nt, Homo sapiens
  misc_RNA (1)...(19): siRNA sense strand
gcccaucccuuuauaaaca

SEQ ID NO: 2090306 - RNA, 19 nt, Homo sapiens
  misc_RNA (1)...(19): siRNA sense strand
ggagaaacccuuugaaugc

SEQ ID NO: 2090307 - RNA, 19 nt, Homo sapiens
  misc_RNA (1)...(19): siRNA sense strand
cugcacacaugaucucuua

SEQ ID NO: 2090308 - RNA, 19 nt, Homo sapiens
  misc_RNA (1)...(19): siRNA sense strand
ggaagacacagcuuacuga

SEQ ID NO: 2090309 - RNA, 19 nt, Homo sapiens
  misc_RNA (1)...(19): siRNA sense strand
ggaaagaaacaccaugaau

SEQ ID NO: 2090310 - RNA, 19 nt, Homo sapiens
  misc_RNA (1)...(19): siRNA sense strand
cagaggugaucuucaaauu

SEQ ID NO: 2090311 - RNA, 19 nt, Homo sapiens
  misc_RNA (1)...(19): siRNA sense strand
ggagagaaacccuaugaau

SEQ ID NO: 2090312 - RNA, 19 nt, Homo sapiens
  misc_RNA (1)...(19): siRNA sense strand
ggagagaaacccuaugaau

SEQ ID NO: 2090313 - RNA, 19 nt, Homo sapiens
  misc_RNA (1)...(19): siRNA sense strand
ggagagaaacccuaucaau

SEQ ID NO: 2090314 - RNA, 19 nt, Homo sapiens
  misc_RNA (1)...(19): siRNA sense strand
uggaacagaucaaggaauu

SEQ ID NO: 2090315 - RNA, 19 nt, Homo sapiens
  misc_RNA (1)...(19): siRNA sense strand
agucgacgcucaucgcuua

SEQ ID NO: 2090316 - RNA, 19 nt, Homo sapiens
  misc_RNA (1)...(19): siRNA sense strand
gaauaaggccuagugaaug

SEQ ID NO: 2090317 - RNA, 19 nt, Homo sapiens
  misc_RNA (1)...(19): siRNA sense strand
aaagaaacccuauaagugu

SEQ ID NO: 2090318 - RNA, 19 nt, Homo sapiens
  misc_RNA (1)...(19): siRNA sense strand
gggacauaaugcagacuua

SEQ ID NO: 2090319 - RNA, 19 nt, Homo sapiens
  misc_RNA (1)...(19): siRNA sense strand
ggagagaagcccuaugaau

SEQ ID NO: 2090320 - RNA, 19 nt, Homo sapiens
  misc_RNA (1)...(19): siRNA sense strand
caaaguucaucucucauuc

SEQ ID NO: 2090321 - RNA, 19 nt, Homo sapiens
  misc_RNA (1)...(19): siRNA sense strand
cauagagcaucacagaauu

SEQ ID NO: 2090322 - RNA, 19 nt, Homo sapiens
  misc_RNA (1)...(19): siRNA sense strand
ucagugacauucaaagaug

SEQ ID NO: 2090323 - RNA, 19 nt, Homo sapiens
  misc_RNA (1)...(19): siRNA sense strand
gaaacccuaugaauguaau

SEQ ID NO: 2090324 - RNA, 19 nt, Homo sapiens
  misc_RNA (1)...(19): siRNA sense strand
gaaacccuaucaauguaau

SEQ ID NO: 2090325 - RNA, 19 nt, Homo sapiens
  misc_RNA (1)...(19): siRNA sense strand
ggagaaauccaacgaccuu

SEQ ID NO: 2090326 - RNA, 19 nt, Homo sapiens
  misc_RNA (1)...(19): siRNA sense strand
ggagaagagccauggauau

SEQ ID NO: 2090327 - RNA, 19 nt, Homo sapiens
  misc_RNA (1)...(19): siRNA sense strand
gugaaauccuaccauugua

SEQ ID NO: 2090328 - RNA, 19 nt, Homo sapiens
  misc_RNA (1)...(19): siRNA sense strand
guaacuacagcauagauuu

SEQ ID NO: 2090329 - RNA, 19 nt, Homo sapiens
  misc_RNA (1)...(19): siRNA sense strand
gggagaaacccuuugaaug

SEQ ID NO: 2090330 - RNA, 19 nt, Homo sapiens
  misc_RNA (1)...(19): siRNA sense strand
gaagagccauggauaucag

SEQ ID NO: 2090331 - RNA, 19 nt, Homo sapiens
  misc_RNA (1)...(19): siRNA sense strand
caacugaacauuccugcaa

SEQ ID NO: 2090332 - RNA, 19 nt, Homo sapiens
  misc_RNA (1)...(19): siRNA sense strand
gagaauucauacuggagaa

SEQ ID NO: 2090333 - RNA, 19 nt, Homo sapiens
  misc_RNA (1)...(19): siRNA sense strand
agagaaacccuaugaaugu

SEQ ID NO: 2090334 - RNA, 19 nt, Homo sapiens
  misc_RNA (1)...(19): siRNA sense strand
agagaaacccuaugaaugu

SEQ ID NO: 2090335 - RNA, 19 nt, Homo sapiens
  misc_RNA (1)...(19): siRNA sense strand
agagaaacccuaucaaugu

SEQ ID NO: 2090336 - RNA, 19 nt, Homo sapiens
  misc_RNA (1)...(19): siRNA sense strand
gaaacccuaucgauguaau

SEQ ID NO: 2090337 - RNA, 19 nt, Homo sapiens
  misc_RNA (1)...(19): siRNA sense strand
gagaaacccuuugaaugca

SEQ ID NO: 2090338 - RNA, 19 nt, Homo sapiens
  misc_RNA (1)...(19): siRNA sense strand
aaagaaacaccaugaaugu

SEQ ID NO: 2090339 - RNA, 19 nt, Homo sapiens
  misc_RNA (1)...(19): siRNA sense strand
gcaagaauaaggccuagug

SEQ ID NO: 2090340 - RNA, 19 nt, Homo sapiens
  misc_RNA (1)...(19): siRNA sense strand
ggagagaaacccuaucagu

SEQ ID NO: 2090341 - RNA, 19 nt, Homo sapiens
  misc_RNA (1)...(19): siRNA sense strand
gagaauucauacucgaaau

SEQ ID NO: 2090342 - RNA, 19 nt, Homo sapiens
  misc_RNA (1)...(19): siRNA sense strand
gagcccaucccuuuauaaa

SEQ ID NO: 2090343 - RNA, 19 nt, Homo sapiens
  misc_RNA (1)...(19): siRNA sense strand
cagagcccaucccuuuaua

SEQ ID NO: 2090344 - RNA, 19 nt, Homo sapiens
  misc_RNA (1)...(19): siRNA sense strand
ggagagaaacccuaucgau

SEQ ID NO: 2090345 - RNA, 19 nt, Homo sapiens
  misc_RNA (1)...(19): siRNA sense strand
gcccagagcuuagguaacu

SEQ ID NO: 2090346 - RNA, 19 nt, Homo sapiens
  misc_RNA (1)...(19): siRNA sense strand
aauaaggccuagugaaugu

SEQ ID NO: 2090347 - RNA, 19 nt, Homo sapiens
  misc_RNA (1)...(19): siRNA sense strand
caaauuggagcaaggagaa

SEQ ID NO: 2090348 - RNA, 19 nt, Homo sapiens
  misc_RNA (1)...(19): siRNA sense strand
gaacucauacuggagagaa

SEQ ID NO: 2090349 - RNA, 19 nt, Homo sapiens
  misc_RNA (1)...(19): siRNA sense strand
cgagagccuuagcaacuuu

SEQ ID NO: 2090350 - RNA, 19 nt, Homo sapiens
  misc_RNA (1)...(19): siRNA sense strand
cauagaucaucgcuuacua

SEQ ID NO: 2090351 - RNA, 19 nt, Homo sapiens
  misc_RNA (1)...(19): siRNA sense strand
cauaaugcagacuuacuua

SEQ ID NO: 2090352 - RNA, 19 nt, Homo sapiens
  misc_RNA (1)...(19): siRNA sense strand
gcagagaaccccuaugauu

SEQ ID NO: 2090353 - RNA, 19 nt, Homo sapiens
  misc_RNA (1)...(19): siRNA sense strand
gagaagagccauggauauc

SEQ ID NO: 2090354 - RNA, 19 nt, Homo sapiens
  misc_RNA (1)...(19): siRNA sense strand
agucaaaguucaucucuca

SEQ ID NO: 2090355 - RNA, 19 nt, Homo sapiens
  misc_RNA (1)...(19): siRNA sense strand
gaaauccuaccauuguaau

SEQ ID NO: 2090356 - RNA, 19 nt, Homo sapiens
  misc_RNA (1)...(19): siRNA sense strand
uuaccgaagugaaauccua

SEQ ID NO: 2090357 - RNA, 19 nt, Homo sapiens
  misc_RNA (1)...(19): siRNA sense strand
gaggaugccgagagccuua

SEQ ID NO: 2090358 - RNA, 19 nt, Homo sapiens
  misc_RNA (1)...(19): siRNA sense strand
aaacaccagagaauucaua

SEQ ID NO: 2090359 - RNA, 19 nt, Homo sapiens
  misc_RNA (1)...(19): siRNA sense strand
gaguacaaguuucauagag

SEQ ID NO: 2090360 - RNA, 19 nt, Homo sapiens
  misc_RNA (1)...(19): siRNA sense strand
gcaacuuuccuaagcuaaa

SEQ ID NO: 2090361 - RNA, 19 nt, Homo sapiens
  misc_RNA (1)...(19): siRNA sense strand
ggccugaagucaaaucauc

SEQ ID NO: 2090362 - RNA, 19 nt, Homo sapiens
  misc_RNA (1)...(19): siRNA sense strand
gaagcccuaugaauguaau

SEQ ID NO: 2090363 - RNA, 19 nt, Homo sapiens
  misc_RNA (1)...(19): siRNA sense strand
gcagcuggcccaucacaga

SEQ ID NO: 2090364 - RNA, 19 nt, Homo sapiens
  misc_RNA (1)...(19): siRNA sense strand
agagaaaccuuuugaaugu

SEQ ID NO: 2090365 - RNA, 19 nt, Homo sapiens
  misc_RNA (1)...(19): siRNA sense strand
gaaacccuuugaaugcaau

SEQ ID NO: 2090366 - RNA, 19 nt, Homo sapiens
  misc_RNA (1)...(19): siRNA sense strand
agagaaacccuaucgaugu

SEQ ID NO: 2090367 - RNA, 19 nt, Homo sapiens
  misc_RNA (1)...(19): siRNA sense strand
guucuucccuuguccaaca

SEQ ID NO: 2090368 - RNA, 19 nt, Homo sapiens
  misc_RNA (1)...(19): siRNA sense strand
caagaagccugucauauau

SEQ ID NO: 2090369 - RNA, 19 nt, Homo sapiens
  misc_RNA (1)...(19): siRNA sense strand
gagaaggacuugcaaagau

SEQ ID NO: 2090370 - RNA, 19 nt, Homo sapiens
  misc_RNA (1)...(19): siRNA sense strand
acaagaagccugucauaua

SEQ ID NO: 2090371 - RNA, 19 nt, Homo sapiens
  misc_RNA (1)...(19): siRNA sense strand
caaauaagcccacagacaa

SEQ ID NO: 2090372 - RNA, 19 nt, Homo sapiens
  misc_RNA (1)...(19): siRNA sense strand
gcaggaaaguuugaagaaa

SEQ ID NO: 2090373 - RNA, 19 nt, Homo sapiens
  misc_RNA (1)...(19): siRNA sense strand
caacuaggauacuuucaga

SEQ ID NO: 2090374 - RNA, 19 nt, Homo sapiens
  misc_RNA (1)...(19): siRNA sense strand
gccaauaccuuuguaauca

SEQ ID NO: 2090375 - RNA, 19 nt, Homo sapiens
  misc_RNA (1)...(19): siRNA sense strand
gcucagauccaguguuuaa

SEQ ID NO: 2090376 - RNA, 19 nt, Homo sapiens
  misc_RNA (1)...(19): siRNA sense strand
uggagaaacugauuaaaga

SEQ ID NO: 2090377 - RNA, 19 nt, Homo sapiens
  misc_RNA (1)...(19): siRNA sense strand
caacauuggcucuggguua

SEQ ID NO: 2090378 - RNA, 19 nt, Homo sapiens
  misc_RNA (1)...(19): siRNA sense strand
agaaggacuugcaaagaua

SEQ ID NO: 2090379 - RNA, 19 nt, Homo sapiens
  misc_RNA (1)...(19): siRNA sense strand
gagaagaacagaagaggaa

SEQ ID NO: 2090380 - RNA, 19 nt, Homo sapiens
  misc_RNA (1)...(19): siRNA sense strand
gagaggcacucgugugaug

SEQ ID NO: 2090381 - RNA, 19 nt, Homo sapiens
  misc_RNA (1)...(19): siRNA sense strand
gacauagucugggagcuua

SEQ ID NO: 2090382 - RNA, 19 nt, Homo sapiens
  misc_RNA (1)...(19): siRNA sense strand
gaaaaugggugugcuuauu

SEQ ID NO: 2090383 - RNA, 19 nt, Homo sapiens
  misc_RNA (1)...(19): siRNA sense strand
gauaccaccuuauggcuau

SEQ ID NO: 2090384 - RNA, 19 nt, Homo sapiens
  misc_RNA (1)...(19): siRNA sense strand
uaacaagaagccugucaua

SEQ ID NO: 2090385 - RNA, 19 nt, Homo sapiens
  misc_RNA (1)...(19): siRNA sense strand
gugguuaucuuuacaauac

SEQ ID NO: 2090386 - RNA, 19 nt, Homo sapiens
  misc_RNA (1)...(19): siRNA sense strand
aagcaugccugucaacuga

SEQ ID NO: 2090387 - RNA, 19 nt, Homo sapiens
  misc_RNA (1)...(19): siRNA sense strand
gaucaagcaugccugucaa

SEQ ID NO: 2090388 - RNA, 19 nt, Homo sapiens
  misc_RNA (1)...(19): siRNA sense strand
gacaagauauggugagcau

SEQ ID NO: 2090389 - RNA, 19 nt, Homo sapiens
  misc_RNA (1)...(19): siRNA sense strand
ggaaagagaaggacuugca

SEQ ID NO: 2090390 - RNA, 19 nt, Homo sapiens
  misc_RNA (1)...(19): siRNA sense strand
gcauggagaugaagaugag

SEQ ID NO: 2090391 - RNA, 19 nt, Homo sapiens
  misc_RNA (1)...(19): siRNA sense strand
gugugaaucuggcaacauu

SEQ ID NO: 2090392 - RNA, 19 nt, Homo sapiens
  misc_RNA (1)...(19): siRNA sense strand
gaagaaagugaauuacauc

SEQ ID NO: 2090393 - RNA, 19 nt, Homo sapiens
  misc_RNA (1)...(19): siRNA sense strand
uuuaguugcuggucuuaua

SEQ ID NO: 2090394 - RNA, 19 nt, Homo sapiens
  misc_RNA (1)...(19): siRNA sense strand
uauguaggcuugccauuca

SEQ ID NO: 2090395 - RNA, 19 nt, Homo sapiens
  misc_RNA (1)...(19): siRNA sense strand
caggaaaguuugaagaaag

SEQ ID NO: 2090396 - RNA, 19 nt, Homo sapiens
  misc_RNA (1)...(19): siRNA sense strand
ggaaagaagcucauaucca

SEQ ID NO: 2090397 - RNA, 19 nt, Homo sapiens
  misc_RNA (1)...(19): siRNA sense strand
gagaaacugauuaaagaug

SEQ ID NO: 2090398 - RNA, 19 nt, Homo sapiens
  misc_RNA (1)...(19): siRNA sense strand
cagacaagauugggagauu

SEQ ID NO: 2090399 - RNA, 19 nt, Homo sapiens
  misc_RNA (1)...(19): siRNA sense strand
ccacgaagaggaaagagaa

SEQ ID NO: 2090400 - RNA, 19 nt, Homo sapiens
  misc_RNA (1)...(19): siRNA sense strand
ggacacacagacaagauug

SEQ ID NO: 2090401 - RNA, 19 nt, Homo sapiens
  misc_RNA (1)...(19): siRNA sense strand
ggacuugcaaagauaugua

SEQ ID NO: 2090402 - RNA, 19 nt, Homo sapiens
  misc_RNA (1)...(19): siRNA sense strand
gaaagagaaggacuugcaa

SEQ ID NO: 2090403 - RNA, 19 nt, Homo sapiens
  misc_RNA (1)...(19): siRNA sense strand
uuauggcuaugcagaauuu

SEQ ID NO: 2090404 - RNA, 19 nt, Homo sapiens
  misc_RNA (1)...(19): siRNA sense strand
ggaggacagucagagaaga

SEQ ID NO: 2090405 - RNA, 19 nt, Homo sapiens
  misc_RNA (1)...(19): siRNA sense strand
aggcucagauccaguguuu

SEQ ID NO: 2090406 - RNA, 19 nt, Homo sapiens
  misc_RNA (1)...(19): siRNA sense strand
uugcuggucuuauaucaaa

SEQ ID NO: 2090407 - RNA, 19 nt, Homo sapiens
  misc_RNA (1)...(19): siRNA sense strand
gugcuuauuuccacgaaga

SEQ ID NO: 2090408 - RNA, 19 nt, Homo sapiens
  misc_RNA (1)...(19): siRNA sense strand
ggugagcauccuccaguua

SEQ ID NO: 2090409 - RNA, 19 nt, Homo sapiens
  misc_RNA (1)...(19): siRNA sense strand
gaaaguuugaagaaaguga

SEQ ID NO: 2090410 - RNA, 19 nt, Homo sapiens
  misc_RNA (1)...(19): siRNA sense strand
gaaggaggcagugaagaug

SEQ ID NO: 2090411 - RNA, 19 nt, Homo sapiens
  misc_RNA (1)...(19): siRNA sense strand
ugagaaaacuuacaacuag

SEQ ID NO: 2090412 - RNA, 19 nt, Homo sapiens
  misc_RNA (1)...(19): siRNA sense strand
ggacauagucugggagcuu

SEQ ID NO: 2090413 - RNA, 19 nt, Homo sapiens
  misc_RNA (1)...(19): siRNA sense strand
gacccugccuugacuuuag

SEQ ID NO: 2090414 - RNA, 19 nt, Homo sapiens
  misc_RNA (1)...(19): siRNA sense strand
gaaggacuugcaaagauau

SEQ ID NO: 2090415 - RNA, 19 nt, Homo sapiens
  misc_RNA (1)...(19): siRNA sense strand
gggagaggcacucguguga

SEQ ID NO: 2090416 - RNA, 19 nt, Homo sapiens
  misc_RNA (1)...(19): siRNA sense strand
uuacaauacuugggacuug

SEQ ID NO: 2090417 - RNA, 19 nt, Homo sapiens
  misc_RNA (1)...(19): siRNA sense strand
ugugauagcaugacgauga

SEQ ID NO: 2090418 - RNA, 19 nt, Homo sapiens
  misc_RNA (1)...(19): siRNA sense strand
gacaagauugggagauuga

SEQ ID NO: 2090419 - RNA, 19 nt, Homo sapiens
  misc_RNA (1)...(19): siRNA sense strand
ucaaauaagcccacagaca

SEQ ID NO: 2090420 - RNA, 19 nt, Homo sapiens
  misc_RNA (1)...(19): siRNA sense strand
acuaggauacuuucagaua

SEQ ID NO: 2090421 - RNA, 19 nt, Homo sapiens
  misc_RNA (1)...(19): siRNA sense strand
gagaagcugagaaaacuua

SEQ ID NO: 2090422 - RNA, 19 nt, Homo sapiens
  misc_RNA (1)...(19): siRNA sense strand
ggaucaagcaugccuguca

SEQ ID NO: 2090423 - RNA, 19 nt, Homo sapiens
  misc_RNA (1)...(19): siRNA sense strand
ggagaaacugauuaaagau

SEQ ID NO: 2090424 - RNA, 19 nt, Homo sapiens
  misc_RNA (1)...(19): siRNA sense strand
gcuggucuuauaucaaaua

SEQ ID NO: 2090425 - RNA, 19 nt, Homo sapiens
  misc_RNA (1)...(19): siRNA sense strand
gaacagaagaggaaaaugg

SEQ ID NO: 2090426 - RNA, 19 nt, Homo sapiens
  misc_RNA (1)...(19): siRNA sense strand
gaggacagucagagaagaa

SEQ ID NO: 2090427 - RNA, 19 nt, Homo sapiens
  misc_RNA (1)...(19): siRNA sense strand
aagccugucauauaucuua

SEQ ID NO: 2090428 - RNA, 19 nt, Homo sapiens
  misc_RNA (1)...(19): siRNA sense strand
gccauucauucucaauaug

SEQ ID NO: 2090429 - RNA, 19 nt, Homo sapiens
  misc_RNA (1)...(19): siRNA sense strand
ccagggcaguggacaagau

SEQ ID NO: 2090430 - RNA, 19 nt, Homo sapiens
  misc_RNA (1)...(19): siRNA sense strand
agacaagauugggagauug

SEQ ID NO: 2090431 - RNA, 19 nt, Homo sapiens
  misc_RNA (1)...(19): siRNA sense strand
gaugauauagagcgaggaa

SEQ ID NO: 2090432 - RNA, 19 nt, Homo sapiens
  misc_RNA (1)...(19): siRNA sense strand
gagcuuauauuuugacucu

SEQ ID NO: 2090433 - RNA, 19 nt, Homo sapiens
  misc_RNA (1)...(19): siRNA sense strand
ggacgaagagaagcugaga

SEQ ID NO: 2090434 - RNA, 19 nt, Homo sapiens
  misc_RNA (1)...(19): siRNA sense strand
caagauugggagauugaaa

SEQ ID NO: 2090435 - RNA, 19 nt, Homo sapiens
  misc_RNA (1)...(19): siRNA sense strand
gauagcagaccccacguua

SEQ ID NO: 2090436 - RNA, 19 nt, Homo sapiens
  misc_RNA (1)...(19): siRNA sense strand
aaauaagcccacagacaaa

SEQ ID NO: 2090437 - RNA, 19 nt, Homo sapiens
  misc_RNA (1)...(19): siRNA sense strand
uaucaaauaagcccacaga

SEQ ID NO: 2090438 - RNA, 19 nt, Homo sapiens
  misc_RNA (1)...(19): siRNA sense strand
gagauugaaagaacucugu

SEQ ID NO: 2090439 - RNA, 19 nt, Homo sapiens
  misc_RNA (1)...(19): siRNA sense strand
gaggaaagagaaggacuug

SEQ ID NO: 2090440 - RNA, 19 nt, Homo sapiens
  misc_RNA (1)...(19): siRNA sense strand
ucugggagcuuauauuuug

SEQ ID NO: 2090441 - RNA, 19 nt, Homo sapiens
  misc_RNA (1)...(19): siRNA sense strand
ugaaggaggcagugaagau

SEQ ID NO: 2090442 - RNA, 19 nt, Homo sapiens
  misc_RNA (1)...(19): siRNA sense strand
ugauauagagcgaggaaga

SEQ ID NO: 2090443 - RNA, 19 nt, Homo sapiens
  misc_RNA (1)...(19): siRNA sense strand
ugccauucauucucaauau

SEQ ID NO: 2090444 - RNA, 19 nt, Homo sapiens
  misc_RNA (1)...(19): siRNA sense strand
ucugaugcauggagaugaa

SEQ ID NO: 2090445 - RNA, 19 nt, Homo sapiens
  misc_RNA (1)...(19): siRNA sense strand
agucaaugguugcaggaaa

SEQ ID NO: 2090446 - RNA, 19 nt, Homo sapiens
  misc_RNA (1)...(19): siRNA sense strand
cguaguggauggcuucagu

SEQ ID NO: 2090447 - RNA, 19 nt, Homo sapiens
  misc_RNA (1)...(19): siRNA sense strand
acgaagagaagcugagaaa

SEQ ID NO: 2090448 - RNA, 19 nt, Homo sapiens
  misc_RNA (1)...(19): siRNA sense strand
gagcauccuccaguuaguu

SEQ ID NO: 2090449 - RNA, 19 nt, Homo sapiens
  misc_RNA (1)...(19): siRNA sense strand
ggccaauaccuuuguaauc

SEQ ID NO: 2090450 - RNA, 19 nt, Homo sapiens
  misc_RNA (1)...(19): siRNA sense strand
agaagccugucauauaucu

SEQ ID NO: 2090451 - RNA, 19 nt, Homo sapiens
  misc_RNA (1)...(19): siRNA sense strand
agucugggagcuuauauuu

SEQ ID NO: 2090452 - RNA, 19 nt, Homo sapiens
  misc_RNA (1)...(19): siRNA sense strand
gacuuuaguugcuggucuu

SEQ ID NO: 2090453 - RNA, 19 nt, Homo sapiens
  misc_RNA (1)...(19): siRNA sense strand
cggugacacuguauaaaca

SEQ ID NO: 2090454 - RNA, 19 nt, Homo sapiens
  misc_RNA (1)...(19): siRNA sense strand
gcaguaggacacacagaca

SEQ ID NO: 2090455 - RNA, 19 nt, Homo sapiens
  misc_RNA (1)...(19): siRNA sense strand
cuaggauacuuucagauac

SEQ ID NO: 2090456 - RNA, 19 nt, Homo sapiens
  misc_RNA (1)...(19): siRNA sense strand
aaacuuacaacuaggauac

SEQ ID NO: 2090457 - RNA, 19 nt, Homo sapiens
  misc_RNA (1)...(19): siRNA sense strand
gaagagaagcugagaaaac

SEQ ID NO: 2090458 - RNA, 19 nt, Homo sapiens
  misc_RNA (1)...(19): siRNA sense strand
aaagagaaggacuugcaaa

SEQ ID NO: 2090459 - RNA, 19 nt, Homo sapiens
  misc_RNA (1)...(19): siRNA sense strand
caguggugguguucagauu

SEQ ID NO: 2090460 - RNA, 19 nt, Homo sapiens
  misc_RNA (1)...(19): siRNA sense strand
uacaauacuugggacuuga

SEQ ID NO: 2090461 - RNA, 19 nt, Homo sapiens
  misc_RNA (1)...(19): siRNA sense strand
gcagccaaaugugauagca

SEQ ID NO: 2090462 - RNA, 19 nt, Homo sapiens
  misc_RNA (1)...(19): siRNA sense strand
acuuucagauaccaccuua

SEQ ID NO: 2090463 - RNA, 19 nt, Homo sapiens
  misc_RNA (1)...(19): siRNA sense strand
gucaaugguugcaggaaag

SEQ ID NO: 2090464 - RNA, 19 nt, Homo sapiens
  misc_RNA (1)...(19): siRNA sense strand
gcaugccugucaacugagu

SEQ ID NO: 2090465 - RNA, 19 nt, Homo sapiens
  misc_RNA (1)...(19): siRNA sense strand
gguuaugucuccucaucag

SEQ ID NO: 2090466 - RNA, 19 nt, Homo sapiens
  misc_RNA (1)...(19): siRNA sense strand
ggauggcuucaguggguua

SEQ ID NO: 2090467 - RNA, 19 nt, Homo sapiens
  misc_RNA (1)...(19): siRNA sense strand
aggaaaguuugaagaaagu

SEQ ID NO: 2090468 - RNA, 19 nt, Homo sapiens
  misc_RNA (1)...(19): siRNA sense strand
ggacaaggaccacgcgaaa

SEQ ID NO: 2090469 - RNA, 19 nt, Homo sapiens
  misc_RNA (1)...(19): siRNA sense strand
ccaaccagcuggacaagga

SEQ ID NO: 2090470 - RNA, 19 nt, Homo sapiens
  misc_RNA (1)...(19): siRNA sense strand
gcgagcagguaaucaaaga

SEQ ID NO: 2090471 - RNA, 19 nt, Homo sapiens
  misc_RNA (1)...(19): siRNA sense strand
gaagagcuccuacccuauc

SEQ ID NO: 2090472 - RNA, 19 nt, Homo sapiens
  misc_RNA (1)...(19): siRNA sense strand
gaaaccugccaguccguua

SEQ ID NO: 2090473 - RNA, 19 nt, Homo sapiens
  misc_RNA (1)...(19): siRNA sense strand
gcucgccucuccagcguuu

SEQ ID NO: 2090474 - RNA, 19 nt, Homo sapiens
  misc_RNA (1)...(19): siRNA sense strand
gaggagugcgucuucuaua

SEQ ID NO: 2090475 - RNA, 19 nt, Homo sapiens
  misc_RNA (1)...(19): siRNA sense strand
gcaggaccgucaccaacga

SEQ ID NO: 2090476 - RNA, 19 nt, Homo sapiens
  misc_RNA (1)...(19): siRNA sense strand
caacaucgcccagaacuac

SEQ ID NO: 2090477 - RNA, 19 nt, Homo sapiens
  misc_RNA (1)...(19): siRNA sense strand
cgcugaagcugcagaagaa

SEQ ID NO: 2090478 - RNA, 19 nt, Homo sapiens
  misc_RNA (1)...(19): siRNA sense strand
cuaaagggcucggacuaca

SEQ ID NO: 2090479 - RNA, 19 nt, Homo sapiens
  misc_RNA (1)...(19): siRNA sense strand
acaaggaccacgcgaaaga

SEQ ID NO: 2090480 - RNA, 19 nt, Homo sapiens
  misc_RNA (1)...(19): siRNA sense strand
gggacucgcugcaguacuc

SEQ ID NO: 2090481 - RNA, 19 nt, Homo sapiens
  misc_RNA (1)...(19): siRNA sense strand
ggacgucaacgacauguac

SEQ ID NO: 2090482 - RNA, 19 nt, Homo sapiens
  misc_RNA (1)...(19): siRNA sense strand
gcaacaucgcccagaacua

SEQ ID NO: 2090483 - RNA, 19 nt, Homo sapiens
  misc_RNA (1)...(19): siRNA sense strand
ccagaaaguggcugacaug

SEQ ID NO: 2090484 - RNA, 19 nt, Homo sapiens
  misc_RNA (1)...(19): siRNA sense strand
ggcacagccugguggagaa

SEQ ID NO: 2090485 - RNA, 19 nt, Homo sapiens
  misc_RNA (1)...(19): siRNA sense strand
gguaaucaaagaccuaaag

SEQ ID NO: 2090486 - RNA, 19 nt, Homo sapiens
  misc_RNA (1)...(19): siRNA sense strand
gggcaucaucgacgacuug

SEQ ID NO: 2090487 - RNA, 19 nt, Homo sapiens
  misc_RNA (1)...(19): siRNA sense strand
gccuaugccuucagacauc

SEQ ID NO: 2090488 - RNA, 19 nt, Homo sapiens
  misc_RNA (1)...(19): siRNA sense strand
acagcaacaucgcccagaa

SEQ ID NO: 2090489 - RNA, 19 nt, Homo sapiens
  misc_RNA (1)...(19): siRNA sense strand
uggcugacauggcuaccaa

SEQ ID NO: 2090490 - RNA, 19 nt, Homo sapiens
  misc_RNA (1)...(19): siRNA sense strand
caaagagcuacuugggaaa

SEQ ID NO: 2090491 - RNA, 19 nt, Homo sapiens
  misc_RNA (1)...(19): siRNA sense strand
ccagcgagcagguaaucaa

SEQ ID NO: 2090492 - RNA, 19 nt, Homo sapiens
  misc_RNA (1)...(19): siRNA sense strand
gccaaggccuccccaaaga

SEQ ID NO: 2090493 - RNA, 19 nt, Homo sapiens
  misc_RNA (1)...(19): siRNA sense strand
cgacugcuacuccgugaau

SEQ ID NO: 2090494 - RNA, 19 nt, Homo sapiens
  misc_RNA (1)...(19): siRNA sense strand
ggccauagucaacgacaug

SEQ ID NO: 2090495 - RNA, 19 nt, Homo sapiens
  misc_RNA (1)...(19): siRNA sense strand
ggaccacgcgaaagaguac

SEQ ID NO: 2090496 - RNA, 19 nt, Homo sapiens
  misc_RNA (1)...(19): siRNA sense strand
gcaggacgucaacgacaug

SEQ ID NO: 2090497 - RNA, 19 nt, Homo sapiens
  misc_RNA (1)...(19): siRNA sense strand
cagcgagcagguaaucaaa

SEQ ID NO: 2090498 - RNA, 19 nt, Homo sapiens
  misc_RNA (1)...(19): siRNA sense strand
gugaggagugcgucuucua

SEQ ID NO: 2090499 - RNA, 19 nt, Homo sapiens
  misc_RNA (1)...(19): siRNA sense strand
ugaggagugcgucuucuau

SEQ ID NO: 2090500 - RNA, 19 nt, Homo sapiens
  misc_RNA (1)...(19): siRNA sense strand
gcaucgaggacuggaagaa

SEQ ID NO: 2090501 - RNA, 19 nt, Homo sapiens
  misc_RNA (1)...(19): siRNA sense strand
ccucgccuaugccuucaga

SEQ ID NO: 2090502 - RNA, 19 nt, Homo sapiens
  misc_RNA (1)...(19): siRNA sense strand
ucccggaaguccagcaugu

SEQ ID NO: 2090503 - RNA, 19 nt, Homo sapiens
  misc_RNA (1)...(19): siRNA sense strand
guucucuccucuccuccuu

SEQ ID NO: 2090504 - RNA, 19 nt, Homo sapiens
  misc_RNA (1)...(19): siRNA sense strand
aggagugcgucuucuauac

SEQ ID NO: 2090505 - RNA, 19 nt, Homo sapiens
  misc_RNA (1)...(19): siRNA sense strand
cauagucaacgacaugaag

SEQ ID NO: 2090506 - RNA, 19 nt, Homo sapiens
  misc_RNA (1)...(19): siRNA sense strand
gcagugaggagugcgucuu

SEQ ID NO: 2090507 - RNA, 19 nt, Homo sapiens
  misc_RNA (1)...(19): siRNA sense strand
caaggucggcucccaugag

SEQ ID NO: 2090508 - RNA, 19 nt, Homo sapiens
  misc_RNA (1)...(19): siRNA sense strand
ugaccaugcugggagagau

SEQ ID NO: 2090509 - RNA, 19 nt, Homo sapiens
  misc_RNA (1)...(19): siRNA sense strand
gaaacgaggugacaaauga

SEQ ID NO: 2090510 - RNA, 19 nt, Homo sapiens
  misc_RNA (1)...(19): siRNA sense strand
caaaugaguucuuguacua

SEQ ID NO: 2090511 - RNA, 19 nt, Homo sapiens
  misc_RNA (1)...(19): siRNA sense strand
ggaaggagaugugaacuuu

SEQ ID NO: 2090512 - RNA, 19 nt, Homo sapiens
  misc_RNA (1)...(19): siRNA sense strand
aaacaaacccugguaauua

SEQ ID NO: 2090513 - RNA, 19 nt, Homo sapiens
  misc_RNA (1)...(19): siRNA sense strand
gaaagacucggacuacaua

SEQ ID NO: 2090514 - RNA, 19 nt, Homo sapiens
  misc_RNA (1)...(19): siRNA sense strand
gagaaaguaucaacuauca

SEQ ID NO: 2090515 - RNA, 19 nt, Homo sapiens
  misc_RNA (1)...(19): siRNA sense strand
gagcauagauugucuguac

SEQ ID NO: 2090516 - RNA, 19 nt, Homo sapiens
  misc_RNA (1)...(19): siRNA sense strand
gaggugaacucccguguug

SEQ ID NO: 2090517 - RNA, 19 nt, Homo sapiens
  misc_RNA (1)...(19): siRNA sense strand
gaccuaagcaucacuauga

SEQ ID NO: 2090518 - RNA, 19 nt, Homo sapiens
  misc_RNA (1)...(19): siRNA sense strand
ccaagaagaucaacaacau

SEQ ID NO: 2090519 - RNA, 19 nt, Homo sapiens
  misc_RNA (1)...(19): siRNA sense strand
gagccucauuucuccauua

SEQ ID NO: 2090520 - RNA, 19 nt, Homo sapiens
  misc_RNA (1)...(19): siRNA sense strand
gaagaaggcuauauuaccu

SEQ ID NO: 2090521 - RNA, 19 nt, Homo sapiens
  misc_RNA (1)...(19): siRNA sense strand
ggaagaaucuccggaccuu

SEQ ID NO: 2090522 - RNA, 19 nt, Homo sapiens
  misc_RNA (1)...(19): siRNA sense strand
ggaaacacauuggagauuc

SEQ ID NO: 2090523 - RNA, 19 nt, Homo sapiens
  misc_RNA (1)...(19): siRNA sense strand
ccaaagcuguagccaauau

SEQ ID NO: 2090524 - RNA, 19 nt, Homo sapiens
  misc_RNA (1)...(19): siRNA sense strand
aauaugagcucuaucugaa

SEQ ID NO: 2090525 - RNA, 19 nt, Homo sapiens
  misc_RNA (1)...(19): siRNA sense strand
aaggagaugugaacuuuaa

SEQ ID NO: 2090526 - RNA, 19 nt, Homo sapiens
  misc_RNA (1)...(19): siRNA sense strand
caacaucacagucuccuuu

SEQ ID NO: 2090527 - RNA, 19 nt, Homo sapiens
  misc_RNA (1)...(19): siRNA sense strand
caaaggugaucuuccgaaa

SEQ ID NO: 2090528 - RNA, 19 nt, Homo sapiens
  misc_RNA (1)...(19): siRNA sense strand
ccagaagaaggcuauauua

SEQ ID NO: 2090529 - RNA, 19 nt, Homo sapiens
  misc_RNA (1)...(19): siRNA sense strand
uaucaacacuggaaaguuc

SEQ ID NO: 2090530 - RNA, 19 nt, Homo sapiens
  misc_RNA (1)...(19): siRNA sense strand
ccaacaggauugugaaguu

SEQ ID NO: 2090531 - RNA, 19 nt, Homo sapiens
  misc_RNA (1)...(19): siRNA sense strand
gaacucauucccuuugaaa

SEQ ID NO: 2090532 - RNA, 19 nt, Homo sapiens
  misc_RNA (1)...(19): siRNA sense strand
acacugagcuucugccaau

SEQ ID NO: 2090533 - RNA, 19 nt, Homo sapiens
  misc_RNA (1)...(19): siRNA sense strand
gagugagacuggaguuaaa

SEQ ID NO: 2090534 - RNA, 19 nt, Homo sapiens
  misc_RNA (1)...(19): siRNA sense strand
gcaacagccugcuuguaug

SEQ ID NO: 2090535 - RNA, 19 nt, Homo sapiens
  misc_RNA (1)...(19): siRNA sense strand
ucuaugagguggaguuaaa

SEQ ID NO: 2090536 - RNA, 19 nt, Homo sapiens
  misc_RNA (1)...(19): siRNA sense strand
ccagaacccugcagcauuc

SEQ ID NO: 2090537 - RNA, 19 nt, Homo sapiens
  misc_RNA (1)...(19): siRNA sense strand
ucaaugggcucucacaaca

SEQ ID NO: 2090538 - RNA, 19 nt, Homo sapiens
  misc_RNA (1)...(19): siRNA sense strand
gaaaguaucaacuaucaag

SEQ ID NO: 2090539 - RNA, 19 nt, Homo sapiens
  misc_RNA (1)...(19): siRNA sense strand
agacuaacaucaucaacuu

SEQ ID NO: 2090540 - RNA, 19 nt, Homo sapiens
  misc_RNA (1)...(19): siRNA sense strand
gccgagggcuacacuauga

SEQ ID NO: 2090541 - RNA, 19 nt, Homo sapiens
  misc_RNA (1)...(19): siRNA sense strand
ucauggaccuuccuaauuc

SEQ ID NO: 2090542 - RNA, 19 nt, Homo sapiens
  misc_RNA (1)...(19): siRNA sense strand
gaaccucucaucucucuga

SEQ ID NO: 2090543 - RNA, 19 nt, Homo sapiens
  misc_RNA (1)...(19): siRNA sense strand
ggaaaagccuguucacuuc

SEQ ID NO: 2090544 - RNA, 19 nt, Homo sapiens
  misc_RNA (1)...(19): siRNA sense strand
caauaucuaucgugaagug

SEQ ID NO: 2090545 - RNA, 19 nt, Homo sapiens
  misc_RNA (1)...(19): siRNA sense strand
caaacaaacccugguaauu

SEQ ID NO: 2090546 - RNA, 19 nt, Homo sapiens
  misc_RNA (1)...(19): siRNA sense strand
ggaccugcuuuaucuauca

SEQ ID NO: 2090547 - RNA, 19 nt, Homo sapiens
  misc_RNA (1)...(19): siRNA sense strand
gaacucauaaucaagauca

SEQ ID NO: 2090548 - RNA, 19 nt, Homo sapiens
  misc_RNA (1)...(19): siRNA sense strand
gcucgcagguggagaguau

SEQ ID NO: 2090549 - RNA, 19 nt, Homo sapiens
  misc_RNA (1)...(19): siRNA sense strand
gaacucccguguugaugug

SEQ ID NO: 2090550 - RNA, 19 nt, Homo sapiens
  misc_RNA (1)...(19): siRNA sense strand
gaaggagaugugaacuuua

SEQ ID NO: 2090551 - RNA, 19 nt, Homo sapiens
  misc_RNA (1)...(19): siRNA sense strand
gaucagccaugguccaaca

SEQ ID NO: 2090552 - RNA, 19 nt, Homo sapiens
  misc_RNA (1)...(19): siRNA sense strand
gaacguacgcugcaaaggu

SEQ ID NO: 2090553 - RNA, 19 nt, Homo sapiens
  misc_RNA (1)...(19): siRNA sense strand
gagcugcccuccuggugaa

SEQ ID NO: 2090554 - RNA, 19 nt, Homo sapiens
  misc_RNA (1)...(19): siRNA sense strand
cuggaucucugaagaaauu

SEQ ID NO: 2090555 - RNA, 19 nt, Homo sapiens
  misc_RNA (1)...(19): siRNA sense strand
ggagugagacuggaguuaa

SEQ ID NO: 2090556 - RNA, 19 nt, Homo sapiens
  misc_RNA (1)...(19): siRNA sense strand
gagggcacguucucauuug

SEQ ID NO: 2090557 - RNA, 19 nt, Homo sapiens
  misc_RNA (1)...(19): siRNA sense strand
ggacaacucccgcuauucu

SEQ ID NO: 2090558 - RNA, 19 nt, Homo sapiens
  misc_RNA (1)...(19): siRNA sense strand
gccaauaucuaucgugaag

SEQ ID NO: 2090559 - RNA, 19 nt, Homo sapiens
  misc_RNA (1)...(19): siRNA sense strand
gagguggaguuaaaugaau

SEQ ID NO: 2090560 - RNA, 19 nt, Homo sapiens
  misc_RNA (1)...(19): siRNA sense strand
gggcaucacugagucauca

SEQ ID NO: 2090561 - RNA, 19 nt, Homo sapiens
  misc_RNA (1)...(19): siRNA sense strand
gaggaaguguucauggaau

SEQ ID NO: 2090562 - RNA, 19 nt, Homo sapiens
  misc_RNA (1)...(19): siRNA sense strand
caaagaagucuguaaacug

SEQ ID NO: 2090563 - RNA, 19 nt, Homo sapiens
  misc_RNA (1)...(19): siRNA sense strand
uggcccagcucacauuuaa

SEQ ID NO: 2090564 - RNA, 19 nt, Homo sapiens
  misc_RNA (1)...(19): siRNA sense strand
ugacagaccuggaacucau

SEQ ID NO: 2090565 - RNA, 19 nt, Homo sapiens
  misc_RNA (1)...(19): siRNA sense strand
cagugugaauucaacuuua

SEQ ID NO: 2090566 - RNA, 19 nt, Homo sapiens
  misc_RNA (1)...(19): siRNA sense strand
ggagaugugaacuuuaauu

SEQ ID NO: 2090567 - RNA, 19 nt, Homo sapiens
  misc_RNA (1)...(19): siRNA sense strand
aagaaucuccggaccuuua

SEQ ID NO: 2090568 - RNA, 19 nt, Homo sapiens
  misc_RNA (1)...(19): siRNA sense strand
aaacccaucuggcagcaaa

SEQ ID NO: 2090569 - RNA, 19 nt, Homo sapiens
  misc_RNA (1)...(19): siRNA sense strand
ccaaagaagucuguaaacu

SEQ ID NO: 2090570 - RNA, 19 nt, Homo sapiens
  misc_RNA (1)...(19): siRNA sense strand
gaacaguuuccaucaugaa

SEQ ID NO: 2090571 - RNA, 19 nt, Homo sapiens
  misc_RNA (1)...(19): siRNA sense strand
gaaguugggagcuguccua

SEQ ID NO: 2090572 - RNA, 19 nt, Homo sapiens
  misc_RNA (1)...(19): siRNA sense strand
caggacaacucccgcuauu

SEQ ID NO: 2090573 - RNA, 19 nt, Homo sapiens
  misc_RNA (1)...(19): siRNA sense strand
gaacaagucacaccucaac

SEQ ID NO: 2090574 - RNA, 19 nt, Homo sapiens
  misc_RNA (1)...(19): siRNA sense strand
cuucagcucucuccucauu

SEQ ID NO: 2090575 - RNA, 19 nt, Homo sapiens
  misc_RNA (1)...(19): siRNA sense strand
gcauggagguuucuuuuga

SEQ ID NO: 2090576 - RNA, 19 nt, Homo sapiens
  misc_RNA (1)...(19): siRNA sense strand
caacaaacagucgaaauca

SEQ ID NO: 2090577 - RNA, 19 nt, Homo sapiens
  misc_RNA (1)...(19): siRNA sense strand
ucacaugccuuacagaaaa

SEQ ID NO: 2090578 - RNA, 19 nt, Homo sapiens
  misc_RNA (1)...(19): siRNA sense strand
uaacuuugcacaacacuga

SEQ ID NO: 2090579 - RNA, 19 nt, Homo sapiens
  misc_RNA (1)...(19): siRNA sense strand
cgaugugggugcaagguuu

SEQ ID NO: 2090580 - RNA, 19 nt, Homo sapiens
  misc_RNA (1)...(19): siRNA sense strand
aaaccuugcugcaguacuu

SEQ ID NO: 2090581 - RNA, 19 nt, Homo sapiens
  misc_RNA (1)...(19): siRNA sense strand
caaccagacuaacaucauc

SEQ ID NO: 2090582 - RNA, 19 nt, Homo sapiens
  misc_RNA (1)...(19): siRNA sense strand
uagauugucuguacaccaa

SEQ ID NO: 2090583 - RNA, 19 nt, Homo sapiens
  misc_RNA (1)...(19): siRNA sense strand
uaaacuggaagucaucuuu

SEQ ID NO: 2090584 - RNA, 19 nt, Homo sapiens
  misc_RNA (1)...(19): siRNA sense strand
caagaacucauucccuuug

SEQ ID NO: 2090585 - RNA, 19 nt, Homo sapiens
  misc_RNA (1)...(19): siRNA sense strand
gagacugugcagaucauua

SEQ ID NO: 2090586 - RNA, 19 nt, Homo sapiens
  misc_RNA (1)...(19): siRNA sense strand
caauaugagcucuaucuga

SEQ ID NO: 2090587 - RNA, 19 nt, Homo sapiens
  misc_RNA (1)...(19): siRNA sense strand
ggugacaaaugaguucuug

SEQ ID NO: 2090588 - RNA, 19 nt, Homo sapiens
  misc_RNA (1)...(19): siRNA sense strand
gaaaguccacccugugaca

SEQ ID NO: 2090589 - RNA, 19 nt, Homo sapiens
  misc_RNA (1)...(19): siRNA sense strand
caacaucacagucccuuuc

SEQ ID NO: 2090590 - RNA, 19 nt, Homo sapiens
  misc_RNA (1)...(19): siRNA sense strand
gaagaucaacaacaucaca

SEQ ID NO: 2090591 - RNA, 19 nt, Homo sapiens
  misc_RNA (1)...(19): siRNA sense strand
uaacccagccuucaccauu

SEQ ID NO: 2090592 - RNA, 19 nt, Homo sapiens
  misc_RNA (1)...(19): siRNA sense strand
gaaauacugaaaccagaga

SEQ ID NO: 2090593 - RNA, 19 nt, Homo sapiens
  misc_RNA (1)...(19): siRNA sense strand
acaaacagucgaaaucaaa

SEQ ID NO: 2090594 - RNA, 19 nt, Homo sapiens
  misc_RNA (1)...(19): siRNA sense strand
guucacaccuuuccaucug

SEQ ID NO: 2090595 - RNA, 19 nt, Homo sapiens
  misc_RNA (1)...(19): siRNA sense strand
aaacaagcccuaugagauc

SEQ ID NO: 2090596 - RNA, 19 nt, Homo sapiens
  misc_RNA (1)...(19): siRNA sense strand
aagaacaguuuccaucaug

SEQ ID NO: 2090597 - RNA, 19 nt, Homo sapiens
  misc_RNA (1)...(19): siRNA sense strand
gcuuguaugucccauggaa

SEQ ID NO: 2090598 - RNA, 19 nt, Homo sapiens
  misc_RNA (1)...(19): siRNA sense strand
aaugggcucucacaacaaa

SEQ ID NO: 2090599 - RNA, 19 nt, Homo sapiens
  misc_RNA (1)...(19): siRNA sense strand
cagccaugguccaacauuu

SEQ ID NO: 2090600 - RNA, 19 nt, Homo sapiens
  misc_RNA (1)...(19): siRNA sense strand
aaaugaauguguccagugu

SEQ ID NO: 2090601 - RNA, 19 nt, Homo sapiens
  misc_RNA (1)...(19): siRNA sense strand
ucaccaagguucagcucaa

SEQ ID NO: 2090602 - RNA, 19 nt, Homo sapiens
  misc_RNA (1)...(19): siRNA sense strand
guacuacaaugugaguuuc

SEQ ID NO: 2090603 - RNA, 19 nt, Homo sapiens
  misc_RNA (1)...(19): siRNA sense strand
gcccaaagaagucuguaaa

SEQ ID NO: 2090604 - RNA, 19 nt, Homo sapiens
  misc_RNA (1)...(19): siRNA sense strand
ugaaaucaaugggcucuca

SEQ ID NO: 2090605 - RNA, 19 nt, Homo sapiens
  misc_RNA (1)...(19): siRNA sense strand
gcaagguccgguccuggua

SEQ ID NO: 2090606 - RNA, 19 nt, Homo sapiens
  misc_RNA (1)...(19): siRNA sense strand
gaaaguucaccuucagcuu

SEQ ID NO: 2090607 - RNA, 19 nt, Homo sapiens
  misc_RNA (1)...(19): siRNA sense strand
gcagaggacagaauacuac

SEQ ID NO: 2090608 - RNA, 19 nt, Homo sapiens
  misc_RNA (1)...(19): siRNA sense strand
gcagccaaaucauccuugu

SEQ ID NO: 2090609 - RNA, 19 nt, Homo sapiens
  misc_RNA (1)...(19): siRNA sense strand
gaaacuacgcgcugaauua

SEQ ID NO: 2090610 - RNA, 19 nt, Homo sapiens
  misc_RNA (1)...(19): siRNA sense strand
ggaaauauuugaagugaga

SEQ ID NO: 2090611 - RNA, 19 nt, Homo sapiens
  misc_RNA (1)...(19): siRNA sense strand
cgaaauaucuggagaaucu

SEQ ID NO: 2090612 - RNA, 19 nt, Homo sapiens
  misc_RNA (1)...(19): siRNA sense strand
uaaagaaucuaccucauug

SEQ ID NO: 2090613 - RNA, 19 nt, Homo sapiens
  misc_RNA (1)...(19): siRNA sense strand
gauauaaccucaucagauc

SEQ ID NO: 2090614 - RNA, 19 nt, Homo sapiens
  misc_RNA (1)...(19): siRNA sense strand
ggaaaggcaucgccauuau

SEQ ID NO: 2090615 - RNA, 19 nt, Homo sapiens
  misc_RNA (1)...(19): siRNA sense strand
gaaugaagaggaagauaua

SEQ ID NO: 2090616 - RNA, 19 nt, Homo sapiens
  misc_RNA (1)...(19): siRNA sense strand
ccaaagcuauguccuagaa

SEQ ID NO: 2090617 - RNA, 19 nt, Homo sapiens
  misc_RNA (1)...(19): siRNA sense strand
gaaucuaccucauugugaa

SEQ ID NO: 2090618 - RNA, 19 nt, Homo sapiens
  misc_RNA (1)...(19): siRNA sense strand
agaaacacaugccgaagua

SEQ ID NO: 2090619 - RNA, 19 nt, Homo sapiens
  misc_RNA (1)...(19): siRNA sense strand
gaacccacaucaucaagau

SEQ ID NO: 2090620 - RNA, 19 nt, Homo sapiens
  misc_RNA (1)...(19): siRNA sense strand
ucaaagagauaaagaaguc

SEQ ID NO: 2090621 - RNA, 19 nt, Homo sapiens
  misc_RNA (1)...(19): siRNA sense strand
cauaauaacugaggaagug

SEQ ID NO: 2090622 - RNA, 19 nt, Homo sapiens
  misc_RNA (1)...(19): siRNA sense strand
gaucagggaaccuccaaua

SEQ ID NO: 2090623 - RNA, 19 nt, Homo sapiens
  misc_RNA (1)...(19): siRNA sense strand
ggagguagaaagacuuaua

SEQ ID NO: 2090624 - RNA, 19 nt, Homo sapiens
  misc_RNA (1)...(19): siRNA sense strand
guaaagaaucuaccucauu

SEQ ID NO: 2090625 - RNA, 19 nt, Homo sapiens
  misc_RNA (1)...(19): siRNA sense strand
agacgagccugcugaggua

SEQ ID NO: 2090626 - RNA, 19 nt, Homo sapiens
  misc_RNA (1)...(19): siRNA sense strand
gaucagcaguaucucauag

SEQ ID NO: 2090627 - RNA, 19 nt, Homo sapiens
  misc_RNA (1)...(19): siRNA sense strand
cuauucagcuuuccaauca

SEQ ID NO: 2090628 - RNA, 19 nt, Homo sapiens
  misc_RNA (1)...(19): siRNA sense strand
caucagggcugccauagag

SEQ ID NO: 2090629 - RNA, 19 nt, Homo sapiens
  misc_RNA (1)...(19): siRNA sense strand
gagccacgccuggaauuua

SEQ ID NO: 2090630 - RNA, 19 nt, Homo sapiens
  misc_RNA (1)...(19): siRNA sense strand
agaggaggcugcugaguga

SEQ ID NO: 2090631 - RNA, 19 nt, Homo sapiens
  misc_RNA (1)...(19): siRNA sense strand
gaaaugcucgaucacuuug

SEQ ID NO: 2090632 - RNA, 19 nt, Homo sapiens
  misc_RNA (1)...(19): siRNA sense strand
aaaccuaccuagaggaaga

SEQ ID NO: 2090633 - RNA, 19 nt, Homo sapiens
  misc_RNA (1)...(19): siRNA sense strand
gcccauuucuggagucuug

SEQ ID NO: 2090634 - RNA, 19 nt, Homo sapiens
  misc_RNA (1)...(19): siRNA sense strand
gagacaggauucaguacug

SEQ ID NO: 2090635 - RNA, 19 nt, Homo sapiens
  misc_RNA (1)...(19): siRNA sense strand
caucaacaccagucacuuu

SEQ ID NO: 2090636 - RNA, 19 nt, Homo sapiens
  misc_RNA (1)...(19): siRNA sense strand
gguggaaacuauucagcuu

SEQ ID NO: 2090637 - RNA, 19 nt, Homo sapiens
  misc_RNA (1)...(19): siRNA sense strand
acacagacaaagaguauaa

SEQ ID NO: 2090638 - RNA, 19 nt, Homo sapiens
  misc_RNA (1)...(19): siRNA sense strand
aaacacagacaaagaguau

SEQ ID NO: 2090639 - RNA, 19 nt, Homo sapiens
  misc_RNA (1)...(19): siRNA sense strand
cgaucacuuugacauaaua

SEQ ID NO: 2090640 - RNA, 19 nt, Homo sapiens
  misc_RNA (1)...(19): siRNA sense strand
ggaagaggaggaugaggaa

SEQ ID NO: 2090641 - RNA, 19 nt, Homo sapiens
  misc_RNA (1)...(19): siRNA sense strand
cagaguacauccuggacuu

SEQ ID NO: 2090642 - RNA, 19 nt, Homo sapiens
  misc_RNA (1)...(19): siRNA sense strand
gagcaucgacuccauugug

SEQ ID NO: 2090643 - RNA, 19 nt, Homo sapiens
  misc_RNA (1)...(19): siRNA sense strand
agacacggaucuucgaaau

SEQ ID NO: 2090644 - RNA, 19 nt, Homo sapiens
  misc_RNA (1)...(19): siRNA sense strand
aaacuacgcgcugaauuaa

SEQ ID NO: 2090645 - RNA, 19 nt, Homo sapiens
  misc_RNA (1)...(19): siRNA sense strand
ccgaaguacuuaagacaga

SEQ ID NO: 2090646 - RNA, 19 nt, Homo sapiens
  misc_RNA (1)...(19): siRNA sense strand
ggacagugccugguggaaa

SEQ ID NO: 2090647 - RNA, 19 nt, Homo sapiens
  misc_RNA (1)...(19): siRNA sense strand
ugagcuagaucguguaaag

SEQ ID NO: 2090648 - RNA, 19 nt, Homo sapiens
  misc_RNA (1)...(19): siRNA sense strand
ugaaaugcucgaucacuuu

SEQ ID NO: 2090649 - RNA, 19 nt, Homo sapiens
  misc_RNA (1)...(19): siRNA sense strand
cagggaaccuccaauagca

SEQ ID NO: 2090650 - RNA, 19 nt, Homo sapiens
  misc_RNA (1)...(19): siRNA sense strand
gcgcugaauuaaagccaaa

SEQ ID NO: 2090651 - RNA, 19 nt, Homo sapiens
  misc_RNA (1)...(19): siRNA sense strand
aaauccagcuaccagagua

SEQ ID NO: 2090652 - RNA, 19 nt, Homo sapiens
  misc_RNA (1)...(19): siRNA sense strand
guacuuaagacagaaacua

SEQ ID NO: 2090653 - RNA, 19 nt, Homo sapiens
  misc_RNA (1)...(19): siRNA sense strand
cggaaaggcaucgccauua

SEQ ID NO: 2090654 - RNA, 19 nt, Homo sapiens
  misc_RNA (1)...(19): siRNA sense strand
ccagauggagguagaaaga

SEQ ID NO: 2090655 - RNA, 19 nt, Homo sapiens
  misc_RNA (1)...(19): siRNA sense strand
ucagcaguaucucauagaa

SEQ ID NO: 2090656 - RNA, 19 nt, Homo sapiens
  misc_RNA (1)...(19): siRNA sense strand
gcaucgccauuaucauuca

SEQ ID NO: 2090657 - RNA, 19 nt, Homo sapiens
  misc_RNA (1)...(19): siRNA sense strand
caugagacaggauucagua

SEQ ID NO: 2090658 - RNA, 19 nt, Homo sapiens
  misc_RNA (1)...(19): siRNA sense strand
gaaaggcaucgccauuauc

SEQ ID NO: 2090659 - RNA, 19 nt, Homo sapiens
  misc_RNA (1)...(19): siRNA sense strand
gaagauauaaccucaucag

SEQ ID NO: 2090660 - RNA, 19 nt, Homo sapiens
  misc_RNA (1)...(19): siRNA sense strand
agcaguaucucauagaaga

SEQ ID NO: 2090661 - RNA, 19 nt, Homo sapiens
  misc_RNA (1)...(19): siRNA sense strand
gcuagaucguguaaagaau

SEQ ID NO: 2090662 - RNA, 19 nt, Homo sapiens
  misc_RNA (1)...(19): siRNA sense strand
ggacuuuggcuacaucauc

SEQ ID NO: 2090663 - RNA, 19 nt, Homo sapiens
  misc_RNA (1)...(19): siRNA sense strand
gagaaacacaugccgaagu

SEQ ID NO: 2090664 - RNA, 19 nt, Homo sapiens
  misc_RNA (1)...(19): siRNA sense strand
gaagucauucugcccauca

SEQ ID NO: 2090665 - RNA, 19 nt, Homo sapiens
  misc_RNA (1)...(19): siRNA sense strand
gcucgaucacuuugacaua

SEQ ID NO: 2090666 - RNA, 19 nt, Homo sapiens
  misc_RNA (1)...(19): siRNA sense strand
acaagcguguccuucauga

SEQ ID NO: 2090667 - RNA, 19 nt, Homo sapiens
  misc_RNA (1)...(19): siRNA sense strand
aaagcuauguccuagaaca

SEQ ID NO: 2090668 - RNA, 19 nt, Homo sapiens
  misc_RNA (1)...(19): siRNA sense strand
gagaaugaagaggaagaua

SEQ ID NO: 2090669 - RNA, 19 nt, Homo sapiens
  misc_RNA (1)...(19): siRNA sense strand
agacgaggccgaggugaua

SEQ ID NO: 2090670 - RNA, 19 nt, Homo sapiens
  misc_RNA (1)...(19): siRNA sense strand
uugacaagcuggagaaaca

SEQ ID NO: 2090671 - RNA, 19 nt, Homo sapiens
  misc_RNA (1)...(19): siRNA sense strand
caacaccagucacuuucca

SEQ ID NO: 2090672 - RNA, 19 nt, Homo sapiens
  misc_RNA (1)...(19): siRNA sense strand
gaaguacuuaagacagaaa

SEQ ID NO: 2090673 - RNA, 19 nt, Homo sapiens
  misc_RNA (1)...(19): siRNA sense strand
cgaaguacuuaagacagaa

SEQ ID NO: 2090674 - RNA, 19 nt, Homo sapiens
  misc_RNA (1)...(19): siRNA sense strand
gaaacggaaauauuugaag

SEQ ID NO: 2090675 - RNA, 19 nt, Homo sapiens
  misc_RNA (1)...(19): siRNA sense strand
aaugugaaaugcucgauca

SEQ ID NO: 2090676 - RNA, 19 nt, Homo sapiens
  misc_RNA (1)...(19): siRNA sense strand
gacagugccugguggaaac

SEQ ID NO: 2090677 - RNA, 19 nt, Homo sapiens
  misc_RNA (1)...(19): siRNA sense strand
ccauagagcaguccgugaa

SEQ ID NO: 2090678 - RNA, 19 nt, Homo sapiens
  misc_RNA (1)...(19): siRNA sense strand
acaggagaaugaagaggaa

SEQ ID NO: 2090679 - RNA, 19 nt, Homo sapiens
  misc_RNA (1)...(19): siRNA sense strand
gcagaugagggcgaaauau

SEQ ID NO: 2090680 - RNA, 19 nt, Homo sapiens
  misc_RNA (1)...(19): siRNA sense strand
ugaagaaucccugcaacuu

SEQ ID NO: 2090681 - RNA, 19 nt, Homo sapiens
  misc_RNA (1)...(19): siRNA sense strand
gaaguccgaacccacauca

SEQ ID NO: 2090682 - RNA, 19 nt, Homo sapiens
  misc_RNA (1)...(19): siRNA sense strand
ggcgaaauaucuggagaau

SEQ ID NO: 2090683 - RNA, 19 nt, Homo sapiens
  misc_RNA (1)...(19): siRNA sense strand
agaauuugaucagcaguau

SEQ ID NO: 2090684 - RNA, 19 nt, Homo sapiens
  misc_RNA (1)...(19): siRNA sense strand
acacaugccgaaguacuua

SEQ ID NO: 2090685 - RNA, 19 nt, Homo sapiens
  misc_RNA (1)...(19): siRNA sense strand
acggaaauauuugaaguga

SEQ ID NO: 2090686 - RNA, 19 nt, Homo sapiens
  misc_RNA (1)...(19): siRNA sense strand
gugaaacggaaauauuuga

SEQ ID NO: 2090687 - RNA, 19 nt, Homo sapiens
  misc_RNA (1)...(19): siRNA sense strand
ucaggaaagucagccaaug

SEQ ID NO: 2090688 - RNA, 19 nt, Homo sapiens
  misc_RNA (1)...(19): siRNA sense strand
ugacaagcuucagagcauu

SEQ ID NO: 2090689 - RNA, 19 nt, Homo sapiens
  misc_RNA (1)...(19): siRNA sense strand
gaaccuccaauagcacaaa

SEQ ID NO: 2090690 - RNA, 19 nt, Homo sapiens
  misc_RNA (1)...(19): siRNA sense strand
agaaugaagaggaagauau

SEQ ID NO: 2090691 - RNA, 19 nt, Homo sapiens
  misc_RNA (1)...(19): siRNA sense strand
caucauccuuggcgaaguc

SEQ ID NO: 2090692 - RNA, 19 nt, Homo sapiens
  misc_RNA (1)...(19): siRNA sense strand
aaaggcaucgccauuauca

SEQ ID NO: 2090693 - RNA, 19 nt, Homo sapiens
  misc_RNA (1)...(19): siRNA sense strand
cgagggaucucugucacau

SEQ ID NO: 2090694 - RNA, 19 nt, Homo sapiens
  misc_RNA (1)...(19): siRNA sense strand
uacgaguacuucaaagaga

SEQ ID NO: 2090695 - RNA, 19 nt, Homo sapiens
  misc_RNA (1)...(19): siRNA sense strand
ccccagaacuguacgagua

SEQ ID NO: 2090696 - RNA, 19 nt, Homo sapiens
  misc_RNA (1)...(19): siRNA sense strand
ccaaaagccuguugacaag

SEQ ID NO: 2090697 - RNA, 19 nt, Homo sapiens
  misc_RNA (1)...(19): siRNA sense strand
cugaggaagugccagaaga

SEQ ID NO: 2090698 - RNA, 19 nt, Homo sapiens
  misc_RNA (1)...(19): siRNA sense strand
ggccaacaguucacaucug

SEQ ID NO: 2090699 - RNA, 19 nt, Homo sapiens
  misc_RNA (1)...(19): siRNA sense strand
gaugaggaaagccuggaaa

SEQ ID NO: 2090700 - RNA, 19 nt, Homo sapiens
  misc_RNA (1)...(19): siRNA sense strand
gagguagaaagacuuauag

SEQ ID NO: 2090701 - RNA, 19 nt, Homo sapiens
  misc_RNA (1)...(19): siRNA sense strand
agauauaaccucaucagau

SEQ ID NO: 2090702 - RNA, 19 nt, Homo sapiens
  misc_RNA (1)...(19): siRNA sense strand
cucgaucacuuugacauaa

SEQ ID NO: 2090703 - RNA, 19 nt, Homo sapiens
  misc_RNA (1)...(19): siRNA sense strand
acuacgcgcugaauuaaag

SEQ ID NO: 2090704 - RNA, 19 nt, Homo sapiens
  misc_RNA (1)...(19): siRNA sense strand
ugaauuaaagccaaagaca

SEQ ID NO: 2090705 - RNA, 19 nt, Homo sapiens
  misc_RNA (1)...(19): siRNA sense strand
aggcaucgccauuaucauu

SEQ ID NO: 2090706 - RNA, 19 nt, Homo sapiens
  misc_RNA (1)...(19): siRNA sense strand
cgaguacuucaaagagaua

SEQ ID NO: 2090707 - RNA, 19 nt, Homo sapiens
  misc_RNA (1)...(19): siRNA sense strand
gggcuaugauuccuacaac

SEQ ID NO: 2090708 - RNA, 19 nt, Homo sapiens
  misc_RNA (1)...(19): siRNA sense strand
aaacaacccagugagcaaa

SEQ ID NO: 2090709 - RNA, 19 nt, Homo sapiens
  misc_RNA (1)...(19): siRNA sense strand
caaauagucuggagucuuu

SEQ ID NO: 2090710 - RNA, 19 nt, Homo sapiens
  misc_RNA (1)...(19): siRNA sense strand
ggaagaaacucuccaaugg

SEQ ID NO: 2090711 - RNA, 19 nt, Homo sapiens
  misc_RNA (1)...(19): siRNA sense strand
gaacuugucccauaauaaa

SEQ ID NO: 2090712 - RNA, 19 nt, Homo sapiens
  misc_RNA (1)...(19): siRNA sense strand
cugaguagcuugagucuua

SEQ ID NO: 2090713 - RNA, 19 nt, Homo sapiens
  misc_RNA (1)...(19): siRNA sense strand
gcuauaaucuucucacaga

SEQ ID NO: 2090714 - RNA, 19 nt, Homo sapiens
  misc_RNA (1)...(19): siRNA sense strand
ggaaagacccagcugcaua

SEQ ID NO: 2090715 - RNA, 19 nt, Homo sapiens
  misc_RNA (1)...(19): siRNA sense strand
gaugugagcuauaaucuuc

SEQ ID NO: 2090716 - RNA, 19 nt, Homo sapiens
  misc_RNA (1)...(19): siRNA sense strand
gaucuuagcuccuuaugca

SEQ ID NO: 2090717 - RNA, 19 nt, Homo sapiens
  misc_RNA (1)...(19): siRNA sense strand
gcaacuuucugacuacuuu

SEQ ID NO: 2090718 - RNA, 19 nt, Homo sapiens
  misc_RNA (1)...(19): siRNA sense strand
guacagcagucaacuaaug

SEQ ID NO: 2090719 - RNA, 19 nt, Homo sapiens
  misc_RNA (1)...(19): siRNA sense strand
gaaagacccagcugcauaa

SEQ ID NO: 2090720 - RNA, 19 nt, Homo sapiens
  misc_RNA (1)...(19): siRNA sense strand
gagcaucucuucuauaguc

SEQ ID NO: 2090721 - RNA, 19 nt, Homo sapiens
  misc_RNA (1)...(19): siRNA sense strand
gcagugggauugccucuga

SEQ ID NO: 2090722 - RNA, 19 nt, Homo sapiens
  misc_RNA (1)...(19): siRNA sense strand
ggccugaacuugucccaua

SEQ ID NO: 2090723 - RNA, 19 nt, Homo sapiens
  misc_RNA (1)...(19): siRNA sense strand
gcuaacaccuucuugguau

SEQ ID NO: 2090724 - RNA, 19 nt, Homo sapiens
  misc_RNA (1)...(19): siRNA sense strand
ugacugagcucaaccuuuc

SEQ ID NO: 2090725 - RNA, 19 nt, Homo sapiens
  misc_RNA (1)...(19): siRNA sense strand
gcucagaccuaucauguca

SEQ ID NO: 2090726 - RNA, 19 nt, Homo sapiens
  misc_RNA (1)...(19): siRNA sense strand
gauggcaacuuucugacua

SEQ ID NO: 2090727 - RNA, 19 nt, Homo sapiens
  misc_RNA (1)...(19): siRNA sense strand
ugaauaggaugaaccauau

SEQ ID NO: 2090728 - RNA, 19 nt, Homo sapiens
  misc_RNA (1)...(19): siRNA sense strand
cuaagaagcugugcacauu

SEQ ID NO: 2090729 - RNA, 19 nt, Homo sapiens
  misc_RNA (1)...(19): siRNA sense strand
gaaccuaaguggcaacaag

SEQ ID NO: 2090730 - RNA, 19 nt, Homo sapiens
  misc_RNA (1)...(19): siRNA sense strand
gaggaaggcugcacuugug

SEQ ID NO: 2090731 - RNA, 19 nt, Homo sapiens
  misc_RNA (1)...(19): siRNA sense strand
caagaugaguugcugauuc

SEQ ID NO: 2090732 - RNA, 19 nt, Homo sapiens
  misc_RNA (1)...(19): siRNA sense strand
uaucaagcauguggauuua

SEQ ID NO: 2090733 - RNA, 19 nt, Homo sapiens
  misc_RNA (1)...(19): siRNA sense strand
acaagacacuggacauauu

SEQ ID NO: 2090734 - RNA, 19 nt, Homo sapiens
  misc_RNA (1)...(19): siRNA sense strand
uuacagaccuuuccugcaa

SEQ ID NO: 2090735 - RNA, 19 nt, Homo sapiens
  misc_RNA (1)...(19): siRNA sense strand
gaagugaaggaacaaauga

SEQ ID NO: 2090736 - RNA, 19 nt, Homo sapiens
  misc_RNA (1)...(19): siRNA sense strand
ggagggaucuggagaacuc

SEQ ID NO: 2090737 - RNA, 19 nt, Homo sapiens
  misc_RNA (1)...(19): siRNA sense strand
ucgauacacucuacaaauu

SEQ ID NO: 2090738 - RNA, 19 nt, Homo sapiens
  misc_RNA (1)...(19): siRNA sense strand
ggaaaucuacaacagcuuu

SEQ ID NO: 2090739 - RNA, 19 nt, Homo sapiens
  misc_RNA (1)...(19): siRNA sense strand
ccguggaucucucguguua

SEQ ID NO: 2090740 - RNA, 19 nt, Homo sapiens
  misc_RNA (1)...(19): siRNA sense strand
gggcgaugguaguuuauuu

SEQ ID NO: 2090741 - RNA, 19 nt, Homo sapiens
  misc_RNA (1)...(19): siRNA sense strand
gaaacucacuauguuagau

SEQ ID NO: 2090742 - RNA, 19 nt, Homo sapiens
  misc_RNA (1)...(19): siRNA sense strand
gcaacgacuugacagaaau

SEQ ID NO: 2090743 - RNA, 19 nt, Homo sapiens
  misc_RNA (1)...(19): siRNA sense strand
gaggagaguuugaguaugc

SEQ ID NO: 2090744 - RNA, 19 nt, Homo sapiens
  misc_RNA (1)...(19): siRNA sense strand
gaauuuccuucaacaacuu

SEQ ID NO: 2090745 - RNA, 19 nt, Homo sapiens
  misc_RNA (1)...(19): siRNA sense strand
ggcuuugccugcuacauua

SEQ ID NO: 2090746 - RNA, 19 nt, Homo sapiens
  misc_RNA (1)...(19): siRNA sense strand
gauauuaccuaccucaacu

SEQ ID NO: 2090747 - RNA, 19 nt, Homo sapiens
  misc_RNA (1)...(19): siRNA sense strand
gagaggagaguuugaguau

SEQ ID NO: 2090748 - RNA, 19 nt, Homo sapiens
  misc_RNA (1)...(19): siRNA sense strand
gcaaagaagauagaaguau

SEQ ID NO: 2090749 - RNA, 19 nt, Homo sapiens
  misc_RNA (1)...(19): siRNA sense strand
ggagggaaauaaacacauc

SEQ ID NO: 2090750 - RNA, 19 nt, Homo sapiens
  misc_RNA (1)...(19): siRNA sense strand
ccacuccgcugaccauuca

SEQ ID NO: 2090751 - RNA, 19 nt, Homo sapiens
  misc_RNA (1)...(19): siRNA sense strand
ccacagaagugcccaagag

SEQ ID NO: 2090752 - RNA, 19 nt, Homo sapiens
  misc_RNA (1)...(19): siRNA sense strand
ucacguacaagacccauua

SEQ ID NO: 2090753 - RNA, 19 nt, Homo sapiens
  misc_RNA (1)...(19): siRNA sense strand
gagcucaaccuuuccugua

SEQ ID NO: 2090754 - RNA, 19 nt, Homo sapiens
  misc_RNA (1)...(19): siRNA sense strand
gcagagaaauaagcugugu

SEQ ID NO: 2090755 - RNA, 19 nt, Homo sapiens
  misc_RNA (1)...(19): siRNA sense strand
gcaaucugcuaaaucuuca

SEQ ID NO: 2090756 - RNA, 19 nt, Homo sapiens
  misc_RNA (1)...(19): siRNA sense strand
ccuauugucuggcaucuau

SEQ ID NO: 2090757 - RNA, 19 nt, Homo sapiens
  misc_RNA (1)...(19): siRNA sense strand
caaacccucugucuugaug

SEQ ID NO: 2090758 - RNA, 19 nt, Homo sapiens
  misc_RNA (1)...(19): siRNA sense strand
uacuuuaccugaagaauug

SEQ ID NO: 2090759 - RNA, 19 nt, Homo sapiens
  misc_RNA (1)...(19): siRNA sense strand
guaccugccuuaucguuuc

SEQ ID NO: 2090760 - RNA, 19 nt, Homo sapiens
  misc_RNA (1)...(19): siRNA sense strand
ggagaggagaguuugagua

SEQ ID NO: 2090761 - RNA, 19 nt, Homo sapiens
  misc_RNA (1)...(19): siRNA sense strand
gaaaccugcuagagugugu

SEQ ID NO: 2090762 - RNA, 19 nt, Homo sapiens
  misc_RNA (1)...(19): siRNA sense strand
ugacagcagugaacgucua

SEQ ID NO: 2090763 - RNA, 19 nt, Homo sapiens
  misc_RNA (1)...(19): siRNA sense strand
uaauggauuucaugaccua

SEQ ID NO: 2090764 - RNA, 19 nt, Homo sapiens
  misc_RNA (1)...(19): siRNA sense strand
ggaaccagaggaccaguuu

SEQ ID NO: 2090765 - RNA, 19 nt, Homo sapiens
  misc_RNA (1)...(19): siRNA sense strand
agacagaacagugugaaua

SEQ ID NO: 2090766 - RNA, 19 nt, Homo sapiens
  misc_RNA (1)...(19): siRNA sense strand
caagacacuggacauauuu

SEQ ID NO: 2090767 - RNA, 19 nt, Homo sapiens
  misc_RNA (1)...(19): siRNA sense strand
gcacuggagaggagaguuu

SEQ ID NO: 2090768 - RNA, 19 nt, Homo sapiens
  misc_RNA (1)...(19): siRNA sense strand
ucaaauuccugagguuuau

SEQ ID NO: 2090769 - RNA, 19 nt, Homo sapiens
  misc_RNA (1)...(19): siRNA sense strand
uacaacagcuuuccuccuu

SEQ ID NO: 2090770 - RNA, 19 nt, Homo sapiens
  misc_RNA (1)...(19): siRNA sense strand
ggaaagauagaagaaguga

SEQ ID NO: 2090771 - RNA, 19 nt, Homo sapiens
  misc_RNA (1)...(19): siRNA sense strand
ggaagaagaagugaaggaa

SEQ ID NO: 2090772 - RNA, 19 nt, Homo sapiens
  misc_RNA (1)...(19): siRNA sense strand
gggaagaaacucuccaaug

SEQ ID NO: 2090773 - RNA, 19 nt, Homo sapiens
  misc_RNA (1)...(19): siRNA sense strand
gaccuuuccugcaagcaaa

SEQ ID NO: 2090774 - RNA, 19 nt, Homo sapiens
  misc_RNA (1)...(19): siRNA sense strand
gcaaggacaggauggaguu

SEQ ID NO: 2090775 - RNA, 19 nt, Homo sapiens
  misc_RNA (1)...(19): siRNA sense strand
caagguagagguggaagua

SEQ ID NO: 2090776 - RNA, 19 nt, Homo sapiens
  misc_RNA (1)...(19): siRNA sense strand
uaagaagcugugcacauua

SEQ ID NO: 2090777 - RNA, 19 nt, Homo sapiens
  misc_RNA (1)...(19): siRNA sense strand
ucacaacccugaaaauuga

SEQ ID NO: 2090778 - RNA, 19 nt, Homo sapiens
  misc_RNA (1)...(19): siRNA sense strand
agacccagcugcauaagug

SEQ ID NO: 2090779 - RNA, 19 nt, Homo sapiens
  misc_RNA (1)...(19): siRNA sense strand
gcaacaagcuuaaaaccau

SEQ ID NO: 2090780 - RNA, 19 nt, Homo sapiens
  misc_RNA (1)...(19): siRNA sense strand
gaagugaagcgacggcaau

SEQ ID NO: 2090781 - RNA, 19 nt, Homo sapiens
  misc_RNA (1)...(19): siRNA sense strand
aagaagaagugaaggaaca

SEQ ID NO: 2090782 - RNA, 19 nt, Homo sapiens
  misc_RNA (1)...(19): siRNA sense strand
gauccaguuuguagaccua

SEQ ID NO: 2090783 - RNA, 19 nt, Homo sapiens
  misc_RNA (1)...(19): siRNA sense strand
uauguuagauagagugguu

SEQ ID NO: 2090784 - RNA, 19 nt, Homo sapiens
  misc_RNA (1)...(19): siRNA sense strand
gagaaacucacuauguuag

SEQ ID NO: 2090785 - RNA, 19 nt, Homo sapiens
  misc_RNA (1)...(19): siRNA sense strand
gaaggcugcacuugugaaa

SEQ ID NO: 2090786 - RNA, 19 nt, Homo sapiens
  misc_RNA (1)...(19): siRNA sense strand
gcaaacaaucaguuacaga

SEQ ID NO: 2090787 - RNA, 19 nt, Homo sapiens
  misc_RNA (1)...(19): siRNA sense strand
gagcuauaaucuucucaca

SEQ ID NO: 2090788 - RNA, 19 nt, Homo sapiens
  misc_RNA (1)...(19): siRNA sense strand
ucacagaggacaacaaagu

SEQ ID NO: 2090789 - RNA, 19 nt, Homo sapiens
  misc_RNA (1)...(19): siRNA sense strand
ccacaaccauagcaaacug

SEQ ID NO: 2090790 - RNA, 19 nt, Homo sapiens
  misc_RNA (1)...(19): siRNA sense strand
guggaaagauagaagaagu

SEQ ID NO: 2090791 - RNA, 19 nt, Homo sapiens
  misc_RNA (1)...(19): siRNA sense strand
cgauacacucuacaaauuu

SEQ ID NO: 2090792 - RNA, 19 nt, Homo sapiens
  misc_RNA (1)...(19): siRNA sense strand
ggauggaguuacagaaguc

SEQ ID NO: 2090793 - RNA, 19 nt, Homo sapiens
  misc_RNA (1)...(19): siRNA sense strand
acaacggccuggacaguga

SEQ ID NO: 2090794 - RNA, 19 nt, Homo sapiens
  misc_RNA (1)...(19): siRNA sense strand
caucacagaggacaacaaa

SEQ ID NO: 2090795 - RNA, 19 nt, Homo sapiens
  misc_RNA (1)...(19): siRNA sense strand
aaccacagauucuacaguu

SEQ ID NO: 2090796 - RNA, 19 nt, Homo sapiens
  misc_RNA (1)...(19): siRNA sense strand
gauagaaguauuagaugug

SEQ ID NO: 2090797 - RNA, 19 nt, Homo sapiens
  misc_RNA (1)...(19): siRNA sense strand
ucugcuaccuucuccagua

SEQ ID NO: 2090798 - RNA, 19 nt, Homo sapiens
  misc_RNA (1)...(19): siRNA sense strand
gcaaauagucuggagucuu

SEQ ID NO: 2090799 - RNA, 19 nt, Homo sapiens
  misc_RNA (1)...(19): siRNA sense strand
cugagcaucucuucuauag

SEQ ID NO: 2090800 - RNA, 19 nt, Homo sapiens
  misc_RNA (1)...(19): siRNA sense strand
ggaguucgacacagcacua

SEQ ID NO: 2090801 - RNA, 19 nt, Homo sapiens
  misc_RNA (1)...(19): siRNA sense strand
gcgccuaguuguccucugu

SEQ ID NO: 2090802 - RNA, 19 nt, Homo sapiens
  misc_RNA (1)...(19): siRNA sense strand
cuugguaucucacaggaaa

SEQ ID NO: 2090803 - RNA, 19 nt, Homo sapiens
  misc_RNA (1)...(19): siRNA sense strand
gauggcagaugugcuuuua

SEQ ID NO: 2090804 - RNA, 19 nt, Homo sapiens
  misc_RNA (1)...(19): siRNA sense strand
cuggacauauuuagccaua

SEQ ID NO: 2090805 - RNA, 19 nt, Homo sapiens
  misc_RNA (1)...(19): siRNA sense strand
ugaccugacuggaaauaca

SEQ ID NO: 2090806 - RNA, 19 nt, Homo sapiens
  misc_RNA (1)...(19): siRNA sense strand
ucaagcauguggauuuaag

SEQ ID NO: 2090807 - RNA, 19 nt, Homo sapiens
  misc_RNA (1)...(19): siRNA sense strand
cuucaaacccucugucuug

SEQ ID NO: 2090808 - RNA, 19 nt, Homo sapiens
  misc_RNA (1)...(19): siRNA sense strand
gcucaaccuuuccuguaau

SEQ ID NO: 2090809 - RNA, 19 nt, Homo sapiens
  misc_RNA (1)...(19): siRNA sense strand
caagaaagcuggcucagau

SEQ ID NO: 2090810 - RNA, 19 nt, Homo sapiens
  misc_RNA (1)...(19): siRNA sense strand
gaacagcggguacaaguaa

SEQ ID NO: 2090811 - RNA, 19 nt, Homo sapiens
  misc_RNA (1)...(19): siRNA sense strand
caacuucucucucagcauu

SEQ ID NO: 2090812 - RNA, 19 nt, Homo sapiens
  misc_RNA (1)...(19): siRNA sense strand
ggaagugaaugaauugugu

SEQ ID NO: 2090813 - RNA, 19 nt, Homo sapiens
  misc_RNA (1)...(19): siRNA sense strand
ugacaguccuccacagaaa

SEQ ID NO: 2090814 - RNA, 19 nt, Homo sapiens
  misc_RNA (1)...(19): siRNA sense strand
agaacuggcuccauccuuu

SEQ ID NO: 2090815 - RNA, 19 nt, Homo sapiens
  misc_RNA (1)...(19): siRNA sense strand
gcucagacauggugacucu

SEQ ID NO: 2090816 - RNA, 19 nt, Homo sapiens
  misc_RNA (1)...(19): siRNA sense strand
gaggcgagaucaccagguu

SEQ ID NO: 2090817 - RNA, 19 nt, Homo sapiens
  misc_RNA (1)...(19): siRNA sense strand
gagccgaccucgcuacaca

SEQ ID NO: 2090818 - RNA, 19 nt, Homo sapiens
  misc_RNA (1)...(19): siRNA sense strand
gcaaagauggcgagaucaa

SEQ ID NO: 2090819 - RNA, 19 nt, Homo sapiens
  misc_RNA (1)...(19): siRNA sense strand
aagcaaagauggcgagauc

SEQ ID NO: 2090820 - RNA, 19 nt, Homo sapiens
  misc_RNA (1)...(19): siRNA sense strand
gaaccacacaucugcuuug

SEQ ID NO: 2090821 - RNA, 19 nt, Homo sapiens
  misc_RNA (1)...(19): siRNA sense strand
gcucagauggugacauuau

SEQ ID NO: 2090822 - RNA, 19 nt, Homo sapiens
  misc_RNA (1)...(19): siRNA sense strand
gaagcugggcacccucuuu

SEQ ID NO: 2090823 - RNA, 19 nt, Homo sapiens
  misc_RNA (1)...(19): siRNA sense strand
gaacuggcuccauccuuug

SEQ ID NO: 2090824 - RNA, 19 nt, Homo sapiens
  misc_RNA (1)...(19): siRNA sense strand
gcgcccaggugauacaaga

SEQ ID NO: 2090825 - RNA, 19 nt, Homo sapiens
  misc_RNA (1)...(19): siRNA sense strand
ccuaggaucuggccuugga

SEQ ID NO: 2090826 - RNA, 19 nt, Homo sapiens
  misc_RNA (1)...(19): siRNA sense strand
gugaaugaauugugucagu

SEQ ID NO: 2090827 - RNA, 19 nt, Homo sapiens
  misc_RNA (1)...(19): siRNA sense strand
ccaagucccugcagaacca

SEQ ID NO: 2090828 - RNA, 19 nt, Homo sapiens
  misc_RNA (1)...(19): siRNA sense strand
uggcucagauggugacauu

SEQ ID NO: 2090829 - RNA, 19 nt, Homo sapiens
  misc_RNA (1)...(19): siRNA sense strand
gcaagaggaagcaaagcaa

SEQ ID NO: 2090830 - RNA, 19 nt, Homo sapiens
  misc_RNA (1)...(19): siRNA sense strand
gacaugcggcuaucaauca

SEQ ID NO: 2090831 - RNA, 19 nt, Homo sapiens
  misc_RNA (1)...(19): siRNA sense strand
gaaggcaagaggaagcaaa

SEQ ID NO: 2090832 - RNA, 19 nt, Homo sapiens
  misc_RNA (1)...(19): siRNA sense strand
ccugagccguccuaacgua

SEQ ID NO: 2090833 - RNA, 19 nt, Homo sapiens
  misc_RNA (1)...(19): siRNA sense strand
gaggaauucuucuccaaaa

SEQ ID NO: 2090834 - RNA, 19 nt, Homo sapiens
  misc_RNA (1)...(19): siRNA sense strand
acaugaagcugagccuuga

SEQ ID NO: 2090835 - RNA, 19 nt, Homo sapiens
  misc_RNA (1)...(19): siRNA sense strand
ggacaugcggcuaucaauc

SEQ ID NO: 2090836 - RNA, 19 nt, Homo sapiens
  misc_RNA (1)...(19): siRNA sense strand
cauacgaggcucuguguga

SEQ ID NO: 2090837 - RNA, 19 nt, Homo sapiens
  misc_RNA (1)...(19): siRNA sense strand
caagaggaagcaaagcaaa

SEQ ID NO: 2090838 - RNA, 19 nt, Homo sapiens
  misc_RNA (1)...(19): siRNA sense strand
ggaagggaaugggcucagu

SEQ ID NO: 2090839 - RNA, 19 nt, Homo sapiens
  misc_RNA (1)...(19): siRNA sense strand
guacugucguuccugaauc

SEQ ID NO: 2090840 - RNA, 19 nt, Homo sapiens
  misc_RNA (1)...(19): siRNA sense strand
gaugacaguccuccacaga

SEQ ID NO: 2090841 - RNA, 19 nt, Homo sapiens
  misc_RNA (1)...(19): siRNA sense strand
cgaccucgcuacacaagag

SEQ ID NO: 2090842 - RNA, 19 nt, Homo sapiens
  misc_RNA (1)...(19): siRNA sense strand
cccuggaucuggcggauaa

SEQ ID NO: 2090843 - RNA, 19 nt, Homo sapiens
  misc_RNA (1)...(19): siRNA sense strand
ggaaccacacaucugcuuu

SEQ ID NO: 2090844 - RNA, 19 nt, Homo sapiens
  misc_RNA (1)...(19): siRNA sense strand
ccaggugauacaagacuua

SEQ ID NO: 2090845 - RNA, 19 nt, Homo sapiens
  misc_RNA (1)...(19): siRNA sense strand
aaagauggcgagaucaaga

SEQ ID NO: 2090846 - RNA, 19 nt, Homo sapiens
  misc_RNA (1)...(19): siRNA sense strand
ggugauacaagacuuagug

SEQ ID NO: 2090847 - RNA, 19 nt, Homo sapiens
  misc_RNA (1)...(19): siRNA sense strand
ggacguggacaccauuuac

SEQ ID NO: 2090848 - RNA, 19 nt, Homo sapiens
  misc_RNA (1)...(19): siRNA sense strand
ugacccaccuggaccuuuc

SEQ ID NO: 2090849 - RNA, 19 nt, Homo sapiens
  misc_RNA (1)...(19): siRNA sense strand
gaacuguaagcaucuccuu

SEQ ID NO: 2090850 - RNA, 19 nt, Homo sapiens
  misc_RNA (1)...(19): siRNA sense strand
gcucagcaggcaacaguga

SEQ ID NO: 2090851 - RNA, 19 nt, Homo sapiens
  misc_RNA (1)...(19): siRNA sense strand
uggcugcccuguccuacaa

SEQ ID NO: 2090852 - RNA, 19 nt, Homo sapiens
  misc_RNA (1)...(19): siRNA sense strand
gcauuguggcucaggcuuu

SEQ ID NO: 2090853 - RNA, 19 nt, Homo sapiens
  misc_RNA (1)...(19): siRNA sense strand
gagaagccggucccugaga

SEQ ID NO: 2090854 - RNA, 19 nt, Homo sapiens
  misc_RNA (1)...(19): siRNA sense strand
ucaggaagugaaugaauug

SEQ ID NO: 2090855 - RNA, 19 nt, Homo sapiens
  misc_RNA (1)...(19): siRNA sense strand
gcacaugaugagucaguca

SEQ ID NO: 2090856 - RNA, 19 nt, Homo sapiens
  misc_RNA (1)...(19): siRNA sense strand
uacaauggcuucccuuucc

SEQ ID NO: 2090857 - RNA, 19 nt, Homo sapiens
  misc_RNA (1)...(19): siRNA sense strand
cauuguggcucaggcuuug

SEQ ID NO: 2090858 - RNA, 19 nt, Homo sapiens
  misc_RNA (1)...(19): siRNA sense strand
caaggccuacucgaugaua

SEQ ID NO: 2090859 - RNA, 19 nt, Homo sapiens
  misc_RNA (1)...(19): siRNA sense strand
gacgacgauuguccucuuc

SEQ ID NO: 2090860 - RNA, 19 nt, Homo sapiens
  misc_RNA (1)...(19): siRNA sense strand
ugaacagcggguacaagua

SEQ ID NO: 2090861 - RNA, 19 nt, Homo sapiens
  misc_RNA (1)...(19): siRNA sense strand
agcaaggccuacucgauga

SEQ ID NO: 2090862 - RNA, 19 nt, Homo sapiens
  misc_RNA (1)...(19): siRNA sense strand
ucaagaagccucguucaac

SEQ ID NO: 2090863 - RNA, 19 nt, Homo sapiens
  misc_RNA (1)...(19): siRNA sense strand
gggcguggaggaauucuuc

SEQ ID NO: 2090864 - RNA, 19 nt, Homo sapiens
  misc_RNA (1)...(19): siRNA sense strand
gagcucagccacggucuuc

SEQ ID NO: 2090865 - RNA, 19 nt, Homo sapiens
  misc_RNA (1)...(19): siRNA sense strand
gcaggcaacagugacaaug

SEQ ID NO: 2090866 - RNA, 19 nt, Homo sapiens
  misc_RNA (1)...(19): siRNA sense strand
aucaggaagugaaugaauu

SEQ ID NO: 2090867 - RNA, 19 nt, Homo sapiens
  misc_RNA (1)...(19): siRNA sense strand
caucaggaagugaaugaau

SEQ ID NO: 2090868 - RNA, 19 nt, Homo sapiens
  misc_RNA (1)...(19): siRNA sense strand
ugaccgcgcuggauaucag

SEQ ID NO: 2090869 - RNA, 19 nt, Homo sapiens
  misc_RNA (1)...(19): siRNA sense strand
gacagcacgugcaguccau

SEQ ID NO: 2090870 - RNA, 19 nt, Homo sapiens
  misc_RNA (1)...(19): siRNA sense strand
guaaugcugcagaggauag

SEQ ID NO: 2090871 - RNA, 19 nt, Homo sapiens
  misc_RNA (1)...(19): siRNA sense strand
uggagggccuucugagaca

SEQ ID NO: 2090872 - RNA, 19 nt, Homo sapiens
  misc_RNA (1)...(19): siRNA sense strand
aaugccaacuucucucuca

SEQ ID NO: 2090873 - RNA, 19 nt, Homo sapiens
  misc_RNA (1)...(19): siRNA sense strand
gagccguccuaacguacug

SEQ ID NO: 2090874 - RNA, 19 nt, Homo sapiens
  misc_RNA (1)...(19): siRNA sense strand
gaaagcuggcucagauggu

SEQ ID NO: 2090875 - RNA, 19 nt, Homo sapiens
  misc_RNA (1)...(19): siRNA sense strand
ccgacggcaucuccuguga

SEQ ID NO: 2090876 - RNA, 19 nt, Homo sapiens
  misc_RNA (1)...(19): siRNA sense strand
ucaagaaagcuggcucaga

SEQ ID NO: 2090877 - RNA, 19 nt, Homo sapiens
  misc_RNA (1)...(19): siRNA sense strand
gacauacgaggcucugugu

SEQ ID NO: 2090878 - RNA, 19 nt, Homo sapiens
  misc_RNA (1)...(19): siRNA sense strand
gcuggagggccuucugaga

SEQ ID NO: 2090879 - RNA, 19 nt, Homo sapiens
  misc_RNA (1)...(19): siRNA sense strand
ccaugccucugccacugaa

SEQ ID NO: 2090880 - RNA, 19 nt, Homo sapiens
  misc_RNA (1)...(19): siRNA sense strand
gagcugguccuggaguuuc

SEQ ID NO: 2090881 - RNA, 19 nt, Homo sapiens
  misc_RNA (1)...(19): siRNA sense strand
ccucccaucucgaucaagu

SEQ ID NO: 2090882 - RNA, 19 nt, Homo sapiens
  misc_RNA (1)...(19): siRNA sense strand
gaccuuggcagagagcauu

SEQ ID NO: 2090883 - RNA, 19 nt, Homo sapiens
  misc_RNA (1)...(19): siRNA sense strand
gcagaaccacagccugaag

SEQ ID NO: 2090884 - RNA, 19 nt, Homo sapiens
  misc_RNA (1)...(19): siRNA sense strand
gagauucagugggcgaacu

SEQ ID NO: 2090885 - RNA, 19 nt, Homo sapiens
  misc_RNA (1)...(19): siRNA sense strand
agguggagcugcugcugaa

SEQ ID NO: 2090886 - RNA, 19 nt, Homo sapiens
  misc_RNA (1)...(19): siRNA sense strand
acgagggcguggaggaauu

SEQ ID NO: 2090887 - RNA, 19 nt, Homo sapiens
  misc_RNA (1)...(19): siRNA sense strand
cgauuguccucuucagucu

SEQ ID NO: 2090888 - RNA, 19 nt, Homo sapiens
  misc_RNA (1)...(19): siRNA sense strand
gcccuagccaccaauccua

SEQ ID NO: 2090889 - RNA, 19 nt, Homo sapiens
  misc_RNA (1)...(19): siRNA sense strand
cuacaauggcuucccuuuc

SEQ ID NO: 2090890 - RNA, 19 nt, Homo sapiens
  misc_RNA (1)...(19): siRNA sense strand
aaguaaugcugcagaggau

SEQ ID NO: 2090891 - RNA, 19 nt, Homo sapiens
  misc_RNA (1)...(19): siRNA sense strand
ggaccggaaccacacaucu

SEQ ID NO: 2090892 - RNA, 19 nt, Homo sapiens
  misc_RNA (1)...(19): siRNA sense strand
gaccggaaccacacaucug

SEQ ID NO: 2090893 - RNA, 19 nt, Homo sapiens
  misc_RNA (1)...(19): siRNA sense strand
gugacauuauggacaguuc

SEQ ID NO: 2090894 - RNA, 19 nt, Homo sapiens
  misc_RNA (1)...(19): siRNA sense strand
gugagcugguccuggaguu

SEQ ID NO: 2090895 - RNA, 19 nt, Homo sapiens
  misc_RNA (1)...(19): siRNA sense strand
agaggaagcaaagcaaaga

SEQ ID NO: 2090896 - RNA, 19 nt, Homo sapiens
  misc_RNA (1)...(19): siRNA sense strand
acgaggcucugugugacua

SEQ ID NO: 2090897 - RNA, 19 nt, Homo sapiens
  misc_RNA (1)...(19): siRNA sense strand
gcucgacccuugggaagcu

SEQ ID NO: 2090898 - RNA, 19 nt, Homo sapiens
  misc_RNA (1)...(19): siRNA sense strand
gaggaagcaaagcaaagau

SEQ ID NO: 2090899 - RNA, 19 nt, Homo sapiens
  misc_RNA (1)...(19): siRNA sense strand
cugcagccaucaagaaggu

SEQ ID NO: 2090900 - RNA, 19 nt, Homo sapiens
  misc_RNA (1)...(19): siRNA sense strand
uggcucggcuggagagaag

SEQ ID NO: 2090901 - RNA, 19 nt, Homo sapiens
  misc_RNA (1)...(19): siRNA sense strand
aaccugaccgcgcuggaua

SEQ ID NO: 2090902 - RNA, 19 nt, Homo sapiens
  misc_RNA (1)...(19): siRNA sense strand
agacauguggcgcuuggaa

SEQ ID NO: 2090903 - RNA, 19 nt, Homo sapiens
  misc_RNA (1)...(19): siRNA sense strand
ucuccuguguggacaugaa

SEQ ID NO: 2090904 - RNA, 19 nt, Homo sapiens
  misc_RNA (1)...(19): siRNA sense strand
ggcaagaggaagcaaagca

SEQ ID NO: 2090905 - RNA, 19 nt, Homo sapiens
  misc_RNA (1)...(19): siRNA sense strand
cccguacacugcgaaagaa

SEQ ID NO: 2090906 - RNA, 19 nt, Homo sapiens
  misc_RNA (1)...(19): siRNA sense strand
ccagggacaugcggcuauc

SEQ ID NO: 2090907 - RNA, 19 nt, Homo sapiens
  misc_RNA (1)...(19): siRNA sense strand
gcacccucuuugccuucaa

SEQ ID NO: 2090908 - RNA, 19 nt, Homo sapiens
  misc_RNA (1)...(19): siRNA sense strand
gcaaggccuacucgaugau

SEQ ID NO: 2090909 - RNA, 19 nt, Homo sapiens
  misc_RNA (1)...(19): siRNA sense strand
gcacucagacgccaagaag

SEQ ID NO: 2090910 - RNA, 19 nt, Homo sapiens
  misc_RNA (1)...(19): siRNA sense strand
gcaaguacugcgacaagga

SEQ ID NO: 2090911 - RNA, 19 nt, Homo sapiens
  misc_RNA (1)...(19): siRNA sense strand
acucagacgccaagaagua

SEQ ID NO: 2090912 - RNA, 19 nt, Homo sapiens
  misc_RNA (1)...(19): siRNA sense strand
gcagagagaaaucaauggu

SEQ ID NO: 2090913 - RNA, 19 nt, Homo sapiens
  misc_RNA (1)...(19): siRNA sense strand
gugcuuccacugccacaaa

SEQ ID NO: 2090914 - RNA, 19 nt, Homo sapiens
  misc_RNA (1)...(19): siRNA sense strand
ucaaagacagccugaacca

SEQ ID NO: 2090915 - RNA, 19 nt, Homo sapiens
  misc_RNA (1)...(19): siRNA sense strand
ggagacgcagagagaaauc

SEQ ID NO: 2090916 - RNA, 19 nt, Homo sapiens
  misc_RNA (1)...(19): siRNA sense strand
gaauacaucugaggaagaa

SEQ ID NO: 2090917 - RNA, 19 nt, Homo sapiens
  misc_RNA (1)...(19): siRNA sense strand
ccaaggagaugcugcagaa

SEQ ID NO: 2090918 - RNA, 19 nt, Homo sapiens
  misc_RNA (1)...(19): siRNA sense strand
gaaauggaagagaugaaua

SEQ ID NO: 2090919 - RNA, 19 nt, Homo sapiens
  misc_RNA (1)...(19): siRNA sense strand
gagugaagcugaagaaggu

SEQ ID NO: 2090920 - RNA, 19 nt, Homo sapiens
  misc_RNA (1)...(19): siRNA sense strand
uaagaaauuuggacacauc

SEQ ID NO: 2090921 - RNA, 19 nt, Homo sapiens
  misc_RNA (1)...(19): siRNA sense strand
gagcucauccuggacuuua

SEQ ID NO: 2090922 - RNA, 19 nt, Homo sapiens
  misc_RNA (1)...(19): siRNA sense strand
aaaggucccugcaugagaa

SEQ ID NO: 2090923 - RNA, 19 nt, Homo sapiens
  misc_RNA (1)...(19): siRNA sense strand
acacaucccugucuacaca

SEQ ID NO: 2090924 - RNA, 19 nt, Homo sapiens
  misc_RNA (1)...(19): siRNA sense strand
uaccuuggcugaaauggaa

SEQ ID NO: 2090925 - RNA, 19 nt, Homo sapiens
  misc_RNA (1)...(19): siRNA sense strand
ugaaggaugucugcaguga

SEQ ID NO: 2090926 - RNA, 19 nt, Homo sapiens
  misc_RNA (1)...(19): siRNA sense strand
caccaggacucuugacuuc

SEQ ID NO: 2090927 - RNA, 19 nt, Homo sapiens
  misc_RNA (1)...(19): siRNA sense strand
gcgccuaccuuggcugaaa

SEQ ID NO: 2090928 - RNA, 19 nt, Homo sapiens
  misc_RNA (1)...(19): siRNA sense strand
gaggguaucagcugccaaa

SEQ ID NO: 2090929 - RNA, 19 nt, Homo sapiens
  misc_RNA (1)...(19): siRNA sense strand
caaaggucccugcaugaga

SEQ ID NO: 2090930 - RNA, 19 nt, Homo sapiens
  misc_RNA (1)...(19): siRNA sense strand
ccagcugucucuucugcaa

SEQ ID NO: 2090931 - RNA, 19 nt, Homo sapiens
  misc_RNA (1)...(19): siRNA sense strand
gcucacggccuccacugaa

SEQ ID NO: 2090932 - RNA, 19 nt, Homo sapiens
  misc_RNA (1)...(19): siRNA sense strand
ccacggcuguguccugaag

SEQ ID NO: 2090933 - RNA, 19 nt, Homo sapiens
  misc_RNA (1)...(19): siRNA sense strand
gggccaaguucccgcuguu

SEQ ID NO: 2090934 - RNA, 19 nt, Homo sapiens
  misc_RNA (1)...(19): siRNA sense strand
ucuaagaaauuuggacaca

SEQ ID NO: 2090935 - RNA, 19 nt, Homo sapiens
  misc_RNA (1)...(19): siRNA sense strand
ggugaaggccgagauggaa

SEQ ID NO: 2090936 - RNA, 19 nt, Homo sapiens
  misc_RNA (1)...(19): siRNA sense strand
gcucacgcccuucgagaug

SEQ ID NO: 2090937 - RNA, 19 nt, Homo sapiens
  misc_RNA (1)...(19): siRNA sense strand
aaggaugucugcagugagu

SEQ ID NO: 2090938 - RNA, 19 nt, Homo sapiens
  misc_RNA (1)...(19): siRNA sense strand
uggcugaaauggaagagau

SEQ ID NO: 2090939 - RNA, 19 nt, Homo sapiens
  misc_RNA (1)...(19): siRNA sense strand
gcaaaggucccugcaugag

SEQ ID NO: 2090940 - RNA, 19 nt, Homo sapiens
  misc_RNA (1)...(19): siRNA sense strand
gcagugagugcaccagcuu

SEQ ID NO: 2090941 - RNA, 19 nt, Homo sapiens
  misc_RNA (1)...(19): siRNA sense strand
ccuaacaccaggacucuug

SEQ ID NO: 2090942 - RNA, 19 nt, Homo sapiens
  misc_RNA (1)...(19): siRNA sense strand
gacccaaucccucuacauc

SEQ ID NO: 2090943 - RNA, 19 nt, Homo sapiens
  misc_RNA (1)...(19): siRNA sense strand
guaccugucccgcgagugu

SEQ ID NO: 2090944 - RNA, 19 nt, Homo sapiens
  misc_RNA (1)...(19): siRNA sense strand
gcacuuccuguagcauaaa

SEQ ID NO: 2090945 - RNA, 19 nt, Homo sapiens
  misc_RNA (1)...(19): siRNA sense strand
ugaaauggaagagaugaau

SEQ ID NO: 2090946 - RNA, 19 nt, Homo sapiens
  misc_RNA (1)...(19): siRNA sense strand
ugaauacaucugaggaaga

SEQ ID NO: 2090947 - RNA, 19 nt, Homo sapiens
  misc_RNA (1)...(19): siRNA sense strand
gcagaacaaggagcucuuc

SEQ ID NO: 2090948 - RNA, 19 nt, Homo sapiens
  misc_RNA (1)...(19): siRNA sense strand
ugcacuuccuguagcauaa

SEQ ID NO: 2090949 - RNA, 19 nt, Homo sapiens
  misc_RNA (1)...(19): siRNA sense strand
uggcccagcuccgaaguga

SEQ ID NO: 2090950 - RNA, 19 nt, Homo sapiens
  misc_RNA (1)...(19): siRNA sense strand
ggacagccugggucacaca

SEQ ID NO: 2090951 - RNA, 19 nt, Homo sapiens
  misc_RNA (1)...(19): siRNA sense strand
ccuguagcauaaagaugaa

SEQ ID NO: 2090952 - RNA, 19 nt, Homo sapiens
  misc_RNA (1)...(19): siRNA sense strand
gcggagugaagcugaagaa

SEQ ID NO: 2090953 - RNA, 19 nt, Homo sapiens
  misc_RNA (1)...(19): siRNA sense strand
cacugaagcaggucucuga

SEQ ID NO: 2090954 - RNA, 19 nt, Homo sapiens
  misc_RNA (1)...(19): siRNA sense strand
guggacguccucaacacua

SEQ ID NO: 2090955 - RNA, 19 nt, Homo sapiens
  misc_RNA (1)...(19): siRNA sense strand
gagcguggacguccucaac

SEQ ID NO: 2090956 - RNA, 19 nt, Homo sapiens
  misc_RNA (1)...(19): siRNA sense strand
ucuacacacugggcuuuga

SEQ ID NO: 2090957 - RNA, 19 nt, Homo sapiens
  misc_RNA (1)...(19): siRNA sense strand
ugcaagagcaggaguucaa

SEQ ID NO: 2090958 - RNA, 19 nt, Homo sapiens
  misc_RNA (1)...(19): siRNA sense strand
cuaagaaauuuggacacau

SEQ ID NO: 2090959 - RNA, 19 nt, Homo sapiens
  misc_RNA (1)...(19): siRNA sense strand
gcugaaauggaagagauga

SEQ ID NO: 2090960 - RNA, 19 nt, Homo sapiens
  misc_RNA (1)...(19): siRNA sense strand
agagagccgucugcacuuc

SEQ ID NO: 2090961 - RNA, 19 nt, Homo sapiens
  misc_RNA (1)...(19): siRNA sense strand
gagcuggcagugcgcaugu

SEQ ID NO: 2090962 - RNA, 19 nt, Homo sapiens
  misc_RNA (1)...(19): siRNA sense strand
gugaaggccgagauggaaa

SEQ ID NO: 2090963 - RNA, 19 nt, Homo sapiens
  misc_RNA (1)...(19): siRNA sense strand
aaauggaagagaugaauac

SEQ ID NO: 2090964 - RNA, 19 nt, Homo sapiens
  misc_RNA (1)...(19): siRNA sense strand
gcagucgccagacccaauc

SEQ ID NO: 2090965 - RNA, 19 nt, Homo sapiens
  misc_RNA (1)...(19): siRNA sense strand
ccgcccagcugucucuucu

SEQ ID NO: 2090966 - RNA, 19 nt, Homo sapiens
  misc_RNA (1)...(19): siRNA sense strand
ugaagaaggggaagauuug

SEQ ID NO: 2090967 - RNA, 19 nt, Homo sapiens
  misc_RNA (1)...(19): siRNA sense strand
gaaagaugcuuccgaguaa

SEQ ID NO: 2090968 - RNA, 19 nt, Homo sapiens
  misc_RNA (1)...(19): siRNA sense strand
gcaaggagcucauucugaa

SEQ ID NO: 2090969 - RNA, 19 nt, Homo sapiens
  misc_RNA (1)...(19): siRNA sense strand
gaacuuucauuuccuaaga

SEQ ID NO: 2090970 - RNA, 19 nt, Homo sapiens
  misc_RNA (1)...(19): siRNA sense strand
gagacuaacuggcuucaaa

SEQ ID NO: 2090971 - RNA, 19 nt, Homo sapiens
  misc_RNA (1)...(19): siRNA sense strand
ggacugggcuugggaagaa

SEQ ID NO: 2090972 - RNA, 19 nt, Homo sapiens
  misc_RNA (1)...(19): siRNA sense strand
agacagcacuuuaagaauu

SEQ ID NO: 2090973 - RNA, 19 nt, Homo sapiens
  misc_RNA (1)...(19): siRNA sense strand
gagccacccuccagcuuua

SEQ ID NO: 2090974 - RNA, 19 nt, Homo sapiens
  misc_RNA (1)...(19): siRNA sense strand
cuucaaagaucuccaguuu

SEQ ID NO: 2090975 - RNA, 19 nt, Homo sapiens
  misc_RNA (1)...(19): siRNA sense strand
ggagagagcaguacgaaga

SEQ ID NO: 2090976 - RNA, 19 nt, Homo sapiens
  misc_RNA (1)...(19): siRNA sense strand
ccaggaguauguucuuuaa

SEQ ID NO: 2090977 - RNA, 19 nt, Homo sapiens
  misc_RNA (1)...(19): siRNA sense strand
ggaaaggugcucaguaaga

SEQ ID NO: 2090978 - RNA, 19 nt, Homo sapiens
  misc_RNA (1)...(19): siRNA sense strand
ggauguagcguugcucuua

SEQ ID NO: 2090979 - RNA, 19 nt, Homo sapiens
  misc_RNA (1)...(19): siRNA sense strand
ggaagcaguugaagcuguu

SEQ ID NO: 2090980 - RNA, 19 nt, Homo sapiens
  misc_RNA (1)...(19): siRNA sense strand
gaaagucagcugcaaagga

SEQ ID NO: 2090981 - RNA, 19 nt, Homo sapiens
  misc_RNA (1)...(19): siRNA sense strand
ggaaggagagaccaaauca

SEQ ID NO: 2090982 - RNA, 19 nt, Homo sapiens
  misc_RNA (1)...(19): siRNA sense strand
ccuccaagcuuguuugaug

SEQ ID NO: 2090983 - RNA, 19 nt, Homo sapiens
  misc_RNA (1)...(19): siRNA sense strand
ccaguguucugucuucaaa

SEQ ID NO: 2090984 - RNA, 19 nt, Homo sapiens
  misc_RNA (1)...(19): siRNA sense strand
gaaaggugcucaguaagac

SEQ ID NO: 2090985 - RNA, 19 nt, Homo sapiens
  misc_RNA (1)...(19): siRNA sense strand
agaaagaugcuuccgagua

SEQ ID NO: 2090986 - RNA, 19 nt, Homo sapiens
  misc_RNA (1)...(19): siRNA sense strand
gcacagagaaugggaugaa

SEQ ID NO: 2090987 - RNA, 19 nt, Homo sapiens
  misc_RNA (1)...(19): siRNA sense strand
cagcaaagcacucaaguuc

SEQ ID NO: 2090988 - RNA, 19 nt, Homo sapiens
  misc_RNA (1)...(19): siRNA sense strand
gcaccaaguuugagaugca

SEQ ID NO: 2090989 - RNA, 19 nt, Homo sapiens
  misc_RNA (1)...(19): siRNA sense strand
ggcggucgcuugacuagaa

SEQ ID NO: 2090990 - RNA, 19 nt, Homo sapiens
  misc_RNA (1)...(19): siRNA sense strand
ggaggcagauggacauugg

SEQ ID NO: 2090991 - RNA, 19 nt, Homo sapiens
  misc_RNA (1)...(19): siRNA sense strand
gcuguaaccugcacucaca

SEQ ID NO: 2090992 - RNA, 19 nt, Homo sapiens
  misc_RNA (1)...(19): siRNA sense strand
guugugagcugccauccaa

SEQ ID NO: 2090993 - RNA, 19 nt, Homo sapiens
  misc_RNA (1)...(19): siRNA sense strand
ggacagcacagaauucaca

SEQ ID NO: 2090994 - RNA, 19 nt, Homo sapiens
  misc_RNA (1)...(19): siRNA sense strand
gaaagaggaacccgcaugu

SEQ ID NO: 2090995 - RNA, 19 nt, Homo sapiens
  misc_RNA (1)...(19): siRNA sense strand
gacagcacuuuaagaauuc

SEQ ID NO: 2090996 - RNA, 19 nt, Homo sapiens
  misc_RNA (1)...(19): siRNA sense strand
ggggaaaggugcucaguaa

SEQ ID NO: 2090997 - RNA, 19 nt, Homo sapiens
  misc_RNA (1)...(19): siRNA sense strand
cuggauggguuccucaaua

SEQ ID NO: 2090998 - RNA, 19 nt, Homo sapiens
  misc_RNA (1)...(19): siRNA sense strand
ggagagaccaaaucacuca

SEQ ID NO: 2090999 - RNA, 19 nt, Homo sapiens
  misc_RNA (1)...(19): siRNA sense strand
gauguagcguugcucuuau

SEQ ID NO: 2091000 - RNA, 19 nt, Homo sapiens
  misc_RNA (1)...(19): siRNA sense strand
aaagaagccugcaucuaca

SEQ ID NO: 2091001 - RNA, 19 nt, Homo sapiens
  misc_RNA (1)...(19): siRNA sense strand
ccacuuaccucgccuucca

SEQ ID NO: 2091002 - RNA, 19 nt, Homo sapiens
  misc_RNA (1)...(19): siRNA sense strand
gagaagggagagagcagua

SEQ ID NO: 2091003 - RNA, 19 nt, Homo sapiens
  misc_RNA (1)...(19): siRNA sense strand
gcugugacccugcugguuu

SEQ ID NO: 2091004 - RNA, 19 nt, Homo sapiens
  misc_RNA (1)...(19): siRNA sense strand
caagcuuguuugaugauga

SEQ ID NO: 2091005 - RNA, 19 nt, Homo sapiens
  misc_RNA (1)...(19): siRNA sense strand
ccaaggauccuccaagcuu

SEQ ID NO: 2091006 - RNA, 19 nt, Homo sapiens
  misc_RNA (1)...(19): siRNA sense strand
caaccacgccucagucaau

SEQ ID NO: 2091007 - RNA, 19 nt, Homo sapiens
  misc_RNA (1)...(19): siRNA sense strand
acccuucucugacaguuua

SEQ ID NO: 2091008 - RNA, 19 nt, Homo sapiens
  misc_RNA (1)...(19): siRNA sense strand
ugccagagcucaucaaagg

SEQ ID NO: 2091009 - RNA, 19 nt, Homo sapiens
  misc_RNA (1)...(19): siRNA sense strand
gaggucccguggcuauaaa

SEQ ID NO: 2091010 - RNA, 19 nt, Homo sapiens
  misc_RNA (1)...(19): siRNA sense strand
gccgccagcucacaagaaa

SEQ ID NO: 2091011 - RNA, 19 nt, Homo sapiens
  misc_RNA (1)...(19): siRNA sense strand
gcguugcucuuaugaguca

SEQ ID NO: 2091012 - RNA, 19 nt, Homo sapiens
  misc_RNA (1)...(19): siRNA sense strand
ccucggaccuggacaugga

SEQ ID NO: 2091013 - RNA, 19 nt, Homo sapiens
  misc_RNA (1)...(19): siRNA sense strand
ccaggaagaccaccuacuu

SEQ ID NO: 2091014 - RNA, 19 nt, Homo sapiens
  misc_RNA (1)...(19): siRNA sense strand
gcaguucgaccgccacaug

SEQ ID NO: 2091015 - RNA, 19 nt, Homo sapiens
  misc_RNA (1)...(19): siRNA sense strand
caaaauccuucccgaaaga

SEQ ID NO: 2091016 - RNA, 19 nt, Homo sapiens
  misc_RNA (1)...(19): siRNA sense strand
gaggggaagucaaauaaga

SEQ ID NO: 2091017 - RNA, 19 nt, Homo sapiens
  misc_RNA (1)...(19): siRNA sense strand
ggacucuccuagccacuca

SEQ ID NO: 2091018 - RNA, 19 nt, Homo sapiens
  misc_RNA (1)...(19): siRNA sense strand
cgaccaggaacuuucauuu

SEQ ID NO: 2091019 - RNA, 19 nt, Homo sapiens
  misc_RNA (1)...(19): siRNA sense strand
gggcacugcuggcaagaca

SEQ ID NO: 2091020 - RNA, 19 nt, Homo sapiens
  misc_RNA (1)...(19): siRNA sense strand
ggaagcuggugcagagaag

SEQ ID NO: 2091021 - RNA, 19 nt, Homo sapiens
  misc_RNA (1)...(19): siRNA sense strand
caacccagcccagcuuuga

SEQ ID NO: 2091022 - RNA, 19 nt, Homo sapiens
  misc_RNA (1)...(19): siRNA sense strand
gaccaggaacuuucauuuc

SEQ ID NO: 2091023 - RNA, 19 nt, Homo sapiens
  misc_RNA (1)...(19): siRNA sense strand
gcaaaggagcaaagacaca

SEQ ID NO: 2091024 - RNA, 19 nt, Homo sapiens
  misc_RNA (1)...(19): siRNA sense strand
gagaggaugagccacagaa

SEQ ID NO: 2091025 - RNA, 19 nt, Homo sapiens
  misc_RNA (1)...(19): siRNA sense strand
gagcucugcgccacgguua

SEQ ID NO: 2091026 - RNA, 19 nt, Homo sapiens
  misc_RNA (1)...(19): siRNA sense strand
agaccuggcuggcuguuuc

SEQ ID NO: 2091027 - RNA, 19 nt, Homo sapiens
  misc_RNA (1)...(19): siRNA sense strand
uagcguugcucuuaugagu

SEQ ID NO: 2091028 - RNA, 19 nt, Homo sapiens
  misc_RNA (1)...(19): siRNA sense strand
cagcacagccagugacuuc

SEQ ID NO: 2091029 - RNA, 19 nt, Homo sapiens
  misc_RNA (1)...(19): siRNA sense strand
ucugacaguuuacacaaga

SEQ ID NO: 2091030 - RNA, 19 nt, Homo sapiens
  misc_RNA (1)...(19): siRNA sense strand
guuaugcgcaucaucaaga

SEQ ID NO: 2091031 - RNA, 19 nt, Homo sapiens
  misc_RNA (1)...(19): siRNA sense strand
ggaagcagggcagccauga

SEQ ID NO: 2091032 - RNA, 19 nt, Homo sapiens
  misc_RNA (1)...(19): siRNA sense strand
ggcaaggagcucauucuga

SEQ ID NO: 2091033 - RNA, 19 nt, Homo sapiens
  misc_RNA (1)...(19): siRNA sense strand
gccaagaugcggagggaaa

SEQ ID NO: 2091034 - RNA, 19 nt, Homo sapiens
  misc_RNA (1)...(19): siRNA sense strand
guccaagccacgacagaua

SEQ ID NO: 2091035 - RNA, 19 nt, Homo sapiens
  misc_RNA (1)...(19): siRNA sense strand
gcacagccaaccagcuuca

SEQ ID NO: 2091036 - RNA, 19 nt, Homo sapiens
  misc_RNA (1)...(19): siRNA sense strand
ccaagucccgccuguguau

SEQ ID NO: 2091037 - RNA, 19 nt, Homo sapiens
  misc_RNA (1)...(19): siRNA sense strand
caccaggaguauguucuuu

SEQ ID NO: 2091038 - RNA, 19 nt, Homo sapiens
  misc_RNA (1)...(19): siRNA sense strand
ggagaagccaagaaagaca

SEQ ID NO: 2091039 - RNA, 19 nt, Homo sapiens
  misc_RNA (1)...(19): siRNA sense strand
gaugcaagaccugugcuuu

SEQ ID NO: 2091040 - RNA, 19 nt, Homo sapiens
  misc_RNA (1)...(19): siRNA sense strand
gagcauucuuccagucucu

SEQ ID NO: 2091041 - RNA, 19 nt, Homo sapiens
  misc_RNA (1)...(19): siRNA sense strand
gagcaugagguagauguga

SEQ ID NO: 2091042 - RNA, 19 nt, Homo sapiens
  misc_RNA (1)...(19): siRNA sense strand
ggccuggcuuugaggguaa

SEQ ID NO: 2091043 - RNA, 19 nt, Homo sapiens
  misc_RNA (1)...(19): siRNA sense strand
ugaaacugccgaagaguca

SEQ ID NO: 2091044 - RNA, 19 nt, Homo sapiens
  misc_RNA (1)...(19): siRNA sense strand
ggaaagcugagagggagaa

SEQ ID NO: 2091045 - RNA, 19 nt, Homo sapiens
  misc_RNA (1)...(19): siRNA sense strand
ucaccgaauuagaaaguca

SEQ ID NO: 2091046 - RNA, 19 nt, Homo sapiens
  misc_RNA (1)...(19): siRNA sense strand
ccaaugggccacugguguu

SEQ ID NO: 2091047 - RNA, 19 nt, Homo sapiens
  misc_RNA (1)...(19): siRNA sense strand
gccgaugacuccuccucuu

SEQ ID NO: 2091048 - RNA, 19 nt, Homo sapiens
  misc_RNA (1)...(19): siRNA sense strand
uggauggguuccucaauag

SEQ ID NO: 2091049 - RNA, 19 nt, Homo sapiens
  misc_RNA (1)...(19): siRNA sense strand
ggagccaacuuccauuuuc

SEQ ID NO: 2091050 - RNA, 19 nt, Homo sapiens
  misc_RNA (1)...(19): siRNA sense strand
agagggagaagccaagaaa

SEQ ID NO: 2091051 - RNA, 19 nt, Homo sapiens
  misc_RNA (1)...(19): siRNA sense strand
cacaagagccugaccaaaa

SEQ ID NO: 2091052 - RNA, 19 nt, Homo sapiens
  misc_RNA (1)...(19): siRNA sense strand
agucucugcugaugugauu

SEQ ID NO: 2091053 - RNA, 19 nt, Homo sapiens
  misc_RNA (1)...(19): siRNA sense strand
agaggcagauggcguccaa

SEQ ID NO: 2091054 - RNA, 19 nt, Homo sapiens
  misc_RNA (1)...(19): siRNA sense strand
caaacccaguguucugucu

SEQ ID NO: 2091055 - RNA, 19 nt, Homo sapiens
  misc_RNA (1)...(19): siRNA sense strand
gcgagaagaggaaggaagu

SEQ ID NO: 2091056 - RNA, 19 nt, Homo sapiens
  misc_RNA (1)...(19): siRNA sense strand
cagcacuguucaccuacaa

SEQ ID NO: 2091057 - RNA, 19 nt, Homo sapiens
  misc_RNA (1)...(19): siRNA sense strand
ggacgagacaccagagaac

SEQ ID NO: 2091058 - RNA, 19 nt, Homo sapiens
  misc_RNA (1)...(19): siRNA sense strand
ccaagaaggagcaguucga

SEQ ID NO: 2091059 - RNA, 19 nt, Homo sapiens
  misc_RNA (1)...(19): siRNA sense strand
agaggaacccgcaugucua

SEQ ID NO: 2091060 - RNA, 19 nt, Homo sapiens
  misc_RNA (1)...(19): siRNA sense strand
ccacagccgaucagaggaa

SEQ ID NO: 2091061 - RNA, 19 nt, Homo sapiens
  misc_RNA (1)...(19): siRNA sense strand
gcuggaugccgggaguuua

SEQ ID NO: 2091062 - RNA, 19 nt, Homo sapiens
  misc_RNA (1)...(19): siRNA sense strand
ggucaccgaauuagaaagu

SEQ ID NO: 2091063 - RNA, 19 nt, Homo sapiens
  misc_RNA (1)...(19): siRNA sense strand
uggaguggcuaagaguaaa

SEQ ID NO: 2091064 - RNA, 19 nt, Homo sapiens
  misc_RNA (1)...(19): siRNA sense strand
gcggucgcuugacuagaaa

SEQ ID NO: 2091065 - RNA, 19 nt, Homo sapiens
  misc_RNA (1)...(19): siRNA sense strand
ugagguagaugugaagacu

SEQ ID NO: 2091066 - RNA, 19 nt, Homo sapiens
  misc_RNA (1)...(19): siRNA sense strand
gggcagccaugagccuuca

SEQ ID NO: 2091067 - RNA, 19 nt, Homo sapiens
  misc_RNA (1)...(19): siRNA sense strand
ugaaggaggucgcuuucua

SEQ ID NO: 2091068 - RNA, 19 nt, Homo sapiens
  misc_RNA (1)...(19): siRNA sense strand
ggaggucgcuuucuacaac

SEQ ID NO: 2091069 - RNA, 19 nt, Homo sapiens
  misc_RNA (1)...(19): siRNA sense strand
caaagacccuggccgaagu

SEQ ID NO: 2091070 - RNA, 19 nt, Homo sapiens
  misc_RNA (1)...(19): siRNA sense strand
gcacacgcuuggcuaucaa

SEQ ID NO: 2091071 - RNA, 19 nt, Homo sapiens
  misc_RNA (1)...(19): siRNA sense strand
cuaucaagcucaugaccaa

SEQ ID NO: 2091072 - RNA, 19 nt, Homo sapiens
  misc_RNA (1)...(19): siRNA sense strand
ggacacugacugccaagga

SEQ ID NO: 2091073 - RNA, 19 nt, Homo sapiens
  misc_RNA (1)...(19): siRNA sense strand
caagugagaagcuggugaa

SEQ ID NO: 2091074 - RNA, 19 nt, Homo sapiens
  misc_RNA (1)...(19): siRNA sense strand
gaaggaggucgcuuucuac

SEQ ID NO: 2091075 - RNA, 19 nt, Homo sapiens
  misc_RNA (1)...(19): siRNA sense strand
gcgugaacaugaaggacuu

SEQ ID NO: 2091076 - RNA, 19 nt, Homo sapiens
  misc_RNA (1)...(19): siRNA sense strand
ggcaugugguggccuuaga

SEQ ID NO: 2091077 - RNA, 19 nt, Homo sapiens
  misc_RNA (1)...(19): siRNA sense strand
guacaggacaagugagaag

SEQ ID NO: 2091078 - RNA, 19 nt, Homo sapiens
  misc_RNA (1)...(19): siRNA sense strand
caccagccgucgacaccaa

SEQ ID NO: 2091079 - RNA, 19 nt, Homo sapiens
  misc_RNA (1)...(19): siRNA sense strand
gaggcucuuucccaacugu

SEQ ID NO: 2091080 - RNA, 19 nt, Homo sapiens
  misc_RNA (1)...(19): siRNA sense strand
ugaaggacuugcccucacu

SEQ ID NO: 2091081 - RNA, 19 nt, Homo sapiens
  misc_RNA (1)...(19): siRNA sense strand
auacgggcuucucggauga

SEQ ID NO: 2091082 - RNA, 19 nt, Homo sapiens
  misc_RNA (1)...(19): siRNA sense strand
cuagaggagagaucaaaga

SEQ ID NO: 2091083 - RNA, 19 nt, Homo sapiens
  misc_RNA (1)...(19): siRNA sense strand
gagccuagaggagagauca

SEQ ID NO: 2091084 - RNA, 19 nt, Homo sapiens
  misc_RNA (1)...(19): siRNA sense strand
gacccuggccgaagugaag

SEQ ID NO: 2091085 - RNA, 19 nt, Homo sapiens
  misc_RNA (1)...(19): siRNA sense strand
ccucgcgucucucccagau

SEQ ID NO: 2091086 - RNA, 19 nt, Homo sapiens
  misc_RNA (1)...(19): siRNA sense strand
ggagggaguucacacaaga

SEQ ID NO: 2091087 - RNA, 19 nt, Homo sapiens
  misc_RNA (1)...(19): siRNA sense strand
ggaguucacacaagacaga

SEQ ID NO: 2091088 - RNA, 19 nt, Homo sapiens
  misc_RNA (1)...(19): siRNA sense strand
ccaccaggauacaacaaug

SEQ ID NO: 2091089 - RNA, 19 nt, Homo sapiens
  misc_RNA (1)...(19): siRNA sense strand
gggagggaguucacacaag

SEQ ID NO: 2091090 - RNA, 19 nt, Homo sapiens
  misc_RNA (1)...(19): siRNA sense strand
caggauacaacaauggaaa

SEQ ID NO: 2091091 - RNA, 19 nt, Homo sapiens
  misc_RNA (1)...(19): siRNA sense strand
guucauucauucacccaau

SEQ ID NO: 2091092 - RNA, 19 nt, Homo sapiens
  misc_RNA (1)...(19): siRNA sense strand
caagaaccaaauccaacuu

SEQ ID NO: 2091093 - RNA, 19 nt, Homo sapiens
  misc_RNA (1)...(19): siRNA sense strand
ggccaagaaccaaauccaa

SEQ ID NO: 2091094 - RNA, 19 nt, Homo sapiens
  misc_RNA (1)...(19): siRNA sense strand
aagaaccaaauccaacuuu

SEQ ID NO: 2091095 - RNA, 19 nt, Homo sapiens
  misc_RNA (1)...(19): siRNA sense strand
ccaagaaccaaauccaacu

SEQ ID NO: 2091096 - RNA, 19 nt, Homo sapiens
  misc_RNA (1)...(19): siRNA sense strand
ggacacccaagcuggucaa

SEQ ID NO: 2091097 - RNA, 19 nt, Homo sapiens
  misc_RNA (1)...(19): siRNA sense strand
cugcagcccagccaggaua

SEQ ID NO: 2091098 - RNA, 19 nt, Homo sapiens
  misc_RNA (1)...(19): siRNA sense strand
gacaagggcucagacuuua

SEQ ID NO: 2091099 - RNA, 19 nt, Homo sapiens
  misc_RNA (1)...(19): siRNA sense strand
ugacaagggcucagacuuu

SEQ ID NO: 2091100 - RNA, 19 nt, Homo sapiens
  misc_RNA (1)...(19): siRNA sense strand
ccacagcucuccccuggua

SEQ ID NO: 2091101 - RNA, 19 nt, Homo sapiens
  misc_RNA (1)...(19): siRNA sense strand
caagggcucagacuuuauc

SEQ ID NO: 2091102 - RNA, 19 nt, Homo sapiens
  misc_RNA (1)...(19): siRNA sense strand
uucuggagcugcugacuga

SEQ ID NO: 2091103 - RNA, 19 nt, Homo sapiens
  misc_RNA (1)...(19): siRNA sense strand
agggagcucugaccaagca

SEQ ID NO: 2091104 - RNA, 19 nt, Homo sapiens
  misc_RNA (1)...(19): siRNA sense strand
ccaagaucuuccuguugca

SEQ ID NO: 2091105 - RNA, 19 nt, Homo sapiens
  misc_RNA (1)...(19): siRNA sense strand
gaacaaggcugacaaucug

SEQ ID NO: 2091106 - RNA, 19 nt, Homo sapiens
  misc_RNA (1)...(19): siRNA sense strand
gaucacagauggagagauu

SEQ ID NO: 2091107 - RNA, 19 nt, Homo sapiens
  misc_RNA (1)...(19): siRNA sense strand
cgacagagcugaccucauc

SEQ ID NO: 2091108 - RNA, 19 nt, Homo sapiens
  misc_RNA (1)...(19): siRNA sense strand
gagcugaccucaucuuugu

SEQ ID NO: 2091109 - RNA, 19 nt, Homo sapiens
  misc_RNA (1)...(19): siRNA sense strand
cagaagauguuggcaauuu

SEQ ID NO: 2091110 - RNA, 19 nt, Homo sapiens
  misc_RNA (1)...(19): siRNA sense strand
gaacaagauugccuucauc

SEQ ID NO: 2091111 - RNA, 19 nt, Homo sapiens
  misc_RNA (1)...(19): siRNA sense strand
gcaauuuguuggagaauca

SEQ ID NO: 2091112 - RNA, 19 nt, Homo sapiens
  misc_RNA (1)...(19): siRNA sense strand
ggaaaguggugauggaagu

SEQ ID NO: 2091113 - RNA, 19 nt, Homo sapiens
  misc_RNA (1)...(19): siRNA sense strand
gggcgugaaucccagauaa

SEQ ID NO: 2091114 - RNA, 19 nt, Homo sapiens
  misc_RNA (1)...(19): siRNA sense strand
gagaacuggucuuuaagga

SEQ ID NO: 2091115 - RNA, 19 nt, Homo sapiens
  misc_RNA (1)...(19): siRNA sense strand
ggaagaucccgauaaauuc

SEQ ID NO: 2091116 - RNA, 19 nt, Homo sapiens
  misc_RNA (1)...(19): siRNA sense strand
acaagaaacugcuccuuca

SEQ ID NO: 2091117 - RNA, 19 nt, Homo sapiens
  misc_RNA (1)...(19): siRNA sense strand
uggaagaucccgauaaauu

SEQ ID NO: 2091118 - RNA, 19 nt, Homo sapiens
  misc_RNA (1)...(19): siRNA sense strand
gaugaagccuccucugaag

SEQ ID NO: 2091119 - RNA, 19 nt, Homo sapiens
  misc_RNA (1)...(19): siRNA sense strand
ucaaucccauuuccaguuu

SEQ ID NO: 2091120 - RNA, 19 nt, Homo sapiens
  misc_RNA (1)...(19): siRNA sense strand
agaaacugcuccuucacua

SEQ ID NO: 2091121 - RNA, 19 nt, Homo sapiens
  misc_RNA (1)...(19): siRNA sense strand
gaagccagccucuccaaug

SEQ ID NO: 2091122 - RNA, 19 nt, Homo sapiens
  misc_RNA (1)...(19): siRNA sense strand
uuaaggacauuguggaaga

SEQ ID NO: 2091123 - RNA, 19 nt, Homo sapiens
  misc_RNA (1)...(19): siRNA sense strand
caaaugcucaugcggguuu

SEQ ID NO: 2091124 - RNA, 19 nt, Homo sapiens
  misc_RNA (1)...(19): siRNA sense strand
caggugcucucaacuguga

SEQ ID NO: 2091125 - RNA, 19 nt, Homo sapiens
  misc_RNA (1)...(19): siRNA sense strand
auggagaacuggucuuuaa

SEQ ID NO: 2091126 - RNA, 19 nt, Homo sapiens
  misc_RNA (1)...(19): siRNA sense strand
ggccagaauuuccuagaga

SEQ ID NO: 2091127 - RNA, 19 nt, Homo sapiens
  misc_RNA (1)...(19): siRNA sense strand
ccucaucuuugucgucuuu

SEQ ID NO: 2091128 - RNA, 19 nt, Homo sapiens
  misc_RNA (1)...(19): siRNA sense strand
gacggaggaugcaaaugaa

SEQ ID NO: 2091129 - RNA, 19 nt, Homo sapiens
  misc_RNA (1)...(19): siRNA sense strand
uguggaagaucccgauaaa

SEQ ID NO: 2091130 - RNA, 19 nt, Homo sapiens
  misc_RNA (1)...(19): siRNA sense strand
ucaagaccauccuggcaaa

SEQ ID NO: 2091131 - RNA, 19 nt, Homo sapiens
  misc_RNA (1)...(19): siRNA sense strand
cacagaagauguuggcaau

SEQ ID NO: 2091132 - RNA, 19 nt, Homo sapiens
  misc_RNA (1)...(19): siRNA sense strand
aaagaccaaugucagcaaa

SEQ ID NO: 2091133 - RNA, 19 nt, Homo sapiens
  misc_RNA (1)...(19): siRNA sense strand
gaaagaggcuaccccuuca

SEQ ID NO: 2091134 - RNA, 19 nt, Homo sapiens
  misc_RNA (1)...(19): siRNA sense strand
gccagaauuuccuagagaa

SEQ ID NO: 2091135 - RNA, 19 nt, Homo sapiens
  misc_RNA (1)...(19): siRNA sense strand
agaagacccucaugcugaa

SEQ ID NO: 2091136 - RNA, 19 nt, Homo sapiens
  misc_RNA (1)...(19): siRNA sense strand
agacggaggaugcaaauga

SEQ ID NO: 2091137 - RNA, 19 nt, Homo sapiens
  misc_RNA (1)...(19): siRNA sense strand
agaacagacuggagaacaa

SEQ ID NO: 2091138 - RNA, 19 nt, Homo sapiens
  misc_RNA (1)...(19): siRNA sense strand
agaccaaugucagcaaauu

SEQ ID NO: 2091139 - RNA, 19 nt, Homo sapiens
  misc_RNA (1)...(19): siRNA sense strand
gaagaucccgauaaauucu

SEQ ID NO: 2091140 - RNA, 19 nt, Homo sapiens
  misc_RNA (1)...(19): siRNA sense strand
gaagauguuggcaauuugu

SEQ ID NO: 2091141 - RNA, 19 nt, Homo sapiens
  misc_RNA (1)...(19): siRNA sense strand
ggagccagauauugacaca

SEQ ID NO: 2091142 - RNA, 19 nt, Homo sapiens
  misc_RNA (1)...(19): siRNA sense strand
gcaugggccuaagcugaaa

SEQ ID NO: 2091143 - RNA, 19 nt, Homo sapiens
  misc_RNA (1)...(19): siRNA sense strand
agaagauguuggcaauuug

SEQ ID NO: 2091144 - RNA, 19 nt, Homo sapiens
  misc_RNA (1)...(19): siRNA sense strand
gaccaaugucagcaaauuu

SEQ ID NO: 2091145 - RNA, 19 nt, Homo sapiens
  misc_RNA (1)...(19): siRNA sense strand
gagcaguccuacaaguaca

SEQ ID NO: 2091146 - RNA, 19 nt, Homo sapiens
  misc_RNA (1)...(19): siRNA sense strand
ggaggaugcaaaugaagaa

SEQ ID NO: 2091147 - RNA, 19 nt, Homo sapiens
  misc_RNA (1)...(19): siRNA sense strand
gagagucggagccagauau

SEQ ID NO: 2091148 - RNA, 19 nt, Homo sapiens
  misc_RNA (1)...(19): siRNA sense strand
agagaucucccuccuagaa

SEQ ID NO: 2091149 - RNA, 19 nt, Homo sapiens
  misc_RNA (1)...(19): siRNA sense strand
ggacacccaucaggaacug

SEQ ID NO: 2091150 - RNA, 19 nt, Homo sapiens
  misc_RNA (1)...(19): siRNA sense strand
caccaggcaucaucgagaa

SEQ ID NO: 2091151 - RNA, 19 nt, Homo sapiens
  misc_RNA (1)...(19): siRNA sense strand
gaaguggaagcgaggaaga

SEQ ID NO: 2091152 - RNA, 19 nt, Homo sapiens
  misc_RNA (1)...(19): siRNA sense strand
cuacaugggagguugcuuu

SEQ ID NO: 2091153 - RNA, 19 nt, Homo sapiens
  misc_RNA (1)...(19): siRNA sense strand
agaacaagauugccuucau

SEQ ID NO: 2091154 - RNA, 19 nt, Homo sapiens
  misc_RNA (1)...(19): siRNA sense strand
gaauccaggugcucucaac

SEQ ID NO: 2091155 - RNA, 19 nt, Homo sapiens
  misc_RNA (1)...(19): siRNA sense strand
caugggagguugcuuucug

SEQ ID NO: 2091156 - RNA, 19 nt, Homo sapiens
  misc_RNA (1)...(19): siRNA sense strand
ccgauaaauucuacaucuu

SEQ ID NO: 2091157 - RNA, 19 nt, Homo sapiens
  misc_RNA (1)...(19): siRNA sense strand
gauggagaacuggucuuua

SEQ ID NO: 2091158 - RNA, 19 nt, Homo sapiens
  misc_RNA (1)...(19): siRNA sense strand
agaggaaaguggugaugga

SEQ ID NO: 2091159 - RNA, 19 nt, Homo sapiens
  misc_RNA (1)...(19): siRNA sense strand
ggacuucuucggcaucaau

SEQ ID NO: 2091160 - RNA, 19 nt, Homo sapiens
  misc_RNA (1)...(19): siRNA sense strand
accgcuaccugcagacuua

SEQ ID NO: 2091161 - RNA, 19 nt, Homo sapiens
  misc_RNA (1)...(19): siRNA sense strand
ugagaaguuuggccagaau

SEQ ID NO: 2091162 - RNA, 19 nt, Homo sapiens
  misc_RNA (1)...(19): siRNA sense strand
gaccguggaguguugguaa

SEQ ID NO: 2091163 - RNA, 19 nt, Homo sapiens
  misc_RNA (1)...(19): siRNA sense strand
aaaugaccuucuucaguga

SEQ ID NO: 2091164 - RNA, 19 nt, Homo sapiens
  misc_RNA (1)...(19): siRNA sense strand
gaagaggaaaguggugaug

SEQ ID NO: 2091165 - RNA, 19 nt, Homo sapiens
  misc_RNA (1)...(19): siRNA sense strand
cgauaaauucuacaucuuc

SEQ ID NO: 2091166 - RNA, 19 nt, Homo sapiens
  misc_RNA (1)...(19): siRNA sense strand
gaacagacuggagaacaag

SEQ ID NO: 2091167 - RNA, 19 nt, Homo sapiens
  misc_RNA (1)...(19): siRNA sense strand
gagaacagacuggagaaca

SEQ ID NO: 2091168 - RNA, 19 nt, Homo sapiens
  misc_RNA (1)...(19): siRNA sense strand
gaaguuuggccagaauuuc

SEQ ID NO: 2091169 - RNA, 19 nt, Homo sapiens
  misc_RNA (1)...(19): siRNA sense strand
cgaggaagaaggaggaguu

SEQ ID NO: 2091170 - RNA, 19 nt, Homo sapiens
  misc_RNA (1)...(19): siRNA sense strand
ugaacaaggcugacaaucu

SEQ ID NO: 2091171 - RNA, 19 nt, Homo sapiens
  misc_RNA (1)...(19): siRNA sense strand
gaacccaccaccucugagu

SEQ ID NO: 2091172 - RNA, 19 nt, Homo sapiens
  misc_RNA (1)...(19): siRNA sense strand
caugauaaacuaccuccuu

SEQ ID NO: 2091173 - RNA, 19 nt, Homo sapiens
  misc_RNA (1)...(19): siRNA sense strand
ccaagcccaugguacuguu

SEQ ID NO: 2091174 - RNA, 19 nt, Homo sapiens
  misc_RNA (1)...(19): siRNA sense strand
acgcaagucuagaggagaa

SEQ ID NO: 2091175 - RNA, 19 nt, Homo sapiens
  misc_RNA (1)...(19): siRNA sense strand
ggccaucacucaggagcuu

SEQ ID NO: 2091176 - RNA, 19 nt, Homo sapiens
  misc_RNA (1)...(19): siRNA sense strand
gaagcugauuggcauugag

SEQ ID NO: 2091177 - RNA, 19 nt, Homo sapiens
  misc_RNA (1)...(19): siRNA sense strand
gagaagcugauuggcauug

SEQ ID NO: 2091178 - RNA, 19 nt, Homo sapiens
  misc_RNA (1)...(19): siRNA sense strand
ggagaacuggucuuuaagg

SEQ ID NO: 2091179 - RNA, 19 nt, Homo sapiens
  misc_RNA (1)...(19): siRNA sense strand
ggauacaccaggcaucauc

SEQ ID NO: 2091180 - RNA, 19 nt, Homo sapiens
  misc_RNA (1)...(19): siRNA sense strand
ggagagucggagccagaua

SEQ ID NO: 2091181 - RNA, 19 nt, Homo sapiens
  misc_RNA (1)...(19): siRNA sense strand
caaagaccaaugucagcaa

SEQ ID NO: 2091182 - RNA, 19 nt, Homo sapiens
  misc_RNA (1)...(19): siRNA sense strand
gcauugagguuccccacaa

SEQ ID NO: 2091183 - RNA, 19 nt, Homo sapiens
  misc_RNA (1)...(19): siRNA sense strand
cggaagaucuaccacucau

SEQ ID NO: 2091184 - RNA, 19 nt, Homo sapiens
  misc_RNA (1)...(19): siRNA sense strand
agucggagccagauauuga

SEQ ID NO: 2091185 - RNA, 19 nt, Homo sapiens
  misc_RNA (1)...(19): siRNA sense strand
ccgaagaggaguccgaaga

SEQ ID NO: 2091186 - RNA, 19 nt, Homo sapiens
  misc_RNA (1)...(19): siRNA sense strand
cccgauaaauucuacaucu

SEQ ID NO: 2091187 - RNA, 19 nt, Homo sapiens
  misc_RNA (1)...(19): siRNA sense strand
gaaccgcaagcagcaagaa

SEQ ID NO: 2091188 - RNA, 19 nt, Homo sapiens
  misc_RNA (1)...(19): siRNA sense strand
ggagcaguccuacaaguac

SEQ ID NO: 2091189 - RNA, 19 nt, Homo sapiens
  misc_RNA (1)...(19): siRNA sense strand
gaaacugcuccuucacuac

SEQ ID NO: 2091190 - RNA, 19 nt, Homo sapiens
  misc_RNA (1)...(19): siRNA sense strand
gaggaaaguggugauggaa

SEQ ID NO: 2091191 - RNA, 19 nt, Homo sapiens
  misc_RNA (1)...(19): siRNA sense strand
agaugaagccuccucugaa

SEQ ID NO: 2091192 - RNA, 19 nt, Homo sapiens
  misc_RNA (1)...(19): siRNA sense strand
gcucucaacugugacaaaa

SEQ ID NO: 2091193 - RNA, 19 nt, Homo sapiens
  misc_RNA (1)...(19): siRNA sense strand
ccaaugucagcaaauuuga

SEQ ID NO: 2091194 - RNA, 19 nt, Homo sapiens
  misc_RNA (1)...(19): siRNA sense strand
caaaaugaccuucuucagu

SEQ ID NO: 2091195 - RNA, 19 nt, Homo sapiens
  misc_RNA (1)...(19): siRNA sense strand
caaucuggccacccaaaug

SEQ ID NO: 2091196 - RNA, 19 nt, Homo sapiens
  misc_RNA (1)...(19): siRNA sense strand
gacaaucuggccacccaaa

SEQ ID NO: 2091197 - RNA, 19 nt, Homo sapiens
  misc_RNA (1)...(19): siRNA sense strand
gagaaguuuggccagaauu

SEQ ID NO: 2091198 - RNA, 19 nt, Homo sapiens
  misc_RNA (1)...(19): siRNA sense strand
gaagagacggaggaugcaa

SEQ ID NO: 2091199 - RNA, 19 nt, Homo sapiens
  misc_RNA (1)...(19): siRNA sense strand
agaaguuuggccagaauuu

SEQ ID NO: 2091200 - RNA, 19 nt, Homo sapiens
  misc_RNA (1)...(19): siRNA sense strand
uggagcaguccuacaagua

SEQ ID NO: 2091201 - RNA, 19 nt, Homo sapiens
  misc_RNA (1)...(19): siRNA sense strand
ugaggaggacgcagaugaa

SEQ ID NO: 2091202 - RNA, 19 nt, Homo sapiens
  misc_RNA (1)...(19): siRNA sense strand
uaaggacauuguggaagau

SEQ ID NO: 2091203 - RNA, 19 nt, Homo sapiens
  misc_RNA (1)...(19): siRNA sense strand
cauccacgcccuccugguu

SEQ ID NO: 2091204 - RNA, 19 nt, Homo sapiens
  misc_RNA (1)...(19): siRNA sense strand
gaaaguggugauggaagug

SEQ ID NO: 2091205 - RNA, 19 nt, Homo sapiens
  misc_RNA (1)...(19): siRNA sense strand
gaacauggaucugaacuuc

SEQ ID NO: 2091206 - RNA, 19 nt, Homo sapiens
  misc_RNA (1)...(19): siRNA sense strand
gcucuuggcugccuuugaa

SEQ ID NO: 2091207 - RNA, 19 nt, Homo sapiens
  misc_RNA (1)...(19): siRNA sense strand
gagagaacauggaucugaa

SEQ ID NO: 2091208 - RNA, 19 nt, Homo sapiens
  misc_RNA (1)...(19): siRNA sense strand
gacggcagcuucucuguga

SEQ ID NO: 2091209 - RNA, 19 nt, Homo sapiens
  misc_RNA (1)...(19): siRNA sense strand
gaaagcagcuccccugaga

SEQ ID NO: 2091210 - RNA, 19 nt, Homo sapiens
  misc_RNA (1)...(19): siRNA sense strand
uaacagaagagguugauga

SEQ ID NO: 2091211 - RNA, 19 nt, Homo sapiens
  misc_RNA (1)...(19): siRNA sense strand
ggagagaacauggaucuga

SEQ ID NO: 2091212 - RNA, 19 nt, Homo sapiens
  misc_RNA (1)...(19): siRNA sense strand
gcacucuugucccuuuaaa

SEQ ID NO: 2091213 - RNA, 19 nt, Homo sapiens
  misc_RNA (1)...(19): siRNA sense strand
cuacuuugcuucgcacuuu

SEQ ID NO: 2091214 - RNA, 19 nt, Homo sapiens
  misc_RNA (1)...(19): siRNA sense strand
gagcacucuugucccuuua

SEQ ID NO: 2091215 - RNA, 19 nt, Homo sapiens
  misc_RNA (1)...(19): siRNA sense strand
aaacagagcagccauacug

SEQ ID NO: 2091216 - RNA, 19 nt, Homo sapiens
  misc_RNA (1)...(19): siRNA sense strand
gaagaaaucaccuauucag

SEQ ID NO: 2091217 - RNA, 19 nt, Homo sapiens
  misc_RNA (1)...(19): siRNA sense strand
ggagaucuauggcauugag

SEQ ID NO: 2091218 - RNA, 19 nt, Homo sapiens
  misc_RNA (1)...(19): siRNA sense strand
gagaaacagagcagccaua

SEQ ID NO: 2091219 - RNA, 19 nt, Homo sapiens
  misc_RNA (1)...(19): siRNA sense strand
ucaggaaacuacuuugcuu

SEQ ID NO: 2091220 - RNA, 19 nt, Homo sapiens
  misc_RNA (1)...(19): siRNA sense strand
caggagaucuauggcauug

SEQ ID NO: 2091221 - RNA, 19 nt, Homo sapiens
  misc_RNA (1)...(19): siRNA sense strand
gcauugagaacaagaacaa

SEQ ID NO: 2091222 - RNA, 19 nt, Homo sapiens
  misc_RNA (1)...(19): siRNA sense strand
ugagcacucuugucccuuu

SEQ ID NO: 2091223 - RNA, 19 nt, Homo sapiens
  misc_RNA (1)...(19): siRNA sense strand
augaagaaaucaccuauuc

SEQ ID NO: 2091224 - RNA, 19 nt, Homo sapiens
  misc_RNA (1)...(19): siRNA sense strand
gagggcaggucccagaaca

SEQ ID NO: 2091225 - RNA, 19 nt, Homo sapiens
  misc_RNA (1)...(19): siRNA sense strand
ggaaggaugacgagcugaa

SEQ ID NO: 2091226 - RNA, 19 nt, Homo sapiens
  misc_RNA (1)...(19): siRNA sense strand
augacgagcugaacuuuga

SEQ ID NO: 2091227 - RNA, 19 nt, Homo sapiens
  misc_RNA (1)...(19): siRNA sense strand
gaacggcagggcaguauac

SEQ ID NO: 2091228 - RNA, 19 nt, Homo sapiens
  misc_RNA (1)...(19): siRNA sense strand
guacuggaaccuucuggaa

SEQ ID NO: 2091229 - RNA, 19 nt, Homo sapiens
  misc_RNA (1)...(19): siRNA sense strand
gagcagcuuccauugagaa

SEQ ID NO: 2091230 - RNA, 19 nt, Homo sapiens
  misc_RNA (1)...(19): siRNA sense strand
gcaggucacugagaaacag

SEQ ID NO: 2091231 - RNA, 19 nt, Homo sapiens
  misc_RNA (1)...(19): siRNA sense strand
aagauugacuucucggaau

SEQ ID NO: 2091232 - RNA, 19 nt, Homo sapiens
  misc_RNA (1)...(19): siRNA sense strand
aaagggaaacaaacucuga

SEQ ID NO: 2091233 - RNA, 19 nt, Homo sapiens
  misc_RNA (1)...(19): siRNA sense strand
ugaaacagucagcaccuuu

SEQ ID NO: 2091234 - RNA, 19 nt, Homo sapiens
  misc_RNA (1)...(19): siRNA sense strand
cgaagaggaugaggagaag

SEQ ID NO: 2091235 - RNA, 19 nt, Homo sapiens
  misc_RNA (1)...(19): siRNA sense strand
ucuauggcauugagaacaa

SEQ ID NO: 2091236 - RNA, 19 nt, Homo sapiens
  misc_RNA (1)...(19): siRNA sense strand
gacccgagcagcuuccauu

SEQ ID NO: 2091237 - RNA, 19 nt, Homo sapiens
  misc_RNA (1)...(19): siRNA sense strand
ggagaugggcaggguguga

SEQ ID NO: 2091238 - RNA, 19 nt, Homo sapiens
  misc_RNA (1)...(19): siRNA sense strand
gcaggagaucuauggcauu

SEQ ID NO: 2091239 - RNA, 19 nt, Homo sapiens
  misc_RNA (1)...(19): siRNA sense strand
ugacaucuaccugccagua

SEQ ID NO: 2091240 - RNA, 19 nt, Homo sapiens
  misc_RNA (1)...(19): siRNA sense strand
ccgagcagcuuccauugag

SEQ ID NO: 2091241 - RNA, 19 nt, Homo sapiens
  misc_RNA (1)...(19): siRNA sense strand
ggaugacgagcugaacuuu

SEQ ID NO: 2091242 - RNA, 19 nt, Homo sapiens
  misc_RNA (1)...(19): siRNA sense strand
ccugagaguuucauaacag

SEQ ID NO: 2091243 - RNA, 19 nt, Homo sapiens
  misc_RNA (1)...(19): siRNA sense strand
uaaagcagaagcaaauugg

SEQ ID NO: 2091244 - RNA, 19 nt, Homo sapiens
  misc_RNA (1)...(19): siRNA sense strand
cagagcagccauacugaau

SEQ ID NO: 2091245 - RNA, 19 nt, Homo sapiens
  misc_RNA (1)...(19): siRNA sense strand
gcguggccaucaccaucua

SEQ ID NO: 2091246 - RNA, 19 nt, Homo sapiens
  misc_RNA (1)...(19): siRNA sense strand
gaugacgagcugaacuuug

SEQ ID NO: 2091247 - RNA, 19 nt, Homo sapiens
  misc_RNA (1)...(19): siRNA sense strand
ccgagaccguccacuacaa

SEQ ID NO: 2091248 - RNA, 19 nt, Homo sapiens
  misc_RNA (1)...(19): siRNA sense strand
gggcguguuuccaguaguc

SEQ ID NO: 2091249 - RNA, 19 nt, Homo sapiens
  misc_RNA (1)...(19): siRNA sense strand
gaucugggcgucaggaaac

SEQ ID NO: 2091250 - RNA, 19 nt, Homo sapiens
  misc_RNA (1)...(19): siRNA sense strand
gaccguccacuacaagaga

SEQ ID NO: 2091251 - RNA, 19 nt, Homo sapiens
  misc_RNA (1)...(19): siRNA sense strand
acuggaaccuucuggaaca

SEQ ID NO: 2091252 - RNA, 19 nt, Homo sapiens
  misc_RNA (1)...(19): siRNA sense strand
uuucauaacagaagagguu

SEQ ID NO: 2091253 - RNA, 19 nt, Homo sapiens
  misc_RNA (1)...(19): siRNA sense strand
uuaaagcagaagcaaauug

SEQ ID NO: 2091254 - RNA, 19 nt, Homo sapiens
  misc_RNA (1)...(19): siRNA sense strand
agauugacuucucggaaug

SEQ ID NO: 2091255 - RNA, 19 nt, Homo sapiens
  misc_RNA (1)...(19): siRNA sense strand
cgacaacagcaacgagugu

SEQ ID NO: 2091256 - RNA, 19 nt, Homo sapiens
  misc_RNA (1)...(19): siRNA sense strand
gaacaggcucaggacucua

SEQ ID NO: 2091257 - RNA, 19 nt, Homo sapiens
  misc_RNA (1)...(19): siRNA sense strand
gagaguuucauaacagaag

SEQ ID NO: 2091258 - RNA, 19 nt, Homo sapiens
  misc_RNA (1)...(19): siRNA sense strand
acagucagcaccuuucaga

SEQ ID NO: 2091259 - RNA, 19 nt, Homo sapiens
  misc_RNA (1)...(19): siRNA sense strand
gaacaccagcacuaaaaga

SEQ ID NO: 2091260 - RNA, 19 nt, Homo sapiens
  misc_RNA (1)...(19): siRNA sense strand
ggaucugggcgucaggaaa

SEQ ID NO: 2091261 - RNA, 19 nt, Homo sapiens
  misc_RNA (1)...(19): siRNA sense strand
caagggacccgagcagcuu

SEQ ID NO: 2091262 - RNA, 19 nt, Homo sapiens
  misc_RNA (1)...(19): siRNA sense strand
ucccugcccuccuucaaga

SEQ ID NO: 2091263 - RNA, 19 nt, Homo sapiens
  misc_RNA (1)...(19): siRNA sense strand
cgagcagcuuccauugaga

SEQ ID NO: 2091264 - RNA, 19 nt, Homo sapiens
  misc_RNA (1)...(19): siRNA sense strand
ugaagccuuuaaagcagaa

SEQ ID NO: 2091265 - RNA, 19 nt, Homo sapiens
  misc_RNA (1)...(19): siRNA sense strand
acgaagaggaugaggagaa

SEQ ID NO: 2091266 - RNA, 19 nt, Homo sapiens
  misc_RNA (1)...(19): siRNA sense strand
cuaccaggguggcccagau

SEQ ID NO: 2091267 - RNA, 19 nt, Homo sapiens
  misc_RNA (1)...(19): siRNA sense strand
uaggaggcccugugagguu

SEQ ID NO: 2091268 - RNA, 19 nt, Homo sapiens
  misc_RNA (1)...(19): siRNA sense strand
cugagaguuucauaacaga

SEQ ID NO: 2091269 - RNA, 19 nt, Homo sapiens
  misc_RNA (1)...(19): siRNA sense strand
agaacaggcucaggacucu

SEQ ID NO: 2091270 - RNA, 19 nt, Homo sapiens
  misc_RNA (1)...(19): siRNA sense strand
ccaggguggcccagauuga

SEQ ID NO: 2091271 - RNA, 19 nt, Homo sapiens
  misc_RNA (1)...(19): siRNA sense strand
cuuuaaagcagaagcaaau

SEQ ID NO: 2091272 - RNA, 19 nt, Homo sapiens
  misc_RNA (1)...(19): siRNA sense strand
gugaacauccgcaaagacu

SEQ ID NO: 2091273 - RNA, 19 nt, Homo sapiens
  misc_RNA (1)...(19): siRNA sense strand
agaguuucauaacagaaga

SEQ ID NO: 2091274 - RNA, 19 nt, Homo sapiens
  misc_RNA (1)...(19): siRNA sense strand
gcagcuccccugagaguuu

SEQ ID NO: 2091275 - RNA, 19 nt, Homo sapiens
  misc_RNA (1)...(19): siRNA sense strand
gagaccguccacuacaaga

SEQ ID NO: 2091276 - RNA, 19 nt, Homo sapiens
  misc_RNA (1)...(19): siRNA sense strand
caccuggccuccacuuggu

SEQ ID NO: 2091277 - RNA, 19 nt, Homo sapiens
  misc_RNA (1)...(19): siRNA sense strand
caugggaggagagaaauuc

SEQ ID NO: 2091278 - RNA, 19 nt, Homo sapiens
  misc_RNA (1)...(19): siRNA sense strand
aaacagucagcaccuuuca

SEQ ID NO: 2091279 - RNA, 19 nt, Homo sapiens
  misc_RNA (1)...(19): siRNA sense strand
ggagcaugaugagcacucu

SEQ ID NO: 2091280 - RNA, 19 nt, Homo sapiens
  misc_RNA (1)...(19): siRNA sense strand
cgccaccugugccucugua

SEQ ID NO: 2091281 - RNA, 19 nt, Homo sapiens
  misc_RNA (1)...(19): siRNA sense strand
agaacaaccaggagaccaa

SEQ ID NO: 2091282 - RNA, 19 nt, Homo sapiens
  misc_RNA (1)...(19): siRNA sense strand
uggcccagauugaaacagu

SEQ ID NO: 2091283 - RNA, 19 nt, Homo sapiens
  misc_RNA (1)...(19): siRNA sense strand
gaaacagagcagccauacu

SEQ ID NO: 2091284 - RNA, 19 nt, Homo sapiens
  misc_RNA (1)...(19): siRNA sense strand
aagauaggaggcccuguga

SEQ ID NO: 2091285 - RNA, 19 nt, Homo sapiens
  misc_RNA (1)...(19): siRNA sense strand
gcuaccaggccaacaacug

SEQ ID NO: 2091286 - RNA, 19 nt, Homo sapiens
  misc_RNA (1)...(19): siRNA sense strand
gugcagagcuagaaaugaa

SEQ ID NO: 2091287 - RNA, 19 nt, Homo sapiens
  misc_RNA (1)...(19): siRNA sense strand
gagccgauauguggauuua

SEQ ID NO: 2091288 - RNA, 19 nt, Homo sapiens
  misc_RNA (1)...(19): siRNA sense strand
ggaggaacaugcuuucugu

SEQ ID NO: 2091289 - RNA, 19 nt, Homo sapiens
  misc_RNA (1)...(19): siRNA sense strand
gcaaacaagcuaaaaguua

SEQ ID NO: 2091290 - RNA, 19 nt, Homo sapiens
  misc_RNA (1)...(19): siRNA sense strand
gagcaucgccuacuuucuu

SEQ ID NO: 2091291 - RNA, 19 nt, Homo sapiens
  misc_RNA (1)...(19): siRNA sense strand
gagauaaucgugcaguauu

SEQ ID NO: 2091292 - RNA, 19 nt, Homo sapiens
  misc_RNA (1)...(19): siRNA sense strand
gaagaugacguccgccauu

SEQ ID NO: 2091293 - RNA, 19 nt, Homo sapiens
  misc_RNA (1)...(19): siRNA sense strand
aaaguuacaugaagaccaa

SEQ ID NO: 2091294 - RNA, 19 nt, Homo sapiens
  misc_RNA (1)...(19): siRNA sense strand
ccagcaaggugcagagcua

SEQ ID NO: 2091295 - RNA, 19 nt, Homo sapiens
  misc_RNA (1)...(19): siRNA sense strand
gagcugucaucucgaguga

SEQ ID NO: 2091296 - RNA, 19 nt, Homo sapiens
  misc_RNA (1)...(19): siRNA sense strand
agauaaucgugcaguauuu

SEQ ID NO: 2091297 - RNA, 19 nt, Homo sapiens
  misc_RNA (1)...(19): siRNA sense strand
caacagcaguggcgagaac

SEQ ID NO: 2091298 - RNA, 19 nt, Homo sapiens
  misc_RNA (1)...(19): siRNA sense strand
gaagaucguggccuugaug

SEQ ID NO: 2091299 - RNA, 19 nt, Homo sapiens
  misc_RNA (1)...(19): siRNA sense strand
gaagggcagacuccacuga

SEQ ID NO: 2091300 - RNA, 19 nt, Homo sapiens
  misc_RNA (1)...(19): siRNA sense strand
ggaagaagggugucagcau

SEQ ID NO: 2091301 - RNA, 19 nt, Homo sapiens
  misc_RNA (1)...(19): siRNA sense strand
uggccuugauggacacuua

SEQ ID NO: 2091302 - RNA, 19 nt, Homo sapiens
  misc_RNA (1)...(19): siRNA sense strand
agagcgaccugaaggaaau

SEQ ID NO: 2091303 - RNA, 19 nt, Homo sapiens
  misc_RNA (1)...(19): siRNA sense strand
gcaaggugcagagcuagaa

SEQ ID NO: 2091304 - RNA, 19 nt, Homo sapiens
  misc_RNA (1)...(19): siRNA sense strand
gagagcgaccugaaggaaa

SEQ ID NO: 2091305 - RNA, 19 nt, Homo sapiens
  misc_RNA (1)...(19): siRNA sense strand
gcuaaaaguuacaugaaga

SEQ ID NO: 2091306 - RNA, 19 nt, Homo sapiens
  misc_RNA (1)...(19): siRNA sense strand
cgagagcaucgccuacuuu

SEQ ID NO: 2091307 - RNA, 19 nt, Homo sapiens
  misc_RNA (1)...(19): siRNA sense strand
gaccuccgcaucuuucuga

SEQ ID NO: 2091308 - RNA, 19 nt, Homo sapiens
  misc_RNA (1)...(19): siRNA sense strand
gccgauauguggauuuacu

SEQ ID NO: 2091309 - RNA, 19 nt, Homo sapiens
  misc_RNA (1)...(19): siRNA sense strand
caaacaagcuaaaaguuac

SEQ ID NO: 2091310 - RNA, 19 nt, Homo sapiens
  misc_RNA (1)...(19): siRNA sense strand
gagagcaucgccuacuuuc

SEQ ID NO: 2091311 - RNA, 19 nt, Homo sapiens
  misc_RNA (1)...(19): siRNA sense strand
gaucaugccuguaaaagcu

SEQ ID NO: 2091312 - RNA, 19 nt, Homo sapiens
  misc_RNA (1)...(19): siRNA sense strand
agaaguggcgggagaccua

SEQ ID NO: 2091313 - RNA, 19 nt, Homo sapiens
  misc_RNA (1)...(19): siRNA sense strand
gaucgggugucugaaguac

SEQ ID NO: 2091314 - RNA, 19 nt, Homo sapiens
  misc_RNA (1)...(19): siRNA sense strand
uggauuuacucccuugaug

SEQ ID NO: 2091315 - RNA, 19 nt, Homo sapiens
  misc_RNA (1)...(19): siRNA sense strand
aagaugacguccgccauug

SEQ ID NO: 2091316 - RNA, 19 nt, Homo sapiens
  misc_RNA (1)...(19): siRNA sense strand
gauuuacucccuugaugga

SEQ ID NO: 2091317 - RNA, 19 nt, Homo sapiens
  misc_RNA (1)...(19): siRNA sense strand
ucacugagagcgaccugaa

SEQ ID NO: 2091318 - RNA, 19 nt, Homo sapiens
  misc_RNA (1)...(19): siRNA sense strand
acucggaucaugccuguaa

SEQ ID NO: 2091319 - RNA, 19 nt, Homo sapiens
  misc_RNA (1)...(19): siRNA sense strand
cagcagcagucgggaggaa

SEQ ID NO: 2091320 - RNA, 19 nt, Homo sapiens
  misc_RNA (1)...(19): siRNA sense strand
gagcuagaaaugaaagaca

SEQ ID NO: 2091321 - RNA, 19 nt, Homo sapiens
  misc_RNA (1)...(19): siRNA sense strand
gcaguacggacacaugaag

SEQ ID NO: 2091322 - RNA, 19 nt, Homo sapiens
  misc_RNA (1)...(19): siRNA sense strand
cagaggccuugccggaaga

SEQ ID NO: 2091323 - RNA, 19 nt, Homo sapiens
  misc_RNA (1)...(19): siRNA sense strand
aaauuggcaucacgcuguu

SEQ ID NO: 2091324 - RNA, 19 nt, Homo sapiens
  misc_RNA (1)...(19): siRNA sense strand
gggaggaacaugcuuucug

SEQ ID NO: 2091325 - RNA, 19 nt, Homo sapiens
  misc_RNA (1)...(19): siRNA sense strand
caacgugagggagccgaua

SEQ ID NO: 2091326 - RNA, 19 nt, Homo sapiens
  misc_RNA (1)...(19): siRNA sense strand
gcagagcuagaaaugaaag

SEQ ID NO: 2091327 - RNA, 19 nt, Homo sapiens
  misc_RNA (1)...(19): siRNA sense strand
aagcuucuguggagagcaa

SEQ ID NO: 2091328 - RNA, 19 nt, Homo sapiens
  misc_RNA (1)...(19): siRNA sense strand
guggcuaugucaccuucaa

SEQ ID NO: 2091329 - RNA, 19 nt, Homo sapiens
  misc_RNA (1)...(19): siRNA sense strand
ugagauaaucgugcaguau

SEQ ID NO: 2091330 - RNA, 19 nt, Homo sapiens
  misc_RNA (1)...(19): siRNA sense strand
caaggugcagagcuagaaa

SEQ ID NO: 2091331 - RNA, 19 nt, Homo sapiens
  misc_RNA (1)...(19): siRNA sense strand
ugaagaucguggccuugau

SEQ ID NO: 2091332 - RNA, 19 nt, Homo sapiens
  misc_RNA (1)...(19): siRNA sense strand
gggagccgauauguggauu

SEQ ID NO: 2091333 - RNA, 19 nt, Homo sapiens
  misc_RNA (1)...(19): siRNA sense strand
caagcaguacggacacaug

SEQ ID NO: 2091334 - RNA, 19 nt, Homo sapiens
  misc_RNA (1)...(19): siRNA sense strand
gcugcuggccaugagauaa

SEQ ID NO: 2091335 - RNA, 19 nt, Homo sapiens
  misc_RNA (1)...(19): siRNA sense strand
gugcugaacgggaagaagu

SEQ ID NO: 2091336 - RNA, 19 nt, Homo sapiens
  misc_RNA (1)...(19): siRNA sense strand
ugagagcgaccugaaggaa

SEQ ID NO: 2091337 - RNA, 19 nt, Homo sapiens
  misc_RNA (1)...(19): siRNA sense strand
gccaggaucacaggcauug

SEQ ID NO: 2091338 - RNA, 19 nt, Homo sapiens
  misc_RNA (1)...(19): siRNA sense strand
cuacuuucuucuccagcaa

SEQ ID NO: 2091339 - RNA, 19 nt, Homo sapiens
  misc_RNA (1)...(19): siRNA sense strand
acgagagcaucgccuacuu

SEQ ID NO: 2091340 - RNA, 19 nt, Homo sapiens
  misc_RNA (1)...(19): siRNA sense strand
aagcaguacggacacauga

SEQ ID NO: 2091341 - RNA, 19 nt, Homo sapiens
  misc_RNA (1)...(19): siRNA sense strand
cuacauuggccacgacaca

SEQ ID NO: 2091342 - RNA, 19 nt, Homo sapiens
  misc_RNA (1)...(19): siRNA sense strand
ugcaggagcucgccaucca

SEQ ID NO: 2091343 - RNA, 19 nt, Homo sapiens
  misc_RNA (1)...(19): siRNA sense strand
gcagcagucgggaggaaca

SEQ ID NO: 2091344 - RNA, 19 nt, Homo sapiens
  misc_RNA (1)...(19): siRNA sense strand
guacggacacaugaagauc

SEQ ID NO: 2091345 - RNA, 19 nt, Homo sapiens
  misc_RNA (1)...(19): siRNA sense strand
gaagagauccugauuguga

SEQ ID NO: 2091346 - RNA, 19 nt, Homo sapiens
  misc_RNA (1)...(19): siRNA sense strand
ggacguggcuguauaccuu

SEQ ID NO: 2091347 - RNA, 19 nt, Homo sapiens
  misc_RNA (1)...(19): siRNA sense strand
ggcaaaggcuucagcaaga

SEQ ID NO: 2091348 - RNA, 19 nt, Homo sapiens
  misc_RNA (1)...(19): siRNA sense strand
gcaccgaccugcacaagca

SEQ ID NO: 2091349 - RNA, 19 nt, Homo sapiens
  misc_RNA (1)...(19): siRNA sense strand
ggaggaagaggcucgauuc

SEQ ID NO: 2091350 - RNA, 19 nt, Homo sapiens
  misc_RNA (1)...(19): siRNA sense strand
uggaggacguggcuguaua

SEQ ID NO: 2091351 - RNA, 19 nt, Homo sapiens
  misc_RNA (1)...(19): siRNA sense strand
aacaacagcucgcacuuca

SEQ ID NO: 2091352 - RNA, 19 nt, Homo sapiens
  misc_RNA (1)...(19): siRNA sense strand
gcaaaggcuucagcaagac

SEQ ID NO: 2091353 - RNA, 19 nt, Homo sapiens
  misc_RNA (1)...(19): siRNA sense strand
caacaacagcucgcacuuc

SEQ ID NO: 2091354 - RNA, 19 nt, Homo sapiens
  misc_RNA (1)...(19): siRNA sense strand
gcgagcggccuuacaagug

SEQ ID NO: 2091355 - RNA, 19 nt, Homo sapiens
  misc_RNA (1)...(19): siRNA sense strand
ggaggacuucugcuuggaa

SEQ ID NO: 2091356 - RNA, 19 nt, Homo sapiens
  misc_RNA (1)...(19): siRNA sense strand
aagagauccugauugugaa

SEQ ID NO: 2091357 - RNA, 19 nt, Homo sapiens
  misc_RNA (1)...(19): siRNA sense strand
cguugagaauggaguggua

SEQ ID NO: 2091358 - RNA, 19 nt, Homo sapiens
  misc_RNA (1)...(19): siRNA sense strand
uuacaagugccuagucugu

SEQ ID NO: 2091359 - RNA, 19 nt, Homo sapiens
  misc_RNA (1)...(19): siRNA sense strand
ggaggacguggcuguauac

SEQ ID NO: 2091360 - RNA, 19 nt, Homo sapiens
  misc_RNA (1)...(19): siRNA sense strand
ggggacaguucuuaaaaca

SEQ ID NO: 2091361 - RNA, 19 nt, Homo sapiens
  misc_RNA (1)...(19): siRNA sense strand
ccaggugcccgugaacuug

SEQ ID NO: 2091362 - RNA, 19 nt, Homo sapiens
  misc_RNA (1)...(19): siRNA sense strand
ggacgcacacaggugagaa

SEQ ID NO: 2091363 - RNA, 19 nt, Homo sapiens
  misc_RNA (1)...(19): siRNA sense strand
ggaagagauccugauugug

SEQ ID NO: 2091364 - RNA, 19 nt, Homo sapiens
  misc_RNA (1)...(19): siRNA sense strand
cagccucgcccuuccuuuc

SEQ ID NO: 2091365 - RNA, 19 nt, Homo sapiens
  misc_RNA (1)...(19): siRNA sense strand
cggcuacguuacccacaau

SEQ ID NO: 2091366 - RNA, 19 nt, Homo sapiens
  misc_RNA (1)...(19): siRNA sense strand
ucagcaagacgucccacuu

SEQ ID NO: 2091367 - RNA, 19 nt, Homo sapiens
  misc_RNA (1)...(19): siRNA sense strand
gaauguggcaaaggcuuca

SEQ ID NO: 2091368 - RNA, 19 nt, Homo sapiens
  misc_RNA (1)...(19): siRNA sense strand
gcaaacuucucuacuacug

SEQ ID NO: 2091369 - RNA, 19 nt, Homo sapiens
  misc_RNA (1)...(19): siRNA sense strand
gacauucggucuuucuuug

SEQ ID NO: 2091370 - RNA, 19 nt, Homo sapiens
  misc_RNA (1)...(19): siRNA sense strand
gcaagauucccaaagauga

SEQ ID NO: 2091371 - RNA, 19 nt, Homo sapiens
  misc_RNA (1)...(19): siRNA sense strand
agacaaacaucuugaacug

SEQ ID NO: 2091372 - RNA, 19 nt, Homo sapiens
  misc_RNA (1)...(19): siRNA sense strand
ggagugagaccuaccauuc

SEQ ID NO: 2091373 - RNA, 19 nt, Homo sapiens
  misc_RNA (1)...(19): siRNA sense strand
ggagagaguguguguaaug

SEQ ID NO: 2091374 - RNA, 19 nt, Homo sapiens
  misc_RNA (1)...(19): siRNA sense strand
ugaacauggugcaaagaua

SEQ ID NO: 2091375 - RNA, 19 nt, Homo sapiens
  misc_RNA (1)...(19): siRNA sense strand
gaaaaugccuuggagaaga

SEQ ID NO: 2091376 - RNA, 19 nt, Homo sapiens
  misc_RNA (1)...(19): siRNA sense strand
ggacacaccaggcuagaga

SEQ ID NO: 2091377 - RNA, 19 nt, Homo sapiens
  misc_RNA (1)...(19): siRNA sense strand
ggacauucggucuuucuuu

SEQ ID NO: 2091378 - RNA, 19 nt, Homo sapiens
  misc_RNA (1)...(19): siRNA sense strand
gaacauggugcaaagauac

SEQ ID NO: 2091379 - RNA, 19 nt, Homo sapiens
  misc_RNA (1)...(19): siRNA sense strand
gaaggagagucggucauca

SEQ ID NO: 2091380 - RNA, 19 nt, Homo sapiens
  misc_RNA (1)...(19): siRNA sense strand
gagagaguguguguaaugu

SEQ ID NO: 2091381 - RNA, 19 nt, Homo sapiens
  misc_RNA (1)...(19): siRNA sense strand
caggguaccucgcacauuc

SEQ ID NO: 2091382 - RNA, 19 nt, Homo sapiens
  misc_RNA (1)...(19): siRNA sense strand
gaagaucgcagguguugag

SEQ ID NO: 2091383 - RNA, 19 nt, Homo sapiens
  misc_RNA (1)...(19): siRNA sense strand
uggagaagaucgccaugaa

SEQ ID NO: 2091384 - RNA, 19 nt, Homo sapiens
  misc_RNA (1)...(19): siRNA sense strand
gagaggggcucccauguga

SEQ ID NO: 2091385 - RNA, 19 nt, Homo sapiens
  misc_RNA (1)...(19): siRNA sense strand
gcgggcagcugaucgacaa

SEQ ID NO: 2091386 - RNA, 19 nt, Homo sapiens
  misc_RNA (1)...(19): siRNA sense strand
aggaggugauugagcauua

SEQ ID NO: 2091387 - RNA, 19 nt, Homo sapiens
  misc_RNA (1)...(19): siRNA sense strand
ggucaucaccugggacuuu

SEQ ID NO: 2091388 - RNA, 19 nt, Homo sapiens
  misc_RNA (1)...(19): siRNA sense strand
gauugagcauuaccugaau

SEQ ID NO: 2091389 - RNA, 19 nt, Homo sapiens
  misc_RNA (1)...(19): siRNA sense strand
gaugcggacuacauugaga

SEQ ID NO: 2091390 - RNA, 19 nt, Homo sapiens
  misc_RNA (1)...(19): siRNA sense strand
aaggcaagauucccaaaga

SEQ ID NO: 2091391 - RNA, 19 nt, Homo sapiens
  misc_RNA (1)...(19): siRNA sense strand
gugcaaacuucucuacuac

SEQ ID NO: 2091392 - RNA, 19 nt, Homo sapiens
  misc_RNA (1)...(19): siRNA sense strand
agugcaaacuucucuacua

SEQ ID NO: 2091393 - RNA, 19 nt, Homo sapiens
  misc_RNA (1)...(19): siRNA sense strand
ccggaggccuuguggacua

SEQ ID NO: 2091394 - RNA, 19 nt, Homo sapiens
  misc_RNA (1)...(19): siRNA sense strand
ccagguggaucuccuccuu

SEQ ID NO: 2091395 - RNA, 19 nt, Homo sapiens
  misc_RNA (1)...(19): siRNA sense strand
gaggacaauuacccagaga

SEQ ID NO: 2091396 - RNA, 19 nt, Homo sapiens
  misc_RNA (1)...(19): siRNA sense strand
gaaaugacacaugcacaca

SEQ ID NO: 2091397 - RNA, 19 nt, Homo sapiens
  misc_RNA (1)...(19): siRNA sense strand
gcccacagaucccagucuu

SEQ ID NO: 2091398 - RNA, 19 nt, Homo sapiens
  misc_RNA (1)...(19): siRNA sense strand
ccaagucccucuacaugac

SEQ ID NO: 2091399 - RNA, 19 nt, Homo sapiens
  misc_RNA (1)...(19): siRNA sense strand
caaacaucuugaacuggaa

SEQ ID NO: 2091400 - RNA, 19 nt, Homo sapiens
  misc_RNA (1)...(19): siRNA sense strand
ggacaccaaaggcuugaug

SEQ ID NO: 2091401 - RNA, 19 nt, Homo sapiens
  misc_RNA (1)...(19): siRNA sense strand
gguccacccugagaaugaa

SEQ ID NO: 2091402 - RNA, 19 nt, Homo sapiens
  misc_RNA (1)...(19): siRNA sense strand
ggcauuaccaggacauaga

SEQ ID NO: 2091403 - RNA, 19 nt, Homo sapiens
  misc_RNA (1)...(19): siRNA sense strand
ggaaggagagucggucauc

SEQ ID NO: 2091404 - RNA, 19 nt, Homo sapiens
  misc_RNA (1)...(19): siRNA sense strand
gagaacaccaggcggaagu

SEQ ID NO: 2091405 - RNA, 19 nt, Homo sapiens
  misc_RNA (1)...(19): siRNA sense strand
guacaccgccaacgucaag

SEQ ID NO: 2091406 - RNA, 19 nt, Homo sapiens
  misc_RNA (1)...(19): siRNA sense strand
gagugagaccuaccauuca

SEQ ID NO: 2091407 - RNA, 19 nt, Homo sapiens
  misc_RNA (1)...(19): siRNA sense strand
ggcaagauucccaaagaug

SEQ ID NO: 2091408 - RNA, 19 nt, Homo sapiens
  misc_RNA (1)...(19): siRNA sense strand
ugauugagcauuaccugaa

SEQ ID NO: 2091409 - RNA, 19 nt, Homo sapiens
  misc_RNA (1)...(19): siRNA sense strand
guggaucuccuccuucaga

SEQ ID NO: 2091410 - RNA, 19 nt, Homo sapiens
  misc_RNA (1)...(19): siRNA sense strand
gcgugaacauggugcaaag

SEQ ID NO: 2091411 - RNA, 19 nt, Homo sapiens
  misc_RNA (1)...(19): siRNA sense strand
caacgaggaaggacagaag

SEQ ID NO: 2091412 - RNA, 19 nt, Homo sapiens
  misc_RNA (1)...(19): siRNA sense strand
caaaggcaagauucccaaa

SEQ ID NO: 2091413 - RNA, 19 nt, Homo sapiens
  misc_RNA (1)...(19): siRNA sense strand
ccugcgggcucaugacuuc

SEQ ID NO: 2091414 - RNA, 19 nt, Homo sapiens
  misc_RNA (1)...(19): siRNA sense strand
ggagaagaucgccaugaag

SEQ ID NO: 2091415 - RNA, 19 nt, Homo sapiens
  misc_RNA (1)...(19): siRNA sense strand
cccgugcucuggacacuga

SEQ ID NO: 2091416 - RNA, 19 nt, Homo sapiens
  misc_RNA (1)...(19): siRNA sense strand
caucgaagcgcacaaugag

SEQ ID NO: 2091417 - RNA, 19 nt, Homo sapiens
  misc_RNA (1)...(19): siRNA sense strand
gcagguggaaugucacucu

SEQ ID NO: 2091418 - RNA, 19 nt, Homo sapiens
  misc_RNA (1)...(19): siRNA sense strand
agugaucccugacuuccuu

SEQ ID NO: 2091419 - RNA, 19 nt, Homo sapiens
  misc_RNA (1)...(19): siRNA sense strand
gcuggaugcggacuacauu

SEQ ID NO: 2091420 - RNA, 19 nt, Homo sapiens
  misc_RNA (1)...(19): siRNA sense strand
ggaggugauugagcauuac

SEQ ID NO: 2091421 - RNA, 19 nt, Homo sapiens
  misc_RNA (1)...(19): siRNA sense strand
gcagacaaacaucuugaac

SEQ ID NO: 2091422 - RNA, 19 nt, Homo sapiens
  misc_RNA (1)...(19): siRNA sense strand
gggagagaguguguguaau

SEQ ID NO: 2091423 - RNA, 19 nt, Homo sapiens
  misc_RNA (1)...(19): siRNA sense strand
ggucuuucuuuggcuuuga

SEQ ID NO: 2091424 - RNA, 19 nt, Homo sapiens
  misc_RNA (1)...(19): siRNA sense strand
gagaaugaagacuggacuu

SEQ ID NO: 2091425 - RNA, 19 nt, Homo sapiens
  misc_RNA (1)...(19): siRNA sense strand
ugaacgagcacugcagcua

SEQ ID NO: 2091426 - RNA, 19 nt, Homo sapiens
  misc_RNA (1)...(19): siRNA sense strand
cggaagaucgcagguguug

SEQ ID NO: 2091427 - RNA, 19 nt, Homo sapiens
  misc_RNA (1)...(19): siRNA sense strand
gaucagccccuucaucaau

SEQ ID NO: 2091428 - RNA, 19 nt, Homo sapiens
  misc_RNA (1)...(19): siRNA sense strand
gcggaugauugaggugguu

SEQ ID NO: 2091429 - RNA, 19 nt, Homo sapiens
  misc_RNA (1)...(19): siRNA sense strand
cacuggacauucggucuuu

SEQ ID NO: 2091430 - RNA, 19 nt, Homo sapiens
  misc_RNA (1)...(19): siRNA sense strand
gugcagacaaacaucuuga

SEQ ID NO: 2091431 - RNA, 19 nt, Homo sapiens
  misc_RNA (1)...(19): siRNA sense strand
gucaucaccugggacuuug

SEQ ID NO: 2091432 - RNA, 19 nt, Homo sapiens
  misc_RNA (1)...(19): siRNA sense strand
ggggagagaguguguguaa

SEQ ID NO: 2091433 - RNA, 19 nt, Homo sapiens
  misc_RNA (1)...(19): siRNA sense strand
gaaguuccucaucuacagu

SEQ ID NO: 2091434 - RNA, 19 nt, Homo sapiens
  misc_RNA (1)...(19): siRNA sense strand
ggcauguucucuccgucaa

SEQ ID NO: 2091435 - RNA, 19 nt, Homo sapiens
  misc_RNA (1)...(19): siRNA sense strand
agaucgccaugaagcagua

SEQ ID NO: 2091436 - RNA, 19 nt, Homo sapiens
  misc_RNA (1)...(19): siRNA sense strand
caagcuggaugcggacuac

SEQ ID NO: 2091437 - RNA, 19 nt, Homo sapiens
  misc_RNA (1)...(19): siRNA sense strand
gcauuaccaggacauagau

SEQ ID NO: 2091438 - RNA, 19 nt, Homo sapiens
  misc_RNA (1)...(19): siRNA sense strand
ggcaguugcugucgaucuc

SEQ ID NO: 2091439 - RNA, 19 nt, Homo sapiens
  misc_RNA (1)...(19): siRNA sense strand
aggcaagauucccaaagau

SEQ ID NO: 2091440 - RNA, 19 nt, Homo sapiens
  misc_RNA (1)...(19): siRNA sense strand
ggcaguggagugagaccua

SEQ ID NO: 2091441 - RNA, 19 nt, Homo sapiens
  misc_RNA (1)...(19): siRNA sense strand
ugaggugguugaggacaau

SEQ ID NO: 2091442 - RNA, 19 nt, Homo sapiens
  misc_RNA (1)...(19): siRNA sense strand
gacaccaaaggcuugauga

SEQ ID NO: 2091443 - RNA, 19 nt, Homo sapiens
  misc_RNA (1)...(19): siRNA sense strand
gugaacauggugcaaagau

SEQ ID NO: 2091444 - RNA, 19 nt, Homo sapiens
  misc_RNA (1)...(19): siRNA sense strand
gcccugcugcggaugauug

SEQ ID NO: 2091445 - RNA, 19 nt, Homo sapiens
  misc_RNA (1)...(19): siRNA sense strand
ccaaccgcgugguggugaa

SEQ ID NO: 2091446 - RNA, 19 nt, Homo sapiens
  misc_RNA (1)...(19): siRNA sense strand
cccaagucccucuacauga

SEQ ID NO: 2091447 - RNA, 19 nt, Homo sapiens
  misc_RNA (1)...(19): siRNA sense strand
aaugaagacuggacuugcu

SEQ ID NO: 2091448 - RNA, 19 nt, Homo sapiens
  misc_RNA (1)...(19): siRNA sense strand
agaaugaagacuggacuug

SEQ ID NO: 2091449 - RNA, 19 nt, Homo sapiens
  misc_RNA (1)...(19): siRNA sense strand
caagauucccaaagaugag

SEQ ID NO: 2091450 - RNA, 19 nt, Homo sapiens
  misc_RNA (1)...(19): siRNA sense strand
gcuccagcgugaacauggu

SEQ ID NO: 2091451 - RNA, 19 nt, Homo sapiens
  misc_RNA (1)...(19): siRNA sense strand
caccaaaggcuugaugaag

SEQ ID NO: 2091452 - RNA, 19 nt, Homo sapiens
  misc_RNA (1)...(19): siRNA sense strand
gaacaacagucccaacuuc

SEQ ID NO: 2091453 - RNA, 19 nt, Homo sapiens
  misc_RNA (1)...(19): siRNA sense strand
gaccaucgcuccaaccaaa

SEQ ID NO: 2091454 - RNA, 19 nt, Homo sapiens
  misc_RNA (1)...(19): siRNA sense strand
cagaagaguuugcacauca

SEQ ID NO: 2091455 - RNA, 19 nt, Homo sapiens
  misc_RNA (1)...(19): siRNA sense strand
gaaaugcuccgugccauga

SEQ ID NO: 2091456 - RNA, 19 nt, Homo sapiens
  misc_RNA (1)...(19): siRNA sense strand
gaacuggaccacuuacgaa

SEQ ID NO: 2091457 - RNA, 19 nt, Homo sapiens
  misc_RNA (1)...(19): siRNA sense strand
cuacagcccugaugagaug

SEQ ID NO: 2091458 - RNA, 19 nt, Homo sapiens
  misc_RNA (1)...(19): siRNA sense strand
gagcagagaagcugaagga

SEQ ID NO: 2091459 - RNA, 19 nt, Homo sapiens
  misc_RNA (1)...(19): siRNA sense strand
agagagacuuguugaaaug

SEQ ID NO: 2091460 - RNA, 19 nt, Homo sapiens
  misc_RNA (1)...(19): siRNA sense strand
gaggaaagacaaagagaga

SEQ ID NO: 2091461 - RNA, 19 nt, Homo sapiens
  misc_RNA (1)...(19): siRNA sense strand
gagcaugcuucacuauauc

SEQ ID NO: 2091462 - RNA, 19 nt, Homo sapiens
  misc_RNA (1)...(19): siRNA sense strand
ugagcaugcuucacuauau

SEQ ID NO: 2091463 - RNA, 19 nt, Homo sapiens
  misc_RNA (1)...(19): siRNA sense strand
ggaggaugaugaagaugga

SEQ ID NO: 2091464 - RNA, 19 nt, Homo sapiens
  misc_RNA (1)...(19): siRNA sense strand
ggagaaaggguacuacuac

SEQ ID NO: 2091465 - RNA, 19 nt, Homo sapiens
  misc_RNA (1)...(19): siRNA sense strand
ggaagaggaggaugaugaa

SEQ ID NO: 2091466 - RNA, 19 nt, Homo sapiens
  misc_RNA (1)...(19): siRNA sense strand
aaagagagacuuguugaaa

SEQ ID NO: 2091467 - RNA, 19 nt, Homo sapiens
  misc_RNA (1)...(19): siRNA sense strand
ugaugaagauggagaagau

SEQ ID NO: 2091468 - RNA, 19 nt, Homo sapiens
  misc_RNA (1)...(19): siRNA sense strand
gcagaagaguuugcacauc

SEQ ID NO: 2091469 - RNA, 19 nt, Homo sapiens
  misc_RNA (1)...(19): siRNA sense strand
gaagauggucucagaaagg

SEQ ID NO: 2091470 - RNA, 19 nt, Homo sapiens
  misc_RNA (1)...(19): siRNA sense strand
aagagagacuuguugaaau

SEQ ID NO: 2091471 - RNA, 19 nt, Homo sapiens
  misc_RNA (1)...(19): siRNA sense strand
uggcugagcucgagaaguc

SEQ ID NO: 2091472 - RNA, 19 nt, Homo sapiens
  misc_RNA (1)...(19): siRNA sense strand
gcagcaagccucucuggau

SEQ ID NO: 2091473 - RNA, 19 nt, Homo sapiens
  misc_RNA (1)...(19): siRNA sense strand
cagaagauggucucagaaa

SEQ ID NO: 2091474 - RNA, 19 nt, Homo sapiens
  misc_RNA (1)...(19): siRNA sense strand
gcucaguugugcaggauuc

SEQ ID NO: 2091475 - RNA, 19 nt, Homo sapiens
  misc_RNA (1)...(19): siRNA sense strand
aacagaagauggucucaga

SEQ ID NO: 2091476 - RNA, 19 nt, Homo sapiens
  misc_RNA (1)...(19): siRNA sense strand
gagcguggcugugcugucu

SEQ ID NO: 2091477 - RNA, 19 nt, Homo sapiens
  misc_RNA (1)...(19): siRNA sense strand
gcagauggacgaggagcua

SEQ ID NO: 2091478 - RNA, 19 nt, Homo sapiens
  misc_RNA (1)...(19): siRNA sense strand
gcaagccucucuggaugug

SEQ ID NO: 2091479 - RNA, 19 nt, Homo sapiens
  misc_RNA (1)...(19): siRNA sense strand
ccaaugaggaggagaagug

SEQ ID NO: 2091480 - RNA, 19 nt, Homo sapiens
  misc_RNA (1)...(19): siRNA sense strand
aggcagaacuggaccacuu

SEQ ID NO: 2091481 - RNA, 19 nt, Homo sapiens
  misc_RNA (1)...(19): siRNA sense strand
gaagaggaaagacaaagag

SEQ ID NO: 2091482 - RNA, 19 nt, Homo sapiens
  misc_RNA (1)...(19): siRNA sense strand
cggagaggcugcagaugga

SEQ ID NO: 2091483 - RNA, 19 nt, Homo sapiens
  misc_RNA (1)...(19): siRNA sense strand
gaacacauagaagagcaaa

SEQ ID NO: 2091484 - RNA, 19 nt, Homo sapiens
  misc_RNA (1)...(19): siRNA sense strand
agaggaggaugaugaagau

SEQ ID NO: 2091485 - RNA, 19 nt, Homo sapiens
  misc_RNA (1)...(19): siRNA sense strand
caacagucccaacuucgaa

SEQ ID NO: 2091486 - RNA, 19 nt, Homo sapiens
  misc_RNA (1)...(19): siRNA sense strand
caaagagagacuuguugaa

SEQ ID NO: 2091487 - RNA, 19 nt, Homo sapiens
  misc_RNA (1)...(19): siRNA sense strand
ggagaagccgguugguguu

SEQ ID NO: 2091488 - RNA, 19 nt, Homo sapiens
  misc_RNA (1)...(19): siRNA sense strand
agaaggagcgcgagcaaga

SEQ ID NO: 2091489 - RNA, 19 nt, Homo sapiens
  misc_RNA (1)...(19): siRNA sense strand
gagaagaugaggaggaagu

SEQ ID NO: 2091490 - RNA, 19 nt, Homo sapiens
  misc_RNA (1)...(19): siRNA sense strand
gcaccaaugaggaggagaa

SEQ ID NO: 2091491 - RNA, 19 nt, Homo sapiens
  misc_RNA (1)...(19): siRNA sense strand
agaaggcccugcagaagca

SEQ ID NO: 2091492 - RNA, 19 nt, Homo sapiens
  misc_RNA (1)...(19): siRNA sense strand
acacguccguccacuacaa

SEQ ID NO: 2091493 - RNA, 19 nt, Homo sapiens
  misc_RNA (1)...(19): siRNA sense strand
agaagaaguuccugaccau

SEQ ID NO: 2091494 - RNA, 19 nt, Homo sapiens
  misc_RNA (1)...(19): siRNA sense strand
cccaggagcugucgagagu

SEQ ID NO: 2091495 - RNA, 19 nt, Homo sapiens
  misc_RNA (1)...(19): siRNA sense strand
gagcagcaccuggauaugg

SEQ ID NO: 2091496 - RNA, 19 nt, Homo sapiens
  misc_RNA (1)...(19): siRNA sense strand
ggcagaacuggaccacuua

SEQ ID NO: 2091497 - RNA, 19 nt, Homo sapiens
  misc_RNA (1)...(19): siRNA sense strand
agaaguuccugaccaucuu

SEQ ID NO: 2091498 - RNA, 19 nt, Homo sapiens
  misc_RNA (1)...(19): siRNA sense strand
uggagaagaugaggaggaa

SEQ ID NO: 2091499 - RNA, 19 nt, Homo sapiens
  misc_RNA (1)...(19): siRNA sense strand
gaaagacaaagagagacuu

SEQ ID NO: 2091500 - RNA, 19 nt, Homo sapiens
  misc_RNA (1)...(19): siRNA sense strand
gaccgaggacuaccugaga

SEQ ID NO: 2091501 - RNA, 19 nt, Homo sapiens
  misc_RNA (1)...(19): siRNA sense strand
cgaccucgaugacucuuac

SEQ ID NO: 2091502 - RNA, 19 nt, Homo sapiens
  misc_RNA (1)...(19): siRNA sense strand
gcaccaaugggaagagcaa

SEQ ID NO: 2091503 - RNA, 19 nt, Homo sapiens
  misc_RNA (1)...(19): siRNA sense strand
ggaaagacaaagagagacu

SEQ ID NO: 2091504 - RNA, 19 nt, Homo sapiens
  misc_RNA (1)...(19): siRNA sense strand
gcgcugagaagaggaaaga

SEQ ID NO: 2091505 - RNA, 19 nt, Homo sapiens
  misc_RNA (1)...(19): siRNA sense strand
gcgccauccuccagcuuug

SEQ ID NO: 2091506 - RNA, 19 nt, Homo sapiens
  misc_RNA (1)...(19): siRNA sense strand
agaagauggucucagaaag

SEQ ID NO: 2091507 - RNA, 19 nt, Homo sapiens
  misc_RNA (1)...(19): siRNA sense strand
gacccugccuacaucuaug

SEQ ID NO: 2091508 - RNA, 19 nt, Homo sapiens
  misc_RNA (1)...(19): siRNA sense strand
ggucgggaacgccucauug

SEQ ID NO: 2091509 - RNA, 19 nt, Homo sapiens
  misc_RNA (1)...(19): siRNA sense strand
aggaagaggaggaugauga

SEQ ID NO: 2091510 - RNA, 19 nt, Homo sapiens
  misc_RNA (1)...(19): siRNA sense strand
cugaugagaugaacaacag

SEQ ID NO: 2091511 - RNA, 19 nt, Homo sapiens
  misc_RNA (1)...(19): siRNA sense strand
agucucagguguccgaguu

SEQ ID NO: 2091512 - RNA, 19 nt, Homo sapiens
  misc_RNA (1)...(19): siRNA sense strand
ggggcuaccugaagggaua

SEQ ID NO: 2091513 - RNA, 19 nt, Homo sapiens
  misc_RNA (1)...(19): siRNA sense strand
guacuacuacgaccucgau

SEQ ID NO: 2091514 - RNA, 19 nt, Homo sapiens
  misc_RNA (1)...(19): siRNA sense strand
gggccaccaccucugauuu

SEQ ID NO: 2091515 - RNA, 19 nt, Homo sapiens
  misc_RNA (1)...(19): siRNA sense strand
ccacccggcugcauuugag

SEQ ID NO: 2091516 - RNA, 19 nt, Homo sapiens
  misc_RNA (1)...(19): siRNA sense strand
ggaguugaggagccagaaa

SEQ ID NO: 2091517 - RNA, 19 nt, Homo sapiens
  misc_RNA (1)...(19): siRNA sense strand
gaagcagaaggcacuguca

SEQ ID NO: 2091518 - RNA, 19 nt, Homo sapiens
  misc_RNA (1)...(19): siRNA sense strand
gagaagaggaaagacaaag

SEQ ID NO: 2091519 - RNA, 19 nt, Homo sapiens
  misc_RNA (1)...(19): siRNA sense strand
gagcggcagguguuacaga

SEQ ID NO: 2091520 - RNA, 19 nt, Homo sapiens
  misc_RNA (1)...(19): siRNA sense strand
gagaagccgguugguguug

SEQ ID NO: 2091521 - RNA, 19 nt, Homo sapiens
  misc_RNA (1)...(19): siRNA sense strand
gcaguggccgacuccuuga

SEQ ID NO: 2091522 - RNA, 19 nt, Homo sapiens
  misc_RNA (1)...(19): siRNA sense strand
aggaauugguggcccagaa

SEQ ID NO: 2091523 - RNA, 19 nt, Homo sapiens
  misc_RNA (1)...(19): siRNA sense strand
aagaggaggaugaugaaga

SEQ ID NO: 2091524 - RNA, 19 nt, Homo sapiens
  misc_RNA (1)...(19): siRNA sense strand
ggaauugguggcccagaag

SEQ ID NO: 2091525 - RNA, 19 nt, Homo sapiens
  misc_RNA (1)...(19): siRNA sense strand
gcugagaagaggaaagaca

SEQ ID NO: 2091526 - RNA, 19 nt, Homo sapiens
  misc_RNA (1)...(19): siRNA sense strand
caagggaucgaggccguuu

SEQ ID NO: 2091527 - RNA, 19 nt, Homo sapiens
  misc_RNA (1)...(19): siRNA sense strand
ggaggaagaggaggaugau

SEQ ID NO: 2091528 - RNA, 19 nt, Homo sapiens
  misc_RNA (1)...(19): siRNA sense strand
aaagacaaagagagacuug

SEQ ID NO: 2091529 - RNA, 19 nt, Homo sapiens
  misc_RNA (1)...(19): siRNA sense strand
agaagaggaaagacaaaga

SEQ ID NO: 2091530 - RNA, 19 nt, Homo sapiens
  misc_RNA (1)...(19): siRNA sense strand
gaaggaggaccggcagucu

SEQ ID NO: 2091531 - RNA, 19 nt, Homo sapiens
  misc_RNA (1)...(19): siRNA sense strand
ggaugaugaagauggagaa

SEQ ID NO: 2091532 - RNA, 19 nt, Homo sapiens
  misc_RNA (1)...(19): siRNA sense strand
guaccgugaccgaggacua

SEQ ID NO: 2091533 - RNA, 19 nt, Homo sapiens
  misc_RNA (1)...(19): siRNA sense strand
ggccaccaccucugauuuc

SEQ ID NO: 2091534 - RNA, 19 nt, Homo sapiens
  misc_RNA (1)...(19): siRNA sense strand
ugauccagcgcaccaauga

SEQ ID NO: 2091535 - RNA, 19 nt, Homo sapiens
  misc_RNA (1)...(19): siRNA sense strand
ugaggagccagaaacagaa

SEQ ID NO: 2091536 - RNA, 19 nt, Homo sapiens
  misc_RNA (1)...(19): siRNA sense strand
ugcgcaagcucgccaaaca

SEQ ID NO: 2091537 - RNA, 19 nt, Homo sapiens
  misc_RNA (1)...(19): siRNA sense strand
ugagaagaggaaagacaaa

SEQ ID NO: 2091538 - RNA, 19 nt, Homo sapiens
  misc_RNA (1)...(19): siRNA sense strand
gcccugaugagaugaacaa

SEQ ID NO: 2091539 - RNA, 19 nt, Homo sapiens
  misc_RNA (1)...(19): siRNA sense strand
cgacccugccuacaucuau

SEQ ID NO: 2091540 - RNA, 19 nt, Homo sapiens
  misc_RNA (1)...(19): siRNA sense strand
ccacccaacagcagaagga

SEQ ID NO: 2091541 - RNA, 19 nt, Homo sapiens
  misc_RNA (1)...(19): siRNA sense strand
ccagaaggcccugcagaag

SEQ ID NO: 2091542 - RNA, 19 nt, Homo sapiens
  misc_RNA (1)...(19): siRNA sense strand
gaagaguuugcacaucagu

SEQ ID NO: 2091543 - RNA, 19 nt, Homo sapiens
  misc_RNA (1)...(19): siRNA sense strand
ugaacaacagucccaacuu

SEQ ID NO: 2091544 - RNA, 19 nt, Homo sapiens
  misc_RNA (1)...(19): siRNA sense strand
uggagcagcaccuggauau

SEQ ID NO: 2091545 - RNA, 19 nt, Homo sapiens
  misc_RNA (1)...(19): siRNA sense strand
cgagaaggagcgcgagcaa

SEQ ID NO: 2091546 - RNA, 19 nt, Homo sapiens
  misc_RNA (1)...(19): siRNA sense strand
ugacacguccguccacuac

SEQ ID NO: 2091547 - RNA, 19 nt, Homo sapiens
  misc_RNA (1)...(19): siRNA sense strand
agucccaacuucgaagaaa

SEQ ID NO: 2091548 - RNA, 19 nt, Homo sapiens
  misc_RNA (1)...(19): siRNA sense strand
gcacucggagcgcaugucu

SEQ ID NO: 2091549 - RNA, 19 nt, Homo sapiens
  misc_RNA (1)...(19): siRNA sense strand
uugaggagccagaaacaga

SEQ ID NO: 2091550 - RNA, 19 nt, Homo sapiens
  misc_RNA (1)...(19): siRNA sense strand
uuaccaggaacacauagaa

SEQ ID NO: 2091551 - RNA, 19 nt, Homo sapiens
  misc_RNA (1)...(19): siRNA sense strand
ggauggacgacuccuacug

SEQ ID NO: 2091552 - RNA, 19 nt, Homo sapiens
  misc_RNA (1)...(19): siRNA sense strand
gaugagaccuucuauaaua

SEQ ID NO: 2091553 - RNA, 19 nt, Homo sapiens
  misc_RNA (1)...(19): siRNA sense strand
gaaagaagcuucaacaaca

SEQ ID NO: 2091554 - RNA, 19 nt, Homo sapiens
  misc_RNA (1)...(19): siRNA sense strand
gcacaacucugcaaauaaa

SEQ ID NO: 2091555 - RNA, 19 nt, Homo sapiens
  misc_RNA (1)...(19): siRNA sense strand
gcaagaagaagccauauua

SEQ ID NO: 2091556 - RNA, 19 nt, Homo sapiens
  misc_RNA (1)...(19): siRNA sense strand
gcacuggaauguagcaaua

SEQ ID NO: 2091557 - RNA, 19 nt, Homo sapiens
  misc_RNA (1)...(19): siRNA sense strand
ggacuuagcuagcgguauu

SEQ ID NO: 2091558 - RNA, 19 nt, Homo sapiens
  misc_RNA (1)...(19): siRNA sense strand
gaugguaguuuaagugaua

SEQ ID NO: 2091559 - RNA, 19 nt, Homo sapiens
  misc_RNA (1)...(19): siRNA sense strand
ggacuuaucaacaguaaua

SEQ ID NO: 2091560 - RNA, 19 nt, Homo sapiens
  misc_RNA (1)...(19): siRNA sense strand
gcaaaccgguggauauuga

SEQ ID NO: 2091561 - RNA, 19 nt, Homo sapiens
  misc_RNA (1)...(19): siRNA sense strand
ccaagcaccuccaauagua

SEQ ID NO: 2091562 - RNA, 19 nt, Homo sapiens
  misc_RNA (1)...(19): siRNA sense strand
gaaccagaguuuguuauuu

SEQ ID NO: 2091563 - RNA, 19 nt, Homo sapiens
  misc_RNA (1)...(19): siRNA sense strand
gaaagucacuaagaagaaa

SEQ ID NO: 2091564 - RNA, 19 nt, Homo sapiens
  misc_RNA (1)...(19): siRNA sense strand
gaaagaagcaugccauuca

SEQ ID NO: 2091565 - RNA, 19 nt, Homo sapiens
  misc_RNA (1)...(19): siRNA sense strand
gaauggaacuuaucaacug

SEQ ID NO: 2091566 - RNA, 19 nt, Homo sapiens
  misc_RNA (1)...(19): siRNA sense strand
agaagagacuggagacuua

SEQ ID NO: 2091567 - RNA, 19 nt, Homo sapiens
  misc_RNA (1)...(19): siRNA sense strand
gcaaugcuuuagaguauaa

SEQ ID NO: 2091568 - RNA, 19 nt, Homo sapiens
  misc_RNA (1)...(19): siRNA sense strand
cgaagaaagucacuaagaa

SEQ ID NO: 2091569 - RNA, 19 nt, Homo sapiens
  misc_RNA (1)...(19): siRNA sense strand
aaacagacuugacucuaua

SEQ ID NO: 2091570 - RNA, 19 nt, Homo sapiens
  misc_RNA (1)...(19): siRNA sense strand
gaaagaaggaaaucaaaga

SEQ ID NO: 2091571 - RNA, 19 nt, Homo sapiens
  misc_RNA (1)...(19): siRNA sense strand
gaaauuagccagagugaca

SEQ ID NO: 2091572 - RNA, 19 nt, Homo sapiens
  misc_RNA (1)...(19): siRNA sense strand
ggauggagauauagaaguu

SEQ ID NO: 2091573 - RNA, 19 nt, Homo sapiens
  misc_RNA (1)...(19): siRNA sense strand
gagcagaccuccaggaaag

SEQ ID NO: 2091574 - RNA, 19 nt, Homo sapiens
  misc_RNA (1)...(19): siRNA sense strand
gaagaagacaccaaauuug

SEQ ID NO: 2091575 - RNA, 19 nt, Homo sapiens
  misc_RNA (1)...(19): siRNA sense strand
caaacagacuugacucuau

SEQ ID NO: 2091576 - RNA, 19 nt, Homo sapiens
  misc_RNA (1)...(19): siRNA sense strand
ggacagauacagaauuuga

SEQ ID NO: 2091577 - RNA, 19 nt, Homo sapiens
  misc_RNA (1)...(19): siRNA sense strand
ggagauaaauguaguucug

SEQ ID NO: 2091578 - RNA, 19 nt, Homo sapiens
  misc_RNA (1)...(19): siRNA sense strand
ccacagcucuauaguauca

SEQ ID NO: 2091579 - RNA, 19 nt, Homo sapiens
  misc_RNA (1)...(19): siRNA sense strand
ugaaguugaugguaguuua

SEQ ID NO: 2091580 - RNA, 19 nt, Homo sapiens
  misc_RNA (1)...(19): siRNA sense strand
ggaccuuucuuguauaaau

SEQ ID NO: 2091581 - RNA, 19 nt, Homo sapiens
  misc_RNA (1)...(19): siRNA sense strand
gacaggaaauuauuagaga

SEQ ID NO: 2091582 - RNA, 19 nt, Homo sapiens
  misc_RNA (1)...(19): siRNA sense strand
gcucugauguggagguuaa

SEQ ID NO: 2091583 - RNA, 19 nt, Homo sapiens
  misc_RNA (1)...(19): siRNA sense strand
ccaagaggcuggccacaga

SEQ ID NO: 2091584 - RNA, 19 nt, Homo sapiens
  misc_RNA (1)...(19): siRNA sense strand
ugaagaagacaccaaauuu

SEQ ID NO: 2091585 - RNA, 19 nt, Homo sapiens
  misc_RNA (1)...(19): siRNA sense strand
ccagaaacuucgacugaaa

SEQ ID NO: 2091586 - RNA, 19 nt, Homo sapiens
  misc_RNA (1)...(19): siRNA sense strand
gaauggagaguuugaggua

SEQ ID NO: 2091587 - RNA, 19 nt, Homo sapiens
  misc_RNA (1)...(19): siRNA sense strand
guggacagauacagaauuu

SEQ ID NO: 2091588 - RNA, 19 nt, Homo sapiens
  misc_RNA (1)...(19): siRNA sense strand
gacagaaacuagagucgaa

SEQ ID NO: 2091589 - RNA, 19 nt, Homo sapiens
  misc_RNA (1)...(19): siRNA sense strand
uaucauugcagcugaauua

SEQ ID NO: 2091590 - RNA, 19 nt, Homo sapiens
  misc_RNA (1)...(19): siRNA sense strand
ugaaauagauggauuagcu

SEQ ID NO: 2091591 - RNA, 19 nt, Homo sapiens
  misc_RNA (1)...(19): siRNA sense strand
ugaaguaguuucuuucugu

SEQ ID NO: 2091592 - RNA, 19 nt, Homo sapiens
  misc_RNA (1)...(19): siRNA sense strand
ucauagaucuccagcaaga

SEQ ID NO: 2091593 - RNA, 19 nt, Homo sapiens
  misc_RNA (1)...(19): siRNA sense strand
aaaagaggcuuaucaguaa

SEQ ID NO: 2091594 - RNA, 19 nt, Homo sapiens
  misc_RNA (1)...(19): siRNA sense strand
gauaaggacccaggagaua

SEQ ID NO: 2091595 - RNA, 19 nt, Homo sapiens
  misc_RNA (1)...(19): siRNA sense strand
agaggaggauggagauaua

SEQ ID NO: 2091596 - RNA, 19 nt, Homo sapiens
  misc_RNA (1)...(19): siRNA sense strand
gaauguagcaauaaugaga

SEQ ID NO: 2091597 - RNA, 19 nt, Homo sapiens
  misc_RNA (1)...(19): siRNA sense strand
gauauugaccucaucugua

SEQ ID NO: 2091598 - RNA, 19 nt, Homo sapiens
  misc_RNA (1)...(19): siRNA sense strand
auaauuaccugacugcaaa

SEQ ID NO: 2091599 - RNA, 19 nt, Homo sapiens
  misc_RNA (1)...(19): siRNA sense strand
ggauugagccaucauauuc

SEQ ID NO: 2091600 - RNA, 19 nt, Homo sapiens
  misc_RNA (1)...(19): siRNA sense strand
gaccucaucuguagcaaug

SEQ ID NO: 2091601 - RNA, 19 nt, Homo sapiens
  misc_RNA (1)...(19): siRNA sense strand
gcaauaaugagaaguuaga

SEQ ID NO: 2091602 - RNA, 19 nt, Homo sapiens
  misc_RNA (1)...(19): siRNA sense strand
gaaacuagaggcacuggaa

SEQ ID NO: 2091603 - RNA, 19 nt, Homo sapiens
  misc_RNA (1)...(19): siRNA sense strand
ccaggaaaguugaaguuga

SEQ ID NO: 2091604 - RNA, 19 nt, Homo sapiens
  misc_RNA (1)...(19): siRNA sense strand
ggaggacaggaaauuauua

SEQ ID NO: 2091605 - RNA, 19 nt, Homo sapiens
  misc_RNA (1)...(19): siRNA sense strand
uggcacaacucugcaaaua

SEQ ID NO: 2091606 - RNA, 19 nt, Homo sapiens
  misc_RNA (1)...(19): siRNA sense strand
cuaaauugcuuccuuugga

SEQ ID NO: 2091607 - RNA, 19 nt, Homo sapiens
  misc_RNA (1)...(19): siRNA sense strand
ggucaggugugaauacuuc

SEQ ID NO: 2091608 - RNA, 19 nt, Homo sapiens
  misc_RNA (1)...(19): siRNA sense strand
caacagcagcaguuccuua

SEQ ID NO: 2091609 - RNA, 19 nt, Homo sapiens
  misc_RNA (1)...(19): siRNA sense strand
gaagccauauuaggagaaa

SEQ ID NO: 2091610 - RNA, 19 nt, Homo sapiens
  misc_RNA (1)...(19): siRNA sense strand
cgugagagauugaagaaau

SEQ ID NO: 2091611 - RNA, 19 nt, Homo sapiens
  misc_RNA (1)...(19): siRNA sense strand
ggacaggccagguuaacuu

SEQ ID NO: 2091612 - RNA, 19 nt, Homo sapiens
  misc_RNA (1)...(19): siRNA sense strand
gguuaaagaugcagaacug

SEQ ID NO: 2091613 - RNA, 19 nt, Homo sapiens
  misc_RNA (1)...(19): siRNA sense strand
gggcagaggcuuaacaaug

SEQ ID NO: 2091614 - RNA, 19 nt, Homo sapiens
  misc_RNA (1)...(19): siRNA sense strand
aaauggacauaguggcuua

SEQ ID NO: 2091615 - RNA, 19 nt, Homo sapiens
  misc_RNA (1)...(19): siRNA sense strand
guaguuucuuucugugaua

SEQ ID NO: 2091616 - RNA, 19 nt, Homo sapiens
  misc_RNA (1)...(19): siRNA sense strand
ggcagaggcuuaacaaugg

SEQ ID NO: 2091617 - RNA, 19 nt, Homo sapiens
  misc_RNA (1)...(19): siRNA sense strand
gaaguugaugguaguuuaa

SEQ ID NO: 2091618 - RNA, 19 nt, Homo sapiens
  misc_RNA (1)...(19): siRNA sense strand
gaaagauauugaccucauc

SEQ ID NO: 2091619 - RNA, 19 nt, Homo sapiens
  misc_RNA (1)...(19): siRNA sense strand
ggccacagauaaacgcuuu

SEQ ID NO: 2091620 - RNA, 19 nt, Homo sapiens
  misc_RNA (1)...(19): siRNA sense strand
ugacacaacuucuucugau

SEQ ID NO: 2091621 - RNA, 19 nt, Homo sapiens
  misc_RNA (1)...(19): siRNA sense strand
ccauauaauuugagacaga

SEQ ID NO: 2091622 - RNA, 19 nt, Homo sapiens
  misc_RNA (1)...(19): siRNA sense strand
gauauguauucaagaguga

SEQ ID NO: 2091623 - RNA, 19 nt, Homo sapiens
  misc_RNA (1)...(19): siRNA sense strand
cuucgaauguggacagaua

SEQ ID NO: 2091624 - RNA, 19 nt, Homo sapiens
  misc_RNA (1)...(19): siRNA sense strand
aaccagaguuuguuauuug

SEQ ID NO: 2091625 - RNA, 19 nt, Homo sapiens
  misc_RNA (1)...(19): siRNA sense strand
augcagaacuggauaaaga

SEQ ID NO: 2091626 - RNA, 19 nt, Homo sapiens
  misc_RNA (1)...(19): siRNA sense strand
ggaaagaagcuucaacaac

SEQ ID NO: 2091627 - RNA, 19 nt, Homo sapiens
  misc_RNA (1)...(19): siRNA sense strand
gcaaguggguuggugaauc

SEQ ID NO: 2091628 - RNA, 19 nt, Homo sapiens
  misc_RNA (1)...(19): siRNA sense strand
gaagaaagucacuaagaag

SEQ ID NO: 2091629 - RNA, 19 nt, Homo sapiens
  misc_RNA (1)...(19): siRNA sense strand
guagaacgacuucgaaugu

SEQ ID NO: 2091630 - RNA, 19 nt, Homo sapiens
  misc_RNA (1)...(19): siRNA sense strand
cgagaggaauggaacuuau

SEQ ID NO: 2091631 - RNA, 19 nt, Homo sapiens
  misc_RNA (1)...(19): siRNA sense strand
uaugacaaaucacaacuug

SEQ ID NO: 2091632 - RNA, 19 nt, Homo sapiens
  misc_RNA (1)...(19): siRNA sense strand
uaagagaguugcgguuguu

SEQ ID NO: 2091633 - RNA, 19 nt, Homo sapiens
  misc_RNA (1)...(19): siRNA sense strand
uauaaauggugacauggaa

SEQ ID NO: 2091634 - RNA, 19 nt, Homo sapiens
  misc_RNA (1)...(19): siRNA sense strand
gugagagauugaagaaauu

SEQ ID NO: 2091635 - RNA, 19 nt, Homo sapiens
  misc_RNA (1)...(19): siRNA sense strand
gaauggcaagcuugaagua

SEQ ID NO: 2091636 - RNA, 19 nt, Homo sapiens
  misc_RNA (1)...(19): siRNA sense strand
ggaaauuauuagagaaugg

SEQ ID NO: 2091637 - RNA, 19 nt, Homo sapiens
  misc_RNA (1)...(19): siRNA sense strand
caccaaauuugcagacuau

SEQ ID NO: 2091638 - RNA, 19 nt, Homo sapiens
  misc_RNA (1)...(19): siRNA sense strand
gaaauuaaggaagcaagaa

SEQ ID NO: 2091639 - RNA, 19 nt, Homo sapiens
  misc_RNA (1)...(19): siRNA sense strand
gaagagguuucagauuauc

SEQ ID NO: 2091640 - RNA, 19 nt, Homo sapiens
  misc_RNA (1)...(19): siRNA sense strand
gcgaagaaagucacuaaga

SEQ ID NO: 2091641 - RNA, 19 nt, Homo sapiens
  misc_RNA (1)...(19): siRNA sense strand
gaaucugaaaggcaacuua

SEQ ID NO: 2091642 - RNA, 19 nt, Homo sapiens
  misc_RNA (1)...(19): siRNA sense strand
ucaguaacaucagaacaaa

SEQ ID NO: 2091643 - RNA, 19 nt, Homo sapiens
  misc_RNA (1)...(19): siRNA sense strand
gaaggacacugcacaugcu

SEQ ID NO: 2091644 - RNA, 19 nt, Homo sapiens
  misc_RNA (1)...(19): siRNA sense strand
ccaauggacuuaucaacag

SEQ ID NO: 2091645 - RNA, 19 nt, Homo sapiens
  misc_RNA (1)...(19): siRNA sense strand
gcuggauguuuccucaaua

SEQ ID NO: 2091646 - RNA, 19 nt, Homo sapiens
  misc_RNA (1)...(19): siRNA sense strand
agacuugacucuauagauc

SEQ ID NO: 2091647 - RNA, 19 nt, Homo sapiens
  misc_RNA (1)...(19): siRNA sense strand
gauccacagcucuauagua

SEQ ID NO: 2091648 - RNA, 19 nt, Homo sapiens
  misc_RNA (1)...(19): siRNA sense strand
uugaucagcuugagagauu

SEQ ID NO: 2091649 - RNA, 19 nt, Homo sapiens
  misc_RNA (1)...(19): siRNA sense strand
gauaguggagauaaaugua

SEQ ID NO: 2091650 - RNA, 19 nt, Homo sapiens
  misc_RNA (1)...(19): siRNA sense strand
ugaaagauauugaccucau

SEQ ID NO: 2091651 - RNA, 19 nt, Homo sapiens
  misc_RNA (1)...(19): siRNA sense strand
caaggaaccaauggacuua

SEQ ID NO: 2091652 - RNA, 19 nt, Homo sapiens
  misc_RNA (1)...(19): siRNA sense strand
gaaagaggcuccauacaug

SEQ ID NO: 2091653 - RNA, 19 nt, Homo sapiens
  misc_RNA (1)...(19): siRNA sense strand
ggaagacggugaaugauga

SEQ ID NO: 2091654 - RNA, 19 nt, Homo sapiens
  misc_RNA (1)...(19): siRNA sense strand
gcacauccaugaggugaua

SEQ ID NO: 2091655 - RNA, 19 nt, Homo sapiens
  misc_RNA (1)...(19): siRNA sense strand
gcaccaagaucaucaagga

SEQ ID NO: 2091656 - RNA, 19 nt, Homo sapiens
  misc_RNA (1)...(19): siRNA sense strand
gaaauucgacucuuuguuc

SEQ ID NO: 2091657 - RNA, 19 nt, Homo sapiens
  misc_RNA (1)...(19): siRNA sense strand
gugcagagcuggaauucaa

SEQ ID NO: 2091658 - RNA, 19 nt, Homo sapiens
  misc_RNA (1)...(19): siRNA sense strand
gaacuugccugucuacaac

SEQ ID NO: 2091659 - RNA, 19 nt, Homo sapiens
  misc_RNA (1)...(19): siRNA sense strand
aaacaaacgugcagaaaca

SEQ ID NO: 2091660 - RNA, 19 nt, Homo sapiens
  misc_RNA (1)...(19): siRNA sense strand
guggagagcuuccucaaga

SEQ ID NO: 2091661 - RNA, 19 nt, Homo sapiens
  misc_RNA (1)...(19): siRNA sense strand
ccgaggagaucaccuauga

SEQ ID NO: 2091662 - RNA, 19 nt, Homo sapiens
  misc_RNA (1)...(19): siRNA sense strand
gcacauggauaagaucguu

SEQ ID NO: 2091663 - RNA, 19 nt, Homo sapiens
  misc_RNA (1)...(19): siRNA sense strand
gaggagaacuugccugucu

SEQ ID NO: 2091664 - RNA, 19 nt, Homo sapiens
  misc_RNA (1)...(19): siRNA sense strand
ggaagaaagaggcuccaua

SEQ ID NO: 2091665 - RNA, 19 nt, Homo sapiens
  misc_RNA (1)...(19): siRNA sense strand
ccacaguacuggagauguu

SEQ ID NO: 2091666 - RNA, 19 nt, Homo sapiens
  misc_RNA (1)...(19): siRNA sense strand
caaacucaaucagaucuuu

SEQ ID NO: 2091667 - RNA, 19 nt, Homo sapiens
  misc_RNA (1)...(19): siRNA sense strand
ggacguggcccaagucaau

SEQ ID NO: 2091668 - RNA, 19 nt, Homo sapiens
  misc_RNA (1)...(19): siRNA sense strand
cauggaggaugcagaaauu

SEQ ID NO: 2091669 - RNA, 19 nt, Homo sapiens
  misc_RNA (1)...(19): siRNA sense strand
gcaucgagcuggcuaacga

SEQ ID NO: 2091670 - RNA, 19 nt, Homo sapiens
  misc_RNA (1)...(19): siRNA sense strand
gaagaaagaggcuccauac

SEQ ID NO: 2091671 - RNA, 19 nt, Homo sapiens
  misc_RNA (1)...(19): siRNA sense strand
gcauugcuauggaggcuuu

SEQ ID NO: 2091672 - RNA, 19 nt, Homo sapiens
  misc_RNA (1)...(19): siRNA sense strand
gagccaugaugacuuagaa

SEQ ID NO: 2091673 - RNA, 19 nt, Homo sapiens
  misc_RNA (1)...(19): siRNA sense strand
gagaauaggaaccgucuga

SEQ ID NO: 2091674 - RNA, 19 nt, Homo sapiens
  misc_RNA (1)...(19): siRNA sense strand
caucaagccuguucucauc

SEQ ID NO: 2091675 - RNA, 19 nt, Homo sapiens
  misc_RNA (1)...(19): siRNA sense strand
gcagaaauucgacucuuug

SEQ ID NO: 2091676 - RNA, 19 nt, Homo sapiens
  misc_RNA (1)...(19): siRNA sense strand
ggaaacaaacgugcagaaa

SEQ ID NO: 2091677 - RNA, 19 nt, Homo sapiens
  misc_RNA (1)...(19): siRNA sense strand
ugaggaagacggugaauga

SEQ ID NO: 2091678 - RNA, 19 nt, Homo sapiens
  misc_RNA (1)...(19): siRNA sense strand
ggagaucaccuaugagaca

SEQ ID NO: 2091679 - RNA, 19 nt, Homo sapiens
  misc_RNA (1)...(19): siRNA sense strand
gaggagaucaccuaugaga

SEQ ID NO: 2091680 - RNA, 19 nt, Homo sapiens
  misc_RNA (1)...(19): siRNA sense strand
ggauaaccauucucuuugg

SEQ ID NO: 2091681 - RNA, 19 nt, Homo sapiens
  misc_RNA (1)...(19): siRNA sense strand
gggcucagcuggagaggau

SEQ ID NO: 2091682 - RNA, 19 nt, Homo sapiens
  misc_RNA (1)...(19): siRNA sense strand
ccaccaagcccaucaggaa

SEQ ID NO: 2091683 - RNA, 19 nt, Homo sapiens
  misc_RNA (1)...(19): siRNA sense strand
ccggagcuaugacuucuuu

SEQ ID NO: 2091684 - RNA, 19 nt, Homo sapiens
  misc_RNA (1)...(19): siRNA sense strand
ucagucagcucacaacagu

SEQ ID NO: 2091685 - RNA, 19 nt, Homo sapiens
  misc_RNA (1)...(19): siRNA sense strand
caaccgcugugcccucuau

SEQ ID NO: 2091686 - RNA, 19 nt, Homo sapiens
  misc_RNA (1)...(19): siRNA sense strand
caaguucucuaccaucagu

SEQ ID NO: 2091687 - RNA, 19 nt, Homo sapiens
  misc_RNA (1)...(19): siRNA sense strand
ccaagcugcuggagucaga

SEQ ID NO: 2091688 - RNA, 19 nt, Homo sapiens
  misc_RNA (1)...(19): siRNA sense strand
ugacagaugaggaucguuu

SEQ ID NO: 2091689 - RNA, 19 nt, Homo sapiens
  misc_RNA (1)...(19): siRNA sense strand
gaaacaaacgugcagaaac

SEQ ID NO: 2091690 - RNA, 19 nt, Homo sapiens
  misc_RNA (1)...(19): siRNA sense strand
ggcaccaacucguuuguga

SEQ ID NO: 2091691 - RNA, 19 nt, Homo sapiens
  misc_RNA (1)...(19): siRNA sense strand
ggaacaguccggagaagga

SEQ ID NO: 2091692 - RNA, 19 nt, Homo sapiens
  misc_RNA (1)...(19): siRNA sense strand
gaaguuucccgaucugugu

SEQ ID NO: 2091693 - RNA, 19 nt, Homo sapiens
  misc_RNA (1)...(19): siRNA sense strand
gaccuucuaugcccucuca

SEQ ID NO: 2091694 - RNA, 19 nt, Homo sapiens
  misc_RNA (1)...(19): siRNA sense strand
gaacugcaggccaauaucu

SEQ ID NO: 2091695 - RNA, 19 nt, Homo sapiens
  misc_RNA (1)...(19): siRNA sense strand
ccacagguuuccagugcaa

SEQ ID NO: 2091696 - RNA, 19 nt, Homo sapiens
  misc_RNA (1)...(19): siRNA sense strand
gcagguauccacagguuuc

SEQ ID NO: 2091697 - RNA, 19 nt, Homo sapiens
  misc_RNA (1)...(19): siRNA sense strand
gagguagaaucgaggaaca

SEQ ID NO: 2091698 - RNA, 19 nt, Homo sapiens
  misc_RNA (1)...(19): siRNA sense strand
ggcccaggcugucucagaa

SEQ ID NO: 2091699 - RNA, 19 nt, Homo sapiens
  misc_RNA (1)...(19): siRNA sense strand
cacaaguucucuaccauca

SEQ ID NO: 2091700 - RNA, 19 nt, Homo sapiens
  misc_RNA (1)...(19): siRNA sense strand
gcacgaggagcgcauguuc

SEQ ID NO: 2091701 - RNA, 19 nt, Homo sapiens
  misc_RNA (1)...(19): siRNA sense strand
cagcagcucuacagacaca

SEQ ID NO: 2091702 - RNA, 19 nt, Homo sapiens
  misc_RNA (1)...(19): siRNA sense strand
agaaagaggcuccauacau

SEQ ID NO: 2091703 - RNA, 19 nt, Homo sapiens
  misc_RNA (1)...(19): siRNA sense strand
agagcaaacucaaucagau

SEQ ID NO: 2091704 - RNA, 19 nt, Homo sapiens
  misc_RNA (1)...(19): siRNA sense strand
cucgagccaugaugacuua

SEQ ID NO: 2091705 - RNA, 19 nt, Homo sapiens
  misc_RNA (1)...(19): siRNA sense strand
gacagaugaggaucguuua

SEQ ID NO: 2091706 - RNA, 19 nt, Homo sapiens
  misc_RNA (1)...(19): siRNA sense strand
caacagugccugccuucug

SEQ ID NO: 2091707 - RNA, 19 nt, Homo sapiens
  misc_RNA (1)...(19): siRNA sense strand
caaacgugcagaaacacua

SEQ ID NO: 2091708 - RNA, 19 nt, Homo sapiens
  misc_RNA (1)...(19): siRNA sense strand
ugcagaaauucgacucuuu

SEQ ID NO: 2091709 - RNA, 19 nt, Homo sapiens
  misc_RNA (1)...(19): siRNA sense strand
ggagagcuuccucaagaug

SEQ ID NO: 2091710 - RNA, 19 nt, Homo sapiens
  misc_RNA (1)...(19): siRNA sense strand
ggcaggugguggagaaguu

SEQ ID NO: 2091711 - RNA, 19 nt, Homo sapiens
  misc_RNA (1)...(19): siRNA sense strand
ccacagcacauggauaaga

SEQ ID NO: 2091712 - RNA, 19 nt, Homo sapiens
  misc_RNA (1)...(19): siRNA sense strand
gauagagaccaggaagaaa

SEQ ID NO: 2091713 - RNA, 19 nt, Homo sapiens
  misc_RNA (1)...(19): siRNA sense strand
cgaucuguguguauacuga

SEQ ID NO: 2091714 - RNA, 19 nt, Homo sapiens
  misc_RNA (1)...(19): siRNA sense strand
cuggauaaccauucucuuu

SEQ ID NO: 2091715 - RNA, 19 nt, Homo sapiens
  misc_RNA (1)...(19): siRNA sense strand
acaaaaggcugguugacaa

SEQ ID NO: 2091716 - RNA, 19 nt, Homo sapiens
  misc_RNA (1)...(19): siRNA sense strand
ccuaugagacacugaagaa

SEQ ID NO: 2091717 - RNA, 19 nt, Homo sapiens
  misc_RNA (1)...(19): siRNA sense strand
uuccucagcugacagauga

SEQ ID NO: 2091718 - RNA, 19 nt, Homo sapiens
  misc_RNA (1)...(19): siRNA sense strand
ugucagcccugccuagcaa

SEQ ID NO: 2091719 - RNA, 19 nt, Homo sapiens
  misc_RNA (1)...(19): siRNA sense strand
ugccauccguugcuuuaaa

SEQ ID NO: 2091720 - RNA, 19 nt, Homo sapiens
  misc_RNA (1)...(19): siRNA sense strand
gcaccaacucguuugugaa

SEQ ID NO: 2091721 - RNA, 19 nt, Homo sapiens
  misc_RNA (1)...(19): siRNA sense strand
aaaugaaguuucccgaucu

SEQ ID NO: 2091722 - RNA, 19 nt, Homo sapiens
  misc_RNA (1)...(19): siRNA sense strand
gagcaaacucaaucagauc

SEQ ID NO: 2091723 - RNA, 19 nt, Homo sapiens
  misc_RNA (1)...(19): siRNA sense strand
gaaaucaagaccaaaauuc

SEQ ID NO: 2091724 - RNA, 19 nt, Homo sapiens
  misc_RNA (1)...(19): siRNA sense strand
ugacgugggucgccaucga

SEQ ID NO: 2091725 - RNA, 19 nt, Homo sapiens
  misc_RNA (1)...(19): siRNA sense strand
gacggugaaugaugaacug

SEQ ID NO: 2091726 - RNA, 19 nt, Homo sapiens
  misc_RNA (1)...(19): siRNA sense strand
ccacgcagccuggacagaa

SEQ ID NO: 2091727 - RNA, 19 nt, Homo sapiens
  misc_RNA (1)...(19): siRNA sense strand
ugauagagaccaggaagaa

SEQ ID NO: 2091728 - RNA, 19 nt, Homo sapiens
  misc_RNA (1)...(19): siRNA sense strand
gcaaggaggaaacaaacgu

SEQ ID NO: 2091729 - RNA, 19 nt, Homo sapiens
  misc_RNA (1)...(19): siRNA sense strand
caggacaccgucuucauga

SEQ ID NO: 2091730 - RNA, 19 nt, Homo sapiens
  misc_RNA (1)...(19): siRNA sense strand
gggcaucguggaagucuug

SEQ ID NO: 2091731 - RNA, 19 nt, Homo sapiens
  misc_RNA (1)...(19): siRNA sense strand
gauaagaucguuccaucac

SEQ ID NO: 2091732 - RNA, 19 nt, Homo sapiens
  misc_RNA (1)...(19): siRNA sense strand
ggauaagaucguuccauca

SEQ ID NO: 2091733 - RNA, 19 nt, Homo sapiens
  misc_RNA (1)...(19): siRNA sense strand
cacagcacauggauaagau

SEQ ID NO: 2091734 - RNA, 19 nt, Homo sapiens
  misc_RNA (1)...(19): siRNA sense strand
gaugaacugcaggccaaua

SEQ ID NO: 2091735 - RNA, 19 nt, Homo sapiens
  misc_RNA (1)...(19): siRNA sense strand
gaagacggugaaugaugaa

SEQ ID NO: 2091736 - RNA, 19 nt, Homo sapiens
  misc_RNA (1)...(19): siRNA sense strand
gaccaaaauucgaauguca

SEQ ID NO: 2091737 - RNA, 19 nt, Homo sapiens
  misc_RNA (1)...(19): siRNA sense strand
gagcuaugacuucuuugug

SEQ ID NO: 2091738 - RNA, 19 nt, Homo sapiens
  misc_RNA (1)...(19): siRNA sense strand
ggagcuaugacuucuuugu

SEQ ID NO: 2091739 - RNA, 19 nt, Homo sapiens
  misc_RNA (1)...(19): siRNA sense strand
caacaucuucccugaggau

SEQ ID NO: 2091740 - RNA, 19 nt, Homo sapiens
  misc_RNA (1)...(19): siRNA sense strand
cccagcagcucuacagaca

SEQ ID NO: 2091741 - RNA, 19 nt, Homo sapiens
  misc_RNA (1)...(19): siRNA sense strand
ggguacgugugcauugcua

SEQ ID NO: 2091742 - RNA, 19 nt, Homo sapiens
  misc_RNA (1)...(19): siRNA sense strand
gcuugcgaauuacacauau

SEQ ID NO: 2091743 - RNA, 19 nt, Homo sapiens
  misc_RNA (1)...(19): siRNA sense strand
caccugagaaggagaaaga

SEQ ID NO: 2091744 - RNA, 19 nt, Homo sapiens
  misc_RNA (1)...(19): siRNA sense strand
gcugcaaggaggaaacaaa

SEQ ID NO: 2091745 - RNA, 19 nt, Homo sapiens
  misc_RNA (1)...(19): siRNA sense strand
ucgaaugucaggcaucaaa

SEQ ID NO: 2091746 - RNA, 19 nt, Homo sapiens
  misc_RNA (1)...(19): siRNA sense strand
cugcagguauccacagguu

SEQ ID NO: 2091747 - RNA, 19 nt, Homo sapiens
  misc_RNA (1)...(19): siRNA sense strand
gauccuggcggcaaagcuu

SEQ ID NO: 2091748 - RNA, 19 nt, Homo sapiens
  misc_RNA (1)...(19): siRNA sense strand
cgagauguacggugugugu

SEQ ID NO: 2091749 - RNA, 19 nt, Homo sapiens
  misc_RNA (1)...(19): siRNA sense strand
cagagcaaacucaaucaga

SEQ ID NO: 2091750 - RNA, 19 nt, Homo sapiens
  misc_RNA (1)...(19): siRNA sense strand
gaggaacaguccggagaag

SEQ ID NO: 2091751 - RNA, 19 nt, Homo sapiens
  misc_RNA (1)...(19): siRNA sense strand
cuacauuccucagcugaca

SEQ ID NO: 2091752 - RNA, 19 nt, Homo sapiens
  misc_RNA (1)...(19): siRNA sense strand
ucaagaagaucaugcaguu

SEQ ID NO: 2091753 - RNA, 19 nt, Homo sapiens
  misc_RNA (1)...(19): siRNA sense strand
gcgacgagcucacucuuau

SEQ ID NO: 2091754 - RNA, 19 nt, Homo sapiens
  misc_RNA (1)...(19): siRNA sense strand
gcuccagccucuccuacua

SEQ ID NO: 2091755 - RNA, 19 nt, Homo sapiens
  misc_RNA (1)...(19): siRNA sense strand
gaucaugcaguucaucaaa

SEQ ID NO: 2091756 - RNA, 19 nt, Homo sapiens
  misc_RNA (1)...(19): siRNA sense strand
ucaccaagcugcaggucaa

SEQ ID NO: 2091757 - RNA, 19 nt, Homo sapiens
  misc_RNA (1)...(19): siRNA sense strand
ggacaccuacucccucuau

SEQ ID NO: 2091758 - RNA, 19 nt, Homo sapiens
  misc_RNA (1)...(19): siRNA sense strand
cagaggauguggugagcuu

SEQ ID NO: 2091759 - RNA, 19 nt, Homo sapiens
  misc_RNA (1)...(19): siRNA sense strand
ggagguggccagugucuuc

SEQ ID NO: 2091760 - RNA, 19 nt, Homo sapiens
  misc_RNA (1)...(19): siRNA sense strand
ucaccacccuccugcgaaa

SEQ ID NO: 2091761 - RNA, 19 nt, Homo sapiens
  misc_RNA (1)...(19): siRNA sense strand
gaaguucaagcuccuggaa

SEQ ID NO: 2091762 - RNA, 19 nt, Homo sapiens
  misc_RNA (1)...(19): siRNA sense strand
acagcgagguguacaacuu

SEQ ID NO: 2091763 - RNA, 19 nt, Homo sapiens
  misc_RNA (1)...(19): siRNA sense strand
ccuacucccucuauugcua

SEQ ID NO: 2091764 - RNA, 19 nt, Homo sapiens
  misc_RNA (1)...(19): siRNA sense strand
cgagaacgcaucgauggua

SEQ ID NO: 2091765 - RNA, 19 nt, Homo sapiens
  misc_RNA (1)...(19): siRNA sense strand
uggaggagguggccagugu

SEQ ID NO: 2091766 - RNA, 19 nt, Homo sapiens
  misc_RNA (1)...(19): siRNA sense strand
ggagggucauugcuacaag

SEQ ID NO: 2091767 - RNA, 19 nt, Homo sapiens
  misc_RNA (1)...(19): siRNA sense strand
gcgccaagaccaccaagga

SEQ ID NO: 2091768 - RNA, 19 nt, Homo sapiens
  misc_RNA (1)...(19): siRNA sense strand
gaaccaccgcaccaacgaa

SEQ ID NO: 2091769 - RNA, 19 nt, Homo sapiens
  misc_RNA (1)...(19): siRNA sense strand
ggcgacgagcucacucuua

SEQ ID NO: 2091770 - RNA, 19 nt, Homo sapiens
  misc_RNA (1)...(19): siRNA sense strand
aagaagaucaugcaguuca

SEQ ID NO: 2091771 - RNA, 19 nt, Homo sapiens
  misc_RNA (1)...(19): siRNA sense strand
gagauccugugcgccaaga

SEQ ID NO: 2091772 - RNA, 19 nt, Homo sapiens
  misc_RNA (1)...(19): siRNA sense strand
gcgaggacagcgaggugua

SEQ ID NO: 2091773 - RNA, 19 nt, Homo sapiens
  misc_RNA (1)...(19): siRNA sense strand
ccaagcugcaggucaagaa

SEQ ID NO: 2091774 - RNA, 19 nt, Homo sapiens
  misc_RNA (1)...(19): siRNA sense strand
caagcugguuagcaucauc

SEQ ID NO: 2091775 - RNA, 19 nt, Homo sapiens
  misc_RNA (1)...(19): siRNA sense strand
ggauguggugagcuucuuu

SEQ ID NO: 2091776 - RNA, 19 nt, Homo sapiens
  misc_RNA (1)...(19): siRNA sense strand
gcccuucgaucccuuugag

SEQ ID NO: 2091777 - RNA, 19 nt, Homo sapiens
  misc_RNA (1)...(19): siRNA sense strand
gacaccuacucccucuauu

SEQ ID NO: 2091778 - RNA, 19 nt, Homo sapiens
  misc_RNA (1)...(19): siRNA sense strand
guuagcaucaucuccaaga

SEQ ID NO: 2091779 - RNA, 19 nt, Homo sapiens
  misc_RNA (1)...(19): siRNA sense strand
gacgagcucacucuuaugg

SEQ ID NO: 2091780 - RNA, 19 nt, Homo sapiens
  misc_RNA (1)...(19): siRNA sense strand
gaacgcaucgaugguagca

SEQ ID NO: 2091781 - RNA, 19 nt, Homo sapiens
  misc_RNA (1)...(19): siRNA sense strand
acaccuacucccucuauug

SEQ ID NO: 2091782 - RNA, 19 nt, Homo sapiens
  misc_RNA (1)...(19): siRNA sense strand
ggcucgaucucaucuccuu

SEQ ID NO: 2091783 - RNA, 19 nt, Homo sapiens
  misc_RNA (1)...(19): siRNA sense strand
gccugagccugcccuuuca

SEQ ID NO: 2091784 - RNA, 19 nt, Homo sapiens
  misc_RNA (1)...(19): siRNA sense strand
gaagaucaugcaguucauc

SEQ ID NO: 2091785 - RNA, 19 nt, Homo sapiens
  misc_RNA (1)...(19): siRNA sense strand
gauguggugagcuucuuug

SEQ ID NO: 2091786 - RNA, 19 nt, Homo sapiens
  misc_RNA (1)...(19): siRNA sense strand
gagugccgccugcucaaug

SEQ ID NO: 2091787 - RNA, 19 nt, Homo sapiens
  misc_RNA (1)...(19): siRNA sense strand
gaugugcgggagccaguga

SEQ ID NO: 2091788 - RNA, 19 nt, Homo sapiens
  misc_RNA (1)...(19): siRNA sense strand
ucaugcaguucaucaaagg

SEQ ID NO: 2091789 - RNA, 19 nt, Homo sapiens
  misc_RNA (1)...(19): siRNA sense strand
ggacagcgagguguacaac

SEQ ID NO: 2091790 - RNA, 19 nt, Homo sapiens
  misc_RNA (1)...(19): siRNA sense strand
ccaaauccgaggcggugaa

SEQ ID NO: 2091791 - RNA, 19 nt, Homo sapiens
  misc_RNA (1)...(19): siRNA sense strand
gcuggaggcccaagaucug

SEQ ID NO: 2091792 - RNA, 19 nt, Homo sapiens
  misc_RNA (1)...(19): siRNA sense strand
gggagccagugagguacuu

SEQ ID NO: 2091793 - RNA, 19 nt, Homo sapiens
  misc_RNA (1)...(19): siRNA sense strand
gcaugaaccaccgcaccaa

SEQ ID NO: 2091794 - RNA, 19 nt, Homo sapiens
  misc_RNA (1)...(19): siRNA sense strand
cuuugagccugaagguuug

SEQ ID NO: 2091795 - RNA, 19 nt, Homo sapiens
  misc_RNA (1)...(19): siRNA sense strand
ccaaggagauuaccaauuu

SEQ ID NO: 2091796 - RNA, 19 nt, Homo sapiens
  misc_RNA (1)...(19): siRNA sense strand
gaagccaggugcuccauua

SEQ ID NO: 2091797 - RNA, 19 nt, Homo sapiens
  misc_RNA (1)...(19): siRNA sense strand
gaaggaguauuuacaagaa

SEQ ID NO: 2091798 - RNA, 19 nt, Homo sapiens
  misc_RNA (1)...(19): siRNA sense strand
ccacagaacuucaauaucu

SEQ ID NO: 2091799 - RNA, 19 nt, Homo sapiens
  misc_RNA (1)...(19): siRNA sense strand
ccagaacaaugccaaauuu

SEQ ID NO: 2091800 - RNA, 19 nt, Homo sapiens
  misc_RNA (1)...(19): siRNA sense strand
gcaaggaucugguggcaau

SEQ ID NO: 2091801 - RNA, 19 nt, Homo sapiens
  misc_RNA (1)...(19): siRNA sense strand
gcugaucgcucauuacuau

SEQ ID NO: 2091802 - RNA, 19 nt, Homo sapiens
  misc_RNA (1)...(19): siRNA sense strand
ggaguuagaucccagguau

SEQ ID NO: 2091803 - RNA, 19 nt, Homo sapiens
  misc_RNA (1)...(19): siRNA sense strand
ggaagaaggcaauuuauau

SEQ ID NO: 2091804 - RNA, 19 nt, Homo sapiens
  misc_RNA (1)...(19): siRNA sense strand
gcccugcccugccuuauua

SEQ ID NO: 2091805 - RNA, 19 nt, Homo sapiens
  misc_RNA (1)...(19): siRNA sense strand
gaaagcugcucuaagacaa

SEQ ID NO: 2091806 - RNA, 19 nt, Homo sapiens
  misc_RNA (1)...(19): siRNA sense strand
cugaggagcucuauacuaa

SEQ ID NO: 2091807 - RNA, 19 nt, Homo sapiens
  misc_RNA (1)...(19): siRNA sense strand
gcaacagccuucuuagaga

SEQ ID NO: 2091808 - RNA, 19 nt, Homo sapiens
  misc_RNA (1)...(19): siRNA sense strand
acacagagcugguagaaca

SEQ ID NO: 2091809 - RNA, 19 nt, Homo sapiens
  misc_RNA (1)...(19): siRNA sense strand
caaacuggcugaaaugauc

SEQ ID NO: 2091810 - RNA, 19 nt, Homo sapiens
  misc_RNA (1)...(19): siRNA sense strand
caaggagauuaccaauuua

SEQ ID NO: 2091811 - RNA, 19 nt, Homo sapiens
  misc_RNA (1)...(19): siRNA sense strand
gacaauugcuccuuugaau

SEQ ID NO: 2091812 - RNA, 19 nt, Homo sapiens
  misc_RNA (1)...(19): siRNA sense strand
ggaauucucucuggucaug

SEQ ID NO: 2091813 - RNA, 19 nt, Homo sapiens
  misc_RNA (1)...(19): siRNA sense strand
agacaaagccuucuaugaa

SEQ ID NO: 2091814 - RNA, 19 nt, Homo sapiens
  misc_RNA (1)...(19): siRNA sense strand
cgaagaggcugaagcugaa

SEQ ID NO: 2091815 - RNA, 19 nt, Homo sapiens
  misc_RNA (1)...(19): siRNA sense strand
gaagaagcaucugggaaga

SEQ ID NO: 2091816 - RNA, 19 nt, Homo sapiens
  misc_RNA (1)...(19): siRNA sense strand
auaaagaguuccucaagaa

SEQ ID NO: 2091817 - RNA, 19 nt, Homo sapiens
  misc_RNA (1)...(19): siRNA sense strand
uaaggaggcuggauuaugg

SEQ ID NO: 2091818 - RNA, 19 nt, Homo sapiens
  misc_RNA (1)...(19): siRNA sense strand
gccuggcccucaauuauua

SEQ ID NO: 2091819 - RNA, 19 nt, Homo sapiens
  misc_RNA (1)...(19): siRNA sense strand
gaagaugugucagugcuau

SEQ ID NO: 2091820 - RNA, 19 nt, Homo sapiens
  misc_RNA (1)...(19): siRNA sense strand
acaagauucugcacaagua

SEQ ID NO: 2091821 - RNA, 19 nt, Homo sapiens
  misc_RNA (1)...(19): siRNA sense strand
gcguguagcuaaggaguua

SEQ ID NO: 2091822 - RNA, 19 nt, Homo sapiens
  misc_RNA (1)...(19): siRNA sense strand
gcggagaagugcuggauga

SEQ ID NO: 2091823 - RNA, 19 nt, Homo sapiens
  misc_RNA (1)...(19): siRNA sense strand
ccagaucuccucagugaua

SEQ ID NO: 2091824 - RNA, 19 nt, Homo sapiens
  misc_RNA (1)...(19): siRNA sense strand
caaaccagcugacaugaag

SEQ ID NO: 2091825 - RNA, 19 nt, Homo sapiens
  misc_RNA (1)...(19): siRNA sense strand
gcaguuggcugggauaaca

SEQ ID NO: 2091826 - RNA, 19 nt, Homo sapiens
  misc_RNA (1)...(19): siRNA sense strand
gcugaaaggcuauauguga

SEQ ID NO: 2091827 - RNA, 19 nt, Homo sapiens
  misc_RNA (1)...(19): siRNA sense strand
gaaggucacaugcuacaaa

SEQ ID NO: 2091828 - RNA, 19 nt, Homo sapiens
  misc_RNA (1)...(19): siRNA sense strand
gagaauguaugcaugaucu

SEQ ID NO: 2091829 - RNA, 19 nt, Homo sapiens
  misc_RNA (1)...(19): siRNA sense strand
auacagacauucccuuuga

SEQ ID NO: 2091830 - RNA, 19 nt, Homo sapiens
  misc_RNA (1)...(19): siRNA sense strand
uaacauggcauucaucuuc

SEQ ID NO: 2091831 - RNA, 19 nt, Homo sapiens
  misc_RNA (1)...(19): siRNA sense strand
gcaaagcccaaggagauua

SEQ ID NO: 2091832 - RNA, 19 nt, Homo sapiens
  misc_RNA (1)...(19): siRNA sense strand
gccaggacgugcugaaauu

SEQ ID NO: 2091833 - RNA, 19 nt, Homo sapiens
  misc_RNA (1)...(19): siRNA sense strand
gcagacaauugcuccuuug

SEQ ID NO: 2091834 - RNA, 19 nt, Homo sapiens
  misc_RNA (1)...(19): siRNA sense strand
caaguuguaugaugacaug

SEQ ID NO: 2091835 - RNA, 19 nt, Homo sapiens
  misc_RNA (1)...(19): siRNA sense strand
uggauuggcuggaacuuaa

SEQ ID NO: 2091836 - RNA, 19 nt, Homo sapiens
  misc_RNA (1)...(19): siRNA sense strand
cagcugaacucuccaucaa

SEQ ID NO: 2091837 - RNA, 19 nt, Homo sapiens
  misc_RNA (1)...(19): siRNA sense strand
gcauucaucuuccucaauc

SEQ ID NO: 2091838 - RNA, 19 nt, Homo sapiens
  misc_RNA (1)...(19): siRNA sense strand
cagaauacaucauugucuu

SEQ ID NO: 2091839 - RNA, 19 nt, Homo sapiens
  misc_RNA (1)...(19): siRNA sense strand
ggagcgagcaggugaacua

SEQ ID NO: 2091840 - RNA, 19 nt, Homo sapiens
  misc_RNA (1)...(19): siRNA sense strand
gaucaaguaucccgggaau

SEQ ID NO: 2091841 - RNA, 19 nt, Homo sapiens
  misc_RNA (1)...(19): siRNA sense strand
gcaaggcaacuacacauug

SEQ ID NO: 2091842 - RNA, 19 nt, Homo sapiens
  misc_RNA (1)...(19): siRNA sense strand
ugaguaaacuggcacuaga

SEQ ID NO: 2091843 - RNA, 19 nt, Homo sapiens
  misc_RNA (1)...(19): siRNA sense strand
gagauagccuggcaaggau

SEQ ID NO: 2091844 - RNA, 19 nt, Homo sapiens
  misc_RNA (1)...(19): siRNA sense strand
gaaaggaacguuacuuggu

SEQ ID NO: 2091845 - RNA, 19 nt, Homo sapiens
  misc_RNA (1)...(19): siRNA sense strand
gucaccauguucacuauua

SEQ ID NO: 2091846 - RNA, 19 nt, Homo sapiens
  misc_RNA (1)...(19): siRNA sense strand
aagcagaacuacaagauuc

SEQ ID NO: 2091847 - RNA, 19 nt, Homo sapiens
  misc_RNA (1)...(19): siRNA sense strand
ggaagucguucuggcugua

SEQ ID NO: 2091848 - RNA, 19 nt, Homo sapiens
  misc_RNA (1)...(19): siRNA sense strand
ucucaaauaugcuauguuc

SEQ ID NO: 2091849 - RNA, 19 nt, Homo sapiens
  misc_RNA (1)...(19): siRNA sense strand
ggaacacugcauccaaaua

SEQ ID NO: 2091850 - RNA, 19 nt, Homo sapiens
  misc_RNA (1)...(19): siRNA sense strand
auugaaagcugcucuaaga

SEQ ID NO: 2091851 - RNA, 19 nt, Homo sapiens
  misc_RNA (1)...(19): siRNA sense strand
uauaaagaguuccucaaga

SEQ ID NO: 2091852 - RNA, 19 nt, Homo sapiens
  misc_RNA (1)...(19): siRNA sense strand
gaacaaggcgaagcgugua

SEQ ID NO: 2091853 - RNA, 19 nt, Homo sapiens
  misc_RNA (1)...(19): siRNA sense strand
gauaaauucuccaccaaac

SEQ ID NO: 2091854 - RNA, 19 nt, Homo sapiens
  misc_RNA (1)...(19): siRNA sense strand
gaacacugcauccaaauac

SEQ ID NO: 2091855 - RNA, 19 nt, Homo sapiens
  misc_RNA (1)...(19): siRNA sense strand
ggaugaggguaaauucgaa

SEQ ID NO: 2091856 - RNA, 19 nt, Homo sapiens
  misc_RNA (1)...(19): siRNA sense strand
aaggacaacuggaauaaau

SEQ ID NO: 2091857 - RNA, 19 nt, Homo sapiens
  misc_RNA (1)...(19): siRNA sense strand
gcaaacaccaaaacuaaua

SEQ ID NO: 2091858 - RNA, 19 nt, Homo sapiens
  misc_RNA (1)...(19): siRNA sense strand
guucgagacugggugcuua

SEQ ID NO: 2091859 - RNA, 19 nt, Homo sapiens
  misc_RNA (1)...(19): siRNA sense strand
gaacggagagauaaauucu

SEQ ID NO: 2091860 - RNA, 19 nt, Homo sapiens
  misc_RNA (1)...(19): siRNA sense strand
ggaccagcauuauaaagag

SEQ ID NO: 2091861 - RNA, 19 nt, Homo sapiens
  misc_RNA (1)...(19): siRNA sense strand
gcugaacucuccaucaagu

SEQ ID NO: 2091862 - RNA, 19 nt, Homo sapiens
  misc_RNA (1)...(19): siRNA sense strand
ggagcaggcuggagaguac

SEQ ID NO: 2091863 - RNA, 19 nt, Homo sapiens
  misc_RNA (1)...(19): siRNA sense strand
caccacagcuguaucaagu

SEQ ID NO: 2091864 - RNA, 19 nt, Homo sapiens
  misc_RNA (1)...(19): siRNA sense strand
acaagaaagucaucugcaa

SEQ ID NO: 2091865 - RNA, 19 nt, Homo sapiens
  misc_RNA (1)...(19): siRNA sense strand
cagcugacaugaaguaugg

SEQ ID NO: 2091866 - RNA, 19 nt, Homo sapiens
  misc_RNA (1)...(19): siRNA sense strand
aaacagaggcaauguggaa

SEQ ID NO: 2091867 - RNA, 19 nt, Homo sapiens
  misc_RNA (1)...(19): siRNA sense strand
agacaaugauccucaacuu

SEQ ID NO: 2091868 - RNA, 19 nt, Homo sapiens
  misc_RNA (1)...(19): siRNA sense strand
gggccagucuguugugcua

SEQ ID NO: 2091869 - RNA, 19 nt, Homo sapiens
  misc_RNA (1)...(19): siRNA sense strand
gcgggaagcuacuaagaag

SEQ ID NO: 2091870 - RNA, 19 nt, Homo sapiens
  misc_RNA (1)...(19): siRNA sense strand
ugaccacgcugcagacaau

SEQ ID NO: 2091871 - RNA, 19 nt, Homo sapiens
  misc_RNA (1)...(19): siRNA sense strand
gaauggaaggcaacaguga

SEQ ID NO: 2091872 - RNA, 19 nt, Homo sapiens
  misc_RNA (1)...(19): siRNA sense strand
gaggagcucuauacuaagg

SEQ ID NO: 2091873 - RNA, 19 nt, Homo sapiens
  misc_RNA (1)...(19): siRNA sense strand
agaaggcccuggagugcua

SEQ ID NO: 2091874 - RNA, 19 nt, Homo sapiens
  misc_RNA (1)...(19): siRNA sense strand
ugagauugcagaucaagua

SEQ ID NO: 2091875 - RNA, 19 nt, Homo sapiens
  misc_RNA (1)...(19): siRNA sense strand
gcaucuguaugauauugaa

SEQ ID NO: 2091876 - RNA, 19 nt, Homo sapiens
  misc_RNA (1)...(19): siRNA sense strand
gaggaacagaagauaauaa

SEQ ID NO: 2091877 - RNA, 19 nt, Homo sapiens
  misc_RNA (1)...(19): siRNA sense strand
cgagguucaucucaaauau

SEQ ID NO: 2091878 - RNA, 19 nt, Homo sapiens
  misc_RNA (1)...(19): siRNA sense strand
ggauacagacauucccuuu

SEQ ID NO: 2091879 - RNA, 19 nt, Homo sapiens
  misc_RNA (1)...(19): siRNA sense strand
ggacaagugcauugaaaca

SEQ ID NO: 2091880 - RNA, 19 nt, Homo sapiens
  misc_RNA (1)...(19): siRNA sense strand
caucaucuaugucuacaag

SEQ ID NO: 2091881 - RNA, 19 nt, Homo sapiens
  misc_RNA (1)...(19): siRNA sense strand
ggaaggcugcuaacaagga

SEQ ID NO: 2091882 - RNA, 19 nt, Homo sapiens
  misc_RNA (1)...(19): siRNA sense strand
gaaggugugacuacuguug

SEQ ID NO: 2091883 - RNA, 19 nt, Homo sapiens
  misc_RNA (1)...(19): siRNA sense strand
caagaacaaguuugaguug

SEQ ID NO: 2091884 - RNA, 19 nt, Homo sapiens
  misc_RNA (1)...(19): siRNA sense strand
aaaagaaggucacaugcua

SEQ ID NO: 2091885 - RNA, 19 nt, Homo sapiens
  misc_RNA (1)...(19): siRNA sense strand
gaagggaagguucguuuag

SEQ ID NO: 2091886 - RNA, 19 nt, Homo sapiens
  misc_RNA (1)...(19): siRNA sense strand
aaagucaucugcaacaagu

SEQ ID NO: 2091887 - RNA, 19 nt, Homo sapiens
  misc_RNA (1)...(19): siRNA sense strand
ggacacaagcuccucuuca

SEQ ID NO: 2091888 - RNA, 19 nt, Homo sapiens
  misc_RNA (1)...(19): siRNA sense strand
cacagaacuucaauaucua

SEQ ID NO: 2091889 - RNA, 19 nt, Homo sapiens
  misc_RNA (1)...(19): siRNA sense strand
guaugcaacucacuugauc

SEQ ID NO: 2091890 - RNA, 19 nt, Homo sapiens
  misc_RNA (1)...(19): siRNA sense strand
cgaguggucuugcuguaug

SEQ ID NO: 2091891 - RNA, 19 nt, Homo sapiens
  misc_RNA (1)...(19): siRNA sense strand
ggacugcuaccucaaagug

SEQ ID NO: 2091892 - RNA, 19 nt, Homo sapiens
  misc_RNA (1)...(19): siRNA sense strand
ccagugggcuuugggaaga

SEQ ID NO: 2091893 - RNA, 19 nt, Homo sapiens
  misc_RNA (1)...(19): siRNA sense strand
gaauauggcggagaaggaa

SEQ ID NO: 2091894 - RNA, 19 nt, Homo sapiens
  misc_RNA (1)...(19): siRNA sense strand
ucaaguaucccgggaauau

SEQ ID NO: 2091895 - RNA, 19 nt, Homo sapiens
  misc_RNA (1)...(19): siRNA sense strand
ugaagaagaugaagaagaa

SEQ ID NO: 2091896 - RNA, 19 nt, Homo sapiens
  misc_RNA (1)...(19): siRNA sense strand
gagcauaccaggauaaauu

SEQ ID NO: 2091897 - RNA, 19 nt, Homo sapiens
  misc_RNA (1)...(19): siRNA sense strand
gcuaugaccuuuguuuauu

SEQ ID NO: 2091898 - RNA, 19 nt, Homo sapiens
  misc_RNA (1)...(19): siRNA sense strand
gaaaccaaguacgaaauuu

SEQ ID NO: 2091899 - RNA, 19 nt, Homo sapiens
  misc_RNA (1)...(19): siRNA sense strand
gaagaaaccaaguacgaaa

SEQ ID NO: 2091900 - RNA, 19 nt, Homo sapiens
  misc_RNA (1)...(19): siRNA sense strand
gggauugucuucaucauca

SEQ ID NO: 2091901 - RNA, 19 nt, Homo sapiens
  misc_RNA (1)...(19): siRNA sense strand
caagagggcuaaauuuacu

SEQ ID NO: 2091902 - RNA, 19 nt, Homo sapiens
  misc_RNA (1)...(19): siRNA sense strand
cauaauaggugauccuucu

SEQ ID NO: 2091903 - RNA, 19 nt, Homo sapiens
  misc_RNA (1)...(19): siRNA sense strand
ggagaaaauuguucccuaa

SEQ ID NO: 2091904 - RNA, 19 nt, Homo sapiens
  misc_RNA (1)...(19): siRNA sense strand
cuaauacaguugaagaaga

SEQ ID NO: 2091905 - RNA, 19 nt, Homo sapiens
  misc_RNA (1)...(19): siRNA sense strand
cauuauaucuggcaaagag

SEQ ID NO: 2091906 - RNA, 19 nt, Homo sapiens
  misc_RNA (1)...(19): siRNA sense strand
gggcuaaauuuacuauaag

SEQ ID NO: 2091907 - RNA, 19 nt, Homo sapiens
  misc_RNA (1)...(19): siRNA sense strand
gaaacuacaacagagauga

SEQ ID NO: 2091908 - RNA, 19 nt, Homo sapiens
  misc_RNA (1)...(19): siRNA sense strand
gcaccaacccauuauaucu

SEQ ID NO: 2091909 - RNA, 19 nt, Homo sapiens
  misc_RNA (1)...(19): siRNA sense strand
uaagugagcauaccaggau

SEQ ID NO: 2091910 - RNA, 19 nt, Homo sapiens
  misc_RNA (1)...(19): siRNA sense strand
ccacaccaguagauuguuc

SEQ ID NO: 2091911 - RNA, 19 nt, Homo sapiens
  misc_RNA (1)...(19): siRNA sense strand
ccauugcaccaacccauua

SEQ ID NO: 2091912 - RNA, 19 nt, Homo sapiens
  misc_RNA (1)...(19): siRNA sense strand
uggauggacugcugcugua

SEQ ID NO: 2091913 - RNA, 19 nt, Homo sapiens
  misc_RNA (1)...(19): siRNA sense strand
ucauacaacucacugucaa

SEQ ID NO: 2091914 - RNA, 19 nt, Homo sapiens
  misc_RNA (1)...(19): siRNA sense strand
uucaagagggcuaaauuua

SEQ ID NO: 2091915 - RNA, 19 nt, Homo sapiens
  misc_RNA (1)...(19): siRNA sense strand
uccaugggcuuuagggaaa

SEQ ID NO: 2091916 - RNA, 19 nt, Homo sapiens
  misc_RNA (1)...(19): siRNA sense strand
gaugacgauuuaauucaag

SEQ ID NO: 2091917 - RNA, 19 nt, Homo sapiens
  misc_RNA (1)...(19): siRNA sense strand
acaacucacugucaaugga

SEQ ID NO: 2091918 - RNA, 19 nt, Homo sapiens
  misc_RNA (1)...(19): siRNA sense strand
acaaguaucuuuuggcuau

SEQ ID NO: 2091919 - RNA, 19 nt, Homo sapiens
  misc_RNA (1)...(19): siRNA sense strand
caucaucuuuauccaguca

SEQ ID NO: 2091920 - RNA, 19 nt, Homo sapiens
  misc_RNA (1)...(19): siRNA sense strand
guaagcaggcgauguugug

SEQ ID NO: 2091921 - RNA, 19 nt, Homo sapiens
  misc_RNA (1)...(19): siRNA sense strand
gaccuuuguuuauuucaag

SEQ ID NO: 2091922 - RNA, 19 nt, Homo sapiens
  misc_RNA (1)...(19): siRNA sense strand
guggagcugucagaaacua

SEQ ID NO: 2091923 - RNA, 19 nt, Homo sapiens
  misc_RNA (1)...(19): siRNA sense strand
caguggagcugucagaaac

SEQ ID NO: 2091924 - RNA, 19 nt, Homo sapiens
  misc_RNA (1)...(19): siRNA sense strand
ugucagaaacuacaacaga

SEQ ID NO: 2091925 - RNA, 19 nt, Homo sapiens
  misc_RNA (1)...(19): siRNA sense strand
ggugauccuucucaagcuu

SEQ ID NO: 2091926 - RNA, 19 nt, Homo sapiens
  misc_RNA (1)...(19): siRNA sense strand
ggacugcugcuguaaaauu

SEQ ID NO: 2091927 - RNA, 19 nt, Homo sapiens
  misc_RNA (1)...(19): siRNA sense strand
cagcaggggugacagaaaa

SEQ ID NO: 2091928 - RNA, 19 nt, Homo sapiens
  misc_RNA (1)...(19): siRNA sense strand
cuacaacagagaugaaguu

SEQ ID NO: 2091929 - RNA, 19 nt, Homo sapiens
  misc_RNA (1)...(19): siRNA sense strand
gaagaagaugaagaagaaa

SEQ ID NO: 2091930 - RNA, 19 nt, Homo sapiens
  misc_RNA (1)...(19): siRNA sense strand
ucaucuuuauccagucaua

SEQ ID NO: 2091931 - RNA, 19 nt, Homo sapiens
  misc_RNA (1)...(19): siRNA sense strand
agaaaccaaguacgaaauu

SEQ ID NO: 2091932 - RNA, 19 nt, Homo sapiens
  misc_RNA (1)...(19): siRNA sense strand
ucaagagggcuaaauuuac

SEQ ID NO: 2091933 - RNA, 19 nt, Homo sapiens
  misc_RNA (1)...(19): siRNA sense strand
ucucaggacucauacaacu

SEQ ID NO: 2091934 - RNA, 19 nt, Homo sapiens
  misc_RNA (1)...(19): siRNA sense strand
gauggacugcugcuguaaa

SEQ ID NO: 2091935 - RNA, 19 nt, Homo sapiens
  misc_RNA (1)...(19): siRNA sense strand
ggcuaugaccuuuguuuau

SEQ ID NO: 2091936 - RNA, 19 nt, Homo sapiens
  misc_RNA (1)...(19): siRNA sense strand
aagaagaaaccaaguacga

SEQ ID NO: 2091937 - RNA, 19 nt, Homo sapiens
  misc_RNA (1)...(19): siRNA sense strand
uggcuaugaccuuuguuua

SEQ ID NO: 2091938 - RNA, 19 nt, Homo sapiens
  misc_RNA (1)...(19): siRNA sense strand
aaacuacaacagagaugaa

SEQ ID NO: 2091939 - RNA, 19 nt, Homo sapiens
  misc_RNA (1)...(19): siRNA sense strand
ccaguagauuguucacucu

SEQ ID NO: 2091940 - RNA, 19 nt, Homo sapiens
  misc_RNA (1)...(19): siRNA sense strand
ucagaaacuacaacagaga

SEQ ID NO: 2091941 - RNA, 19 nt, Homo sapiens
  misc_RNA (1)...(19): siRNA sense strand
aacauucucaggacucaua

SEQ ID NO: 2091942 - RNA, 19 nt, Homo sapiens
  misc_RNA (1)...(19): siRNA sense strand
uuucaagagggcuaaauuu

SEQ ID NO: 2091943 - RNA, 19 nt, Homo sapiens
  misc_RNA (1)...(19): siRNA sense strand
agaagaaaccaaguacgaa

SEQ ID NO: 2091944 - RNA, 19 nt, Homo sapiens
  misc_RNA (1)...(19): siRNA sense strand
gcucugggauagaauugac

SEQ ID NO: 2091945 - RNA, 19 nt, Homo sapiens
  misc_RNA (1)...(19): siRNA sense strand
gcuaauacaguugaagaag

SEQ ID NO: 2091946 - RNA, 19 nt, Homo sapiens
  misc_RNA (1)...(19): siRNA sense strand
ucucaagcuuauacugguu

SEQ ID NO: 2091947 - RNA, 19 nt, Homo sapiens
  misc_RNA (1)...(19): siRNA sense strand
ucaggacucauacaacuca

SEQ ID NO: 2091948 - RNA, 19 nt, Homo sapiens
  misc_RNA (1)...(19): siRNA sense strand
gauuguucacucuguggua

SEQ ID NO: 2091949 - RNA, 19 nt, Homo sapiens
  misc_RNA (1)...(19): siRNA sense strand
ugaagaagaaaccaaguac

SEQ ID NO: 2091950 - RNA, 19 nt, Homo sapiens
  misc_RNA (1)...(19): siRNA sense strand
gcucuguaucuggcuaaua

SEQ ID NO: 2091951 - RNA, 19 nt, Homo sapiens
  misc_RNA (1)...(19): siRNA sense strand
gugauccuucucaagcuua

SEQ ID NO: 2091952 - RNA, 19 nt, Homo sapiens
  misc_RNA (1)...(19): siRNA sense strand
gcuguaaaauugcagacaa

SEQ ID NO: 2091953 - RNA, 19 nt, Homo sapiens
  misc_RNA (1)...(19): siRNA sense strand
gcgauguugugaggagguu

SEQ ID NO: 2091954 - RNA, 19 nt, Homo sapiens
  misc_RNA (1)...(19): siRNA sense strand
aagcuuauacugguucuga

SEQ ID NO: 2091955 - RNA, 19 nt, Homo sapiens
  misc_RNA (1)...(19): siRNA sense strand
uaauaggugauccuucuca

SEQ ID NO: 2091956 - RNA, 19 nt, Homo sapiens
  misc_RNA (1)...(19): siRNA sense strand
gcagacaaguaucuuuugg

SEQ ID NO: 2091957 - RNA, 19 nt, Homo sapiens
  misc_RNA (1)...(19): siRNA sense strand
ggauggacugcugcuguaa

SEQ ID NO: 2091958 - RNA, 19 nt, Homo sapiens
  misc_RNA (1)...(19): siRNA sense strand
gauguugugaggagguuau

SEQ ID NO: 2091959 - RNA, 19 nt, Homo sapiens
  misc_RNA (1)...(19): siRNA sense strand
guaaaauugcagacaagua

SEQ ID NO: 2091960 - RNA, 19 nt, Homo sapiens
  misc_RNA (1)...(19): siRNA sense strand
aauaggugauccuucucaa

SEQ ID NO: 2091961 - RNA, 19 nt, Homo sapiens
  misc_RNA (1)...(19): siRNA sense strand
gucuucaucaucaucuuua

SEQ ID NO: 2091962 - RNA, 19 nt, Homo sapiens
  misc_RNA (1)...(19): siRNA sense strand
gagggcuaaauuuacuaua

SEQ ID NO: 2091963 - RNA, 19 nt, Homo sapiens
  misc_RNA (1)...(19): siRNA sense strand
ggacauaauaggugauccu

SEQ ID NO: 2091964 - RNA, 19 nt, Homo sapiens
  misc_RNA (1)...(19): siRNA sense strand
gccauugcaccaacccauu

SEQ ID NO: 2091965 - RNA, 19 nt, Homo sapiens
  misc_RNA (1)...(19): siRNA sense strand
cagaaacuacaacagagau

SEQ ID NO: 2091966 - RNA, 19 nt, Homo sapiens
  misc_RNA (1)...(19): siRNA sense strand
ggagcugucagaaacuaca

SEQ ID NO: 2091967 - RNA, 19 nt, Homo sapiens
  misc_RNA (1)...(19): siRNA sense strand
uugaagaagaugaagaaga

SEQ ID NO: 2091968 - RNA, 19 nt, Homo sapiens
  misc_RNA (1)...(19): siRNA sense strand
ggauugucuucaucaucau

SEQ ID NO: 2091969 - RNA, 19 nt, Homo sapiens
  misc_RNA (1)...(19): siRNA sense strand
augaagaagaaaccaagua

SEQ ID NO: 2091970 - RNA, 19 nt, Homo sapiens
  misc_RNA (1)...(19): siRNA sense strand
gaugaagaagaaaccaagu

SEQ ID NO: 2091971 - RNA, 19 nt, Homo sapiens
  misc_RNA (1)...(19): siRNA sense strand
ggauaugacugcuuucuuu

SEQ ID NO: 2091972 - RNA, 19 nt, Homo sapiens
  misc_RNA (1)...(19): siRNA sense strand
ugaagaagaugaagaagaa

SEQ ID NO: 2091973 - RNA, 19 nt, Homo sapiens
  misc_RNA (1)...(19): siRNA sense strand
gagcauaccaggauaaauu

SEQ ID NO: 2091974 - RNA, 19 nt, Homo sapiens
  misc_RNA (1)...(19): siRNA sense strand
gcuaugaccuuuguuuauu

SEQ ID NO: 2091975 - RNA, 19 nt, Homo sapiens
  misc_RNA (1)...(19): siRNA sense strand
gaaaccaaguacgaaauuu

SEQ ID NO: 2091976 - RNA, 19 nt, Homo sapiens
  misc_RNA (1)...(19): siRNA sense strand
gaagaaaccaaguacgaaa

SEQ ID NO: 2091977 - RNA, 19 nt, Homo sapiens
  misc_RNA (1)...(19): siRNA sense strand
gggauugucuucaucauca

SEQ ID NO: 2091978 - RNA, 19 nt, Homo sapiens
  misc_RNA (1)...(19): siRNA sense strand
gauaugacugcuuucuuua

SEQ ID NO: 2091979 - RNA, 19 nt, Homo sapiens
  misc_RNA (1)...(19): siRNA sense strand
caagagggcuaaauuuacu

SEQ ID NO: 2091980 - RNA, 19 nt, Homo sapiens
  misc_RNA (1)...(19): siRNA sense strand
cauaauaggugauccuucu

SEQ ID NO: 2091981 - RNA, 19 nt, Homo sapiens
  misc_RNA (1)...(19): siRNA sense strand
aaucagauguguugugaga

SEQ ID NO: 2091982 - RNA, 19 nt, Homo sapiens
  misc_RNA (1)...(19): siRNA sense strand
gaagcguccuauuuguaaa

SEQ ID NO: 2091983 - RNA, 19 nt, Homo sapiens
  misc_RNA (1)...(19): siRNA sense strand
ggagaaaauuguucccuaa

SEQ ID NO: 2091984 - RNA, 19 nt, Homo sapiens
  misc_RNA (1)...(19): siRNA sense strand
caccuacugucacuguuua

SEQ ID NO: 2091985 - RNA, 19 nt, Homo sapiens
  misc_RNA (1)...(19): siRNA sense strand
gaccuugucugguuauaca

SEQ ID NO: 2091986 - RNA, 19 nt, Homo sapiens
  misc_RNA (1)...(19): siRNA sense strand
cguccuauuuguaaagaua

SEQ ID NO: 2091987 - RNA, 19 nt, Homo sapiens
  misc_RNA (1)...(19): siRNA sense strand
cuaauacaguugaagaaga

SEQ ID NO: 2091988 - RNA, 19 nt, Homo sapiens
  misc_RNA (1)...(19): siRNA sense strand
cauuauaucuggcaaagag

SEQ ID NO: 2091989 - RNA, 19 nt, Homo sapiens
  misc_RNA (1)...(19): siRNA sense strand
gggcuaaauuuacuauaag

SEQ ID NO: 2091990 - RNA, 19 nt, Homo sapiens
  misc_RNA (1)...(19): siRNA sense strand
ugaagcguccuauuuguaa

SEQ ID NO: 2091991 - RNA, 19 nt, Homo sapiens
  misc_RNA (1)...(19): siRNA sense strand
gaaacuacaacagagauga

SEQ ID NO: 2091992 - RNA, 19 nt, Homo sapiens
  misc_RNA (1)...(19): siRNA sense strand
gcaccaacccauuauaucu

SEQ ID NO: 2091993 - RNA, 19 nt, Homo sapiens
  misc_RNA (1)...(19): siRNA sense strand
aaagauaauuggcaagcau

SEQ ID NO: 2091994 - RNA, 19 nt, Homo sapiens
  misc_RNA (1)...(19): siRNA sense strand
ccacaccaguagauuguuc

SEQ ID NO: 2091995 - RNA, 19 nt, Homo sapiens
  misc_RNA (1)...(19): siRNA sense strand
ccauugcaccaacccauua

SEQ ID NO: 2091996 - RNA, 19 nt, Homo sapiens
  misc_RNA (1)...(19): siRNA sense strand
ucagauguguugugagaca

SEQ ID NO: 2091997 - RNA, 19 nt, Homo sapiens
  misc_RNA (1)...(19): siRNA sense strand
uaagugagcauaccaggau

SEQ ID NO: 2091998 - RNA, 19 nt, Homo sapiens
  misc_RNA (1)...(19): siRNA sense strand
uggauggacugcugcugua

SEQ ID NO: 2091999 - RNA, 19 nt, Homo sapiens
  misc_RNA (1)...(19): siRNA sense strand
ucauacaacucacugucaa

SEQ ID NO: 2092000 - RNA, 19 nt, Homo sapiens
  misc_RNA (1)...(19): siRNA sense strand
uucaagagggcuaaauuua

SEQ ID NO: 2092001 - RNA, 19 nt, Homo sapiens
  misc_RNA (1)...(19): siRNA sense strand
uccaugggcuuuagggaaa

SEQ ID NO: 2092002 - RNA, 19 nt, Homo sapiens
  misc_RNA (1)...(19): siRNA sense strand
uacugucacuguuuaugua

SEQ ID NO: 2092003 - RNA, 19 nt, Homo sapiens
  misc_RNA (1)...(19): siRNA sense strand
acaacucacugucaaugga

SEQ ID NO: 2092004 - RNA, 19 nt, Homo sapiens
  misc_RNA (1)...(19): siRNA sense strand
gaugacgauuuaauucaag

SEQ ID NO: 2092005 - RNA, 19 nt, Homo sapiens
  misc_RNA (1)...(19): siRNA sense strand
acaaguaucuuuuggcuau

SEQ ID NO: 2092006 - RNA, 19 nt, Homo sapiens
  misc_RNA (1)...(19): siRNA sense strand
caucaucuuuauccaguca

SEQ ID NO: 2092007 - RNA, 19 nt, Homo sapiens
  misc_RNA (1)...(19): siRNA sense strand
guaagcaggcgauguugug

SEQ ID NO: 2092008 - RNA, 19 nt, Homo sapiens
  misc_RNA (1)...(19): siRNA sense strand
ggucaaauagaucacauca

SEQ ID NO: 2092009 - RNA, 19 nt, Homo sapiens
  misc_RNA (1)...(19): siRNA sense strand
gaccuuuguuuauuucaag

SEQ ID NO: 2092010 - RNA, 19 nt, Homo sapiens
  misc_RNA (1)...(19): siRNA sense strand
guggagcugucagaaacua

SEQ ID NO: 2092011 - RNA, 19 nt, Homo sapiens
  misc_RNA (1)...(19): siRNA sense strand
acucugaagcguccuauuu

SEQ ID NO: 2092012 - RNA, 19 nt, Homo sapiens
  misc_RNA (1)...(19): siRNA sense strand
caguggagcugucagaaac

SEQ ID NO: 2092013 - RNA, 19 nt, Homo sapiens
  misc_RNA (1)...(19): siRNA sense strand
guuauacagcgucaggaua

SEQ ID NO: 2092014 - RNA, 19 nt, Homo sapiens
  misc_RNA (1)...(19): siRNA sense strand
ggugauccuucucaagcuu

SEQ ID NO: 2092015 - RNA, 19 nt, Homo sapiens
  misc_RNA (1)...(19): siRNA sense strand
cagcaggggugacagaaaa

SEQ ID NO: 2092016 - RNA, 19 nt, Homo sapiens
  misc_RNA (1)...(19): siRNA sense strand
cuacaacagagaugaaguu

SEQ ID NO: 2092017 - RNA, 19 nt, Homo sapiens
  misc_RNA (1)...(19): siRNA sense strand
ugucagaaacuacaacaga

SEQ ID NO: 2092018 - RNA, 19 nt, Homo sapiens
  misc_RNA (1)...(19): siRNA sense strand
aaaucagggucaaauagau

SEQ ID NO: 2092019 - RNA, 19 nt, Homo sapiens
  misc_RNA (1)...(19): siRNA sense strand
ggacugcugcuguaaaauu

SEQ ID NO: 2092020 - RNA, 19 nt, Homo sapiens
  misc_RNA (1)...(19): siRNA sense strand
gauaauuggcaagcauuug

SEQ ID NO: 2092021 - RNA, 19 nt, Homo sapiens
  misc_RNA (1)...(19): siRNA sense strand
ucaucuuuauccagucaua

SEQ ID NO: 2092022 - RNA, 19 nt, Homo sapiens
  misc_RNA (1)...(19): siRNA sense strand
agaaaccaaguacgaaauu

SEQ ID NO: 2092023 - RNA, 19 nt, Homo sapiens
  misc_RNA (1)...(19): siRNA sense strand
gaagaagaugaagaagaaa

SEQ ID NO: 2092024 - RNA, 19 nt, Homo sapiens
  misc_RNA (1)...(19): siRNA sense strand
gauggacugcugcuguaaa

SEQ ID NO: 2092025 - RNA, 19 nt, Homo sapiens
  misc_RNA (1)...(19): siRNA sense strand
ucucaggacucauacaacu

SEQ ID NO: 2092026 - RNA, 19 nt, Homo sapiens
  misc_RNA (1)...(19): siRNA sense strand
ucaagagggcuaaauuuac

SEQ ID NO: 2092027 - RNA, 19 nt, Homo sapiens
  misc_RNA (1)...(19): siRNA sense strand
ggcuaugaccuuuguuuau

SEQ ID NO: 2092028 - RNA, 19 nt, Homo sapiens
  misc_RNA (1)...(19): siRNA sense strand
ccaccuacugucacuguuu

SEQ ID NO: 2092029 - RNA, 19 nt, Homo sapiens
  misc_RNA (1)...(19): siRNA sense strand
uaaagauaauuggcaagca

SEQ ID NO: 2092030 - RNA, 19 nt, Homo sapiens
  misc_RNA (1)...(19): siRNA sense strand
aagaagaaaccaaguacga

SEQ ID NO: 2092031 - RNA, 19 nt, Homo sapiens
  misc_RNA (1)...(19): siRNA sense strand
uggcuaugaccuuuguuua

SEQ ID NO: 2092032 - RNA, 19 nt, Homo sapiens
  misc_RNA (1)...(19): siRNA sense strand
guaaaaucagggucaaaua

SEQ ID NO: 2092033 - RNA, 19 nt, Homo sapiens
  misc_RNA (1)...(19): siRNA sense strand
uagaucacaucagccuaaa

SEQ ID NO: 2092034 - RNA, 19 nt, Homo sapiens
  misc_RNA (1)...(19): siRNA sense strand
aaacuacaacagagaugaa

SEQ ID NO: 2092035 - RNA, 19 nt, Homo sapiens
  misc_RNA (1)...(19): siRNA sense strand
uuauacagcgucaggauau

SEQ ID NO: 2092036 - RNA, 19 nt, Homo sapiens
  misc_RNA (1)...(19): siRNA sense strand
auaauuggcaagcauuuga

SEQ ID NO: 2092037 - RNA, 19 nt, Homo sapiens
  misc_RNA (1)...(19): siRNA sense strand
ccaguagauuguucacucu

SEQ ID NO: 2092038 - RNA, 19 nt, Homo sapiens
  misc_RNA (1)...(19): siRNA sense strand
ucugaagcguccuauuugu

SEQ ID NO: 2092039 - RNA, 19 nt, Homo sapiens
  misc_RNA (1)...(19): siRNA sense strand
cugaagcguccuauuugua

SEQ ID NO: 2092040 - RNA, 19 nt, Homo sapiens
  misc_RNA (1)...(19): siRNA sense strand
aacauucucaggacucaua

SEQ ID NO: 2092041 - RNA, 19 nt, Homo sapiens
  misc_RNA (1)...(19): siRNA sense strand
ucagaaacuacaacagaga

SEQ ID NO: 2092042 - RNA, 19 nt, Homo sapiens
  misc_RNA (1)...(19): siRNA sense strand
auagaucacaucagccuaa

SEQ ID NO: 2092043 - RNA, 19 nt, Homo sapiens
  misc_RNA (1)...(19): siRNA sense strand
uuucaagagggcuaaauuu

SEQ ID NO: 2092044 - RNA, 19 nt, Homo sapiens
  misc_RNA (1)...(19): siRNA sense strand
agaagaaaccaaguacgaa

SEQ ID NO: 2092045 - RNA, 19 nt, Homo sapiens
  misc_RNA (1)...(19): siRNA sense strand
gcucugggauagaauugac

SEQ ID NO: 2092046 - RNA, 19 nt, Homo sapiens
  misc_RNA (1)...(19): siRNA sense strand
gcuaauacaguugaagaag

SEQ ID NO: 2092047 - RNA, 19 nt, Homo sapiens
  misc_RNA (1)...(19): siRNA sense strand
ucucaagcuuauacugguu

SEQ ID NO: 2092048 - RNA, 19 nt, Homo sapiens
  misc_RNA (1)...(19): siRNA sense strand
ucaggacucauacaacuca

SEQ ID NO: 2092049 - RNA, 19 nt, Homo sapiens
  misc_RNA (1)...(19): siRNA sense strand
gauuguucacucuguggua

SEQ ID NO: 2092050 - RNA, 19 nt, Homo sapiens
  misc_RNA (1)...(19): siRNA sense strand
ugaagaagaaaccaaguac

SEQ ID NO: 2092051 - RNA, 19 nt, Homo sapiens
  misc_RNA (1)...(19): siRNA sense strand
gcuguaaaauugcagacaa

SEQ ID NO: 2092052 - RNA, 19 nt, Homo sapiens
  misc_RNA (1)...(19): siRNA sense strand
gugauccuucucaagcuua

SEQ ID NO: 2092053 - RNA, 19 nt, Homo sapiens
  misc_RNA (1)...(19): siRNA sense strand
gcucuguaucuggcuaaua

SEQ ID NO: 2092054 - RNA, 19 nt, Homo sapiens
  misc_RNA (1)...(19): siRNA sense strand
gcagacaaguaucuuuugg

SEQ ID NO: 2092055 - RNA, 19 nt, Homo sapiens
  misc_RNA (1)...(19): siRNA sense strand
aagcuuauacugguucuga

SEQ ID NO: 2092056 - RNA, 19 nt, Homo sapiens
  misc_RNA (1)...(19): siRNA sense strand
uaauaggugauccuucuca

SEQ ID NO: 2092057 - RNA, 19 nt, Homo sapiens
  misc_RNA (1)...(19): siRNA sense strand
ggauggacugcugcuguaa

SEQ ID NO: 2092058 - RNA, 19 nt, Homo sapiens
  misc_RNA (1)...(19): siRNA sense strand
gauguugugaggagguuau

SEQ ID NO: 2092059 - RNA, 19 nt, Homo sapiens
  misc_RNA (1)...(19): siRNA sense strand
gcgauguugugaggagguu

SEQ ID NO: 2092060 - RNA, 19 nt, Homo sapiens
  misc_RNA (1)...(19): siRNA sense strand
cuacugucacuguuuaugu

SEQ ID NO: 2092061 - RNA, 19 nt, Homo sapiens
  misc_RNA (1)...(19): siRNA sense strand
aauaggugauccuucucaa

SEQ ID NO: 2092062 - RNA, 19 nt, Homo sapiens
  misc_RNA (1)...(19): siRNA sense strand
guaaaauugcagacaagua

SEQ ID NO: 2092063 - RNA, 19 nt, Homo sapiens
  misc_RNA (1)...(19): siRNA sense strand
gucuucaucaucaucuuua

SEQ ID NO: 2092064 - RNA, 19 nt, Homo sapiens
  misc_RNA (1)...(19): siRNA sense strand
gagggcuaaauuuacuaua

SEQ ID NO: 2092065 - RNA, 19 nt, Homo sapiens
  misc_RNA (1)...(19): siRNA sense strand
ggacauaauaggugauccu

SEQ ID NO: 2092066 - RNA, 19 nt, Homo sapiens
  misc_RNA (1)...(19): siRNA sense strand
gccauugcaccaacccauu

SEQ ID NO: 2092067 - RNA, 19 nt, Homo sapiens
  misc_RNA (1)...(19): siRNA sense strand
cagaaacuacaacagagau

SEQ ID NO: 2092068 - RNA, 19 nt, Homo sapiens
  misc_RNA (1)...(19): siRNA sense strand
ggagcugucagaaacuaca

SEQ ID NO: 2092069 - RNA, 19 nt, Homo sapiens
  misc_RNA (1)...(19): siRNA sense strand
uaaaaucagggucaaauag

SEQ ID NO: 2092070 - RNA, 19 nt, Homo sapiens
  misc_RNA (1)...(19): siRNA sense strand
ggauugucuucaucaucau

SEQ ID NO: 2092071 - RNA, 19 nt, Homo sapiens
  misc_RNA (1)...(19): siRNA sense strand
guacagacaugcaaaguaa

SEQ ID NO: 2092072 - RNA, 19 nt, Homo sapiens
  misc_RNA (1)...(19): siRNA sense strand
guacaugaccgguuacuua

SEQ ID NO: 2092073 - RNA, 19 nt, Homo sapiens
  misc_RNA (1)...(19): siRNA sense strand
ccucauauguguuuaguaa

SEQ ID NO: 2092074 - RNA, 19 nt, Homo sapiens
  misc_RNA (1)...(19): siRNA sense strand
ggagucugaugaugaaaua

SEQ ID NO: 2092075 - RNA, 19 nt, Homo sapiens
  misc_RNA (1)...(19): siRNA sense strand
ggacagagauacagcaagu

SEQ ID NO: 2092076 - RNA, 19 nt, Homo sapiens
  misc_RNA (1)...(19): siRNA sense strand
uaaccagacugacuuauug

SEQ ID NO: 2092077 - RNA, 19 nt, Homo sapiens
  misc_RNA (1)...(19): siRNA sense strand
ggacaccagugaugaauuc

SEQ ID NO: 2092078 - RNA, 19 nt, Homo sapiens
  misc_RNA (1)...(19): siRNA sense strand
caucauaccuguccacguu

SEQ ID NO: 2092079 - RNA, 19 nt, Homo sapiens
  misc_RNA (1)...(19): siRNA sense strand
gauaaggauucugaagaua

SEQ ID NO: 2092080 - RNA, 19 nt, Homo sapiens
  misc_RNA (1)...(19): siRNA sense strand
cgaugaaccugucuauauu

SEQ ID NO: 2092081 - RNA, 19 nt, Homo sapiens
  misc_RNA (1)...(19): siRNA sense strand
ggaauuacaggucuuuauu

SEQ ID NO: 2092082 - RNA, 19 nt, Homo sapiens
  misc_RNA (1)...(19): siRNA sense strand
caaaguugguguaugaaga

SEQ ID NO: 2092083 - RNA, 19 nt, Homo sapiens
  misc_RNA (1)...(19): siRNA sense strand
gaagaccuccagacgaaua

SEQ ID NO: 2092084 - RNA, 19 nt, Homo sapiens
  misc_RNA (1)...(19): siRNA sense strand
caacagagucaacugcaua

SEQ ID NO: 2092085 - RNA, 19 nt, Homo sapiens
  misc_RNA (1)...(19): siRNA sense strand
cagagaaccucauaugugu

SEQ ID NO: 2092086 - RNA, 19 nt, Homo sapiens
  misc_RNA (1)...(19): siRNA sense strand
acgaauagcuuuccaguuc

SEQ ID NO: 2092087 - RNA, 19 nt, Homo sapiens
  misc_RNA (1)...(19): siRNA sense strand
ggaaagcuuauucuucuaa

SEQ ID NO: 2092088 - RNA, 19 nt, Homo sapiens
  misc_RNA (1)...(19): siRNA sense strand
gaagaggagucugaugaug

SEQ ID NO: 2092089 - RNA, 19 nt, Homo sapiens
  misc_RNA (1)...(19): siRNA sense strand
gaaaucagaagcuguagga

SEQ ID NO: 2092090 - RNA, 19 nt, Homo sapiens
  misc_RNA (1)...(19): siRNA sense strand
ggauauagacacacacaaa

SEQ ID NO: 2092091 - RNA, 19 nt, Homo sapiens
  misc_RNA (1)...(19): siRNA sense strand
caaaguagaaacagcuaua

SEQ ID NO: 2092092 - RNA, 19 nt, Homo sapiens
  misc_RNA (1)...(19): siRNA sense strand
gugaugucauuuacaguua

SEQ ID NO: 2092093 - RNA, 19 nt, Homo sapiens
  misc_RNA (1)...(19): siRNA sense strand
uacaagagcuuacaaagag

SEQ ID NO: 2092094 - RNA, 19 nt, Homo sapiens
  misc_RNA (1)...(19): siRNA sense strand
uaacaguucaugcaucaua

SEQ ID NO: 2092095 - RNA, 19 nt, Homo sapiens
  misc_RNA (1)...(19): siRNA sense strand
gaagauaauugggaugaag

SEQ ID NO: 2092096 - RNA, 19 nt, Homo sapiens
  misc_RNA (1)...(19): siRNA sense strand
ggacaugcaacgccaguuu

SEQ ID NO: 2092097 - RNA, 19 nt, Homo sapiens
  misc_RNA (1)...(19): siRNA sense strand
aaagaagacuguauuaagg

SEQ ID NO: 2092098 - RNA, 19 nt, Homo sapiens
  misc_RNA (1)...(19): siRNA sense strand
gagaaccucauauguguuu

SEQ ID NO: 2092099 - RNA, 19 nt, Homo sapiens
  misc_RNA (1)...(19): siRNA sense strand
agaagagccugucaaguug

SEQ ID NO: 2092100 - RNA, 19 nt, Homo sapiens
  misc_RNA (1)...(19): siRNA sense strand
aagaagagccugucaaguu

SEQ ID NO: 2092101 - RNA, 19 nt, Homo sapiens
  misc_RNA (1)...(19): siRNA sense strand
aaaggagaguuacacagua

SEQ ID NO: 2092102 - RNA, 19 nt, Homo sapiens
  misc_RNA (1)...(19): siRNA sense strand
aggcaaaguugguguauga

SEQ ID NO: 2092103 - RNA, 19 nt, Homo sapiens
  misc_RNA (1)...(19): siRNA sense strand
agaaacagcuauaacaaag

SEQ ID NO: 2092104 - RNA, 19 nt, Homo sapiens
  misc_RNA (1)...(19): siRNA sense strand
gcagugaugucauuuacag

SEQ ID NO: 2092105 - RNA, 19 nt, Homo sapiens
  misc_RNA (1)...(19): siRNA sense strand
caaguuggcuguuguuugc

SEQ ID NO: 2092106 - RNA, 19 nt, Homo sapiens
  misc_RNA (1)...(19): siRNA sense strand
aaagaagucuacaggcauu

SEQ ID NO: 2092107 - RNA, 19 nt, Homo sapiens
  misc_RNA (1)...(19): siRNA sense strand
ugaaauagcagauaaggau

SEQ ID NO: 2092108 - RNA, 19 nt, Homo sapiens
  misc_RNA (1)...(19): siRNA sense strand
gaauagcuuuccaguucuu

SEQ ID NO: 2092109 - RNA, 19 nt, Homo sapiens
  misc_RNA (1)...(19): siRNA sense strand
uuucuuaucuggagcagua

SEQ ID NO: 2092110 - RNA, 19 nt, Homo sapiens
  misc_RNA (1)...(19): siRNA sense strand
caucagaccuccuaaugag

SEQ ID NO: 2092111 - RNA, 19 nt, Homo sapiens
  misc_RNA (1)...(19): siRNA sense strand
gacggucacuuacgaguau

SEQ ID NO: 2092112 - RNA, 19 nt, Homo sapiens
  misc_RNA (1)...(19): siRNA sense strand
ggaggagagugaaagugaa

SEQ ID NO: 2092113 - RNA, 19 nt, Homo sapiens
  misc_RNA (1)...(19): siRNA sense strand
gaaccugucuauauugacu

SEQ ID NO: 2092114 - RNA, 19 nt, Homo sapiens
  misc_RNA (1)...(19): siRNA sense strand
gaacguacagacaugcaaa

SEQ ID NO: 2092115 - RNA, 19 nt, Homo sapiens
  misc_RNA (1)...(19): siRNA sense strand
gcaagaagucaacaccaaa

SEQ ID NO: 2092116 - RNA, 19 nt, Homo sapiens
  misc_RNA (1)...(19): siRNA sense strand
aaaguaaagugcaaaugga

SEQ ID NO: 2092117 - RNA, 19 nt, Homo sapiens
  misc_RNA (1)...(19): siRNA sense strand
ggcaagaagucaacaccaa

SEQ ID NO: 2092118 - RNA, 19 nt, Homo sapiens
  misc_RNA (1)...(19): siRNA sense strand
guuaacaguucaugcauca

SEQ ID NO: 2092119 - RNA, 19 nt, Homo sapiens
  misc_RNA (1)...(19): siRNA sense strand
caugaccgguuacuuaaug

SEQ ID NO: 2092120 - RNA, 19 nt, Homo sapiens
  misc_RNA (1)...(19): siRNA sense strand
uaauagugcugugcuaaug

SEQ ID NO: 2092121 - RNA, 19 nt, Homo sapiens
  misc_RNA (1)...(19): siRNA sense strand
ccgaugaaccugucuauau

SEQ ID NO: 2092122 - RNA, 19 nt, Homo sapiens
  misc_RNA (1)...(19): siRNA sense strand
aggaagaccuccagacgaa

SEQ ID NO: 2092123 - RNA, 19 nt, Homo sapiens
  misc_RNA (1)...(19): siRNA sense strand
caccagugaugaauucuga

SEQ ID NO: 2092124 - RNA, 19 nt, Homo sapiens
  misc_RNA (1)...(19): siRNA sense strand
guagaaacagcuauaacaa

SEQ ID NO: 2092125 - RNA, 19 nt, Homo sapiens
  misc_RNA (1)...(19): siRNA sense strand
guaaccagacugacuuauu

SEQ ID NO: 2092126 - RNA, 19 nt, Homo sapiens
  misc_RNA (1)...(19): siRNA sense strand
gaaauagcagauaaggauu

SEQ ID NO: 2092127 - RNA, 19 nt, Homo sapiens
  misc_RNA (1)...(19): siRNA sense strand
gggacacucuaccaguuaa

SEQ ID NO: 2092128 - RNA, 19 nt, Homo sapiens
  misc_RNA (1)...(19): siRNA sense strand
ccagagaaccucauaugug

SEQ ID NO: 2092129 - RNA, 19 nt, Homo sapiens
  misc_RNA (1)...(19): siRNA sense strand
caaaguaaagugcaaaugg

SEQ ID NO: 2092130 - RNA, 19 nt, Homo sapiens
  misc_RNA (1)...(19): siRNA sense strand
aaacugcacaauucagaua

SEQ ID NO: 2092131 - RNA, 19 nt, Homo sapiens
  misc_RNA (1)...(19): siRNA sense strand
gacuuaacuuugucagaaa

SEQ ID NO: 2092132 - RNA, 19 nt, Homo sapiens
  misc_RNA (1)...(19): siRNA sense strand
agaggagucugaugaugaa

SEQ ID NO: 2092133 - RNA, 19 nt, Homo sapiens
  misc_RNA (1)...(19): siRNA sense strand
ugaaagugaagaagaauga

SEQ ID NO: 2092134 - RNA, 19 nt, Homo sapiens
  misc_RNA (1)...(19): siRNA sense strand
aaacagcuauaacaaaggu

SEQ ID NO: 2092135 - RNA, 19 nt, Homo sapiens
  misc_RNA (1)...(19): siRNA sense strand
gcuuagaaaguaacgauuu

SEQ ID NO: 2092136 - RNA, 19 nt, Homo sapiens
  misc_RNA (1)...(19): siRNA sense strand
gaagcuguaggaaugagua

SEQ ID NO: 2092137 - RNA, 19 nt, Homo sapiens
  misc_RNA (1)...(19): siRNA sense strand
ucacugauguucacuacca

SEQ ID NO: 2092138 - RNA, 19 nt, Homo sapiens
  misc_RNA (1)...(19): siRNA sense strand
agauaaggauucugaagau

SEQ ID NO: 2092139 - RNA, 19 nt, Homo sapiens
  misc_RNA (1)...(19): siRNA sense strand
caaagaagagccugucaag

SEQ ID NO: 2092140 - RNA, 19 nt, Homo sapiens
  misc_RNA (1)...(19): siRNA sense strand
acccagggcuuagaaagua

SEQ ID NO: 2092141 - RNA, 19 nt, Homo sapiens
  misc_RNA (1)...(19): siRNA sense strand
gaugaauucugaagcaaaa

SEQ ID NO: 2092142 - RNA, 19 nt, Homo sapiens
  misc_RNA (1)...(19): siRNA sense strand
gguuucagccuacuauuga

SEQ ID NO: 2092143 - RNA, 19 nt, Homo sapiens
  misc_RNA (1)...(19): siRNA sense strand
ugucauuguugcuuguaua

SEQ ID NO: 2092144 - RNA, 19 nt, Homo sapiens
  misc_RNA (1)...(19): siRNA sense strand
gauagcaacaccugggaaa

SEQ ID NO: 2092145 - RNA, 19 nt, Homo sapiens
  misc_RNA (1)...(19): siRNA sense strand
gaugaugaaauagcagaua

SEQ ID NO: 2092146 - RNA, 19 nt, Homo sapiens
  misc_RNA (1)...(19): siRNA sense strand
gcacagcaguugguagcau

SEQ ID NO: 2092147 - RNA, 19 nt, Homo sapiens
  misc_RNA (1)...(19): siRNA sense strand
ggaauggaacguacagaca

SEQ ID NO: 2092148 - RNA, 19 nt, Homo sapiens
  misc_RNA (1)...(19): siRNA sense strand
gaggagagugaaagugaaa

SEQ ID NO: 2092149 - RNA, 19 nt, Homo sapiens
  misc_RNA (1)...(19): siRNA sense strand
cacguugccugaccuggua

SEQ ID NO: 2092150 - RNA, 19 nt, Homo sapiens
  misc_RNA (1)...(19): siRNA sense strand
caauggauauagacacaca

SEQ ID NO: 2092151 - RNA, 19 nt, Homo sapiens
  misc_RNA (1)...(19): siRNA sense strand
gaugaaccugucuauauug

SEQ ID NO: 2092152 - RNA, 19 nt, Homo sapiens
  misc_RNA (1)...(19): siRNA sense strand
gaaugaguaaccagacuga

SEQ ID NO: 2092153 - RNA, 19 nt, Homo sapiens
  misc_RNA (1)...(19): siRNA sense strand
agagugcagugaugucauu

SEQ ID NO: 2092154 - RNA, 19 nt, Homo sapiens
  misc_RNA (1)...(19): siRNA sense strand
ggucgaacaaucaaacuau

SEQ ID NO: 2092155 - RNA, 19 nt, Homo sapiens
  misc_RNA (1)...(19): siRNA sense strand
gcuuucagcuggucgaaca

SEQ ID NO: 2092156 - RNA, 19 nt, Homo sapiens
  misc_RNA (1)...(19): siRNA sense strand
agcaguacaugaccgguua

SEQ ID NO: 2092157 - RNA, 19 nt, Homo sapiens
  misc_RNA (1)...(19): siRNA sense strand
gcacagccaggccuacuuc

SEQ ID NO: 2092158 - RNA, 19 nt, Homo sapiens
  misc_RNA (1)...(19): siRNA sense strand
caaguaacagcaucagaga

SEQ ID NO: 2092159 - RNA, 19 nt, Homo sapiens
  misc_RNA (1)...(19): siRNA sense strand
uuacaagagcuuacaaaga

SEQ ID NO: 2092160 - RNA, 19 nt, Homo sapiens
  misc_RNA (1)...(19): siRNA sense strand
cagcccagauggaaagaug

SEQ ID NO: 2092161 - RNA, 19 nt, Homo sapiens
  misc_RNA (1)...(19): siRNA sense strand
ugaggacguugaagaggaa

SEQ ID NO: 2092162 - RNA, 19 nt, Homo sapiens
  misc_RNA (1)...(19): siRNA sense strand
aaauguguguuaacaguuc

SEQ ID NO: 2092163 - RNA, 19 nt, Homo sapiens
  misc_RNA (1)...(19): siRNA sense strand
cuaggaauguaaaccuuau

SEQ ID NO: 2092164 - RNA, 19 nt, Homo sapiens
  misc_RNA (1)...(19): siRNA sense strand
guagagagcaagaggaagu

SEQ ID NO: 2092165 - RNA, 19 nt, Homo sapiens
  misc_RNA (1)...(19): siRNA sense strand
ccacaaaccgagcaaguag

SEQ ID NO: 2092166 - RNA, 19 nt, Homo sapiens
  misc_RNA (1)...(19): siRNA sense strand
gcuuuaaacuccagagaac

SEQ ID NO: 2092167 - RNA, 19 nt, Homo sapiens
  misc_RNA (1)...(19): siRNA sense strand
cauuuacaguuaccgauga

SEQ ID NO: 2092168 - RNA, 19 nt, Homo sapiens
  misc_RNA (1)...(19): siRNA sense strand
gaauggaacguacagacau

SEQ ID NO: 2092169 - RNA, 19 nt, Homo sapiens
  misc_RNA (1)...(19): siRNA sense strand
caagcccgcuccuccacaa

SEQ ID NO: 2092170 - RNA, 19 nt, Homo sapiens
  misc_RNA (1)...(19): siRNA sense strand
gaguaaccagacugacuua

SEQ ID NO: 2092171 - RNA, 19 nt, Homo sapiens
  misc_RNA (1)...(19): siRNA sense strand
ggaauugccugaugcgaua

SEQ ID NO: 2092172 - RNA, 19 nt, Homo sapiens
  misc_RNA (1)...(19): siRNA sense strand
ucgaagacaugauugauua

SEQ ID NO: 2092173 - RNA, 19 nt, Homo sapiens
  misc_RNA (1)...(19): siRNA sense strand
gccuauaucuucauucaua

SEQ ID NO: 2092174 - RNA, 19 nt, Homo sapiens
  misc_RNA (1)...(19): siRNA sense strand
ggagaaagaagugucauua

SEQ ID NO: 2092175 - RNA, 19 nt, Homo sapiens
  misc_RNA (1)...(19): siRNA sense strand
gaaagaagugucauuauca

SEQ ID NO: 2092176 - RNA, 19 nt, Homo sapiens
  misc_RNA (1)...(19): siRNA sense strand
ggacugaucucacagaaaa

SEQ ID NO: 2092177 - RNA, 19 nt, Homo sapiens
  misc_RNA (1)...(19): siRNA sense strand
gaacuacaggcuuuacuuu

SEQ ID NO: 2092178 - RNA, 19 nt, Homo sapiens
  misc_RNA (1)...(19): siRNA sense strand
gggauuuacuuuauacuga

SEQ ID NO: 2092179 - RNA, 19 nt, Homo sapiens
  misc_RNA (1)...(19): siRNA sense strand
ggacaagaauggacuggau

SEQ ID NO: 2092180 - RNA, 19 nt, Homo sapiens
  misc_RNA (1)...(19): siRNA sense strand
caaagguguuccuggauuu

SEQ ID NO: 2092181 - RNA, 19 nt, Homo sapiens
  misc_RNA (1)...(19): siRNA sense strand
agaaagaagugucauuauc

SEQ ID NO: 2092182 - RNA, 19 nt, Homo sapiens
  misc_RNA (1)...(19): siRNA sense strand
ucaaagguguuccuggauu

SEQ ID NO: 2092183 - RNA, 19 nt, Homo sapiens
  misc_RNA (1)...(19): siRNA sense strand
cgauauagcuaccucagau

SEQ ID NO: 2092184 - RNA, 19 nt, Homo sapiens
  misc_RNA (1)...(19): siRNA sense strand
ggaaauggaaggaugacaa

SEQ ID NO: 2092185 - RNA, 19 nt, Homo sapiens
  misc_RNA (1)...(19): siRNA sense strand
cagcaagucucgaaguaau

SEQ ID NO: 2092186 - RNA, 19 nt, Homo sapiens
  misc_RNA (1)...(19): siRNA sense strand
cacccuaccuguggcauua

SEQ ID NO: 2092187 - RNA, 19 nt, Homo sapiens
  misc_RNA (1)...(19): siRNA sense strand
gagaaagaagugucauuau

SEQ ID NO: 2092188 - RNA, 19 nt, Homo sapiens
  misc_RNA (1)...(19): siRNA sense strand
uccaagaacuacaggcuuu

SEQ ID NO: 2092189 - RNA, 19 nt, Homo sapiens
  misc_RNA (1)...(19): siRNA sense strand
guaaacccaucuugguauc

SEQ ID NO: 2092190 - RNA, 19 nt, Homo sapiens
  misc_RNA (1)...(19): siRNA sense strand
caagagccauuucgaagac

SEQ ID NO: 2092191 - RNA, 19 nt, Homo sapiens
  misc_RNA (1)...(19): siRNA sense strand
ccucaaagcgagucucaaa

SEQ ID NO: 2092192 - RNA, 19 nt, Homo sapiens
  misc_RNA (1)...(19): siRNA sense strand
agaagggacugaucucaca

SEQ ID NO: 2092193 - RNA, 19 nt, Homo sapiens
  misc_RNA (1)...(19): siRNA sense strand
gaaauggaaggaugacaag

SEQ ID NO: 2092194 - RNA, 19 nt, Homo sapiens
  misc_RNA (1)...(19): siRNA sense strand
caaagcgagucucaaaggu

SEQ ID NO: 2092195 - RNA, 19 nt, Homo sapiens
  misc_RNA (1)...(19): siRNA sense strand
ccacuucaacuccucauau

SEQ ID NO: 2092196 - RNA, 19 nt, Homo sapiens
  misc_RNA (1)...(19): siRNA sense strand
aacagcaagucucgaagua

SEQ ID NO: 2092197 - RNA, 19 nt, Homo sapiens
  misc_RNA (1)...(19): siRNA sense strand
gaaaacagcaagucucgaa

SEQ ID NO: 2092198 - RNA, 19 nt, Homo sapiens
  misc_RNA (1)...(19): siRNA sense strand
ugacaagagccauuucgaa

SEQ ID NO: 2092199 - RNA, 19 nt, Homo sapiens
  misc_RNA (1)...(19): siRNA sense strand
cacuucaacuccucauauu

SEQ ID NO: 2092200 - RNA, 19 nt, Homo sapiens
  misc_RNA (1)...(19): siRNA sense strand
gauauucacgaaccacuuc

SEQ ID NO: 2092201 - RNA, 19 nt, Homo sapiens
  misc_RNA (1)...(19): siRNA sense strand
guaaugcauuugcugaaaa

SEQ ID NO: 2092202 - RNA, 19 nt, Homo sapiens
  misc_RNA (1)...(19): siRNA sense strand
gauauagcuaccucagauu

SEQ ID NO: 2092203 - RNA, 19 nt, Homo sapiens
  misc_RNA (1)...(19): siRNA sense strand
aguaaugcauuugcugaaa

SEQ ID NO: 2092204 - RNA, 19 nt, Homo sapiens
  misc_RNA (1)...(19): siRNA sense strand
ccaagaacuacaggcuuua

SEQ ID NO: 2092205 - RNA, 19 nt, Homo sapiens
  misc_RNA (1)...(19): siRNA sense strand
caugaaccaucggacaaga

SEQ ID NO: 2092206 - RNA, 19 nt, Homo sapiens
  misc_RNA (1)...(19): siRNA sense strand
ugguaucgcuggaucaaca

SEQ ID NO: 2092207 - RNA, 19 nt, Homo sapiens
  misc_RNA (1)...(19): siRNA sense strand
cugccuauaucuucauuca

SEQ ID NO: 2092208 - RNA, 19 nt, Homo sapiens
  misc_RNA (1)...(19): siRNA sense strand
ccauuucgaagacaugauu

SEQ ID NO: 2092209 - RNA, 19 nt, Homo sapiens
  misc_RNA (1)...(19): siRNA sense strand
acaagagccauuucgaaga

SEQ ID NO: 2092210 - RNA, 19 nt, Homo sapiens
  misc_RNA (1)...(19): siRNA sense strand
ucaaagcgagucucaaagg

SEQ ID NO: 2092211 - RNA, 19 nt, Homo sapiens
  misc_RNA (1)...(19): siRNA sense strand
gcugcugccuauaucuuca

SEQ ID NO: 2092212 - RNA, 19 nt, Homo sapiens
  misc_RNA (1)...(19): siRNA sense strand
ucacgaaccacuucaacuc

SEQ ID NO: 2092213 - RNA, 19 nt, Homo sapiens
  misc_RNA (1)...(19): siRNA sense strand
ccuguggaauugccugaug

SEQ ID NO: 2092214 - RNA, 19 nt, Homo sapiens
  misc_RNA (1)...(19): siRNA sense strand
gaagacaugauugauuacu

SEQ ID NO: 2092215 - RNA, 19 nt, Homo sapiens
  misc_RNA (1)...(19): siRNA sense strand
cauggaaagggauuuacuu

SEQ ID NO: 2092216 - RNA, 19 nt, Homo sapiens
  misc_RNA (1)...(19): siRNA sense strand
ugucauggaaagggauuua

SEQ ID NO: 2092217 - RNA, 19 nt, Homo sapiens
  misc_RNA (1)...(19): siRNA sense strand
aaacagcaagucucgaagu

SEQ ID NO: 2092218 - RNA, 19 nt, Homo sapiens
  misc_RNA (1)...(19): siRNA sense strand
uguaaacccaucuugguau

SEQ ID NO: 2092219 - RNA, 19 nt, Homo sapiens
  misc_RNA (1)...(19): siRNA sense strand
gcgauauagcuaccucaga

SEQ ID NO: 2092220 - RNA, 19 nt, Homo sapiens
  misc_RNA (1)...(19): siRNA sense strand
gucucgaaguaaugcauuu

SEQ ID NO: 2092221 - RNA, 19 nt, Homo sapiens
  misc_RNA (1)...(19): siRNA sense strand
ugaaccaucggacaagaau

SEQ ID NO: 2092222 - RNA, 19 nt, Homo sapiens
  misc_RNA (1)...(19): siRNA sense strand
gggacugaucucacagaaa

SEQ ID NO: 2092223 - RNA, 19 nt, Homo sapiens
  misc_RNA (1)...(19): siRNA sense strand
gcauuuguuccuggagaaa

SEQ ID NO: 2092224 - RNA, 19 nt, Homo sapiens
  misc_RNA (1)...(19): siRNA sense strand
agaacuacaggcuuuacuu

SEQ ID NO: 2092225 - RNA, 19 nt, Homo sapiens
  misc_RNA (1)...(19): siRNA sense strand
gcaagucucgaaguaaugc

SEQ ID NO: 2092226 - RNA, 19 nt, Homo sapiens
  misc_RNA (1)...(19): siRNA sense strand
caagaauggacuggauguu

SEQ ID NO: 2092227 - RNA, 19 nt, Homo sapiens
  misc_RNA (1)...(19): siRNA sense strand
gaaccaucggacaagaaug

SEQ ID NO: 2092228 - RNA, 19 nt, Homo sapiens
  misc_RNA (1)...(19): siRNA sense strand
aagaauggacuggauguuc

SEQ ID NO: 2092229 - RNA, 19 nt, Homo sapiens
  misc_RNA (1)...(19): siRNA sense strand
ggaauugccugaugcgaua

SEQ ID NO: 2092230 - RNA, 19 nt, Homo sapiens
  misc_RNA (1)...(19): siRNA sense strand
ucgaagacaugauugauua

SEQ ID NO: 2092231 - RNA, 19 nt, Homo sapiens
  misc_RNA (1)...(19): siRNA sense strand
gccuauaucuucauucaua

SEQ ID NO: 2092232 - RNA, 19 nt, Homo sapiens
  misc_RNA (1)...(19): siRNA sense strand
ggagaaagaagugucauua

SEQ ID NO: 2092233 - RNA, 19 nt, Homo sapiens
  misc_RNA (1)...(19): siRNA sense strand
gaaagaagugucauuauca

SEQ ID NO: 2092234 - RNA, 19 nt, Homo sapiens
  misc_RNA (1)...(19): siRNA sense strand
ggacugaucucacagaaaa

SEQ ID NO: 2092235 - RNA, 19 nt, Homo sapiens
  misc_RNA (1)...(19): siRNA sense strand
gaacuacaggcuuuacuuu

SEQ ID NO: 2092236 - RNA, 19 nt, Homo sapiens
  misc_RNA (1)...(19): siRNA sense strand
gggauuuacuuuauacuga

SEQ ID NO: 2092237 - RNA, 19 nt, Homo sapiens
  misc_RNA (1)...(19): siRNA sense strand
ggacaagaauggacuggau

SEQ ID NO: 2092238 - RNA, 19 nt, Homo sapiens
  misc_RNA (1)...(19): siRNA sense strand
caaagguguuccuggauuu

SEQ ID NO: 2092239 - RNA, 19 nt, Homo sapiens
  misc_RNA (1)...(19): siRNA sense strand
agaaagaagugucauuauc

SEQ ID NO: 2092240 - RNA, 19 nt, Homo sapiens
  misc_RNA (1)...(19): siRNA sense strand
ucaaagguguuccuggauu

SEQ ID NO: 2092241 - RNA, 19 nt, Homo sapiens
  misc_RNA (1)...(19): siRNA sense strand
cgauauagcuaccucagau

SEQ ID NO: 2092242 - RNA, 19 nt, Homo sapiens
  misc_RNA (1)...(19): siRNA sense strand
ggaaauggaaggaugacaa

SEQ ID NO: 2092243 - RNA, 19 nt, Homo sapiens
  misc_RNA (1)...(19): siRNA sense strand
cagcaagucucgaaguaau

SEQ ID NO: 2092244 - RNA, 19 nt, Homo sapiens
  misc_RNA (1)...(19): siRNA sense strand
cacccuaccuguggcauua

SEQ ID NO: 2092245 - RNA, 19 nt, Homo sapiens
  misc_RNA (1)...(19): siRNA sense strand
gagaaagaagugucauuau

SEQ ID NO: 2092246 - RNA, 19 nt, Homo sapiens
  misc_RNA (1)...(19): siRNA sense strand
uccaagaacuacaggcuuu

SEQ ID NO: 2092247 - RNA, 19 nt, Homo sapiens
  misc_RNA (1)...(19): siRNA sense strand
guaaacccaucuugguauc

SEQ ID NO: 2092248 - RNA, 19 nt, Homo sapiens
  misc_RNA (1)...(19): siRNA sense strand
caagagccauuucgaagac

SEQ ID NO: 2092249 - RNA, 19 nt, Homo sapiens
  misc_RNA (1)...(19): siRNA sense strand
ccucaaagcgagucucaaa

SEQ ID NO: 2092250 - RNA, 19 nt, Homo sapiens
  misc_RNA (1)...(19): siRNA sense strand
agaagggacugaucucaca

SEQ ID NO: 2092251 - RNA, 19 nt, Homo sapiens
  misc_RNA (1)...(19): siRNA sense strand
gaaauggaaggaugacaag

SEQ ID NO: 2092252 - RNA, 19 nt, Homo sapiens
  misc_RNA (1)...(19): siRNA sense strand
caaagcgagucucaaaggu

SEQ ID NO: 2092253 - RNA, 19 nt, Homo sapiens
  misc_RNA (1)...(19): siRNA sense strand
ccacuucaacuccucauau

SEQ ID NO: 2092254 - RNA, 19 nt, Homo sapiens
  misc_RNA (1)...(19): siRNA sense strand
aacagcaagucucgaagua

SEQ ID NO: 2092255 - RNA, 19 nt, Homo sapiens
  misc_RNA (1)...(19): siRNA sense strand
gaaaacagcaagucucgaa

SEQ ID NO: 2092256 - RNA, 19 nt, Homo sapiens
  misc_RNA (1)...(19): siRNA sense strand
ugacaagagccauuucgaa

SEQ ID NO: 2092257 - RNA, 19 nt, Homo sapiens
  misc_RNA (1)...(19): siRNA sense strand
cacuucaacuccucauauu

SEQ ID NO: 2092258 - RNA, 19 nt, Homo sapiens
  misc_RNA (1)...(19): siRNA sense strand
gauauucacgaaccacuuc

SEQ ID NO: 2092259 - RNA, 19 nt, Homo sapiens
  misc_RNA (1)...(19): siRNA sense strand
guaaugcauuugcugaaaa

SEQ ID NO: 2092260 - RNA, 19 nt, Homo sapiens
  misc_RNA (1)...(19): siRNA sense strand
gauauagcuaccucagauu

SEQ ID NO: 2092261 - RNA, 19 nt, Homo sapiens
  misc_RNA (1)...(19): siRNA sense strand
aguaaugcauuugcugaaa

SEQ ID NO: 2092262 - RNA, 19 nt, Homo sapiens
  misc_RNA (1)...(19): siRNA sense strand
ccaagaacuacaggcuuua

SEQ ID NO: 2092263 - RNA, 19 nt, Homo sapiens
  misc_RNA (1)...(19): siRNA sense strand
caugaaccaucggacaaga

SEQ ID NO: 2092264 - RNA, 19 nt, Homo sapiens
  misc_RNA (1)...(19): siRNA sense strand
ugguaucgcuggaucaaca

SEQ ID NO: 2092265 - RNA, 19 nt, Homo sapiens
  misc_RNA (1)...(19): siRNA sense strand
cugccuauaucuucauuca

SEQ ID NO: 2092266 - RNA, 19 nt, Homo sapiens
  misc_RNA (1)...(19): siRNA sense strand
ccauuucgaagacaugauu

SEQ ID NO: 2092267 - RNA, 19 nt, Homo sapiens
  misc_RNA (1)...(19): siRNA sense strand
acaagagccauuucgaaga

SEQ ID NO: 2092268 - RNA, 19 nt, Homo sapiens
  misc_RNA (1)...(19): siRNA sense strand
ucaaagcgagucucaaagg

SEQ ID NO: 2092269 - RNA, 19 nt, Homo sapiens
  misc_RNA (1)...(19): siRNA sense strand
gcugcugccuauaucuuca

SEQ ID NO: 2092270 - RNA, 19 nt, Homo sapiens
  misc_RNA (1)...(19): siRNA sense strand
ucacgaaccacuucaacuc

SEQ ID NO: 2092271 - RNA, 19 nt, Homo sapiens
  misc_RNA (1)...(19): siRNA sense strand
ccuguggaauugccugaug

SEQ ID NO: 2092272 - RNA, 19 nt, Homo sapiens
  misc_RNA (1)...(19): siRNA sense strand
gaagacaugauugauuacu

SEQ ID NO: 2092273 - RNA, 19 nt, Homo sapiens
  misc_RNA (1)...(19): siRNA sense strand
cauggaaagggauuuacuu

SEQ ID NO: 2092274 - RNA, 19 nt, Homo sapiens
  misc_RNA (1)...(19): siRNA sense strand
ugucauggaaagggauuua

SEQ ID NO: 2092275 - RNA, 19 nt, Homo sapiens
  misc_RNA (1)...(19): siRNA sense strand
aaacagcaagucucgaagu

SEQ ID NO: 2092276 - RNA, 19 nt, Homo sapiens
  misc_RNA (1)...(19): siRNA sense strand
uguaaacccaucuugguau

SEQ ID NO: 2092277 - RNA, 19 nt, Homo sapiens
  misc_RNA (1)...(19): siRNA sense strand
gcgauauagcuaccucaga

SEQ ID NO: 2092278 - RNA, 19 nt, Homo sapiens
  misc_RNA (1)...(19): siRNA sense strand
gucucgaaguaaugcauuu

SEQ ID NO: 2092279 - RNA, 19 nt, Homo sapiens
  misc_RNA (1)...(19): siRNA sense strand
ugaaccaucggacaagaau

SEQ ID NO: 2092280 - RNA, 19 nt, Homo sapiens
  misc_RNA (1)...(19): siRNA sense strand
gggacugaucucacagaaa

SEQ ID NO: 2092281 - RNA, 19 nt, Homo sapiens
  misc_RNA (1)...(19): siRNA sense strand
gcauuuguuccuggagaaa

SEQ ID NO: 2092282 - RNA, 19 nt, Homo sapiens
  misc_RNA (1)...(19): siRNA sense strand
agaacuacaggcuuuacuu

SEQ ID NO: 2092283 - RNA, 19 nt, Homo sapiens
  misc_RNA (1)...(19): siRNA sense strand
gcaagucucgaaguaaugc

SEQ ID NO: 2092284 - RNA, 19 nt, Homo sapiens
  misc_RNA (1)...(19): siRNA sense strand
caagaauggacuggauguu

SEQ ID NO: 2092285 - RNA, 19 nt, Homo sapiens
  misc_RNA (1)...(19): siRNA sense strand
gaaccaucggacaagaaug

SEQ ID NO: 2092286 - RNA, 19 nt, Homo sapiens
  misc_RNA (1)...(19): siRNA sense strand
aagaauggacuggauguuc

SEQ ID NO: 2092287 - RNA, 19 nt, Homo sapiens
  misc_RNA (1)...(19): siRNA sense strand
gagccagccugauagguuu

SEQ ID NO: 2092288 - RNA, 19 nt, Homo sapiens
  misc_RNA (1)...(19): siRNA sense strand
ggacguauccuuucagcuu

SEQ ID NO: 2092289 - RNA, 19 nt, Homo sapiens
  misc_RNA (1)...(19): siRNA sense strand
gcaaacauagaccugaaua

SEQ ID NO: 2092290 - RNA, 19 nt, Homo sapiens
  misc_RNA (1)...(19): siRNA sense strand
gcagacagcccuucuuuag

SEQ ID NO: 2092291 - RNA, 19 nt, Homo sapiens
  misc_RNA (1)...(19): siRNA sense strand
gaagccaccuacaacagaa

SEQ ID NO: 2092292 - RNA, 19 nt, Homo sapiens
  misc_RNA (1)...(19): siRNA sense strand
gacguauccuuucagcuua

SEQ ID NO: 2092293 - RNA, 19 nt, Homo sapiens
  misc_RNA (1)...(19): siRNA sense strand
gagcagacagcccuucuuu

SEQ ID NO: 2092294 - RNA, 19 nt, Homo sapiens
  misc_RNA (1)...(19): siRNA sense strand
ggaagcacaucuuuuauga

SEQ ID NO: 2092295 - RNA, 19 nt, Homo sapiens
  misc_RNA (1)...(19): siRNA sense strand
ggaugacgcugcaggacuu

SEQ ID NO: 2092296 - RNA, 19 nt, Homo sapiens
  misc_RNA (1)...(19): siRNA sense strand
gcacagcaauccccaguuu

SEQ ID NO: 2092297 - RNA, 19 nt, Homo sapiens
  misc_RNA (1)...(19): siRNA sense strand
gaagcucucucagaagguu

SEQ ID NO: 2092298 - RNA, 19 nt, Homo sapiens
  misc_RNA (1)...(19): siRNA sense strand
guacauacaugguggucau

SEQ ID NO: 2092299 - RNA, 19 nt, Homo sapiens
  misc_RNA (1)...(19): siRNA sense strand
guucuuggcugcuuugcaa

SEQ ID NO: 2092300 - RNA, 19 nt, Homo sapiens
  misc_RNA (1)...(19): siRNA sense strand
gcagagugccugaggaaug

SEQ ID NO: 2092301 - RNA, 19 nt, Homo sapiens
  misc_RNA (1)...(19): siRNA sense strand
cugguuaucuguaaacuga

SEQ ID NO: 2092302 - RNA, 19 nt, Homo sapiens
  misc_RNA (1)...(19): siRNA sense strand
caagcucucugguuccuau

SEQ ID NO: 2092303 - RNA, 19 nt, Homo sapiens
  misc_RNA (1)...(19): siRNA sense strand
gcucagugaugacgucugu

SEQ ID NO: 2092304 - RNA, 19 nt, Homo sapiens
  misc_RNA (1)...(19): siRNA sense strand
aggaauggcugccucuuug

SEQ ID NO: 2092305 - RNA, 19 nt, Homo sapiens
  misc_RNA (1)...(19): siRNA sense strand
ccucugagccagccugaua

SEQ ID NO: 2092306 - RNA, 19 nt, Homo sapiens
  misc_RNA (1)...(19): siRNA sense strand
gaguuucacugagaaguau

SEQ ID NO: 2092307 - RNA, 19 nt, Homo sapiens
  misc_RNA (1)...(19): siRNA sense strand
ggccaugccuauacucuca

SEQ ID NO: 2092308 - RNA, 19 nt, Homo sapiens
  misc_RNA (1)...(19): siRNA sense strand
caucgugcccugcauauug

SEQ ID NO: 2092309 - RNA, 19 nt, Homo sapiens
  misc_RNA (1)...(19): siRNA sense strand
gcgccaagguacucuagga

SEQ ID NO: 2092310 - RNA, 19 nt, Homo sapiens
  misc_RNA (1)...(19): siRNA sense strand
aaacauagaccugaauauc

SEQ ID NO: 2092311 - RNA, 19 nt, Homo sapiens
  misc_RNA (1)...(19): siRNA sense strand
cagauggacuuugucaguu

SEQ ID NO: 2092312 - RNA, 19 nt, Homo sapiens
  misc_RNA (1)...(19): siRNA sense strand
ccaggaagcacaucuuuua

SEQ ID NO: 2092313 - RNA, 19 nt, Homo sapiens
  misc_RNA (1)...(19): siRNA sense strand
aaaggagacuggagugaca

SEQ ID NO: 2092314 - RNA, 19 nt, Homo sapiens
  misc_RNA (1)...(19): siRNA sense strand
agauggacuuugucaguuu

SEQ ID NO: 2092315 - RNA, 19 nt, Homo sapiens
  misc_RNA (1)...(19): siRNA sense strand
ccuauacucucacaggaau

SEQ ID NO: 2092316 - RNA, 19 nt, Homo sapiens
  misc_RNA (1)...(19): siRNA sense strand
gaauggcugccucuuugaa

SEQ ID NO: 2092317 - RNA, 19 nt, Homo sapiens
  misc_RNA (1)...(19): siRNA sense strand
caggaaucaugcucaguga

SEQ ID NO: 2092318 - RNA, 19 nt, Homo sapiens
  misc_RNA (1)...(19): siRNA sense strand
ggaaaggagacuggaguga

SEQ ID NO: 2092319 - RNA, 19 nt, Homo sapiens
  misc_RNA (1)...(19): siRNA sense strand
guaggagacugcugguucu

SEQ ID NO: 2092320 - RNA, 19 nt, Homo sapiens
  misc_RNA (1)...(19): siRNA sense strand
ggaagcuggcgccaaggua

SEQ ID NO: 2092321 - RNA, 19 nt, Homo sapiens
  misc_RNA (1)...(19): siRNA sense strand
gcucucugguuccuaugaa

SEQ ID NO: 2092322 - RNA, 19 nt, Homo sapiens
  misc_RNA (1)...(19): siRNA sense strand
gauggacuuugucaguuuc

SEQ ID NO: 2092323 - RNA, 19 nt, Homo sapiens
  misc_RNA (1)...(19): siRNA sense strand
gauagaagaccaaaaugaa

SEQ ID NO: 2092324 - RNA, 19 nt, Homo sapiens
  misc_RNA (1)...(19): siRNA sense strand
ggagauagaagaccaaaau

SEQ ID NO: 2092325 - RNA, 19 nt, Homo sapiens
  misc_RNA (1)...(19): siRNA sense strand
gcccagaaguggacguaca

SEQ ID NO: 2092326 - RNA, 19 nt, Homo sapiens
  misc_RNA (1)...(19): siRNA sense strand
ggggaaagguggaauggaa

SEQ ID NO: 2092327 - RNA, 19 nt, Homo sapiens
  misc_RNA (1)...(19): siRNA sense strand
cugaauaucucgucaagcu

SEQ ID NO: 2092328 - RNA, 19 nt, Homo sapiens
  misc_RNA (1)...(19): siRNA sense strand
cugaagcccuuguagacuu

SEQ ID NO: 2092329 - RNA, 19 nt, Homo sapiens
  misc_RNA (1)...(19): siRNA sense strand
gagggcgucuccacagcaa

SEQ ID NO: 2092330 - RNA, 19 nt, Homo sapiens
  misc_RNA (1)...(19): siRNA sense strand
gagggaggcaggaaucaug

SEQ ID NO: 2092331 - RNA, 19 nt, Homo sapiens
  misc_RNA (1)...(19): siRNA sense strand
ugaaaggcaggaugaauuc

SEQ ID NO: 2092332 - RNA, 19 nt, Homo sapiens
  misc_RNA (1)...(19): siRNA sense strand
gcaauccccaguuuuauuu

SEQ ID NO: 2092333 - RNA, 19 nt, Homo sapiens
  misc_RNA (1)...(19): siRNA sense strand
acauagaccugaauaucuc

SEQ ID NO: 2092334 - RNA, 19 nt, Homo sapiens
  misc_RNA (1)...(19): siRNA sense strand
ggaauggcugccucuuuga

SEQ ID NO: 2092335 - RNA, 19 nt, Homo sapiens
  misc_RNA (1)...(19): siRNA sense strand
ggggagcacuucuggaaaa

SEQ ID NO: 2092336 - RNA, 19 nt, Homo sapiens
  misc_RNA (1)...(19): siRNA sense strand
caagauggcaaagggauau

SEQ ID NO: 2092337 - RNA, 19 nt, Homo sapiens
  misc_RNA (1)...(19): siRNA sense strand
cuuaaugcaucagguacua

SEQ ID NO: 2092338 - RNA, 19 nt, Homo sapiens
  misc_RNA (1)...(19): siRNA sense strand
cgaagccaccuacaacaga

SEQ ID NO: 2092339 - RNA, 19 nt, Homo sapiens
  misc_RNA (1)...(19): siRNA sense strand
ccagauggacuuugucagu

SEQ ID NO: 2092340 - RNA, 19 nt, Homo sapiens
  misc_RNA (1)...(19): siRNA sense strand
cuaugagcauccaggaauu

SEQ ID NO: 2092341 - RNA, 19 nt, Homo sapiens
  misc_RNA (1)...(19): siRNA sense strand
gcuccugguuaucuguaaa

SEQ ID NO: 2092342 - RNA, 19 nt, Homo sapiens
  misc_RNA (1)...(19): siRNA sense strand
gggaaagguggaauggaaa

SEQ ID NO: 2092343 - RNA, 19 nt, Homo sapiens
  misc_RNA (1)...(19): siRNA sense strand
ccaagauggcaaagggaua

SEQ ID NO: 2092344 - RNA, 19 nt, Homo sapiens
  misc_RNA (1)...(19): siRNA sense strand
gaugaccgucugccuguga

SEQ ID NO: 2092345 - RNA, 19 nt, Homo sapiens
  misc_RNA (1)...(19): siRNA sense strand
cagcuuaaugcaucaggua

SEQ ID NO: 2092346 - RNA, 19 nt, Homo sapiens
  misc_RNA (1)...(19): siRNA sense strand
cagagugccugaggaaugg

SEQ ID NO: 2092347 - RNA, 19 nt, Homo sapiens
  misc_RNA (1)...(19): siRNA sense strand
ccaccuauaagaacuuguu

SEQ ID NO: 2092348 - RNA, 19 nt, Homo sapiens
  misc_RNA (1)...(19): siRNA sense strand
ggugucgucuucucaaagg

SEQ ID NO: 2092349 - RNA, 19 nt, Homo sapiens
  misc_RNA (1)...(19): siRNA sense strand
caauucuggugucgucuuc

SEQ ID NO: 2092350 - RNA, 19 nt, Homo sapiens
  misc_RNA (1)...(19): siRNA sense strand
ccauuggcuucuaccugua

SEQ ID NO: 2092351 - RNA, 19 nt, Homo sapiens
  misc_RNA (1)...(19): siRNA sense strand
ucacaggaaucaggaaggu

SEQ ID NO: 2092352 - RNA, 19 nt, Homo sapiens
  misc_RNA (1)...(19): siRNA sense strand
cugcaaacauagaccugaa

SEQ ID NO: 2092353 - RNA, 19 nt, Homo sapiens
  misc_RNA (1)...(19): siRNA sense strand
gaggaugucuuccaaaacu

SEQ ID NO: 2092354 - RNA, 19 nt, Homo sapiens
  misc_RNA (1)...(19): siRNA sense strand
ugacgcugcaggacuuuaa

SEQ ID NO: 2092355 - RNA, 19 nt, Homo sapiens
  misc_RNA (1)...(19): siRNA sense strand
ggaaagguggaauggaaag

SEQ ID NO: 2092356 - RNA, 19 nt, Homo sapiens
  misc_RNA (1)...(19): siRNA sense strand
caaacauagaccugaauau

SEQ ID NO: 2092357 - RNA, 19 nt, Homo sapiens
  misc_RNA (1)...(19): siRNA sense strand
gcuggcaucuuccgguucu

SEQ ID NO: 2092358 - RNA, 19 nt, Homo sapiens
  misc_RNA (1)...(19): siRNA sense strand
cugauagguuucucaagga

SEQ ID NO: 2092359 - RNA, 19 nt, Homo sapiens
  misc_RNA (1)...(19): siRNA sense strand
gcaauucuggugucgucuu

SEQ ID NO: 2092360 - RNA, 19 nt, Homo sapiens
  misc_RNA (1)...(19): siRNA sense strand
gaaaagcccacguacauac

SEQ ID NO: 2092361 - RNA, 19 nt, Homo sapiens
  misc_RNA (1)...(19): siRNA sense strand
cuguauagguaccaugaug

SEQ ID NO: 2092362 - RNA, 19 nt, Homo sapiens
  misc_RNA (1)...(19): siRNA sense strand
ugagccagccugauagguu

SEQ ID NO: 2092363 - RNA, 19 nt, Homo sapiens
  misc_RNA (1)...(19): siRNA sense strand
gggugacaaugaccaucaa

SEQ ID NO: 2092364 - RNA, 19 nt, Homo sapiens
  misc_RNA (1)...(19): siRNA sense strand
gcugguucuuggcugcuuu

SEQ ID NO: 2092365 - RNA, 19 nt, Homo sapiens
  misc_RNA (1)...(19): siRNA sense strand
uacaacagaacccucauug

SEQ ID NO: 2092366 - RNA, 19 nt, Homo sapiens
  misc_RNA (1)...(19): siRNA sense strand
caucgaagccaccuacaac

SEQ ID NO: 2092367 - RNA, 19 nt, Homo sapiens
  misc_RNA (1)...(19): siRNA sense strand
aaggcaggaugaauucuuc

SEQ ID NO: 2092368 - RNA, 19 nt, Homo sapiens
  misc_RNA (1)...(19): siRNA sense strand
agaguuucacugagaagua

SEQ ID NO: 2092369 - RNA, 19 nt, Homo sapiens
  misc_RNA (1)...(19): siRNA sense strand
augaaaggcaggaugaauu

SEQ ID NO: 2092370 - RNA, 19 nt, Homo sapiens
  misc_RNA (1)...(19): siRNA sense strand
ggacuuugucaguuucauc

SEQ ID NO: 2092371 - RNA, 19 nt, Homo sapiens
  misc_RNA (1)...(19): siRNA sense strand
ggaugucuuccaaaacuua

SEQ ID NO: 2092372 - RNA, 19 nt, Homo sapiens
  misc_RNA (1)...(19): siRNA sense strand
gaccaucaaccuggcagaa

SEQ ID NO: 2092373 - RNA, 19 nt, Homo sapiens
  misc_RNA (1)...(19): siRNA sense strand
ucaguuucauccacuugau

SEQ ID NO: 2092374 - RNA, 19 nt, Homo sapiens
  misc_RNA (1)...(19): siRNA sense strand
ccucaucgugcccugcaua

SEQ ID NO: 2092375 - RNA, 19 nt, Homo sapiens
  misc_RNA (1)...(19): siRNA sense strand
cuacaacagaacccucauu

SEQ ID NO: 2092376 - RNA, 19 nt, Homo sapiens
  misc_RNA (1)...(19): siRNA sense strand
acagcaauccccaguuuua

SEQ ID NO: 2092377 - RNA, 19 nt, Homo sapiens
  misc_RNA (1)...(19): siRNA sense strand
gaugcugcguguagagaac

SEQ ID NO: 2092378 - RNA, 19 nt, Homo sapiens
  misc_RNA (1)...(19): siRNA sense strand
ggagaaugggcugguggaa

SEQ ID NO: 2092379 - RNA, 19 nt, Homo sapiens
  misc_RNA (1)...(19): siRNA sense strand
gcccuucuuuagccuggaa

SEQ ID NO: 2092380 - RNA, 19 nt, Homo sapiens
  misc_RNA (1)...(19): siRNA sense strand
ggagcagacagcccuucuu

SEQ ID NO: 2092381 - RNA, 19 nt, Homo sapiens
  misc_RNA (1)...(19): siRNA sense strand
aaaggcaggaugaauucuu

SEQ ID NO: 2092382 - RNA, 19 nt, Homo sapiens
  misc_RNA (1)...(19): siRNA sense strand
caaggagaaagaagugagu

SEQ ID NO: 2092383 - RNA, 19 nt, Homo sapiens
  misc_RNA (1)...(19): siRNA sense strand
aggagaaacugggcaagca

SEQ ID NO: 2092384 - RNA, 19 nt, Homo sapiens
  misc_RNA (1)...(19): siRNA sense strand
caucagguacuaugagcau

SEQ ID NO: 2092385 - RNA, 19 nt, Homo sapiens
  misc_RNA (1)...(19): siRNA sense strand
uaaugcaucagguacuaug

SEQ ID NO: 2092386 - RNA, 19 nt, Homo sapiens
  misc_RNA (1)...(19): siRNA sense strand
acuaugagcauccaggaau

SEQ ID NO: 2092387 - RNA, 19 nt, Homo sapiens
  misc_RNA (1)...(19): siRNA sense strand
ggagaaagcugcuaauaaa

SEQ ID NO: 2092388 - RNA, 19 nt, Homo sapiens
  misc_RNA (1)...(19): siRNA sense strand
gaagagggagccagaauua

SEQ ID NO: 2092389 - RNA, 19 nt, Homo sapiens
  misc_RNA (1)...(19): siRNA sense strand
ccaaacaucuucuucauau

SEQ ID NO: 2092390 - RNA, 19 nt, Homo sapiens
  misc_RNA (1)...(19): siRNA sense strand
gagugaagcugaagaauuc

SEQ ID NO: 2092391 - RNA, 19 nt, Homo sapiens
  misc_RNA (1)...(19): siRNA sense strand
ucacauaccucaucucaga

SEQ ID NO: 2092392 - RNA, 19 nt, Homo sapiens
  misc_RNA (1)...(19): siRNA sense strand
gcauggagguuaucaguau

SEQ ID NO: 2092393 - RNA, 19 nt, Homo sapiens
  misc_RNA (1)...(19): siRNA sense strand
gccgaaacguucagucuua

SEQ ID NO: 2092394 - RNA, 19 nt, Homo sapiens
  misc_RNA (1)...(19): siRNA sense strand
gacaauagauaccaagaug

SEQ ID NO: 2092395 - RNA, 19 nt, Homo sapiens
  misc_RNA (1)...(19): siRNA sense strand
caaggaggcuggacagaug

SEQ ID NO: 2092396 - RNA, 19 nt, Homo sapiens
  misc_RNA (1)...(19): siRNA sense strand
gcuaagagccagacagaaa

SEQ ID NO: 2092397 - RNA, 19 nt, Homo sapiens
  misc_RNA (1)...(19): siRNA sense strand
ggagguggcuaccaagaug

SEQ ID NO: 2092398 - RNA, 19 nt, Homo sapiens
  misc_RNA (1)...(19): siRNA sense strand
gcuggugucugaauuaaga

SEQ ID NO: 2092399 - RNA, 19 nt, Homo sapiens
  misc_RNA (1)...(19): siRNA sense strand
gagaugaacugcccguauc

SEQ ID NO: 2092400 - RNA, 19 nt, Homo sapiens
  misc_RNA (1)...(19): siRNA sense strand
gugcuuggcuggugucuga

SEQ ID NO: 2092401 - RNA, 19 nt, Homo sapiens
  misc_RNA (1)...(19): siRNA sense strand
ggaagacauuacacuaguu

SEQ ID NO: 2092402 - RNA, 19 nt, Homo sapiens
  misc_RNA (1)...(19): siRNA sense strand
gaacugcccguaucuuuca

SEQ ID NO: 2092403 - RNA, 19 nt, Homo sapiens
  misc_RNA (1)...(19): siRNA sense strand
gggaagacauuacacuagu

SEQ ID NO: 2092404 - RNA, 19 nt, Homo sapiens
  misc_RNA (1)...(19): siRNA sense strand
cauggagacugacaucuug

SEQ ID NO: 2092405 - RNA, 19 nt, Homo sapiens
  misc_RNA (1)...(19): siRNA sense strand
gaagaggaaauaagcauca

SEQ ID NO: 2092406 - RNA, 19 nt, Homo sapiens
  misc_RNA (1)...(19): siRNA sense strand
acaagcagcggcucuauaa

SEQ ID NO: 2092407 - RNA, 19 nt, Homo sapiens
  misc_RNA (1)...(19): siRNA sense strand
gauagaagcaauuaaccaa

SEQ ID NO: 2092408 - RNA, 19 nt, Homo sapiens
  misc_RNA (1)...(19): siRNA sense strand
caacuaacaguccgaguga

SEQ ID NO: 2092409 - RNA, 19 nt, Homo sapiens
  misc_RNA (1)...(19): siRNA sense strand
gaagacauuacacuaguug

SEQ ID NO: 2092410 - RNA, 19 nt, Homo sapiens
  misc_RNA (1)...(19): siRNA sense strand
ggaagagggagccagaauu

SEQ ID NO: 2092411 - RNA, 19 nt, Homo sapiens
  misc_RNA (1)...(19): siRNA sense strand
acuagaagcugccagaaug

SEQ ID NO: 2092412 - RNA, 19 nt, Homo sapiens
  misc_RNA (1)...(19): siRNA sense strand
ccaagcgccuucucauuca

SEQ ID NO: 2092413 - RNA, 19 nt, Homo sapiens
  misc_RNA (1)...(19): siRNA sense strand
gauggugguuaucgagauu

SEQ ID NO: 2092414 - RNA, 19 nt, Homo sapiens
  misc_RNA (1)...(19): siRNA sense strand
ggugguagacccaaugaaa

SEQ ID NO: 2092415 - RNA, 19 nt, Homo sapiens
  misc_RNA (1)...(19): siRNA sense strand
cggagaaagcugcuaauaa

SEQ ID NO: 2092416 - RNA, 19 nt, Homo sapiens
  misc_RNA (1)...(19): siRNA sense strand
caacugcagucugaagaga

SEQ ID NO: 2092417 - RNA, 19 nt, Homo sapiens
  misc_RNA (1)...(19): siRNA sense strand
ggacagggaagacauuaca

SEQ ID NO: 2092418 - RNA, 19 nt, Homo sapiens
  misc_RNA (1)...(19): siRNA sense strand
aggcaggacuugucaaaga

SEQ ID NO: 2092419 - RNA, 19 nt, Homo sapiens
  misc_RNA (1)...(19): siRNA sense strand
gagcuaagagccagacaga

SEQ ID NO: 2092420 - RNA, 19 nt, Homo sapiens
  misc_RNA (1)...(19): siRNA sense strand
gcaggacaauagauaccaa

SEQ ID NO: 2092421 - RNA, 19 nt, Homo sapiens
  misc_RNA (1)...(19): siRNA sense strand
gcaauuaaccaagccauag

SEQ ID NO: 2092422 - RNA, 19 nt, Homo sapiens
  misc_RNA (1)...(19): siRNA sense strand
cgagugaagcugaagaauu

SEQ ID NO: 2092423 - RNA, 19 nt, Homo sapiens
  misc_RNA (1)...(19): siRNA sense strand
gagccagaauuaucaccaa

SEQ ID NO: 2092424 - RNA, 19 nt, Homo sapiens
  misc_RNA (1)...(19): siRNA sense strand
guccaaaccuccagccaau

SEQ ID NO: 2092425 - RNA, 19 nt, Homo sapiens
  misc_RNA (1)...(19): siRNA sense strand
gaaauuugaauaccacagu

SEQ ID NO: 2092426 - RNA, 19 nt, Homo sapiens
  misc_RNA (1)...(19): siRNA sense strand
gacaagcagcggcucuaua

SEQ ID NO: 2092427 - RNA, 19 nt, Homo sapiens
  misc_RNA (1)...(19): siRNA sense strand
ggagaugaacugcccguau

SEQ ID NO: 2092428 - RNA, 19 nt, Homo sapiens
  misc_RNA (1)...(19): siRNA sense strand
gaauaugaaguccggagaa

SEQ ID NO: 2092429 - RNA, 19 nt, Homo sapiens
  misc_RNA (1)...(19): siRNA sense strand
caaaagagacagcaacaaa

SEQ ID NO: 2092430 - RNA, 19 nt, Homo sapiens
  misc_RNA (1)...(19): siRNA sense strand
ccaaaccuccagccaauau

SEQ ID NO: 2092431 - RNA, 19 nt, Homo sapiens
  misc_RNA (1)...(19): siRNA sense strand
ccugacgacucggaaauuu

SEQ ID NO: 2092432 - RNA, 19 nt, Homo sapiens
  misc_RNA (1)...(19): siRNA sense strand
cauggagguuaucaguaua

SEQ ID NO: 2092433 - RNA, 19 nt, Homo sapiens
  misc_RNA (1)...(19): siRNA sense strand
acgaggaggucaugaacaa

SEQ ID NO: 2092434 - RNA, 19 nt, Homo sapiens
  misc_RNA (1)...(19): siRNA sense strand
cagccaauauaacuauguu

SEQ ID NO: 2092435 - RNA, 19 nt, Homo sapiens
  misc_RNA (1)...(19): siRNA sense strand
ugacgacucggaaauuuga

SEQ ID NO: 2092436 - RNA, 19 nt, Homo sapiens
  misc_RNA (1)...(19): siRNA sense strand
uaugguggcuuccaaacau

SEQ ID NO: 2092437 - RNA, 19 nt, Homo sapiens
  misc_RNA (1)...(19): siRNA sense strand
caggacuugucaaagauuu

SEQ ID NO: 2092438 - RNA, 19 nt, Homo sapiens
  misc_RNA (1)...(19): siRNA sense strand
agaaugcucugugugaaug

SEQ ID NO: 2092439 - RNA, 19 nt, Homo sapiens
  misc_RNA (1)...(19): siRNA sense strand
gaccaagcgccuucucauu

SEQ ID NO: 2092440 - RNA, 19 nt, Homo sapiens
  misc_RNA (1)...(19): siRNA sense strand
acaguagcauggaguguga

SEQ ID NO: 2092441 - RNA, 19 nt, Homo sapiens
  misc_RNA (1)...(19): siRNA sense strand
uggaagaucuagguuacaa

SEQ ID NO: 2092442 - RNA, 19 nt, Homo sapiens
  misc_RNA (1)...(19): siRNA sense strand
aauaugaaguccggagaaa

SEQ ID NO: 2092443 - RNA, 19 nt, Homo sapiens
  misc_RNA (1)...(19): siRNA sense strand
uugaaaggcauauguauug

SEQ ID NO: 2092444 - RNA, 19 nt, Homo sapiens
  misc_RNA (1)...(19): siRNA sense strand
gaguugaaaggcauaugua

SEQ ID NO: 2092445 - RNA, 19 nt, Homo sapiens
  misc_RNA (1)...(19): siRNA sense strand
gcucacauaccucaucuca

SEQ ID NO: 2092446 - RNA, 19 nt, Homo sapiens
  misc_RNA (1)...(19): siRNA sense strand
gagggagccagaauuauca

SEQ ID NO: 2092447 - RNA, 19 nt, Homo sapiens
  misc_RNA (1)...(19): siRNA sense strand
ggacaauagauaccaagau

SEQ ID NO: 2092448 - RNA, 19 nt, Homo sapiens
  misc_RNA (1)...(19): siRNA sense strand
cagcagugguggcuaucaa

SEQ ID NO: 2092449 - RNA, 19 nt, Homo sapiens
  misc_RNA (1)...(19): siRNA sense strand
agggagagguggcuaugaa

SEQ ID NO: 2092450 - RNA, 19 nt, Homo sapiens
  misc_RNA (1)...(19): siRNA sense strand
uaaccaagccauagccaau

SEQ ID NO: 2092451 - RNA, 19 nt, Homo sapiens
  misc_RNA (1)...(19): siRNA sense strand
uagcaaaaguuccaccuaa

SEQ ID NO: 2092452 - RNA, 19 nt, Homo sapiens
  misc_RNA (1)...(19): siRNA sense strand
cugaagaauuccagcuuga

SEQ ID NO: 2092453 - RNA, 19 nt, Homo sapiens
  misc_RNA (1)...(19): siRNA sense strand
ccaagauggugguuaucga

SEQ ID NO: 2092454 - RNA, 19 nt, Homo sapiens
  misc_RNA (1)...(19): siRNA sense strand
agagguggcuaugaacauu

SEQ ID NO: 2092455 - RNA, 19 nt, Homo sapiens
  misc_RNA (1)...(19): siRNA sense strand
ggcaggacuugucaaagau

SEQ ID NO: 2092456 - RNA, 19 nt, Homo sapiens
  misc_RNA (1)...(19): siRNA sense strand
cgacucggaaauuugaaua

SEQ ID NO: 2092457 - RNA, 19 nt, Homo sapiens
  misc_RNA (1)...(19): siRNA sense strand
aaaccuccagccaauauaa

SEQ ID NO: 2092458 - RNA, 19 nt, Homo sapiens
  misc_RNA (1)...(19): siRNA sense strand
guugaaaggcauauguauu

SEQ ID NO: 2092459 - RNA, 19 nt, Homo sapiens
  misc_RNA (1)...(19): siRNA sense strand
guuggaagaucuagguuac

SEQ ID NO: 2092460 - RNA, 19 nt, Homo sapiens
  misc_RNA (1)...(19): siRNA sense strand
agccauagccaaugaauau

SEQ ID NO: 2092461 - RNA, 19 nt, Homo sapiens
  misc_RNA (1)...(19): siRNA sense strand
gaacuagaagcugccagaa

SEQ ID NO: 2092462 - RNA, 19 nt, Homo sapiens
  misc_RNA (1)...(19): siRNA sense strand
ccucaucucagaacuagaa

SEQ ID NO: 2092463 - RNA, 19 nt, Homo sapiens
  misc_RNA (1)...(19): siRNA sense strand
aagcagcggcucuauaaga

SEQ ID NO: 2092464 - RNA, 19 nt, Homo sapiens
  misc_RNA (1)...(19): siRNA sense strand
uggaggagguggcuaccaa

SEQ ID NO: 2092465 - RNA, 19 nt, Homo sapiens
  misc_RNA (1)...(19): siRNA sense strand
ggaggaagaggaaauaagc

SEQ ID NO: 2092466 - RNA, 19 nt, Homo sapiens
  misc_RNA (1)...(19): siRNA sense strand
aggcauauguauugcucua

SEQ ID NO: 2092467 - RNA, 19 nt, Homo sapiens
  misc_RNA (1)...(19): siRNA sense strand
gcaggacuugucaaagauu

SEQ ID NO: 2092468 - RNA, 19 nt, Homo sapiens
  misc_RNA (1)...(19): siRNA sense strand
gggaaaagauagaagcaau

SEQ ID NO: 2092469 - RNA, 19 nt, Homo sapiens
  misc_RNA (1)...(19): siRNA sense strand
agagacagcaacaaacuga

SEQ ID NO: 2092470 - RNA, 19 nt, Homo sapiens
  misc_RNA (1)...(19): siRNA sense strand
ggacaagcagcggcucuau

SEQ ID NO: 2092471 - RNA, 19 nt, Homo sapiens
  misc_RNA (1)...(19): siRNA sense strand
cagggaagacauuacacua

SEQ ID NO: 2092472 - RNA, 19 nt, Homo sapiens
  misc_RNA (1)...(19): siRNA sense strand
gcuaccagcaggacaauag

SEQ ID NO: 2092473 - RNA, 19 nt, Homo sapiens
  misc_RNA (1)...(19): siRNA sense strand
uguuucaacugcagucuga

SEQ ID NO: 2092474 - RNA, 19 nt, Homo sapiens
  misc_RNA (1)...(19): siRNA sense strand
ugaggugagugggcuacua

SEQ ID NO: 2092475 - RNA, 19 nt, Homo sapiens
  misc_RNA (1)...(19): siRNA sense strand
caaaccuccagccaauaua

SEQ ID NO: 2092476 - RNA, 19 nt, Homo sapiens
  misc_RNA (1)...(19): siRNA sense strand
uggcuggugucugaauuaa

SEQ ID NO: 2092477 - RNA, 19 nt, Homo sapiens
  misc_RNA (1)...(19): siRNA sense strand
ggagagguggcuaugaaca

SEQ ID NO: 2092478 - RNA, 19 nt, Homo sapiens
  misc_RNA (1)...(19): siRNA sense strand
caccuaaucaugugggaaa

SEQ ID NO: 2092479 - RNA, 19 nt, Homo sapiens
  misc_RNA (1)...(19): siRNA sense strand
cauauguauugcucuagga

SEQ ID NO: 2092480 - RNA, 19 nt, Homo sapiens
  misc_RNA (1)...(19): siRNA sense strand
ggacuugucaaagauuuua

SEQ ID NO: 2092481 - RNA, 19 nt, Homo sapiens
  misc_RNA (1)...(19): siRNA sense strand
ccgaaacguucagucuuau

SEQ ID NO: 2092482 - RNA, 19 nt, Homo sapiens
  misc_RNA (1)...(19): siRNA sense strand
aaaguuccaccuaaucaug

SEQ ID NO: 2092483 - RNA, 19 nt, Homo sapiens
  misc_RNA (1)...(19): siRNA sense strand
ggacgaggaggucaugaac

SEQ ID NO: 2092484 - RNA, 19 nt, Homo sapiens
  misc_RNA (1)...(19): siRNA sense strand
ccggagaaagcugcuaaua

SEQ ID NO: 2092485 - RNA, 19 nt, Homo sapiens
  misc_RNA (1)...(19): siRNA sense strand
ugaagagaggguugaguug

SEQ ID NO: 2092486 - RNA, 19 nt, Homo sapiens
  misc_RNA (1)...(19): siRNA sense strand
gaggagguggcuaccaaga

SEQ ID NO: 2092487 - RNA, 19 nt, Homo sapiens
  misc_RNA (1)...(19): siRNA sense strand
gaaugaagcuguauuuaug

SEQ ID NO: 2092488 - RNA, 19 nt, Homo sapiens
  misc_RNA (1)...(19): siRNA sense strand
ggaguuagcccacaguuua

SEQ ID NO: 2092489 - RNA, 19 nt, Homo sapiens
  misc_RNA (1)...(19): siRNA sense strand
ccaaagaucuucaugaguu

SEQ ID NO: 2092490 - RNA, 19 nt, Homo sapiens
  misc_RNA (1)...(19): siRNA sense strand
gcaauaaagucugcagaua

SEQ ID NO: 2092491 - RNA, 19 nt, Homo sapiens
  misc_RNA (1)...(19): siRNA sense strand
gaaaucggcucgagauguu

SEQ ID NO: 2092492 - RNA, 19 nt, Homo sapiens
  misc_RNA (1)...(19): siRNA sense strand
ggagacagaucgaaaauua

SEQ ID NO: 2092493 - RNA, 19 nt, Homo sapiens
  misc_RNA (1)...(19): siRNA sense strand
aaagaaaucugccaagcua

SEQ ID NO: 2092494 - RNA, 19 nt, Homo sapiens
  misc_RNA (1)...(19): siRNA sense strand
gcaagaauauugaaagaca

SEQ ID NO: 2092495 - RNA, 19 nt, Homo sapiens
  misc_RNA (1)...(19): siRNA sense strand
gaaccaacauuaucucuag

SEQ ID NO: 2092496 - RNA, 19 nt, Homo sapiens
  misc_RNA (1)...(19): siRNA sense strand
gaaacacucuaaaugaaga

SEQ ID NO: 2092497 - RNA, 19 nt, Homo sapiens
  misc_RNA (1)...(19): siRNA sense strand
gaaguggaguugucaguga

SEQ ID NO: 2092498 - RNA, 19 nt, Homo sapiens
  misc_RNA (1)...(19): siRNA sense strand
gcugauagguguugaguug

SEQ ID NO: 2092499 - RNA, 19 nt, Homo sapiens
  misc_RNA (1)...(19): siRNA sense strand
gaaagaugguaguuaguau

SEQ ID NO: 2092500 - RNA, 19 nt, Homo sapiens
  misc_RNA (1)...(19): siRNA sense strand
caagauacaccaucagaua

SEQ ID NO: 2092501 - RNA, 19 nt, Homo sapiens
  misc_RNA (1)...(19): siRNA sense strand
gaccaucugucguucguua

SEQ ID NO: 2092502 - RNA, 19 nt, Homo sapiens
  misc_RNA (1)...(19): siRNA sense strand
gaagugagaguuggaguua

SEQ ID NO: 2092503 - RNA, 19 nt, Homo sapiens
  misc_RNA (1)...(19): siRNA sense strand
ugcaauggcugcuuuguua

SEQ ID NO: 2092504 - RNA, 19 nt, Homo sapiens
  misc_RNA (1)...(19): siRNA sense strand
ccauggagcucaucugaaa

SEQ ID NO: 2092505 - RNA, 19 nt, Homo sapiens
  misc_RNA (1)...(19): siRNA sense strand
gcaacucucuuaaguagug

SEQ ID NO: 2092506 - RNA, 19 nt, Homo sapiens
  misc_RNA (1)...(19): siRNA sense strand
gcaacaacuucuacaauuc

SEQ ID NO: 2092507 - RNA, 19 nt, Homo sapiens
  misc_RNA (1)...(19): siRNA sense strand
gcuaaaagcuguugaaaga

SEQ ID NO: 2092508 - RNA, 19 nt, Homo sapiens
  misc_RNA (1)...(19): siRNA sense strand
gaagugaaaucuuaaugag

SEQ ID NO: 2092509 - RNA, 19 nt, Homo sapiens
  misc_RNA (1)...(19): siRNA sense strand
ggaaagaugguaguuagua

SEQ ID NO: 2092510 - RNA, 19 nt, Homo sapiens
  misc_RNA (1)...(19): siRNA sense strand
uaucuuaccugcuggauga

SEQ ID NO: 2092511 - RNA, 19 nt, Homo sapiens
  misc_RNA (1)...(19): siRNA sense strand
gauugcagcugccaaagaa

SEQ ID NO: 2092512 - RNA, 19 nt, Homo sapiens
  misc_RNA (1)...(19): siRNA sense strand
aaacaccgauuacaaaugu

SEQ ID NO: 2092513 - RNA, 19 nt, Homo sapiens
  misc_RNA (1)...(19): siRNA sense strand
caauauagcuuugacaagu

SEQ ID NO: 2092514 - RNA, 19 nt, Homo sapiens
  misc_RNA (1)...(19): siRNA sense strand
gaaagugcgucuagaaacu

SEQ ID NO: 2092515 - RNA, 19 nt, Homo sapiens
  misc_RNA (1)...(19): siRNA sense strand
ugacagcgguggucucauu

SEQ ID NO: 2092516 - RNA, 19 nt, Homo sapiens
  misc_RNA (1)...(19): siRNA sense strand
gaagaccagugucagcauu

SEQ ID NO: 2092517 - RNA, 19 nt, Homo sapiens
  misc_RNA (1)...(19): siRNA sense strand
caauaaagucugcagauaa

SEQ ID NO: 2092518 - RNA, 19 nt, Homo sapiens
  misc_RNA (1)...(19): siRNA sense strand
caagaccgauguaaaggaa

SEQ ID NO: 2092519 - RNA, 19 nt, Homo sapiens
  misc_RNA (1)...(19): siRNA sense strand
ccacaauucuguucuuaau

SEQ ID NO: 2092520 - RNA, 19 nt, Homo sapiens
  misc_RNA (1)...(19): siRNA sense strand
guucuuaccuugcuguuga

SEQ ID NO: 2092521 - RNA, 19 nt, Homo sapiens
  misc_RNA (1)...(19): siRNA sense strand
ggagaaauguuaaaaguug

SEQ ID NO: 2092522 - RNA, 19 nt, Homo sapiens
  misc_RNA (1)...(19): siRNA sense strand
aaagagcgguggagaaaug

SEQ ID NO: 2092523 - RNA, 19 nt, Homo sapiens
  misc_RNA (1)...(19): siRNA sense strand
cagaauggcugcaugaaca

SEQ ID NO: 2092524 - RNA, 19 nt, Homo sapiens
  misc_RNA (1)...(19): siRNA sense strand
gcacuuugguuaaauagca

SEQ ID NO: 2092525 - RNA, 19 nt, Homo sapiens
  misc_RNA (1)...(19): siRNA sense strand
gauacaccaucagauauaa

SEQ ID NO: 2092526 - RNA, 19 nt, Homo sapiens
  misc_RNA (1)...(19): siRNA sense strand
aagaugagauggaugauga

SEQ ID NO: 2092527 - RNA, 19 nt, Homo sapiens
  misc_RNA (1)...(19): siRNA sense strand
ugaagaagcugaaaagaaa

SEQ ID NO: 2092528 - RNA, 19 nt, Homo sapiens
  misc_RNA (1)...(19): siRNA sense strand
caaagaucuucaugaguuu

SEQ ID NO: 2092529 - RNA, 19 nt, Homo sapiens
  misc_RNA (1)...(19): siRNA sense strand
gaaacagaccagccaguaa

SEQ ID NO: 2092530 - RNA, 19 nt, Homo sapiens
  misc_RNA (1)...(19): siRNA sense strand
ccaggucucucuugacuga

SEQ ID NO: 2092531 - RNA, 19 nt, Homo sapiens
  misc_RNA (1)...(19): siRNA sense strand
gaaagacacagcaauaaag

SEQ ID NO: 2092532 - RNA, 19 nt, Homo sapiens
  misc_RNA (1)...(19): siRNA sense strand
gauccuuccucuauuuauu

SEQ ID NO: 2092533 - RNA, 19 nt, Homo sapiens
  misc_RNA (1)...(19): siRNA sense strand
gaugaagucuuagaacuca

SEQ ID NO: 2092534 - RNA, 19 nt, Homo sapiens
  misc_RNA (1)...(19): siRNA sense strand
caagucacauagccacuaa

SEQ ID NO: 2092535 - RNA, 19 nt, Homo sapiens
  misc_RNA (1)...(19): siRNA sense strand
caacaagaccgauguaaag

SEQ ID NO: 2092536 - RNA, 19 nt, Homo sapiens
  misc_RNA (1)...(19): siRNA sense strand
gggcuuagcugaaaacaaa

SEQ ID NO: 2092537 - RNA, 19 nt, Homo sapiens
  misc_RNA (1)...(19): siRNA sense strand
cagaacggcucaacaacuu

SEQ ID NO: 2092538 - RNA, 19 nt, Homo sapiens
  misc_RNA (1)...(19): siRNA sense strand
caugauccuuccucuauuu

SEQ ID NO: 2092539 - RNA, 19 nt, Homo sapiens
  misc_RNA (1)...(19): siRNA sense strand
caaaugaccucuugguacu

SEQ ID NO: 2092540 - RNA, 19 nt, Homo sapiens
  misc_RNA (1)...(19): siRNA sense strand
gcccacaguuuauugcuaa

SEQ ID NO: 2092541 - RNA, 19 nt, Homo sapiens
  misc_RNA (1)...(19): siRNA sense strand
gaaugugccaugacuauga

SEQ ID NO: 2092542 - RNA, 19 nt, Homo sapiens
  misc_RNA (1)...(19): siRNA sense strand
gccaccagauaguuuaaua

SEQ ID NO: 2092543 - RNA, 19 nt, Homo sapiens
  misc_RNA (1)...(19): siRNA sense strand
gcagguaacuuuggaaggu

SEQ ID NO: 2092544 - RNA, 19 nt, Homo sapiens
  misc_RNA (1)...(19): siRNA sense strand
gcuacuaacugaagaugug

SEQ ID NO: 2092545 - RNA, 19 nt, Homo sapiens
  misc_RNA (1)...(19): siRNA sense strand
guccugagcuacuaacuga

SEQ ID NO: 2092546 - RNA, 19 nt, Homo sapiens
  misc_RNA (1)...(19): siRNA sense strand
gacgauguguuuccuuuau

SEQ ID NO: 2092547 - RNA, 19 nt, Homo sapiens
  misc_RNA (1)...(19): siRNA sense strand
uaauaggaguccagucauu

SEQ ID NO: 2092548 - RNA, 19 nt, Homo sapiens
  misc_RNA (1)...(19): siRNA sense strand
gaaguaagcaugcuaacag

SEQ ID NO: 2092549 - RNA, 19 nt, Homo sapiens
  misc_RNA (1)...(19): siRNA sense strand
aaagaggccuguaccguau

SEQ ID NO: 2092550 - RNA, 19 nt, Homo sapiens
  misc_RNA (1)...(19): siRNA sense strand
guauacaguuucuuuguuc

SEQ ID NO: 2092551 - RNA, 19 nt, Homo sapiens
  misc_RNA (1)...(19): siRNA sense strand
gaugaacugccaccagaua

SEQ ID NO: 2092552 - RNA, 19 nt, Homo sapiens
  misc_RNA (1)...(19): siRNA sense strand
ucaagaaguuugcgucugu

SEQ ID NO: 2092553 - RNA, 19 nt, Homo sapiens
  misc_RNA (1)...(19): siRNA sense strand
ggaugaugauaccauguuu

SEQ ID NO: 2092554 - RNA, 19 nt, Homo sapiens
  misc_RNA (1)...(19): siRNA sense strand
gauuacaaauguuggauca

SEQ ID NO: 2092555 - RNA, 19 nt, Homo sapiens
  misc_RNA (1)...(19): siRNA sense strand
uuaaugcacuucuuagaga

SEQ ID NO: 2092556 - RNA, 19 nt, Homo sapiens
  misc_RNA (1)...(19): siRNA sense strand
guacaucaguguccuuugg

SEQ ID NO: 2092557 - RNA, 19 nt, Homo sapiens
  misc_RNA (1)...(19): siRNA sense strand
uaaagcggcugccagacaa

SEQ ID NO: 2092558 - RNA, 19 nt, Homo sapiens
  misc_RNA (1)...(19): siRNA sense strand
gucaauggcuguucgaugu

SEQ ID NO: 2092559 - RNA, 19 nt, Homo sapiens
  misc_RNA (1)...(19): siRNA sense strand
gcaccaacaauuaagcuaa

SEQ ID NO: 2092560 - RNA, 19 nt, Homo sapiens
  misc_RNA (1)...(19): siRNA sense strand
uaacagcaauugcacucuu

SEQ ID NO: 2092561 - RNA, 19 nt, Homo sapiens
  misc_RNA (1)...(19): siRNA sense strand
gaaaaucucuuguguuugc

SEQ ID NO: 2092562 - RNA, 19 nt, Homo sapiens
  misc_RNA (1)...(19): siRNA sense strand
gauaggaaguggaguuguc

SEQ ID NO: 2092563 - RNA, 19 nt, Homo sapiens
  misc_RNA (1)...(19): siRNA sense strand
ggaauaggcucaggacaac

SEQ ID NO: 2092564 - RNA, 19 nt, Homo sapiens
  misc_RNA (1)...(19): siRNA sense strand
gaugauaguguucuucuug

SEQ ID NO: 2092565 - RNA, 19 nt, Homo sapiens
  misc_RNA (1)...(19): siRNA sense strand
gaaagcuagugcugcaaug

SEQ ID NO: 2092566 - RNA, 19 nt, Homo sapiens
  misc_RNA (1)...(19): siRNA sense strand
gaaaauugaugaccccuau

SEQ ID NO: 2092567 - RNA, 19 nt, Homo sapiens
  misc_RNA (1)...(19): siRNA sense strand
gagcuucguugcacauugu

SEQ ID NO: 2092568 - RNA, 19 nt, Homo sapiens
  misc_RNA (1)...(19): siRNA sense strand
uagaagcaguagugaauga

SEQ ID NO: 2092569 - RNA, 19 nt, Homo sapiens
  misc_RNA (1)...(19): siRNA sense strand
cagaaacgguaaauaaucu

SEQ ID NO: 2092570 - RNA, 19 nt, Homo sapiens
  misc_RNA (1)...(19): siRNA sense strand
agaagaaagugcucguuug

SEQ ID NO: 2092571 - RNA, 19 nt, Homo sapiens
  misc_RNA (1)...(19): siRNA sense strand
cuauggagcugcugauguu

SEQ ID NO: 2092572 - RNA, 19 nt, Homo sapiens
  misc_RNA (1)...(19): siRNA sense strand
agacuucacuaucggaauu

SEQ ID NO: 2092573 - RNA, 19 nt, Homo sapiens
  misc_RNA (1)...(19): siRNA sense strand
ucacuuugcugaauguguu

SEQ ID NO: 2092574 - RNA, 19 nt, Homo sapiens
  misc_RNA (1)...(19): siRNA sense strand
gcagcaagccagcauguga

SEQ ID NO: 2092575 - RNA, 19 nt, Homo sapiens
  misc_RNA (1)...(19): siRNA sense strand
cagacgauguguuuccuuu

SEQ ID NO: 2092576 - RNA, 19 nt, Homo sapiens
  misc_RNA (1)...(19): siRNA sense strand
gagcaacauuugaugaagu

SEQ ID NO: 2092577 - RNA, 19 nt, Homo sapiens
  misc_RNA (1)...(19): siRNA sense strand
uauguggacugcugaacua

SEQ ID NO: 2092578 - RNA, 19 nt, Homo sapiens
  misc_RNA (1)...(19): siRNA sense strand
gcccacaauucuguucuua

SEQ ID NO: 2092579 - RNA, 19 nt, Homo sapiens
  misc_RNA (1)...(19): siRNA sense strand
ugccagaaauuaacaaaga

SEQ ID NO: 2092580 - RNA, 19 nt, Homo sapiens
  misc_RNA (1)...(19): siRNA sense strand
aaagaaagaugagauggau

SEQ ID NO: 2092581 - RNA, 19 nt, Homo sapiens
  misc_RNA (1)...(19): siRNA sense strand
gcuagaauggcccaauaua

SEQ ID NO: 2092582 - RNA, 19 nt, Homo sapiens
  misc_RNA (1)...(19): siRNA sense strand
ugaagaagcuuuggcucaa

SEQ ID NO: 2092583 - RNA, 19 nt, Homo sapiens
  misc_RNA (1)...(19): siRNA sense strand
gcaugauccuuccucuauu

SEQ ID NO: 2092584 - RNA, 19 nt, Homo sapiens
  misc_RNA (1)...(19): siRNA sense strand
ggaguccagucauuacaga

SEQ ID NO: 2092585 - RNA, 19 nt, Homo sapiens
  misc_RNA (1)...(19): siRNA sense strand
uuacauaccuugcuagacu

SEQ ID NO: 2092586 - RNA, 19 nt, Homo sapiens
  misc_RNA (1)...(19): siRNA sense strand
cagcagcaauaucugguuu

SEQ ID NO: 2092587 - RNA, 19 nt, Homo sapiens
  misc_RNA (1)...(19): siRNA sense strand
ccaacaagaccacauaugu

SEQ ID NO: 2092588 - RNA, 19 nt, Homo sapiens
  misc_RNA (1)...(19): siRNA sense strand
ucaaggcgguggacuuuag

SEQ ID NO: 2092589 - RNA, 19 nt, Homo sapiens
  misc_RNA (1)...(19): siRNA sense strand
gagaagcggaaccucuaua

SEQ ID NO: 2092590 - RNA, 19 nt, Homo sapiens
  misc_RNA (1)...(19): siRNA sense strand
gcgagggcaugaacgagaa

SEQ ID NO: 2092591 - RNA, 19 nt, Homo sapiens
  misc_RNA (1)...(19): siRNA sense strand
gcucaaggcgguggacuuu

SEQ ID NO: 2092592 - RNA, 19 nt, Homo sapiens
  misc_RNA (1)...(19): siRNA sense strand
ccaacgugcugcagcucua

SEQ ID NO: 2092593 - RNA, 19 nt, Homo sapiens
  misc_RNA (1)...(19): siRNA sense strand
aagcggaaccucuauaaug

SEQ ID NO: 2092594 - RNA, 19 nt, Homo sapiens
  misc_RNA (1)...(19): siRNA sense strand
gaagcggaaccucuauaau

SEQ ID NO: 2092595 - RNA, 19 nt, Homo sapiens
  misc_RNA (1)...(19): siRNA sense strand
ugagagccaugcccagugu

SEQ ID NO: 2092596 - RNA, 19 nt, Homo sapiens
  misc_RNA (1)...(19): siRNA sense strand
agaagcggaaccucuauaa

SEQ ID NO: 2092597 - RNA, 19 nt, Homo sapiens
  misc_RNA (1)...(19): siRNA sense strand
cuauaaugccuacagguuu

SEQ ID NO: 2092598 - RNA, 19 nt, Homo sapiens
  misc_RNA (1)...(19): siRNA sense strand
caaagugacggaccuggau

SEQ ID NO: 2092599 - RNA, 19 nt, Homo sapiens
  misc_RNA (1)...(19): siRNA sense strand
uauaaugccuacagguuuu

SEQ ID NO: 2092600 - RNA, 19 nt, Homo sapiens
  misc_RNA (1)...(19): siRNA sense strand
cgacugcauacucgaguuu

SEQ ID NO: 2092601 - RNA, 19 nt, Homo sapiens
  misc_RNA (1)...(19): siRNA sense strand
ucuauaaugccuacagguu

SEQ ID NO: 2092602 - RNA, 19 nt, Homo sapiens
  misc_RNA (1)...(19): siRNA sense strand
caagcagcaguaccgagua

SEQ ID NO: 2092603 - RNA, 19 nt, Homo sapiens
  misc_RNA (1)...(19): siRNA sense strand
cagacacccugaccaccau

SEQ ID NO: 2092604 - RNA, 19 nt, Homo sapiens
  misc_RNA (1)...(19): siRNA sense strand
ggacuuuagcggccacgau

SEQ ID NO: 2092605 - RNA, 19 nt, Homo sapiens
  misc_RNA (1)...(19): siRNA sense strand
acgagaagcggaaccucua

SEQ ID NO: 2092606 - RNA, 19 nt, Homo sapiens
  misc_RNA (1)...(19): siRNA sense strand
uggcugaggcuguggaugu

SEQ ID NO: 2092607 - RNA, 19 nt, Homo sapiens
  misc_RNA (1)...(19): siRNA sense strand
uggcccagcuggagaaggu

SEQ ID NO: 2092608 - RNA, 19 nt, Homo sapiens
  misc_RNA (1)...(19): siRNA sense strand
ggaagaaucugaaacaaca

SEQ ID NO: 2092609 - RNA, 19 nt, Homo sapiens
  misc_RNA (1)...(19): siRNA sense strand
gagauuaugucuacuuuga

SEQ ID NO: 2092610 - RNA, 19 nt, Homo sapiens
  misc_RNA (1)...(19): siRNA sense strand
ugacaaaggugaaaucaga

SEQ ID NO: 2092611 - RNA, 19 nt, Homo sapiens
  misc_RNA (1)...(19): siRNA sense strand
gcagaaacaucaguugaaa

SEQ ID NO: 2092612 - RNA, 19 nt, Homo sapiens
  misc_RNA (1)...(19): siRNA sense strand
ugacuagcaucauugaaua

SEQ ID NO: 2092613 - RNA, 19 nt, Homo sapiens
  misc_RNA (1)...(19): siRNA sense strand
gagaugaaauggaggaaug

SEQ ID NO: 2092614 - RNA, 19 nt, Homo sapiens
  misc_RNA (1)...(19): siRNA sense strand
cuaaagaaauugaggaaga

SEQ ID NO: 2092615 - RNA, 19 nt, Homo sapiens
  misc_RNA (1)...(19): siRNA sense strand
gcaauuuguuggcuuuauu

SEQ ID NO: 2092616 - RNA, 19 nt, Homo sapiens
  misc_RNA (1)...(19): siRNA sense strand
cagaaucaguauugucaua

SEQ ID NO: 2092617 - RNA, 19 nt, Homo sapiens
  misc_RNA (1)...(19): siRNA sense strand
gcaaagacuucaaugacau

SEQ ID NO: 2092618 - RNA, 19 nt, Homo sapiens
  misc_RNA (1)...(19): siRNA sense strand
caagcuuucuuccuucaua

SEQ ID NO: 2092619 - RNA, 19 nt, Homo sapiens
  misc_RNA (1)...(19): siRNA sense strand
aaccaaauauccacuagua

SEQ ID NO: 2092620 - RNA, 19 nt, Homo sapiens
  misc_RNA (1)...(19): siRNA sense strand
ugugagagcugcuaugcua

SEQ ID NO: 2092621 - RNA, 19 nt, Homo sapiens
  misc_RNA (1)...(19): siRNA sense strand
cagcaacccauaccuaaua

SEQ ID NO: 2092622 - RNA, 19 nt, Homo sapiens
  misc_RNA (1)...(19): siRNA sense strand
cagccuaguuugcauauga

SEQ ID NO: 2092623 - RNA, 19 nt, Homo sapiens
  misc_RNA (1)...(19): siRNA sense strand
gaggcugacuugaccgaua

SEQ ID NO: 2092624 - RNA, 19 nt, Homo sapiens
  misc_RNA (1)...(19): siRNA sense strand
gcaagacggccguuuguug

SEQ ID NO: 2092625 - RNA, 19 nt, Homo sapiens
  misc_RNA (1)...(19): siRNA sense strand
ggucggagauuaugucuac

SEQ ID NO: 2092626 - RNA, 19 nt, Homo sapiens
  misc_RNA (1)...(19): siRNA sense strand
gauuaugucuacuuugaga

SEQ ID NO: 2092627 - RNA, 19 nt, Homo sapiens
  misc_RNA (1)...(19): siRNA sense strand
cagauaagcaugcuaaaga

SEQ ID NO: 2092628 - RNA, 19 nt, Homo sapiens
  misc_RNA (1)...(19): siRNA sense strand
gaaggagaaucagaugaga

SEQ ID NO: 2092629 - RNA, 19 nt, Homo sapiens
  misc_RNA (1)...(19): siRNA sense strand
gaaugagacagaaucagua

SEQ ID NO: 2092630 - RNA, 19 nt, Homo sapiens
  misc_RNA (1)...(19): siRNA sense strand
agacacagcuaugauuuga

SEQ ID NO: 2092631 - RNA, 19 nt, Homo sapiens
  misc_RNA (1)...(19): siRNA sense strand
acagauaugugcaacagaa

SEQ ID NO: 2092632 - RNA, 19 nt, Homo sapiens
  misc_RNA (1)...(19): siRNA sense strand
gaggauaccuucuucuacu

SEQ ID NO: 2092633 - RNA, 19 nt, Homo sapiens
  misc_RNA (1)...(19): siRNA sense strand
ggaaaucauugacuagcau

SEQ ID NO: 2092634 - RNA, 19 nt, Homo sapiens
  misc_RNA (1)...(19): siRNA sense strand
gauuugagcagugccauua

SEQ ID NO: 2092635 - RNA, 19 nt, Homo sapiens
  misc_RNA (1)...(19): siRNA sense strand
gaaaacuacugacagauau

SEQ ID NO: 2092636 - RNA, 19 nt, Homo sapiens
  misc_RNA (1)...(19): siRNA sense strand
uagaagaacucaacaagac

SEQ ID NO: 2092637 - RNA, 19 nt, Homo sapiens
  misc_RNA (1)...(19): siRNA sense strand
ggcaaagacuucaaugaca

SEQ ID NO: 2092638 - RNA, 19 nt, Homo sapiens
  misc_RNA (1)...(19): siRNA sense strand
gauauuuccaacacacuua

SEQ ID NO: 2092639 - RNA, 19 nt, Homo sapiens
  misc_RNA (1)...(19): siRNA sense strand
agaguaaacugaaacaagu

SEQ ID NO: 2092640 - RNA, 19 nt, Homo sapiens
  misc_RNA (1)...(19): siRNA sense strand
ccaaauauccacuaguaau

SEQ ID NO: 2092641 - RNA, 19 nt, Homo sapiens
  misc_RNA (1)...(19): siRNA sense strand
gaggaagaaucugaaacaa

SEQ ID NO: 2092642 - RNA, 19 nt, Homo sapiens
  misc_RNA (1)...(19): siRNA sense strand
ggaaaacuacugacagaua

SEQ ID NO: 2092643 - RNA, 19 nt, Homo sapiens
  misc_RNA (1)...(19): siRNA sense strand
aagcagacauuccagaaau

SEQ ID NO: 2092644 - RNA, 19 nt, Homo sapiens
  misc_RNA (1)...(19): siRNA sense strand
gaaucaguauugucauauc

SEQ ID NO: 2092645 - RNA, 19 nt, Homo sapiens
  misc_RNA (1)...(19): siRNA sense strand
ccaaaucccaaccaaauau

SEQ ID NO: 2092646 - RNA, 19 nt, Homo sapiens
  misc_RNA (1)...(19): siRNA sense strand
caaagacuucaaugacaua

SEQ ID NO: 2092647 - RNA, 19 nt, Homo sapiens
  misc_RNA (1)...(19): siRNA sense strand
acuauuagcugacaaaggu

SEQ ID NO: 2092648 - RNA, 19 nt, Homo sapiens
  misc_RNA (1)...(19): siRNA sense strand
caaaccaaaucccaaccaa

SEQ ID NO: 2092649 - RNA, 19 nt, Homo sapiens
  misc_RNA (1)...(19): siRNA sense strand
gauccaaauagcccacuua

SEQ ID NO: 2092650 - RNA, 19 nt, Homo sapiens
  misc_RNA (1)...(19): siRNA sense strand
gaaaucagagugggaccua

SEQ ID NO: 2092651 - RNA, 19 nt, Homo sapiens
  misc_RNA (1)...(19): siRNA sense strand
caaauauccacuaguaaug

SEQ ID NO: 2092652 - RNA, 19 nt, Homo sapiens
  misc_RNA (1)...(19): siRNA sense strand
gaacucaacaagacugcaa

SEQ ID NO: 2092653 - RNA, 19 nt, Homo sapiens
  misc_RNA (1)...(19): siRNA sense strand
ugagacagaaucaguauug

SEQ ID NO: 2092654 - RNA, 19 nt, Homo sapiens
  misc_RNA (1)...(19): siRNA sense strand
guguugcccuucugaauga

SEQ ID NO: 2092655 - RNA, 19 nt, Homo sapiens
  misc_RNA (1)...(19): siRNA sense strand
gaaacauagggaacucuuu

SEQ ID NO: 2092656 - RNA, 19 nt, Homo sapiens
  misc_RNA (1)...(19): siRNA sense strand
gauaagcaugcuaaagaaa

SEQ ID NO: 2092657 - RNA, 19 nt, Homo sapiens
  misc_RNA (1)...(19): siRNA sense strand
agauaagcaugcuaaagaa

SEQ ID NO: 2092658 - RNA, 19 nt, Homo sapiens
  misc_RNA (1)...(19): siRNA sense strand
caacccauaccuaauaaga

SEQ ID NO: 2092659 - RNA, 19 nt, Homo sapiens
  misc_RNA (1)...(19): siRNA sense strand
ccgccaagcuuucuuccuu

SEQ ID NO: 2092660 - RNA, 19 nt, Homo sapiens
  misc_RNA (1)...(19): siRNA sense strand
gagaguaaacugaaacaag

SEQ ID NO: 2092661 - RNA, 19 nt, Homo sapiens
  misc_RNA (1)...(19): siRNA sense strand
gauagaagaacucaacaag

SEQ ID NO: 2092662 - RNA, 19 nt, Homo sapiens
  misc_RNA (1)...(19): siRNA sense strand
caguguagauuaugugcaa

SEQ ID NO: 2092663 - RNA, 19 nt, Homo sapiens
  misc_RNA (1)...(19): siRNA sense strand
ggccguuuguugcuauuaa

SEQ ID NO: 2092664 - RNA, 19 nt, Homo sapiens
  misc_RNA (1)...(19): siRNA sense strand
uaagaaggauagaagaacu

SEQ ID NO: 2092665 - RNA, 19 nt, Homo sapiens
  misc_RNA (1)...(19): siRNA sense strand
caccuaauaugcaguguag

SEQ ID NO: 2092666 - RNA, 19 nt, Homo sapiens
  misc_RNA (1)...(19): siRNA sense strand
aaguauauaucccaaccua

SEQ ID NO: 2092667 - RNA, 19 nt, Homo sapiens
  misc_RNA (1)...(19): siRNA sense strand
ucaguauugucauaucuug

SEQ ID NO: 2092668 - RNA, 19 nt, Homo sapiens
  misc_RNA (1)...(19): siRNA sense strand
cggagauuaugucuacuuu

SEQ ID NO: 2092669 - RNA, 19 nt, Homo sapiens
  misc_RNA (1)...(19): siRNA sense strand
gcuguuagaaggagaauca

SEQ ID NO: 2092670 - RNA, 19 nt, Homo sapiens
  misc_RNA (1)...(19): siRNA sense strand
gcagcaagacggccguuug

SEQ ID NO: 2092671 - RNA, 19 nt, Homo sapiens
  misc_RNA (1)...(19): siRNA sense strand
gaagcugagaguaaacuga

SEQ ID NO: 2092672 - RNA, 19 nt, Homo sapiens
  misc_RNA (1)...(19): siRNA sense strand
uauagacgacgugauauuu

SEQ ID NO: 2092673 - RNA, 19 nt, Homo sapiens
  misc_RNA (1)...(19): siRNA sense strand
guauauaucccaaccuaca

SEQ ID NO: 2092674 - RNA, 19 nt, Homo sapiens
  misc_RNA (1)...(19): siRNA sense strand
gauugcagcaguucuguga

SEQ ID NO: 2092675 - RNA, 19 nt, Homo sapiens
  misc_RNA (1)...(19): siRNA sense strand
ccgauaagcagaaacauca

SEQ ID NO: 2092676 - RNA, 19 nt, Homo sapiens
  misc_RNA (1)...(19): siRNA sense strand
uuuguuggcuuuauuggaa

SEQ ID NO: 2092677 - RNA, 19 nt, Homo sapiens
  misc_RNA (1)...(19): siRNA sense strand
agaaacaucaguugaaaca

SEQ ID NO: 2092678 - RNA, 19 nt, Homo sapiens
  misc_RNA (1)...(19): siRNA sense strand
gaagccuggugcugugaau

SEQ ID NO: 2092679 - RNA, 19 nt, Homo sapiens
  misc_RNA (1)...(19): siRNA sense strand
caaccuacagcaaaccaaa

SEQ ID NO: 2092680 - RNA, 19 nt, Homo sapiens
  misc_RNA (1)...(19): siRNA sense strand
gaguaaacugaaacaagua

SEQ ID NO: 2092681 - RNA, 19 nt, Homo sapiens
  misc_RNA (1)...(19): siRNA sense strand
aggcugacuugaccgauaa

SEQ ID NO: 2092682 - RNA, 19 nt, Homo sapiens
  misc_RNA (1)...(19): siRNA sense strand
ccuuggaaaucauugacua

SEQ ID NO: 2092683 - RNA, 19 nt, Homo sapiens
  misc_RNA (1)...(19): siRNA sense strand
ugccauuagugucuuagua

SEQ ID NO: 2092684 - RNA, 19 nt, Homo sapiens
  misc_RNA (1)...(19): siRNA sense strand
ccagaaaugcuguuagaag

SEQ ID NO: 2092685 - RNA, 19 nt, Homo sapiens
  misc_RNA (1)...(19): siRNA sense strand
ggauagaagaacucaacaa

SEQ ID NO: 2092686 - RNA, 19 nt, Homo sapiens
  misc_RNA (1)...(19): siRNA sense strand
gugaagacccgccaagcuu

SEQ ID NO: 2092687 - RNA, 19 nt, Homo sapiens
  misc_RNA (1)...(19): siRNA sense strand
ggaaugccaguccgaaaca

SEQ ID NO: 2092688 - RNA, 19 nt, Homo sapiens
  misc_RNA (1)...(19): siRNA sense strand
gucagaagaagagaaguua

SEQ ID NO: 2092689 - RNA, 19 nt, Homo sapiens
  misc_RNA (1)...(19): siRNA sense strand
gccucagaauccucucuua

SEQ ID NO: 2092690 - RNA, 19 nt, Homo sapiens
  misc_RNA (1)...(19): siRNA sense strand
ugacagauaugugcaacag

SEQ ID NO: 2092691 - RNA, 19 nt, Homo sapiens
  misc_RNA (1)...(19): siRNA sense strand
ucaaugacauacggcaaga

SEQ ID NO: 2092692 - RNA, 19 nt, Homo sapiens
  misc_RNA (1)...(19): siRNA sense strand
gaugagagggaacaaucaa

SEQ ID NO: 2092693 - RNA, 19 nt, Homo sapiens
  misc_RNA (1)...(19): siRNA sense strand
caagcagacauuccagaaa

SEQ ID NO: 2092694 - RNA, 19 nt, Homo sapiens
  misc_RNA (1)...(19): siRNA sense strand
gagacagaaucaguauugu

SEQ ID NO: 2092695 - RNA, 19 nt, Homo sapiens
  misc_RNA (1)...(19): siRNA sense strand
gauuaugugcaauuuguug

SEQ ID NO: 2092696 - RNA, 19 nt, Homo sapiens
  misc_RNA (1)...(19): siRNA sense strand
gcagauaagcaugcuaaag

SEQ ID NO: 2092697 - RNA, 19 nt, Homo sapiens
  misc_RNA (1)...(19): siRNA sense strand
gaagacccgccaagcuuuc

SEQ ID NO: 2092698 - RNA, 19 nt, Homo sapiens
  misc_RNA (1)...(19): siRNA sense strand
ccaacacacuuauaaugcu

SEQ ID NO: 2092699 - RNA, 19 nt, Homo sapiens
  misc_RNA (1)...(19): siRNA sense strand
ugaagacccgccaagcuuu

SEQ ID NO: 2092700 - RNA, 19 nt, Homo sapiens
  misc_RNA (1)...(19): siRNA sense strand
ugaggaagaaucugaaaca

SEQ ID NO: 2092701 - RNA, 19 nt, Homo sapiens
  misc_RNA (1)...(19): siRNA sense strand
ccaaccaaauauccacuag

SEQ ID NO: 2092702 - RNA, 19 nt, Homo sapiens
  misc_RNA (1)...(19): siRNA sense strand
gcagugccauuagugucuu

SEQ ID NO: 2092703 - RNA, 19 nt, Homo sapiens
  misc_RNA (1)...(19): siRNA sense strand
gaaaaugcccacccaguca

SEQ ID NO: 2092704 - RNA, 19 nt, Homo sapiens
  misc_RNA (1)...(19): siRNA sense strand
aaccaaaucccaaccaaau

SEQ ID NO: 2092705 - RNA, 19 nt, Homo sapiens
  misc_RNA (1)...(19): siRNA sense strand
cuaauaagaaggauagaag

SEQ ID NO: 2092706 - RNA, 19 nt, Homo sapiens
  misc_RNA (1)...(19): siRNA sense strand
caacagaaacgucuaaaag

SEQ ID NO: 2092707 - RNA, 19 nt, Homo sapiens
  misc_RNA (1)...(19): siRNA sense strand
ccacucggaggaccuguuu

SEQ ID NO: 2092708 - RNA, 19 nt, Homo sapiens
  misc_RNA (1)...(19): siRNA sense strand
gaacaaagaucuggcauua

SEQ ID NO: 2092709 - RNA, 19 nt, Homo sapiens
  misc_RNA (1)...(19): siRNA sense strand
gaagauaaguuuccuuuag

SEQ ID NO: 2092710 - RNA, 19 nt, Homo sapiens
  misc_RNA (1)...(19): siRNA sense strand
aaaccaaacugaagagaua

SEQ ID NO: 2092711 - RNA, 19 nt, Homo sapiens
  misc_RNA (1)...(19): siRNA sense strand
uaaaugagcuggaauugga

SEQ ID NO: 2092712 - RNA, 19 nt, Homo sapiens
  misc_RNA (1)...(19): siRNA sense strand
ugacagaucuugugauuca

SEQ ID NO: 2092713 - RNA, 19 nt, Homo sapiens
  misc_RNA (1)...(19): siRNA sense strand
gacagcagcucuauauuug

SEQ ID NO: 2092714 - RNA, 19 nt, Homo sapiens
  misc_RNA (1)...(19): siRNA sense strand
gaacaagcuuugccacaga

SEQ ID NO: 2092715 - RNA, 19 nt, Homo sapiens
  misc_RNA (1)...(19): siRNA sense strand
ucuuaaagguggugaauua

SEQ ID NO: 2092716 - RNA, 19 nt, Homo sapiens
  misc_RNA (1)...(19): siRNA sense strand
caacuuaccuccuaauugg

SEQ ID NO: 2092717 - RNA, 19 nt, Homo sapiens
  misc_RNA (1)...(19): siRNA sense strand
acaaagaucuggcauuaga

SEQ ID NO: 2092718 - RNA, 19 nt, Homo sapiens
  misc_RNA (1)...(19): siRNA sense strand
gaagacagccacagaauca

SEQ ID NO: 2092719 - RNA, 19 nt, Homo sapiens
  misc_RNA (1)...(19): siRNA sense strand
gaaucaaacucuaaagcaa

SEQ ID NO: 2092720 - RNA, 19 nt, Homo sapiens
  misc_RNA (1)...(19): siRNA sense strand
gaagacagcuccagaucca

SEQ ID NO: 2092721 - RNA, 19 nt, Homo sapiens
  misc_RNA (1)...(19): siRNA sense strand
uaagaacaaugcagucaaa

SEQ ID NO: 2092722 - RNA, 19 nt, Homo sapiens
  misc_RNA (1)...(19): siRNA sense strand
ggauuaaaguguuacagaa

SEQ ID NO: 2092723 - RNA, 19 nt, Homo sapiens
  misc_RNA (1)...(19): siRNA sense strand
gaaaagacauggaagaaau

SEQ ID NO: 2092724 - RNA, 19 nt, Homo sapiens
  misc_RNA (1)...(19): siRNA sense strand
ggacaaaccaacagagaaa

SEQ ID NO: 2092725 - RNA, 19 nt, Homo sapiens
  misc_RNA (1)...(19): siRNA sense strand
gcagagauuuagagcauug

SEQ ID NO: 2092726 - RNA, 19 nt, Homo sapiens
  misc_RNA (1)...(19): siRNA sense strand
gaugggaagugaaauguau

SEQ ID NO: 2092727 - RNA, 19 nt, Homo sapiens
  misc_RNA (1)...(19): siRNA sense strand
caaggaaacaucaagauuu

SEQ ID NO: 2092728 - RNA, 19 nt, Homo sapiens
  misc_RNA (1)...(19): siRNA sense strand
gaagagcagaaacaaauaa

SEQ ID NO: 2092729 - RNA, 19 nt, Homo sapiens
  misc_RNA (1)...(19): siRNA sense strand
caaagugaaucaaacucua

SEQ ID NO: 2092730 - RNA, 19 nt, Homo sapiens
  misc_RNA (1)...(19): siRNA sense strand
gaguugugaugauggauua

SEQ ID NO: 2092731 - RNA, 19 nt, Homo sapiens
  misc_RNA (1)...(19): siRNA sense strand
cagagaacauugcaucaaa

SEQ ID NO: 2092732 - RNA, 19 nt, Homo sapiens
  misc_RNA (1)...(19): siRNA sense strand
gaacuuagugcauccugua

SEQ ID NO: 2092733 - RNA, 19 nt, Homo sapiens
  misc_RNA (1)...(19): siRNA sense strand
caaaucagguauucgaaug

SEQ ID NO: 2092734 - RNA, 19 nt, Homo sapiens
  misc_RNA (1)...(19): siRNA sense strand
agagaaagcagcuaagaua

SEQ ID NO: 2092735 - RNA, 19 nt, Homo sapiens
  misc_RNA (1)...(19): siRNA sense strand
gaaagcagcuaagauaaaa

SEQ ID NO: 2092736 - RNA, 19 nt, Homo sapiens
  misc_RNA (1)...(19): siRNA sense strand
uaaagcaagucauagagaa

SEQ ID NO: 2092737 - RNA, 19 nt, Homo sapiens
  misc_RNA (1)...(19): siRNA sense strand
guggaaagcucuaaauagu

SEQ ID NO: 2092738 - RNA, 19 nt, Homo sapiens
  misc_RNA (1)...(19): siRNA sense strand
gagcagaaacaaauaagaa

SEQ ID NO: 2092739 - RNA, 19 nt, Homo sapiens
  misc_RNA (1)...(19): siRNA sense strand
aaacacacauacuaucuga

SEQ ID NO: 2092740 - RNA, 19 nt, Homo sapiens
  misc_RNA (1)...(19): siRNA sense strand
caaagaagguggcauacag

SEQ ID NO: 2092741 - RNA, 19 nt, Homo sapiens
  misc_RNA (1)...(19): siRNA sense strand
ggaagagacuuuuggcaua

SEQ ID NO: 2092742 - RNA, 19 nt, Homo sapiens
  misc_RNA (1)...(19): siRNA sense strand
gaugacagcagcucuauau

SEQ ID NO: 2092743 - RNA, 19 nt, Homo sapiens
  misc_RNA (1)...(19): siRNA sense strand
gaagguggcauacagcaaa

SEQ ID NO: 2092744 - RNA, 19 nt, Homo sapiens
  misc_RNA (1)...(19): siRNA sense strand
guagaaagaacgcaacaaa

SEQ ID NO: 2092745 - RNA, 19 nt, Homo sapiens
  misc_RNA (1)...(19): siRNA sense strand
gcaauugauuaccacauau

SEQ ID NO: 2092746 - RNA, 19 nt, Homo sapiens
  misc_RNA (1)...(19): siRNA sense strand
gcagacagaagcuauuaaa

SEQ ID NO: 2092747 - RNA, 19 nt, Homo sapiens
  misc_RNA (1)...(19): siRNA sense strand
cgagugauguaauuagaaa

SEQ ID NO: 2092748 - RNA, 19 nt, Homo sapiens
  misc_RNA (1)...(19): siRNA sense strand
caucaggacuuuauacauc

SEQ ID NO: 2092749 - RNA, 19 nt, Homo sapiens
  misc_RNA (1)...(19): siRNA sense strand
ugacagcagcucuauauuu

SEQ ID NO: 2092750 - RNA, 19 nt, Homo sapiens
  misc_RNA (1)...(19): siRNA sense strand
guugacagaucuugugauu

SEQ ID NO: 2092751 - RNA, 19 nt, Homo sapiens
  misc_RNA (1)...(19): siRNA sense strand
gaacacaagaagcuauauu

SEQ ID NO: 2092752 - RNA, 19 nt, Homo sapiens
  misc_RNA (1)...(19): siRNA sense strand
gagaaagcagcuaagauaa

SEQ ID NO: 2092753 - RNA, 19 nt, Homo sapiens
  misc_RNA (1)...(19): siRNA sense strand
caaaccaacagagaaauua

SEQ ID NO: 2092754 - RNA, 19 nt, Homo sapiens
  misc_RNA (1)...(19): siRNA sense strand
gaacaacugguuugcaaau

SEQ ID NO: 2092755 - RNA, 19 nt, Homo sapiens
  misc_RNA (1)...(19): siRNA sense strand
uaaagguggugaauuacuu

SEQ ID NO: 2092756 - RNA, 19 nt, Homo sapiens
  misc_RNA (1)...(19): siRNA sense strand
gaaagugauuaugcuauuc

SEQ ID NO: 2092757 - RNA, 19 nt, Homo sapiens
  misc_RNA (1)...(19): siRNA sense strand
gaacaggcuuccaaagaac

SEQ ID NO: 2092758 - RNA, 19 nt, Homo sapiens
  misc_RNA (1)...(19): siRNA sense strand
gaaagaagucauccacugu

SEQ ID NO: 2092759 - RNA, 19 nt, Homo sapiens
  misc_RNA (1)...(19): siRNA sense strand
ggacuguucgucugacaua

SEQ ID NO: 2092760 - RNA, 19 nt, Homo sapiens
  misc_RNA (1)...(19): siRNA sense strand
caucaagauuugugacauu

SEQ ID NO: 2092761 - RNA, 19 nt, Homo sapiens
  misc_RNA (1)...(19): siRNA sense strand
caaacaaacaguucaguug

SEQ ID NO: 2092762 - RNA, 19 nt, Homo sapiens
  misc_RNA (1)...(19): siRNA sense strand
caagauaucaucgaaagaa

SEQ ID NO: 2092763 - RNA, 19 nt, Homo sapiens
  misc_RNA (1)...(19): siRNA sense strand
gaagcaagacccucaagga

SEQ ID NO: 2092764 - RNA, 19 nt, Homo sapiens
  misc_RNA (1)...(19): siRNA sense strand
uuuaagaccugccagcuuu

SEQ ID NO: 2092765 - RNA, 19 nt, Homo sapiens
  misc_RNA (1)...(19): siRNA sense strand
ggaagagguugacagaucu

SEQ ID NO: 2092766 - RNA, 19 nt, Homo sapiens
  misc_RNA (1)...(19): siRNA sense strand
uaaauaguccucuuggaaa

SEQ ID NO: 2092767 - RNA, 19 nt, Homo sapiens
  misc_RNA (1)...(19): siRNA sense strand
gguggcaucucccagaauu

SEQ ID NO: 2092768 - RNA, 19 nt, Homo sapiens
  misc_RNA (1)...(19): siRNA sense strand
gaagagaaagcagcuaaga

SEQ ID NO: 2092769 - RNA, 19 nt, Homo sapiens
  misc_RNA (1)...(19): siRNA sense strand
aaggaaacaucaagauuug

SEQ ID NO: 2092770 - RNA, 19 nt, Homo sapiens
  misc_RNA (1)...(19): siRNA sense strand
ggacacgaguugugaugau

SEQ ID NO: 2092771 - RNA, 19 nt, Homo sapiens
  misc_RNA (1)...(19): siRNA sense strand
guacagaaguuuuagagaa

SEQ ID NO: 2092772 - RNA, 19 nt, Homo sapiens
  misc_RNA (1)...(19): siRNA sense strand
gaucuggagucgcuaauac

SEQ ID NO: 2092773 - RNA, 19 nt, Homo sapiens
  misc_RNA (1)...(19): siRNA sense strand
ucagacaaaugaucaaauc

SEQ ID NO: 2092774 - RNA, 19 nt, Homo sapiens
  misc_RNA (1)...(19): siRNA sense strand
acacuuggcuuuaucaucu

SEQ ID NO: 2092775 - RNA, 19 nt, Homo sapiens
  misc_RNA (1)...(19): siRNA sense strand
ugaagggauugcucacuaa

SEQ ID NO: 2092776 - RNA, 19 nt, Homo sapiens
  misc_RNA (1)...(19): siRNA sense strand
ggaagugaaauguaucuga

SEQ ID NO: 2092777 - RNA, 19 nt, Homo sapiens
  misc_RNA (1)...(19): siRNA sense strand
uacaagaaguucaaggaaa

SEQ ID NO: 2092778 - RNA, 19 nt, Homo sapiens
  misc_RNA (1)...(19): siRNA sense strand
gaagagauaagaacaaugc

SEQ ID NO: 2092779 - RNA, 19 nt, Homo sapiens
  misc_RNA (1)...(19): siRNA sense strand
gaaucagaaucuucguuug

SEQ ID NO: 2092780 - RNA, 19 nt, Homo sapiens
  misc_RNA (1)...(19): siRNA sense strand
gaagagacuuuuggcauaa

SEQ ID NO: 2092781 - RNA, 19 nt, Homo sapiens
  misc_RNA (1)...(19): siRNA sense strand
cagcaaagaagguggcaua

SEQ ID NO: 2092782 - RNA, 19 nt, Homo sapiens
  misc_RNA (1)...(19): siRNA sense strand
uaaguuaaaugagcuggaa

SEQ ID NO: 2092783 - RNA, 19 nt, Homo sapiens
  misc_RNA (1)...(19): siRNA sense strand
gcaacccuuuccuauacua

SEQ ID NO: 2092784 - RNA, 19 nt, Homo sapiens
  misc_RNA (1)...(19): siRNA sense strand
gagacucgauuauucaucu

SEQ ID NO: 2092785 - RNA, 19 nt, Homo sapiens
  misc_RNA (1)...(19): siRNA sense strand
gauuugcguuguucacuga

SEQ ID NO: 2092786 - RNA, 19 nt, Homo sapiens
  misc_RNA (1)...(19): siRNA sense strand
gcuggaagcaacaauguaa

SEQ ID NO: 2092787 - RNA, 19 nt, Homo sapiens
  misc_RNA (1)...(19): siRNA sense strand
gguguacacuaauaggaaa

SEQ ID NO: 2092788 - RNA, 19 nt, Homo sapiens
  misc_RNA (1)...(19): siRNA sense strand
agagauggcuguucugaag

SEQ ID NO: 2092789 - RNA, 19 nt, Homo sapiens
  misc_RNA (1)...(19): siRNA sense strand
guauagagauggcuguucu

SEQ ID NO: 2092790 - RNA, 19 nt, Homo sapiens
  misc_RNA (1)...(19): siRNA sense strand
gagaaaaguugcuguuaau

SEQ ID NO: 2092791 - RNA, 19 nt, Homo sapiens
  misc_RNA (1)...(19): siRNA sense strand
gaagguacaaggacuguuc

SEQ ID NO: 2092792 - RNA, 19 nt, Homo sapiens
  misc_RNA (1)...(19): siRNA sense strand
gagccuuccucucagauau

SEQ ID NO: 2092793 - RNA, 19 nt, Homo sapiens
  misc_RNA (1)...(19): siRNA sense strand
gaggaaaugagcaagauau

SEQ ID NO: 2092794 - RNA, 19 nt, Homo sapiens
  misc_RNA (1)...(19): siRNA sense strand
gcgcauuuauuugacagua

SEQ ID NO: 2092795 - RNA, 19 nt, Homo sapiens
  misc_RNA (1)...(19): siRNA sense strand
ugcaauugauuaccacaua

SEQ ID NO: 2092796 - RNA, 19 nt, Homo sapiens
  misc_RNA (1)...(19): siRNA sense strand
acaacugguuugcaaauug

SEQ ID NO: 2092797 - RNA, 19 nt, Homo sapiens
  misc_RNA (1)...(19): siRNA sense strand
gaucugaauuugaacaacu

SEQ ID NO: 2092798 - RNA, 19 nt, Homo sapiens
  misc_RNA (1)...(19): siRNA sense strand
cagauucucccaauauauu

SEQ ID NO: 2092799 - RNA, 19 nt, Homo sapiens
  misc_RNA (1)...(19): siRNA sense strand
aaacaaacaguucaguuga

SEQ ID NO: 2092800 - RNA, 19 nt, Homo sapiens
  misc_RNA (1)...(19): siRNA sense strand
gaagaagacagcuccagau

SEQ ID NO: 2092801 - RNA, 19 nt, Homo sapiens
  misc_RNA (1)...(19): siRNA sense strand
gaagauccaaguccagaug

SEQ ID NO: 2092802 - RNA, 19 nt, Homo sapiens
  misc_RNA (1)...(19): siRNA sense strand
ggaaacaucaagauuugug

SEQ ID NO: 2092803 - RNA, 19 nt, Homo sapiens
  misc_RNA (1)...(19): siRNA sense strand
gaaucaaccaggaccauug

SEQ ID NO: 2092804 - RNA, 19 nt, Homo sapiens
  misc_RNA (1)...(19): siRNA sense strand
uggaagagguugacagauc

SEQ ID NO: 2092805 - RNA, 19 nt, Homo sapiens
  misc_RNA (1)...(19): siRNA sense strand
gaagaguggauuaaagugu

SEQ ID NO: 2092806 - RNA, 19 nt, Homo sapiens
  misc_RNA (1)...(19): siRNA sense strand
aagaggagauaacaaacaa

SEQ ID NO: 2092807 - RNA, 19 nt, Homo sapiens
  misc_RNA (1)...(19): siRNA sense strand
cuaaauaguccucuuggaa

SEQ ID NO: 2092808 - RNA, 19 nt, Homo sapiens
  misc_RNA (1)...(19): siRNA sense strand
gaaaguaccuugccgaaug

SEQ ID NO: 2092809 - RNA, 19 nt, Homo sapiens
  misc_RNA (1)...(19): siRNA sense strand
caaacaaacucuaccauca

SEQ ID NO: 2092810 - RNA, 19 nt, Homo sapiens
  misc_RNA (1)...(19): siRNA sense strand
gagcaagacuuucuauaag

SEQ ID NO: 2092811 - RNA, 19 nt, Homo sapiens
  misc_RNA (1)...(19): siRNA sense strand
ggacaucuguucuucaagu

SEQ ID NO: 2092812 - RNA, 19 nt, Homo sapiens
  misc_RNA (1)...(19): siRNA sense strand
gaacucugcuggccuuuca

SEQ ID NO: 2092813 - RNA, 19 nt, Homo sapiens
  misc_RNA (1)...(19): siRNA sense strand
gaagauggcagacuacuca

SEQ ID NO: 2092814 - RNA, 19 nt, Homo sapiens
  misc_RNA (1)...(19): siRNA sense strand
gaacugguccucugcaaga

SEQ ID NO: 2092815 - RNA, 19 nt, Homo sapiens
  misc_RNA (1)...(19): siRNA sense strand
gaucugagccuccuggauu

SEQ ID NO: 2092816 - RNA, 19 nt, Homo sapiens
  misc_RNA (1)...(19): siRNA sense strand
gaaaaugacugcagcauag

SEQ ID NO: 2092817 - RNA, 19 nt, Homo sapiens
  misc_RNA (1)...(19): siRNA sense strand
ggagaaacauggauuugag

SEQ ID NO: 2092818 - RNA, 19 nt, Homo sapiens
  misc_RNA (1)...(19): siRNA sense strand
gcacuucuguggcccauca

SEQ ID NO: 2092819 - RNA, 19 nt, Homo sapiens
  misc_RNA (1)...(19): siRNA sense strand
gaagucaagugcuguaagg

SEQ ID NO: 2092820 - RNA, 19 nt, Homo sapiens
  misc_RNA (1)...(19): siRNA sense strand
agaaacacaugccgaaaga

SEQ ID NO: 2092821 - RNA, 19 nt, Homo sapiens
  misc_RNA (1)...(19): siRNA sense strand
ucauugacauguccucuuu

SEQ ID NO: 2092822 - RNA, 19 nt, Homo sapiens
  misc_RNA (1)...(19): siRNA sense strand
gcugauggaagaauuuaua

SEQ ID NO: 2092823 - RNA, 19 nt, Homo sapiens
  misc_RNA (1)...(19): siRNA sense strand
gaucaggcauuagaaguuc

SEQ ID NO: 2092824 - RNA, 19 nt, Homo sapiens
  misc_RNA (1)...(19): siRNA sense strand
gggccuggcuuaagaaaca

SEQ ID NO: 2092825 - RNA, 19 nt, Homo sapiens
  misc_RNA (1)...(19): siRNA sense strand
gaacaagcgcaguuucuuc

SEQ ID NO: 2092826 - RNA, 19 nt, Homo sapiens
  misc_RNA (1)...(19): siRNA sense strand
cauagaggaugcuguuguu

SEQ ID NO: 2092827 - RNA, 19 nt, Homo sapiens
  misc_RNA (1)...(19): siRNA sense strand
ugaggaggaugccagaauu

SEQ ID NO: 2092828 - RNA, 19 nt, Homo sapiens
  misc_RNA (1)...(19): siRNA sense strand
gaauuggaccugaaacguu

SEQ ID NO: 2092829 - RNA, 19 nt, Homo sapiens
  misc_RNA (1)...(19): siRNA sense strand
gccaggcacuugaccauug

SEQ ID NO: 2092830 - RNA, 19 nt, Homo sapiens
  misc_RNA (1)...(19): siRNA sense strand
ucacagaguuugagauaac

SEQ ID NO: 2092831 - RNA, 19 nt, Homo sapiens
  misc_RNA (1)...(19): siRNA sense strand
gaggaggaugccagaauua

SEQ ID NO: 2092832 - RNA, 19 nt, Homo sapiens
  misc_RNA (1)...(19): siRNA sense strand
gauaaaggacagauugaau

SEQ ID NO: 2092833 - RNA, 19 nt, Homo sapiens
  misc_RNA (1)...(19): siRNA sense strand
gaagcugugugugucauug

SEQ ID NO: 2092834 - RNA, 19 nt, Homo sapiens
  misc_RNA (1)...(19): siRNA sense strand
agagcaagacuuucuauaa

SEQ ID NO: 2092835 - RNA, 19 nt, Homo sapiens
  misc_RNA (1)...(19): siRNA sense strand
gacaucuguucuucaagua

SEQ ID NO: 2092836 - RNA, 19 nt, Homo sapiens
  misc_RNA (1)...(19): siRNA sense strand
guacacagcccucaaucug

SEQ ID NO: 2092837 - RNA, 19 nt, Homo sapiens
  misc_RNA (1)...(19): siRNA sense strand
ccagguggauggagaaaca

SEQ ID NO: 2092838 - RNA, 19 nt, Homo sapiens
  misc_RNA (1)...(19): siRNA sense strand
gaagucaugccuuugaugu

SEQ ID NO: 2092839 - RNA, 19 nt, Homo sapiens
  misc_RNA (1)...(19): siRNA sense strand
cagauugaaugccaguauu

SEQ ID NO: 2092840 - RNA, 19 nt, Homo sapiens
  misc_RNA (1)...(19): siRNA sense strand
agaaccagcuggagauuca

SEQ ID NO: 2092841 - RNA, 19 nt, Homo sapiens
  misc_RNA (1)...(19): siRNA sense strand
gcaagaaccagcuggagau

SEQ ID NO: 2092842 - RNA, 19 nt, Homo sapiens
  misc_RNA (1)...(19): siRNA sense strand
gagcagcacaccaacuauu

SEQ ID NO: 2092843 - RNA, 19 nt, Homo sapiens
  misc_RNA (1)...(19): siRNA sense strand
gaaguacacagcccucaau

SEQ ID NO: 2092844 - RNA, 19 nt, Homo sapiens
  misc_RNA (1)...(19): siRNA sense strand
acgcagggcugaauguuau

SEQ ID NO: 2092845 - RNA, 19 nt, Homo sapiens
  misc_RNA (1)...(19): siRNA sense strand
ccagaccgguaggcaguua

SEQ ID NO: 2092846 - RNA, 19 nt, Homo sapiens
  misc_RNA (1)...(19): siRNA sense strand
aauuggaccugaaacguuu

SEQ ID NO: 2092847 - RNA, 19 nt, Homo sapiens
  misc_RNA (1)...(19): siRNA sense strand
ggaugcugauggaagaauu

SEQ ID NO: 2092848 - RNA, 19 nt, Homo sapiens
  misc_RNA (1)...(19): siRNA sense strand
gagcagagcaagacuuucu

SEQ ID NO: 2092849 - RNA, 19 nt, Homo sapiens
  misc_RNA (1)...(19): siRNA sense strand
guaaggaagcugugugugu

SEQ ID NO: 2092850 - RNA, 19 nt, Homo sapiens
  misc_RNA (1)...(19): siRNA sense strand
gaauggaugguacaugguu

SEQ ID NO: 2092851 - RNA, 19 nt, Homo sapiens
  misc_RNA (1)...(19): siRNA sense strand
uacaguaccucuucuccaa

SEQ ID NO: 2092852 - RNA, 19 nt, Homo sapiens
  misc_RNA (1)...(19): siRNA sense strand
gcagacuacucaaacaaac

SEQ ID NO: 2092853 - RNA, 19 nt, Homo sapiens
  misc_RNA (1)...(19): siRNA sense strand
caagcgcaguuucuucaug

SEQ ID NO: 2092854 - RNA, 19 nt, Homo sapiens
  misc_RNA (1)...(19): siRNA sense strand
cagagcagcacaccaacua

SEQ ID NO: 2092855 - RNA, 19 nt, Homo sapiens
  misc_RNA (1)...(19): siRNA sense strand
agaggaugcuguuguuguu

SEQ ID NO: 2092856 - RNA, 19 nt, Homo sapiens
  misc_RNA (1)...(19): siRNA sense strand
acacagcccucaaucugau

SEQ ID NO: 2092857 - RNA, 19 nt, Homo sapiens
  misc_RNA (1)...(19): siRNA sense strand
aaaaugggguggaaggaua

SEQ ID NO: 2092858 - RNA, 19 nt, Homo sapiens
  misc_RNA (1)...(19): siRNA sense strand
gagcgugggcuaugcaaau

SEQ ID NO: 2092859 - RNA, 19 nt, Homo sapiens
  misc_RNA (1)...(19): siRNA sense strand
aagcgcaguuucuucauga

SEQ ID NO: 2092860 - RNA, 19 nt, Homo sapiens
  misc_RNA (1)...(19): siRNA sense strand
ggaucaggcauuagaaguu

SEQ ID NO: 2092861 - RNA, 19 nt, Homo sapiens
  misc_RNA (1)...(19): siRNA sense strand
ugacauguccucuuucaca

SEQ ID NO: 2092862 - RNA, 19 nt, Homo sapiens
  misc_RNA (1)...(19): siRNA sense strand
gauggagaaacauggauuu

SEQ ID NO: 2092863 - RNA, 19 nt, Homo sapiens
  misc_RNA (1)...(19): siRNA sense strand
guuaguaucccgcuacaug

SEQ ID NO: 2092864 - RNA, 19 nt, Homo sapiens
  misc_RNA (1)...(19): siRNA sense strand
gaccggacaucuguucuuc

SEQ ID NO: 2092865 - RNA, 19 nt, Homo sapiens
  misc_RNA (1)...(19): siRNA sense strand
ccaggcacuugaccauuga

SEQ ID NO: 2092866 - RNA, 19 nt, Homo sapiens
  misc_RNA (1)...(19): siRNA sense strand
gcgagucuccugcagugua

SEQ ID NO: 2092867 - RNA, 19 nt, Homo sapiens
  misc_RNA (1)...(19): siRNA sense strand
caucuguucuucaaguaau

SEQ ID NO: 2092868 - RNA, 19 nt, Homo sapiens
  misc_RNA (1)...(19): siRNA sense strand
uuauagguaucccuucuga

SEQ ID NO: 2092869 - RNA, 19 nt, Homo sapiens
  misc_RNA (1)...(19): siRNA sense strand
gauguaugaucugaagguu

SEQ ID NO: 2092870 - RNA, 19 nt, Homo sapiens
  misc_RNA (1)...(19): siRNA sense strand
ggaggaugccagaauuaga

SEQ ID NO: 2092871 - RNA, 19 nt, Homo sapiens
  misc_RNA (1)...(19): siRNA sense strand
ccggacaucuguucuucaa

SEQ ID NO: 2092872 - RNA, 19 nt, Homo sapiens
  misc_RNA (1)...(19): siRNA sense strand
gggcugaauguuauaggua

SEQ ID NO: 2092873 - RNA, 19 nt, Homo sapiens
  misc_RNA (1)...(19): siRNA sense strand
gcaccucuccucucuacga

SEQ ID NO: 2092874 - RNA, 19 nt, Homo sapiens
  misc_RNA (1)...(19): siRNA sense strand
gaccuucgcaucagacaug

SEQ ID NO: 2092875 - RNA, 19 nt, Homo sapiens
  misc_RNA (1)...(19): siRNA sense strand
gcagagcaagacuuucuau

SEQ ID NO: 2092876 - RNA, 19 nt, Homo sapiens
  misc_RNA (1)...(19): siRNA sense strand
gagaaacauggauuugaga

SEQ ID NO: 2092877 - RNA, 19 nt, Homo sapiens
  misc_RNA (1)...(19): siRNA sense strand
aaggacaggcucaaucuuu

SEQ ID NO: 2092878 - RNA, 19 nt, Homo sapiens
  misc_RNA (1)...(19): siRNA sense strand
caacuguucauguggagaa

SEQ ID NO: 2092879 - RNA, 19 nt, Homo sapiens
  misc_RNA (1)...(19): siRNA sense strand
caaaugggauccgggugau

SEQ ID NO: 2092880 - RNA, 19 nt, Homo sapiens
  misc_RNA (1)...(19): siRNA sense strand
ccacuucccaagccucuuu

SEQ ID NO: 2092881 - RNA, 19 nt, Homo sapiens
  misc_RNA (1)...(19): siRNA sense strand
uggaugugcugucugaguu

SEQ ID NO: 2092882 - RNA, 19 nt, Homo sapiens
  misc_RNA (1)...(19): siRNA sense strand
gaggguggaggguaugaaa

SEQ ID NO: 2092883 - RNA, 19 nt, Homo sapiens
  misc_RNA (1)...(19): siRNA sense strand
agucaugccuuugauguau

SEQ ID NO: 2092884 - RNA, 19 nt, Homo sapiens
  misc_RNA (1)...(19): siRNA sense strand
ggcugaauguuauagguau

SEQ ID NO: 2092885 - RNA, 19 nt, Homo sapiens
  misc_RNA (1)...(19): siRNA sense strand
ucuauaagccagauugguu

SEQ ID NO: 2092886 - RNA, 19 nt, Homo sapiens
  misc_RNA (1)...(19): siRNA sense strand
agcagaagauggcagacua

SEQ ID NO: 2092887 - RNA, 19 nt, Homo sapiens
  misc_RNA (1)...(19): siRNA sense strand
gggaucacuuugccucugu

SEQ ID NO: 2092888 - RNA, 19 nt, Homo sapiens
  misc_RNA (1)...(19): siRNA sense strand
gagaagaacccaaaaccaa

SEQ ID NO: 2092889 - RNA, 19 nt, Homo sapiens
  misc_RNA (1)...(19): siRNA sense strand
ucaguuagagcaagaaaca

SEQ ID NO: 2092890 - RNA, 19 nt, Homo sapiens
  misc_RNA (1)...(19): siRNA sense strand
gagaugagcgugggcuaug

SEQ ID NO: 2092891 - RNA, 19 nt, Homo sapiens
  misc_RNA (1)...(19): siRNA sense strand
caguaccucuucuccaaug

SEQ ID NO: 2092892 - RNA, 19 nt, Homo sapiens
  misc_RNA (1)...(19): siRNA sense strand
ggauggagaaacauggauu

SEQ ID NO: 2092893 - RNA, 19 nt, Homo sapiens
  misc_RNA (1)...(19): siRNA sense strand
caagaaaguggccgagcuu

SEQ ID NO: 2092894 - RNA, 19 nt, Homo sapiens
  misc_RNA (1)...(19): siRNA sense strand
cgaacagguuacacaagga

SEQ ID NO: 2092895 - RNA, 19 nt, Homo sapiens
  misc_RNA (1)...(19): siRNA sense strand
gauccgaacagguuacaca

SEQ ID NO: 2092896 - RNA, 19 nt, Homo sapiens
  misc_RNA (1)...(19): siRNA sense strand
ggaaguacacagcccucaa

SEQ ID NO: 2092897 - RNA, 19 nt, Homo sapiens
  misc_RNA (1)...(19): siRNA sense strand
gacgucaccuggaaguaca

SEQ ID NO: 2092898 - RNA, 19 nt, Homo sapiens
  misc_RNA (1)...(19): siRNA sense strand
uggaggacgucaccuggaa

SEQ ID NO: 2092899 - RNA, 19 nt, Homo sapiens
  misc_RNA (1)...(19): siRNA sense strand
cagcauagcacgacugaac

SEQ ID NO: 2092900 - RNA, 19 nt, Homo sapiens
  misc_RNA (1)...(19): siRNA sense strand
uuucacagaguuugagaua

SEQ ID NO: 2092901 - RNA, 19 nt, Homo sapiens
  misc_RNA (1)...(19): siRNA sense strand
aauggaugguacaugguua

SEQ ID NO: 2092902 - RNA, 19 nt, Homo sapiens
  misc_RNA (1)...(19): siRNA sense strand
acgaggagccgguuaguau

SEQ ID NO: 2092903 - RNA, 19 nt, Homo sapiens
  misc_RNA (1)...(19): siRNA sense strand
ggaaaguaccuugccgaau

SEQ ID NO: 2092904 - RNA, 19 nt, Homo sapiens
  misc_RNA (1)...(19): siRNA sense strand
aaacacaugccgaaagaca

SEQ ID NO: 2092905 - RNA, 19 nt, Homo sapiens
  misc_RNA (1)...(19): siRNA sense strand
gcauagcacgacugaacaa

SEQ ID NO: 2092906 - RNA, 19 nt, Homo sapiens
  misc_RNA (1)...(19): siRNA sense strand
ggaagucaugccuuugaug

SEQ ID NO: 2092907 - RNA, 19 nt, Homo sapiens
  misc_RNA (1)...(19): siRNA sense strand
ccagagcagccgcaccuuu

SEQ ID NO: 2092908 - RNA, 19 nt, Homo sapiens
  misc_RNA (1)...(19): siRNA sense strand
gaagaggacguauauauua

SEQ ID NO: 2092909 - RNA, 19 nt, Homo sapiens
  misc_RNA (1)...(19): siRNA sense strand
ggacguauauauuaugcua

SEQ ID NO: 2092910 - RNA, 19 nt, Homo sapiens
  misc_RNA (1)...(19): siRNA sense strand
uaaaggagcagagguauua

SEQ ID NO: 2092911 - RNA, 19 nt, Homo sapiens
  misc_RNA (1)...(19): siRNA sense strand
gagcagagguauuacugaa

SEQ ID NO: 2092912 - RNA, 19 nt, Homo sapiens
  misc_RNA (1)...(19): siRNA sense strand
ggaagaggacguauauauu

SEQ ID NO: 2092913 - RNA, 19 nt, Homo sapiens
  misc_RNA (1)...(19): siRNA sense strand
ccacuugccucuccuggua

SEQ ID NO: 2092914 - RNA, 19 nt, Homo sapiens
  misc_RNA (1)...(19): siRNA sense strand
gcacaagccuuuaaaucca

SEQ ID NO: 2092915 - RNA, 19 nt, Homo sapiens
  misc_RNA (1)...(19): siRNA sense strand
uaacacaaaugcaagaaca

SEQ ID NO: 2092916 - RNA, 19 nt, Homo sapiens
  misc_RNA (1)...(19): siRNA sense strand
gcagagguauuacugaaca

SEQ ID NO: 2092917 - RNA, 19 nt, Homo sapiens
  misc_RNA (1)...(19): siRNA sense strand
ucaaacaacuguaggagau

SEQ ID NO: 2092918 - RNA, 19 nt, Homo sapiens
  misc_RNA (1)...(19): siRNA sense strand
ccaggucucugccaacaaa

SEQ ID NO: 2092919 - RNA, 19 nt, Homo sapiens
  misc_RNA (1)...(19): siRNA sense strand
gcaagaacauacaaugaac

SEQ ID NO: 2092920 - RNA, 19 nt, Homo sapiens
  misc_RNA (1)...(19): siRNA sense strand
aaaggaaacucagcggaaa

SEQ ID NO: 2092921 - RNA, 19 nt, Homo sapiens
  misc_RNA (1)...(19): siRNA sense strand
ugaaccauuucccuacaua

SEQ ID NO: 2092922 - RNA, 19 nt, Homo sapiens
  misc_RNA (1)...(19): siRNA sense strand
cagcagaacuucaaaacaa

SEQ ID NO: 2092923 - RNA, 19 nt, Homo sapiens
  misc_RNA (1)...(19): siRNA sense strand
ggaugcugcuauaacauau

SEQ ID NO: 2092924 - RNA, 19 nt, Homo sapiens
  misc_RNA (1)...(19): siRNA sense strand
gcuauaacauauguaagug

SEQ ID NO: 2092925 - RNA, 19 nt, Homo sapiens
  misc_RNA (1)...(19): siRNA sense strand
aaacacagcaagaugcaaa

SEQ ID NO: 2092926 - RNA, 19 nt, Homo sapiens
  misc_RNA (1)...(19): siRNA sense strand
ccagaggagugacuuccaa

SEQ ID NO: 2092927 - RNA, 19 nt, Homo sapiens
  misc_RNA (1)...(19): siRNA sense strand
gccuuuaaauccaccaauu

SEQ ID NO: 2092928 - RNA, 19 nt, Homo sapiens
  misc_RNA (1)...(19): siRNA sense strand
gcaagucagcaacggcuuu

SEQ ID NO: 2092929 - RNA, 19 nt, Homo sapiens
  misc_RNA (1)...(19): siRNA sense strand
uggaagaggacguauauau

SEQ ID NO: 2092930 - RNA, 19 nt, Homo sapiens
  misc_RNA (1)...(19): siRNA sense strand
ggaaagagacacggagcuu

SEQ ID NO: 2092931 - RNA, 19 nt, Homo sapiens
  misc_RNA (1)...(19): siRNA sense strand
aaagccuucuuguggaaua

SEQ ID NO: 2092932 - RNA, 19 nt, Homo sapiens
  misc_RNA (1)...(19): siRNA sense strand
acacaaaugcaagaacaua

SEQ ID NO: 2092933 - RNA, 19 nt, Homo sapiens
  misc_RNA (1)...(19): siRNA sense strand
agaggaugcugcuauaaca

SEQ ID NO: 2092934 - RNA, 19 nt, Homo sapiens
  misc_RNA (1)...(19): siRNA sense strand
gcggaaagcagaaugaucu

SEQ ID NO: 2092935 - RNA, 19 nt, Homo sapiens
  misc_RNA (1)...(19): siRNA sense strand
ccuuuaaauccaccaauua

SEQ ID NO: 2092936 - RNA, 19 nt, Homo sapiens
  misc_RNA (1)...(19): siRNA sense strand
gcugcuauaacauauguaa

SEQ ID NO: 2092937 - RNA, 19 nt, Homo sapiens
  misc_RNA (1)...(19): siRNA sense strand
guuggaagaggacguauau

SEQ ID NO: 2092938 - RNA, 19 nt, Homo sapiens
  misc_RNA (1)...(19): siRNA sense strand
ggccaacaguuccuaaagg

SEQ ID NO: 2092939 - RNA, 19 nt, Homo sapiens
  misc_RNA (1)...(19): siRNA sense strand
gacugguggucacauggua

SEQ ID NO: 2092940 - RNA, 19 nt, Homo sapiens
  misc_RNA (1)...(19): siRNA sense strand
gaggacguauauauuaugc

SEQ ID NO: 2092941 - RNA, 19 nt, Homo sapiens
  misc_RNA (1)...(19): siRNA sense strand
ggcaguaggccaacaguuc

SEQ ID NO: 2092942 - RNA, 19 nt, Homo sapiens
  misc_RNA (1)...(19): siRNA sense strand
caaaagccuucuuguggaa

SEQ ID NO: 2092943 - RNA, 19 nt, Homo sapiens
  misc_RNA (1)...(19): siRNA sense strand
caaaugcaagaacauacaa

SEQ ID NO: 2092944 - RNA, 19 nt, Homo sapiens
  misc_RNA (1)...(19): siRNA sense strand
ccauuucccuacauagauc

SEQ ID NO: 2092945 - RNA, 19 nt, Homo sapiens
  misc_RNA (1)...(19): siRNA sense strand
gccuaaaacucacuuauca

SEQ ID NO: 2092946 - RNA, 19 nt, Homo sapiens
  misc_RNA (1)...(19): siRNA sense strand
guacaucagcagaacuuca

SEQ ID NO: 2092947 - RNA, 19 nt, Homo sapiens
  misc_RNA (1)...(19): siRNA sense strand
ggagcagagguauuacuga

SEQ ID NO: 2092948 - RNA, 19 nt, Homo sapiens
  misc_RNA (1)...(19): siRNA sense strand
ucaauaugaugccagaaaa

SEQ ID NO: 2092949 - RNA, 19 nt, Homo sapiens
  misc_RNA (1)...(19): siRNA sense strand
ugcaagaacauacaaugaa

SEQ ID NO: 2092950 - RNA, 19 nt, Homo sapiens
  misc_RNA (1)...(19): siRNA sense strand
aaaaucacauguuggaaga

SEQ ID NO: 2092951 - RNA, 19 nt, Homo sapiens
  misc_RNA (1)...(19): siRNA sense strand
gaaccauuucccuacauag

SEQ ID NO: 2092952 - RNA, 19 nt, Homo sapiens
  misc_RNA (1)...(19): siRNA sense strand
ggaaagcagaaugaucuca

SEQ ID NO: 2092953 - RNA, 19 nt, Homo sapiens
  misc_RNA (1)...(19): siRNA sense strand
aggaugcugcuauaacaua

SEQ ID NO: 2092954 - RNA, 19 nt, Homo sapiens
  misc_RNA (1)...(19): siRNA sense strand
caccaggucucugccaaca

SEQ ID NO: 2092955 - RNA, 19 nt, Homo sapiens
  misc_RNA (1)...(19): siRNA sense strand
guggucacaugguaaagca

SEQ ID NO: 2092956 - RNA, 19 nt, Homo sapiens
  misc_RNA (1)...(19): siRNA sense strand
cuaaaggagcagagguauu

SEQ ID NO: 2092957 - RNA, 19 nt, Homo sapiens
  misc_RNA (1)...(19): siRNA sense strand
acacggagcuuuuguacag

SEQ ID NO: 2092958 - RNA, 19 nt, Homo sapiens
  misc_RNA (1)...(19): siRNA sense strand
ccuaccaccuuacgacucu

SEQ ID NO: 2092959 - RNA, 19 nt, Homo sapiens
  misc_RNA (1)...(19): siRNA sense strand
aaacucacuuaucagaaac

SEQ ID NO: 2092960 - RNA, 19 nt, Homo sapiens
  misc_RNA (1)...(19): siRNA sense strand
gccuucuuguggaauagua

SEQ ID NO: 2092961 - RNA, 19 nt, Homo sapiens
  misc_RNA (1)...(19): siRNA sense strand
acaaaugcaagaacauaca

SEQ ID NO: 2092962 - RNA, 19 nt, Homo sapiens
  misc_RNA (1)...(19): siRNA sense strand
gcauacaucauucaaaauc

SEQ ID NO: 2092963 - RNA, 19 nt, Homo sapiens
  misc_RNA (1)...(19): siRNA sense strand
uguaggagaugcucuuuuc

SEQ ID NO: 2092964 - RNA, 19 nt, Homo sapiens
  misc_RNA (1)...(19): siRNA sense strand
gagauaaaaccaggcagua

SEQ ID NO: 2092965 - RNA, 19 nt, Homo sapiens
  misc_RNA (1)...(19): siRNA sense strand
cagaggagugacuuccaaa

SEQ ID NO: 2092966 - RNA, 19 nt, Homo sapiens
  misc_RNA (1)...(19): siRNA sense strand
ggagaugcucuuuucacua

SEQ ID NO: 2092967 - RNA, 19 nt, Homo sapiens
  misc_RNA (1)...(19): siRNA sense strand
cagggucacguucaucaga

SEQ ID NO: 2092968 - RNA, 19 nt, Homo sapiens
  misc_RNA (1)...(19): siRNA sense strand
gagccucuccagggaaaga

SEQ ID NO: 2092969 - RNA, 19 nt, Homo sapiens
  misc_RNA (1)...(19): siRNA sense strand
uacaucagcagaacuucaa

SEQ ID NO: 2092970 - RNA, 19 nt, Homo sapiens
  misc_RNA (1)...(19): siRNA sense strand
ccagucaaacacagcaaga

SEQ ID NO: 2092971 - RNA, 19 nt, Homo sapiens
  misc_RNA (1)...(19): siRNA sense strand
gauagaagccuuugucugu

SEQ ID NO: 2092972 - RNA, 19 nt, Homo sapiens
  misc_RNA (1)...(19): siRNA sense strand
gaugaaaugucagaggaaa

SEQ ID NO: 2092973 - RNA, 19 nt, Homo sapiens
  misc_RNA (1)...(19): siRNA sense strand
gagccaggaugaaauguca

SEQ ID NO: 2092974 - RNA, 19 nt, Homo sapiens
  misc_RNA (1)...(19): siRNA sense strand
ggaucgggcucaccuacaa

SEQ ID NO: 2092975 - RNA, 19 nt, Homo sapiens
  misc_RNA (1)...(19): siRNA sense strand
ggacauccucgccuucuau

SEQ ID NO: 2092976 - RNA, 19 nt, Homo sapiens
  misc_RNA (1)...(19): siRNA sense strand
cgacggagacugcuucaug

SEQ ID NO: 2092977 - RNA, 19 nt, Homo sapiens
  misc_RNA (1)...(19): siRNA sense strand
caccaggccuucaccaguu

SEQ ID NO: 2092978 - RNA, 19 nt, Homo sapiens
  misc_RNA (1)...(19): siRNA sense strand
cagaggcagacaccuauua

SEQ ID NO: 2092979 - RNA, 19 nt, Homo sapiens
  misc_RNA (1)...(19): siRNA sense strand
gaacgaccagcgcugcaaa

SEQ ID NO: 2092980 - RNA, 19 nt, Homo sapiens
  misc_RNA (1)...(19): siRNA sense strand
uuacagagccaggaugaaa

SEQ ID NO: 2092981 - RNA, 19 nt, Homo sapiens
  misc_RNA (1)...(19): siRNA sense strand
gcaagugggcuggaacaug

SEQ ID NO: 2092982 - RNA, 19 nt, Homo sapiens
  misc_RNA (1)...(19): siRNA sense strand
gcaaaacccgaaaccguua

SEQ ID NO: 2092983 - RNA, 19 nt, Homo sapiens
  misc_RNA (1)...(19): siRNA sense strand
gaacaggaaggagaguuuc

SEQ ID NO: 2092984 - RNA, 19 nt, Homo sapiens
  misc_RNA (1)...(19): siRNA sense strand
cguuacaucugccaguuug

SEQ ID NO: 2092985 - RNA, 19 nt, Homo sapiens
  misc_RNA (1)...(19): siRNA sense strand
ccauggacgucucaacauc

SEQ ID NO: 2092986 - RNA, 19 nt, Homo sapiens
  misc_RNA (1)...(19): siRNA sense strand
ggaaggagaguuucuugcu

SEQ ID NO: 2092987 - RNA, 19 nt, Homo sapiens
  misc_RNA (1)...(19): siRNA sense strand
ggcagacaccuauuacaga

SEQ ID NO: 2092988 - RNA, 19 nt, Homo sapiens
  misc_RNA (1)...(19): siRNA sense strand
ugaacaggaaggagaguuu

SEQ ID NO: 2092989 - RNA, 19 nt, Homo sapiens
  misc_RNA (1)...(19): siRNA sense strand
gaucaagagccagaaagug

SEQ ID NO: 2092990 - RNA, 19 nt, Homo sapiens
  misc_RNA (1)...(19): siRNA sense strand
ggagugcucgugcgucugu

SEQ ID NO: 2092991 - RNA, 19 nt, Homo sapiens
  misc_RNA (1)...(19): siRNA sense strand
cagcugccuucaacuggaa

SEQ ID NO: 2092992 - RNA, 19 nt, Homo sapiens
  misc_RNA (1)...(19): siRNA sense strand
gccagaaagugcaggacau

SEQ ID NO: 2092993 - RNA, 19 nt, Homo sapiens
  misc_RNA (1)...(19): siRNA sense strand
ggaugaaaugucagaggaa

SEQ ID NO: 2092994 - RNA, 19 nt, Homo sapiens
  misc_RNA (1)...(19): siRNA sense strand
acgaggugauugacaguga

SEQ ID NO: 2092995 - RNA, 19 nt, Homo sapiens
  misc_RNA (1)...(19): siRNA sense strand
gaggucaacgggaagacaa

SEQ ID NO: 2092996 - RNA, 19 nt, Homo sapiens
  misc_RNA (1)...(19): siRNA sense strand
ugucucaggcugcuucaaa

SEQ ID NO: 2092997 - RNA, 19 nt, Homo sapiens
  misc_RNA (1)...(19): siRNA sense strand
cuucagaggcagacaccua

SEQ ID NO: 2092998 - RNA, 19 nt, Homo sapiens
  misc_RNA (1)...(19): siRNA sense strand
ccagaucaagagccagaaa

SEQ ID NO: 2092999 - RNA, 19 nt, Homo sapiens
  misc_RNA (1)...(19): siRNA sense strand
caggaaggagaguuucuug

SEQ ID NO: 2093000 - RNA, 19 nt, Homo sapiens
  misc_RNA (1)...(19): siRNA sense strand
ggaacgaccagcgcugcaa

SEQ ID NO: 2093001 - RNA, 19 nt, Homo sapiens
  misc_RNA (1)...(19): siRNA sense strand
gcuucauggugucuucaga

SEQ ID NO: 2093002 - RNA, 19 nt, Homo sapiens
  misc_RNA (1)...(19): siRNA sense strand
ccuacaagaccgccaagga

SEQ ID NO: 2093003 - RNA, 19 nt, Homo sapiens
  misc_RNA (1)...(19): siRNA sense strand
uauuacagagccaggauga

SEQ ID NO: 2093004 - RNA, 19 nt, Homo sapiens
  misc_RNA (1)...(19): siRNA sense strand
aggcuggacuggagugaca

SEQ ID NO: 2093005 - RNA, 19 nt, Homo sapiens
  misc_RNA (1)...(19): siRNA sense strand
ggcuucagcugccuucaac

SEQ ID NO: 2093006 - RNA, 19 nt, Homo sapiens
  misc_RNA (1)...(19): siRNA sense strand
acagagccaggaugaaaug

SEQ ID NO: 2093007 - RNA, 19 nt, Homo sapiens
  misc_RNA (1)...(19): siRNA sense strand
ggugauugacagugacuuc

SEQ ID NO: 2093008 - RNA, 19 nt, Homo sapiens
  misc_RNA (1)...(19): siRNA sense strand
cauccucgccuucuaucug

SEQ ID NO: 2093009 - RNA, 19 nt, Homo sapiens
  misc_RNA (1)...(19): siRNA sense strand
gauagaagccuuugucugu

SEQ ID NO: 2093010 - RNA, 19 nt, Homo sapiens
  misc_RNA (1)...(19): siRNA sense strand
gaugaaaugucagaggaaa

SEQ ID NO: 2093011 - RNA, 19 nt, Homo sapiens
  misc_RNA (1)...(19): siRNA sense strand
gagccaggaugaaauguca

SEQ ID NO: 2093012 - RNA, 19 nt, Homo sapiens
  misc_RNA (1)...(19): siRNA sense strand
ggaucgggcucaccuacaa

SEQ ID NO: 2093013 - RNA, 19 nt, Homo sapiens
  misc_RNA (1)...(19): siRNA sense strand
ggacauccucgccuucuau

SEQ ID NO: 2093014 - RNA, 19 nt, Homo sapiens
  misc_RNA (1)...(19): siRNA sense strand
cgacggagacugcuucaug

SEQ ID NO: 2093015 - RNA, 19 nt, Homo sapiens
  misc_RNA (1)...(19): siRNA sense strand
caccaggccuucaccaguu

SEQ ID NO: 2093016 - RNA, 19 nt, Homo sapiens
  misc_RNA (1)...(19): siRNA sense strand
cagaggcagacaccuauua

SEQ ID NO: 2093017 - RNA, 19 nt, Homo sapiens
  misc_RNA (1)...(19): siRNA sense strand
gaacgaccagcgcugcaaa

SEQ ID NO: 2093018 - RNA, 19 nt, Homo sapiens
  misc_RNA (1)...(19): siRNA sense strand
uuacagagccaggaugaaa

SEQ ID NO: 2093019 - RNA, 19 nt, Homo sapiens
  misc_RNA (1)...(19): siRNA sense strand
gcaagugggcuggaacaug

SEQ ID NO: 2093020 - RNA, 19 nt, Homo sapiens
  misc_RNA (1)...(19): siRNA sense strand
gcaaaacccgaaaccguua

SEQ ID NO: 2093021 - RNA, 19 nt, Homo sapiens
  misc_RNA (1)...(19): siRNA sense strand
gaacaggaaggagaguuuc

SEQ ID NO: 2093022 - RNA, 19 nt, Homo sapiens
  misc_RNA (1)...(19): siRNA sense strand
cguuacaucugccaguuug

SEQ ID NO: 2093023 - RNA, 19 nt, Homo sapiens
  misc_RNA (1)...(19): siRNA sense strand
ccauggacgucucaacauc

SEQ ID NO: 2093024 - RNA, 19 nt, Homo sapiens
  misc_RNA (1)...(19): siRNA sense strand
ggaaggagaguuucuugcu

SEQ ID NO: 2093025 - RNA, 19 nt, Homo sapiens
  misc_RNA (1)...(19): siRNA sense strand
ggcagacaccuauuacaga

SEQ ID NO: 2093026 - RNA, 19 nt, Homo sapiens
  misc_RNA (1)...(19): siRNA sense strand
ugaacaggaaggagaguuu

SEQ ID NO: 2093027 - RNA, 19 nt, Homo sapiens
  misc_RNA (1)...(19): siRNA sense strand
gaucaagagccagaaagug

SEQ ID NO: 2093028 - RNA, 19 nt, Homo sapiens
  misc_RNA (1)...(19): siRNA sense strand
ggagugcucgugcgucugu

SEQ ID NO: 2093029 - RNA, 19 nt, Homo sapiens
  misc_RNA (1)...(19): siRNA sense strand
cagcugccuucaacuggaa

SEQ ID NO: 2093030 - RNA, 19 nt, Homo sapiens
  misc_RNA (1)...(19): siRNA sense strand
gccagaaagugcaggacau

SEQ ID NO: 2093031 - RNA, 19 nt, Homo sapiens
  misc_RNA (1)...(19): siRNA sense strand
ggaugaaaugucagaggaa

SEQ ID NO: 2093032 - RNA, 19 nt, Homo sapiens
  misc_RNA (1)...(19): siRNA sense strand
acgaggugauugacaguga

SEQ ID NO: 2093033 - RNA, 19 nt, Homo sapiens
  misc_RNA (1)...(19): siRNA sense strand
gaggucaacgggaagacaa

SEQ ID NO: 2093034 - RNA, 19 nt, Homo sapiens
  misc_RNA (1)...(19): siRNA sense strand
ugucucaggcugcuucaaa

SEQ ID NO: 2093035 - RNA, 19 nt, Homo sapiens
  misc_RNA (1)...(19): siRNA sense strand
cuucagaggcagacaccua

SEQ ID NO: 2093036 - RNA, 19 nt, Homo sapiens
  misc_RNA (1)...(19): siRNA sense strand
ccagaucaagagccagaaa

SEQ ID NO: 2093037 - RNA, 19 nt, Homo sapiens
  misc_RNA (1)...(19): siRNA sense strand
caggaaggagaguuucuug

SEQ ID NO: 2093038 - RNA, 19 nt, Homo sapiens
  misc_RNA (1)...(19): siRNA sense strand
ggaacgaccagcgcugcaa

SEQ ID NO: 2093039 - RNA, 19 nt, Homo sapiens
  misc_RNA (1)...(19): siRNA sense strand
gcuucauggugucuucaga

SEQ ID NO: 2093040 - RNA, 19 nt, Homo sapiens
  misc_RNA (1)...(19): siRNA sense strand
ccuacaagaccgccaagga

SEQ ID NO: 2093041 - RNA, 19 nt, Homo sapiens
  misc_RNA (1)...(19): siRNA sense strand
uauuacagagccaggauga

SEQ ID NO: 2093042 - RNA, 19 nt, Homo sapiens
  misc_RNA (1)...(19): siRNA sense strand
aggcuggacuggagugaca

SEQ ID NO: 2093043 - RNA, 19 nt, Homo sapiens
  misc_RNA (1)...(19): siRNA sense strand
ggcuucagcugccuucaac

SEQ ID NO: 2093044 - RNA, 19 nt, Homo sapiens
  misc_RNA (1)...(19): siRNA sense strand
acagagccaggaugaaaug

SEQ ID NO: 2093045 - RNA, 19 nt, Homo sapiens
  misc_RNA (1)...(19): siRNA sense strand
ggugauugacagugacuuc

SEQ ID NO: 2093046 - RNA, 19 nt, Homo sapiens
  misc_RNA (1)...(19): siRNA sense strand
cauccucgccuucuaucug

SEQ ID NO: 2093047 - RNA, 19 nt, Homo sapiens
  misc_RNA (1)...(19): siRNA sense strand
gaucagaccuugagaaugu

SEQ ID NO: 2093048 - RNA, 19 nt, Homo sapiens
  misc_RNA (1)...(19): siRNA sense strand
gaagcgagcugaaguguug

SEQ ID NO: 2093049 - RNA, 19 nt, Homo sapiens
  misc_RNA (1)...(19): siRNA sense strand
gaucaaggcugcugggaaa

SEQ ID NO: 2093050 - RNA, 19 nt, Homo sapiens
  misc_RNA (1)...(19): siRNA sense strand
gagcugaaguguugaaguu

SEQ ID NO: 2093051 - RNA, 19 nt, Homo sapiens
  misc_RNA (1)...(19): siRNA sense strand
gaguagaccuuuacaagug

SEQ ID NO: 2093052 - RNA, 19 nt, Homo sapiens
  misc_RNA (1)...(19): siRNA sense strand
gacaggagcugcacagugu

SEQ ID NO: 2093053 - RNA, 19 nt, Homo sapiens
  misc_RNA (1)...(19): siRNA sense strand
gcaaaugacauauuagaug

SEQ ID NO: 2093054 - RNA, 19 nt, Homo sapiens
  misc_RNA (1)...(19): siRNA sense strand
ggagagcuguacauauuga

SEQ ID NO: 2093055 - RNA, 19 nt, Homo sapiens
  misc_RNA (1)...(19): siRNA sense strand
cuagaaaucuccuggaaga

SEQ ID NO: 2093056 - RNA, 19 nt, Homo sapiens
  misc_RNA (1)...(19): siRNA sense strand
gaaguucccugcacaguac

SEQ ID NO: 2093057 - RNA, 19 nt, Homo sapiens
  misc_RNA (1)...(19): siRNA sense strand
ugggagagcuguacauauu

SEQ ID NO: 2093058 - RNA, 19 nt, Homo sapiens
  misc_RNA (1)...(19): siRNA sense strand
ggacacagcccugcagaaa

SEQ ID NO: 2093059 - RNA, 19 nt, Homo sapiens
  misc_RNA (1)...(19): siRNA sense strand
ggaaacaugucagaagaau

SEQ ID NO: 2093060 - RNA, 19 nt, Homo sapiens
  misc_RNA (1)...(19): siRNA sense strand
ucaagaugcuggugaaguu

SEQ ID NO: 2093061 - RNA, 19 nt, Homo sapiens
  misc_RNA (1)...(19): siRNA sense strand
gcaauuugaugacuuuaag

SEQ ID NO: 2093062 - RNA, 19 nt, Homo sapiens
  misc_RNA (1)...(19): siRNA sense strand
guacagcaguggaauaucu

SEQ ID NO: 2093063 - RNA, 19 nt, Homo sapiens
  misc_RNA (1)...(19): siRNA sense strand
gaacgcgaccagcaugaua

SEQ ID NO: 2093064 - RNA, 19 nt, Homo sapiens
  misc_RNA (1)...(19): siRNA sense strand
gauaagaggaaacccagua

SEQ ID NO: 2093065 - RNA, 19 nt, Homo sapiens
  misc_RNA (1)...(19): siRNA sense strand
cauauuagaugguguugau

SEQ ID NO: 2093066 - RNA, 19 nt, Homo sapiens
  misc_RNA (1)...(19): siRNA sense strand
ggaagaagcccuaaaagaa

SEQ ID NO: 2093067 - RNA, 19 nt, Homo sapiens
  misc_RNA (1)...(19): siRNA sense strand
gagcggaaaucaagacgau

SEQ ID NO: 2093068 - RNA, 19 nt, Homo sapiens
  misc_RNA (1)...(19): siRNA sense strand
caggaaacaugucagaaga

SEQ ID NO: 2093069 - RNA, 19 nt, Homo sapiens
  misc_RNA (1)...(19): siRNA sense strand
agaagacccugcacacuga

SEQ ID NO: 2093070 - RNA, 19 nt, Homo sapiens
  misc_RNA (1)...(19): siRNA sense strand
gaagagaggcagagcacuu

SEQ ID NO: 2093071 - RNA, 19 nt, Homo sapiens
  misc_RNA (1)...(19): siRNA sense strand
ccucggaaauaccucaaua

SEQ ID NO: 2093072 - RNA, 19 nt, Homo sapiens
  misc_RNA (1)...(19): siRNA sense strand
ccagcaauuugaugacuuu

SEQ ID NO: 2093073 - RNA, 19 nt, Homo sapiens
  misc_RNA (1)...(19): siRNA sense strand
gaaaucaagacgauggaaa

SEQ ID NO: 2093074 - RNA, 19 nt, Homo sapiens
  misc_RNA (1)...(19): siRNA sense strand
ggagaauccucaccagaag

SEQ ID NO: 2093075 - RNA, 19 nt, Homo sapiens
  misc_RNA (1)...(19): siRNA sense strand
ggaaugucuuugacuugaa

SEQ ID NO: 2093076 - RNA, 19 nt, Homo sapiens
  misc_RNA (1)...(19): siRNA sense strand
gcugaaguguugaaguuug

SEQ ID NO: 2093077 - RNA, 19 nt, Homo sapiens
  misc_RNA (1)...(19): siRNA sense strand
gaagagaggaaaucagauc

SEQ ID NO: 2093078 - RNA, 19 nt, Homo sapiens
  misc_RNA (1)...(19): siRNA sense strand
gagccugaccuccugguua

SEQ ID NO: 2093079 - RNA, 19 nt, Homo sapiens
  misc_RNA (1)...(19): siRNA sense strand
acacagcccugcagaaagu

SEQ ID NO: 2093080 - RNA, 19 nt, Homo sapiens
  misc_RNA (1)...(19): siRNA sense strand
acaccuacaucuacauuug

SEQ ID NO: 2093081 - RNA, 19 nt, Homo sapiens
  misc_RNA (1)...(19): siRNA sense strand
ugacagcuuugcacacuau

SEQ ID NO: 2093082 - RNA, 19 nt, Homo sapiens
  misc_RNA (1)...(19): siRNA sense strand
aaacgugguuguagaguuc

SEQ ID NO: 2093083 - RNA, 19 nt, Homo sapiens
  misc_RNA (1)...(19): siRNA sense strand
cagaagagcuccgcuuugg

SEQ ID NO: 2093084 - RNA, 19 nt, Homo sapiens
  misc_RNA (1)...(19): siRNA sense strand
ucacaaggcccaugacaau

SEQ ID NO: 2093085 - RNA, 19 nt, Homo sapiens
  misc_RNA (1)...(19): siRNA sense strand
gauaugggauaagaggaaa

SEQ ID NO: 2093086 - RNA, 19 nt, Homo sapiens
  misc_RNA (1)...(19): siRNA sense strand
gggagaauccucaccagaa

SEQ ID NO: 2093087 - RNA, 19 nt, Homo sapiens
  misc_RNA (1)...(19): siRNA sense strand
gaaccuucguuuauacagu

SEQ ID NO: 2093088 - RNA, 19 nt, Homo sapiens
  misc_RNA (1)...(19): siRNA sense strand
gaaggucaccgaaagaucu

SEQ ID NO: 2093089 - RNA, 19 nt, Homo sapiens
  misc_RNA (1)...(19): siRNA sense strand
uauccuagcuuuaccucuu

SEQ ID NO: 2093090 - RNA, 19 nt, Homo sapiens
  misc_RNA (1)...(19): siRNA sense strand
ucaagacgauggaaaagua

SEQ ID NO: 2093091 - RNA, 19 nt, Homo sapiens
  misc_RNA (1)...(19): siRNA sense strand
gugcaaauccggaauguca

SEQ ID NO: 2093092 - RNA, 19 nt, Homo sapiens
  misc_RNA (1)...(19): siRNA sense strand
gaggaaaucagaucaacug

SEQ ID NO: 2093093 - RNA, 19 nt, Homo sapiens
  misc_RNA (1)...(19): siRNA sense strand
gaaugucaauguggagaug

SEQ ID NO: 2093094 - RNA, 19 nt, Homo sapiens
  misc_RNA (1)...(19): siRNA sense strand
ggacaccuacaucuacauu

SEQ ID NO: 2093095 - RNA, 19 nt, Homo sapiens
  misc_RNA (1)...(19): siRNA sense strand
ccaauacccagcaauuuga

SEQ ID NO: 2093096 - RNA, 19 nt, Homo sapiens
  misc_RNA (1)...(19): siRNA sense strand
gccaauacccagcaauuug

SEQ ID NO: 2093097 - RNA, 19 nt, Homo sapiens
  misc_RNA (1)...(19): siRNA sense strand
ugacggcgaugugcggaua

SEQ ID NO: 2093098 - RNA, 19 nt, Homo sapiens
  misc_RNA (1)...(19): siRNA sense strand
ggaauucucccugaucaau

SEQ ID NO: 2093099 - RNA, 19 nt, Homo sapiens
  misc_RNA (1)...(19): siRNA sense strand
ucucagccuugucugcuua

SEQ ID NO: 2093100 - RNA, 19 nt, Homo sapiens
  misc_RNA (1)...(19): siRNA sense strand
uaucaaagacacaaggaaa

SEQ ID NO: 2093101 - RNA, 19 nt, Homo sapiens
  misc_RNA (1)...(19): siRNA sense strand
uaaccguucuucuaaucuu

SEQ ID NO: 2093102 - RNA, 19 nt, Homo sapiens
  misc_RNA (1)...(19): siRNA sense strand
cauccaccaugaaagcuaa

SEQ ID NO: 2093103 - RNA, 19 nt, Homo sapiens
  misc_RNA (1)...(19): siRNA sense strand
auacacaccuuucagcaau

SEQ ID NO: 2093104 - RNA, 19 nt, Homo sapiens
  misc_RNA (1)...(19): siRNA sense strand
ggauaugggauaagaggaa

SEQ ID NO: 2093105 - RNA, 19 nt, Homo sapiens
  misc_RNA (1)...(19): siRNA sense strand
gaugcucuguagcguguuu

SEQ ID NO: 2093106 - RNA, 19 nt, Homo sapiens
  misc_RNA (1)...(19): siRNA sense strand
caucacauccaccaugaaa

SEQ ID NO: 2093107 - RNA, 19 nt, Homo sapiens
  misc_RNA (1)...(19): siRNA sense strand
gaugugcggauaugggaua

SEQ ID NO: 2093108 - RNA, 19 nt, Homo sapiens
  misc_RNA (1)...(19): siRNA sense strand
gcaaaggcuucacguucca

SEQ ID NO: 2093109 - RNA, 19 nt, Homo sapiens
  misc_RNA (1)...(19): siRNA sense strand
cugggaaccuucguuuaua

SEQ ID NO: 2093110 - RNA, 19 nt, Homo sapiens
  misc_RNA (1)...(19): siRNA sense strand
uagaugguguugaugaguu

SEQ ID NO: 2093111 - RNA, 19 nt, Homo sapiens
  misc_RNA (1)...(19): siRNA sense strand
gcggguggauucccagaug

SEQ ID NO: 2093112 - RNA, 19 nt, Homo sapiens
  misc_RNA (1)...(19): siRNA sense strand
ucaagacaauucugugaag

SEQ ID NO: 2093113 - RNA, 19 nt, Homo sapiens
  misc_RNA (1)...(19): siRNA sense strand
gugcggauaugggauaaga

SEQ ID NO: 2093114 - RNA, 19 nt, Homo sapiens
  misc_RNA (1)...(19): siRNA sense strand
acaaggaaaccuacuguug

SEQ ID NO: 2093115 - RNA, 19 nt, Homo sapiens
  misc_RNA (1)...(19): siRNA sense strand
uggaaugucuuugacuuga

SEQ ID NO: 2093116 - RNA, 19 nt, Homo sapiens
  misc_RNA (1)...(19): siRNA sense strand
ccuccugccuguucacaaa

SEQ ID NO: 2093117 - RNA, 19 nt, Homo sapiens
  misc_RNA (1)...(19): siRNA sense strand
guaccaggacgccaacauu

SEQ ID NO: 2093118 - RNA, 19 nt, Homo sapiens
  misc_RNA (1)...(19): siRNA sense strand
gagaggaaaucagaucaac

SEQ ID NO: 2093119 - RNA, 19 nt, Homo sapiens
  misc_RNA (1)...(19): siRNA sense strand
ggccgcagauucuuauaca

SEQ ID NO: 2093120 - RNA, 19 nt, Homo sapiens
  misc_RNA (1)...(19): siRNA sense strand
agacaauucugugaaguuc

SEQ ID NO: 2093121 - RNA, 19 nt, Homo sapiens
  misc_RNA (1)...(19): siRNA sense strand
gaaugucuuugacuugaac

SEQ ID NO: 2093122 - RNA, 19 nt, Homo sapiens
  misc_RNA (1)...(19): siRNA sense strand
gagagaagcgagcugaagu

SEQ ID NO: 2093123 - RNA, 19 nt, Homo sapiens
  misc_RNA (1)...(19): siRNA sense strand
ccaugaagauccgcacaga

SEQ ID NO: 2093124 - RNA, 19 nt, Homo sapiens
  misc_RNA (1)...(19): siRNA sense strand
gcaaccaucgugucaagau

SEQ ID NO: 2093125 - RNA, 19 nt, Homo sapiens
  misc_RNA (1)...(19): siRNA sense strand
cagcaaccaucgugucaag

SEQ ID NO: 2093126 - RNA, 19 nt, Homo sapiens
  misc_RNA (1)...(19): siRNA sense strand
gcaaauccggaaugucaau

SEQ ID NO: 2093127 - RNA, 19 nt, Homo sapiens
  misc_RNA (1)...(19): siRNA sense strand
gugcaaaugacauauuaga

SEQ ID NO: 2093128 - RNA, 19 nt, Homo sapiens
  misc_RNA (1)...(19): siRNA sense strand
gauacacaccuuucagcaa

SEQ ID NO: 2093129 - RNA, 19 nt, Homo sapiens
  misc_RNA (1)...(19): siRNA sense strand
ugaaguucccugcacagua

SEQ ID NO: 2093130 - RNA, 19 nt, Homo sapiens
  misc_RNA (1)...(19): siRNA sense strand
gggaucagaccuugagaau

SEQ ID NO: 2093131 - RNA, 19 nt, Homo sapiens
  misc_RNA (1)...(19): siRNA sense strand
ucacaaagggaucgaguuc

SEQ ID NO: 2093132 - RNA, 19 nt, Homo sapiens
  misc_RNA (1)...(19): siRNA sense strand
gaauccucaugacagcuuu

SEQ ID NO: 2093133 - RNA, 19 nt, Homo sapiens
  misc_RNA (1)...(19): siRNA sense strand
aacauucccuuuccuagga

SEQ ID NO: 2093134 - RNA, 19 nt, Homo sapiens
  misc_RNA (1)...(19): siRNA sense strand
ccuaaccguucuucuaauc

SEQ ID NO: 2093135 - RNA, 19 nt, Homo sapiens
  misc_RNA (1)...(19): siRNA sense strand
gcuccgggauguucagaca

SEQ ID NO: 2093136 - RNA, 19 nt, Homo sapiens
  misc_RNA (1)...(19): siRNA sense strand
aaacaugucagaagaaugc

SEQ ID NO: 2093137 - RNA, 19 nt, Homo sapiens
  misc_RNA (1)...(19): siRNA sense strand
gagcuguacauauugaaug

SEQ ID NO: 2093138 - RNA, 19 nt, Homo sapiens
  misc_RNA (1)...(19): siRNA sense strand
caagacaauucugugaagu

SEQ ID NO: 2093139 - RNA, 19 nt, Homo sapiens
  misc_RNA (1)...(19): siRNA sense strand
ggaucgaguucggcgugua

SEQ ID NO: 2093140 - RNA, 19 nt, Homo sapiens
  misc_RNA (1)...(19): siRNA sense strand
gaaaugcuauggggaaauc

SEQ ID NO: 2093141 - RNA, 19 nt, Homo sapiens
  misc_RNA (1)...(19): siRNA sense strand
gcugggagagcuguacaua

SEQ ID NO: 2093142 - RNA, 19 nt, Homo sapiens
  misc_RNA (1)...(19): siRNA sense strand
ggaauccucaugacagcuu

SEQ ID NO: 2093143 - RNA, 19 nt, Homo sapiens
  misc_RNA (1)...(19): siRNA sense strand
ggaggaagaagcccuaaaa

SEQ ID NO: 2093144 - RNA, 19 nt, Homo sapiens
  misc_RNA (1)...(19): siRNA sense strand
acaaggagcggaaaucaag

SEQ ID NO: 2093145 - RNA, 19 nt, Homo sapiens
  misc_RNA (1)...(19): siRNA sense strand
ggagucugaccuacaguga

SEQ ID NO: 2093146 - RNA, 19 nt, Homo sapiens
  misc_RNA (1)...(19): siRNA sense strand
uacgguagcuacagaucuu

SEQ ID NO: 2093147 - RNA, 19 nt, Homo sapiens
  misc_RNA (1)...(19): siRNA sense strand
uaagacagcuggaggaaga

SEQ ID NO: 2093148 - RNA, 19 nt, Homo sapiens
  misc_RNA (1)...(19): siRNA sense strand
agaaacagcucaaauaugg

SEQ ID NO: 2093149 - RNA, 19 nt, Homo sapiens
  misc_RNA (1)...(19): siRNA sense strand
guacaaaggaccaauguga

SEQ ID NO: 2093150 - RNA, 19 nt, Homo sapiens
  misc_RNA (1)...(19): siRNA sense strand
gaaucaaccuuguccuaug

SEQ ID NO: 2093151 - RNA, 19 nt, Homo sapiens
  misc_RNA (1)...(19): siRNA sense strand
ucaaggauaucaaccagaa

SEQ ID NO: 2093152 - RNA, 19 nt, Homo sapiens
  misc_RNA (1)...(19): siRNA sense strand
gcucaaauauggagaaagg

SEQ ID NO: 2093153 - RNA, 19 nt, Homo sapiens
  misc_RNA (1)...(19): siRNA sense strand
gcaagggugccgaggaaua

SEQ ID NO: 2093154 - RNA, 19 nt, Homo sapiens
  misc_RNA (1)...(19): siRNA sense strand
ggaauuaggcaacauuugu

SEQ ID NO: 2093155 - RNA, 19 nt, Homo sapiens
  misc_RNA (1)...(19): siRNA sense strand
gaaggcaaccuccaacuag

SEQ ID NO: 2093156 - RNA, 19 nt, Homo sapiens
  misc_RNA (1)...(19): siRNA sense strand
gaagacaaccaggaacuga

SEQ ID NO: 2093157 - RNA, 19 nt, Homo sapiens
  misc_RNA (1)...(19): siRNA sense strand
gcuguuuccuggaugauga

SEQ ID NO: 2093158 - RNA, 19 nt, Homo sapiens
  misc_RNA (1)...(19): siRNA sense strand
acuagaaacagcucaaaua

SEQ ID NO: 2093159 - RNA, 19 nt, Homo sapiens
  misc_RNA (1)...(19): siRNA sense strand
ccgaaacgcugcccaagca

SEQ ID NO: 2093160 - RNA, 19 nt, Homo sapiens
  misc_RNA (1)...(19): siRNA sense strand
gguacauucucuuaagguu

SEQ ID NO: 2093161 - RNA, 19 nt, Homo sapiens
  misc_RNA (1)...(19): siRNA sense strand
cggagcaucuucagaaaca

SEQ ID NO: 2093162 - RNA, 19 nt, Homo sapiens
  misc_RNA (1)...(19): siRNA sense strand
ucaaccuuguccuauguua

SEQ ID NO: 2093163 - RNA, 19 nt, Homo sapiens
  misc_RNA (1)...(19): siRNA sense strand
ggagcucugugugcuacua

SEQ ID NO: 2093164 - RNA, 19 nt, Homo sapiens
  misc_RNA (1)...(19): siRNA sense strand
ggcaacauuugucaggaaa

SEQ ID NO: 2093165 - RNA, 19 nt, Homo sapiens
  misc_RNA (1)...(19): siRNA sense strand
cuagaaacagcucaaauau

SEQ ID NO: 2093166 - RNA, 19 nt, Homo sapiens
  misc_RNA (1)...(19): siRNA sense strand
gacgaugccugccuacucu

SEQ ID NO: 2093167 - RNA, 19 nt, Homo sapiens
  misc_RNA (1)...(19): siRNA sense strand
gagcaccucaaacaacauu

SEQ ID NO: 2093168 - RNA, 19 nt, Homo sapiens
  misc_RNA (1)...(19): siRNA sense strand
aaucaaccuuguccuaugu

SEQ ID NO: 2093169 - RNA, 19 nt, Homo sapiens
  misc_RNA (1)...(19): siRNA sense strand
gcaccucaaacaacauuau

SEQ ID NO: 2093170 - RNA, 19 nt, Homo sapiens
  misc_RNA (1)...(19): siRNA sense strand
gaugaugaccggcagaaag

SEQ ID NO: 2093171 - RNA, 19 nt, Homo sapiens
  misc_RNA (1)...(19): siRNA sense strand
gcagcuggaggcaagagua

SEQ ID NO: 2093172 - RNA, 19 nt, Homo sapiens
  misc_RNA (1)...(19): siRNA sense strand
gcccggagcaucuucagaa

SEQ ID NO: 2093173 - RNA, 19 nt, Homo sapiens
  misc_RNA (1)...(19): siRNA sense strand
uacauucucuuaagguugu

SEQ ID NO: 2093174 - RNA, 19 nt, Homo sapiens
  misc_RNA (1)...(19): siRNA sense strand
gcuacuagaugaggagaag

SEQ ID NO: 2093175 - RNA, 19 nt, Homo sapiens
  misc_RNA (1)...(19): siRNA sense strand
cggagcaccucaaacaaca

SEQ ID NO: 2093176 - RNA, 19 nt, Homo sapiens
  misc_RNA (1)...(19): siRNA sense strand
accagaaacuccaggaaga

SEQ ID NO: 2093177 - RNA, 19 nt, Homo sapiens
  misc_RNA (1)...(19): siRNA sense strand
ucacccaacucugcagcua

SEQ ID NO: 2093178 - RNA, 19 nt, Homo sapiens
  misc_RNA (1)...(19): siRNA sense strand
ggacgaugccugccuacuc

SEQ ID NO: 2093179 - RNA, 19 nt, Homo sapiens
  misc_RNA (1)...(19): siRNA sense strand
ccaggaagacaaccaggaa

SEQ ID NO: 2093180 - RNA, 19 nt, Homo sapiens
  misc_RNA (1)...(19): siRNA sense strand
gaggaaacuuggagaugcu

SEQ ID NO: 2093181 - RNA, 19 nt, Homo sapiens
  misc_RNA (1)...(19): siRNA sense strand
uagaaacagcucaaauaug

SEQ ID NO: 2093182 - RNA, 19 nt, Homo sapiens
  misc_RNA (1)...(19): siRNA sense strand
gagacugggucgcuacacu

SEQ ID NO: 2093183 - RNA, 19 nt, Homo sapiens
  misc_RNA (1)...(19): siRNA sense strand
gaauuaggcaacauuuguc

SEQ ID NO: 2093184 - RNA, 19 nt, Homo sapiens
  misc_RNA (1)...(19): siRNA sense strand
cagcucaaauauggagaaa

SEQ ID NO: 2093185 - RNA, 19 nt, Homo sapiens
  misc_RNA (1)...(19): siRNA sense strand
caacuagaaacagcucaaa

SEQ ID NO: 2093186 - RNA, 19 nt, Homo sapiens
  misc_RNA (1)...(19): siRNA sense strand
gcccggagcaccucaaaca

SEQ ID NO: 2093187 - RNA, 19 nt, Homo sapiens
  misc_RNA (1)...(19): siRNA sense strand
gcugaugggaguaacaguu

SEQ ID NO: 2093188 - RNA, 19 nt, Homo sapiens
  misc_RNA (1)...(19): siRNA sense strand
agaaggcaaccuccaacua

SEQ ID NO: 2093189 - RNA, 19 nt, Homo sapiens
  misc_RNA (1)...(19): siRNA sense strand
cgaaucaaccuuguccuau

SEQ ID NO: 2093190 - RNA, 19 nt, Homo sapiens
  misc_RNA (1)...(19): siRNA sense strand
aggaggaaguggugaagga

SEQ ID NO: 2093191 - RNA, 19 nt, Homo sapiens
  misc_RNA (1)...(19): siRNA sense strand
ggaggaggcaguggaggaa

SEQ ID NO: 2093192 - RNA, 19 nt, Homo sapiens
  misc_RNA (1)...(19): siRNA sense strand
ucugugugcuacuagauga

SEQ ID NO: 2093193 - RNA, 19 nt, Homo sapiens
  misc_RNA (1)...(19): siRNA sense strand
aggaaguggugaaggagaa

SEQ ID NO: 2093194 - RNA, 19 nt, Homo sapiens
  misc_RNA (1)...(19): siRNA sense strand
gaaacagcucaaauaugga

SEQ ID NO: 2093195 - RNA, 19 nt, Homo sapiens
  misc_RNA (1)...(19): siRNA sense strand
gcuggaggcaagaguaaga

SEQ ID NO: 2093196 - RNA, 19 nt, Homo sapiens
  misc_RNA (1)...(19): siRNA sense strand
cagcuggaggcaagaguaa

SEQ ID NO: 2093197 - RNA, 19 nt, Homo sapiens
  misc_RNA (1)...(19): siRNA sense strand
ggcaaccuccaacuagaaa

SEQ ID NO: 2093198 - RNA, 19 nt, Homo sapiens
  misc_RNA (1)...(19): siRNA sense strand
aaggcaaccuccaacuaga

SEQ ID NO: 2093199 - RNA, 19 nt, Homo sapiens
  misc_RNA (1)...(19): siRNA sense strand
ccuuauaccugcagaagcu

SEQ ID NO: 2093200 - RNA, 19 nt, Homo sapiens
  misc_RNA (1)...(19): siRNA sense strand
caaggagcucugugugcua

SEQ ID NO: 2093201 - RNA, 19 nt, Homo sapiens
  misc_RNA (1)...(19): siRNA sense strand
caggaaaccaguacaaagg

SEQ ID NO: 2093202 - RNA, 19 nt, Homo sapiens
  misc_RNA (1)...(19): siRNA sense strand
ucaccggaaugucuacagu

SEQ ID NO: 2093203 - RNA, 19 nt, Homo sapiens
  misc_RNA (1)...(19): siRNA sense strand
ggaagacaaccaggaacug

SEQ ID NO: 2093204 - RNA, 19 nt, Homo sapiens
  misc_RNA (1)...(19): siRNA sense strand
aggcaacauuugucaggaa

SEQ ID NO: 2093205 - RNA, 19 nt, Homo sapiens
  misc_RNA (1)...(19): siRNA sense strand
ugugguacauucucuuaag

SEQ ID NO: 2093206 - RNA, 19 nt, Homo sapiens
  misc_RNA (1)...(19): siRNA sense strand
ccugugguacauucucuua

SEQ ID NO: 2093207 - RNA, 19 nt, Homo sapiens
  misc_RNA (1)...(19): siRNA sense strand
caagggugccgaggaauag

SEQ ID NO: 2093208 - RNA, 19 nt, Homo sapiens
  misc_RNA (1)...(19): siRNA sense strand
acaguggcaugaacgaauc

SEQ ID NO: 2093209 - RNA, 19 nt, Homo sapiens
  misc_RNA (1)...(19): siRNA sense strand
ccucaaacaacauuaugga

SEQ ID NO: 2093210 - RNA, 19 nt, Homo sapiens
  misc_RNA (1)...(19): siRNA sense strand
caaccuccaacuagaaaca

SEQ ID NO: 2093211 - RNA, 19 nt, Homo sapiens
  misc_RNA (1)...(19): siRNA sense strand
caaccagaaacuccaggaa

SEQ ID NO: 2093212 - RNA, 19 nt, Homo sapiens
  misc_RNA (1)...(19): siRNA sense strand
ucaggaaaccaguacaaag

SEQ ID NO: 2093213 - RNA, 19 nt, Homo sapiens
  misc_RNA (1)...(19): siRNA sense strand
gaaacuccaggaagacaac

SEQ ID NO: 2093214 - RNA, 19 nt, Homo sapiens
  misc_RNA (1)...(19): siRNA sense strand
ccucugcuguuuccuggau

SEQ ID NO: 2093215 - RNA, 19 nt, Homo sapiens
  misc_RNA (1)...(19): siRNA sense strand
cugaaccugugguacauuc

SEQ ID NO: 2093216 - RNA, 19 nt, Homo sapiens
  misc_RNA (1)...(19): siRNA sense strand
cccggagcaucuucagaaa

SEQ ID NO: 2093217 - RNA, 19 nt, Homo sapiens
  misc_RNA (1)...(19): siRNA sense strand
gagcaaggaggagcugauc

SEQ ID NO: 2093218 - RNA, 19 nt, Homo sapiens
  misc_RNA (1)...(19): siRNA sense strand
gccagccugugccaacuca

SEQ ID NO: 2093219 - RNA, 19 nt, Homo sapiens
  misc_RNA (1)...(19): siRNA sense strand
caacauuugucaggaaacc

SEQ ID NO: 2093220 - RNA, 19 nt, Homo sapiens
  misc_RNA (1)...(19): siRNA sense strand
caggccagccagaauagaa

SEQ ID NO: 2093221 - RNA, 19 nt, Homo sapiens
  misc_RNA (1)...(19): siRNA sense strand
aggagaacauggagcucaa

SEQ ID NO: 2093222 - RNA, 19 nt, Homo sapiens
  misc_RNA (1)...(19): siRNA sense strand
aaacccagagccuguggaa

SEQ ID NO: 2093223 - RNA, 19 nt, Homo sapiens
  misc_RNA (1)...(19): siRNA sense strand
gaaccugugguacauucuc

SEQ ID NO: 2093224 - RNA, 19 nt, Homo sapiens
  misc_RNA (1)...(19): siRNA sense strand
ggaugaugaccggcagaaa

SEQ ID NO: 2093225 - RNA, 19 nt, Homo sapiens
  misc_RNA (1)...(19): siRNA sense strand
ggagcaaggaggagcugau

SEQ ID NO: 2093226 - RNA, 19 nt, Homo sapiens
  misc_RNA (1)...(19): siRNA sense strand
acgaaucaaccuuguccua

SEQ ID NO: 2093227 - RNA, 19 nt, Homo sapiens
  misc_RNA (1)...(19): siRNA sense strand
gcaugaacgaaucaaccuu

SEQ ID NO: 2093228 - RNA, 19 nt, Homo sapiens
  misc_RNA (1)...(19): siRNA sense strand
aauagaaggcaaccuccaa

SEQ ID NO: 2093229 - RNA, 19 nt, Homo sapiens
  misc_RNA (1)...(19): siRNA sense strand
ccaguacaaaggaccaaug

SEQ ID NO: 2093230 - RNA, 19 nt, Homo sapiens
  misc_RNA (1)...(19): siRNA sense strand
gaauaaagauugugagaug

SEQ ID NO: 2093231 - RNA, 19 nt, Homo sapiens
  misc_RNA (1)...(19): siRNA sense strand
ugacauacauggagaauuu

SEQ ID NO: 2093232 - RNA, 19 nt, Homo sapiens
  misc_RNA (1)...(19): siRNA sense strand
guacagagaugucauuguu

SEQ ID NO: 2093233 - RNA, 19 nt, Homo sapiens
  misc_RNA (1)...(19): siRNA sense strand
acaaagggcuguaaaguga

SEQ ID NO: 2093234 - RNA, 19 nt, Homo sapiens
  misc_RNA (1)...(19): siRNA sense strand
gaucugaggucacugaaga

SEQ ID NO: 2093235 - RNA, 19 nt, Homo sapiens
  misc_RNA (1)...(19): siRNA sense strand
gaaguacuuugcugaauau

SEQ ID NO: 2093236 - RNA, 19 nt, Homo sapiens
  misc_RNA (1)...(19): siRNA sense strand
ugaaguacuuugcugaaua

SEQ ID NO: 2093237 - RNA, 19 nt, Homo sapiens
  misc_RNA (1)...(19): siRNA sense strand
gggaagagguggacauuuc

SEQ ID NO: 2093238 - RNA, 19 nt, Homo sapiens
  misc_RNA (1)...(19): siRNA sense strand
gaaauuacagggcaccuaa

SEQ ID NO: 2093239 - RNA, 19 nt, Homo sapiens
  misc_RNA (1)...(19): siRNA sense strand
ucaauuggcugacuuguuc

SEQ ID NO: 2093240 - RNA, 19 nt, Homo sapiens
  misc_RNA (1)...(19): siRNA sense strand
caaagaaguucacuagaca

SEQ ID NO: 2093241 - RNA, 19 nt, Homo sapiens
  misc_RNA (1)...(19): siRNA sense strand
gcucaaugcuuucuuguca

SEQ ID NO: 2093242 - RNA, 19 nt, Homo sapiens
  misc_RNA (1)...(19): siRNA sense strand
caugauccuuuauccauua

SEQ ID NO: 2093243 - RNA, 19 nt, Homo sapiens
  misc_RNA (1)...(19): siRNA sense strand
caaccaggaugcacaaaga

SEQ ID NO: 2093244 - RNA, 19 nt, Homo sapiens
  misc_RNA (1)...(19): siRNA sense strand
guaagaagauugaaagacu

SEQ ID NO: 2093245 - RNA, 19 nt, Homo sapiens
  misc_RNA (1)...(19): siRNA sense strand
gcgaaugacugaaauuaca

SEQ ID NO: 2093246 - RNA, 19 nt, Homo sapiens
  misc_RNA (1)...(19): siRNA sense strand
gaauuuaucccugcuguaa

SEQ ID NO: 2093247 - RNA, 19 nt, Homo sapiens
  misc_RNA (1)...(19): siRNA sense strand
gaagaaguauccaagaaac

SEQ ID NO: 2093248 - RNA, 19 nt, Homo sapiens
  misc_RNA (1)...(19): siRNA sense strand
agaaaugacugaagaaucu

SEQ ID NO: 2093249 - RNA, 19 nt, Homo sapiens
  misc_RNA (1)...(19): siRNA sense strand
uaucaggccuuucucugua

SEQ ID NO: 2093250 - RNA, 19 nt, Homo sapiens
  misc_RNA (1)...(19): siRNA sense strand
gcagcaacauuguauagau

SEQ ID NO: 2093251 - RNA, 19 nt, Homo sapiens
  misc_RNA (1)...(19): siRNA sense strand
gcaaaucuucucacacgua

SEQ ID NO: 2093252 - RNA, 19 nt, Homo sapiens
  misc_RNA (1)...(19): siRNA sense strand
caaaugguauuggacauga

SEQ ID NO: 2093253 - RNA, 19 nt, Homo sapiens
  misc_RNA (1)...(19): siRNA sense strand
gaucuguucucacacaaug

SEQ ID NO: 2093254 - RNA, 19 nt, Homo sapiens
  misc_RNA (1)...(19): siRNA sense strand
gaaagaagaauuccuugca

SEQ ID NO: 2093255 - RNA, 19 nt, Homo sapiens
  misc_RNA (1)...(19): siRNA sense strand
gguauagaaugugauguuu

SEQ ID NO: 2093256 - RNA, 19 nt, Homo sapiens
  misc_RNA (1)...(19): siRNA sense strand
ggaucgacguggaaauauu

SEQ ID NO: 2093257 - RNA, 19 nt, Homo sapiens
  misc_RNA (1)...(19): siRNA sense strand
gaagauugaaagacuguuu

SEQ ID NO: 2093258 - RNA, 19 nt, Homo sapiens
  misc_RNA (1)...(19): siRNA sense strand
ucaagggcguccugcauaa

SEQ ID NO: 2093259 - RNA, 19 nt, Homo sapiens
  misc_RNA (1)...(19): siRNA sense strand
gaaguucacuagacaacca

SEQ ID NO: 2093260 - RNA, 19 nt, Homo sapiens
  misc_RNA (1)...(19): siRNA sense strand
ccaaagaaguucacuagac

SEQ ID NO: 2093261 - RNA, 19 nt, Homo sapiens
  misc_RNA (1)...(19): siRNA sense strand
ggagcucaaugcuuucuug

SEQ ID NO: 2093262 - RNA, 19 nt, Homo sapiens
  misc_RNA (1)...(19): siRNA sense strand
uauagaugcuguuugugua

SEQ ID NO: 2093263 - RNA, 19 nt, Homo sapiens
  misc_RNA (1)...(19): siRNA sense strand
gcucgugccuggauuaaca

SEQ ID NO: 2093264 - RNA, 19 nt, Homo sapiens
  misc_RNA (1)...(19): siRNA sense strand
gaagaagaaguauccaaga

SEQ ID NO: 2093265 - RNA, 19 nt, Homo sapiens
  misc_RNA (1)...(19): siRNA sense strand
ggaacacuaaggagaauaa

SEQ ID NO: 2093266 - RNA, 19 nt, Homo sapiens
  misc_RNA (1)...(19): siRNA sense strand
aaacuggacucuacaacug

SEQ ID NO: 2093267 - RNA, 19 nt, Homo sapiens
  misc_RNA (1)...(19): siRNA sense strand
uauuggacaugauccuuua

SEQ ID NO: 2093268 - RNA, 19 nt, Homo sapiens
  misc_RNA (1)...(19): siRNA sense strand
aagaagaaguauccaagaa

SEQ ID NO: 2093269 - RNA, 19 nt, Homo sapiens
  misc_RNA (1)...(19): siRNA sense strand
guggagaaaugacugaaga

SEQ ID NO: 2093270 - RNA, 19 nt, Homo sapiens
  misc_RNA (1)...(19): siRNA sense strand
gaaacagaaagaagaauuc

SEQ ID NO: 2093271 - RNA, 19 nt, Homo sapiens
  misc_RNA (1)...(19): siRNA sense strand
caaaucuucucacacguau

SEQ ID NO: 2093272 - RNA, 19 nt, Homo sapiens
  misc_RNA (1)...(19): siRNA sense strand
ggagagaguccuguugaaa

SEQ ID NO: 2093273 - RNA, 19 nt, Homo sapiens
  misc_RNA (1)...(19): siRNA sense strand
ugaggucacugaagaugaa

SEQ ID NO: 2093274 - RNA, 19 nt, Homo sapiens
  misc_RNA (1)...(19): siRNA sense strand
uagcugaucuguucucaca

SEQ ID NO: 2093275 - RNA, 19 nt, Homo sapiens
  misc_RNA (1)...(19): siRNA sense strand
gaacaguguauucaguauu

SEQ ID NO: 2093276 - RNA, 19 nt, Homo sapiens
  misc_RNA (1)...(19): siRNA sense strand
gaaacuuuagccacauaua

SEQ ID NO: 2093277 - RNA, 19 nt, Homo sapiens
  misc_RNA (1)...(19): siRNA sense strand
gaagcucgccuguugacaa

SEQ ID NO: 2093278 - RNA, 19 nt, Homo sapiens
  misc_RNA (1)...(19): siRNA sense strand
cuaaggagaauaaagauug

SEQ ID NO: 2093279 - RNA, 19 nt, Homo sapiens
  misc_RNA (1)...(19): siRNA sense strand
ccaaagcagcucagagaaa

SEQ ID NO: 2093280 - RNA, 19 nt, Homo sapiens
  misc_RNA (1)...(19): siRNA sense strand
caacggcgaaugacugaaa

SEQ ID NO: 2093281 - RNA, 19 nt, Homo sapiens
  misc_RNA (1)...(19): siRNA sense strand
cuagaauguuggacgauuu

SEQ ID NO: 2093282 - RNA, 19 nt, Homo sapiens
  misc_RNA (1)...(19): siRNA sense strand
gcuagaauguuggacgauu

SEQ ID NO: 2093283 - RNA, 19 nt, Homo sapiens
  misc_RNA (1)...(19): siRNA sense strand
gagaauaaagauugugaga

SEQ ID NO: 2093284 - RNA, 19 nt, Homo sapiens
  misc_RNA (1)...(19): siRNA sense strand
cagcaacauuguauagaug

SEQ ID NO: 2093285 - RNA, 19 nt, Homo sapiens
  misc_RNA (1)...(19): siRNA sense strand
aaacaacaauuuccugaac

SEQ ID NO: 2093286 - RNA, 19 nt, Homo sapiens
  misc_RNA (1)...(19): siRNA sense strand
gauguauacuggcgauugu

SEQ ID NO: 2093287 - RNA, 19 nt, Homo sapiens
  misc_RNA (1)...(19): siRNA sense strand
aagaagaauuccuugcauu

SEQ ID NO: 2093288 - RNA, 19 nt, Homo sapiens
  misc_RNA (1)...(19): siRNA sense strand
gaauuaaagagcaguggaa

SEQ ID NO: 2093289 - RNA, 19 nt, Homo sapiens
  misc_RNA (1)...(19): siRNA sense strand
caaagcagcucagagaaaa

SEQ ID NO: 2093290 - RNA, 19 nt, Homo sapiens
  misc_RNA (1)...(19): siRNA sense strand
uuacagggcaccuaauaaa

SEQ ID NO: 2093291 - RNA, 19 nt, Homo sapiens
  misc_RNA (1)...(19): siRNA sense strand
ugaguaugcagaagaauaa

SEQ ID NO: 2093292 - RNA, 19 nt, Homo sapiens
  misc_RNA (1)...(19): siRNA sense strand
gaucgacguggaaauauug

SEQ ID NO: 2093293 - RNA, 19 nt, Homo sapiens
  misc_RNA (1)...(19): siRNA sense strand
acacuaaggagaauaaaga

SEQ ID NO: 2093294 - RNA, 19 nt, Homo sapiens
  misc_RNA (1)...(19): siRNA sense strand
uaucaaauccucacuucuu

SEQ ID NO: 2093295 - RNA, 19 nt, Homo sapiens
  misc_RNA (1)...(19): siRNA sense strand
gggauguucaugaguauuu

SEQ ID NO: 2093296 - RNA, 19 nt, Homo sapiens
  misc_RNA (1)...(19): siRNA sense strand
acagagaugucauuguugu

SEQ ID NO: 2093297 - RNA, 19 nt, Homo sapiens
  misc_RNA (1)...(19): siRNA sense strand
ccaguauaauucccuaaug

SEQ ID NO: 2093298 - RNA, 19 nt, Homo sapiens
  misc_RNA (1)...(19): siRNA sense strand
gaaguauccaagaaacaaa

SEQ ID NO: 2093299 - RNA, 19 nt, Homo sapiens
  misc_RNA (1)...(19): siRNA sense strand
aguggaagcucgccuguug

SEQ ID NO: 2093300 - RNA, 19 nt, Homo sapiens
  misc_RNA (1)...(19): siRNA sense strand
acguauagcugaucuguuc

SEQ ID NO: 2093301 - RNA, 19 nt, Homo sapiens
  misc_RNA (1)...(19): siRNA sense strand
ucauaaugguggagaaaug

SEQ ID NO: 2093302 - RNA, 19 nt, Homo sapiens
  misc_RNA (1)...(19): siRNA sense strand
uauaucaaauccucacuuc

SEQ ID NO: 2093303 - RNA, 19 nt, Homo sapiens
  misc_RNA (1)...(19): siRNA sense strand
gagaaaugacugaagaauc

SEQ ID NO: 2093304 - RNA, 19 nt, Homo sapiens
  misc_RNA (1)...(19): siRNA sense strand
aacaguguauucaguauug

SEQ ID NO: 2093305 - RNA, 19 nt, Homo sapiens
  misc_RNA (1)...(19): siRNA sense strand
gaauuugcaggagguauuu

SEQ ID NO: 2093306 - RNA, 19 nt, Homo sapiens
  misc_RNA (1)...(19): siRNA sense strand
gcugaucuguucucacaca

SEQ ID NO: 2093307 - RNA, 19 nt, Homo sapiens
  misc_RNA (1)...(19): siRNA sense strand
agaguccuguugaaacuuu

SEQ ID NO: 2093308 - RNA, 19 nt, Homo sapiens
  misc_RNA (1)...(19): siRNA sense strand
guucuucgguuugauccua

SEQ ID NO: 2093309 - RNA, 19 nt, Homo sapiens
  misc_RNA (1)...(19): siRNA sense strand
ccaaaagguucuucgguuu

SEQ ID NO: 2093310 - RNA, 19 nt, Homo sapiens
  misc_RNA (1)...(19): siRNA sense strand
guauagaugcuguuugugu

SEQ ID NO: 2093311 - RNA, 19 nt, Homo sapiens
  misc_RNA (1)...(19): siRNA sense strand
aaagaagaauuccuugcau

SEQ ID NO: 2093312 - RNA, 19 nt, Homo sapiens
  misc_RNA (1)...(19): siRNA sense strand
gacgaucaacggcgaauga

SEQ ID NO: 2093313 - RNA, 19 nt, Homo sapiens
  misc_RNA (1)...(19): siRNA sense strand
aagaugaaguuggagauga

SEQ ID NO: 2093314 - RNA, 19 nt, Homo sapiens
  misc_RNA (1)...(19): siRNA sense strand
aaagauacaguuagugaug

SEQ ID NO: 2093315 - RNA, 19 nt, Homo sapiens
  misc_RNA (1)...(19): siRNA sense strand
acaacaauuuccugaacaa

SEQ ID NO: 2093316 - RNA, 19 nt, Homo sapiens
  misc_RNA (1)...(19): siRNA sense strand
ggaagagguggacauuuca

SEQ ID NO: 2093317 - RNA, 19 nt, Homo sapiens
  misc_RNA (1)...(19): siRNA sense strand
uggacgauuugcacaagua

SEQ ID NO: 2093318 - RNA, 19 nt, Homo sapiens
  misc_RNA (1)...(19): siRNA sense strand
gacaugauccuuuauccau

SEQ ID NO: 2093319 - RNA, 19 nt, Homo sapiens
  misc_RNA (1)...(19): siRNA sense strand
ggagaaaugacugaagaau

SEQ ID NO: 2093320 - RNA, 19 nt, Homo sapiens
  misc_RNA (1)...(19): siRNA sense strand
acaaagagaagacgaucaa

SEQ ID NO: 2093321 - RNA, 19 nt, Homo sapiens
  misc_RNA (1)...(19): siRNA sense strand
agaagaaguauccaagaaa

SEQ ID NO: 2093322 - RNA, 19 nt, Homo sapiens
  misc_RNA (1)...(19): siRNA sense strand
agaugaaguuggagaugaa

SEQ ID NO: 2093323 - RNA, 19 nt, Homo sapiens
  misc_RNA (1)...(19): siRNA sense strand
gaagaugaaguuggagaug

SEQ ID NO: 2093324 - RNA, 19 nt, Homo sapiens
  misc_RNA (1)...(19): siRNA sense strand
guggaucgacguggaaaua

SEQ ID NO: 2093325 - RNA, 19 nt, Homo sapiens
  misc_RNA (1)...(19): siRNA sense strand
auugugagaugcccacuuu

SEQ ID NO: 2093326 - RNA, 19 nt, Homo sapiens
  misc_RNA (1)...(19): siRNA sense strand
aaaggaacacuaaggagaa

SEQ ID NO: 2093327 - RNA, 19 nt, Homo sapiens
  misc_RNA (1)...(19): siRNA sense strand
ucacauaagagauaagaca

SEQ ID NO: 2093328 - RNA, 19 nt, Homo sapiens
  misc_RNA (1)...(19): siRNA sense strand
caaaagauacaguuaguga

SEQ ID NO: 2093329 - RNA, 19 nt, Homo sapiens
  misc_RNA (1)...(19): siRNA sense strand
caaguacagagaugucauu

SEQ ID NO: 2093330 - RNA, 19 nt, Homo sapiens
  misc_RNA (1)...(19): siRNA sense strand
gaaauugacucuccuuauu

SEQ ID NO: 2093331 - RNA, 19 nt, Homo sapiens
  misc_RNA (1)...(19): siRNA sense strand
uaacauggcugacuuaaug

SEQ ID NO: 2093332 - RNA, 19 nt, Homo sapiens
  misc_RNA (1)...(19): siRNA sense strand
gaagaugggucagaugaua

SEQ ID NO: 2093333 - RNA, 19 nt, Homo sapiens
  misc_RNA (1)...(19): siRNA sense strand
gcaaugagguuaauucuag

SEQ ID NO: 2093334 - RNA, 19 nt, Homo sapiens
  misc_RNA (1)...(19): siRNA sense strand
gaagacaugucaaauauca

SEQ ID NO: 2093335 - RNA, 19 nt, Homo sapiens
  misc_RNA (1)...(19): siRNA sense strand
ccacauauuucauggauuu

SEQ ID NO: 2093336 - RNA, 19 nt, Homo sapiens
  misc_RNA (1)...(19): siRNA sense strand
gaacuucugucaauauuuc

SEQ ID NO: 2093337 - RNA, 19 nt, Homo sapiens
  misc_RNA (1)...(19): siRNA sense strand
caacagaucaguaguaauu

SEQ ID NO: 2093338 - RNA, 19 nt, Homo sapiens
  misc_RNA (1)...(19): siRNA sense strand
gggcaaagaugacguuuau

SEQ ID NO: 2093339 - RNA, 19 nt, Homo sapiens
  misc_RNA (1)...(19): siRNA sense strand
gaauauagauagagagugu

SEQ ID NO: 2093340 - RNA, 19 nt, Homo sapiens
  misc_RNA (1)...(19): siRNA sense strand
ggaccaaauuuacauauug

SEQ ID NO: 2093341 - RNA, 19 nt, Homo sapiens
  misc_RNA (1)...(19): siRNA sense strand
gcaguggucucuauaaguu

SEQ ID NO: 2093342 - RNA, 19 nt, Homo sapiens
  misc_RNA (1)...(19): siRNA sense strand
ugacuuagcugacuugaga

SEQ ID NO: 2093343 - RNA, 19 nt, Homo sapiens
  misc_RNA (1)...(19): siRNA sense strand
gcaagaagccaaagaaaga

SEQ ID NO: 2093344 - RNA, 19 nt, Homo sapiens
  misc_RNA (1)...(19): siRNA sense strand
gaagaacaguccaacaaug

SEQ ID NO: 2093345 - RNA, 19 nt, Homo sapiens
  misc_RNA (1)...(19): siRNA sense strand
cagaagacaugucaaauau

SEQ ID NO: 2093346 - RNA, 19 nt, Homo sapiens
  misc_RNA (1)...(19): siRNA sense strand
guacagaucuucggaauag

SEQ ID NO: 2093347 - RNA, 19 nt, Homo sapiens
  misc_RNA (1)...(19): siRNA sense strand
gcaaagaugacguuuauga

SEQ ID NO: 2093348 - RNA, 19 nt, Homo sapiens
  misc_RNA (1)...(19): siRNA sense strand
gaaaggcauuugacauuau

SEQ ID NO: 2093349 - RNA, 19 nt, Homo sapiens
  misc_RNA (1)...(19): siRNA sense strand
ggauuuagcuuaucaugau

SEQ ID NO: 2093350 - RNA, 19 nt, Homo sapiens
  misc_RNA (1)...(19): siRNA sense strand
gcagcuauccaguauauua

SEQ ID NO: 2093351 - RNA, 19 nt, Homo sapiens
  misc_RNA (1)...(19): siRNA sense strand
gagcagcuauccaguauau

SEQ ID NO: 2093352 - RNA, 19 nt, Homo sapiens
  misc_RNA (1)...(19): siRNA sense strand
caagaugacuauugaaaug

SEQ ID NO: 2093353 - RNA, 19 nt, Homo sapiens
  misc_RNA (1)...(19): siRNA sense strand
gaaguuacagugaucuuua

SEQ ID NO: 2093354 - RNA, 19 nt, Homo sapiens
  misc_RNA (1)...(19): siRNA sense strand
guacuuggcauccauguua

SEQ ID NO: 2093355 - RNA, 19 nt, Homo sapiens
  misc_RNA (1)...(19): siRNA sense strand
gagccaaacuuuauguuga

SEQ ID NO: 2093356 - RNA, 19 nt, Homo sapiens
  misc_RNA (1)...(19): siRNA sense strand
ggagaagguuugcauauca

SEQ ID NO: 2093357 - RNA, 19 nt, Homo sapiens
  misc_RNA (1)...(19): siRNA sense strand
uguaguagcucccagguua

SEQ ID NO: 2093358 - RNA, 19 nt, Homo sapiens
  misc_RNA (1)...(19): siRNA sense strand
gcagaguaaugauggauuu

SEQ ID NO: 2093359 - RNA, 19 nt, Homo sapiens
  misc_RNA (1)...(19): siRNA sense strand
ggauugaacuguugacgaa

SEQ ID NO: 2093360 - RNA, 19 nt, Homo sapiens
  misc_RNA (1)...(19): siRNA sense strand
gaucacaggucuagacaug

SEQ ID NO: 2093361 - RNA, 19 nt, Homo sapiens
  misc_RNA (1)...(19): siRNA sense strand
gaacaggaaucacacucaa

SEQ ID NO: 2093362 - RNA, 19 nt, Homo sapiens
  misc_RNA (1)...(19): siRNA sense strand
gaucagcacucuuauuaca

SEQ ID NO: 2093363 - RNA, 19 nt, Homo sapiens
  misc_RNA (1)...(19): siRNA sense strand
gaagcaaacugugccaauu

SEQ ID NO: 2093364 - RNA, 19 nt, Homo sapiens
  misc_RNA (1)...(19): siRNA sense strand
ugaaguaacucauugguau

SEQ ID NO: 2093365 - RNA, 19 nt, Homo sapiens
  misc_RNA (1)...(19): siRNA sense strand
gaaacuucuuuguucguua

SEQ ID NO: 2093366 - RNA, 19 nt, Homo sapiens
  misc_RNA (1)...(19): siRNA sense strand
ccaugugacuggagauuua

SEQ ID NO: 2093367 - RNA, 19 nt, Homo sapiens
  misc_RNA (1)...(19): siRNA sense strand
ccaauacccuggagcagua

SEQ ID NO: 2093368 - RNA, 19 nt, Homo sapiens
  misc_RNA (1)...(19): siRNA sense strand
ggagaaggagcaagaauuu

SEQ ID NO: 2093369 - RNA, 19 nt, Homo sapiens
  misc_RNA (1)...(19): siRNA sense strand
caaaucaacuccauaccuu

SEQ ID NO: 2093370 - RNA, 19 nt, Homo sapiens
  misc_RNA (1)...(19): siRNA sense strand
gcaagugcuucuuuaaaug

SEQ ID NO: 2093371 - RNA, 19 nt, Homo sapiens
  misc_RNA (1)...(19): siRNA sense strand
gcccuuaucuucagagaaa

SEQ ID NO: 2093372 - RNA, 19 nt, Homo sapiens
  misc_RNA (1)...(19): siRNA sense strand
caaaccacccuuuaaauuu

SEQ ID NO: 2093373 - RNA, 19 nt, Homo sapiens
  misc_RNA (1)...(19): siRNA sense strand
caauuuagcuuccauuuac

SEQ ID NO: 2093374 - RNA, 19 nt, Homo sapiens
  misc_RNA (1)...(19): siRNA sense strand
ucaaugaugugugcaauaa

SEQ ID NO: 2093375 - RNA, 19 nt, Homo sapiens
  misc_RNA (1)...(19): siRNA sense strand
gccuagaucuugcauuuaa

SEQ ID NO: 2093376 - RNA, 19 nt, Homo sapiens
  misc_RNA (1)...(19): siRNA sense strand
uaugggaggugauugaaua

SEQ ID NO: 2093377 - RNA, 19 nt, Homo sapiens
  misc_RNA (1)...(19): siRNA sense strand
aaacauacaccauggauaa

SEQ ID NO: 2093378 - RNA, 19 nt, Homo sapiens
  misc_RNA (1)...(19): siRNA sense strand
uaacagagguauuucuugu

SEQ ID NO: 2093379 - RNA, 19 nt, Homo sapiens
  misc_RNA (1)...(19): siRNA sense strand
cagaagacauugcagauau

SEQ ID NO: 2093380 - RNA, 19 nt, Homo sapiens
  misc_RNA (1)...(19): siRNA sense strand
gaagaagagcuuagaagaa

SEQ ID NO: 2093381 - RNA, 19 nt, Homo sapiens
  misc_RNA (1)...(19): siRNA sense strand
gcagaagaaccacugaaua

SEQ ID NO: 2093382 - RNA, 19 nt, Homo sapiens
  misc_RNA (1)...(19): siRNA sense strand
uuaaagcacuguggaauaa

SEQ ID NO: 2093383 - RNA, 19 nt, Homo sapiens
  misc_RNA (1)...(19): siRNA sense strand
gcagggaaguucugacgaa

SEQ ID NO: 2093384 - RNA, 19 nt, Homo sapiens
  misc_RNA (1)...(19): siRNA sense strand
gaugauagcuuuaguugcu

SEQ ID NO: 2093385 - RNA, 19 nt, Homo sapiens
  misc_RNA (1)...(19): siRNA sense strand
ggaagaagauauccucucu

SEQ ID NO: 2093386 - RNA, 19 nt, Homo sapiens
  misc_RNA (1)...(19): siRNA sense strand
uaagugcccuaaucaaauu

SEQ ID NO: 2093387 - RNA, 19 nt, Homo sapiens
  misc_RNA (1)...(19): siRNA sense strand
ugaggaagaaccaauauua

SEQ ID NO: 2093388 - RNA, 19 nt, Homo sapiens
  misc_RNA (1)...(19): siRNA sense strand
ugaaggaauuuauggagua

SEQ ID NO: 2093389 - RNA, 19 nt, Homo sapiens
  misc_RNA (1)...(19): siRNA sense strand
uuaaagaccuccacuguuc

SEQ ID NO: 2093390 - RNA, 19 nt, Homo sapiens
  misc_RNA (1)...(19): siRNA sense strand
agaaaggcauuugacauua

SEQ ID NO: 2093391 - RNA, 19 nt, Homo sapiens
  misc_RNA (1)...(19): siRNA sense strand
agaaagauaugacagaguu

SEQ ID NO: 2093392 - RNA, 19 nt, Homo sapiens
  misc_RNA (1)...(19): siRNA sense strand
gauaagcagccucugaaua

SEQ ID NO: 2093393 - RNA, 19 nt, Homo sapiens
  misc_RNA (1)...(19): siRNA sense strand
aacaacaucuucccaauuu

SEQ ID NO: 2093394 - RNA, 19 nt, Homo sapiens
  misc_RNA (1)...(19): siRNA sense strand
ugaagaaucuggaugugaa

SEQ ID NO: 2093395 - RNA, 19 nt, Homo sapiens
  misc_RNA (1)...(19): siRNA sense strand
gcagugagguacagucaga

SEQ ID NO: 2093396 - RNA, 19 nt, Homo sapiens
  misc_RNA (1)...(19): siRNA sense strand
gaaauaagaaagaggaaga

SEQ ID NO: 2093397 - RNA, 19 nt, Homo sapiens
  misc_RNA (1)...(19): siRNA sense strand
gauacaacauuaugcuuug

SEQ ID NO: 2093398 - RNA, 19 nt, Homo sapiens
  misc_RNA (1)...(19): siRNA sense strand
gaucaggaguuacgacaga

SEQ ID NO: 2093399 - RNA, 19 nt, Homo sapiens
  misc_RNA (1)...(19): siRNA sense strand
guacuaccauuaacauaga

SEQ ID NO: 2093400 - RNA, 19 nt, Homo sapiens
  misc_RNA (1)...(19): siRNA sense strand
gcaauuguguaguuguauu

SEQ ID NO: 2093401 - RNA, 19 nt, Homo sapiens
  misc_RNA (1)...(19): siRNA sense strand
gaagaaccacugaauauag

SEQ ID NO: 2093402 - RNA, 19 nt, Homo sapiens
  misc_RNA (1)...(19): siRNA sense strand
gauacacacuggauaacaa

SEQ ID NO: 2093403 - RNA, 19 nt, Homo sapiens
  misc_RNA (1)...(19): siRNA sense strand
agacagacuucuuguugua

SEQ ID NO: 2093404 - RNA, 19 nt, Homo sapiens
  misc_RNA (1)...(19): siRNA sense strand
gagagaagaagaauuagaa

SEQ ID NO: 2093405 - RNA, 19 nt, Homo sapiens
  misc_RNA (1)...(19): siRNA sense strand
gugauaacauguauacuug

SEQ ID NO: 2093406 - RNA, 19 nt, Homo sapiens
  misc_RNA (1)...(19): siRNA sense strand
gauagaugauuaugaggaa

SEQ ID NO: 2093407 - RNA, 19 nt, Homo sapiens
  misc_RNA (1)...(19): siRNA sense strand
ggaagaagagcuuagaaga

SEQ ID NO: 2093408 - RNA, 19 nt, Homo sapiens
  misc_RNA (1)...(19): siRNA sense strand
ccaaugcagauacuaauua

SEQ ID NO: 2093409 - RNA, 19 nt, Homo sapiens
  misc_RNA (1)...(19): siRNA sense strand
ggaaggugauaacauguau

SEQ ID NO: 2093410 - RNA, 19 nt, Homo sapiens
  misc_RNA (1)...(19): siRNA sense strand
ggaggagacucaaucaauc

SEQ ID NO: 2093411 - RNA, 19 nt, Homo sapiens
  misc_RNA (1)...(19): siRNA sense strand
gcuaaaaccugaaacaauu

SEQ ID NO: 2093412 - RNA, 19 nt, Homo sapiens
  misc_RNA (1)...(19): siRNA sense strand
gaugaugucaguuguagua

SEQ ID NO: 2093413 - RNA, 19 nt, Homo sapiens
  misc_RNA (1)...(19): siRNA sense strand
gcagaagggcgacugagua

SEQ ID NO: 2093414 - RNA, 19 nt, Homo sapiens
  misc_RNA (1)...(19): siRNA sense strand
ccaaguggcugauaugaag

SEQ ID NO: 2093415 - RNA, 19 nt, Homo sapiens
  misc_RNA (1)...(19): siRNA sense strand
gaaguuaauaugccaguuu

SEQ ID NO: 2093416 - RNA, 19 nt, Homo sapiens
  misc_RNA (1)...(19): siRNA sense strand
gcacaugcguuuauuacag

SEQ ID NO: 2093417 - RNA, 19 nt, Homo sapiens
  misc_RNA (1)...(19): siRNA sense strand
guagauaugacgauuguaa

SEQ ID NO: 2093418 - RNA, 19 nt, Homo sapiens
  misc_RNA (1)...(19): siRNA sense strand
gaccagagacuccucaauu

SEQ ID NO: 2093419 - RNA, 19 nt, Homo sapiens
  misc_RNA (1)...(19): siRNA sense strand
agaaaugccuguauagugu

SEQ ID NO: 2093420 - RNA, 19 nt, Homo sapiens
  misc_RNA (1)...(19): siRNA sense strand
gacuggagauuuaguagaa

SEQ ID NO: 2093421 - RNA, 19 nt, Homo sapiens
  misc_RNA (1)...(19): siRNA sense strand
ggauuuauguggcaauugu

SEQ ID NO: 2093422 - RNA, 19 nt, Homo sapiens
  misc_RNA (1)...(19): siRNA sense strand
agagcaaguugacaucuua

SEQ ID NO: 2093423 - RNA, 19 nt, Homo sapiens
  misc_RNA (1)...(19): siRNA sense strand
guauguugguuuacagaua

SEQ ID NO: 2093424 - RNA, 19 nt, Homo sapiens
  misc_RNA (1)...(19): siRNA sense strand
ggauaauguuugcaagaaa

SEQ ID NO: 2093425 - RNA, 19 nt, Homo sapiens
  misc_RNA (1)...(19): siRNA sense strand
guugagaacuacaggcuaa

SEQ ID NO: 2093426 - RNA, 19 nt, Homo sapiens
  misc_RNA (1)...(19): siRNA sense strand
ucagaagacaugucaaaua

SEQ ID NO: 2093427 - RNA, 19 nt, Homo sapiens
  misc_RNA (1)...(19): siRNA sense strand
caaagcuagugcccuauuu

SEQ ID NO: 2093428 - RNA, 19 nt, Homo sapiens
  misc_RNA (1)...(19): siRNA sense strand
ugagaacccuguuauuaau

SEQ ID NO: 2093429 - RNA, 19 nt, Homo sapiens
  misc_RNA (1)...(19): siRNA sense strand
gaguggauuuggcaugaua

SEQ ID NO: 2093430 - RNA, 19 nt, Homo sapiens
  misc_RNA (1)...(19): siRNA sense strand
ucaaggagauggccacuuu

SEQ ID NO: 2093431 - RNA, 19 nt, Homo sapiens
  misc_RNA (1)...(19): siRNA sense strand
gaacaagccguaagaaaga

SEQ ID NO: 2093432 - RNA, 19 nt, Homo sapiens
  misc_RNA (1)...(19): siRNA sense strand
ugaaagaguugcucagaaa

SEQ ID NO: 2093433 - RNA, 19 nt, Homo sapiens
  misc_RNA (1)...(19): siRNA sense strand
agagaaaucuguugaagaa

SEQ ID NO: 2093434 - RNA, 19 nt, Homo sapiens
  misc_RNA (1)...(19): siRNA sense strand
cuaaggagcucaucaacaa

SEQ ID NO: 2093435 - RNA, 19 nt, Homo sapiens
  misc_RNA (1)...(19): siRNA sense strand
aagaagagcucuaucgaaa

SEQ ID NO: 2093436 - RNA, 19 nt, Homo sapiens
  misc_RNA (1)...(19): siRNA sense strand
gaaacacguuggccuuauu

SEQ ID NO: 2093437 - RNA, 19 nt, Homo sapiens
  misc_RNA (1)...(19): siRNA sense strand
guugaaggcugcccacaua

SEQ ID NO: 2093438 - RNA, 19 nt, Homo sapiens
  misc_RNA (1)...(19): siRNA sense strand
aggaauaucugaugaguuu

SEQ ID NO: 2093439 - RNA, 19 nt, Homo sapiens
  misc_RNA (1)...(19): siRNA sense strand
ggagauggccacuuuauug

SEQ ID NO: 2093440 - RNA, 19 nt, Homo sapiens
  misc_RNA (1)...(19): siRNA sense strand
ggaugaacaugcaccgaua

SEQ ID NO: 2093441 - RNA, 19 nt, Homo sapiens
  misc_RNA (1)...(19): siRNA sense strand
gauaagcuaugaggacuuu

SEQ ID NO: 2093442 - RNA, 19 nt, Homo sapiens
  misc_RNA (1)...(19): siRNA sense strand
gaagagaaaucuguugaag

SEQ ID NO: 2093443 - RNA, 19 nt, Homo sapiens
  misc_RNA (1)...(19): siRNA sense strand
gaaaucuguugaagaauca

SEQ ID NO: 2093444 - RNA, 19 nt, Homo sapiens
  misc_RNA (1)...(19): siRNA sense strand
gcaaccggcucccuagcua

SEQ ID NO: 2093445 - RNA, 19 nt, Homo sapiens
  misc_RNA (1)...(19): siRNA sense strand
gcuguaaaguugaagugua

SEQ ID NO: 2093446 - RNA, 19 nt, Homo sapiens
  misc_RNA (1)...(19): siRNA sense strand
gaagaagagcucuaucgaa

SEQ ID NO: 2093447 - RNA, 19 nt, Homo sapiens
  misc_RNA (1)...(19): siRNA sense strand
ggacaacgagcuacuccua

SEQ ID NO: 2093448 - RNA, 19 nt, Homo sapiens
  misc_RNA (1)...(19): siRNA sense strand
gauaagagaacagaagaaa

SEQ ID NO: 2093449 - RNA, 19 nt, Homo sapiens
  misc_RNA (1)...(19): siRNA sense strand
ggaguuacccaaccuagaa

SEQ ID NO: 2093450 - RNA, 19 nt, Homo sapiens
  misc_RNA (1)...(19): siRNA sense strand
ggaaagugaagaagagaaa

SEQ ID NO: 2093451 - RNA, 19 nt, Homo sapiens
  misc_RNA (1)...(19): siRNA sense strand
gagaacaagccguaagaaa

SEQ ID NO: 2093452 - RNA, 19 nt, Homo sapiens
  misc_RNA (1)...(19): siRNA sense strand
uuugugaacuuuccugaua

SEQ ID NO: 2093453 - RNA, 19 nt, Homo sapiens
  misc_RNA (1)...(19): siRNA sense strand
gaagaguccaugaaaucua

SEQ ID NO: 2093454 - RNA, 19 nt, Homo sapiens
  misc_RNA (1)...(19): siRNA sense strand
caagaaaguagaagaguug

SEQ ID NO: 2093455 - RNA, 19 nt, Homo sapiens
  misc_RNA (1)...(19): siRNA sense strand
ucaagaaaguagaagaguu

SEQ ID NO: 2093456 - RNA, 19 nt, Homo sapiens
  misc_RNA (1)...(19): siRNA sense strand
agaagaggauccagaguau

SEQ ID NO: 2093457 - RNA, 19 nt, Homo sapiens
  misc_RNA (1)...(19): siRNA sense strand
agaaacaccucucagaaca

SEQ ID NO: 2093458 - RNA, 19 nt, Homo sapiens
  misc_RNA (1)...(19): siRNA sense strand
gagaaaauguaccaggaua

SEQ ID NO: 2093459 - RNA, 19 nt, Homo sapiens
  misc_RNA (1)...(19): siRNA sense strand
gagagaauaccaacgagaa

SEQ ID NO: 2093460 - RNA, 19 nt, Homo sapiens
  misc_RNA (1)...(19): siRNA sense strand
ccacaugcaucuauuaaaa

SEQ ID NO: 2093461 - RNA, 19 nt, Homo sapiens
  misc_RNA (1)...(19): siRNA sense strand
aagaguccaugaaaucuaa

SEQ ID NO: 2093462 - RNA, 19 nt, Homo sapiens
  misc_RNA (1)...(19): siRNA sense strand
aaagaagaguccaugaaau

SEQ ID NO: 2093463 - RNA, 19 nt, Homo sapiens
  misc_RNA (1)...(19): siRNA sense strand
gauauucaccacucuaaug

SEQ ID NO: 2093464 - RNA, 19 nt, Homo sapiens
  misc_RNA (1)...(19): siRNA sense strand
gcacuaggaauaucugaug

SEQ ID NO: 2093465 - RNA, 19 nt, Homo sapiens
  misc_RNA (1)...(19): siRNA sense strand
cagcugagagacuuucuua

SEQ ID NO: 2093466 - RNA, 19 nt, Homo sapiens
  misc_RNA (1)...(19): siRNA sense strand
cuaucacccugucucauua

SEQ ID NO: 2093467 - RNA, 19 nt, Homo sapiens
  misc_RNA (1)...(19): siRNA sense strand
gagauggccacuuuauuga

SEQ ID NO: 2093468 - RNA, 19 nt, Homo sapiens
  misc_RNA (1)...(19): siRNA sense strand
gaagaagagaaaucuguug

SEQ ID NO: 2093469 - RNA, 19 nt, Homo sapiens
  misc_RNA (1)...(19): siRNA sense strand
uaaacccugugccuuguaa

SEQ ID NO: 2093470 - RNA, 19 nt, Homo sapiens
  misc_RNA (1)...(19): siRNA sense strand
gaagagcucuaucgaaacc

SEQ ID NO: 2093471 - RNA, 19 nt, Homo sapiens
  misc_RNA (1)...(19): siRNA sense strand
gaagaaauuccgagccaau

SEQ ID NO: 2093472 - RNA, 19 nt, Homo sapiens
  misc_RNA (1)...(19): siRNA sense strand
gaaggcugcccacauagaa

SEQ ID NO: 2093473 - RNA, 19 nt, Homo sapiens
  misc_RNA (1)...(19): siRNA sense strand
ucaaggauuugcugaagga

SEQ ID NO: 2093474 - RNA, 19 nt, Homo sapiens
  misc_RNA (1)...(19): siRNA sense strand
ggacgaagaggaggagaaa

SEQ ID NO: 2093475 - RNA, 19 nt, Homo sapiens
  misc_RNA (1)...(19): siRNA sense strand
agaaaucuguugaagaauc

SEQ ID NO: 2093476 - RNA, 19 nt, Homo sapiens
  misc_RNA (1)...(19): siRNA sense strand
ccaacagccaggauucuua

SEQ ID NO: 2093477 - RNA, 19 nt, Homo sapiens
  misc_RNA (1)...(19): siRNA sense strand
gaaugaugaccuaugcuaa

SEQ ID NO: 2093478 - RNA, 19 nt, Homo sapiens
  misc_RNA (1)...(19): siRNA sense strand
gaacuuuccugauauucac

SEQ ID NO: 2093479 - RNA, 19 nt, Homo sapiens
  misc_RNA (1)...(19): siRNA sense strand
gaaaguagaagaguugaag

SEQ ID NO: 2093480 - RNA, 19 nt, Homo sapiens
  misc_RNA (1)...(19): siRNA sense strand
aagaggauccagaguauaa

SEQ ID NO: 2093481 - RNA, 19 nt, Homo sapiens
  misc_RNA (1)...(19): siRNA sense strand
ccaggauucuuacaaggaa

SEQ ID NO: 2093482 - RNA, 19 nt, Homo sapiens
  misc_RNA (1)...(19): siRNA sense strand
aggaaaggaugagagaaua

SEQ ID NO: 2093483 - RNA, 19 nt, Homo sapiens
  misc_RNA (1)...(19): siRNA sense strand
gaagaggauccagaguaua

SEQ ID NO: 2093484 - RNA, 19 nt, Homo sapiens
  misc_RNA (1)...(19): siRNA sense strand
aguaagaugugcaggugua

SEQ ID NO: 2093485 - RNA, 19 nt, Homo sapiens
  misc_RNA (1)...(19): siRNA sense strand
guaaaccauuugaucuuca

SEQ ID NO: 2093486 - RNA, 19 nt, Homo sapiens
  misc_RNA (1)...(19): siRNA sense strand
cuguaaaguugaaguguaa

SEQ ID NO: 2093487 - RNA, 19 nt, Homo sapiens
  misc_RNA (1)...(19): siRNA sense strand
gaacaugcaccgauaagcu

SEQ ID NO: 2093488 - RNA, 19 nt, Homo sapiens
  misc_RNA (1)...(19): siRNA sense strand
gaugagagaauaccaacga

SEQ ID NO: 2093489 - RNA, 19 nt, Homo sapiens
  misc_RNA (1)...(19): siRNA sense strand
aggcguaagucaccaguaa

SEQ ID NO: 2093490 - RNA, 19 nt, Homo sapiens
  misc_RNA (1)...(19): siRNA sense strand
gaacacaagucuccaaaac

SEQ ID NO: 2093491 - RNA, 19 nt, Homo sapiens
  misc_RNA (1)...(19): siRNA sense strand
gggcaucggcugauuugaa

SEQ ID NO: 2093492 - RNA, 19 nt, Homo sapiens
  misc_RNA (1)...(19): siRNA sense strand
ccaaaacucuuaacagugu

SEQ ID NO: 2093493 - RNA, 19 nt, Homo sapiens
  misc_RNA (1)...(19): siRNA sense strand
ccagaaacaccucucagaa

SEQ ID NO: 2093494 - RNA, 19 nt, Homo sapiens
  misc_RNA (1)...(19): siRNA sense strand
gauccagaguauaagaaga

SEQ ID NO: 2093495 - RNA, 19 nt, Homo sapiens
  misc_RNA (1)...(19): siRNA sense strand
guaccaggauaaauuacau

SEQ ID NO: 2093496 - RNA, 19 nt, Homo sapiens
  misc_RNA (1)...(19): siRNA sense strand
gcaagaauggcagcagaaa

SEQ ID NO: 2093497 - RNA, 19 nt, Homo sapiens
  misc_RNA (1)...(19): siRNA sense strand
ccaacgagaacuagaagaa

SEQ ID NO: 2093498 - RNA, 19 nt, Homo sapiens
  misc_RNA (1)...(19): siRNA sense strand
gaaggaaagaacuuacuag

SEQ ID NO: 2093499 - RNA, 19 nt, Homo sapiens
  misc_RNA (1)...(19): siRNA sense strand
gaauaucugaugaguuugu

SEQ ID NO: 2093500 - RNA, 19 nt, Homo sapiens
  misc_RNA (1)...(19): siRNA sense strand
gagaucugcucccgcuaug

SEQ ID NO: 2093501 - RNA, 19 nt, Homo sapiens
  misc_RNA (1)...(19): siRNA sense strand
aagaagaggauccagagua

SEQ ID NO: 2093502 - RNA, 19 nt, Homo sapiens
  misc_RNA (1)...(19): siRNA sense strand
uaaagauacuggcuuccau

SEQ ID NO: 2093503 - RNA, 19 nt, Homo sapiens
  misc_RNA (1)...(19): siRNA sense strand
guaagucaccaguaagaug

SEQ ID NO: 2093504 - RNA, 19 nt, Homo sapiens
  misc_RNA (1)...(19): siRNA sense strand
gcugagagacuuucuuaag

SEQ ID NO: 2093505 - RNA, 19 nt, Homo sapiens
  misc_RNA (1)...(19): siRNA sense strand
aggauuauauucgcuguaa

SEQ ID NO: 2093506 - RNA, 19 nt, Homo sapiens
  misc_RNA (1)...(19): siRNA sense strand
ugaggaaagugaagaagag

SEQ ID NO: 2093507 - RNA, 19 nt, Homo sapiens
  misc_RNA (1)...(19): siRNA sense strand
caacgagaacuagaagaaa

SEQ ID NO: 2093508 - RNA, 19 nt, Homo sapiens
  misc_RNA (1)...(19): siRNA sense strand
gagcucaucaacaauaugu

SEQ ID NO: 2093509 - RNA, 19 nt, Homo sapiens
  misc_RNA (1)...(19): siRNA sense strand
ucaaagaaaggccaaagug

SEQ ID NO: 2093510 - RNA, 19 nt, Homo sapiens
  misc_RNA (1)...(19): siRNA sense strand
agaggccacugcuauuuga

SEQ ID NO: 2093511 - RNA, 19 nt, Homo sapiens
  misc_RNA (1)...(19): siRNA sense strand
cgaagcagaugaagaaaau

SEQ ID NO: 2093512 - RNA, 19 nt, Homo sapiens
  misc_RNA (1)...(19): siRNA sense strand
aaucagauaucgaaauggu

SEQ ID NO: 2093513 - RNA, 19 nt, Homo sapiens
  misc_RNA (1)...(19): siRNA sense strand
gaugaacaugcaccgauaa

SEQ ID NO: 2093514 - RNA, 19 nt, Homo sapiens
  misc_RNA (1)...(19): siRNA sense strand
caacagccagugcacauuc

SEQ ID NO: 2093515 - RNA, 19 nt, Homo sapiens
  misc_RNA (1)...(19): siRNA sense strand
aaagaggccacugcuauuu

SEQ ID NO: 2093516 - RNA, 19 nt, Homo sapiens
  misc_RNA (1)...(19): siRNA sense strand
ugagagcccaggagcauuu

SEQ ID NO: 2093517 - RNA, 19 nt, Homo sapiens
  misc_RNA (1)...(19): siRNA sense strand
aaagaaggaagaaacgaaa

SEQ ID NO: 2093518 - RNA, 19 nt, Homo sapiens
  misc_RNA (1)...(19): siRNA sense strand
ucaacaauauguggacaga

SEQ ID NO: 2093519 - RNA, 19 nt, Homo sapiens
  misc_RNA (1)...(19): siRNA sense strand
gcuaugaggacuuugugaa

SEQ ID NO: 2093520 - RNA, 19 nt, Homo sapiens
  misc_RNA (1)...(19): siRNA sense strand
aaacaccucucagaacaca

SEQ ID NO: 2093521 - RNA, 19 nt, Homo sapiens
  misc_RNA (1)...(19): siRNA sense strand
caucuccucugccuuguag

SEQ ID NO: 2093522 - RNA, 19 nt, Homo sapiens
  misc_RNA (1)...(19): siRNA sense strand
ugaaggaaagaacuuacua

SEQ ID NO: 2093523 - RNA, 19 nt, Homo sapiens
  misc_RNA (1)...(19): siRNA sense strand
ggauuauauucgcuguaaa

SEQ ID NO: 2093524 - RNA, 19 nt, Homo sapiens
  misc_RNA (1)...(19): siRNA sense strand
ggacagacuuuuguguuga

SEQ ID NO: 2093525 - RNA, 19 nt, Homo sapiens
  misc_RNA (1)...(19): siRNA sense strand
gaaaauguaccaggauaaa

SEQ ID NO: 2093526 - RNA, 19 nt, Homo sapiens
  misc_RNA (1)...(19): siRNA sense strand
gaugauaagagaacagaag

SEQ ID NO: 2093527 - RNA, 19 nt, Homo sapiens
  misc_RNA (1)...(19): siRNA sense strand
aaggagcucaucaacaaua

SEQ ID NO: 2093528 - RNA, 19 nt, Homo sapiens
  misc_RNA (1)...(19): siRNA sense strand
gauggccacuuuauugacu

SEQ ID NO: 2093529 - RNA, 19 nt, Homo sapiens
  misc_RNA (1)...(19): siRNA sense strand
gaacuagaagaaagagaag

SEQ ID NO: 2093530 - RNA, 19 nt, Homo sapiens
  misc_RNA (1)...(19): siRNA sense strand
gcaguuaccuuuaauucuu

SEQ ID NO: 2093531 - RNA, 19 nt, Homo sapiens
  misc_RNA (1)...(19): siRNA sense strand
uaacaaaucugcccuugga

SEQ ID NO: 2093532 - RNA, 19 nt, Homo sapiens
  misc_RNA (1)...(19): siRNA sense strand
gaaauggucuccaguuugg

SEQ ID NO: 2093533 - RNA, 19 nt, Homo sapiens
  misc_RNA (1)...(19): siRNA sense strand
ggagaagguuccugaguug

SEQ ID NO: 2093534 - RNA, 19 nt, Homo sapiens
  misc_RNA (1)...(19): siRNA sense strand
gaaaaugguuaaucaguug

SEQ ID NO: 2093535 - RNA, 19 nt, Homo sapiens
  misc_RNA (1)...(19): siRNA sense strand
ccaaguuguugcagcauuu

SEQ ID NO: 2093536 - RNA, 19 nt, Homo sapiens
  misc_RNA (1)...(19): siRNA sense strand
gcacugcagaugucacuuu

SEQ ID NO: 2093537 - RNA, 19 nt, Homo sapiens
  misc_RNA (1)...(19): siRNA sense strand
cugcagaugucacuuuauu

SEQ ID NO: 2093538 - RNA, 19 nt, Homo sapiens
  misc_RNA (1)...(19): siRNA sense strand
ggaaaaugguuaaucaguu

SEQ ID NO: 2093539 - RNA, 19 nt, Homo sapiens
  misc_RNA (1)...(19): siRNA sense strand
gcaaacagaggagacauga

SEQ ID NO: 2093540 - RNA, 19 nt, Homo sapiens
  misc_RNA (1)...(19): siRNA sense strand
aaacagaggagacaugaga

SEQ ID NO: 2093541 - RNA, 19 nt, Homo sapiens
  misc_RNA (1)...(19): siRNA sense strand
caucuucacucucuuccuu

SEQ ID NO: 2093542 - RNA, 19 nt, Homo sapiens
  misc_RNA (1)...(19): siRNA sense strand
cauaucaucuucacucucu

SEQ ID NO: 2093543 - RNA, 19 nt, Homo sapiens
  misc_RNA (1)...(19): siRNA sense strand
ggagacaugagaaggauga

SEQ ID NO: 2093544 - RNA, 19 nt, Homo sapiens
  misc_RNA (1)...(19): siRNA sense strand
cuauugcaguuaccuuuaa

SEQ ID NO: 2093545 - RNA, 19 nt, Homo sapiens
  misc_RNA (1)...(19): siRNA sense strand
cacugcagaugucacuuua

SEQ ID NO: 2093546 - RNA, 19 nt, Homo sapiens
  misc_RNA (1)...(19): siRNA sense strand
ggucauguauagaagagau

SEQ ID NO: 2093547 - RNA, 19 nt, Homo sapiens
  misc_RNA (1)...(19): siRNA sense strand
gaggagacaugagaaggau

SEQ ID NO: 2093548 - RNA, 19 nt, Homo sapiens
  misc_RNA (1)...(19): siRNA sense strand
gaucacuguuaucauccua

SEQ ID NO: 2093549 - RNA, 19 nt, Homo sapiens
  misc_RNA (1)...(19): siRNA sense strand
gcagaugucacuuuauuuu

SEQ ID NO: 2093550 - RNA, 19 nt, Homo sapiens
  misc_RNA (1)...(19): siRNA sense strand
uaaugaaggccuaacaaau

SEQ ID NO: 2093551 - RNA, 19 nt, Homo sapiens
  misc_RNA (1)...(19): siRNA sense strand
ugaaauggucuccaguuug

SEQ ID NO: 2093552 - RNA, 19 nt, Homo sapiens
  misc_RNA (1)...(19): siRNA sense strand
gaccggcucucugcaaaca

SEQ ID NO: 2093553 - RNA, 19 nt, Homo sapiens
  misc_RNA (1)...(19): siRNA sense strand
ugggugagcagcauuauga

SEQ ID NO: 2093554 - RNA, 19 nt, Homo sapiens
  misc_RNA (1)...(19): siRNA sense strand
guuaaucaguuggcaguuc

SEQ ID NO: 2093555 - RNA, 19 nt, Homo sapiens
  misc_RNA (1)...(19): siRNA sense strand
aaugaaggccuaacaaauc

SEQ ID NO: 2093556 - RNA, 19 nt, Homo sapiens
  misc_RNA (1)...(19): siRNA sense strand
augaaauggucuccaguuu

SEQ ID NO: 2093557 - RNA, 19 nt, Homo sapiens
  misc_RNA (1)...(19): siRNA sense strand
uuaaugaaggccuaacaaa

SEQ ID NO: 2093558 - RNA, 19 nt, Homo sapiens
  misc_RNA (1)...(19): siRNA sense strand
guuguugcagcauuucuua

SEQ ID NO: 2093559 - RNA, 19 nt, Homo sapiens
  misc_RNA (1)...(19): siRNA sense strand
gaagccauccgguuguauc

SEQ ID NO: 2093560 - RNA, 19 nt, Homo sapiens
  misc_RNA (1)...(19): siRNA sense strand
gaggucauguauagaagag

SEQ ID NO: 2093561 - RNA, 19 nt, Homo sapiens
  misc_RNA (1)...(19): siRNA sense strand
ugcagcauuucuuaccuua

SEQ ID NO: 2093562 - RNA, 19 nt, Homo sapiens
  misc_RNA (1)...(19): siRNA sense strand
acaaaucugcccuuggaaa

SEQ ID NO: 2093563 - RNA, 19 nt, Homo sapiens
  misc_RNA (1)...(19): siRNA sense strand
ucacuguuaucauccuaau

SEQ ID NO: 2093564 - RNA, 19 nt, Homo sapiens
  misc_RNA (1)...(19): siRNA sense strand
uggguaaccuacaggagaa

SEQ ID NO: 2093565 - RNA, 19 nt, Homo sapiens
  misc_RNA (1)...(19): siRNA sense strand
ucauugugaucacuguuau

SEQ ID NO: 2093566 - RNA, 19 nt, Homo sapiens
  misc_RNA (1)...(19): siRNA sense strand
caaauucauugugaucacu

SEQ ID NO: 2093567 - RNA, 19 nt, Homo sapiens
  misc_RNA (1)...(19): siRNA sense strand
ucuauugcaguuaccuuua

SEQ ID NO: 2093568 - RNA, 19 nt, Homo sapiens
  misc_RNA (1)...(19): siRNA sense strand
ucacucucuuccuugcuuu

SEQ ID NO: 2093569 - RNA, 19 nt, Homo sapiens
  misc_RNA (1)...(19): siRNA sense strand
gcagcauuucuuaccuuaa

SEQ ID NO: 2093570 - RNA, 19 nt, Homo sapiens
  misc_RNA (1)...(19): siRNA sense strand
ucaguuggcaguucguuuc

SEQ ID NO: 2093571 - RNA, 19 nt, Homo sapiens
  misc_RNA (1)...(19): siRNA sense strand
uugaagccauccgguugua

SEQ ID NO: 2093572 - RNA, 19 nt, Homo sapiens
  misc_RNA (1)...(19): siRNA sense strand
ggugagcagcauuaugaug

SEQ ID NO: 2093573 - RNA, 19 nt, Homo sapiens
  misc_RNA (1)...(19): siRNA sense strand
cuacguggguaaccuacag

SEQ ID NO: 2093574 - RNA, 19 nt, Homo sapiens
  misc_RNA (1)...(19): siRNA sense strand
gggcuacguggguaaccua

SEQ ID NO: 2093575 - RNA, 19 nt, Homo sapiens
  misc_RNA (1)...(19): siRNA sense strand
augaaggccuaacaaaucu

SEQ ID NO: 2093576 - RNA, 19 nt, Homo sapiens
  misc_RNA (1)...(19): siRNA sense strand
cguguucagugauuccaau

SEQ ID NO: 2093577 - RNA, 19 nt, Homo sapiens
  misc_RNA (1)...(19): siRNA sense strand
caaaucugcccuuggaaaa

SEQ ID NO: 2093578 - RNA, 19 nt, Homo sapiens
  misc_RNA (1)...(19): siRNA sense strand
aaugaaauggucuccaguu

SEQ ID NO: 2093579 - RNA, 19 nt, Homo sapiens
  misc_RNA (1)...(19): siRNA sense strand
ccaaugaggguccggaaaa

SEQ ID NO: 2093580 - RNA, 19 nt, Homo sapiens
  misc_RNA (1)...(19): siRNA sense strand
auuaugaugcuucacauga

SEQ ID NO: 2093581 - RNA, 19 nt, Homo sapiens
  misc_RNA (1)...(19): siRNA sense strand
gguuguaucugggcuacgu

SEQ ID NO: 2093582 - RNA, 19 nt, Homo sapiens
  misc_RNA (1)...(19): siRNA sense strand
ccugacuacuacaaauuca

SEQ ID NO: 2093583 - RNA, 19 nt, Homo sapiens
  misc_RNA (1)...(19): siRNA sense strand
uccaaguuguugcagcauu

SEQ ID NO: 2093584 - RNA, 19 nt, Homo sapiens
  misc_RNA (1)...(19): siRNA sense strand
gcaguuaccuuuaauucuu

SEQ ID NO: 2093585 - RNA, 19 nt, Homo sapiens
  misc_RNA (1)...(19): siRNA sense strand
uaacaaaucugcccuugga

SEQ ID NO: 2093586 - RNA, 19 nt, Homo sapiens
  misc_RNA (1)...(19): siRNA sense strand
gaaauggucuccaguuugg

SEQ ID NO: 2093587 - RNA, 19 nt, Homo sapiens
  misc_RNA (1)...(19): siRNA sense strand
ggagaagguuccugaguug

SEQ ID NO: 2093588 - RNA, 19 nt, Homo sapiens
  misc_RNA (1)...(19): siRNA sense strand
gaaaaugguuaaucaguug

SEQ ID NO: 2093589 - RNA, 19 nt, Homo sapiens
  misc_RNA (1)...(19): siRNA sense strand
ccaaguuguugcagcauuu

SEQ ID NO: 2093590 - RNA, 19 nt, Homo sapiens
  misc_RNA (1)...(19): siRNA sense strand
gcacugcagaugucacuuu

SEQ ID NO: 2093591 - RNA, 19 nt, Homo sapiens
  misc_RNA (1)...(19): siRNA sense strand
cugcagaugucacuuuauu

SEQ ID NO: 2093592 - RNA, 19 nt, Homo sapiens
  misc_RNA (1)...(19): siRNA sense strand
ggaaaaugguuaaucaguu

SEQ ID NO: 2093593 - RNA, 19 nt, Homo sapiens
  misc_RNA (1)...(19): siRNA sense strand
gcaaacagaggagacauga

SEQ ID NO: 2093594 - RNA, 19 nt, Homo sapiens
  misc_RNA (1)...(19): siRNA sense strand
aaacagaggagacaugaga

SEQ ID NO: 2093595 - RNA, 19 nt, Homo sapiens
  misc_RNA (1)...(19): siRNA sense strand
caucuucacucucuuccuu

SEQ ID NO: 2093596 - RNA, 19 nt, Homo sapiens
  misc_RNA (1)...(19): siRNA sense strand
cauaucaucuucacucucu

SEQ ID NO: 2093597 - RNA, 19 nt, Homo sapiens
  misc_RNA (1)...(19): siRNA sense strand
ggagacaugagaaggauga

SEQ ID NO: 2093598 - RNA, 19 nt, Homo sapiens
  misc_RNA (1)...(19): siRNA sense strand
cuauugcaguuaccuuuaa

SEQ ID NO: 2093599 - RNA, 19 nt, Homo sapiens
  misc_RNA (1)...(19): siRNA sense strand
cacugcagaugucacuuua

SEQ ID NO: 2093600 - RNA, 19 nt, Homo sapiens
  misc_RNA (1)...(19): siRNA sense strand
ggucauguauagaagagau

SEQ ID NO: 2093601 - RNA, 19 nt, Homo sapiens
  misc_RNA (1)...(19): siRNA sense strand
gaggagacaugagaaggau

SEQ ID NO: 2093602 - RNA, 19 nt, Homo sapiens
  misc_RNA (1)...(19): siRNA sense strand
gaucacuguuaucauccua

SEQ ID NO: 2093603 - RNA, 19 nt, Homo sapiens
  misc_RNA (1)...(19): siRNA sense strand
gcagaugucacuuuauuuu

SEQ ID NO: 2093604 - RNA, 19 nt, Homo sapiens
  misc_RNA (1)...(19): siRNA sense strand
uaaugaaggccuaacaaau

SEQ ID NO: 2093605 - RNA, 19 nt, Homo sapiens
  misc_RNA (1)...(19): siRNA sense strand
ugaaauggucuccaguuug

SEQ ID NO: 2093606 - RNA, 19 nt, Homo sapiens
  misc_RNA (1)...(19): siRNA sense strand
gaccggcucucugcaaaca

SEQ ID NO: 2093607 - RNA, 19 nt, Homo sapiens
  misc_RNA (1)...(19): siRNA sense strand
ugggugagcagcauuauga

SEQ ID NO: 2093608 - RNA, 19 nt, Homo sapiens
  misc_RNA (1)...(19): siRNA sense strand
guuaaucaguuggcaguuc

SEQ ID NO: 2093609 - RNA, 19 nt, Homo sapiens
  misc_RNA (1)...(19): siRNA sense strand
aaugaaggccuaacaaauc

SEQ ID NO: 2093610 - RNA, 19 nt, Homo sapiens
  misc_RNA (1)...(19): siRNA sense strand
augaaauggucuccaguuu

SEQ ID NO: 2093611 - RNA, 19 nt, Homo sapiens
  misc_RNA (1)...(19): siRNA sense strand
uuaaugaaggccuaacaaa

SEQ ID NO: 2093612 - RNA, 19 nt, Homo sapiens
  misc_RNA (1)...(19): siRNA sense strand
guuguugcagcauuucuua

SEQ ID NO: 2093613 - RNA, 19 nt, Homo sapiens
  misc_RNA (1)...(19): siRNA sense strand
gaagccauccgguuguauc

SEQ ID NO: 2093614 - RNA, 19 nt, Homo sapiens
  misc_RNA (1)...(19): siRNA sense strand
gaggucauguauagaagag

SEQ ID NO: 2093615 - RNA, 19 nt, Homo sapiens
  misc_RNA (1)...(19): siRNA sense strand
ugcagcauuucuuaccuua

SEQ ID NO: 2093616 - RNA, 19 nt, Homo sapiens
  misc_RNA (1)...(19): siRNA sense strand
acaaaucugcccuuggaaa

SEQ ID NO: 2093617 - RNA, 19 nt, Homo sapiens
  misc_RNA (1)...(19): siRNA sense strand
ucacuguuaucauccuaau

SEQ ID NO: 2093618 - RNA, 19 nt, Homo sapiens
  misc_RNA (1)...(19): siRNA sense strand
uggguaaccuacaggagaa

SEQ ID NO: 2093619 - RNA, 19 nt, Homo sapiens
  misc_RNA (1)...(19): siRNA sense strand
ucauugugaucacuguuau

SEQ ID NO: 2093620 - RNA, 19 nt, Homo sapiens
  misc_RNA (1)...(19): siRNA sense strand
caaauucauugugaucacu

SEQ ID NO: 2093621 - RNA, 19 nt, Homo sapiens
  misc_RNA (1)...(19): siRNA sense strand
ucuauugcaguuaccuuua

SEQ ID NO: 2093622 - RNA, 19 nt, Homo sapiens
  misc_RNA (1)...(19): siRNA sense strand
ucacucucuuccuugcuuu

SEQ ID NO: 2093623 - RNA, 19 nt, Homo sapiens
  misc_RNA (1)...(19): siRNA sense strand
gcagcauuucuuaccuuaa

SEQ ID NO: 2093624 - RNA, 19 nt, Homo sapiens
  misc_RNA (1)...(19): siRNA sense strand
ucaguuggcaguucguuuc

SEQ ID NO: 2093625 - RNA, 19 nt, Homo sapiens
  misc_RNA (1)...(19): siRNA sense strand
uugaagccauccgguugua

SEQ ID NO: 2093626 - RNA, 19 nt, Homo sapiens
  misc_RNA (1)...(19): siRNA sense strand
ggugagcagcauuaugaug

SEQ ID NO: 2093627 - RNA, 19 nt, Homo sapiens
  misc_RNA (1)...(19): siRNA sense strand
cuacguggguaaccuacag

SEQ ID NO: 2093628 - RNA, 19 nt, Homo sapiens
  misc_RNA (1)...(19): siRNA sense strand
gggcuacguggguaaccua

SEQ ID NO: 2093629 - RNA, 19 nt, Homo sapiens
  misc_RNA (1)...(19): siRNA sense strand
augaaggccuaacaaaucu

SEQ ID NO: 2093630 - RNA, 19 nt, Homo sapiens
  misc_RNA (1)...(19): siRNA sense strand
cguguucagugauuccaau

SEQ ID NO: 2093631 - RNA, 19 nt, Homo sapiens
  misc_RNA (1)...(19): siRNA sense strand
caaaucugcccuuggaaaa

SEQ ID NO: 2093632 - RNA, 19 nt, Homo sapiens
  misc_RNA (1)...(19): siRNA sense strand
aaugaaauggucuccaguu

SEQ ID NO: 2093633 - RNA, 19 nt, Homo sapiens
  misc_RNA (1)...(19): siRNA sense strand
ccaaugaggguccggaaaa

SEQ ID NO: 2093634 - RNA, 19 nt, Homo sapiens
  misc_RNA (1)...(19): siRNA sense strand
auuaugaugcuucacauga

SEQ ID NO: 2093635 - RNA, 19 nt, Homo sapiens
  misc_RNA (1)...(19): siRNA sense strand
gguuguaucugggcuacgu

SEQ ID NO: 2093636 - RNA, 19 nt, Homo sapiens
  misc_RNA (1)...(19): siRNA sense strand
ccugacuacuacaaauuca

SEQ ID NO: 2093637 - RNA, 19 nt, Homo sapiens
  misc_RNA (1)...(19): siRNA sense strand
uccaaguuguugcagcauu

SEQ ID NO: 2093638 - RNA, 19 nt, Homo sapiens
  misc_RNA (1)...(19): siRNA sense strand
gcacagaauucuaaagauu

SEQ ID NO: 2093639 - RNA, 19 nt, Homo sapiens
  misc_RNA (1)...(19): siRNA sense strand
gaccagaugugcagaggua

SEQ ID NO: 2093640 - RNA, 19 nt, Homo sapiens
  misc_RNA (1)...(19): siRNA sense strand
acacuacucuucguuauaa

SEQ ID NO: 2093641 - RNA, 19 nt, Homo sapiens
  misc_RNA (1)...(19): siRNA sense strand
gaugguggcuuucuuugga

SEQ ID NO: 2093642 - RNA, 19 nt, Homo sapiens
  misc_RNA (1)...(19): siRNA sense strand
gugcagagguaaugaauac

SEQ ID NO: 2093643 - RNA, 19 nt, Homo sapiens
  misc_RNA (1)...(19): siRNA sense strand
caucaaccaguuacuauuu

SEQ ID NO: 2093644 - RNA, 19 nt, Homo sapiens
  misc_RNA (1)...(19): siRNA sense strand
cagcagcacagaauucuaa

SEQ ID NO: 2093645 - RNA, 19 nt, Homo sapiens
  misc_RNA (1)...(19): siRNA sense strand
gaaagggcuuccuggucuu

SEQ ID NO: 2093646 - RNA, 19 nt, Homo sapiens
  misc_RNA (1)...(19): siRNA sense strand
gcuuugagguggcagaguu

SEQ ID NO: 2093647 - RNA, 19 nt, Homo sapiens
  misc_RNA (1)...(19): siRNA sense strand
guagaugguggcuuucuuu

SEQ ID NO: 2093648 - RNA, 19 nt, Homo sapiens
  misc_RNA (1)...(19): siRNA sense strand
ccucugggcuccuggaaug

SEQ ID NO: 2093649 - RNA, 19 nt, Homo sapiens
  misc_RNA (1)...(19): siRNA sense strand
cagcacagaauucuaaaga

SEQ ID NO: 2093650 - RNA, 19 nt, Homo sapiens
  misc_RNA (1)...(19): siRNA sense strand
gaagcuaucugcaaaaguc

SEQ ID NO: 2093651 - RNA, 19 nt, Homo sapiens
  misc_RNA (1)...(19): siRNA sense strand
gacaucaaccaguuacuau

SEQ ID NO: 2093652 - RNA, 19 nt, Homo sapiens
  misc_RNA (1)...(19): siRNA sense strand
ccacagaacaacacucauc

SEQ ID NO: 2093653 - RNA, 19 nt, Homo sapiens
  misc_RNA (1)...(19): siRNA sense strand
cugggaagcuaucugcaaa

SEQ ID NO: 2093654 - RNA, 19 nt, Homo sapiens
  misc_RNA (1)...(19): siRNA sense strand
ugacaucaaccaguuacua

SEQ ID NO: 2093655 - RNA, 19 nt, Homo sapiens
  misc_RNA (1)...(19): siRNA sense strand
gaagggccaucugccucaa

SEQ ID NO: 2093656 - RNA, 19 nt, Homo sapiens
  misc_RNA (1)...(19): siRNA sense strand
ccacagcagcacagaauuc

SEQ ID NO: 2093657 - RNA, 19 nt, Homo sapiens
  misc_RNA (1)...(19): siRNA sense strand
caccugcucucaacaccuu

SEQ ID NO: 2093658 - RNA, 19 nt, Homo sapiens
  misc_RNA (1)...(19): siRNA sense strand
agaagaacccagagacaga

SEQ ID NO: 2093659 - RNA, 19 nt, Homo sapiens
  misc_RNA (1)...(19): siRNA sense strand
uuccguagaugguggcuuu

SEQ ID NO: 2093660 - RNA, 19 nt, Homo sapiens
  misc_RNA (1)...(19): siRNA sense strand
cacagaauucuaaagauug

SEQ ID NO: 2093661 - RNA, 19 nt, Homo sapiens
  misc_RNA (1)...(19): siRNA sense strand
ucaggaaaccacuggauca

SEQ ID NO: 2093662 - RNA, 19 nt, Homo sapiens
  misc_RNA (1)...(19): siRNA sense strand
gguggcagaguuaacacua

SEQ ID NO: 2093663 - RNA, 19 nt, Homo sapiens
  misc_RNA (1)...(19): siRNA sense strand
gcucucacgguaaccauga

SEQ ID NO: 2093664 - RNA, 19 nt, Homo sapiens
  misc_RNA (1)...(19): siRNA sense strand
guaaugaauaccagggaau

SEQ ID NO: 2093665 - RNA, 19 nt, Homo sapiens
  misc_RNA (1)...(19): siRNA sense strand
gaugugcagagguaaugaa

SEQ ID NO: 2093666 - RNA, 19 nt, Homo sapiens
  misc_RNA (1)...(19): siRNA sense strand
gcugggaagcuaucugcaa

SEQ ID NO: 2093667 - RNA, 19 nt, Homo sapiens
  misc_RNA (1)...(19): siRNA sense strand
cguagaugguggcuuucuu

SEQ ID NO: 2093668 - RNA, 19 nt, Homo sapiens
  misc_RNA (1)...(19): siRNA sense strand
agaaccaccugcucucaac

SEQ ID NO: 2093669 - RNA, 19 nt, Homo sapiens
  misc_RNA (1)...(19): siRNA sense strand
ccacaauggccccaccuua

SEQ ID NO: 2093670 - RNA, 19 nt, Homo sapiens
  misc_RNA (1)...(19): siRNA sense strand
guuacuauuugacucuucu

SEQ ID NO: 2093671 - RNA, 19 nt, Homo sapiens
  misc_RNA (1)...(19): siRNA sense strand
ucagaagaacccagagaca

SEQ ID NO: 2093672 - RNA, 19 nt, Homo sapiens
  misc_RNA (1)...(19): siRNA sense strand
gaaccaccugcucucaaca

SEQ ID NO: 2093673 - RNA, 19 nt, Homo sapiens
  misc_RNA (1)...(19): siRNA sense strand
aacacuacucuucguuaua

SEQ ID NO: 2093674 - RNA, 19 nt, Homo sapiens
  misc_RNA (1)...(19): siRNA sense strand
aaaaguccaucugcagaaa

SEQ ID NO: 2093675 - RNA, 19 nt, Homo sapiens
  misc_RNA (1)...(19): siRNA sense strand
gggaaacauuugagaauua

SEQ ID NO: 2093676 - RNA, 19 nt, Homo sapiens
  misc_RNA (1)...(19): siRNA sense strand
caacaaagcuagugauuac

SEQ ID NO: 2093677 - RNA, 19 nt, Homo sapiens
  misc_RNA (1)...(19): siRNA sense strand
gaaacauacuugauucuga

SEQ ID NO: 2093678 - RNA, 19 nt, Homo sapiens
  misc_RNA (1)...(19): siRNA sense strand
ggaagaugaugaagaggua

SEQ ID NO: 2093679 - RNA, 19 nt, Homo sapiens
  misc_RNA (1)...(19): siRNA sense strand
caacauguuugcacaguuu

SEQ ID NO: 2093680 - RNA, 19 nt, Homo sapiens
  misc_RNA (1)...(19): siRNA sense strand
uaacugaacugcugaaagu

SEQ ID NO: 2093681 - RNA, 19 nt, Homo sapiens
  misc_RNA (1)...(19): siRNA sense strand
gaaaggaacugguaauagc

SEQ ID NO: 2093682 - RNA, 19 nt, Homo sapiens
  misc_RNA (1)...(19): siRNA sense strand
caaccuaccuugcugacua

SEQ ID NO: 2093683 - RNA, 19 nt, Homo sapiens
  misc_RNA (1)...(19): siRNA sense strand
gaaaucagagaccaauaua

SEQ ID NO: 2093684 - RNA, 19 nt, Homo sapiens
  misc_RNA (1)...(19): siRNA sense strand
guaaguacuuggaagaauu

SEQ ID NO: 2093685 - RNA, 19 nt, Homo sapiens
  misc_RNA (1)...(19): siRNA sense strand
gcaacucucugcagaaugu

SEQ ID NO: 2093686 - RNA, 19 nt, Homo sapiens
  misc_RNA (1)...(19): siRNA sense strand
cagagaaugugaacaguuu

SEQ ID NO: 2093687 - RNA, 19 nt, Homo sapiens
  misc_RNA (1)...(19): siRNA sense strand
gugaaacucugcuaaagaa

SEQ ID NO: 2093688 - RNA, 19 nt, Homo sapiens
  misc_RNA (1)...(19): siRNA sense strand
guaaauagagccuacauug

SEQ ID NO: 2093689 - RNA, 19 nt, Homo sapiens
  misc_RNA (1)...(19): siRNA sense strand
ggauuucucuccaguuuau

SEQ ID NO: 2093690 - RNA, 19 nt, Homo sapiens
  misc_RNA (1)...(19): siRNA sense strand
aaagaaaccuggauaacau

SEQ ID NO: 2093691 - RNA, 19 nt, Homo sapiens
  misc_RNA (1)...(19): siRNA sense strand
caacaacccagaauaggua

SEQ ID NO: 2093692 - RNA, 19 nt, Homo sapiens
  misc_RNA (1)...(19): siRNA sense strand
caucuaagcucaacugaag

SEQ ID NO: 2093693 - RNA, 19 nt, Homo sapiens
  misc_RNA (1)...(19): siRNA sense strand
gcaacaaagcuagugauua

SEQ ID NO: 2093694 - RNA, 19 nt, Homo sapiens
  misc_RNA (1)...(19): siRNA sense strand
ccgcaaacauucagacaaa

SEQ ID NO: 2093695 - RNA, 19 nt, Homo sapiens
  misc_RNA (1)...(19): siRNA sense strand
ggagaaauccuguaaguac

SEQ ID NO: 2093696 - RNA, 19 nt, Homo sapiens
  misc_RNA (1)...(19): siRNA sense strand
gcucaggucuguuuaugau

SEQ ID NO: 2093697 - RNA, 19 nt, Homo sapiens
  misc_RNA (1)...(19): siRNA sense strand
gcauuauccugcacugaaa

SEQ ID NO: 2093698 - RNA, 19 nt, Homo sapiens
  misc_RNA (1)...(19): siRNA sense strand
gaauuuaucaccaacauca

SEQ ID NO: 2093699 - RNA, 19 nt, Homo sapiens
  misc_RNA (1)...(19): siRNA sense strand
gagcuuguucagauuauua

SEQ ID NO: 2093700 - RNA, 19 nt, Homo sapiens
  misc_RNA (1)...(19): siRNA sense strand
gagcaacucucugcagaau

SEQ ID NO: 2093701 - RNA, 19 nt, Homo sapiens
  misc_RNA (1)...(19): siRNA sense strand
caauucccauuucaagaua

SEQ ID NO: 2093702 - RNA, 19 nt, Homo sapiens
  misc_RNA (1)...(19): siRNA sense strand
gaagcagugucgacuacaa

SEQ ID NO: 2093703 - RNA, 19 nt, Homo sapiens
  misc_RNA (1)...(19): siRNA sense strand
ugaaguugaugacaugauu

SEQ ID NO: 2093704 - RNA, 19 nt, Homo sapiens
  misc_RNA (1)...(19): siRNA sense strand
guacuaguccgaagucuga

SEQ ID NO: 2093705 - RNA, 19 nt, Homo sapiens
  misc_RNA (1)...(19): siRNA sense strand
gaagagauuuauaccaacu

SEQ ID NO: 2093706 - RNA, 19 nt, Homo sapiens
  misc_RNA (1)...(19): siRNA sense strand
cuaaagaagugggcaggua

SEQ ID NO: 2093707 - RNA, 19 nt, Homo sapiens
  misc_RNA (1)...(19): siRNA sense strand
gcaaggugaugguggacaa

SEQ ID NO: 2093708 - RNA, 19 nt, Homo sapiens
  misc_RNA (1)...(19): siRNA sense strand
gagagcauccgcaaacauu

SEQ ID NO: 2093709 - RNA, 19 nt, Homo sapiens
  misc_RNA (1)...(19): siRNA sense strand
caagugacggauacuaaua

SEQ ID NO: 2093710 - RNA, 19 nt, Homo sapiens
  misc_RNA (1)...(19): siRNA sense strand
gaaauccuguaaguacuug

SEQ ID NO: 2093711 - RNA, 19 nt, Homo sapiens
  misc_RNA (1)...(19): siRNA sense strand
ucagaaacauacuugauuc

SEQ ID NO: 2093712 - RNA, 19 nt, Homo sapiens
  misc_RNA (1)...(19): siRNA sense strand
ggaauccaaccuagcauuu

SEQ ID NO: 2093713 - RNA, 19 nt, Homo sapiens
  misc_RNA (1)...(19): siRNA sense strand
cgaggaagaugaugaagag

SEQ ID NO: 2093714 - RNA, 19 nt, Homo sapiens
  misc_RNA (1)...(19): siRNA sense strand
gagaggagaagcccagaaa

SEQ ID NO: 2093715 - RNA, 19 nt, Homo sapiens
  misc_RNA (1)...(19): siRNA sense strand
caacuuaaaccagaagauu

SEQ ID NO: 2093716 - RNA, 19 nt, Homo sapiens
  misc_RNA (1)...(19): siRNA sense strand
cuacaguccuauaccagua

SEQ ID NO: 2093717 - RNA, 19 nt, Homo sapiens
  misc_RNA (1)...(19): siRNA sense strand
gguugaagaucacauuuua

SEQ ID NO: 2093718 - RNA, 19 nt, Homo sapiens
  misc_RNA (1)...(19): siRNA sense strand
caaagaaaccuggauaaca

SEQ ID NO: 2093719 - RNA, 19 nt, Homo sapiens
  misc_RNA (1)...(19): siRNA sense strand
cgacuacaacagagaaaua

SEQ ID NO: 2093720 - RNA, 19 nt, Homo sapiens
  misc_RNA (1)...(19): siRNA sense strand
ugacggauacuaauagaaa

SEQ ID NO: 2093721 - RNA, 19 nt, Homo sapiens
  misc_RNA (1)...(19): siRNA sense strand
ugaagaacauggacguuuc

SEQ ID NO: 2093722 - RNA, 19 nt, Homo sapiens
  misc_RNA (1)...(19): siRNA sense strand
caacuuggacgucagagaa

SEQ ID NO: 2093723 - RNA, 19 nt, Homo sapiens
  misc_RNA (1)...(19): siRNA sense strand
acccagggcuuaguaaaua

SEQ ID NO: 2093724 - RNA, 19 nt, Homo sapiens
  misc_RNA (1)...(19): siRNA sense strand
gcaagaggaaaucuaagaa

SEQ ID NO: 2093725 - RNA, 19 nt, Homo sapiens
  misc_RNA (1)...(19): siRNA sense strand
gagcggauccugcgagaga

SEQ ID NO: 2093726 - RNA, 19 nt, Homo sapiens
  misc_RNA (1)...(19): siRNA sense strand
gggaaaggaacugguaaua

SEQ ID NO: 2093727 - RNA, 19 nt, Homo sapiens
  misc_RNA (1)...(19): siRNA sense strand
gauacuagccgcaagaaca

SEQ ID NO: 2093728 - RNA, 19 nt, Homo sapiens
  misc_RNA (1)...(19): siRNA sense strand
guaggacaauucccauuuc

SEQ ID NO: 2093729 - RNA, 19 nt, Homo sapiens
  misc_RNA (1)...(19): siRNA sense strand
caaaccuuguguuagauuu

SEQ ID NO: 2093730 - RNA, 19 nt, Homo sapiens
  misc_RNA (1)...(19): siRNA sense strand
uaaauagagccuacauuga

SEQ ID NO: 2093731 - RNA, 19 nt, Homo sapiens
  misc_RNA (1)...(19): siRNA sense strand
ggaaacauuugagaauuac

SEQ ID NO: 2093732 - RNA, 19 nt, Homo sapiens
  misc_RNA (1)...(19): siRNA sense strand
guagcaagaggaaaucuaa

SEQ ID NO: 2093733 - RNA, 19 nt, Homo sapiens
  misc_RNA (1)...(19): siRNA sense strand
cagcggacauuacgcagaa

SEQ ID NO: 2093734 - RNA, 19 nt, Homo sapiens
  misc_RNA (1)...(19): siRNA sense strand
ggaagaauauugggcuuac

SEQ ID NO: 2093735 - RNA, 19 nt, Homo sapiens
  misc_RNA (1)...(19): siRNA sense strand
ggaaaggaacugguaauag

SEQ ID NO: 2093736 - RNA, 19 nt, Homo sapiens
  misc_RNA (1)...(19): siRNA sense strand
uaucuacgcuugucugaag

SEQ ID NO: 2093737 - RNA, 19 nt, Homo sapiens
  misc_RNA (1)...(19): siRNA sense strand
ggacaauucccauuucaag

SEQ ID NO: 2093738 - RNA, 19 nt, Homo sapiens
  misc_RNA (1)...(19): siRNA sense strand
caacuacaguccuauacca

SEQ ID NO: 2093739 - RNA, 19 nt, Homo sapiens
  misc_RNA (1)...(19): siRNA sense strand
caagaggaaaucuaagaaa

SEQ ID NO: 2093740 - RNA, 19 nt, Homo sapiens
  misc_RNA (1)...(19): siRNA sense strand
gguaggacaauucccauuu

SEQ ID NO: 2093741 - RNA, 19 nt, Homo sapiens
  misc_RNA (1)...(19): siRNA sense strand
caaguaagccacuaucgau

SEQ ID NO: 2093742 - RNA, 19 nt, Homo sapiens
  misc_RNA (1)...(19): siRNA sense strand
gcucugacccugcuugaga

SEQ ID NO: 2093743 - RNA, 19 nt, Homo sapiens
  misc_RNA (1)...(19): siRNA sense strand
gaagauugaccaguuccua

SEQ ID NO: 2093744 - RNA, 19 nt, Homo sapiens
  misc_RNA (1)...(19): siRNA sense strand
gaauuuaucuacgcuuguc

SEQ ID NO: 2093745 - RNA, 19 nt, Homo sapiens
  misc_RNA (1)...(19): siRNA sense strand
aaauagagccuacauugau

SEQ ID NO: 2093746 - RNA, 19 nt, Homo sapiens
  misc_RNA (1)...(19): siRNA sense strand
ggagaagcccagaaacuca

SEQ ID NO: 2093747 - RNA, 19 nt, Homo sapiens
  misc_RNA (1)...(19): siRNA sense strand
guguaugguuucccuguaa

SEQ ID NO: 2093748 - RNA, 19 nt, Homo sapiens
  misc_RNA (1)...(19): siRNA sense strand
caggaauucuggauguuga

SEQ ID NO: 2093749 - RNA, 19 nt, Homo sapiens
  misc_RNA (1)...(19): siRNA sense strand
cagcaaagaaaccuggaua

SEQ ID NO: 2093750 - RNA, 19 nt, Homo sapiens
  misc_RNA (1)...(19): siRNA sense strand
auacagagauagaaaguac

SEQ ID NO: 2093751 - RNA, 19 nt, Homo sapiens
  misc_RNA (1)...(19): siRNA sense strand
gagaaauccuguaaguacu

SEQ ID NO: 2093752 - RNA, 19 nt, Homo sapiens
  misc_RNA (1)...(19): siRNA sense strand
gacaugcuguuagaaauca

SEQ ID NO: 2093753 - RNA, 19 nt, Homo sapiens
  misc_RNA (1)...(19): siRNA sense strand
guacuucaaccuccaucua

SEQ ID NO: 2093754 - RNA, 19 nt, Homo sapiens
  misc_RNA (1)...(19): siRNA sense strand
ccagaagauugaccaguuc

SEQ ID NO: 2093755 - RNA, 19 nt, Homo sapiens
  misc_RNA (1)...(19): siRNA sense strand
cagcugaagaagagauuua

SEQ ID NO: 2093756 - RNA, 19 nt, Homo sapiens
  misc_RNA (1)...(19): siRNA sense strand
caagauauagaacuggaaa

SEQ ID NO: 2093757 - RNA, 19 nt, Homo sapiens
  misc_RNA (1)...(19): siRNA sense strand
ugccacuguugauaaauua

SEQ ID NO: 2093758 - RNA, 19 nt, Homo sapiens
  misc_RNA (1)...(19): siRNA sense strand
uaacaagugaagagaugua

SEQ ID NO: 2093759 - RNA, 19 nt, Homo sapiens
  misc_RNA (1)...(19): siRNA sense strand
gaaacucugcuaaagaagu

SEQ ID NO: 2093760 - RNA, 19 nt, Homo sapiens
  misc_RNA (1)...(19): siRNA sense strand
ucagagaccaauauaguga

SEQ ID NO: 2093761 - RNA, 19 nt, Homo sapiens
  misc_RNA (1)...(19): siRNA sense strand
gguguaugguuucccugua

SEQ ID NO: 2093762 - RNA, 19 nt, Homo sapiens
  misc_RNA (1)...(19): siRNA sense strand
cgggaaacauuugagaauu

SEQ ID NO: 2093763 - RNA, 19 nt, Homo sapiens
  misc_RNA (1)...(19): siRNA sense strand
gaauagguagcaagaggaa

SEQ ID NO: 2093764 - RNA, 19 nt, Homo sapiens
  misc_RNA (1)...(19): siRNA sense strand
gaagcaagcccagcagcaa

SEQ ID NO: 2093765 - RNA, 19 nt, Homo sapiens
  misc_RNA (1)...(19): siRNA sense strand
gaaaguacuaguccgaagu

SEQ ID NO: 2093766 - RNA, 19 nt, Homo sapiens
  misc_RNA (1)...(19): siRNA sense strand
gcaagcauuuagccacauc

SEQ ID NO: 2093767 - RNA, 19 nt, Homo sapiens
  misc_RNA (1)...(19): siRNA sense strand
gaagaagagauuuauacca

SEQ ID NO: 2093768 - RNA, 19 nt, Homo sapiens
  misc_RNA (1)...(19): siRNA sense strand
aaacucugcuaaagaagug

SEQ ID NO: 2093769 - RNA, 19 nt, Homo sapiens
  misc_RNA (1)...(19): siRNA sense strand
gagccuacauugaugaacu

SEQ ID NO: 2093770 - RNA, 19 nt, Homo sapiens
  misc_RNA (1)...(19): siRNA sense strand
caucuaacaugcaugaaac

SEQ ID NO: 2093771 - RNA, 19 nt, Homo sapiens
  misc_RNA (1)...(19): siRNA sense strand
gaagaacauggacguuuca

SEQ ID NO: 2093772 - RNA, 19 nt, Homo sapiens
  misc_RNA (1)...(19): siRNA sense strand
caagugaagagauguacaa

SEQ ID NO: 2093773 - RNA, 19 nt, Homo sapiens
  misc_RNA (1)...(19): siRNA sense strand
ugacaacuacaguccuaua

SEQ ID NO: 2093774 - RNA, 19 nt, Homo sapiens
  misc_RNA (1)...(19): siRNA sense strand
gaugaacugugggaaaugg

SEQ ID NO: 2093775 - RNA, 19 nt, Homo sapiens
  misc_RNA (1)...(19): siRNA sense strand
aagaagggcucccaucaca

SEQ ID NO: 2093776 - RNA, 19 nt, Homo sapiens
  misc_RNA (1)...(19): siRNA sense strand
gaagggcucccaucacauc

SEQ ID NO: 2093777 - RNA, 19 nt, Homo sapiens
  misc_RNA (1)...(19): siRNA sense strand
ccacgaagcaggccaaugg

SEQ ID NO: 2093778 - RNA, 19 nt, Homo sapiens
  misc_RNA (1)...(19): siRNA sense strand
gggacccucuccauuucua

SEQ ID NO: 2093779 - RNA, 19 nt, Homo sapiens
  misc_RNA (1)...(19): siRNA sense strand
gaagaagggcucccaucac

SEQ ID NO: 2093780 - RNA, 19 nt, Homo sapiens
  misc_RNA (1)...(19): siRNA sense strand
ccgggacccucuccauuuc

SEQ ID NO: 2093781 - RNA, 19 nt, Homo sapiens
  misc_RNA (1)...(19): siRNA sense strand
agaagaagggcucccauca

SEQ ID NO: 2093782 - RNA, 19 nt, Homo sapiens
  misc_RNA (1)...(19): siRNA sense strand
caaaguacaaacggcagaa

SEQ ID NO: 2093783 - RNA, 19 nt, Homo sapiens
  misc_RNA (1)...(19): siRNA sense strand
ggccugaguccgagcagaa

SEQ ID NO: 2093784 - RNA, 19 nt, Homo sapiens
  misc_RNA (1)...(19): siRNA sense strand
aguccgagcagaagaagaa

SEQ ID NO: 2093785 - RNA, 19 nt, Homo sapiens
  misc_RNA (1)...(19): siRNA sense strand
agaaccggaggacaaagua

SEQ ID NO: 2093786 - RNA, 19 nt, Homo sapiens
  misc_RNA (1)...(19): siRNA sense strand
gcuuuaccauagaguccuu

SEQ ID NO: 2093787 - RNA, 19 nt, Homo sapiens
  misc_RNA (1)...(19): siRNA sense strand
gggcucccaucacaucaac

SEQ ID NO: 2093788 - RNA, 19 nt, Homo sapiens
  misc_RNA (1)...(19): siRNA sense strand
gcaaagaccuccaccagaa

SEQ ID NO: 2093789 - RNA, 19 nt, Homo sapiens
  misc_RNA (1)...(19): siRNA sense strand
ugaaggaucuggccucuuu

SEQ ID NO: 2093790 - RNA, 19 nt, Homo sapiens
  misc_RNA (1)...(19): siRNA sense strand
ggaggaaauuguccauaaa

SEQ ID NO: 2093791 - RNA, 19 nt, Homo sapiens
  misc_RNA (1)...(19): siRNA sense strand
ugagaugacugauguguga

SEQ ID NO: 2093792 - RNA, 19 nt, Homo sapiens
  misc_RNA (1)...(19): siRNA sense strand
gaaauuguccauaaacuuc

SEQ ID NO: 2093793 - RNA, 19 nt, Homo sapiens
  misc_RNA (1)...(19): siRNA sense strand
gggaugagaugacugaugu

SEQ ID NO: 2093794 - RNA, 19 nt, Homo sapiens
  misc_RNA (1)...(19): siRNA sense strand
ucacugcucuggaggauau

SEQ ID NO: 2093795 - RNA, 19 nt, Homo sapiens
  misc_RNA (1)...(19): siRNA sense strand
ggagaacuaucuauuuguc

SEQ ID NO: 2093796 - RNA, 19 nt, Homo sapiens
  misc_RNA (1)...(19): siRNA sense strand
ccugguggcugcacaguuu

SEQ ID NO: 2093797 - RNA, 19 nt, Homo sapiens
  misc_RNA (1)...(19): siRNA sense strand
ggaaauuguccauaaacuu

SEQ ID NO: 2093798 - RNA, 19 nt, Homo sapiens
  misc_RNA (1)...(19): siRNA sense strand
ggaaggagagccagaagau

SEQ ID NO: 2093799 - RNA, 19 nt, Homo sapiens
  misc_RNA (1)...(19): siRNA sense strand
aggaggaaauuguccauaa

SEQ ID NO: 2093800 - RNA, 19 nt, Homo sapiens
  misc_RNA (1)...(19): siRNA sense strand
ggagaggaaauuuguauca

SEQ ID NO: 2093801 - RNA, 19 nt, Homo sapiens
  misc_RNA (1)...(19): siRNA sense strand
caggaggcauggaggagua

SEQ ID NO: 2093802 - RNA, 19 nt, Homo sapiens
  misc_RNA (1)...(19): siRNA sense strand
ggauuccggucucucuuug

SEQ ID NO: 2093803 - RNA, 19 nt, Homo sapiens
  misc_RNA (1)...(19): siRNA sense strand
agggagaacuaucuauuug

SEQ ID NO: 2093804 - RNA, 19 nt, Homo sapiens
  misc_RNA (1)...(19): siRNA sense strand
gacaaggaccguuggauca

SEQ ID NO: 2093805 - RNA, 19 nt, Homo sapiens
  misc_RNA (1)...(19): siRNA sense strand
gaacuucugcggagacucu

SEQ ID NO: 2093806 - RNA, 19 nt, Homo sapiens
  misc_RNA (1)...(19): siRNA sense strand
gggagaccaucuucguaga

SEQ ID NO: 2093807 - RNA, 19 nt, Homo sapiens
  misc_RNA (1)...(19): siRNA sense strand
cagggagaacuaucuauuu

SEQ ID NO: 2093808 - RNA, 19 nt, Homo sapiens
  misc_RNA (1)...(19): siRNA sense strand
caaugaagaggaggaaauu

SEQ ID NO: 2093809 - RNA, 19 nt, Homo sapiens
  misc_RNA (1)...(19): siRNA sense strand
gcugaugaacccaauguga

SEQ ID NO: 2093810 - RNA, 19 nt, Homo sapiens
  misc_RNA (1)...(19): siRNA sense strand
caaggaccguuggaucaga

SEQ ID NO: 2093811 - RNA, 19 nt, Homo sapiens
  misc_RNA (1)...(19): siRNA sense strand
gcagucagccagugguuca

SEQ ID NO: 2093812 - RNA, 19 nt, Homo sapiens
  misc_RNA (1)...(19): siRNA sense strand
ggagaccaucuucguagaa

SEQ ID NO: 2093813 - RNA, 19 nt, Homo sapiens
  misc_RNA (1)...(19): siRNA sense strand
gcacaguuucucuggaaug

SEQ ID NO: 2093814 - RNA, 19 nt, Homo sapiens
  misc_RNA (1)...(19): siRNA sense strand
gagaggaaauuuguaucag

SEQ ID NO: 2093815 - RNA, 19 nt, Homo sapiens
  misc_RNA (1)...(19): siRNA sense strand
ucucuggaaugcacuuuau

SEQ ID NO: 2093816 - RNA, 19 nt, Homo sapiens
  misc_RNA (1)...(19): siRNA sense strand
uaacaaaacagccaaugaa

SEQ ID NO: 2093817 - RNA, 19 nt, Homo sapiens
  misc_RNA (1)...(19): siRNA sense strand
ucagggagaacuaucuauu

SEQ ID NO: 2093818 - RNA, 19 nt, Homo sapiens
  misc_RNA (1)...(19): siRNA sense strand
ccaaugaagaggaggaaau

SEQ ID NO: 2093819 - RNA, 19 nt, Homo sapiens
  misc_RNA (1)...(19): siRNA sense strand
cugcacaguuucucuggaa

SEQ ID NO: 2093820 - RNA, 19 nt, Homo sapiens
  misc_RNA (1)...(19): siRNA sense strand
cagaagaggaagaggaaga

SEQ ID NO: 2093821 - RNA, 19 nt, Homo sapiens
  misc_RNA (1)...(19): siRNA sense strand
gaacuaucuauuugucugu

SEQ ID NO: 2093822 - RNA, 19 nt, Homo sapiens
  misc_RNA (1)...(19): siRNA sense strand
caggagaggaaauuuguau

SEQ ID NO: 2093823 - RNA, 19 nt, Homo sapiens
  misc_RNA (1)...(19): siRNA sense strand
ggacaucgaggcagcaacu

SEQ ID NO: 2093824 - RNA, 19 nt, Homo sapiens
  misc_RNA (1)...(19): siRNA sense strand
ccuugcauccucucaauaa

SEQ ID NO: 2093825 - RNA, 19 nt, Homo sapiens
  misc_RNA (1)...(19): siRNA sense strand
gaaggagagccagaagaug

SEQ ID NO: 2093826 - RNA, 19 nt, Homo sapiens
  misc_RNA (1)...(19): siRNA sense strand
ggaggaaggagagccagaa

SEQ ID NO: 2093827 - RNA, 19 nt, Homo sapiens
  misc_RNA (1)...(19): siRNA sense strand
ccaaugugaccucagaaga

SEQ ID NO: 2093828 - RNA, 19 nt, Homo sapiens
  misc_RNA (1)...(19): siRNA sense strand
gcagcuugacgccuucauu

SEQ ID NO: 2093829 - RNA, 19 nt, Homo sapiens
  misc_RNA (1)...(19): siRNA sense strand
cagcuugacgccuucauug

SEQ ID NO: 2093830 - RNA, 19 nt, Homo sapiens
  misc_RNA (1)...(19): siRNA sense strand
gaggaggaaauuguccaua

SEQ ID NO: 2093831 - RNA, 19 nt, Homo sapiens
  misc_RNA (1)...(19): siRNA sense strand
caccagaacuguccccauu

SEQ ID NO: 2093832 - RNA, 19 nt, Homo sapiens
  misc_RNA (1)...(19): siRNA sense strand
gagaccaucuucguagaac

SEQ ID NO: 2093833 - RNA, 19 nt, Homo sapiens
  misc_RNA (1)...(19): siRNA sense strand
gccaggagaggaaauuugu

SEQ ID NO: 2093834 - RNA, 19 nt, Homo sapiens
  misc_RNA (1)...(19): siRNA sense strand
ggaccaauggccaaggaau

SEQ ID NO: 2093835 - RNA, 19 nt, Homo sapiens
  misc_RNA (1)...(19): siRNA sense strand
acccagagcugugcacugu

SEQ ID NO: 2093836 - RNA, 19 nt, Homo sapiens
  misc_RNA (1)...(19): siRNA sense strand
ucauugaccagcuauacaa

SEQ ID NO: 2093837 - RNA, 19 nt, Homo sapiens
  misc_RNA (1)...(19): siRNA sense strand
uagagaaggcagaggagaa

SEQ ID NO: 2093838 - RNA, 19 nt, Homo sapiens
  misc_RNA (1)...(19): siRNA sense strand
caaauucaagggccaacug

SEQ ID NO: 2093839 - RNA, 19 nt, Homo sapiens
  misc_RNA (1)...(19): siRNA sense strand
gaggaaauuguccauaaac

SEQ ID NO: 2093840 - RNA, 19 nt, Homo sapiens
  misc_RNA (1)...(19): siRNA sense strand
ugaagcaggcgaaggacaa

SEQ ID NO: 2093841 - RNA, 19 nt, Homo sapiens
  misc_RNA (1)...(19): siRNA sense strand
ccacagccgccacaagauc

SEQ ID NO: 2093842 - RNA, 19 nt, Homo sapiens
  misc_RNA (1)...(19): siRNA sense strand
gaugagaugacugaugugu

SEQ ID NO: 2093843 - RNA, 19 nt, Homo sapiens
  misc_RNA (1)...(19): siRNA sense strand
acaagauccucagggagaa

SEQ ID NO: 2093844 - RNA, 19 nt, Homo sapiens
  misc_RNA (1)...(19): siRNA sense strand
gaugguggccacagugaag

SEQ ID NO: 2093845 - RNA, 19 nt, Homo sapiens
  misc_RNA (1)...(19): siRNA sense strand
caaugugaccucagaagag

SEQ ID NO: 2093846 - RNA, 19 nt, Homo sapiens
  misc_RNA (1)...(19): siRNA sense strand
gggagaacuaucuauuugu

SEQ ID NO: 2093847 - RNA, 19 nt, Homo sapiens
  misc_RNA (1)...(19): siRNA sense strand
cauggaggaguauucacua

SEQ ID NO: 2093848 - RNA, 19 nt, Homo sapiens
  misc_RNA (1)...(19): siRNA sense strand
gagcagcgccaagggaaag

SEQ ID NO: 2093849 - RNA, 19 nt, Homo sapiens
  misc_RNA (1)...(19): siRNA sense strand
gaccaauggccaaggaauc

SEQ ID NO: 2093850 - RNA, 19 nt, Homo sapiens
  misc_RNA (1)...(19): siRNA sense strand
caaaacagccaaugaagag

SEQ ID NO: 2093851 - RNA, 19 nt, Homo sapiens
  misc_RNA (1)...(19): siRNA sense strand
agagaccuccuuuccagaa

SEQ ID NO: 2093852 - RNA, 19 nt, Homo sapiens
  misc_RNA (1)...(19): siRNA sense strand
uuucuuaacugugaaggau

SEQ ID NO: 2093853 - RNA, 19 nt, Homo sapiens
  misc_RNA (1)...(19): siRNA sense strand
gcauggaggaguauucacu

SEQ ID NO: 2093854 - RNA, 19 nt, Homo sapiens
  misc_RNA (1)...(19): siRNA sense strand
caaugcagagaccuccuuu

SEQ ID NO: 2093855 - RNA, 19 nt, Homo sapiens
  misc_RNA (1)...(19): siRNA sense strand
cagugaagcaggcgaagga

SEQ ID NO: 2093856 - RNA, 19 nt, Homo sapiens
  misc_RNA (1)...(19): siRNA sense strand
uugaccagcuauacaagga

SEQ ID NO: 2093857 - RNA, 19 nt, Homo sapiens
  misc_RNA (1)...(19): siRNA sense strand
aacccaaugugaccucaga

SEQ ID NO: 2093858 - RNA, 19 nt, Homo sapiens
  misc_RNA (1)...(19): siRNA sense strand
ccaggagaggaaauuugua

SEQ ID NO: 2093859 - RNA, 19 nt, Homo sapiens
  misc_RNA (1)...(19): siRNA sense strand
ggaggaggaggaggaagga

SEQ ID NO: 2093860 - RNA, 19 nt, Homo sapiens
  misc_RNA (1)...(19): siRNA sense strand
ugcggagacucuucacaga

SEQ ID NO: 2093861 - RNA, 19 nt, Homo sapiens
  misc_RNA (1)...(19): siRNA sense strand
gaaauuuguaucagcuacu

SEQ ID NO: 2093862 - RNA, 19 nt, Homo sapiens
  misc_RNA (1)...(19): siRNA sense strand
ccagaaaacaacuuccuuu

SEQ ID NO: 2093863 - RNA, 19 nt, Homo sapiens
  misc_RNA (1)...(19): siRNA sense strand
acaguugugugcccaaugc

SEQ ID NO: 2093864 - RNA, 19 nt, Homo sapiens
  misc_RNA (1)...(19): siRNA sense strand
ucauguugauggcuaggau

SEQ ID NO: 2093865 - RNA, 19 nt, Homo sapiens
  misc_RNA (1)...(19): siRNA sense strand
ccucagggagaacuaucua

SEQ ID NO: 2093866 - RNA, 19 nt, Homo sapiens
  misc_RNA (1)...(19): siRNA sense strand
uaagccaggagaggaaauu

SEQ ID NO: 2093867 - RNA, 19 nt, Homo sapiens
  misc_RNA (1)...(19): siRNA sense strand
guaacaaaacagccaauga

SEQ ID NO: 2093868 - RNA, 19 nt, Homo sapiens
  misc_RNA (1)...(19): siRNA sense strand
gagacugcaagcaucaugu

SEQ ID NO: 2093869 - RNA, 19 nt, Homo sapiens
  misc_RNA (1)...(19): siRNA sense strand
ggcagccacugagcaauac

SEQ ID NO: 2093870 - RNA, 19 nt, Homo sapiens
  misc_RNA (1)...(19): siRNA sense strand
gaaggaucuggccucuuug

SEQ ID NO: 2093871 - RNA, 19 nt, Homo sapiens
  misc_RNA (1)...(19): siRNA sense strand
cgccuucauugaccagcua

SEQ ID NO: 2093872 - RNA, 19 nt, Homo sapiens
  misc_RNA (1)...(19): siRNA sense strand
ugaagaggaggaaauuguc

SEQ ID NO: 2093873 - RNA, 19 nt, Homo sapiens
  misc_RNA (1)...(19): siRNA sense strand
gaugcgagcugcccucuuc

SEQ ID NO: 2093874 - RNA, 19 nt, Homo sapiens
  misc_RNA (1)...(19): siRNA sense strand
gcccagagauccugaagau

SEQ ID NO: 2093875 - RNA, 19 nt, Homo sapiens
  misc_RNA (1)...(19): siRNA sense strand
agauugggauugcggauua

SEQ ID NO: 2093876 - RNA, 19 nt, Homo sapiens
  misc_RNA (1)...(19): siRNA sense strand
gauugcggauuauuucaaa

SEQ ID NO: 2093877 - RNA, 19 nt, Homo sapiens
  misc_RNA (1)...(19): siRNA sense strand
gaaagaaggagagcaagga

SEQ ID NO: 2093878 - RNA, 19 nt, Homo sapiens
  misc_RNA (1)...(19): siRNA sense strand
uggcaucacucgcgagaaa

SEQ ID NO: 2093879 - RNA, 19 nt, Homo sapiens
  misc_RNA (1)...(19): siRNA sense strand
gagcugcccucuucugcau

SEQ ID NO: 2093880 - RNA, 19 nt, Homo sapiens
  misc_RNA (1)...(19): siRNA sense strand
gaucgucucccuccaagug

SEQ ID NO: 2093881 - RNA, 19 nt, Homo sapiens
  misc_RNA (1)...(19): siRNA sense strand
ggccgugccuaacacauau

SEQ ID NO: 2093882 - RNA, 19 nt, Homo sapiens
  misc_RNA (1)...(19): siRNA sense strand
gguggaaggcggcugcuaa

SEQ ID NO: 2093883 - RNA, 19 nt, Homo sapiens
  misc_RNA (1)...(19): siRNA sense strand
cuaagauucugcacaucaa

SEQ ID NO: 2093884 - RNA, 19 nt, Homo sapiens
  misc_RNA (1)...(19): siRNA sense strand
gcuccaaguuccuggcaau

SEQ ID NO: 2093885 - RNA, 19 nt, Homo sapiens
  misc_RNA (1)...(19): siRNA sense strand
uugaggacauggugacaaa

SEQ ID NO: 2093886 - RNA, 19 nt, Homo sapiens
  misc_RNA (1)...(19): siRNA sense strand
gacguuggcucccgaacca

SEQ ID NO: 2093887 - RNA, 19 nt, Homo sapiens
  misc_RNA (1)...(19): siRNA sense strand
ucucuaagauucugcacau

SEQ ID NO: 2093888 - RNA, 19 nt, Homo sapiens
  misc_RNA (1)...(19): siRNA sense strand
gaagcuguuugaggacaug

SEQ ID NO: 2093889 - RNA, 19 nt, Homo sapiens
  misc_RNA (1)...(19): siRNA sense strand
cuaaggcccuacugcacuu

SEQ ID NO: 2093890 - RNA, 19 nt, Homo sapiens
  misc_RNA (1)...(19): siRNA sense strand
gcccgugucugcuccaagu

SEQ ID NO: 2093891 - RNA, 19 nt, Homo sapiens
  misc_RNA (1)...(19): siRNA sense strand
gaaccucaaguccauugug

SEQ ID NO: 2093892 - RNA, 19 nt, Homo sapiens
  misc_RNA (1)...(19): siRNA sense strand
gccggaaccucaaguccau

SEQ ID NO: 2093893 - RNA, 19 nt, Homo sapiens
  misc_RNA (1)...(19): siRNA sense strand
ggauugcggauuauuucaa

SEQ ID NO: 2093894 - RNA, 19 nt, Homo sapiens
  misc_RNA (1)...(19): siRNA sense strand
gaggucaucagcccagaga

SEQ ID NO: 2093895 - RNA, 19 nt, Homo sapiens
  misc_RNA (1)...(19): siRNA sense strand
ugaagggacuggagaugcu

SEQ ID NO: 2093896 - RNA, 19 nt, Homo sapiens
  misc_RNA (1)...(19): siRNA sense strand
gaccacgugucagagauca

SEQ ID NO: 2093897 - RNA, 19 nt, Homo sapiens
  misc_RNA (1)...(19): siRNA sense strand
ccagagcucaggcugcuau

SEQ ID NO: 2093898 - RNA, 19 nt, Homo sapiens
  misc_RNA (1)...(19): siRNA sense strand
ggagagcaaggaggaguau

SEQ ID NO: 2093899 - RNA, 19 nt, Homo sapiens
  misc_RNA (1)...(19): siRNA sense strand
ggucaucagcccagagauc

SEQ ID NO: 2093900 - RNA, 19 nt, Homo sapiens
  misc_RNA (1)...(19): siRNA sense strand
cggccgugccuaacacaua

SEQ ID NO: 2093901 - RNA, 19 nt, Homo sapiens
  misc_RNA (1)...(19): siRNA sense strand
gccaggccauccagaacug

SEQ ID NO: 2093902 - RNA, 19 nt, Homo sapiens
  misc_RNA (1)...(19): siRNA sense strand
ccaaguuccuggcaaugcu

SEQ ID NO: 2093903 - RNA, 19 nt, Homo sapiens
  misc_RNA (1)...(19): siRNA sense strand
ucuaagauucugcacauca

SEQ ID NO: 2093904 - RNA, 19 nt, Homo sapiens
  misc_RNA (1)...(19): siRNA sense strand
gauugggauugcggauuau

SEQ ID NO: 2093905 - RNA, 19 nt, Homo sapiens
  misc_RNA (1)...(19): siRNA sense strand
gcuaugacagugacagucu

SEQ ID NO: 2093906 - RNA, 19 nt, Homo sapiens
  misc_RNA (1)...(19): siRNA sense strand
cagcccacacgcuucagua

SEQ ID NO: 2093907 - RNA, 19 nt, Homo sapiens
  misc_RNA (1)...(19): siRNA sense strand
ccauugugguccagauugg

SEQ ID NO: 2093908 - RNA, 19 nt, Homo sapiens
  misc_RNA (1)...(19): siRNA sense strand
gcccucuucugcaucuuca

SEQ ID NO: 2093909 - RNA, 19 nt, Homo sapiens
  misc_RNA (1)...(19): siRNA sense strand
gagcucaggcugcuaugac

SEQ ID NO: 2093910 - RNA, 19 nt, Homo sapiens
  misc_RNA (1)...(19): siRNA sense strand
cagcagcccacacgcuuca

SEQ ID NO: 2093911 - RNA, 19 nt, Homo sapiens
  misc_RNA (1)...(19): siRNA sense strand
ggacacaccugccaagaga

SEQ ID NO: 2093912 - RNA, 19 nt, Homo sapiens
  misc_RNA (1)...(19): siRNA sense strand
caagacaccucgcaaguuc

SEQ ID NO: 2093913 - RNA, 19 nt, Homo sapiens
  misc_RNA (1)...(19): siRNA sense strand
agaagaagauucagaagga

SEQ ID NO: 2093914 - RNA, 19 nt, Homo sapiens
  misc_RNA (1)...(19): siRNA sense strand
caacugcgauggcccagaa

SEQ ID NO: 2093915 - RNA, 19 nt, Homo sapiens
  misc_RNA (1)...(19): siRNA sense strand
ccgaagcuguguccucuua

SEQ ID NO: 2093916 - RNA, 19 nt, Homo sapiens
  misc_RNA (1)...(19): siRNA sense strand
gaugaagguccauauuaua

SEQ ID NO: 2093917 - RNA, 19 nt, Homo sapiens
  misc_RNA (1)...(19): siRNA sense strand
gagagaggauuugcaagaa

SEQ ID NO: 2093918 - RNA, 19 nt, Homo sapiens
  misc_RNA (1)...(19): siRNA sense strand
gaucaagucuguggucaug

SEQ ID NO: 2093919 - RNA, 19 nt, Homo sapiens
  misc_RNA (1)...(19): siRNA sense strand
gaaagcccauucagaucaa

SEQ ID NO: 2093920 - RNA, 19 nt, Homo sapiens
  misc_RNA (1)...(19): siRNA sense strand
ggagucaccucuuaaguac

SEQ ID NO: 2093921 - RNA, 19 nt, Homo sapiens
  misc_RNA (1)...(19): siRNA sense strand
gcaucucgcuggucuucua

SEQ ID NO: 2093922 - RNA, 19 nt, Homo sapiens
  misc_RNA (1)...(19): siRNA sense strand
gcaggcagcuucccacucu

SEQ ID NO: 2093923 - RNA, 19 nt, Homo sapiens
  misc_RNA (1)...(19): siRNA sense strand
caacagauccaucaagcaa

SEQ ID NO: 2093924 - RNA, 19 nt, Homo sapiens
  misc_RNA (1)...(19): siRNA sense strand
gaagcuguguccucuuaug

SEQ ID NO: 2093925 - RNA, 19 nt, Homo sapiens
  misc_RNA (1)...(19): siRNA sense strand
cagagacgcuggcaagaug

SEQ ID NO: 2093926 - RNA, 19 nt, Homo sapiens
  misc_RNA (1)...(19): siRNA sense strand
gaagugcuccggaagaguu

SEQ ID NO: 2093927 - RNA, 19 nt, Homo sapiens
  misc_RNA (1)...(19): siRNA sense strand
gcgaagaccuugacacacu

SEQ ID NO: 2093928 - RNA, 19 nt, Homo sapiens
  misc_RNA (1)...(19): siRNA sense strand
cagcauaaccucuacaaug

SEQ ID NO: 2093929 - RNA, 19 nt, Homo sapiens
  misc_RNA (1)...(19): siRNA sense strand
gaagaagugcuccggaaga

SEQ ID NO: 2093930 - RNA, 19 nt, Homo sapiens
  misc_RNA (1)...(19): siRNA sense strand
ccaaggagaagaagaagaa

SEQ ID NO: 2093931 - RNA, 19 nt, Homo sapiens
  misc_RNA (1)...(19): siRNA sense strand
gaaagaugaagguccauau

SEQ ID NO: 2093932 - RNA, 19 nt, Homo sapiens
  misc_RNA (1)...(19): siRNA sense strand
gaugcggccucaacgauga

SEQ ID NO: 2093933 - RNA, 19 nt, Homo sapiens
  misc_RNA (1)...(19): siRNA sense strand
gcaagauucccgaggauga

SEQ ID NO: 2093934 - RNA, 19 nt, Homo sapiens
  misc_RNA (1)...(19): siRNA sense strand
gcaguuugaggcugaauuu

SEQ ID NO: 2093935 - RNA, 19 nt, Homo sapiens
  misc_RNA (1)...(19): siRNA sense strand
agaugaagguccauauuau

SEQ ID NO: 2093936 - RNA, 19 nt, Homo sapiens
  misc_RNA (1)...(19): siRNA sense strand
aagaugaagguccauauua

SEQ ID NO: 2093937 - RNA, 19 nt, Homo sapiens
  misc_RNA (1)...(19): siRNA sense strand
gaagguccauauuauacuc

SEQ ID NO: 2093938 - RNA, 19 nt, Homo sapiens
  misc_RNA (1)...(19): siRNA sense strand
gaacaaauaguggagaaag

SEQ ID NO: 2093939 - RNA, 19 nt, Homo sapiens
  misc_RNA (1)...(19): siRNA sense strand
cuacgguggugcugaguuu

SEQ ID NO: 2093940 - RNA, 19 nt, Homo sapiens
  misc_RNA (1)...(19): siRNA sense strand
gcaagacaccucgcaaguu

SEQ ID NO: 2093941 - RNA, 19 nt, Homo sapiens
  misc_RNA (1)...(19): siRNA sense strand
ucaaccaccugcuuccauu

SEQ ID NO: 2093942 - RNA, 19 nt, Homo sapiens
  misc_RNA (1)...(19): siRNA sense strand
ggacaaucccaaagaggaa

SEQ ID NO: 2093943 - RNA, 19 nt, Homo sapiens
  misc_RNA (1)...(19): siRNA sense strand
gaggcugaauuuggagaua

SEQ ID NO: 2093944 - RNA, 19 nt, Homo sapiens
  misc_RNA (1)...(19): siRNA sense strand
gcgauugcgucgaacaaau

SEQ ID NO: 2093945 - RNA, 19 nt, Homo sapiens
  misc_RNA (1)...(19): siRNA sense strand
gcacccggcucuaugaaac

SEQ ID NO: 2093946 - RNA, 19 nt, Homo sapiens
  misc_RNA (1)...(19): siRNA sense strand
ccaccacgccgcuuaagaa

SEQ ID NO: 2093947 - RNA, 19 nt, Homo sapiens
  misc_RNA (1)...(19): siRNA sense strand
ggacagugaacacaacuuc

SEQ ID NO: 2093948 - RNA, 19 nt, Homo sapiens
  misc_RNA (1)...(19): siRNA sense strand
gagaagaagaagauucaga

SEQ ID NO: 2093949 - RNA, 19 nt, Homo sapiens
  misc_RNA (1)...(19): siRNA sense strand
agagaggauuugcaagaaa

SEQ ID NO: 2093950 - RNA, 19 nt, Homo sapiens
  misc_RNA (1)...(19): siRNA sense strand
ggaggacccagucaccuuu

SEQ ID NO: 2093951 - RNA, 19 nt, Homo sapiens
  misc_RNA (1)...(19): siRNA sense strand
acagauccaucaagcaaga

SEQ ID NO: 2093952 - RNA, 19 nt, Homo sapiens
  misc_RNA (1)...(19): siRNA sense strand
gaggagaaccagaaugcaa

SEQ ID NO: 2093953 - RNA, 19 nt, Homo sapiens
  misc_RNA (1)...(19): siRNA sense strand
gagcucauccggcaguuug

SEQ ID NO: 2093954 - RNA, 19 nt, Homo sapiens
  misc_RNA (1)...(19): siRNA sense strand
gcagaccgccauugccauu

SEQ ID NO: 2093955 - RNA, 19 nt, Homo sapiens
  misc_RNA (1)...(19): siRNA sense strand
auuggaggcucaagaagua

SEQ ID NO: 2093956 - RNA, 19 nt, Homo sapiens
  misc_RNA (1)...(19): siRNA sense strand
ggaaagccauccggaucga

SEQ ID NO: 2093957 - RNA, 19 nt, Homo sapiens
  misc_RNA (1)...(19): siRNA sense strand
cgaaagcccauucagauca

SEQ ID NO: 2093958 - RNA, 19 nt, Homo sapiens
  misc_RNA (1)...(19): siRNA sense strand
gugauuacauccagucagu

SEQ ID NO: 2093959 - RNA, 19 nt, Homo sapiens
  misc_RNA (1)...(19): siRNA sense strand
gaaaggcagcagccgagaa

SEQ ID NO: 2093960 - RNA, 19 nt, Homo sapiens
  misc_RNA (1)...(19): siRNA sense strand
ggccaacacggaugaguuu

SEQ ID NO: 2093961 - RNA, 19 nt, Homo sapiens
  misc_RNA (1)...(19): siRNA sense strand
gagaggauuugcaagaaaa

SEQ ID NO: 2093962 - RNA, 19 nt, Homo sapiens
  misc_RNA (1)...(19): siRNA sense strand
ggcacacgcuggaggagaa

SEQ ID NO: 2093963 - RNA, 19 nt, Homo sapiens
  misc_RNA (1)...(19): siRNA sense strand
cgauugcgucgaacaaaua

SEQ ID NO: 2093964 - RNA, 19 nt, Homo sapiens
  misc_RNA (1)...(19): siRNA sense strand
ggacacacccaccaagagu

SEQ ID NO: 2093965 - RNA, 19 nt, Homo sapiens
  misc_RNA (1)...(19): siRNA sense strand
gaagaagaagcucccaaca

SEQ ID NO: 2093966 - RNA, 19 nt, Homo sapiens
  misc_RNA (1)...(19): siRNA sense strand
gcaagggagcggugaagga

SEQ ID NO: 2093967 - RNA, 19 nt, Homo sapiens
  misc_RNA (1)...(19): siRNA sense strand
agaagaagaagauucagaa

SEQ ID NO: 2093968 - RNA, 19 nt, Homo sapiens
  misc_RNA (1)...(19): siRNA sense strand
ucaagucuguggucaugga

SEQ ID NO: 2093969 - RNA, 19 nt, Homo sapiens
  misc_RNA (1)...(19): siRNA sense strand
ugaacagcguguacuccua

SEQ ID NO: 2093970 - RNA, 19 nt, Homo sapiens
  misc_RNA (1)...(19): siRNA sense strand
uggagucaccucuuaagua

SEQ ID NO: 2093971 - RNA, 19 nt, Homo sapiens
  misc_RNA (1)...(19): siRNA sense strand
ccauucagaucaagaaguc

SEQ ID NO: 2093972 - RNA, 19 nt, Homo sapiens
  misc_RNA (1)...(19): siRNA sense strand
gauuacauccagucaguau

SEQ ID NO: 2093973 - RNA, 19 nt, Homo sapiens
  misc_RNA (1)...(19): siRNA sense strand
gacaagcucaguuccuuug

SEQ ID NO: 2093974 - RNA, 19 nt, Homo sapiens
  misc_RNA (1)...(19): siRNA sense strand
ccagagagaggauuugcaa

SEQ ID NO: 2093975 - RNA, 19 nt, Homo sapiens
  misc_RNA (1)...(19): siRNA sense strand
gagcucagcccaguugaug

SEQ ID NO: 2093976 - RNA, 19 nt, Homo sapiens
  misc_RNA (1)...(19): siRNA sense strand
guuugaggcugaauuugga

SEQ ID NO: 2093977 - RNA, 19 nt, Homo sapiens
  misc_RNA (1)...(19): siRNA sense strand
gacccaggccugucucuga

SEQ ID NO: 2093978 - RNA, 19 nt, Homo sapiens
  misc_RNA (1)...(19): siRNA sense strand
gaggagcgguauggagaga

SEQ ID NO: 2093979 - RNA, 19 nt, Homo sapiens
  misc_RNA (1)...(19): siRNA sense strand
cagcaacuccuagaacuga

SEQ ID NO: 2093980 - RNA, 19 nt, Homo sapiens
  misc_RNA (1)...(19): siRNA sense strand
caacacggaugaguuuggu

SEQ ID NO: 2093981 - RNA, 19 nt, Homo sapiens
  misc_RNA (1)...(19): siRNA sense strand
caccugcgauugcgucgaa

SEQ ID NO: 2093982 - RNA, 19 nt, Homo sapiens
  misc_RNA (1)...(19): siRNA sense strand
cagagugcccugagcauug

SEQ ID NO: 2093983 - RNA, 19 nt, Homo sapiens
  misc_RNA (1)...(19): siRNA sense strand
gaugagcagcugcauguuc

SEQ ID NO: 2093984 - RNA, 19 nt, Homo sapiens
  misc_RNA (1)...(19): siRNA sense strand
gaauuuggagauagcuuug

SEQ ID NO: 2093985 - RNA, 19 nt, Homo sapiens
  misc_RNA (1)...(19): siRNA sense strand
aaagaugaagguccauauu

SEQ ID NO: 2093986 - RNA, 19 nt, Homo sapiens
  misc_RNA (1)...(19): siRNA sense strand
uguccgaggugucucagaa

SEQ ID NO: 2093987 - RNA, 19 nt, Homo sapiens
  misc_RNA (1)...(19): siRNA sense strand
gaagaagaagauucagaag

SEQ ID NO: 2093988 - RNA, 19 nt, Homo sapiens
  misc_RNA (1)...(19): siRNA sense strand
ggaccagcauaaccucuac

SEQ ID NO: 2093989 - RNA, 19 nt, Homo sapiens
  misc_RNA (1)...(19): siRNA sense strand
caacgaggaaauagcgauu

SEQ ID NO: 2093990 - RNA, 19 nt, Homo sapiens
  misc_RNA (1)...(19): siRNA sense strand
agagagaggauuugcaaga

SEQ ID NO: 2093991 - RNA, 19 nt, Homo sapiens
  misc_RNA (1)...(19): siRNA sense strand
agaccgccauugccauuga

SEQ ID NO: 2093992 - RNA, 19 nt, Homo sapiens
  misc_RNA (1)...(19): siRNA sense strand
ggaucgagaaggucaucua

SEQ ID NO: 2093993 - RNA, 19 nt, Homo sapiens
  misc_RNA (1)...(19): siRNA sense strand
ggagcgguauggagagaag

SEQ ID NO: 2093994 - RNA, 19 nt, Homo sapiens
  misc_RNA (1)...(19): siRNA sense strand
aaccuucucuugcgcuauu

SEQ ID NO: 2093995 - RNA, 19 nt, Homo sapiens
  misc_RNA (1)...(19): siRNA sense strand
ggcccagccugacugagaa

SEQ ID NO: 2093996 - RNA, 19 nt, Homo sapiens
  misc_RNA (1)...(19): siRNA sense strand
cgaggugucucagaaugga

SEQ ID NO: 2093997 - RNA, 19 nt, Homo sapiens
  misc_RNA (1)...(19): siRNA sense strand
aguacgcucucccgucuuu

SEQ ID NO: 2093998 - RNA, 19 nt, Homo sapiens
  misc_RNA (1)...(19): siRNA sense strand
gggcaagauucccgaggau

SEQ ID NO: 2093999 - RNA, 19 nt, Homo sapiens
  misc_RNA (1)...(19): siRNA sense strand
agcauaaccucuacaaugg

SEQ ID NO: 2094000 - RNA, 19 nt, Homo sapiens
  misc_RNA (1)...(19): siRNA sense strand
ucgaacaaauaguggagaa

SEQ ID NO: 2094001 - RNA, 19 nt, Homo sapiens
  misc_RNA (1)...(19): siRNA sense strand
ucaagaaguaccagagaga

SEQ ID NO: 2094002 - RNA, 19 nt, Homo sapiens
  misc_RNA (1)...(19): siRNA sense strand
ggagaggagggcaggauuc

SEQ ID NO: 2094003 - RNA, 19 nt, Homo sapiens
  misc_RNA (1)...(19): siRNA sense strand
gcucaagaaguaccagaga

SEQ ID NO: 2094004 - RNA, 19 nt, Homo sapiens
  misc_RNA (1)...(19): siRNA sense strand
ucauacugcucgccuggaa

SEQ ID NO: 2094005 - RNA, 19 nt, Homo sapiens
  misc_RNA (1)...(19): siRNA sense strand
acgaggaaauagcgauuga

SEQ ID NO: 2094006 - RNA, 19 nt, Homo sapiens
  misc_RNA (1)...(19): siRNA sense strand
cagcgaagaccuugacaca

SEQ ID NO: 2094007 - RNA, 19 nt, Homo sapiens
  misc_RNA (1)...(19): siRNA sense strand
gagaugcggccucaacgau

SEQ ID NO: 2094008 - RNA, 19 nt, Homo sapiens
  misc_RNA (1)...(19): siRNA sense strand
aacaaauaguggagaaaga

SEQ ID NO: 2094009 - RNA, 19 nt, Homo sapiens
  misc_RNA (1)...(19): siRNA sense strand
ccaccugcuuccauucaga

SEQ ID NO: 2094010 - RNA, 19 nt, Homo sapiens
  misc_RNA (1)...(19): siRNA sense strand
ucagaucuccccagucuua

SEQ ID NO: 2094011 - RNA, 19 nt, Homo sapiens
  misc_RNA (1)...(19): siRNA sense strand
gaagcaaucuccauucuuu

SEQ ID NO: 2094012 - RNA, 19 nt, Homo sapiens
  misc_RNA (1)...(19): siRNA sense strand
gaaauauucuggacaauga

SEQ ID NO: 2094013 - RNA, 19 nt, Homo sapiens
  misc_RNA (1)...(19): siRNA sense strand
gaacauaaagccucagaua

SEQ ID NO: 2094014 - RNA, 19 nt, Homo sapiens
  misc_RNA (1)...(19): siRNA sense strand
gaagaaucauuuccaguuu

SEQ ID NO: 2094015 - RNA, 19 nt, Homo sapiens
  misc_RNA (1)...(19): siRNA sense strand
gaccaaagaugccuucgua

SEQ ID NO: 2094016 - RNA, 19 nt, Homo sapiens
  misc_RNA (1)...(19): siRNA sense strand
ugacaaagguguaaaugaa

SEQ ID NO: 2094017 - RNA, 19 nt, Homo sapiens
  misc_RNA (1)...(19): siRNA sense strand
gauagaagcugccaagaca

SEQ ID NO: 2094018 - RNA, 19 nt, Homo sapiens
  misc_RNA (1)...(19): siRNA sense strand
gcacuggauuccuuagaua

SEQ ID NO: 2094019 - RNA, 19 nt, Homo sapiens
  misc_RNA (1)...(19): siRNA sense strand
gcagagcgcuauuacaaug

SEQ ID NO: 2094020 - RNA, 19 nt, Homo sapiens
  misc_RNA (1)...(19): siRNA sense strand
ggaaugugcuuuacugaau

SEQ ID NO: 2094021 - RNA, 19 nt, Homo sapiens
  misc_RNA (1)...(19): siRNA sense strand
ggauugaguucuuuccaua

SEQ ID NO: 2094022 - RNA, 19 nt, Homo sapiens
  misc_RNA (1)...(19): siRNA sense strand
ggucaaggaugcaaugaaa

SEQ ID NO: 2094023 - RNA, 19 nt, Homo sapiens
  misc_RNA (1)...(19): siRNA sense strand
aaacucaucuacagcuuua

SEQ ID NO: 2094024 - RNA, 19 nt, Homo sapiens
  misc_RNA (1)...(19): siRNA sense strand
gaagaaagcauacagaagu

SEQ ID NO: 2094025 - RNA, 19 nt, Homo sapiens
  misc_RNA (1)...(19): siRNA sense strand
gguaagagcuauggauuug

SEQ ID NO: 2094026 - RNA, 19 nt, Homo sapiens
  misc_RNA (1)...(19): siRNA sense strand
gaaauuacuuaugguggua

SEQ ID NO: 2094027 - RNA, 19 nt, Homo sapiens
  misc_RNA (1)...(19): siRNA sense strand
uaagagcuauggauuugua

SEQ ID NO: 2094028 - RNA, 19 nt, Homo sapiens
  misc_RNA (1)...(19): siRNA sense strand
ugaagaaacccaagcaaua

SEQ ID NO: 2094029 - RNA, 19 nt, Homo sapiens
  misc_RNA (1)...(19): siRNA sense strand
gaaguuugaggaagaaaua

SEQ ID NO: 2094030 - RNA, 19 nt, Homo sapiens
  misc_RNA (1)...(19): siRNA sense strand
ggugaugucugaagaaaug

SEQ ID NO: 2094031 - RNA, 19 nt, Homo sapiens
  misc_RNA (1)...(19): siRNA sense strand
gaagauggccuuugaugau

SEQ ID NO: 2094032 - RNA, 19 nt, Homo sapiens
  misc_RNA (1)...(19): siRNA sense strand
gacaagaacugcccaugga

SEQ ID NO: 2094033 - RNA, 19 nt, Homo sapiens
  misc_RNA (1)...(19): siRNA sense strand
cauaaagccucagauauug

SEQ ID NO: 2094034 - RNA, 19 nt, Homo sapiens
  misc_RNA (1)...(19): siRNA sense strand
gaagcucccuggcuaccua

SEQ ID NO: 2094035 - RNA, 19 nt, Homo sapiens
  misc_RNA (1)...(19): siRNA sense strand
gcaaaccguuggauaagga

SEQ ID NO: 2094036 - RNA, 19 nt, Homo sapiens
  misc_RNA (1)...(19): siRNA sense strand
gaacgggugcagucaauuu

SEQ ID NO: 2094037 - RNA, 19 nt, Homo sapiens
  misc_RNA (1)...(19): siRNA sense strand
gaaacaaacauacuaguag

SEQ ID NO: 2094038 - RNA, 19 nt, Homo sapiens
  misc_RNA (1)...(19): siRNA sense strand
gagcugaguuucaaauaca

SEQ ID NO: 2094039 - RNA, 19 nt, Homo sapiens
  misc_RNA (1)...(19): siRNA sense strand
ucauuaagcuuacagauag

SEQ ID NO: 2094040 - RNA, 19 nt, Homo sapiens
  misc_RNA (1)...(19): siRNA sense strand
gaucucugguuucuucuuu

SEQ ID NO: 2094041 - RNA, 19 nt, Homo sapiens
  misc_RNA (1)...(19): siRNA sense strand
gaaaguggauauucagaac

SEQ ID NO: 2094042 - RNA, 19 nt, Homo sapiens
  misc_RNA (1)...(19): siRNA sense strand
ggcagaagauggccuuuga

SEQ ID NO: 2094043 - RNA, 19 nt, Homo sapiens
  misc_RNA (1)...(19): siRNA sense strand
ugacgaaauuguucaagaa

SEQ ID NO: 2094044 - RNA, 19 nt, Homo sapiens
  misc_RNA (1)...(19): siRNA sense strand
caaagaugccuucguacua

SEQ ID NO: 2094045 - RNA, 19 nt, Homo sapiens
  misc_RNA (1)...(19): siRNA sense strand
gagguaugcauuaaaguua

SEQ ID NO: 2094046 - RNA, 19 nt, Homo sapiens
  misc_RNA (1)...(19): siRNA sense strand
acucagacauugauuauga

SEQ ID NO: 2094047 - RNA, 19 nt, Homo sapiens
  misc_RNA (1)...(19): siRNA sense strand
gaacaaacucuccuaacug

SEQ ID NO: 2094048 - RNA, 19 nt, Homo sapiens
  misc_RNA (1)...(19): siRNA sense strand
uggaauaucugcuaugaau

SEQ ID NO: 2094049 - RNA, 19 nt, Homo sapiens
  misc_RNA (1)...(19): siRNA sense strand
gaggaucaguuguuaagug

SEQ ID NO: 2094050 - RNA, 19 nt, Homo sapiens
  misc_RNA (1)...(19): siRNA sense strand
gaagaaacccaagcaauag

SEQ ID NO: 2094051 - RNA, 19 nt, Homo sapiens
  misc_RNA (1)...(19): siRNA sense strand
uggcaaagcuucaaaagua

SEQ ID NO: 2094052 - RNA, 19 nt, Homo sapiens
  misc_RNA (1)...(19): siRNA sense strand
ggacaaugaagaacuuauu

SEQ ID NO: 2094053 - RNA, 19 nt, Homo sapiens
  misc_RNA (1)...(19): siRNA sense strand
gcaggaggaugaagcaaca

SEQ ID NO: 2094054 - RNA, 19 nt, Homo sapiens
  misc_RNA (1)...(19): siRNA sense strand
uuaacaaccugcugaaguu

SEQ ID NO: 2094055 - RNA, 19 nt, Homo sapiens
  misc_RNA (1)...(19): siRNA sense strand
gaaguggaccgguuuaaca

SEQ ID NO: 2094056 - RNA, 19 nt, Homo sapiens
  misc_RNA (1)...(19): siRNA sense strand
gcaagccucucagaaauag

SEQ ID NO: 2094057 - RNA, 19 nt, Homo sapiens
  misc_RNA (1)...(19): siRNA sense strand
gaaaguguccaaagcaugu

SEQ ID NO: 2094058 - RNA, 19 nt, Homo sapiens
  misc_RNA (1)...(19): siRNA sense strand
guacaggcagucacuuaua

SEQ ID NO: 2094059 - RNA, 19 nt, Homo sapiens
  misc_RNA (1)...(19): siRNA sense strand
uacaagaguuuaaggacua

SEQ ID NO: 2094060 - RNA, 19 nt, Homo sapiens
  misc_RNA (1)...(19): siRNA sense strand
gcaaugaaaucaggaaacu

SEQ ID NO: 2094061 - RNA, 19 nt, Homo sapiens
  misc_RNA (1)...(19): siRNA sense strand
ggaccugccuacccuguau

SEQ ID NO: 2094062 - RNA, 19 nt, Homo sapiens
  misc_RNA (1)...(19): siRNA sense strand
acauaaagccucagauauu

SEQ ID NO: 2094063 - RNA, 19 nt, Homo sapiens
  misc_RNA (1)...(19): siRNA sense strand
ugacagggaaugugcuuua

SEQ ID NO: 2094064 - RNA, 19 nt, Homo sapiens
  misc_RNA (1)...(19): siRNA sense strand
gcaaauaucagacgagcau

SEQ ID NO: 2094065 - RNA, 19 nt, Homo sapiens
  misc_RNA (1)...(19): siRNA sense strand
acacgaagauaaacacaug

SEQ ID NO: 2094066 - RNA, 19 nt, Homo sapiens
  misc_RNA (1)...(19): siRNA sense strand
caaggaacccuaucugaug

SEQ ID NO: 2094067 - RNA, 19 nt, Homo sapiens
  misc_RNA (1)...(19): siRNA sense strand
gaucacuucuggugccauu

SEQ ID NO: 2094068 - RNA, 19 nt, Homo sapiens
  misc_RNA (1)...(19): siRNA sense strand
aaagaaagccuggcaaaga

SEQ ID NO: 2094069 - RNA, 19 nt, Homo sapiens
  misc_RNA (1)...(19): siRNA sense strand
caacauaaacucaucuaca

SEQ ID NO: 2094070 - RNA, 19 nt, Homo sapiens
  misc_RNA (1)...(19): siRNA sense strand
auaaggagauggugauaga

SEQ ID NO: 2094071 - RNA, 19 nt, Homo sapiens
  misc_RNA (1)...(19): siRNA sense strand
aaagaugccuucguacuau

SEQ ID NO: 2094072 - RNA, 19 nt, Homo sapiens
  misc_RNA (1)...(19): siRNA sense strand
caaagcauguaaaucuaug

SEQ ID NO: 2094073 - RNA, 19 nt, Homo sapiens
  misc_RNA (1)...(19): siRNA sense strand
gaccagcacuuuaaucaac

SEQ ID NO: 2094074 - RNA, 19 nt, Homo sapiens
  misc_RNA (1)...(19): siRNA sense strand
agacgagcauuuacugaaa

SEQ ID NO: 2094075 - RNA, 19 nt, Homo sapiens
  misc_RNA (1)...(19): siRNA sense strand
uaagcuccaugccuaguaa

SEQ ID NO: 2094076 - RNA, 19 nt, Homo sapiens
  misc_RNA (1)...(19): siRNA sense strand
uuacagacuuugugauaga

SEQ ID NO: 2094077 - RNA, 19 nt, Homo sapiens
  misc_RNA (1)...(19): siRNA sense strand
gcaaggaacccuaucugau

SEQ ID NO: 2094078 - RNA, 19 nt, Homo sapiens
  misc_RNA (1)...(19): siRNA sense strand
gaaagcauacagaaguuug

SEQ ID NO: 2094079 - RNA, 19 nt, Homo sapiens
  misc_RNA (1)...(19): siRNA sense strand
gagaaaguguccaaagcau

SEQ ID NO: 2094080 - RNA, 19 nt, Homo sapiens
  misc_RNA (1)...(19): siRNA sense strand
ggaaaguggauauucagaa

SEQ ID NO: 2094081 - RNA, 19 nt, Homo sapiens
  misc_RNA (1)...(19): siRNA sense strand
uggaagagcuuaaggaaac

SEQ ID NO: 2094082 - RNA, 19 nt, Homo sapiens
  misc_RNA (1)...(19): siRNA sense strand
uaagacaaguagaagauca

SEQ ID NO: 2094083 - RNA, 19 nt, Homo sapiens
  misc_RNA (1)...(19): siRNA sense strand
auacaggccuuacaagaug

SEQ ID NO: 2094084 - RNA, 19 nt, Homo sapiens
  misc_RNA (1)...(19): siRNA sense strand
ggugauagaagaugcauug

SEQ ID NO: 2094085 - RNA, 19 nt, Homo sapiens
  misc_RNA (1)...(19): siRNA sense strand
uagaugagcugaguuucaa

SEQ ID NO: 2094086 - RNA, 19 nt, Homo sapiens
  misc_RNA (1)...(19): siRNA sense strand
gagaucgggugaagaaugg

SEQ ID NO: 2094087 - RNA, 19 nt, Homo sapiens
  misc_RNA (1)...(19): siRNA sense strand
gaucgaugacccagaaauu

SEQ ID NO: 2094088 - RNA, 19 nt, Homo sapiens
  misc_RNA (1)...(19): siRNA sense strand
aaacucuccuaacugcuua

SEQ ID NO: 2094089 - RNA, 19 nt, Homo sapiens
  misc_RNA (1)...(19): siRNA sense strand
cauugaaacuucuguaaag

SEQ ID NO: 2094090 - RNA, 19 nt, Homo sapiens
  misc_RNA (1)...(19): siRNA sense strand
guaaaucuaugugcaugug

SEQ ID NO: 2094091 - RNA, 19 nt, Homo sapiens
  misc_RNA (1)...(19): siRNA sense strand
aaaggaagcagauuauuuc

SEQ ID NO: 2094092 - RNA, 19 nt, Homo sapiens
  misc_RNA (1)...(19): siRNA sense strand
ugaaaugacaccuucguuu

SEQ ID NO: 2094093 - RNA, 19 nt, Homo sapiens
  misc_RNA (1)...(19): siRNA sense strand
ggaaggcuauucuaaaaug

SEQ ID NO: 2094094 - RNA, 19 nt, Homo sapiens
  misc_RNA (1)...(19): siRNA sense strand
ucaaggcucuguaauguac

SEQ ID NO: 2094095 - RNA, 19 nt, Homo sapiens
  misc_RNA (1)...(19): siRNA sense strand
caauguggcucgugagaag

SEQ ID NO: 2094096 - RNA, 19 nt, Homo sapiens
  misc_RNA (1)...(19): siRNA sense strand
ggaaauauucuggacaaug

SEQ ID NO: 2094097 - RNA, 19 nt, Homo sapiens
  misc_RNA (1)...(19): siRNA sense strand
gagacucagacauugauua

SEQ ID NO: 2094098 - RNA, 19 nt, Homo sapiens
  misc_RNA (1)...(19): siRNA sense strand
cagcuuguguggccuacua

SEQ ID NO: 2094099 - RNA, 19 nt, Homo sapiens
  misc_RNA (1)...(19): siRNA sense strand
gaaaagcaagcauuacuaa

SEQ ID NO: 2094100 - RNA, 19 nt, Homo sapiens
  misc_RNA (1)...(19): siRNA sense strand
ugacuuggaagaaucauuu

SEQ ID NO: 2094101 - RNA, 19 nt, Homo sapiens
  misc_RNA (1)...(19): siRNA sense strand
ugucaaggaucuucaagga

SEQ ID NO: 2094102 - RNA, 19 nt, Homo sapiens
  misc_RNA (1)...(19): siRNA sense strand
gaaaugacaccuucguuuu

SEQ ID NO: 2094103 - RNA, 19 nt, Homo sapiens
  misc_RNA (1)...(19): siRNA sense strand
gcaaggacaaggaccuauu

SEQ ID NO: 2094104 - RNA, 19 nt, Homo sapiens
  misc_RNA (1)...(19): siRNA sense strand
ccacugagcagaugaucaa

SEQ ID NO: 2094105 - RNA, 19 nt, Homo sapiens
  misc_RNA (1)...(19): siRNA sense strand
gauuuguggugaugucuga

SEQ ID NO: 2094106 - RNA, 19 nt, Homo sapiens
  misc_RNA (1)...(19): siRNA sense strand
acaaagccaucgcuggauu

SEQ ID NO: 2094107 - RNA, 19 nt, Homo sapiens
  misc_RNA (1)...(19): siRNA sense strand
gagaccagcacuuuaauca

SEQ ID NO: 2094108 - RNA, 19 nt, Homo sapiens
  misc_RNA (1)...(19): siRNA sense strand
gaaugugcuuuacugaauc

SEQ ID NO: 2094109 - RNA, 19 nt, Homo sapiens
  misc_RNA (1)...(19): siRNA sense strand
acaaggaccuauugcugaa

SEQ ID NO: 2094110 - RNA, 19 nt, Homo sapiens
  misc_RNA (1)...(19): siRNA sense strand
ggacuuacccaaaauauau

SEQ ID NO: 2094111 - RNA, 19 nt, Homo sapiens
  misc_RNA (1)...(19): siRNA sense strand
gaacaccacuccgaaguua

SEQ ID NO: 2094112 - RNA, 19 nt, Homo sapiens
  misc_RNA (1)...(19): siRNA sense strand
ggacagcgcuggaacuuca

SEQ ID NO: 2094113 - RNA, 19 nt, Homo sapiens
  misc_RNA (1)...(19): siRNA sense strand
ugacugaaguggacauuaa

SEQ ID NO: 2094114 - RNA, 19 nt, Homo sapiens
  misc_RNA (1)...(19): siRNA sense strand
caacaaagcgagcugaauu

SEQ ID NO: 2094115 - RNA, 19 nt, Homo sapiens
  misc_RNA (1)...(19): siRNA sense strand
gcgagaaccuccaagaugu

SEQ ID NO: 2094116 - RNA, 19 nt, Homo sapiens
  misc_RNA (1)...(19): siRNA sense strand
ggagauugacagcuacuua

SEQ ID NO: 2094117 - RNA, 19 nt, Homo sapiens
  misc_RNA (1)...(19): siRNA sense strand
ggacagcgacuuaaagcaa

SEQ ID NO: 2094118 - RNA, 19 nt, Homo sapiens
  misc_RNA (1)...(19): siRNA sense strand
gagcagcauuguguacuuu

SEQ ID NO: 2094119 - RNA, 19 nt, Homo sapiens
  misc_RNA (1)...(19): siRNA sense strand
ggaaguaccggcaccagaa

SEQ ID NO: 2094120 - RNA, 19 nt, Homo sapiens
  misc_RNA (1)...(19): siRNA sense strand
aaagcgagcugaauuccuu

SEQ ID NO: 2094121 - RNA, 19 nt, Homo sapiens
  misc_RNA (1)...(19): siRNA sense strand
gccgggagcugaucuacaa

SEQ ID NO: 2094122 - RNA, 19 nt, Homo sapiens
  misc_RNA (1)...(19): siRNA sense strand
gacggaggaucucaucaaa

SEQ ID NO: 2094123 - RNA, 19 nt, Homo sapiens
  misc_RNA (1)...(19): siRNA sense strand
gcagugccauccauugaau

SEQ ID NO: 2094124 - RNA, 19 nt, Homo sapiens
  misc_RNA (1)...(19): siRNA sense strand
gaagagcagugccauccau

SEQ ID NO: 2094125 - RNA, 19 nt, Homo sapiens
  misc_RNA (1)...(19): siRNA sense strand
cggaggaucucaucaaaca

SEQ ID NO: 2094126 - RNA, 19 nt, Homo sapiens
  misc_RNA (1)...(19): siRNA sense strand
gaaaggaccagggaagguu

SEQ ID NO: 2094127 - RNA, 19 nt, Homo sapiens
  misc_RNA (1)...(19): siRNA sense strand
gagcugaauuccuucuugu

SEQ ID NO: 2094128 - RNA, 19 nt, Homo sapiens
  misc_RNA (1)...(19): siRNA sense strand
gaucucaucaaacacuaua

SEQ ID NO: 2094129 - RNA, 19 nt, Homo sapiens
  misc_RNA (1)...(19): siRNA sense strand
ggaggagagugacauaguc

SEQ ID NO: 2094130 - RNA, 19 nt, Homo sapiens
  misc_RNA (1)...(19): siRNA sense strand
gagcagugccauccauuga

SEQ ID NO: 2094131 - RNA, 19 nt, Homo sapiens
  misc_RNA (1)...(19): siRNA sense strand
caagcggaaugagagaaua

SEQ ID NO: 2094132 - RNA, 19 nt, Homo sapiens
  misc_RNA (1)...(19): siRNA sense strand
gcgcuggaacuucacuuua

SEQ ID NO: 2094133 - RNA, 19 nt, Homo sapiens
  misc_RNA (1)...(19): siRNA sense strand
gcacaucuccacugaacug

SEQ ID NO: 2094134 - RNA, 19 nt, Homo sapiens
  misc_RNA (1)...(19): siRNA sense strand
ggaagguucagaagcaauu

SEQ ID NO: 2094135 - RNA, 19 nt, Homo sapiens
  misc_RNA (1)...(19): siRNA sense strand
gcagcauuguguacuuuga

SEQ ID NO: 2094136 - RNA, 19 nt, Homo sapiens
  misc_RNA (1)...(19): siRNA sense strand
ggugcuggcuuuccaaaca

SEQ ID NO: 2094137 - RNA, 19 nt, Homo sapiens
  misc_RNA (1)...(19): siRNA sense strand
caaaauggacagcgacuua

SEQ ID NO: 2094138 - RNA, 19 nt, Homo sapiens
  misc_RNA (1)...(19): siRNA sense strand
gacuaccucuucaaugcua

SEQ ID NO: 2094139 - RNA, 19 nt, Homo sapiens
  misc_RNA (1)...(19): siRNA sense strand
uaaagaccacugcgacaaa

SEQ ID NO: 2094140 - RNA, 19 nt, Homo sapiens
  misc_RNA (1)...(19): siRNA sense strand
cagacuaccucuucaaugc

SEQ ID NO: 2094141 - RNA, 19 nt, Homo sapiens
  misc_RNA (1)...(19): siRNA sense strand
gcaaugggcagccagagau

SEQ ID NO: 2094142 - RNA, 19 nt, Homo sapiens
  misc_RNA (1)...(19): siRNA sense strand
cagcauaagcacagacgua

SEQ ID NO: 2094143 - RNA, 19 nt, Homo sapiens
  misc_RNA (1)...(19): siRNA sense strand
ccagagaucguccaguuau

SEQ ID NO: 2094144 - RNA, 19 nt, Homo sapiens
  misc_RNA (1)...(19): siRNA sense strand
cagggaagguucagaagca

SEQ ID NO: 2094145 - RNA, 19 nt, Homo sapiens
  misc_RNA (1)...(19): siRNA sense strand
gacagcgacuuaaagcaau

SEQ ID NO: 2094146 - RNA, 19 nt, Homo sapiens
  misc_RNA (1)...(19): siRNA sense strand
ugaaggcuaugagguagaa

SEQ ID NO: 2094147 - RNA, 19 nt, Homo sapiens
  misc_RNA (1)...(19): siRNA sense strand
caggucaucuuugcuuuga

SEQ ID NO: 2094148 - RNA, 19 nt, Homo sapiens
  misc_RNA (1)...(19): siRNA sense strand
cccaccaucuuacuucuuu

SEQ ID NO: 2094149 - RNA, 19 nt, Homo sapiens
  misc_RNA (1)...(19): siRNA sense strand
cgagcugaauuccuucuug

SEQ ID NO: 2094150 - RNA, 19 nt, Homo sapiens
  misc_RNA (1)...(19): siRNA sense strand
gcaggaaccaaugcgauuu

SEQ ID NO: 2094151 - RNA, 19 nt, Homo sapiens
  misc_RNA (1)...(19): siRNA sense strand
caucacugcucaggagauu

SEQ ID NO: 2094152 - RNA, 19 nt, Homo sapiens
  misc_RNA (1)...(19): siRNA sense strand
gcgugaaggcuaugaggua

SEQ ID NO: 2094153 - RNA, 19 nt, Homo sapiens
  misc_RNA (1)...(19): siRNA sense strand
gcagacuaccucuucaaug

SEQ ID NO: 2094154 - RNA, 19 nt, Homo sapiens
  misc_RNA (1)...(19): siRNA sense strand
ucaacucccugacugaagu

SEQ ID NO: 2094155 - RNA, 19 nt, Homo sapiens
  misc_RNA (1)...(19): siRNA sense strand
acaggcacaucuccacuga

SEQ ID NO: 2094156 - RNA, 19 nt, Homo sapiens
  misc_RNA (1)...(19): siRNA sense strand
cucaggagauugacagcua

SEQ ID NO: 2094157 - RNA, 19 nt, Homo sapiens
  misc_RNA (1)...(19): siRNA sense strand
agccagagaucguccaguu

SEQ ID NO: 2094158 - RNA, 19 nt, Homo sapiens
  misc_RNA (1)...(19): siRNA sense strand
ucucuggacuccuguguuc

SEQ ID NO: 2094159 - RNA, 19 nt, Homo sapiens
  misc_RNA (1)...(19): siRNA sense strand
ggaggaguucccugacaaa

SEQ ID NO: 2094160 - RNA, 19 nt, Homo sapiens
  misc_RNA (1)...(19): siRNA sense strand
ucacugcucaggagauuga

SEQ ID NO: 2094161 - RNA, 19 nt, Homo sapiens
  misc_RNA (1)...(19): siRNA sense strand
ggcgagaaccuccaagaug

SEQ ID NO: 2094162 - RNA, 19 nt, Homo sapiens
  misc_RNA (1)...(19): siRNA sense strand
gaccagggaagguucagaa

SEQ ID NO: 2094163 - RNA, 19 nt, Homo sapiens
  misc_RNA (1)...(19): siRNA sense strand
ggacgacccauccacaaag

SEQ ID NO: 2094164 - RNA, 19 nt, Homo sapiens
  misc_RNA (1)...(19): siRNA sense strand
acacagugcuggauguuuu

SEQ ID NO: 2094165 - RNA, 19 nt, Homo sapiens
  misc_RNA (1)...(19): siRNA sense strand
cuuuggagcuggucauuuc

SEQ ID NO: 2094166 - RNA, 19 nt, Homo sapiens
  misc_RNA (1)...(19): siRNA sense strand
ggucaucuuugcuuugaac

SEQ ID NO: 2094167 - RNA, 19 nt, Homo sapiens
  misc_RNA (1)...(19): siRNA sense strand
cgacggaggaucucaucaa

SEQ ID NO: 2094168 - RNA, 19 nt, Homo sapiens
  misc_RNA (1)...(19): siRNA sense strand
aaagaccacugcgacaaau

SEQ ID NO: 2094169 - RNA, 19 nt, Homo sapiens
  misc_RNA (1)...(19): siRNA sense strand
gccagagaucguccaguua

SEQ ID NO: 2094170 - RNA, 19 nt, Homo sapiens
  misc_RNA (1)...(19): siRNA sense strand
ucacaggucaucuuugcuu

SEQ ID NO: 2094171 - RNA, 19 nt, Homo sapiens
  misc_RNA (1)...(19): siRNA sense strand
gcauaagcacagacguaaa

SEQ ID NO: 2094172 - RNA, 19 nt, Homo sapiens
  misc_RNA (1)...(19): siRNA sense strand
ccacaaagggaagaguaaa

SEQ ID NO: 2094173 - RNA, 19 nt, Homo sapiens
  misc_RNA (1)...(19): siRNA sense strand
gaguaugucaagcucauga

SEQ ID NO: 2094174 - RNA, 19 nt, Homo sapiens
  misc_RNA (1)...(19): siRNA sense strand
ccaguuaucagauucucaa

SEQ ID NO: 2094175 - RNA, 19 nt, Homo sapiens
  misc_RNA (1)...(19): siRNA sense strand
cacaggucaucuuugcuuu

SEQ ID NO: 2094176 - RNA, 19 nt, Homo sapiens
  misc_RNA (1)...(19): siRNA sense strand
augaugcccuuguggauga

SEQ ID NO: 2094177 - RNA, 19 nt, Homo sapiens
  misc_RNA (1)...(19): siRNA sense strand
cuacgcagacuaccucuuc

SEQ ID NO: 2094178 - RNA, 19 nt, Homo sapiens
  misc_RNA (1)...(19): siRNA sense strand
uggaggaguucccugacaa

SEQ ID NO: 2094179 - RNA, 19 nt, Homo sapiens
  misc_RNA (1)...(19): siRNA sense strand
guaaacgcaggaaccaaug

SEQ ID NO: 2094180 - RNA, 19 nt, Homo sapiens
  misc_RNA (1)...(19): siRNA sense strand
caacaacacagugcuggau

SEQ ID NO: 2094181 - RNA, 19 nt, Homo sapiens
  misc_RNA (1)...(19): siRNA sense strand
gcucucaccagcugucaga

SEQ ID NO: 2094182 - RNA, 19 nt, Homo sapiens
  misc_RNA (1)...(19): siRNA sense strand
gagauugacagcuacuuac

SEQ ID NO: 2094183 - RNA, 19 nt, Homo sapiens
  misc_RNA (1)...(19): siRNA sense strand
cgaacaccacuccgaaguu

SEQ ID NO: 2094184 - RNA, 19 nt, Homo sapiens
  misc_RNA (1)...(19): siRNA sense strand
acaacacagugcuggaugu

SEQ ID NO: 2094185 - RNA, 19 nt, Homo sapiens
  misc_RNA (1)...(19): siRNA sense strand
cauaagcacagacguaaac

SEQ ID NO: 2094186 - RNA, 19 nt, Homo sapiens
  misc_RNA (1)...(19): siRNA sense strand
gagcaggcagucuucagau

SEQ ID NO: 2094187 - RNA, 19 nt, Homo sapiens
  misc_RNA (1)...(19): siRNA sense strand
caaaugcuccugcgaacac

SEQ ID NO: 2094188 - RNA, 19 nt, Homo sapiens
  misc_RNA (1)...(19): siRNA sense strand
gcagagcagcauuguguac

SEQ ID NO: 2094189 - RNA, 19 nt, Homo sapiens
  misc_RNA (1)...(19): siRNA sense strand
cguaaacgcaggaaccaau

SEQ ID NO: 2094190 - RNA, 19 nt, Homo sapiens
  misc_RNA (1)...(19): siRNA sense strand
aaauggacagcgacuuaaa

SEQ ID NO: 2094191 - RNA, 19 nt, Homo sapiens
  misc_RNA (1)...(19): siRNA sense strand
gaaguaccggcaccagaag

SEQ ID NO: 2094192 - RNA, 19 nt, Homo sapiens
  misc_RNA (1)...(19): siRNA sense strand
gaggaucucaucaaacacu

SEQ ID NO: 2094193 - RNA, 19 nt, Homo sapiens
  misc_RNA (1)...(19): siRNA sense strand
gagcggcugaggaaacaga

SEQ ID NO: 2094194 - RNA, 19 nt, Homo sapiens
  misc_RNA (1)...(19): siRNA sense strand
guggagugccugucuuaga

SEQ ID NO: 2094195 - RNA, 19 nt, Homo sapiens
  misc_RNA (1)...(19): siRNA sense strand
acagcgacuuaaagcaauu

SEQ ID NO: 2094196 - RNA, 19 nt, Homo sapiens
  misc_RNA (1)...(19): siRNA sense strand
uauaccaucucagcucuca

SEQ ID NO: 2094197 - RNA, 19 nt, Homo sapiens
  misc_RNA (1)...(19): siRNA sense strand
uuacuucuuuggcacaauc

SEQ ID NO: 2094198 - RNA, 19 nt, Homo sapiens
  misc_RNA (1)...(19): siRNA sense strand
agcgagacccaccaucuua

SEQ ID NO: 2094199 - RNA, 19 nt, Homo sapiens
  misc_RNA (1)...(19): siRNA sense strand
gcgaacaccacuccgaagu

SEQ ID NO: 2094200 - RNA, 19 nt, Homo sapiens
  misc_RNA (1)...(19): siRNA sense strand
agagcagcauuguguacuu

SEQ ID NO: 2094201 - RNA, 19 nt, Homo sapiens
  misc_RNA (1)...(19): siRNA sense strand
gaauagggaagcgggugaa

SEQ ID NO: 2094202 - RNA, 19 nt, Homo sapiens
  misc_RNA (1)...(19): siRNA sense strand
gggugaugcucauggucaa

SEQ ID NO: 2094203 - RNA, 19 nt, Homo sapiens
  misc_RNA (1)...(19): siRNA sense strand
gaucguccaguuaucagau

SEQ ID NO: 2094204 - RNA, 19 nt, Homo sapiens
  misc_RNA (1)...(19): siRNA sense strand
ucaagcgccaccuggagua

SEQ ID NO: 2094205 - RNA, 19 nt, Homo sapiens
  misc_RNA (1)...(19): siRNA sense strand
ccucacaaucggcagcaua

SEQ ID NO: 2094206 - RNA, 19 nt, Homo sapiens
  misc_RNA (1)...(19): siRNA sense strand
ggaccucagcuccgucauc

SEQ ID NO: 2094207 - RNA, 19 nt, Homo sapiens
  misc_RNA (1)...(19): siRNA sense strand
cagagaucguccaguuauc

SEQ ID NO: 2094208 - RNA, 19 nt, Homo sapiens
  misc_RNA (1)...(19): siRNA sense strand
cgagcaggcagucuucaga

SEQ ID NO: 2094209 - RNA, 19 nt, Homo sapiens
  misc_RNA (1)...(19): siRNA sense strand
auucagggcucuggcaaug

SEQ ID NO: 2094210 - RNA, 19 nt, Homo sapiens
  misc_RNA (1)...(19): siRNA sense strand
gacgacccauccacaaagg

SEQ ID NO: 2094211 - RNA, 19 nt, Homo sapiens
  misc_RNA (1)...(19): siRNA sense strand
caacuguacugucauauuu

SEQ ID NO: 2094212 - RNA, 19 nt, Homo sapiens
  misc_RNA (1)...(19): siRNA sense strand
ugaaggagaugauacaauu

SEQ ID NO: 2094213 - RNA, 19 nt, Homo sapiens
  misc_RNA (1)...(19): siRNA sense strand
gcaagaggcagcugaagaa

SEQ ID NO: 2094214 - RNA, 19 nt, Homo sapiens
  misc_RNA (1)...(19): siRNA sense strand
guucggccaucaagagaua

SEQ ID NO: 2094215 - RNA, 19 nt, Homo sapiens
  misc_RNA (1)...(19): siRNA sense strand
auacaauucuccaaggaua

SEQ ID NO: 2094216 - RNA, 19 nt, Homo sapiens
  misc_RNA (1)...(19): siRNA sense strand
ggaaggugcccaaugagaa

SEQ ID NO: 2094217 - RNA, 19 nt, Homo sapiens
  misc_RNA (1)...(19): siRNA sense strand
gcccaacuguacugucaua

SEQ ID NO: 2094218 - RNA, 19 nt, Homo sapiens
  misc_RNA (1)...(19): siRNA sense strand
gcacaucuucggagugauu

SEQ ID NO: 2094219 - RNA, 19 nt, Homo sapiens
  misc_RNA (1)...(19): siRNA sense strand
ucaugagguugugaaauua

SEQ ID NO: 2094220 - RNA, 19 nt, Homo sapiens
  misc_RNA (1)...(19): siRNA sense strand
ggacguggacacauucuug

SEQ ID NO: 2094221 - RNA, 19 nt, Homo sapiens
  misc_RNA (1)...(19): siRNA sense strand
gaagcaggagccaguguuu

SEQ ID NO: 2094222 - RNA, 19 nt, Homo sapiens
  misc_RNA (1)...(19): siRNA sense strand
agaacgaauucauguacua

SEQ ID NO: 2094223 - RNA, 19 nt, Homo sapiens
  misc_RNA (1)...(19): siRNA sense strand
guacaucucgcacaucuuc

SEQ ID NO: 2094224 - RNA, 19 nt, Homo sapiens
  misc_RNA (1)...(19): siRNA sense strand
uugacagccuuguuaauuu

SEQ ID NO: 2094225 - RNA, 19 nt, Homo sapiens
  misc_RNA (1)...(19): siRNA sense strand
gggagugccuggagaagca

SEQ ID NO: 2094226 - RNA, 19 nt, Homo sapiens
  misc_RNA (1)...(19): siRNA sense strand
ccucaacguuagugaagaa

SEQ ID NO: 2094227 - RNA, 19 nt, Homo sapiens
  misc_RNA (1)...(19): siRNA sense strand
cugcaaagccuaugccauu

SEQ ID NO: 2094228 - RNA, 19 nt, Homo sapiens
  misc_RNA (1)...(19): siRNA sense strand
gaaggaugcuuggcugaac

SEQ ID NO: 2094229 - RNA, 19 nt, Homo sapiens
  misc_RNA (1)...(19): siRNA sense strand
gagcugacuguguccuaua

SEQ ID NO: 2094230 - RNA, 19 nt, Homo sapiens
  misc_RNA (1)...(19): siRNA sense strand
ggguggacguggacacauu

SEQ ID NO: 2094231 - RNA, 19 nt, Homo sapiens
  misc_RNA (1)...(19): siRNA sense strand
ggagcugacuguguccuau

SEQ ID NO: 2094232 - RNA, 19 nt, Homo sapiens
  misc_RNA (1)...(19): siRNA sense strand
aucaugagguugugaaauu

SEQ ID NO: 2094233 - RNA, 19 nt, Homo sapiens
  misc_RNA (1)...(19): siRNA sense strand
agaggcagcugaagaagca

SEQ ID NO: 2094234 - RNA, 19 nt, Homo sapiens
  misc_RNA (1)...(19): siRNA sense strand
ggagaggagcugacugugu

SEQ ID NO: 2094235 - RNA, 19 nt, Homo sapiens
  misc_RNA (1)...(19): siRNA sense strand
ccaacuggcaugcugguaa

SEQ ID NO: 2094236 - RNA, 19 nt, Homo sapiens
  misc_RNA (1)...(19): siRNA sense strand
uuucggagguccuuuccua

SEQ ID NO: 2094237 - RNA, 19 nt, Homo sapiens
  misc_RNA (1)...(19): siRNA sense strand
gaaccacaagaaugaaugu

SEQ ID NO: 2094238 - RNA, 19 nt, Homo sapiens
  misc_RNA (1)...(19): siRNA sense strand
ucgcacaucuucggaguga

SEQ ID NO: 2094239 - RNA, 19 nt, Homo sapiens
  misc_RNA (1)...(19): siRNA sense strand
ugacagccuuguuaauuuu

SEQ ID NO: 2094240 - RNA, 19 nt, Homo sapiens
  misc_RNA (1)...(19): siRNA sense strand
gaugguggacggcuauaug

SEQ ID NO: 2094241 - RNA, 19 nt, Homo sapiens
  misc_RNA (1)...(19): siRNA sense strand
ugccacaccugcuucaaga

SEQ ID NO: 2094242 - RNA, 19 nt, Homo sapiens
  misc_RNA (1)...(19): siRNA sense strand
ggguuuguaucaugagguu

SEQ ID NO: 2094243 - RNA, 19 nt, Homo sapiens
  misc_RNA (1)...(19): siRNA sense strand
ccaacuguacugucauauu

SEQ ID NO: 2094244 - RNA, 19 nt, Homo sapiens
  misc_RNA (1)...(19): siRNA sense strand
gaaccacguggagcacuuu

SEQ ID NO: 2094245 - RNA, 19 nt, Homo sapiens
  misc_RNA (1)...(19): siRNA sense strand
gggaaggugcccaaugaga

SEQ ID NO: 2094246 - RNA, 19 nt, Homo sapiens
  misc_RNA (1)...(19): siRNA sense strand
caacuggcaugcugguaac

SEQ ID NO: 2094247 - RNA, 19 nt, Homo sapiens
  misc_RNA (1)...(19): siRNA sense strand
ccgaggguuuguaucauga

SEQ ID NO: 2094248 - RNA, 19 nt, Homo sapiens
  misc_RNA (1)...(19): siRNA sense strand
ugauacaauucuccaagga

SEQ ID NO: 2094249 - RNA, 19 nt, Homo sapiens
  misc_RNA (1)...(19): siRNA sense strand
gaaggagaugauacaauuc

SEQ ID NO: 2094250 - RNA, 19 nt, Homo sapiens
  misc_RNA (1)...(19): siRNA sense strand
gcaaucaugaggcagugaa

SEQ ID NO: 2094251 - RNA, 19 nt, Homo sapiens
  misc_RNA (1)...(19): siRNA sense strand
gggaggaggagcagaagga

SEQ ID NO: 2094252 - RNA, 19 nt, Homo sapiens
  misc_RNA (1)...(19): siRNA sense strand
ccagcucuguuccacaaga

SEQ ID NO: 2094253 - RNA, 19 nt, Homo sapiens
  misc_RNA (1)...(19): siRNA sense strand
gagauggagcuacgcaugu

SEQ ID NO: 2094254 - RNA, 19 nt, Homo sapiens
  misc_RNA (1)...(19): siRNA sense strand
caguacaucucgcacaucu

SEQ ID NO: 2094255 - RNA, 19 nt, Homo sapiens
  misc_RNA (1)...(19): siRNA sense strand
gaaggugcccaaugagaac

SEQ ID NO: 2094256 - RNA, 19 nt, Homo sapiens
  misc_RNA (1)...(19): siRNA sense strand
gaacgaauucauguacuac

SEQ ID NO: 2094257 - RNA, 19 nt, Homo sapiens
  misc_RNA (1)...(19): siRNA sense strand
caaagccuaugccauucuc

SEQ ID NO: 2094258 - RNA, 19 nt, Homo sapiens
  misc_RNA (1)...(19): siRNA sense strand
ggcugaaccacaagaauga

SEQ ID NO: 2094259 - RNA, 19 nt, Homo sapiens
  misc_RNA (1)...(19): siRNA sense strand
gaugaucugcaaagccuau

SEQ ID NO: 2094260 - RNA, 19 nt, Homo sapiens
  misc_RNA (1)...(19): siRNA sense strand
ggcagugaaauccauguuu

SEQ ID NO: 2094261 - RNA, 19 nt, Homo sapiens
  misc_RNA (1)...(19): siRNA sense strand
cagcucuguuccacaagaa

SEQ ID NO: 2094262 - RNA, 19 nt, Homo sapiens
  misc_RNA (1)...(19): siRNA sense strand
ccgcagagccagcaguuca

SEQ ID NO: 2094263 - RNA, 19 nt, Homo sapiens
  misc_RNA (1)...(19): siRNA sense strand
ccagaacgaauucauguac

SEQ ID NO: 2094264 - RNA, 19 nt, Homo sapiens
  misc_RNA (1)...(19): siRNA sense strand
agauggagcuacgcauguu

SEQ ID NO: 2094265 - RNA, 19 nt, Homo sapiens
  misc_RNA (1)...(19): siRNA sense strand
ggcacgggaugaucugcaa

SEQ ID NO: 2094266 - RNA, 19 nt, Homo sapiens
  misc_RNA (1)...(19): siRNA sense strand
auacccagaugagaauuga

SEQ ID NO: 2094267 - RNA, 19 nt, Homo sapiens
  misc_RNA (1)...(19): siRNA sense strand
caauagggagaauggagaa

SEQ ID NO: 2094268 - RNA, 19 nt, Homo sapiens
  misc_RNA (1)...(19): siRNA sense strand
gauacaauucuccaaggau

SEQ ID NO: 2094269 - RNA, 19 nt, Homo sapiens
  misc_RNA (1)...(19): siRNA sense strand
gcaaagccuaugccauucu

SEQ ID NO: 2094270 - RNA, 19 nt, Homo sapiens
  misc_RNA (1)...(19): siRNA sense strand
guuccgaggguuuguauca

SEQ ID NO: 2094271 - RNA, 19 nt, Homo sapiens
  misc_RNA (1)...(19): siRNA sense strand
uggcccaacuguacuguca

SEQ ID NO: 2094272 - RNA, 19 nt, Homo sapiens
  misc_RNA (1)...(19): siRNA sense strand
gccagaacgaauucaugua

SEQ ID NO: 2094273 - RNA, 19 nt, Homo sapiens
  misc_RNA (1)...(19): siRNA sense strand
uuaacaauggcaaucauga

SEQ ID NO: 2094274 - RNA, 19 nt, Homo sapiens
  misc_RNA (1)...(19): siRNA sense strand
augcuuggcugaaccacaa

SEQ ID NO: 2094275 - RNA, 19 nt, Homo sapiens
  misc_RNA (1)...(19): siRNA sense strand
uuugacagccuuguuaauu

SEQ ID NO: 2094276 - RNA, 19 nt, Homo sapiens
  misc_RNA (1)...(19): siRNA sense strand
ggacacauucuugcaguac

SEQ ID NO: 2094277 - RNA, 19 nt, Homo sapiens
  misc_RNA (1)...(19): siRNA sense strand
gaaguggugaaggagauga

SEQ ID NO: 2094278 - RNA, 19 nt, Homo sapiens
  misc_RNA (1)...(19): siRNA sense strand
caagcccucucaggaagug

SEQ ID NO: 2094279 - RNA, 19 nt, Homo sapiens
  misc_RNA (1)...(19): siRNA sense strand
ugaaggccaccaaggaguu

SEQ ID NO: 2094280 - RNA, 19 nt, Homo sapiens
  misc_RNA (1)...(19): siRNA sense strand
uggacacauucuugcagua

SEQ ID NO: 2094281 - RNA, 19 nt, Homo sapiens
  misc_RNA (1)...(19): siRNA sense strand
gagccaguguuugcugaca

SEQ ID NO: 2094282 - RNA, 19 nt, Homo sapiens
  misc_RNA (1)...(19): siRNA sense strand
uugcugagcgggcuuauuc

SEQ ID NO: 2094283 - RNA, 19 nt, Homo sapiens
  misc_RNA (1)...(19): siRNA sense strand
cuucaccgcugagggcaaa

SEQ ID NO: 2094284 - RNA, 19 nt, Homo sapiens
  misc_RNA (1)...(19): siRNA sense strand
acacauucuugcaguacug

SEQ ID NO: 2094285 - RNA, 19 nt, Homo sapiens
  misc_RNA (1)...(19): siRNA sense strand
ucggagugauuaacugcaa

SEQ ID NO: 2094286 - RNA, 19 nt, Homo sapiens
  misc_RNA (1)...(19): siRNA sense strand
gcgaggcugcccugaacaa

SEQ ID NO: 2094287 - RNA, 19 nt, Homo sapiens
  misc_RNA (1)...(19): siRNA sense strand
gaggaugguggacggcuau

SEQ ID NO: 2094288 - RNA, 19 nt, Homo sapiens
  misc_RNA (1)...(19): siRNA sense strand
cucaggaaguggugaagga

SEQ ID NO: 2094289 - RNA, 19 nt, Homo sapiens
  misc_RNA (1)...(19): siRNA sense strand
ggagaacguggaggucuuc

SEQ ID NO: 2094290 - RNA, 19 nt, Homo sapiens
  misc_RNA (1)...(19): siRNA sense strand
cagaacgaauucauguacu

SEQ ID NO: 2094291 - RNA, 19 nt, Homo sapiens
  misc_RNA (1)...(19): siRNA sense strand
uggagaacguggaggucuu

SEQ ID NO: 2094292 - RNA, 19 nt, Homo sapiens
  misc_RNA (1)...(19): siRNA sense strand
gugaaggagaugauacaau

SEQ ID NO: 2094293 - RNA, 19 nt, Homo sapiens
  misc_RNA (1)...(19): siRNA sense strand
agaaccacguggagcacuu

SEQ ID NO: 2094294 - RNA, 19 nt, Homo sapiens
  misc_RNA (1)...(19): siRNA sense strand
uggccgagcccagcaauga

SEQ ID NO: 2094295 - RNA, 19 nt, Homo sapiens
  misc_RNA (1)...(19): siRNA sense strand
gcugugggcagugcaaguu

SEQ ID NO: 2094296 - RNA, 19 nt, Homo sapiens
  misc_RNA (1)...(19): siRNA sense strand
uggcugaaccacaagaaug

SEQ ID NO: 2094297 - RNA, 19 nt, Homo sapiens
  misc_RNA (1)...(19): siRNA sense strand
gcacgggaugaucugcaaa

SEQ ID NO: 2094298 - RNA, 19 nt, Homo sapiens
  misc_RNA (1)...(19): siRNA sense strand
ggcaugcugguaacauuga

SEQ ID NO: 2094299 - RNA, 19 nt, Homo sapiens
  misc_RNA (1)...(19): siRNA sense strand
cuggcaugcugguaacauu

SEQ ID NO: 2094300 - RNA, 19 nt, Homo sapiens
  misc_RNA (1)...(19): siRNA sense strand
gagaagcaggagccagugu

SEQ ID NO: 2094301 - RNA, 19 nt, Homo sapiens
  misc_RNA (1)...(19): siRNA sense strand
cuacuuugacugcacaugu

SEQ ID NO: 2094302 - RNA, 19 nt, Homo sapiens
  misc_RNA (1)...(19): siRNA sense strand
gaauguucggccaucaaga

SEQ ID NO: 2094303 - RNA, 19 nt, Homo sapiens
  misc_RNA (1)...(19): siRNA sense strand
gaaggccaccaaggaguuc

SEQ ID NO: 2094304 - RNA, 19 nt, Homo sapiens
  misc_RNA (1)...(19): siRNA sense strand
uaacaauggcaaucaugag

SEQ ID NO: 2094305 - RNA, 19 nt, Homo sapiens
  misc_RNA (1)...(19): siRNA sense strand
gguggacggcuauaugaag

SEQ ID NO: 2094306 - RNA, 19 nt, Homo sapiens
  misc_RNA (1)...(19): siRNA sense strand
ugugaacacugccagaaaa

SEQ ID NO: 2094307 - RNA, 19 nt, Homo sapiens
  misc_RNA (1)...(19): siRNA sense strand
ggauacauuggaaaagaua

SEQ ID NO: 2094308 - RNA, 19 nt, Homo sapiens
  misc_RNA (1)...(19): siRNA sense strand
ugacaccaacaucuacaug

SEQ ID NO: 2094309 - RNA, 19 nt, Homo sapiens
  misc_RNA (1)...(19): siRNA sense strand
caugagguugugaaauuau

SEQ ID NO: 2094310 - RNA, 19 nt, Homo sapiens
  misc_RNA (1)...(19): siRNA sense strand
uccgaggguuuguaucaug

SEQ ID NO: 2094311 - RNA, 19 nt, Homo sapiens
  misc_RNA (1)...(19): siRNA sense strand
caacuguacugucauauuu

SEQ ID NO: 2094312 - RNA, 19 nt, Homo sapiens
  misc_RNA (1)...(19): siRNA sense strand
ugaaggagaugauacaauu

SEQ ID NO: 2094313 - RNA, 19 nt, Homo sapiens
  misc_RNA (1)...(19): siRNA sense strand
gcaagaggcagcugaagaa

SEQ ID NO: 2094314 - RNA, 19 nt, Homo sapiens
  misc_RNA (1)...(19): siRNA sense strand
guucggccaucaagagaua

SEQ ID NO: 2094315 - RNA, 19 nt, Homo sapiens
  misc_RNA (1)...(19): siRNA sense strand
auacaauucuccaaggaua

SEQ ID NO: 2094316 - RNA, 19 nt, Homo sapiens
  misc_RNA (1)...(19): siRNA sense strand
ggaaggugcccaaugagaa

SEQ ID NO: 2094317 - RNA, 19 nt, Homo sapiens
  misc_RNA (1)...(19): siRNA sense strand
gcccaacuguacugucaua

SEQ ID NO: 2094318 - RNA, 19 nt, Homo sapiens
  misc_RNA (1)...(19): siRNA sense strand
gcacaucuucggagugauu

SEQ ID NO: 2094319 - RNA, 19 nt, Homo sapiens
  misc_RNA (1)...(19): siRNA sense strand
ucaugagguugugaaauua

SEQ ID NO: 2094320 - RNA, 19 nt, Homo sapiens
  misc_RNA (1)...(19): siRNA sense strand
ggacguggacacauucuug

SEQ ID NO: 2094321 - RNA, 19 nt, Homo sapiens
  misc_RNA (1)...(19): siRNA sense strand
gaagcaggagccaguguuu

SEQ ID NO: 2094322 - RNA, 19 nt, Homo sapiens
  misc_RNA (1)...(19): siRNA sense strand
agaacgaauucauguacua

SEQ ID NO: 2094323 - RNA, 19 nt, Homo sapiens
  misc_RNA (1)...(19): siRNA sense strand
guacaucucgcacaucuuc

SEQ ID NO: 2094324 - RNA, 19 nt, Homo sapiens
  misc_RNA (1)...(19): siRNA sense strand
uugacagccuuguuaauuu

SEQ ID NO: 2094325 - RNA, 19 nt, Homo sapiens
  misc_RNA (1)...(19): siRNA sense strand
gggagugccuggagaagca

SEQ ID NO: 2094326 - RNA, 19 nt, Homo sapiens
  misc_RNA (1)...(19): siRNA sense strand
ccucaacguuagugaagaa

SEQ ID NO: 2094327 - RNA, 19 nt, Homo sapiens
  misc_RNA (1)...(19): siRNA sense strand
cugcaaagccuaugccauu

SEQ ID NO: 2094328 - RNA, 19 nt, Homo sapiens
  misc_RNA (1)...(19): siRNA sense strand
gaaggaugcuuggcugaac

SEQ ID NO: 2094329 - RNA, 19 nt, Homo sapiens
  misc_RNA (1)...(19): siRNA sense strand
gagcugacuguguccuaua

SEQ ID NO: 2094330 - RNA, 19 nt, Homo sapiens
  misc_RNA (1)...(19): siRNA sense strand
ggguggacguggacacauu

SEQ ID NO: 2094331 - RNA, 19 nt, Homo sapiens
  misc_RNA (1)...(19): siRNA sense strand
ggagcugacuguguccuau

SEQ ID NO: 2094332 - RNA, 19 nt, Homo sapiens
  misc_RNA (1)...(19): siRNA sense strand
aucaugagguugugaaauu

SEQ ID NO: 2094333 - RNA, 19 nt, Homo sapiens
  misc_RNA (1)...(19): siRNA sense strand
agaggcagcugaagaagca

SEQ ID NO: 2094334 - RNA, 19 nt, Homo sapiens
  misc_RNA (1)...(19): siRNA sense strand
ggagaggagcugacugugu

SEQ ID NO: 2094335 - RNA, 19 nt, Homo sapiens
  misc_RNA (1)...(19): siRNA sense strand
ccaacuggcaugcugguaa

SEQ ID NO: 2094336 - RNA, 19 nt, Homo sapiens
  misc_RNA (1)...(19): siRNA sense strand
uuucggagguccuuuccua

SEQ ID NO: 2094337 - RNA, 19 nt, Homo sapiens
  misc_RNA (1)...(19): siRNA sense strand
gaaccacaagaaugaaugu

SEQ ID NO: 2094338 - RNA, 19 nt, Homo sapiens
  misc_RNA (1)...(19): siRNA sense strand
ucgcacaucuucggaguga

SEQ ID NO: 2094339 - RNA, 19 nt, Homo sapiens
  misc_RNA (1)...(19): siRNA sense strand
ugacagccuuguuaauuuu

SEQ ID NO: 2094340 - RNA, 19 nt, Homo sapiens
  misc_RNA (1)...(19): siRNA sense strand
gaugguggacggcuauaug

SEQ ID NO: 2094341 - RNA, 19 nt, Homo sapiens
  misc_RNA (1)...(19): siRNA sense strand
ugccacaccugcuucaaga

SEQ ID NO: 2094342 - RNA, 19 nt, Homo sapiens
  misc_RNA (1)...(19): siRNA sense strand
ggguuuguaucaugagguu

SEQ ID NO: 2094343 - RNA, 19 nt, Homo sapiens
  misc_RNA (1)...(19): siRNA sense strand
ccaacuguacugucauauu

SEQ ID NO: 2094344 - RNA, 19 nt, Homo sapiens
  misc_RNA (1)...(19): siRNA sense strand
gaaccacguggagcacuuu

SEQ ID NO: 2094345 - RNA, 19 nt, Homo sapiens
  misc_RNA (1)...(19): siRNA sense strand
gggaaggugcccaaugaga

SEQ ID NO: 2094346 - RNA, 19 nt, Homo sapiens
  misc_RNA (1)...(19): siRNA sense strand
caacuggcaugcugguaac

SEQ ID NO: 2094347 - RNA, 19 nt, Homo sapiens
  misc_RNA (1)...(19): siRNA sense strand
ccgaggguuuguaucauga

SEQ ID NO: 2094348 - RNA, 19 nt, Homo sapiens
  misc_RNA (1)...(19): siRNA sense strand
ugauacaauucuccaagga

SEQ ID NO: 2094349 - RNA, 19 nt, Homo sapiens
  misc_RNA (1)...(19): siRNA sense strand
gaaggagaugauacaauuc

SEQ ID NO: 2094350 - RNA, 19 nt, Homo sapiens
  misc_RNA (1)...(19): siRNA sense strand
gcaaucaugaggcagugaa

SEQ ID NO: 2094351 - RNA, 19 nt, Homo sapiens
  misc_RNA (1)...(19): siRNA sense strand
gggaggaggagcagaagga

SEQ ID NO: 2094352 - RNA, 19 nt, Homo sapiens
  misc_RNA (1)...(19): siRNA sense strand
ccagcucuguuccacaaga

SEQ ID NO: 2094353 - RNA, 19 nt, Homo sapiens
  misc_RNA (1)...(19): siRNA sense strand
gagauggagcuacgcaugu

SEQ ID NO: 2094354 - RNA, 19 nt, Homo sapiens
  misc_RNA (1)...(19): siRNA sense strand
caguacaucucgcacaucu

SEQ ID NO: 2094355 - RNA, 19 nt, Homo sapiens
  misc_RNA (1)...(19): siRNA sense strand
gaaggugcccaaugagaac

SEQ ID NO: 2094356 - RNA, 19 nt, Homo sapiens
  misc_RNA (1)...(19): siRNA sense strand
gaacgaauucauguacuac

SEQ ID NO: 2094357 - RNA, 19 nt, Homo sapiens
  misc_RNA (1)...(19): siRNA sense strand
caaagccuaugccauucuc

SEQ ID NO: 2094358 - RNA, 19 nt, Homo sapiens
  misc_RNA (1)...(19): siRNA sense strand
ggcugaaccacaagaauga

SEQ ID NO: 2094359 - RNA, 19 nt, Homo sapiens
  misc_RNA (1)...(19): siRNA sense strand
gaugaucugcaaagccuau

SEQ ID NO: 2094360 - RNA, 19 nt, Homo sapiens
  misc_RNA (1)...(19): siRNA sense strand
ggcagugaaauccauguuu

SEQ ID NO: 2094361 - RNA, 19 nt, Homo sapiens
  misc_RNA (1)...(19): siRNA sense strand
cagcucuguuccacaagaa

SEQ ID NO: 2094362 - RNA, 19 nt, Homo sapiens
  misc_RNA (1)...(19): siRNA sense strand
ccgcagagccagcaguuca

SEQ ID NO: 2094363 - RNA, 19 nt, Homo sapiens
  misc_RNA (1)...(19): siRNA sense strand
ccagaacgaauucauguac

SEQ ID NO: 2094364 - RNA, 19 nt, Homo sapiens
  misc_RNA (1)...(19): siRNA sense strand
agauggagcuacgcauguu

SEQ ID NO: 2094365 - RNA, 19 nt, Homo sapiens
  misc_RNA (1)...(19): siRNA sense strand
ggcacgggaugaucugcaa

SEQ ID NO: 2094366 - RNA, 19 nt, Homo sapiens
  misc_RNA (1)...(19): siRNA sense strand
auacccagaugagaauuga

SEQ ID NO: 2094367 - RNA, 19 nt, Homo sapiens
  misc_RNA (1)...(19): siRNA sense strand
gauacaauucuccaaggau

SEQ ID NO: 2094368 - RNA, 19 nt, Homo sapiens
  misc_RNA (1)...(19): siRNA sense strand
gcaaagccuaugccauucu

SEQ ID NO: 2094369 - RNA, 19 nt, Homo sapiens
  misc_RNA (1)...(19): siRNA sense strand
guuccgaggguuuguauca

SEQ ID NO: 2094370 - RNA, 19 nt, Homo sapiens
  misc_RNA (1)...(19): siRNA sense strand
uggcccaacuguacuguca

SEQ ID NO: 2094371 - RNA, 19 nt, Homo sapiens
  misc_RNA (1)...(19): siRNA sense strand
augcuuggcugaaccacaa

SEQ ID NO: 2094372 - RNA, 19 nt, Homo sapiens
  misc_RNA (1)...(19): siRNA sense strand
gccagaacgaauucaugua

SEQ ID NO: 2094373 - RNA, 19 nt, Homo sapiens
  misc_RNA (1)...(19): siRNA sense strand
uuugacagccuuguuaauu

SEQ ID NO: 2094374 - RNA, 19 nt, Homo sapiens
  misc_RNA (1)...(19): siRNA sense strand
uuaacaauggcaaucauga

SEQ ID NO: 2094375 - RNA, 19 nt, Homo sapiens
  misc_RNA (1)...(19): siRNA sense strand
ggacacauucuugcaguac

SEQ ID NO: 2094376 - RNA, 19 nt, Homo sapiens
  misc_RNA (1)...(19): siRNA sense strand
ugaaggccaccaaggaguu

SEQ ID NO: 2094377 - RNA, 19 nt, Homo sapiens
  misc_RNA (1)...(19): siRNA sense strand
gaaguggugaaggagauga

SEQ ID NO: 2094378 - RNA, 19 nt, Homo sapiens
  misc_RNA (1)...(19): siRNA sense strand
caagcccucucaggaagug

SEQ ID NO: 2094379 - RNA, 19 nt, Homo sapiens
  misc_RNA (1)...(19): siRNA sense strand
uggacacauucuugcagua

SEQ ID NO: 2094380 - RNA, 19 nt, Homo sapiens
  misc_RNA (1)...(19): siRNA sense strand
gagccaguguuugcugaca

SEQ ID NO: 2094381 - RNA, 19 nt, Homo sapiens
  misc_RNA (1)...(19): siRNA sense strand
cuucaccgcugagggcaaa

SEQ ID NO: 2094382 - RNA, 19 nt, Homo sapiens
  misc_RNA (1)...(19): siRNA sense strand
uugcugagcgggcuuauuc

SEQ ID NO: 2094383 - RNA, 19 nt, Homo sapiens
  misc_RNA (1)...(19): siRNA sense strand
acacauucuugcaguacug

SEQ ID NO: 2094384 - RNA, 19 nt, Homo sapiens
  misc_RNA (1)...(19): siRNA sense strand
ucggagugauuaacugcaa

SEQ ID NO: 2094385 - RNA, 19 nt, Homo sapiens
  misc_RNA (1)...(19): siRNA sense strand
gcgaggcugcccugaacaa

SEQ ID NO: 2094386 - RNA, 19 nt, Homo sapiens
  misc_RNA (1)...(19): siRNA sense strand
gaggaugguggacggcuau

SEQ ID NO: 2094387 - RNA, 19 nt, Homo sapiens
  misc_RNA (1)...(19): siRNA sense strand
cucaggaaguggugaagga

SEQ ID NO: 2094388 - RNA, 19 nt, Homo sapiens
  misc_RNA (1)...(19): siRNA sense strand
ggagaacguggaggucuuc

SEQ ID NO: 2094389 - RNA, 19 nt, Homo sapiens
  misc_RNA (1)...(19): siRNA sense strand
cagaacgaauucauguacu

SEQ ID NO: 2094390 - RNA, 19 nt, Homo sapiens
  misc_RNA (1)...(19): siRNA sense strand
gugaaggagaugauacaau

SEQ ID NO: 2094391 - RNA, 19 nt, Homo sapiens
  misc_RNA (1)...(19): siRNA sense strand
cuacuuugacugcacaugu

SEQ ID NO: 2094392 - RNA, 19 nt, Homo sapiens
  misc_RNA (1)...(19): siRNA sense strand
uggccgagcccagcaauga

SEQ ID NO: 2094393 - RNA, 19 nt, Homo sapiens
  misc_RNA (1)...(19): siRNA sense strand
gcugugggcagugcaaguu

SEQ ID NO: 2094394 - RNA, 19 nt, Homo sapiens
  misc_RNA (1)...(19): siRNA sense strand
gcacgggaugaucugcaaa

SEQ ID NO: 2094395 - RNA, 19 nt, Homo sapiens
  misc_RNA (1)...(19): siRNA sense strand
uggcugaaccacaagaaug

SEQ ID NO: 2094396 - RNA, 19 nt, Homo sapiens
  misc_RNA (1)...(19): siRNA sense strand
ggcaugcugguaacauuga

SEQ ID NO: 2094397 - RNA, 19 nt, Homo sapiens
  misc_RNA (1)...(19): siRNA sense strand
cuggcaugcugguaacauu

SEQ ID NO: 2094398 - RNA, 19 nt, Homo sapiens
  misc_RNA (1)...(19): siRNA sense strand
gaauguucggccaucaaga

SEQ ID NO: 2094399 - RNA, 19 nt, Homo sapiens
  misc_RNA (1)...(19): siRNA sense strand
gagaagcaggagccagugu

SEQ ID NO: 2094400 - RNA, 19 nt, Homo sapiens
  misc_RNA (1)...(19): siRNA sense strand
agaaccacguggagcacuu

SEQ ID NO: 2094401 - RNA, 19 nt, Homo sapiens
  misc_RNA (1)...(19): siRNA sense strand
gaaggccaccaaggaguuc

SEQ ID NO: 2094402 - RNA, 19 nt, Homo sapiens
  misc_RNA (1)...(19): siRNA sense strand
uaacaauggcaaucaugag

SEQ ID NO: 2094403 - RNA, 19 nt, Homo sapiens
  misc_RNA (1)...(19): siRNA sense strand
gguggacggcuauaugaag

SEQ ID NO: 2094404 - RNA, 19 nt, Homo sapiens
  misc_RNA (1)...(19): siRNA sense strand
ugugaacacugccagaaaa

SEQ ID NO: 2094405 - RNA, 19 nt, Homo sapiens
  misc_RNA (1)...(19): siRNA sense strand
cgcaagaggcagcugaaga

SEQ ID NO: 2094406 - RNA, 19 nt, Homo sapiens
  misc_RNA (1)...(19): siRNA sense strand
ugacaccaacaucuacaug

SEQ ID NO: 2094407 - RNA, 19 nt, Homo sapiens
  misc_RNA (1)...(19): siRNA sense strand
caugagguugugaaauuau

SEQ ID NO: 2094408 - RNA, 19 nt, Homo sapiens
  misc_RNA (1)...(19): siRNA sense strand
uccgaggguuuguaucaug

SEQ ID NO: 2094409 - RNA, 19 nt, Homo sapiens
  misc_RNA (1)...(19): siRNA sense strand
ggauacauuggaaaagaua

SEQ ID NO: 2094410 - RNA, 19 nt, Homo sapiens
  misc_RNA (1)...(19): siRNA sense strand
acaccaacaucuacaugcu

SEQ ID NO: 2094411 - RNA, 19 nt, Homo sapiens
  misc_RNA (1)...(19): siRNA sense strand
gaaaagagaugcaaaguua

SEQ ID NO: 2094412 - RNA, 19 nt, Homo sapiens
  misc_RNA (1)...(19): siRNA sense strand
gaacauauccugcauuaga

SEQ ID NO: 2094413 - RNA, 19 nt, Homo sapiens
  misc_RNA (1)...(19): siRNA sense strand
ccaaagaacccuacauuua

SEQ ID NO: 2094414 - RNA, 19 nt, Homo sapiens
  misc_RNA (1)...(19): siRNA sense strand
gaaaugaccucacagaagu

SEQ ID NO: 2094415 - RNA, 19 nt, Homo sapiens
  misc_RNA (1)...(19): siRNA sense strand
acacuuagcugguuuguuu

SEQ ID NO: 2094416 - RNA, 19 nt, Homo sapiens
  misc_RNA (1)...(19): siRNA sense strand
ggagagaguuauuguauga

SEQ ID NO: 2094417 - RNA, 19 nt, Homo sapiens
  misc_RNA (1)...(19): siRNA sense strand
ggaaggagaucgucuacaa

SEQ ID NO: 2094418 - RNA, 19 nt, Homo sapiens
  misc_RNA (1)...(19): siRNA sense strand
caaagaacccuacauuuaa

SEQ ID NO: 2094419 - RNA, 19 nt, Homo sapiens
  misc_RNA (1)...(19): siRNA sense strand
gauaucagguggcugguua

SEQ ID NO: 2094420 - RNA, 19 nt, Homo sapiens
  misc_RNA (1)...(19): siRNA sense strand
uaacucagcuuacaaugaa

SEQ ID NO: 2094421 - RNA, 19 nt, Homo sapiens
  misc_RNA (1)...(19): siRNA sense strand
gggaagcagucaaguguua

SEQ ID NO: 2094422 - RNA, 19 nt, Homo sapiens
  misc_RNA (1)...(19): siRNA sense strand
gagagugccugaacuauug

SEQ ID NO: 2094423 - RNA, 19 nt, Homo sapiens
  misc_RNA (1)...(19): siRNA sense strand
ucagagaucuucuucguuu

SEQ ID NO: 2094424 - RNA, 19 nt, Homo sapiens
  misc_RNA (1)...(19): siRNA sense strand
uauaggacaugcuguaaua

SEQ ID NO: 2094425 - RNA, 19 nt, Homo sapiens
  misc_RNA (1)...(19): siRNA sense strand
caugagaccugaauuggua

SEQ ID NO: 2094426 - RNA, 19 nt, Homo sapiens
  misc_RNA (1)...(19): siRNA sense strand
gugcacaacuguuuaauug

SEQ ID NO: 2094427 - RNA, 19 nt, Homo sapiens
  misc_RNA (1)...(19): siRNA sense strand
caaugaagaugcaguuaaa

SEQ ID NO: 2094428 - RNA, 19 nt, Homo sapiens
  misc_RNA (1)...(19): siRNA sense strand
ggauguggaugaagaaauu

SEQ ID NO: 2094429 - RNA, 19 nt, Homo sapiens
  misc_RNA (1)...(19): siRNA sense strand
gcaauucacugaugaccaa

SEQ ID NO: 2094430 - RNA, 19 nt, Homo sapiens
  misc_RNA (1)...(19): siRNA sense strand
gaagaugcaguuaaagaua

SEQ ID NO: 2094431 - RNA, 19 nt, Homo sapiens
  misc_RNA (1)...(19): siRNA sense strand
ggaauuacuucaacaguca

SEQ ID NO: 2094432 - RNA, 19 nt, Homo sapiens
  misc_RNA (1)...(19): siRNA sense strand
guagaugcaugucgacuuu

SEQ ID NO: 2094433 - RNA, 19 nt, Homo sapiens
  misc_RNA (1)...(19): siRNA sense strand
gaacauaaacagcaauuca

SEQ ID NO: 2094434 - RNA, 19 nt, Homo sapiens
  misc_RNA (1)...(19): siRNA sense strand
aagaacauauccugcauua

SEQ ID NO: 2094435 - RNA, 19 nt, Homo sapiens
  misc_RNA (1)...(19): siRNA sense strand
gaaauucagaaccauguua

SEQ ID NO: 2094436 - RNA, 19 nt, Homo sapiens
  misc_RNA (1)...(19): siRNA sense strand
gaagaauggcgaccuuuaa

SEQ ID NO: 2094437 - RNA, 19 nt, Homo sapiens
  misc_RNA (1)...(19): siRNA sense strand
aaagaaaccugcccuggaa

SEQ ID NO: 2094438 - RNA, 19 nt, Homo sapiens
  misc_RNA (1)...(19): siRNA sense strand
gcauauaacuucuguugca

SEQ ID NO: 2094439 - RNA, 19 nt, Homo sapiens
  misc_RNA (1)...(19): siRNA sense strand
gaaaagccaucaauaguga

SEQ ID NO: 2094440 - RNA, 19 nt, Homo sapiens
  misc_RNA (1)...(19): siRNA sense strand
guagacaccuugcuagaug

SEQ ID NO: 2094441 - RNA, 19 nt, Homo sapiens
  misc_RNA (1)...(19): siRNA sense strand
gauuucgucuuacaguuua

SEQ ID NO: 2094442 - RNA, 19 nt, Homo sapiens
  misc_RNA (1)...(19): siRNA sense strand
uggcaaaccuucaugauug

SEQ ID NO: 2094443 - RNA, 19 nt, Homo sapiens
  misc_RNA (1)...(19): siRNA sense strand
ucagagcacuguugauuga

SEQ ID NO: 2094444 - RNA, 19 nt, Homo sapiens
  misc_RNA (1)...(19): siRNA sense strand
gaauuacuauggaaucuuc

SEQ ID NO: 2094445 - RNA, 19 nt, Homo sapiens
  misc_RNA (1)...(19): siRNA sense strand
gagaagagacagaaacuga

SEQ ID NO: 2094446 - RNA, 19 nt, Homo sapiens
  misc_RNA (1)...(19): siRNA sense strand
gggagcagcuuguaaagau

SEQ ID NO: 2094447 - RNA, 19 nt, Homo sapiens
  misc_RNA (1)...(19): siRNA sense strand
gauaaucauugguugcauu

SEQ ID NO: 2094448 - RNA, 19 nt, Homo sapiens
  misc_RNA (1)...(19): siRNA sense strand
gaaagaacauauccugcau

SEQ ID NO: 2094449 - RNA, 19 nt, Homo sapiens
  misc_RNA (1)...(19): siRNA sense strand
gaacaagcgggauggagua

SEQ ID NO: 2094450 - RNA, 19 nt, Homo sapiens
  misc_RNA (1)...(19): siRNA sense strand
gaagugugcugaccuacau

SEQ ID NO: 2094451 - RNA, 19 nt, Homo sapiens
  misc_RNA (1)...(19): siRNA sense strand
ugaaauagcggaauuacuu

SEQ ID NO: 2094452 - RNA, 19 nt, Homo sapiens
  misc_RNA (1)...(19): siRNA sense strand
ggauuaaauugguuuccua

SEQ ID NO: 2094453 - RNA, 19 nt, Homo sapiens
  misc_RNA (1)...(19): siRNA sense strand
caaccaugaugcaauugua

SEQ ID NO: 2094454 - RNA, 19 nt, Homo sapiens
  misc_RNA (1)...(19): siRNA sense strand
guacaauccucacccaaug

SEQ ID NO: 2094455 - RNA, 19 nt, Homo sapiens
  misc_RNA (1)...(19): siRNA sense strand
cuccagaacuucaucauaa

SEQ ID NO: 2094456 - RNA, 19 nt, Homo sapiens
  misc_RNA (1)...(19): siRNA sense strand
gaauuugacucccgaugga

SEQ ID NO: 2094457 - RNA, 19 nt, Homo sapiens
  misc_RNA (1)...(19): siRNA sense strand
cagcugaauuugaggauuu

SEQ ID NO: 2094458 - RNA, 19 nt, Homo sapiens
  misc_RNA (1)...(19): siRNA sense strand
gaaauaaggcucagcaaac

SEQ ID NO: 2094459 - RNA, 19 nt, Homo sapiens
  misc_RNA (1)...(19): siRNA sense strand
aaacagcaauucacugaug

SEQ ID NO: 2094460 - RNA, 19 nt, Homo sapiens
  misc_RNA (1)...(19): siRNA sense strand
ugacacacuuggagaguuu

SEQ ID NO: 2094461 - RNA, 19 nt, Homo sapiens
  misc_RNA (1)...(19): siRNA sense strand
gagcauauaacuucuguug

SEQ ID NO: 2094462 - RNA, 19 nt, Homo sapiens
  misc_RNA (1)...(19): siRNA sense strand
uguaugagcugguaucaau

SEQ ID NO: 2094463 - RNA, 19 nt, Homo sapiens
  misc_RNA (1)...(19): siRNA sense strand
guaaagugcugcccagaag

SEQ ID NO: 2094464 - RNA, 19 nt, Homo sapiens
  misc_RNA (1)...(19): siRNA sense strand
ggacaggguggaccaagua

SEQ ID NO: 2094465 - RNA, 19 nt, Homo sapiens
  misc_RNA (1)...(19): siRNA sense strand
gccacaagcuuacugauca

SEQ ID NO: 2094466 - RNA, 19 nt, Homo sapiens
  misc_RNA (1)...(19): siRNA sense strand
uaaaugauccucagccuau

SEQ ID NO: 2094467 - RNA, 19 nt, Homo sapiens
  misc_RNA (1)...(19): siRNA sense strand
gcgagacccugguucugua

SEQ ID NO: 2094468 - RNA, 19 nt, Homo sapiens
  misc_RNA (1)...(19): siRNA sense strand
ccuaaacccacccaaauua

SEQ ID NO: 2094469 - RNA, 19 nt, Homo sapiens
  misc_RNA (1)...(19): siRNA sense strand
guaaaucucuuugcucgau

SEQ ID NO: 2094470 - RNA, 19 nt, Homo sapiens
  misc_RNA (1)...(19): siRNA sense strand
uagcuacgaugaacugaaa

SEQ ID NO: 2094471 - RNA, 19 nt, Homo sapiens
  misc_RNA (1)...(19): siRNA sense strand
ccaaggaucucacaagcau

SEQ ID NO: 2094472 - RNA, 19 nt, Homo sapiens
  misc_RNA (1)...(19): siRNA sense strand
gcaggaacauaaacagcaa

SEQ ID NO: 2094473 - RNA, 19 nt, Homo sapiens
  misc_RNA (1)...(19): siRNA sense strand
caaguaagcuagugcaaaa

SEQ ID NO: 2094474 - RNA, 19 nt, Homo sapiens
  misc_RNA (1)...(19): siRNA sense strand
ggagagugccugaacuauu

SEQ ID NO: 2094475 - RNA, 19 nt, Homo sapiens
  misc_RNA (1)...(19): siRNA sense strand
ucuaagcacuggacauuug

SEQ ID NO: 2094476 - RNA, 19 nt, Homo sapiens
  misc_RNA (1)...(19): siRNA sense strand
gacaaggaauuacuaugga

SEQ ID NO: 2094477 - RNA, 19 nt, Homo sapiens
  misc_RNA (1)...(19): siRNA sense strand
agaaagaaaugaccucaca

SEQ ID NO: 2094478 - RNA, 19 nt, Homo sapiens
  misc_RNA (1)...(19): siRNA sense strand
gagcugguaucaauuccaa

SEQ ID NO: 2094479 - RNA, 19 nt, Homo sapiens
  misc_RNA (1)...(19): siRNA sense strand
ugaaaccucucauggaugu

SEQ ID NO: 2094480 - RNA, 19 nt, Homo sapiens
  misc_RNA (1)...(19): siRNA sense strand
gcagaacagauuauauuug

SEQ ID NO: 2094481 - RNA, 19 nt, Homo sapiens
  misc_RNA (1)...(19): siRNA sense strand
gcauugggcuucugucucu

SEQ ID NO: 2094482 - RNA, 19 nt, Homo sapiens
  misc_RNA (1)...(19): siRNA sense strand
ccaauguuccaaagaaaua

SEQ ID NO: 2094483 - RNA, 19 nt, Homo sapiens
  misc_RNA (1)...(19): siRNA sense strand
gauaauauaggguacauag

SEQ ID NO: 2094484 - RNA, 19 nt, Homo sapiens
  misc_RNA (1)...(19): siRNA sense strand
ggagaccacuuuaugacau

SEQ ID NO: 2094485 - RNA, 19 nt, Homo sapiens
  misc_RNA (1)...(19): siRNA sense strand
gaauggcgaccuuuaaugu

SEQ ID NO: 2094486 - RNA, 19 nt, Homo sapiens
  misc_RNA (1)...(19): siRNA sense strand
gaaucucagugcacaucua

SEQ ID NO: 2094487 - RNA, 19 nt, Homo sapiens
  misc_RNA (1)...(19): siRNA sense strand
caagcgggauggaguaaau

SEQ ID NO: 2094488 - RNA, 19 nt, Homo sapiens
  misc_RNA (1)...(19): siRNA sense strand
gaaauugaaaccucucaug

SEQ ID NO: 2094489 - RNA, 19 nt, Homo sapiens
  misc_RNA (1)...(19): siRNA sense strand
gcaauuguaguucgaaaga

SEQ ID NO: 2094490 - RNA, 19 nt, Homo sapiens
  misc_RNA (1)...(19): siRNA sense strand
caagcaaugucccuggaaa

SEQ ID NO: 2094491 - RNA, 19 nt, Homo sapiens
  misc_RNA (1)...(19): siRNA sense strand
ggccagcgauuguuucuuc

SEQ ID NO: 2094492 - RNA, 19 nt, Homo sapiens
  misc_RNA (1)...(19): siRNA sense strand
ccugauagccacaagcuua

SEQ ID NO: 2094493 - RNA, 19 nt, Homo sapiens
  misc_RNA (1)...(19): siRNA sense strand
gacagagcaccuaggauua

SEQ ID NO: 2094494 - RNA, 19 nt, Homo sapiens
  misc_RNA (1)...(19): siRNA sense strand
gcgauguguugcagaaauu

SEQ ID NO: 2094495 - RNA, 19 nt, Homo sapiens
  misc_RNA (1)...(19): siRNA sense strand
ggagucaaguugcuuugug

SEQ ID NO: 2094496 - RNA, 19 nt, Homo sapiens
  misc_RNA (1)...(19): siRNA sense strand
acagucaggugagaaauaa

SEQ ID NO: 2094497 - RNA, 19 nt, Homo sapiens
  misc_RNA (1)...(19): siRNA sense strand
ugaaaugucuagagaugau

SEQ ID NO: 2094498 - RNA, 19 nt, Homo sapiens
  misc_RNA (1)...(19): siRNA sense strand
ggagaguuuggucgaauua

SEQ ID NO: 2094499 - RNA, 19 nt, Homo sapiens
  misc_RNA (1)...(19): siRNA sense strand
gaagagacagaaacugaga

SEQ ID NO: 2094500 - RNA, 19 nt, Homo sapiens
  misc_RNA (1)...(19): siRNA sense strand
ugacaugguagaaagaaua

SEQ ID NO: 2094501 - RNA, 19 nt, Homo sapiens
  misc_RNA (1)...(19): siRNA sense strand
cuauugagaugacuguaaa

SEQ ID NO: 2094502 - RNA, 19 nt, Homo sapiens
  misc_RNA (1)...(19): siRNA sense strand
gagaugcaaaguuauguuu

SEQ ID NO: 2094503 - RNA, 19 nt, Homo sapiens
  misc_RNA (1)...(19): siRNA sense strand
ccagaaagauggggacuua

SEQ ID NO: 2094504 - RNA, 19 nt, Homo sapiens
  misc_RNA (1)...(19): siRNA sense strand
uauagaaaguagcacauug

SEQ ID NO: 2094505 - RNA, 19 nt, Homo sapiens
  misc_RNA (1)...(19): siRNA sense strand
ggacagauguuuuggacuu

SEQ ID NO: 2094506 - RNA, 19 nt, Homo sapiens
  misc_RNA (1)...(19): siRNA sense strand
gcaacuaguaaaucucuuu

SEQ ID NO: 2094507 - RNA, 19 nt, Homo sapiens
  misc_RNA (1)...(19): siRNA sense strand
ccgcugagaugcuagaaga

SEQ ID NO: 2094508 - RNA, 19 nt, Homo sapiens
  misc_RNA (1)...(19): siRNA sense strand
guacauagauugggaucca

SEQ ID NO: 2094509 - RNA, 19 nt, Homo sapiens
  misc_RNA (1)...(19): siRNA sense strand
gugcugaccuacauauuca

SEQ ID NO: 2094510 - RNA, 19 nt, Homo sapiens
  misc_RNA (1)...(19): siRNA sense strand
ggagcagcuuguaaagauu

SEQ ID NO: 2094511 - RNA, 19 nt, Homo sapiens
  misc_RNA (1)...(19): siRNA sense strand
ccaaggagcucgagaaaua

SEQ ID NO: 2094512 - RNA, 19 nt, Homo sapiens
  misc_RNA (1)...(19): siRNA sense strand
gagaagauguggaggauga

SEQ ID NO: 2094513 - RNA, 19 nt, Homo sapiens
  misc_RNA (1)...(19): siRNA sense strand
gcacauggauccaaucaau

SEQ ID NO: 2094514 - RNA, 19 nt, Homo sapiens
  misc_RNA (1)...(19): siRNA sense strand
gaacucagauuaccacgau

SEQ ID NO: 2094515 - RNA, 19 nt, Homo sapiens
  misc_RNA (1)...(19): siRNA sense strand
ggaagacgauagugacaaa

SEQ ID NO: 2094516 - RNA, 19 nt, Homo sapiens
  misc_RNA (1)...(19): siRNA sense strand
ggacucccuuaaacuauua

SEQ ID NO: 2094517 - RNA, 19 nt, Homo sapiens
  misc_RNA (1)...(19): siRNA sense strand
gcacagagcaaagaagaua

SEQ ID NO: 2094518 - RNA, 19 nt, Homo sapiens
  misc_RNA (1)...(19): siRNA sense strand
gagcaaagaagauaaagaa

SEQ ID NO: 2094519 - RNA, 19 nt, Homo sapiens
  misc_RNA (1)...(19): siRNA sense strand
ugacggaaauguauacaaa

SEQ ID NO: 2094520 - RNA, 19 nt, Homo sapiens
  misc_RNA (1)...(19): siRNA sense strand
ugaguugaguuuagacuua

SEQ ID NO: 2094521 - RNA, 19 nt, Homo sapiens
  misc_RNA (1)...(19): siRNA sense strand
gaaggacgccggacagaaa

SEQ ID NO: 2094522 - RNA, 19 nt, Homo sapiens
  misc_RNA (1)...(19): siRNA sense strand
gauggaagccgauaugauu

SEQ ID NO: 2094523 - RNA, 19 nt, Homo sapiens
  misc_RNA (1)...(19): siRNA sense strand
gaagagguguucgacauga

SEQ ID NO: 2094524 - RNA, 19 nt, Homo sapiens
  misc_RNA (1)...(19): siRNA sense strand
ccaggaggcucuagaagaa

SEQ ID NO: 2094525 - RNA, 19 nt, Homo sapiens
  misc_RNA (1)...(19): siRNA sense strand
ucacaauacucgaauaaug

SEQ ID NO: 2094526 - RNA, 19 nt, Homo sapiens
  misc_RNA (1)...(19): siRNA sense strand
gcaaagaagauaaagaaga

SEQ ID NO: 2094527 - RNA, 19 nt, Homo sapiens
  misc_RNA (1)...(19): siRNA sense strand
gaacagcaauaccuccaau

SEQ ID NO: 2094528 - RNA, 19 nt, Homo sapiens
  misc_RNA (1)...(19): siRNA sense strand
gaacaacggacucauggaa

SEQ ID NO: 2094529 - RNA, 19 nt, Homo sapiens
  misc_RNA (1)...(19): siRNA sense strand
ucaaggagcuaaaugaauc

SEQ ID NO: 2094530 - RNA, 19 nt, Homo sapiens
  misc_RNA (1)...(19): siRNA sense strand
cagcaagacaguagaaaua

SEQ ID NO: 2094531 - RNA, 19 nt, Homo sapiens
  misc_RNA (1)...(19): siRNA sense strand
gcaagacaguagaaauaug

SEQ ID NO: 2094532 - RNA, 19 nt, Homo sapiens
  misc_RNA (1)...(19): siRNA sense strand
aaacucagaacucagauua

SEQ ID NO: 2094533 - RNA, 19 nt, Homo sapiens
  misc_RNA (1)...(19): siRNA sense strand
ggacauaucaccggcaauu

SEQ ID NO: 2094534 - RNA, 19 nt, Homo sapiens
  misc_RNA (1)...(19): siRNA sense strand
aaacgaagaccaucaaaug

SEQ ID NO: 2094535 - RNA, 19 nt, Homo sapiens
  misc_RNA (1)...(19): siRNA sense strand
ggaggaagaggaagaagaa

SEQ ID NO: 2094536 - RNA, 19 nt, Homo sapiens
  misc_RNA (1)...(19): siRNA sense strand
gaagaaaucaaggagcuaa

SEQ ID NO: 2094537 - RNA, 19 nt, Homo sapiens
  misc_RNA (1)...(19): siRNA sense strand
acaguuagaugaagaaauc

SEQ ID NO: 2094538 - RNA, 19 nt, Homo sapiens
  misc_RNA (1)...(19): siRNA sense strand
gaagaaaucaaacaguuag

SEQ ID NO: 2094539 - RNA, 19 nt, Homo sapiens
  misc_RNA (1)...(19): siRNA sense strand
gggagaagauggccaugga

SEQ ID NO: 2094540 - RNA, 19 nt, Homo sapiens
  misc_RNA (1)...(19): siRNA sense strand
caagacaguagaaauauga

SEQ ID NO: 2094541 - RNA, 19 nt, Homo sapiens
  misc_RNA (1)...(19): siRNA sense strand
aaauaaagcccuacuggaa

SEQ ID NO: 2094542 - RNA, 19 nt, Homo sapiens
  misc_RNA (1)...(19): siRNA sense strand
ggagcuaaaugaauccaau

SEQ ID NO: 2094543 - RNA, 19 nt, Homo sapiens
  misc_RNA (1)...(19): siRNA sense strand
gaaaucaaacaguuagaug

SEQ ID NO: 2094544 - RNA, 19 nt, Homo sapiens
  misc_RNA (1)...(19): siRNA sense strand
cgaagaccaucaaaugaau

SEQ ID NO: 2094545 - RNA, 19 nt, Homo sapiens
  misc_RNA (1)...(19): siRNA sense strand
ggaagccgauaugauuaaa

SEQ ID NO: 2094546 - RNA, 19 nt, Homo sapiens
  misc_RNA (1)...(19): siRNA sense strand
ugacgaauaugacaauuac

SEQ ID NO: 2094547 - RNA, 19 nt, Homo sapiens
  misc_RNA (1)...(19): siRNA sense strand
ucaaacaguuagaugaaga

SEQ ID NO: 2094548 - RNA, 19 nt, Homo sapiens
  misc_RNA (1)...(19): siRNA sense strand
gaaagacggguaccugaau

SEQ ID NO: 2094549 - RNA, 19 nt, Homo sapiens
  misc_RNA (1)...(19): siRNA sense strand
guaaagaucccucaagaac

SEQ ID NO: 2094550 - RNA, 19 nt, Homo sapiens
  misc_RNA (1)...(19): siRNA sense strand
ugagcagucuggaguguuu

SEQ ID NO: 2094551 - RNA, 19 nt, Homo sapiens
  misc_RNA (1)...(19): siRNA sense strand
cagaagacuuggacccauu

SEQ ID NO: 2094552 - RNA, 19 nt, Homo sapiens
  misc_RNA (1)...(19): siRNA sense strand
agacagugauguuguuaga

SEQ ID NO: 2094553 - RNA, 19 nt, Homo sapiens
  misc_RNA (1)...(19): siRNA sense strand
gaaaucaaggagcuaaaug

SEQ ID NO: 2094554 - RNA, 19 nt, Homo sapiens
  misc_RNA (1)...(19): siRNA sense strand
ugacgaggauggagaagau

SEQ ID NO: 2094555 - RNA, 19 nt, Homo sapiens
  misc_RNA (1)...(19): siRNA sense strand
caucggagccuuucagguu

SEQ ID NO: 2094556 - RNA, 19 nt, Homo sapiens
  misc_RNA (1)...(19): siRNA sense strand
gacaaaagcauucgaagua

SEQ ID NO: 2094557 - RNA, 19 nt, Homo sapiens
  misc_RNA (1)...(19): siRNA sense strand
gcaugaaaguguccucaag

SEQ ID NO: 2094558 - RNA, 19 nt, Homo sapiens
  misc_RNA (1)...(19): siRNA sense strand
gaaaugaacagcaauaccu

SEQ ID NO: 2094559 - RNA, 19 nt, Homo sapiens
  misc_RNA (1)...(19): siRNA sense strand
gaagaggagaacaaaguga

SEQ ID NO: 2094560 - RNA, 19 nt, Homo sapiens
  misc_RNA (1)...(19): siRNA sense strand
caaagacauuacuccagaa

SEQ ID NO: 2094561 - RNA, 19 nt, Homo sapiens
  misc_RNA (1)...(19): siRNA sense strand
acagugauguuguuagaga

SEQ ID NO: 2094562 - RNA, 19 nt, Homo sapiens
  misc_RNA (1)...(19): siRNA sense strand
gaaacaguggacucccuua

SEQ ID NO: 2094563 - RNA, 19 nt, Homo sapiens
  misc_RNA (1)...(19): siRNA sense strand
gacgauaccaccucuguga

SEQ ID NO: 2094564 - RNA, 19 nt, Homo sapiens
  misc_RNA (1)...(19): siRNA sense strand
ccaaguacccucagugcaa

SEQ ID NO: 2094565 - RNA, 19 nt, Homo sapiens
  misc_RNA (1)...(19): siRNA sense strand
uccaagaccucguuugaau

SEQ ID NO: 2094566 - RNA, 19 nt, Homo sapiens
  misc_RNA (1)...(19): siRNA sense strand
gauggaaccggccacguaa

SEQ ID NO: 2094567 - RNA, 19 nt, Homo sapiens
  misc_RNA (1)...(19): siRNA sense strand
aaagugaguugaguuuaga

SEQ ID NO: 2094568 - RNA, 19 nt, Homo sapiens
  misc_RNA (1)...(19): siRNA sense strand
ccacaucacugggaaguac

SEQ ID NO: 2094569 - RNA, 19 nt, Homo sapiens
  misc_RNA (1)...(19): siRNA sense strand
ccaagaccucguuugaaua

SEQ ID NO: 2094570 - RNA, 19 nt, Homo sapiens
  misc_RNA (1)...(19): siRNA sense strand
guuccaaccuggccaagga

SEQ ID NO: 2094571 - RNA, 19 nt, Homo sapiens
  misc_RNA (1)...(19): siRNA sense strand
aaagaucccucaagaacag

SEQ ID NO: 2094572 - RNA, 19 nt, Homo sapiens
  misc_RNA (1)...(19): siRNA sense strand
caaaggccaugagggagaa

SEQ ID NO: 2094573 - RNA, 19 nt, Homo sapiens
  misc_RNA (1)...(19): siRNA sense strand
ucagaaaugaacagcaaua

SEQ ID NO: 2094574 - RNA, 19 nt, Homo sapiens
  misc_RNA (1)...(19): siRNA sense strand
caguauggcuacagaaaca

SEQ ID NO: 2094575 - RNA, 19 nt, Homo sapiens
  misc_RNA (1)...(19): siRNA sense strand
ccacguaacugggcuguac

SEQ ID NO: 2094576 - RNA, 19 nt, Homo sapiens
  misc_RNA (1)...(19): siRNA sense strand
gaagaccaucaaaugaauu

SEQ ID NO: 2094577 - RNA, 19 nt, Homo sapiens
  misc_RNA (1)...(19): siRNA sense strand
ugauuaaacucagaacuca

SEQ ID NO: 2094578 - RNA, 19 nt, Homo sapiens
  misc_RNA (1)...(19): siRNA sense strand
gggaggagggacaauauga

SEQ ID NO: 2094579 - RNA, 19 nt, Homo sapiens
  misc_RNA (1)...(19): siRNA sense strand
gaauaaugcaagacacaga

SEQ ID NO: 2094580 - RNA, 19 nt, Homo sapiens
  misc_RNA (1)...(19): siRNA sense strand
gcaagagcagcuucgacua

SEQ ID NO: 2094581 - RNA, 19 nt, Homo sapiens
  misc_RNA (1)...(19): siRNA sense strand
acauggagguggaugagaa

SEQ ID NO: 2094582 - RNA, 19 nt, Homo sapiens
  misc_RNA (1)...(19): siRNA sense strand
ugguaaagaucccucaaga

SEQ ID NO: 2094583 - RNA, 19 nt, Homo sapiens
  misc_RNA (1)...(19): siRNA sense strand
gaagaucaagaacccauca

SEQ ID NO: 2094584 - RNA, 19 nt, Homo sapiens
  misc_RNA (1)...(19): siRNA sense strand
guuacgacaaccauacuua

SEQ ID NO: 2094585 - RNA, 19 nt, Homo sapiens
  misc_RNA (1)...(19): siRNA sense strand
agucagaaaugaacagcaa

SEQ ID NO: 2094586 - RNA, 19 nt, Homo sapiens
  misc_RNA (1)...(19): siRNA sense strand
augcuuacgugacuacuuu

SEQ ID NO: 2094587 - RNA, 19 nt, Homo sapiens
  misc_RNA (1)...(19): siRNA sense strand
gguaaagaucccucaagaa

SEQ ID NO: 2094588 - RNA, 19 nt, Homo sapiens
  misc_RNA (1)...(19): siRNA sense strand
ggacagaaagccuaaaucc

SEQ ID NO: 2094589 - RNA, 19 nt, Homo sapiens
  misc_RNA (1)...(19): siRNA sense strand
gcagcaagacaguagaaau

SEQ ID NO: 2094590 - RNA, 19 nt, Homo sapiens
  misc_RNA (1)...(19): siRNA sense strand
ugacuacuuugacggaaau

SEQ ID NO: 2094591 - RNA, 19 nt, Homo sapiens
  misc_RNA (1)...(19): siRNA sense strand
gaaagccuaaauccaguga

SEQ ID NO: 2094592 - RNA, 19 nt, Homo sapiens
  misc_RNA (1)...(19): siRNA sense strand
ggaggaggaugaggacgau

SEQ ID NO: 2094593 - RNA, 19 nt, Homo sapiens
  misc_RNA (1)...(19): siRNA sense strand
gugcaaaccagggauauau

SEQ ID NO: 2094594 - RNA, 19 nt, Homo sapiens
  misc_RNA (1)...(19): siRNA sense strand
gcaacgguauagaaaauga

SEQ ID NO: 2094595 - RNA, 19 nt, Homo sapiens
  misc_RNA (1)...(19): siRNA sense strand
ccacgucagcgaugaagaa

SEQ ID NO: 2094596 - RNA, 19 nt, Homo sapiens
  misc_RNA (1)...(19): siRNA sense strand
agcaauaccuccaauaguc

SEQ ID NO: 2094597 - RNA, 19 nt, Homo sapiens
  misc_RNA (1)...(19): siRNA sense strand
aauaaagcccuacuggaaa

SEQ ID NO: 2094598 - RNA, 19 nt, Homo sapiens
  misc_RNA (1)...(19): siRNA sense strand
gaggagaacaaagugauug

SEQ ID NO: 2094599 - RNA, 19 nt, Homo sapiens
  misc_RNA (1)...(19): siRNA sense strand
gagcuaaaugaauccaauu

SEQ ID NO: 2094600 - RNA, 19 nt, Homo sapiens
  misc_RNA (1)...(19): siRNA sense strand
caccgcagcuugucaggau

SEQ ID NO: 2094601 - RNA, 19 nt, Homo sapiens
  misc_RNA (1)...(19): siRNA sense strand
aaagacggguaccugaaug

SEQ ID NO: 2094602 - RNA, 19 nt, Homo sapiens
  misc_RNA (1)...(19): siRNA sense strand
ggaggaggaggaagaggaa

SEQ ID NO: 2094603 - RNA, 19 nt, Homo sapiens
  misc_RNA (1)...(19): siRNA sense strand
ugaagcagcuggagauucc

SEQ ID NO: 2094604 - RNA, 19 nt, Homo sapiens
  misc_RNA (1)...(19): siRNA sense strand
aaagagagcaaguguccaa

SEQ ID NO: 2094605 - RNA, 19 nt, Homo sapiens
  misc_RNA (1)...(19): siRNA sense strand
ggaaggacgccggacagaa

SEQ ID NO: 2094606 - RNA, 19 nt, Homo sapiens
  misc_RNA (1)...(19): siRNA sense strand
ggaaaagugaguugaguuu

SEQ ID NO: 2094607 - RNA, 19 nt, Homo sapiens
  misc_RNA (1)...(19): siRNA sense strand
gcuggagauuccucaguau

SEQ ID NO: 2094608 - RNA, 19 nt, Homo sapiens
  misc_RNA (1)...(19): siRNA sense strand
cuacuuugacggaaaugua

SEQ ID NO: 2094609 - RNA, 19 nt, Homo sapiens
  misc_RNA (1)...(19): siRNA sense strand
gacauaucaccggcaauua

SEQ ID NO: 2094610 - RNA, 19 nt, Homo sapiens
  misc_RNA (1)...(19): siRNA sense strand
agaccucguuugaauacaa

SEQ ID NO: 2094611 - RNA, 19 nt, Homo sapiens
  misc_RNA (1)...(19): siRNA sense strand
gaucuucgcuuuaacagaa

SEQ ID NO: 2094612 - RNA, 19 nt, Homo sapiens
  misc_RNA (1)...(19): siRNA sense strand
ugacagagcuauaaacuca

SEQ ID NO: 2094613 - RNA, 19 nt, Homo sapiens
  misc_RNA (1)...(19): siRNA sense strand
gaacacagauaaagaaacu

SEQ ID NO: 2094614 - RNA, 19 nt, Homo sapiens
  misc_RNA (1)...(19): siRNA sense strand
cggaagagcugaacuguga

SEQ ID NO: 2094615 - RNA, 19 nt, Homo sapiens
  misc_RNA (1)...(19): siRNA sense strand
ucacaaagcuuucuucucu

SEQ ID NO: 2094616 - RNA, 19 nt, Homo sapiens
  misc_RNA (1)...(19): siRNA sense strand
gaaggauucuugaccauca

SEQ ID NO: 2094617 - RNA, 19 nt, Homo sapiens
  misc_RNA (1)...(19): siRNA sense strand
aaagaugcaugcaccauuu

SEQ ID NO: 2094618 - RNA, 19 nt, Homo sapiens
  misc_RNA (1)...(19): siRNA sense strand
ugacuucgcugcucaugaa

SEQ ID NO: 2094619 - RNA, 19 nt, Homo sapiens
  misc_RNA (1)...(19): siRNA sense strand
caacuauaccugcacuuua

SEQ ID NO: 2094620 - RNA, 19 nt, Homo sapiens
  misc_RNA (1)...(19): siRNA sense strand
cauccuagaucuucgcuuu

SEQ ID NO: 2094621 - RNA, 19 nt, Homo sapiens
  misc_RNA (1)...(19): siRNA sense strand
ggacaaaugacuucagaga

SEQ ID NO: 2094622 - RNA, 19 nt, Homo sapiens
  misc_RNA (1)...(19): siRNA sense strand
ggacugcugugaagacugu

SEQ ID NO: 2094623 - RNA, 19 nt, Homo sapiens
  misc_RNA (1)...(19): siRNA sense strand
agaaugagauccagucaau

SEQ ID NO: 2094624 - RNA, 19 nt, Homo sapiens
  misc_RNA (1)...(19): siRNA sense strand
caaccggauuacacauuua

SEQ ID NO: 2094625 - RNA, 19 nt, Homo sapiens
  misc_RNA (1)...(19): siRNA sense strand
gcacuuuaaucagauagaa

SEQ ID NO: 2094626 - RNA, 19 nt, Homo sapiens
  misc_RNA (1)...(19): siRNA sense strand
ugaaauccguguacgagaa

SEQ ID NO: 2094627 - RNA, 19 nt, Homo sapiens
  misc_RNA (1)...(19): siRNA sense strand
ggagauccguuuguagcua

SEQ ID NO: 2094628 - RNA, 19 nt, Homo sapiens
  misc_RNA (1)...(19): siRNA sense strand
ucaaccagcucaccuccua

SEQ ID NO: 2094629 - RNA, 19 nt, Homo sapiens
  misc_RNA (1)...(19): siRNA sense strand
gacagaaaguggaaaauuu

SEQ ID NO: 2094630 - RNA, 19 nt, Homo sapiens
  misc_RNA (1)...(19): siRNA sense strand
acaaaugacuucagagagu

SEQ ID NO: 2094631 - RNA, 19 nt, Homo sapiens
  misc_RNA (1)...(19): siRNA sense strand
ggacauugcagcucauuca

SEQ ID NO: 2094632 - RNA, 19 nt, Homo sapiens
  misc_RNA (1)...(19): siRNA sense strand
caaaugacuucagagaguu

SEQ ID NO: 2094633 - RNA, 19 nt, Homo sapiens
  misc_RNA (1)...(19): siRNA sense strand
ggacaagccgaccaagaaa

SEQ ID NO: 2094634 - RNA, 19 nt, Homo sapiens
  misc_RNA (1)...(19): siRNA sense strand
gcgacaccaucuacuauga

SEQ ID NO: 2094635 - RNA, 19 nt, Homo sapiens
  misc_RNA (1)...(19): siRNA sense strand
aacuauaccugcacuuuaa

SEQ ID NO: 2094636 - RNA, 19 nt, Homo sapiens
  misc_RNA (1)...(19): siRNA sense strand
ucacagaccucagaacaca

SEQ ID NO: 2094637 - RNA, 19 nt, Homo sapiens
  misc_RNA (1)...(19): siRNA sense strand
gaacaaguuaccacuacaa

SEQ ID NO: 2094638 - RNA, 19 nt, Homo sapiens
  misc_RNA (1)...(19): siRNA sense strand
gcacacccuugccaguuga

SEQ ID NO: 2094639 - RNA, 19 nt, Homo sapiens
  misc_RNA (1)...(19): siRNA sense strand
ugaggaacuugaacacauu

SEQ ID NO: 2094640 - RNA, 19 nt, Homo sapiens
  misc_RNA (1)...(19): siRNA sense strand
aaauggagauccguuugua

SEQ ID NO: 2094641 - RNA, 19 nt, Homo sapiens
  misc_RNA (1)...(19): siRNA sense strand
auaaugagcugagcaugaa

SEQ ID NO: 2094642 - RNA, 19 nt, Homo sapiens
  misc_RNA (1)...(19): siRNA sense strand
gcaacuauaccugcacuuu

SEQ ID NO: 2094643 - RNA, 19 nt, Homo sapiens
  misc_RNA (1)...(19): siRNA sense strand
ggacagagucguuauugag

SEQ ID NO: 2094644 - RNA, 19 nt, Homo sapiens
  misc_RNA (1)...(19): siRNA sense strand
gcaaaccugucgggcugua

SEQ ID NO: 2094645 - RNA, 19 nt, Homo sapiens
  misc_RNA (1)...(19): siRNA sense strand
gagggauccuuacacaguu

SEQ ID NO: 2094646 - RNA, 19 nt, Homo sapiens
  misc_RNA (1)...(19): siRNA sense strand
ugaggacgcugggagagua

SEQ ID NO: 2094647 - RNA, 19 nt, Homo sapiens
  misc_RNA (1)...(19): siRNA sense strand
acaaccggauuacacauuu

SEQ ID NO: 2094648 - RNA, 19 nt, Homo sapiens
  misc_RNA (1)...(19): siRNA sense strand
gagaguuuguucuggaaau

SEQ ID NO: 2094649 - RNA, 19 nt, Homo sapiens
  misc_RNA (1)...(19): siRNA sense strand
gaacaacugcucggacaug

SEQ ID NO: 2094650 - RNA, 19 nt, Homo sapiens
  misc_RNA (1)...(19): siRNA sense strand
guaauccagccacagaaua

SEQ ID NO: 2094651 - RNA, 19 nt, Homo sapiens
  misc_RNA (1)...(19): siRNA sense strand
gaagagcugaacugugaaa

SEQ ID NO: 2094652 - RNA, 19 nt, Homo sapiens
  misc_RNA (1)...(19): siRNA sense strand
gauugcgacuggacucaaa

SEQ ID NO: 2094653 - RNA, 19 nt, Homo sapiens
  misc_RNA (1)...(19): siRNA sense strand
gaaauggagauccguuugu

SEQ ID NO: 2094654 - RNA, 19 nt, Homo sapiens
  misc_RNA (1)...(19): siRNA sense strand
gaacuugaacacauugcuu

SEQ ID NO: 2094655 - RNA, 19 nt, Homo sapiens
  misc_RNA (1)...(19): siRNA sense strand
gaccucagaacacagauaa

SEQ ID NO: 2094656 - RNA, 19 nt, Homo sapiens
  misc_RNA (1)...(19): siRNA sense strand
ggaacaaguuaccacuaca

SEQ ID NO: 2094657 - RNA, 19 nt, Homo sapiens
  misc_RNA (1)...(19): siRNA sense strand
gacauuuaaucacuuggaa

SEQ ID NO: 2094658 - RNA, 19 nt, Homo sapiens
  misc_RNA (1)...(19): siRNA sense strand
ucagaacacagauaaagaa

SEQ ID NO: 2094659 - RNA, 19 nt, Homo sapiens
  misc_RNA (1)...(19): siRNA sense strand
uaagggacuugccucucua

SEQ ID NO: 2094660 - RNA, 19 nt, Homo sapiens
  misc_RNA (1)...(19): siRNA sense strand
gggagaaacugaaaagguu

SEQ ID NO: 2094661 - RNA, 19 nt, Homo sapiens
  misc_RNA (1)...(19): siRNA sense strand
uaccugcacuuuaaucaga

SEQ ID NO: 2094662 - RNA, 19 nt, Homo sapiens
  misc_RNA (1)...(19): siRNA sense strand
cagcggccaucugugaaua

SEQ ID NO: 2094663 - RNA, 19 nt, Homo sapiens
  misc_RNA (1)...(19): siRNA sense strand
gacaccaucuacuaugaga

SEQ ID NO: 2094664 - RNA, 19 nt, Homo sapiens
  misc_RNA (1)...(19): siRNA sense strand
caaguuaccacuacaacga

SEQ ID NO: 2094665 - RNA, 19 nt, Homo sapiens
  misc_RNA (1)...(19): siRNA sense strand
ggacccugaugauccagaa

SEQ ID NO: 2094666 - RNA, 19 nt, Homo sapiens
  misc_RNA (1)...(19): siRNA sense strand
gauaccuaguggagcauuu

SEQ ID NO: 2094667 - RNA, 19 nt, Homo sapiens
  misc_RNA (1)...(19): siRNA sense strand
aaugagauccagucaauug

SEQ ID NO: 2094668 - RNA, 19 nt, Homo sapiens
  misc_RNA (1)...(19): siRNA sense strand
caacaacaccaaguggaaa

SEQ ID NO: 2094669 - RNA, 19 nt, Homo sapiens
  misc_RNA (1)...(19): siRNA sense strand
cgacaacgcggacaacauc

SEQ ID NO: 2094670 - RNA, 19 nt, Homo sapiens
  misc_RNA (1)...(19): siRNA sense strand
agacgucgcuggccaggau

SEQ ID NO: 2094671 - RNA, 19 nt, Homo sapiens
  misc_RNA (1)...(19): siRNA sense strand
cuuagaaucucugguguug

SEQ ID NO: 2094672 - RNA, 19 nt, Homo sapiens
  misc_RNA (1)...(19): siRNA sense strand
ugacgucagucgaaaugga

SEQ ID NO: 2094673 - RNA, 19 nt, Homo sapiens
  misc_RNA (1)...(19): siRNA sense strand
gaaaugcagaagaccauca

SEQ ID NO: 2094674 - RNA, 19 nt, Homo sapiens
  misc_RNA (1)...(19): siRNA sense strand
guacgagaauggcuucaac

SEQ ID NO: 2094675 - RNA, 19 nt, Homo sapiens
  misc_RNA (1)...(19): siRNA sense strand
ccagggacauuuaaucacu

SEQ ID NO: 2094676 - RNA, 19 nt, Homo sapiens
  misc_RNA (1)...(19): siRNA sense strand
uggaagcgauugcgacugu

SEQ ID NO: 2094677 - RNA, 19 nt, Homo sapiens
  misc_RNA (1)...(19): siRNA sense strand
uugcauaacaaccggauua

SEQ ID NO: 2094678 - RNA, 19 nt, Homo sapiens
  misc_RNA (1)...(19): siRNA sense strand
gcgaaucucacgccaacaa

SEQ ID NO: 2094679 - RNA, 19 nt, Homo sapiens
  misc_RNA (1)...(19): siRNA sense strand
gaaauccguguacgagaau

SEQ ID NO: 2094680 - RNA, 19 nt, Homo sapiens
  misc_RNA (1)...(19): siRNA sense strand
gaccucaacggaacaaguu

SEQ ID NO: 2094681 - RNA, 19 nt, Homo sapiens
  misc_RNA (1)...(19): siRNA sense strand
gggacagguugugguauga

SEQ ID NO: 2094682 - RNA, 19 nt, Homo sapiens
  misc_RNA (1)...(19): siRNA sense strand
gaccaucacagaccucaga

SEQ ID NO: 2094683 - RNA, 19 nt, Homo sapiens
  misc_RNA (1)...(19): siRNA sense strand
auaaucagaucaagaggau

SEQ ID NO: 2094684 - RNA, 19 nt, Homo sapiens
  misc_RNA (1)...(19): siRNA sense strand
gacagguugugguaugaga

SEQ ID NO: 2094685 - RNA, 19 nt, Homo sapiens
  misc_RNA (1)...(19): siRNA sense strand
ggacauuuaaucacuugga

SEQ ID NO: 2094686 - RNA, 19 nt, Homo sapiens
  misc_RNA (1)...(19): siRNA sense strand
acacagauaaagaaacuug

SEQ ID NO: 2094687 - RNA, 19 nt, Homo sapiens
  misc_RNA (1)...(19): siRNA sense strand
gaagcgauugcgacuguug

SEQ ID NO: 2094688 - RNA, 19 nt, Homo sapiens
  misc_RNA (1)...(19): siRNA sense strand
gaagcucgagaggcuauuu

SEQ ID NO: 2094689 - RNA, 19 nt, Homo sapiens
  misc_RNA (1)...(19): siRNA sense strand
ccaacaacaccaaguggaa

SEQ ID NO: 2094690 - RNA, 19 nt, Homo sapiens
  misc_RNA (1)...(19): siRNA sense strand
gggaacaucucagcaacag

SEQ ID NO: 2094691 - RNA, 19 nt, Homo sapiens
  misc_RNA (1)...(19): siRNA sense strand
gcggagauccagcacauca

SEQ ID NO: 2094692 - RNA, 19 nt, Homo sapiens
  misc_RNA (1)...(19): siRNA sense strand
gcauggugcucagugugaa

SEQ ID NO: 2094693 - RNA, 19 nt, Homo sapiens
  misc_RNA (1)...(19): siRNA sense strand
gauuacacauuuaguucca

SEQ ID NO: 2094694 - RNA, 19 nt, Homo sapiens
  misc_RNA (1)...(19): siRNA sense strand
uuaagggacuugccucucu

SEQ ID NO: 2094695 - RNA, 19 nt, Homo sapiens
  misc_RNA (1)...(19): siRNA sense strand
gaggacaagccgaccaaga

SEQ ID NO: 2094696 - RNA, 19 nt, Homo sapiens
  misc_RNA (1)...(19): siRNA sense strand
uccuagaucuucgcuuuaa

SEQ ID NO: 2094697 - RNA, 19 nt, Homo sapiens
  misc_RNA (1)...(19): siRNA sense strand
gcagcaacgugugcagcaa

SEQ ID NO: 2094698 - RNA, 19 nt, Homo sapiens
  misc_RNA (1)...(19): siRNA sense strand
cgagggauccuuacacagu

SEQ ID NO: 2094699 - RNA, 19 nt, Homo sapiens
  misc_RNA (1)...(19): siRNA sense strand
gaauacagaggugcugguu

SEQ ID NO: 2094700 - RNA, 19 nt, Homo sapiens
  misc_RNA (1)...(19): siRNA sense strand
aauaaugagcugagcauga

SEQ ID NO: 2094701 - RNA, 19 nt, Homo sapiens
  misc_RNA (1)...(19): siRNA sense strand
uaacagaaucagagagauc

SEQ ID NO: 2094702 - RNA, 19 nt, Homo sapiens
  misc_RNA (1)...(19): siRNA sense strand
caucacagaccucagaaca

SEQ ID NO: 2094703 - RNA, 19 nt, Homo sapiens
  misc_RNA (1)...(19): siRNA sense strand
gcagaccuccauccuagau

SEQ ID NO: 2094704 - RNA, 19 nt, Homo sapiens
  misc_RNA (1)...(19): siRNA sense strand
cggaacaaguuaccacuac

SEQ ID NO: 2094705 - RNA, 19 nt, Homo sapiens
  misc_RNA (1)...(19): siRNA sense strand
cgaaauggagauccguuug

SEQ ID NO: 2094706 - RNA, 19 nt, Homo sapiens
  misc_RNA (1)...(19): siRNA sense strand
uuacauacagaacgucgua

SEQ ID NO: 2094707 - RNA, 19 nt, Homo sapiens
  misc_RNA (1)...(19): siRNA sense strand
gaccuggugucuccacagu

SEQ ID NO: 2094708 - RNA, 19 nt, Homo sapiens
  misc_RNA (1)...(19): siRNA sense strand
gcaugcaccauuugugaau

SEQ ID NO: 2094709 - RNA, 19 nt, Homo sapiens
  misc_RNA (1)...(19): siRNA sense strand
ugggacaaaugacuucaga

SEQ ID NO: 2094710 - RNA, 19 nt, Homo sapiens
  misc_RNA (1)...(19): siRNA sense strand
gaacuuccagcccauugca

SEQ ID NO: 2094711 - RNA, 19 nt, Homo sapiens
  misc_RNA (1)...(19): siRNA sense strand
gaauagaagucaaacagua

SEQ ID NO: 2094712 - RNA, 19 nt, Homo sapiens
  misc_RNA (1)...(19): siRNA sense strand
ccucacagcugaaacuuua

SEQ ID NO: 2094713 - RNA, 19 nt, Homo sapiens
  misc_RNA (1)...(19): siRNA sense strand
gcuguuagauccagacaua

SEQ ID NO: 2094714 - RNA, 19 nt, Homo sapiens
  misc_RNA (1)...(19): siRNA sense strand
ucacagagccuugcaaaua

SEQ ID NO: 2094715 - RNA, 19 nt, Homo sapiens
  misc_RNA (1)...(19): siRNA sense strand
gggcugagguccauuugua

SEQ ID NO: 2094716 - RNA, 19 nt, Homo sapiens
  misc_RNA (1)...(19): siRNA sense strand
ggaaggcgauguagauguu

SEQ ID NO: 2094717 - RNA, 19 nt, Homo sapiens
  misc_RNA (1)...(19): siRNA sense strand
gaagaaacagcaaaucaaa

SEQ ID NO: 2094718 - RNA, 19 nt, Homo sapiens
  misc_RNA (1)...(19): siRNA sense strand
gagcaacuuaucaguauua

SEQ ID NO: 2094719 - RNA, 19 nt, Homo sapiens
  misc_RNA (1)...(19): siRNA sense strand
gaaggaaugucucuuuguc

SEQ ID NO: 2094720 - RNA, 19 nt, Homo sapiens
  misc_RNA (1)...(19): siRNA sense strand
cacagagccuugcaaauaa

SEQ ID NO: 2094721 - RNA, 19 nt, Homo sapiens
  misc_RNA (1)...(19): siRNA sense strand
gaaggaaugucucuuuguc

SEQ ID NO: 2094722 - RNA, 19 nt, Homo sapiens
  misc_RNA (1)...(19): siRNA sense strand
gcagaggacuaccacaaau

SEQ ID NO: 2094723 - RNA, 19 nt, Homo sapiens
  misc_RNA (1)...(19): siRNA sense strand
ucaacuggcugcuagaauu

SEQ ID NO: 2094724 - RNA, 19 nt, Homo sapiens
  misc_RNA (1)...(19): siRNA sense strand
ucucaagacuccucccuua

SEQ ID NO: 2094725 - RNA, 19 nt, Homo sapiens
  misc_RNA (1)...(19): siRNA sense strand
gcacaacaauuacccaaac

SEQ ID NO: 2094726 - RNA, 19 nt, Homo sapiens
  misc_RNA (1)...(19): siRNA sense strand
guaauaugguuagcaguuu

SEQ ID NO: 2094727 - RNA, 19 nt, Homo sapiens
  misc_RNA (1)...(19): siRNA sense strand
ugacagaagucuugcugaa

SEQ ID NO: 2094728 - RNA, 19 nt, Homo sapiens
  misc_RNA (1)...(19): siRNA sense strand
gcggaaaccugaaagaagu

SEQ ID NO: 2094729 - RNA, 19 nt, Homo sapiens
  misc_RNA (1)...(19): siRNA sense strand
aaacaguaguggaagagua

SEQ ID NO: 2094730 - RNA, 19 nt, Homo sapiens
  misc_RNA (1)...(19): siRNA sense strand
caagauauguaccauugug

SEQ ID NO: 2094731 - RNA, 19 nt, Homo sapiens
  misc_RNA (1)...(19): siRNA sense strand
acggaaggauuguguaaua

SEQ ID NO: 2094732 - RNA, 19 nt, Homo sapiens
  misc_RNA (1)...(19): siRNA sense strand
ggccgaggcacaacaauua

SEQ ID NO: 2094733 - RNA, 19 nt, Homo sapiens
  misc_RNA (1)...(19): siRNA sense strand
gaaggauuguguaauaugg

SEQ ID NO: 2094734 - RNA, 19 nt, Homo sapiens
  misc_RNA (1)...(19): siRNA sense strand
ugaaagacgucauuacucu

SEQ ID NO: 2094735 - RNA, 19 nt, Homo sapiens
  misc_RNA (1)...(19): siRNA sense strand
ugaagaugcugaagaaaca

SEQ ID NO: 2094736 - RNA, 19 nt, Homo sapiens
  misc_RNA (1)...(19): siRNA sense strand
cauaaaggaugaccagauc

SEQ ID NO: 2094737 - RNA, 19 nt, Homo sapiens
  misc_RNA (1)...(19): siRNA sense strand
gguuagcaguuuauuaaug

SEQ ID NO: 2094738 - RNA, 19 nt, Homo sapiens
  misc_RNA (1)...(19): siRNA sense strand
caugagugcugaagagcua

SEQ ID NO: 2094739 - RNA, 19 nt, Homo sapiens
  misc_RNA (1)...(19): siRNA sense strand
gaggaacaaucgccagaug

SEQ ID NO: 2094740 - RNA, 19 nt, Homo sapiens
  misc_RNA (1)...(19): siRNA sense strand
uaaugaaaguggagaugaa

SEQ ID NO: 2094741 - RNA, 19 nt, Homo sapiens
  misc_RNA (1)...(19): siRNA sense strand
uauugaagaugcugaagaa

SEQ ID NO: 2094742 - RNA, 19 nt, Homo sapiens
  misc_RNA (1)...(19): siRNA sense strand
cugaagaggucaaagaaau

SEQ ID NO: 2094743 - RNA, 19 nt, Homo sapiens
  misc_RNA (1)...(19): siRNA sense strand
gaaaguggagaugaaguuu

SEQ ID NO: 2094744 - RNA, 19 nt, Homo sapiens
  misc_RNA (1)...(19): siRNA sense strand
agaggaaggugacaacgaa

SEQ ID NO: 2094745 - RNA, 19 nt, Homo sapiens
  misc_RNA (1)...(19): siRNA sense strand
cugaagagcuacaggaguu

SEQ ID NO: 2094746 - RNA, 19 nt, Homo sapiens
  misc_RNA (1)...(19): siRNA sense strand
gaaagacgucauuacucua

SEQ ID NO: 2094747 - RNA, 19 nt, Homo sapiens
  misc_RNA (1)...(19): siRNA sense strand
cgauguagauguuucagau

SEQ ID NO: 2094748 - RNA, 19 nt, Homo sapiens
  misc_RNA (1)...(19): siRNA sense strand
cagaagucuugcugaagua

SEQ ID NO: 2094749 - RNA, 19 nt, Homo sapiens
  misc_RNA (1)...(19): siRNA sense strand
ggaaggauuguguaauaug

SEQ ID NO: 2094750 - RNA, 19 nt, Homo sapiens
  misc_RNA (1)...(19): siRNA sense strand
gaagaggucaaagaaauuc

SEQ ID NO: 2094751 - RNA, 19 nt, Homo sapiens
  misc_RNA (1)...(19): siRNA sense strand
caacucaacaacauucuau

SEQ ID NO: 2094752 - RNA, 19 nt, Homo sapiens
  misc_RNA (1)...(19): siRNA sense strand
gaaauaaaauuggccugaa

SEQ ID NO: 2094753 - RNA, 19 nt, Homo sapiens
  misc_RNA (1)...(19): siRNA sense strand
gauccuauuuaucagguau

SEQ ID NO: 2094754 - RNA, 19 nt, Homo sapiens
  misc_RNA (1)...(19): siRNA sense strand
gauaaucuuccugcaaauu

SEQ ID NO: 2094755 - RNA, 19 nt, Homo sapiens
  misc_RNA (1)...(19): siRNA sense strand
uaaggaaggcgauguagau

SEQ ID NO: 2094756 - RNA, 19 nt, Homo sapiens
  misc_RNA (1)...(19): siRNA sense strand
acagaagucuugcugaagu

SEQ ID NO: 2094757 - RNA, 19 nt, Homo sapiens
  misc_RNA (1)...(19): siRNA sense strand
aaacagcaaaucaaacuug

SEQ ID NO: 2094758 - RNA, 19 nt, Homo sapiens
  misc_RNA (1)...(19): siRNA sense strand
ggacuaccacaaaugcaaa

SEQ ID NO: 2094759 - RNA, 19 nt, Homo sapiens
  misc_RNA (1)...(19): siRNA sense strand
agcaagauauguaccauug

SEQ ID NO: 2094760 - RNA, 19 nt, Homo sapiens
  misc_RNA (1)...(19): siRNA sense strand
ugaagaaccagcuguuaga

SEQ ID NO: 2094761 - RNA, 19 nt, Homo sapiens
  misc_RNA (1)...(19): siRNA sense strand
caaacccacuggacaccuu

SEQ ID NO: 2094762 - RNA, 19 nt, Homo sapiens
  misc_RNA (1)...(19): siRNA sense strand
gagcggaaaccugaaagaa

SEQ ID NO: 2094763 - RNA, 19 nt, Homo sapiens
  misc_RNA (1)...(19): siRNA sense strand
aaguggagaugaaguuuau

SEQ ID NO: 2094764 - RNA, 19 nt, Homo sapiens
  misc_RNA (1)...(19): siRNA sense strand
augauaaucuuccugcaaa

SEQ ID NO: 2094765 - RNA, 19 nt, Homo sapiens
  misc_RNA (1)...(19): siRNA sense strand
augauaaucugaaggaaug

SEQ ID NO: 2094766 - RNA, 19 nt, Homo sapiens
  misc_RNA (1)...(19): siRNA sense strand
ugaagaaacagcaaaucaa

SEQ ID NO: 2094767 - RNA, 19 nt, Homo sapiens
  misc_RNA (1)...(19): siRNA sense strand
augauaaucugaaggaaug

SEQ ID NO: 2094768 - RNA, 19 nt, Homo sapiens
  misc_RNA (1)...(19): siRNA sense strand
gaggguggaugagguggaa

SEQ ID NO: 2094769 - RNA, 19 nt, Homo sapiens
  misc_RNA (1)...(19): siRNA sense strand
ccacggaaggauuguguaa

SEQ ID NO: 2094770 - RNA, 19 nt, Homo sapiens
  misc_RNA (1)...(19): siRNA sense strand
gaugauaaucuuccugcaa

SEQ ID NO: 2094771 - RNA, 19 nt, Homo sapiens
  misc_RNA (1)...(19): siRNA sense strand
uugagcaacuuaucaguau

SEQ ID NO: 2094772 - RNA, 19 nt, Homo sapiens
  misc_RNA (1)...(19): siRNA sense strand
caaaacgggugaaacaaau

SEQ ID NO: 2094773 - RNA, 19 nt, Homo sapiens
  misc_RNA (1)...(19): siRNA sense strand
cccaagaggcggaggauuu

SEQ ID NO: 2094774 - RNA, 19 nt, Homo sapiens
  misc_RNA (1)...(19): siRNA sense strand
uggaugagguggaacaauc

SEQ ID NO: 2094775 - RNA, 19 nt, Homo sapiens
  misc_RNA (1)...(19): siRNA sense strand
gaugauaaucugaaggaau

SEQ ID NO: 2094776 - RNA, 19 nt, Homo sapiens
  misc_RNA (1)...(19): siRNA sense strand
caugauugcuucccauuuu

SEQ ID NO: 2094777 - RNA, 19 nt, Homo sapiens
  misc_RNA (1)...(19): siRNA sense strand
gaugauaaucugaaggaau

SEQ ID NO: 2094778 - RNA, 19 nt, Homo sapiens
  misc_RNA (1)...(19): siRNA sense strand
aaaguggagaugaaguuua

SEQ ID NO: 2094779 - RNA, 19 nt, Homo sapiens
  misc_RNA (1)...(19): siRNA sense strand
agacaugagugcugaagag

SEQ ID NO: 2094780 - RNA, 19 nt, Homo sapiens
  misc_RNA (1)...(19): siRNA sense strand
ugaagaggucaaagaaauu

SEQ ID NO: 2094781 - RNA, 19 nt, Homo sapiens
  misc_RNA (1)...(19): siRNA sense strand
cacccucaguggaugauaa

SEQ ID NO: 2094782 - RNA, 19 nt, Homo sapiens
  misc_RNA (1)...(19): siRNA sense strand
gaucaucaacuggcugcua

SEQ ID NO: 2094783 - RNA, 19 nt, Homo sapiens
  misc_RNA (1)...(19): siRNA sense strand
gacuuugaguuguugaaga

SEQ ID NO: 2094784 - RNA, 19 nt, Homo sapiens
  misc_RNA (1)...(19): siRNA sense strand
cacccucaguggaugauaa

SEQ ID NO: 2094785 - RNA, 19 nt, Homo sapiens
  misc_RNA (1)...(19): siRNA sense strand
cacccucaguggaugauaa

SEQ ID NO: 2094786 - RNA, 19 nt, Homo sapiens
  misc_RNA (1)...(19): siRNA sense strand
agaggaagaccgccagaaa

SEQ ID NO: 2094787 - RNA, 19 nt, Homo sapiens
  misc_RNA (1)...(19): siRNA sense strand
cuacaggaguucaagaaac

SEQ ID NO: 2094788 - RNA, 19 nt, Homo sapiens
  misc_RNA (1)...(19): siRNA sense strand
guaaguaccagcucgucuu

SEQ ID NO: 2094789 - RNA, 19 nt, Homo sapiens
  misc_RNA (1)...(19): siRNA sense strand
gaaacagcaaaucaaacuu

SEQ ID NO: 2094790 - RNA, 19 nt, Homo sapiens
  misc_RNA (1)...(19): siRNA sense strand
ggaagaguauuuggcuuuu

SEQ ID NO: 2094791 - RNA, 19 nt, Homo sapiens
  misc_RNA (1)...(19): siRNA sense strand
agauugccuugguugaaua

SEQ ID NO: 2094792 - RNA, 19 nt, Homo sapiens
  misc_RNA (1)...(19): siRNA sense strand
ccucagcggaugauaauau

SEQ ID NO: 2094793 - RNA, 19 nt, Homo sapiens
  misc_RNA (1)...(19): siRNA sense strand
cugaaggaaugucucuuug

SEQ ID NO: 2094794 - RNA, 19 nt, Homo sapiens
  misc_RNA (1)...(19): siRNA sense strand
cuagugcugcucaucuuua

SEQ ID NO: 2094795 - RNA, 19 nt, Homo sapiens
  misc_RNA (1)...(19): siRNA sense strand
ugaaaguggagaugaaguu

SEQ ID NO: 2094796 - RNA, 19 nt, Homo sapiens
  misc_RNA (1)...(19): siRNA sense strand
cggaaggauuguguaauau

SEQ ID NO: 2094797 - RNA, 19 nt, Homo sapiens
  misc_RNA (1)...(19): siRNA sense strand
gcaugauugcuucccauuu

SEQ ID NO: 2094798 - RNA, 19 nt, Homo sapiens
  misc_RNA (1)...(19): siRNA sense strand
cugaaggaaugucucuuug

SEQ ID NO: 2094799 - RNA, 19 nt, Homo sapiens
  misc_RNA (1)...(19): siRNA sense strand
gggugaaacaaaugacuuu

SEQ ID NO: 2094800 - RNA, 19 nt, Homo sapiens
  misc_RNA (1)...(19): siRNA sense strand
cagaugcugccagucauua

SEQ ID NO: 2094801 - RNA, 19 nt, Homo sapiens
  misc_RNA (1)...(19): siRNA sense strand
ggaaaccugaaagaaguaa

SEQ ID NO: 2094802 - RNA, 19 nt, Homo sapiens
  misc_RNA (1)...(19): siRNA sense strand
gcucaucuuuacacaagca

SEQ ID NO: 2094803 - RNA, 19 nt, Homo sapiens
  misc_RNA (1)...(19): siRNA sense strand
gaagaaccagcuguuagau

SEQ ID NO: 2094804 - RNA, 19 nt, Homo sapiens
  misc_RNA (1)...(19): siRNA sense strand
guugaagaaccagcuguua

SEQ ID NO: 2094805 - RNA, 19 nt, Homo sapiens
  misc_RNA (1)...(19): siRNA sense strand
gcugaagaggucaaagaaa

SEQ ID NO: 2094806 - RNA, 19 nt, Homo sapiens
  misc_RNA (1)...(19): siRNA sense strand
gauauguaccauugugaau

SEQ ID NO: 2094807 - RNA, 19 nt, Homo sapiens
  misc_RNA (1)...(19): siRNA sense strand
acagagccuugcaaauaau

SEQ ID NO: 2094808 - RNA, 19 nt, Homo sapiens
  misc_RNA (1)...(19): siRNA sense strand
gcuacaggaguucaagaaa

SEQ ID NO: 2094809 - RNA, 19 nt, Homo sapiens
  misc_RNA (1)...(19): siRNA sense strand
gaaacaaaaguuagagcua

SEQ ID NO: 2094810 - RNA, 19 nt, Homo sapiens
  misc_RNA (1)...(19): siRNA sense strand
gaccgugucucagcaugau

SEQ ID NO: 2094811 - RNA, 19 nt, Homo sapiens
  misc_RNA (1)...(19): siRNA sense strand
gaagucagaugggauugaa

SEQ ID NO: 2094812 - RNA, 19 nt, Homo sapiens
  misc_RNA (1)...(19): siRNA sense strand
gaacaagacccggacauuc

SEQ ID NO: 2094813 - RNA, 19 nt, Homo sapiens
  misc_RNA (1)...(19): siRNA sense strand
ggaacaagacccggacauu

SEQ ID NO: 2094814 - RNA, 19 nt, Homo sapiens
  misc_RNA (1)...(19): siRNA sense strand
cagaugggauugaaaggau

SEQ ID NO: 2094815 - RNA, 19 nt, Homo sapiens
  misc_RNA (1)...(19): siRNA sense strand
uagaaugggugaggaaugu

SEQ ID NO: 2094816 - RNA, 19 nt, Homo sapiens
  misc_RNA (1)...(19): siRNA sense strand
ggccuucucugcuguguca

SEQ ID NO: 2094817 - RNA, 19 nt, Homo sapiens
  misc_RNA (1)...(19): siRNA sense strand
ccacaguccugggaaguca

SEQ ID NO: 2094818 - RNA, 19 nt, Homo sapiens
  misc_RNA (1)...(19): siRNA sense strand
gaaccugccuauauuuuag

SEQ ID NO: 2094819 - RNA, 19 nt, Homo sapiens
  misc_RNA (1)...(19): siRNA sense strand
ggaaccugccuauauuuua

SEQ ID NO: 2094820 - RNA, 19 nt, Homo sapiens
  misc_RNA (1)...(19): siRNA sense strand
ggugaggaauguguuagug

SEQ ID NO: 2094821 - RNA, 19 nt, Homo sapiens
  misc_RNA (1)...(19): siRNA sense strand
gagucccacuggucuagaa

SEQ ID NO: 2094822 - RNA, 19 nt, Homo sapiens
  misc_RNA (1)...(19): siRNA sense strand
cagccagggugaccacaga

SEQ ID NO: 2094823 - RNA, 19 nt, Homo sapiens
  misc_RNA (1)...(19): siRNA sense strand
ggaagucagaugggauuga

SEQ ID NO: 2094824 - RNA, 19 nt, Homo sapiens
  misc_RNA (1)...(19): siRNA sense strand
ggacauuccaggccacagu

SEQ ID NO: 2094825 - RNA, 19 nt, Homo sapiens
  misc_RNA (1)...(19): siRNA sense strand
ccacccaccucuggucugu

SEQ ID NO: 2094826 - RNA, 19 nt, Homo sapiens
  misc_RNA (1)...(19): siRNA sense strand
ggaaguggcgagggucuca

SEQ ID NO: 2094827 - RNA, 19 nt, Homo sapiens
  misc_RNA (1)...(19): siRNA sense strand
gaaugggugaggaaugugu

SEQ ID NO: 2094828 - RNA, 19 nt, Homo sapiens
  misc_RNA (1)...(19): siRNA sense strand
gagacgguccagacaggaa

SEQ ID NO: 2094829 - RNA, 19 nt, Homo sapiens
  misc_RNA (1)...(19): siRNA sense strand
ggauugaaaggaucuucug

SEQ ID NO: 2094830 - RNA, 19 nt, Homo sapiens
  misc_RNA (1)...(19): siRNA sense strand
gcuccuuccugcuucucuu

SEQ ID NO: 2094831 - RNA, 19 nt, Homo sapiens
  misc_RNA (1)...(19): siRNA sense strand
gguccagacaggaacaaga

SEQ ID NO: 2094832 - RNA, 19 nt, Homo sapiens
  misc_RNA (1)...(19): siRNA sense strand
ccucuggucugugccacuu

SEQ ID NO: 2094833 - RNA, 19 nt, Homo sapiens
  misc_RNA (1)...(19): siRNA sense strand
ggucugugccacuuugauc

SEQ ID NO: 2094834 - RNA, 19 nt, Homo sapiens
  misc_RNA (1)...(19): siRNA sense strand
acagaaaggacugcaggaa

SEQ ID NO: 2094835 - RNA, 19 nt, Homo sapiens
  misc_RNA (1)...(19): siRNA sense strand
ucagaugggauugaaagga

SEQ ID NO: 2094836 - RNA, 19 nt, Homo sapiens
  misc_RNA (1)...(19): siRNA sense strand
ucuggucugugccacuuug

SEQ ID NO: 2094837 - RNA, 19 nt, Homo sapiens
  misc_RNA (1)...(19): siRNA sense strand
gaagucagaugggauugaa

SEQ ID NO: 2094838 - RNA, 19 nt, Homo sapiens
  misc_RNA (1)...(19): siRNA sense strand
gaacaagacccggacauuc

SEQ ID NO: 2094839 - RNA, 19 nt, Homo sapiens
  misc_RNA (1)...(19): siRNA sense strand
ggaacaagacccggacauu

SEQ ID NO: 2094840 - RNA, 19 nt, Homo sapiens
  misc_RNA (1)...(19): siRNA sense strand
cagaugggauugaaaggau

SEQ ID NO: 2094841 - RNA, 19 nt, Homo sapiens
  misc_RNA (1)...(19): siRNA sense strand
uagaaugggugaggaaugu

SEQ ID NO: 2094842 - RNA, 19 nt, Homo sapiens
  misc_RNA (1)...(19): siRNA sense strand
ggccuucucugcuguguca

SEQ ID NO: 2094843 - RNA, 19 nt, Homo sapiens
  misc_RNA (1)...(19): siRNA sense strand
ccacaguccugggaaguca

SEQ ID NO: 2094844 - RNA, 19 nt, Homo sapiens
  misc_RNA (1)...(19): siRNA sense strand
gaaccugccuauauuuuag

SEQ ID NO: 2094845 - RNA, 19 nt, Homo sapiens
  misc_RNA (1)...(19): siRNA sense strand
ggaaccugccuauauuuua

SEQ ID NO: 2094846 - RNA, 19 nt, Homo sapiens
  misc_RNA (1)...(19): siRNA sense strand
ggugaggaauguguuagug

SEQ ID NO: 2094847 - RNA, 19 nt, Homo sapiens
  misc_RNA (1)...(19): siRNA sense strand
gagucccacuggucuagaa

SEQ ID NO: 2094848 - RNA, 19 nt, Homo sapiens
  misc_RNA (1)...(19): siRNA sense strand
cagccagggugaccacaga

SEQ ID NO: 2094849 - RNA, 19 nt, Homo sapiens
  misc_RNA (1)...(19): siRNA sense strand
ggaagucagaugggauuga

SEQ ID NO: 2094850 - RNA, 19 nt, Homo sapiens
  misc_RNA (1)...(19): siRNA sense strand
ggacauuccaggccacagu

SEQ ID NO: 2094851 - RNA, 19 nt, Homo sapiens
  misc_RNA (1)...(19): siRNA sense strand
ccacccaccucuggucugu

SEQ ID NO: 2094852 - RNA, 19 nt, Homo sapiens
  misc_RNA (1)...(19): siRNA sense strand
ggaaguggcgagggucuca

SEQ ID NO: 2094853 - RNA, 19 nt, Homo sapiens
  misc_RNA (1)...(19): siRNA sense strand
gaaugggugaggaaugugu

SEQ ID NO: 2094854 - RNA, 19 nt, Homo sapiens
  misc_RNA (1)...(19): siRNA sense strand
gagacgguccagacaggaa

SEQ ID NO: 2094855 - RNA, 19 nt, Homo sapiens
  misc_RNA (1)...(19): siRNA sense strand
ggauugaaaggaucuucug

SEQ ID NO: 2094856 - RNA, 19 nt, Homo sapiens
  misc_RNA (1)...(19): siRNA sense strand
gcuccuuccugcuucucuu

SEQ ID NO: 2094857 - RNA, 19 nt, Homo sapiens
  misc_RNA (1)...(19): siRNA sense strand
gguccagacaggaacaaga

SEQ ID NO: 2094858 - RNA, 19 nt, Homo sapiens
  misc_RNA (1)...(19): siRNA sense strand
ccucuggucugugccacuu

SEQ ID NO: 2094859 - RNA, 19 nt, Homo sapiens
  misc_RNA (1)...(19): siRNA sense strand
ggucugugccacuuugauc

SEQ ID NO: 2094860 - RNA, 19 nt, Homo sapiens
  misc_RNA (1)...(19): siRNA sense strand
acagaaaggacugcaggaa

SEQ ID NO: 2094861 - RNA, 19 nt, Homo sapiens
  misc_RNA (1)...(19): siRNA sense strand
ucagaugggauugaaagga

SEQ ID NO: 2094862 - RNA, 19 nt, Homo sapiens
  misc_RNA (1)...(19): siRNA sense strand
ucuggucugugccacuuug

SEQ ID NO: 2094863 - RNA, 19 nt, Homo sapiens
  misc_RNA (1)...(19): siRNA sense strand
gaccggauguuaaccuuua

SEQ ID NO: 2094864 - RNA, 19 nt, Homo sapiens
  misc_RNA (1)...(19): siRNA sense strand
agacugaccuguacaaguu

SEQ ID NO: 2094865 - RNA, 19 nt, Homo sapiens
  misc_RNA (1)...(19): siRNA sense strand
gcaaugaccauaucugcua

SEQ ID NO: 2094866 - RNA, 19 nt, Homo sapiens
  misc_RNA (1)...(19): siRNA sense strand
gaaacuaccuacagucucu

SEQ ID NO: 2094867 - RNA, 19 nt, Homo sapiens
  misc_RNA (1)...(19): siRNA sense strand
ggaccugaauuguaucauc

SEQ ID NO: 2094868 - RNA, 19 nt, Homo sapiens
  misc_RNA (1)...(19): siRNA sense strand
gaccugaauuguaucauca

SEQ ID NO: 2094869 - RNA, 19 nt, Homo sapiens
  misc_RNA (1)...(19): siRNA sense strand
aggaggaccugaauuguau

SEQ ID NO: 2094870 - RNA, 19 nt, Homo sapiens
  misc_RNA (1)...(19): siRNA sense strand
gauggagacugaccuguac

SEQ ID NO: 2094871 - RNA, 19 nt, Homo sapiens
  misc_RNA (1)...(19): siRNA sense strand
gaccuuaagauuugugauu

SEQ ID NO: 2094872 - RNA, 19 nt, Homo sapiens
  misc_RNA (1)...(19): siRNA sense strand
ccugcgaccuuaagauuug

SEQ ID NO: 2094873 - RNA, 19 nt, Homo sapiens
  misc_RNA (1)...(19): siRNA sense strand
gcugagcaaugaccauauc

SEQ ID NO: 2094874 - RNA, 19 nt, Homo sapiens
  misc_RNA (1)...(19): siRNA sense strand
gcuacacgcaguugcagua

SEQ ID NO: 2094875 - RNA, 19 nt, Homo sapiens
  misc_RNA (1)...(19): siRNA sense strand
cuaaggagcggcugaagga

SEQ ID NO: 2094876 - RNA, 19 nt, Homo sapiens
  misc_RNA (1)...(19): siRNA sense strand
uggaugaccuaccuaagga

SEQ ID NO: 2094877 - RNA, 19 nt, Homo sapiens
  misc_RNA (1)...(19): siRNA sense strand
ccaauaaacggaucacagu

SEQ ID NO: 2094878 - RNA, 19 nt, Homo sapiens
  misc_RNA (1)...(19): siRNA sense strand
gaucagcucaaccacauuc

SEQ ID NO: 2094879 - RNA, 19 nt, Homo sapiens
  misc_RNA (1)...(19): siRNA sense strand
caacaccaccugcgaccuu

SEQ ID NO: 2094880 - RNA, 19 nt, Homo sapiens
  misc_RNA (1)...(19): siRNA sense strand
gcccgaaacuaccuacagu

SEQ ID NO: 2094881 - RNA, 19 nt, Homo sapiens
  misc_RNA (1)...(19): siRNA sense strand
ccaaguccaucgacaucug

SEQ ID NO: 2094882 - RNA, 19 nt, Homo sapiens
  misc_RNA (1)...(19): siRNA sense strand
ugauggagacugaccugua

SEQ ID NO: 2094883 - RNA, 19 nt, Homo sapiens
  misc_RNA (1)...(19): siRNA sense strand
cagcugagcaaugaccaua

SEQ ID NO: 2094884 - RNA, 19 nt, Homo sapiens
  misc_RNA (1)...(19): siRNA sense strand
uggaucagcucaaccacau

SEQ ID NO: 2094885 - RNA, 19 nt, Homo sapiens
  misc_RNA (1)...(19): siRNA sense strand
caugaaggcccgaaacuac

SEQ ID NO: 2094886 - RNA, 19 nt, Homo sapiens
  misc_RNA (1)...(19): siRNA sense strand
gagacugaccuguacaagu

SEQ ID NO: 2094887 - RNA, 19 nt, Homo sapiens
  misc_RNA (1)...(19): siRNA sense strand
ccgaggagcccuucaccuu

SEQ ID NO: 2094888 - RNA, 19 nt, Homo sapiens
  misc_RNA (1)...(19): siRNA sense strand
acacgcaguugcaguacau

SEQ ID NO: 2094889 - RNA, 19 nt, Homo sapiens
  misc_RNA (1)...(19): siRNA sense strand
acuaugacccgacggauga

SEQ ID NO: 2094890 - RNA, 19 nt, Homo sapiens
  misc_RNA (1)...(19): siRNA sense strand
ggaccggauguuaaccuuu

SEQ ID NO: 2094891 - RNA, 19 nt, Homo sapiens
  misc_RNA (1)...(19): siRNA sense strand
caccugcgaccuuaagauu

SEQ ID NO: 2094892 - RNA, 19 nt, Homo sapiens
  misc_RNA (1)...(19): siRNA sense strand
gcuacuuccucuaccagau

SEQ ID NO: 2094893 - RNA, 19 nt, Homo sapiens
  misc_RNA (1)...(19): siRNA sense strand
uacagucucugcccuccaa

SEQ ID NO: 2094894 - RNA, 19 nt, Homo sapiens
  misc_RNA (1)...(19): siRNA sense strand
ccagagaucaugcugaacu

SEQ ID NO: 2094895 - RNA, 19 nt, Homo sapiens
  misc_RNA (1)...(19): siRNA sense strand
ggagcuggaugaccuaccu

SEQ ID NO: 2094896 - RNA, 19 nt, Homo sapiens
  misc_RNA (1)...(19): siRNA sense strand
gcaagcacuaccuggauca

SEQ ID NO: 2094897 - RNA, 19 nt, Homo sapiens
  misc_RNA (1)...(19): siRNA sense strand
uccaagggcuauaccaagu

SEQ ID NO: 2094898 - RNA, 19 nt, Homo sapiens
  misc_RNA (1)...(19): siRNA sense strand
gcguggccaucaagaagau

SEQ ID NO: 2094899 - RNA, 19 nt, Homo sapiens
  misc_RNA (1)...(19): siRNA sense strand
ccuuaagauuugugauuuc

SEQ ID NO: 2094900 - RNA, 19 nt, Homo sapiens
  misc_RNA (1)...(19): siRNA sense strand
aacaccaccugcgaccuua

SEQ ID NO: 2094901 - RNA, 19 nt, Homo sapiens
  misc_RNA (1)...(19): siRNA sense strand
caacaugaaggcccgaaac

SEQ ID NO: 2094902 - RNA, 19 nt, Homo sapiens
  misc_RNA (1)...(19): siRNA sense strand
gcgcuuccgccaugagaau

SEQ ID NO: 2094903 - RNA, 19 nt, Homo sapiens
  misc_RNA (1)...(19): siRNA sense strand
gaaggcccgaaacuaccua

SEQ ID NO: 2094904 - RNA, 19 nt, Homo sapiens
  misc_RNA (1)...(19): siRNA sense strand
cugcuggaccggauguuaa

SEQ ID NO: 2094905 - RNA, 19 nt, Homo sapiens
  misc_RNA (1)...(19): siRNA sense strand
uggaagccaugagagaugu

SEQ ID NO: 2094906 - RNA, 19 nt, Homo sapiens
  misc_RNA (1)...(19): siRNA sense strand
gauugccgauccugagcau

SEQ ID NO: 2094907 - RNA, 19 nt, Homo sapiens
  misc_RNA (1)...(19): siRNA sense strand
gugcuccaccgagaucuaa

SEQ ID NO: 2094908 - RNA, 19 nt, Homo sapiens
  misc_RNA (1)...(19): siRNA sense strand
acaugaaggcccgaaacua

SEQ ID NO: 2094909 - RNA, 19 nt, Homo sapiens
  misc_RNA (1)...(19): siRNA sense strand
gaggaccugaauuguauca

SEQ ID NO: 2094910 - RNA, 19 nt, Homo sapiens
  misc_RNA (1)...(19): siRNA sense strand
gcugcauucuggcugagau

SEQ ID NO: 2094911 - RNA, 19 nt, Homo sapiens
  misc_RNA (1)...(19): siRNA sense strand
ccggcuuccugacggagua

SEQ ID NO: 2094912 - RNA, 19 nt, Homo sapiens
  misc_RNA (1)...(19): siRNA sense strand
caacgugcuccaccgagau

SEQ ID NO: 2094913 - RNA, 19 nt, Homo sapiens
  misc_RNA (1)...(19): siRNA sense strand
agacucgcguggccaucaa

SEQ ID NO: 2094914 - RNA, 19 nt, Homo sapiens
  misc_RNA (1)...(19): siRNA sense strand
gaauuguaucaucaacaug

SEQ ID NO: 2094915 - RNA, 19 nt, Homo sapiens
  misc_RNA (1)...(19): siRNA sense strand
agaucaugcugaacuccaa

SEQ ID NO: 2094916 - RNA, 19 nt, Homo sapiens
  misc_RNA (1)...(19): siRNA sense strand
cagagaucaugcugaacuc

SEQ ID NO: 2094917 - RNA, 19 nt, Homo sapiens
  misc_RNA (1)...(19): siRNA sense strand
gaccggauguuaaccuuua

SEQ ID NO: 2094918 - RNA, 19 nt, Homo sapiens
  misc_RNA (1)...(19): siRNA sense strand
agacugaccuguacaaguu

SEQ ID NO: 2094919 - RNA, 19 nt, Homo sapiens
  misc_RNA (1)...(19): siRNA sense strand
gcaaugaccauaucugcua

SEQ ID NO: 2094920 - RNA, 19 nt, Homo sapiens
  misc_RNA (1)...(19): siRNA sense strand
gaaacuaccuacagucucu

SEQ ID NO: 2094921 - RNA, 19 nt, Homo sapiens
  misc_RNA (1)...(19): siRNA sense strand
ggaccugaauuguaucauc

SEQ ID NO: 2094922 - RNA, 19 nt, Homo sapiens
  misc_RNA (1)...(19): siRNA sense strand
gaccugaauuguaucauca

SEQ ID NO: 2094923 - RNA, 19 nt, Homo sapiens
  misc_RNA (1)...(19): siRNA sense strand
aggaggaccugaauuguau

SEQ ID NO: 2094924 - RNA, 19 nt, Homo sapiens
  misc_RNA (1)...(19): siRNA sense strand
gauggagacugaccuguac

SEQ ID NO: 2094925 - RNA, 19 nt, Homo sapiens
  misc_RNA (1)...(19): siRNA sense strand
gaccuuaagauuugugauu

SEQ ID NO: 2094926 - RNA, 19 nt, Homo sapiens
  misc_RNA (1)...(19): siRNA sense strand
ccugcgaccuuaagauuug

SEQ ID NO: 2094927 - RNA, 19 nt, Homo sapiens
  misc_RNA (1)...(19): siRNA sense strand
gcugagcaaugaccauauc

SEQ ID NO: 2094928 - RNA, 19 nt, Homo sapiens
  misc_RNA (1)...(19): siRNA sense strand
gcuacacgcaguugcagua

SEQ ID NO: 2094929 - RNA, 19 nt, Homo sapiens
  misc_RNA (1)...(19): siRNA sense strand
cuaaggagcggcugaagga

SEQ ID NO: 2094930 - RNA, 19 nt, Homo sapiens
  misc_RNA (1)...(19): siRNA sense strand
uggaugaccuaccuaagga

SEQ ID NO: 2094931 - RNA, 19 nt, Homo sapiens
  misc_RNA (1)...(19): siRNA sense strand
ccaauaaacggaucacagu

SEQ ID NO: 2094932 - RNA, 19 nt, Homo sapiens
  misc_RNA (1)...(19): siRNA sense strand
gaucagcucaaccacauuc

SEQ ID NO: 2094933 - RNA, 19 nt, Homo sapiens
  misc_RNA (1)...(19): siRNA sense strand
caacaccaccugcgaccuu

SEQ ID NO: 2094934 - RNA, 19 nt, Homo sapiens
  misc_RNA (1)...(19): siRNA sense strand
gcccgaaacuaccuacagu

SEQ ID NO: 2094935 - RNA, 19 nt, Homo sapiens
  misc_RNA (1)...(19): siRNA sense strand
ccaaguccaucgacaucug

SEQ ID NO: 2094936 - RNA, 19 nt, Homo sapiens
  misc_RNA (1)...(19): siRNA sense strand
ugauggagacugaccugua

SEQ ID NO: 2094937 - RNA, 19 nt, Homo sapiens
  misc_RNA (1)...(19): siRNA sense strand
cagcugagcaaugaccaua

SEQ ID NO: 2094938 - RNA, 19 nt, Homo sapiens
  misc_RNA (1)...(19): siRNA sense strand
uggaucagcucaaccacau

SEQ ID NO: 2094939 - RNA, 19 nt, Homo sapiens
  misc_RNA (1)...(19): siRNA sense strand
caugaaggcccgaaacuac

SEQ ID NO: 2094940 - RNA, 19 nt, Homo sapiens
  misc_RNA (1)...(19): siRNA sense strand
gagacugaccuguacaagu

SEQ ID NO: 2094941 - RNA, 19 nt, Homo sapiens
  misc_RNA (1)...(19): siRNA sense strand
ccgaggagcccuucaccuu

SEQ ID NO: 2094942 - RNA, 19 nt, Homo sapiens
  misc_RNA (1)...(19): siRNA sense strand
acacgcaguugcaguacau

SEQ ID NO: 2094943 - RNA, 19 nt, Homo sapiens
  misc_RNA (1)...(19): siRNA sense strand
ggaccggauguuaaccuuu

SEQ ID NO: 2094944 - RNA, 19 nt, Homo sapiens
  misc_RNA (1)...(19): siRNA sense strand
caccugcgaccuuaagauu

SEQ ID NO: 2094945 - RNA, 19 nt, Homo sapiens
  misc_RNA (1)...(19): siRNA sense strand
gcuacuuccucuaccagau

SEQ ID NO: 2094946 - RNA, 19 nt, Homo sapiens
  misc_RNA (1)...(19): siRNA sense strand
uacagucucugcccuccaa

SEQ ID NO: 2094947 - RNA, 19 nt, Homo sapiens
  misc_RNA (1)...(19): siRNA sense strand
ccagagaucaugcugaacu

SEQ ID NO: 2094948 - RNA, 19 nt, Homo sapiens
  misc_RNA (1)...(19): siRNA sense strand
ggagcuggaugaccuaccu

SEQ ID NO: 2094949 - RNA, 19 nt, Homo sapiens
  misc_RNA (1)...(19): siRNA sense strand
gcaagcacuaccuggauca

SEQ ID NO: 2094950 - RNA, 19 nt, Homo sapiens
  misc_RNA (1)...(19): siRNA sense strand
uccaagggcuauaccaagu

SEQ ID NO: 2094951 - RNA, 19 nt, Homo sapiens
  misc_RNA (1)...(19): siRNA sense strand
gcguggccaucaagaagau

SEQ ID NO: 2094952 - RNA, 19 nt, Homo sapiens
  misc_RNA (1)...(19): siRNA sense strand
ccuuaagauuugugauuuc

SEQ ID NO: 2094953 - RNA, 19 nt, Homo sapiens
  misc_RNA (1)...(19): siRNA sense strand
aacaccaccugcgaccuua

SEQ ID NO: 2094954 - RNA, 19 nt, Homo sapiens
  misc_RNA (1)...(19): siRNA sense strand
caacaugaaggcccgaaac

SEQ ID NO: 2094955 - RNA, 19 nt, Homo sapiens
  misc_RNA (1)...(19): siRNA sense strand
gcgcuuccgccaugagaau

SEQ ID NO: 2094956 - RNA, 19 nt, Homo sapiens
  misc_RNA (1)...(19): siRNA sense strand
gaaggcccgaaacuaccua

SEQ ID NO: 2094957 - RNA, 19 nt, Homo sapiens
  misc_RNA (1)...(19): siRNA sense strand
cugcuggaccggauguuaa

SEQ ID NO: 2094958 - RNA, 19 nt, Homo sapiens
  misc_RNA (1)...(19): siRNA sense strand
uggaagccaugagagaugu

SEQ ID NO: 2094959 - RNA, 19 nt, Homo sapiens
  misc_RNA (1)...(19): siRNA sense strand
gauugccgauccugagcau

SEQ ID NO: 2094960 - RNA, 19 nt, Homo sapiens
  misc_RNA (1)...(19): siRNA sense strand
gugcuccaccgagaucuaa

SEQ ID NO: 2094961 - RNA, 19 nt, Homo sapiens
  misc_RNA (1)...(19): siRNA sense strand
acaugaaggcccgaaacua

SEQ ID NO: 2094962 - RNA, 19 nt, Homo sapiens
  misc_RNA (1)...(19): siRNA sense strand
gaggaccugaauuguauca

SEQ ID NO: 2094963 - RNA, 19 nt, Homo sapiens
  misc_RNA (1)...(19): siRNA sense strand
gcugcauucuggcugagau

SEQ ID NO: 2094964 - RNA, 19 nt, Homo sapiens
  misc_RNA (1)...(19): siRNA sense strand
ccggcuuccugacggagua

SEQ ID NO: 2094965 - RNA, 19 nt, Homo sapiens
  misc_RNA (1)...(19): siRNA sense strand
caacgugcuccaccgagau

SEQ ID NO: 2094966 - RNA, 19 nt, Homo sapiens
  misc_RNA (1)...(19): siRNA sense strand
agacucgcguggccaucaa

SEQ ID NO: 2094967 - RNA, 19 nt, Homo sapiens
  misc_RNA (1)...(19): siRNA sense strand
gaauuguaucaucaacaug

SEQ ID NO: 2094968 - RNA, 19 nt, Homo sapiens
  misc_RNA (1)...(19): siRNA sense strand
agaucaugcugaacuccaa

SEQ ID NO: 2094969 - RNA, 19 nt, Homo sapiens
  misc_RNA (1)...(19): siRNA sense strand
cagagaucaugcugaacuc

SEQ ID NO: 2094970 - RNA, 19 nt, Homo sapiens
  misc_RNA (1)...(19): siRNA sense strand
cgaaacauaugcaccuuua

SEQ ID NO: 2094971 - RNA, 19 nt, Homo sapiens
  misc_RNA (1)...(19): siRNA sense strand
gaagacagaugcuauccuu

SEQ ID NO: 2094972 - RNA, 19 nt, Homo sapiens
  misc_RNA (1)...(19): siRNA sense strand
caagauuucucugauguua

SEQ ID NO: 2094973 - RNA, 19 nt, Homo sapiens
  misc_RNA (1)...(19): siRNA sense strand
gauguuauccuaagcaaua

SEQ ID NO: 2094974 - RNA, 19 nt, Homo sapiens
  misc_RNA (1)...(19): siRNA sense strand
uggaauaucuggagaaauu

SEQ ID NO: 2094975 - RNA, 19 nt, Homo sapiens
  misc_RNA (1)...(19): siRNA sense strand
gaacagggaaggacaauug

SEQ ID NO: 2094976 - RNA, 19 nt, Homo sapiens
  misc_RNA (1)...(19): siRNA sense strand
gaagaaguccgaaacauau

SEQ ID NO: 2094977 - RNA, 19 nt, Homo sapiens
  misc_RNA (1)...(19): siRNA sense strand
ucucgcagcucacacauua

SEQ ID NO: 2094978 - RNA, 19 nt, Homo sapiens
  misc_RNA (1)...(19): siRNA sense strand
caagacaccuuccagacaa

SEQ ID NO: 2094979 - RNA, 19 nt, Homo sapiens
  misc_RNA (1)...(19): siRNA sense strand
ggaaguaaccauuaugaug

SEQ ID NO: 2094980 - RNA, 19 nt, Homo sapiens
  misc_RNA (1)...(19): siRNA sense strand
gggaaugaauuggaaguaa

SEQ ID NO: 2094981 - RNA, 19 nt, Homo sapiens
  misc_RNA (1)...(19): siRNA sense strand
gaauuggaaguaaccauua

SEQ ID NO: 2094982 - RNA, 19 nt, Homo sapiens
  misc_RNA (1)...(19): siRNA sense strand
gaaagacuguucuauagcu

SEQ ID NO: 2094983 - RNA, 19 nt, Homo sapiens
  misc_RNA (1)...(19): siRNA sense strand
caaauguaccgagcaauua

SEQ ID NO: 2094984 - RNA, 19 nt, Homo sapiens
  misc_RNA (1)...(19): siRNA sense strand
caauaacaaucacacagaa

SEQ ID NO: 2094985 - RNA, 19 nt, Homo sapiens
  misc_RNA (1)...(19): siRNA sense strand
caucaucuauuguuggaaa

SEQ ID NO: 2094986 - RNA, 19 nt, Homo sapiens
  misc_RNA (1)...(19): siRNA sense strand
uaagaagucacaugaguaa

SEQ ID NO: 2094987 - RNA, 19 nt, Homo sapiens
  misc_RNA (1)...(19): siRNA sense strand
aaagcugacuucaacuaua

SEQ ID NO: 2094988 - RNA, 19 nt, Homo sapiens
  misc_RNA (1)...(19): siRNA sense strand
gaaggacaauugguuggaa

SEQ ID NO: 2094989 - RNA, 19 nt, Homo sapiens
  misc_RNA (1)...(19): siRNA sense strand
gcaaucuccugaagacaga

SEQ ID NO: 2094990 - RNA, 19 nt, Homo sapiens
  misc_RNA (1)...(19): siRNA sense strand
gcaauaacaaucacacaga

SEQ ID NO: 2094991 - RNA, 19 nt, Homo sapiens
  misc_RNA (1)...(19): siRNA sense strand
gaagguaucauucgaaguc

SEQ ID NO: 2094992 - RNA, 19 nt, Homo sapiens
  misc_RNA (1)...(19): siRNA sense strand
uggaaagacuguucuauag

SEQ ID NO: 2094993 - RNA, 19 nt, Homo sapiens
  misc_RNA (1)...(19): siRNA sense strand
acagagauguguugauguu

SEQ ID NO: 2094994 - RNA, 19 nt, Homo sapiens
  misc_RNA (1)...(19): siRNA sense strand
ggaaauaaagcaugugagu

SEQ ID NO: 2094995 - RNA, 19 nt, Homo sapiens
  misc_RNA (1)...(19): siRNA sense strand
gcauuaagaagucacauga

SEQ ID NO: 2094996 - RNA, 19 nt, Homo sapiens
  misc_RNA (1)...(19): siRNA sense strand
uuacagagauguguugaug

SEQ ID NO: 2094997 - RNA, 19 nt, Homo sapiens
  misc_RNA (1)...(19): siRNA sense strand
caacuuagacuuguucuuc

SEQ ID NO: 2094998 - RNA, 19 nt, Homo sapiens
  misc_RNA (1)...(19): siRNA sense strand
gaaagcugacuucaacuau

SEQ ID NO: 2094999 - RNA, 19 nt, Homo sapiens
  misc_RNA (1)...(19): siRNA sense strand
gcacaauucacuguucuuu

SEQ ID NO: 2095000 - RNA, 19 nt, Homo sapiens
  misc_RNA (1)...(19): siRNA sense strand
ggaaugaauuggaaguaac

SEQ ID NO: 2095001 - RNA, 19 nt, Homo sapiens
  misc_RNA (1)...(19): siRNA sense strand
gcagaacgcuauccaugac

SEQ ID NO: 2095002 - RNA, 19 nt, Homo sapiens
  misc_RNA (1)...(19): siRNA sense strand
ccccugagguuauaaauua

SEQ ID NO: 2095003 - RNA, 19 nt, Homo sapiens
  misc_RNA (1)...(19): siRNA sense strand
gguagaagcacuaugugaa

SEQ ID NO: 2095004 - RNA, 19 nt, Homo sapiens
  misc_RNA (1)...(19): siRNA sense strand
aagcugacuucaacuauau

SEQ ID NO: 2095005 - RNA, 19 nt, Homo sapiens
  misc_RNA (1)...(19): siRNA sense strand
gcaccuuuauucugucuuc

SEQ ID NO: 2095006 - RNA, 19 nt, Homo sapiens
  misc_RNA (1)...(19): siRNA sense strand
acaauucacuguucuuucu

SEQ ID NO: 2095007 - RNA, 19 nt, Homo sapiens
  misc_RNA (1)...(19): siRNA sense strand
ucaaauguaccgagcaauu

SEQ ID NO: 2095008 - RNA, 19 nt, Homo sapiens
  misc_RNA (1)...(19): siRNA sense strand
caaccaacuuagacuuguu

SEQ ID NO: 2095009 - RNA, 19 nt, Homo sapiens
  misc_RNA (1)...(19): siRNA sense strand
agagauguguugauguuug

SEQ ID NO: 2095010 - RNA, 19 nt, Homo sapiens
  misc_RNA (1)...(19): siRNA sense strand
ccaaggucauuagaacuuu

SEQ ID NO: 2095011 - RNA, 19 nt, Homo sapiens
  misc_RNA (1)...(19): siRNA sense strand
gaguaaagcaccaaguaau

SEQ ID NO: 2095012 - RNA, 19 nt, Homo sapiens
  misc_RNA (1)...(19): siRNA sense strand
ggaauaucuggagaaauua

SEQ ID NO: 2095013 - RNA, 19 nt, Homo sapiens
  misc_RNA (1)...(19): siRNA sense strand
aguaaagcaccaaguaaua

SEQ ID NO: 2095014 - RNA, 19 nt, Homo sapiens
  misc_RNA (1)...(19): siRNA sense strand
ucauuguccugaagcuaua

SEQ ID NO: 2095015 - RNA, 19 nt, Homo sapiens
  misc_RNA (1)...(19): siRNA sense strand
ugucuuccgucuuuccaua

SEQ ID NO: 2095016 - RNA, 19 nt, Homo sapiens
  misc_RNA (1)...(19): siRNA sense strand
agacagaugcuauccuuug

SEQ ID NO: 2095017 - RNA, 19 nt, Homo sapiens
  misc_RNA (1)...(19): siRNA sense strand
ucacacagaaauucaagaa

SEQ ID NO: 2095018 - RNA, 19 nt, Homo sapiens
  misc_RNA (1)...(19): siRNA sense strand
gaagcuauacagggaauug

SEQ ID NO: 2095019 - RNA, 19 nt, Homo sapiens
  misc_RNA (1)...(19): siRNA sense strand
gaagucacaugaguaaagc

SEQ ID NO: 2095020 - RNA, 19 nt, Homo sapiens
  misc_RNA (1)...(19): siRNA sense strand
gcagugacagugagacaug

SEQ ID NO: 2095021 - RNA, 19 nt, Homo sapiens
  misc_RNA (1)...(19): siRNA sense strand
gacaauugaagguaucauu

SEQ ID NO: 2095022 - RNA, 19 nt, Homo sapiens
  misc_RNA (1)...(19): siRNA sense strand
ugaguaaagcaccaaguaa

SEQ ID NO: 2095023 - RNA, 19 nt, Homo sapiens
  misc_RNA (1)...(19): siRNA sense strand
ugcaguaucuggaauaucu

SEQ ID NO: 2095024 - RNA, 19 nt, Homo sapiens
  misc_RNA (1)...(19): siRNA sense strand
augggaagcugcacaauuc

SEQ ID NO: 2095025 - RNA, 19 nt, Homo sapiens
  misc_RNA (1)...(19): siRNA sense strand
gcugaagggagguuugaaa

SEQ ID NO: 2095026 - RNA, 19 nt, Homo sapiens
  misc_RNA (1)...(19): siRNA sense strand
uauucugucuuccgucuuu

SEQ ID NO: 2095027 - RNA, 19 nt, Homo sapiens
  misc_RNA (1)...(19): siRNA sense strand
ccaaaccgacugacucuuc

SEQ ID NO: 2095028 - RNA, 19 nt, Homo sapiens
  misc_RNA (1)...(19): siRNA sense strand
cgagggaugugcuaaugca

SEQ ID NO: 2095029 - RNA, 19 nt, Homo sapiens
  misc_RNA (1)...(19): siRNA sense strand
gaauugcugucuggucauc

SEQ ID NO: 2095030 - RNA, 19 nt, Homo sapiens
  misc_RNA (1)...(19): siRNA sense strand
gcuuugacuugcuuacaga

SEQ ID NO: 2095031 - RNA, 19 nt, Homo sapiens
  misc_RNA (1)...(19): siRNA sense strand
uuaagaagucacaugagua

SEQ ID NO: 2095032 - RNA, 19 nt, Homo sapiens
  misc_RNA (1)...(19): siRNA sense strand
ggcagaacgcuauccauga

SEQ ID NO: 2095033 - RNA, 19 nt, Homo sapiens
  misc_RNA (1)...(19): siRNA sense strand
ggugguagaagcacuaugu

SEQ ID NO: 2095034 - RNA, 19 nt, Homo sapiens
  misc_RNA (1)...(19): siRNA sense strand
ugaauuggaaguaaccauu

SEQ ID NO: 2095035 - RNA, 19 nt, Homo sapiens
  misc_RNA (1)...(19): siRNA sense strand
uaacaaccaacuuagacuu

SEQ ID NO: 2095036 - RNA, 19 nt, Homo sapiens
  misc_RNA (1)...(19): siRNA sense strand
gacagaugcuauccuuugg

SEQ ID NO: 2095037 - RNA, 19 nt, Homo sapiens
  misc_RNA (1)...(19): siRNA sense strand
uuggaaagacuguucuaua

SEQ ID NO: 2095038 - RNA, 19 nt, Homo sapiens
  misc_RNA (1)...(19): siRNA sense strand
guaaagcaccaaguaauac

SEQ ID NO: 2095039 - RNA, 19 nt, Homo sapiens
  misc_RNA (1)...(19): siRNA sense strand
cccaagauuucucugaugu

SEQ ID NO: 2095040 - RNA, 19 nt, Homo sapiens
  misc_RNA (1)...(19): siRNA sense strand
uaccugcucuguccucuuc

SEQ ID NO: 2095041 - RNA, 19 nt, Homo sapiens
  misc_RNA (1)...(19): siRNA sense strand
ugggaacucucauagaaca

SEQ ID NO: 2095042 - RNA, 19 nt, Homo sapiens
  misc_RNA (1)...(19): siRNA sense strand
ggacaauugguuggaaaga

SEQ ID NO: 2095043 - RNA, 19 nt, Homo sapiens
  misc_RNA (1)...(19): siRNA sense strand
ugucaaauguaccgagcaa

SEQ ID NO: 2095044 - RNA, 19 nt, Homo sapiens
  misc_RNA (1)...(19): siRNA sense strand
gaacgcuauccaugacuug

SEQ ID NO: 2095045 - RNA, 19 nt, Homo sapiens
  misc_RNA (1)...(19): siRNA sense strand
gugcucaccuuagccaaug

SEQ ID NO: 2095046 - RNA, 19 nt, Homo sapiens
  misc_RNA (1)...(19): siRNA sense strand
gaagggagguuugaaaagg

SEQ ID NO: 2095047 - RNA, 19 nt, Homo sapiens
  misc_RNA (1)...(19): siRNA sense strand
gaaaacaaccagccuaucu

SEQ ID NO: 2095048 - RNA, 19 nt, Homo sapiens
  misc_RNA (1)...(19): siRNA sense strand
gagacauggcuuugacuug

SEQ ID NO: 2095049 - RNA, 19 nt, Homo sapiens
  misc_RNA (1)...(19): siRNA sense strand
guugauguuugccauguuc

SEQ ID NO: 2095050 - RNA, 19 nt, Homo sapiens
  misc_RNA (1)...(19): siRNA sense strand
auucgacucuccaucauga

SEQ ID NO: 2095051 - RNA, 19 nt, Homo sapiens
  misc_RNA (1)...(19): siRNA sense strand
caacuagugcacuguggaa

SEQ ID NO: 2095052 - RNA, 19 nt, Homo sapiens
  misc_RNA (1)...(19): siRNA sense strand
ggauucgacucuccaucau

SEQ ID NO: 2095053 - RNA, 19 nt, Homo sapiens
  misc_RNA (1)...(19): siRNA sense strand
gaugaaggccaugguaaca

SEQ ID NO: 2095054 - RNA, 19 nt, Homo sapiens
  misc_RNA (1)...(19): siRNA sense strand
ccagacaauugaagguauc

SEQ ID NO: 2095055 - RNA, 19 nt, Homo sapiens
  misc_RNA (1)...(19): siRNA sense strand
uccuuuagauguuauccua

SEQ ID NO: 2095056 - RNA, 19 nt, Homo sapiens
  misc_RNA (1)...(19): siRNA sense strand
gcugucuggucaucaucua

SEQ ID NO: 2095057 - RNA, 19 nt, Homo sapiens
  misc_RNA (1)...(19): siRNA sense strand
ucacuguucuuucuaagcu

SEQ ID NO: 2095058 - RNA, 19 nt, Homo sapiens
  misc_RNA (1)...(19): siRNA sense strand
gcugcacaauucacuguuc

SEQ ID NO: 2095059 - RNA, 19 nt, Homo sapiens
  misc_RNA (1)...(19): siRNA sense strand
gagauguguugauguuugc

SEQ ID NO: 2095060 - RNA, 19 nt, Homo sapiens
  misc_RNA (1)...(19): siRNA sense strand
ccucuuccuugccagauga

SEQ ID NO: 2095061 - RNA, 19 nt, Homo sapiens
  misc_RNA (1)...(19): siRNA sense strand
aaacaaccagccuaucuca

SEQ ID NO: 2095062 - RNA, 19 nt, Homo sapiens
  misc_RNA (1)...(19): siRNA sense strand
caucaugaggguaggauug

SEQ ID NO: 2095063 - RNA, 19 nt, Homo sapiens
  misc_RNA (1)...(19): siRNA sense strand
gcagagcucaagacaccuu

SEQ ID NO: 2095064 - RNA, 19 nt, Homo sapiens
  misc_RNA (1)...(19): siRNA sense strand
ggaaggacaauugguugga

SEQ ID NO: 2095065 - RNA, 19 nt, Homo sapiens
  misc_RNA (1)...(19): siRNA sense strand
gcugacuucaacuauauaa

SEQ ID NO: 2095066 - RNA, 19 nt, Homo sapiens
  misc_RNA (1)...(19): siRNA sense strand
gucaucaucuauuguugga

SEQ ID NO: 2095067 - RNA, 19 nt, Homo sapiens
  misc_RNA (1)...(19): siRNA sense strand
ugacuugcuuacagagaug

SEQ ID NO: 2095068 - RNA, 19 nt, Homo sapiens
  misc_RNA (1)...(19): siRNA sense strand
gugaugaaggccaugguaa

SEQ ID NO: 2095069 - RNA, 19 nt, Homo sapiens
  misc_RNA (1)...(19): siRNA sense strand
ucaagacaccuuccagaca

SEQ ID NO: 2095070 - RNA, 19 nt, Homo sapiens
  misc_RNA (1)...(19): siRNA sense strand
gagaacagcuaccaagaug

SEQ ID NO: 2095071 - RNA, 19 nt, Homo sapiens
  misc_RNA (1)...(19): siRNA sense strand
caaacuacccagcguauua

SEQ ID NO: 2095072 - RNA, 19 nt, Homo sapiens
  misc_RNA (1)...(19): siRNA sense strand
ggaaagagccaucggaaau

SEQ ID NO: 2095073 - RNA, 19 nt, Homo sapiens
  misc_RNA (1)...(19): siRNA sense strand
gaagaagaagcuccgauuu

SEQ ID NO: 2095074 - RNA, 19 nt, Homo sapiens
  misc_RNA (1)...(19): siRNA sense strand
gcagugaguuugaacagau

SEQ ID NO: 2095075 - RNA, 19 nt, Homo sapiens
  misc_RNA (1)...(19): siRNA sense strand
gacaacaacgaaugaaaua

SEQ ID NO: 2095076 - RNA, 19 nt, Homo sapiens
  misc_RNA (1)...(19): siRNA sense strand
gcaaggcccugagugagaa

SEQ ID NO: 2095077 - RNA, 19 nt, Homo sapiens
  misc_RNA (1)...(19): siRNA sense strand
gaaagagccaucggaaauu

SEQ ID NO: 2095078 - RNA, 19 nt, Homo sapiens
  misc_RNA (1)...(19): siRNA sense strand
ggacaacaacgaaugaaau

SEQ ID NO: 2095079 - RNA, 19 nt, Homo sapiens
  misc_RNA (1)...(19): siRNA sense strand
ggaagaagaagcuccgauu

SEQ ID NO: 2095080 - RNA, 19 nt, Homo sapiens
  misc_RNA (1)...(19): siRNA sense strand
aaagagccaucggaaauuu

SEQ ID NO: 2095081 - RNA, 19 nt, Homo sapiens
  misc_RNA (1)...(19): siRNA sense strand
ccacuucucugcaucuuca

SEQ ID NO: 2095082 - RNA, 19 nt, Homo sapiens
  misc_RNA (1)...(19): siRNA sense strand
gucaacgacucaaaguaua

SEQ ID NO: 2095083 - RNA, 19 nt, Homo sapiens
  misc_RNA (1)...(19): siRNA sense strand
gcugagcgcuucccaccuu

SEQ ID NO: 2095084 - RNA, 19 nt, Homo sapiens
  misc_RNA (1)...(19): siRNA sense strand
ugaaggauaugugccguaa

SEQ ID NO: 2095085 - RNA, 19 nt, Homo sapiens
  misc_RNA (1)...(19): siRNA sense strand
gcaagaaggagaaggacaa

SEQ ID NO: 2095086 - RNA, 19 nt, Homo sapiens
  misc_RNA (1)...(19): siRNA sense strand
ccacaaagaaggagacaga

SEQ ID NO: 2095087 - RNA, 19 nt, Homo sapiens
  misc_RNA (1)...(19): siRNA sense strand
ccaaggaggaggauaaaga

SEQ ID NO: 2095088 - RNA, 19 nt, Homo sapiens
  misc_RNA (1)...(19): siRNA sense strand
agaaggagaaggacaagua

SEQ ID NO: 2095089 - RNA, 19 nt, Homo sapiens
  misc_RNA (1)...(19): siRNA sense strand
ggagaaggaugaggaggau

SEQ ID NO: 2095090 - RNA, 19 nt, Homo sapiens
  misc_RNA (1)...(19): siRNA sense strand
ggaggaggauaaagagaag

SEQ ID NO: 2095091 - RNA, 19 nt, Homo sapiens
  misc_RNA (1)...(19): siRNA sense strand
ggucagaacauccgucaga

SEQ ID NO: 2095092 - RNA, 19 nt, Homo sapiens
  misc_RNA (1)...(19): siRNA sense strand
ugaggaagaugaagaucga

SEQ ID NO: 2095093 - RNA, 19 nt, Homo sapiens
  misc_RNA (1)...(19): siRNA sense strand
ggagaucaccuacgacuac

SEQ ID NO: 2095094 - RNA, 19 nt, Homo sapiens
  misc_RNA (1)...(19): siRNA sense strand
caaaggacaacaacgaaug

SEQ ID NO: 2095095 - RNA, 19 nt, Homo sapiens
  misc_RNA (1)...(19): siRNA sense strand
agaagaagcuccgauuugg

SEQ ID NO: 2095096 - RNA, 19 nt, Homo sapiens
  misc_RNA (1)...(19): siRNA sense strand
cgaggaagaugaggaagau

SEQ ID NO: 2095097 - RNA, 19 nt, Homo sapiens
  misc_RNA (1)...(19): siRNA sense strand
cgaaugaaauacuaugaac

SEQ ID NO: 2095098 - RNA, 19 nt, Homo sapiens
  misc_RNA (1)...(19): siRNA sense strand
agaugaagaucgagaggaa

SEQ ID NO: 2095099 - RNA, 19 nt, Homo sapiens
  misc_RNA (1)...(19): siRNA sense strand
caacgacucaaaguauaua

SEQ ID NO: 2095100 - RNA, 19 nt, Homo sapiens
  misc_RNA (1)...(19): siRNA sense strand
ugaggaggaugacgaggaa

SEQ ID NO: 2095101 - RNA, 19 nt, Homo sapiens
  misc_RNA (1)...(19): siRNA sense strand
gcaagaugguggagaacgu

SEQ ID NO: 2095102 - RNA, 19 nt, Homo sapiens
  misc_RNA (1)...(19): siRNA sense strand
ggacagugaccugcugaaa

SEQ ID NO: 2095103 - RNA, 19 nt, Homo sapiens
  misc_RNA (1)...(19): siRNA sense strand
cuacgggcaucgaggcuuu

SEQ ID NO: 2095104 - RNA, 19 nt, Homo sapiens
  misc_RNA (1)...(19): siRNA sense strand
uugcaaggcugaaugacaa

SEQ ID NO: 2095105 - RNA, 19 nt, Homo sapiens
  misc_RNA (1)...(19): siRNA sense strand
cgauucgucuuccaaaugu

SEQ ID NO: 2095106 - RNA, 19 nt, Homo sapiens
  misc_RNA (1)...(19): siRNA sense strand
gaugcagacccagauguua

SEQ ID NO: 2095107 - RNA, 19 nt, Homo sapiens
  misc_RNA (1)...(19): siRNA sense strand
uaaguacggugagguggaa

SEQ ID NO: 2095108 - RNA, 19 nt, Homo sapiens
  misc_RNA (1)...(19): siRNA sense strand
caucauccaugcccagcuu

SEQ ID NO: 2095109 - RNA, 19 nt, Homo sapiens
  misc_RNA (1)...(19): siRNA sense strand
cagcucaaguuccggaaga

SEQ ID NO: 2095110 - RNA, 19 nt, Homo sapiens
  misc_RNA (1)...(19): siRNA sense strand
ggaagaugaggaagaugaa

SEQ ID NO: 2095111 - RNA, 19 nt, Homo sapiens
  misc_RNA (1)...(19): siRNA sense strand
gauguuaacucggcuccau

SEQ ID NO: 2095112 - RNA, 19 nt, Homo sapiens
  misc_RNA (1)...(19): siRNA sense strand
acagugaccugcugaaacu

SEQ ID NO: 2095113 - RNA, 19 nt, Homo sapiens
  misc_RNA (1)...(19): siRNA sense strand
aaggauaugugccguaagu

SEQ ID NO: 2095114 - RNA, 19 nt, Homo sapiens
  misc_RNA (1)...(19): siRNA sense strand
caagaucccgugucugugu

SEQ ID NO: 2095115 - RNA, 19 nt, Homo sapiens
  misc_RNA (1)...(19): siRNA sense strand
gcaagcaccgcaaguccuu

SEQ ID NO: 2095116 - RNA, 19 nt, Homo sapiens
  misc_RNA (1)...(19): siRNA sense strand
ggagaaggccaagccauuc

SEQ ID NO: 2095117 - RNA, 19 nt, Homo sapiens
  misc_RNA (1)...(19): siRNA sense strand
caacaacgaaugaaauacu

SEQ ID NO: 2095118 - RNA, 19 nt, Homo sapiens
  misc_RNA (1)...(19): siRNA sense strand
caucaaaggacaacaacga

SEQ ID NO: 2095119 - RNA, 19 nt, Homo sapiens
  misc_RNA (1)...(19): siRNA sense strand
agacgacccugaacaagag

SEQ ID NO: 2095120 - RNA, 19 nt, Homo sapiens
  misc_RNA (1)...(19): siRNA sense strand
aagaagaagcuccgauuug

SEQ ID NO: 2095121 - RNA, 19 nt, Homo sapiens
  misc_RNA (1)...(19): siRNA sense strand
gaagguguaccgcuaugau

SEQ ID NO: 2095122 - RNA, 19 nt, Homo sapiens
  misc_RNA (1)...(19): siRNA sense strand
aguuuaagcuggacgaguu

SEQ ID NO: 2095123 - RNA, 19 nt, Homo sapiens
  misc_RNA (1)...(19): siRNA sense strand
acaacaagaucccgugucu

SEQ ID NO: 2095124 - RNA, 19 nt, Homo sapiens
  misc_RNA (1)...(19): siRNA sense strand
uuccaaauguucucuguau

SEQ ID NO: 2095125 - RNA, 19 nt, Homo sapiens
  misc_RNA (1)...(19): siRNA sense strand
gcgauucgucuuccaaaug

SEQ ID NO: 2095126 - RNA, 19 nt, Homo sapiens
  misc_RNA (1)...(19): siRNA sense strand
gaggaaagcgauucgucuu

SEQ ID NO: 2095127 - RNA, 19 nt, Homo sapiens
  misc_RNA (1)...(19): siRNA sense strand
acacagaggaggaggaaga

SEQ ID NO: 2095128 - RNA, 19 nt, Homo sapiens
  misc_RNA (1)...(19): siRNA sense strand
cagcacagcagccuggauu

SEQ ID NO: 2095129 - RNA, 19 nt, Homo sapiens
  misc_RNA (1)...(19): siRNA sense strand
gcccagcccugagagagaa

SEQ ID NO: 2095130 - RNA, 19 nt, Homo sapiens
  misc_RNA (1)...(19): siRNA sense strand
ggacgaguucuauauugga

SEQ ID NO: 2095131 - RNA, 19 nt, Homo sapiens
  misc_RNA (1)...(19): siRNA sense strand
ccacugagacggccgaauc

SEQ ID NO: 2095132 - RNA, 19 nt, Homo sapiens
  misc_RNA (1)...(19): siRNA sense strand
caaggcaaauggacagaac

SEQ ID NO: 2095133 - RNA, 19 nt, Homo sapiens
  misc_RNA (1)...(19): siRNA sense strand
gagaggaagcuguggauac

SEQ ID NO: 2095134 - RNA, 19 nt, Homo sapiens
  misc_RNA (1)...(19): siRNA sense strand
ugaagacgacccugaacaa

SEQ ID NO: 2095135 - RNA, 19 nt, Homo sapiens
  misc_RNA (1)...(19): siRNA sense strand
gcagggcaagggauugauu

SEQ ID NO: 2095136 - RNA, 19 nt, Homo sapiens
  misc_RNA (1)...(19): siRNA sense strand
caacgaaugaaauacuaug

SEQ ID NO: 2095137 - RNA, 19 nt, Homo sapiens
  misc_RNA (1)...(19): siRNA sense strand
ugucaacgacucaaaguau

SEQ ID NO: 2095138 - RNA, 19 nt, Homo sapiens
  misc_RNA (1)...(19): siRNA sense strand
gaaagcgauucgucuucca

SEQ ID NO: 2095139 - RNA, 19 nt, Homo sapiens
  misc_RNA (1)...(19): siRNA sense strand
ucgagaugcugcugaagga

SEQ ID NO: 2095140 - RNA, 19 nt, Homo sapiens
  misc_RNA (1)...(19): siRNA sense strand
ccacgcaucucuggucaag

SEQ ID NO: 2095141 - RNA, 19 nt, Homo sapiens
  misc_RNA (1)...(19): siRNA sense strand
gcccauguccuuccagaug

SEQ ID NO: 2095142 - RNA, 19 nt, Homo sapiens
  misc_RNA (1)...(19): siRNA sense strand
guucuauauuggacagauu

SEQ ID NO: 2095143 - RNA, 19 nt, Homo sapiens
  misc_RNA (1)...(19): siRNA sense strand
ucgaauacgugggucagaa

SEQ ID NO: 2095144 - RNA, 19 nt, Homo sapiens
  misc_RNA (1)...(19): siRNA sense strand
uccagcagccgacaagaua

SEQ ID NO: 2095145 - RNA, 19 nt, Homo sapiens
  misc_RNA (1)...(19): siRNA sense strand
ugacaucaaaggacaacaa

SEQ ID NO: 2095146 - RNA, 19 nt, Homo sapiens
  misc_RNA (1)...(19): siRNA sense strand
acgaggagaucaccuacga

SEQ ID NO: 2095147 - RNA, 19 nt, Homo sapiens
  misc_RNA (1)...(19): siRNA sense strand
caaccuggccagauucauc

SEQ ID NO: 2095148 - RNA, 19 nt, Homo sapiens
  misc_RNA (1)...(19): siRNA sense strand
gaacucgggccuggacuca

SEQ ID NO: 2095149 - RNA, 19 nt, Homo sapiens
  misc_RNA (1)...(19): siRNA sense strand
gcuggacgaguucuauauu

SEQ ID NO: 2095150 - RNA, 19 nt, Homo sapiens
  misc_RNA (1)...(19): siRNA sense strand
cagaggaggaggaagagaa

SEQ ID NO: 2095151 - RNA, 19 nt, Homo sapiens
  misc_RNA (1)...(19): siRNA sense strand
ggcaaggcccugagugaga

SEQ ID NO: 2095152 - RNA, 19 nt, Homo sapiens
  misc_RNA (1)...(19): siRNA sense strand
aaaggacaacaacgaauga

SEQ ID NO: 2095153 - RNA, 19 nt, Homo sapiens
  misc_RNA (1)...(19): siRNA sense strand
gcugcacgccuaacugcua

SEQ ID NO: 2095154 - RNA, 19 nt, Homo sapiens
  misc_RNA (1)...(19): siRNA sense strand
gaaggagaaggacaaguac

SEQ ID NO: 2095155 - RNA, 19 nt, Homo sapiens
  misc_RNA (1)...(19): siRNA sense strand
gaagacgacccugaacaag

SEQ ID NO: 2095156 - RNA, 19 nt, Homo sapiens
  misc_RNA (1)...(19): siRNA sense strand
gaacagcagcaugguccuu

SEQ ID NO: 2095157 - RNA, 19 nt, Homo sapiens
  misc_RNA (1)...(19): siRNA sense strand
gcaaacuacccagcguauu

SEQ ID NO: 2095158 - RNA, 19 nt, Homo sapiens
  misc_RNA (1)...(19): siRNA sense strand
cagaagguguaccgcuaug

SEQ ID NO: 2095159 - RNA, 19 nt, Homo sapiens
  misc_RNA (1)...(19): siRNA sense strand
cuggacgaguucuauauug

SEQ ID NO: 2095160 - RNA, 19 nt, Homo sapiens
  misc_RNA (1)...(19): siRNA sense strand
gagaucaccuacgacuaca

SEQ ID NO: 2095161 - RNA, 19 nt, Homo sapiens
  misc_RNA (1)...(19): siRNA sense strand
guccuccucugaagaugaa

SEQ ID NO: 2095162 - RNA, 19 nt, Homo sapiens
  misc_RNA (1)...(19): siRNA sense strand
ugacucagauggcgaaaau

SEQ ID NO: 2095163 - RNA, 19 nt, Homo sapiens
  misc_RNA (1)...(19): siRNA sense strand
agaaggaugaggaggauga

SEQ ID NO: 2095164 - RNA, 19 nt, Homo sapiens
  misc_RNA (1)...(19): siRNA sense strand
ccaagcagcaagccaagga

SEQ ID NO: 2095165 - RNA, 19 nt, Homo sapiens
  misc_RNA (1)...(19): siRNA sense strand
ccgcacaucuaugacuuug

SEQ ID NO: 2095166 - RNA, 19 nt, Homo sapiens
  misc_RNA (1)...(19): siRNA sense strand
ggauaugugccguaaguac

SEQ ID NO: 2095167 - RNA, 19 nt, Homo sapiens
  misc_RNA (1)...(19): siRNA sense strand
gaccauccuguaugacauu

SEQ ID NO: 2095168 - RNA, 19 nt, Homo sapiens
  misc_RNA (1)...(19): siRNA sense strand
ccgaugagcgucccucuuc

SEQ ID NO: 2095169 - RNA, 19 nt, Homo sapiens
  misc_RNA (1)...(19): siRNA sense strand
ucaaguuccggaagaagaa

SEQ ID NO: 2095170 - RNA, 19 nt, Homo sapiens
  misc_RNA (1)...(19): siRNA sense strand
gcuccaaccucaucaagca

SEQ ID NO: 2095171 - RNA, 19 nt, Homo sapiens
  misc_RNA (1)...(19): siRNA sense strand
gcugcuggcucaccaagga

SEQ ID NO: 2095172 - RNA, 19 nt, Homo sapiens
  misc_RNA (1)...(19): siRNA sense strand
cgaccucccuuccuuuauc

SEQ ID NO: 2095173 - RNA, 19 nt, Homo sapiens
  misc_RNA (1)...(19): siRNA sense strand
ggagugcggcaaggguuua

SEQ ID NO: 2095174 - RNA, 19 nt, Homo sapiens
  misc_RNA (1)...(19): siRNA sense strand
gguccuuccuucaacaucu

SEQ ID NO: 2095175 - RNA, 19 nt, Homo sapiens
  misc_RNA (1)...(19): siRNA sense strand
cacagcgacuggcgagaga

SEQ ID NO: 2095176 - RNA, 19 nt, Homo sapiens
  misc_RNA (1)...(19): siRNA sense strand
gaucggccaccagcgaauu

SEQ ID NO: 2095177 - RNA, 19 nt, Homo sapiens
  misc_RNA (1)...(19): siRNA sense strand
gggagugcggcaaggguuu

SEQ ID NO: 2095178 - RNA, 19 nt, Homo sapiens
  misc_RNA (1)...(19): siRNA sense strand
gggagggguuuuacucaga

SEQ ID NO: 2095179 - RNA, 19 nt, Homo sapiens
  misc_RNA (1)...(19): siRNA sense strand
cccgaccucccuuccuuua

SEQ ID NO: 2095180 - RNA, 19 nt, Homo sapiens
  misc_RNA (1)...(19): siRNA sense strand
ccacucgggagaagccauu

SEQ ID NO: 2095181 - RNA, 19 nt, Homo sapiens
  misc_RNA (1)...(19): siRNA sense strand
gaaauuggcuuuacacuag

SEQ ID NO: 2095182 - RNA, 19 nt, Homo sapiens
  misc_RNA (1)...(19): siRNA sense strand
gaggauagcucagaagaua

SEQ ID NO: 2095183 - RNA, 19 nt, Homo sapiens
  misc_RNA (1)...(19): siRNA sense strand
ggaaugggcucaucaacaa

SEQ ID NO: 2095184 - RNA, 19 nt, Homo sapiens
  misc_RNA (1)...(19): siRNA sense strand
gaagaugggcuuuguuuaa

SEQ ID NO: 2095185 - RNA, 19 nt, Homo sapiens
  misc_RNA (1)...(19): siRNA sense strand
agucagaacuguagaaaua

SEQ ID NO: 2095186 - RNA, 19 nt, Homo sapiens
  misc_RNA (1)...(19): siRNA sense strand
gaucuuagcugugcauuug

SEQ ID NO: 2095187 - RNA, 19 nt, Homo sapiens
  misc_RNA (1)...(19): siRNA sense strand
gcuguuauguugcuucuua

SEQ ID NO: 2095188 - RNA, 19 nt, Homo sapiens
  misc_RNA (1)...(19): siRNA sense strand
guaaugaccucucuauaau

SEQ ID NO: 2095189 - RNA, 19 nt, Homo sapiens
  misc_RNA (1)...(19): siRNA sense strand
ccaagaaguugucaccaua

SEQ ID NO: 2095190 - RNA, 19 nt, Homo sapiens
  misc_RNA (1)...(19): siRNA sense strand
gguaaugaccucucuauaa

SEQ ID NO: 2095191 - RNA, 19 nt, Homo sapiens
  misc_RNA (1)...(19): siRNA sense strand
gauggaggcuucuggauug

SEQ ID NO: 2095192 - RNA, 19 nt, Homo sapiens
  misc_RNA (1)...(19): siRNA sense strand
gaaaguuggagaaaugaua

SEQ ID NO: 2095193 - RNA, 19 nt, Homo sapiens
  misc_RNA (1)...(19): siRNA sense strand
ggacccagcaccaacauua

SEQ ID NO: 2095194 - RNA, 19 nt, Homo sapiens
  misc_RNA (1)...(19): siRNA sense strand
ggacgacucugaagcugaa

SEQ ID NO: 2095195 - RNA, 19 nt, Homo sapiens
  misc_RNA (1)...(19): siRNA sense strand
gagaaaugauagugucaaa

SEQ ID NO: 2095196 - RNA, 19 nt, Homo sapiens
  misc_RNA (1)...(19): siRNA sense strand
gaagggauagauacaauuu

SEQ ID NO: 2095197 - RNA, 19 nt, Homo sapiens
  misc_RNA (1)...(19): siRNA sense strand
uaccagcacuauuaacuua

SEQ ID NO: 2095198 - RNA, 19 nt, Homo sapiens
  misc_RNA (1)...(19): siRNA sense strand
acaacgagcuugccauuga

SEQ ID NO: 2095199 - RNA, 19 nt, Homo sapiens
  misc_RNA (1)...(19): siRNA sense strand
gcaaagacuuauuccugaa

SEQ ID NO: 2095200 - RNA, 19 nt, Homo sapiens
  misc_RNA (1)...(19): siRNA sense strand
gaugagaaaguguaugaua

SEQ ID NO: 2095201 - RNA, 19 nt, Homo sapiens
  misc_RNA (1)...(19): siRNA sense strand
cgaagagagugauuuagaa

SEQ ID NO: 2095202 - RNA, 19 nt, Homo sapiens
  misc_RNA (1)...(19): siRNA sense strand
ugaaaugccugguggagaa

SEQ ID NO: 2095203 - RNA, 19 nt, Homo sapiens
  misc_RNA (1)...(19): siRNA sense strand
gggaaccucuuacugauug

SEQ ID NO: 2095204 - RNA, 19 nt, Homo sapiens
  misc_RNA (1)...(19): siRNA sense strand
cagaauggcuucagucauc

SEQ ID NO: 2095205 - RNA, 19 nt, Homo sapiens
  misc_RNA (1)...(19): siRNA sense strand
ggaaauuggcuuuacacua

SEQ ID NO: 2095206 - RNA, 19 nt, Homo sapiens
  misc_RNA (1)...(19): siRNA sense strand
ugucaaugcuuauuaggua

SEQ ID NO: 2095207 - RNA, 19 nt, Homo sapiens
  misc_RNA (1)...(19): siRNA sense strand
ggagaaccauaauaaagau

SEQ ID NO: 2095208 - RNA, 19 nt, Homo sapiens
  misc_RNA (1)...(19): siRNA sense strand
gaagaugcccgacccagaa

SEQ ID NO: 2095209 - RNA, 19 nt, Homo sapiens
  misc_RNA (1)...(19): siRNA sense strand
ggaaacggcuccugugcau

SEQ ID NO: 2095210 - RNA, 19 nt, Homo sapiens
  misc_RNA (1)...(19): siRNA sense strand
agucagauguuuagaguaa

SEQ ID NO: 2095211 - RNA, 19 nt, Homo sapiens
  misc_RNA (1)...(19): siRNA sense strand
gaacaaagaaagaagaucu

SEQ ID NO: 2095212 - RNA, 19 nt, Homo sapiens
  misc_RNA (1)...(19): siRNA sense strand
caagagacccauugcaauu

SEQ ID NO: 2095213 - RNA, 19 nt, Homo sapiens
  misc_RNA (1)...(19): siRNA sense strand
aaacgaagagagugauuua

SEQ ID NO: 2095214 - RNA, 19 nt, Homo sapiens
  misc_RNA (1)...(19): siRNA sense strand
gaugggcuuuguuuaaauu

SEQ ID NO: 2095215 - RNA, 19 nt, Homo sapiens
  misc_RNA (1)...(19): siRNA sense strand
gcaccaacauuagcacuug

SEQ ID NO: 2095216 - RNA, 19 nt, Homo sapiens
  misc_RNA (1)...(19): siRNA sense strand
gaaagaagaucuggaugac

SEQ ID NO: 2095217 - RNA, 19 nt, Homo sapiens
  misc_RNA (1)...(19): siRNA sense strand
ggagaggacggguggauaa

SEQ ID NO: 2095218 - RNA, 19 nt, Homo sapiens
  misc_RNA (1)...(19): siRNA sense strand
cauuaagacucaucaagaa

SEQ ID NO: 2095219 - RNA, 19 nt, Homo sapiens
  misc_RNA (1)...(19): siRNA sense strand
aagaagaucuggaugacaa

SEQ ID NO: 2095220 - RNA, 19 nt, Homo sapiens
  misc_RNA (1)...(19): siRNA sense strand
ggaugccagugccaaauuu

SEQ ID NO: 2095221 - RNA, 19 nt, Homo sapiens
  misc_RNA (1)...(19): siRNA sense strand
acaauaacauucaggauca

SEQ ID NO: 2095222 - RNA, 19 nt, Homo sapiens
  misc_RNA (1)...(19): siRNA sense strand
gauuacacacuuccuauuu

SEQ ID NO: 2095223 - RNA, 19 nt, Homo sapiens
  misc_RNA (1)...(19): siRNA sense strand
ggaucacgcugcucaugaa

SEQ ID NO: 2095224 - RNA, 19 nt, Homo sapiens
  misc_RNA (1)...(19): siRNA sense strand
caauaaauguggacaagag

SEQ ID NO: 2095225 - RNA, 19 nt, Homo sapiens
  misc_RNA (1)...(19): siRNA sense strand
ggaggaggauagcucagaa

SEQ ID NO: 2095226 - RNA, 19 nt, Homo sapiens
  misc_RNA (1)...(19): siRNA sense strand
ggaccauucucaggcauuu

SEQ ID NO: 2095227 - RNA, 19 nt, Homo sapiens
  misc_RNA (1)...(19): siRNA sense strand
gaacguugccuaagucagu

SEQ ID NO: 2095228 - RNA, 19 nt, Homo sapiens
  misc_RNA (1)...(19): siRNA sense strand
ggaggcuucuggauuguga

SEQ ID NO: 2095229 - RNA, 19 nt, Homo sapiens
  misc_RNA (1)...(19): siRNA sense strand
uggagaagcuguuugacuu

SEQ ID NO: 2095230 - RNA, 19 nt, Homo sapiens
  misc_RNA (1)...(19): siRNA sense strand
ggauugugauugaugagaa

SEQ ID NO: 2095231 - RNA, 19 nt, Homo sapiens
  misc_RNA (1)...(19): siRNA sense strand
gcucauugcuugccagaag

SEQ ID NO: 2095232 - RNA, 19 nt, Homo sapiens
  misc_RNA (1)...(19): siRNA sense strand
gcggacugcugcaaauauu

SEQ ID NO: 2095233 - RNA, 19 nt, Homo sapiens
  misc_RNA (1)...(19): siRNA sense strand
agagagugauuuagaagaa

SEQ ID NO: 2095234 - RNA, 19 nt, Homo sapiens
  misc_RNA (1)...(19): siRNA sense strand
gaaacgaagagagugauuu

SEQ ID NO: 2095235 - RNA, 19 nt, Homo sapiens
  misc_RNA (1)...(19): siRNA sense strand
gaacgugggcugucuuagu

SEQ ID NO: 2095236 - RNA, 19 nt, Homo sapiens
  misc_RNA (1)...(19): siRNA sense strand
ugucaaugcuuauuaguca

SEQ ID NO: 2095237 - RNA, 19 nt, Homo sapiens
  misc_RNA (1)...(19): siRNA sense strand
gcccgugcuuucuguguua

SEQ ID NO: 2095238 - RNA, 19 nt, Homo sapiens
  misc_RNA (1)...(19): siRNA sense strand
ggcauuaucuuuaguucau

SEQ ID NO: 2095239 - RNA, 19 nt, Homo sapiens
  misc_RNA (1)...(19): siRNA sense strand
aagaugggcuuuguuuaaa

SEQ ID NO: 2095240 - RNA, 19 nt, Homo sapiens
  misc_RNA (1)...(19): siRNA sense strand
gaagcagaauguucaggau

SEQ ID NO: 2095241 - RNA, 19 nt, Homo sapiens
  misc_RNA (1)...(19): siRNA sense strand
gaauugagaccugcuguug

SEQ ID NO: 2095242 - RNA, 19 nt, Homo sapiens
  misc_RNA (1)...(19): siRNA sense strand
uaaaggacuuccagacaca

SEQ ID NO: 2095243 - RNA, 19 nt, Homo sapiens
  misc_RNA (1)...(19): siRNA sense strand
gauaagggaaauuggcuuu

SEQ ID NO: 2095244 - RNA, 19 nt, Homo sapiens
  misc_RNA (1)...(19): siRNA sense strand
gacaagagacccauugcaa

SEQ ID NO: 2095245 - RNA, 19 nt, Homo sapiens
  misc_RNA (1)...(19): siRNA sense strand
cagaagaugggcuuuguuu

SEQ ID NO: 2095246 - RNA, 19 nt, Homo sapiens
  misc_RNA (1)...(19): siRNA sense strand
gggccugcuucucggauua

SEQ ID NO: 2095247 - RNA, 19 nt, Homo sapiens
  misc_RNA (1)...(19): siRNA sense strand
gcgaagccaccaagacuuu

SEQ ID NO: 2095248 - RNA, 19 nt, Homo sapiens
  misc_RNA (1)...(19): siRNA sense strand
agagacccauugcaauuaa

SEQ ID NO: 2095249 - RNA, 19 nt, Homo sapiens
  misc_RNA (1)...(19): siRNA sense strand
ggagcuggcugugcagaga

SEQ ID NO: 2095250 - RNA, 19 nt, Homo sapiens
  misc_RNA (1)...(19): siRNA sense strand
ccacuacaaugauguuuac

SEQ ID NO: 2095251 - RNA, 19 nt, Homo sapiens
  misc_RNA (1)...(19): siRNA sense strand
aaagagaauuccuaagaag

SEQ ID NO: 2095252 - RNA, 19 nt, Homo sapiens
  misc_RNA (1)...(19): siRNA sense strand
gaccugcuguugguaauga

SEQ ID NO: 2095253 - RNA, 19 nt, Homo sapiens
  misc_RNA (1)...(19): siRNA sense strand
ggucugcacuccugucauc

SEQ ID NO: 2095254 - RNA, 19 nt, Homo sapiens
  misc_RNA (1)...(19): siRNA sense strand
caugagcccuggcagaaug

SEQ ID NO: 2095255 - RNA, 19 nt, Homo sapiens
  misc_RNA (1)...(19): siRNA sense strand
ugaaacuccugcaccugua

SEQ ID NO: 2095256 - RNA, 19 nt, Homo sapiens
  misc_RNA (1)...(19): siRNA sense strand
cagguguacuugauauuga

SEQ ID NO: 2095257 - RNA, 19 nt, Homo sapiens
  misc_RNA (1)...(19): siRNA sense strand
gauugugauugaugagaaa

SEQ ID NO: 2095258 - RNA, 19 nt, Homo sapiens
  misc_RNA (1)...(19): siRNA sense strand
caaauagaaagguacugua

SEQ ID NO: 2095259 - RNA, 19 nt, Homo sapiens
  misc_RNA (1)...(19): siRNA sense strand
gaacaaacugaaaggaaca

SEQ ID NO: 2095260 - RNA, 19 nt, Homo sapiens
  misc_RNA (1)...(19): siRNA sense strand
ccucauaguccaauaaaug

SEQ ID NO: 2095261 - RNA, 19 nt, Homo sapiens
  misc_RNA (1)...(19): siRNA sense strand
ucauguggcauuaucuuua

SEQ ID NO: 2095262 - RNA, 19 nt, Homo sapiens
  misc_RNA (1)...(19): siRNA sense strand
gcagggcacaggaaacuga

SEQ ID NO: 2095263 - RNA, 19 nt, Homo sapiens
  misc_RNA (1)...(19): siRNA sense strand
gaagagagugauuuagaag

SEQ ID NO: 2095264 - RNA, 19 nt, Homo sapiens
  misc_RNA (1)...(19): siRNA sense strand
gagcaaauaaagcacagaa

SEQ ID NO: 2095265 - RNA, 19 nt, Homo sapiens
  misc_RNA (1)...(19): siRNA sense strand
caaaccaaguggaacaaag

SEQ ID NO: 2095266 - RNA, 19 nt, Homo sapiens
  misc_RNA (1)...(19): siRNA sense strand
gccaaauugugcacgauga

SEQ ID NO: 2095267 - RNA, 19 nt, Homo sapiens
  misc_RNA (1)...(19): siRNA sense strand
ugagagguguggacuggaa

SEQ ID NO: 2095268 - RNA, 19 nt, Homo sapiens
  misc_RNA (1)...(19): siRNA sense strand
gaagcaacaaggaaggaaa

SEQ ID NO: 2095269 - RNA, 19 nt, Homo sapiens
  misc_RNA (1)...(19): siRNA sense strand
agaaagaagaucuggauga

SEQ ID NO: 2095270 - RNA, 19 nt, Homo sapiens
  misc_RNA (1)...(19): siRNA sense strand
acaagugguugaagcagaa

SEQ ID NO: 2095271 - RNA, 19 nt, Homo sapiens
  misc_RNA (1)...(19): siRNA sense strand
gaccacaccgaucauguuu

SEQ ID NO: 2095272 - RNA, 19 nt, Homo sapiens
  misc_RNA (1)...(19): siRNA sense strand
gugacaauguugaggaaga

SEQ ID NO: 2095273 - RNA, 19 nt, Homo sapiens
  misc_RNA (1)...(19): siRNA sense strand
gcccgugcuuucugcguua

SEQ ID NO: 2095274 - RNA, 19 nt, Homo sapiens
  misc_RNA (1)...(19): siRNA sense strand
cagugggugucaaugcuua

SEQ ID NO: 2095275 - RNA, 19 nt, Homo sapiens
  misc_RNA (1)...(19): siRNA sense strand
ggaagggauagauacaauu

SEQ ID NO: 2095276 - RNA, 19 nt, Homo sapiens
  misc_RNA (1)...(19): siRNA sense strand
gcagguguacuugauauug

SEQ ID NO: 2095277 - RNA, 19 nt, Homo sapiens
  misc_RNA (1)...(19): siRNA sense strand
ggauagcucagaagauaau

SEQ ID NO: 2095278 - RNA, 19 nt, Homo sapiens
  misc_RNA (1)...(19): siRNA sense strand
gaagcugaacaaacugaaa

SEQ ID NO: 2095279 - RNA, 19 nt, Homo sapiens
  misc_RNA (1)...(19): siRNA sense strand
ugaauuugcccuuaaggaa

SEQ ID NO: 2095280 - RNA, 19 nt, Homo sapiens
  misc_RNA (1)...(19): siRNA sense strand
uuacagggguucacagaua

SEQ ID NO: 2095281 - RNA, 19 nt, Homo sapiens
  misc_RNA (1)...(19): siRNA sense strand
uaaaugcccugaaugcaaa

SEQ ID NO: 2095282 - RNA, 19 nt, Homo sapiens
  misc_RNA (1)...(19): siRNA sense strand
gcaccaaccucaucaagca

SEQ ID NO: 2095283 - RNA, 19 nt, Homo sapiens
  misc_RNA (1)...(19): siRNA sense strand
gagagaagcccuacaagug

SEQ ID NO: 2095284 - RNA, 19 nt, Homo sapiens
  misc_RNA (1)...(19): siRNA sense strand
agccagagcuccaaccuua

SEQ ID NO: 2095285 - RNA, 19 nt, Homo sapiens
  misc_RNA (1)...(19): siRNA sense strand
gcacgcacauggacgagaa

SEQ ID NO: 2095286 - RNA, 19 nt, Homo sapiens
  misc_RNA (1)...(19): siRNA sense strand
caccagagguuggagcuua

SEQ ID NO: 2095287 - RNA, 19 nt, Homo sapiens
  misc_RNA (1)...(19): siRNA sense strand
gagaagcccuacaaguguu

SEQ ID NO: 2095288 - RNA, 19 nt, Homo sapiens
  misc_RNA (1)...(19): siRNA sense strand
ucacagaggugccgagagu

SEQ ID NO: 2095289 - RNA, 19 nt, Homo sapiens
  misc_RNA (1)...(19): siRNA sense strand
gcgagaagcccuacaagug

SEQ ID NO: 2095290 - RNA, 19 nt, Homo sapiens
  misc_RNA (1)...(19): siRNA sense strand
gcgagaagcccuacaagug

SEQ ID NO: 2095291 - RNA, 19 nt, Homo sapiens
  misc_RNA (1)...(19): siRNA sense strand
gcgagaagcccuacaagug

SEQ ID NO: 2095292 - RNA, 19 nt, Homo sapiens
  misc_RNA (1)...(19): siRNA sense strand
ggauuccucuguguuugua

SEQ ID NO: 2095293 - RNA, 19 nt, Homo sapiens
  misc_RNA (1)...(19): siRNA sense strand
ggagaaaaccccuacaaaa

SEQ ID NO: 2095294 - RNA, 19 nt, Homo sapiens
  misc_RNA (1)...(19): siRNA sense strand
gagccaagccgcacaagug

SEQ ID NO: 2095295 - RNA, 19 nt, Homo sapiens
  misc_RNA (1)...(19): siRNA sense strand
gcgagaaacccuacaagug

SEQ ID NO: 2095296 - RNA, 19 nt, Homo sapiens
  misc_RNA (1)...(19): siRNA sense strand
aucaugagcuccacccuua

SEQ ID NO: 2095297 - RNA, 19 nt, Homo sapiens
  misc_RNA (1)...(19): siRNA sense strand
gugggaagcccuuuaaaug

SEQ ID NO: 2095298 - RNA, 19 nt, Homo sapiens
  misc_RNA (1)...(19): siRNA sense strand
gugagaagcccuacaagug

SEQ ID NO: 2095299 - RNA, 19 nt, Homo sapiens
  misc_RNA (1)...(19): siRNA sense strand
ggagagaagcccuacaagu

SEQ ID NO: 2095300 - RNA, 19 nt, Homo sapiens
  misc_RNA (1)...(19): siRNA sense strand
gaguaucccuggccagaca

SEQ ID NO: 2095301 - RNA, 19 nt, Homo sapiens
  misc_RNA (1)...(19): siRNA sense strand
ccccaaaccuccucaguua

SEQ ID NO: 2095302 - RNA, 19 nt, Homo sapiens
  misc_RNA (1)...(19): siRNA sense strand
gcgaggacccguucaagug

SEQ ID NO: 2095303 - RNA, 19 nt, Homo sapiens
  misc_RNA (1)...(19): siRNA sense strand
uaagugggaagcccuuuaa

SEQ ID NO: 2095304 - RNA, 19 nt, Homo sapiens
  misc_RNA (1)...(19): siRNA sense strand
gcuccaaccucaucaacca

SEQ ID NO: 2095305 - RNA, 19 nt, Homo sapiens
  misc_RNA (1)...(19): siRNA sense strand
gggcugcuguccuccaaga

SEQ ID NO: 2095306 - RNA, 19 nt, Homo sapiens
  misc_RNA (1)...(19): siRNA sense strand
gaagagcucccagaagagu

SEQ ID NO: 2095307 - RNA, 19 nt, Homo sapiens
  misc_RNA (1)...(19): siRNA sense strand
ccagagcuccaaccuuauu

SEQ ID NO: 2095308 - RNA, 19 nt, Homo sapiens
  misc_RNA (1)...(19): siRNA sense strand
acacauacacaauaccaaa

SEQ ID NO: 2095309 - RNA, 19 nt, Homo sapiens
  misc_RNA (1)...(19): siRNA sense strand
gagcuuaugaugccucuca

SEQ ID NO: 2095310 - RNA, 19 nt, Homo sapiens
  misc_RNA (1)...(19): siRNA sense strand
uccaaggacucaacagaga

SEQ ID NO: 2095311 - RNA, 19 nt, Homo sapiens
  misc_RNA (1)...(19): siRNA sense strand
gcuccacccucaucaagca

SEQ ID NO: 2095312 - RNA, 19 nt, Homo sapiens
  misc_RNA (1)...(19): siRNA sense strand
gaagaaaagcccuaucugu

SEQ ID NO: 2095313 - RNA, 19 nt, Homo sapiens
  misc_RNA (1)...(19): siRNA sense strand
gaaacccacacccaggaaa

SEQ ID NO: 2095314 - RNA, 19 nt, Homo sapiens
  misc_RNA (1)...(19): siRNA sense strand
caacgacgagggcaucuuc

SEQ ID NO: 2095315 - RNA, 19 nt, Homo sapiens
  misc_RNA (1)...(19): siRNA sense strand
ucucuuuccugauuauaga

SEQ ID NO: 2095316 - RNA, 19 nt, Homo sapiens
  misc_RNA (1)...(19): siRNA sense strand
ugagaagcccuacaagugu

SEQ ID NO: 2095317 - RNA, 19 nt, Homo sapiens
  misc_RNA (1)...(19): siRNA sense strand
uuaaaugcccugaaugcaa

SEQ ID NO: 2095318 - RNA, 19 nt, Homo sapiens
  misc_RNA (1)...(19): siRNA sense strand
gaaccacaaccuccucaag

SEQ ID NO: 2095319 - RNA, 19 nt, Homo sapiens
  misc_RNA (1)...(19): siRNA sense strand
ugaaugcaaacaaagcuuu

SEQ ID NO: 2095320 - RNA, 19 nt, Homo sapiens
  misc_RNA (1)...(19): siRNA sense strand
cauccugcccucuagagua

SEQ ID NO: 2095321 - RNA, 19 nt, Homo sapiens
  misc_RNA (1)...(19): siRNA sense strand
ccaaaacccuaguggaaga

SEQ ID NO: 2095322 - RNA, 19 nt, Homo sapiens
  misc_RNA (1)...(19): siRNA sense strand
auccgcagcucccaccuua

SEQ ID NO: 2095323 - RNA, 19 nt, Homo sapiens
  misc_RNA (1)...(19): siRNA sense strand
gauuccgccuuccggcuuu

SEQ ID NO: 2095324 - RNA, 19 nt, Homo sapiens
  misc_RNA (1)...(19): siRNA sense strand
gagguuggagcuuaugaug

SEQ ID NO: 2095325 - RNA, 19 nt, Homo sapiens
  misc_RNA (1)...(19): siRNA sense strand
cauacacaauaccaaacuu

SEQ ID NO: 2095326 - RNA, 19 nt, Homo sapiens
  misc_RNA (1)...(19): siRNA sense strand
gcggaaagggcuucaacga

SEQ ID NO: 2095327 - RNA, 19 nt, Homo sapiens
  misc_RNA (1)...(19): siRNA sense strand
ggugagaagcccuacaagu

SEQ ID NO: 2095328 - RNA, 19 nt, Homo sapiens
  misc_RNA (1)...(19): siRNA sense strand
gcacgcacacgggagagaa

SEQ ID NO: 2095329 - RNA, 19 nt, Homo sapiens
  misc_RNA (1)...(19): siRNA sense strand
cccuuucucuuuccugauu

SEQ ID NO: 2095330 - RNA, 19 nt, Homo sapiens
  misc_RNA (1)...(19): siRNA sense strand
gaggauccacaucggagaa

SEQ ID NO: 2095331 - RNA, 19 nt, Homo sapiens
  misc_RNA (1)...(19): siRNA sense strand
cgacgagggcaucuucaug

SEQ ID NO: 2095332 - RNA, 19 nt, Homo sapiens
  misc_RNA (1)...(19): siRNA sense strand
cagagcuccaaccuuauua

SEQ ID NO: 2095333 - RNA, 19 nt, Homo sapiens
  misc_RNA (1)...(19): siRNA sense strand
uaacacauacacaauacca

SEQ ID NO: 2095334 - RNA, 19 nt, Homo sapiens
  misc_RNA (1)...(19): siRNA sense strand
ccacagcuccacccucauc

SEQ ID NO: 2095335 - RNA, 19 nt, Homo sapiens
  misc_RNA (1)...(19): siRNA sense strand
caaggacucaacagagaug

SEQ ID NO: 2095336 - RNA, 19 nt, Homo sapiens
  misc_RNA (1)...(19): siRNA sense strand
uuaagugggaagcccuuua

SEQ ID NO: 2095337 - RNA, 19 nt, Homo sapiens
  misc_RNA (1)...(19): siRNA sense strand
ucaccauccugcccucuag

SEQ ID NO: 2095338 - RNA, 19 nt, Homo sapiens
  misc_RNA (1)...(19): siRNA sense strand
cggagaagcccuacaucug

SEQ ID NO: 2095339 - RNA, 19 nt, Homo sapiens
  misc_RNA (1)...(19): siRNA sense strand
cccuaccgcugcucagauu

SEQ ID NO: 2095340 - RNA, 19 nt, Homo sapiens
  misc_RNA (1)...(19): siRNA sense strand
gagcaccaaccucaucaag

SEQ ID NO: 2095341 - RNA, 19 nt, Homo sapiens
  misc_RNA (1)...(19): siRNA sense strand
ggaagagcucccagaagag

SEQ ID NO: 2095342 - RNA, 19 nt, Homo sapiens
  misc_RNA (1)...(19): siRNA sense strand
ucugcacgcucccaggauu

SEQ ID NO: 2095343 - RNA, 19 nt, Homo sapiens
  misc_RNA (1)...(19): siRNA sense strand
acagaggugccgagaguga

SEQ ID NO: 2095344 - RNA, 19 nt, Homo sapiens
  misc_RNA (1)...(19): siRNA sense strand
gcggagaagcccuacaucu

SEQ ID NO: 2095345 - RNA, 19 nt, Homo sapiens
  misc_RNA (1)...(19): siRNA sense strand
agaugucccuggagagauc

SEQ ID NO: 2095346 - RNA, 19 nt, Homo sapiens
  misc_RNA (1)...(19): siRNA sense strand
gcucucaccacauggaaca

SEQ ID NO: 2095347 - RNA, 19 nt, Homo sapiens
  misc_RNA (1)...(19): siRNA sense strand
ccagagcaccaaccucauc

SEQ ID NO: 2095348 - RNA, 19 nt, Homo sapiens
  misc_RNA (1)...(19): siRNA sense strand
cggcaagagcuucaucaug

SEQ ID NO: 2095349 - RNA, 19 nt, Homo sapiens
  misc_RNA (1)...(19): siRNA sense strand
gcucacccacggcaacgaa

SEQ ID NO: 2095350 - RNA, 19 nt, Homo sapiens
  misc_RNA (1)...(19): siRNA sense strand
cgggagagaagcccuacaa

SEQ ID NO: 2095351 - RNA, 19 nt, Homo sapiens
  misc_RNA (1)...(19): siRNA sense strand
caaaccuccucaguuacga

SEQ ID NO: 2095352 - RNA, 19 nt, Homo sapiens
  misc_RNA (1)...(19): siRNA sense strand
guccacagaucaggaaggu

SEQ ID NO: 2095353 - RNA, 19 nt, Homo sapiens
  misc_RNA (1)...(19): siRNA sense strand
ggcgagaaacccuacaagu

SEQ ID NO: 2095354 - RNA, 19 nt, Homo sapiens
  misc_RNA (1)...(19): siRNA sense strand
ugcccugaaugcaaacaaa

SEQ ID NO: 2095355 - RNA, 19 nt, Homo sapiens
  misc_RNA (1)...(19): siRNA sense strand
ccgcagcucccaccuuauc

SEQ ID NO: 2095356 - RNA, 19 nt, Homo sapiens
  misc_RNA (1)...(19): siRNA sense strand
gcacgcacacaggcgagaa

SEQ ID NO: 2095357 - RNA, 19 nt, Homo sapiens
  misc_RNA (1)...(19): siRNA sense strand
ggaaucaccccuugagaag

SEQ ID NO: 2095358 - RNA, 19 nt, Homo sapiens
  misc_RNA (1)...(19): siRNA sense strand
ccaagccgcacaagugucu

SEQ ID NO: 2095359 - RNA, 19 nt, Homo sapiens
  misc_RNA (1)...(19): siRNA sense strand
gagaaacccuauaaaugua

SEQ ID NO: 2095360 - RNA, 19 nt, Homo sapiens
  misc_RNA (1)...(19): siRNA sense strand
ucacacagauguaauaaug

SEQ ID NO: 2095361 - RNA, 19 nt, Homo sapiens
  misc_RNA (1)...(19): siRNA sense strand
ggaaagagcccuggaaugu

SEQ ID NO: 2095362 - RNA, 19 nt, Homo sapiens
  misc_RNA (1)...(19): siRNA sense strand
gcaaaucuuucucucauuc

SEQ ID NO: 2095363 - RNA, 19 nt, Homo sapiens
  misc_RNA (1)...(19): siRNA sense strand
agagaaaccuuacaaaugu

SEQ ID NO: 2095364 - RNA, 19 nt, Homo sapiens
  misc_RNA (1)...(19): siRNA sense strand
agagaaaccuuacaaaugu

SEQ ID NO: 2095365 - RNA, 19 nt, Homo sapiens
  misc_RNA (1)...(19): siRNA sense strand
gaagagaaaccuuacaaau

SEQ ID NO: 2095366 - RNA, 19 nt, Homo sapiens
  misc_RNA (1)...(19): siRNA sense strand
gagagaaacccuauaaaug

SEQ ID NO: 2095367 - RNA, 19 nt, Homo sapiens
  misc_RNA (1)...(19): siRNA sense strand
gagagaaaccuuacaaaug

SEQ ID NO: 2095368 - RNA, 19 nt, Homo sapiens
  misc_RNA (1)...(19): siRNA sense strand
gagagaaacccuacaaaug

SEQ ID NO: 2095369 - RNA, 19 nt, Homo sapiens
  misc_RNA (1)...(19): siRNA sense strand
aaagagcccuggaauguga

SEQ ID NO: 2095370 - RNA, 19 nt, Homo sapiens
  misc_RNA (1)...(19): siRNA sense strand
ggagagaaacccuauaaau

SEQ ID NO: 2095371 - RNA, 19 nt, Homo sapiens
  misc_RNA (1)...(19): siRNA sense strand
gcaaagccuucaauucuag

SEQ ID NO: 2095372 - RNA, 19 nt, Homo sapiens
  misc_RNA (1)...(19): siRNA sense strand
ggaaagagugggaaaguga

SEQ ID NO: 2095373 - RNA, 19 nt, Homo sapiens
  misc_RNA (1)...(19): siRNA sense strand
gaagaaaggcuggauugaa

SEQ ID NO: 2095374 - RNA, 19 nt, Homo sapiens
  misc_RNA (1)...(19): siRNA sense strand
ggagagaaacccuacauau

SEQ ID NO: 2095375 - RNA, 19 nt, Homo sapiens
  misc_RNA (1)...(19): siRNA sense strand
ggcaaagccuucaauucua

SEQ ID NO: 2095376 - RNA, 19 nt, Homo sapiens
  misc_RNA (1)...(19): siRNA sense strand
gggaacaccuggacucaga

SEQ ID NO: 2095377 - RNA, 19 nt, Homo sapiens
  misc_RNA (1)...(19): siRNA sense strand
cagaguaucuuuauucaag

SEQ ID NO: 2095378 - RNA, 19 nt, Homo sapiens
  misc_RNA (1)...(19): siRNA sense strand
gagagaaaccauacaaaug

SEQ ID NO: 2095379 - RNA, 19 nt, Homo sapiens
  misc_RNA (1)...(19): siRNA sense strand
guucaucccuuacuaaaca

SEQ ID NO: 2095380 - RNA, 19 nt, Homo sapiens
  misc_RNA (1)...(19): siRNA sense strand
gagagaaacccuacauaug

SEQ ID NO: 2095381 - RNA, 19 nt, Homo sapiens
  misc_RNA (1)...(19): siRNA sense strand
ggucguaccuaacuaaaca

SEQ ID NO: 2095382 - RNA, 19 nt, Homo sapiens
  misc_RNA (1)...(19): siRNA sense strand
ggagagaaaccauacaaau

SEQ ID NO: 2095383 - RNA, 19 nt, Homo sapiens
  misc_RNA (1)...(19): siRNA sense strand
ggagagaaaccuuacaaau

SEQ ID NO: 2095384 - RNA, 19 nt, Homo sapiens
  misc_RNA (1)...(19): siRNA sense strand
guggagagcuaaugacaug

SEQ ID NO: 2095385 - RNA, 19 nt, Homo sapiens
  misc_RNA (1)...(19): siRNA sense strand
aaucgaugcucaacccuua

SEQ ID NO: 2095386 - RNA, 19 nt, Homo sapiens
  misc_RNA (1)...(19): siRNA sense strand
ggagagaaacccuacaaau

SEQ ID NO: 2095387 - RNA, 19 nt, Homo sapiens
  misc_RNA (1)...(19): siRNA sense strand
agagaagucugccaaaugu

SEQ ID NO: 2095388 - RNA, 19 nt, Homo sapiens
  misc_RNA (1)...(19): siRNA sense strand
gagaagaaaggcuggauug

SEQ ID NO: 2095389 - RNA, 19 nt, Homo sapiens
  misc_RNA (1)...(19): siRNA sense strand
caagagaagucugccaaau

SEQ ID NO: 2095390 - RNA, 19 nt, Homo sapiens
  misc_RNA (1)...(19): siRNA sense strand
ggacucagaucagaagcuu

SEQ ID NO: 2095391 - RNA, 19 nt, Homo sapiens
  misc_RNA (1)...(19): siRNA sense strand
gcaggacuauacccuaaau

SEQ ID NO: 2095392 - RNA, 19 nt, Homo sapiens
  misc_RNA (1)...(19): siRNA sense strand
caaaucuucuugugcauca

SEQ ID NO: 2095393 - RNA, 19 nt, Homo sapiens
  misc_RNA (1)...(19): siRNA sense strand
gauaauccauaaugaagag

SEQ ID NO: 2095394 - RNA, 19 nt, Homo sapiens
  misc_RNA (1)...(19): siRNA sense strand
agagaaacccuauaaaugu

SEQ ID NO: 2095395 - RNA, 19 nt, Homo sapiens
  misc_RNA (1)...(19): siRNA sense strand
ucucauuccucaugucuuu

SEQ ID NO: 2095396 - RNA, 19 nt, Homo sapiens
  misc_RNA (1)...(19): siRNA sense strand
ucucguuccucaagucuua

SEQ ID NO: 2095397 - RNA, 19 nt, Homo sapiens
  misc_RNA (1)...(19): siRNA sense strand
gaagagugcagagacagua

SEQ ID NO: 2095398 - RNA, 19 nt, Homo sapiens
  misc_RNA (1)...(19): siRNA sense strand
guucacaccuuacucaaca

SEQ ID NO: 2095399 - RNA, 19 nt, Homo sapiens
  misc_RNA (1)...(19): siRNA sense strand
ggacuauacccuaaauaau

SEQ ID NO: 2095400 - RNA, 19 nt, Homo sapiens
  misc_RNA (1)...(19): siRNA sense strand
gauuguggcaucuccuuua

SEQ ID NO: 2095401 - RNA, 19 nt, Homo sapiens
  misc_RNA (1)...(19): siRNA sense strand
gggaugugauguuagagaa

SEQ ID NO: 2095402 - RNA, 19 nt, Homo sapiens
  misc_RNA (1)...(19): siRNA sense strand
agagaaacccuacaaaugu

SEQ ID NO: 2095403 - RNA, 19 nt, Homo sapiens
  misc_RNA (1)...(19): siRNA sense strand
uaaccggucuucaaaccuu

SEQ ID NO: 2095404 - RNA, 19 nt, Homo sapiens
  misc_RNA (1)...(19): siRNA sense strand
aagaaaggcuggauugaag

SEQ ID NO: 2095405 - RNA, 19 nt, Homo sapiens
  misc_RNA (1)...(19): siRNA sense strand
agagaaacccuacauaugu

SEQ ID NO: 2095406 - RNA, 19 nt, Homo sapiens
  misc_RNA (1)...(19): siRNA sense strand
gagaauucauacuggagaa

SEQ ID NO: 2095407 - RNA, 19 nt, Homo sapiens
  misc_RNA (1)...(19): siRNA sense strand
ccagauaucuuuucucaug

SEQ ID NO: 2095408 - RNA, 19 nt, Homo sapiens
  misc_RNA (1)...(19): siRNA sense strand
uagcaaaucuuucucucau

SEQ ID NO: 2095409 - RNA, 19 nt, Homo sapiens
  misc_RNA (1)...(19): siRNA sense strand
ccucagagaauccauauug

SEQ ID NO: 2095410 - RNA, 19 nt, Homo sapiens
  misc_RNA (1)...(19): siRNA sense strand
gcuguggcccucagaauuu

SEQ ID NO: 2095411 - RNA, 19 nt, Homo sapiens
  misc_RNA (1)...(19): siRNA sense strand
cauaaccauugcaaacgua

SEQ ID NO: 2095412 - RNA, 19 nt, Homo sapiens
  misc_RNA (1)...(19): siRNA sense strand
auacuggaaugaaaccaua

SEQ ID NO: 2095413 - RNA, 19 nt, Homo sapiens
  misc_RNA (1)...(19): siRNA sense strand
agaggaaacuaaugggauu

SEQ ID NO: 2095414 - RNA, 19 nt, Homo sapiens
  misc_RNA (1)...(19): siRNA sense strand
aaccaucguucacaccuua

SEQ ID NO: 2095415 - RNA, 19 nt, Homo sapiens
  misc_RNA (1)...(19): siRNA sense strand
caucagaguaucuuuauuc

SEQ ID NO: 2095416 - RNA, 19 nt, Homo sapiens
  misc_RNA (1)...(19): siRNA sense strand
gagaauucauaccggagaa

SEQ ID NO: 2095417 - RNA, 19 nt, Homo sapiens
  misc_RNA (1)...(19): siRNA sense strand
ggauguggccauagaauuc

SEQ ID NO: 2095418 - RNA, 19 nt, Homo sapiens
  misc_RNA (1)...(19): siRNA sense strand
uaaagcauguagcaaaucu

SEQ ID NO: 2095419 - RNA, 19 nt, Homo sapiens
  misc_RNA (1)...(19): siRNA sense strand
aagagaaaccuuacaaaug

SEQ ID NO: 2095420 - RNA, 19 nt, Homo sapiens
  misc_RNA (1)...(19): siRNA sense strand
gcaccaaccauguccauca

SEQ ID NO: 2095421 - RNA, 19 nt, Homo sapiens
  misc_RNA (1)...(19): siRNA sense strand
aauuguaguucacgccuua

SEQ ID NO: 2095422 - RNA, 19 nt, Homo sapiens
  misc_RNA (1)...(19): siRNA sense strand
guaaagaauguggcaaauu

SEQ ID NO: 2095423 - RNA, 19 nt, Homo sapiens
  misc_RNA (1)...(19): siRNA sense strand
ucagggauguggccauaga

SEQ ID NO: 2095424 - RNA, 19 nt, Homo sapiens
  misc_RNA (1)...(19): siRNA sense strand
agagaaaccauacaaaugu

SEQ ID NO: 2095425 - RNA, 19 nt, Homo sapiens
  misc_RNA (1)...(19): siRNA sense strand
gaaagagcccuggaaugug

SEQ ID NO: 2095426 - RNA, 19 nt, Homo sapiens
  misc_RNA (1)...(19): siRNA sense strand
cucaaggccucuuaagaaa

SEQ ID NO: 2095427 - RNA, 19 nt, Homo sapiens
  misc_RNA (1)...(19): siRNA sense strand
uaaagcguguagcaaaugu

SEQ ID NO: 2095428 - RNA, 19 nt, Homo sapiens
  misc_RNA (1)...(19): siRNA sense strand
gugagaaaauccuuaguaa

SEQ ID NO: 2095429 - RNA, 19 nt, Homo sapiens
  misc_RNA (1)...(19): siRNA sense strand
gauucauacuggagagaaa

SEQ ID NO: 2095430 - RNA, 19 nt, Homo sapiens
  misc_RNA (1)...(19): siRNA sense strand
gugcaucagauaacucaua

SEQ ID NO: 2095431 - RNA, 19 nt, Homo sapiens
  misc_RNA (1)...(19): siRNA sense strand
gugcaucagagaauucaua

SEQ ID NO: 2095432 - RNA, 19 nt, Homo sapiens
  misc_RNA (1)...(19): siRNA sense strand
acucaaggccucuuaagaa

SEQ ID NO: 2095433 - RNA, 19 nt, Homo sapiens
  misc_RNA (1)...(19): siRNA sense strand
guuagagccugcgauguga

SEQ ID NO: 2095434 - RNA, 19 nt, Homo sapiens
  misc_RNA (1)...(19): siRNA sense strand
uguaaagcauguagcaaau

SEQ ID NO: 2095435 - RNA, 19 nt, Homo sapiens
  misc_RNA (1)...(19): siRNA sense strand
caucagagaauucauacug

SEQ ID NO: 2095436 - RNA, 19 nt, Homo sapiens
  misc_RNA (1)...(19): siRNA sense strand
caucagagaauucauacug

SEQ ID NO: 2095437 - RNA, 19 nt, Homo sapiens
  misc_RNA (1)...(19): siRNA sense strand
ggagaaaagucacacagau

SEQ ID NO: 2095438 - RNA, 19 nt, Homo sapiens
  misc_RNA (1)...(19): siRNA sense strand
agaagucugccaaauguaa

SEQ ID NO: 2095439 - RNA, 19 nt, Homo sapiens
  misc_RNA (1)...(19): siRNA sense strand
uauagaagcaucauuccaa

SEQ ID NO: 2095440 - RNA, 19 nt, Homo sapiens
  misc_RNA (1)...(19): siRNA sense strand
acacagauguaauaauggu

SEQ ID NO: 2095441 - RNA, 19 nt, Homo sapiens
  misc_RNA (1)...(19): siRNA sense strand
gauaacucauacuggaaug

SEQ ID NO: 2095442 - RNA, 19 nt, Homo sapiens
  misc_RNA (1)...(19): siRNA sense strand
guucacgccuuacucaaca

SEQ ID NO: 2095443 - RNA, 19 nt, Homo sapiens
  misc_RNA (1)...(19): siRNA sense strand
ggagaagaaaggcuggauu

SEQ ID NO: 2095444 - RNA, 19 nt, Homo sapiens
  misc_RNA (1)...(19): siRNA sense strand
guaccuaacuaaacaucag

SEQ ID NO: 2095445 - RNA, 19 nt, Homo sapiens
  misc_RNA (1)...(19): siRNA sense strand
auagaagcaucauuccaaa

SEQ ID NO: 2095446 - RNA, 19 nt, Homo sapiens
  misc_RNA (1)...(19): siRNA sense strand
aggcaggacuauacccuaa

SEQ ID NO: 2095447 - RNA, 19 nt, Homo sapiens
  misc_RNA (1)...(19): siRNA sense strand
agaaagaagcuuauagaag

SEQ ID NO: 2095448 - RNA, 19 nt, Homo sapiens
  misc_RNA (1)...(19): siRNA sense strand
gguuagagccugcgaugug

SEQ ID NO: 2095449 - RNA, 19 nt, Homo sapiens
  misc_RNA (1)...(19): siRNA sense strand
gaaacccuauaaauguaag

SEQ ID NO: 2095450 - RNA, 19 nt, Homo sapiens
  misc_RNA (1)...(19): siRNA sense strand
uguaaagcguguagcaaau

SEQ ID NO: 2095451 - RNA, 19 nt, Homo sapiens
  misc_RNA (1)...(19): siRNA sense strand
gcuaaugacaugggaagaa

SEQ ID NO: 2095452 - RNA, 19 nt, Homo sapiens
  misc_RNA (1)...(19): siRNA sense strand
uggcaaagccuucaauucu

SEQ ID NO: 2095453 - RNA, 19 nt, Homo sapiens
  misc_RNA (1)...(19): siRNA sense strand
gcucgcaguuuagaggaaa

SEQ ID NO: 2095454 - RNA, 19 nt, Homo sapiens
  misc_RNA (1)...(19): siRNA sense strand
cuuaguaaauugucaaguc

SEQ ID NO: 2095455 - RNA, 19 nt, Homo sapiens
  misc_RNA (1)...(19): siRNA sense strand
ggaaacuaaugggauugug

SEQ ID NO: 2095456 - RNA, 19 nt, Homo sapiens
  misc_RNA (1)...(19): siRNA sense strand
aaagugauauuggauggau

SEQ ID NO: 2095457 - RNA, 19 nt, Homo sapiens
  misc_RNA (1)...(19): siRNA sense strand
gcauguagcaaaucuuucu

SEQ ID NO: 2095458 - RNA, 19 nt, Homo sapiens
  misc_RNA (1)...(19): siRNA sense strand
uugcagggauugagagaga

SEQ ID NO: 2095459 - RNA, 19 nt, Homo sapiens
  misc_RNA (1)...(19): siRNA sense strand
uuacaggcccucuuuauuu

SEQ ID NO: 2095460 - RNA, 19 nt, Homo sapiens
  misc_RNA (1)...(19): siRNA sense strand
gcaaacacuuccauagacu

SEQ ID NO: 2095461 - RNA, 19 nt, Homo sapiens
  misc_RNA (1)...(19): siRNA sense strand
gcaccauuccugcauacua

SEQ ID NO: 2095462 - RNA, 19 nt, Homo sapiens
  misc_RNA (1)...(19): siRNA sense strand
gaggaugaaggacaaguuu

SEQ ID NO: 2095463 - RNA, 19 nt, Homo sapiens
  misc_RNA (1)...(19): siRNA sense strand
caccauuccugcauacuau

SEQ ID NO: 2095464 - RNA, 19 nt, Homo sapiens
  misc_RNA (1)...(19): siRNA sense strand
cagcaaacacuuccauaga

SEQ ID NO: 2095465 - RNA, 19 nt, Homo sapiens
  misc_RNA (1)...(19): siRNA sense strand
gagcagcgaguggaaauug

SEQ ID NO: 2095466 - RNA, 19 nt, Homo sapiens
  misc_RNA (1)...(19): siRNA sense strand
gaaauuguuccucgagauc

SEQ ID NO: 2095467 - RNA, 19 nt, Homo sapiens
  misc_RNA (1)...(19): siRNA sense strand
acacuuccauagacuuuau

SEQ ID NO: 2095468 - RNA, 19 nt, Homo sapiens
  misc_RNA (1)...(19): siRNA sense strand
gcagcaaacacuuccauag

SEQ ID NO: 2095469 - RNA, 19 nt, Homo sapiens
  misc_RNA (1)...(19): siRNA sense strand
cagugugcauggaggauaa

SEQ ID NO: 2095470 - RNA, 19 nt, Homo sapiens
  misc_RNA (1)...(19): siRNA sense strand
aaacacuuccauagacuuu

SEQ ID NO: 2095471 - RNA, 19 nt, Homo sapiens
  misc_RNA (1)...(19): siRNA sense strand
caccagagacugcaccauu

SEQ ID NO: 2095472 - RNA, 19 nt, Homo sapiens
  misc_RNA (1)...(19): siRNA sense strand
ugaaggacaaguuucuaaa

SEQ ID NO: 2095473 - RNA, 19 nt, Homo sapiens
  misc_RNA (1)...(19): siRNA sense strand
gaugaaggacaaguuucua

SEQ ID NO: 2095474 - RNA, 19 nt, Homo sapiens
  misc_RNA (1)...(19): siRNA sense strand
ccauagacuuuaucacaac

SEQ ID NO: 2095475 - RNA, 19 nt, Homo sapiens
  misc_RNA (1)...(19): siRNA sense strand
gaaggacaaguuucuaaaa

SEQ ID NO: 2095476 - RNA, 19 nt, Homo sapiens
  misc_RNA (1)...(19): siRNA sense strand
gcagcgaguggaaauuguu

SEQ ID NO: 2095477 - RNA, 19 nt, Homo sapiens
  misc_RNA (1)...(19): siRNA sense strand
uccauagacuuuaucacaa

SEQ ID NO: 2095478 - RNA, 19 nt, Homo sapiens
  misc_RNA (1)...(19): siRNA sense strand
ggaugaaggacaaguuucu

SEQ ID NO: 2095479 - RNA, 19 nt, Homo sapiens
  misc_RNA (1)...(19): siRNA sense strand
cauggaggauaagcaguga

SEQ ID NO: 2095480 - RNA, 19 nt, Homo sapiens
  misc_RNA (1)...(19): siRNA sense strand
caccuuacaggcccucuuu

SEQ ID NO: 2095481 - RNA, 19 nt, Homo sapiens
  misc_RNA (1)...(19): siRNA sense strand
uacaggcccucuuuauuuu

SEQ ID NO: 2095482 - RNA, 19 nt, Homo sapiens
  misc_RNA (1)...(19): siRNA sense strand
cauagacuuuaucacaaca

SEQ ID NO: 2095483 - RNA, 19 nt, Homo sapiens
  misc_RNA (1)...(19): siRNA sense strand
cuuacaggcccucuuuauu

SEQ ID NO: 2095484 - RNA, 19 nt, Homo sapiens
  misc_RNA (1)...(19): siRNA sense strand
caaacacuuccauagacuu

SEQ ID NO: 2095485 - RNA, 19 nt, Homo sapiens
  misc_RNA (1)...(19): siRNA sense strand
ccauuccugcauacuauaa

SEQ ID NO: 2095486 - RNA, 19 nt, Homo sapiens
  misc_RNA (1)...(19): siRNA sense strand
cucgagaucugaggaugaa

SEQ ID NO: 2095487 - RNA, 19 nt, Homo sapiens
  misc_RNA (1)...(19): siRNA sense strand
accagagacugcaccauuc

SEQ ID NO: 2095488 - RNA, 19 nt, Homo sapiens
  misc_RNA (1)...(19): siRNA sense strand
gagaucugaggaugaagga

SEQ ID NO: 2095489 - RNA, 19 nt, Homo sapiens
  misc_RNA (1)...(19): siRNA sense strand
ccagugugcauggaggaua

SEQ ID NO: 2095490 - RNA, 19 nt, Homo sapiens
  misc_RNA (1)...(19): siRNA sense strand
ggagcagcgaguggaaauu

SEQ ID NO: 2095491 - RNA, 19 nt, Homo sapiens
  misc_RNA (1)...(19): siRNA sense strand
uccaggagcugcggaagca

SEQ ID NO: 2095492 - RNA, 19 nt, Homo sapiens
  misc_RNA (1)...(19): siRNA sense strand
agcaaacacuuccauagac

SEQ ID NO: 2095493 - RNA, 19 nt, Homo sapiens
  misc_RNA (1)...(19): siRNA sense strand
ccuuacaggcccucuuuau

SEQ ID NO: 2095494 - RNA, 19 nt, Homo sapiens
  misc_RNA (1)...(19): siRNA sense strand
gauaaaggauggacaaaua

SEQ ID NO: 2095495 - RNA, 19 nt, Homo sapiens
  misc_RNA (1)...(19): siRNA sense strand
gaauauagccagagaaaua

SEQ ID NO: 2095496 - RNA, 19 nt, Homo sapiens
  misc_RNA (1)...(19): siRNA sense strand
caacaaagcugacaaucaa

SEQ ID NO: 2095497 - RNA, 19 nt, Homo sapiens
  misc_RNA (1)...(19): siRNA sense strand
gaagaaauguugaagaguu

SEQ ID NO: 2095498 - RNA, 19 nt, Homo sapiens
  misc_RNA (1)...(19): siRNA sense strand
gaauauacccacagaaaua

SEQ ID NO: 2095499 - RNA, 19 nt, Homo sapiens
  misc_RNA (1)...(19): siRNA sense strand
gaauauagccacagagaua

SEQ ID NO: 2095500 - RNA, 19 nt, Homo sapiens
  misc_RNA (1)...(19): siRNA sense strand
gaacaagacuuagaaaugg

SEQ ID NO: 2095501 - RNA, 19 nt, Homo sapiens
  misc_RNA (1)...(19): siRNA sense strand
gauagaagcugaugugaca

SEQ ID NO: 2095502 - RNA, 19 nt, Homo sapiens
  misc_RNA (1)...(19): siRNA sense strand
cagaaacgauagccuguua

SEQ ID NO: 2095503 - RNA, 19 nt, Homo sapiens
  misc_RNA (1)...(19): siRNA sense strand
gaugagaagucaaguaugu

SEQ ID NO: 2095504 - RNA, 19 nt, Homo sapiens
  misc_RNA (1)...(19): siRNA sense strand
gaaacgauagccuguuaua

SEQ ID NO: 2095505 - RNA, 19 nt, Homo sapiens
  misc_RNA (1)...(19): siRNA sense strand
gaacagaguauccugagaa

SEQ ID NO: 2095506 - RNA, 19 nt, Homo sapiens
  misc_RNA (1)...(19): siRNA sense strand
gaaagcagaaagagaagua

SEQ ID NO: 2095507 - RNA, 19 nt, Homo sapiens
  misc_RNA (1)...(19): siRNA sense strand
cagcagagguggaauugaa

SEQ ID NO: 2095508 - RNA, 19 nt, Homo sapiens
  misc_RNA (1)...(19): siRNA sense strand
gaagagcaauauaggauag

SEQ ID NO: 2095509 - RNA, 19 nt, Homo sapiens
  misc_RNA (1)...(19): siRNA sense strand
gaaauuagaccagaugaga

SEQ ID NO: 2095510 - RNA, 19 nt, Homo sapiens
  misc_RNA (1)...(19): siRNA sense strand
aagaagaccugcugcauga

SEQ ID NO: 2095511 - RNA, 19 nt, Homo sapiens
  misc_RNA (1)...(19): siRNA sense strand
gaggaaacauuagcagaaa

SEQ ID NO: 2095512 - RNA, 19 nt, Homo sapiens
  misc_RNA (1)...(19): siRNA sense strand
cccagaagguuauauuuaa

SEQ ID NO: 2095513 - RNA, 19 nt, Homo sapiens
  misc_RNA (1)...(19): siRNA sense strand
ggaaagauuuugucaacua

SEQ ID NO: 2095514 - RNA, 19 nt, Homo sapiens
  misc_RNA (1)...(19): siRNA sense strand
ggaugaugcucgcaacaaa

SEQ ID NO: 2095515 - RNA, 19 nt, Homo sapiens
  misc_RNA (1)...(19): siRNA sense strand
aaaagaggcuugaagaaua

SEQ ID NO: 2095516 - RNA, 19 nt, Homo sapiens
  misc_RNA (1)...(19): siRNA sense strand
cuacaagugucaagaaaga

SEQ ID NO: 2095517 - RNA, 19 nt, Homo sapiens
  misc_RNA (1)...(19): siRNA sense strand
uaaaccggcucucaaauca

SEQ ID NO: 2095518 - RNA, 19 nt, Homo sapiens
  misc_RNA (1)...(19): siRNA sense strand
ggaugaccuugaugacaua

SEQ ID NO: 2095519 - RNA, 19 nt, Homo sapiens
  misc_RNA (1)...(19): siRNA sense strand
gaugaugucuuaaacaaac

SEQ ID NO: 2095520 - RNA, 19 nt, Homo sapiens
  misc_RNA (1)...(19): siRNA sense strand
agaaacaacuggccuggaa

SEQ ID NO: 2095521 - RNA, 19 nt, Homo sapiens
  misc_RNA (1)...(19): siRNA sense strand
ggcaaagacuggaaacaga

SEQ ID NO: 2095522 - RNA, 19 nt, Homo sapiens
  misc_RNA (1)...(19): siRNA sense strand
gcccagaagguuauauuua

SEQ ID NO: 2095523 - RNA, 19 nt, Homo sapiens
  misc_RNA (1)...(19): siRNA sense strand
ggaacagugucuucucaga

SEQ ID NO: 2095524 - RNA, 19 nt, Homo sapiens
  misc_RNA (1)...(19): siRNA sense strand
gaagacaggaggaaauaau

SEQ ID NO: 2095525 - RNA, 19 nt, Homo sapiens
  misc_RNA (1)...(19): siRNA sense strand
aaagaggcuugaagaauau

SEQ ID NO: 2095526 - RNA, 19 nt, Homo sapiens
  misc_RNA (1)...(19): siRNA sense strand
gcaacaaagcugacaauca

SEQ ID NO: 2095527 - RNA, 19 nt, Homo sapiens
  misc_RNA (1)...(19): siRNA sense strand
aaacugagcuccauuacac

SEQ ID NO: 2095528 - RNA, 19 nt, Homo sapiens
  misc_RNA (1)...(19): siRNA sense strand
aauaaaggauggacaacaa

SEQ ID NO: 2095529 - RNA, 19 nt, Homo sapiens
  misc_RNA (1)...(19): siRNA sense strand
cagaaagcaccgucucuua

SEQ ID NO: 2095530 - RNA, 19 nt, Homo sapiens
  misc_RNA (1)...(19): siRNA sense strand
uaaagauuguguucaccua

SEQ ID NO: 2095531 - RNA, 19 nt, Homo sapiens
  misc_RNA (1)...(19): siRNA sense strand
gaagaaauuagaccagaug

SEQ ID NO: 2095532 - RNA, 19 nt, Homo sapiens
  misc_RNA (1)...(19): siRNA sense strand
ggaagaaauuagaccagau

SEQ ID NO: 2095533 - RNA, 19 nt, Homo sapiens
  misc_RNA (1)...(19): siRNA sense strand
caaaagagacuaucugaaa

SEQ ID NO: 2095534 - RNA, 19 nt, Homo sapiens
  misc_RNA (1)...(19): siRNA sense strand
gggaugaccuugaugacau

SEQ ID NO: 2095535 - RNA, 19 nt, Homo sapiens
  misc_RNA (1)...(19): siRNA sense strand
cagaugugaugcuagagua

SEQ ID NO: 2095536 - RNA, 19 nt, Homo sapiens
  misc_RNA (1)...(19): siRNA sense strand
gcaaagacuggaaacagaa

SEQ ID NO: 2095537 - RNA, 19 nt, Homo sapiens
  misc_RNA (1)...(19): siRNA sense strand
gaagaccugcugcaugaaa

SEQ ID NO: 2095538 - RNA, 19 nt, Homo sapiens
  misc_RNA (1)...(19): siRNA sense strand
caacaugaaaugaagugua

SEQ ID NO: 2095539 - RNA, 19 nt, Homo sapiens
  misc_RNA (1)...(19): siRNA sense strand
ugaccuugaugacauaauu

SEQ ID NO: 2095540 - RNA, 19 nt, Homo sapiens
  misc_RNA (1)...(19): siRNA sense strand
ucgcuuugcuguaauugua

SEQ ID NO: 2095541 - RNA, 19 nt, Homo sapiens
  misc_RNA (1)...(19): siRNA sense strand
gaaauaaaggauggagaaa

SEQ ID NO: 2095542 - RNA, 19 nt, Homo sapiens
  misc_RNA (1)...(19): siRNA sense strand
gaauucucauguucugauu

SEQ ID NO: 2095543 - RNA, 19 nt, Homo sapiens
  misc_RNA (1)...(19): siRNA sense strand
guacaaaaguggauacaau

SEQ ID NO: 2095544 - RNA, 19 nt, Homo sapiens
  misc_RNA (1)...(19): siRNA sense strand
ggaacagaguauccugaga

SEQ ID NO: 2095545 - RNA, 19 nt, Homo sapiens
  misc_RNA (1)...(19): siRNA sense strand
ugagacagcuucaacaaaa

SEQ ID NO: 2095546 - RNA, 19 nt, Homo sapiens
  misc_RNA (1)...(19): siRNA sense strand
agagaaagcagaaagagaa

SEQ ID NO: 2095547 - RNA, 19 nt, Homo sapiens
  misc_RNA (1)...(19): siRNA sense strand
caaagugagcuaaagcaaa

SEQ ID NO: 2095548 - RNA, 19 nt, Homo sapiens
  misc_RNA (1)...(19): siRNA sense strand
gcacaguagauaaauguug

SEQ ID NO: 2095549 - RNA, 19 nt, Homo sapiens
  misc_RNA (1)...(19): siRNA sense strand
gugacucgcuuugcuguaa

SEQ ID NO: 2095550 - RNA, 19 nt, Homo sapiens
  misc_RNA (1)...(19): siRNA sense strand
gaaacaaccagccuugaag

SEQ ID NO: 2095551 - RNA, 19 nt, Homo sapiens
  misc_RNA (1)...(19): siRNA sense strand
gaaacaaucggcccagaag

SEQ ID NO: 2095552 - RNA, 19 nt, Homo sapiens
  misc_RNA (1)...(19): siRNA sense strand
aagaagaaauguugaagag

SEQ ID NO: 2095553 - RNA, 19 nt, Homo sapiens
  misc_RNA (1)...(19): siRNA sense strand
ggcuacaggugaugagaaa

SEQ ID NO: 2095554 - RNA, 19 nt, Homo sapiens
  misc_RNA (1)...(19): siRNA sense strand
gaaagagaaguagcuguga

SEQ ID NO: 2095555 - RNA, 19 nt, Homo sapiens
  misc_RNA (1)...(19): siRNA sense strand
aaagugagcuaaagcaaaa

SEQ ID NO: 2095556 - RNA, 19 nt, Homo sapiens
  misc_RNA (1)...(19): siRNA sense strand
gaucaaagucacucaucaa

SEQ ID NO: 2095557 - RNA, 19 nt, Homo sapiens
  misc_RNA (1)...(19): siRNA sense strand
gcaaucauaccguuguaga

SEQ ID NO: 2095558 - RNA, 19 nt, Homo sapiens
  misc_RNA (1)...(19): siRNA sense strand
gagaaucugcccaccuuga

SEQ ID NO: 2095559 - RNA, 19 nt, Homo sapiens
  misc_RNA (1)...(19): siRNA sense strand
ucacagaagagcaauauag

SEQ ID NO: 2095560 - RNA, 19 nt, Homo sapiens
  misc_RNA (1)...(19): siRNA sense strand
ggacaacaaucuggaacag

SEQ ID NO: 2095561 - RNA, 19 nt, Homo sapiens
  misc_RNA (1)...(19): siRNA sense strand
agaacaagacuuagaaaug

SEQ ID NO: 2095562 - RNA, 19 nt, Homo sapiens
  misc_RNA (1)...(19): siRNA sense strand
ggaaacagaaaugcaauca

SEQ ID NO: 2095563 - RNA, 19 nt, Homo sapiens
  misc_RNA (1)...(19): siRNA sense strand
caacuuugcacaccaacaa

SEQ ID NO: 2095564 - RNA, 19 nt, Homo sapiens
  misc_RNA (1)...(19): siRNA sense strand
guugaagaguugcaccaaa

SEQ ID NO: 2095565 - RNA, 19 nt, Homo sapiens
  misc_RNA (1)...(19): siRNA sense strand
cagaugagaagucaaguau

SEQ ID NO: 2095566 - RNA, 19 nt, Homo sapiens
  misc_RNA (1)...(19): siRNA sense strand
aaagcaccgucucuuacua

SEQ ID NO: 2095567 - RNA, 19 nt, Homo sapiens
  misc_RNA (1)...(19): siRNA sense strand
gcaaagugagcuaaagcaa

SEQ ID NO: 2095568 - RNA, 19 nt, Homo sapiens
  misc_RNA (1)...(19): siRNA sense strand
cagaguauccugagaaucu

SEQ ID NO: 2095569 - RNA, 19 nt, Homo sapiens
  misc_RNA (1)...(19): siRNA sense strand
caagccagaugugaugcua

SEQ ID NO: 2095570 - RNA, 19 nt, Homo sapiens
  misc_RNA (1)...(19): siRNA sense strand
gaaugcugcucuaugugau

SEQ ID NO: 2095571 - RNA, 19 nt, Homo sapiens
  misc_RNA (1)...(19): siRNA sense strand
aacauuagcagaaacgaua

SEQ ID NO: 2095572 - RNA, 19 nt, Homo sapiens
  misc_RNA (1)...(19): siRNA sense strand
aagaaauguugaagaguug

SEQ ID NO: 2095573 - RNA, 19 nt, Homo sapiens
  misc_RNA (1)...(19): siRNA sense strand
gugagcaacuuagaguaaa

SEQ ID NO: 2095574 - RNA, 19 nt, Homo sapiens
  misc_RNA (1)...(19): siRNA sense strand
agaaauaaaggauggagaa

SEQ ID NO: 2095575 - RNA, 19 nt, Homo sapiens
  misc_RNA (1)...(19): siRNA sense strand
gaaacugagcuccauuaca

SEQ ID NO: 2095576 - RNA, 19 nt, Homo sapiens
  misc_RNA (1)...(19): siRNA sense strand
cacaguagauaaauguugu

SEQ ID NO: 2095577 - RNA, 19 nt, Homo sapiens
  misc_RNA (1)...(19): siRNA sense strand
gaaacaaaggaugaacaaa

SEQ ID NO: 2095578 - RNA, 19 nt, Homo sapiens
  misc_RNA (1)...(19): siRNA sense strand
caagugacaagaaagauuc

SEQ ID NO: 2095579 - RNA, 19 nt, Homo sapiens
  misc_RNA (1)...(19): siRNA sense strand
cuugaaggcuacaauugaa

SEQ ID NO: 2095580 - RNA, 19 nt, Homo sapiens
  misc_RNA (1)...(19): siRNA sense strand
gaaagcaccgucucuuacu

SEQ ID NO: 2095581 - RNA, 19 nt, Homo sapiens
  misc_RNA (1)...(19): siRNA sense strand
ucgaauauacccacagaaa

SEQ ID NO: 2095582 - RNA, 19 nt, Homo sapiens
  misc_RNA (1)...(19): siRNA sense strand
ggcuacaagugacaagaaa

SEQ ID NO: 2095583 - RNA, 19 nt, Homo sapiens
  misc_RNA (1)...(19): siRNA sense strand
caaaucagcagagguggaa

SEQ ID NO: 2095584 - RNA, 19 nt, Homo sapiens
  misc_RNA (1)...(19): siRNA sense strand
ggcuacaagugucaagaaa

SEQ ID NO: 2095585 - RNA, 19 nt, Homo sapiens
  misc_RNA (1)...(19): siRNA sense strand
cagaagagcaauauaggau

SEQ ID NO: 2095586 - RNA, 19 nt, Homo sapiens
  misc_RNA (1)...(19): siRNA sense strand
gcagaaagcaccgucucuu

SEQ ID NO: 2095587 - RNA, 19 nt, Homo sapiens
  misc_RNA (1)...(19): siRNA sense strand
aagauuguguucaccuauu

SEQ ID NO: 2095588 - RNA, 19 nt, Homo sapiens
  misc_RNA (1)...(19): siRNA sense strand
ggauucaaggaagaaauua

SEQ ID NO: 2095589 - RNA, 19 nt, Homo sapiens
  misc_RNA (1)...(19): siRNA sense strand
gaaaaugggaugcaggauu

SEQ ID NO: 2095590 - RNA, 19 nt, Homo sapiens
  misc_RNA (1)...(19): siRNA sense strand
ucgcgucacugcaucuauu

SEQ ID NO: 2095591 - RNA, 19 nt, Homo sapiens
  misc_RNA (1)...(19): siRNA sense strand
ugaaugcugcucuauguga

SEQ ID NO: 2095592 - RNA, 19 nt, Homo sapiens
  misc_RNA (1)...(19): siRNA sense strand
ugaggaaacauuagcagaa

SEQ ID NO: 2095593 - RNA, 19 nt, Homo sapiens
  misc_RNA (1)...(19): siRNA sense strand
ucauaccguuguagacuga

SEQ ID NO: 2095594 - RNA, 19 nt, Homo sapiens
  misc_RNA (1)...(19): siRNA sense strand
gcaccuagcucagcccuuu

SEQ ID NO: 2095595 - RNA, 19 nt, Homo sapiens
  misc_RNA (1)...(19): siRNA sense strand
cgacagcgauugagcagaa

SEQ ID NO: 2095596 - RNA, 19 nt, Homo sapiens
  misc_RNA (1)...(19): siRNA sense strand
cagagcagcuguuccaguu

SEQ ID NO: 2095597 - RNA, 19 nt, Homo sapiens
  misc_RNA (1)...(19): siRNA sense strand
caacgcugcugcucuucaa

SEQ ID NO: 2095598 - RNA, 19 nt, Homo sapiens
  misc_RNA (1)...(19): siRNA sense strand
ggaugcaccgugugacaua

SEQ ID NO: 2095599 - RNA, 19 nt, Homo sapiens
  misc_RNA (1)...(19): siRNA sense strand
gugaugagcacggccauua

SEQ ID NO: 2095600 - RNA, 19 nt, Homo sapiens
  misc_RNA (1)...(19): siRNA sense strand
cuaaagcccugccagucuu

SEQ ID NO: 2095601 - RNA, 19 nt, Homo sapiens
  misc_RNA (1)...(19): siRNA sense strand
ucacacaccuggcacaacu

SEQ ID NO: 2095602 - RNA, 19 nt, Homo sapiens
  misc_RNA (1)...(19): siRNA sense strand
acacugcccagauuucuuu

SEQ ID NO: 2095603 - RNA, 19 nt, Homo sapiens
  misc_RNA (1)...(19): siRNA sense strand
gaugagcacggccauuaug

SEQ ID NO: 2095604 - RNA, 19 nt, Homo sapiens
  misc_RNA (1)...(19): siRNA sense strand
caagaccugcugcugcuaa

SEQ ID NO: 2095605 - RNA, 19 nt, Homo sapiens
  misc_RNA (1)...(19): siRNA sense strand
uggcaacgcugcugcucuu

SEQ ID NO: 2095606 - RNA, 19 nt, Homo sapiens
  misc_RNA (1)...(19): siRNA sense strand
caguggccgucaccuauga

SEQ ID NO: 2095607 - RNA, 19 nt, Homo sapiens
  misc_RNA (1)...(19): siRNA sense strand
gagcugucauguccugagu

SEQ ID NO: 2095608 - RNA, 19 nt, Homo sapiens
  misc_RNA (1)...(19): siRNA sense strand
gcuaaagcccugccagucu

SEQ ID NO: 2095609 - RNA, 19 nt, Homo sapiens
  misc_RNA (1)...(19): siRNA sense strand
gcaggaauacaucgucagu

SEQ ID NO: 2095610 - RNA, 19 nt, Homo sapiens
  misc_RNA (1)...(19): siRNA sense strand
gcccagauuucuuucuuuu

SEQ ID NO: 2095611 - RNA, 19 nt, Homo sapiens
  misc_RNA (1)...(19): siRNA sense strand
gaaagcugcuguggaaacc

SEQ ID NO: 2095612 - RNA, 19 nt, Homo sapiens
  misc_RNA (1)...(19): siRNA sense strand
ugacggaggagauacuguu

SEQ ID NO: 2095613 - RNA, 19 nt, Homo sapiens
  misc_RNA (1)...(19): siRNA sense strand
ggagcugcagggcauauug

SEQ ID NO: 2095614 - RNA, 19 nt, Homo sapiens
  misc_RNA (1)...(19): siRNA sense strand
ccaaugcgggcuccugguu

SEQ ID NO: 2095615 - RNA, 19 nt, Homo sapiens
  misc_RNA (1)...(19): siRNA sense strand
gcaacgcugcugcucuuca

SEQ ID NO: 2095616 - RNA, 19 nt, Homo sapiens
  misc_RNA (1)...(19): siRNA sense strand
acacagggcgacagcgauu

SEQ ID NO: 2095617 - RNA, 19 nt, Homo sapiens
  misc_RNA (1)...(19): siRNA sense strand
gacagcgauugagcagaaa

SEQ ID NO: 2095618 - RNA, 19 nt, Homo sapiens
  misc_RNA (1)...(19): siRNA sense strand
gcugcccgauacugaguug

SEQ ID NO: 2095619 - RNA, 19 nt, Homo sapiens
  misc_RNA (1)...(19): siRNA sense strand
gaaaccgaguggggacuuu

SEQ ID NO: 2095620 - RNA, 19 nt, Homo sapiens
  misc_RNA (1)...(19): siRNA sense strand
gagccagaaugagcuguac

SEQ ID NO: 2095621 - RNA, 19 nt, Homo sapiens
  misc_RNA (1)...(19): siRNA sense strand
ggcaguucauuuguagcua

SEQ ID NO: 2095622 - RNA, 19 nt, Homo sapiens
  misc_RNA (1)...(19): siRNA sense strand
uagugacagugaugacuuc

SEQ ID NO: 2095623 - RNA, 19 nt, Homo sapiens
  misc_RNA (1)...(19): siRNA sense strand
uugcguggcuuugauguag

SEQ ID NO: 2095624 - RNA, 19 nt, Homo sapiens
  misc_RNA (1)...(19): siRNA sense strand
acccaaagcucgccaucag

SEQ ID NO: 2095625 - RNA, 19 nt, Homo sapiens
  misc_RNA (1)...(19): siRNA sense strand
gaugcaccgugugacauag

SEQ ID NO: 2095626 - RNA, 19 nt, Homo sapiens
  misc_RNA (1)...(19): siRNA sense strand
gggacuuuacugauaguga

SEQ ID NO: 2095627 - RNA, 19 nt, Homo sapiens
  misc_RNA (1)...(19): siRNA sense strand
uguccugagugccagugua

SEQ ID NO: 2095628 - RNA, 19 nt, Homo sapiens
  misc_RNA (1)...(19): siRNA sense strand
gauacugaguugggcuaca

SEQ ID NO: 2095629 - RNA, 19 nt, Homo sapiens
  misc_RNA (1)...(19): siRNA sense strand
gcucuggcuguccuacgua

SEQ ID NO: 2095630 - RNA, 19 nt, Homo sapiens
  misc_RNA (1)...(19): siRNA sense strand
gauacuguugcguggcuuu

SEQ ID NO: 2095631 - RNA, 19 nt, Homo sapiens
  misc_RNA (1)...(19): siRNA sense strand
aagaccugcugcugcuaaa

SEQ ID NO: 2095632 - RNA, 19 nt, Homo sapiens
  misc_RNA (1)...(19): siRNA sense strand
gccagcugcccgauacuga

SEQ ID NO: 2095633 - RNA, 19 nt, Homo sapiens
  misc_RNA (1)...(19): siRNA sense strand
ugcccagauuucuuucuuu

SEQ ID NO: 2095634 - RNA, 19 nt, Homo sapiens
  misc_RNA (1)...(19): siRNA sense strand
cugcccagauuucuuucuu

SEQ ID NO: 2095635 - RNA, 19 nt, Homo sapiens
  misc_RNA (1)...(19): siRNA sense strand
gugcugggccaauguacug

SEQ ID NO: 2095636 - RNA, 19 nt, Homo sapiens
  misc_RNA (1)...(19): siRNA sense strand
gaacucaccugcaacauac

SEQ ID NO: 2095637 - RNA, 19 nt, Homo sapiens
  misc_RNA (1)...(19): siRNA sense strand
gaaacgcuaucgcuucaaa

SEQ ID NO: 2095638 - RNA, 19 nt, Homo sapiens
  misc_RNA (1)...(19): siRNA sense strand
gaucaaaccucaacuucag

SEQ ID NO: 2095639 - RNA, 19 nt, Homo sapiens
  misc_RNA (1)...(19): siRNA sense strand
ggacuacaauggccugugu

SEQ ID NO: 2095640 - RNA, 19 nt, Homo sapiens
  misc_RNA (1)...(19): siRNA sense strand
ccagaaggauuacauaugg

SEQ ID NO: 2095641 - RNA, 19 nt, Homo sapiens
  misc_RNA (1)...(19): siRNA sense strand
ccugguggaugacaauuua

SEQ ID NO: 2095642 - RNA, 19 nt, Homo sapiens
  misc_RNA (1)...(19): siRNA sense strand
guucaaaacuucugcuaua

SEQ ID NO: 2095643 - RNA, 19 nt, Homo sapiens
  misc_RNA (1)...(19): siRNA sense strand
ggaagaugcuguuuucuau

SEQ ID NO: 2095644 - RNA, 19 nt, Homo sapiens
  misc_RNA (1)...(19): siRNA sense strand
acaagucccugaaguacaa

SEQ ID NO: 2095645 - RNA, 19 nt, Homo sapiens
  misc_RNA (1)...(19): siRNA sense strand
gagcacaagucccugaagu

SEQ ID NO: 2095646 - RNA, 19 nt, Homo sapiens
  misc_RNA (1)...(19): siRNA sense strand
ggaugacaauuuaaguaga

SEQ ID NO: 2095647 - RNA, 19 nt, Homo sapiens
  misc_RNA (1)...(19): siRNA sense strand
gaucccaucuuuggcauga

SEQ ID NO: 2095648 - RNA, 19 nt, Homo sapiens
  misc_RNA (1)...(19): siRNA sense strand
cagaaagccuaaacgguau

SEQ ID NO: 2095649 - RNA, 19 nt, Homo sapiens
  misc_RNA (1)...(19): siRNA sense strand
gcacuuaugcuguuuaacu

SEQ ID NO: 2095650 - RNA, 19 nt, Homo sapiens
  misc_RNA (1)...(19): siRNA sense strand
guaaagcagaggaugagua

SEQ ID NO: 2095651 - RNA, 19 nt, Homo sapiens
  misc_RNA (1)...(19): siRNA sense strand
gagaaggacaugcagaaga

SEQ ID NO: 2095652 - RNA, 19 nt, Homo sapiens
  misc_RNA (1)...(19): siRNA sense strand
gcuguauccucccauuaaa

SEQ ID NO: 2095653 - RNA, 19 nt, Homo sapiens
  misc_RNA (1)...(19): siRNA sense strand
gccaugagcuggaucaaac

SEQ ID NO: 2095654 - RNA, 19 nt, Homo sapiens
  misc_RNA (1)...(19): siRNA sense strand
uaggcuaccucuacagaaa

SEQ ID NO: 2095655 - RNA, 19 nt, Homo sapiens
  misc_RNA (1)...(19): siRNA sense strand
gaagaugagccuggagauu

SEQ ID NO: 2095656 - RNA, 19 nt, Homo sapiens
  misc_RNA (1)...(19): siRNA sense strand
gcacuucucccucuuuaag

SEQ ID NO: 2095657 - RNA, 19 nt, Homo sapiens
  misc_RNA (1)...(19): siRNA sense strand
ugaacucaccugcaacaua

SEQ ID NO: 2095658 - RNA, 19 nt, Homo sapiens
  misc_RNA (1)...(19): siRNA sense strand
caauagaccaugaguggaa

SEQ ID NO: 2095659 - RNA, 19 nt, Homo sapiens
  misc_RNA (1)...(19): siRNA sense strand
gaugacaauuuaaguagag

SEQ ID NO: 2095660 - RNA, 19 nt, Homo sapiens
  misc_RNA (1)...(19): siRNA sense strand
ggagaaggaccuagagauc

SEQ ID NO: 2095661 - RNA, 19 nt, Homo sapiens
  misc_RNA (1)...(19): siRNA sense strand
ccacagucaucgaccuuga

SEQ ID NO: 2095662 - RNA, 19 nt, Homo sapiens
  misc_RNA (1)...(19): siRNA sense strand
aaaccuaaagccuacaaua

SEQ ID NO: 2095663 - RNA, 19 nt, Homo sapiens
  misc_RNA (1)...(19): siRNA sense strand
aagcacuucucccucuuua

SEQ ID NO: 2095664 - RNA, 19 nt, Homo sapiens
  misc_RNA (1)...(19): siRNA sense strand
caacuggcgguucaucuuu

SEQ ID NO: 2095665 - RNA, 19 nt, Homo sapiens
  misc_RNA (1)...(19): siRNA sense strand
aagcagaggaugaguauga

SEQ ID NO: 2095666 - RNA, 19 nt, Homo sapiens
  misc_RNA (1)...(19): siRNA sense strand
gaagacagacauccacuac

SEQ ID NO: 2095667 - RNA, 19 nt, Homo sapiens
  misc_RNA (1)...(19): siRNA sense strand
gguaugagcugcgaugcau

SEQ ID NO: 2095668 - RNA, 19 nt, Homo sapiens
  misc_RNA (1)...(19): siRNA sense strand
uaaagcagaggaugaguau

SEQ ID NO: 2095669 - RNA, 19 nt, Homo sapiens
  misc_RNA (1)...(19): siRNA sense strand
uauacgggcuggagaagga

SEQ ID NO: 2095670 - RNA, 19 nt, Homo sapiens
  misc_RNA (1)...(19): siRNA sense strand
gguccucgaugguggcaaa

SEQ ID NO: 2095671 - RNA, 19 nt, Homo sapiens
  misc_RNA (1)...(19): siRNA sense strand
gauaggaaccacagucauc

SEQ ID NO: 2095672 - RNA, 19 nt, Homo sapiens
  misc_RNA (1)...(19): siRNA sense strand
agacagacauccacuacca

SEQ ID NO: 2095673 - RNA, 19 nt, Homo sapiens
  misc_RNA (1)...(19): siRNA sense strand
caauuuaaguagagagaag

SEQ ID NO: 2095674 - RNA, 19 nt, Homo sapiens
  misc_RNA (1)...(19): siRNA sense strand
gcacaagucccugaaguac

SEQ ID NO: 2095675 - RNA, 19 nt, Homo sapiens
  misc_RNA (1)...(19): siRNA sense strand
gagccagaaggauuacaua

SEQ ID NO: 2095676 - RNA, 19 nt, Homo sapiens
  misc_RNA (1)...(19): siRNA sense strand
gagcgacaucuacaucaaa

SEQ ID NO: 2095677 - RNA, 19 nt, Homo sapiens
  misc_RNA (1)...(19): siRNA sense strand
ggucauaucgauuauagca

SEQ ID NO: 2095678 - RNA, 19 nt, Homo sapiens
  misc_RNA (1)...(19): siRNA sense strand
ccgcugcaguucuugguuu

SEQ ID NO: 2095679 - RNA, 19 nt, Homo sapiens
  misc_RNA (1)...(19): siRNA sense strand
agaagaagcaccaagacuu

SEQ ID NO: 2095680 - RNA, 19 nt, Homo sapiens
  misc_RNA (1)...(19): siRNA sense strand
aaccucaacuucagcugua

SEQ ID NO: 2095681 - RNA, 19 nt, Homo sapiens
  misc_RNA (1)...(19): siRNA sense strand
uggaaacgcuaucgcuuca

SEQ ID NO: 2095682 - RNA, 19 nt, Homo sapiens
  misc_RNA (1)...(19): siRNA sense strand
caaguggcccuauuucauc

SEQ ID NO: 2095683 - RNA, 19 nt, Homo sapiens
  misc_RNA (1)...(19): siRNA sense strand
cgagcgacaucuacaucaa

SEQ ID NO: 2095684 - RNA, 19 nt, Homo sapiens
  misc_RNA (1)...(19): siRNA sense strand
guggaugacaauuuaagua

SEQ ID NO: 2095685 - RNA, 19 nt, Homo sapiens
  misc_RNA (1)...(19): siRNA sense strand
ggcaugauguuugaacuca

SEQ ID NO: 2095686 - RNA, 19 nt, Homo sapiens
  misc_RNA (1)...(19): siRNA sense strand
aagacuauaugcacccaaa

SEQ ID NO: 2095687 - RNA, 19 nt, Homo sapiens
  misc_RNA (1)...(19): siRNA sense strand
ggaucaaaccucaacuuca

SEQ ID NO: 2095688 - RNA, 19 nt, Homo sapiens
  misc_RNA (1)...(19): siRNA sense strand
uuccaacgcugucugagaa

SEQ ID NO: 2095689 - RNA, 19 nt, Homo sapiens
  misc_RNA (1)...(19): siRNA sense strand
ccaaguggcccuauuucau

SEQ ID NO: 2095690 - RNA, 19 nt, Homo sapiens
  misc_RNA (1)...(19): siRNA sense strand
ugccagaccuucaaacucu

SEQ ID NO: 2095691 - RNA, 19 nt, Homo sapiens
  misc_RNA (1)...(19): siRNA sense strand
guccagagccagaaggauu

SEQ ID NO: 2095692 - RNA, 19 nt, Homo sapiens
  misc_RNA (1)...(19): siRNA sense strand
ccaguaaagcagaggauga

SEQ ID NO: 2095693 - RNA, 19 nt, Homo sapiens
  misc_RNA (1)...(19): siRNA sense strand
cgcuaucgcuucaaacuca

SEQ ID NO: 2095694 - RNA, 19 nt, Homo sapiens
  misc_RNA (1)...(19): siRNA sense strand
gaagacgagcgacaucuac

SEQ ID NO: 2095695 - RNA, 19 nt, Homo sapiens
  misc_RNA (1)...(19): siRNA sense strand
agggaaaggugcaaaugug

SEQ ID NO: 2095696 - RNA, 19 nt, Homo sapiens
  misc_RNA (1)...(19): siRNA sense strand
ucuaugacuucgaccuauu

SEQ ID NO: 2095697 - RNA, 19 nt, Homo sapiens
  misc_RNA (1)...(19): siRNA sense strand
ccacagaugagcacaaguc

SEQ ID NO: 2095698 - RNA, 19 nt, Homo sapiens
  misc_RNA (1)...(19): siRNA sense strand
cacccaggauccaaaccua

SEQ ID NO: 2095699 - RNA, 19 nt, Homo sapiens
  misc_RNA (1)...(19): siRNA sense strand
auucagcuccgcacuauuu

SEQ ID NO: 2095700 - RNA, 19 nt, Homo sapiens
  misc_RNA (1)...(19): siRNA sense strand
cuauucagcuccgcacuau

SEQ ID NO: 2095701 - RNA, 19 nt, Homo sapiens
  misc_RNA (1)...(19): siRNA sense strand
ucagggacuuucagaccaa

SEQ ID NO: 2095702 - RNA, 19 nt, Homo sapiens
  misc_RNA (1)...(19): siRNA sense strand
ucaaacucauagccuuuau

SEQ ID NO: 2095703 - RNA, 19 nt, Homo sapiens
  misc_RNA (1)...(19): siRNA sense strand
gccagaaggauuacauaug

SEQ ID NO: 2095704 - RNA, 19 nt, Homo sapiens
  misc_RNA (1)...(19): siRNA sense strand
agaaggacaugcagaagac

SEQ ID NO: 2095705 - RNA, 19 nt, Homo sapiens
  misc_RNA (1)...(19): siRNA sense strand
ggaacgccuugcacuguac

SEQ ID NO: 2095706 - RNA, 19 nt, Homo sapiens
  misc_RNA (1)...(19): siRNA sense strand
gcucuaugacuucgaccua

SEQ ID NO: 2095707 - RNA, 19 nt, Homo sapiens
  misc_RNA (1)...(19): siRNA sense strand
agucggaacccaaccagua

SEQ ID NO: 2095708 - RNA, 19 nt, Homo sapiens
  misc_RNA (1)...(19): siRNA sense strand
cagaaggauuacauaugga

SEQ ID NO: 2095709 - RNA, 19 nt, Homo sapiens
  misc_RNA (1)...(19): siRNA sense strand
aggaacgccuugcacugua

SEQ ID NO: 2095710 - RNA, 19 nt, Homo sapiens
  misc_RNA (1)...(19): siRNA sense strand
gaaagccuaaacgguauga

SEQ ID NO: 2095711 - RNA, 19 nt, Homo sapiens
  misc_RNA (1)...(19): siRNA sense strand
cgccagcucuuccauccuu

SEQ ID NO: 2095712 - RNA, 19 nt, Homo sapiens
  misc_RNA (1)...(19): siRNA sense strand
cacuuaugcuguuuaacuu

SEQ ID NO: 2095713 - RNA, 19 nt, Homo sapiens
  misc_RNA (1)...(19): siRNA sense strand
aacuggcgguucaucuuua

SEQ ID NO: 2095714 - RNA, 19 nt, Homo sapiens
  misc_RNA (1)...(19): siRNA sense strand
gacuucaacuggcgguuca

SEQ ID NO: 2095715 - RNA, 19 nt, Homo sapiens
  misc_RNA (1)...(19): siRNA sense strand
ccuaaagccuacaauagac

SEQ ID NO: 2095716 - RNA, 19 nt, Homo sapiens
  misc_RNA (1)...(19): siRNA sense strand
agaaggaccuagagaucca

SEQ ID NO: 2095717 - RNA, 19 nt, Homo sapiens
  misc_RNA (1)...(19): siRNA sense strand
cuacaucaaagggugguua

SEQ ID NO: 2095718 - RNA, 19 nt, Homo sapiens
  misc_RNA (1)...(19): siRNA sense strand
guggagacccgcacacugu

SEQ ID NO: 2095719 - RNA, 19 nt, Homo sapiens
  misc_RNA (1)...(19): siRNA sense strand
gaagaugcuguuuucuaua

SEQ ID NO: 2095720 - RNA, 19 nt, Homo sapiens
  misc_RNA (1)...(19): siRNA sense strand
ugaggaagaugcuguuuuc

SEQ ID NO: 2095721 - RNA, 19 nt, Homo sapiens
  misc_RNA (1)...(19): siRNA sense strand
gccagaccuucaaacucua

SEQ ID NO: 2095722 - RNA, 19 nt, Homo sapiens
  misc_RNA (1)...(19): siRNA sense strand
ucagcuguauccucccauu

SEQ ID NO: 2095723 - RNA, 19 nt, Homo sapiens
  misc_RNA (1)...(19): siRNA sense strand
uggcugcggucaccaguuc

SEQ ID NO: 2095724 - RNA, 19 nt, Homo sapiens
  misc_RNA (1)...(19): siRNA sense strand
caagcacuucucccucuuu

SEQ ID NO: 2095725 - RNA, 19 nt, Homo sapiens
  misc_RNA (1)...(19): siRNA sense strand
caucaaagggugguuauac

SEQ ID NO: 2095726 - RNA, 19 nt, Homo sapiens
  misc_RNA (1)...(19): siRNA sense strand
gagaagaagcaccaagacu

SEQ ID NO: 2095727 - RNA, 19 nt, Homo sapiens
  misc_RNA (1)...(19): siRNA sense strand
agucagggcccuuuagaug

SEQ ID NO: 2095728 - RNA, 19 nt, Homo sapiens
  misc_RNA (1)...(19): siRNA sense strand
agauccagcucuaugacuu

SEQ ID NO: 2095729 - RNA, 19 nt, Homo sapiens
  misc_RNA (1)...(19): siRNA sense strand
uguuugaacucaccugcaa

SEQ ID NO: 2095730 - RNA, 19 nt, Homo sapiens
  misc_RNA (1)...(19): siRNA sense strand
ccaacgcugucugagaaga

SEQ ID NO: 2095731 - RNA, 19 nt, Homo sapiens
  misc_RNA (1)...(19): siRNA sense strand
caacgcugucugagaagaa

SEQ ID NO: 2095732 - RNA, 19 nt, Homo sapiens
  misc_RNA (1)...(19): siRNA sense strand
cagcuguauccucccauua

SEQ ID NO: 2095733 - RNA, 19 nt, Homo sapiens
  misc_RNA (1)...(19): siRNA sense strand
aagaugagccuggagauuc

SEQ ID NO: 2095734 - RNA, 19 nt, Homo sapiens
  misc_RNA (1)...(19): siRNA sense strand
gaugccacguccaugaagu

SEQ ID NO: 2095735 - RNA, 19 nt, Homo sapiens
  misc_RNA (1)...(19): siRNA sense strand
acuccuaucuggcuuugga

SEQ ID NO: 2095736 - RNA, 19 nt, Homo sapiens
  misc_RNA (1)...(19): siRNA sense strand
caaagacgaugacgcaguu

SEQ ID NO: 2095737 - RNA, 19 nt, Homo sapiens
  misc_RNA (1)...(19): siRNA sense strand
ccacacaacuuaaagaucu

SEQ ID NO: 2095738 - RNA, 19 nt, Homo sapiens
  misc_RNA (1)...(19): siRNA sense strand
gggaugaaguccaguguga

SEQ ID NO: 2095739 - RNA, 19 nt, Homo sapiens
  misc_RNA (1)...(19): siRNA sense strand
ggagguagauugggaagug

SEQ ID NO: 2095740 - RNA, 19 nt, Homo sapiens
  misc_RNA (1)...(19): siRNA sense strand
caagacagaggaccugaua

SEQ ID NO: 2095741 - RNA, 19 nt, Homo sapiens
  misc_RNA (1)...(19): siRNA sense strand
cagauaagguggugugugu

SEQ ID NO: 2095742 - RNA, 19 nt, Homo sapiens
  misc_RNA (1)...(19): siRNA sense strand
gcucgugacuggcuaacaa

SEQ ID NO: 2095743 - RNA, 19 nt, Homo sapiens
  misc_RNA (1)...(19): siRNA sense strand
gcucagaaguggcccuuuc

SEQ ID NO: 2095744 - RNA, 19 nt, Homo sapiens
  misc_RNA (1)...(19): siRNA sense strand
ccaaggagcccaucaucuu

SEQ ID NO: 2095745 - RNA, 19 nt, Homo sapiens
  misc_RNA (1)...(19): siRNA sense strand
gcuggugucugguagaaga

SEQ ID NO: 2095746 - RNA, 19 nt, Homo sapiens
  misc_RNA (1)...(19): siRNA sense strand
gaacuaggugucaucauca

SEQ ID NO: 2095747 - RNA, 19 nt, Homo sapiens
  misc_RNA (1)...(19): siRNA sense strand
gaaguccagugugagauug

SEQ ID NO: 2095748 - RNA, 19 nt, Homo sapiens
  misc_RNA (1)...(19): siRNA sense strand
gcagauccacacaacuuaa

SEQ ID NO: 2095749 - RNA, 19 nt, Homo sapiens
  misc_RNA (1)...(19): siRNA sense strand
gguagaagaagauuacuca

SEQ ID NO: 2095750 - RNA, 19 nt, Homo sapiens
  misc_RNA (1)...(19): siRNA sense strand
gaaagaaaggcaagcacau

SEQ ID NO: 2095751 - RNA, 19 nt, Homo sapiens
  misc_RNA (1)...(19): siRNA sense strand
agaacuaggugucaucauc

SEQ ID NO: 2095752 - RNA, 19 nt, Homo sapiens
  misc_RNA (1)...(19): siRNA sense strand
caaggacaguguagcagau

SEQ ID NO: 2095753 - RNA, 19 nt, Homo sapiens
  misc_RNA (1)...(19): siRNA sense strand
gaugaaguccagugugaga

SEQ ID NO: 2095754 - RNA, 19 nt, Homo sapiens
  misc_RNA (1)...(19): siRNA sense strand
ucuccuggauccuguguuu

SEQ ID NO: 2095755 - RNA, 19 nt, Homo sapiens
  misc_RNA (1)...(19): siRNA sense strand
gaaaggcaagcacaucaag

SEQ ID NO: 2095756 - RNA, 19 nt, Homo sapiens
  misc_RNA (1)...(19): siRNA sense strand
aacaguggcugcugggaaa

SEQ ID NO: 2095757 - RNA, 19 nt, Homo sapiens
  misc_RNA (1)...(19): siRNA sense strand
uagcagauccacacaacuu

SEQ ID NO: 2095758 - RNA, 19 nt, Homo sapiens
  misc_RNA (1)...(19): siRNA sense strand
gaagaacuaggugucauca

SEQ ID NO: 2095759 - RNA, 19 nt, Homo sapiens
  misc_RNA (1)...(19): siRNA sense strand
gcacaucaaggccacagau

SEQ ID NO: 2095760 - RNA, 19 nt, Homo sapiens
  misc_RNA (1)...(19): siRNA sense strand
ggagcuggccguggucauu

SEQ ID NO: 2095761 - RNA, 19 nt, Homo sapiens
  misc_RNA (1)...(19): siRNA sense strand
gauccacacaacuuaaaga

SEQ ID NO: 2095762 - RNA, 19 nt, Homo sapiens
  misc_RNA (1)...(19): siRNA sense strand
aagaucugcugccgaguga

SEQ ID NO: 2095763 - RNA, 19 nt, Homo sapiens
  misc_RNA (1)...(19): siRNA sense strand
ccagagacaugagacuagu

SEQ ID NO: 2095764 - RNA, 19 nt, Homo sapiens
  misc_RNA (1)...(19): siRNA sense strand
gaucugcugccgagugaau

SEQ ID NO: 2095765 - RNA, 19 nt, Homo sapiens
  misc_RNA (1)...(19): siRNA sense strand
caucaucuucagcaaguuu

SEQ ID NO: 2095766 - RNA, 19 nt, Homo sapiens
  misc_RNA (1)...(19): siRNA sense strand
caaggagcccaucaucuuc

SEQ ID NO: 2095767 - RNA, 19 nt, Homo sapiens
  misc_RNA (1)...(19): siRNA sense strand
cguggucauuggaaagaaa

SEQ ID NO: 2095768 - RNA, 19 nt, Homo sapiens
  misc_RNA (1)...(19): siRNA sense strand
gugugagauugaagaacua

SEQ ID NO: 2095769 - RNA, 19 nt, Homo sapiens
  misc_RNA (1)...(19): siRNA sense strand
ugaaguccagugugagauu

SEQ ID NO: 2095770 - RNA, 19 nt, Homo sapiens
  misc_RNA (1)...(19): siRNA sense strand
uuucaacccuccagagaca

SEQ ID NO: 2095771 - RNA, 19 nt, Homo sapiens
  misc_RNA (1)...(19): siRNA sense strand
cagauccacacaacuuaaa

SEQ ID NO: 2095772 - RNA, 19 nt, Homo sapiens
  misc_RNA (1)...(19): siRNA sense strand
gugugggcaugaauuaugu

SEQ ID NO: 2095773 - RNA, 19 nt, Homo sapiens
  misc_RNA (1)...(19): siRNA sense strand
uagaagaagauuacucaca

SEQ ID NO: 2095774 - RNA, 19 nt, Homo sapiens
  misc_RNA (1)...(19): siRNA sense strand
gcuucacuguggcucauga

SEQ ID NO: 2095775 - RNA, 19 nt, Homo sapiens
  misc_RNA (1)...(19): siRNA sense strand
acaugagacuagugcaguu

SEQ ID NO: 2095776 - RNA, 19 nt, Homo sapiens
  misc_RNA (1)...(19): siRNA sense strand
gagcuggccguggucauug

SEQ ID NO: 2095777 - RNA, 19 nt, Homo sapiens
  misc_RNA (1)...(19): siRNA sense strand
cccaucaucuucagcaagu

SEQ ID NO: 2095778 - RNA, 19 nt, Homo sapiens
  misc_RNA (1)...(19): siRNA sense strand
gaccaaggacaguguagca

SEQ ID NO: 2095779 - RNA, 19 nt, Homo sapiens
  misc_RNA (1)...(19): siRNA sense strand
ugugugugggcaugaauua

SEQ ID NO: 2095780 - RNA, 19 nt, Homo sapiens
  misc_RNA (1)...(19): siRNA sense strand
aagaaaggcaagcacauca

SEQ ID NO: 2095781 - RNA, 19 nt, Homo sapiens
  misc_RNA (1)...(19): siRNA sense strand
uaggugucaucaucaacaa

SEQ ID NO: 2095782 - RNA, 19 nt, Homo sapiens
  misc_RNA (1)...(19): siRNA sense strand
aaagaaaggcaagcacauc

SEQ ID NO: 2095783 - RNA, 19 nt, Homo sapiens
  misc_RNA (1)...(19): siRNA sense strand
agugugagauugaagaacu

SEQ ID NO: 2095784 - RNA, 19 nt, Homo sapiens
  misc_RNA (1)...(19): siRNA sense strand
ccagaugguauucaagaca

SEQ ID NO: 2095785 - RNA, 19 nt, Homo sapiens
  misc_RNA (1)...(19): siRNA sense strand
uguagcagauccacacaac

SEQ ID NO: 2095786 - RNA, 19 nt, Homo sapiens
  misc_RNA (1)...(19): siRNA sense strand
ggugucugguagaagaaga

SEQ ID NO: 2095787 - RNA, 19 nt, Homo sapiens
  misc_RNA (1)...(19): siRNA sense strand
uaucaaccucaaugccuuu

SEQ ID NO: 2095788 - RNA, 19 nt, Homo sapiens
  misc_RNA (1)...(19): siRNA sense strand
gacgaugacgcaguuccua

SEQ ID NO: 2095789 - RNA, 19 nt, Homo sapiens
  misc_RNA (1)...(19): siRNA sense strand
cgaugacgcaguuccuaga

SEQ ID NO: 2095790 - RNA, 19 nt, Homo sapiens
  misc_RNA (1)...(19): siRNA sense strand
caucaacaaggugguguga

SEQ ID NO: 2095791 - RNA, 19 nt, Homo sapiens
  misc_RNA (1)...(19): siRNA sense strand
ccaaagggcugacugagaa

SEQ ID NO: 2095792 - RNA, 19 nt, Homo sapiens
  misc_RNA (1)...(19): siRNA sense strand
gauaucaacucaacaucuu

SEQ ID NO: 2095793 - RNA, 19 nt, Homo sapiens
  misc_RNA (1)...(19): siRNA sense strand
ccagcacccugaacaauga

SEQ ID NO: 2095794 - RNA, 19 nt, Homo sapiens
  misc_RNA (1)...(19): siRNA sense strand
gacuucuucucuagacuua

SEQ ID NO: 2095795 - RNA, 19 nt, Homo sapiens
  misc_RNA (1)...(19): siRNA sense strand
ccaguuaaccuguggaaga

SEQ ID NO: 2095796 - RNA, 19 nt, Homo sapiens
  misc_RNA (1)...(19): siRNA sense strand
aaagguggcuccagaaagg

SEQ ID NO: 2095797 - RNA, 19 nt, Homo sapiens
  misc_RNA (1)...(19): siRNA sense strand
ggucuucuguguccuuugu

SEQ ID NO: 2095798 - RNA, 19 nt, Homo sapiens
  misc_RNA (1)...(19): siRNA sense strand
ggaaagaccaaagcagaug

SEQ ID NO: 2095799 - RNA, 19 nt, Homo sapiens
  misc_RNA (1)...(19): siRNA sense strand
accugaagcugucgagaua

SEQ ID NO: 2095800 - RNA, 19 nt, Homo sapiens
  misc_RNA (1)...(19): siRNA sense strand
caagauggcuaaggagaac

SEQ ID NO: 2095801 - RNA, 19 nt, Homo sapiens
  misc_RNA (1)...(19): siRNA sense strand
ggaggcggaugccaagaag

SEQ ID NO: 2095802 - RNA, 19 nt, Homo sapiens
  misc_RNA (1)...(19): siRNA sense strand
cuucuucucuagacuuaaa

SEQ ID NO: 2095803 - RNA, 19 nt, Homo sapiens
  misc_RNA (1)...(19): siRNA sense strand
ccagggacuucuucucuag

SEQ ID NO: 2095804 - RNA, 19 nt, Homo sapiens
  misc_RNA (1)...(19): siRNA sense strand
ccagaaagggcauccucua

SEQ ID NO: 2095805 - RNA, 19 nt, Homo sapiens
  misc_RNA (1)...(19): siRNA sense strand
gacaacgauucucccaaga

SEQ ID NO: 2095806 - RNA, 19 nt, Homo sapiens
  misc_RNA (1)...(19): siRNA sense strand
ccaggaaacaguacaagau

SEQ ID NO: 2095807 - RNA, 19 nt, Homo sapiens
  misc_RNA (1)...(19): siRNA sense strand
ggccgugucucccuuucuu

SEQ ID NO: 2095808 - RNA, 19 nt, Homo sapiens
  misc_RNA (1)...(19): siRNA sense strand
gaccagaugaugccaggaa

SEQ ID NO: 2095809 - RNA, 19 nt, Homo sapiens
  misc_RNA (1)...(19): siRNA sense strand
ggacuucuucucuagacuu

SEQ ID NO: 2095810 - RNA, 19 nt, Homo sapiens
  misc_RNA (1)...(19): siRNA sense strand
ucuacaaguucaugaagga

SEQ ID NO: 2095811 - RNA, 19 nt, Homo sapiens
  misc_RNA (1)...(19): siRNA sense strand
aguacaagauggcuaagga

SEQ ID NO: 2095812 - RNA, 19 nt, Homo sapiens
  misc_RNA (1)...(19): siRNA sense strand
gcacgcaccaccagucaca

SEQ ID NO: 2095813 - RNA, 19 nt, Homo sapiens
  misc_RNA (1)...(19): siRNA sense strand
ccaccgagaggccgaagaa

SEQ ID NO: 2095814 - RNA, 19 nt, Homo sapiens
  misc_RNA (1)...(19): siRNA sense strand
gcccuucugcguuccauaa

SEQ ID NO: 2095815 - RNA, 19 nt, Homo sapiens
  misc_RNA (1)...(19): siRNA sense strand
caccaccagucacaaccua

SEQ ID NO: 2095816 - RNA, 19 nt, Homo sapiens
  misc_RNA (1)...(19): siRNA sense strand
cgagauaucaacucaacau

SEQ ID NO: 2095817 - RNA, 19 nt, Homo sapiens
  misc_RNA (1)...(19): siRNA sense strand
caguuaaccuguggaagau

SEQ ID NO: 2095818 - RNA, 19 nt, Homo sapiens
  misc_RNA (1)...(19): siRNA sense strand
cccagggacuucuucucua

SEQ ID NO: 2095819 - RNA, 19 nt, Homo sapiens
  misc_RNA (1)...(19): siRNA sense strand
ccgcuggccugaugcacuu

SEQ ID NO: 2095820 - RNA, 19 nt, Homo sapiens
  misc_RNA (1)...(19): siRNA sense strand
acaaagcaguggagaagcu

SEQ ID NO: 2095821 - RNA, 19 nt, Homo sapiens
  misc_RNA (1)...(19): siRNA sense strand
gcacugcccgcugaacuuc

SEQ ID NO: 2095822 - RNA, 19 nt, Homo sapiens
  misc_RNA (1)...(19): siRNA sense strand
gcuguucaccucccagaga

SEQ ID NO: 2095823 - RNA, 19 nt, Homo sapiens
  misc_RNA (1)...(19): siRNA sense strand
caggaaacaguacaagaug

SEQ ID NO: 2095824 - RNA, 19 nt, Homo sapiens
  misc_RNA (1)...(19): siRNA sense strand
guuaaccuguggaagaucu

SEQ ID NO: 2095825 - RNA, 19 nt, Homo sapiens
  misc_RNA (1)...(19): siRNA sense strand
gaagcugucgagauaucaa

SEQ ID NO: 2095826 - RNA, 19 nt, Homo sapiens
  misc_RNA (1)...(19): siRNA sense strand
gcgcauggaccagaugaug

SEQ ID NO: 2095827 - RNA, 19 nt, Homo sapiens
  misc_RNA (1)...(19): siRNA sense strand
cuacaaagcaguggagaag

SEQ ID NO: 2095828 - RNA, 19 nt, Homo sapiens
  misc_RNA (1)...(19): siRNA sense strand
ggucagccucuacaaguuc

SEQ ID NO: 2095829 - RNA, 19 nt, Homo sapiens
  misc_RNA (1)...(19): siRNA sense strand
cagaugaugccaggaaaga

SEQ ID NO: 2095830 - RNA, 19 nt, Homo sapiens
  misc_RNA (1)...(19): siRNA sense strand
gaccugaagcugucgagau

SEQ ID NO: 2095831 - RNA, 19 nt, Homo sapiens
  misc_RNA (1)...(19): siRNA sense strand
uguggaagaucuacaaagc

SEQ ID NO: 2095832 - RNA, 19 nt, Homo sapiens
  misc_RNA (1)...(19): siRNA sense strand
gcccuccgccacagacuuu

SEQ ID NO: 2095833 - RNA, 19 nt, Homo sapiens
  misc_RNA (1)...(19): siRNA sense strand
gucgagauaucaacucaac

SEQ ID NO: 2095834 - RNA, 19 nt, Homo sapiens
  misc_RNA (1)...(19): siRNA sense strand
cauaaagguggcuccagaa

SEQ ID NO: 2095835 - RNA, 19 nt, Homo sapiens
  misc_RNA (1)...(19): siRNA sense strand
agaggcugguccugccaua

SEQ ID NO: 2095836 - RNA, 19 nt, Homo sapiens
  misc_RNA (1)...(19): siRNA sense strand
cugaagcugucgagauauc

SEQ ID NO: 2095837 - RNA, 19 nt, Homo sapiens
  misc_RNA (1)...(19): siRNA sense strand
ccaagcccaggaaacagua

SEQ ID NO: 2095838 - RNA, 19 nt, Homo sapiens
  misc_RNA (1)...(19): siRNA sense strand
acaagauggcuaaggagaa

SEQ ID NO: 2095839 - RNA, 19 nt, Homo sapiens
  misc_RNA (1)...(19): siRNA sense strand
uaaagguggcuccagaaag

SEQ ID NO: 2095840 - RNA, 19 nt, Homo sapiens
  misc_RNA (1)...(19): siRNA sense strand
gcaaagaggggcugucagu

SEQ ID NO: 2095841 - RNA, 19 nt, Homo sapiens
  misc_RNA (1)...(19): siRNA sense strand
agagggugcugcccacagu

SEQ ID NO: 2095842 - RNA, 19 nt, Homo sapiens
  misc_RNA (1)...(19): siRNA sense strand
uucaagggcugcuucuaca

SEQ ID NO: 2095843 - RNA, 19 nt, Homo sapiens
  misc_RNA (1)...(19): siRNA sense strand
auaaagguggcuccagaaa

SEQ ID NO: 2095844 - RNA, 19 nt, Homo sapiens
  misc_RNA (1)...(19): siRNA sense strand
ccaggagggacaacgauuc

SEQ ID NO: 2095845 - RNA, 19 nt, Homo sapiens
  misc_RNA (1)...(19): siRNA sense strand
gcagaacggaauccagaac

SEQ ID NO: 2095846 - RNA, 19 nt, Homo sapiens
  misc_RNA (1)...(19): siRNA sense strand
gcuccuauccagcuucuac

SEQ ID NO: 2095847 - RNA, 19 nt, Homo sapiens
  misc_RNA (1)...(19): siRNA sense strand
gcaggcagucccgaacuuc

SEQ ID NO: 2095848 - RNA, 19 nt, Homo sapiens
  misc_RNA (1)...(19): siRNA sense strand
cagaaagggcauccucuac

SEQ ID NO: 2095849 - RNA, 19 nt, Homo sapiens
  misc_RNA (1)...(19): siRNA sense strand
cccaaagggcugacugaga

SEQ ID NO: 2095850 - RNA, 19 nt, Homo sapiens
  misc_RNA (1)...(19): siRNA sense strand
ggggagacacugaagaaaa

SEQ ID NO: 2095851 - RNA, 19 nt, Homo sapiens
  misc_RNA (1)...(19): siRNA sense strand
uggucagccucuacaaguu

SEQ ID NO: 2095852 - RNA, 19 nt, Homo sapiens
  misc_RNA (1)...(19): siRNA sense strand
ccaggaacagcacagaaca

SEQ ID NO: 2095853 - RNA, 19 nt, Homo sapiens
  misc_RNA (1)...(19): siRNA sense strand
gagauaucaacucaacauc

SEQ ID NO: 2095854 - RNA, 19 nt, Homo sapiens
  misc_RNA (1)...(19): siRNA sense strand
ggaaagaaguggagaauga

SEQ ID NO: 2095855 - RNA, 19 nt, Homo sapiens
  misc_RNA (1)...(19): siRNA sense strand
gaagauggcugaggaauug

SEQ ID NO: 2095856 - RNA, 19 nt, Homo sapiens
  misc_RNA (1)...(19): siRNA sense strand
cuaauuaacuucccugaaa

SEQ ID NO: 2095857 - RNA, 19 nt, Homo sapiens
  misc_RNA (1)...(19): siRNA sense strand
gaacaaaggcauugagaga

SEQ ID NO: 2095858 - RNA, 19 nt, Homo sapiens
  misc_RNA (1)...(19): siRNA sense strand
ggaaugugcucuucuggaa

SEQ ID NO: 2095859 - RNA, 19 nt, Homo sapiens
  misc_RNA (1)...(19): siRNA sense strand
gaaaugccaugcuaucauc

SEQ ID NO: 2095860 - RNA, 19 nt, Homo sapiens
  misc_RNA (1)...(19): siRNA sense strand
ccacugcaaucguguuaua

SEQ ID NO: 2095861 - RNA, 19 nt, Homo sapiens
  misc_RNA (1)...(19): siRNA sense strand
gagcagcccuuaacacugu

SEQ ID NO: 2095862 - RNA, 19 nt, Homo sapiens
  misc_RNA (1)...(19): siRNA sense strand
gauguggucucugcucuua

SEQ ID NO: 2095863 - RNA, 19 nt, Homo sapiens
  misc_RNA (1)...(19): siRNA sense strand
cgagagggcuguuuccaaa

SEQ ID NO: 2095864 - RNA, 19 nt, Homo sapiens
  misc_RNA (1)...(19): siRNA sense strand
ccagaggccuugggaaaua

SEQ ID NO: 2095865 - RNA, 19 nt, Homo sapiens
  misc_RNA (1)...(19): siRNA sense strand
gaaaguacugugaacauga

SEQ ID NO: 2095866 - RNA, 19 nt, Homo sapiens
  misc_RNA (1)...(19): siRNA sense strand
gcagauaucggguuuguca

SEQ ID NO: 2095867 - RNA, 19 nt, Homo sapiens
  misc_RNA (1)...(19): siRNA sense strand
ccaaugaucguucagcuuu

SEQ ID NO: 2095868 - RNA, 19 nt, Homo sapiens
  misc_RNA (1)...(19): siRNA sense strand
ggaagaaaguacugugaac

SEQ ID NO: 2095869 - RNA, 19 nt, Homo sapiens
  misc_RNA (1)...(19): siRNA sense strand
gagacgaucgugaacagua

SEQ ID NO: 2095870 - RNA, 19 nt, Homo sapiens
  misc_RNA (1)...(19): siRNA sense strand
aggccggucuuccuaauua

SEQ ID NO: 2095871 - RNA, 19 nt, Homo sapiens
  misc_RNA (1)...(19): siRNA sense strand
ggagcuauuuggugauguu

SEQ ID NO: 2095872 - RNA, 19 nt, Homo sapiens
  misc_RNA (1)...(19): siRNA sense strand
gaaagaaguggagaaugaa

SEQ ID NO: 2095873 - RNA, 19 nt, Homo sapiens
  misc_RNA (1)...(19): siRNA sense strand
ggcgaaagcuugugaagac

SEQ ID NO: 2095874 - RNA, 19 nt, Homo sapiens
  misc_RNA (1)...(19): siRNA sense strand
gaauuuaagaggcgacuug

SEQ ID NO: 2095875 - RNA, 19 nt, Homo sapiens
  misc_RNA (1)...(19): siRNA sense strand
acaaaggcauugagagaau

SEQ ID NO: 2095876 - RNA, 19 nt, Homo sapiens
  misc_RNA (1)...(19): siRNA sense strand
ggagagagaagcaaaggau

SEQ ID NO: 2095877 - RNA, 19 nt, Homo sapiens
  misc_RNA (1)...(19): siRNA sense strand
gauaucggguuugucaaga

SEQ ID NO: 2095878 - RNA, 19 nt, Homo sapiens
  misc_RNA (1)...(19): siRNA sense strand
aaacacugcugcucaugau

SEQ ID NO: 2095879 - RNA, 19 nt, Homo sapiens
  misc_RNA (1)...(19): siRNA sense strand
agacgaucgugaacaguaa

SEQ ID NO: 2095880 - RNA, 19 nt, Homo sapiens
  misc_RNA (1)...(19): siRNA sense strand
ggacauuguuggacgaacu

SEQ ID NO: 2095881 - RNA, 19 nt, Homo sapiens
  misc_RNA (1)...(19): siRNA sense strand
gagagagaagcaaaggaua

SEQ ID NO: 2095882 - RNA, 19 nt, Homo sapiens
  misc_RNA (1)...(19): siRNA sense strand
guacugugaacaugacuuu

SEQ ID NO: 2095883 - RNA, 19 nt, Homo sapiens
  misc_RNA (1)...(19): siRNA sense strand
guauuaagcugggugucuu

SEQ ID NO: 2095884 - RNA, 19 nt, Homo sapiens
  misc_RNA (1)...(19): siRNA sense strand
ccucugcccuugcugacua

SEQ ID NO: 2095885 - RNA, 19 nt, Homo sapiens
  misc_RNA (1)...(19): siRNA sense strand
gcaucgcccucaccaacuu

SEQ ID NO: 2095886 - RNA, 19 nt, Homo sapiens
  misc_RNA (1)...(19): siRNA sense strand
gcaguggcauguggagcua

SEQ ID NO: 2095887 - RNA, 19 nt, Homo sapiens
  misc_RNA (1)...(19): siRNA sense strand
ucaaagccaugaauaacag

SEQ ID NO: 2095888 - RNA, 19 nt, Homo sapiens
  misc_RNA (1)...(19): siRNA sense strand
ccuggaagcuauuaacauc

SEQ ID NO: 2095889 - RNA, 19 nt, Homo sapiens
  misc_RNA (1)...(19): siRNA sense strand
aguggagaaugaaguauuu

SEQ ID NO: 2095890 - RNA, 19 nt, Homo sapiens
  misc_RNA (1)...(19): siRNA sense strand
gcaggaggcaccacuguca

SEQ ID NO: 2095891 - RNA, 19 nt, Homo sapiens
  misc_RNA (1)...(19): siRNA sense strand
gagaagcaaaggauaagga

SEQ ID NO: 2095892 - RNA, 19 nt, Homo sapiens
  misc_RNA (1)...(19): siRNA sense strand
gaugagcagccucugauau

SEQ ID NO: 2095893 - RNA, 19 nt, Homo sapiens
  misc_RNA (1)...(19): siRNA sense strand
gaagaaaguacugugaaca

SEQ ID NO: 2095894 - RNA, 19 nt, Homo sapiens
  misc_RNA (1)...(19): siRNA sense strand
acagugacgugaaagucua

SEQ ID NO: 2095895 - RNA, 19 nt, Homo sapiens
  misc_RNA (1)...(19): siRNA sense strand
ggaauuggcgaaagcuugu

SEQ ID NO: 2095896 - RNA, 19 nt, Homo sapiens
  misc_RNA (1)...(19): siRNA sense strand
cccaugagcugaccuugau

SEQ ID NO: 2095897 - RNA, 19 nt, Homo sapiens
  misc_RNA (1)...(19): siRNA sense strand
agagagaagcaaaggauaa

SEQ ID NO: 2095898 - RNA, 19 nt, Homo sapiens
  misc_RNA (1)...(19): siRNA sense strand
caaggaguucugugacuuu

SEQ ID NO: 2095899 - RNA, 19 nt, Homo sapiens
  misc_RNA (1)...(19): siRNA sense strand
ugccagaaaugccaugcua

SEQ ID NO: 2095900 - RNA, 19 nt, Homo sapiens
  misc_RNA (1)...(19): siRNA sense strand
caaacacugcugcucauga

SEQ ID NO: 2095901 - RNA, 19 nt, Homo sapiens
  misc_RNA (1)...(19): siRNA sense strand
cugcaacacuaaauuaaca

SEQ ID NO: 2095902 - RNA, 19 nt, Homo sapiens
  misc_RNA (1)...(19): siRNA sense strand
agaaaguacugugaacaug

SEQ ID NO: 2095903 - RNA, 19 nt, Homo sapiens
  misc_RNA (1)...(19): siRNA sense strand
ggaguucugugacuuuuau

SEQ ID NO: 2095904 - RNA, 19 nt, Homo sapiens
  misc_RNA (1)...(19): siRNA sense strand
caaaggauaaggacaagca

SEQ ID NO: 2095905 - RNA, 19 nt, Homo sapiens
  misc_RNA (1)...(19): siRNA sense strand
guuaucaaagccaugaaua

SEQ ID NO: 2095906 - RNA, 19 nt, Homo sapiens
  misc_RNA (1)...(19): siRNA sense strand
uaacauccacagcaucaga

SEQ ID NO: 2095907 - RNA, 19 nt, Homo sapiens
  misc_RNA (1)...(19): siRNA sense strand
acacugcugcucaugauuu

SEQ ID NO: 2095908 - RNA, 19 nt, Homo sapiens
  misc_RNA (1)...(19): siRNA sense strand
gaaagucuacaaggaguuc

SEQ ID NO: 2095909 - RNA, 19 nt, Homo sapiens
  misc_RNA (1)...(19): siRNA sense strand
ucaaccaccuccuggaaca

SEQ ID NO: 2095910 - RNA, 19 nt, Homo sapiens
  misc_RNA (1)...(19): siRNA sense strand
uaauuaacuucccugaaag

SEQ ID NO: 2095911 - RNA, 19 nt, Homo sapiens
  misc_RNA (1)...(19): siRNA sense strand
uaccugcaacacuaaauua

SEQ ID NO: 2095912 - RNA, 19 nt, Homo sapiens
  misc_RNA (1)...(19): siRNA sense strand
gagcagccucugauauuca

SEQ ID NO: 2095913 - RNA, 19 nt, Homo sapiens
  misc_RNA (1)...(19): siRNA sense strand
agaaguggagaaugaagua

SEQ ID NO: 2095914 - RNA, 19 nt, Homo sapiens
  misc_RNA (1)...(19): siRNA sense strand
ugugcacgcuucaggguaa

SEQ ID NO: 2095915 - RNA, 19 nt, Homo sapiens
  misc_RNA (1)...(19): siRNA sense strand
gugguugugugggucuuua

SEQ ID NO: 2095916 - RNA, 19 nt, Homo sapiens
  misc_RNA (1)...(19): siRNA sense strand
gcucaaccaccuccuggaa

SEQ ID NO: 2095917 - RNA, 19 nt, Homo sapiens
  misc_RNA (1)...(19): siRNA sense strand
uaaggccggucuuccuaau

SEQ ID NO: 2095918 - RNA, 19 nt, Homo sapiens
  misc_RNA (1)...(19): siRNA sense strand
gccaucugcucaucucaau

SEQ ID NO: 2095919 - RNA, 19 nt, Homo sapiens
  misc_RNA (1)...(19): siRNA sense strand
ggauaaggacaagcagaaa

SEQ ID NO: 2095920 - RNA, 19 nt, Homo sapiens
  misc_RNA (1)...(19): siRNA sense strand
gaggaaagaaguggagaau

SEQ ID NO: 2095921 - RNA, 19 nt, Homo sapiens
  misc_RNA (1)...(19): siRNA sense strand
caaaggcauugagagaauc

SEQ ID NO: 2095922 - RNA, 19 nt, Homo sapiens
  misc_RNA (1)...(19): siRNA sense strand
caaugaucguucagcuuug

SEQ ID NO: 2095923 - RNA, 19 nt, Homo sapiens
  misc_RNA (1)...(19): siRNA sense strand
cggaagcugugucuguuuc

SEQ ID NO: 2095924 - RNA, 19 nt, Homo sapiens
  misc_RNA (1)...(19): siRNA sense strand
gugggucccuggaagcuau

SEQ ID NO: 2095925 - RNA, 19 nt, Homo sapiens
  misc_RNA (1)...(19): siRNA sense strand
cugcaaucguguuauagaa

SEQ ID NO: 2095926 - RNA, 19 nt, Homo sapiens
  misc_RNA (1)...(19): siRNA sense strand
gcuauuuggugauguuugc

SEQ ID NO: 2095927 - RNA, 19 nt, Homo sapiens
  misc_RNA (1)...(19): siRNA sense strand
uguggugaauucaucauug

SEQ ID NO: 2095928 - RNA, 19 nt, Homo sapiens
  misc_RNA (1)...(19): siRNA sense strand
acaaggaguucugugacuu

SEQ ID NO: 2095929 - RNA, 19 nt, Homo sapiens
  misc_RNA (1)...(19): siRNA sense strand
ggccggucuuccuaauuaa

SEQ ID NO: 2095930 - RNA, 19 nt, Homo sapiens
  misc_RNA (1)...(19): siRNA sense strand
agucuuuccucuuggauga

SEQ ID NO: 2095931 - RNA, 19 nt, Homo sapiens
  misc_RNA (1)...(19): siRNA sense strand
cacggaagcugugucuguu

SEQ ID NO: 2095932 - RNA, 19 nt, Homo sapiens
  misc_RNA (1)...(19): siRNA sense strand
ugaucgaucugauuaucug

SEQ ID NO: 2095933 - RNA, 19 nt, Homo sapiens
  misc_RNA (1)...(19): siRNA sense strand
uaaagccagucugcaaaca

SEQ ID NO: 2095934 - RNA, 19 nt, Homo sapiens
  misc_RNA (1)...(19): siRNA sense strand
ugagcagccucugauauuc

SEQ ID NO: 2095935 - RNA, 19 nt, Homo sapiens
  misc_RNA (1)...(19): siRNA sense strand
ucaguguggugaauucauc

SEQ ID NO: 2095936 - RNA, 19 nt, Homo sapiens
  misc_RNA (1)...(19): siRNA sense strand
aaaugcagcccuggucuuu

SEQ ID NO: 2095937 - RNA, 19 nt, Homo sapiens
  misc_RNA (1)...(19): siRNA sense strand
ggagaagauggcugaggaa

SEQ ID NO: 2095938 - RNA, 19 nt, Homo sapiens
  misc_RNA (1)...(19): siRNA sense strand
ggaucugacugccgaugca

SEQ ID NO: 2095939 - RNA, 19 nt, Homo sapiens
  misc_RNA (1)...(19): siRNA sense strand
ccagaaaugccaugcuauc

SEQ ID NO: 2095940 - RNA, 19 nt, Homo sapiens
  misc_RNA (1)...(19): siRNA sense strand
gcacagugacgugaaaguc

SEQ ID NO: 2095941 - RNA, 19 nt, Homo sapiens
  misc_RNA (1)...(19): siRNA sense strand
caggcacagugacgugaaa

SEQ ID NO: 2095942 - RNA, 19 nt, Homo sapiens
  misc_RNA (1)...(19): siRNA sense strand
ugcccuugcugacuacuuu

SEQ ID NO: 2095943 - RNA, 19 nt, Homo sapiens
  misc_RNA (1)...(19): siRNA sense strand
gaccuugaucgaucugauu

SEQ ID NO: 2095944 - RNA, 19 nt, Homo sapiens
  misc_RNA (1)...(19): siRNA sense strand
aagcaaaggauaaggacaa

SEQ ID NO: 2095945 - RNA, 19 nt, Homo sapiens
  misc_RNA (1)...(19): siRNA sense strand
uguggucucugcucuuaau

SEQ ID NO: 2095946 - RNA, 19 nt, Homo sapiens
  misc_RNA (1)...(19): siRNA sense strand
uaucggguuugucaagaau

SEQ ID NO: 2095947 - RNA, 19 nt, Homo sapiens
  misc_RNA (1)...(19): siRNA sense strand
cagaacaaaggcauugaga

SEQ ID NO: 2095948 - RNA, 19 nt, Homo sapiens
  misc_RNA (1)...(19): siRNA sense strand
gaaagucgucagaccuucu

SEQ ID NO: 2095949 - RNA, 19 nt, Homo sapiens
  misc_RNA (1)...(19): siRNA sense strand
gagagaagcaaaggauaag

SEQ ID NO: 2095950 - RNA, 19 nt, Homo sapiens
  misc_RNA (1)...(19): siRNA sense strand
uggcagauaucggguuugu

SEQ ID NO: 2095951 - RNA, 19 nt, Homo sapiens
  misc_RNA (1)...(19): siRNA sense strand
caauggagaggaaagaagu

SEQ ID NO: 2095952 - RNA, 19 nt, Homo sapiens
  misc_RNA (1)...(19): siRNA sense strand
uaagaggcgacuugccaaa

SEQ ID NO: 2095953 - RNA, 19 nt, Homo sapiens
  misc_RNA (1)...(19): siRNA sense strand
agaagauggcugaggaauu

SEQ ID NO: 2095954 - RNA, 19 nt, Homo sapiens
  misc_RNA (1)...(19): siRNA sense strand
gggagaagcuggccaagga

SEQ ID NO: 2095955 - RNA, 19 nt, Homo sapiens
  misc_RNA (1)...(19): siRNA sense strand
ugaccgagauccacgagua

SEQ ID NO: 2095956 - RNA, 19 nt, Homo sapiens
  misc_RNA (1)...(19): siRNA sense strand
ggacguggauggugugaag

SEQ ID NO: 2095957 - RNA, 19 nt, Homo sapiens
  misc_RNA (1)...(19): siRNA sense strand
gcuuccggcugcaugauua

SEQ ID NO: 2095958 - RNA, 19 nt, Homo sapiens
  misc_RNA (1)...(19): siRNA sense strand
ucacagccauagcaaagga

SEQ ID NO: 2095959 - RNA, 19 nt, Homo sapiens
  misc_RNA (1)...(19): siRNA sense strand
ggcauugacuuccggaaca

SEQ ID NO: 2095960 - RNA, 19 nt, Homo sapiens
  misc_RNA (1)...(19): siRNA sense strand
gcauugacuuccggaacaa

SEQ ID NO: 2095961 - RNA, 19 nt, Homo sapiens
  misc_RNA (1)...(19): siRNA sense strand
ugaagcagcgcuccaugaa

SEQ ID NO: 2095962 - RNA, 19 nt, Homo sapiens
  misc_RNA (1)...(19): siRNA sense strand
gaagcuggccaaggaguau

SEQ ID NO: 2095963 - RNA, 19 nt, Homo sapiens
  misc_RNA (1)...(19): siRNA sense strand
ucuacgaugucaccaacaa

SEQ ID NO: 2095964 - RNA, 19 nt, Homo sapiens
  misc_RNA (1)...(19): siRNA sense strand
uagcaaaggaguugaagca

SEQ ID NO: 2095965 - RNA, 19 nt, Homo sapiens
  misc_RNA (1)...(19): siRNA sense strand
gguggacucugcccaugag

SEQ ID NO: 2095966 - RNA, 19 nt, Homo sapiens
  misc_RNA (1)...(19): siRNA sense strand
gaguauggacugcccuuca

SEQ ID NO: 2095967 - RNA, 19 nt, Homo sapiens
  misc_RNA (1)...(19): siRNA sense strand
gaaggugaagcugcagaug

SEQ ID NO: 2095968 - RNA, 19 nt, Homo sapiens
  misc_RNA (1)...(19): siRNA sense strand
auucaaggauggugcuuuc

SEQ ID NO: 2095969 - RNA, 19 nt, Homo sapiens
  misc_RNA (1)...(19): siRNA sense strand
aggugaagcugcagaugug

SEQ ID NO: 2095970 - RNA, 19 nt, Homo sapiens
  misc_RNA (1)...(19): siRNA sense strand
gaagcagcgcuccaugaag

SEQ ID NO: 2095971 - RNA, 19 nt, Homo sapiens
  misc_RNA (1)...(19): siRNA sense strand
uggauggugugaaggugaa

SEQ ID NO: 2095972 - RNA, 19 nt, Homo sapiens
  misc_RNA (1)...(19): siRNA sense strand
caucuccaccguaggcauu

SEQ ID NO: 2095973 - RNA, 19 nt, Homo sapiens
  misc_RNA (1)...(19): siRNA sense strand
gcugcaugauuacguuaag

SEQ ID NO: 2095974 - RNA, 19 nt, Homo sapiens
  misc_RNA (1)...(19): siRNA sense strand
caccguaggcauugacuuc

SEQ ID NO: 2095975 - RNA, 19 nt, Homo sapiens
  misc_RNA (1)...(19): siRNA sense strand
ccugucugcuggugcgauu

SEQ ID NO: 2095976 - RNA, 19 nt, Homo sapiens
  misc_RNA (1)...(19): siRNA sense strand
ccauagcaaaggaguugaa

SEQ ID NO: 2095977 - RNA, 19 nt, Homo sapiens
  misc_RNA (1)...(19): siRNA sense strand
gauucaaggauggugcuuu

SEQ ID NO: 2095978 - RNA, 19 nt, Homo sapiens
  misc_RNA (1)...(19): siRNA sense strand
caacaaagcugaaugaacu

SEQ ID NO: 2095979 - RNA, 19 nt, Homo sapiens
  misc_RNA (1)...(19): siRNA sense strand
gaaagucccuauagagcua

SEQ ID NO: 2095980 - RNA, 19 nt, Homo sapiens
  misc_RNA (1)...(19): siRNA sense strand
gagaagagccggaagaugu

SEQ ID NO: 2095981 - RNA, 19 nt, Homo sapiens
  misc_RNA (1)...(19): siRNA sense strand
ccagauggcuugagugaug

SEQ ID NO: 2095982 - RNA, 19 nt, Homo sapiens
  misc_RNA (1)...(19): siRNA sense strand
ggccagugcuaucgacuua

SEQ ID NO: 2095983 - RNA, 19 nt, Homo sapiens
  misc_RNA (1)...(19): siRNA sense strand
gcacaaagagggacgagaa

SEQ ID NO: 2095984 - RNA, 19 nt, Homo sapiens
  misc_RNA (1)...(19): siRNA sense strand
ggcgagaacuguacacuga

SEQ ID NO: 2095985 - RNA, 19 nt, Homo sapiens
  misc_RNA (1)...(19): siRNA sense strand
ggcacaagaucaccaagua

SEQ ID NO: 2095986 - RNA, 19 nt, Homo sapiens
  misc_RNA (1)...(19): siRNA sense strand
ucaaugaccuggcccaaga

SEQ ID NO: 2095987 - RNA, 19 nt, Homo sapiens
  misc_RNA (1)...(19): siRNA sense strand
gggcaggacucuacuggaa

SEQ ID NO: 2095988 - RNA, 19 nt, Homo sapiens
  misc_RNA (1)...(19): siRNA sense strand
gaaacucgcgggacucauu

SEQ ID NO: 2095989 - RNA, 19 nt, Homo sapiens
  misc_RNA (1)...(19): siRNA sense strand
cagaacggcugcugaauag

SEQ ID NO: 2095990 - RNA, 19 nt, Homo sapiens
  misc_RNA (1)...(19): siRNA sense strand
gcucuucucucccaguaaa

SEQ ID NO: 2095991 - RNA, 19 nt, Homo sapiens
  misc_RNA (1)...(19): siRNA sense strand
gaagaagucaucccaggaa

SEQ ID NO: 2095992 - RNA, 19 nt, Homo sapiens
  misc_RNA (1)...(19): siRNA sense strand
cagcaagcauggugaagaa

SEQ ID NO: 2095993 - RNA, 19 nt, Homo sapiens
  misc_RNA (1)...(19): siRNA sense strand
gaacggcugcugaauagug

SEQ ID NO: 2095994 - RNA, 19 nt, Homo sapiens
  misc_RNA (1)...(19): siRNA sense strand
ggacauuuccucugccuau

SEQ ID NO: 2095995 - RNA, 19 nt, Homo sapiens
  misc_RNA (1)...(19): siRNA sense strand
gagagcagcggcacaaaga

SEQ ID NO: 2095996 - RNA, 19 nt, Homo sapiens
  misc_RNA (1)...(19): siRNA sense strand
gagccugccacacacauua

SEQ ID NO: 2095997 - RNA, 19 nt, Homo sapiens
  misc_RNA (1)...(19): siRNA sense strand
gaacaacauugcgcugaag

SEQ ID NO: 2095998 - RNA, 19 nt, Homo sapiens
  misc_RNA (1)...(19): siRNA sense strand
gcucaucuguucucuccuu

SEQ ID NO: 2095999 - RNA, 19 nt, Homo sapiens
  misc_RNA (1)...(19): siRNA sense strand
gaagcaaacaccaucucua

SEQ ID NO: 2096000 - RNA, 19 nt, Homo sapiens
  misc_RNA (1)...(19): siRNA sense strand
gaacuuaugaagcuagugu

SEQ ID NO: 2096001 - RNA, 19 nt, Homo sapiens
  misc_RNA (1)...(19): siRNA sense strand
guugacagcuugcaugaca

SEQ ID NO: 2096002 - RNA, 19 nt, Homo sapiens
  misc_RNA (1)...(19): siRNA sense strand
gcgcugaaguacaagaaga

SEQ ID NO: 2096003 - RNA, 19 nt, Homo sapiens
  misc_RNA (1)...(19): siRNA sense strand
ugacaagaaugcaacaaag

SEQ ID NO: 2096004 - RNA, 19 nt, Homo sapiens
  misc_RNA (1)...(19): siRNA sense strand
ggaacuguauggccugauc

SEQ ID NO: 2096005 - RNA, 19 nt, Homo sapiens
  misc_RNA (1)...(19): siRNA sense strand
cagcuggugugcaugauga

SEQ ID NO: 2096006 - RNA, 19 nt, Homo sapiens
  misc_RNA (1)...(19): siRNA sense strand
gcaagaggcccaggaagga

SEQ ID NO: 2096007 - RNA, 19 nt, Homo sapiens
  misc_RNA (1)...(19): siRNA sense strand
guucauugguucuggaaau

SEQ ID NO: 2096008 - RNA, 19 nt, Homo sapiens
  misc_RNA (1)...(19): siRNA sense strand
gccgaagucuaccucauga

SEQ ID NO: 2096009 - RNA, 19 nt, Homo sapiens
  misc_RNA (1)...(19): siRNA sense strand
acauugcgcugaaguacaa

SEQ ID NO: 2096010 - RNA, 19 nt, Homo sapiens
  misc_RNA (1)...(19): siRNA sense strand
gcaagcagagugccaagga

SEQ ID NO: 2096011 - RNA, 19 nt, Homo sapiens
  misc_RNA (1)...(19): siRNA sense strand
agaguggccuguccgauga

SEQ ID NO: 2096012 - RNA, 19 nt, Homo sapiens
  misc_RNA (1)...(19): siRNA sense strand
gagcugcgcaagaagauug

SEQ ID NO: 2096013 - RNA, 19 nt, Homo sapiens
  misc_RNA (1)...(19): siRNA sense strand
cagcauugauuacauuucu

SEQ ID NO: 2096014 - RNA, 19 nt, Homo sapiens
  misc_RNA (1)...(19): siRNA sense strand
uugcagagguuguggauuc

SEQ ID NO: 2096015 - RNA, 19 nt, Homo sapiens
  misc_RNA (1)...(19): siRNA sense strand
caagcauggugaagaacaa

SEQ ID NO: 2096016 - RNA, 19 nt, Homo sapiens
  misc_RNA (1)...(19): siRNA sense strand
gggcuugucuggcaucucu

SEQ ID NO: 2096017 - RNA, 19 nt, Homo sapiens
  misc_RNA (1)...(19): siRNA sense strand
gaccaaagcagcucugucu

SEQ ID NO: 2096018 - RNA, 19 nt, Homo sapiens
  misc_RNA (1)...(19): siRNA sense strand
uguauggccugaucugcua

SEQ ID NO: 2096019 - RNA, 19 nt, Homo sapiens
  misc_RNA (1)...(19): siRNA sense strand
cagcuugcaugacaaagug

SEQ ID NO: 2096020 - RNA, 19 nt, Homo sapiens
  misc_RNA (1)...(19): siRNA sense strand
guacaucgacuuugaucau

SEQ ID NO: 2096021 - RNA, 19 nt, Homo sapiens
  misc_RNA (1)...(19): siRNA sense strand
gcaaacaccaucucuacag

SEQ ID NO: 2096022 - RNA, 19 nt, Homo sapiens
  misc_RNA (1)...(19): siRNA sense strand
ggugaaggagucccucuuu

SEQ ID NO: 2096023 - RNA, 19 nt, Homo sapiens
  misc_RNA (1)...(19): siRNA sense strand
gaaggugacacugcacuug

SEQ ID NO: 2096024 - RNA, 19 nt, Homo sapiens
  misc_RNA (1)...(19): siRNA sense strand
gcagagcuccggagagagu

SEQ ID NO: 2096025 - RNA, 19 nt, Homo sapiens
  misc_RNA (1)...(19): siRNA sense strand
gcacagaggacaagaacac

SEQ ID NO: 2096026 - RNA, 19 nt, Homo sapiens
  misc_RNA (1)...(19): siRNA sense strand
ccgagaagcucuguuugau

SEQ ID NO: 2096027 - RNA, 19 nt, Homo sapiens
  misc_RNA (1)...(19): siRNA sense strand
aauaguguguucauugguu

SEQ ID NO: 2096028 - RNA, 19 nt, Homo sapiens
  misc_RNA (1)...(19): siRNA sense strand
gcaggacucuacuggaacu

SEQ ID NO: 2096029 - RNA, 19 nt, Homo sapiens
  misc_RNA (1)...(19): siRNA sense strand
gcaaaucuuacuucaccuu

SEQ ID NO: 2096030 - RNA, 19 nt, Homo sapiens
  misc_RNA (1)...(19): siRNA sense strand
gggcugcaguccuguaucu

SEQ ID NO: 2096031 - RNA, 19 nt, Homo sapiens
  misc_RNA (1)...(19): siRNA sense strand
ccuaugcucugucaucaca

SEQ ID NO: 2096032 - RNA, 19 nt, Homo sapiens
  misc_RNA (1)...(19): siRNA sense strand
ugaagcuaguguugaggua

SEQ ID NO: 2096033 - RNA, 19 nt, Homo sapiens
  misc_RNA (1)...(19): siRNA sense strand
agaacaacauugcgcugaa

SEQ ID NO: 2096034 - RNA, 19 nt, Homo sapiens
  misc_RNA (1)...(19): siRNA sense strand
gauuacauuucucgguuca

SEQ ID NO: 2096035 - RNA, 19 nt, Homo sapiens
  misc_RNA (1)...(19): siRNA sense strand
gugaaggagucccucuuuc

SEQ ID NO: 2096036 - RNA, 19 nt, Homo sapiens
  misc_RNA (1)...(19): siRNA sense strand
caucuguucucuccuuauc

SEQ ID NO: 2096037 - RNA, 19 nt, Homo sapiens
  misc_RNA (1)...(19): siRNA sense strand
cgggagaacuuaugaagcu

SEQ ID NO: 2096038 - RNA, 19 nt, Homo sapiens
  misc_RNA (1)...(19): siRNA sense strand
gaaugaagccagaguucca

SEQ ID NO: 2096039 - RNA, 19 nt, Homo sapiens
  misc_RNA (1)...(19): siRNA sense strand
gaagucaucccaggaacug

SEQ ID NO: 2096040 - RNA, 19 nt, Homo sapiens
  misc_RNA (1)...(19): siRNA sense strand
gaaggagucccucuuucuc

SEQ ID NO: 2096041 - RNA, 19 nt, Homo sapiens
  misc_RNA (1)...(19): siRNA sense strand
uugcagagcuccggagaga

SEQ ID NO: 2096042 - RNA, 19 nt, Homo sapiens
  misc_RNA (1)...(19): siRNA sense strand
gcacucagcggaagacacu

SEQ ID NO: 2096043 - RNA, 19 nt, Homo sapiens
  misc_RNA (1)...(19): siRNA sense strand
caugauugauggaaugaag

SEQ ID NO: 2096044 - RNA, 19 nt, Homo sapiens
  misc_RNA (1)...(19): siRNA sense strand
caaaucuuacuucaccuuu

SEQ ID NO: 2096045 - RNA, 19 nt, Homo sapiens
  misc_RNA (1)...(19): siRNA sense strand
gacauuuccucugccuauu

SEQ ID NO: 2096046 - RNA, 19 nt, Homo sapiens
  misc_RNA (1)...(19): siRNA sense strand
gccgagaagcucuguuuga

SEQ ID NO: 2096047 - RNA, 19 nt, Homo sapiens
  misc_RNA (1)...(19): siRNA sense strand
caagcuggcucuggaagca

SEQ ID NO: 2096048 - RNA, 19 nt, Homo sapiens
  misc_RNA (1)...(19): siRNA sense strand
cgagaacuguacacugaca

SEQ ID NO: 2096049 - RNA, 19 nt, Homo sapiens
  misc_RNA (1)...(19): siRNA sense strand
gaagugggcgcuccaugag

SEQ ID NO: 2096050 - RNA, 19 nt, Homo sapiens
  misc_RNA (1)...(19): siRNA sense strand
ucuccagccucaucgaauu

SEQ ID NO: 2096051 - RNA, 19 nt, Homo sapiens
  misc_RNA (1)...(19): siRNA sense strand
gcaacaaagcugaaugaac

SEQ ID NO: 2096052 - RNA, 19 nt, Homo sapiens
  misc_RNA (1)...(19): siRNA sense strand
cgagaaggaagaaggcaaa

SEQ ID NO: 2096053 - RNA, 19 nt, Homo sapiens
  misc_RNA (1)...(19): siRNA sense strand
ccacuuugguuuaacuuuu

SEQ ID NO: 2096054 - RNA, 19 nt, Homo sapiens
  misc_RNA (1)...(19): siRNA sense strand
gcaggaugacagugaaguu

SEQ ID NO: 2096055 - RNA, 19 nt, Homo sapiens
  misc_RNA (1)...(19): siRNA sense strand
ucaguaugcagucggauuu

SEQ ID NO: 2096056 - RNA, 19 nt, Homo sapiens
  misc_RNA (1)...(19): siRNA sense strand
cgaagucuaccucaugaug

SEQ ID NO: 2096057 - RNA, 19 nt, Homo sapiens
  misc_RNA (1)...(19): siRNA sense strand
ccgcaccgaugcaggagaa

SEQ ID NO: 2096058 - RNA, 19 nt, Homo sapiens
  misc_RNA (1)...(19): siRNA sense strand
gggagaacuuaugaagcua

SEQ ID NO: 2096059 - RNA, 19 nt, Homo sapiens
  misc_RNA (1)...(19): siRNA sense strand
gcaagcauggugaagaaca

SEQ ID NO: 2096060 - RNA, 19 nt, Homo sapiens
  misc_RNA (1)...(19): siRNA sense strand
uuacauuucucgguucaau

SEQ ID NO: 2096061 - RNA, 19 nt, Homo sapiens
  misc_RNA (1)...(19): siRNA sense strand
ucgcgggacucauuugugu

SEQ ID NO: 2096062 - RNA, 19 nt, Homo sapiens
  misc_RNA (1)...(19): siRNA sense strand
gcuggauguuugcacuaaa

SEQ ID NO: 2096063 - RNA, 19 nt, Homo sapiens
  misc_RNA (1)...(19): siRNA sense strand
gcagagccuugcccagaac

SEQ ID NO: 2096064 - RNA, 19 nt, Homo sapiens
  misc_RNA (1)...(19): siRNA sense strand
gggccaccacuguacguua

SEQ ID NO: 2096065 - RNA, 19 nt, Homo sapiens
  misc_RNA (1)...(19): siRNA sense strand
gagaacuuaugaagcuagu

SEQ ID NO: 2096066 - RNA, 19 nt, Homo sapiens
  misc_RNA (1)...(19): siRNA sense strand
uaccgcaccuggcacaaga

SEQ ID NO: 2096067 - RNA, 19 nt, Homo sapiens
  misc_RNA (1)...(19): siRNA sense strand
gaaaacagcauugauuaca

SEQ ID NO: 2096068 - RNA, 19 nt, Homo sapiens
  misc_RNA (1)...(19): siRNA sense strand
cauuagcgacuccaucauu

SEQ ID NO: 2096069 - RNA, 19 nt, Homo sapiens
  misc_RNA (1)...(19): siRNA sense strand
uuccagggcucaucuguuc

SEQ ID NO: 2096070 - RNA, 19 nt, Homo sapiens
  misc_RNA (1)...(19): siRNA sense strand
uggcaucucuccacugucu

SEQ ID NO: 2096071 - RNA, 19 nt, Homo sapiens
  misc_RNA (1)...(19): siRNA sense strand
ccucagugcuagccagugu

SEQ ID NO: 2096072 - RNA, 19 nt, Homo sapiens
  misc_RNA (1)...(19): siRNA sense strand
agaagugggcgcuccauga

SEQ ID NO: 2096073 - RNA, 19 nt, Homo sapiens
  misc_RNA (1)...(19): siRNA sense strand
ugaggacggugcacagagu

SEQ ID NO: 2096074 - RNA, 19 nt, Homo sapiens
  misc_RNA (1)...(19): siRNA sense strand
gggaggacgggcucaagaa

SEQ ID NO: 2096075 - RNA, 19 nt, Homo sapiens
  misc_RNA (1)...(19): siRNA sense strand
gccagcaucugaacuccau

SEQ ID NO: 2096076 - RNA, 19 nt, Homo sapiens
  misc_RNA (1)...(19): siRNA sense strand
ucguggagcuacaucgaaa

SEQ ID NO: 2096077 - RNA, 19 nt, Homo sapiens
  misc_RNA (1)...(19): siRNA sense strand
gaggagagcagcggcacaa

SEQ ID NO: 2096078 - RNA, 19 nt, Homo sapiens
  misc_RNA (1)...(19): siRNA sense strand
gaaagugacugcgugucua

SEQ ID NO: 2096079 - RNA, 19 nt, Homo sapiens
  misc_RNA (1)...(19): siRNA sense strand
ggacacagacauccuccua

SEQ ID NO: 2096080 - RNA, 19 nt, Homo sapiens
  misc_RNA (1)...(19): siRNA sense strand
gaagaauaaucaggaaagu

SEQ ID NO: 2096081 - RNA, 19 nt, Homo sapiens
  misc_RNA (1)...(19): siRNA sense strand
agaauaaucaggaaaguga

SEQ ID NO: 2096082 - RNA, 19 nt, Homo sapiens
  misc_RNA (1)...(19): siRNA sense strand
gagaccgccuggacacaga

SEQ ID NO: 2096083 - RNA, 19 nt, Homo sapiens
  misc_RNA (1)...(19): siRNA sense strand
ggaaagugacugcgugucu

SEQ ID NO: 2096084 - RNA, 19 nt, Homo sapiens
  misc_RNA (1)...(19): siRNA sense strand
aauggucccugacuucuau

SEQ ID NO: 2096085 - RNA, 19 nt, Homo sapiens
  misc_RNA (1)...(19): siRNA sense strand
gucccugacuucuauguug

SEQ ID NO: 2096086 - RNA, 19 nt, Homo sapiens
  misc_RNA (1)...(19): siRNA sense strand
gugacugcgugucuaagaa

SEQ ID NO: 2096087 - RNA, 19 nt, Homo sapiens
  misc_RNA (1)...(19): siRNA sense strand
acaaccggcuuccgcuuga

SEQ ID NO: 2096088 - RNA, 19 nt, Homo sapiens
  misc_RNA (1)...(19): siRNA sense strand
cagcauagccgaccuuuug

SEQ ID NO: 2096089 - RNA, 19 nt, Homo sapiens
  misc_RNA (1)...(19): siRNA sense strand
gaaaauggucccugacuuc

SEQ ID NO: 2096090 - RNA, 19 nt, Homo sapiens
  misc_RNA (1)...(19): siRNA sense strand
uaggggaugugaagaauaa

SEQ ID NO: 2096091 - RNA, 19 nt, Homo sapiens
  misc_RNA (1)...(19): siRNA sense strand
aaagugacugcgugucuaa

SEQ ID NO: 2096092 - RNA, 19 nt, Homo sapiens
  misc_RNA (1)...(19): siRNA sense strand
gggaugugaagaauaauca

SEQ ID NO: 2096093 - RNA, 19 nt, Homo sapiens
  misc_RNA (1)...(19): siRNA sense strand
gacccgcacuucagcuaca

SEQ ID NO: 2096094 - RNA, 19 nt, Homo sapiens
  misc_RNA (1)...(19): siRNA sense strand
ugugaagaauaaucaggaa

SEQ ID NO: 2096095 - RNA, 19 nt, Homo sapiens
  misc_RNA (1)...(19): siRNA sense strand
ugaagaauaaucaggaaag

SEQ ID NO: 2096096 - RNA, 19 nt, Homo sapiens
  misc_RNA (1)...(19): siRNA sense strand
ucccugacuucuauguuga

SEQ ID NO: 2096097 - RNA, 19 nt, Homo sapiens
  misc_RNA (1)...(19): siRNA sense strand
gcucgugggcaccaacaug

SEQ ID NO: 2096098 - RNA, 19 nt, Homo sapiens
  misc_RNA (1)...(19): siRNA sense strand
cugcgugucuaagaagaaa

SEQ ID NO: 2096099 - RNA, 19 nt, Homo sapiens
  misc_RNA (1)...(19): siRNA sense strand
gacugcgugucuaagaaga

SEQ ID NO: 2096100 - RNA, 19 nt, Homo sapiens
  misc_RNA (1)...(19): siRNA sense strand
gugaagaauaaucaggaaa

SEQ ID NO: 2096101 - RNA, 19 nt, Homo sapiens
  misc_RNA (1)...(19): siRNA sense strand
uggacacgcugcuguucga

SEQ ID NO: 2096102 - RNA, 19 nt, Homo sapiens
  misc_RNA (1)...(19): siRNA sense strand
cgacugcgugucccaggaa

SEQ ID NO: 2096103 - RNA, 19 nt, Homo sapiens
  misc_RNA (1)...(19): siRNA sense strand
ggagaaugcuuuguguuua

SEQ ID NO: 2096104 - RNA, 19 nt, Homo sapiens
  misc_RNA (1)...(19): siRNA sense strand
gcacugaacugcaggaacu

SEQ ID NO: 2096105 - RNA, 19 nt, Homo sapiens
  misc_RNA (1)...(19): siRNA sense strand
gcagauggccaaugagaaa

SEQ ID NO: 2096106 - RNA, 19 nt, Homo sapiens
  misc_RNA (1)...(19): siRNA sense strand
agaaagcccugaagcagaa

SEQ ID NO: 2096107 - RNA, 19 nt, Homo sapiens
  misc_RNA (1)...(19): siRNA sense strand
gagaaugcuuuguguuuag

SEQ ID NO: 2096108 - RNA, 19 nt, Homo sapiens
  misc_RNA (1)...(19): siRNA sense strand
ggagugagagaaauaaguu

SEQ ID NO: 2096109 - RNA, 19 nt, Homo sapiens
  misc_RNA (1)...(19): siRNA sense strand
cugagaagcugcuggagaa

SEQ ID NO: 2096110 - RNA, 19 nt, Homo sapiens
  misc_RNA (1)...(19): siRNA sense strand
ucaagaccaugcagaagga

SEQ ID NO: 2096111 - RNA, 19 nt, Homo sapiens
  misc_RNA (1)...(19): siRNA sense strand
uccgagaacuuccucauug

SEQ ID NO: 2096112 - RNA, 19 nt, Homo sapiens
  misc_RNA (1)...(19): siRNA sense strand
acacgcaggugcccagcua

SEQ ID NO: 2096113 - RNA, 19 nt, Homo sapiens
  misc_RNA (1)...(19): siRNA sense strand
gacaugagccuacccucuu

SEQ ID NO: 2096114 - RNA, 19 nt, Homo sapiens
  misc_RNA (1)...(19): siRNA sense strand
cggagaaugcuuuguguuu

SEQ ID NO: 2096115 - RNA, 19 nt, Homo sapiens
  misc_RNA (1)...(19): siRNA sense strand
gggaccuggugaacaagua

SEQ ID NO: 2096116 - RNA, 19 nt, Homo sapiens
  misc_RNA (1)...(19): siRNA sense strand
aaaggcaguuuguacacuu

SEQ ID NO: 2096117 - RNA, 19 nt, Homo sapiens
  misc_RNA (1)...(19): siRNA sense strand
gccaggcgcucuacaucga

SEQ ID NO: 2096118 - RNA, 19 nt, Homo sapiens
  misc_RNA (1)...(19): siRNA sense strand
ggagguguguggugcuuac

SEQ ID NO: 2096119 - RNA, 19 nt, Homo sapiens
  misc_RNA (1)...(19): siRNA sense strand
ucagagacaucgcgaagac

SEQ ID NO: 2096120 - RNA, 19 nt, Homo sapiens
  misc_RNA (1)...(19): siRNA sense strand
gaggcaaacugggcuucuu

SEQ ID NO: 2096121 - RNA, 19 nt, Homo sapiens
  misc_RNA (1)...(19): siRNA sense strand
ugagagaaauaaguuugga

SEQ ID NO: 2096122 - RNA, 19 nt, Homo sapiens
  misc_RNA (1)...(19): siRNA sense strand
gguucuacuuccaguguga

SEQ ID NO: 2096123 - RNA, 19 nt, Homo sapiens
  misc_RNA (1)...(19): siRNA sense strand
caagaccgaguccauguuc

SEQ ID NO: 2096124 - RNA, 19 nt, Homo sapiens
  misc_RNA (1)...(19): siRNA sense strand
gacuggagugagagaaaua

SEQ ID NO: 2096125 - RNA, 19 nt, Homo sapiens
  misc_RNA (1)...(19): siRNA sense strand
gaccggagaaugcuuugug

SEQ ID NO: 2096126 - RNA, 19 nt, Homo sapiens
  misc_RNA (1)...(19): siRNA sense strand
gcaagaucgugggcaagca

SEQ ID NO: 2096127 - RNA, 19 nt, Homo sapiens
  misc_RNA (1)...(19): siRNA sense strand
ccaaugagaaagcccugaa

SEQ ID NO: 2096128 - RNA, 19 nt, Homo sapiens
  misc_RNA (1)...(19): siRNA sense strand
acaugagccuacccucuug

SEQ ID NO: 2096129 - RNA, 19 nt, Homo sapiens
  misc_RNA (1)...(19): siRNA sense strand
caacugcuucguggacaaa

SEQ ID NO: 2096130 - RNA, 19 nt, Homo sapiens
  misc_RNA (1)...(19): siRNA sense strand
ugagggagaugagagacau

SEQ ID NO: 2096131 - RNA, 19 nt, Homo sapiens
  misc_RNA (1)...(19): siRNA sense strand
agagcuuccuggccuuuga

SEQ ID NO: 2096132 - RNA, 19 nt, Homo sapiens
  misc_RNA (1)...(19): siRNA sense strand
agacuggagugagagaaau

SEQ ID NO: 2096133 - RNA, 19 nt, Homo sapiens
  misc_RNA (1)...(19): siRNA sense strand
gagugagagaaauaaguuu

SEQ ID NO: 2096134 - RNA, 19 nt, Homo sapiens
  misc_RNA (1)...(19): siRNA sense strand
gcacguucgucagagacau

SEQ ID NO: 2096135 - RNA, 19 nt, Homo sapiens
  misc_RNA (1)...(19): siRNA sense strand
cagacuggagugagagaaa

SEQ ID NO: 2096136 - RNA, 19 nt, Homo sapiens
  misc_RNA (1)...(19): siRNA sense strand
ucaucaagaccaugcagaa

SEQ ID NO: 2096137 - RNA, 19 nt, Homo sapiens
  misc_RNA (1)...(19): siRNA sense strand
ccuacccucuugcucauca

SEQ ID NO: 2096138 - RNA, 19 nt, Homo sapiens
  misc_RNA (1)...(19): siRNA sense strand
cgacaucgugggcaagauc

SEQ ID NO: 2096139 - RNA, 19 nt, Homo sapiens
  misc_RNA (1)...(19): siRNA sense strand
ccaagaccgaguccauguu

SEQ ID NO: 2096140 - RNA, 19 nt, Homo sapiens
  misc_RNA (1)...(19): siRNA sense strand
acgaguggguggugaucaa

SEQ ID NO: 2096141 - RNA, 19 nt, Homo sapiens
  misc_RNA (1)...(19): siRNA sense strand
gagaagcugcuggagaaag

SEQ ID NO: 2096142 - RNA, 19 nt, Homo sapiens
  misc_RNA (1)...(19): siRNA sense strand
acacuuggccguccaugca

SEQ ID NO: 2096143 - RNA, 19 nt, Homo sapiens
  misc_RNA (1)...(19): siRNA sense strand
gaagcagaagaguguguca

SEQ ID NO: 2096144 - RNA, 19 nt, Homo sapiens
  misc_RNA (1)...(19): siRNA sense strand
uccugcagauggccaauga

SEQ ID NO: 2096145 - RNA, 19 nt, Homo sapiens
  misc_RNA (1)...(19): siRNA sense strand
gcccagcuacugccugaau

SEQ ID NO: 2096146 - RNA, 19 nt, Homo sapiens
  misc_RNA (1)...(19): siRNA sense strand
agauccagcuccugcagau

SEQ ID NO: 2096147 - RNA, 19 nt, Homo sapiens
  misc_RNA (1)...(19): siRNA sense strand
ucaaguucuuccacaaggu

SEQ ID NO: 2096148 - RNA, 19 nt, Homo sapiens
  misc_RNA (1)...(19): siRNA sense strand
agaagcugcuggagaaagc

SEQ ID NO: 2096149 - RNA, 19 nt, Homo sapiens
  misc_RNA (1)...(19): siRNA sense strand
aggcaaacugggcuucuuu

SEQ ID NO: 2096150 - RNA, 19 nt, Homo sapiens
  misc_RNA (1)...(19): siRNA sense strand
ggucagcgaucccauccau

SEQ ID NO: 2096151 - RNA, 19 nt, Homo sapiens
  misc_RNA (1)...(19): siRNA sense strand
caacucagagggcaauguu

SEQ ID NO: 2096152 - RNA, 19 nt, Homo sapiens
  misc_RNA (1)...(19): siRNA sense strand
acaacuccaucaaggugua

SEQ ID NO: 2096153 - RNA, 19 nt, Homo sapiens
  misc_RNA (1)...(19): siRNA sense strand
gggcaucugcuccaacuca

SEQ ID NO: 2096154 - RNA, 19 nt, Homo sapiens
  misc_RNA (1)...(19): siRNA sense strand
gagcuggguucuaguuucc

SEQ ID NO: 2096155 - RNA, 19 nt, Homo sapiens
  misc_RNA (1)...(19): siRNA sense strand
guucuaguuuccaacaaca

SEQ ID NO: 2096156 - RNA, 19 nt, Homo sapiens
  misc_RNA (1)...(19): siRNA sense strand
ccaaggacaacuccaucaa

SEQ ID NO: 2096157 - RNA, 19 nt, Homo sapiens
  misc_RNA (1)...(19): siRNA sense strand
gcuggguucuaguuuccaa

SEQ ID NO: 2096158 - RNA, 19 nt, Homo sapiens
  misc_RNA (1)...(19): siRNA sense strand
gcgggcaucugcuccaacu

SEQ ID NO: 2096159 - RNA, 19 nt, Homo sapiens
  misc_RNA (1)...(19): siRNA sense strand
agagcuggguucuaguuuc

SEQ ID NO: 2096160 - RNA, 19 nt, Homo sapiens
  misc_RNA (1)...(19): siRNA sense strand
caaggacaacuccaucaag

SEQ ID NO: 2096161 - RNA, 19 nt, Homo sapiens
  misc_RNA (1)...(19): siRNA sense strand
ccagaggacguggcuguga

SEQ ID NO: 2096162 - RNA, 19 nt, Homo sapiens
  misc_RNA (1)...(19): siRNA sense strand
acucagagggcaauguuau

SEQ ID NO: 2096163 - RNA, 19 nt, Homo sapiens
  misc_RNA (1)...(19): siRNA sense strand
gguucuaguuuccaacaac

SEQ ID NO: 2096164 - RNA, 19 nt, Homo sapiens
  misc_RNA (1)...(19): siRNA sense strand
gccaaggacaacuccauca

SEQ ID NO: 2096165 - RNA, 19 nt, Homo sapiens
  misc_RNA (1)...(19): siRNA sense strand
gaaggaagaugcagccaau

SEQ ID NO: 2096166 - RNA, 19 nt, Homo sapiens
  misc_RNA (1)...(19): siRNA sense strand
gaagaugcagccaauaauu

SEQ ID NO: 2096167 - RNA, 19 nt, Homo sapiens
  misc_RNA (1)...(19): siRNA sense strand
uaaguucgaucucauguau

SEQ ID NO: 2096168 - RNA, 19 nt, Homo sapiens
  misc_RNA (1)...(19): siRNA sense strand
gaacuguacugccuugaac

SEQ ID NO: 2096169 - RNA, 19 nt, Homo sapiens
  misc_RNA (1)...(19): siRNA sense strand
ggccaaaugccaagugaua

SEQ ID NO: 2096170 - RNA, 19 nt, Homo sapiens
  misc_RNA (1)...(19): siRNA sense strand
ccaaucaaauggucaagug

SEQ ID NO: 2096171 - RNA, 19 nt, Homo sapiens
  misc_RNA (1)...(19): siRNA sense strand
gaccauaaguucgaucuca

SEQ ID NO: 2096172 - RNA, 19 nt, Homo sapiens
  misc_RNA (1)...(19): siRNA sense strand
gcaagaaguccaagcuaga

SEQ ID NO: 2096173 - RNA, 19 nt, Homo sapiens
  misc_RNA (1)...(19): siRNA sense strand
caaggagauuguugaccua

SEQ ID NO: 2096174 - RNA, 19 nt, Homo sapiens
  misc_RNA (1)...(19): siRNA sense strand
acaaugaagccaucuauga

SEQ ID NO: 2096175 - RNA, 19 nt, Homo sapiens
  misc_RNA (1)...(19): siRNA sense strand
aagaugcagccaauaauua

SEQ ID NO: 2096176 - RNA, 19 nt, Homo sapiens
  misc_RNA (1)...(19): siRNA sense strand
ggagauuguugaccuaguc

SEQ ID NO: 2096177 - RNA, 19 nt, Homo sapiens
  misc_RNA (1)...(19): siRNA sense strand
ucaacacguucuucaguga

SEQ ID NO: 2096178 - RNA, 19 nt, Homo sapiens
  misc_RNA (1)...(19): siRNA sense strand
ccaaaugccaagugauaaa

SEQ ID NO: 2096179 - RNA, 19 nt, Homo sapiens
  misc_RNA (1)...(19): siRNA sense strand
ggauuuaaggugggcauua

SEQ ID NO: 2096180 - RNA, 19 nt, Homo sapiens
  misc_RNA (1)...(19): siRNA sense strand
ggaagaugcagccaauaau

SEQ ID NO: 2096181 - RNA, 19 nt, Homo sapiens
  misc_RNA (1)...(19): siRNA sense strand
ggcgcaaccuggacauuga

SEQ ID NO: 2096182 - RNA, 19 nt, Homo sapiens
  misc_RNA (1)...(19): siRNA sense strand
guacugccuugaacaugga

SEQ ID NO: 2096183 - RNA, 19 nt, Homo sapiens
  misc_RNA (1)...(19): siRNA sense strand
ugacggaauuccagaccaa

SEQ ID NO: 2096184 - RNA, 19 nt, Homo sapiens
  misc_RNA (1)...(19): siRNA sense strand
guucacagcgcgaguguau

SEQ ID NO: 2096185 - RNA, 19 nt, Homo sapiens
  misc_RNA (1)...(19): siRNA sense strand
ggaacuguacugccuugaa

SEQ ID NO: 2096186 - RNA, 19 nt, Homo sapiens
  misc_RNA (1)...(19): siRNA sense strand
ucgcaucucugcucaugga

SEQ ID NO: 2096187 - RNA, 19 nt, Homo sapiens
  misc_RNA (1)...(19): siRNA sense strand
cgacaaugaagccaucuau

SEQ ID NO: 2096188 - RNA, 19 nt, Homo sapiens
  misc_RNA (1)...(19): siRNA sense strand
aggaagaugcagccaauaa

SEQ ID NO: 2096189 - RNA, 19 nt, Homo sapiens
  misc_RNA (1)...(19): siRNA sense strand
cugcagggcuuccucaucu

SEQ ID NO: 2096190 - RNA, 19 nt, Homo sapiens
  misc_RNA (1)...(19): siRNA sense strand
guucgcaucucugcucaug

SEQ ID NO: 2096191 - RNA, 19 nt, Homo sapiens
  misc_RNA (1)...(19): siRNA sense strand
gggccuuugugcacuggua

SEQ ID NO: 2096192 - RNA, 19 nt, Homo sapiens
  misc_RNA (1)...(19): siRNA sense strand
gcucuggguucgcaucucu

SEQ ID NO: 2096193 - RNA, 19 nt, Homo sapiens
  misc_RNA (1)...(19): siRNA sense strand
gccaaaugccaagugauaa

SEQ ID NO: 2096194 - RNA, 19 nt, Homo sapiens
  misc_RNA (1)...(19): siRNA sense strand
cagaucguguccuccauca

SEQ ID NO: 2096195 - RNA, 19 nt, Homo sapiens
  misc_RNA (1)...(19): siRNA sense strand
gaagaggugggcguggauu

SEQ ID NO: 2096196 - RNA, 19 nt, Homo sapiens
  misc_RNA (1)...(19): siRNA sense strand
cgagccagccaaucaaaug

SEQ ID NO: 2096197 - RNA, 19 nt, Homo sapiens
  misc_RNA (1)...(19): siRNA sense strand
ucacagcgcgaguguaucu

SEQ ID NO: 2096198 - RNA, 19 nt, Homo sapiens
  misc_RNA (1)...(19): siRNA sense strand
ccacguacaccaaccucaa

SEQ ID NO: 2096199 - RNA, 19 nt, Homo sapiens
  misc_RNA (1)...(19): siRNA sense strand
gcgaguguaucucuaucca

SEQ ID NO: 2096200 - RNA, 19 nt, Homo sapiens
  misc_RNA (1)...(19): siRNA sense strand
ucagcccgauggccaaaug

SEQ ID NO: 2096201 - RNA, 19 nt, Homo sapiens
  misc_RNA (1)...(19): siRNA sense strand
cagcgcgaguguaucucua

SEQ ID NO: 2096202 - RNA, 19 nt, Homo sapiens
  misc_RNA (1)...(19): siRNA sense strand
gcagggcuuccucaucuuc

SEQ ID NO: 2096203 - RNA, 19 nt, Homo sapiens
  misc_RNA (1)...(19): siRNA sense strand
aauguggacuugacggaau

SEQ ID NO: 2096204 - RNA, 19 nt, Homo sapiens
  misc_RNA (1)...(19): siRNA sense strand
gacaaugaagccaucuaug

SEQ ID NO: 2096205 - RNA, 19 nt, Homo sapiens
  misc_RNA (1)...(19): siRNA sense strand
gcccagagcaguguuugug

SEQ ID NO: 2096206 - RNA, 19 nt, Homo sapiens
  misc_RNA (1)...(19): siRNA sense strand
caaugaagccaucuaugac

SEQ ID NO: 2096207 - RNA, 19 nt, Homo sapiens
  misc_RNA (1)...(19): siRNA sense strand
gcgcgaguguaucucuauc

SEQ ID NO: 2096208 - RNA, 19 nt, Homo sapiens
  misc_RNA (1)...(19): siRNA sense strand
gcugaucaccgggaaggaa

SEQ ID NO: 2096209 - RNA, 19 nt, Homo sapiens
  misc_RNA (1)...(19): siRNA sense strand
ccucaucuuccacagcuuu

SEQ ID NO: 2096210 - RNA, 19 nt, Homo sapiens
  misc_RNA (1)...(19): siRNA sense strand
gcuucgagccagccaauca

SEQ ID NO: 2096211 - RNA, 19 nt, Homo sapiens
  misc_RNA (1)...(19): siRNA sense strand
ggaccuacaggcagcucuu

SEQ ID NO: 2096212 - RNA, 19 nt, Homo sapiens
  misc_RNA (1)...(19): siRNA sense strand
aucaaauggucaaguguga

SEQ ID NO: 2096213 - RNA, 19 nt, Homo sapiens
  misc_RNA (1)...(19): siRNA sense strand
gcgcaaccuggacauugaa

SEQ ID NO: 2096214 - RNA, 19 nt, Homo sapiens
  misc_RNA (1)...(19): siRNA sense strand
uaaggugggcauuaacuac

SEQ ID NO: 2096215 - RNA, 19 nt, Homo sapiens
  misc_RNA (1)...(19): siRNA sense strand
ccauaaguucgaucucaug

SEQ ID NO: 2096216 - RNA, 19 nt, Homo sapiens
  misc_RNA (1)...(19): siRNA sense strand
cggcaagaaguccaagcua

SEQ ID NO: 2096217 - RNA, 19 nt, Homo sapiens
  misc_RNA (1)...(19): siRNA sense strand
ggcccugaauguggacuug

SEQ ID NO: 2096218 - RNA, 19 nt, Homo sapiens
  misc_RNA (1)...(19): siRNA sense strand
gaacugugguugcaaauga

SEQ ID NO: 2096219 - RNA, 19 nt, Homo sapiens
  misc_RNA (1)...(19): siRNA sense strand
gcaguagccuguucugaua

SEQ ID NO: 2096220 - RNA, 19 nt, Homo sapiens
  misc_RNA (1)...(19): siRNA sense strand
gaggaagucuugugaaauu

SEQ ID NO: 2096221 - RNA, 19 nt, Homo sapiens
  misc_RNA (1)...(19): siRNA sense strand
gaauuaaccugcauugaug

SEQ ID NO: 2096222 - RNA, 19 nt, Homo sapiens
  misc_RNA (1)...(19): siRNA sense strand
gggaagaaauugcagcaua

SEQ ID NO: 2096223 - RNA, 19 nt, Homo sapiens
  misc_RNA (1)...(19): siRNA sense strand
caaaugguuuccuggauua

SEQ ID NO: 2096224 - RNA, 19 nt, Homo sapiens
  misc_RNA (1)...(19): siRNA sense strand
gcaagucuuuggaacaaua

SEQ ID NO: 2096225 - RNA, 19 nt, Homo sapiens
  misc_RNA (1)...(19): siRNA sense strand
caacaggccuccaaaggaa

SEQ ID NO: 2096226 - RNA, 19 nt, Homo sapiens
  misc_RNA (1)...(19): siRNA sense strand
gaagggcuauacagagaua

SEQ ID NO: 2096227 - RNA, 19 nt, Homo sapiens
  misc_RNA (1)...(19): siRNA sense strand
gagaggaagucuugugaaa

SEQ ID NO: 2096228 - RNA, 19 nt, Homo sapiens
  misc_RNA (1)...(19): siRNA sense strand
gagaagggcuauacagaga

SEQ ID NO: 2096229 - RNA, 19 nt, Homo sapiens
  misc_RNA (1)...(19): siRNA sense strand
gaaagaggccugcauuguu

SEQ ID NO: 2096230 - RNA, 19 nt, Homo sapiens
  misc_RNA (1)...(19): siRNA sense strand
gagcaucguuuguguaaug

SEQ ID NO: 2096231 - RNA, 19 nt, Homo sapiens
  misc_RNA (1)...(19): siRNA sense strand
caacuggucugcauguaaa

SEQ ID NO: 2096232 - RNA, 19 nt, Homo sapiens
  misc_RNA (1)...(19): siRNA sense strand
ggaagaggaauauacauuu

SEQ ID NO: 2096233 - RNA, 19 nt, Homo sapiens
  misc_RNA (1)...(19): siRNA sense strand
caagauuccuucccauuga

SEQ ID NO: 2096234 - RNA, 19 nt, Homo sapiens
  misc_RNA (1)...(19): siRNA sense strand
gaauuuauaucccaaccuu

SEQ ID NO: 2096235 - RNA, 19 nt, Homo sapiens
  misc_RNA (1)...(19): siRNA sense strand
ggaagaaauugcagcauag

SEQ ID NO: 2096236 - RNA, 19 nt, Homo sapiens
  misc_RNA (1)...(19): siRNA sense strand
ccaggagacugccauuuaa

SEQ ID NO: 2096237 - RNA, 19 nt, Homo sapiens
  misc_RNA (1)...(19): siRNA sense strand
ggaaugcccagauaccuua

SEQ ID NO: 2096238 - RNA, 19 nt, Homo sapiens
  misc_RNA (1)...(19): siRNA sense strand
uguaguaucugaguucuua

SEQ ID NO: 2096239 - RNA, 19 nt, Homo sapiens
  misc_RNA (1)...(19): siRNA sense strand
cagcagcucugguuacauu

SEQ ID NO: 2096240 - RNA, 19 nt, Homo sapiens
  misc_RNA (1)...(19): siRNA sense strand
gcagaaagaaggagaaaug

SEQ ID NO: 2096241 - RNA, 19 nt, Homo sapiens
  misc_RNA (1)...(19): siRNA sense strand
ccauguugcugaaauuaua

SEQ ID NO: 2096242 - RNA, 19 nt, Homo sapiens
  misc_RNA (1)...(19): siRNA sense strand
uagguacacugaugaauaa

SEQ ID NO: 2096243 - RNA, 19 nt, Homo sapiens
  misc_RNA (1)...(19): siRNA sense strand
ugaaauaugcgaacacuuu

SEQ ID NO: 2096244 - RNA, 19 nt, Homo sapiens
  misc_RNA (1)...(19): siRNA sense strand
gaagaagcuuugagacugu

SEQ ID NO: 2096245 - RNA, 19 nt, Homo sapiens
  misc_RNA (1)...(19): siRNA sense strand
gcaaagauccaauuguuuc

SEQ ID NO: 2096246 - RNA, 19 nt, Homo sapiens
  misc_RNA (1)...(19): siRNA sense strand
aaagaggccugcauuguug

SEQ ID NO: 2096247 - RNA, 19 nt, Homo sapiens
  misc_RNA (1)...(19): siRNA sense strand
gauauuaccucaagcaaaa

SEQ ID NO: 2096248 - RNA, 19 nt, Homo sapiens
  misc_RNA (1)...(19): siRNA sense strand
guacaggaggcaaauguua

SEQ ID NO: 2096249 - RNA, 19 nt, Homo sapiens
  misc_RNA (1)...(19): siRNA sense strand
uaacaguacuggacaggaa

SEQ ID NO: 2096250 - RNA, 19 nt, Homo sapiens
  misc_RNA (1)...(19): siRNA sense strand
cggcaaagauccaauuguu

SEQ ID NO: 2096251 - RNA, 19 nt, Homo sapiens
  misc_RNA (1)...(19): siRNA sense strand
cggacucgauuuaucauua

SEQ ID NO: 2096252 - RNA, 19 nt, Homo sapiens
  misc_RNA (1)...(19): siRNA sense strand
cagcagaaaugauggaaug

SEQ ID NO: 2096253 - RNA, 19 nt, Homo sapiens
  misc_RNA (1)...(19): siRNA sense strand
ggaguuugcucuuauugau

SEQ ID NO: 2096254 - RNA, 19 nt, Homo sapiens
  misc_RNA (1)...(19): siRNA sense strand
ucacugaacucaaggacuu

SEQ ID NO: 2096255 - RNA, 19 nt, Homo sapiens
  misc_RNA (1)...(19): siRNA sense strand
ggaagaauggauagaaauu

SEQ ID NO: 2096256 - RNA, 19 nt, Homo sapiens
  misc_RNA (1)...(19): siRNA sense strand
gagaaaaccugcccaguga

SEQ ID NO: 2096257 - RNA, 19 nt, Homo sapiens
  misc_RNA (1)...(19): siRNA sense strand
caaacuggaucucaagaau

SEQ ID NO: 2096258 - RNA, 19 nt, Homo sapiens
  misc_RNA (1)...(19): siRNA sense strand
uauggaaacuggucagauu

SEQ ID NO: 2096259 - RNA, 19 nt, Homo sapiens
  misc_RNA (1)...(19): siRNA sense strand
guaccaggcucagaggaua

SEQ ID NO: 2096260 - RNA, 19 nt, Homo sapiens
  misc_RNA (1)...(19): siRNA sense strand
gcacaugccagcugaguga

SEQ ID NO: 2096261 - RNA, 19 nt, Homo sapiens
  misc_RNA (1)...(19): siRNA sense strand
ugaaguauguggaccagaa

SEQ ID NO: 2096262 - RNA, 19 nt, Homo sapiens
  misc_RNA (1)...(19): siRNA sense strand
ucaaaugguuuccuggauu

SEQ ID NO: 2096263 - RNA, 19 nt, Homo sapiens
  misc_RNA (1)...(19): siRNA sense strand
ggacucgauuuaucauuau

SEQ ID NO: 2096264 - RNA, 19 nt, Homo sapiens
  misc_RNA (1)...(19): siRNA sense strand
gcagaaucauaacugguuu

SEQ ID NO: 2096265 - RNA, 19 nt, Homo sapiens
  misc_RNA (1)...(19): siRNA sense strand
ggccaggaaugcccagaua

SEQ ID NO: 2096266 - RNA, 19 nt, Homo sapiens
  misc_RNA (1)...(19): siRNA sense strand
gaaagaaugccaagucucu

SEQ ID NO: 2096267 - RNA, 19 nt, Homo sapiens
  misc_RNA (1)...(19): siRNA sense strand
ggaaagggguuacaaacaa

SEQ ID NO: 2096268 - RNA, 19 nt, Homo sapiens
  misc_RNA (1)...(19): siRNA sense strand
guagguggcugugaaguau

SEQ ID NO: 2096269 - RNA, 19 nt, Homo sapiens
  misc_RNA (1)...(19): siRNA sense strand
ggaauuguauacugaugga

SEQ ID NO: 2096270 - RNA, 19 nt, Homo sapiens
  misc_RNA (1)...(19): siRNA sense strand
caguaaacaugguaugauu

SEQ ID NO: 2096271 - RNA, 19 nt, Homo sapiens
  misc_RNA (1)...(19): siRNA sense strand
ccaaauggcuaaaagaaaa

SEQ ID NO: 2096272 - RNA, 19 nt, Homo sapiens
  misc_RNA (1)...(19): siRNA sense strand
caagucaccugucuaacug

SEQ ID NO: 2096273 - RNA, 19 nt, Homo sapiens
  misc_RNA (1)...(19): siRNA sense strand
gaccaucacugaacucaag

SEQ ID NO: 2096274 - RNA, 19 nt, Homo sapiens
  misc_RNA (1)...(19): siRNA sense strand
caagggaugugggaagaaa

SEQ ID NO: 2096275 - RNA, 19 nt, Homo sapiens
  misc_RNA (1)...(19): siRNA sense strand
gaacacuggucuucaugca

SEQ ID NO: 2096276 - RNA, 19 nt, Homo sapiens
  misc_RNA (1)...(19): siRNA sense strand
gcccagauaccuuauauga

SEQ ID NO: 2096277 - RNA, 19 nt, Homo sapiens
  misc_RNA (1)...(19): siRNA sense strand
aaagaaauccuuccauuag

SEQ ID NO: 2096278 - RNA, 19 nt, Homo sapiens
  misc_RNA (1)...(19): siRNA sense strand
guggagcacaugugaauua

SEQ ID NO: 2096279 - RNA, 19 nt, Homo sapiens
  misc_RNA (1)...(19): siRNA sense strand
gcaaaugcccacagucaug

SEQ ID NO: 2096280 - RNA, 19 nt, Homo sapiens
  misc_RNA (1)...(19): siRNA sense strand
acacuggucuucaugcaaa

SEQ ID NO: 2096281 - RNA, 19 nt, Homo sapiens
  misc_RNA (1)...(19): siRNA sense strand
gcagcaaugucccagguau

SEQ ID NO: 2096282 - RNA, 19 nt, Homo sapiens
  misc_RNA (1)...(19): siRNA sense strand
gcaacaggccuccaaagga

SEQ ID NO: 2096283 - RNA, 19 nt, Homo sapiens
  misc_RNA (1)...(19): siRNA sense strand
gaaauaugcgaacacuuug

SEQ ID NO: 2096284 - RNA, 19 nt, Homo sapiens
  misc_RNA (1)...(19): siRNA sense strand
guucagauccgcagccuuu

SEQ ID NO: 2096285 - RNA, 19 nt, Homo sapiens
  misc_RNA (1)...(19): siRNA sense strand
gcaacuggucugcauguaa

SEQ ID NO: 2096286 - RNA, 19 nt, Homo sapiens
  misc_RNA (1)...(19): siRNA sense strand
gagcaaaugcccacaguca

SEQ ID NO: 2096287 - RNA, 19 nt, Homo sapiens
  misc_RNA (1)...(19): siRNA sense strand
guagaacacuggucuucau

SEQ ID NO: 2096288 - RNA, 19 nt, Homo sapiens
  misc_RNA (1)...(19): siRNA sense strand
ucaagaaucagguacauga

SEQ ID NO: 2096289 - RNA, 19 nt, Homo sapiens
  misc_RNA (1)...(19): siRNA sense strand
ggagaaggccugcgcuuuc

SEQ ID NO: 2096290 - RNA, 19 nt, Homo sapiens
  misc_RNA (1)...(19): siRNA sense strand
cagacugccucaucuuaaa

SEQ ID NO: 2096291 - RNA, 19 nt, Homo sapiens
  misc_RNA (1)...(19): siRNA sense strand
cgagucaccuuuaaacauc

SEQ ID NO: 2096292 - RNA, 19 nt, Homo sapiens
  misc_RNA (1)...(19): siRNA sense strand
aaugugagcagcauaauuu

SEQ ID NO: 2096293 - RNA, 19 nt, Homo sapiens
  misc_RNA (1)...(19): siRNA sense strand
cccauuugauugcaaguua

SEQ ID NO: 2096294 - RNA, 19 nt, Homo sapiens
  misc_RNA (1)...(19): siRNA sense strand
gaacagggaguuugcucuu

SEQ ID NO: 2096295 - RNA, 19 nt, Homo sapiens
  misc_RNA (1)...(19): siRNA sense strand
gggauuguguaguaucuga

SEQ ID NO: 2096296 - RNA, 19 nt, Homo sapiens
  misc_RNA (1)...(19): siRNA sense strand
ucccaguccuguucaaaua

SEQ ID NO: 2096297 - RNA, 19 nt, Homo sapiens
  misc_RNA (1)...(19): siRNA sense strand
ggaguguccugaacuucuu

SEQ ID NO: 2096298 - RNA, 19 nt, Homo sapiens
  misc_RNA (1)...(19): siRNA sense strand
gggaagaggaauauacauu

SEQ ID NO: 2096299 - RNA, 19 nt, Homo sapiens
  misc_RNA (1)...(19): siRNA sense strand
ccucucagcucugcaauau

SEQ ID NO: 2096300 - RNA, 19 nt, Homo sapiens
  misc_RNA (1)...(19): siRNA sense strand
gaccuuagccuacgaugga

SEQ ID NO: 2096301 - RNA, 19 nt, Homo sapiens
  misc_RNA (1)...(19): siRNA sense strand
caaauguuaucacuacaca

SEQ ID NO: 2096302 - RNA, 19 nt, Homo sapiens
  misc_RNA (1)...(19): siRNA sense strand
ccaagagcaucguuugugu

SEQ ID NO: 2096303 - RNA, 19 nt, Homo sapiens
  misc_RNA (1)...(19): siRNA sense strand
ugaagcagcuguguucugu

SEQ ID NO: 2096304 - RNA, 19 nt, Homo sapiens
  misc_RNA (1)...(19): siRNA sense strand
caaaugaaauaugcgaaca

SEQ ID NO: 2096305 - RNA, 19 nt, Homo sapiens
  misc_RNA (1)...(19): siRNA sense strand
gagccggacucgauuuauc

SEQ ID NO: 2096306 - RNA, 19 nt, Homo sapiens
  misc_RNA (1)...(19): siRNA sense strand
cgaaugagccggacucgau

SEQ ID NO: 2096307 - RNA, 19 nt, Homo sapiens
  misc_RNA (1)...(19): siRNA sense strand
caguucaucuuguggaauu

SEQ ID NO: 2096308 - RNA, 19 nt, Homo sapiens
  misc_RNA (1)...(19): siRNA sense strand
gaacuauguccuugugaug

SEQ ID NO: 2096309 - RNA, 19 nt, Homo sapiens
  misc_RNA (1)...(19): siRNA sense strand
gcaggaaaugccacaguaa

SEQ ID NO: 2096310 - RNA, 19 nt, Homo sapiens
  misc_RNA (1)...(19): siRNA sense strand
gaaguuguuuccgaguuug

SEQ ID NO: 2096311 - RNA, 19 nt, Homo sapiens
  misc_RNA (1)...(19): siRNA sense strand
gcuuguggcuguugguuau

SEQ ID NO: 2096312 - RNA, 19 nt, Homo sapiens
  misc_RNA (1)...(19): siRNA sense strand
ccaguccuguucaaauaaa

SEQ ID NO: 2096313 - RNA, 19 nt, Homo sapiens
  misc_RNA (1)...(19): siRNA sense strand
gauggagacuuagacaugu

SEQ ID NO: 2096314 - RNA, 19 nt, Homo sapiens
  misc_RNA (1)...(19): siRNA sense strand
aaaccuuucuccuacugua

SEQ ID NO: 2096315 - RNA, 19 nt, Homo sapiens
  misc_RNA (1)...(19): siRNA sense strand
gaaacacgcccuuguacag

SEQ ID NO: 2096316 - RNA, 19 nt, Homo sapiens
  misc_RNA (1)...(19): siRNA sense strand
agacugccauuuaacagaa

SEQ ID NO: 2096317 - RNA, 19 nt, Homo sapiens
  misc_RNA (1)...(19): siRNA sense strand
agaaguuguuuccgaguuu

SEQ ID NO: 2096318 - RNA, 19 nt, Homo sapiens
  misc_RNA (1)...(19): siRNA sense strand
gcaaggagcuucauacauc

SEQ ID NO: 2096319 - RNA, 19 nt, Homo sapiens
  misc_RNA (1)...(19): siRNA sense strand
caggccaucuuuaccauuu

SEQ ID NO: 2096320 - RNA, 19 nt, Homo sapiens
  misc_RNA (1)...(19): siRNA sense strand
ucucagaccuggccuacau

SEQ ID NO: 2096321 - RNA, 19 nt, Homo sapiens
  misc_RNA (1)...(19): siRNA sense strand
ccagguaccaccacauuga

SEQ ID NO: 2096322 - RNA, 19 nt, Homo sapiens
  misc_RNA (1)...(19): siRNA sense strand
gaccagguaccaccacauu

SEQ ID NO: 2096323 - RNA, 19 nt, Homo sapiens
  misc_RNA (1)...(19): siRNA sense strand
gagcaaggagcuucauaca

SEQ ID NO: 2096324 - RNA, 19 nt, Homo sapiens
  misc_RNA (1)...(19): siRNA sense strand
ccgcauggccuguggcauu

SEQ ID NO: 2096325 - RNA, 19 nt, Homo sapiens
  misc_RNA (1)...(19): siRNA sense strand
ggaaggcaguggcccucau

SEQ ID NO: 2096326 - RNA, 19 nt, Homo sapiens
  misc_RNA (1)...(19): siRNA sense strand
cuaacauccugcucucaga

SEQ ID NO: 2096327 - RNA, 19 nt, Homo sapiens
  misc_RNA (1)...(19): siRNA sense strand
ccuguggcauucucacuga

SEQ ID NO: 2096328 - RNA, 19 nt, Homo sapiens
  misc_RNA (1)...(19): siRNA sense strand
gauguggccuccuggucau

SEQ ID NO: 2096329 - RNA, 19 nt, Homo sapiens
  misc_RNA (1)...(19): siRNA sense strand
ggagcaaggagcuucauac

SEQ ID NO: 2096330 - RNA, 19 nt, Homo sapiens
  misc_RNA (1)...(19): siRNA sense strand
uuauuuggcucagcaagug

SEQ ID NO: 2096331 - RNA, 19 nt, Homo sapiens
  misc_RNA (1)...(19): siRNA sense strand
ggaggcaccaggccaucuu

SEQ ID NO: 2096332 - RNA, 19 nt, Homo sapiens
  misc_RNA (1)...(19): siRNA sense strand
cauggcuccuggcagcuaa

SEQ ID NO: 2096333 - RNA, 19 nt, Homo sapiens
  misc_RNA (1)...(19): siRNA sense strand
gaaggcaguggcccucauc

SEQ ID NO: 2096334 - RNA, 19 nt, Homo sapiens
  misc_RNA (1)...(19): siRNA sense strand
gcacaggggugguguucuc

SEQ ID NO: 2096335 - RNA, 19 nt, Homo sapiens
  misc_RNA (1)...(19): siRNA sense strand
cagugcugaucacauugua

SEQ ID NO: 2096336 - RNA, 19 nt, Homo sapiens
  misc_RNA (1)...(19): siRNA sense strand
ucauacauccuaccaccaa

SEQ ID NO: 2096337 - RNA, 19 nt, Homo sapiens
  misc_RNA (1)...(19): siRNA sense strand
acaccuaccuggcagucau

SEQ ID NO: 2096338 - RNA, 19 nt, Homo sapiens
  misc_RNA (1)...(19): siRNA sense strand
ggccuccuggucauuguua

SEQ ID NO: 2096339 - RNA, 19 nt, Homo sapiens
  misc_RNA (1)...(19): siRNA sense strand
ucucacugaugcugucuuc

SEQ ID NO: 2096340 - RNA, 19 nt, Homo sapiens
  misc_RNA (1)...(19): siRNA sense strand
ccagcaccauccuguccuu

SEQ ID NO: 2096341 - RNA, 19 nt, Homo sapiens
  misc_RNA (1)...(19): siRNA sense strand
ccucugcacagcucucauu

SEQ ID NO: 2096342 - RNA, 19 nt, Homo sapiens
  misc_RNA (1)...(19): siRNA sense strand
gcaccauccuguccuucac

SEQ ID NO: 2096343 - RNA, 19 nt, Homo sapiens
  misc_RNA (1)...(19): siRNA sense strand
gaggcaccaggccaucuuu

SEQ ID NO: 2096344 - RNA, 19 nt, Homo sapiens
  misc_RNA (1)...(19): siRNA sense strand
gccaagacuucaggcaucu

SEQ ID NO: 2096345 - RNA, 19 nt, Homo sapiens
  misc_RNA (1)...(19): siRNA sense strand
ccaagcagccagcaacacu

SEQ ID NO: 2096346 - RNA, 19 nt, Homo sapiens
  misc_RNA (1)...(19): siRNA sense strand
cccgugccaugcucccaua

SEQ ID NO: 2096347 - RNA, 19 nt, Homo sapiens
  misc_RNA (1)...(19): siRNA sense strand
ggaggagcaaggagcuuca

SEQ ID NO: 2096348 - RNA, 19 nt, Homo sapiens
  misc_RNA (1)...(19): siRNA sense strand
gauaauagauccaugagaa

SEQ ID NO: 2096349 - RNA, 19 nt, Homo sapiens
  misc_RNA (1)...(19): siRNA sense strand
gaacucgaaugaaggaaua

SEQ ID NO: 2096350 - RNA, 19 nt, Homo sapiens
  misc_RNA (1)...(19): siRNA sense strand
gaaggcacauccucaguuu

SEQ ID NO: 2096351 - RNA, 19 nt, Homo sapiens
  misc_RNA (1)...(19): siRNA sense strand
gaacaccacaagacauuua

SEQ ID NO: 2096352 - RNA, 19 nt, Homo sapiens
  misc_RNA (1)...(19): siRNA sense strand
ucaaagugcucaugagaaa

SEQ ID NO: 2096353 - RNA, 19 nt, Homo sapiens
  misc_RNA (1)...(19): siRNA sense strand
ugagugugcugacuauuua

SEQ ID NO: 2096354 - RNA, 19 nt, Homo sapiens
  misc_RNA (1)...(19): siRNA sense strand
gcacucagaucauuaccaa

SEQ ID NO: 2096355 - RNA, 19 nt, Homo sapiens
  misc_RNA (1)...(19): siRNA sense strand
gaucaaggcccaugagaaa

SEQ ID NO: 2096356 - RNA, 19 nt, Homo sapiens
  misc_RNA (1)...(19): siRNA sense strand
ggaaagcucucccaacaag

SEQ ID NO: 2096357 - RNA, 19 nt, Homo sapiens
  misc_RNA (1)...(19): siRNA sense strand
gccaagagcugcugcaaga

SEQ ID NO: 2096358 - RNA, 19 nt, Homo sapiens
  misc_RNA (1)...(19): siRNA sense strand
ccaaguaaguugccuuuga

SEQ ID NO: 2096359 - RNA, 19 nt, Homo sapiens
  misc_RNA (1)...(19): siRNA sense strand
ccacauggcaguaaauuaa

SEQ ID NO: 2096360 - RNA, 19 nt, Homo sapiens
  misc_RNA (1)...(19): siRNA sense strand
ccgcaucccuuauuaaauu

SEQ ID NO: 2096361 - RNA, 19 nt, Homo sapiens
  misc_RNA (1)...(19): siRNA sense strand
ccaaaggucucuccgaaga

SEQ ID NO: 2096362 - RNA, 19 nt, Homo sapiens
  misc_RNA (1)...(19): siRNA sense strand
gaggaacaccaacuaaaua

SEQ ID NO: 2096363 - RNA, 19 nt, Homo sapiens
  misc_RNA (1)...(19): siRNA sense strand
caucauaggcucuaaauau

SEQ ID NO: 2096364 - RNA, 19 nt, Homo sapiens
  misc_RNA (1)...(19): siRNA sense strand
cgacagaagugcagaggaa

SEQ ID NO: 2096365 - RNA, 19 nt, Homo sapiens
  misc_RNA (1)...(19): siRNA sense strand
ggucaucucuguccucgaa

SEQ ID NO: 2096366 - RNA, 19 nt, Homo sapiens
  misc_RNA (1)...(19): siRNA sense strand
gcaagaggaugaagacgau

SEQ ID NO: 2096367 - RNA, 19 nt, Homo sapiens
  misc_RNA (1)...(19): siRNA sense strand
caagagccauuggaaagua

SEQ ID NO: 2096368 - RNA, 19 nt, Homo sapiens
  misc_RNA (1)...(19): siRNA sense strand
gggaaacucucacgauuca

SEQ ID NO: 2096369 - RNA, 19 nt, Homo sapiens
  misc_RNA (1)...(19): siRNA sense strand
gaaaugacguccuccaaaa

SEQ ID NO: 2096370 - RNA, 19 nt, Homo sapiens
  misc_RNA (1)...(19): siRNA sense strand
gaaccuggauguccuugug

SEQ ID NO: 2096371 - RNA, 19 nt, Homo sapiens
  misc_RNA (1)...(19): siRNA sense strand
gaacaccaacuaaauacaa

SEQ ID NO: 2096372 - RNA, 19 nt, Homo sapiens
  misc_RNA (1)...(19): siRNA sense strand
aaacaaagcccaccucugu

SEQ ID NO: 2096373 - RNA, 19 nt, Homo sapiens
  misc_RNA (1)...(19): siRNA sense strand
gaagagagguguccccaaa

SEQ ID NO: 2096374 - RNA, 19 nt, Homo sapiens
  misc_RNA (1)...(19): siRNA sense strand
uaacagcccucaugguugu

SEQ ID NO: 2096375 - RNA, 19 nt, Homo sapiens
  misc_RNA (1)...(19): siRNA sense strand
ucagggaauugcuuguuua

SEQ ID NO: 2096376 - RNA, 19 nt, Homo sapiens
  misc_RNA (1)...(19): siRNA sense strand
gcaagagacuauacuuucu

SEQ ID NO: 2096377 - RNA, 19 nt, Homo sapiens
  misc_RNA (1)...(19): siRNA sense strand
cgaugacccuuccaccuua

SEQ ID NO: 2096378 - RNA, 19 nt, Homo sapiens
  misc_RNA (1)...(19): siRNA sense strand
ggaaaugacguccuccaaa

SEQ ID NO: 2096379 - RNA, 19 nt, Homo sapiens
  misc_RNA (1)...(19): siRNA sense strand
cgucaaagguuuaaagaca

SEQ ID NO: 2096380 - RNA, 19 nt, Homo sapiens
  misc_RNA (1)...(19): siRNA sense strand
gaacuaccuccaacucgua

SEQ ID NO: 2096381 - RNA, 19 nt, Homo sapiens
  misc_RNA (1)...(19): siRNA sense strand
gagcaaggaauguguuaaa

SEQ ID NO: 2096382 - RNA, 19 nt, Homo sapiens
  misc_RNA (1)...(19): siRNA sense strand
caaaccaacacacaauaua

SEQ ID NO: 2096383 - RNA, 19 nt, Homo sapiens
  misc_RNA (1)...(19): siRNA sense strand
gauaaaaggcuaaguauug

SEQ ID NO: 2096384 - RNA, 19 nt, Homo sapiens
  misc_RNA (1)...(19): siRNA sense strand
gaagaaggagcaaggaaug

SEQ ID NO: 2096385 - RNA, 19 nt, Homo sapiens
  misc_RNA (1)...(19): siRNA sense strand
gagaacaccacaagacauu

SEQ ID NO: 2096386 - RNA, 19 nt, Homo sapiens
  misc_RNA (1)...(19): siRNA sense strand
aaaaugagcuuaucaagga

SEQ ID NO: 2096387 - RNA, 19 nt, Homo sapiens
  misc_RNA (1)...(19): siRNA sense strand
ggaaacagcacuacaagag

SEQ ID NO: 2096388 - RNA, 19 nt, Homo sapiens
  misc_RNA (1)...(19): siRNA sense strand
ucaaagugcucaugaaguc

SEQ ID NO: 2096389 - RNA, 19 nt, Homo sapiens
  misc_RNA (1)...(19): siRNA sense strand
acaaagggacauaggauua

SEQ ID NO: 2096390 - RNA, 19 nt, Homo sapiens
  misc_RNA (1)...(19): siRNA sense strand
uaaauuaacccacaguguu

SEQ ID NO: 2096391 - RNA, 19 nt, Homo sapiens
  misc_RNA (1)...(19): siRNA sense strand
guagcagccucaaggagua

SEQ ID NO: 2096392 - RNA, 19 nt, Homo sapiens
  misc_RNA (1)...(19): siRNA sense strand
ggaagacggugagcccauu

SEQ ID NO: 2096393 - RNA, 19 nt, Homo sapiens
  misc_RNA (1)...(19): siRNA sense strand
cauccaagcuagaaacuuc

SEQ ID NO: 2096394 - RNA, 19 nt, Homo sapiens
  misc_RNA (1)...(19): siRNA sense strand
caaagccgauauggaagua

SEQ ID NO: 2096395 - RNA, 19 nt, Homo sapiens
  misc_RNA (1)...(19): siRNA sense strand
aaucaaagccgauauggaa

SEQ ID NO: 2096396 - RNA, 19 nt, Homo sapiens
  misc_RNA (1)...(19): siRNA sense strand
uaauccagauggcgguuua

SEQ ID NO: 2096397 - RNA, 19 nt, Homo sapiens
  misc_RNA (1)...(19): siRNA sense strand
ccaguuauuucuucuaauc

SEQ ID NO: 2096398 - RNA, 19 nt, Homo sapiens
  misc_RNA (1)...(19): siRNA sense strand
acaaccaacugaagauuga

SEQ ID NO: 2096399 - RNA, 19 nt, Homo sapiens
  misc_RNA (1)...(19): siRNA sense strand
ccagaggacuccaagaauc

SEQ ID NO: 2096400 - RNA, 19 nt, Homo sapiens
  misc_RNA (1)...(19): siRNA sense strand
ggucagcaguuccucauca

SEQ ID NO: 2096401 - RNA, 19 nt, Homo sapiens
  misc_RNA (1)...(19): siRNA sense strand
ucacaaaacugggauaaaa

SEQ ID NO: 2096402 - RNA, 19 nt, Homo sapiens
  misc_RNA (1)...(19): siRNA sense strand
gagagugauugaagaagga

SEQ ID NO: 2096403 - RNA, 19 nt, Homo sapiens
  misc_RNA (1)...(19): siRNA sense strand
agacaaagagcuacaaaga

SEQ ID NO: 2096404 - RNA, 19 nt, Homo sapiens
  misc_RNA (1)...(19): siRNA sense strand
ccagauggcgguuuacaaa

SEQ ID NO: 2096405 - RNA, 19 nt, Homo sapiens
  misc_RNA (1)...(19): siRNA sense strand
gauuccgcaucccuuauua

SEQ ID NO: 2096406 - RNA, 19 nt, Homo sapiens
  misc_RNA (1)...(19): siRNA sense strand
guaacuaccgcuacacgua

SEQ ID NO: 2096407 - RNA, 19 nt, Homo sapiens
  misc_RNA (1)...(19): siRNA sense strand
cauaacagcccucaugguu

SEQ ID NO: 2096408 - RNA, 19 nt, Homo sapiens
  misc_RNA (1)...(19): siRNA sense strand
gaaacucucacgauucaug

SEQ ID NO: 2096409 - RNA, 19 nt, Homo sapiens
  misc_RNA (1)...(19): siRNA sense strand
gggaauugcuuguuuacag

SEQ ID NO: 2096410 - RNA, 19 nt, Homo sapiens
  misc_RNA (1)...(19): siRNA sense strand
ggacauaggauuacagacu

SEQ ID NO: 2096411 - RNA, 19 nt, Homo sapiens
  misc_RNA (1)...(19): siRNA sense strand
uugaugagcugcacauaga

SEQ ID NO: 2096412 - RNA, 19 nt, Homo sapiens
  misc_RNA (1)...(19): siRNA sense strand
ggaugaagacgaugcaguu

SEQ ID NO: 2096413 - RNA, 19 nt, Homo sapiens
  misc_RNA (1)...(19): siRNA sense strand
ccaaaagacucccugguaa

SEQ ID NO: 2096414 - RNA, 19 nt, Homo sapiens
  misc_RNA (1)...(19): siRNA sense strand
ucaaggaaaccacaagaaa

SEQ ID NO: 2096415 - RNA, 19 nt, Homo sapiens
  misc_RNA (1)...(19): siRNA sense strand
ugacggaacucuugaacag

SEQ ID NO: 2096416 - RNA, 19 nt, Homo sapiens
  misc_RNA (1)...(19): siRNA sense strand
gaaaaggacaauugaauga

SEQ ID NO: 2096417 - RNA, 19 nt, Homo sapiens
  misc_RNA (1)...(19): siRNA sense strand
caacacacaauauaucaug

SEQ ID NO: 2096418 - RNA, 19 nt, Homo sapiens
  misc_RNA (1)...(19): siRNA sense strand
agagagcagugaugagaaa

SEQ ID NO: 2096419 - RNA, 19 nt, Homo sapiens
  misc_RNA (1)...(19): siRNA sense strand
ccaaguggcuuugcuaguc

SEQ ID NO: 2096420 - RNA, 19 nt, Homo sapiens
  misc_RNA (1)...(19): siRNA sense strand
acacagacacucuccuuaa

SEQ ID NO: 2096421 - RNA, 19 nt, Homo sapiens
  misc_RNA (1)...(19): siRNA sense strand
gaaacaagcaguacaucca

SEQ ID NO: 2096422 - RNA, 19 nt, Homo sapiens
  misc_RNA (1)...(19): siRNA sense strand
caaguaaguugccuuugag

SEQ ID NO: 2096423 - RNA, 19 nt, Homo sapiens
  misc_RNA (1)...(19): siRNA sense strand
acucagaucauuaccaaua

SEQ ID NO: 2096424 - RNA, 19 nt, Homo sapiens
  misc_RNA (1)...(19): siRNA sense strand
ggacucaaagugcucauga

SEQ ID NO: 2096425 - RNA, 19 nt, Homo sapiens
  misc_RNA (1)...(19): siRNA sense strand
ggaaggcacauccucaguu

SEQ ID NO: 2096426 - RNA, 19 nt, Homo sapiens
  misc_RNA (1)...(19): siRNA sense strand
gaagaaugugugacuguga

SEQ ID NO: 2096427 - RNA, 19 nt, Homo sapiens
  misc_RNA (1)...(19): siRNA sense strand
acaaugaaacguuugauga

SEQ ID NO: 2096428 - RNA, 19 nt, Homo sapiens
  misc_RNA (1)...(19): siRNA sense strand
ggaauuucugcuccaguua

SEQ ID NO: 2096429 - RNA, 19 nt, Homo sapiens
  misc_RNA (1)...(19): siRNA sense strand
cuauuuagcucgacacaag

SEQ ID NO: 2096430 - RNA, 19 nt, Homo sapiens
  misc_RNA (1)...(19): siRNA sense strand
aaaggagagugauugaaga

SEQ ID NO: 2096431 - RNA, 19 nt, Homo sapiens
  misc_RNA (1)...(19): siRNA sense strand
guagauaauagauccauga

SEQ ID NO: 2096432 - RNA, 19 nt, Homo sapiens
  misc_RNA (1)...(19): siRNA sense strand
gcucucaaccuccagcuuu

SEQ ID NO: 2096433 - RNA, 19 nt, Homo sapiens
  misc_RNA (1)...(19): siRNA sense strand
caagucacauuugggugua

SEQ ID NO: 2096434 - RNA, 19 nt, Homo sapiens
  misc_RNA (1)...(19): siRNA sense strand
cagacacucuccuuaacuu

SEQ ID NO: 2096435 - RNA, 19 nt, Homo sapiens
  misc_RNA (1)...(19): siRNA sense strand
gcccagcuaugacuauuca

SEQ ID NO: 2096436 - RNA, 19 nt, Homo sapiens
  misc_RNA (1)...(19): siRNA sense strand
ccucagaaaucaaaacuaa

SEQ ID NO: 2096437 - RNA, 19 nt, Homo sapiens
  misc_RNA (1)...(19): siRNA sense strand
caaaugggguuauaaagau

SEQ ID NO: 2096438 - RNA, 19 nt, Homo sapiens
  misc_RNA (1)...(19): siRNA sense strand
aaagaagccugaacuacag

SEQ ID NO: 2096439 - RNA, 19 nt, Homo sapiens
  misc_RNA (1)...(19): siRNA sense strand
caacucguaucaaggaaag

SEQ ID NO: 2096440 - RNA, 19 nt, Homo sapiens
  misc_RNA (1)...(19): siRNA sense strand
ugaugacaaugaaacguuu

SEQ ID NO: 2096441 - RNA, 19 nt, Homo sapiens
  misc_RNA (1)...(19): siRNA sense strand
aaauuaacccacaguguuu

SEQ ID NO: 2096442 - RNA, 19 nt, Homo sapiens
  misc_RNA (1)...(19): siRNA sense strand
uaucuucacucacccuaug

SEQ ID NO: 2096443 - RNA, 19 nt, Homo sapiens
  misc_RNA (1)...(19): siRNA sense strand
uagcacagcccaugucaga

SEQ ID NO: 2096444 - RNA, 19 nt, Homo sapiens
  misc_RNA (1)...(19): siRNA sense strand
ccucaugguugucaaagug

SEQ ID NO: 2096445 - RNA, 19 nt, Homo sapiens
  misc_RNA (1)...(19): siRNA sense strand
gaaccaaggaauagacaca

SEQ ID NO: 2096446 - RNA, 19 nt, Homo sapiens
  misc_RNA (1)...(19): siRNA sense strand
gugagugugcugacuauuu

SEQ ID NO: 2096447 - RNA, 19 nt, Homo sapiens
  misc_RNA (1)...(19): siRNA sense strand
cuaaauauagccaugaaug

SEQ ID NO: 2096448 - RNA, 19 nt, Homo sapiens
  misc_RNA (1)...(19): siRNA sense strand
ggagggagacuucuucuuu

SEQ ID NO: 2096449 - RNA, 19 nt, Homo sapiens
  misc_RNA (1)...(19): siRNA sense strand
gaaauuguggcucaacaua

SEQ ID NO: 2096450 - RNA, 19 nt, Homo sapiens
  misc_RNA (1)...(19): siRNA sense strand
ggagacuucuucuuugauu

SEQ ID NO: 2096451 - RNA, 19 nt, Homo sapiens
  misc_RNA (1)...(19): siRNA sense strand
ggacaucgccugccagauc

SEQ ID NO: 2096452 - RNA, 19 nt, Homo sapiens
  misc_RNA (1)...(19): siRNA sense strand
gagggagacuucuucuuug

SEQ ID NO: 2096453 - RNA, 19 nt, Homo sapiens
  misc_RNA (1)...(19): siRNA sense strand
ugaagcagcugacgcacaa

SEQ ID NO: 2096454 - RNA, 19 nt, Homo sapiens
  misc_RNA (1)...(19): siRNA sense strand
ccaaguaccugcgcggauu

SEQ ID NO: 2096455 - RNA, 19 nt, Homo sapiens
  misc_RNA (1)...(19): siRNA sense strand
gagcauccuucuagccuau

SEQ ID NO: 2096456 - RNA, 19 nt, Homo sapiens
  misc_RNA (1)...(19): siRNA sense strand
gcccagaaguuuauagaca

SEQ ID NO: 2096457 - RNA, 19 nt, Homo sapiens
  misc_RNA (1)...(19): siRNA sense strand
accaggagcugcccaagua

SEQ ID NO: 2096458 - RNA, 19 nt, Homo sapiens
  misc_RNA (1)...(19): siRNA sense strand
ggacucagccuccacaucu

SEQ ID NO: 2096459 - RNA, 19 nt, Homo sapiens
  misc_RNA (1)...(19): siRNA sense strand
gcagacaccauacuccauu

SEQ ID NO: 2096460 - RNA, 19 nt, Homo sapiens
  misc_RNA (1)...(19): siRNA sense strand
ggaugugugugacagcauu

SEQ ID NO: 2096461 - RNA, 19 nt, Homo sapiens
  misc_RNA (1)...(19): siRNA sense strand
cagacaccauacuccauua

SEQ ID NO: 2096462 - RNA, 19 nt, Homo sapiens
  misc_RNA (1)...(19): siRNA sense strand
ggucccagcuggcuagugu

SEQ ID NO: 2096463 - RNA, 19 nt, Homo sapiens
  misc_RNA (1)...(19): siRNA sense strand
gcaugaggaguacgaguuu

SEQ ID NO: 2096464 - RNA, 19 nt, Homo sapiens
  misc_RNA (1)...(19): siRNA sense strand
gagcuugcuugccauguca

SEQ ID NO: 2096465 - RNA, 19 nt, Homo sapiens
  misc_RNA (1)...(19): siRNA sense strand
agaccucccugggcuauaa

SEQ ID NO: 2096466 - RNA, 19 nt, Homo sapiens
  misc_RNA (1)...(19): siRNA sense strand
gaaccucacacgccugaug

SEQ ID NO: 2096467 - RNA, 19 nt, Homo sapiens
  misc_RNA (1)...(19): siRNA sense strand
gcaugcacaucgcucacaa

SEQ ID NO: 2096468 - RNA, 19 nt, Homo sapiens
  misc_RNA (1)...(19): siRNA sense strand
ggaguacgaguuuguguca

SEQ ID NO: 2096469 - RNA, 19 nt, Homo sapiens
  misc_RNA (1)...(19): siRNA sense strand
ccacgaugcaugaggagua

SEQ ID NO: 2096470 - RNA, 19 nt, Homo sapiens
  misc_RNA (1)...(19): siRNA sense strand
ucaucaagauuucagacaa

SEQ ID NO: 2096471 - RNA, 19 nt, Homo sapiens
  misc_RNA (1)...(19): siRNA sense strand
gggaacuggugccugagaa

SEQ ID NO: 2096472 - RNA, 19 nt, Homo sapiens
  misc_RNA (1)...(19): siRNA sense strand
gaacaagccccagaaagaa

SEQ ID NO: 2096473 - RNA, 19 nt, Homo sapiens
  misc_RNA (1)...(19): siRNA sense strand
caucaagauuucagacaag

SEQ ID NO: 2096474 - RNA, 19 nt, Homo sapiens
  misc_RNA (1)...(19): siRNA sense strand
acaggaaggccacagauga

SEQ ID NO: 2096475 - RNA, 19 nt, Homo sapiens
  misc_RNA (1)...(19): siRNA sense strand
ccaccuaucccuucaccaa

SEQ ID NO: 2096476 - RNA, 19 nt, Homo sapiens
  misc_RNA (1)...(19): siRNA sense strand
gaggagccacccaaggaaa

SEQ ID NO: 2096477 - RNA, 19 nt, Homo sapiens
  misc_RNA (1)...(19): siRNA sense strand
cagaacgucucccgcaucu

SEQ ID NO: 2096478 - RNA, 19 nt, Homo sapiens
  misc_RNA (1)...(19): siRNA sense strand
ggacaggaaggccacagau

SEQ ID NO: 2096479 - RNA, 19 nt, Homo sapiens
  misc_RNA (1)...(19): siRNA sense strand
gcauccuucuagccuauga

SEQ ID NO: 2096480 - RNA, 19 nt, Homo sapiens
  misc_RNA (1)...(19): siRNA sense strand
gagacuucuucuuugauuc

SEQ ID NO: 2096481 - RNA, 19 nt, Homo sapiens
  misc_RNA (1)...(19): siRNA sense strand
agggagacuucuucuuuga

SEQ ID NO: 2096482 - RNA, 19 nt, Homo sapiens
  misc_RNA (1)...(19): siRNA sense strand
gcugcagccucuucaucaa

SEQ ID NO: 2096483 - RNA, 19 nt, Homo sapiens
  misc_RNA (1)...(19): siRNA sense strand
agaaggacauggugagcau

SEQ ID NO: 2096484 - RNA, 19 nt, Homo sapiens
  misc_RNA (1)...(19): siRNA sense strand
gaaggaggaagagcugguu

SEQ ID NO: 2096485 - RNA, 19 nt, Homo sapiens
  misc_RNA (1)...(19): siRNA sense strand
gcgaguacagcuucgagaa

SEQ ID NO: 2096486 - RNA, 19 nt, Homo sapiens
  misc_RNA (1)...(19): siRNA sense strand
gacaucgccugccagaucu

SEQ ID NO: 2096487 - RNA, 19 nt, Homo sapiens
  misc_RNA (1)...(19): siRNA sense strand
cugacugggugaagaagaa

SEQ ID NO: 2096488 - RNA, 19 nt, Homo sapiens
  misc_RNA (1)...(19): siRNA sense strand
ugagugccaugaacaagca

SEQ ID NO: 2096489 - RNA, 19 nt, Homo sapiens
  misc_RNA (1)...(19): siRNA sense strand
aauuguggcucaacauauc

SEQ ID NO: 2096490 - RNA, 19 nt, Homo sapiens
  misc_RNA (1)...(19): siRNA sense strand
agaagaugcugcuggaacu

SEQ ID NO: 2096491 - RNA, 19 nt, Homo sapiens
  misc_RNA (1)...(19): siRNA sense strand
ggaaauuguggcucaacau

SEQ ID NO: 2096492 - RNA, 19 nt, Homo sapiens
  misc_RNA (1)...(19): siRNA sense strand
ucaugggucuggccaccaa

SEQ ID NO: 2096493 - RNA, 19 nt, Homo sapiens
  misc_RNA (1)...(19): siRNA sense strand
gagacgcaccuaugccaau

SEQ ID NO: 2096494 - RNA, 19 nt, Homo sapiens
  misc_RNA (1)...(19): siRNA sense strand
ucagcaccgagcuuauuua

SEQ ID NO: 2096495 - RNA, 19 nt, Homo sapiens
  misc_RNA (1)...(19): siRNA sense strand
gaagaacaagccccagaaa

SEQ ID NO: 2096496 - RNA, 19 nt, Homo sapiens
  misc_RNA (1)...(19): siRNA sense strand
ggagcucaccgaccagauc

SEQ ID NO: 2096497 - RNA, 19 nt, Homo sapiens
  misc_RNA (1)...(19): siRNA sense strand
gacaggaaggccacagaug

SEQ ID NO: 2096498 - RNA, 19 nt, Homo sapiens
  misc_RNA (1)...(19): siRNA sense strand
caaugacaccagugagaug

SEQ ID NO: 2096499 - RNA, 19 nt, Homo sapiens
  misc_RNA (1)...(19): siRNA sense strand
agacgcaccuaugccaaug

SEQ ID NO: 2096500 - RNA, 19 nt, Homo sapiens
  misc_RNA (1)...(19): siRNA sense strand
gaaugcagacaccauacuc

SEQ ID NO: 2096501 - RNA, 19 nt, Homo sapiens
  misc_RNA (1)...(19): siRNA sense strand
ucccgcaucugccacaaga

SEQ ID NO: 2096502 - RNA, 19 nt, Homo sapiens
  misc_RNA (1)...(19): siRNA sense strand
caacaggcacagcgaagag

SEQ ID NO: 2096503 - RNA, 19 nt, Homo sapiens
  misc_RNA (1)...(19): siRNA sense strand
gcucuucgaagucaucaca

SEQ ID NO: 2096504 - RNA, 19 nt, Homo sapiens
  misc_RNA (1)...(19): siRNA sense strand
ugacaagcauaaggacaag

SEQ ID NO: 2096505 - RNA, 19 nt, Homo sapiens
  misc_RNA (1)...(19): siRNA sense strand
acaaggcccaguucaacaa

SEQ ID NO: 2096506 - RNA, 19 nt, Homo sapiens
  misc_RNA (1)...(19): siRNA sense strand
gcgcggauuccacaagugu

SEQ ID NO: 2096507 - RNA, 19 nt, Homo sapiens
  misc_RNA (1)...(19): siRNA sense strand
cggaaauuguggcucaaca

SEQ ID NO: 2096508 - RNA, 19 nt, Homo sapiens
  misc_RNA (1)...(19): siRNA sense strand
guacuucaugcggaaauug

SEQ ID NO: 2096509 - RNA, 19 nt, Homo sapiens
  misc_RNA (1)...(19): siRNA sense strand
ugaaggagagguccauuuu

SEQ ID NO: 2096510 - RNA, 19 nt, Homo sapiens
  misc_RNA (1)...(19): siRNA sense strand
cuccacaucucgggaaaug

SEQ ID NO: 2096511 - RNA, 19 nt, Homo sapiens
  misc_RNA (1)...(19): siRNA sense strand
ugugaaugcagacaccaua

SEQ ID NO: 2096512 - RNA, 19 nt, Homo sapiens
  misc_RNA (1)...(19): siRNA sense strand
gucagcaccgagcuuauuu

SEQ ID NO: 2096513 - RNA, 19 nt, Homo sapiens
  misc_RNA (1)...(19): siRNA sense strand
ccagaaguuuauagacacu

SEQ ID NO: 2096514 - RNA, 19 nt, Homo sapiens
  misc_RNA (1)...(19): siRNA sense strand
acacacgggugcgggaugu

SEQ ID NO: 2096515 - RNA, 19 nt, Homo sapiens
  misc_RNA (1)...(19): siRNA sense strand
ccaaugacaccagugagau

SEQ ID NO: 2096516 - RNA, 19 nt, Homo sapiens
  misc_RNA (1)...(19): siRNA sense strand
aaaccucggagccuuccua

SEQ ID NO: 2096517 - RNA, 19 nt, Homo sapiens
  misc_RNA (1)...(19): siRNA sense strand
cuucggauccgccuucuuc

SEQ ID NO: 2096518 - RNA, 19 nt, Homo sapiens
  misc_RNA (1)...(19): siRNA sense strand
aaauuguggcucaacauau

SEQ ID NO: 2096519 - RNA, 19 nt, Homo sapiens
  misc_RNA (1)...(19): siRNA sense strand
gcucuucucccggcucuuc

SEQ ID NO: 2096520 - RNA, 19 nt, Homo sapiens
  misc_RNA (1)...(19): siRNA sense strand
cagcaccuacuuccacaug

SEQ ID NO: 2096521 - RNA, 19 nt, Homo sapiens
  misc_RNA (1)...(19): siRNA sense strand
ugagcuugcuugccauguc

SEQ ID NO: 2096522 - RNA, 19 nt, Homo sapiens
  misc_RNA (1)...(19): siRNA sense strand
uguugguccucacaaagaa

SEQ ID NO: 2096523 - RNA, 19 nt, Homo sapiens
  misc_RNA (1)...(19): siRNA sense strand
ugucagcaccgagcuuauu

SEQ ID NO: 2096524 - RNA, 19 nt, Homo sapiens
  misc_RNA (1)...(19): siRNA sense strand
caugaggaguacgaguuug

SEQ ID NO: 2096525 - RNA, 19 nt, Homo sapiens
  misc_RNA (1)...(19): siRNA sense strand
guucuccuaugaguucuuc

SEQ ID NO: 2096526 - RNA, 19 nt, Homo sapiens
  misc_RNA (1)...(19): siRNA sense strand
gcggauuccacaaguguuc

SEQ ID NO: 2096527 - RNA, 19 nt, Homo sapiens
  misc_RNA (1)...(19): siRNA sense strand
agaacaagccccagaaaga

SEQ ID NO: 2096528 - RNA, 19 nt, Homo sapiens
  misc_RNA (1)...(19): siRNA sense strand
gcucaccgaccagaucuuc

SEQ ID NO: 2096529 - RNA, 19 nt, Homo sapiens
  misc_RNA (1)...(19): siRNA sense strand
gaggaguacgaguuugugu

SEQ ID NO: 2096530 - RNA, 19 nt, Homo sapiens
  misc_RNA (1)...(19): siRNA sense strand
gcuccugagugccaugaac

SEQ ID NO: 2096531 - RNA, 19 nt, Homo sapiens
  misc_RNA (1)...(19): siRNA sense strand
agucuggucuggcgaguac

SEQ ID NO: 2096532 - RNA, 19 nt, Homo sapiens
  misc_RNA (1)...(19): siRNA sense strand
cuacaaggcccaguucaac

SEQ ID NO: 2096533 - RNA, 19 nt, Homo sapiens
  misc_RNA (1)...(19): siRNA sense strand
acaccauacuccauuacca

SEQ ID NO: 2096534 - RNA, 19 nt, Homo sapiens
  misc_RNA (1)...(19): siRNA sense strand
ccugucagcaccgagcuua

SEQ ID NO: 2096535 - RNA, 19 nt, Homo sapiens
  misc_RNA (1)...(19): siRNA sense strand
cugaggagccacccaagga

SEQ ID NO: 2096536 - RNA, 19 nt, Homo sapiens
  misc_RNA (1)...(19): siRNA sense strand
cugaaggagagguccauuu

SEQ ID NO: 2096537 - RNA, 19 nt, Homo sapiens
  misc_RNA (1)...(19): siRNA sense strand
cgaaagcccaccacacuua

SEQ ID NO: 2096538 - RNA, 19 nt, Homo sapiens
  misc_RNA (1)...(19): siRNA sense strand
ucaaguccaucucuaauuc

SEQ ID NO: 2096539 - RNA, 19 nt, Homo sapiens
  misc_RNA (1)...(19): siRNA sense strand
aaucagacaucacagaaga

SEQ ID NO: 2096540 - RNA, 19 nt, Homo sapiens
  misc_RNA (1)...(19): siRNA sense strand
agaagaggcugcaggcaau

SEQ ID NO: 2096541 - RNA, 19 nt, Homo sapiens
  misc_RNA (1)...(19): siRNA sense strand
ggagaagagccuacaguuc

SEQ ID NO: 2096542 - RNA, 19 nt, Homo sapiens
  misc_RNA (1)...(19): siRNA sense strand
cauaaugaaucagacauca

SEQ ID NO: 2096543 - RNA, 19 nt, Homo sapiens
  misc_RNA (1)...(19): siRNA sense strand
agacaucacagaagaaaga

SEQ ID NO: 2096544 - RNA, 19 nt, Homo sapiens
  misc_RNA (1)...(19): siRNA sense strand
ucaacaagcaagauucaaa

SEQ ID NO: 2096545 - RNA, 19 nt, Homo sapiens
  misc_RNA (1)...(19): siRNA sense strand
gcagagcgacccgcagaaa

SEQ ID NO: 2096546 - RNA, 19 nt, Homo sapiens
  misc_RNA (1)...(19): siRNA sense strand
cccaaggucuccaccaaga

SEQ ID NO: 2096547 - RNA, 19 nt, Homo sapiens
  misc_RNA (1)...(19): siRNA sense strand
ccaagaagccacgcauuuc

SEQ ID NO: 2096548 - RNA, 19 nt, Homo sapiens
  misc_RNA (1)...(19): siRNA sense strand
gaaagcccaccacacuuag

SEQ ID NO: 2096549 - RNA, 19 nt, Homo sapiens
  misc_RNA (1)...(19): siRNA sense strand
gaaacacagccaucaacuc

SEQ ID NO: 2096550 - RNA, 19 nt, Homo sapiens
  misc_RNA (1)...(19): siRNA sense strand
ugaaucagacaucacagaa

SEQ ID NO: 2096551 - RNA, 19 nt, Homo sapiens
  misc_RNA (1)...(19): siRNA sense strand
cacaggacgaucuccguua

SEQ ID NO: 2096552 - RNA, 19 nt, Homo sapiens
  misc_RNA (1)...(19): siRNA sense strand
ccucaagucccuccuggaa

SEQ ID NO: 2096553 - RNA, 19 nt, Homo sapiens
  misc_RNA (1)...(19): siRNA sense strand
uacaagggcaggccagaaa

SEQ ID NO: 2096554 - RNA, 19 nt, Homo sapiens
  misc_RNA (1)...(19): siRNA sense strand
gacagccucuccacgucaa

SEQ ID NO: 2096555 - RNA, 19 nt, Homo sapiens
  misc_RNA (1)...(19): siRNA sense strand
uaaugaaucagacaucaca

SEQ ID NO: 2096556 - RNA, 19 nt, Homo sapiens
  misc_RNA (1)...(19): siRNA sense strand
ucagacaucacagaagaaa

SEQ ID NO: 2096557 - RNA, 19 nt, Homo sapiens
  misc_RNA (1)...(19): siRNA sense strand
cgucaagcuuccagucugu

SEQ ID NO: 2096558 - RNA, 19 nt, Homo sapiens
  misc_RNA (1)...(19): siRNA sense strand
caacaagcaagauucaaaa

SEQ ID NO: 2096559 - RNA, 19 nt, Homo sapiens
  misc_RNA (1)...(19): siRNA sense strand
gcgaaagcccaccacacuu

SEQ ID NO: 2096560 - RNA, 19 nt, Homo sapiens
  misc_RNA (1)...(19): siRNA sense strand
gucaaguccaucucuaauu

SEQ ID NO: 2096561 - RNA, 19 nt, Homo sapiens
  misc_RNA (1)...(19): siRNA sense strand
gaaccuggaccuggagaag

SEQ ID NO: 2096562 - RNA, 19 nt, Homo sapiens
  misc_RNA (1)...(19): siRNA sense strand
gaccaagaagccacgcauu

SEQ ID NO: 2096563 - RNA, 19 nt, Homo sapiens
  misc_RNA (1)...(19): siRNA sense strand
gagcaucugaagcgggaaa

SEQ ID NO: 2096564 - RNA, 19 nt, Homo sapiens
  misc_RNA (1)...(19): siRNA sense strand
guacaagggcaggccagaa

SEQ ID NO: 2096565 - RNA, 19 nt, Homo sapiens
  misc_RNA (1)...(19): siRNA sense strand
gaaucagacaucacagaag

SEQ ID NO: 2096566 - RNA, 19 nt, Homo sapiens
  misc_RNA (1)...(19): siRNA sense strand
accaagaagccacgcauuu

SEQ ID NO: 2096567 - RNA, 19 nt, Homo sapiens
  misc_RNA (1)...(19): siRNA sense strand
acaggacgaucuccguuac

SEQ ID NO: 2096568 - RNA, 19 nt, Homo sapiens
  misc_RNA (1)...(19): siRNA sense strand
ucugucaaguccaucucua

SEQ ID NO: 2096569 - RNA, 19 nt, Homo sapiens
  misc_RNA (1)...(19): siRNA sense strand
gaagaggcugcaggcaaug

SEQ ID NO: 2096570 - RNA, 19 nt, Homo sapiens
  misc_RNA (1)...(19): siRNA sense strand
uggagaagagccuacaguu

SEQ ID NO: 2096571 - RNA, 19 nt, Homo sapiens
  misc_RNA (1)...(19): siRNA sense strand
aggacgaucuccguuacaa

SEQ ID NO: 2096572 - RNA, 19 nt, Homo sapiens
  misc_RNA (1)...(19): siRNA sense strand
caagcaagauucaaaagcu

SEQ ID NO: 2096573 - RNA, 19 nt, Homo sapiens
  misc_RNA (1)...(19): siRNA sense strand
caaguccaucucuaauuca

SEQ ID NO: 2096574 - RNA, 19 nt, Homo sapiens
  misc_RNA (1)...(19): siRNA sense strand
acagaaacacagccaucaa

SEQ ID NO: 2096575 - RNA, 19 nt, Homo sapiens
  misc_RNA (1)...(19): siRNA sense strand
aaagauggccccucaggaa

SEQ ID NO: 2096576 - RNA, 19 nt, Homo sapiens
  misc_RNA (1)...(19): siRNA sense strand
cagaaacacagccaucaac

SEQ ID NO: 2096577 - RNA, 19 nt, Homo sapiens
  misc_RNA (1)...(19): siRNA sense strand
ggucaaaugccaagugaua

SEQ ID NO: 2096578 - RNA, 19 nt, Homo sapiens
  misc_RNA (1)...(19): siRNA sense strand
uaaguucgaucucauguau

SEQ ID NO: 2096579 - RNA, 19 nt, Homo sapiens
  misc_RNA (1)...(19): siRNA sense strand
gaagaugcagccaguaauu

SEQ ID NO: 2096580 - RNA, 19 nt, Homo sapiens
  misc_RNA (1)...(19): siRNA sense strand
ccaaucagauggucaagug

SEQ ID NO: 2096581 - RNA, 19 nt, Homo sapiens
  misc_RNA (1)...(19): siRNA sense strand
gaacuguacugccuugaac

SEQ ID NO: 2096582 - RNA, 19 nt, Homo sapiens
  misc_RNA (1)...(19): siRNA sense strand
gcaagaaguccaagcuaga

SEQ ID NO: 2096583 - RNA, 19 nt, Homo sapiens
  misc_RNA (1)...(19): siRNA sense strand
caaggagauuguugaccua

SEQ ID NO: 2096584 - RNA, 19 nt, Homo sapiens
  misc_RNA (1)...(19): siRNA sense strand
acaaugaagccaucuauga

SEQ ID NO: 2096585 - RNA, 19 nt, Homo sapiens
  misc_RNA (1)...(19): siRNA sense strand
ggagauuguugaccuaguc

SEQ ID NO: 2096586 - RNA, 19 nt, Homo sapiens
  misc_RNA (1)...(19): siRNA sense strand
ucaacacguucuucaguga

SEQ ID NO: 2096587 - RNA, 19 nt, Homo sapiens
  misc_RNA (1)...(19): siRNA sense strand
ggauuuaaggugggcauua

SEQ ID NO: 2096588 - RNA, 19 nt, Homo sapiens
  misc_RNA (1)...(19): siRNA sense strand
ggcgcaaccuggacauuga

SEQ ID NO: 2096589 - RNA, 19 nt, Homo sapiens
  misc_RNA (1)...(19): siRNA sense strand
guacugccuugaacaugga

SEQ ID NO: 2096590 - RNA, 19 nt, Homo sapiens
  misc_RNA (1)...(19): siRNA sense strand
ucaaaugccaagugauaaa

SEQ ID NO: 2096591 - RNA, 19 nt, Homo sapiens
  misc_RNA (1)...(19): siRNA sense strand
ugacggaauuccagaccaa

SEQ ID NO: 2096592 - RNA, 19 nt, Homo sapiens
  misc_RNA (1)...(19): siRNA sense strand
ggaacuguacugccuugaa

SEQ ID NO: 2096593 - RNA, 19 nt, Homo sapiens
  misc_RNA (1)...(19): siRNA sense strand
ucgcaucucugcucaugga

SEQ ID NO: 2096594 - RNA, 19 nt, Homo sapiens
  misc_RNA (1)...(19): siRNA sense strand
ggaagaugcagccaguaau

SEQ ID NO: 2096595 - RNA, 19 nt, Homo sapiens
  misc_RNA (1)...(19): siRNA sense strand
cgacaaugaagccaucuau

SEQ ID NO: 2096596 - RNA, 19 nt, Homo sapiens
  misc_RNA (1)...(19): siRNA sense strand
ugaagaaggcgaagcauac

SEQ ID NO: 2096597 - RNA, 19 nt, Homo sapiens
  misc_RNA (1)...(19): siRNA sense strand
guccauaaguucgaucuca

SEQ ID NO: 2096598 - RNA, 19 nt, Homo sapiens
  misc_RNA (1)...(19): siRNA sense strand
cugcagggcuuccucaucu

SEQ ID NO: 2096599 - RNA, 19 nt, Homo sapiens
  misc_RNA (1)...(19): siRNA sense strand
cccuacaacuccauccuaa

SEQ ID NO: 2096600 - RNA, 19 nt, Homo sapiens
  misc_RNA (1)...(19): siRNA sense strand
aagaugcagccaguaauua

SEQ ID NO: 2096601 - RNA, 19 nt, Homo sapiens
  misc_RNA (1)...(19): siRNA sense strand
gggccuuugugcacuggua

SEQ ID NO: 2096602 - RNA, 19 nt, Homo sapiens
  misc_RNA (1)...(19): siRNA sense strand
guucgcaucucugcucaug

SEQ ID NO: 2096603 - RNA, 19 nt, Homo sapiens
  misc_RNA (1)...(19): siRNA sense strand
gcucuggguucgcaucucu

SEQ ID NO: 2096604 - RNA, 19 nt, Homo sapiens
  misc_RNA (1)...(19): siRNA sense strand
ucagcccgauggucaaaug

SEQ ID NO: 2096605 - RNA, 19 nt, Homo sapiens
  misc_RNA (1)...(19): siRNA sense strand
cagaucguguccuccauca

SEQ ID NO: 2096606 - RNA, 19 nt, Homo sapiens
  misc_RNA (1)...(19): siRNA sense strand
agaaggcgaagcauacuga

SEQ ID NO: 2096607 - RNA, 19 nt, Homo sapiens
  misc_RNA (1)...(19): siRNA sense strand
gaagaggugggcguggauu

SEQ ID NO: 2096608 - RNA, 19 nt, Homo sapiens
  misc_RNA (1)...(19): siRNA sense strand
gcgaguguaucucuaucca

SEQ ID NO: 2096609 - RNA, 19 nt, Homo sapiens
  misc_RNA (1)...(19): siRNA sense strand
gagcaacaccacggccauu

SEQ ID NO: 2096610 - RNA, 19 nt, Homo sapiens
  misc_RNA (1)...(19): siRNA sense strand
ccacguacaccaaccucaa

SEQ ID NO: 2096611 - RNA, 19 nt, Homo sapiens
  misc_RNA (1)...(19): siRNA sense strand
cagcaagaaguccaagcua

SEQ ID NO: 2096612 - RNA, 19 nt, Homo sapiens
  misc_RNA (1)...(19): siRNA sense strand
gaucucauguaugccaagu

SEQ ID NO: 2096613 - RNA, 19 nt, Homo sapiens
  misc_RNA (1)...(19): siRNA sense strand
gcagggcuuccucaucuuc

SEQ ID NO: 2096614 - RNA, 19 nt, Homo sapiens
  misc_RNA (1)...(19): siRNA sense strand
cugaagaaggcgaagcaua

SEQ ID NO: 2096615 - RNA, 19 nt, Homo sapiens
  misc_RNA (1)...(19): siRNA sense strand
aauguggacuugacggaau

SEQ ID NO: 2096616 - RNA, 19 nt, Homo sapiens
  misc_RNA (1)...(19): siRNA sense strand
aggaagaugcagccaguaa

SEQ ID NO: 2096617 - RNA, 19 nt, Homo sapiens
  misc_RNA (1)...(19): siRNA sense strand
gaagaaggcgaagcauacu

SEQ ID NO: 2096618 - RNA, 19 nt, Homo sapiens
  misc_RNA (1)...(19): siRNA sense strand
gacaaugaagccaucuaug

SEQ ID NO: 2096619 - RNA, 19 nt, Homo sapiens
  misc_RNA (1)...(19): siRNA sense strand
gcccagagcaguguuugug

SEQ ID NO: 2096620 - RNA, 19 nt, Homo sapiens
  misc_RNA (1)...(19): siRNA sense strand
caaugaagccaucuaugac

SEQ ID NO: 2096621 - RNA, 19 nt, Homo sapiens
  misc_RNA (1)...(19): siRNA sense strand
ucaguggauuacagcaaga

SEQ ID NO: 2096622 - RNA, 19 nt, Homo sapiens
  misc_RNA (1)...(19): siRNA sense strand
gcgcgaguguaucucuauc

SEQ ID NO: 2096623 - RNA, 19 nt, Homo sapiens
  misc_RNA (1)...(19): siRNA sense strand
gcugaucaccgggaaggaa

SEQ ID NO: 2096624 - RNA, 19 nt, Homo sapiens
  misc_RNA (1)...(19): siRNA sense strand
ccucaucuuccacagcuuu

SEQ ID NO: 2096625 - RNA, 19 nt, Homo sapiens
  misc_RNA (1)...(19): siRNA sense strand
gucaaaugccaagugauaa

SEQ ID NO: 2096626 - RNA, 19 nt, Homo sapiens
  misc_RNA (1)...(19): siRNA sense strand
gauggucaaaugccaagug

SEQ ID NO: 2096627 - RNA, 19 nt, Homo sapiens
  misc_RNA (1)...(19): siRNA sense strand
gcuucgagccagccaauca

SEQ ID NO: 2096628 - RNA, 19 nt, Homo sapiens
  misc_RNA (1)...(19): siRNA sense strand
gcccuacaacuccauccua

SEQ ID NO: 2096629 - RNA, 19 nt, Homo sapiens
  misc_RNA (1)...(19): siRNA sense strand
ggaccuacaggcagcucuu

SEQ ID NO: 2096630 - RNA, 19 nt, Homo sapiens
  misc_RNA (1)...(19): siRNA sense strand
cgagccagccaaucagaug

SEQ ID NO: 2096631 - RNA, 19 nt, Homo sapiens
  misc_RNA (1)...(19): siRNA sense strand
ggccaucgccaccaucaag

SEQ ID NO: 2096632 - RNA, 19 nt, Homo sapiens
  misc_RNA (1)...(19): siRNA sense strand
gcgcaaccuggacauugaa

SEQ ID NO: 2096633 - RNA, 19 nt, Homo sapiens
  misc_RNA (1)...(19): siRNA sense strand
uaaggugggcauuaacuac

SEQ ID NO: 2096634 - RNA, 19 nt, Homo sapiens
  misc_RNA (1)...(19): siRNA sense strand
ccauaaguucgaucucaug

SEQ ID NO: 2096635 - RNA, 19 nt, Homo sapiens
  misc_RNA (1)...(19): siRNA sense strand
ggcccugaauguggacuug

SEQ ID NO: 2096636 - RNA, 19 nt, Homo sapiens
  misc_RNA (1)...(19): siRNA sense strand
gccaagaccucaacaauca

SEQ ID NO: 2096637 - RNA, 19 nt, Homo sapiens
  misc_RNA (1)...(19): siRNA sense strand
acaggacccucaacaaaua

SEQ ID NO: 2096638 - RNA, 19 nt, Homo sapiens
  misc_RNA (1)...(19): siRNA sense strand
ggaaccagauucagauuac

SEQ ID NO: 2096639 - RNA, 19 nt, Homo sapiens
  misc_RNA (1)...(19): siRNA sense strand
gaacacaggacccucaaca

SEQ ID NO: 2096640 - RNA, 19 nt, Homo sapiens
  misc_RNA (1)...(19): siRNA sense strand
auucagagcugucccagaa

SEQ ID NO: 2096641 - RNA, 19 nt, Homo sapiens
  misc_RNA (1)...(19): siRNA sense strand
acacaggacccucaacaaa

SEQ ID NO: 2096642 - RNA, 19 nt, Homo sapiens
  misc_RNA (1)...(19): siRNA sense strand
ccaccuguaucauccacua

SEQ ID NO: 2096643 - RNA, 19 nt, Homo sapiens
  misc_RNA (1)...(19): siRNA sense strand
gugcagaccaccacagauu

SEQ ID NO: 2096644 - RNA, 19 nt, Homo sapiens
  misc_RNA (1)...(19): siRNA sense strand
ggaggaaccagauucagau

SEQ ID NO: 2096645 - RNA, 19 nt, Homo sapiens
  misc_RNA (1)...(19): siRNA sense strand
ucaaugacaccugcaagua

SEQ ID NO: 2096646 - RNA, 19 nt, Homo sapiens
  misc_RNA (1)...(19): siRNA sense strand
gauguggccucugcaggaa

SEQ ID NO: 2096647 - RNA, 19 nt, Homo sapiens
  misc_RNA (1)...(19): siRNA sense strand
caaugacaccugcaaguau

SEQ ID NO: 2096648 - RNA, 19 nt, Homo sapiens
  misc_RNA (1)...(19): siRNA sense strand
gagcugcacuacgcaaauc

SEQ ID NO: 2096649 - RNA, 19 nt, Homo sapiens
  misc_RNA (1)...(19): siRNA sense strand
gaaccagauucagauuaca

SEQ ID NO: 2096650 - RNA, 19 nt, Homo sapiens
  misc_RNA (1)...(19): siRNA sense strand
ccuggaggauguuucagaa

SEQ ID NO: 2096651 - RNA, 19 nt, Homo sapiens
  misc_RNA (1)...(19): siRNA sense strand
ggaggaggaaccagauuca

SEQ ID NO: 2096652 - RNA, 19 nt, Homo sapiens
  misc_RNA (1)...(19): siRNA sense strand
caacaaucacaacugcauu

SEQ ID NO: 2096653 - RNA, 19 nt, Homo sapiens
  misc_RNA (1)...(19): siRNA sense strand
aaucacaacugcauuucca

SEQ ID NO: 2096654 - RNA, 19 nt, Homo sapiens
  misc_RNA (1)...(19): siRNA sense strand
aaacugaggagguggugaa

SEQ ID NO: 2096655 - RNA, 19 nt, Homo sapiens
  misc_RNA (1)...(19): siRNA sense strand
uuuccuaugugacaagauu

SEQ ID NO: 2096656 - RNA, 19 nt, Homo sapiens
  misc_RNA (1)...(19): siRNA sense strand
cacaggacccucaacaaau

SEQ ID NO: 2096657 - RNA, 19 nt, Homo sapiens
  misc_RNA (1)...(19): siRNA sense strand
ccaaagggucagcaggaaa

SEQ ID NO: 2096658 - RNA, 19 nt, Homo sapiens
  misc_RNA (1)...(19): siRNA sense strand
gaggaaccagauucagauu

SEQ ID NO: 2096659 - RNA, 19 nt, Homo sapiens
  misc_RNA (1)...(19): siRNA sense strand
gggagguggagguggaaua

SEQ ID NO: 2096660 - RNA, 19 nt, Homo sapiens
  misc_RNA (1)...(19): siRNA sense strand
ggccaagaccucaacaauc

SEQ ID NO: 2096661 - RNA, 19 nt, Homo sapiens
  misc_RNA (1)...(19): siRNA sense strand
aaugacaccugcaaguauc

SEQ ID NO: 2096662 - RNA, 19 nt, Homo sapiens
  misc_RNA (1)...(19): siRNA sense strand
cauuguugcugcuucuguu

SEQ ID NO: 2096663 - RNA, 19 nt, Homo sapiens
  misc_RNA (1)...(19): siRNA sense strand
ccucggugguguuugauuc

SEQ ID NO: 2096664 - RNA, 19 nt, Homo sapiens
  misc_RNA (1)...(19): siRNA sense strand
gauuacagugugauaagga

SEQ ID NO: 2096665 - RNA, 19 nt, Homo sapiens
  misc_RNA (1)...(19): siRNA sense strand
cagugacccuggagaaucu

SEQ ID NO: 2096666 - RNA, 19 nt, Homo sapiens
  misc_RNA (1)...(19): siRNA sense strand
gcagugucccuaugagaag

SEQ ID NO: 2096667 - RNA, 19 nt, Homo sapiens
  misc_RNA (1)...(19): siRNA sense strand
gcauccaggaggaaacuga

SEQ ID NO: 2096668 - RNA, 19 nt, Homo sapiens
  misc_RNA (1)...(19): siRNA sense strand
ucagauuacagugugauaa

SEQ ID NO: 2096669 - RNA, 19 nt, Homo sapiens
  misc_RNA (1)...(19): siRNA sense strand
cugcuagccuggaggaugu

SEQ ID NO: 2096670 - RNA, 19 nt, Homo sapiens
  misc_RNA (1)...(19): siRNA sense strand
gggaggaggaaccagauuc

SEQ ID NO: 2096671 - RNA, 19 nt, Homo sapiens
  misc_RNA (1)...(19): siRNA sense strand
gauucagauuacaguguga

SEQ ID NO: 2096672 - RNA, 19 nt, Homo sapiens
  misc_RNA (1)...(19): siRNA sense strand
aacaaucacaacugcauuu

SEQ ID NO: 2096673 - RNA, 19 nt, Homo sapiens
  misc_RNA (1)...(19): siRNA sense strand
cugaggagguggugaacuc

SEQ ID NO: 2096674 - RNA, 19 nt, Homo sapiens
  misc_RNA (1)...(19): siRNA sense strand
gcagaccaccacagauuuu

SEQ ID NO: 2096675 - RNA, 19 nt, Homo sapiens
  misc_RNA (1)...(19): siRNA sense strand
aggaaccagauucagauua

SEQ ID NO: 2096676 - RNA, 19 nt, Homo sapiens
  misc_RNA (1)...(19): siRNA sense strand
cggugguguuugauucuaa

SEQ ID NO: 2096677 - RNA, 19 nt, Homo sapiens
  misc_RNA (1)...(19): siRNA sense strand
caaagggucagcaggaaaa

SEQ ID NO: 2096678 - RNA, 19 nt, Homo sapiens
  misc_RNA (1)...(19): siRNA sense strand
cagauuacagugugauaag

SEQ ID NO: 2096679 - RNA, 19 nt, Homo sapiens
  misc_RNA (1)...(19): siRNA sense strand
uaucauccacuacccuguu

SEQ ID NO: 2096680 - RNA, 19 nt, Homo sapiens
  misc_RNA (1)...(19): siRNA sense strand
caagaccucaacaaucaca

SEQ ID NO: 2096681 - RNA, 19 nt, Homo sapiens
  misc_RNA (1)...(19): siRNA sense strand
cggccaagaccucaacaau

SEQ ID NO: 2096682 - RNA, 19 nt, Homo sapiens
  misc_RNA (1)...(19): siRNA sense strand
cagauucagauuacagugu

SEQ ID NO: 2096683 - RNA, 19 nt, Homo sapiens
  misc_RNA (1)...(19): siRNA sense strand
ggagguggagguggaauac

SEQ ID NO: 2096684 - RNA, 19 nt, Homo sapiens
  misc_RNA (1)...(19): siRNA sense strand
gaaaagccagcaccaccaa

SEQ ID NO: 2096685 - RNA, 19 nt, Homo sapiens
  misc_RNA (1)...(19): siRNA sense strand
ucaacaaucacaacugcau

SEQ ID NO: 2096686 - RNA, 19 nt, Homo sapiens
  misc_RNA (1)...(19): siRNA sense strand
gccaagaccucaacaauca

SEQ ID NO: 2096687 - RNA, 19 nt, Homo sapiens
  misc_RNA (1)...(19): siRNA sense strand
acaggacccucaacaaaua

SEQ ID NO: 2096688 - RNA, 19 nt, Homo sapiens
  misc_RNA (1)...(19): siRNA sense strand
ggaaccagauucagauuac

SEQ ID NO: 2096689 - RNA, 19 nt, Homo sapiens
  misc_RNA (1)...(19): siRNA sense strand
gaacacaggacccucaaca

SEQ ID NO: 2096690 - RNA, 19 nt, Homo sapiens
  misc_RNA (1)...(19): siRNA sense strand
auucagagcugucccagaa

SEQ ID NO: 2096691 - RNA, 19 nt, Homo sapiens
  misc_RNA (1)...(19): siRNA sense strand
acacaggacccucaacaaa

SEQ ID NO: 2096692 - RNA, 19 nt, Homo sapiens
  misc_RNA (1)...(19): siRNA sense strand
ccaccuguaucauccacua

SEQ ID NO: 2096693 - RNA, 19 nt, Homo sapiens
  misc_RNA (1)...(19): siRNA sense strand
gugcagaccaccacagauu

SEQ ID NO: 2096694 - RNA, 19 nt, Homo sapiens
  misc_RNA (1)...(19): siRNA sense strand
ggaggaaccagauucagau

SEQ ID NO: 2096695 - RNA, 19 nt, Homo sapiens
  misc_RNA (1)...(19): siRNA sense strand
ucaaugacaccugcaagua

SEQ ID NO: 2096696 - RNA, 19 nt, Homo sapiens
  misc_RNA (1)...(19): siRNA sense strand
gauguggccucugcaggaa

SEQ ID NO: 2096697 - RNA, 19 nt, Homo sapiens
  misc_RNA (1)...(19): siRNA sense strand
caaugacaccugcaaguau

SEQ ID NO: 2096698 - RNA, 19 nt, Homo sapiens
  misc_RNA (1)...(19): siRNA sense strand
gagcugcacuacgcaaauc

SEQ ID NO: 2096699 - RNA, 19 nt, Homo sapiens
  misc_RNA (1)...(19): siRNA sense strand
gaaccagauucagauuaca

SEQ ID NO: 2096700 - RNA, 19 nt, Homo sapiens
  misc_RNA (1)...(19): siRNA sense strand
ccuggaggauguuucagaa

SEQ ID NO: 2096701 - RNA, 19 nt, Homo sapiens
  misc_RNA (1)...(19): siRNA sense strand
ggaggaggaaccagauuca

SEQ ID NO: 2096702 - RNA, 19 nt, Homo sapiens
  misc_RNA (1)...(19): siRNA sense strand
caacaaucacaacugcauu

SEQ ID NO: 2096703 - RNA, 19 nt, Homo sapiens
  misc_RNA (1)...(19): siRNA sense strand
aaucacaacugcauuucca

SEQ ID NO: 2096704 - RNA, 19 nt, Homo sapiens
  misc_RNA (1)...(19): siRNA sense strand
aaacugaggagguggugaa

SEQ ID NO: 2096705 - RNA, 19 nt, Homo sapiens
  misc_RNA (1)...(19): siRNA sense strand
uuuccuaugugacaagauu

SEQ ID NO: 2096706 - RNA, 19 nt, Homo sapiens
  misc_RNA (1)...(19): siRNA sense strand
cacaggacccucaacaaau

SEQ ID NO: 2096707 - RNA, 19 nt, Homo sapiens
  misc_RNA (1)...(19): siRNA sense strand
ccaaagggucagcaggaaa

SEQ ID NO: 2096708 - RNA, 19 nt, Homo sapiens
  misc_RNA (1)...(19): siRNA sense strand
gaggaaccagauucagauu

SEQ ID NO: 2096709 - RNA, 19 nt, Homo sapiens
  misc_RNA (1)...(19): siRNA sense strand
gggagguggagguggaaua

SEQ ID NO: 2096710 - RNA, 19 nt, Homo sapiens
  misc_RNA (1)...(19): siRNA sense strand
ggccaagaccucaacaauc

SEQ ID NO: 2096711 - RNA, 19 nt, Homo sapiens
  misc_RNA (1)...(19): siRNA sense strand
aaugacaccugcaaguauc

SEQ ID NO: 2096712 - RNA, 19 nt, Homo sapiens
  misc_RNA (1)...(19): siRNA sense strand
cauuguugcugcuucuguu

SEQ ID NO: 2096713 - RNA, 19 nt, Homo sapiens
  misc_RNA (1)...(19): siRNA sense strand
ccucggugguguuugauuc

SEQ ID NO: 2096714 - RNA, 19 nt, Homo sapiens
  misc_RNA (1)...(19): siRNA sense strand
gauuacagugugauaagga

SEQ ID NO: 2096715 - RNA, 19 nt, Homo sapiens
  misc_RNA (1)...(19): siRNA sense strand
cagugacccuggagaaucu

SEQ ID NO: 2096716 - RNA, 19 nt, Homo sapiens
  misc_RNA (1)...(19): siRNA sense strand
gcagugucccuaugagaag

SEQ ID NO: 2096717 - RNA, 19 nt, Homo sapiens
  misc_RNA (1)...(19): siRNA sense strand
gcauccaggaggaaacuga

SEQ ID NO: 2096718 - RNA, 19 nt, Homo sapiens
  misc_RNA (1)...(19): siRNA sense strand
ucagauuacagugugauaa

SEQ ID NO: 2096719 - RNA, 19 nt, Homo sapiens
  misc_RNA (1)...(19): siRNA sense strand
cugcuagccuggaggaugu

SEQ ID NO: 2096720 - RNA, 19 nt, Homo sapiens
  misc_RNA (1)...(19): siRNA sense strand
gggaggaggaaccagauuc

SEQ ID NO: 2096721 - RNA, 19 nt, Homo sapiens
  misc_RNA (1)...(19): siRNA sense strand
gauucagauuacaguguga

SEQ ID NO: 2096722 - RNA, 19 nt, Homo sapiens
  misc_RNA (1)...(19): siRNA sense strand
aacaaucacaacugcauuu

SEQ ID NO: 2096723 - RNA, 19 nt, Homo sapiens
  misc_RNA (1)...(19): siRNA sense strand
cugaggagguggugaacuc

SEQ ID NO: 2096724 - RNA, 19 nt, Homo sapiens
  misc_RNA (1)...(19): siRNA sense strand
gcagaccaccacagauuuu

SEQ ID NO: 2096725 - RNA, 19 nt, Homo sapiens
  misc_RNA (1)...(19): siRNA sense strand
aggaaccagauucagauua

SEQ ID NO: 2096726 - RNA, 19 nt, Homo sapiens
  misc_RNA (1)...(19): siRNA sense strand
cggugguguuugauucuaa

SEQ ID NO: 2096727 - RNA, 19 nt, Homo sapiens
  misc_RNA (1)...(19): siRNA sense strand
caaagggucagcaggaaaa

SEQ ID NO: 2096728 - RNA, 19 nt, Homo sapiens
  misc_RNA (1)...(19): siRNA sense strand
cagauuacagugugauaag

SEQ ID NO: 2096729 - RNA, 19 nt, Homo sapiens
  misc_RNA (1)...(19): siRNA sense strand
uaucauccacuacccuguu

SEQ ID NO: 2096730 - RNA, 19 nt, Homo sapiens
  misc_RNA (1)...(19): siRNA sense strand
caagaccucaacaaucaca

SEQ ID NO: 2096731 - RNA, 19 nt, Homo sapiens
  misc_RNA (1)...(19): siRNA sense strand
cggccaagaccucaacaau

SEQ ID NO: 2096732 - RNA, 19 nt, Homo sapiens
  misc_RNA (1)...(19): siRNA sense strand
cagauucagauuacagugu

SEQ ID NO: 2096733 - RNA, 19 nt, Homo sapiens
  misc_RNA (1)...(19): siRNA sense strand
ggagguggagguggaauac

SEQ ID NO: 2096734 - RNA, 19 nt, Homo sapiens
  misc_RNA (1)...(19): siRNA sense strand
gaaaagccagcaccaccaa

SEQ ID NO: 2096735 - RNA, 19 nt, Homo sapiens
  misc_RNA (1)...(19): siRNA sense strand
ucaacaaucacaacugcau

SEQ ID NO: 2096736 - RNA, 19 nt, Homo sapiens
  misc_RNA (1)...(19): siRNA sense strand
ggauggagauggcaagaga

SEQ ID NO: 2096737 - RNA, 19 nt, Homo sapiens
  misc_RNA (1)...(19): siRNA sense strand
ggaugucccucugaucuuu

SEQ ID NO: 2096738 - RNA, 19 nt, Homo sapiens
  misc_RNA (1)...(19): siRNA sense strand
gagguuggguuaugugguu

SEQ ID NO: 2096739 - RNA, 19 nt, Homo sapiens
  misc_RNA (1)...(19): siRNA sense strand
ggagauggcaagagaaaga

SEQ ID NO: 2096740 - RNA, 19 nt, Homo sapiens
  misc_RNA (1)...(19): siRNA sense strand
gcuuggaaaucaucuuuga

SEQ ID NO: 2096741 - RNA, 19 nt, Homo sapiens
  misc_RNA (1)...(19): siRNA sense strand
gaugugcauuaguggauuu

SEQ ID NO: 2096742 - RNA, 19 nt, Homo sapiens
  misc_RNA (1)...(19): siRNA sense strand
ggugacaucuccuucuaca

SEQ ID NO: 2096743 - RNA, 19 nt, Homo sapiens
  misc_RNA (1)...(19): siRNA sense strand
gcccggaugugcauuagug

SEQ ID NO: 2096744 - RNA, 19 nt, Homo sapiens
  misc_RNA (1)...(19): siRNA sense strand
guucgacgauuccaaccaa

SEQ ID NO: 2096745 - RNA, 19 nt, Homo sapiens
  misc_RNA (1)...(19): siRNA sense strand
ccaaggcccuggacaacuc

SEQ ID NO: 2096746 - RNA, 19 nt, Homo sapiens
  misc_RNA (1)...(19): siRNA sense strand
gcgguugucuuaccagagu

SEQ ID NO: 2096747 - RNA, 19 nt, Homo sapiens
  misc_RNA (1)...(19): siRNA sense strand
ggaugugcauuaguggauu

SEQ ID NO: 2096748 - RNA, 19 nt, Homo sapiens
  misc_RNA (1)...(19): siRNA sense strand
ugaagagguuggguuaugu

SEQ ID NO: 2096749 - RNA, 19 nt, Homo sapiens
  misc_RNA (1)...(19): siRNA sense strand
gcacuuggaggauggagau

SEQ ID NO: 2096750 - RNA, 19 nt, Homo sapiens
  misc_RNA (1)...(19): siRNA sense strand
gggcuuggaaaucaucuuu

SEQ ID NO: 2096751 - RNA, 19 nt, Homo sapiens
  misc_RNA (1)...(19): siRNA sense strand
cugaagagguuggguuaug

SEQ ID NO: 2096752 - RNA, 19 nt, Homo sapiens
  misc_RNA (1)...(19): siRNA sense strand
gccucaagcgguugucuua

SEQ ID NO: 2096753 - RNA, 19 nt, Homo sapiens
  misc_RNA (1)...(19): siRNA sense strand
cggaagaggccuuguaucu

SEQ ID NO: 2096754 - RNA, 19 nt, Homo sapiens
  misc_RNA (1)...(19): siRNA sense strand
agcccucgguccauuaaua

SEQ ID NO: 2096755 - RNA, 19 nt, Homo sapiens
  misc_RNA (1)...(19): siRNA sense strand
cguaugagaggcagcuuaa

SEQ ID NO: 2096756 - RNA, 19 nt, Homo sapiens
  misc_RNA (1)...(19): siRNA sense strand
gaagagguuggguuaugug

SEQ ID NO: 2096757 - RNA, 19 nt, Homo sapiens
  misc_RNA (1)...(19): siRNA sense strand
gcccucgguccauuaauaa

SEQ ID NO: 2096758 - RNA, 19 nt, Homo sapiens
  misc_RNA (1)...(19): siRNA sense strand
gcuggaacuucgagcagau

SEQ ID NO: 2096759 - RNA, 19 nt, Homo sapiens
  misc_RNA (1)...(19): siRNA sense strand
gugcauuaguggauuugau

SEQ ID NO: 2096760 - RNA, 19 nt, Homo sapiens
  misc_RNA (1)...(19): siRNA sense strand
gccacugucuauccaggaa

SEQ ID NO: 2096761 - RNA, 19 nt, Homo sapiens
  misc_RNA (1)...(19): siRNA sense strand
gccgugguccuucagcaua

SEQ ID NO: 2096762 - RNA, 19 nt, Homo sapiens
  misc_RNA (1)...(19): siRNA sense strand
ugaaccagcgcaaggagaa

SEQ ID NO: 2096763 - RNA, 19 nt, Homo sapiens
  misc_RNA (1)...(19): siRNA sense strand
gcauuaguggauuugauga

SEQ ID NO: 2096764 - RNA, 19 nt, Homo sapiens
  misc_RNA (1)...(19): siRNA sense strand
ccaaugcccagaggagaaa

SEQ ID NO: 2096765 - RNA, 19 nt, Homo sapiens
  misc_RNA (1)...(19): siRNA sense strand
guuaugugguucgacgauu

SEQ ID NO: 2096766 - RNA, 19 nt, Homo sapiens
  misc_RNA (1)...(19): siRNA sense strand
guggccacauuccgaaaga

SEQ ID NO: 2096767 - RNA, 19 nt, Homo sapiens
  misc_RNA (1)...(19): siRNA sense strand
gccaaugcccagaggagaa

SEQ ID NO: 2096768 - RNA, 19 nt, Homo sapiens
  misc_RNA (1)...(19): siRNA sense strand
aaagaauaacccuggcaaa

SEQ ID NO: 2096769 - RNA, 19 nt, Homo sapiens
  misc_RNA (1)...(19): siRNA sense strand
caccaagaccugccacugu

SEQ ID NO: 2096770 - RNA, 19 nt, Homo sapiens
  misc_RNA (1)...(19): siRNA sense strand
acaacacaccuuccugaug

SEQ ID NO: 2096771 - RNA, 19 nt, Homo sapiens
  misc_RNA (1)...(19): siRNA sense strand
ucaagcgguugucuuacca

SEQ ID NO: 2096772 - RNA, 19 nt, Homo sapiens
  misc_RNA (1)...(19): siRNA sense strand
uuaugugguucgacgauuc

SEQ ID NO: 2096773 - RNA, 19 nt, Homo sapiens
  misc_RNA (1)...(19): siRNA sense strand
gguggaucauggugacauc

SEQ ID NO: 2096774 - RNA, 19 nt, Homo sapiens
  misc_RNA (1)...(19): siRNA sense strand
gaucuuugcccugguggau

SEQ ID NO: 2096775 - RNA, 19 nt, Homo sapiens
  misc_RNA (1)...(19): siRNA sense strand
ugucuauccaggaagcuua

SEQ ID NO: 2096776 - RNA, 19 nt, Homo sapiens
  misc_RNA (1)...(19): siRNA sense strand
gacaacacaccuuccugau

SEQ ID NO: 2096777 - RNA, 19 nt, Homo sapiens
  misc_RNA (1)...(19): siRNA sense strand
cucgguccauuaauaagaa

SEQ ID NO: 2096778 - RNA, 19 nt, Homo sapiens
  misc_RNA (1)...(19): siRNA sense strand
auggugacaucuccuucua

SEQ ID NO: 2096779 - RNA, 19 nt, Homo sapiens
  misc_RNA (1)...(19): siRNA sense strand
ccagcuggcgggaguacaa

SEQ ID NO: 2096780 - RNA, 19 nt, Homo sapiens
  misc_RNA (1)...(19): siRNA sense strand
ggagaaaccccaggaguca

SEQ ID NO: 2096781 - RNA, 19 nt, Homo sapiens
  misc_RNA (1)...(19): siRNA sense strand
aagagggcuucguggaguu

SEQ ID NO: 2096782 - RNA, 19 nt, Homo sapiens
  misc_RNA (1)...(19): siRNA sense strand
ugaccuuccugcaguacca

SEQ ID NO: 2096783 - RNA, 19 nt, Homo sapiens
  misc_RNA (1)...(19): siRNA sense strand
ucuuugcccugguggauca

SEQ ID NO: 2096784 - RNA, 19 nt, Homo sapiens
  misc_RNA (1)...(19): siRNA sense strand
ucaagcaucucuucuagua

SEQ ID NO: 2096785 - RNA, 19 nt, Homo sapiens
  misc_RNA (1)...(19): siRNA sense strand
acacguaccugaaagaauu

SEQ ID NO: 2096786 - RNA, 19 nt, Homo sapiens
  misc_RNA (1)...(19): siRNA sense strand
gcaagagacugcuuaugug

SEQ ID NO: 2096787 - RNA, 19 nt, Homo sapiens
  misc_RNA (1)...(19): siRNA sense strand
ugaaaugccuuaaguguca

SEQ ID NO: 2096788 - RNA, 19 nt, Homo sapiens
  misc_RNA (1)...(19): siRNA sense strand
caaaugccaggccaaauua

SEQ ID NO: 2096789 - RNA, 19 nt, Homo sapiens
  misc_RNA (1)...(19): siRNA sense strand
ggagaagacuuucgauaac

SEQ ID NO: 2096790 - RNA, 19 nt, Homo sapiens
  misc_RNA (1)...(19): siRNA sense strand
caaacgcucugcccuucua

SEQ ID NO: 2096791 - RNA, 19 nt, Homo sapiens
  misc_RNA (1)...(19): siRNA sense strand
gcacuacacguaccugaaa

SEQ ID NO: 2096792 - RNA, 19 nt, Homo sapiens
  misc_RNA (1)...(19): siRNA sense strand
gaaaggcaacugcaccaaa

SEQ ID NO: 2096793 - RNA, 19 nt, Homo sapiens
  misc_RNA (1)...(19): siRNA sense strand
gagaagacuuucgauaaca

SEQ ID NO: 2096794 - RNA, 19 nt, Homo sapiens
  misc_RNA (1)...(19): siRNA sense strand
ucaaaugccaggccaaauu

SEQ ID NO: 2096795 - RNA, 19 nt, Homo sapiens
  misc_RNA (1)...(19): siRNA sense strand
ggcaagagacugcuuaugu

SEQ ID NO: 2096796 - RNA, 19 nt, Homo sapiens
  misc_RNA (1)...(19): siRNA sense strand
gagccucgguggcaagaga

SEQ ID NO: 2096797 - RNA, 19 nt, Homo sapiens
  misc_RNA (1)...(19): siRNA sense strand
gggagacccuggcaagugu

SEQ ID NO: 2096798 - RNA, 19 nt, Homo sapiens
  misc_RNA (1)...(19): siRNA sense strand
gggacggcaccuucaauua

SEQ ID NO: 2096799 - RNA, 19 nt, Homo sapiens
  misc_RNA (1)...(19): siRNA sense strand
uggagaagacuuucgauaa

SEQ ID NO: 2096800 - RNA, 19 nt, Homo sapiens
  misc_RNA (1)...(19): siRNA sense strand
gguaccaccuucguuacua

SEQ ID NO: 2096801 - RNA, 19 nt, Homo sapiens
  misc_RNA (1)...(19): siRNA sense strand
cauagagucugcuuuggau

SEQ ID NO: 2096802 - RNA, 19 nt, Homo sapiens
  misc_RNA (1)...(19): siRNA sense strand
ggacggcaccuucaauuac

SEQ ID NO: 2096803 - RNA, 19 nt, Homo sapiens
  misc_RNA (1)...(19): siRNA sense strand
ugaaagaauuccgcacaga

SEQ ID NO: 2096804 - RNA, 19 nt, Homo sapiens
  misc_RNA (1)...(19): siRNA sense strand
gacggcaccuucaauuaca

SEQ ID NO: 2096805 - RNA, 19 nt, Homo sapiens
  misc_RNA (1)...(19): siRNA sense strand
uuacagcccugacgucuac

SEQ ID NO: 2096806 - RNA, 19 nt, Homo sapiens
  misc_RNA (1)...(19): siRNA sense strand
ggugaaaugccuuaagugu

SEQ ID NO: 2096807 - RNA, 19 nt, Homo sapiens
  misc_RNA (1)...(19): siRNA sense strand
aagcaucucuucuaguauc

SEQ ID NO: 2096808 - RNA, 19 nt, Homo sapiens
  misc_RNA (1)...(19): siRNA sense strand
agacggagccuugcaagaa

SEQ ID NO: 2096809 - RNA, 19 nt, Homo sapiens
  misc_RNA (1)...(19): siRNA sense strand
ccaccuucguuacuacaaa

SEQ ID NO: 2096810 - RNA, 19 nt, Homo sapiens
  misc_RNA (1)...(19): siRNA sense strand
ucagugcccuccucuguag

SEQ ID NO: 2096811 - RNA, 19 nt, Homo sapiens
  misc_RNA (1)...(19): siRNA sense strand
uggaugaccuggaccugaa

SEQ ID NO: 2096812 - RNA, 19 nt, Homo sapiens
  misc_RNA (1)...(19): siRNA sense strand
ccucaagcaucucuucuag

SEQ ID NO: 2096813 - RNA, 19 nt, Homo sapiens
  misc_RNA (1)...(19): siRNA sense strand
gaagccaacagcaccauca

SEQ ID NO: 2096814 - RNA, 19 nt, Homo sapiens
  misc_RNA (1)...(19): siRNA sense strand
gcccuccucuguagaaaca

SEQ ID NO: 2096815 - RNA, 19 nt, Homo sapiens
  misc_RNA (1)...(19): siRNA sense strand
cagcaucacauggaucuuu

SEQ ID NO: 2096816 - RNA, 19 nt, Homo sapiens
  misc_RNA (1)...(19): siRNA sense strand
gacggagccuugcaagaag

SEQ ID NO: 2096817 - RNA, 19 nt, Homo sapiens
  misc_RNA (1)...(19): siRNA sense strand
ccgagaaaccgcagcacua

SEQ ID NO: 2096818 - RNA, 19 nt, Homo sapiens
  misc_RNA (1)...(19): siRNA sense strand
ggagacgccugccaguacu

SEQ ID NO: 2096819 - RNA, 19 nt, Homo sapiens
  misc_RNA (1)...(19): siRNA sense strand
cacgguagagucagucaua

SEQ ID NO: 2096820 - RNA, 19 nt, Homo sapiens
  misc_RNA (1)...(19): siRNA sense strand
aaauacaggucgucuccau

SEQ ID NO: 2096821 - RNA, 19 nt, Homo sapiens
  misc_RNA (1)...(19): siRNA sense strand
ggucugaacgggaugaaca

SEQ ID NO: 2096822 - RNA, 19 nt, Homo sapiens
  misc_RNA (1)...(19): siRNA sense strand
gggcccaccuggaacaagu

SEQ ID NO: 2096823 - RNA, 19 nt, Homo sapiens
  misc_RNA (1)...(19): siRNA sense strand
aaaggcaacugcaccaaaa

SEQ ID NO: 2096824 - RNA, 19 nt, Homo sapiens
  misc_RNA (1)...(19): siRNA sense strand
ccucuacucccuccagaaa

SEQ ID NO: 2096825 - RNA, 19 nt, Homo sapiens
  misc_RNA (1)...(19): siRNA sense strand
gcaggcacagcccgagaaa

SEQ ID NO: 2096826 - RNA, 19 nt, Homo sapiens
  misc_RNA (1)...(19): siRNA sense strand
ccauggaggccuugcagaa

SEQ ID NO: 2096827 - RNA, 19 nt, Homo sapiens
  misc_RNA (1)...(19): siRNA sense strand
gguggcaagagacugcuua

SEQ ID NO: 2096828 - RNA, 19 nt, Homo sapiens
  misc_RNA (1)...(19): siRNA sense strand
ucggugaaaugccuuaagu

SEQ ID NO: 2096829 - RNA, 19 nt, Homo sapiens
  misc_RNA (1)...(19): siRNA sense strand
ugugaugccuggaagaaag

SEQ ID NO: 2096830 - RNA, 19 nt, Homo sapiens
  misc_RNA (1)...(19): siRNA sense strand
gcaccgagcagcaguucca

SEQ ID NO: 2096831 - RNA, 19 nt, Homo sapiens
  misc_RNA (1)...(19): siRNA sense strand
guaccaccuucguuacuac

SEQ ID NO: 2096832 - RNA, 19 nt, Homo sapiens
  misc_RNA (1)...(19): siRNA sense strand
uagagucugcuuuggauga

SEQ ID NO: 2096833 - RNA, 19 nt, Homo sapiens
  misc_RNA (1)...(19): siRNA sense strand
gaccuggaccugaaugagu

SEQ ID NO: 2096834 - RNA, 19 nt, Homo sapiens
  misc_RNA (1)...(19): siRNA sense strand
ucuacucccuccagaaaca

SEQ ID NO: 2096835 - RNA, 19 nt, Homo sapiens
  misc_RNA (1)...(19): siRNA sense strand
cauuagagcccaggaguca

SEQ ID NO: 2096836 - RNA, 19 nt, Homo sapiens
  misc_RNA (1)...(19): siRNA sense strand
agucauagagucugcuuug

SEQ ID NO: 2096837 - RNA, 19 nt, Homo sapiens
  misc_RNA (1)...(19): siRNA sense strand
uuaagugucaggaacagaa

SEQ ID NO: 2096838 - RNA, 19 nt, Homo sapiens
  misc_RNA (1)...(19): siRNA sense strand
gcucugcacccgugaacau

SEQ ID NO: 2096839 - RNA, 19 nt, Homo sapiens
  misc_RNA (1)...(19): siRNA sense strand
ggacccuucugcgccuuug

SEQ ID NO: 2096840 - RNA, 19 nt, Homo sapiens
  misc_RNA (1)...(19): siRNA sense strand
ccacaugcagucggugaaa

SEQ ID NO: 2096841 - RNA, 19 nt, Homo sapiens
  misc_RNA (1)...(19): siRNA sense strand
gcccauuccugcacagaac

SEQ ID NO: 2096842 - RNA, 19 nt, Homo sapiens
  misc_RNA (1)...(19): siRNA sense strand
gucagccucuccucgcauu

SEQ ID NO: 2096843 - RNA, 19 nt, Homo sapiens
  misc_RNA (1)...(19): siRNA sense strand
ucauagagucugcuuugga

SEQ ID NO: 2096844 - RNA, 19 nt, Homo sapiens
  misc_RNA (1)...(19): siRNA sense strand
auuaaaaccccacucauua

SEQ ID NO: 2096845 - RNA, 19 nt, Homo sapiens
  misc_RNA (1)...(19): siRNA sense strand
gggagccgaguaccugaaa

SEQ ID NO: 2096846 - RNA, 19 nt, Homo sapiens
  misc_RNA (1)...(19): siRNA sense strand
gguagagucagucauagag

SEQ ID NO: 2096847 - RNA, 19 nt, Homo sapiens
  misc_RNA (1)...(19): siRNA sense strand
gcgacacgguagagucagu

SEQ ID NO: 2096848 - RNA, 19 nt, Homo sapiens
  misc_RNA (1)...(19): siRNA sense strand
cacuggaggugcaggugaa

SEQ ID NO: 2096849 - RNA, 19 nt, Homo sapiens
  misc_RNA (1)...(19): siRNA sense strand
gcuaugccugucccuacua

SEQ ID NO: 2096850 - RNA, 19 nt, Homo sapiens
  misc_RNA (1)...(19): siRNA sense strand
aaccgcagcacuacacgua

SEQ ID NO: 2096851 - RNA, 19 nt, Homo sapiens
  misc_RNA (1)...(19): siRNA sense strand
acaaggccguguuccacau

SEQ ID NO: 2096852 - RNA, 19 nt, Homo sapiens
  misc_RNA (1)...(19): siRNA sense strand
agaagacuuucgauaacag

SEQ ID NO: 2096853 - RNA, 19 nt, Homo sapiens
  misc_RNA (1)...(19): siRNA sense strand
cuggagaagacuuucgaua

SEQ ID NO: 2096854 - RNA, 19 nt, Homo sapiens
  misc_RNA (1)...(19): siRNA sense strand
cagcgacacgguagaguca

SEQ ID NO: 2096855 - RNA, 19 nt, Homo sapiens
  misc_RNA (1)...(19): siRNA sense strand
ccucagugcccuccucugu

SEQ ID NO: 2096856 - RNA, 19 nt, Homo sapiens
  misc_RNA (1)...(19): siRNA sense strand
auggaggccuugcagaaug

SEQ ID NO: 2096857 - RNA, 19 nt, Homo sapiens
  misc_RNA (1)...(19): siRNA sense strand
gagaaaccgcagcacuaca

SEQ ID NO: 2096858 - RNA, 19 nt, Homo sapiens
  misc_RNA (1)...(19): siRNA sense strand
auacaggucgucuccaugu

SEQ ID NO: 2096859 - RNA, 19 nt, Homo sapiens
  misc_RNA (1)...(19): siRNA sense strand
caaauuaaaaccccacuca

SEQ ID NO: 2096860 - RNA, 19 nt, Homo sapiens
  misc_RNA (1)...(19): siRNA sense strand
ggagacucggugccuguga

SEQ ID NO: 2096861 - RNA, 19 nt, Homo sapiens
  misc_RNA (1)...(19): siRNA sense strand
cgggacggcaccuucaauu

SEQ ID NO: 2096862 - RNA, 19 nt, Homo sapiens
  misc_RNA (1)...(19): siRNA sense strand
cgagaaaccgcagcacuac

SEQ ID NO: 2096863 - RNA, 19 nt, Homo sapiens
  misc_RNA (1)...(19): siRNA sense strand
cuacacguaccugaaagaa

SEQ ID NO: 2096864 - RNA, 19 nt, Homo sapiens
  misc_RNA (1)...(19): siRNA sense strand
gacaagaucuuccacaaua

SEQ ID NO: 2096865 - RNA, 19 nt, Homo sapiens
  misc_RNA (1)...(19): siRNA sense strand
gaggaggccuucaugauua

SEQ ID NO: 2096866 - RNA, 19 nt, Homo sapiens
  misc_RNA (1)...(19): siRNA sense strand
guacagaugugcaagauga

SEQ ID NO: 2096867 - RNA, 19 nt, Homo sapiens
  misc_RNA (1)...(19): siRNA sense strand
ccucugagcugcugcgaua

SEQ ID NO: 2096868 - RNA, 19 nt, Homo sapiens
  misc_RNA (1)...(19): siRNA sense strand
gaugaaggccuuuggagaa

SEQ ID NO: 2096869 - RNA, 19 nt, Homo sapiens
  misc_RNA (1)...(19): siRNA sense strand
gcucaucccuggcuuccaa

SEQ ID NO: 2096870 - RNA, 19 nt, Homo sapiens
  misc_RNA (1)...(19): siRNA sense strand
gggcuucgcaggaucuuua

SEQ ID NO: 2096871 - RNA, 19 nt, Homo sapiens
  misc_RNA (1)...(19): siRNA sense strand
gggacaagaucuuccacaa

SEQ ID NO: 2096872 - RNA, 19 nt, Homo sapiens
  misc_RNA (1)...(19): siRNA sense strand
gagcuuugcuacaugaaca

SEQ ID NO: 2096873 - RNA, 19 nt, Homo sapiens
  misc_RNA (1)...(19): siRNA sense strand
gcacaugggacaagaucuu

SEQ ID NO: 2096874 - RNA, 19 nt, Homo sapiens
  misc_RNA (1)...(19): siRNA sense strand
ggacaagaucuuccacaau

SEQ ID NO: 2096875 - RNA, 19 nt, Homo sapiens
  misc_RNA (1)...(19): siRNA sense strand
agaaggaccuauccgacuu

SEQ ID NO: 2096876 - RNA, 19 nt, Homo sapiens
  misc_RNA (1)...(19): siRNA sense strand
caucagcgguggaucuauc

SEQ ID NO: 2096877 - RNA, 19 nt, Homo sapiens
  misc_RNA (1)...(19): siRNA sense strand
ccaacaggcugaagauugc

SEQ ID NO: 2096878 - RNA, 19 nt, Homo sapiens
  misc_RNA (1)...(19): siRNA sense strand
caugauuaccgucaaguuu

SEQ ID NO: 2096879 - RNA, 19 nt, Homo sapiens
  misc_RNA (1)...(19): siRNA sense strand
gagaagcccaggucuuugu

SEQ ID NO: 2096880 - RNA, 19 nt, Homo sapiens
  misc_RNA (1)...(19): siRNA sense strand
gaugagaccuuugaauucc

SEQ ID NO: 2096881 - RNA, 19 nt, Homo sapiens
  misc_RNA (1)...(19): siRNA sense strand
agucagagaucuacaggau

SEQ ID NO: 2096882 - RNA, 19 nt, Homo sapiens
  misc_RNA (1)...(19): siRNA sense strand
gaacucauccggaaguacu

SEQ ID NO: 2096883 - RNA, 19 nt, Homo sapiens
  misc_RNA (1)...(19): siRNA sense strand
gcgccaggccaucaagaua

SEQ ID NO: 2096884 - RNA, 19 nt, Homo sapiens
  misc_RNA (1)...(19): siRNA sense strand
gaaacaggccaagggcauu

SEQ ID NO: 2096885 - RNA, 19 nt, Homo sapiens
  misc_RNA (1)...(19): siRNA sense strand
gaccuucacccauuguuug

SEQ ID NO: 2096886 - RNA, 19 nt, Homo sapiens
  misc_RNA (1)...(19): siRNA sense strand
ggaccuucacccauuguuu

SEQ ID NO: 2096887 - RNA, 19 nt, Homo sapiens
  misc_RNA (1)...(19): siRNA sense strand
ccaagcacauccagaaacu

SEQ ID NO: 2096888 - RNA, 19 nt, Homo sapiens
  misc_RNA (1)...(19): siRNA sense strand
gaaggccuuuggagaacug

SEQ ID NO: 2096889 - RNA, 19 nt, Homo sapiens
  misc_RNA (1)...(19): siRNA sense strand
ccgagaagcccaggucuuu

SEQ ID NO: 2096890 - RNA, 19 nt, Homo sapiens
  misc_RNA (1)...(19): siRNA sense strand
agaggaggccuucaugauu

SEQ ID NO: 2096891 - RNA, 19 nt, Homo sapiens
  misc_RNA (1)...(19): siRNA sense strand
gcacaucagcgguggaucu

SEQ ID NO: 2096892 - RNA, 19 nt, Homo sapiens
  misc_RNA (1)...(19): siRNA sense strand
gguugugggugauguagug

SEQ ID NO: 2096893 - RNA, 19 nt, Homo sapiens
  misc_RNA (1)...(19): siRNA sense strand
guggagcuuugcuacauga

SEQ ID NO: 2096894 - RNA, 19 nt, Homo sapiens
  misc_RNA (1)...(19): siRNA sense strand
guacugcagccuuauaaag

SEQ ID NO: 2096895 - RNA, 19 nt, Homo sapiens
  misc_RNA (1)...(19): siRNA sense strand
gcuuucaucuggacaugug

SEQ ID NO: 2096896 - RNA, 19 nt, Homo sapiens
  misc_RNA (1)...(19): siRNA sense strand
ccggaagggugaccgagaa

SEQ ID NO: 2096897 - RNA, 19 nt, Homo sapiens
  misc_RNA (1)...(19): siRNA sense strand
gggaacucauccggaagua

SEQ ID NO: 2096898 - RNA, 19 nt, Homo sapiens
  misc_RNA (1)...(19): siRNA sense strand
caucaccaaugcgagcuuu

SEQ ID NO: 2096899 - RNA, 19 nt, Homo sapiens
  misc_RNA (1)...(19): siRNA sense strand
ccacaauacccucaagauc

SEQ ID NO: 2096900 - RNA, 19 nt, Homo sapiens
  misc_RNA (1)...(19): siRNA sense strand
ugaagcagcagcaccauca

SEQ ID NO: 2096901 - RNA, 19 nt, Homo sapiens
  misc_RNA (1)...(19): siRNA sense strand
gagcuuucaucuggacaug

SEQ ID NO: 2096902 - RNA, 19 nt, Homo sapiens
  misc_RNA (1)...(19): siRNA sense strand
ucaccgugcuggacuacga

SEQ ID NO: 2096903 - RNA, 19 nt, Homo sapiens
  misc_RNA (1)...(19): siRNA sense strand
ugaugagaccuuugaauuc

SEQ ID NO: 2096904 - RNA, 19 nt, Homo sapiens
  misc_RNA (1)...(19): siRNA sense strand
uugaugagaccuuugaauu

SEQ ID NO: 2096905 - RNA, 19 nt, Homo sapiens
  misc_RNA (1)...(19): siRNA sense strand
gcgcugugcagauggauga

SEQ ID NO: 2096906 - RNA, 19 nt, Homo sapiens
  misc_RNA (1)...(19): siRNA sense strand
gagaugggcgagagucugu

SEQ ID NO: 2096907 - RNA, 19 nt, Homo sapiens
  misc_RNA (1)...(19): siRNA sense strand
acaauacccucaagaucca

SEQ ID NO: 2096908 - RNA, 19 nt, Homo sapiens
  misc_RNA (1)...(19): siRNA sense strand
ugugggaccuggacacugu

SEQ ID NO: 2096909 - RNA, 19 nt, Homo sapiens
  misc_RNA (1)...(19): siRNA sense strand
ugugugugguggugaauga

SEQ ID NO: 2096910 - RNA, 19 nt, Homo sapiens
  misc_RNA (1)...(19): siRNA sense strand
gaagauugcccugcagaac

SEQ ID NO: 2096911 - RNA, 19 nt, Homo sapiens
  misc_RNA (1)...(19): siRNA sense strand
cuacaugaacaccaacuug

SEQ ID NO: 2096912 - RNA, 19 nt, Homo sapiens
  misc_RNA (1)...(19): siRNA sense strand
uccuggcccuggauaauuu

SEQ ID NO: 2096913 - RNA, 19 nt, Homo sapiens
  misc_RNA (1)...(19): siRNA sense strand
gguggagcuuugcuacaug

SEQ ID NO: 2096914 - RNA, 19 nt, Homo sapiens
  misc_RNA (1)...(19): siRNA sense strand
cugguguacugcagccuua

SEQ ID NO: 2096915 - RNA, 19 nt, Homo sapiens
  misc_RNA (1)...(19): siRNA sense strand
ugauuaccgucaaguuugu

SEQ ID NO: 2096916 - RNA, 19 nt, Homo sapiens
  misc_RNA (1)...(19): siRNA sense strand
ugggugaacugaccaagca

SEQ ID NO: 2096917 - RNA, 19 nt, Homo sapiens
  misc_RNA (1)...(19): siRNA sense strand
gaucuauccaccugcuuug

SEQ ID NO: 2096918 - RNA, 19 nt, Homo sapiens
  misc_RNA (1)...(19): siRNA sense strand
gguguacugcagccuuaua

SEQ ID NO: 2096919 - RNA, 19 nt, Homo sapiens
  misc_RNA (1)...(19): siRNA sense strand
cagaggaggccuucaugau

SEQ ID NO: 2096920 - RNA, 19 nt, Homo sapiens
  misc_RNA (1)...(19): siRNA sense strand
caagggcauucugggcaaa

SEQ ID NO: 2096921 - RNA, 19 nt, Homo sapiens
  misc_RNA (1)...(19): siRNA sense strand
ccagaggaggccuucauga

SEQ ID NO: 2096922 - RNA, 19 nt, Homo sapiens
  misc_RNA (1)...(19): siRNA sense strand
caagaugaaggccuuugga

SEQ ID NO: 2096923 - RNA, 19 nt, Homo sapiens
  misc_RNA (1)...(19): siRNA sense strand
cggcugcagucucuucuca

SEQ ID NO: 2096924 - RNA, 19 nt, Homo sapiens
  misc_RNA (1)...(19): siRNA sense strand
cgccaggccaucaagauaa

SEQ ID NO: 2096925 - RNA, 19 nt, Homo sapiens
  misc_RNA (1)...(19): siRNA sense strand
cugaaugguuccaccugaa

SEQ ID NO: 2096926 - RNA, 19 nt, Homo sapiens
  misc_RNA (1)...(19): siRNA sense strand
gaagcccaggucuuuguga

SEQ ID NO: 2096927 - RNA, 19 nt, Homo sapiens
  misc_RNA (1)...(19): siRNA sense strand
gccaggccaucaagauaag

SEQ ID NO: 2096928 - RNA, 19 nt, Homo sapiens
  misc_RNA (1)...(19): siRNA sense strand
ccacacagaaggaccuauc

SEQ ID NO: 2096929 - RNA, 19 nt, Homo sapiens
  misc_RNA (1)...(19): siRNA sense strand
cuucacccauuguuugaug

SEQ ID NO: 2096930 - RNA, 19 nt, Homo sapiens
  misc_RNA (1)...(19): siRNA sense strand
cccagaagcacaagaagga

SEQ ID NO: 2096931 - RNA, 19 nt, Homo sapiens
  misc_RNA (1)...(19): siRNA sense strand
ggaguccuggcccuggaua

SEQ ID NO: 2096932 - RNA, 19 nt, Homo sapiens
  misc_RNA (1)...(19): siRNA sense strand
gagguuccgcucugucuuc

SEQ ID NO: 2096933 - RNA, 19 nt, Homo sapiens
  misc_RNA (1)...(19): siRNA sense strand
ccgcagagucagagaucua

SEQ ID NO: 2096934 - RNA, 19 nt, Homo sapiens
  misc_RNA (1)...(19): siRNA sense strand
ggucagggagcuugagaag

SEQ ID NO: 2096935 - RNA, 19 nt, Homo sapiens
  misc_RNA (1)...(19): siRNA sense strand
cagcgcacaugggacaaga

SEQ ID NO: 2096936 - RNA, 19 nt, Homo sapiens
  misc_RNA (1)...(19): siRNA sense strand
ggagaacugugccccaaca

SEQ ID NO: 2096937 - RNA, 19 nt, Homo sapiens
  misc_RNA (1)...(19): siRNA sense strand
gcaagaugaaggccuuugg

SEQ ID NO: 2096938 - RNA, 19 nt, Homo sapiens
  misc_RNA (1)...(19): siRNA sense strand
gauccagggucggcucaag

SEQ ID NO: 2096939 - RNA, 19 nt, Homo sapiens
  misc_RNA (1)...(19): siRNA sense strand
ccaaugcgagcuuucaucu

SEQ ID NO: 2096940 - RNA, 19 nt, Homo sapiens
  misc_RNA (1)...(19): siRNA sense strand
uccaacaggcugaagauug

SEQ ID NO: 2096941 - RNA, 19 nt, Homo sapiens
  misc_RNA (1)...(19): siRNA sense strand
gaccaagcacagcacauca

SEQ ID NO: 2096942 - RNA, 19 nt, Homo sapiens
  misc_RNA (1)...(19): siRNA sense strand
guguacugcagccuuauaa

SEQ ID NO: 2096943 - RNA, 19 nt, Homo sapiens
  misc_RNA (1)...(19): siRNA sense strand
acaaaggccaggacgacuu

SEQ ID NO: 2096944 - RNA, 19 nt, Homo sapiens
  misc_RNA (1)...(19): siRNA sense strand
gggagacccagaagcacaa

SEQ ID NO: 2096945 - RNA, 19 nt, Homo sapiens
  misc_RNA (1)...(19): siRNA sense strand
acaagaucuuccacaauac

SEQ ID NO: 2096946 - RNA, 19 nt, Homo sapiens
  misc_RNA (1)...(19): siRNA sense strand
gaagcagcagcaccaucaa

SEQ ID NO: 2096947 - RNA, 19 nt, Homo sapiens
  misc_RNA (1)...(19): siRNA sense strand
ucugaaggcaacagugaaa

SEQ ID NO: 2096948 - RNA, 19 nt, Homo sapiens
  misc_RNA (1)...(19): siRNA sense strand
gaaggcaacagugaaacag

SEQ ID NO: 2096949 - RNA, 19 nt, Homo sapiens
  misc_RNA (1)...(19): siRNA sense strand
gaccuucauccuggaguuu

SEQ ID NO: 2096950 - RNA, 19 nt, Homo sapiens
  misc_RNA (1)...(19): siRNA sense strand
ugucugaaggcaacaguga

SEQ ID NO: 2096951 - RNA, 19 nt, Homo sapiens
  misc_RNA (1)...(19): siRNA sense strand
gggcaucgccaagcacauc

SEQ ID NO: 2096952 - RNA, 19 nt, Homo sapiens
  misc_RNA (1)...(19): siRNA sense strand
ccuccuggcugcagaagac

SEQ ID NO: 2096953 - RNA, 19 nt, Homo sapiens
  misc_RNA (1)...(19): siRNA sense strand
agacuggcaccacugaaug

SEQ ID NO: 2096954 - RNA, 19 nt, Homo sapiens
  misc_RNA (1)...(19): siRNA sense strand
caagcaggccucccagcau

SEQ ID NO: 2096955 - RNA, 19 nt, Homo sapiens
  misc_RNA (1)...(19): siRNA sense strand
ugaaggcaacagugaaaca

SEQ ID NO: 2096956 - RNA, 19 nt, Homo sapiens
  misc_RNA (1)...(19): siRNA sense strand
agacccagaagcacaagaa

SEQ ID NO: 2096957 - RNA, 19 nt, Homo sapiens
  misc_RNA (1)...(19): siRNA sense strand
guacuucugcagccgaauc

SEQ ID NO: 2096958 - RNA, 19 nt, Homo sapiens
  misc_RNA (1)...(19): siRNA sense strand
ucgccaagcacauccagaa

SEQ ID NO: 2096959 - RNA, 19 nt, Homo sapiens
  misc_RNA (1)...(19): siRNA sense strand
agaccuucauccuggaguu

SEQ ID NO: 2096960 - RNA, 19 nt, Homo sapiens
  misc_RNA (1)...(19): siRNA sense strand
ccaccugcuuugcccagau

SEQ ID NO: 2096961 - RNA, 19 nt, Homo sapiens
  misc_RNA (1)...(19): siRNA sense strand
gauguaguguccccagaga

SEQ ID NO: 2096962 - RNA, 19 nt, Homo sapiens
  misc_RNA (1)...(19): siRNA sense strand
cgacgguugugggugaugu

SEQ ID NO: 2096963 - RNA, 19 nt, Homo sapiens
  misc_RNA (1)...(19): siRNA sense strand
gcgcacaugggacaagauc

SEQ ID NO: 2096964 - RNA, 19 nt, Homo sapiens
  misc_RNA (1)...(19): siRNA sense strand
gggaggugcuacauacuuu

SEQ ID NO: 2096965 - RNA, 19 nt, Homo sapiens
  misc_RNA (1)...(19): siRNA sense strand
ggaggccucaggaaacuua

SEQ ID NO: 2096966 - RNA, 19 nt, Homo sapiens
  misc_RNA (1)...(19): siRNA sense strand
ccucaacucuuccuucaag

SEQ ID NO: 2096967 - RNA, 19 nt, Homo sapiens
  misc_RNA (1)...(19): siRNA sense strand
ggaggggccuuuuggaaga

SEQ ID NO: 2096968 - RNA, 19 nt, Homo sapiens
  misc_RNA (1)...(19): siRNA sense strand
agacagaaguuuggacaac

SEQ ID NO: 2096969 - RNA, 19 nt, Homo sapiens
  misc_RNA (1)...(19): siRNA sense strand
caggaaacuuacagucaca

SEQ ID NO: 2096970 - RNA, 19 nt, Homo sapiens
  misc_RNA (1)...(19): siRNA sense strand
uaaggacagucaggacauc

SEQ ID NO: 2096971 - RNA, 19 nt, Homo sapiens
  misc_RNA (1)...(19): siRNA sense strand
aaauaucacaggccggauu

SEQ ID NO: 2096972 - RNA, 19 nt, Homo sapiens
  misc_RNA (1)...(19): siRNA sense strand
cugcgugcuucaaauauca

SEQ ID NO: 2096973 - RNA, 19 nt, Homo sapiens
  misc_RNA (1)...(19): siRNA sense strand
ugccucaacucuuccuuca

SEQ ID NO: 2096974 - RNA, 19 nt, Homo sapiens
  misc_RNA (1)...(19): siRNA sense strand
agucacagcggaaggcaaa

SEQ ID NO: 2096975 - RNA, 19 nt, Homo sapiens
  misc_RNA (1)...(19): siRNA sense strand
gaggugcuacauacuuuua

SEQ ID NO: 2096976 - RNA, 19 nt, Homo sapiens
  misc_RNA (1)...(19): siRNA sense strand
caggccggauugucaggaa

SEQ ID NO: 2096977 - RNA, 19 nt, Homo sapiens
  misc_RNA (1)...(19): siRNA sense strand
uuucugcgugcuucaaaua

SEQ ID NO: 2096978 - RNA, 19 nt, Homo sapiens
  misc_RNA (1)...(19): siRNA sense strand
ugaggcagacagaaguuug

SEQ ID NO: 2096979 - RNA, 19 nt, Homo sapiens
  misc_RNA (1)...(19): siRNA sense strand
ggugcuacauacuuuuaaa

SEQ ID NO: 2096980 - RNA, 19 nt, Homo sapiens
  misc_RNA (1)...(19): siRNA sense strand
ggacggaaccugcguacaa

SEQ ID NO: 2096981 - RNA, 19 nt, Homo sapiens
  misc_RNA (1)...(19): siRNA sense strand
gaacaaauacauggagauc

SEQ ID NO: 2096982 - RNA, 19 nt, Homo sapiens
  misc_RNA (1)...(19): siRNA sense strand
ggaaggagucccugaucuu

SEQ ID NO: 2096983 - RNA, 19 nt, Homo sapiens
  misc_RNA (1)...(19): siRNA sense strand
caucaaggccauuaugaga

SEQ ID NO: 2096984 - RNA, 19 nt, Homo sapiens
  misc_RNA (1)...(19): siRNA sense strand
ggagaagcggcucaucaaa

SEQ ID NO: 2096985 - RNA, 19 nt, Homo sapiens
  misc_RNA (1)...(19): siRNA sense strand
gagaagcggcucaucaaag

SEQ ID NO: 2096986 - RNA, 19 nt, Homo sapiens
  misc_RNA (1)...(19): siRNA sense strand
gcgcaaggccaaacucuuc

SEQ ID NO: 2096987 - RNA, 19 nt, Homo sapiens
  misc_RNA (1)...(19): siRNA sense strand
caacauggccgugguguac

SEQ ID NO: 2096988 - RNA, 19 nt, Homo sapiens
  misc_RNA (1)...(19): siRNA sense strand
agaagcggcucaucaaagg

SEQ ID NO: 2096989 - RNA, 19 nt, Homo sapiens
  misc_RNA (1)...(19): siRNA sense strand
ccaagcaguucaugaccau

SEQ ID NO: 2096990 - RNA, 19 nt, Homo sapiens
  misc_RNA (1)...(19): siRNA sense strand
ggagaugaaccaccuguac

SEQ ID NO: 2096991 - RNA, 19 nt, Homo sapiens
  misc_RNA (1)...(19): siRNA sense strand
ggacagucgacuacaacaa

SEQ ID NO: 2096992 - RNA, 19 nt, Homo sapiens
  misc_RNA (1)...(19): siRNA sense strand
ugaagaagcggaccaagag

SEQ ID NO: 2096993 - RNA, 19 nt, Homo sapiens
  misc_RNA (1)...(19): siRNA sense strand
ugggcauccugaacaaaua

SEQ ID NO: 2096994 - RNA, 19 nt, Homo sapiens
  misc_RNA (1)...(19): siRNA sense strand
gcaacauggccguggugua

SEQ ID NO: 2096995 - RNA, 19 nt, Homo sapiens
  misc_RNA (1)...(19): siRNA sense strand
cauucugacugcacucuau

SEQ ID NO: 2096996 - RNA, 19 nt, Homo sapiens
  misc_RNA (1)...(19): siRNA sense strand
ucaaggccauuaugagaac

SEQ ID NO: 2096997 - RNA, 19 nt, Homo sapiens
  misc_RNA (1)...(19): siRNA sense strand
gcaaggaggcgagcaucug

SEQ ID NO: 2096998 - RNA, 19 nt, Homo sapiens
  misc_RNA (1)...(19): siRNA sense strand
ggaccacgggcuaaucugu

SEQ ID NO: 2096999 - RNA, 19 nt, Homo sapiens
  misc_RNA (1)...(19): siRNA sense strand
gcaagcccaccuccagaga

SEQ ID NO: 2097000 - RNA, 19 nt, Homo sapiens
  misc_RNA (1)...(19): siRNA sense strand
gcagugggcggacauucug

SEQ ID NO: 2097001 - RNA, 19 nt, Homo sapiens
  misc_RNA (1)...(19): siRNA sense strand
gcagccaucaaggccauua

SEQ ID NO: 2097002 - RNA, 19 nt, Homo sapiens
  misc_RNA (1)...(19): siRNA sense strand
gaaguaccggugccgaauc

SEQ ID NO: 2097003 - RNA, 19 nt, Homo sapiens
  misc_RNA (1)...(19): siRNA sense strand
cgccaaugguugcaucuuc

SEQ ID NO: 2097004 - RNA, 19 nt, Homo sapiens
  misc_RNA (1)...(19): siRNA sense strand
gccaucaaggccauuauga

SEQ ID NO: 2097005 - RNA, 19 nt, Homo sapiens
  misc_RNA (1)...(19): siRNA sense strand
acaugggacucuccuucaa

SEQ ID NO: 2097006 - RNA, 19 nt, Homo sapiens
  misc_RNA (1)...(19): siRNA sense strand
cguacaaccacgaggagua

SEQ ID NO: 2097007 - RNA, 19 nt, Homo sapiens
  misc_RNA (1)...(19): siRNA sense strand
cggagaagcggcucaucaa

SEQ ID NO: 2097008 - RNA, 19 nt, Homo sapiens
  misc_RNA (1)...(19): siRNA sense strand
gaggugccagccuuuguga

SEQ ID NO: 2097009 - RNA, 19 nt, Homo sapiens
  misc_RNA (1)...(19): siRNA sense strand
cggcaaggccagcaacaug

SEQ ID NO: 2097010 - RNA, 19 nt, Homo sapiens
  misc_RNA (1)...(19): siRNA sense strand
gaagcugcccgcucaccau

SEQ ID NO: 2097011 - RNA, 19 nt, Homo sapiens
  misc_RNA (1)...(19): siRNA sense strand
ugccagccuuugugaagaa

SEQ ID NO: 2097012 - RNA, 19 nt, Homo sapiens
  misc_RNA (1)...(19): siRNA sense strand
gugccagccuuugugaaga

SEQ ID NO: 2097013 - RNA, 19 nt, Homo sapiens
  misc_RNA (1)...(19): siRNA sense strand
gacggaaccugcguacaac

SEQ ID NO: 2097014 - RNA, 19 nt, Homo sapiens
  misc_RNA (1)...(19): siRNA sense strand
ggucacagucucccugaag

SEQ ID NO: 2097015 - RNA, 19 nt, Homo sapiens
  misc_RNA (1)...(19): siRNA sense strand
agugcuaccugcagaagga

SEQ ID NO: 2097016 - RNA, 19 nt, Homo sapiens
  misc_RNA (1)...(19): siRNA sense strand
ggaaggggaaggagaaguu

SEQ ID NO: 2097017 - RNA, 19 nt, Homo sapiens
  misc_RNA (1)...(19): siRNA sense strand
uaccgcagccugaguuuca

SEQ ID NO: 2097018 - RNA, 19 nt, Homo sapiens
  misc_RNA (1)...(19): siRNA sense strand
gcagaugaagcggcacaug

SEQ ID NO: 2097019 - RNA, 19 nt, Homo sapiens
  misc_RNA (1)...(19): siRNA sense strand
cuaccuacccuacgaguac

SEQ ID NO: 2097020 - RNA, 19 nt, Homo sapiens
  misc_RNA (1)...(19): siRNA sense strand
gacagucgacuacaacaac

SEQ ID NO: 2097021 - RNA, 19 nt, Homo sapiens
  misc_RNA (1)...(19): siRNA sense strand
aaguaccggugccgaauca

SEQ ID NO: 2097022 - RNA, 19 nt, Homo sapiens
  misc_RNA (1)...(19): siRNA sense strand
uguggacagucgacuacaa

SEQ ID NO: 2097023 - RNA, 19 nt, Homo sapiens
  misc_RNA (1)...(19): siRNA sense strand
ucugugagcccuccuucuu

SEQ ID NO: 2097024 - RNA, 19 nt, Homo sapiens
  misc_RNA (1)...(19): siRNA sense strand
gcagauccugguccacauc

SEQ ID NO: 2097025 - RNA, 19 nt, Homo sapiens
  misc_RNA (1)...(19): siRNA sense strand
gugccagggcugucuguga

SEQ ID NO: 2097026 - RNA, 19 nt, Homo sapiens
  misc_RNA (1)...(19): siRNA sense strand
ugaccauguuuccucauac

SEQ ID NO: 2097027 - RNA, 19 nt, Homo sapiens
  misc_RNA (1)...(19): siRNA sense strand
accacgggcuaaucuguga

SEQ ID NO: 2097028 - RNA, 19 nt, Homo sapiens
  misc_RNA (1)...(19): siRNA sense strand
ggugccagccuuugugaag

SEQ ID NO: 2097029 - RNA, 19 nt, Homo sapiens
  misc_RNA (1)...(19): siRNA sense strand
ccacccagagggaccagaa

SEQ ID NO: 2097030 - RNA, 19 nt, Homo sapiens
  misc_RNA (1)...(19): siRNA sense strand
ggacggaaccugcguacaa

SEQ ID NO: 2097031 - RNA, 19 nt, Homo sapiens
  misc_RNA (1)...(19): siRNA sense strand
gaacaaauacauggagauc

SEQ ID NO: 2097032 - RNA, 19 nt, Homo sapiens
  misc_RNA (1)...(19): siRNA sense strand
ggaaggagucccugaucuu

SEQ ID NO: 2097033 - RNA, 19 nt, Homo sapiens
  misc_RNA (1)...(19): siRNA sense strand
caucaaggccauuaugaga

SEQ ID NO: 2097034 - RNA, 19 nt, Homo sapiens
  misc_RNA (1)...(19): siRNA sense strand
ggagaagcggcucaucaaa

SEQ ID NO: 2097035 - RNA, 19 nt, Homo sapiens
  misc_RNA (1)...(19): siRNA sense strand
gagaagcggcucaucaaag

SEQ ID NO: 2097036 - RNA, 19 nt, Homo sapiens
  misc_RNA (1)...(19): siRNA sense strand
gcgcaaggccaaacucuuc

SEQ ID NO: 2097037 - RNA, 19 nt, Homo sapiens
  misc_RNA (1)...(19): siRNA sense strand
caacauggccgugguguac

SEQ ID NO: 2097038 - RNA, 19 nt, Homo sapiens
  misc_RNA (1)...(19): siRNA sense strand
agaagcggcucaucaaagg

SEQ ID NO: 2097039 - RNA, 19 nt, Homo sapiens
  misc_RNA (1)...(19): siRNA sense strand
ccaagcaguucaugaccau

SEQ ID NO: 2097040 - RNA, 19 nt, Homo sapiens
  misc_RNA (1)...(19): siRNA sense strand
ggagaugaaccaccuguac

SEQ ID NO: 2097041 - RNA, 19 nt, Homo sapiens
  misc_RNA (1)...(19): siRNA sense strand
ggacagucgacuacaacaa

SEQ ID NO: 2097042 - RNA, 19 nt, Homo sapiens
  misc_RNA (1)...(19): siRNA sense strand
ugaagaagcggaccaagag

SEQ ID NO: 2097043 - RNA, 19 nt, Homo sapiens
  misc_RNA (1)...(19): siRNA sense strand
ugggcauccugaacaaaua

SEQ ID NO: 2097044 - RNA, 19 nt, Homo sapiens
  misc_RNA (1)...(19): siRNA sense strand
gcaacauggccguggugua

SEQ ID NO: 2097045 - RNA, 19 nt, Homo sapiens
  misc_RNA (1)...(19): siRNA sense strand
cauucugacugcacucuau

SEQ ID NO: 2097046 - RNA, 19 nt, Homo sapiens
  misc_RNA (1)...(19): siRNA sense strand
ucaaggccauuaugagaac

SEQ ID NO: 2097047 - RNA, 19 nt, Homo sapiens
  misc_RNA (1)...(19): siRNA sense strand
gcaaggaggcgagcaucug

SEQ ID NO: 2097048 - RNA, 19 nt, Homo sapiens
  misc_RNA (1)...(19): siRNA sense strand
ggaccacgggcuaaucugu

SEQ ID NO: 2097049 - RNA, 19 nt, Homo sapiens
  misc_RNA (1)...(19): siRNA sense strand
gcaagcccaccuccagaga

SEQ ID NO: 2097050 - RNA, 19 nt, Homo sapiens
  misc_RNA (1)...(19): siRNA sense strand
gcagugggcggacauucug

SEQ ID NO: 2097051 - RNA, 19 nt, Homo sapiens
  misc_RNA (1)...(19): siRNA sense strand
gcagccaucaaggccauua

SEQ ID NO: 2097052 - RNA, 19 nt, Homo sapiens
  misc_RNA (1)...(19): siRNA sense strand
gaaguaccggugccgaauc

SEQ ID NO: 2097053 - RNA, 19 nt, Homo sapiens
  misc_RNA (1)...(19): siRNA sense strand
cgccaaugguugcaucuuc

SEQ ID NO: 2097054 - RNA, 19 nt, Homo sapiens
  misc_RNA (1)...(19): siRNA sense strand
gccaucaaggccauuauga

SEQ ID NO: 2097055 - RNA, 19 nt, Homo sapiens
  misc_RNA (1)...(19): siRNA sense strand
acaugggacucuccuucaa

SEQ ID NO: 2097056 - RNA, 19 nt, Homo sapiens
  misc_RNA (1)...(19): siRNA sense strand
cguacaaccacgaggagua

SEQ ID NO: 2097057 - RNA, 19 nt, Homo sapiens
  misc_RNA (1)...(19): siRNA sense strand
cggagaagcggcucaucaa

SEQ ID NO: 2097058 - RNA, 19 nt, Homo sapiens
  misc_RNA (1)...(19): siRNA sense strand
gaggugccagccuuuguga

SEQ ID NO: 2097059 - RNA, 19 nt, Homo sapiens
  misc_RNA (1)...(19): siRNA sense strand
cggcaaggccagcaacaug

SEQ ID NO: 2097060 - RNA, 19 nt, Homo sapiens
  misc_RNA (1)...(19): siRNA sense strand
gaagcugcccgcucaccau

SEQ ID NO: 2097061 - RNA, 19 nt, Homo sapiens
  misc_RNA (1)...(19): siRNA sense strand
ugccagccuuugugaagaa

SEQ ID NO: 2097062 - RNA, 19 nt, Homo sapiens
  misc_RNA (1)...(19): siRNA sense strand
gugccagccuuugugaaga

SEQ ID NO: 2097063 - RNA, 19 nt, Homo sapiens
  misc_RNA (1)...(19): siRNA sense strand
gacggaaccugcguacaac

SEQ ID NO: 2097064 - RNA, 19 nt, Homo sapiens
  misc_RNA (1)...(19): siRNA sense strand
ggucacagucucccugaag

SEQ ID NO: 2097065 - RNA, 19 nt, Homo sapiens
  misc_RNA (1)...(19): siRNA sense strand
agugcuaccugcagaagga

SEQ ID NO: 2097066 - RNA, 19 nt, Homo sapiens
  misc_RNA (1)...(19): siRNA sense strand
ggaaggggaaggagaaguu

SEQ ID NO: 2097067 - RNA, 19 nt, Homo sapiens
  misc_RNA (1)...(19): siRNA sense strand
uaccgcagccugaguuuca

SEQ ID NO: 2097068 - RNA, 19 nt, Homo sapiens
  misc_RNA (1)...(19): siRNA sense strand
gcagaugaagcggcacaug

SEQ ID NO: 2097069 - RNA, 19 nt, Homo sapiens
  misc_RNA (1)...(19): siRNA sense strand
cuaccuacccuacgaguac

SEQ ID NO: 2097070 - RNA, 19 nt, Homo sapiens
  misc_RNA (1)...(19): siRNA sense strand
gacagucgacuacaacaac

SEQ ID NO: 2097071 - RNA, 19 nt, Homo sapiens
  misc_RNA (1)...(19): siRNA sense strand
aaguaccggugccgaauca

SEQ ID NO: 2097072 - RNA, 19 nt, Homo sapiens
  misc_RNA (1)...(19): siRNA sense strand
uguggacagucgacuacaa

SEQ ID NO: 2097073 - RNA, 19 nt, Homo sapiens
  misc_RNA (1)...(19): siRNA sense strand
ucugugagcccuccuucuu

SEQ ID NO: 2097074 - RNA, 19 nt, Homo sapiens
  misc_RNA (1)...(19): siRNA sense strand
gcagauccugguccacauc

SEQ ID NO: 2097075 - RNA, 19 nt, Homo sapiens
  misc_RNA (1)...(19): siRNA sense strand
gugccagggcugucuguga

SEQ ID NO: 2097076 - RNA, 19 nt, Homo sapiens
  misc_RNA (1)...(19): siRNA sense strand
ugaccauguuuccucauac

SEQ ID NO: 2097077 - RNA, 19 nt, Homo sapiens
  misc_RNA (1)...(19): siRNA sense strand
accacgggcuaaucuguga

SEQ ID NO: 2097078 - RNA, 19 nt, Homo sapiens
  misc_RNA (1)...(19): siRNA sense strand
ggugccagccuuugugaag

SEQ ID NO: 2097079 - RNA, 19 nt, Homo sapiens
  misc_RNA (1)...(19): siRNA sense strand
ccacccagagggaccagaa

SEQ ID NO: 2097080 - RNA, 19 nt, Homo sapiens
  misc_RNA (1)...(19): siRNA sense strand
ggacggaaccugcguacaa

SEQ ID NO: 2097081 - RNA, 19 nt, Homo sapiens
  misc_RNA (1)...(19): siRNA sense strand
gaacaaauacauggagauc

SEQ ID NO: 2097082 - RNA, 19 nt, Homo sapiens
  misc_RNA (1)...(19): siRNA sense strand
ggaaggagucccugaucuu

SEQ ID NO: 2097083 - RNA, 19 nt, Homo sapiens
  misc_RNA (1)...(19): siRNA sense strand
caucaaggccauuaugaga

SEQ ID NO: 2097084 - RNA, 19 nt, Homo sapiens
  misc_RNA (1)...(19): siRNA sense strand
ggagaagcggcucaucaaa

SEQ ID NO: 2097085 - RNA, 19 nt, Homo sapiens
  misc_RNA (1)...(19): siRNA sense strand
gagaagcggcucaucaaag

SEQ ID NO: 2097086 - RNA, 19 nt, Homo sapiens
  misc_RNA (1)...(19): siRNA sense strand
gcgcaaggccaaacucuuc

SEQ ID NO: 2097087 - RNA, 19 nt, Homo sapiens
  misc_RNA (1)...(19): siRNA sense strand
caacauggccgugguguac

SEQ ID NO: 2097088 - RNA, 19 nt, Homo sapiens
  misc_RNA (1)...(19): siRNA sense strand
agaagcggcucaucaaagg

SEQ ID NO: 2097089 - RNA, 19 nt, Homo sapiens
  misc_RNA (1)...(19): siRNA sense strand
ccaagcaguucaugaccau

SEQ ID NO: 2097090 - RNA, 19 nt, Homo sapiens
  misc_RNA (1)...(19): siRNA sense strand
ggagaugaaccaccuguac

SEQ ID NO: 2097091 - RNA, 19 nt, Homo sapiens
  misc_RNA (1)...(19): siRNA sense strand
ggacagucgacuacaacaa

SEQ ID NO: 2097092 - RNA, 19 nt, Homo sapiens
  misc_RNA (1)...(19): siRNA sense strand
ugaagaagcggaccaagag

SEQ ID NO: 2097093 - RNA, 19 nt, Homo sapiens
  misc_RNA (1)...(19): siRNA sense strand
ugggcauccugaacaaaua

SEQ ID NO: 2097094 - RNA, 19 nt, Homo sapiens
  misc_RNA (1)...(19): siRNA sense strand
gcaacauggccguggugua

SEQ ID NO: 2097095 - RNA, 19 nt, Homo sapiens
  misc_RNA (1)...(19): siRNA sense strand
cauucugacugcacucuau

SEQ ID NO: 2097096 - RNA, 19 nt, Homo sapiens
  misc_RNA (1)...(19): siRNA sense strand
ucaaggccauuaugagaac

SEQ ID NO: 2097097 - RNA, 19 nt, Homo sapiens
  misc_RNA (1)...(19): siRNA sense strand
gcaaggaggcgagcaucug

SEQ ID NO: 2097098 - RNA, 19 nt, Homo sapiens
  misc_RNA (1)...(19): siRNA sense strand
ggaccacgggcuaaucugu

SEQ ID NO: 2097099 - RNA, 19 nt, Homo sapiens
  misc_RNA (1)...(19): siRNA sense strand
gcaagcccaccuccagaga

SEQ ID NO: 2097100 - RNA, 19 nt, Homo sapiens
  misc_RNA (1)...(19): siRNA sense strand
gcagugggcggacauucug

SEQ ID NO: 2097101 - RNA, 19 nt, Homo sapiens
  misc_RNA (1)...(19): siRNA sense strand
gcagccaucaaggccauua

SEQ ID NO: 2097102 - RNA, 19 nt, Homo sapiens
  misc_RNA (1)...(19): siRNA sense strand
gaaguaccggugccgaauc

SEQ ID NO: 2097103 - RNA, 19 nt, Homo sapiens
  misc_RNA (1)...(19): siRNA sense strand
cgccaaugguugcaucuuc

SEQ ID NO: 2097104 - RNA, 19 nt, Homo sapiens
  misc_RNA (1)...(19): siRNA sense strand
gccaucaaggccauuauga

SEQ ID NO: 2097105 - RNA, 19 nt, Homo sapiens
  misc_RNA (1)...(19): siRNA sense strand
acaugggacucuccuucaa

SEQ ID NO: 2097106 - RNA, 19 nt, Homo sapiens
  misc_RNA (1)...(19): siRNA sense strand
cguacaaccacgaggagua

SEQ ID NO: 2097107 - RNA, 19 nt, Homo sapiens
  misc_RNA (1)...(19): siRNA sense strand
cggagaagcggcucaucaa

SEQ ID NO: 2097108 - RNA, 19 nt, Homo sapiens
  misc_RNA (1)...(19): siRNA sense strand
gaggugccagccuuuguga

SEQ ID NO: 2097109 - RNA, 19 nt, Homo sapiens
  misc_RNA (1)...(19): siRNA sense strand
cggcaaggccagcaacaug

SEQ ID NO: 2097110 - RNA, 19 nt, Homo sapiens
  misc_RNA (1)...(19): siRNA sense strand
gaagcugcccgcucaccau

SEQ ID NO: 2097111 - RNA, 19 nt, Homo sapiens
  misc_RNA (1)...(19): siRNA sense strand
ugccagccuuugugaagaa

SEQ ID NO: 2097112 - RNA, 19 nt, Homo sapiens
  misc_RNA (1)...(19): siRNA sense strand
gugccagccuuugugaaga

SEQ ID NO: 2097113 - RNA, 19 nt, Homo sapiens
  misc_RNA (1)...(19): siRNA sense strand
gacggaaccugcguacaac

SEQ ID NO: 2097114 - RNA, 19 nt, Homo sapiens
  misc_RNA (1)...(19): siRNA sense strand
ggucacagucucccugaag

SEQ ID NO: 2097115 - RNA, 19 nt, Homo sapiens
  misc_RNA (1)...(19): siRNA sense strand
agugcuaccugcagaagga

SEQ ID NO: 2097116 - RNA, 19 nt, Homo sapiens
  misc_RNA (1)...(19): siRNA sense strand
ggaaggggaaggagaaguu

SEQ ID NO: 2097117 - RNA, 19 nt, Homo sapiens
  misc_RNA (1)...(19): siRNA sense strand
uaccgcagccugaguuuca

SEQ ID NO: 2097118 - RNA, 19 nt, Homo sapiens
  misc_RNA (1)...(19): siRNA sense strand
gcagaugaagcggcacaug

SEQ ID NO: 2097119 - RNA, 19 nt, Homo sapiens
  misc_RNA (1)...(19): siRNA sense strand
cuaccuacccuacgaguac

SEQ ID NO: 2097120 - RNA, 19 nt, Homo sapiens
  misc_RNA (1)...(19): siRNA sense strand
gacagucgacuacaacaac

SEQ ID NO: 2097121 - RNA, 19 nt, Homo sapiens
  misc_RNA (1)...(19): siRNA sense strand
aaguaccggugccgaauca

SEQ ID NO: 2097122 - RNA, 19 nt, Homo sapiens
  misc_RNA (1)...(19): siRNA sense strand
uguggacagucgacuacaa

SEQ ID NO: 2097123 - RNA, 19 nt, Homo sapiens
  misc_RNA (1)...(19): siRNA sense strand
ucugugagcccuccuucuu

SEQ ID NO: 2097124 - RNA, 19 nt, Homo sapiens
  misc_RNA (1)...(19): siRNA sense strand
gcagauccugguccacauc

SEQ ID NO: 2097125 - RNA, 19 nt, Homo sapiens
  misc_RNA (1)...(19): siRNA sense strand
gugccagggcugucuguga

SEQ ID NO: 2097126 - RNA, 19 nt, Homo sapiens
  misc_RNA (1)...(19): siRNA sense strand
ugaccauguuuccucauac

SEQ ID NO: 2097127 - RNA, 19 nt, Homo sapiens
  misc_RNA (1)...(19): siRNA sense strand
accacgggcuaaucuguga

SEQ ID NO: 2097128 - RNA, 19 nt, Homo sapiens
  misc_RNA (1)...(19): siRNA sense strand
ggugccagccuuugugaag

SEQ ID NO: 2097129 - RNA, 19 nt, Homo sapiens
  misc_RNA (1)...(19): siRNA sense strand
ccacccagagggaccagaa

SEQ ID NO: 2097130 - RNA, 19 nt, Homo sapiens
  misc_RNA (1)...(19): siRNA sense strand
gcaggugcaucuuguuugg

SEQ ID NO: 2097131 - RNA, 19 nt, Homo sapiens
  misc_RNA (1)...(19): siRNA sense strand
cggagacggugcagcagua

SEQ ID NO: 2097132 - RNA, 19 nt, Homo sapiens
  misc_RNA (1)...(19): siRNA sense strand
gagcgugucucugcugcuu

SEQ ID NO: 2097133 - RNA, 19 nt, Homo sapiens
  misc_RNA (1)...(19): siRNA sense strand
gggcaggcuugguggagaa

SEQ ID NO: 2097134 - RNA, 19 nt, Homo sapiens
  misc_RNA (1)...(19): siRNA sense strand
ccaggcaggugcaucuugu

SEQ ID NO: 2097135 - RNA, 19 nt, Homo sapiens
  misc_RNA (1)...(19): siRNA sense strand
gugccaggcuccuaugcuu

SEQ ID NO: 2097136 - RNA, 19 nt, Homo sapiens
  misc_RNA (1)...(19): siRNA sense strand
guggagaagaggcugauga

SEQ ID NO: 2097137 - RNA, 19 nt, Homo sapiens
  misc_RNA (1)...(19): siRNA sense strand
guucagggaaauuaaggaa

SEQ ID NO: 2097138 - RNA, 19 nt, Homo sapiens
  misc_RNA (1)...(19): siRNA sense strand
ggagaagaggcugaugaga

SEQ ID NO: 2097139 - RNA, 19 nt, Homo sapiens
  misc_RNA (1)...(19): siRNA sense strand
gcagagagguggggucgau

SEQ ID NO: 2097140 - RNA, 19 nt, Homo sapiens
  misc_RNA (1)...(19): siRNA sense strand
gcaucuacaucagcuacuc

SEQ ID NO: 2097141 - RNA, 19 nt, Homo sapiens
  misc_RNA (1)...(19): siRNA sense strand
aaucuguggucaucugagu

SEQ ID NO: 2097142 - RNA, 19 nt, Homo sapiens
  misc_RNA (1)...(19): siRNA sense strand
ccucuguucuguccacucu

SEQ ID NO: 2097143 - RNA, 19 nt, Homo sapiens
  misc_RNA (1)...(19): siRNA sense strand
ugggugcacugcucagcuu

SEQ ID NO: 2097144 - RNA, 19 nt, Homo sapiens
  misc_RNA (1)...(19): siRNA sense strand
ggcaggugcaucuuguuug

SEQ ID NO: 2097145 - RNA, 19 nt, Homo sapiens
  misc_RNA (1)...(19): siRNA sense strand
gaacagcgaucugaacuuu

SEQ ID NO: 2097146 - RNA, 19 nt, Homo sapiens
  misc_RNA (1)...(19): siRNA sense strand
ugaaagcacuggacaauaa

SEQ ID NO: 2097147 - RNA, 19 nt, Homo sapiens
  misc_RNA (1)...(19): siRNA sense strand
gcaaagagcuggaaaagaa

SEQ ID NO: 2097148 - RNA, 19 nt, Homo sapiens
  misc_RNA (1)...(19): siRNA sense strand
gcauaggucucuuagauga

SEQ ID NO: 2097149 - RNA, 19 nt, Homo sapiens
  misc_RNA (1)...(19): siRNA sense strand
gcacacagauggaacuuuc

SEQ ID NO: 2097150 - RNA, 19 nt, Homo sapiens
  misc_RNA (1)...(19): siRNA sense strand
caacucauccugaagguua

SEQ ID NO: 2097151 - RNA, 19 nt, Homo sapiens
  misc_RNA (1)...(19): siRNA sense strand
ggagaucuauggaauugaa

SEQ ID NO: 2097152 - RNA, 19 nt, Homo sapiens
  misc_RNA (1)...(19): siRNA sense strand
gaagagcccuggagaagag

SEQ ID NO: 2097153 - RNA, 19 nt, Homo sapiens
  misc_RNA (1)...(19): siRNA sense strand
gaucauuccuuuaguuuag

SEQ ID NO: 2097154 - RNA, 19 nt, Homo sapiens
  misc_RNA (1)...(19): siRNA sense strand
ugagaagccuggucaauau

SEQ ID NO: 2097155 - RNA, 19 nt, Homo sapiens
  misc_RNA (1)...(19): siRNA sense strand
caggaaugcucccuucaua

SEQ ID NO: 2097156 - RNA, 19 nt, Homo sapiens
  misc_RNA (1)...(19): siRNA sense strand
gauaguggcaucuguauga

SEQ ID NO: 2097157 - RNA, 19 nt, Homo sapiens
  misc_RNA (1)...(19): siRNA sense strand
acaauaagcugugcucuga

SEQ ID NO: 2097158 - RNA, 19 nt, Homo sapiens
  misc_RNA (1)...(19): siRNA sense strand
agagggaaaugauguuaua

SEQ ID NO: 2097159 - RNA, 19 nt, Homo sapiens
  misc_RNA (1)...(19): siRNA sense strand
uaagguggcugaagacgaa

SEQ ID NO: 2097160 - RNA, 19 nt, Homo sapiens
  misc_RNA (1)...(19): siRNA sense strand
gaccaguuguguuuccuua

SEQ ID NO: 2097161 - RNA, 19 nt, Homo sapiens
  misc_RNA (1)...(19): siRNA sense strand
gagcauccauccucagaga

SEQ ID NO: 2097162 - RNA, 19 nt, Homo sapiens
  misc_RNA (1)...(19): siRNA sense strand
gaagaggccaguaaagcua

SEQ ID NO: 2097163 - RNA, 19 nt, Homo sapiens
  misc_RNA (1)...(19): siRNA sense strand
gagcuuggcuuugauuuag

SEQ ID NO: 2097164 - RNA, 19 nt, Homo sapiens
  misc_RNA (1)...(19): siRNA sense strand
caagguaguucaguuauca

SEQ ID NO: 2097165 - RNA, 19 nt, Homo sapiens
  misc_RNA (1)...(19): siRNA sense strand
gaagaguuccagaauggua

SEQ ID NO: 2097166 - RNA, 19 nt, Homo sapiens
  misc_RNA (1)...(19): siRNA sense strand
ggguauagaugaccuggaa

SEQ ID NO: 2097167 - RNA, 19 nt, Homo sapiens
  misc_RNA (1)...(19): siRNA sense strand
aagcauaggucucuuagau

SEQ ID NO: 2097168 - RNA, 19 nt, Homo sapiens
  misc_RNA (1)...(19): siRNA sense strand
ggagaggaaugugguguga

SEQ ID NO: 2097169 - RNA, 19 nt, Homo sapiens
  misc_RNA (1)...(19): siRNA sense strand
ggaaugcucccuucauaug

SEQ ID NO: 2097170 - RNA, 19 nt, Homo sapiens
  misc_RNA (1)...(19): siRNA sense strand
gaagacgaagugagugaua

SEQ ID NO: 2097171 - RNA, 19 nt, Homo sapiens
  misc_RNA (1)...(19): siRNA sense strand
uccaguaccugaaagauuu

SEQ ID NO: 2097172 - RNA, 19 nt, Homo sapiens
  misc_RNA (1)...(19): siRNA sense strand
ucacaagguaguucaguua

SEQ ID NO: 2097173 - RNA, 19 nt, Homo sapiens
  misc_RNA (1)...(19): siRNA sense strand
gguauggagugugacaaua

SEQ ID NO: 2097174 - RNA, 19 nt, Homo sapiens
  misc_RNA (1)...(19): siRNA sense strand
caggagaucuauggaauug

SEQ ID NO: 2097175 - RNA, 19 nt, Homo sapiens
  misc_RNA (1)...(19): siRNA sense strand
ccugaaagauuugauagaa

SEQ ID NO: 2097176 - RNA, 19 nt, Homo sapiens
  misc_RNA (1)...(19): siRNA sense strand
ccagaucauuccuuuaguu

SEQ ID NO: 2097177 - RNA, 19 nt, Homo sapiens
  misc_RNA (1)...(19): siRNA sense strand
gaagaaagcauaggucucu

SEQ ID NO: 2097178 - RNA, 19 nt, Homo sapiens
  misc_RNA (1)...(19): siRNA sense strand
caaaugugcugaggaagug

SEQ ID NO: 2097179 - RNA, 19 nt, Homo sapiens
  misc_RNA (1)...(19): siRNA sense strand
ucaaagcaccgcaacauga

SEQ ID NO: 2097180 - RNA, 19 nt, Homo sapiens
  misc_RNA (1)...(19): siRNA sense strand
ggagcuuggcuuugauuua

SEQ ID NO: 2097181 - RNA, 19 nt, Homo sapiens
  misc_RNA (1)...(19): siRNA sense strand
cgucaaaugugcugaggaa

SEQ ID NO: 2097182 - RNA, 19 nt, Homo sapiens
  misc_RNA (1)...(19): siRNA sense strand
ugacucaacucauccugaa

SEQ ID NO: 2097183 - RNA, 19 nt, Homo sapiens
  misc_RNA (1)...(19): siRNA sense strand
aagaggagcuuggcuuuga

SEQ ID NO: 2097184 - RNA, 19 nt, Homo sapiens
  misc_RNA (1)...(19): siRNA sense strand
gauggaacuuucuguguca

SEQ ID NO: 2097185 - RNA, 19 nt, Homo sapiens
  misc_RNA (1)...(19): siRNA sense strand
ggagagaacagcgaucuga

SEQ ID NO: 2097186 - RNA, 19 nt, Homo sapiens
  misc_RNA (1)...(19): siRNA sense strand
gcagagggaaaugauguua

SEQ ID NO: 2097187 - RNA, 19 nt, Homo sapiens
  misc_RNA (1)...(19): siRNA sense strand
ccagcuacauucccaaaga

SEQ ID NO: 2097188 - RNA, 19 nt, Homo sapiens
  misc_RNA (1)...(19): siRNA sense strand
cgacuuuggugcccuguug

SEQ ID NO: 2097189 - RNA, 19 nt, Homo sapiens
  misc_RNA (1)...(19): siRNA sense strand
gggaaaugauguuauagag

SEQ ID NO: 2097190 - RNA, 19 nt, Homo sapiens
  misc_RNA (1)...(19): siRNA sense strand
caugaucccucagugcaua

SEQ ID NO: 2097191 - RNA, 19 nt, Homo sapiens
  misc_RNA (1)...(19): siRNA sense strand
guuuagagcugggcaguga

SEQ ID NO: 2097192 - RNA, 19 nt, Homo sapiens
  misc_RNA (1)...(19): siRNA sense strand
cagauucccuggccaagga

SEQ ID NO: 2097193 - RNA, 19 nt, Homo sapiens
  misc_RNA (1)...(19): siRNA sense strand
caaacagaaacaaguagua

SEQ ID NO: 2097194 - RNA, 19 nt, Homo sapiens
  misc_RNA (1)...(19): siRNA sense strand
ggagauccaguaccugaaa

SEQ ID NO: 2097195 - RNA, 19 nt, Homo sapiens
  misc_RNA (1)...(19): siRNA sense strand
guauggagugugacaauaa

SEQ ID NO: 2097196 - RNA, 19 nt, Homo sapiens
  misc_RNA (1)...(19): siRNA sense strand
ggaagagucaggaagcuau

SEQ ID NO: 2097197 - RNA, 19 nt, Homo sapiens
  misc_RNA (1)...(19): siRNA sense strand
agaaugguauugccagcua

SEQ ID NO: 2097198 - RNA, 19 nt, Homo sapiens
  misc_RNA (1)...(19): siRNA sense strand
ugaaggaguucgacuuugg

SEQ ID NO: 2097199 - RNA, 19 nt, Homo sapiens
  misc_RNA (1)...(19): siRNA sense strand
cgaagugagugauaacagu

SEQ ID NO: 2097200 - RNA, 19 nt, Homo sapiens
  misc_RNA (1)...(19): siRNA sense strand
gcaaagcagagaaucacaa

SEQ ID NO: 2097201 - RNA, 19 nt, Homo sapiens
  misc_RNA (1)...(19): siRNA sense strand
ccucugucauccacuauuu

SEQ ID NO: 2097202 - RNA, 19 nt, Homo sapiens
  misc_RNA (1)...(19): siRNA sense strand
guaccugaaagauuugaua

SEQ ID NO: 2097203 - RNA, 19 nt, Homo sapiens
  misc_RNA (1)...(19): siRNA sense strand
uggaaaccaugccagauga

SEQ ID NO: 2097204 - RNA, 19 nt, Homo sapiens
  misc_RNA (1)...(19): siRNA sense strand
ccagaggacgugcgcauuu

SEQ ID NO: 2097205 - RNA, 19 nt, Homo sapiens
  misc_RNA (1)...(19): siRNA sense strand
gcuaugaaguaguaucucu

SEQ ID NO: 2097206 - RNA, 19 nt, Homo sapiens
  misc_RNA (1)...(19): siRNA sense strand
ggaugaaggagacgaguau

SEQ ID NO: 2097207 - RNA, 19 nt, Homo sapiens
  misc_RNA (1)...(19): siRNA sense strand
gaagaacgaggcucuaaaa

SEQ ID NO: 2097208 - RNA, 19 nt, Homo sapiens
  misc_RNA (1)...(19): siRNA sense strand
ugacacuuguaaucucuuu

SEQ ID NO: 2097209 - RNA, 19 nt, Homo sapiens
  misc_RNA (1)...(19): siRNA sense strand
uagaugaccuggaaaccau

SEQ ID NO: 2097210 - RNA, 19 nt, Homo sapiens
  misc_RNA (1)...(19): siRNA sense strand
ugacaucgcaagcgugaaa

SEQ ID NO: 2097211 - RNA, 19 nt, Homo sapiens
  misc_RNA (1)...(19): siRNA sense strand
guggacaucccgucuaauu

SEQ ID NO: 2097212 - RNA, 19 nt, Homo sapiens
  misc_RNA (1)...(19): siRNA sense strand
ccaaggagauccaguaccu

SEQ ID NO: 2097213 - RNA, 19 nt, Homo sapiens
  misc_RNA (1)...(19): siRNA sense strand
gaugacacuuguaaucucu

SEQ ID NO: 2097214 - RNA, 19 nt, Homo sapiens
  misc_RNA (1)...(19): siRNA sense strand
ggaugacacuuguaaucuc

SEQ ID NO: 2097215 - RNA, 19 nt, Homo sapiens
  misc_RNA (1)...(19): siRNA sense strand
gaaagcauaggucucuuag

SEQ ID NO: 2097216 - RNA, 19 nt, Homo sapiens
  misc_RNA (1)...(19): siRNA sense strand
uaacaaugacuuugacauc

SEQ ID NO: 2097217 - RNA, 19 nt, Homo sapiens
  misc_RNA (1)...(19): siRNA sense strand
ccgagaaguuuacccucua

SEQ ID NO: 2097218 - RNA, 19 nt, Homo sapiens
  misc_RNA (1)...(19): siRNA sense strand
gaugguagcagcaaaagua

SEQ ID NO: 2097219 - RNA, 19 nt, Homo sapiens
  misc_RNA (1)...(19): siRNA sense strand
agaaagcauaggucucuua

SEQ ID NO: 2097220 - RNA, 19 nt, Homo sapiens
  misc_RNA (1)...(19): siRNA sense strand
guacaacacacaagauucu

SEQ ID NO: 2097221 - RNA, 19 nt, Homo sapiens
  misc_RNA (1)...(19): siRNA sense strand
ggauugugguaucagcauu

SEQ ID NO: 2097222 - RNA, 19 nt, Homo sapiens
  misc_RNA (1)...(19): siRNA sense strand
ugauuuagaccgagaaguu

SEQ ID NO: 2097223 - RNA, 19 nt, Homo sapiens
  misc_RNA (1)...(19): siRNA sense strand
gaagaggagcuuggcuuug

SEQ ID NO: 2097224 - RNA, 19 nt, Homo sapiens
  misc_RNA (1)...(19): siRNA sense strand
ggguagccaucaccaucua

SEQ ID NO: 2097225 - RNA, 19 nt, Homo sapiens
  misc_RNA (1)...(19): siRNA sense strand
cuggaaagccucuggauug

SEQ ID NO: 2097226 - RNA, 19 nt, Homo sapiens
  misc_RNA (1)...(19): siRNA sense strand
ccucaaacagaaacaagua

SEQ ID NO: 2097227 - RNA, 19 nt, Homo sapiens
  misc_RNA (1)...(19): siRNA sense strand
cgaagaggagcuuggcuuu

SEQ ID NO: 2097228 - RNA, 19 nt, Homo sapiens
  misc_RNA (1)...(19): siRNA sense strand
gaagagucaggaagcuauu

SEQ ID NO: 2097229 - RNA, 19 nt, Homo sapiens
  misc_RNA (1)...(19): siRNA sense strand
guaguucaguuaucaaagc

SEQ ID NO: 2097230 - RNA, 19 nt, Homo sapiens
  misc_RNA (1)...(19): siRNA sense strand
cauccauccucagagaaua

SEQ ID NO: 2097231 - RNA, 19 nt, Homo sapiens
  misc_RNA (1)...(19): siRNA sense strand
cacugaggcucgucaaaug

SEQ ID NO: 2097232 - RNA, 19 nt, Homo sapiens
  misc_RNA (1)...(19): siRNA sense strand
cugagaagccuggucaaua

SEQ ID NO: 2097233 - RNA, 19 nt, Homo sapiens
  misc_RNA (1)...(19): siRNA sense strand
cagaucauuccuuuaguuu

SEQ ID NO: 2097234 - RNA, 19 nt, Homo sapiens
  misc_RNA (1)...(19): siRNA sense strand
gaauauuccaccaggcuau

SEQ ID NO: 2097235 - RNA, 19 nt, Homo sapiens
  misc_RNA (1)...(19): siRNA sense strand
gauuuagaccgagaaguuu

SEQ ID NO: 2097236 - RNA, 19 nt, Homo sapiens
  misc_RNA (1)...(19): siRNA sense strand
guaaagcuaaaguccacua

SEQ ID NO: 2097237 - RNA, 19 nt, Homo sapiens
  misc_RNA (1)...(19): siRNA sense strand
agacagcagccacuaggua

SEQ ID NO: 2097238 - RNA, 19 nt, Homo sapiens
  misc_RNA (1)...(19): siRNA sense strand
gagaagcacacagauggaa

SEQ ID NO: 2097239 - RNA, 19 nt, Homo sapiens
  misc_RNA (1)...(19): siRNA sense strand
gagacgaggcccugugugu

SEQ ID NO: 2097240 - RNA, 19 nt, Homo sapiens
  misc_RNA (1)...(19): siRNA sense strand
caauaacaaugacuuugac

SEQ ID NO: 2097241 - RNA, 19 nt, Homo sapiens
  misc_RNA (1)...(19): siRNA sense strand
aagacgaagugagugauaa

SEQ ID NO: 2097242 - RNA, 19 nt, Homo sapiens
  misc_RNA (1)...(19): siRNA sense strand
gccagccacuucauuaugg

SEQ ID NO: 2097243 - RNA, 19 nt, Homo sapiens
  misc_RNA (1)...(19): siRNA sense strand
gagagaacagcgaucugaa

SEQ ID NO: 2097244 - RNA, 19 nt, Homo sapiens
  misc_RNA (1)...(19): siRNA sense strand
gugaaagcacuggacaaua

SEQ ID NO: 2097245 - RNA, 19 nt, Homo sapiens
  misc_RNA (1)...(19): siRNA sense strand
ggacguacgcuguguguuc

SEQ ID NO: 2097246 - RNA, 19 nt, Homo sapiens
  misc_RNA (1)...(19): siRNA sense strand
uguguguucuuacugcuua

SEQ ID NO: 2097247 - RNA, 19 nt, Homo sapiens
  misc_RNA (1)...(19): siRNA sense strand
gaguagcaguggccacaug

SEQ ID NO: 2097248 - RNA, 19 nt, Homo sapiens
  misc_RNA (1)...(19): siRNA sense strand
ccaccucucuucauguucu

SEQ ID NO: 2097249 - RNA, 19 nt, Homo sapiens
  misc_RNA (1)...(19): siRNA sense strand
cguacgcuguguguucuua

SEQ ID NO: 2097250 - RNA, 19 nt, Homo sapiens
  misc_RNA (1)...(19): siRNA sense strand
gcucagcaccugcccagau

SEQ ID NO: 2097251 - RNA, 19 nt, Homo sapiens
  misc_RNA (1)...(19): siRNA sense strand
acaccaucuuggacucuuu

SEQ ID NO: 2097252 - RNA, 19 nt, Homo sapiens
  misc_RNA (1)...(19): siRNA sense strand
gauggccucugcgucuuuc

SEQ ID NO: 2097253 - RNA, 19 nt, Homo sapiens
  misc_RNA (1)...(19): siRNA sense strand
gacguacgcuguguguucu

SEQ ID NO: 2097254 - RNA, 19 nt, Homo sapiens
  misc_RNA (1)...(19): siRNA sense strand
gacaccaucuuggacucuu

SEQ ID NO: 2097255 - RNA, 19 nt, Homo sapiens
  misc_RNA (1)...(19): siRNA sense strand
uuccaccucucuucauguu

SEQ ID NO: 2097256 - RNA, 19 nt, Homo sapiens
  misc_RNA (1)...(19): siRNA sense strand
ccggaacucugcccacacu

SEQ ID NO: 2097257 - RNA, 19 nt, Homo sapiens
  misc_RNA (1)...(19): siRNA sense strand
ucucauggagugcaaagug

SEQ ID NO: 2097258 - RNA, 19 nt, Homo sapiens
  misc_RNA (1)...(19): siRNA sense strand
gauucaggacaccaucuug

SEQ ID NO: 2097259 - RNA, 19 nt, Homo sapiens
  misc_RNA (1)...(19): siRNA sense strand
gaagaaaucuggccuacaa

SEQ ID NO: 2097260 - RNA, 19 nt, Homo sapiens
  misc_RNA (1)...(19): siRNA sense strand
gaaacuagcuguuauacau

SEQ ID NO: 2097261 - RNA, 19 nt, Homo sapiens
  misc_RNA (1)...(19): siRNA sense strand
cagcaggacuucacauuua

SEQ ID NO: 2097262 - RNA, 19 nt, Homo sapiens
  misc_RNA (1)...(19): siRNA sense strand
ugaaagaucuccagaguga

SEQ ID NO: 2097263 - RNA, 19 nt, Homo sapiens
  misc_RNA (1)...(19): siRNA sense strand
gaagagaaaugggucacua

SEQ ID NO: 2097264 - RNA, 19 nt, Homo sapiens
  misc_RNA (1)...(19): siRNA sense strand
gaagaaacaauaucuguga

SEQ ID NO: 2097265 - RNA, 19 nt, Homo sapiens
  misc_RNA (1)...(19): siRNA sense strand
gcagagaguugccgauuuc

SEQ ID NO: 2097266 - RNA, 19 nt, Homo sapiens
  misc_RNA (1)...(19): siRNA sense strand
gaacgagccugcgcaaguu

SEQ ID NO: 2097267 - RNA, 19 nt, Homo sapiens
  misc_RNA (1)...(19): siRNA sense strand
ugaauuggaugacuuagaa

SEQ ID NO: 2097268 - RNA, 19 nt, Homo sapiens
  misc_RNA (1)...(19): siRNA sense strand
uaaagaaagugccuacaug

SEQ ID NO: 2097269 - RNA, 19 nt, Homo sapiens
  misc_RNA (1)...(19): siRNA sense strand
gaaagugccuacauguugu

SEQ ID NO: 2097270 - RNA, 19 nt, Homo sapiens
  misc_RNA (1)...(19): siRNA sense strand
gaauugagaucugcuuaga

SEQ ID NO: 2097271 - RNA, 19 nt, Homo sapiens
  misc_RNA (1)...(19): siRNA sense strand
uaugaccucuucucaguua

SEQ ID NO: 2097272 - RNA, 19 nt, Homo sapiens
  misc_RNA (1)...(19): siRNA sense strand
caaggaaacuagcuguuau

SEQ ID NO: 2097273 - RNA, 19 nt, Homo sapiens
  misc_RNA (1)...(19): siRNA sense strand
agaaaugggucacuaguau

SEQ ID NO: 2097274 - RNA, 19 nt, Homo sapiens
  misc_RNA (1)...(19): siRNA sense strand
ggacagaaauggaaaucgu

SEQ ID NO: 2097275 - RNA, 19 nt, Homo sapiens
  misc_RNA (1)...(19): siRNA sense strand
gaaggagacaugguucuua

SEQ ID NO: 2097276 - RNA, 19 nt, Homo sapiens
  misc_RNA (1)...(19): siRNA sense strand
ggaugcagcuaacauugaa

SEQ ID NO: 2097277 - RNA, 19 nt, Homo sapiens
  misc_RNA (1)...(19): siRNA sense strand
gaaggaagcagaauugaag

SEQ ID NO: 2097278 - RNA, 19 nt, Homo sapiens
  misc_RNA (1)...(19): siRNA sense strand
ggaacaagaaguacagaaa

SEQ ID NO: 2097279 - RNA, 19 nt, Homo sapiens
  misc_RNA (1)...(19): siRNA sense strand
gaaagacggagauacuauu

SEQ ID NO: 2097280 - RNA, 19 nt, Homo sapiens
  misc_RNA (1)...(19): siRNA sense strand
ggaaaucguaguagaagaa

SEQ ID NO: 2097281 - RNA, 19 nt, Homo sapiens
  misc_RNA (1)...(19): siRNA sense strand
ggagauacuuugcuuuuaa

SEQ ID NO: 2097282 - RNA, 19 nt, Homo sapiens
  misc_RNA (1)...(19): siRNA sense strand
gaaaugggaagcuucuuug

SEQ ID NO: 2097283 - RNA, 19 nt, Homo sapiens
  misc_RNA (1)...(19): siRNA sense strand
gagauacuauugguguuaa

SEQ ID NO: 2097284 - RNA, 19 nt, Homo sapiens
  misc_RNA (1)...(19): siRNA sense strand
gaccucuucucaguuauua

SEQ ID NO: 2097285 - RNA, 19 nt, Homo sapiens
  misc_RNA (1)...(19): siRNA sense strand
ggacagcuauacuuugaag

SEQ ID NO: 2097286 - RNA, 19 nt, Homo sapiens
  misc_RNA (1)...(19): siRNA sense strand
gaauuaaagccauaaagga

SEQ ID NO: 2097287 - RNA, 19 nt, Homo sapiens
  misc_RNA (1)...(19): siRNA sense strand
gaaagcgugugggauuuga

SEQ ID NO: 2097288 - RNA, 19 nt, Homo sapiens
  misc_RNA (1)...(19): siRNA sense strand
gaugaugauuucaguacaa

SEQ ID NO: 2097289 - RNA, 19 nt, Homo sapiens
  misc_RNA (1)...(19): siRNA sense strand
ccagauuguuuguaaagaa

SEQ ID NO: 2097290 - RNA, 19 nt, Homo sapiens
  misc_RNA (1)...(19): siRNA sense strand
ugacgacgaugaugauuuc

SEQ ID NO: 2097291 - RNA, 19 nt, Homo sapiens
  misc_RNA (1)...(19): siRNA sense strand
ggagauacuauugguguua

SEQ ID NO: 2097292 - RNA, 19 nt, Homo sapiens
  misc_RNA (1)...(19): siRNA sense strand
gcaaguuucucuccucuac

SEQ ID NO: 2097293 - RNA, 19 nt, Homo sapiens
  misc_RNA (1)...(19): siRNA sense strand
gaagaugggaaguucauug

SEQ ID NO: 2097294 - RNA, 19 nt, Homo sapiens
  misc_RNA (1)...(19): siRNA sense strand
gucaauauuucagcuguua

SEQ ID NO: 2097295 - RNA, 19 nt, Homo sapiens
  misc_RNA (1)...(19): siRNA sense strand
ggauuugaccuuugauaaa

SEQ ID NO: 2097296 - RNA, 19 nt, Homo sapiens
  misc_RNA (1)...(19): siRNA sense strand
gagaaaugggucacuagua

SEQ ID NO: 2097297 - RNA, 19 nt, Homo sapiens
  misc_RNA (1)...(19): siRNA sense strand
acauagagaucucagaaga

SEQ ID NO: 2097298 - RNA, 19 nt, Homo sapiens
  misc_RNA (1)...(19): siRNA sense strand
guuagaaucugaagagaag

SEQ ID NO: 2097299 - RNA, 19 nt, Homo sapiens
  misc_RNA (1)...(19): siRNA sense strand
uacguaagcugccuccuuu

SEQ ID NO: 2097300 - RNA, 19 nt, Homo sapiens
  misc_RNA (1)...(19): siRNA sense strand
gcaccaaguucgucucagu

SEQ ID NO: 2097301 - RNA, 19 nt, Homo sapiens
  misc_RNA (1)...(19): siRNA sense strand
ccacugguuugauauaaau

SEQ ID NO: 2097302 - RNA, 19 nt, Homo sapiens
  misc_RNA (1)...(19): siRNA sense strand
ccaaaggaaugaccagcaa

SEQ ID NO: 2097303 - RNA, 19 nt, Homo sapiens
  misc_RNA (1)...(19): siRNA sense strand
cagcaaagucggccaaauu

SEQ ID NO: 2097304 - RNA, 19 nt, Homo sapiens
  misc_RNA (1)...(19): siRNA sense strand
aaacuaggacggagaauug

SEQ ID NO: 2097305 - RNA, 19 nt, Homo sapiens
  misc_RNA (1)...(19): siRNA sense strand
ugaaggaacuagcugacaa

SEQ ID NO: 2097306 - RNA, 19 nt, Homo sapiens
  misc_RNA (1)...(19): siRNA sense strand
ucucagauauuucuacuca

SEQ ID NO: 2097307 - RNA, 19 nt, Homo sapiens
  misc_RNA (1)...(19): siRNA sense strand
uauaugaccucuucucagu

SEQ ID NO: 2097308 - RNA, 19 nt, Homo sapiens
  misc_RNA (1)...(19): siRNA sense strand
gagaguugccgauuucuau

SEQ ID NO: 2097309 - RNA, 19 nt, Homo sapiens
  misc_RNA (1)...(19): siRNA sense strand
cagcaacuguuaacacaau

SEQ ID NO: 2097310 - RNA, 19 nt, Homo sapiens
  misc_RNA (1)...(19): siRNA sense strand
caagaugcuuccuccagaa

SEQ ID NO: 2097311 - RNA, 19 nt, Homo sapiens
  misc_RNA (1)...(19): siRNA sense strand
ccggacagcuauacuuuga

SEQ ID NO: 2097312 - RNA, 19 nt, Homo sapiens
  misc_RNA (1)...(19): siRNA sense strand
ugugagagauuguuuaaag

SEQ ID NO: 2097313 - RNA, 19 nt, Homo sapiens
  misc_RNA (1)...(19): siRNA sense strand
cguaguagaagaaacaaua

SEQ ID NO: 2097314 - RNA, 19 nt, Homo sapiens
  misc_RNA (1)...(19): siRNA sense strand
gccauuaccauguauauau

SEQ ID NO: 2097315 - RNA, 19 nt, Homo sapiens
  misc_RNA (1)...(19): siRNA sense strand
uggcggagcugaagucuca

SEQ ID NO: 2097316 - RNA, 19 nt, Homo sapiens
  misc_RNA (1)...(19): siRNA sense strand
gaagaagaugcaacacuga

SEQ ID NO: 2097317 - RNA, 19 nt, Homo sapiens
  misc_RNA (1)...(19): siRNA sense strand
gcuccauucucagauauuu

SEQ ID NO: 2097318 - RNA, 19 nt, Homo sapiens
  misc_RNA (1)...(19): siRNA sense strand
gagaauugagaucugcuua

SEQ ID NO: 2097319 - RNA, 19 nt, Homo sapiens
  misc_RNA (1)...(19): siRNA sense strand
ggaacgagccugcgcaagu

SEQ ID NO: 2097320 - RNA, 19 nt, Homo sapiens
  misc_RNA (1)...(19): siRNA sense strand
cagaaagcgugugggauuu

SEQ ID NO: 2097321 - RNA, 19 nt, Homo sapiens
  misc_RNA (1)...(19): siRNA sense strand
gaaaguacaguucgucucu

SEQ ID NO: 2097322 - RNA, 19 nt, Homo sapiens
  misc_RNA (1)...(19): siRNA sense strand
gaaccauuguuaaccagau

SEQ ID NO: 2097323 - RNA, 19 nt, Homo sapiens
  misc_RNA (1)...(19): siRNA sense strand
ggaaugaccagcaaauuuu

SEQ ID NO: 2097324 - RNA, 19 nt, Homo sapiens
  misc_RNA (1)...(19): siRNA sense strand
ggagagccuuuaugugaag

SEQ ID NO: 2097325 - RNA, 19 nt, Homo sapiens
  misc_RNA (1)...(19): siRNA sense strand
gaugcucucuggaacaugu

SEQ ID NO: 2097326 - RNA, 19 nt, Homo sapiens
  misc_RNA (1)...(19): siRNA sense strand
gccaugaccuugccuccuu

SEQ ID NO: 2097327 - RNA, 19 nt, Homo sapiens
  misc_RNA (1)...(19): siRNA sense strand
ggugucaucuucaucaaca

SEQ ID NO: 2097328 - RNA, 19 nt, Homo sapiens
  misc_RNA (1)...(19): siRNA sense strand
gggauuugaccuuugauaa

SEQ ID NO: 2097329 - RNA, 19 nt, Homo sapiens
  misc_RNA (1)...(19): siRNA sense strand
gaaaugcgaacgcuacaag

SEQ ID NO: 2097330 - RNA, 19 nt, Homo sapiens
  misc_RNA (1)...(19): siRNA sense strand
agacaugguucuuaguguu

SEQ ID NO: 2097331 - RNA, 19 nt, Homo sapiens
  misc_RNA (1)...(19): siRNA sense strand
agaaagugccuacauguug

SEQ ID NO: 2097332 - RNA, 19 nt, Homo sapiens
  misc_RNA (1)...(19): siRNA sense strand
acaaggaaacuagcuguua

SEQ ID NO: 2097333 - RNA, 19 nt, Homo sapiens
  misc_RNA (1)...(19): siRNA sense strand
gaccucaucuaucgucugu

SEQ ID NO: 2097334 - RNA, 19 nt, Homo sapiens
  misc_RNA (1)...(19): siRNA sense strand
uagcuggaaccaacaaaua

SEQ ID NO: 2097335 - RNA, 19 nt, Homo sapiens
  misc_RNA (1)...(19): siRNA sense strand
gauugaaauugccaaauac

SEQ ID NO: 2097336 - RNA, 19 nt, Homo sapiens
  misc_RNA (1)...(19): siRNA sense strand
ucagauauuucuacucagu

SEQ ID NO: 2097337 - RNA, 19 nt, Homo sapiens
  misc_RNA (1)...(19): siRNA sense strand
gagacaugguucuuagugu

SEQ ID NO: 2097338 - RNA, 19 nt, Homo sapiens
  misc_RNA (1)...(19): siRNA sense strand
gaagauugaaauugccaaa

SEQ ID NO: 2097339 - RNA, 19 nt, Homo sapiens
  misc_RNA (1)...(19): siRNA sense strand
gaaaucuggccuacaagga

SEQ ID NO: 2097340 - RNA, 19 nt, Homo sapiens
  misc_RNA (1)...(19): siRNA sense strand
agaaauggaaaucguagua

SEQ ID NO: 2097341 - RNA, 19 nt, Homo sapiens
  misc_RNA (1)...(19): siRNA sense strand
ucacuaguaugaaugagau

SEQ ID NO: 2097342 - RNA, 19 nt, Homo sapiens
  misc_RNA (1)...(19): siRNA sense strand
gagugaauuggaugacuua

SEQ ID NO: 2097343 - RNA, 19 nt, Homo sapiens
  misc_RNA (1)...(19): siRNA sense strand
gguguuugauauucgaauu

SEQ ID NO: 2097344 - RNA, 19 nt, Homo sapiens
  misc_RNA (1)...(19): siRNA sense strand
ccucuucucaguuauuaua

SEQ ID NO: 2097345 - RNA, 19 nt, Homo sapiens
  misc_RNA (1)...(19): siRNA sense strand
gaaaagaaaagcagaaaca

SEQ ID NO: 2097346 - RNA, 19 nt, Homo sapiens
  misc_RNA (1)...(19): siRNA sense strand
cgacgaugaugauuucagu

SEQ ID NO: 2097347 - RNA, 19 nt, Homo sapiens
  misc_RNA (1)...(19): siRNA sense strand
gauauguucuggagauacu

SEQ ID NO: 2097348 - RNA, 19 nt, Homo sapiens
  misc_RNA (1)...(19): siRNA sense strand
cuggagagccuuuauguga

SEQ ID NO: 2097349 - RNA, 19 nt, Homo sapiens
  misc_RNA (1)...(19): siRNA sense strand
aaauggaaaucguaguaga

SEQ ID NO: 2097350 - RNA, 19 nt, Homo sapiens
  misc_RNA (1)...(19): siRNA sense strand
gaaaugggucacuaguaug

SEQ ID NO: 2097351 - RNA, 19 nt, Homo sapiens
  misc_RNA (1)...(19): siRNA sense strand
acagaaagcgugugggauu

SEQ ID NO: 2097352 - RNA, 19 nt, Homo sapiens
  misc_RNA (1)...(19): siRNA sense strand
acauugaacugcaaaccaa

SEQ ID NO: 2097353 - RNA, 19 nt, Homo sapiens
  misc_RNA (1)...(19): siRNA sense strand
guaaagaaagugccuacau

SEQ ID NO: 2097354 - RNA, 19 nt, Homo sapiens
  misc_RNA (1)...(19): siRNA sense strand
gaacaagaaguacagaaaa

SEQ ID NO: 2097355 - RNA, 19 nt, Homo sapiens
  misc_RNA (1)...(19): siRNA sense strand
cacaagcagugauggagaa

SEQ ID NO: 2097356 - RNA, 19 nt, Homo sapiens
  misc_RNA (1)...(19): siRNA sense strand
cagggaauauaaacuagga

SEQ ID NO: 2097357 - RNA, 19 nt, Homo sapiens
  misc_RNA (1)...(19): siRNA sense strand
gcaggugucaucuucauca

SEQ ID NO: 2097358 - RNA, 19 nt, Homo sapiens
  misc_RNA (1)...(19): siRNA sense strand
gugauagaaucuccacaug

SEQ ID NO: 2097359 - RNA, 19 nt, Homo sapiens
  misc_RNA (1)...(19): siRNA sense strand
guaaagagcugaacaacca

SEQ ID NO: 2097360 - RNA, 19 nt, Homo sapiens
  misc_RNA (1)...(19): siRNA sense strand
ccaagaaggugaagcagua

SEQ ID NO: 2097361 - RNA, 19 nt, Homo sapiens
  misc_RNA (1)...(19): siRNA sense strand
agaaggagcuugagaaaug

SEQ ID NO: 2097362 - RNA, 19 nt, Homo sapiens
  misc_RNA (1)...(19): siRNA sense strand
ccaaggagcuggaggacaa

SEQ ID NO: 2097363 - RNA, 19 nt, Homo sapiens
  misc_RNA (1)...(19): siRNA sense strand
acagugagcugauggauau

SEQ ID NO: 2097364 - RNA, 19 nt, Homo sapiens
  misc_RNA (1)...(19): siRNA sense strand
ugagcaagcugaagccuuu

SEQ ID NO: 2097365 - RNA, 19 nt, Homo sapiens
  misc_RNA (1)...(19): siRNA sense strand
caacuuggcaggaauuauu

SEQ ID NO: 2097366 - RNA, 19 nt, Homo sapiens
  misc_RNA (1)...(19): siRNA sense strand
cuaagaucauucaccauua

SEQ ID NO: 2097367 - RNA, 19 nt, Homo sapiens
  misc_RNA (1)...(19): siRNA sense strand
gaaacucccucaagaagac

SEQ ID NO: 2097368 - RNA, 19 nt, Homo sapiens
  misc_RNA (1)...(19): siRNA sense strand
gagcaguccuggcagauca

SEQ ID NO: 2097369 - RNA, 19 nt, Homo sapiens
  misc_RNA (1)...(19): siRNA sense strand
gcuaagaucauucaccauu

SEQ ID NO: 2097370 - RNA, 19 nt, Homo sapiens
  misc_RNA (1)...(19): siRNA sense strand
gcagaaggagcuugagaaa

SEQ ID NO: 2097371 - RNA, 19 nt, Homo sapiens
  misc_RNA (1)...(19): siRNA sense strand
ucaaggaccuggaggacuu

SEQ ID NO: 2097372 - RNA, 19 nt, Homo sapiens
  misc_RNA (1)...(19): siRNA sense strand
ggacuacagcaaugacuuu

SEQ ID NO: 2097373 - RNA, 19 nt, Homo sapiens
  misc_RNA (1)...(19): siRNA sense strand
ccaccuugcugcugagaaa

SEQ ID NO: 2097374 - RNA, 19 nt, Homo sapiens
  misc_RNA (1)...(19): siRNA sense strand
uuaagacccuguaugcaaa

SEQ ID NO: 2097375 - RNA, 19 nt, Homo sapiens
  misc_RNA (1)...(19): siRNA sense strand
uagaaacaauggccuaugu

SEQ ID NO: 2097376 - RNA, 19 nt, Homo sapiens
  misc_RNA (1)...(19): siRNA sense strand
gaaugugcuucaugacuuc

SEQ ID NO: 2097377 - RNA, 19 nt, Homo sapiens
  misc_RNA (1)...(19): siRNA sense strand
caagugauaccgcuacuga

SEQ ID NO: 2097378 - RNA, 19 nt, Homo sapiens
  misc_RNA (1)...(19): siRNA sense strand
gaaggagcuugagaaaugu

SEQ ID NO: 2097379 - RNA, 19 nt, Homo sapiens
  misc_RNA (1)...(19): siRNA sense strand
gaagaguguugugcagguu

SEQ ID NO: 2097380 - RNA, 19 nt, Homo sapiens
  misc_RNA (1)...(19): siRNA sense strand
ugaagcagaugucuacaca

SEQ ID NO: 2097381 - RNA, 19 nt, Homo sapiens
  misc_RNA (1)...(19): siRNA sense strand
guccugagcugccgcauca

SEQ ID NO: 2097382 - RNA, 19 nt, Homo sapiens
  misc_RNA (1)...(19): siRNA sense strand
gagcugaacaaccagauug

SEQ ID NO: 2097383 - RNA, 19 nt, Homo sapiens
  misc_RNA (1)...(19): siRNA sense strand
ccaugcagcucuuguucaa

SEQ ID NO: 2097384 - RNA, 19 nt, Homo sapiens
  misc_RNA (1)...(19): siRNA sense strand
caucaccgcuaagaucauu

SEQ ID NO: 2097385 - RNA, 19 nt, Homo sapiens
  misc_RNA (1)...(19): siRNA sense strand
gaacccgcauggccucaau

SEQ ID NO: 2097386 - RNA, 19 nt, Homo sapiens
  misc_RNA (1)...(19): siRNA sense strand
ggaaggucuugcuggagaa

SEQ ID NO: 2097387 - RNA, 19 nt, Homo sapiens
  misc_RNA (1)...(19): siRNA sense strand
uggcaggaauuauuaugaa

SEQ ID NO: 2097388 - RNA, 19 nt, Homo sapiens
  misc_RNA (1)...(19): siRNA sense strand
gagccaccaaucugcauua

SEQ ID NO: 2097389 - RNA, 19 nt, Homo sapiens
  misc_RNA (1)...(19): siRNA sense strand
cugcgaaacucccucaaga

SEQ ID NO: 2097390 - RNA, 19 nt, Homo sapiens
  misc_RNA (1)...(19): siRNA sense strand
ccaaggccaucaacaacau

SEQ ID NO: 2097391 - RNA, 19 nt, Homo sapiens
  misc_RNA (1)...(19): siRNA sense strand
gauaucagcauacauucug

SEQ ID NO: 2097392 - RNA, 19 nt, Homo sapiens
  misc_RNA (1)...(19): siRNA sense strand
uucagaagcuggaugagaa

SEQ ID NO: 2097393 - RNA, 19 nt, Homo sapiens
  misc_RNA (1)...(19): siRNA sense strand
ggggauaacugcccaaugu

SEQ ID NO: 2097394 - RNA, 19 nt, Homo sapiens
  misc_RNA (1)...(19): siRNA sense strand
uguuggagcugcuguacaa

SEQ ID NO: 2097395 - RNA, 19 nt, Homo sapiens
  misc_RNA (1)...(19): siRNA sense strand
gaugacaagaugaccguuu

SEQ ID NO: 2097396 - RNA, 19 nt, Homo sapiens
  misc_RNA (1)...(19): siRNA sense strand
gcgagggugugauuaugug

SEQ ID NO: 2097397 - RNA, 19 nt, Homo sapiens
  misc_RNA (1)...(19): siRNA sense strand
ugacagcgagggugugauu

SEQ ID NO: 2097398 - RNA, 19 nt, Homo sapiens
  misc_RNA (1)...(19): siRNA sense strand
gggaagacaagcugauuca

SEQ ID NO: 2097399 - RNA, 19 nt, Homo sapiens
  misc_RNA (1)...(19): siRNA sense strand
ggauguccaagaagcauuu

SEQ ID NO: 2097400 - RNA, 19 nt, Homo sapiens
  misc_RNA (1)...(19): siRNA sense strand
ccaccaaucugcauuaccu

SEQ ID NO: 2097401 - RNA, 19 nt, Homo sapiens
  misc_RNA (1)...(19): siRNA sense strand
gcgaaacucccucaagaag

SEQ ID NO: 2097402 - RNA, 19 nt, Homo sapiens
  misc_RNA (1)...(19): siRNA sense strand
cagaaagccugggaagaca

SEQ ID NO: 2097403 - RNA, 19 nt, Homo sapiens
  misc_RNA (1)...(19): siRNA sense strand
ccgcauggccucaaugaau

SEQ ID NO: 2097404 - RNA, 19 nt, Homo sapiens
  misc_RNA (1)...(19): siRNA sense strand
caaccagauugcgagcuuu

SEQ ID NO: 2097405 - RNA, 19 nt, Homo sapiens
  misc_RNA (1)...(19): siRNA sense strand
gucuacacauuaucugaaa

SEQ ID NO: 2097406 - RNA, 19 nt, Homo sapiens
  misc_RNA (1)...(19): siRNA sense strand
aaucgcugcuugcaacuug

SEQ ID NO: 2097407 - RNA, 19 nt, Homo sapiens
  misc_RNA (1)...(19): siRNA sense strand
gcauggaggcccugaccaa

SEQ ID NO: 2097408 - RNA, 19 nt, Homo sapiens
  misc_RNA (1)...(19): siRNA sense strand
uggaagaacauacugaguu

SEQ ID NO: 2097409 - RNA, 19 nt, Homo sapiens
  misc_RNA (1)...(19): siRNA sense strand
cuggaggacuuucacuuug

SEQ ID NO: 2097410 - RNA, 19 nt, Homo sapiens
  misc_RNA (1)...(19): siRNA sense strand
cagcgagggugugauuaug

SEQ ID NO: 2097411 - RNA, 19 nt, Homo sapiens
  misc_RNA (1)...(19): siRNA sense strand
ugagggagcccgugagcaa

SEQ ID NO: 2097412 - RNA, 19 nt, Homo sapiens
  misc_RNA (1)...(19): siRNA sense strand
ccauccaccuucucauuca

SEQ ID NO: 2097413 - RNA, 19 nt, Homo sapiens
  misc_RNA (1)...(19): siRNA sense strand
agacgacucuuaccagcau

SEQ ID NO: 2097414 - RNA, 19 nt, Homo sapiens
  misc_RNA (1)...(19): siRNA sense strand
aaagugcccucauggugau

SEQ ID NO: 2097415 - RNA, 19 nt, Homo sapiens
  misc_RNA (1)...(19): siRNA sense strand
cgcauggccucaaugaaug

SEQ ID NO: 2097416 - RNA, 19 nt, Homo sapiens
  misc_RNA (1)...(19): siRNA sense strand
gcaggaucuucuucgacaa

SEQ ID NO: 2097417 - RNA, 19 nt, Homo sapiens
  misc_RNA (1)...(19): siRNA sense strand
ggacaagguggccgagauc

SEQ ID NO: 2097418 - RNA, 19 nt, Homo sapiens
  misc_RNA (1)...(19): siRNA sense strand
acaaccagauugcgagcuu

SEQ ID NO: 2097419 - RNA, 19 nt, Homo sapiens
  misc_RNA (1)...(19): siRNA sense strand
caggaauuauuaugaagca

SEQ ID NO: 2097420 - RNA, 19 nt, Homo sapiens
  misc_RNA (1)...(19): siRNA sense strand
cgaaacucccucaagaaga

SEQ ID NO: 2097421 - RNA, 19 nt, Homo sapiens
  misc_RNA (1)...(19): siRNA sense strand
ucaaguccaugcagcucuu

SEQ ID NO: 2097422 - RNA, 19 nt, Homo sapiens
  misc_RNA (1)...(19): siRNA sense strand
gcacaauggucggacucau

SEQ ID NO: 2097423 - RNA, 19 nt, Homo sapiens
  misc_RNA (1)...(19): siRNA sense strand
ggaaaacagugagcugaug

SEQ ID NO: 2097424 - RNA, 19 nt, Homo sapiens
  misc_RNA (1)...(19): siRNA sense strand
caagacggacuacagcaau

SEQ ID NO: 2097425 - RNA, 19 nt, Homo sapiens
  misc_RNA (1)...(19): siRNA sense strand
gaggagaugaaccugcaaa

SEQ ID NO: 2097426 - RNA, 19 nt, Homo sapiens
  misc_RNA (1)...(19): siRNA sense strand
ccuggaggacuuucacuuu

SEQ ID NO: 2097427 - RNA, 19 nt, Homo sapiens
  misc_RNA (1)...(19): siRNA sense strand
gcaagcugaagccuuucua

SEQ ID NO: 2097428 - RNA, 19 nt, Homo sapiens
  misc_RNA (1)...(19): siRNA sense strand
cuacagcaaugacuuugac

SEQ ID NO: 2097429 - RNA, 19 nt, Homo sapiens
  misc_RNA (1)...(19): siRNA sense strand
uggaggcccugaccaagau

SEQ ID NO: 2097430 - RNA, 19 nt, Homo sapiens
  misc_RNA (1)...(19): siRNA sense strand
ggagccugcgcuugaguaa

SEQ ID NO: 2097431 - RNA, 19 nt, Homo sapiens
  misc_RNA (1)...(19): siRNA sense strand
gaagcuggaugagaaugac

SEQ ID NO: 2097432 - RNA, 19 nt, Homo sapiens
  misc_RNA (1)...(19): siRNA sense strand
uuaccaaggccaucaacaa

SEQ ID NO: 2097433 - RNA, 19 nt, Homo sapiens
  misc_RNA (1)...(19): siRNA sense strand
gugauaccgcuacugauga

SEQ ID NO: 2097434 - RNA, 19 nt, Homo sapiens
  misc_RNA (1)...(19): siRNA sense strand
caccauccaccuucucauu

SEQ ID NO: 2097435 - RNA, 19 nt, Homo sapiens
  misc_RNA (1)...(19): siRNA sense strand
gaucauucaccauuauguc

SEQ ID NO: 2097436 - RNA, 19 nt, Homo sapiens
  misc_RNA (1)...(19): siRNA sense strand
ggcaggaauuauuaugaag

SEQ ID NO: 2097437 - RNA, 19 nt, Homo sapiens
  misc_RNA (1)...(19): siRNA sense strand
ugugggagcuggagauugc

SEQ ID NO: 2097438 - RNA, 19 nt, Homo sapiens
  misc_RNA (1)...(19): siRNA sense strand
gcuugcaacuuggcaggaa

SEQ ID NO: 2097439 - RNA, 19 nt, Homo sapiens
  misc_RNA (1)...(19): siRNA sense strand
aaagccggcuguucucuac

SEQ ID NO: 2097440 - RNA, 19 nt, Homo sapiens
  misc_RNA (1)...(19): siRNA sense strand
ucaccuggauagccuucuu

SEQ ID NO: 2097441 - RNA, 19 nt, Homo sapiens
  misc_RNA (1)...(19): siRNA sense strand
uguaauuucucuccaacuc

SEQ ID NO: 2097442 - RNA, 19 nt, Homo sapiens
  misc_RNA (1)...(19): siRNA sense strand
gaaccugcagcaugacaag

SEQ ID NO: 2097443 - RNA, 19 nt, Homo sapiens
  misc_RNA (1)...(19): siRNA sense strand
ugaguaaagagcugaacaa

SEQ ID NO: 2097444 - RNA, 19 nt, Homo sapiens
  misc_RNA (1)...(19): siRNA sense strand
gaaagccugggaagacaag

SEQ ID NO: 2097445 - RNA, 19 nt, Homo sapiens
  misc_RNA (1)...(19): siRNA sense strand
agccugcgcuugaguaaag

SEQ ID NO: 2097446 - RNA, 19 nt, Homo sapiens
  misc_RNA (1)...(19): siRNA sense strand
agccagaccugcuccuugu

SEQ ID NO: 2097447 - RNA, 19 nt, Homo sapiens
  misc_RNA (1)...(19): siRNA sense strand
ccauuaagacccuguaugc

SEQ ID NO: 2097448 - RNA, 19 nt, Homo sapiens
  misc_RNA (1)...(19): siRNA sense strand
acucuuaccagcauuauag

SEQ ID NO: 2097449 - RNA, 19 nt, Homo sapiens
  misc_RNA (1)...(19): siRNA sense strand
gagcagugcaggaucuucu

SEQ ID NO: 2097450 - RNA, 19 nt, Homo sapiens
  misc_RNA (1)...(19): siRNA sense strand
gcaccggagccaccaaucu

SEQ ID NO: 2097451 - RNA, 19 nt, Homo sapiens
  misc_RNA (1)...(19): siRNA sense strand
ccaagguggucugcaugga

SEQ ID NO: 2097452 - RNA, 19 nt, Homo sapiens
  misc_RNA (1)...(19): siRNA sense strand
ccaaggggcugcaggagau

SEQ ID NO: 2097453 - RNA, 19 nt, Homo sapiens
  misc_RNA (1)...(19): siRNA sense strand
gcccucauggugauguaua

SEQ ID NO: 2097454 - RNA, 19 nt, Homo sapiens
  misc_RNA (1)...(19): siRNA sense strand
gagcugcugcgucugaaag

SEQ ID NO: 2097455 - RNA, 19 nt, Homo sapiens
  misc_RNA (1)...(19): siRNA sense strand
aggcagaaccgacugacaa

SEQ ID NO: 2097456 - RNA, 19 nt, Homo sapiens
  misc_RNA (1)...(19): siRNA sense strand
ucagaaagccugggaagac

SEQ ID NO: 2097457 - RNA, 19 nt, Homo sapiens
  misc_RNA (1)...(19): siRNA sense strand
ggauaucagcauacauucu

SEQ ID NO: 2097458 - RNA, 19 nt, Homo sapiens
  misc_RNA (1)...(19): siRNA sense strand
ggagaugaaccugcaaagg

SEQ ID NO: 2097459 - RNA, 19 nt, Homo sapiens
  misc_RNA (1)...(19): siRNA sense strand
gcugagauguucaacuuug

SEQ ID NO: 2097460 - RNA, 19 nt, Homo sapiens
  misc_RNA (1)...(19): siRNA sense strand
guucaacuuuggagaauga

SEQ ID NO: 2097461 - RNA, 19 nt, Homo sapiens
  misc_RNA (1)...(19): siRNA sense strand
ccacaucucccgccuggua

SEQ ID NO: 2097462 - RNA, 19 nt, Homo sapiens
  misc_RNA (1)...(19): siRNA sense strand
aagcugagauguucaacuu

SEQ ID NO: 2097463 - RNA, 19 nt, Homo sapiens
  misc_RNA (1)...(19): siRNA sense strand
gcaaggagcgcaucaucau

SEQ ID NO: 2097464 - RNA, 19 nt, Homo sapiens
  misc_RNA (1)...(19): siRNA sense strand
ggacaucugcggcuacauc

SEQ ID NO: 2097465 - RNA, 19 nt, Homo sapiens
  misc_RNA (1)...(19): siRNA sense strand
ucacggcacgggacaauga

SEQ ID NO: 2097466 - RNA, 19 nt, Homo sapiens
  misc_RNA (1)...(19): siRNA sense strand
gauguucaacuuuggagaa

SEQ ID NO: 2097467 - RNA, 19 nt, Homo sapiens
  misc_RNA (1)...(19): siRNA sense strand
cuacaucaaccgcagcuuu

SEQ ID NO: 2097468 - RNA, 19 nt, Homo sapiens
  misc_RNA (1)...(19): siRNA sense strand
ccuggaggauggaagaaga

SEQ ID NO: 2097469 - RNA, 19 nt, Homo sapiens
  misc_RNA (1)...(19): siRNA sense strand
gaggacaucugcggcuaca

SEQ ID NO: 2097470 - RNA, 19 nt, Homo sapiens
  misc_RNA (1)...(19): siRNA sense strand
cagcagcgcagcaccauca

SEQ ID NO: 2097471 - RNA, 19 nt, Homo sapiens
  misc_RNA (1)...(19): siRNA sense strand
ggaccugaccugccucaag

SEQ ID NO: 2097472 - RNA, 19 nt, Homo sapiens
  misc_RNA (1)...(19): siRNA sense strand
caacuggaaggccaucaug

SEQ ID NO: 2097473 - RNA, 19 nt, Homo sapiens
  misc_RNA (1)...(19): siRNA sense strand
ggagguacucacagacuca

SEQ ID NO: 2097474 - RNA, 19 nt, Homo sapiens
  misc_RNA (1)...(19): siRNA sense strand
gcagaggcccaggacaaug

SEQ ID NO: 2097475 - RNA, 19 nt, Homo sapiens
  misc_RNA (1)...(19): siRNA sense strand
gccuggagguacucacaga

SEQ ID NO: 2097476 - RNA, 19 nt, Homo sapiens
  misc_RNA (1)...(19): siRNA sense strand
ggaagcggcaggugauggu

SEQ ID NO: 2097477 - RNA, 19 nt, Homo sapiens
  misc_RNA (1)...(19): siRNA sense strand
ucgucuggcuggucacauu

SEQ ID NO: 2097478 - RNA, 19 nt, Homo sapiens
  misc_RNA (1)...(19): siRNA sense strand
gguacucacagacucauca

SEQ ID NO: 2097479 - RNA, 19 nt, Homo sapiens
  misc_RNA (1)...(19): siRNA sense strand
caaggagcgcaucaucaug

SEQ ID NO: 2097480 - RNA, 19 nt, Homo sapiens
  misc_RNA (1)...(19): siRNA sense strand
cggcuucgaggacaucaaa

SEQ ID NO: 2097481 - RNA, 19 nt, Homo sapiens
  misc_RNA (1)...(19): siRNA sense strand
ccacgacgcagcagagaac

SEQ ID NO: 2097482 - RNA, 19 nt, Homo sapiens
  misc_RNA (1)...(19): siRNA sense strand
gucaggaguaugagaguga

SEQ ID NO: 2097483 - RNA, 19 nt, Homo sapiens
  misc_RNA (1)...(19): siRNA sense strand
gccugucccugcugcugaa

SEQ ID NO: 2097484 - RNA, 19 nt, Homo sapiens
  misc_RNA (1)...(19): siRNA sense strand
uacaucaaccgcagcuuug

SEQ ID NO: 2097485 - RNA, 19 nt, Homo sapiens
  misc_RNA (1)...(19): siRNA sense strand
gcaacuggaaggccaucau

SEQ ID NO: 2097486 - RNA, 19 nt, Homo sapiens
  misc_RNA (1)...(19): siRNA sense strand
cuucaacggugaggacauc

SEQ ID NO: 2097487 - RNA, 19 nt, Homo sapiens
  misc_RNA (1)...(19): siRNA sense strand
gcagcuuugccuucuggaa

SEQ ID NO: 2097488 - RNA, 19 nt, Homo sapiens
  misc_RNA (1)...(19): siRNA sense strand
gcugagauguucaacuuug

SEQ ID NO: 2097489 - RNA, 19 nt, Homo sapiens
  misc_RNA (1)...(19): siRNA sense strand
guucaacuuuggagaauga

SEQ ID NO: 2097490 - RNA, 19 nt, Homo sapiens
  misc_RNA (1)...(19): siRNA sense strand
ccacaucucccgccuggua

SEQ ID NO: 2097491 - RNA, 19 nt, Homo sapiens
  misc_RNA (1)...(19): siRNA sense strand
aagcugagauguucaacuu

SEQ ID NO: 2097492 - RNA, 19 nt, Homo sapiens
  misc_RNA (1)...(19): siRNA sense strand
gcaaggagcgcaucaucau

SEQ ID NO: 2097493 - RNA, 19 nt, Homo sapiens
  misc_RNA (1)...(19): siRNA sense strand
ggacaucugcggcuacauc

SEQ ID NO: 2097494 - RNA, 19 nt, Homo sapiens
  misc_RNA (1)...(19): siRNA sense strand
ucacggcacgggacaauga

SEQ ID NO: 2097495 - RNA, 19 nt, Homo sapiens
  misc_RNA (1)...(19): siRNA sense strand
gauguucaacuuuggagaa

SEQ ID NO: 2097496 - RNA, 19 nt, Homo sapiens
  misc_RNA (1)...(19): siRNA sense strand
cuacaucaaccgcagcuuu

SEQ ID NO: 2097497 - RNA, 19 nt, Homo sapiens
  misc_RNA (1)...(19): siRNA sense strand
ccuggaggauggaagaaga

SEQ ID NO: 2097498 - RNA, 19 nt, Homo sapiens
  misc_RNA (1)...(19): siRNA sense strand
gaggacaucugcggcuaca

SEQ ID NO: 2097499 - RNA, 19 nt, Homo sapiens
  misc_RNA (1)...(19): siRNA sense strand
cagcagcgcagcaccauca

SEQ ID NO: 2097500 - RNA, 19 nt, Homo sapiens
  misc_RNA (1)...(19): siRNA sense strand
ggaccugaccugccucaag

SEQ ID NO: 2097501 - RNA, 19 nt, Homo sapiens
  misc_RNA (1)...(19): siRNA sense strand
caacuggaaggccaucaug

SEQ ID NO: 2097502 - RNA, 19 nt, Homo sapiens
  misc_RNA (1)...(19): siRNA sense strand
ggagguacucacagacuca

SEQ ID NO: 2097503 - RNA, 19 nt, Homo sapiens
  misc_RNA (1)...(19): siRNA sense strand
gcagaggcccaggacaaug

SEQ ID NO: 2097504 - RNA, 19 nt, Homo sapiens
  misc_RNA (1)...(19): siRNA sense strand
gccuggagguacucacaga

SEQ ID NO: 2097505 - RNA, 19 nt, Homo sapiens
  misc_RNA (1)...(19): siRNA sense strand
ggaagcggcaggugauggu

SEQ ID NO: 2097506 - RNA, 19 nt, Homo sapiens
  misc_RNA (1)...(19): siRNA sense strand
ucgucuggcuggucacauu

SEQ ID NO: 2097507 - RNA, 19 nt, Homo sapiens
  misc_RNA (1)...(19): siRNA sense strand
gguacucacagacucauca

SEQ ID NO: 2097508 - RNA, 19 nt, Homo sapiens
  misc_RNA (1)...(19): siRNA sense strand
caaggagcgcaucaucaug

SEQ ID NO: 2097509 - RNA, 19 nt, Homo sapiens
  misc_RNA (1)...(19): siRNA sense strand
cggcuucgaggacaucaaa

SEQ ID NO: 2097510 - RNA, 19 nt, Homo sapiens
  misc_RNA (1)...(19): siRNA sense strand
ccacgacgcagcagagaac

SEQ ID NO: 2097511 - RNA, 19 nt, Homo sapiens
  misc_RNA (1)...(19): siRNA sense strand
gucaggaguaugagaguga

SEQ ID NO: 2097512 - RNA, 19 nt, Homo sapiens
  misc_RNA (1)...(19): siRNA sense strand
gccugucccugcugcugaa

SEQ ID NO: 2097513 - RNA, 19 nt, Homo sapiens
  misc_RNA (1)...(19): siRNA sense strand
uacaucaaccgcagcuuug

SEQ ID NO: 2097514 - RNA, 19 nt, Homo sapiens
  misc_RNA (1)...(19): siRNA sense strand
gcaacuggaaggccaucau

SEQ ID NO: 2097515 - RNA, 19 nt, Homo sapiens
  misc_RNA (1)...(19): siRNA sense strand
cuucaacggugaggacauc

SEQ ID NO: 2097516 - RNA, 19 nt, Homo sapiens
  misc_RNA (1)...(19): siRNA sense strand
gcagcuuugccuucuggaa

SEQ ID NO: 2097517 - RNA, 19 nt, Homo sapiens
  misc_RNA (1)...(19): siRNA sense strand
gccgucauguggucacuuu

SEQ ID NO: 2097518 - RNA, 19 nt, Homo sapiens
  misc_RNA (1)...(19): siRNA sense strand
ggaggaaccugagggaaaa

SEQ ID NO: 2097519 - RNA, 19 nt, Homo sapiens
  misc_RNA (1)...(19): siRNA sense strand
gcucugcccuggugcucuu

SEQ ID NO: 2097520 - RNA, 19 nt, Homo sapiens
  misc_RNA (1)...(19): siRNA sense strand
uagcguggcugcagcucuu

SEQ ID NO: 2097521 - RNA, 19 nt, Homo sapiens
  misc_RNA (1)...(19): siRNA sense strand
gcaccuuuggccauucuuu

SEQ ID NO: 2097522 - RNA, 19 nt, Homo sapiens
  misc_RNA (1)...(19): siRNA sense strand
ggccauucuuucuuugguu

SEQ ID NO: 2097523 - RNA, 19 nt, Homo sapiens
  misc_RNA (1)...(19): siRNA sense strand
uggaggaaccugagggaaa

SEQ ID NO: 2097524 - RNA, 19 nt, Homo sapiens
  misc_RNA (1)...(19): siRNA sense strand
uugguugucugugcaagua

SEQ ID NO: 2097525 - RNA, 19 nt, Homo sapiens
  misc_RNA (1)...(19): siRNA sense strand
cuuuggccauucuuucuuu

SEQ ID NO: 2097526 - RNA, 19 nt, Homo sapiens
  misc_RNA (1)...(19): siRNA sense strand
gggcaccuuuggccauucu

SEQ ID NO: 2097527 - RNA, 19 nt, Homo sapiens
  misc_RNA (1)...(19): siRNA sense strand
caacaggacuuugaaggua

SEQ ID NO: 2097528 - RNA, 19 nt, Homo sapiens
  misc_RNA (1)...(19): siRNA sense strand
gagugaagcuggaagauuc

SEQ ID NO: 2097529 - RNA, 19 nt, Homo sapiens
  misc_RNA (1)...(19): siRNA sense strand
cgaggacucucaggaaaga

SEQ ID NO: 2097530 - RNA, 19 nt, Homo sapiens
  misc_RNA (1)...(19): siRNA sense strand
gcaaggugguggcauucug

SEQ ID NO: 2097531 - RNA, 19 nt, Homo sapiens
  misc_RNA (1)...(19): siRNA sense strand
gaucaggaaaggcuucuau

SEQ ID NO: 2097532 - RNA, 19 nt, Homo sapiens
  misc_RNA (1)...(19): siRNA sense strand
cggaggaccugcuguucuu

SEQ ID NO: 2097533 - RNA, 19 nt, Homo sapiens
  misc_RNA (1)...(19): siRNA sense strand
cacgaggacucucaggaaa

SEQ ID NO: 2097534 - RNA, 19 nt, Homo sapiens
  misc_RNA (1)...(19): siRNA sense strand
ccauggagcugucuguuuu

SEQ ID NO: 2097535 - RNA, 19 nt, Homo sapiens
  misc_RNA (1)...(19): siRNA sense strand
gcccagagcucagggucuu

SEQ ID NO: 2097536 - RNA, 19 nt, Homo sapiens
  misc_RNA (1)...(19): siRNA sense strand
gcaacaggacuuugaaggu

SEQ ID NO: 2097537 - RNA, 19 nt, Homo sapiens
  misc_RNA (1)...(19): siRNA sense strand
ccacgaggacucucaggaa

SEQ ID NO: 2097538 - RNA, 19 nt, Homo sapiens
  misc_RNA (1)...(19): siRNA sense strand
ggucgugggucuauuaucc

SEQ ID NO: 2097539 - RNA, 19 nt, Homo sapiens
  misc_RNA (1)...(19): siRNA sense strand
ucaggaaaggcuucuauug

SEQ ID NO: 2097540 - RNA, 19 nt, Homo sapiens
  misc_RNA (1)...(19): siRNA sense strand
gaauguuugaggucuguuu

SEQ ID NO: 2097541 - RNA, 19 nt, Homo sapiens
  misc_RNA (1)...(19): siRNA sense strand
gcucagggucuuaccuuug

SEQ ID NO: 2097542 - RNA, 19 nt, Homo sapiens
  misc_RNA (1)...(19): siRNA sense strand
ggagagugaagcuggaaga

SEQ ID NO: 2097543 - RNA, 19 nt, Homo sapiens
  misc_RNA (1)...(19): siRNA sense strand
aaccguggcuggacgaaug

SEQ ID NO: 2097544 - RNA, 19 nt, Homo sapiens
  misc_RNA (1)...(19): siRNA sense strand
cagcacccgucgagcauca

SEQ ID NO: 2097545 - RNA, 19 nt, Homo sapiens
  misc_RNA (1)...(19): siRNA sense strand
gagaacaagaucaggaaag

SEQ ID NO: 2097546 - RNA, 19 nt, Homo sapiens
  misc_RNA (1)...(19): siRNA sense strand
ggagcugucuguuuucaau

SEQ ID NO: 2097547 - RNA, 19 nt, Homo sapiens
  misc_RNA (1)...(19): siRNA sense strand
gagcucagggucuuaccuu

SEQ ID NO: 2097548 - RNA, 19 nt, Homo sapiens
  misc_RNA (1)...(19): siRNA sense strand
ucugugacguggacgagaa

SEQ ID NO: 2097549 - RNA, 19 nt, Homo sapiens
  misc_RNA (1)...(19): siRNA sense strand
agaacaagaucaggaaagg

SEQ ID NO: 2097550 - RNA, 19 nt, Homo sapiens
  misc_RNA (1)...(19): siRNA sense strand
ucaaugaugccaguaagga

SEQ ID NO: 2097551 - RNA, 19 nt, Homo sapiens
  misc_RNA (1)...(19): siRNA sense strand
ccuggucgugggucuauua

SEQ ID NO: 2097552 - RNA, 19 nt, Homo sapiens
  misc_RNA (1)...(19): siRNA sense strand
acacgaggcugccguucag

SEQ ID NO: 2097553 - RNA, 19 nt, Homo sapiens
  misc_RNA (1)...(19): siRNA sense strand
gaccuuccucguucugauu

SEQ ID NO: 2097554 - RNA, 19 nt, Homo sapiens
  misc_RNA (1)...(19): siRNA sense strand
caggaaaggcuucuauugc

SEQ ID NO: 2097555 - RNA, 19 nt, Homo sapiens
  misc_RNA (1)...(19): siRNA sense strand
uaacuccaccgaacgauac

SEQ ID NO: 2097556 - RNA, 19 nt, Homo sapiens
  misc_RNA (1)...(19): siRNA sense strand
cuaacuccaccgaacgaua

SEQ ID NO: 2097557 - RNA, 19 nt, Homo sapiens
  misc_RNA (1)...(19): siRNA sense strand
accagagucuccugcugua

SEQ ID NO: 2097558 - RNA, 19 nt, Homo sapiens
  misc_RNA (1)...(19): siRNA sense strand
ggacaagucuggggcuauc

SEQ ID NO: 2097559 - RNA, 19 nt, Homo sapiens
  misc_RNA (1)...(19): siRNA sense strand
cgauacacacguuggauca

SEQ ID NO: 2097560 - RNA, 19 nt, Homo sapiens
  misc_RNA (1)...(19): siRNA sense strand
cgaccuuccucguucugau

SEQ ID NO: 2097561 - RNA, 19 nt, Homo sapiens
  misc_RNA (1)...(19): siRNA sense strand
gcacccgucgagcaucauu

SEQ ID NO: 2097562 - RNA, 19 nt, Homo sapiens
  misc_RNA (1)...(19): siRNA sense strand
caaggugguggcauucugu

SEQ ID NO: 2097563 - RNA, 19 nt, Homo sapiens
  misc_RNA (1)...(19): siRNA sense strand
cgagaacaagaucaggaaa

SEQ ID NO: 2097564 - RNA, 19 nt, Homo sapiens
  misc_RNA (1)...(19): siRNA sense strand
agagugaagcuggaagauu

SEQ ID NO: 2097565 - RNA, 19 nt, Homo sapiens
  misc_RNA (1)...(19): siRNA sense strand
cagagucuccugcuguauc

SEQ ID NO: 2097566 - RNA, 19 nt, Homo sapiens
  misc_RNA (1)...(19): siRNA sense strand
ucuacgagcaccucaggaa

SEQ ID NO: 2097567 - RNA, 19 nt, Homo sapiens
  misc_RNA (1)...(19): siRNA sense strand
caggugcucucaucguuaa

SEQ ID NO: 2097568 - RNA, 19 nt, Homo sapiens
  misc_RNA (1)...(19): siRNA sense strand
ccacaggcuuccaguacga

SEQ ID NO: 2097569 - RNA, 19 nt, Homo sapiens
  misc_RNA (1)...(19): siRNA sense strand
ccucuucacuggccacaug

SEQ ID NO: 2097570 - RNA, 19 nt, Homo sapiens
  misc_RNA (1)...(19): siRNA sense strand
ucaaggacuuccagaggau

SEQ ID NO: 2097571 - RNA, 19 nt, Homo sapiens
  misc_RNA (1)...(19): siRNA sense strand
ggaccacaggcuuccagua

SEQ ID NO: 2097572 - RNA, 19 nt, Homo sapiens
  misc_RNA (1)...(19): siRNA sense strand
gcauggcgacuuccucuuc

SEQ ID NO: 2097573 - RNA, 19 nt, Homo sapiens
  misc_RNA (1)...(19): siRNA sense strand
gaccacaggcuuccaguac

SEQ ID NO: 2097574 - RNA, 19 nt, Homo sapiens
  misc_RNA (1)...(19): siRNA sense strand
cccaacaggugcucucauc

SEQ ID NO: 2097575 - RNA, 19 nt, Homo sapiens
  misc_RNA (1)...(19): siRNA sense strand
ccacgccgcagcaggauau

SEQ ID NO: 2097576 - RNA, 19 nt, Homo sapiens
  misc_RNA (1)...(19): siRNA sense strand
aacaggugcucucaucguu

SEQ ID NO: 2097577 - RNA, 19 nt, Homo sapiens
  misc_RNA (1)...(19): siRNA sense strand
cagacucuaucggcagaaa

SEQ ID NO: 2097578 - RNA, 19 nt, Homo sapiens
  misc_RNA (1)...(19): siRNA sense strand
ggagguggagcagguguau

SEQ ID NO: 2097579 - RNA, 19 nt, Homo sapiens
  misc_RNA (1)...(19): siRNA sense strand
cauggcgacuuccucuuca

SEQ ID NO: 2097580 - RNA, 19 nt, Homo sapiens
  misc_RNA (1)...(19): siRNA sense strand
gaggcuccauccagcaagu

SEQ ID NO: 2097581 - RNA, 19 nt, Homo sapiens
  misc_RNA (1)...(19): siRNA sense strand
caacaggugcucucaucgu

SEQ ID NO: 2097582 - RNA, 19 nt, Homo sapiens
  misc_RNA (1)...(19): siRNA sense strand
acaggugcucucaucguua

SEQ ID NO: 2097583 - RNA, 19 nt, Homo sapiens
  misc_RNA (1)...(19): siRNA sense strand
caccugaccgugugcauca

SEQ ID NO: 2097584 - RNA, 19 nt, Homo sapiens
  misc_RNA (1)...(19): siRNA sense strand
gaguggauguacccaacag

SEQ ID NO: 2097585 - RNA, 19 nt, Homo sapiens
  misc_RNA (1)...(19): siRNA sense strand
ucacuggccacaugcacuu

SEQ ID NO: 2097586 - RNA, 19 nt, Homo sapiens
  misc_RNA (1)...(19): siRNA sense strand
gcgcgugagcagacucuau

SEQ ID NO: 2097587 - RNA, 19 nt, Homo sapiens
  misc_RNA (1)...(19): siRNA sense strand
ggaggaagaucuuugauga

SEQ ID NO: 2097588 - RNA, 19 nt, Homo sapiens
  misc_RNA (1)...(19): siRNA sense strand
cgaaauagcuaaagaaucu

SEQ ID NO: 2097589 - RNA, 19 nt, Homo sapiens
  misc_RNA (1)...(19): siRNA sense strand
uaaagaaucugccaaaucu

SEQ ID NO: 2097590 - RNA, 19 nt, Homo sapiens
  misc_RNA (1)...(19): siRNA sense strand
gaagaucuuugaugaugaa

SEQ ID NO: 2097591 - RNA, 19 nt, Homo sapiens
  misc_RNA (1)...(19): siRNA sense strand
gcucaaaccugaccuuauc

SEQ ID NO: 2097592 - RNA, 19 nt, Homo sapiens
  misc_RNA (1)...(19): siRNA sense strand
gaguguaccuccuuuauuc

SEQ ID NO: 2097593 - RNA, 19 nt, Homo sapiens
  misc_RNA (1)...(19): siRNA sense strand
ggaagaucuuugaugauga

SEQ ID NO: 2097594 - RNA, 19 nt, Homo sapiens
  misc_RNA (1)...(19): siRNA sense strand
aaacagauccagaaaggaa

SEQ ID NO: 2097595 - RNA, 19 nt, Homo sapiens
  misc_RNA (1)...(19): siRNA sense strand
gaaccaacuaucauuagaa

SEQ ID NO: 2097596 - RNA, 19 nt, Homo sapiens
  misc_RNA (1)...(19): siRNA sense strand
ggaagaagcagaacuugag

SEQ ID NO: 2097597 - RNA, 19 nt, Homo sapiens
  misc_RNA (1)...(19): siRNA sense strand
ucaccacccucuugcauug

SEQ ID NO: 2097598 - RNA, 19 nt, Homo sapiens
  misc_RNA (1)...(19): siRNA sense strand
gcacagcacggccaccuau

SEQ ID NO: 2097599 - RNA, 19 nt, Homo sapiens
  misc_RNA (1)...(19): siRNA sense strand
gaucuuugaugaugaacca

SEQ ID NO: 2097600 - RNA, 19 nt, Homo sapiens
  misc_RNA (1)...(19): siRNA sense strand
gcuaaagaaucugccaaau

SEQ ID NO: 2097601 - RNA, 19 nt, Homo sapiens
  misc_RNA (1)...(19): siRNA sense strand
ugaaccaacuaucauuaga

SEQ ID NO: 2097602 - RNA, 19 nt, Homo sapiens
  misc_RNA (1)...(19): siRNA sense strand
cagacgguauuaagccuaa

SEQ ID NO: 2097603 - RNA, 19 nt, Homo sapiens
  misc_RNA (1)...(19): siRNA sense strand
uaaagucaccacccucuug

SEQ ID NO: 2097604 - RNA, 19 nt, Homo sapiens
  misc_RNA (1)...(19): siRNA sense strand
aggaagaucuuugaugaug

SEQ ID NO: 2097605 - RNA, 19 nt, Homo sapiens
  misc_RNA (1)...(19): siRNA sense strand
caaaacagauccagaaagg

SEQ ID NO: 2097606 - RNA, 19 nt, Homo sapiens
  misc_RNA (1)...(19): siRNA sense strand
ggagaagaccagggaagaa

SEQ ID NO: 2097607 - RNA, 19 nt, Homo sapiens
  misc_RNA (1)...(19): siRNA sense strand
gggaagaagcagaacuuga

SEQ ID NO: 2097608 - RNA, 19 nt, Homo sapiens
  misc_RNA (1)...(19): siRNA sense strand
cuaaagaaucugccaaauc

SEQ ID NO: 2097609 - RNA, 19 nt, Homo sapiens
  misc_RNA (1)...(19): siRNA sense strand
ccuccgaaauagcuaaaga

SEQ ID NO: 2097610 - RNA, 19 nt, Homo sapiens
  misc_RNA (1)...(19): siRNA sense strand
gaccagggaagaagcagaa

SEQ ID NO: 2097611 - RNA, 19 nt, Homo sapiens
  misc_RNA (1)...(19): siRNA sense strand
gugccagacuugcccaguu

SEQ ID NO: 2097612 - RNA, 19 nt, Homo sapiens
  misc_RNA (1)...(19): siRNA sense strand
ccaacuaucauuagaagag

SEQ ID NO: 2097613 - RNA, 19 nt, Homo sapiens
  misc_RNA (1)...(19): siRNA sense strand
gagaagaccagggaagaag

SEQ ID NO: 2097614 - RNA, 19 nt, Homo sapiens
  misc_RNA (1)...(19): siRNA sense strand
cagaggaccugcucaaacc

SEQ ID NO: 2097615 - RNA, 19 nt, Homo sapiens
  misc_RNA (1)...(19): siRNA sense strand
ccagguuguugccaucgaa

SEQ ID NO: 2097616 - RNA, 19 nt, Homo sapiens
  misc_RNA (1)...(19): siRNA sense strand
gaagaccagggaagaagca

SEQ ID NO: 2097617 - RNA, 19 nt, Homo sapiens
  misc_RNA (1)...(19): siRNA sense strand
aaccaacuaucauuagaag

SEQ ID NO: 2097618 - RNA, 19 nt, Homo sapiens
  misc_RNA (1)...(19): siRNA sense strand
gaggaagaucuuugaugau

SEQ ID NO: 2097619 - RNA, 19 nt, Homo sapiens
  misc_RNA (1)...(19): siRNA sense strand
cagggaagaagcagaacuu

SEQ ID NO: 2097620 - RNA, 19 nt, Homo sapiens
  misc_RNA (1)...(19): siRNA sense strand
gauccagaaaggaaaguuc

SEQ ID NO: 2097621 - RNA, 19 nt, Homo sapiens
  misc_RNA (1)...(19): siRNA sense strand
cagaauaguuuuagugaac

SEQ ID NO: 2097622 - RNA, 19 nt, Homo sapiens
  misc_RNA (1)...(19): siRNA sense strand
uaagccuaauccagaauag

SEQ ID NO: 2097623 - RNA, 19 nt, Homo sapiens
  misc_RNA (1)...(19): siRNA sense strand
uuaagccuaauccagaaua

SEQ ID NO: 2097624 - RNA, 19 nt, Homo sapiens
  misc_RNA (1)...(19): siRNA sense strand
uuuacucuuugggcaauua

SEQ ID NO: 2097625 - RNA, 19 nt, Homo sapiens
  misc_RNA (1)...(19): siRNA sense strand
gacuggaugccacggguaa

SEQ ID NO: 2097626 - RNA, 19 nt, Homo sapiens
  misc_RNA (1)...(19): siRNA sense strand
ccagaggaccugcucaaac

SEQ ID NO: 2097627 - RNA, 19 nt, Homo sapiens
  misc_RNA (1)...(19): siRNA sense strand
ugccagacuugcccaguuc

SEQ ID NO: 2097628 - RNA, 19 nt, Homo sapiens
  misc_RNA (1)...(19): siRNA sense strand
gccuaauccagaauaguuu

SEQ ID NO: 2097629 - RNA, 19 nt, Homo sapiens
  misc_RNA (1)...(19): siRNA sense strand
cccagucaguggcagauuc

SEQ ID NO: 2097630 - RNA, 19 nt, Homo sapiens
  misc_RNA (1)...(19): siRNA sense strand
ucugccaaaucuccuguga

SEQ ID NO: 2097631 - RNA, 19 nt, Homo sapiens
  misc_RNA (1)...(19): siRNA sense strand
cauagccacugaggugagu

SEQ ID NO: 2097632 - RNA, 19 nt, Homo sapiens
  misc_RNA (1)...(19): siRNA sense strand
gccagaggaccugcucaaa

SEQ ID NO: 2097633 - RNA, 19 nt, Homo sapiens
  misc_RNA (1)...(19): siRNA sense strand
ggccagaggaccugcucaa

SEQ ID NO: 2097634 - RNA, 19 nt, Homo sapiens
  misc_RNA (1)...(19): siRNA sense strand
gaagaggaauccaaaugua

SEQ ID NO: 2097635 - RNA, 19 nt, Homo sapiens
  misc_RNA (1)...(19): siRNA sense strand
gaaaggaaaugcaacaaug

SEQ ID NO: 2097636 - RNA, 19 nt, Homo sapiens
  misc_RNA (1)...(19): siRNA sense strand
gaugauagcugccgaacaa

SEQ ID NO: 2097637 - RNA, 19 nt, Homo sapiens
  misc_RNA (1)...(19): siRNA sense strand
ggagugagauccagugaaa

SEQ ID NO: 2097638 - RNA, 19 nt, Homo sapiens
  misc_RNA (1)...(19): siRNA sense strand
gaucagaaccuucauuaaa

SEQ ID NO: 2097639 - RNA, 19 nt, Homo sapiens
  misc_RNA (1)...(19): siRNA sense strand
caacugcucugauaaguau

SEQ ID NO: 2097640 - RNA, 19 nt, Homo sapiens
  misc_RNA (1)...(19): siRNA sense strand
ggaagagacugaagguauu

SEQ ID NO: 2097641 - RNA, 19 nt, Homo sapiens
  misc_RNA (1)...(19): siRNA sense strand
gaugggcgauuacuuuaua

SEQ ID NO: 2097642 - RNA, 19 nt, Homo sapiens
  misc_RNA (1)...(19): siRNA sense strand
gaacaauggccuaguaauu

SEQ ID NO: 2097643 - RNA, 19 nt, Homo sapiens
  misc_RNA (1)...(19): siRNA sense strand
caaagcaucugacuguaaa

SEQ ID NO: 2097644 - RNA, 19 nt, Homo sapiens
  misc_RNA (1)...(19): siRNA sense strand
ggaagaugcugacagaaga

SEQ ID NO: 2097645 - RNA, 19 nt, Homo sapiens
  misc_RNA (1)...(19): siRNA sense strand
cuucauggcucauauuaua

SEQ ID NO: 2097646 - RNA, 19 nt, Homo sapiens
  misc_RNA (1)...(19): siRNA sense strand
gcaagugauccacauauua

SEQ ID NO: 2097647 - RNA, 19 nt, Homo sapiens
  misc_RNA (1)...(19): siRNA sense strand
gauacucccuugcauauug

SEQ ID NO: 2097648 - RNA, 19 nt, Homo sapiens
  misc_RNA (1)...(19): siRNA sense strand
acacaaggcucuccaaaga

SEQ ID NO: 2097649 - RNA, 19 nt, Homo sapiens
  misc_RNA (1)...(19): siRNA sense strand
ucacagagcgucauaaauu

SEQ ID NO: 2097650 - RNA, 19 nt, Homo sapiens
  misc_RNA (1)...(19): siRNA sense strand
ggaaauagugaaggaauua

SEQ ID NO: 2097651 - RNA, 19 nt, Homo sapiens
  misc_RNA (1)...(19): siRNA sense strand
aaagucaacugcucugaua

SEQ ID NO: 2097652 - RNA, 19 nt, Homo sapiens
  misc_RNA (1)...(19): siRNA sense strand
gagaggccaugcagauaua

SEQ ID NO: 2097653 - RNA, 19 nt, Homo sapiens
  misc_RNA (1)...(19): siRNA sense strand
ggaaauacagcuuugauga

SEQ ID NO: 2097654 - RNA, 19 nt, Homo sapiens
  misc_RNA (1)...(19): siRNA sense strand
gaagugggcugcgcuauca

SEQ ID NO: 2097655 - RNA, 19 nt, Homo sapiens
  misc_RNA (1)...(19): siRNA sense strand
gaauguggaugcaguaugu

SEQ ID NO: 2097656 - RNA, 19 nt, Homo sapiens
  misc_RNA (1)...(19): siRNA sense strand
aaaccuagaucccaaacua

SEQ ID NO: 2097657 - RNA, 19 nt, Homo sapiens
  misc_RNA (1)...(19): siRNA sense strand
gaauuacucuucuggcuau

SEQ ID NO: 2097658 - RNA, 19 nt, Homo sapiens
  misc_RNA (1)...(19): siRNA sense strand
gagaauacauugcucagau

SEQ ID NO: 2097659 - RNA, 19 nt, Homo sapiens
  misc_RNA (1)...(19): siRNA sense strand
gaauggagcuaacugcaau

SEQ ID NO: 2097660 - RNA, 19 nt, Homo sapiens
  misc_RNA (1)...(19): siRNA sense strand
gugagaagcugaaacaaau

SEQ ID NO: 2097661 - RNA, 19 nt, Homo sapiens
  misc_RNA (1)...(19): siRNA sense strand
gaacuccuccuuaaauuga

SEQ ID NO: 2097662 - RNA, 19 nt, Homo sapiens
  misc_RNA (1)...(19): siRNA sense strand
gaacaaggcaaucuggaaa

SEQ ID NO: 2097663 - RNA, 19 nt, Homo sapiens
  misc_RNA (1)...(19): siRNA sense strand
gcucgacgcuggaacauau

SEQ ID NO: 2097664 - RNA, 19 nt, Homo sapiens
  misc_RNA (1)...(19): siRNA sense strand
cacagagcgucauaaauua

SEQ ID NO: 2097665 - RNA, 19 nt, Homo sapiens
  misc_RNA (1)...(19): siRNA sense strand
gaagccaacguucaaguua

SEQ ID NO: 2097666 - RNA, 19 nt, Homo sapiens
  misc_RNA (1)...(19): siRNA sense strand
gaaacuagaagacgaaaug

SEQ ID NO: 2097667 - RNA, 19 nt, Homo sapiens
  misc_RNA (1)...(19): siRNA sense strand
guauugggcuguugagaaa

SEQ ID NO: 2097668 - RNA, 19 nt, Homo sapiens
  misc_RNA (1)...(19): siRNA sense strand
guaguagaguugcuucuuu

SEQ ID NO: 2097669 - RNA, 19 nt, Homo sapiens
  misc_RNA (1)...(19): siRNA sense strand
gcacagaagaaucagauaa

SEQ ID NO: 2097670 - RNA, 19 nt, Homo sapiens
  misc_RNA (1)...(19): siRNA sense strand
aaacauuccugcucugaaa

SEQ ID NO: 2097671 - RNA, 19 nt, Homo sapiens
  misc_RNA (1)...(19): siRNA sense strand
uaaagugucugcuguagau

SEQ ID NO: 2097672 - RNA, 19 nt, Homo sapiens
  misc_RNA (1)...(19): siRNA sense strand
uguaaaugcuguccucaua

SEQ ID NO: 2097673 - RNA, 19 nt, Homo sapiens
  misc_RNA (1)...(19): siRNA sense strand
agaaggagcuaauucaaug

SEQ ID NO: 2097674 - RNA, 19 nt, Homo sapiens
  misc_RNA (1)...(19): siRNA sense strand
ucagaacaauggccuagua

SEQ ID NO: 2097675 - RNA, 19 nt, Homo sapiens
  misc_RNA (1)...(19): siRNA sense strand
ggaaguccuuucuaaugaa

SEQ ID NO: 2097676 - RNA, 19 nt, Homo sapiens
  misc_RNA (1)...(19): siRNA sense strand
agacagauuugaagcuuaa

SEQ ID NO: 2097677 - RNA, 19 nt, Homo sapiens
  misc_RNA (1)...(19): siRNA sense strand
ggugaaacgccacuuauaa

SEQ ID NO: 2097678 - RNA, 19 nt, Homo sapiens
  misc_RNA (1)...(19): siRNA sense strand
gaagaaagagaaagcauuc

SEQ ID NO: 2097679 - RNA, 19 nt, Homo sapiens
  misc_RNA (1)...(19): siRNA sense strand
uaaaggcaauuaaccagaa

SEQ ID NO: 2097680 - RNA, 19 nt, Homo sapiens
  misc_RNA (1)...(19): siRNA sense strand
ucugaaagcucuucuugaa

SEQ ID NO: 2097681 - RNA, 19 nt, Homo sapiens
  misc_RNA (1)...(19): siRNA sense strand
caaagaauauuccaacaac

SEQ ID NO: 2097682 - RNA, 19 nt, Homo sapiens
  misc_RNA (1)...(19): siRNA sense strand
gcucaaagaugacaaagac

SEQ ID NO: 2097683 - RNA, 19 nt, Homo sapiens
  misc_RNA (1)...(19): siRNA sense strand
ggaaauuauugcagauguu

SEQ ID NO: 2097684 - RNA, 19 nt, Homo sapiens
  misc_RNA (1)...(19): siRNA sense strand
cauguugucucccaucuuu

SEQ ID NO: 2097685 - RNA, 19 nt, Homo sapiens
  misc_RNA (1)...(19): siRNA sense strand
caagacagcccucaauaga

SEQ ID NO: 2097686 - RNA, 19 nt, Homo sapiens
  misc_RNA (1)...(19): siRNA sense strand
gcaacaauggugagagaua

SEQ ID NO: 2097687 - RNA, 19 nt, Homo sapiens
  misc_RNA (1)...(19): siRNA sense strand
gagauguuaucgauuauuc

SEQ ID NO: 2097688 - RNA, 19 nt, Homo sapiens
  misc_RNA (1)...(19): siRNA sense strand
ccuccaaacugcacaaauu

SEQ ID NO: 2097689 - RNA, 19 nt, Homo sapiens
  misc_RNA (1)...(19): siRNA sense strand
aaacuucucuggcugaaau

SEQ ID NO: 2097690 - RNA, 19 nt, Homo sapiens
  misc_RNA (1)...(19): siRNA sense strand
caacaauggugagagauau

SEQ ID NO: 2097691 - RNA, 19 nt, Homo sapiens
  misc_RNA (1)...(19): siRNA sense strand
uauaaaggcuaccaagaug

SEQ ID NO: 2097692 - RNA, 19 nt, Homo sapiens
  misc_RNA (1)...(19): siRNA sense strand
ccacauagcacauauuaca

SEQ ID NO: 2097693 - RNA, 19 nt, Homo sapiens
  misc_RNA (1)...(19): siRNA sense strand
uugaugagcugaagaaaga

SEQ ID NO: 2097694 - RNA, 19 nt, Homo sapiens
  misc_RNA (1)...(19): siRNA sense strand
uggaagauuuggauaauug

SEQ ID NO: 2097695 - RNA, 19 nt, Homo sapiens
  misc_RNA (1)...(19): siRNA sense strand
gcucggauguccauuuguu

SEQ ID NO: 2097696 - RNA, 19 nt, Homo sapiens
  misc_RNA (1)...(19): siRNA sense strand
cuucuuggcucucuuauau

SEQ ID NO: 2097697 - RNA, 19 nt, Homo sapiens
  misc_RNA (1)...(19): siRNA sense strand
caaaggccguacugacgua

SEQ ID NO: 2097698 - RNA, 19 nt, Homo sapiens
  misc_RNA (1)...(19): siRNA sense strand
uagaggaacuacugaaaug

SEQ ID NO: 2097699 - RNA, 19 nt, Homo sapiens
  misc_RNA (1)...(19): siRNA sense strand
ccagagagcagaucaguau

SEQ ID NO: 2097700 - RNA, 19 nt, Homo sapiens
  misc_RNA (1)...(19): siRNA sense strand
ccugcaagauccaauuaua

SEQ ID NO: 2097701 - RNA, 19 nt, Homo sapiens
  misc_RNA (1)...(19): siRNA sense strand
acaaugaaguggcggauga

SEQ ID NO: 2097702 - RNA, 19 nt, Homo sapiens
  misc_RNA (1)...(19): siRNA sense strand
gcgagacuccuuauaauau

SEQ ID NO: 2097703 - RNA, 19 nt, Homo sapiens
  misc_RNA (1)...(19): siRNA sense strand
ggggagauguuaucgauua

SEQ ID NO: 2097704 - RNA, 19 nt, Homo sapiens
  misc_RNA (1)...(19): siRNA sense strand
ucaauagacgggacacuua

SEQ ID NO: 2097705 - RNA, 19 nt, Homo sapiens
  misc_RNA (1)...(19): siRNA sense strand
gacguuccaugcucagaua

SEQ ID NO: 2097706 - RNA, 19 nt, Homo sapiens
  misc_RNA (1)...(19): siRNA sense strand
uggcagauauucucaguga

SEQ ID NO: 2097707 - RNA, 19 nt, Homo sapiens
  misc_RNA (1)...(19): siRNA sense strand
gagauacucccuugcauau

SEQ ID NO: 2097708 - RNA, 19 nt, Homo sapiens
  misc_RNA (1)...(19): siRNA sense strand
gcagcagccucuucugaga

SEQ ID NO: 2097709 - RNA, 19 nt, Homo sapiens
  misc_RNA (1)...(19): siRNA sense strand
gaaaugagaaacgcagaaa

SEQ ID NO: 2097710 - RNA, 19 nt, Homo sapiens
  misc_RNA (1)...(19): siRNA sense strand
cauaaauggccguguguua

SEQ ID NO: 2097711 - RNA, 19 nt, Homo sapiens
  misc_RNA (1)...(19): siRNA sense strand
ggacuaagcaaugcaagaa

SEQ ID NO: 2097712 - RNA, 19 nt, Homo sapiens
  misc_RNA (1)...(19): siRNA sense strand
caagugauccacauauuau

SEQ ID NO: 2097713 - RNA, 19 nt, Homo sapiens
  misc_RNA (1)...(19): siRNA sense strand
gaagagaaggagagaguug

SEQ ID NO: 2097714 - RNA, 19 nt, Homo sapiens
  misc_RNA (1)...(19): siRNA sense strand
cgagacuccuuauaauauu

SEQ ID NO: 2097715 - RNA, 19 nt, Homo sapiens
  misc_RNA (1)...(19): siRNA sense strand
gaaauacagcuuugaugau

SEQ ID NO: 2097716 - RNA, 19 nt, Homo sapiens
  misc_RNA (1)...(19): siRNA sense strand
ggaaggauagugaaccaaa

SEQ ID NO: 2097717 - RNA, 19 nt, Homo sapiens
  misc_RNA (1)...(19): siRNA sense strand
gcucagaugucccaguuag

SEQ ID NO: 2097718 - RNA, 19 nt, Homo sapiens
  misc_RNA (1)...(19): siRNA sense strand
gccaugcacuguaaaccua

SEQ ID NO: 2097719 - RNA, 19 nt, Homo sapiens
  misc_RNA (1)...(19): siRNA sense strand
gggauuggccuuuguguug

SEQ ID NO: 2097720 - RNA, 19 nt, Homo sapiens
  misc_RNA (1)...(19): siRNA sense strand
acaaggcaaucuggaaaua

SEQ ID NO: 2097721 - RNA, 19 nt, Homo sapiens
  misc_RNA (1)...(19): siRNA sense strand
agauaaaggugcuaaagug

SEQ ID NO: 2097722 - RNA, 19 nt, Homo sapiens
  misc_RNA (1)...(19): siRNA sense strand
ugucagagguggucauguu

SEQ ID NO: 2097723 - RNA, 19 nt, Homo sapiens
  misc_RNA (1)...(19): siRNA sense strand
gagcacaggcuuuggagaa

SEQ ID NO: 2097724 - RNA, 19 nt, Homo sapiens
  misc_RNA (1)...(19): siRNA sense strand
aacaauggccuaguaauua

SEQ ID NO: 2097725 - RNA, 19 nt, Homo sapiens
  misc_RNA (1)...(19): siRNA sense strand
gcacuuauaucugcaucga

SEQ ID NO: 2097726 - RNA, 19 nt, Homo sapiens
  misc_RNA (1)...(19): siRNA sense strand
caucucacguccaucagua

SEQ ID NO: 2097727 - RNA, 19 nt, Homo sapiens
  misc_RNA (1)...(19): siRNA sense strand
cagcaucccuucuacaaca

SEQ ID NO: 2097728 - RNA, 19 nt, Homo sapiens
  misc_RNA (1)...(19): siRNA sense strand
gacauuagaggacaggaua

SEQ ID NO: 2097729 - RNA, 19 nt, Homo sapiens
  misc_RNA (1)...(19): siRNA sense strand
gggcuugguuuauuguuug

SEQ ID NO: 2097730 - RNA, 19 nt, Homo sapiens
  misc_RNA (1)...(19): siRNA sense strand
gcuucgggauucaaauaua

SEQ ID NO: 2097731 - RNA, 19 nt, Homo sapiens
  misc_RNA (1)...(19): siRNA sense strand
acaauggccuaguaauuau

SEQ ID NO: 2097732 - RNA, 19 nt, Homo sapiens
  misc_RNA (1)...(19): siRNA sense strand
gaaaagcccuuccgaaugc

SEQ ID NO: 2097733 - RNA, 19 nt, Homo sapiens
  misc_RNA (1)...(19): siRNA sense strand
gaagaaagagaugaauaug

SEQ ID NO: 2097734 - RNA, 19 nt, Homo sapiens
  misc_RNA (1)...(19): siRNA sense strand
ggacuucucaucuuauuua

SEQ ID NO: 2097735 - RNA, 19 nt, Homo sapiens
  misc_RNA (1)...(19): siRNA sense strand
ggaagaacagugcaucaua

SEQ ID NO: 2097736 - RNA, 19 nt, Homo sapiens
  misc_RNA (1)...(19): siRNA sense strand
gaagaacagugcaucauac

SEQ ID NO: 2097737 - RNA, 19 nt, Homo sapiens
  misc_RNA (1)...(19): siRNA sense strand
uaaagagcauggugcagua

SEQ ID NO: 2097738 - RNA, 19 nt, Homo sapiens
  misc_RNA (1)...(19): siRNA sense strand
cauacaagguugcaaacua

SEQ ID NO: 2097739 - RNA, 19 nt, Homo sapiens
  misc_RNA (1)...(19): siRNA sense strand
gccaggacuucucaucuua

SEQ ID NO: 2097740 - RNA, 19 nt, Homo sapiens
  misc_RNA (1)...(19): siRNA sense strand
ggaguacgcugcgaaccua

SEQ ID NO: 2097741 - RNA, 19 nt, Homo sapiens
  misc_RNA (1)...(19): siRNA sense strand
auacaagguugcaaacuaa

SEQ ID NO: 2097742 - RNA, 19 nt, Homo sapiens
  misc_RNA (1)...(19): siRNA sense strand
gcucuggccucgcuuguug

SEQ ID NO: 2097743 - RNA, 19 nt, Homo sapiens
  misc_RNA (1)...(19): siRNA sense strand
ggacaucccugagaaucga

SEQ ID NO: 2097744 - RNA, 19 nt, Homo sapiens
  misc_RNA (1)...(19): siRNA sense strand
gaacagugcaucauacaag

SEQ ID NO: 2097745 - RNA, 19 nt, Homo sapiens
  misc_RNA (1)...(19): siRNA sense strand
ggacaucccaguagcaguu

SEQ ID NO: 2097746 - RNA, 19 nt, Homo sapiens
  misc_RNA (1)...(19): siRNA sense strand
ggacuacauuugucuccaa

SEQ ID NO: 2097747 - RNA, 19 nt, Homo sapiens
  misc_RNA (1)...(19): siRNA sense strand
uaaaucgccugaacucugu

SEQ ID NO: 2097748 - RNA, 19 nt, Homo sapiens
  misc_RNA (1)...(19): siRNA sense strand
uaccuuugcugcuuccuua

SEQ ID NO: 2097749 - RNA, 19 nt, Homo sapiens
  misc_RNA (1)...(19): siRNA sense strand
gaacucuguuguuggugaa

SEQ ID NO: 2097750 - RNA, 19 nt, Homo sapiens
  misc_RNA (1)...(19): siRNA sense strand
ucgcaucucuggccuuuga

SEQ ID NO: 2097751 - RNA, 19 nt, Homo sapiens
  misc_RNA (1)...(19): siRNA sense strand
ugaaacagccugggaagaa

SEQ ID NO: 2097752 - RNA, 19 nt, Homo sapiens
  misc_RNA (1)...(19): siRNA sense strand
caaacuaaaucgccugaac

SEQ ID NO: 2097753 - RNA, 19 nt, Homo sapiens
  misc_RNA (1)...(19): siRNA sense strand
ccaguagcaguuacaauuu

SEQ ID NO: 2097754 - RNA, 19 nt, Homo sapiens
  misc_RNA (1)...(19): siRNA sense strand
caggacuucucaucuuauu

SEQ ID NO: 2097755 - RNA, 19 nt, Homo sapiens
  misc_RNA (1)...(19): siRNA sense strand
gaaacagccugggaagaac

SEQ ID NO: 2097756 - RNA, 19 nt, Homo sapiens
  misc_RNA (1)...(19): siRNA sense strand
ggacagccaggacuucuca

SEQ ID NO: 2097757 - RNA, 19 nt, Homo sapiens
  misc_RNA (1)...(19): siRNA sense strand
caucauacaagguugcaaa

SEQ ID NO: 2097758 - RNA, 19 nt, Homo sapiens
  misc_RNA (1)...(19): siRNA sense strand
ccaaugacagugcacuaaa

SEQ ID NO: 2097759 - RNA, 19 nt, Homo sapiens
  misc_RNA (1)...(19): siRNA sense strand
ggucucuucucuaccuuug

SEQ ID NO: 2097760 - RNA, 19 nt, Homo sapiens
  misc_RNA (1)...(19): siRNA sense strand
uaucagauggacuacauuu

SEQ ID NO: 2097761 - RNA, 19 nt, Homo sapiens
  misc_RNA (1)...(19): siRNA sense strand
gccaaugcguguuuacaag

SEQ ID NO: 2097762 - RNA, 19 nt, Homo sapiens
  misc_RNA (1)...(19): siRNA sense strand
ucagauggacuacauuugu

SEQ ID NO: 2097763 - RNA, 19 nt, Homo sapiens
  misc_RNA (1)...(19): siRNA sense strand
cccaguagcaguuacaauu

SEQ ID NO: 2097764 - RNA, 19 nt, Homo sapiens
  misc_RNA (1)...(19): siRNA sense strand
caaugcguguuuacaagug

SEQ ID NO: 2097765 - RNA, 19 nt, Homo sapiens
  misc_RNA (1)...(19): siRNA sense strand
cgccugaacucuguuguug

SEQ ID NO: 2097766 - RNA, 19 nt, Homo sapiens
  misc_RNA (1)...(19): siRNA sense strand
acaaguggcccaagacugu

SEQ ID NO: 2097767 - RNA, 19 nt, Homo sapiens
  misc_RNA (1)...(19): siRNA sense strand
cagauggacuacauuuguc

SEQ ID NO: 2097768 - RNA, 19 nt, Homo sapiens
  misc_RNA (1)...(19): siRNA sense strand
caaugacagugcacuaaaa

SEQ ID NO: 2097769 - RNA, 19 nt, Homo sapiens
  misc_RNA (1)...(19): siRNA sense strand
ggauguagcagaagcaaaa

SEQ ID NO: 2097770 - RNA, 19 nt, Homo sapiens
  misc_RNA (1)...(19): siRNA sense strand
caagauuaaucaggaaagg

SEQ ID NO: 2097771 - RNA, 19 nt, Homo sapiens
  misc_RNA (1)...(19): siRNA sense strand
gccaaugacagugcacuaa

SEQ ID NO: 2097772 - RNA, 19 nt, Homo sapiens
  misc_RNA (1)...(19): siRNA sense strand
guuuacaaguggcccaaga

SEQ ID NO: 2097773 - RNA, 19 nt, Homo sapiens
  misc_RNA (1)...(19): siRNA sense strand
gcaucucuggccuuugaua

SEQ ID NO: 2097774 - RNA, 19 nt, Homo sapiens
  misc_RNA (1)...(19): siRNA sense strand
ccugaacucuguuguuggu

SEQ ID NO: 2097775 - RNA, 19 nt, Homo sapiens
  misc_RNA (1)...(19): siRNA sense strand
ucucgcaucucuggccuuu

SEQ ID NO: 2097776 - RNA, 19 nt, Homo sapiens
  misc_RNA (1)...(19): siRNA sense strand
gaaaaugugauguucugaa

SEQ ID NO: 2097777 - RNA, 19 nt, Homo sapiens
  misc_RNA (1)...(19): siRNA sense strand
caagguugcaaacuaaauc

SEQ ID NO: 2097778 - RNA, 19 nt, Homo sapiens
  misc_RNA (1)...(19): siRNA sense strand
gaagcaaaaccugaauuaa

SEQ ID NO: 2097779 - RNA, 19 nt, Homo sapiens
  misc_RNA (1)...(19): siRNA sense strand
aaugugauguucugaaucg

SEQ ID NO: 2097780 - RNA, 19 nt, Homo sapiens
  misc_RNA (1)...(19): siRNA sense strand
agauuaaucaggaaaggaa

SEQ ID NO: 2097781 - RNA, 19 nt, Homo sapiens
  misc_RNA (1)...(19): siRNA sense strand
caguagcaguuacaauuuu

SEQ ID NO: 2097782 - RNA, 19 nt, Homo sapiens
  misc_RNA (1)...(19): siRNA sense strand
uuuaucagauggacuacau

SEQ ID NO: 2097783 - RNA, 19 nt, Homo sapiens
  misc_RNA (1)...(19): siRNA sense strand
agccaggacuucucaucuu

SEQ ID NO: 2097784 - RNA, 19 nt, Homo sapiens
  misc_RNA (1)...(19): siRNA sense strand
ccguggacaucccugagaa

SEQ ID NO: 2097785 - RNA, 19 nt, Homo sapiens
  misc_RNA (1)...(19): siRNA sense strand
gacaucccaguagcaguua

SEQ ID NO: 2097786 - RNA, 19 nt, Homo sapiens
  misc_RNA (1)...(19): siRNA sense strand
agaagcaaaaccugaauua

SEQ ID NO: 2097787 - RNA, 19 nt, Homo sapiens
  misc_RNA (1)...(19): siRNA sense strand
aauaugccaaugcguguuu

SEQ ID NO: 2097788 - RNA, 19 nt, Homo sapiens
  misc_RNA (1)...(19): siRNA sense strand
gaauaugccaaugcguguu

SEQ ID NO: 2097789 - RNA, 19 nt, Homo sapiens
  misc_RNA (1)...(19): siRNA sense strand
gcauggugcaguaccugaa

SEQ ID NO: 2097790 - RNA, 19 nt, Homo sapiens
  misc_RNA (1)...(19): siRNA sense strand
gcaguuacaauuuucuuug

SEQ ID NO: 2097791 - RNA, 19 nt, Homo sapiens
  misc_RNA (1)...(19): siRNA sense strand
gauuaaucaggaaaggaaa

SEQ ID NO: 2097792 - RNA, 19 nt, Homo sapiens
  misc_RNA (1)...(19): siRNA sense strand
ccaaugcguguuuacaagu

SEQ ID NO: 2097793 - RNA, 19 nt, Homo sapiens
  misc_RNA (1)...(19): siRNA sense strand
acucuguuguuggugaaua

SEQ ID NO: 2097794 - RNA, 19 nt, Homo sapiens
  misc_RNA (1)...(19): siRNA sense strand
gggaagaacagugcaucau

SEQ ID NO: 2097795 - RNA, 19 nt, Homo sapiens
  misc_RNA (1)...(19): siRNA sense strand
cugcgaaccuaaagagcau

SEQ ID NO: 2097796 - RNA, 19 nt, Homo sapiens
  misc_RNA (1)...(19): siRNA sense strand
gcaggacagccaggacuuc

SEQ ID NO: 2097797 - RNA, 19 nt, Homo sapiens
  misc_RNA (1)...(19): siRNA sense strand
aaucgagucauucucauca

SEQ ID NO: 2097798 - RNA, 19 nt, Homo sapiens
  misc_RNA (1)...(19): siRNA sense strand
ggccaaugacagugcacua

SEQ ID NO: 2097799 - RNA, 19 nt, Homo sapiens
  misc_RNA (1)...(19): siRNA sense strand
aaacuaaaucgccugaacu

SEQ ID NO: 2097800 - RNA, 19 nt, Homo sapiens
  misc_RNA (1)...(19): siRNA sense strand
acagugcacuaaaagauga

SEQ ID NO: 2097801 - RNA, 19 nt, Homo sapiens
  misc_RNA (1)...(19): siRNA sense strand
gaaaguggcugcuauugaa

SEQ ID NO: 2097802 - RNA, 19 nt, Homo sapiens
  misc_RNA (1)...(19): siRNA sense strand
ggaaagugaucuagaaauu

SEQ ID NO: 2097803 - RNA, 19 nt, Homo sapiens
  misc_RNA (1)...(19): siRNA sense strand
ugacagagccauugaaaua

SEQ ID NO: 2097804 - RNA, 19 nt, Homo sapiens
  misc_RNA (1)...(19): siRNA sense strand
ccagaaagccauugacuua

SEQ ID NO: 2097805 - RNA, 19 nt, Homo sapiens
  misc_RNA (1)...(19): siRNA sense strand
guaagaagguggaggaaga

SEQ ID NO: 2097806 - RNA, 19 nt, Homo sapiens
  misc_RNA (1)...(19): siRNA sense strand
gaagguggaggaagacuua

SEQ ID NO: 2097807 - RNA, 19 nt, Homo sapiens
  misc_RNA (1)...(19): siRNA sense strand
caaagaaggugugauugaa

SEQ ID NO: 2097808 - RNA, 19 nt, Homo sapiens
  misc_RNA (1)...(19): siRNA sense strand
gaaagccauugacuuauuc

SEQ ID NO: 2097809 - RNA, 19 nt, Homo sapiens
  misc_RNA (1)...(19): siRNA sense strand
gcucagaacccagcaaaua

SEQ ID NO: 2097810 - RNA, 19 nt, Homo sapiens
  misc_RNA (1)...(19): siRNA sense strand
agaaagccauugacuuauu

SEQ ID NO: 2097811 - RNA, 19 nt, Homo sapiens
  misc_RNA (1)...(19): siRNA sense strand
ugaggaaagugaucuagaa

SEQ ID NO: 2097812 - RNA, 19 nt, Homo sapiens
  misc_RNA (1)...(19): siRNA sense strand
uaaauugucagccaaguuu

SEQ ID NO: 2097813 - RNA, 19 nt, Homo sapiens
  misc_RNA (1)...(19): siRNA sense strand
gaagaaggaaugccuggaa

SEQ ID NO: 2097814 - RNA, 19 nt, Homo sapiens
  misc_RNA (1)...(19): siRNA sense strand
ugacaaagaaggugugauu

SEQ ID NO: 2097815 - RNA, 19 nt, Homo sapiens
  misc_RNA (1)...(19): siRNA sense strand
guuuggaggucaaguguaa

SEQ ID NO: 2097816 - RNA, 19 nt, Homo sapiens
  misc_RNA (1)...(19): siRNA sense strand
ugaugaagaugcuagugua

SEQ ID NO: 2097817 - RNA, 19 nt, Homo sapiens
  misc_RNA (1)...(19): siRNA sense strand
gaaagugaucuagaaauug

SEQ ID NO: 2097818 - RNA, 19 nt, Homo sapiens
  misc_RNA (1)...(19): siRNA sense strand
ugaagaugcuaguguaaug

SEQ ID NO: 2097819 - RNA, 19 nt, Homo sapiens
  misc_RNA (1)...(19): siRNA sense strand
ggaagaagcagcccaugau

SEQ ID NO: 2097820 - RNA, 19 nt, Homo sapiens
  misc_RNA (1)...(19): siRNA sense strand
acagagccauugaaauaaa

SEQ ID NO: 2097821 - RNA, 19 nt, Homo sapiens
  misc_RNA (1)...(19): siRNA sense strand
ggacucaaugaaauucuua

SEQ ID NO: 2097822 - RNA, 19 nt, Homo sapiens
  misc_RNA (1)...(19): siRNA sense strand
gaacaucagagaaaguaug

SEQ ID NO: 2097823 - RNA, 19 nt, Homo sapiens
  misc_RNA (1)...(19): siRNA sense strand
ucaggcaaaugauaagaaa

SEQ ID NO: 2097824 - RNA, 19 nt, Homo sapiens
  misc_RNA (1)...(19): siRNA sense strand
gaacauguguaagcaggau

SEQ ID NO: 2097825 - RNA, 19 nt, Homo sapiens
  misc_RNA (1)...(19): siRNA sense strand
ccuguaaauuggauuauga

SEQ ID NO: 2097826 - RNA, 19 nt, Homo sapiens
  misc_RNA (1)...(19): siRNA sense strand
cauacaggauccagaaguu

SEQ ID NO: 2097827 - RNA, 19 nt, Homo sapiens
  misc_RNA (1)...(19): siRNA sense strand
gaacccagcaaauauguca

SEQ ID NO: 2097828 - RNA, 19 nt, Homo sapiens
  misc_RNA (1)...(19): siRNA sense strand
cggaaugccuggacucaau

SEQ ID NO: 2097829 - RNA, 19 nt, Homo sapiens
  misc_RNA (1)...(19): siRNA sense strand
gaggaaagugaucuagaaa

SEQ ID NO: 2097830 - RNA, 19 nt, Homo sapiens
  misc_RNA (1)...(19): siRNA sense strand
acaaagaaggugugauuga

SEQ ID NO: 2097831 - RNA, 19 nt, Homo sapiens
  misc_RNA (1)...(19): siRNA sense strand
gacagagccauugaaauaa

SEQ ID NO: 2097832 - RNA, 19 nt, Homo sapiens
  misc_RNA (1)...(19): siRNA sense strand
cagaacaucagagaaagua

SEQ ID NO: 2097833 - RNA, 19 nt, Homo sapiens
  misc_RNA (1)...(19): siRNA sense strand
gagcuucgggccuuuguga

SEQ ID NO: 2097834 - RNA, 19 nt, Homo sapiens
  misc_RNA (1)...(19): siRNA sense strand
gaugaagaugcuaguguaa

SEQ ID NO: 2097835 - RNA, 19 nt, Homo sapiens
  misc_RNA (1)...(19): siRNA sense strand
uaagaaaguggcugcuauu

SEQ ID NO: 2097836 - RNA, 19 nt, Homo sapiens
  misc_RNA (1)...(19): siRNA sense strand
auaagaaaguggcugcuau

SEQ ID NO: 2097837 - RNA, 19 nt, Homo sapiens
  misc_RNA (1)...(19): siRNA sense strand
gauaagaaaguggcugcua

SEQ ID NO: 2097838 - RNA, 19 nt, Homo sapiens
  misc_RNA (1)...(19): siRNA sense strand
gggaagaagcagcccauga

SEQ ID NO: 2097839 - RNA, 19 nt, Homo sapiens
  misc_RNA (1)...(19): siRNA sense strand
caagaaaugggaggugaaa

SEQ ID NO: 2097840 - RNA, 19 nt, Homo sapiens
  misc_RNA (1)...(19): siRNA sense strand
gaaugagcuucgggccuuu

SEQ ID NO: 2097841 - RNA, 19 nt, Homo sapiens
  misc_RNA (1)...(19): siRNA sense strand
acccaaagguuaugaaucu

SEQ ID NO: 2097842 - RNA, 19 nt, Homo sapiens
  misc_RNA (1)...(19): siRNA sense strand
gaaggaaugccuggaaugg

SEQ ID NO: 2097843 - RNA, 19 nt, Homo sapiens
  misc_RNA (1)...(19): siRNA sense strand
gaagaagcagcccaugauc

SEQ ID NO: 2097844 - RNA, 19 nt, Homo sapiens
  misc_RNA (1)...(19): siRNA sense strand
ccagugucuucgucaaauu

SEQ ID NO: 2097845 - RNA, 19 nt, Homo sapiens
  misc_RNA (1)...(19): siRNA sense strand
aauccucgcuuggcuguuu

SEQ ID NO: 2097846 - RNA, 19 nt, Homo sapiens
  misc_RNA (1)...(19): siRNA sense strand
uaacggaggagaugaugga

SEQ ID NO: 2097847 - RNA, 19 nt, Homo sapiens
  misc_RNA (1)...(19): siRNA sense strand
cagcucagccucacaagug

SEQ ID NO: 2097848 - RNA, 19 nt, Homo sapiens
  misc_RNA (1)...(19): siRNA sense strand
gcccuugccuguaaauugg

SEQ ID NO: 2097849 - RNA, 19 nt, Homo sapiens
  misc_RNA (1)...(19): siRNA sense strand
gaucuugcccuugccugua

SEQ ID NO: 2097850 - RNA, 19 nt, Homo sapiens
  misc_RNA (1)...(19): siRNA sense strand
gcagacgaaccaucaagug

SEQ ID NO: 2097851 - RNA, 19 nt, Homo sapiens
  misc_RNA (1)...(19): siRNA sense strand
guaaauugucagccaaguu

SEQ ID NO: 2097852 - RNA, 19 nt, Homo sapiens
  misc_RNA (1)...(19): siRNA sense strand
cagagaaaguaugagcaaa

SEQ ID NO: 2097853 - RNA, 19 nt, Homo sapiens
  misc_RNA (1)...(19): siRNA sense strand
agaaaguggcugcuauuga

SEQ ID NO: 2097854 - RNA, 19 nt, Homo sapiens
  misc_RNA (1)...(19): siRNA sense strand
cuauugaagcccuaaauga

SEQ ID NO: 2097855 - RNA, 19 nt, Homo sapiens
  misc_RNA (1)...(19): siRNA sense strand
guaagcaggaucugagugu

SEQ ID NO: 2097856 - RNA, 19 nt, Homo sapiens
  misc_RNA (1)...(19): siRNA sense strand
cuaguguaaugcugaaaga

SEQ ID NO: 2097857 - RNA, 19 nt, Homo sapiens
  misc_RNA (1)...(19): siRNA sense strand
cagagccauugaaauaaau

SEQ ID NO: 2097858 - RNA, 19 nt, Homo sapiens
  misc_RNA (1)...(19): siRNA sense strand
ucaaauuacagaagccaaa

SEQ ID NO: 2097859 - RNA, 19 nt, Homo sapiens
  misc_RNA (1)...(19): siRNA sense strand
caucaagugaggaaaguga

SEQ ID NO: 2097860 - RNA, 19 nt, Homo sapiens
  misc_RNA (1)...(19): siRNA sense strand
ucucaucaguaaauuguca

SEQ ID NO: 2097861 - RNA, 19 nt, Homo sapiens
  misc_RNA (1)...(19): siRNA sense strand
cagacgaaccaucaaguga

SEQ ID NO: 2097862 - RNA, 19 nt, Homo sapiens
  misc_RNA (1)...(19): siRNA sense strand
caacuuagggcacagaaaa

SEQ ID NO: 2097863 - RNA, 19 nt, Homo sapiens
  misc_RNA (1)...(19): siRNA sense strand
guguaaugcugaaagaagu

SEQ ID NO: 2097864 - RNA, 19 nt, Homo sapiens
  misc_RNA (1)...(19): siRNA sense strand
agaagcagcccaugaucuu

SEQ ID NO: 2097865 - RNA, 19 nt, Homo sapiens
  misc_RNA (1)...(19): siRNA sense strand
cagugucuucgucaaauua

SEQ ID NO: 2097866 - RNA, 19 nt, Homo sapiens
  misc_RNA (1)...(19): siRNA sense strand
gccagugucuucgucaaau

SEQ ID NO: 2097867 - RNA, 19 nt, Homo sapiens
  misc_RNA (1)...(19): siRNA sense strand
ccauugacuuauucacaga

SEQ ID NO: 2097868 - RNA, 19 nt, Homo sapiens
  misc_RNA (1)...(19): siRNA sense strand
gcuauugaagcccuaaaug

SEQ ID NO: 2097869 - RNA, 19 nt, Homo sapiens
  misc_RNA (1)...(19): siRNA sense strand
gaaucucaucaguaaauug

SEQ ID NO: 2097870 - RNA, 19 nt, Homo sapiens
  misc_RNA (1)...(19): siRNA sense strand
gcaaauaugucaaaauacc

SEQ ID NO: 2097871 - RNA, 19 nt, Homo sapiens
  misc_RNA (1)...(19): siRNA sense strand
ugauugaaccagacacuga

SEQ ID NO: 2097872 - RNA, 19 nt, Homo sapiens
  misc_RNA (1)...(19): siRNA sense strand
ucagaacccagcaaauaug

SEQ ID NO: 2097873 - RNA, 19 nt, Homo sapiens
  misc_RNA (1)...(19): siRNA sense strand
aagaaggaaugccuggaau

SEQ ID NO: 2097874 - RNA, 19 nt, Homo sapiens
  misc_RNA (1)...(19): siRNA sense strand
uugcagaacaucagagaaa

SEQ ID NO: 2097875 - RNA, 19 nt, Homo sapiens
  misc_RNA (1)...(19): siRNA sense strand
gaagcagcccaugaucuug

SEQ ID NO: 2097876 - RNA, 19 nt, Homo sapiens
  misc_RNA (1)...(19): siRNA sense strand
ccuaaaugauggugaacuc

SEQ ID NO: 2097877 - RNA, 19 nt, Homo sapiens
  misc_RNA (1)...(19): siRNA sense strand
ccaaagguuaugaaucuca

SEQ ID NO: 2097878 - RNA, 19 nt, Homo sapiens
  misc_RNA (1)...(19): siRNA sense strand
ggaaugccuggacucaaug

SEQ ID NO: 2097879 - RNA, 19 nt, Homo sapiens
  misc_RNA (1)...(19): siRNA sense strand
ucagagaaaguaugagcaa

SEQ ID NO: 2097880 - RNA, 19 nt, Homo sapiens
  misc_RNA (1)...(19): siRNA sense strand
gcagaacaucagagaaagu

SEQ ID NO: 2097881 - RNA, 19 nt, Homo sapiens
  misc_RNA (1)...(19): siRNA sense strand
aaaggcagacgaaccauca

SEQ ID NO: 2097882 - RNA, 19 nt, Homo sapiens
  misc_RNA (1)...(19): siRNA sense strand
ggaaagcacauagacuucu

SEQ ID NO: 2097883 - RNA, 19 nt, Homo sapiens
  misc_RNA (1)...(19): siRNA sense strand
gggaaagcacauagacuuc

SEQ ID NO: 2097884 - RNA, 19 nt, Homo sapiens
  misc_RNA (1)...(19): siRNA sense strand
ugccuggacucaaugaaau

SEQ ID NO: 2097885 - RNA, 19 nt, Homo sapiens
  misc_RNA (1)...(19): siRNA sense strand
ggcaaaugauaagaaagug

SEQ ID NO: 2097886 - RNA, 19 nt, Homo sapiens
  misc_RNA (1)...(19): siRNA sense strand
agacuuaaaggcagacgaa

SEQ ID NO: 2097887 - RNA, 19 nt, Homo sapiens
  misc_RNA (1)...(19): siRNA sense strand
ggauuaugaugaagaugcu

SEQ ID NO: 2097888 - RNA, 19 nt, Homo sapiens
  misc_RNA (1)...(19): siRNA sense strand
uaagcaggaucugaguguu

SEQ ID NO: 2097889 - RNA, 19 nt, Homo sapiens
  misc_RNA (1)...(19): siRNA sense strand
agaagaaaaugccaaggaa

SEQ ID NO: 2097890 - RNA, 19 nt, Homo sapiens
  misc_RNA (1)...(19): siRNA sense strand
uauugaagcccuaaaugau

SEQ ID NO: 2097891 - RNA, 19 nt, Homo sapiens
  misc_RNA (1)...(19): siRNA sense strand
gaaaaugccaaggaagaaa

SEQ ID NO: 2097892 - RNA, 19 nt, Homo sapiens
  misc_RNA (1)...(19): siRNA sense strand
uccaggauguggcucagaa

SEQ ID NO: 2097893 - RNA, 19 nt, Homo sapiens
  misc_RNA (1)...(19): siRNA sense strand
gagauaacggaggagauga

SEQ ID NO: 2097894 - RNA, 19 nt, Homo sapiens
  misc_RNA (1)...(19): siRNA sense strand
auacaggauccagaaguua

SEQ ID NO: 2097895 - RNA, 19 nt, Homo sapiens
  misc_RNA (1)...(19): siRNA sense strand
gacaaagaaggugugauug

SEQ ID NO: 2097896 - RNA, 19 nt, Homo sapiens
  misc_RNA (1)...(19): siRNA sense strand
gaaugccuggacucaauga

SEQ ID NO: 2097897 - RNA, 19 nt, Homo sapiens
  misc_RNA (1)...(19): siRNA sense strand
caaauuacagaagccaaau

SEQ ID NO: 2097898 - RNA, 19 nt, Homo sapiens
  misc_RNA (1)...(19): siRNA sense strand
gauaacggaggagaugaug

SEQ ID NO: 2097899 - RNA, 19 nt, Homo sapiens
  misc_RNA (1)...(19): siRNA sense strand
ucgcuuggcuguuuuguau

SEQ ID NO: 2097900 - RNA, 19 nt, Homo sapiens
  misc_RNA (1)...(19): siRNA sense strand
gccuguaaauuggauuaug

SEQ ID NO: 2097901 - RNA, 19 nt, Homo sapiens
  misc_RNA (1)...(19): siRNA sense strand
gcagagaccuugagggaua

SEQ ID NO: 2097902 - RNA, 19 nt, Homo sapiens
  misc_RNA (1)...(19): siRNA sense strand
uaacgaagcuuugugauaa

SEQ ID NO: 2097903 - RNA, 19 nt, Homo sapiens
  misc_RNA (1)...(19): siRNA sense strand
gccaugagcucuucaaauu

SEQ ID NO: 2097904 - RNA, 19 nt, Homo sapiens
  misc_RNA (1)...(19): siRNA sense strand
cagcagaucuugugcagaa

SEQ ID NO: 2097905 - RNA, 19 nt, Homo sapiens
  misc_RNA (1)...(19): siRNA sense strand
gaugaaauccuguuuguug

SEQ ID NO: 2097906 - RNA, 19 nt, Homo sapiens
  misc_RNA (1)...(19): siRNA sense strand
gaacuccucucagcuuaaa

SEQ ID NO: 2097907 - RNA, 19 nt, Homo sapiens
  misc_RNA (1)...(19): siRNA sense strand
gcccugagguugacucuuu

SEQ ID NO: 2097908 - RNA, 19 nt, Homo sapiens
  misc_RNA (1)...(19): siRNA sense strand
gcuagaagcagccaguuua

SEQ ID NO: 2097909 - RNA, 19 nt, Homo sapiens
  misc_RNA (1)...(19): siRNA sense strand
gcaguuaugccaaguauug

SEQ ID NO: 2097910 - RNA, 19 nt, Homo sapiens
  misc_RNA (1)...(19): siRNA sense strand
ucagugaucuugaaaggaa

SEQ ID NO: 2097911 - RNA, 19 nt, Homo sapiens
  misc_RNA (1)...(19): siRNA sense strand
gaaaucauaucugcuucaa

SEQ ID NO: 2097912 - RNA, 19 nt, Homo sapiens
  misc_RNA (1)...(19): siRNA sense strand
caaauuggcccagaucuuu

SEQ ID NO: 2097913 - RNA, 19 nt, Homo sapiens
  misc_RNA (1)...(19): siRNA sense strand
ucaagacacuuaauuaugg

SEQ ID NO: 2097914 - RNA, 19 nt, Homo sapiens
  misc_RNA (1)...(19): siRNA sense strand
ggaggagaaugaacaacuu

SEQ ID NO: 2097915 - RNA, 19 nt, Homo sapiens
  misc_RNA (1)...(19): siRNA sense strand
gaagcuuugugauaagauu

SEQ ID NO: 2097916 - RNA, 19 nt, Homo sapiens
  misc_RNA (1)...(19): siRNA sense strand
aggaugagcuguuucuaaa

SEQ ID NO: 2097917 - RNA, 19 nt, Homo sapiens
  misc_RNA (1)...(19): siRNA sense strand
ccaagauuauguuacguaa

SEQ ID NO: 2097918 - RNA, 19 nt, Homo sapiens
  misc_RNA (1)...(19): siRNA sense strand
acacauggguauccagaaa

SEQ ID NO: 2097919 - RNA, 19 nt, Homo sapiens
  misc_RNA (1)...(19): siRNA sense strand
gaggaugagcuguuucuaa

SEQ ID NO: 2097920 - RNA, 19 nt, Homo sapiens
  misc_RNA (1)...(19): siRNA sense strand
acagaaagcugaggagguu

SEQ ID NO: 2097921 - RNA, 19 nt, Homo sapiens
  misc_RNA (1)...(19): siRNA sense strand
gcagauguccucccucaga

SEQ ID NO: 2097922 - RNA, 19 nt, Homo sapiens
  misc_RNA (1)...(19): siRNA sense strand
cugcagugcuguacucuaa

SEQ ID NO: 2097923 - RNA, 19 nt, Homo sapiens
  misc_RNA (1)...(19): siRNA sense strand
gaagaugaaauccuguuug

SEQ ID NO: 2097924 - RNA, 19 nt, Homo sapiens
  misc_RNA (1)...(19): siRNA sense strand
gugaacuccucucagcuua

SEQ ID NO: 2097925 - RNA, 19 nt, Homo sapiens
  misc_RNA (1)...(19): siRNA sense strand
ggucaagacacuuaauuau

SEQ ID NO: 2097926 - RNA, 19 nt, Homo sapiens
  misc_RNA (1)...(19): siRNA sense strand
caacugagaggauugugaa

SEQ ID NO: 2097927 - RNA, 19 nt, Homo sapiens
  misc_RNA (1)...(19): siRNA sense strand
aaaccuccaucgucugaaa

SEQ ID NO: 2097928 - RNA, 19 nt, Homo sapiens
  misc_RNA (1)...(19): siRNA sense strand
cagagaagaaggaaacaaa

SEQ ID NO: 2097929 - RNA, 19 nt, Homo sapiens
  misc_RNA (1)...(19): siRNA sense strand
caugagcucuucaaauugg

SEQ ID NO: 2097930 - RNA, 19 nt, Homo sapiens
  misc_RNA (1)...(19): siRNA sense strand
ugagggauaucuuucuuca

SEQ ID NO: 2097931 - RNA, 19 nt, Homo sapiens
  misc_RNA (1)...(19): siRNA sense strand
guccugacgugacuauuug

SEQ ID NO: 2097932 - RNA, 19 nt, Homo sapiens
  misc_RNA (1)...(19): siRNA sense strand
aagaugaaauccuguuugu

SEQ ID NO: 2097933 - RNA, 19 nt, Homo sapiens
  misc_RNA (1)...(19): siRNA sense strand
aaaggacagucucacagaa

SEQ ID NO: 2097934 - RNA, 19 nt, Homo sapiens
  misc_RNA (1)...(19): siRNA sense strand
gcaaaugggacaccagagu

SEQ ID NO: 2097935 - RNA, 19 nt, Homo sapiens
  misc_RNA (1)...(19): siRNA sense strand
cgucacagcggauuagaaa

SEQ ID NO: 2097936 - RNA, 19 nt, Homo sapiens
  misc_RNA (1)...(19): siRNA sense strand
ucacuccucuucacuucuu

SEQ ID NO: 2097937 - RNA, 19 nt, Homo sapiens
  misc_RNA (1)...(19): siRNA sense strand
ccuaaagggagcaucguua

SEQ ID NO: 2097938 - RNA, 19 nt, Homo sapiens
  misc_RNA (1)...(19): siRNA sense strand
cuaagggagugucacauuc

SEQ ID NO: 2097939 - RNA, 19 nt, Homo sapiens
  misc_RNA (1)...(19): siRNA sense strand
gcaacccaagauuauguua

SEQ ID NO: 2097940 - RNA, 19 nt, Homo sapiens
  misc_RNA (1)...(19): siRNA sense strand
uccaggagcuccagaagau

SEQ ID NO: 2097941 - RNA, 19 nt, Homo sapiens
  misc_RNA (1)...(19): siRNA sense strand
aaucaggucaagacacuua

SEQ ID NO: 2097942 - RNA, 19 nt, Homo sapiens
  misc_RNA (1)...(19): siRNA sense strand
gaggagaaugaacaacuuu

SEQ ID NO: 2097943 - RNA, 19 nt, Homo sapiens
  misc_RNA (1)...(19): siRNA sense strand
gcuuaugcguagauccuuu

SEQ ID NO: 2097944 - RNA, 19 nt, Homo sapiens
  misc_RNA (1)...(19): siRNA sense strand
gcccugagcacaauacaga

SEQ ID NO: 2097945 - RNA, 19 nt, Homo sapiens
  misc_RNA (1)...(19): siRNA sense strand
ggccugugcugccuuagga

SEQ ID NO: 2097946 - RNA, 19 nt, Homo sapiens
  misc_RNA (1)...(19): siRNA sense strand
gaaugaacaacuuuccaau

SEQ ID NO: 2097947 - RNA, 19 nt, Homo sapiens
  misc_RNA (1)...(19): siRNA sense strand
gaugcugagacacauguua

SEQ ID NO: 2097948 - RNA, 19 nt, Homo sapiens
  misc_RNA (1)...(19): siRNA sense strand
guucaggucacaauuucua

SEQ ID NO: 2097949 - RNA, 19 nt, Homo sapiens
  misc_RNA (1)...(19): siRNA sense strand
gagcugcagugcuguacuc

SEQ ID NO: 2097950 - RNA, 19 nt, Homo sapiens
  misc_RNA (1)...(19): siRNA sense strand
caacacacaggaccuaaag

SEQ ID NO: 2097951 - RNA, 19 nt, Homo sapiens
  misc_RNA (1)...(19): siRNA sense strand
gauguuugaagcacacuuu

SEQ ID NO: 2097952 - RNA, 19 nt, Homo sapiens
  misc_RNA (1)...(19): siRNA sense strand
caagccagaccaucaguga

SEQ ID NO: 2097953 - RNA, 19 nt, Homo sapiens
  misc_RNA (1)...(19): siRNA sense strand
uauguuacguaaagcagaa

SEQ ID NO: 2097954 - RNA, 19 nt, Homo sapiens
  misc_RNA (1)...(19): siRNA sense strand
gcagugcuguacucuaagg

SEQ ID NO: 2097955 - RNA, 19 nt, Homo sapiens
  misc_RNA (1)...(19): siRNA sense strand
ggaaaucauaucugcuuca

SEQ ID NO: 2097956 - RNA, 19 nt, Homo sapiens
  misc_RNA (1)...(19): siRNA sense strand
gaccuugagggauaucuuu

SEQ ID NO: 2097957 - RNA, 19 nt, Homo sapiens
  misc_RNA (1)...(19): siRNA sense strand
uaacagagcacagacacau

SEQ ID NO: 2097958 - RNA, 19 nt, Homo sapiens
  misc_RNA (1)...(19): siRNA sense strand
ccaccuggucucucgguua

SEQ ID NO: 2097959 - RNA, 19 nt, Homo sapiens
  misc_RNA (1)...(19): siRNA sense strand
aaugcugucuucaaccuuu

SEQ ID NO: 2097960 - RNA, 19 nt, Homo sapiens
  misc_RNA (1)...(19): siRNA sense strand
gucaagacacuuaauuaug

SEQ ID NO: 2097961 - RNA, 19 nt, Homo sapiens
  misc_RNA (1)...(19): siRNA sense strand
auaacgaagcuuugugaua

SEQ ID NO: 2097962 - RNA, 19 nt, Homo sapiens
  misc_RNA (1)...(19): siRNA sense strand
caucauccaucggcuuaug

SEQ ID NO: 2097963 - RNA, 19 nt, Homo sapiens
  misc_RNA (1)...(19): siRNA sense strand
gaguggcgaugcugagaca

SEQ ID NO: 2097964 - RNA, 19 nt, Homo sapiens
  misc_RNA (1)...(19): siRNA sense strand
ggucucaguauuucuuuga

SEQ ID NO: 2097965 - RNA, 19 nt, Homo sapiens
  misc_RNA (1)...(19): siRNA sense strand
gcuaugggccucacaagag

SEQ ID NO: 2097966 - RNA, 19 nt, Homo sapiens
  misc_RNA (1)...(19): siRNA sense strand
gaggcaagccagaccauca

SEQ ID NO: 2097967 - RNA, 19 nt, Homo sapiens
  misc_RNA (1)...(19): siRNA sense strand
aaagucagccacccaucua

SEQ ID NO: 2097968 - RNA, 19 nt, Homo sapiens
  misc_RNA (1)...(19): siRNA sense strand
gauauuaaugggaaguaug

SEQ ID NO: 2097969 - RNA, 19 nt, Homo sapiens
  misc_RNA (1)...(19): siRNA sense strand
ggaucugccuguggaugaa

SEQ ID NO: 2097970 - RNA, 19 nt, Homo sapiens
  misc_RNA (1)...(19): siRNA sense strand
gcaacaaucaggucaagac

SEQ ID NO: 2097971 - RNA, 19 nt, Homo sapiens
  misc_RNA (1)...(19): siRNA sense strand
caccagcccuagcagaugu

SEQ ID NO: 2097972 - RNA, 19 nt, Homo sapiens
  misc_RNA (1)...(19): siRNA sense strand
uguagggccugcauuguag

SEQ ID NO: 2097973 - RNA, 19 nt, Homo sapiens
  misc_RNA (1)...(19): siRNA sense strand
gcagugacaccugaauugu

SEQ ID NO: 2097974 - RNA, 19 nt, Homo sapiens
  misc_RNA (1)...(19): siRNA sense strand
ccucugugcucucuguguu

SEQ ID NO: 2097975 - RNA, 19 nt, Homo sapiens
  misc_RNA (1)...(19): siRNA sense strand
acaaucaggucaagacacu

SEQ ID NO: 2097976 - RNA, 19 nt, Homo sapiens
  misc_RNA (1)...(19): siRNA sense strand
gcagagaaaccuccaucgu

SEQ ID NO: 2097977 - RNA, 19 nt, Homo sapiens
  misc_RNA (1)...(19): siRNA sense strand
gccuguggaugaauggaaa

SEQ ID NO: 2097978 - RNA, 19 nt, Homo sapiens
  misc_RNA (1)...(19): siRNA sense strand
auuccuggaugcgauauua

SEQ ID NO: 2097979 - RNA, 19 nt, Homo sapiens
  misc_RNA (1)...(19): siRNA sense strand
auucaaggccuaacacuga

SEQ ID NO: 2097980 - RNA, 19 nt, Homo sapiens
  misc_RNA (1)...(19): siRNA sense strand
uacaggccaucccaacuga

SEQ ID NO: 2097981 - RNA, 19 nt, Homo sapiens
  misc_RNA (1)...(19): siRNA sense strand
ucauaacgaagcuuuguga

SEQ ID NO: 2097982 - RNA, 19 nt, Homo sapiens
  misc_RNA (1)...(19): siRNA sense strand
gacauuaacagagcacaga

SEQ ID NO: 2097983 - RNA, 19 nt, Homo sapiens
  misc_RNA (1)...(19): siRNA sense strand
uaagggagugucacauuca

SEQ ID NO: 2097984 - RNA, 19 nt, Homo sapiens
  misc_RNA (1)...(19): siRNA sense strand
caggagcuccagaagauga

SEQ ID NO: 2097985 - RNA, 19 nt, Homo sapiens
  misc_RNA (1)...(19): siRNA sense strand
ccgaagcccugagcacaau

SEQ ID NO: 2097986 - RNA, 19 nt, Homo sapiens
  misc_RNA (1)...(19): siRNA sense strand
cagagauggugaacuagag

SEQ ID NO: 2097987 - RNA, 19 nt, Homo sapiens
  misc_RNA (1)...(19): siRNA sense strand
agggauaucuuucuucacu

SEQ ID NO: 2097988 - RNA, 19 nt, Homo sapiens
  misc_RNA (1)...(19): siRNA sense strand
gcaggaggaugcuuuugug

SEQ ID NO: 2097989 - RNA, 19 nt, Homo sapiens
  misc_RNA (1)...(19): siRNA sense strand
gggaagcauucuguugcaa

SEQ ID NO: 2097990 - RNA, 19 nt, Homo sapiens
  misc_RNA (1)...(19): siRNA sense strand
cgauauuaaugggaaguau

SEQ ID NO: 2097991 - RNA, 19 nt, Homo sapiens
  misc_RNA (1)...(19): siRNA sense strand
agaaaccuccaucgucuga

SEQ ID NO: 2097992 - RNA, 19 nt, Homo sapiens
  misc_RNA (1)...(19): siRNA sense strand
aaacugaggcacacaggau

SEQ ID NO: 2097993 - RNA, 19 nt, Homo sapiens
  misc_RNA (1)...(19): siRNA sense strand
ccaauuccuggaugcgaua

SEQ ID NO: 2097994 - RNA, 19 nt, Homo sapiens
  misc_RNA (1)...(19): siRNA sense strand
ggugggauuugaggauguu

SEQ ID NO: 2097995 - RNA, 19 nt, Homo sapiens
  misc_RNA (1)...(19): siRNA sense strand
ggaggaugcuuuugugagu

SEQ ID NO: 2097996 - RNA, 19 nt, Homo sapiens
  misc_RNA (1)...(19): siRNA sense strand
ucuaagggagugucacauu

SEQ ID NO: 2097997 - RNA, 19 nt, Homo sapiens
  misc_RNA (1)...(19): siRNA sense strand
ucaaauuggcccagaucuu

SEQ ID NO: 2097998 - RNA, 19 nt, Homo sapiens
  misc_RNA (1)...(19): siRNA sense strand
ggugggaagcauucuguug

SEQ ID NO: 2097999 - RNA, 19 nt, Homo sapiens
  misc_RNA (1)...(19): siRNA sense strand
aagguuacuuggugggaaa

SEQ ID NO: 2098000 - RNA, 19 nt, Homo sapiens
  misc_RNA (1)...(19): siRNA sense strand
cuacagagaagaaggaaac

SEQ ID NO: 2098001 - RNA, 19 nt, Homo sapiens
  misc_RNA (1)...(19): siRNA sense strand
gaaagacgcuggugacaug

SEQ ID NO: 2098002 - RNA, 19 nt, Homo sapiens
  misc_RNA (1)...(19): siRNA sense strand
gcacggcgcucaucgagaa

SEQ ID NO: 2098003 - RNA, 19 nt, Homo sapiens
  misc_RNA (1)...(19): siRNA sense strand
agagagaacugcuguauga

SEQ ID NO: 2098004 - RNA, 19 nt, Homo sapiens
  misc_RNA (1)...(19): siRNA sense strand
gcacaucacuauuaacuac

SEQ ID NO: 2098005 - RNA, 19 nt, Homo sapiens
  misc_RNA (1)...(19): siRNA sense strand
ggacuucacugacaucauc

SEQ ID NO: 2098006 - RNA, 19 nt, Homo sapiens
  misc_RNA (1)...(19): siRNA sense strand
ucacugacaucaucaaguu

SEQ ID NO: 2098007 - RNA, 19 nt, Homo sapiens
  misc_RNA (1)...(19): siRNA sense strand
gaagacagcagccacauca

SEQ ID NO: 2098008 - RNA, 19 nt, Homo sapiens
  misc_RNA (1)...(19): siRNA sense strand
ccaggaaguuugugcauga

SEQ ID NO: 2098009 - RNA, 19 nt, Homo sapiens
  misc_RNA (1)...(19): siRNA sense strand
ggaaguuugugcaugaaga

SEQ ID NO: 2098010 - RNA, 19 nt, Homo sapiens
  misc_RNA (1)...(19): siRNA sense strand
agaaggaggugaagcaaau

SEQ ID NO: 2098011 - RNA, 19 nt, Homo sapiens
  misc_RNA (1)...(19): siRNA sense strand
ugccuacacuauagaauua

SEQ ID NO: 2098012 - RNA, 19 nt, Homo sapiens
  misc_RNA (1)...(19): siRNA sense strand
gcaaguaucagaaggacaa

SEQ ID NO: 2098013 - RNA, 19 nt, Homo sapiens
  misc_RNA (1)...(19): siRNA sense strand
gcagccacaucauugcuuu

SEQ ID NO: 2098014 - RNA, 19 nt, Homo sapiens
  misc_RNA (1)...(19): siRNA sense strand
ccaaccagcucaugaaugg

SEQ ID NO: 2098015 - RNA, 19 nt, Homo sapiens
  misc_RNA (1)...(19): siRNA sense strand
aagagaaacugcuguggaa

SEQ ID NO: 2098016 - RNA, 19 nt, Homo sapiens
  misc_RNA (1)...(19): siRNA sense strand
uggacaaggucgugcaaua

SEQ ID NO: 2098017 - RNA, 19 nt, Homo sapiens
  misc_RNA (1)...(19): siRNA sense strand
gcugguuccugcuggauuu

SEQ ID NO: 2098018 - RNA, 19 nt, Homo sapiens
  misc_RNA (1)...(19): siRNA sense strand
gcucauagagaacaaguga

SEQ ID NO: 2098019 - RNA, 19 nt, Homo sapiens
  misc_RNA (1)...(19): siRNA sense strand
gcaacgauguguuuaucuc

SEQ ID NO: 2098020 - RNA, 19 nt, Homo sapiens
  misc_RNA (1)...(19): siRNA sense strand
gauccuggccucucuucua

SEQ ID NO: 2098021 - RNA, 19 nt, Homo sapiens
  misc_RNA (1)...(19): siRNA sense strand
gaucauccgugacaacaac

SEQ ID NO: 2098022 - RNA, 19 nt, Homo sapiens
  misc_RNA (1)...(19): siRNA sense strand
gcgaugcucucaaugaucu

SEQ ID NO: 2098023 - RNA, 19 nt, Homo sapiens
  misc_RNA (1)...(19): siRNA sense strand
gguggacgaugaugaggaa

SEQ ID NO: 2098024 - RNA, 19 nt, Homo sapiens
  misc_RNA (1)...(19): siRNA sense strand
cacgagcacaucacuauua

SEQ ID NO: 2098025 - RNA, 19 nt, Homo sapiens
  misc_RNA (1)...(19): siRNA sense strand
caagacagccgaucacuac

SEQ ID NO: 2098026 - RNA, 19 nt, Homo sapiens
  misc_RNA (1)...(19): siRNA sense strand
ggagauuugccacaaggua

SEQ ID NO: 2098027 - RNA, 19 nt, Homo sapiens
  misc_RNA (1)...(19): siRNA sense strand
ggaauacacuaagcucaag

SEQ ID NO: 2098028 - RNA, 19 nt, Homo sapiens
  misc_RNA (1)...(19): siRNA sense strand
caagauggcagcccuguuc

SEQ ID NO: 2098029 - RNA, 19 nt, Homo sapiens
  misc_RNA (1)...(19): siRNA sense strand
ggacgcagucaaagagaaa

SEQ ID NO: 2098030 - RNA, 19 nt, Homo sapiens
  misc_RNA (1)...(19): siRNA sense strand
uagaauuacuggacacugu

SEQ ID NO: 2098031 - RNA, 19 nt, Homo sapiens
  misc_RNA (1)...(19): siRNA sense strand
guucgacucuccagacuca

SEQ ID NO: 2098032 - RNA, 19 nt, Homo sapiens
  misc_RNA (1)...(19): siRNA sense strand
gagcugcugcggcaaguuu

SEQ ID NO: 2098033 - RNA, 19 nt, Homo sapiens
  misc_RNA (1)...(19): siRNA sense strand
uacaggagcugcagcaaca

SEQ ID NO: 2098034 - RNA, 19 nt, Homo sapiens
  misc_RNA (1)...(19): siRNA sense strand
gacagcagccacaucauug

SEQ ID NO: 2098035 - RNA, 19 nt, Homo sapiens
  misc_RNA (1)...(19): siRNA sense strand
ggaagaggaggauaaacug

SEQ ID NO: 2098036 - RNA, 19 nt, Homo sapiens
  misc_RNA (1)...(19): siRNA sense strand
gcaaguacuacgagaagga

SEQ ID NO: 2098037 - RNA, 19 nt, Homo sapiens
  misc_RNA (1)...(19): siRNA sense strand
gagacuacacccacuucua

SEQ ID NO: 2098038 - RNA, 19 nt, Homo sapiens
  misc_RNA (1)...(19): siRNA sense strand
ugaagaggaugagccagaa

SEQ ID NO: 2098039 - RNA, 19 nt, Homo sapiens
  misc_RNA (1)...(19): siRNA sense strand
gagcacaucacuauuaacu

SEQ ID NO: 2098040 - RNA, 19 nt, Homo sapiens
  misc_RNA (1)...(19): siRNA sense strand
acgagcacaucacuauuaa

SEQ ID NO: 2098041 - RNA, 19 nt, Homo sapiens
  misc_RNA (1)...(19): siRNA sense strand
gaggauguguuugcugugu

SEQ ID NO: 2098042 - RNA, 19 nt, Homo sapiens
  misc_RNA (1)...(19): siRNA sense strand
cagcaacgauguguuuauc

SEQ ID NO: 2098043 - RNA, 19 nt, Homo sapiens
  misc_RNA (1)...(19): siRNA sense strand
uaagagagaacugcuguau

SEQ ID NO: 2098044 - RNA, 19 nt, Homo sapiens
  misc_RNA (1)...(19): siRNA sense strand
gugcagaugcucauagaga

SEQ ID NO: 2098045 - RNA, 19 nt, Homo sapiens
  misc_RNA (1)...(19): siRNA sense strand
gcacgagcacaucacuauu

SEQ ID NO: 2098046 - RNA, 19 nt, Homo sapiens
  misc_RNA (1)...(19): siRNA sense strand
ggagcacuuuguccuguuc

SEQ ID NO: 2098047 - RNA, 19 nt, Homo sapiens
  misc_RNA (1)...(19): siRNA sense strand
ggacgaugaugaggaagag

SEQ ID NO: 2098048 - RNA, 19 nt, Homo sapiens
  misc_RNA (1)...(19): siRNA sense strand
gaagaaggaggugaagcaa

SEQ ID NO: 2098049 - RNA, 19 nt, Homo sapiens
  misc_RNA (1)...(19): siRNA sense strand
gacuauguguuccggauca

SEQ ID NO: 2098050 - RNA, 19 nt, Homo sapiens
  misc_RNA (1)...(19): siRNA sense strand
caacaugcgcucccucauc

SEQ ID NO: 2098051 - RNA, 19 nt, Homo sapiens
  misc_RNA (1)...(19): siRNA sense strand
caccgagacuccaccauca

SEQ ID NO: 2098052 - RNA, 19 nt, Homo sapiens
  misc_RNA (1)...(19): siRNA sense strand
ccaaggacguguggagcaa

SEQ ID NO: 2098053 - RNA, 19 nt, Homo sapiens
  misc_RNA (1)...(19): siRNA sense strand
ggacaaggucgugcaauac

SEQ ID NO: 2098054 - RNA, 19 nt, Homo sapiens
  misc_RNA (1)...(19): siRNA sense strand
ccacuucuacuucuguuau

SEQ ID NO: 2098055 - RNA, 19 nt, Homo sapiens
  misc_RNA (1)...(19): siRNA sense strand
caagguaccagcagguguu

SEQ ID NO: 2098056 - RNA, 19 nt, Homo sapiens
  misc_RNA (1)...(19): siRNA sense strand
gaaccucacagcucccaau

SEQ ID NO: 2098057 - RNA, 19 nt, Homo sapiens
  misc_RNA (1)...(19): siRNA sense strand
uggcagcccuguucaccaa

SEQ ID NO: 2098058 - RNA, 19 nt, Homo sapiens
  misc_RNA (1)...(19): siRNA sense strand
cgagagaucauccgugaca

SEQ ID NO: 2098059 - RNA, 19 nt, Homo sapiens
  misc_RNA (1)...(19): siRNA sense strand
agacagcagccacaucauu

SEQ ID NO: 2098060 - RNA, 19 nt, Homo sapiens
  misc_RNA (1)...(19): siRNA sense strand
uggagucccugcaccagaa

SEQ ID NO: 2098061 - RNA, 19 nt, Homo sapiens
  misc_RNA (1)...(19): siRNA sense strand
gcagcaaguacuacgagaa

SEQ ID NO: 2098062 - RNA, 19 nt, Homo sapiens
  misc_RNA (1)...(19): siRNA sense strand
ggaggugaagcaaaucaug

SEQ ID NO: 2098063 - RNA, 19 nt, Homo sapiens
  misc_RNA (1)...(19): siRNA sense strand
gcagagcgugggcuucgaa

SEQ ID NO: 2098064 - RNA, 19 nt, Homo sapiens
  misc_RNA (1)...(19): siRNA sense strand
ggagcaaguaucagaagga

SEQ ID NO: 2098065 - RNA, 19 nt, Homo sapiens
  misc_RNA (1)...(19): siRNA sense strand
gacccugugccuuggaaua

SEQ ID NO: 2098066 - RNA, 19 nt, Homo sapiens
  misc_RNA (1)...(19): siRNA sense strand
ggcacgagcacaucacuau

SEQ ID NO: 2098067 - RNA, 19 nt, Homo sapiens
  misc_RNA (1)...(19): siRNA sense strand
guggaggccuaccgagaga

SEQ ID NO: 2098068 - RNA, 19 nt, Homo sapiens
  misc_RNA (1)...(19): siRNA sense strand
ucaagacagccgaucacua

SEQ ID NO: 2098069 - RNA, 19 nt, Homo sapiens
  misc_RNA (1)...(19): siRNA sense strand
uguggaacgugaagaagga

SEQ ID NO: 2098070 - RNA, 19 nt, Homo sapiens
  misc_RNA (1)...(19): siRNA sense strand
ggacguguggagcaaguau

SEQ ID NO: 2098071 - RNA, 19 nt, Homo sapiens
  misc_RNA (1)...(19): siRNA sense strand
gcggcugccuacacuauag

SEQ ID NO: 2098072 - RNA, 19 nt, Homo sapiens
  misc_RNA (1)...(19): siRNA sense strand
ugcagaugcucauagagaa

SEQ ID NO: 2098073 - RNA, 19 nt, Homo sapiens
  misc_RNA (1)...(19): siRNA sense strand
gcaucagaauggagacuac

SEQ ID NO: 2098074 - RNA, 19 nt, Homo sapiens
  misc_RNA (1)...(19): siRNA sense strand
ugaagaaggaggugaagca

SEQ ID NO: 2098075 - RNA, 19 nt, Homo sapiens
  misc_RNA (1)...(19): siRNA sense strand
gagcgugggcuucgaagag

SEQ ID NO: 2098076 - RNA, 19 nt, Homo sapiens
  misc_RNA (1)...(19): siRNA sense strand
gcggaaaacugcagcaagu

SEQ ID NO: 2098077 - RNA, 19 nt, Homo sapiens
  misc_RNA (1)...(19): siRNA sense strand
cagaggacgcagucaaaga

SEQ ID NO: 2098078 - RNA, 19 nt, Homo sapiens
  misc_RNA (1)...(19): siRNA sense strand
gagaucauccgugacaaca

SEQ ID NO: 2098079 - RNA, 19 nt, Homo sapiens
  misc_RNA (1)...(19): siRNA sense strand
gcuguaugaggauguguuu

SEQ ID NO: 2098080 - RNA, 19 nt, Homo sapiens
  misc_RNA (1)...(19): siRNA sense strand
gcccugcagcucacacuuu

SEQ ID NO: 2098081 - RNA, 19 nt, Homo sapiens
  misc_RNA (1)...(19): siRNA sense strand
gcgcagaggacgcagucaa

SEQ ID NO: 2098082 - RNA, 19 nt, Homo sapiens
  misc_RNA (1)...(19): siRNA sense strand
caacgauguguuuaucuca

SEQ ID NO: 2098083 - RNA, 19 nt, Homo sapiens
  misc_RNA (1)...(19): siRNA sense strand
caccugcuguccuuucugu

SEQ ID NO: 2098084 - RNA, 19 nt, Homo sapiens
  misc_RNA (1)...(19): siRNA sense strand
gaauacacuaagcucaaga

SEQ ID NO: 2098085 - RNA, 19 nt, Homo sapiens
  misc_RNA (1)...(19): siRNA sense strand
aacauggacuucacugaca

SEQ ID NO: 2098086 - RNA, 19 nt, Homo sapiens
  misc_RNA (1)...(19): siRNA sense strand
gagagaucauccgugacaa

SEQ ID NO: 2098087 - RNA, 19 nt, Homo sapiens
  misc_RNA (1)...(19): siRNA sense strand
caucucaucggagcacuuu

SEQ ID NO: 2098088 - RNA, 19 nt, Homo sapiens
  misc_RNA (1)...(19): siRNA sense strand
ucagccaccucaugaagag

SEQ ID NO: 2098089 - RNA, 19 nt, Homo sapiens
  misc_RNA (1)...(19): siRNA sense strand
acuggacacuguggccuua

SEQ ID NO: 2098090 - RNA, 19 nt, Homo sapiens
  misc_RNA (1)...(19): siRNA sense strand
agcauucgcuccguggaua

SEQ ID NO: 2098091 - RNA, 19 nt, Homo sapiens
  misc_RNA (1)...(19): siRNA sense strand
ugaggaagaggaggauaaa

SEQ ID NO: 2098092 - RNA, 19 nt, Homo sapiens
  misc_RNA (1)...(19): siRNA sense strand
ugcaauaccuggcggaaaa

SEQ ID NO: 2098093 - RNA, 19 nt, Homo sapiens
  misc_RNA (1)...(19): siRNA sense strand
uggacacuguggccuuaaa

SEQ ID NO: 2098094 - RNA, 19 nt, Homo sapiens
  misc_RNA (1)...(19): siRNA sense strand
gcccuccucucgcaauuac

SEQ ID NO: 2098095 - RNA, 19 nt, Homo sapiens
  misc_RNA (1)...(19): siRNA sense strand
cucaguggaugaucuggaa

SEQ ID NO: 2098096 - RNA, 19 nt, Homo sapiens
  misc_RNA (1)...(19): siRNA sense strand
gcuggcagacccuguguuc

SEQ ID NO: 2098097 - RNA, 19 nt, Homo sapiens
  misc_RNA (1)...(19): siRNA sense strand
gagacgucaugugcagcua

SEQ ID NO: 2098098 - RNA, 19 nt, Homo sapiens
  misc_RNA (1)...(19): siRNA sense strand
ggugugaccgcaacuacug

SEQ ID NO: 2098099 - RNA, 19 nt, Homo sapiens
  misc_RNA (1)...(19): siRNA sense strand
caggaaguuugugcaugaa

SEQ ID NO: 2098100 - RNA, 19 nt, Homo sapiens
  misc_RNA (1)...(19): siRNA sense strand
uguccugucuggagaaugg

SEQ ID NO: 2098101 - RNA, 19 nt, Homo sapiens
  misc_RNA (1)...(19): siRNA sense strand
gcacacggcuuuccucaaa

SEQ ID NO: 2098102 - RNA, 19 nt, Homo sapiens
  misc_RNA (1)...(19): siRNA sense strand
gcagagaacucaccaggaa

SEQ ID NO: 2098103 - RNA, 19 nt, Homo sapiens
  misc_RNA (1)...(19): siRNA sense strand
gcucagaucuuauuaaaca

SEQ ID NO: 2098104 - RNA, 19 nt, Homo sapiens
  misc_RNA (1)...(19): siRNA sense strand
gagagaaacuugaagaaug

SEQ ID NO: 2098105 - RNA, 19 nt, Homo sapiens
  misc_RNA (1)...(19): siRNA sense strand
gggaaagacucuaaucaaa

SEQ ID NO: 2098106 - RNA, 19 nt, Homo sapiens
  misc_RNA (1)...(19): siRNA sense strand
gaaagacucuaaucaaagu

SEQ ID NO: 2098107 - RNA, 19 nt, Homo sapiens
  misc_RNA (1)...(19): siRNA sense strand
gaucauacaucagagaauu

SEQ ID NO: 2098108 - RNA, 19 nt, Homo sapiens
  misc_RNA (1)...(19): siRNA sense strand
aaacagaagucaggauuaa

SEQ ID NO: 2098109 - RNA, 19 nt, Homo sapiens
  misc_RNA (1)...(19): siRNA sense strand
gcucagaucucaucagaca

SEQ ID NO: 2098110 - RNA, 19 nt, Homo sapiens
  misc_RNA (1)...(19): siRNA sense strand
ggaaauaagccauaugugu

SEQ ID NO: 2098111 - RNA, 19 nt, Homo sapiens
  misc_RNA (1)...(19): siRNA sense strand
caacaucggagacuucaua

SEQ ID NO: 2098112 - RNA, 19 nt, Homo sapiens
  misc_RNA (1)...(19): siRNA sense strand
gagaaacccuaugaaugua

SEQ ID NO: 2098113 - RNA, 19 nt, Homo sapiens
  misc_RNA (1)...(19): siRNA sense strand
gagaaacccuaugaaugua

SEQ ID NO: 2098114 - RNA, 19 nt, Homo sapiens
  misc_RNA (1)...(19): siRNA sense strand
ucagguaacucauacaaga

SEQ ID NO: 2098115 - RNA, 19 nt, Homo sapiens
  misc_RNA (1)...(19): siRNA sense strand
guucaaaccugaucauaca

SEQ ID NO: 2098116 - RNA, 19 nt, Homo sapiens
  misc_RNA (1)...(19): siRNA sense strand
caacaaaugugggaaaucu

SEQ ID NO: 2098117 - RNA, 19 nt, Homo sapiens
  misc_RNA (1)...(19): siRNA sense strand
ggaaaagacuucaaucaga

SEQ ID NO: 2098118 - RNA, 19 nt, Homo sapiens
  misc_RNA (1)...(19): siRNA sense strand
gagagaaacccuaugaaug

SEQ ID NO: 2098119 - RNA, 19 nt, Homo sapiens
  misc_RNA (1)...(19): siRNA sense strand
caagagagaaaccauauga

SEQ ID NO: 2098120 - RNA, 19 nt, Homo sapiens
  misc_RNA (1)...(19): siRNA sense strand
gagaaaccauaugaaugua

SEQ ID NO: 2098121 - RNA, 19 nt, Homo sapiens
  misc_RNA (1)...(19): siRNA sense strand
gaaugugaguuaguugaaa

SEQ ID NO: 2098122 - RNA, 19 nt, Homo sapiens
  misc_RNA (1)...(19): siRNA sense strand
ucagggaaaugcauauuau

SEQ ID NO: 2098123 - RNA, 19 nt, Homo sapiens
  misc_RNA (1)...(19): siRNA sense strand
gagaaagcucccauagaua

SEQ ID NO: 2098124 - RNA, 19 nt, Homo sapiens
  misc_RNA (1)...(19): siRNA sense strand
ggucacaccuugcuacaca

SEQ ID NO: 2098125 - RNA, 19 nt, Homo sapiens
  misc_RNA (1)...(19): siRNA sense strand
ggagagaaacccuaugaau

SEQ ID NO: 2098126 - RNA, 19 nt, Homo sapiens
  misc_RNA (1)...(19): siRNA sense strand
ugagaaacccuaugaaugu

SEQ ID NO: 2098127 - RNA, 19 nt, Homo sapiens
  misc_RNA (1)...(19): siRNA sense strand
gagagaaaccauaugaaug

SEQ ID NO: 2098128 - RNA, 19 nt, Homo sapiens
  misc_RNA (1)...(19): siRNA sense strand
caaacagaagucaggauua

SEQ ID NO: 2098129 - RNA, 19 nt, Homo sapiens
  misc_RNA (1)...(19): siRNA sense strand
ggugagacauaagcaaauu

SEQ ID NO: 2098130 - RNA, 19 nt, Homo sapiens
  misc_RNA (1)...(19): siRNA sense strand
ggaaagacucuaaucaaag

SEQ ID NO: 2098131 - RNA, 19 nt, Homo sapiens
  misc_RNA (1)...(19): siRNA sense strand
ggaaaucaaagauggaaau

SEQ ID NO: 2098132 - RNA, 19 nt, Homo sapiens
  misc_RNA (1)...(19): siRNA sense strand
cagcucagaucucaucaga

SEQ ID NO: 2098133 - RNA, 19 nt, Homo sapiens
  misc_RNA (1)...(19): siRNA sense strand
agagaaacuugaagaaugu

SEQ ID NO: 2098134 - RNA, 19 nt, Homo sapiens
  misc_RNA (1)...(19): siRNA sense strand
agagaaacccuaugaaugu

SEQ ID NO: 2098135 - RNA, 19 nt, Homo sapiens
  misc_RNA (1)...(19): siRNA sense strand
gcuccaaucuggugagaca

SEQ ID NO: 2098136 - RNA, 19 nt, Homo sapiens
  misc_RNA (1)...(19): siRNA sense strand
ccaggaaugugaguuaguu

SEQ ID NO: 2098137 - RNA, 19 nt, Homo sapiens
  misc_RNA (1)...(19): siRNA sense strand
agaaagcucccauagauau

SEQ ID NO: 2098138 - RNA, 19 nt, Homo sapiens
  misc_RNA (1)...(19): siRNA sense strand
ggagagaaacccuaucagu

SEQ ID NO: 2098139 - RNA, 19 nt, Homo sapiens
  misc_RNA (1)...(19): siRNA sense strand
gagaauucauacaggaaau

SEQ ID NO: 2098140 - RNA, 19 nt, Homo sapiens
  misc_RNA (1)...(19): siRNA sense strand
ccauauguguguaaugaau

SEQ ID NO: 2098141 - RNA, 19 nt, Homo sapiens
  misc_RNA (1)...(19): siRNA sense strand
ggccauggauguaaugaag

SEQ ID NO: 2098142 - RNA, 19 nt, Homo sapiens
  misc_RNA (1)...(19): siRNA sense strand
ggagagaaacuugaagaau

SEQ ID NO: 2098143 - RNA, 19 nt, Homo sapiens
  misc_RNA (1)...(19): siRNA sense strand
gaauguaaggaaugugaaa

SEQ ID NO: 2098144 - RNA, 19 nt, Homo sapiens
  misc_RNA (1)...(19): siRNA sense strand
ggaauggaaaucaaagaug

SEQ ID NO: 2098145 - RNA, 19 nt, Homo sapiens
  misc_RNA (1)...(19): siRNA sense strand
gagauuggccauggaugua

SEQ ID NO: 2098146 - RNA, 19 nt, Homo sapiens
  misc_RNA (1)...(19): siRNA sense strand
agagaaaccauaugaaugu

SEQ ID NO: 2098147 - RNA, 19 nt, Homo sapiens
  misc_RNA (1)...(19): siRNA sense strand
gugggaaacucuucaugug

SEQ ID NO: 2098148 - RNA, 19 nt, Homo sapiens
  misc_RNA (1)...(19): siRNA sense strand
gaaacccuaugaauguaag

SEQ ID NO: 2098149 - RNA, 19 nt, Homo sapiens
  misc_RNA (1)...(19): siRNA sense strand
gaaacccuaugaauguagu

SEQ ID NO: 2098150 - RNA, 19 nt, Homo sapiens
  misc_RNA (1)...(19): siRNA sense strand
gcacuggguaagcccuuua

SEQ ID NO: 2098151 - RNA, 19 nt, Homo sapiens
  misc_RNA (1)...(19): siRNA sense strand
agacaucagguaacucaua

SEQ ID NO: 2098152 - RNA, 19 nt, Homo sapiens
  misc_RNA (1)...(19): siRNA sense strand
gaaaagagcagagaacuca

SEQ ID NO: 2098153 - RNA, 19 nt, Homo sapiens
  misc_RNA (1)...(19): siRNA sense strand
gugagaaacccuaugaaug

SEQ ID NO: 2098154 - RNA, 19 nt, Homo sapiens
  misc_RNA (1)...(19): siRNA sense strand
aaacaccaucguauucaua

SEQ ID NO: 2098155 - RNA, 19 nt, Homo sapiens
  misc_RNA (1)...(19): siRNA sense strand
ggaaugugaguuaguugaa

SEQ ID NO: 2098156 - RNA, 19 nt, Homo sapiens
  misc_RNA (1)...(19): siRNA sense strand
uuuaaaggaugcaaugaga

SEQ ID NO: 2098157 - RNA, 19 nt, Homo sapiens
  misc_RNA (1)...(19): siRNA sense strand
ggccaaaacuucaaacaga

SEQ ID NO: 2098158 - RNA, 19 nt, Homo sapiens
  misc_RNA (1)...(19): siRNA sense strand
uguaaucaguguaguagga

SEQ ID NO: 2098159 - RNA, 19 nt, Homo sapiens
  misc_RNA (1)...(19): siRNA sense strand
caucggagacuucauagug

SEQ ID NO: 2098160 - RNA, 19 nt, Homo sapiens
  misc_RNA (1)...(19): siRNA sense strand
acaaaugugggaaaucuuu

SEQ ID NO: 2098161 - RNA, 19 nt, Homo sapiens
  misc_RNA (1)...(19): siRNA sense strand
caccagagaauccacagua

SEQ ID NO: 2098162 - RNA, 19 nt, Homo sapiens
  misc_RNA (1)...(19): siRNA sense strand
ccaaucuggugagacauaa

SEQ ID NO: 2098163 - RNA, 19 nt, Homo sapiens
  misc_RNA (1)...(19): siRNA sense strand
caggaaagaaaccuuauau

SEQ ID NO: 2098164 - RNA, 19 nt, Homo sapiens
  misc_RNA (1)...(19): siRNA sense strand
agauggaaauuucugaaga

SEQ ID NO: 2098165 - RNA, 19 nt, Homo sapiens
  misc_RNA (1)...(19): siRNA sense strand
ucaaacagaagucaggauu

SEQ ID NO: 2098166 - RNA, 19 nt, Homo sapiens
  misc_RNA (1)...(19): siRNA sense strand
gagaauucauacaggaaag

SEQ ID NO: 2098167 - RNA, 19 nt, Homo sapiens
  misc_RNA (1)...(19): siRNA sense strand
gaccuucugagacaucaua

SEQ ID NO: 2098168 - RNA, 19 nt, Homo sapiens
  misc_RNA (1)...(19): siRNA sense strand
gacaucagguaacucauac

SEQ ID NO: 2098169 - RNA, 19 nt, Homo sapiens
  misc_RNA (1)...(19): siRNA sense strand
ggugagaaacccuaugaau

SEQ ID NO: 2098170 - RNA, 19 nt, Homo sapiens
  misc_RNA (1)...(19): siRNA sense strand
ccauggauguaaugaagga

SEQ ID NO: 2098171 - RNA, 19 nt, Homo sapiens
  misc_RNA (1)...(19): siRNA sense strand
gaacucaccaggaaaagaa

SEQ ID NO: 2098172 - RNA, 19 nt, Homo sapiens
  misc_RNA (1)...(19): siRNA sense strand
ggcguucccuccuuauuca

SEQ ID NO: 2098173 - RNA, 19 nt, Homo sapiens
  misc_RNA (1)...(19): siRNA sense strand
caaagauggaaauuucuga

SEQ ID NO: 2098174 - RNA, 19 nt, Homo sapiens
  misc_RNA (1)...(19): siRNA sense strand
caucagacaucagguaacu

SEQ ID NO: 2098175 - RNA, 19 nt, Homo sapiens
  misc_RNA (1)...(19): siRNA sense strand
gcaaggaugaggagcuuag

SEQ ID NO: 2098176 - RNA, 19 nt, Homo sapiens
  misc_RNA (1)...(19): siRNA sense strand
gaaggaauggaaaucaaag

SEQ ID NO: 2098177 - RNA, 19 nt, Homo sapiens
  misc_RNA (1)...(19): siRNA sense strand
uaagaccuaugaauguaag

SEQ ID NO: 2098178 - RNA, 19 nt, Homo sapiens
  misc_RNA (1)...(19): siRNA sense strand
agagagaaaccauaugaau

SEQ ID NO: 2098179 - RNA, 19 nt, Homo sapiens
  misc_RNA (1)...(19): siRNA sense strand
cagcaaggaugaggagcuu

SEQ ID NO: 2098180 - RNA, 19 nt, Homo sapiens
  misc_RNA (1)...(19): siRNA sense strand
cuaugaauguagugaaugu

SEQ ID NO: 2098181 - RNA, 19 nt, Homo sapiens
  misc_RNA (1)...(19): siRNA sense strand
auacaggaaagaaaccuua

SEQ ID NO: 2098182 - RNA, 19 nt, Homo sapiens
  misc_RNA (1)...(19): siRNA sense strand
gguaucagggaaaugcaua

SEQ ID NO: 2098183 - RNA, 19 nt, Homo sapiens
  misc_RNA (1)...(19): siRNA sense strand
agccauauguguguaauga

SEQ ID NO: 2098184 - RNA, 19 nt, Homo sapiens
  misc_RNA (1)...(19): siRNA sense strand
uaaacaccaucguauucau

SEQ ID NO: 2098185 - RNA, 19 nt, Homo sapiens
  misc_RNA (1)...(19): siRNA sense strand
caggaaauaagccauaugu

SEQ ID NO: 2098186 - RNA, 19 nt, Homo sapiens
  misc_RNA (1)...(19): siRNA sense strand
agacaaaucacccaggaau

SEQ ID NO: 2098187 - RNA, 19 nt, Homo sapiens
  misc_RNA (1)...(19): siRNA sense strand
cagggcagcucagaucuca

SEQ ID NO: 2098188 - RNA, 19 nt, Homo sapiens
  misc_RNA (1)...(19): siRNA sense strand
uaaaggaugcaaugagaca

SEQ ID NO: 2098189 - RNA, 19 nt, Homo sapiens
  misc_RNA (1)...(19): siRNA sense strand
cggcuuuccucaaacauca

SEQ ID NO: 2098190 - RNA, 19 nt, Homo sapiens
  misc_RNA (1)...(19): siRNA sense strand
guagcucagaucuuauuaa

SEQ ID NO: 2098191 - RNA, 19 nt, Homo sapiens
  misc_RNA (1)...(19): siRNA sense strand
gagcuccaaucuggugaga

SEQ ID NO: 2098192 - RNA, 19 nt, Homo sapiens
  misc_RNA (1)...(19): siRNA sense strand
acaaaucacccaggaaugu

SEQ ID NO: 2098193 - RNA, 19 nt, Homo sapiens
  misc_RNA (1)...(19): siRNA sense strand
gauuggccauggauguaau

SEQ ID NO: 2098194 - RNA, 19 nt, Homo sapiens
  misc_RNA (1)...(19): siRNA sense strand
caucagagaauucauacag

SEQ ID NO: 2098195 - RNA, 19 nt, Homo sapiens
  misc_RNA (1)...(19): siRNA sense strand
ucagacaucagguaacuca

SEQ ID NO: 2098196 - RNA, 19 nt, Homo sapiens
  misc_RNA (1)...(19): siRNA sense strand
uaaggaaugugggaaacuc

SEQ ID NO: 2098197 - RNA, 19 nt, Homo sapiens
  misc_RNA (1)...(19): siRNA sense strand
ggguagcucagaucuuauu

SEQ ID NO: 2098198 - RNA, 19 nt, Homo sapiens
  misc_RNA (1)...(19): siRNA sense strand
gaauucauacaggaaagaa

SEQ ID NO: 2098199 - RNA, 19 nt, Homo sapiens
  misc_RNA (1)...(19): siRNA sense strand
caucagagaauucauacag

SEQ ID NO: 2098200 - RNA, 19 nt, Homo sapiens
  misc_RNA (1)...(19): siRNA sense strand
agacauaagcaaauucaca

SEQ ID NO: 2098201 - RNA, 19 nt, Homo sapiens
  misc_RNA (1)...(19): siRNA sense strand
ggagggagauugagauguu

SEQ ID NO: 2098202 - RNA, 19 nt, Homo sapiens
  misc_RNA (1)...(19): siRNA sense strand
gaaaggagcuguguuuuau

SEQ ID NO: 2098203 - RNA, 19 nt, Homo sapiens
  misc_RNA (1)...(19): siRNA sense strand
cacagaggcuggcagaaua

SEQ ID NO: 2098204 - RNA, 19 nt, Homo sapiens
  misc_RNA (1)...(19): siRNA sense strand
gcaagacacucguuguaca

SEQ ID NO: 2098205 - RNA, 19 nt, Homo sapiens
  misc_RNA (1)...(19): siRNA sense strand
ugaaagacuugaucaaugg

SEQ ID NO: 2098206 - RNA, 19 nt, Homo sapiens
  misc_RNA (1)...(19): siRNA sense strand
ggagguuccugccuaacaa

SEQ ID NO: 2098207 - RNA, 19 nt, Homo sapiens
  misc_RNA (1)...(19): siRNA sense strand
gggaguaugugcccagaug

SEQ ID NO: 2098208 - RNA, 19 nt, Homo sapiens
  misc_RNA (1)...(19): siRNA sense strand
gcacagaggcuggcagaau

SEQ ID NO: 2098209 - RNA, 19 nt, Homo sapiens
  misc_RNA (1)...(19): siRNA sense strand
acagggagcuacuacuuug

SEQ ID NO: 2098210 - RNA, 19 nt, Homo sapiens
  misc_RNA (1)...(19): siRNA sense strand
agauugagauguuugauuc

SEQ ID NO: 2098211 - RNA, 19 nt, Homo sapiens
  misc_RNA (1)...(19): siRNA sense strand
uggcagaauucaacagaaa

SEQ ID NO: 2098212 - RNA, 19 nt, Homo sapiens
  misc_RNA (1)...(19): siRNA sense strand
gaugaaagacuugaucaau

SEQ ID NO: 2098213 - RNA, 19 nt, Homo sapiens
  misc_RNA (1)...(19): siRNA sense strand
gcaccuacauuggaugcuu

SEQ ID NO: 2098214 - RNA, 19 nt, Homo sapiens
  misc_RNA (1)...(19): siRNA sense strand
ccagagaacaucacacaug

SEQ ID NO: 2098215 - RNA, 19 nt, Homo sapiens
  misc_RNA (1)...(19): siRNA sense strand
gcaaagaguggccggacuu

SEQ ID NO: 2098216 - RNA, 19 nt, Homo sapiens
  misc_RNA (1)...(19): siRNA sense strand
ccuaacaaauccaaagugu

SEQ ID NO: 2098217 - RNA, 19 nt, Homo sapiens
  misc_RNA (1)...(19): siRNA sense strand
gagauugagauguuugauu

SEQ ID NO: 2098218 - RNA, 19 nt, Homo sapiens
  misc_RNA (1)...(19): siRNA sense strand
gauggaacccucuacaaca

SEQ ID NO: 2098219 - RNA, 19 nt, Homo sapiens
  misc_RNA (1)...(19): siRNA sense strand
gagggagauugagauguuu

SEQ ID NO: 2098220 - RNA, 19 nt, Homo sapiens
  misc_RNA (1)...(19): siRNA sense strand
gcugagcgguccuaugucu

SEQ ID NO: 2098221 - RNA, 19 nt, Homo sapiens
  misc_RNA (1)...(19): siRNA sense strand
ggaagaguguaaccaugag

SEQ ID NO: 2098222 - RNA, 19 nt, Homo sapiens
  misc_RNA (1)...(19): siRNA sense strand
gugcaagacacucguugua

SEQ ID NO: 2098223 - RNA, 19 nt, Homo sapiens
  misc_RNA (1)...(19): siRNA sense strand
gugcugagcgguccuaugu

SEQ ID NO: 2098224 - RNA, 19 nt, Homo sapiens
  misc_RNA (1)...(19): siRNA sense strand
augaaagacuugaucaaug

SEQ ID NO: 2098225 - RNA, 19 nt, Homo sapiens
  misc_RNA (1)...(19): siRNA sense strand
ggaacccucuacaacaaag

SEQ ID NO: 2098226 - RNA, 19 nt, Homo sapiens
  misc_RNA (1)...(19): siRNA sense strand
gggcacggcaccucauuga

SEQ ID NO: 2098227 - RNA, 19 nt, Homo sapiens
  misc_RNA (1)...(19): siRNA sense strand
gagcuacuacuuugaugga

SEQ ID NO: 2098228 - RNA, 19 nt, Homo sapiens
  misc_RNA (1)...(19): siRNA sense strand
gagaugaaagacuugauca

SEQ ID NO: 2098229 - RNA, 19 nt, Homo sapiens
  misc_RNA (1)...(19): siRNA sense strand
ggagaugaaagacuugauc

SEQ ID NO: 2098230 - RNA, 19 nt, Homo sapiens
  misc_RNA (1)...(19): siRNA sense strand
ucugaaaggagcuguguuu

SEQ ID NO: 2098231 - RNA, 19 nt, Homo sapiens
  misc_RNA (1)...(19): siRNA sense strand
ugaaaggagcuguguuuua

SEQ ID NO: 2098232 - RNA, 19 nt, Homo sapiens
  misc_RNA (1)...(19): siRNA sense strand
cgaggcaccuacauuggau

SEQ ID NO: 2098233 - RNA, 19 nt, Homo sapiens
  misc_RNA (1)...(19): siRNA sense strand
ggaaugcuacugugcuuac

SEQ ID NO: 2098234 - RNA, 19 nt, Homo sapiens
  misc_RNA (1)...(19): siRNA sense strand
gcaacuggaagagcaaaga

SEQ ID NO: 2098235 - RNA, 19 nt, Homo sapiens
  misc_RNA (1)...(19): siRNA sense strand
cagcugaccgcaacuggaa

SEQ ID NO: 2098236 - RNA, 19 nt, Homo sapiens
  misc_RNA (1)...(19): siRNA sense strand
acucggagcugcgucaguu

SEQ ID NO: 2098237 - RNA, 19 nt, Homo sapiens
  misc_RNA (1)...(19): siRNA sense strand
uggaagaguguaaccauga

SEQ ID NO: 2098238 - RNA, 19 nt, Homo sapiens
  misc_RNA (1)...(19): siRNA sense strand
gacacucguuguacagaca

SEQ ID NO: 2098239 - RNA, 19 nt, Homo sapiens
  misc_RNA (1)...(19): siRNA sense strand
gggagcuacuacuuugaug

SEQ ID NO: 2098240 - RNA, 19 nt, Homo sapiens
  misc_RNA (1)...(19): siRNA sense strand
cgacgcaccaucuguguca

SEQ ID NO: 2098241 - RNA, 19 nt, Homo sapiens
  misc_RNA (1)...(19): siRNA sense strand
gcaggagggagauugagau

SEQ ID NO: 2098242 - RNA, 19 nt, Homo sapiens
  misc_RNA (1)...(19): siRNA sense strand
gaugguggccuuccucaac

SEQ ID NO: 2098243 - RNA, 19 nt, Homo sapiens
  misc_RNA (1)...(19): siRNA sense strand
ccagacaccugugcaagac

SEQ ID NO: 2098244 - RNA, 19 nt, Homo sapiens
  misc_RNA (1)...(19): siRNA sense strand
ggucccugguggcagaauu

SEQ ID NO: 2098245 - RNA, 19 nt, Homo sapiens
  misc_RNA (1)...(19): siRNA sense strand
gaggcuggcagaauacugu

SEQ ID NO: 2098246 - RNA, 19 nt, Homo sapiens
  misc_RNA (1)...(19): siRNA sense strand
ggaguaugugcccagauga

SEQ ID NO: 2098247 - RNA, 19 nt, Homo sapiens
  misc_RNA (1)...(19): siRNA sense strand
gggaaugcuacugugcuua

SEQ ID NO: 2098248 - RNA, 19 nt, Homo sapiens
  misc_RNA (1)...(19): siRNA sense strand
guggcagaauucaacagaa

SEQ ID NO: 2098249 - RNA, 19 nt, Homo sapiens
  misc_RNA (1)...(19): siRNA sense strand
auggaacccucuacaacaa

SEQ ID NO: 2098250 - RNA, 19 nt, Homo sapiens
  misc_RNA (1)...(19): siRNA sense strand
cagaauacugugaggucua

SEQ ID NO: 2098251 - RNA, 19 nt, Homo sapiens
  misc_RNA (1)...(19): siRNA sense strand
gguggcagaauucaacaga

SEQ ID NO: 2098252 - RNA, 19 nt, Homo sapiens
  misc_RNA (1)...(19): siRNA sense strand
aagaguggccggacuuugu

SEQ ID NO: 2098253 - RNA, 19 nt, Homo sapiens
  misc_RNA (1)...(19): siRNA sense strand
uggaccggcucuccgugua

SEQ ID NO: 2098254 - RNA, 19 nt, Homo sapiens
  misc_RNA (1)...(19): siRNA sense strand
ugauucagccauccugcua

SEQ ID NO: 2098255 - RNA, 19 nt, Homo sapiens
  misc_RNA (1)...(19): siRNA sense strand
uacagggagcuacuacuuu

SEQ ID NO: 2098256 - RNA, 19 nt, Homo sapiens
  misc_RNA (1)...(19): siRNA sense strand
cagccgaggcaccuacauu

SEQ ID NO: 2098257 - RNA, 19 nt, Homo sapiens
  misc_RNA (1)...(19): siRNA sense strand
gccauggacagcucaguau

SEQ ID NO: 2098258 - RNA, 19 nt, Homo sapiens
  misc_RNA (1)...(19): siRNA sense strand
gggcugggaaugcuacugu

SEQ ID NO: 2098259 - RNA, 19 nt, Homo sapiens
  misc_RNA (1)...(19): siRNA sense strand
gagguuccugccuaacaaa

SEQ ID NO: 2098260 - RNA, 19 nt, Homo sapiens
  misc_RNA (1)...(19): siRNA sense strand
gcguggagaacaacaagga

SEQ ID NO: 2098261 - RNA, 19 nt, Homo sapiens
  misc_RNA (1)...(19): siRNA sense strand
gauucagccauccugcuaa

SEQ ID NO: 2098262 - RNA, 19 nt, Homo sapiens
  misc_RNA (1)...(19): siRNA sense strand
auacagggagcuacuacuu

SEQ ID NO: 2098263 - RNA, 19 nt, Homo sapiens
  misc_RNA (1)...(19): siRNA sense strand
gggagauugagauguuuga

SEQ ID NO: 2098264 - RNA, 19 nt, Homo sapiens
  misc_RNA (1)...(19): siRNA sense strand
aaggagcuguguuuuauga

SEQ ID NO: 2098265 - RNA, 19 nt, Homo sapiens
  misc_RNA (1)...(19): siRNA sense strand
cuugaucaauggcuacauc

SEQ ID NO: 2098266 - RNA, 19 nt, Homo sapiens
  misc_RNA (1)...(19): siRNA sense strand
gaagaguguaaccaugagu

SEQ ID NO: 2098267 - RNA, 19 nt, Homo sapiens
  misc_RNA (1)...(19): siRNA sense strand
agaauacugugaggucuac

SEQ ID NO: 2098268 - RNA, 19 nt, Homo sapiens
  misc_RNA (1)...(19): siRNA sense strand
cauggacagcucaguaugu

SEQ ID NO: 2098269 - RNA, 19 nt, Homo sapiens
  misc_RNA (1)...(19): siRNA sense strand
ugggaaugcuacugugcuu

SEQ ID NO: 2098270 - RNA, 19 nt, Homo sapiens
  misc_RNA (1)...(19): siRNA sense strand
guguaaccaugagugcaaa

SEQ ID NO: 2098271 - RNA, 19 nt, Homo sapiens
  misc_RNA (1)...(19): siRNA sense strand
gcuuccgacugccagagaa

SEQ ID NO: 2098272 - RNA, 19 nt, Homo sapiens
  misc_RNA (1)...(19): siRNA sense strand
ggccggacuuugucaacag

SEQ ID NO: 2098273 - RNA, 19 nt, Homo sapiens
  misc_RNA (1)...(19): siRNA sense strand
gcugcuggguguggacaug

SEQ ID NO: 2098274 - RNA, 19 nt, Homo sapiens
  misc_RNA (1)...(19): siRNA sense strand
gcuggaagaguguaaccau

SEQ ID NO: 2098275 - RNA, 19 nt, Homo sapiens
  misc_RNA (1)...(19): siRNA sense strand
cggacuuugucaacagcua

SEQ ID NO: 2098276 - RNA, 19 nt, Homo sapiens
  misc_RNA (1)...(19): siRNA sense strand
gcugaccgcaacuggaaga

SEQ ID NO: 2098277 - RNA, 19 nt, Homo sapiens
  misc_RNA (1)...(19): siRNA sense strand
gaaguuucuccgccgaaca

SEQ ID NO: 2098278 - RNA, 19 nt, Homo sapiens
  misc_RNA (1)...(19): siRNA sense strand
ggcaggagggagauugaga

SEQ ID NO: 2098279 - RNA, 19 nt, Homo sapiens
  misc_RNA (1)...(19): siRNA sense strand
gagccgacgcaccaucugu

SEQ ID NO: 2098280 - RNA, 19 nt, Homo sapiens
  misc_RNA (1)...(19): siRNA sense strand
gauaaaggccacugugaaa

SEQ ID NO: 2098281 - RNA, 19 nt, Homo sapiens
  misc_RNA (1)...(19): siRNA sense strand
gagaaacuccuccagcuaa

SEQ ID NO: 2098282 - RNA, 19 nt, Homo sapiens
  misc_RNA (1)...(19): siRNA sense strand
ggacggagacggaaauaga

SEQ ID NO: 2098283 - RNA, 19 nt, Homo sapiens
  misc_RNA (1)...(19): siRNA sense strand
caagguauaugaagauucu

SEQ ID NO: 2098284 - RNA, 19 nt, Homo sapiens
  misc_RNA (1)...(19): siRNA sense strand
ggacaguggcccagauaaa

SEQ ID NO: 2098285 - RNA, 19 nt, Homo sapiens
  misc_RNA (1)...(19): siRNA sense strand
cuaagaaacucaacuucga

SEQ ID NO: 2098286 - RNA, 19 nt, Homo sapiens
  misc_RNA (1)...(19): siRNA sense strand
gguggcaucuggugucuug

SEQ ID NO: 2098287 - RNA, 19 nt, Homo sapiens
  misc_RNA (1)...(19): siRNA sense strand
acagaaggcugaugugaca

SEQ ID NO: 2098288 - RNA, 19 nt, Homo sapiens
  misc_RNA (1)...(19): siRNA sense strand
gcugagggcugcugugaag

SEQ ID NO: 2098289 - RNA, 19 nt, Homo sapiens
  misc_RNA (1)...(19): siRNA sense strand
gggacgaucuuaaucacau

SEQ ID NO: 2098290 - RNA, 19 nt, Homo sapiens
  misc_RNA (1)...(19): siRNA sense strand
gaaacgcaagguauaugaa

SEQ ID NO: 2098291 - RNA, 19 nt, Homo sapiens
  misc_RNA (1)...(19): siRNA sense strand
acagugacgugguggauau

SEQ ID NO: 2098292 - RNA, 19 nt, Homo sapiens
  misc_RNA (1)...(19): siRNA sense strand
gggcugcugugaagcgauu

SEQ ID NO: 2098293 - RNA, 19 nt, Homo sapiens
  misc_RNA (1)...(19): siRNA sense strand
caucagcugugucaucaag

SEQ ID NO: 2098294 - RNA, 19 nt, Homo sapiens
  misc_RNA (1)...(19): siRNA sense strand
ccaagaaagggcccaagaa

SEQ ID NO: 2098295 - RNA, 19 nt, Homo sapiens
  misc_RNA (1)...(19): siRNA sense strand
caagaaagggcccaagaag

SEQ ID NO: 2098296 - RNA, 19 nt, Homo sapiens
  misc_RNA (1)...(19): siRNA sense strand
gauucuggccuucucauga

SEQ ID NO: 2098297 - RNA, 19 nt, Homo sapiens
  misc_RNA (1)...(19): siRNA sense strand
ugaaacgcaagguauauga

SEQ ID NO: 2098298 - RNA, 19 nt, Homo sapiens
  misc_RNA (1)...(19): siRNA sense strand
cgacuccgaugccaacagu

SEQ ID NO: 2098299 - RNA, 19 nt, Homo sapiens
  misc_RNA (1)...(19): siRNA sense strand
aaacagaaggcugauguga

SEQ ID NO: 2098300 - RNA, 19 nt, Homo sapiens
  misc_RNA (1)...(19): siRNA sense strand
agaaagggcccaagaaggu

SEQ ID NO: 2098301 - RNA, 19 nt, Homo sapiens
  misc_RNA (1)...(19): siRNA sense strand
cagauaaaggccacuguga

SEQ ID NO: 2098302 - RNA, 19 nt, Homo sapiens
  misc_RNA (1)...(19): siRNA sense strand
ggacgaucuuaaucacauc

SEQ ID NO: 2098303 - RNA, 19 nt, Homo sapiens
  misc_RNA (1)...(19): siRNA sense strand
gugacgugguggauauuga

SEQ ID NO: 2098304 - RNA, 19 nt, Homo sapiens
  misc_RNA (1)...(19): siRNA sense strand
gaaacagaaggcugaugug

SEQ ID NO: 2098305 - RNA, 19 nt, Homo sapiens
  misc_RNA (1)...(19): siRNA sense strand
gaaacuccuccagcuaaga

SEQ ID NO: 2098306 - RNA, 19 nt, Homo sapiens
  misc_RNA (1)...(19): siRNA sense strand
ccagcugagucacccaaga

SEQ ID NO: 2098307 - RNA, 19 nt, Homo sapiens
  misc_RNA (1)...(19): siRNA sense strand
aaacuccuccagcuaagaa

SEQ ID NO: 2098308 - RNA, 19 nt, Homo sapiens
  misc_RNA (1)...(19): siRNA sense strand
ucagcugugucaucaagga

SEQ ID NO: 2098309 - RNA, 19 nt, Homo sapiens
  misc_RNA (1)...(19): siRNA sense strand
cagcuaagaaacucaacuu

SEQ ID NO: 2098310 - RNA, 19 nt, Homo sapiens
  misc_RNA (1)...(19): siRNA sense strand
ggagacggaaauagagaug

SEQ ID NO: 2098311 - RNA, 19 nt, Homo sapiens
  misc_RNA (1)...(19): siRNA sense strand
agaaacagaaggcugaugu

SEQ ID NO: 2098312 - RNA, 19 nt, Homo sapiens
  misc_RNA (1)...(19): siRNA sense strand
gacaguggcccagauaaag

SEQ ID NO: 2098313 - RNA, 19 nt, Homo sapiens
  misc_RNA (1)...(19): siRNA sense strand
cagcugagucacccaagaa

SEQ ID NO: 2098314 - RNA, 19 nt, Homo sapiens
  misc_RNA (1)...(19): siRNA sense strand
agauaaaggccacugugaa

SEQ ID NO: 2098315 - RNA, 19 nt, Homo sapiens
  misc_RNA (1)...(19): siRNA sense strand
gcaagguauaugaagauuc

SEQ ID NO: 2098316 - RNA, 19 nt, Homo sapiens
  misc_RNA (1)...(19): siRNA sense strand
ggcaucuggugucuuguca

SEQ ID NO: 2098317 - RNA, 19 nt, Homo sapiens
  misc_RNA (1)...(19): siRNA sense strand
ugacgugguggauauugaa

SEQ ID NO: 2098318 - RNA, 19 nt, Homo sapiens
  misc_RNA (1)...(19): siRNA sense strand
cgcaagguauaugaagauu

SEQ ID NO: 2098319 - RNA, 19 nt, Homo sapiens
  misc_RNA (1)...(19): siRNA sense strand
caacagugacgugguggau

SEQ ID NO: 2098320 - RNA, 19 nt, Homo sapiens
  misc_RNA (1)...(19): siRNA sense strand
agaaacuccuccagcuaag

SEQ ID NO: 2098321 - RNA, 19 nt, Homo sapiens
  misc_RNA (1)...(19): siRNA sense strand
aacgcaagguauaugaaga

SEQ ID NO: 2098322 - RNA, 19 nt, Homo sapiens
  misc_RNA (1)...(19): siRNA sense strand
gugaaacgcaagguauaug

SEQ ID NO: 2098323 - RNA, 19 nt, Homo sapiens
  misc_RNA (1)...(19): siRNA sense strand
agacggaaauagagaugcu

SEQ ID NO: 2098324 - RNA, 19 nt, Homo sapiens
  misc_RNA (1)...(19): siRNA sense strand
aaacgcaagguauaugaag

SEQ ID NO: 2098325 - RNA, 19 nt, Homo sapiens
  misc_RNA (1)...(19): siRNA sense strand
agaccaagcucccugagua

SEQ ID NO: 2098326 - RNA, 19 nt, Homo sapiens
  misc_RNA (1)...(19): siRNA sense strand
gcaccacgcuguacaacug

SEQ ID NO: 2098327 - RNA, 19 nt, Homo sapiens
  misc_RNA (1)...(19): siRNA sense strand
uagaugagguguccaugaa

SEQ ID NO: 2098328 - RNA, 19 nt, Homo sapiens
  misc_RNA (1)...(19): siRNA sense strand
gaacaaagucacagagaag

SEQ ID NO: 2098329 - RNA, 19 nt, Homo sapiens
  misc_RNA (1)...(19): siRNA sense strand
ugaacaaagucacagagaa

SEQ ID NO: 2098330 - RNA, 19 nt, Homo sapiens
  misc_RNA (1)...(19): siRNA sense strand
gaugagguguccaugaaca

SEQ ID NO: 2098331 - RNA, 19 nt, Homo sapiens
  misc_RNA (1)...(19): siRNA sense strand
ucuccucacucccuucaua

SEQ ID NO: 2098332 - RNA, 19 nt, Homo sapiens
  misc_RNA (1)...(19): siRNA sense strand
ggaguuggcuucgaaagac

SEQ ID NO: 2098333 - RNA, 19 nt, Homo sapiens
  misc_RNA (1)...(19): siRNA sense strand
cuucggagcuuuccugcuu

SEQ ID NO: 2098334 - RNA, 19 nt, Homo sapiens
  misc_RNA (1)...(19): siRNA sense strand
uauuggaguuggcuucgaa

SEQ ID NO: 2098335 - RNA, 19 nt, Homo sapiens
  misc_RNA (1)...(19): siRNA sense strand
cuucucggccuuugccuua

SEQ ID NO: 2098336 - RNA, 19 nt, Homo sapiens
  misc_RNA (1)...(19): siRNA sense strand
ccucacucccuucauauug

SEQ ID NO: 2098337 - RNA, 19 nt, Homo sapiens
  misc_RNA (1)...(19): siRNA sense strand
cgcccaggcuugugucuuc

SEQ ID NO: 2098338 - RNA, 19 nt, Homo sapiens
  misc_RNA (1)...(19): siRNA sense strand
gagggucauggaaaucaaa

SEQ ID NO: 2098339 - RNA, 19 nt, Homo sapiens
  misc_RNA (1)...(19): siRNA sense strand
ucacucccuucauauugga

SEQ ID NO: 2098340 - RNA, 19 nt, Homo sapiens
  misc_RNA (1)...(19): siRNA sense strand
ccagacuucucggccuuug

SEQ ID NO: 2098341 - RNA, 19 nt, Homo sapiens
  misc_RNA (1)...(19): siRNA sense strand
ggucauggaaaucaaagag

SEQ ID NO: 2098342 - RNA, 19 nt, Homo sapiens
  misc_RNA (1)...(19): siRNA sense strand
ugagggucauggaaaucaa

SEQ ID NO: 2098343 - RNA, 19 nt, Homo sapiens
  misc_RNA (1)...(19): siRNA sense strand
cccaccaccuccaagcaaa

SEQ ID NO: 2098344 - RNA, 19 nt, Homo sapiens
  misc_RNA (1)...(19): siRNA sense strand
uuagaugagguguccauga

SEQ ID NO: 2098345 - RNA, 19 nt, Homo sapiens
  misc_RNA (1)...(19): siRNA sense strand
guccugagggucauggaaa

SEQ ID NO: 2098346 - RNA, 19 nt, Homo sapiens
  misc_RNA (1)...(19): siRNA sense strand
ccaggcuugugucuucugu

SEQ ID NO: 2098347 - RNA, 19 nt, Homo sapiens
  misc_RNA (1)...(19): siRNA sense strand
agaccaagcucccugagua

SEQ ID NO: 2098348 - RNA, 19 nt, Homo sapiens
  misc_RNA (1)...(19): siRNA sense strand
gcaccacgcuguacaacug

SEQ ID NO: 2098349 - RNA, 19 nt, Homo sapiens
  misc_RNA (1)...(19): siRNA sense strand
gguaugcacucacaacuuc

SEQ ID NO: 2098350 - RNA, 19 nt, Homo sapiens
  misc_RNA (1)...(19): siRNA sense strand
uagaugagguguccaugaa

SEQ ID NO: 2098351 - RNA, 19 nt, Homo sapiens
  misc_RNA (1)...(19): siRNA sense strand
gaacaaagucacagagaag

SEQ ID NO: 2098352 - RNA, 19 nt, Homo sapiens
  misc_RNA (1)...(19): siRNA sense strand
ugaacaaagucacagagaa

SEQ ID NO: 2098353 - RNA, 19 nt, Homo sapiens
  misc_RNA (1)...(19): siRNA sense strand
gaugagguguccaugaaca

SEQ ID NO: 2098354 - RNA, 19 nt, Homo sapiens
  misc_RNA (1)...(19): siRNA sense strand
ucuccucacucccuucaua

SEQ ID NO: 2098355 - RNA, 19 nt, Homo sapiens
  misc_RNA (1)...(19): siRNA sense strand
ggaguuggcuucgaaagac

SEQ ID NO: 2098356 - RNA, 19 nt, Homo sapiens
  misc_RNA (1)...(19): siRNA sense strand
cuucggagcuuuccugcuu

SEQ ID NO: 2098357 - RNA, 19 nt, Homo sapiens
  misc_RNA (1)...(19): siRNA sense strand
uauuggaguuggcuucgaa

SEQ ID NO: 2098358 - RNA, 19 nt, Homo sapiens
  misc_RNA (1)...(19): siRNA sense strand
cuucucggccuuugccuua

SEQ ID NO: 2098359 - RNA, 19 nt, Homo sapiens
  misc_RNA (1)...(19): siRNA sense strand
ccucacucccuucauauug

SEQ ID NO: 2098360 - RNA, 19 nt, Homo sapiens
  misc_RNA (1)...(19): siRNA sense strand
gagggucauggaaaucaaa

SEQ ID NO: 2098361 - RNA, 19 nt, Homo sapiens
  misc_RNA (1)...(19): siRNA sense strand
aaaaguggcuugugaagac

SEQ ID NO: 2098362 - RNA, 19 nt, Homo sapiens
  misc_RNA (1)...(19): siRNA sense strand
ucacucccuucauauugga

SEQ ID NO: 2098363 - RNA, 19 nt, Homo sapiens
  misc_RNA (1)...(19): siRNA sense strand
gcacucacaacuuccacau

SEQ ID NO: 2098364 - RNA, 19 nt, Homo sapiens
  misc_RNA (1)...(19): siRNA sense strand
ccagacuucucggccuuug

SEQ ID NO: 2098365 - RNA, 19 nt, Homo sapiens
  misc_RNA (1)...(19): siRNA sense strand
ggucauggaaaucaaagag

SEQ ID NO: 2098366 - RNA, 19 nt, Homo sapiens
  misc_RNA (1)...(19): siRNA sense strand
ugagggucauggaaaucaa

SEQ ID NO: 2098367 - RNA, 19 nt, Homo sapiens
  misc_RNA (1)...(19): siRNA sense strand
cccaccaccuccaagcaaa

SEQ ID NO: 2098368 - RNA, 19 nt, Homo sapiens
  misc_RNA (1)...(19): siRNA sense strand
ggguaugcacucacaacuu

SEQ ID NO: 2098369 - RNA, 19 nt, Homo sapiens
  misc_RNA (1)...(19): siRNA sense strand
guccugagggucauggaaa

SEQ ID NO: 2098370 - RNA, 19 nt, Homo sapiens
  misc_RNA (1)...(19): siRNA sense strand
uuagaugagguguccauga

SEQ ID NO: 2098371 - RNA, 19 nt, Homo sapiens
  misc_RNA (1)...(19): siRNA sense strand
gaugagaacugggaucuga

SEQ ID NO: 2098372 - RNA, 19 nt, Homo sapiens
  misc_RNA (1)...(19): siRNA sense strand
gaagaaccaucacaucauc

SEQ ID NO: 2098373 - RNA, 19 nt, Homo sapiens
  misc_RNA (1)...(19): siRNA sense strand
ggaaugaggugaagaacgu

SEQ ID NO: 2098374 - RNA, 19 nt, Homo sapiens
  misc_RNA (1)...(19): siRNA sense strand
ggagaccucguguggauua

SEQ ID NO: 2098375 - RNA, 19 nt, Homo sapiens
  misc_RNA (1)...(19): siRNA sense strand
ggaagugaccuuagagaga

SEQ ID NO: 2098376 - RNA, 19 nt, Homo sapiens
  misc_RNA (1)...(19): siRNA sense strand
ggaacuugcuacaccuuga

SEQ ID NO: 2098377 - RNA, 19 nt, Homo sapiens
  misc_RNA (1)...(19): siRNA sense strand
caaacgggaugccuucuca

SEQ ID NO: 2098378 - RNA, 19 nt, Homo sapiens
  misc_RNA (1)...(19): siRNA sense strand
gcaucuaucuggagagcaa

SEQ ID NO: 2098379 - RNA, 19 nt, Homo sapiens
  misc_RNA (1)...(19): siRNA sense strand
gcccucgacucuuugauuu

SEQ ID NO: 2098380 - RNA, 19 nt, Homo sapiens
  misc_RNA (1)...(19): siRNA sense strand
gaucaacacugaggagaag

SEQ ID NO: 2098381 - RNA, 19 nt, Homo sapiens
  misc_RNA (1)...(19): siRNA sense strand
cauccaauauuccugugua

SEQ ID NO: 2098382 - RNA, 19 nt, Homo sapiens
  misc_RNA (1)...(19): siRNA sense strand
aaagaaggcucgggaggaa

SEQ ID NO: 2098383 - RNA, 19 nt, Homo sapiens
  misc_RNA (1)...(19): siRNA sense strand
gcaccaacaucgacuuguc

SEQ ID NO: 2098384 - RNA, 19 nt, Homo sapiens
  misc_RNA (1)...(19): siRNA sense strand
aaccgaagaucaacacuga

SEQ ID NO: 2098385 - RNA, 19 nt, Homo sapiens
  misc_RNA (1)...(19): siRNA sense strand
cggcagaucuggccuugug

SEQ ID NO: 2098386 - RNA, 19 nt, Homo sapiens
  misc_RNA (1)...(19): siRNA sense strand
ugaagaugcuggacgaauc

SEQ ID NO: 2098387 - RNA, 19 nt, Homo sapiens
  misc_RNA (1)...(19): siRNA sense strand
cgacuugucugaugcuaag

SEQ ID NO: 2098388 - RNA, 19 nt, Homo sapiens
  misc_RNA (1)...(19): siRNA sense strand
acaccaccauugccaagua

SEQ ID NO: 2098389 - RNA, 19 nt, Homo sapiens
  misc_RNA (1)...(19): siRNA sense strand
ugaacacggugcagcugua

SEQ ID NO: 2098390 - RNA, 19 nt, Homo sapiens
  misc_RNA (1)...(19): siRNA sense strand
gcacacagcagucggaaac

SEQ ID NO: 2098391 - RNA, 19 nt, Homo sapiens
  misc_RNA (1)...(19): siRNA sense strand
ugaagaacgucaaauccau

SEQ ID NO: 2098392 - RNA, 19 nt, Homo sapiens
  misc_RNA (1)...(19): siRNA sense strand
ggacaaaaguacuguuauc

SEQ ID NO: 2098393 - RNA, 19 nt, Homo sapiens
  misc_RNA (1)...(19): siRNA sense strand
gagaauggcagccgcaaca

SEQ ID NO: 2098394 - RNA, 19 nt, Homo sapiens
  misc_RNA (1)...(19): siRNA sense strand
gaccucguguggauuaaug

SEQ ID NO: 2098395 - RNA, 19 nt, Homo sapiens
  misc_RNA (1)...(19): siRNA sense strand
ccacagcgcccuucgauac

SEQ ID NO: 2098396 - RNA, 19 nt, Homo sapiens
  misc_RNA (1)...(19): siRNA sense strand
aaagggaaguuucgagagu

SEQ ID NO: 2098397 - RNA, 19 nt, Homo sapiens
  misc_RNA (1)...(19): siRNA sense strand
agaaggagcaucagaagga

SEQ ID NO: 2098398 - RNA, 19 nt, Homo sapiens
  misc_RNA (1)...(19): siRNA sense strand
gcacaaacggaacuaugga

SEQ ID NO: 2098399 - RNA, 19 nt, Homo sapiens
  misc_RNA (1)...(19): siRNA sense strand
ggauggagagaucuuagaa

SEQ ID NO: 2098400 - RNA, 19 nt, Homo sapiens
  misc_RNA (1)...(19): siRNA sense strand
gcaggaaugccaaggugaa

SEQ ID NO: 2098401 - RNA, 19 nt, Homo sapiens
  misc_RNA (1)...(19): siRNA sense strand
agucugaggugcuagaaga

SEQ ID NO: 2098402 - RNA, 19 nt, Homo sapiens
  misc_RNA (1)...(19): siRNA sense strand
gauccagggucgugagaag

SEQ ID NO: 2098403 - RNA, 19 nt, Homo sapiens
  misc_RNA (1)...(19): siRNA sense strand
agucagagcacgauaguga

SEQ ID NO: 2098404 - RNA, 19 nt, Homo sapiens
  misc_RNA (1)...(19): siRNA sense strand
caucacaucaucaaguuug

SEQ ID NO: 2098405 - RNA, 19 nt, Homo sapiens
  misc_RNA (1)...(19): siRNA sense strand
agaaggagagugaggauga

SEQ ID NO: 2098406 - RNA, 19 nt, Homo sapiens
  misc_RNA (1)...(19): siRNA sense strand
gacagaaggagcaucagaa

SEQ ID NO: 2098407 - RNA, 19 nt, Homo sapiens
  misc_RNA (1)...(19): siRNA sense strand
gagcacaaacggaacuaug

SEQ ID NO: 2098408 - RNA, 19 nt, Homo sapiens
  misc_RNA (1)...(19): siRNA sense strand
gggaacagcuugggcaacu

SEQ ID NO: 2098409 - RNA, 19 nt, Homo sapiens
  misc_RNA (1)...(19): siRNA sense strand
caaggaagaggaacagcaa

SEQ ID NO: 2098410 - RNA, 19 nt, Homo sapiens
  misc_RNA (1)...(19): siRNA sense strand
ccaggagaauaacaacuuc

SEQ ID NO: 2098411 - RNA, 19 nt, Homo sapiens
  misc_RNA (1)...(19): siRNA sense strand
gaacgauacgaguggaaug

SEQ ID NO: 2098412 - RNA, 19 nt, Homo sapiens
  misc_RNA (1)...(19): siRNA sense strand
gguagagaguggugacaag

SEQ ID NO: 2098413 - RNA, 19 nt, Homo sapiens
  misc_RNA (1)...(19): siRNA sense strand
ccggagaccucguguggau

SEQ ID NO: 2098414 - RNA, 19 nt, Homo sapiens
  misc_RNA (1)...(19): siRNA sense strand
gggagaccaucagcgcuuu

SEQ ID NO: 2098415 - RNA, 19 nt, Homo sapiens
  misc_RNA (1)...(19): siRNA sense strand
gaagauccggcucaucaag

SEQ ID NO: 2098416 - RNA, 19 nt, Homo sapiens
  misc_RNA (1)...(19): siRNA sense strand
ggaagaaaaucgcuuacca

SEQ ID NO: 2098417 - RNA, 19 nt, Homo sapiens
  misc_RNA (1)...(19): siRNA sense strand
ggagccagccgaauucaag

SEQ ID NO: 2098418 - RNA, 19 nt, Homo sapiens
  misc_RNA (1)...(19): siRNA sense strand
ucaagaugaucaaguucug

SEQ ID NO: 2098419 - RNA, 19 nt, Homo sapiens
  misc_RNA (1)...(19): siRNA sense strand
gcccaugauucacguguca

SEQ ID NO: 2098420 - RNA, 19 nt, Homo sapiens
  misc_RNA (1)...(19): siRNA sense strand
ggaagaggaacagcaacaa

SEQ ID NO: 2098421 - RNA, 19 nt, Homo sapiens
  misc_RNA (1)...(19): siRNA sense strand
cugaagcugcgcucacuua

SEQ ID NO: 2098422 - RNA, 19 nt, Homo sapiens
  misc_RNA (1)...(19): siRNA sense strand
uguucaagaugaucaaguu

SEQ ID NO: 2098423 - RNA, 19 nt, Homo sapiens
  misc_RNA (1)...(19): siRNA sense strand
cggugcagcuguacaugaa

SEQ ID NO: 2098424 - RNA, 19 nt, Homo sapiens
  misc_RNA (1)...(19): siRNA sense strand
ccgaagaaccaucacauca

SEQ ID NO: 2098425 - RNA, 19 nt, Homo sapiens
  misc_RNA (1)...(19): siRNA sense strand
gaaggagagugaggaugag

SEQ ID NO: 2098426 - RNA, 19 nt, Homo sapiens
  misc_RNA (1)...(19): siRNA sense strand
ggaaguuucgagaguccua

SEQ ID NO: 2098427 - RNA, 19 nt, Homo sapiens
  misc_RNA (1)...(19): siRNA sense strand
ucacauggcaguaguucug

SEQ ID NO: 2098428 - RNA, 19 nt, Homo sapiens
  misc_RNA (1)...(19): siRNA sense strand
gcgauguggagguguuuaa

SEQ ID NO: 2098429 - RNA, 19 nt, Homo sapiens
  misc_RNA (1)...(19): siRNA sense strand
ggacgagccagccuacuac

SEQ ID NO: 2098430 - RNA, 19 nt, Homo sapiens
  misc_RNA (1)...(19): siRNA sense strand
ugauucacgugucauggaa

SEQ ID NO: 2098431 - RNA, 19 nt, Homo sapiens
  misc_RNA (1)...(19): siRNA sense strand
cgacagaaggagcaucaga

SEQ ID NO: 2098432 - RNA, 19 nt, Homo sapiens
  misc_RNA (1)...(19): siRNA sense strand
ccgagaggauggagagauc

SEQ ID NO: 2098433 - RNA, 19 nt, Homo sapiens
  misc_RNA (1)...(19): siRNA sense strand
gaccaucagcgcuuucugu

SEQ ID NO: 2098434 - RNA, 19 nt, Homo sapiens
  misc_RNA (1)...(19): siRNA sense strand
caacaucgacuugucugau

SEQ ID NO: 2098435 - RNA, 19 nt, Homo sapiens
  misc_RNA (1)...(19): siRNA sense strand
cgaagaaccaucacaucau

SEQ ID NO: 2098436 - RNA, 19 nt, Homo sapiens
  misc_RNA (1)...(19): siRNA sense strand
gagugaggaugaggaguca

SEQ ID NO: 2098437 - RNA, 19 nt, Homo sapiens
  misc_RNA (1)...(19): siRNA sense strand
guacagacccucgaaaucc

SEQ ID NO: 2098438 - RNA, 19 nt, Homo sapiens
  misc_RNA (1)...(19): siRNA sense strand
caaaauaccucaggaagcu

SEQ ID NO: 2098439 - RNA, 19 nt, Homo sapiens
  misc_RNA (1)...(19): siRNA sense strand
cugaagauccggcucauca

SEQ ID NO: 2098440 - RNA, 19 nt, Homo sapiens
  misc_RNA (1)...(19): siRNA sense strand
gaagaggaacagcaacaac

SEQ ID NO: 2098441 - RNA, 19 nt, Homo sapiens
  misc_RNA (1)...(19): siRNA sense strand
agagagagcagaguucaga

SEQ ID NO: 2098442 - RNA, 19 nt, Homo sapiens
  misc_RNA (1)...(19): siRNA sense strand
gacaggcacucggcagauc

SEQ ID NO: 2098443 - RNA, 19 nt, Homo sapiens
  misc_RNA (1)...(19): siRNA sense strand
cagccucugucccuggaaa

SEQ ID NO: 2098444 - RNA, 19 nt, Homo sapiens
  misc_RNA (1)...(19): siRNA sense strand
gagccgaacccaggcauuc

SEQ ID NO: 2098445 - RNA, 19 nt, Homo sapiens
  misc_RNA (1)...(19): siRNA sense strand
ggagaaggagagugaggau

SEQ ID NO: 2098446 - RNA, 19 nt, Homo sapiens
  misc_RNA (1)...(19): siRNA sense strand
uuucgagaguccuaccuuu

SEQ ID NO: 2098447 - RNA, 19 nt, Homo sapiens
  misc_RNA (1)...(19): siRNA sense strand
caaggugaaagggaaguuu

SEQ ID NO: 2098448 - RNA, 19 nt, Homo sapiens
  misc_RNA (1)...(19): siRNA sense strand
ggaaugccaaggugaaagg

SEQ ID NO: 2098449 - RNA, 19 nt, Homo sapiens
  misc_RNA (1)...(19): siRNA sense strand
uggcagaccucaccaucag

SEQ ID NO: 2098450 - RNA, 19 nt, Homo sapiens
  misc_RNA (1)...(19): siRNA sense strand
uggccaacaucaugaagau

SEQ ID NO: 2098451 - RNA, 19 nt, Homo sapiens
  misc_RNA (1)...(19): siRNA sense strand
cugaugggcuggccaacau

SEQ ID NO: 2098452 - RNA, 19 nt, Homo sapiens
  misc_RNA (1)...(19): siRNA sense strand
cggccagccugcucaaauc

SEQ ID NO: 2098453 - RNA, 19 nt, Homo sapiens
  misc_RNA (1)...(19): siRNA sense strand
agaccuuuaucgccucuga

SEQ ID NO: 2098454 - RNA, 19 nt, Homo sapiens
  misc_RNA (1)...(19): siRNA sense strand
ggacuggagcagcuguuuc

SEQ ID NO: 2098455 - RNA, 19 nt, Homo sapiens
  misc_RNA (1)...(19): siRNA sense strand
gggcuggccaacaucauga

SEQ ID NO: 2098456 - RNA, 19 nt, Homo sapiens
  misc_RNA (1)...(19): siRNA sense strand
ggaacgauacgaguggaau

SEQ ID NO: 2098457 - RNA, 19 nt, Homo sapiens
  misc_RNA (1)...(19): siRNA sense strand
gagaccucguguggauuaa

SEQ ID NO: 2098458 - RNA, 19 nt, Homo sapiens
  misc_RNA (1)...(19): siRNA sense strand
caggccaccaggagaauaa

SEQ ID NO: 2098459 - RNA, 19 nt, Homo sapiens
  misc_RNA (1)...(19): siRNA sense strand
ggaagcgaguggcgaacac

SEQ ID NO: 2098460 - RNA, 19 nt, Homo sapiens
  misc_RNA (1)...(19): siRNA sense strand
gaagcugcgcucacuuagu

SEQ ID NO: 2098461 - RNA, 19 nt, Homo sapiens
  misc_RNA (1)...(19): siRNA sense strand
guaagcggcgacagaagga

SEQ ID NO: 2098462 - RNA, 19 nt, Homo sapiens
  misc_RNA (1)...(19): siRNA sense strand
caccgccucuagccaaguu

SEQ ID NO: 2098463 - RNA, 19 nt, Homo sapiens
  misc_RNA (1)...(19): siRNA sense strand
accaucacaucaucaaguu

SEQ ID NO: 2098464 - RNA, 19 nt, Homo sapiens
  misc_RNA (1)...(19): siRNA sense strand
cgaacacaccguggaaguu

SEQ ID NO: 2098465 - RNA, 19 nt, Homo sapiens
  misc_RNA (1)...(19): siRNA sense strand
gcuacaccuugagcacaaa

SEQ ID NO: 2098466 - RNA, 19 nt, Homo sapiens
  misc_RNA (1)...(19): siRNA sense strand
gagaggauggagagaucuu

SEQ ID NO: 2098467 - RNA, 19 nt, Homo sapiens
  misc_RNA (1)...(19): siRNA sense strand
gaucucuaugcauccaaua

SEQ ID NO: 2098468 - RNA, 19 nt, Homo sapiens
  misc_RNA (1)...(19): siRNA sense strand
gcgaacacaccguggaagu

SEQ ID NO: 2098469 - RNA, 19 nt, Homo sapiens
  misc_RNA (1)...(19): siRNA sense strand
ccagccugcucaaauccuu

SEQ ID NO: 2098470 - RNA, 19 nt, Homo sapiens
  misc_RNA (1)...(19): siRNA sense strand
ggcccucgacucuuugauu

SEQ ID NO: 2098471 - RNA, 19 nt, Homo sapiens
  misc_RNA (1)...(19): siRNA sense strand
caagauagaucauaaguug

SEQ ID NO: 2098472 - RNA, 19 nt, Homo sapiens
  misc_RNA (1)...(19): siRNA sense strand
gaacagaagucaucagcaa

SEQ ID NO: 2098473 - RNA, 19 nt, Homo sapiens
  misc_RNA (1)...(19): siRNA sense strand
ucaagaaacugcaugauuu

SEQ ID NO: 2098474 - RNA, 19 nt, Homo sapiens
  misc_RNA (1)...(19): siRNA sense strand
ccaacaaagugaugauuua

SEQ ID NO: 2098475 - RNA, 19 nt, Homo sapiens
  misc_RNA (1)...(19): siRNA sense strand
gaauaucccugaauacgaa

SEQ ID NO: 2098476 - RNA, 19 nt, Homo sapiens
  misc_RNA (1)...(19): siRNA sense strand
ggaggaagaugaaaugaau

SEQ ID NO: 2098477 - RNA, 19 nt, Homo sapiens
  misc_RNA (1)...(19): siRNA sense strand
gcaagaagcgugacaguga

SEQ ID NO: 2098478 - RNA, 19 nt, Homo sapiens
  misc_RNA (1)...(19): siRNA sense strand
ggacaccucuugagaagga

SEQ ID NO: 2098479 - RNA, 19 nt, Homo sapiens
  misc_RNA (1)...(19): siRNA sense strand
ccagaaugaugcucaauuu

SEQ ID NO: 2098480 - RNA, 19 nt, Homo sapiens
  misc_RNA (1)...(19): siRNA sense strand
gagaagaacagcagaauug

SEQ ID NO: 2098481 - RNA, 19 nt, Homo sapiens
  misc_RNA (1)...(19): siRNA sense strand
gcaagcaaguuaacuacaa

SEQ ID NO: 2098482 - RNA, 19 nt, Homo sapiens
  misc_RNA (1)...(19): siRNA sense strand
gaacaaccaguccaaguuu

SEQ ID NO: 2098483 - RNA, 19 nt, Homo sapiens
  misc_RNA (1)...(19): siRNA sense strand
caaguuaacuacaaugaug

SEQ ID NO: 2098484 - RNA, 19 nt, Homo sapiens
  misc_RNA (1)...(19): siRNA sense strand
caagaaagcuuuuaagaug

SEQ ID NO: 2098485 - RNA, 19 nt, Homo sapiens
  misc_RNA (1)...(19): siRNA sense strand
ggaggaguuugcugacaua

SEQ ID NO: 2098486 - RNA, 19 nt, Homo sapiens
  misc_RNA (1)...(19): siRNA sense strand
gaaagaugaugcugacaca

SEQ ID NO: 2098487 - RNA, 19 nt, Homo sapiens
  misc_RNA (1)...(19): siRNA sense strand
gggagaagauggagacaga

SEQ ID NO: 2098488 - RNA, 19 nt, Homo sapiens
  misc_RNA (1)...(19): siRNA sense strand
ggaagaagaagaauacgaa

SEQ ID NO: 2098489 - RNA, 19 nt, Homo sapiens
  misc_RNA (1)...(19): siRNA sense strand
gcacauguaucaguuggaa

SEQ ID NO: 2098490 - RNA, 19 nt, Homo sapiens
  misc_RNA (1)...(19): siRNA sense strand
gcaaguauaagaagaagaa

SEQ ID NO: 2098491 - RNA, 19 nt, Homo sapiens
  misc_RNA (1)...(19): siRNA sense strand
ggaggaggaugaucacaug

SEQ ID NO: 2098492 - RNA, 19 nt, Homo sapiens
  misc_RNA (1)...(19): siRNA sense strand
ggagggacuuaccauauga

SEQ ID NO: 2098493 - RNA, 19 nt, Homo sapiens
  misc_RNA (1)...(19): siRNA sense strand
ucacagagcuucacacacu

SEQ ID NO: 2098494 - RNA, 19 nt, Homo sapiens
  misc_RNA (1)...(19): siRNA sense strand
ugacgacauucucaaauuu

SEQ ID NO: 2098495 - RNA, 19 nt, Homo sapiens
  misc_RNA (1)...(19): siRNA sense strand
gcacagaagacaugacuau

SEQ ID NO: 2098496 - RNA, 19 nt, Homo sapiens
  misc_RNA (1)...(19): siRNA sense strand
ggaagaaugacauggauga

SEQ ID NO: 2098497 - RNA, 19 nt, Homo sapiens
  misc_RNA (1)...(19): siRNA sense strand
ggcaggacauccagaauga

SEQ ID NO: 2098498 - RNA, 19 nt, Homo sapiens
  misc_RNA (1)...(19): siRNA sense strand
gaggagaaguacuaucguu

SEQ ID NO: 2098499 - RNA, 19 nt, Homo sapiens
  misc_RNA (1)...(19): siRNA sense strand
cgacaagcguaaagugaaa

SEQ ID NO: 2098500 - RNA, 19 nt, Homo sapiens
  misc_RNA (1)...(19): siRNA sense strand
gggaaauuauucuguguga

SEQ ID NO: 2098501 - RNA, 19 nt, Homo sapiens
  misc_RNA (1)...(19): siRNA sense strand
ggaacuuucuggagaugaa

SEQ ID NO: 2098502 - RNA, 19 nt, Homo sapiens
  misc_RNA (1)...(19): siRNA sense strand
gaaauuauucugugugaca

SEQ ID NO: 2098503 - RNA, 19 nt, Homo sapiens
  misc_RNA (1)...(19): siRNA sense strand
ccagagagauuuaacaacu

SEQ ID NO: 2098504 - RNA, 19 nt, Homo sapiens
  misc_RNA (1)...(19): siRNA sense strand
ucucaaugguuacaagaua

SEQ ID NO: 2098505 - RNA, 19 nt, Homo sapiens
  misc_RNA (1)...(19): siRNA sense strand
cauaagaggcggaguaaga

SEQ ID NO: 2098506 - RNA, 19 nt, Homo sapiens
  misc_RNA (1)...(19): siRNA sense strand
agacggcucugaaaccuuu

SEQ ID NO: 2098507 - RNA, 19 nt, Homo sapiens
  misc_RNA (1)...(19): siRNA sense strand
ucaggguucucaaugguua

SEQ ID NO: 2098508 - RNA, 19 nt, Homo sapiens
  misc_RNA (1)...(19): siRNA sense strand
agacggaucaccaggauua

SEQ ID NO: 2098509 - RNA, 19 nt, Homo sapiens
  misc_RNA (1)...(19): siRNA sense strand
gaaaggagaaggcauaagg

SEQ ID NO: 2098510 - RNA, 19 nt, Homo sapiens
  misc_RNA (1)...(19): siRNA sense strand
gagcgagaguucuuuguca

SEQ ID NO: 2098511 - RNA, 19 nt, Homo sapiens
  misc_RNA (1)...(19): siRNA sense strand
ccaagaagcagaaggagaa

SEQ ID NO: 2098512 - RNA, 19 nt, Homo sapiens
  misc_RNA (1)...(19): siRNA sense strand
caacggcccuccagugcuu

SEQ ID NO: 2098513 - RNA, 19 nt, Homo sapiens
  misc_RNA (1)...(19): siRNA sense strand
gaugcucaauuugccauua

SEQ ID NO: 2098514 - RNA, 19 nt, Homo sapiens
  misc_RNA (1)...(19): siRNA sense strand
gcagaagaaauacuacaaa

SEQ ID NO: 2098515 - RNA, 19 nt, Homo sapiens
  misc_RNA (1)...(19): siRNA sense strand
gaacaugccagccaagaca

SEQ ID NO: 2098516 - RNA, 19 nt, Homo sapiens
  misc_RNA (1)...(19): siRNA sense strand
gaaaauggcaccacucaaa

SEQ ID NO: 2098517 - RNA, 19 nt, Homo sapiens
  misc_RNA (1)...(19): siRNA sense strand
uaagaagaauccuaagauc

SEQ ID NO: 2098518 - RNA, 19 nt, Homo sapiens
  misc_RNA (1)...(19): siRNA sense strand
gcaaagguccaggccauaa

SEQ ID NO: 2098519 - RNA, 19 nt, Homo sapiens
  misc_RNA (1)...(19): siRNA sense strand
gaacaugaaugaguaucuc

SEQ ID NO: 2098520 - RNA, 19 nt, Homo sapiens
  misc_RNA (1)...(19): siRNA sense strand
ugauggaucuuaagaagug

SEQ ID NO: 2098521 - RNA, 19 nt, Homo sapiens
  misc_RNA (1)...(19): siRNA sense strand
gaggcacccugcacaugua

SEQ ID NO: 2098522 - RNA, 19 nt, Homo sapiens
  misc_RNA (1)...(19): siRNA sense strand
gaaaugaauaucccugaau

SEQ ID NO: 2098523 - RNA, 19 nt, Homo sapiens
  misc_RNA (1)...(19): siRNA sense strand
cagaagacaugacuauugg

SEQ ID NO: 2098524 - RNA, 19 nt, Homo sapiens
  misc_RNA (1)...(19): siRNA sense strand
gcaggagcuugacgacauu

SEQ ID NO: 2098525 - RNA, 19 nt, Homo sapiens
  misc_RNA (1)...(19): siRNA sense strand
caaggcagaugucuuuaag

SEQ ID NO: 2098526 - RNA, 19 nt, Homo sapiens
  misc_RNA (1)...(19): siRNA sense strand
ggaagaagaggaggaagaa

SEQ ID NO: 2098527 - RNA, 19 nt, Homo sapiens
  misc_RNA (1)...(19): siRNA sense strand
ugaaccagcuggaggaguu

SEQ ID NO: 2098528 - RNA, 19 nt, Homo sapiens
  misc_RNA (1)...(19): siRNA sense strand
gcaagaagcuucggggaaa

SEQ ID NO: 2098529 - RNA, 19 nt, Homo sapiens
  misc_RNA (1)...(19): siRNA sense strand
caaugaugcugcucaggaa

SEQ ID NO: 2098530 - RNA, 19 nt, Homo sapiens
  misc_RNA (1)...(19): siRNA sense strand
acagcagugugauucauua

SEQ ID NO: 2098531 - RNA, 19 nt, Homo sapiens
  misc_RNA (1)...(19): siRNA sense strand
gaaacuaccagcggaagaa

SEQ ID NO: 2098532 - RNA, 19 nt, Homo sapiens
  misc_RNA (1)...(19): siRNA sense strand
gaaggaagaagaagaaggu

SEQ ID NO: 2098533 - RNA, 19 nt, Homo sapiens
  misc_RNA (1)...(19): siRNA sense strand
cgacgaagguccugaacca

SEQ ID NO: 2098534 - RNA, 19 nt, Homo sapiens
  misc_RNA (1)...(19): siRNA sense strand
ugagaaaggagaaggcaua

SEQ ID NO: 2098535 - RNA, 19 nt, Homo sapiens
  misc_RNA (1)...(19): siRNA sense strand
agucaugucucucgucaaa

SEQ ID NO: 2098536 - RNA, 19 nt, Homo sapiens
  misc_RNA (1)...(19): siRNA sense strand
ccaguucucccacuaauga

SEQ ID NO: 2098537 - RNA, 19 nt, Homo sapiens
  misc_RNA (1)...(19): siRNA sense strand
gaucagagcgagaguucuu

SEQ ID NO: 2098538 - RNA, 19 nt, Homo sapiens
  misc_RNA (1)...(19): siRNA sense strand
ggaggaagaagaagaauac

SEQ ID NO: 2098539 - RNA, 19 nt, Homo sapiens
  misc_RNA (1)...(19): siRNA sense strand
agacugagaaggaguuuaa

SEQ ID NO: 2098540 - RNA, 19 nt, Homo sapiens
  misc_RNA (1)...(19): siRNA sense strand
gggaagaagacaagauuga

SEQ ID NO: 2098541 - RNA, 19 nt, Homo sapiens
  misc_RNA (1)...(19): siRNA sense strand
gcagaugaccaaaauguua

SEQ ID NO: 2098542 - RNA, 19 nt, Homo sapiens
  misc_RNA (1)...(19): siRNA sense strand
ccagggcacugacaccauu

SEQ ID NO: 2098543 - RNA, 19 nt, Homo sapiens
  misc_RNA (1)...(19): siRNA sense strand
gagcgggaguuccagaugu

SEQ ID NO: 2098544 - RNA, 19 nt, Homo sapiens
  misc_RNA (1)...(19): siRNA sense strand
ggaguuugcugacauaucc

SEQ ID NO: 2098545 - RNA, 19 nt, Homo sapiens
  misc_RNA (1)...(19): siRNA sense strand
cauucuagcugaugagaug

SEQ ID NO: 2098546 - RNA, 19 nt, Homo sapiens
  misc_RNA (1)...(19): siRNA sense strand
caagcaaguuaacuacaau

SEQ ID NO: 2098547 - RNA, 19 nt, Homo sapiens
  misc_RNA (1)...(19): siRNA sense strand
caugauggaucuuaagaag

SEQ ID NO: 2098548 - RNA, 19 nt, Homo sapiens
  misc_RNA (1)...(19): siRNA sense strand
cguaugagcugaucaccau

SEQ ID NO: 2098549 - RNA, 19 nt, Homo sapiens
  misc_RNA (1)...(19): siRNA sense strand
ugaggacaaugccaucaaa

SEQ ID NO: 2098550 - RNA, 19 nt, Homo sapiens
  misc_RNA (1)...(19): siRNA sense strand
ugcagaagauccuacauug

SEQ ID NO: 2098551 - RNA, 19 nt, Homo sapiens
  misc_RNA (1)...(19): siRNA sense strand
gaagagcgaaucacacaag

SEQ ID NO: 2098552 - RNA, 19 nt, Homo sapiens
  misc_RNA (1)...(19): siRNA sense strand
gcgcaucgauggugguauc

SEQ ID NO: 2098553 - RNA, 19 nt, Homo sapiens
  misc_RNA (1)...(19): siRNA sense strand
caagaaacugcaugauuug

SEQ ID NO: 2098554 - RNA, 19 nt, Homo sapiens
  misc_RNA (1)...(19): siRNA sense strand
agagagauuuaacaacuug

SEQ ID NO: 2098555 - RNA, 19 nt, Homo sapiens
  misc_RNA (1)...(19): siRNA sense strand
ugaaaugaauaucccugaa

SEQ ID NO: 2098556 - RNA, 19 nt, Homo sapiens
  misc_RNA (1)...(19): siRNA sense strand
agacaccgagaacuaauua

SEQ ID NO: 2098557 - RNA, 19 nt, Homo sapiens
  misc_RNA (1)...(19): siRNA sense strand
agaggcagcuccggaauga

SEQ ID NO: 2098558 - RNA, 19 nt, Homo sapiens
  misc_RNA (1)...(19): siRNA sense strand
agacaagauugaggaaauu

SEQ ID NO: 2098559 - RNA, 19 nt, Homo sapiens
  misc_RNA (1)...(19): siRNA sense strand
ggacgacgacgagggagua

SEQ ID NO: 2098560 - RNA, 19 nt, Homo sapiens
  misc_RNA (1)...(19): siRNA sense strand
ccuaagaucccaaugucua

SEQ ID NO: 2098561 - RNA, 19 nt, Homo sapiens
  misc_RNA (1)...(19): siRNA sense strand
gaaauugagcgagagauca

SEQ ID NO: 2098562 - RNA, 19 nt, Homo sapiens
  misc_RNA (1)...(19): siRNA sense strand
ugcagaacaugaaugagua

SEQ ID NO: 2098563 - RNA, 19 nt, Homo sapiens
  misc_RNA (1)...(19): siRNA sense strand
uaugaaggcuacaaguaug

SEQ ID NO: 2098564 - RNA, 19 nt, Homo sapiens
  misc_RNA (1)...(19): siRNA sense strand
ccaaagaggaccagaucaa

SEQ ID NO: 2098565 - RNA, 19 nt, Homo sapiens
  misc_RNA (1)...(19): siRNA sense strand
caggugaaguuccauguuc

SEQ ID NO: 2098566 - RNA, 19 nt, Homo sapiens
  misc_RNA (1)...(19): siRNA sense strand
caaauucuauguggugaca

SEQ ID NO: 2098567 - RNA, 19 nt, Homo sapiens
  misc_RNA (1)...(19): siRNA sense strand
gaacauaagcaaagcuacu

SEQ ID NO: 2098568 - RNA, 19 nt, Homo sapiens
  misc_RNA (1)...(19): siRNA sense strand
ggaagagcgacaagcguaa

SEQ ID NO: 2098569 - RNA, 19 nt, Homo sapiens
  misc_RNA (1)...(19): siRNA sense strand
gggcguagacagucaaaga

SEQ ID NO: 2098570 - RNA, 19 nt, Homo sapiens
  misc_RNA (1)...(19): siRNA sense strand
caagagagaagauguaaaa

SEQ ID NO: 2098571 - RNA, 19 nt, Homo sapiens
  misc_RNA (1)...(19): siRNA sense strand
gaucugauauggacgauga

SEQ ID NO: 2098572 - RNA, 19 nt, Homo sapiens
  misc_RNA (1)...(19): siRNA sense strand
ggaagaagagcuagaaauu

SEQ ID NO: 2098573 - RNA, 19 nt, Homo sapiens
  misc_RNA (1)...(19): siRNA sense strand
ucaaggagcugcaaggaaa

SEQ ID NO: 2098574 - RNA, 19 nt, Homo sapiens
  misc_RNA (1)...(19): siRNA sense strand
ggagauaaguaacaugaga

SEQ ID NO: 2098575 - RNA, 19 nt, Homo sapiens
  misc_RNA (1)...(19): siRNA sense strand
gggaaacuguggcuacuuu

SEQ ID NO: 2098576 - RNA, 19 nt, Homo sapiens
  misc_RNA (1)...(19): siRNA sense strand
guaccuggaugcagaguaa

SEQ ID NO: 2098577 - RNA, 19 nt, Homo sapiens
  misc_RNA (1)...(19): siRNA sense strand
gaaaauagccuuuggauca

SEQ ID NO: 2098578 - RNA, 19 nt, Homo sapiens
  misc_RNA (1)...(19): siRNA sense strand
gaaucaggcuuucgacguu

SEQ ID NO: 2098579 - RNA, 19 nt, Homo sapiens
  misc_RNA (1)...(19): siRNA sense strand
ucagagagcuggaaaugau

SEQ ID NO: 2098580 - RNA, 19 nt, Homo sapiens
  misc_RNA (1)...(19): siRNA sense strand
gguggucagugucuuguua

SEQ ID NO: 2098581 - RNA, 19 nt, Homo sapiens
  misc_RNA (1)...(19): siRNA sense strand
gaagaguuguuugauauuc

SEQ ID NO: 2098582 - RNA, 19 nt, Homo sapiens
  misc_RNA (1)...(19): siRNA sense strand
gaaccaaacaggcccauga

SEQ ID NO: 2098583 - RNA, 19 nt, Homo sapiens
  misc_RNA (1)...(19): siRNA sense strand
gcuagaaauugcugaagaa

SEQ ID NO: 2098584 - RNA, 19 nt, Homo sapiens
  misc_RNA (1)...(19): siRNA sense strand
caagugaaauggaaaugga

SEQ ID NO: 2098585 - RNA, 19 nt, Homo sapiens
  misc_RNA (1)...(19): siRNA sense strand
gucagugucuuguuagaua

SEQ ID NO: 2098586 - RNA, 19 nt, Homo sapiens
  misc_RNA (1)...(19): siRNA sense strand
gauagaggcuacucaugga

SEQ ID NO: 2098587 - RNA, 19 nt, Homo sapiens
  misc_RNA (1)...(19): siRNA sense strand
gaagaagagcuagaaauug

SEQ ID NO: 2098588 - RNA, 19 nt, Homo sapiens
  misc_RNA (1)...(19): siRNA sense strand
ggacacgcaugcucaagga

SEQ ID NO: 2098589 - RNA, 19 nt, Homo sapiens
  misc_RNA (1)...(19): siRNA sense strand
gaagaaagggcugagauug

SEQ ID NO: 2098590 - RNA, 19 nt, Homo sapiens
  misc_RNA (1)...(19): siRNA sense strand
gcacagagaaacugauaga

SEQ ID NO: 2098591 - RNA, 19 nt, Homo sapiens
  misc_RNA (1)...(19): siRNA sense strand
uggagaacgugaucgaaua

SEQ ID NO: 2098592 - RNA, 19 nt, Homo sapiens
  misc_RNA (1)...(19): siRNA sense strand
ggagcaagccgugauguaa

SEQ ID NO: 2098593 - RNA, 19 nt, Homo sapiens
  misc_RNA (1)...(19): siRNA sense strand
gaaauggaaauggagauaa

SEQ ID NO: 2098594 - RNA, 19 nt, Homo sapiens
  misc_RNA (1)...(19): siRNA sense strand
ggaagaaagggcugagauu

SEQ ID NO: 2098595 - RNA, 19 nt, Homo sapiens
  misc_RNA (1)...(19): siRNA sense strand
gauuguaucugguaaguac

SEQ ID NO: 2098596 - RNA, 19 nt, Homo sapiens
  misc_RNA (1)...(19): siRNA sense strand
aaggaagaguuguuugaua

SEQ ID NO: 2098597 - RNA, 19 nt, Homo sapiens
  misc_RNA (1)...(19): siRNA sense strand
gaaauggagauaaguaaca

SEQ ID NO: 2098598 - RNA, 19 nt, Homo sapiens
  misc_RNA (1)...(19): siRNA sense strand
ggccagaccuaaagauugu

SEQ ID NO: 2098599 - RNA, 19 nt, Homo sapiens
  misc_RNA (1)...(19): siRNA sense strand
aggaagaguuguuugauau

SEQ ID NO: 2098600 - RNA, 19 nt, Homo sapiens
  misc_RNA (1)...(19): siRNA sense strand
gaaugucaccaaagaaguu

SEQ ID NO: 2098601 - RNA, 19 nt, Homo sapiens
  misc_RNA (1)...(19): siRNA sense strand
ggcaauguuuggcuauaaa

SEQ ID NO: 2098602 - RNA, 19 nt, Homo sapiens
  misc_RNA (1)...(19): siRNA sense strand
gagcaagccgugauguaaa

SEQ ID NO: 2098603 - RNA, 19 nt, Homo sapiens
  misc_RNA (1)...(19): siRNA sense strand
agagaggccuugcaccaaa

SEQ ID NO: 2098604 - RNA, 19 nt, Homo sapiens
  misc_RNA (1)...(19): siRNA sense strand
gaggcaauguuuggcuaua

SEQ ID NO: 2098605 - RNA, 19 nt, Homo sapiens
  misc_RNA (1)...(19): siRNA sense strand
agaaagggcugagauugga

SEQ ID NO: 2098606 - RNA, 19 nt, Homo sapiens
  misc_RNA (1)...(19): siRNA sense strand
gggcacagagaaacugaua

SEQ ID NO: 2098607 - RNA, 19 nt, Homo sapiens
  misc_RNA (1)...(19): siRNA sense strand
aagaagagcuagaaauugc

SEQ ID NO: 2098608 - RNA, 19 nt, Homo sapiens
  misc_RNA (1)...(19): siRNA sense strand
ggaaacuguggcuacuuua

SEQ ID NO: 2098609 - RNA, 19 nt, Homo sapiens
  misc_RNA (1)...(19): siRNA sense strand
aauaugaugugaucucugu

SEQ ID NO: 2098610 - RNA, 19 nt, Homo sapiens
  misc_RNA (1)...(19): siRNA sense strand
ggaagaguuguuugauauu

SEQ ID NO: 2098611 - RNA, 19 nt, Homo sapiens
  misc_RNA (1)...(19): siRNA sense strand
gauggugaguucaaguuca

SEQ ID NO: 2098612 - RNA, 19 nt, Homo sapiens
  misc_RNA (1)...(19): siRNA sense strand
gaagaacagcuagaaaaua

SEQ ID NO: 2098613 - RNA, 19 nt, Homo sapiens
  misc_RNA (1)...(19): siRNA sense strand
agaaauugcugaagaacag

SEQ ID NO: 2098614 - RNA, 19 nt, Homo sapiens
  misc_RNA (1)...(19): siRNA sense strand
caggaucacucaaccaagu

SEQ ID NO: 2098615 - RNA, 19 nt, Homo sapiens
  misc_RNA (1)...(19): siRNA sense strand
gcuauauuccucaaacuug

SEQ ID NO: 2098616 - RNA, 19 nt, Homo sapiens
  misc_RNA (1)...(19): siRNA sense strand
caaaguuaguagaaagcaa

SEQ ID NO: 2098617 - RNA, 19 nt, Homo sapiens
  misc_RNA (1)...(19): siRNA sense strand
gaacccagcaccucacaag

SEQ ID NO: 2098618 - RNA, 19 nt, Homo sapiens
  misc_RNA (1)...(19): siRNA sense strand
caugauacacaucucagua

SEQ ID NO: 2098619 - RNA, 19 nt, Homo sapiens
  misc_RNA (1)...(19): siRNA sense strand
gccaaaggccuccgauuca

SEQ ID NO: 2098620 - RNA, 19 nt, Homo sapiens
  misc_RNA (1)...(19): siRNA sense strand
caagguauuuuccaaagaa

SEQ ID NO: 2098621 - RNA, 19 nt, Homo sapiens
  misc_RNA (1)...(19): siRNA sense strand
aaaugcaagugaaauggaa

SEQ ID NO: 2098622 - RNA, 19 nt, Homo sapiens
  misc_RNA (1)...(19): siRNA sense strand
guaaacagugccaccagaa

SEQ ID NO: 2098623 - RNA, 19 nt, Homo sapiens
  misc_RNA (1)...(19): siRNA sense strand
gaucacucaaccaaguuua

SEQ ID NO: 2098624 - RNA, 19 nt, Homo sapiens
  misc_RNA (1)...(19): siRNA sense strand
gcaccaaagcccaugacuu

SEQ ID NO: 2098625 - RNA, 19 nt, Homo sapiens
  misc_RNA (1)...(19): siRNA sense strand
aaauggaaauggagauaag

SEQ ID NO: 2098626 - RNA, 19 nt, Homo sapiens
  misc_RNA (1)...(19): siRNA sense strand
ucaugcagauggugaggaa

SEQ ID NO: 2098627 - RNA, 19 nt, Homo sapiens
  misc_RNA (1)...(19): siRNA sense strand
ggaaguuaaagaagcuaaa

SEQ ID NO: 2098628 - RNA, 19 nt, Homo sapiens
  misc_RNA (1)...(19): siRNA sense strand
ccaaaggccuccgauucau

SEQ ID NO: 2098629 - RNA, 19 nt, Homo sapiens
  misc_RNA (1)...(19): siRNA sense strand
ggaaggagcaagccgugau

SEQ ID NO: 2098630 - RNA, 19 nt, Homo sapiens
  misc_RNA (1)...(19): siRNA sense strand
ugaaauggaaauggagaua

SEQ ID NO: 2098631 - RNA, 19 nt, Homo sapiens
  misc_RNA (1)...(19): siRNA sense strand
aaacagugccaccagaaga

SEQ ID NO: 2098632 - RNA, 19 nt, Homo sapiens
  misc_RNA (1)...(19): siRNA sense strand
gaacccaguacccaagaga

SEQ ID NO: 2098633 - RNA, 19 nt, Homo sapiens
  misc_RNA (1)...(19): siRNA sense strand
cccaugagguggucagugu

SEQ ID NO: 2098634 - RNA, 19 nt, Homo sapiens
  misc_RNA (1)...(19): siRNA sense strand
caaaugcaagugaaaugga

SEQ ID NO: 2098635 - RNA, 19 nt, Homo sapiens
  misc_RNA (1)...(19): siRNA sense strand
gaaggagcaagccgugaug

SEQ ID NO: 2098636 - RNA, 19 nt, Homo sapiens
  misc_RNA (1)...(19): siRNA sense strand
cacaugccaaguugaaaua

SEQ ID NO: 2098637 - RNA, 19 nt, Homo sapiens
  misc_RNA (1)...(19): siRNA sense strand
gagaggccuugcaccaaag

SEQ ID NO: 2098638 - RNA, 19 nt, Homo sapiens
  misc_RNA (1)...(19): siRNA sense strand
ccacaugccaaguugaaau

SEQ ID NO: 2098639 - RNA, 19 nt, Homo sapiens
  misc_RNA (1)...(19): siRNA sense strand
gaaguuaaagaagcuaaag

SEQ ID NO: 2098640 - RNA, 19 nt, Homo sapiens
  misc_RNA (1)...(19): siRNA sense strand
guaccacccuggccaaagc

SEQ ID NO: 2098641 - RNA, 19 nt, Homo sapiens
  misc_RNA (1)...(19): siRNA sense strand
gggaaugucaccaaagaag

SEQ ID NO: 2098642 - RNA, 19 nt, Homo sapiens
  misc_RNA (1)...(19): siRNA sense strand
gaaacuguggcuacuuuac

SEQ ID NO: 2098643 - RNA, 19 nt, Homo sapiens
  misc_RNA (1)...(19): siRNA sense strand
ccaguguguuagacucuga

SEQ ID NO: 2098644 - RNA, 19 nt, Homo sapiens
  misc_RNA (1)...(19): siRNA sense strand
ggaaugucaccaaagaagu

SEQ ID NO: 2098645 - RNA, 19 nt, Homo sapiens
  misc_RNA (1)...(19): siRNA sense strand
uauggacgaugacauggau

SEQ ID NO: 2098646 - RNA, 19 nt, Homo sapiens
  misc_RNA (1)...(19): siRNA sense strand
gcaagguauuuuccaaaga

SEQ ID NO: 2098647 - RNA, 19 nt, Homo sapiens
  misc_RNA (1)...(19): siRNA sense strand
gauuggagcagacagaucu

SEQ ID NO: 2098648 - RNA, 19 nt, Homo sapiens
  misc_RNA (1)...(19): siRNA sense strand
aaaggaaguuaaagaagcu

SEQ ID NO: 2098649 - RNA, 19 nt, Homo sapiens
  misc_RNA (1)...(19): siRNA sense strand
aagaacagcuagaaaauag

SEQ ID NO: 2098650 - RNA, 19 nt, Homo sapiens
  misc_RNA (1)...(19): siRNA sense strand
ggaaauggagauaaguaac

SEQ ID NO: 2098651 - RNA, 19 nt, Homo sapiens
  misc_RNA (1)...(19): siRNA sense strand
aggcaauguuuggcuauaa

SEQ ID NO: 2098652 - RNA, 19 nt, Homo sapiens
  misc_RNA (1)...(19): siRNA sense strand
caaaggccuccgauucaug

SEQ ID NO: 2098653 - RNA, 19 nt, Homo sapiens
  misc_RNA (1)...(19): siRNA sense strand
ggugaguucaaguucauuu

SEQ ID NO: 2098654 - RNA, 19 nt, Homo sapiens
  misc_RNA (1)...(19): siRNA sense strand
ggaucacucaaccaaguuu

SEQ ID NO: 2098655 - RNA, 19 nt, Homo sapiens
  misc_RNA (1)...(19): siRNA sense strand
ugauauggacgaugacaug

SEQ ID NO: 2098656 - RNA, 19 nt, Homo sapiens
  misc_RNA (1)...(19): siRNA sense strand
ugacaguggcguugaguuc

SEQ ID NO: 2098657 - RNA, 19 nt, Homo sapiens
  misc_RNA (1)...(19): siRNA sense strand
ucagugucuuguuagauau

SEQ ID NO: 2098658 - RNA, 19 nt, Homo sapiens
  misc_RNA (1)...(19): siRNA sense strand
uuacaacagcaagguauuu

SEQ ID NO: 2098659 - RNA, 19 nt, Homo sapiens
  misc_RNA (1)...(19): siRNA sense strand
uggaaauggagauaaguaa

SEQ ID NO: 2098660 - RNA, 19 nt, Homo sapiens
  misc_RNA (1)...(19): siRNA sense strand
ucacucaaccaaguuuauu

SEQ ID NO: 2098661 - RNA, 19 nt, Homo sapiens
  misc_RNA (1)...(19): siRNA sense strand
ggagaacgugaucgaauac

SEQ ID NO: 2098662 - RNA, 19 nt, Homo sapiens
  misc_RNA (1)...(19): siRNA sense strand
gcguugaguucacaaacca

SEQ ID NO: 2098663 - RNA, 19 nt, Homo sapiens
  misc_RNA (1)...(19): siRNA sense strand
cacucaaccaaguuuauua

SEQ ID NO: 2098664 - RNA, 19 nt, Homo sapiens
  misc_RNA (1)...(19): siRNA sense strand
uauaucugacucuguguaa

SEQ ID NO: 2098665 - RNA, 19 nt, Homo sapiens
  misc_RNA (1)...(19): siRNA sense strand
auaaggaagaguuguuuga

SEQ ID NO: 2098666 - RNA, 19 nt, Homo sapiens
  misc_RNA (1)...(19): siRNA sense strand
gauuaucgccgugcagcaa

SEQ ID NO: 2098667 - RNA, 19 nt, Homo sapiens
  misc_RNA (1)...(19): siRNA sense strand
gaucaggcaggaagaaagg

SEQ ID NO: 2098668 - RNA, 19 nt, Homo sapiens
  misc_RNA (1)...(19): siRNA sense strand
ggugaggaaucaggcuuuc

SEQ ID NO: 2098669 - RNA, 19 nt, Homo sapiens
  misc_RNA (1)...(19): siRNA sense strand
gcaagugaaauggaaaugg

SEQ ID NO: 2098670 - RNA, 19 nt, Homo sapiens
  misc_RNA (1)...(19): siRNA sense strand
aaucaggcuuucgacguuu

SEQ ID NO: 2098671 - RNA, 19 nt, Homo sapiens
  misc_RNA (1)...(19): siRNA sense strand
ucagaaaccucgacaauua

SEQ ID NO: 2098672 - RNA, 19 nt, Homo sapiens
  misc_RNA (1)...(19): siRNA sense strand
caaguaagcugcagaauga

SEQ ID NO: 2098673 - RNA, 19 nt, Homo sapiens
  misc_RNA (1)...(19): siRNA sense strand
gaaugaagcuuccguuuua

SEQ ID NO: 2098674 - RNA, 19 nt, Homo sapiens
  misc_RNA (1)...(19): siRNA sense strand
gaagaaaggaccauaauau

SEQ ID NO: 2098675 - RNA, 19 nt, Homo sapiens
  misc_RNA (1)...(19): siRNA sense strand
gaacaaugcccuuaaaguu

SEQ ID NO: 2098676 - RNA, 19 nt, Homo sapiens
  misc_RNA (1)...(19): siRNA sense strand
ggaaagauguggaccguau

SEQ ID NO: 2098677 - RNA, 19 nt, Homo sapiens
  misc_RNA (1)...(19): siRNA sense strand
gauccgggcuuuagaauug

SEQ ID NO: 2098678 - RNA, 19 nt, Homo sapiens
  misc_RNA (1)...(19): siRNA sense strand
gaacaaagcucgggaugag

SEQ ID NO: 2098679 - RNA, 19 nt, Homo sapiens
  misc_RNA (1)...(19): siRNA sense strand
gaagagggcuggaaaauug

SEQ ID NO: 2098680 - RNA, 19 nt, Homo sapiens
  misc_RNA (1)...(19): siRNA sense strand
gagaacaccuaaagucuga

SEQ ID NO: 2098681 - RNA, 19 nt, Homo sapiens
  misc_RNA (1)...(19): siRNA sense strand
ggaagaaccuggagaagca

SEQ ID NO: 2098682 - RNA, 19 nt, Homo sapiens
  misc_RNA (1)...(19): siRNA sense strand
gaagaagcgucaugagaug

SEQ ID NO: 2098683 - RNA, 19 nt, Homo sapiens
  misc_RNA (1)...(19): siRNA sense strand
agaagaagcugaaagaaau

SEQ ID NO: 2098684 - RNA, 19 nt, Homo sapiens
  misc_RNA (1)...(19): siRNA sense strand
gaauugacaugcuugaaug

SEQ ID NO: 2098685 - RNA, 19 nt, Homo sapiens
  misc_RNA (1)...(19): siRNA sense strand
cagggaagguggacuauaa

SEQ ID NO: 2098686 - RNA, 19 nt, Homo sapiens
  misc_RNA (1)...(19): siRNA sense strand
caacaaagaugauauucag

SEQ ID NO: 2098687 - RNA, 19 nt, Homo sapiens
  misc_RNA (1)...(19): siRNA sense strand
gcagaugaguggcugauga

SEQ ID NO: 2098688 - RNA, 19 nt, Homo sapiens
  misc_RNA (1)...(19): siRNA sense strand
ggauauugcuggauuugaa

SEQ ID NO: 2098689 - RNA, 19 nt, Homo sapiens
  misc_RNA (1)...(19): siRNA sense strand
agaaugagcuagauaaugu

SEQ ID NO: 2098690 - RNA, 19 nt, Homo sapiens
  misc_RNA (1)...(19): siRNA sense strand
acaaggagcuggcguguga

SEQ ID NO: 2098691 - RNA, 19 nt, Homo sapiens
  misc_RNA (1)...(19): siRNA sense strand
ggacucuucuguguaguua

SEQ ID NO: 2098692 - RNA, 19 nt, Homo sapiens
  misc_RNA (1)...(19): siRNA sense strand
gagaagaagcugaaagaaa

SEQ ID NO: 2098693 - RNA, 19 nt, Homo sapiens
  misc_RNA (1)...(19): siRNA sense strand
ccaaagaacaggcagauuu

SEQ ID NO: 2098694 - RNA, 19 nt, Homo sapiens
  misc_RNA (1)...(19): siRNA sense strand
ggaagaaaggaccauaaua

SEQ ID NO: 2098695 - RNA, 19 nt, Homo sapiens
  misc_RNA (1)...(19): siRNA sense strand
ggaggaagcagaagaagaa

SEQ ID NO: 2098696 - RNA, 19 nt, Homo sapiens
  misc_RNA (1)...(19): siRNA sense strand
caguucagcuuucuucaua

SEQ ID NO: 2098697 - RNA, 19 nt, Homo sapiens
  misc_RNA (1)...(19): siRNA sense strand
gggcuucccuaaccgaaua

SEQ ID NO: 2098698 - RNA, 19 nt, Homo sapiens
  misc_RNA (1)...(19): siRNA sense strand
aagcaaaucuagagaagaa

SEQ ID NO: 2098699 - RNA, 19 nt, Homo sapiens
  misc_RNA (1)...(19): siRNA sense strand
ccaauuuacucugagaaua

SEQ ID NO: 2098700 - RNA, 19 nt, Homo sapiens
  misc_RNA (1)...(19): siRNA sense strand
ggccagaggugaugaugaa

SEQ ID NO: 2098701 - RNA, 19 nt, Homo sapiens
  misc_RNA (1)...(19): siRNA sense strand
gaguggaacuucaucgauu

SEQ ID NO: 2098702 - RNA, 19 nt, Homo sapiens
  misc_RNA (1)...(19): siRNA sense strand
gaacuugaacggcagcuuu

SEQ ID NO: 2098703 - RNA, 19 nt, Homo sapiens
  misc_RNA (1)...(19): siRNA sense strand
gaggaccagucaauucuuu

SEQ ID NO: 2098704 - RNA, 19 nt, Homo sapiens
  misc_RNA (1)...(19): siRNA sense strand
ccacacaucuaugcuauau

SEQ ID NO: 2098705 - RNA, 19 nt, Homo sapiens
  misc_RNA (1)...(19): siRNA sense strand
aagcagaaauccuucaauu

SEQ ID NO: 2098706 - RNA, 19 nt, Homo sapiens
  misc_RNA (1)...(19): siRNA sense strand
gaauauccuugcagaacaa

SEQ ID NO: 2098707 - RNA, 19 nt, Homo sapiens
  misc_RNA (1)...(19): siRNA sense strand
gacccaaacuuguacagaa

SEQ ID NO: 2098708 - RNA, 19 nt, Homo sapiens
  misc_RNA (1)...(19): siRNA sense strand
ggaugaaugugauggaguu

SEQ ID NO: 2098709 - RNA, 19 nt, Homo sapiens
  misc_RNA (1)...(19): siRNA sense strand
guucagcuuucuucauaua

SEQ ID NO: 2098710 - RNA, 19 nt, Homo sapiens
  misc_RNA (1)...(19): siRNA sense strand
gagcugaacuccuuugaac

SEQ ID NO: 2098711 - RNA, 19 nt, Homo sapiens
  misc_RNA (1)...(19): siRNA sense strand
agaaggcacuggcguauga

SEQ ID NO: 2098712 - RNA, 19 nt, Homo sapiens
  misc_RNA (1)...(19): siRNA sense strand
gaugaaacacuccauaaga

SEQ ID NO: 2098713 - RNA, 19 nt, Homo sapiens
  misc_RNA (1)...(19): siRNA sense strand
gaacaacuuugcaucaacu

SEQ ID NO: 2098714 - RNA, 19 nt, Homo sapiens
  misc_RNA (1)...(19): siRNA sense strand
gaacuccuuugaacaacuu

SEQ ID NO: 2098715 - RNA, 19 nt, Homo sapiens
  misc_RNA (1)...(19): siRNA sense strand
ggaagaagcgucaugagau

SEQ ID NO: 2098716 - RNA, 19 nt, Homo sapiens
  misc_RNA (1)...(19): siRNA sense strand
gaaaguaagaccagugaug

SEQ ID NO: 2098717 - RNA, 19 nt, Homo sapiens
  misc_RNA (1)...(19): siRNA sense strand
gggaugaggugauuaagca

SEQ ID NO: 2098718 - RNA, 19 nt, Homo sapiens
  misc_RNA (1)...(19): siRNA sense strand
gagaagaaggguauuaaau

SEQ ID NO: 2098719 - RNA, 19 nt, Homo sapiens
  misc_RNA (1)...(19): siRNA sense strand
ggacagcaagacaaagaua

SEQ ID NO: 2098720 - RNA, 19 nt, Homo sapiens
  misc_RNA (1)...(19): siRNA sense strand
gaaguuugaccagcuguua

SEQ ID NO: 2098721 - RNA, 19 nt, Homo sapiens
  misc_RNA (1)...(19): siRNA sense strand
gcagagaagaaggguauua

SEQ ID NO: 2098722 - RNA, 19 nt, Homo sapiens
  misc_RNA (1)...(19): siRNA sense strand
gcaaguaagcugcagaaug

SEQ ID NO: 2098723 - RNA, 19 nt, Homo sapiens
  misc_RNA (1)...(19): siRNA sense strand
gggcaacucuacaaagaau

SEQ ID NO: 2098724 - RNA, 19 nt, Homo sapiens
  misc_RNA (1)...(19): siRNA sense strand
ggauuaccaacgugaauua

SEQ ID NO: 2098725 - RNA, 19 nt, Homo sapiens
  misc_RNA (1)...(19): siRNA sense strand
aggcucagaugaaggauua

SEQ ID NO: 2098726 - RNA, 19 nt, Homo sapiens
  misc_RNA (1)...(19): siRNA sense strand
ugaggcagcuaguaucaaa

SEQ ID NO: 2098727 - RNA, 19 nt, Homo sapiens
  misc_RNA (1)...(19): siRNA sense strand
gaagaagaaagaaaccaaa

SEQ ID NO: 2098728 - RNA, 19 nt, Homo sapiens
  misc_RNA (1)...(19): siRNA sense strand
gaugaacccaccuaaguuu

SEQ ID NO: 2098729 - RNA, 19 nt, Homo sapiens
  misc_RNA (1)...(19): siRNA sense strand
caaagcaaaucuagagaag

SEQ ID NO: 2098730 - RNA, 19 nt, Homo sapiens
  misc_RNA (1)...(19): siRNA sense strand
caaaugcuauuccuaaagg

SEQ ID NO: 2098731 - RNA, 19 nt, Homo sapiens
  misc_RNA (1)...(19): siRNA sense strand
gaaaaugacaggagaauga

SEQ ID NO: 2098732 - RNA, 19 nt, Homo sapiens
  misc_RNA (1)...(19): siRNA sense strand
gcaagcaaauccaauucug

SEQ ID NO: 2098733 - RNA, 19 nt, Homo sapiens
  misc_RNA (1)...(19): siRNA sense strand
ggacagagcaagauauuuu

SEQ ID NO: 2098734 - RNA, 19 nt, Homo sapiens
  misc_RNA (1)...(19): siRNA sense strand
gagcagccgccaacaaauu

SEQ ID NO: 2098735 - RNA, 19 nt, Homo sapiens
  misc_RNA (1)...(19): siRNA sense strand
gcagaaauccuucaauugc

SEQ ID NO: 2098736 - RNA, 19 nt, Homo sapiens
  misc_RNA (1)...(19): siRNA sense strand
gagaaugaaucugcaguuc

SEQ ID NO: 2098737 - RNA, 19 nt, Homo sapiens
  misc_RNA (1)...(19): siRNA sense strand
gggagcaucuuucauugga

SEQ ID NO: 2098738 - RNA, 19 nt, Homo sapiens
  misc_RNA (1)...(19): siRNA sense strand
agaaagcaauggucaacaa

SEQ ID NO: 2098739 - RNA, 19 nt, Homo sapiens
  misc_RNA (1)...(19): siRNA sense strand
agaagaagcagaagaaguu

SEQ ID NO: 2098740 - RNA, 19 nt, Homo sapiens
  misc_RNA (1)...(19): siRNA sense strand
uagaagaacgcuuaaagaa

SEQ ID NO: 2098741 - RNA, 19 nt, Homo sapiens
  misc_RNA (1)...(19): siRNA sense strand
gaaaugcgaagacugugaa

SEQ ID NO: 2098742 - RNA, 19 nt, Homo sapiens
  misc_RNA (1)...(19): siRNA sense strand
caggacuaaucuauacuua

SEQ ID NO: 2098743 - RNA, 19 nt, Homo sapiens
  misc_RNA (1)...(19): siRNA sense strand
ccuaaagucugauuugcuu

SEQ ID NO: 2098744 - RNA, 19 nt, Homo sapiens
  misc_RNA (1)...(19): siRNA sense strand
gcacugagaagaagcugaa

SEQ ID NO: 2098745 - RNA, 19 nt, Homo sapiens
  misc_RNA (1)...(19): siRNA sense strand
gaugaaggauuaccaacgu

SEQ ID NO: 2098746 - RNA, 19 nt, Homo sapiens
  misc_RNA (1)...(19): siRNA sense strand
gggaugagcagaaugaaga

SEQ ID NO: 2098747 - RNA, 19 nt, Homo sapiens
  misc_RNA (1)...(19): siRNA sense strand
gaaagcaauggucaacaaa

SEQ ID NO: 2098748 - RNA, 19 nt, Homo sapiens
  misc_RNA (1)...(19): siRNA sense strand
gagacacgccagaaacuaa

SEQ ID NO: 2098749 - RNA, 19 nt, Homo sapiens
  misc_RNA (1)...(19): siRNA sense strand
ugaagaagaagaagaaaga

SEQ ID NO: 2098750 - RNA, 19 nt, Homo sapiens
  misc_RNA (1)...(19): siRNA sense strand
gcgaaggcaucgaguggaa

SEQ ID NO: 2098751 - RNA, 19 nt, Homo sapiens
  misc_RNA (1)...(19): siRNA sense strand
gagcaucuuucauuggaau

SEQ ID NO: 2098752 - RNA, 19 nt, Homo sapiens
  misc_RNA (1)...(19): siRNA sense strand
caauaaagcucuggauagg

SEQ ID NO: 2098753 - RNA, 19 nt, Homo sapiens
  misc_RNA (1)...(19): siRNA sense strand
gcaaauuuauucggaucaa

SEQ ID NO: 2098754 - RNA, 19 nt, Homo sapiens
  misc_RNA (1)...(19): siRNA sense strand
caucagaacgccaugguuu

SEQ ID NO: 2098755 - RNA, 19 nt, Homo sapiens
  misc_RNA (1)...(19): siRNA sense strand
gaagauggaagaggagauu

SEQ ID NO: 2098756 - RNA, 19 nt, Homo sapiens
  misc_RNA (1)...(19): siRNA sense strand
gaucaagucacugguauga

SEQ ID NO: 2098757 - RNA, 19 nt, Homo sapiens
  misc_RNA (1)...(19): siRNA sense strand
guuauaaacccuuacaaga

SEQ ID NO: 2098758 - RNA, 19 nt, Homo sapiens
  misc_RNA (1)...(19): siRNA sense strand
uuaccaacgugaauuagaa

SEQ ID NO: 2098759 - RNA, 19 nt, Homo sapiens
  misc_RNA (1)...(19): siRNA sense strand
aggcggagcuggaggauga

SEQ ID NO: 2098760 - RNA, 19 nt, Homo sapiens
  misc_RNA (1)...(19): siRNA sense strand
acacaucuaugcuauaucu

SEQ ID NO: 2098761 - RNA, 19 nt, Homo sapiens
  misc_RNA (1)...(19): siRNA sense strand
ggcagagaauggaaagaaa

SEQ ID NO: 2098762 - RNA, 19 nt, Homo sapiens
  misc_RNA (1)...(19): siRNA sense strand
cagcuaguaucaaagaaga

SEQ ID NO: 2098763 - RNA, 19 nt, Homo sapiens
  misc_RNA (1)...(19): siRNA sense strand
ggaaaaggccaaaagaaaa

SEQ ID NO: 2098764 - RNA, 19 nt, Homo sapiens
  misc_RNA (1)...(19): siRNA sense strand
gaacguacuuuucauaucu

SEQ ID NO: 2098765 - RNA, 19 nt, Homo sapiens
  misc_RNA (1)...(19): siRNA sense strand
ggaaaagucucgugcuguu

SEQ ID NO: 2098766 - RNA, 19 nt, Homo sapiens
  misc_RNA (1)...(19): siRNA sense strand
gaaagaaagcaauggucaa

SEQ ID NO: 2098767 - RNA, 19 nt, Homo sapiens
  misc_RNA (1)...(19): siRNA sense strand
gaacuucaggccaaagaug

SEQ ID NO: 2098768 - RNA, 19 nt, Homo sapiens
  misc_RNA (1)...(19): siRNA sense strand
ggaauaagcaagaagugau

SEQ ID NO: 2098769 - RNA, 19 nt, Homo sapiens
  misc_RNA (1)...(19): siRNA sense strand
aaaagaaacucauggaaga

SEQ ID NO: 2098770 - RNA, 19 nt, Homo sapiens
  misc_RNA (1)...(19): siRNA sense strand
gaaaccaaauccuccaaaa

SEQ ID NO: 2098771 - RNA, 19 nt, Homo sapiens
  misc_RNA (1)...(19): siRNA sense strand
gaucuugguugaacuguau

SEQ ID NO: 2098772 - RNA, 19 nt, Homo sapiens
  misc_RNA (1)...(19): siRNA sense strand
gggcuuauauccuguucua

SEQ ID NO: 2098773 - RNA, 19 nt, Homo sapiens
  misc_RNA (1)...(19): siRNA sense strand
gugaaaggcagaagcauua

SEQ ID NO: 2098774 - RNA, 19 nt, Homo sapiens
  misc_RNA (1)...(19): siRNA sense strand
gcacugggcaugucacaaa

SEQ ID NO: 2098775 - RNA, 19 nt, Homo sapiens
  misc_RNA (1)...(19): siRNA sense strand
gcaaggaaacucaaggaaa

SEQ ID NO: 2098776 - RNA, 19 nt, Homo sapiens
  misc_RNA (1)...(19): siRNA sense strand
gcagcaggcuagcagguuu

SEQ ID NO: 2098777 - RNA, 19 nt, Homo sapiens
  misc_RNA (1)...(19): siRNA sense strand
gggccacccuuccugauaa

SEQ ID NO: 2098778 - RNA, 19 nt, Homo sapiens
  misc_RNA (1)...(19): siRNA sense strand
gcagaagcauuagcaugaa

SEQ ID NO: 2098779 - RNA, 19 nt, Homo sapiens
  misc_RNA (1)...(19): siRNA sense strand
caaggaaacucaaggaaaa

SEQ ID NO: 2098780 - RNA, 19 nt, Homo sapiens
  misc_RNA (1)...(19): siRNA sense strand
gaagaggaccugaauacca

SEQ ID NO: 2098781 - RNA, 19 nt, Homo sapiens
  misc_RNA (1)...(19): siRNA sense strand
gcacagcuguaccuuggau

SEQ ID NO: 2098782 - RNA, 19 nt, Homo sapiens
  misc_RNA (1)...(19): siRNA sense strand
gcaaggugcuaauccucuu

SEQ ID NO: 2098783 - RNA, 19 nt, Homo sapiens
  misc_RNA (1)...(19): siRNA sense strand
uauaugggauucucuggaa

SEQ ID NO: 2098784 - RNA, 19 nt, Homo sapiens
  misc_RNA (1)...(19): siRNA sense strand
acaucaagcuucccagaaa

SEQ ID NO: 2098785 - RNA, 19 nt, Homo sapiens
  misc_RNA (1)...(19): siRNA sense strand
agagggagauaauguguau

SEQ ID NO: 2098786 - RNA, 19 nt, Homo sapiens
  misc_RNA (1)...(19): siRNA sense strand
ggcagaagcauuagcauga

SEQ ID NO: 2098787 - RNA, 19 nt, Homo sapiens
  misc_RNA (1)...(19): siRNA sense strand
gcacugcgggugaggauga

SEQ ID NO: 2098788 - RNA, 19 nt, Homo sapiens
  misc_RNA (1)...(19): siRNA sense strand
ucaaauaucacacucuuuc

SEQ ID NO: 2098789 - RNA, 19 nt, Homo sapiens
  misc_RNA (1)...(19): siRNA sense strand
gugcuaauccucuucugua

SEQ ID NO: 2098790 - RNA, 19 nt, Homo sapiens
  misc_RNA (1)...(19): siRNA sense strand
gagaacaggaggaaugaga

SEQ ID NO: 2098791 - RNA, 19 nt, Homo sapiens
  misc_RNA (1)...(19): siRNA sense strand
gcuccucccugucugauca

SEQ ID NO: 2098792 - RNA, 19 nt, Homo sapiens
  misc_RNA (1)...(19): siRNA sense strand
guguaugccuuucaaguuc

SEQ ID NO: 2098793 - RNA, 19 nt, Homo sapiens
  misc_RNA (1)...(19): siRNA sense strand
aaacucagaugguccaaac

SEQ ID NO: 2098794 - RNA, 19 nt, Homo sapiens
  misc_RNA (1)...(19): siRNA sense strand
ccaacagccucugcaauca

SEQ ID NO: 2098795 - RNA, 19 nt, Homo sapiens
  misc_RNA (1)...(19): siRNA sense strand
gaugaagaggaccugaaua

SEQ ID NO: 2098796 - RNA, 19 nt, Homo sapiens
  misc_RNA (1)...(19): siRNA sense strand
agaaggccaugaacuggaa

SEQ ID NO: 2098797 - RNA, 19 nt, Homo sapiens
  misc_RNA (1)...(19): siRNA sense strand
ucuccacgcuggugaaguu

SEQ ID NO: 2098798 - RNA, 19 nt, Homo sapiens
  misc_RNA (1)...(19): siRNA sense strand
gauaauguguaugccuuuc

SEQ ID NO: 2098799 - RNA, 19 nt, Homo sapiens
  misc_RNA (1)...(19): siRNA sense strand
gaggugaucuugguugaac

SEQ ID NO: 2098800 - RNA, 19 nt, Homo sapiens
  misc_RNA (1)...(19): siRNA sense strand
uaauguguaugccuuucaa

SEQ ID NO: 2098801 - RNA, 19 nt, Homo sapiens
  misc_RNA (1)...(19): siRNA sense strand
gcagagggagauaaugugu

SEQ ID NO: 2098802 - RNA, 19 nt, Homo sapiens
  misc_RNA (1)...(19): siRNA sense strand
cuuauauccuguucuauca

SEQ ID NO: 2098803 - RNA, 19 nt, Homo sapiens
  misc_RNA (1)...(19): siRNA sense strand
gauggccagugguacaguu

SEQ ID NO: 2098804 - RNA, 19 nt, Homo sapiens
  misc_RNA (1)...(19): siRNA sense strand
aagaggaccugaauaccau

SEQ ID NO: 2098805 - RNA, 19 nt, Homo sapiens
  misc_RNA (1)...(19): siRNA sense strand
cuaauccucuucuguaacu

SEQ ID NO: 2098806 - RNA, 19 nt, Homo sapiens
  misc_RNA (1)...(19): siRNA sense strand
uauauccuguucuaucaga

SEQ ID NO: 2098807 - RNA, 19 nt, Homo sapiens
  misc_RNA (1)...(19): siRNA sense strand
guaccuuggaugaauguuu

SEQ ID NO: 2098808 - RNA, 19 nt, Homo sapiens
  misc_RNA (1)...(19): siRNA sense strand
agucaaauaucacacucuu

SEQ ID NO: 2098809 - RNA, 19 nt, Homo sapiens
  misc_RNA (1)...(19): siRNA sense strand
ccucugcggugguccuuug

SEQ ID NO: 2098810 - RNA, 19 nt, Homo sapiens
  misc_RNA (1)...(19): siRNA sense strand
ccagcggucuuucuuugau

SEQ ID NO: 2098811 - RNA, 19 nt, Homo sapiens
  misc_RNA (1)...(19): siRNA sense strand
gcuuauauccuguucuauc

SEQ ID NO: 2098812 - RNA, 19 nt, Homo sapiens
  misc_RNA (1)...(19): siRNA sense strand
agcaagguccgccaucuua

SEQ ID NO: 2098813 - RNA, 19 nt, Homo sapiens
  misc_RNA (1)...(19): siRNA sense strand
gcuguaccuuggaugaaug

SEQ ID NO: 2098814 - RNA, 19 nt, Homo sapiens
  misc_RNA (1)...(19): siRNA sense strand
gcaagguccgccaucuuau

SEQ ID NO: 2098815 - RNA, 19 nt, Homo sapiens
  misc_RNA (1)...(19): siRNA sense strand
ggauggugaagcugaguuu

SEQ ID NO: 2098816 - RNA, 19 nt, Homo sapiens
  misc_RNA (1)...(19): siRNA sense strand
caucaagcuucccagaaag

SEQ ID NO: 2098817 - RNA, 19 nt, Homo sapiens
  misc_RNA (1)...(19): siRNA sense strand
ggccagugguacaguuaug

SEQ ID NO: 2098818 - RNA, 19 nt, Homo sapiens
  misc_RNA (1)...(19): siRNA sense strand
gggagcaggcuucuuaugg

SEQ ID NO: 2098819 - RNA, 19 nt, Homo sapiens
  misc_RNA (1)...(19): siRNA sense strand
gguggaaccgcuucgagaa

SEQ ID NO: 2098820 - RNA, 19 nt, Homo sapiens
  misc_RNA (1)...(19): siRNA sense strand
caagguccgccaucuuaug

SEQ ID NO: 2098821 - RNA, 19 nt, Homo sapiens
  misc_RNA (1)...(19): siRNA sense strand
gacaucaagcuucccagaa

SEQ ID NO: 2098822 - RNA, 19 nt, Homo sapiens
  misc_RNA (1)...(19): siRNA sense strand
gagccaagcagggaccauu

SEQ ID NO: 2098823 - RNA, 19 nt, Homo sapiens
  misc_RNA (1)...(19): siRNA sense strand
aagcagggaccauucaaga

SEQ ID NO: 2098824 - RNA, 19 nt, Homo sapiens
  misc_RNA (1)...(19): siRNA sense strand
caagcuucccagaaaguuu

SEQ ID NO: 2098825 - RNA, 19 nt, Homo sapiens
  misc_RNA (1)...(19): siRNA sense strand
ggaugacgccuggaagugu

SEQ ID NO: 2098826 - RNA, 19 nt, Homo sapiens
  misc_RNA (1)...(19): siRNA sense strand
gaaacucagaugguccaaa

SEQ ID NO: 2098827 - RNA, 19 nt, Homo sapiens
  misc_RNA (1)...(19): siRNA sense strand
ugcuaauccucuucuguaa

SEQ ID NO: 2098828 - RNA, 19 nt, Homo sapiens
  misc_RNA (1)...(19): siRNA sense strand
gccagaaggccaugaacug

SEQ ID NO: 2098829 - RNA, 19 nt, Homo sapiens
  misc_RNA (1)...(19): siRNA sense strand
gguuggagcccaggcguuu

SEQ ID NO: 2098830 - RNA, 19 nt, Homo sapiens
  misc_RNA (1)...(19): siRNA sense strand
gcaaggugggcauuacaca

SEQ ID NO: 2098831 - RNA, 19 nt, Homo sapiens
  misc_RNA (1)...(19): siRNA sense strand
ucuguggccugcagcuauu

SEQ ID NO: 2098832 - RNA, 19 nt, Homo sapiens
  misc_RNA (1)...(19): siRNA sense strand
gguccgccaucuuaugaag

SEQ ID NO: 2098833 - RNA, 19 nt, Homo sapiens
  misc_RNA (1)...(19): siRNA sense strand
ccacgagccaguccauugu

SEQ ID NO: 2098834 - RNA, 19 nt, Homo sapiens
  misc_RNA (1)...(19): siRNA sense strand
guuccugacucucccaucu

SEQ ID NO: 2098835 - RNA, 19 nt, Homo sapiens
  misc_RNA (1)...(19): siRNA sense strand
caggggagcaggcuucuua

SEQ ID NO: 2098836 - RNA, 19 nt, Homo sapiens
  misc_RNA (1)...(19): siRNA sense strand
gggacacucacccuucuga

SEQ ID NO: 2098837 - RNA, 19 nt, Homo sapiens
  misc_RNA (1)...(19): siRNA sense strand
ugaucuugguugaacugua

SEQ ID NO: 2098838 - RNA, 19 nt, Homo sapiens
  misc_RNA (1)...(19): siRNA sense strand
cagaagcauuagcaugaag

SEQ ID NO: 2098839 - RNA, 19 nt, Homo sapiens
  misc_RNA (1)...(19): siRNA sense strand
cgugaaaggcagaagcauu

SEQ ID NO: 2098840 - RNA, 19 nt, Homo sapiens
  misc_RNA (1)...(19): siRNA sense strand
gggacucucucagcucauc

SEQ ID NO: 2098841 - RNA, 19 nt, Homo sapiens
  misc_RNA (1)...(19): siRNA sense strand
uuccagcggucuuucuuug

SEQ ID NO: 2098842 - RNA, 19 nt, Homo sapiens
  misc_RNA (1)...(19): siRNA sense strand
ucgaguugguggaguacuu

SEQ ID NO: 2098843 - RNA, 19 nt, Homo sapiens
  misc_RNA (1)...(19): siRNA sense strand
gagaagaugaggucaacac

SEQ ID NO: 2098844 - RNA, 19 nt, Homo sapiens
  misc_RNA (1)...(19): siRNA sense strand
gggugaggaugagaaguca

SEQ ID NO: 2098845 - RNA, 19 nt, Homo sapiens
  misc_RNA (1)...(19): siRNA sense strand
aaggagaacaggaggaaug

SEQ ID NO: 2098846 - RNA, 19 nt, Homo sapiens
  misc_RNA (1)...(19): siRNA sense strand
ugccuucaguggagcauga

SEQ ID NO: 2098847 - RNA, 19 nt, Homo sapiens
  misc_RNA (1)...(19): siRNA sense strand
cagcaaggaaacucaagga

SEQ ID NO: 2098848 - RNA, 19 nt, Homo sapiens
  misc_RNA (1)...(19): siRNA sense strand
cagcaucgccgagguccaa

SEQ ID NO: 2098849 - RNA, 19 nt, Homo sapiens
  misc_RNA (1)...(19): siRNA sense strand
ccucaucauccaccucaaa

SEQ ID NO: 2098850 - RNA, 19 nt, Homo sapiens
  misc_RNA (1)...(19): siRNA sense strand
cagcggucuuucuuugaug

SEQ ID NO: 2098851 - RNA, 19 nt, Homo sapiens
  misc_RNA (1)...(19): siRNA sense strand
ccgucgaguugguggagua

SEQ ID NO: 2098852 - RNA, 19 nt, Homo sapiens
  misc_RNA (1)...(19): siRNA sense strand
ucugaucacuggcucuuac

SEQ ID NO: 2098853 - RNA, 19 nt, Homo sapiens
  misc_RNA (1)...(19): siRNA sense strand
ucagccagcagcuccauga

SEQ ID NO: 2098854 - RNA, 19 nt, Homo sapiens
  misc_RNA (1)...(19): siRNA sense strand
cagagggagauaaugugua

SEQ ID NO: 2098855 - RNA, 19 nt, Homo sapiens
  misc_RNA (1)...(19): siRNA sense strand
ucucccaucuucaccaaca

SEQ ID NO: 2098856 - RNA, 19 nt, Homo sapiens
  misc_RNA (1)...(19): siRNA sense strand
uaucacacucuuucuuuag

SEQ ID NO: 2098857 - RNA, 19 nt, Homo sapiens
  misc_RNA (1)...(19): siRNA sense strand
uucagagagucaaauauca

SEQ ID NO: 2098858 - RNA, 19 nt, Homo sapiens
  misc_RNA (1)...(19): siRNA sense strand
ucucuccgccucccucgua

SEQ ID NO: 2098859 - RNA, 19 nt, Homo sapiens
  misc_RNA (1)...(19): siRNA sense strand
ucgcagagggagauaaugu

SEQ ID NO: 2098860 - RNA, 19 nt, Homo sapiens
  misc_RNA (1)...(19): siRNA sense strand
uguguaugccuuucaaguu

SEQ ID NO: 2098861 - RNA, 19 nt, Homo sapiens
  misc_RNA (1)...(19): siRNA sense strand
gcuauuugucuccgaagga

SEQ ID NO: 2098862 - RNA, 19 nt, Homo sapiens
  misc_RNA (1)...(19): siRNA sense strand
caucgcagagggagauaau

SEQ ID NO: 2098863 - RNA, 19 nt, Homo sapiens
  misc_RNA (1)...(19): siRNA sense strand
uaccuuggaugaauguuuu

SEQ ID NO: 2098864 - RNA, 19 nt, Homo sapiens
  misc_RNA (1)...(19): siRNA sense strand
gggauagcucugucaagga

SEQ ID NO: 2098865 - RNA, 19 nt, Homo sapiens
  misc_RNA (1)...(19): siRNA sense strand
gaggcgucccugcagauga

SEQ ID NO: 2098866 - RNA, 19 nt, Homo sapiens
  misc_RNA (1)...(19): siRNA sense strand
ucacacucuuucuuuaggu

SEQ ID NO: 2098867 - RNA, 19 nt, Homo sapiens
  misc_RNA (1)...(19): siRNA sense strand
cuucugagguccguguuuc

SEQ ID NO: 2098868 - RNA, 19 nt, Homo sapiens
  misc_RNA (1)...(19): siRNA sense strand
guccaaacacagcaaggaa

SEQ ID NO: 2098869 - RNA, 19 nt, Homo sapiens
  misc_RNA (1)...(19): siRNA sense strand
uccauugugucgcuguuga

SEQ ID NO: 2098870 - RNA, 19 nt, Homo sapiens
  misc_RNA (1)...(19): siRNA sense strand
ccugauaagggaagacaga

SEQ ID NO: 2098871 - RNA, 19 nt, Homo sapiens
  misc_RNA (1)...(19): siRNA sense strand
gaauauaccuucaugucaa

SEQ ID NO: 2098872 - RNA, 19 nt, Homo sapiens
  misc_RNA (1)...(19): siRNA sense strand
ggagaaauguccaccaugu

SEQ ID NO: 2098873 - RNA, 19 nt, Homo sapiens
  misc_RNA (1)...(19): siRNA sense strand
gagagaaaccuuauaaaug

SEQ ID NO: 2098874 - RNA, 19 nt, Homo sapiens
  misc_RNA (1)...(19): siRNA sense strand
gggaagagcuggcaggaau

SEQ ID NO: 2098875 - RNA, 19 nt, Homo sapiens
  misc_RNA (1)...(19): siRNA sense strand
gagagaaacccuauaaaug

SEQ ID NO: 2098876 - RNA, 19 nt, Homo sapiens
  misc_RNA (1)...(19): siRNA sense strand
gaacagcugucuccucaag

SEQ ID NO: 2098877 - RNA, 19 nt, Homo sapiens
  misc_RNA (1)...(19): siRNA sense strand
gagaagcccuguaaaugug

SEQ ID NO: 2098878 - RNA, 19 nt, Homo sapiens
  misc_RNA (1)...(19): siRNA sense strand
ggagagaaaccuuauaaau

SEQ ID NO: 2098879 - RNA, 19 nt, Homo sapiens
  misc_RNA (1)...(19): siRNA sense strand
gaaccuaaauuuggagaau

SEQ ID NO: 2098880 - RNA, 19 nt, Homo sapiens
  misc_RNA (1)...(19): siRNA sense strand
ggagagaaacccuauaaau

SEQ ID NO: 2098881 - RNA, 19 nt, Homo sapiens
  misc_RNA (1)...(19): siRNA sense strand
uauaggaauucucagcuua

SEQ ID NO: 2098882 - RNA, 19 nt, Homo sapiens
  misc_RNA (1)...(19): siRNA sense strand
aaucugaccugacuaauuc

SEQ ID NO: 2098883 - RNA, 19 nt, Homo sapiens
  misc_RNA (1)...(19): siRNA sense strand
caucaaagaucccacuuag

SEQ ID NO: 2098884 - RNA, 19 nt, Homo sapiens
  misc_RNA (1)...(19): siRNA sense strand
gcaggaauauaccuucaug

SEQ ID NO: 2098885 - RNA, 19 nt, Homo sapiens
  misc_RNA (1)...(19): siRNA sense strand
ugaccugacuaauucaaua

SEQ ID NO: 2098886 - RNA, 19 nt, Homo sapiens
  misc_RNA (1)...(19): siRNA sense strand
gacaggacaucuuaucaga

SEQ ID NO: 2098887 - RNA, 19 nt, Homo sapiens
  misc_RNA (1)...(19): siRNA sense strand
ggagagacauacuuucagu

SEQ ID NO: 2098888 - RNA, 19 nt, Homo sapiens
  misc_RNA (1)...(19): siRNA sense strand
gagagaagcccuguaaaug

SEQ ID NO: 2098889 - RNA, 19 nt, Homo sapiens
  misc_RNA (1)...(19): siRNA sense strand
ggagagaagcccuguaaau

SEQ ID NO: 2098890 - RNA, 19 nt, Homo sapiens
  misc_RNA (1)...(19): siRNA sense strand
ucaaagaucccacuuagga

SEQ ID NO: 2098891 - RNA, 19 nt, Homo sapiens
  misc_RNA (1)...(19): siRNA sense strand
acaaggagaaccuaaauuu

SEQ ID NO: 2098892 - RNA, 19 nt, Homo sapiens
  misc_RNA (1)...(19): siRNA sense strand
gagaaacccuauaaauguc

SEQ ID NO: 2098893 - RNA, 19 nt, Homo sapiens
  misc_RNA (1)...(19): siRNA sense strand
caggacaucuuaucagaga

SEQ ID NO: 2098894 - RNA, 19 nt, Homo sapiens
  misc_RNA (1)...(19): siRNA sense strand
ccaaagagcagauccuaga

SEQ ID NO: 2098895 - RNA, 19 nt, Homo sapiens
  misc_RNA (1)...(19): siRNA sense strand
gaaacaguguccaggaagu

SEQ ID NO: 2098896 - RNA, 19 nt, Homo sapiens
  misc_RNA (1)...(19): siRNA sense strand
gcucgagccuugacaaaca

SEQ ID NO: 2098897 - RNA, 19 nt, Homo sapiens
  misc_RNA (1)...(19): siRNA sense strand
agagaaacccuauaaaugu

SEQ ID NO: 2098898 - RNA, 19 nt, Homo sapiens
  misc_RNA (1)...(19): siRNA sense strand
ggaauauaccuucauguca

SEQ ID NO: 2098899 - RNA, 19 nt, Homo sapiens
  misc_RNA (1)...(19): siRNA sense strand
gggaagaccuuuuauagga

SEQ ID NO: 2098900 - RNA, 19 nt, Homo sapiens
  misc_RNA (1)...(19): siRNA sense strand
ccauguggcuugaggagaa

SEQ ID NO: 2098901 - RNA, 19 nt, Homo sapiens
  misc_RNA (1)...(19): siRNA sense strand
gaaagaggaaucugacaca

SEQ ID NO: 2098902 - RNA, 19 nt, Homo sapiens
  misc_RNA (1)...(19): siRNA sense strand
aggaaaggcugaucagaga

SEQ ID NO: 2098903 - RNA, 19 nt, Homo sapiens
  misc_RNA (1)...(19): siRNA sense strand
gacaagagaaugacaagga

SEQ ID NO: 2098904 - RNA, 19 nt, Homo sapiens
  misc_RNA (1)...(19): siRNA sense strand
gagauagacaagagaauga

SEQ ID NO: 2098905 - RNA, 19 nt, Homo sapiens
  misc_RNA (1)...(19): siRNA sense strand
gagcaauacugggaucuca

SEQ ID NO: 2098906 - RNA, 19 nt, Homo sapiens
  misc_RNA (1)...(19): siRNA sense strand
ccaaaucugaccugacuaa

SEQ ID NO: 2098907 - RNA, 19 nt, Homo sapiens
  misc_RNA (1)...(19): siRNA sense strand
ugacacagaagcagaacua

SEQ ID NO: 2098908 - RNA, 19 nt, Homo sapiens
  misc_RNA (1)...(19): siRNA sense strand
cuauaaauguccuaucugu

SEQ ID NO: 2098909 - RNA, 19 nt, Homo sapiens
  misc_RNA (1)...(19): siRNA sense strand
ggucagcauuugccuaauc

SEQ ID NO: 2098910 - RNA, 19 nt, Homo sapiens
  misc_RNA (1)...(19): siRNA sense strand
ggagauagacaagagaaug

SEQ ID NO: 2098911 - RNA, 19 nt, Homo sapiens
  misc_RNA (1)...(19): siRNA sense strand
caggagagaaacccuauaa

SEQ ID NO: 2098912 - RNA, 19 nt, Homo sapiens
  misc_RNA (1)...(19): siRNA sense strand
gcagugacccuuguggaaa

SEQ ID NO: 2098913 - RNA, 19 nt, Homo sapiens
  misc_RNA (1)...(19): siRNA sense strand
auaaauguccuaucuguga

SEQ ID NO: 2098914 - RNA, 19 nt, Homo sapiens
  misc_RNA (1)...(19): siRNA sense strand
caaggagaaccuaaauuug

SEQ ID NO: 2098915 - RNA, 19 nt, Homo sapiens
  misc_RNA (1)...(19): siRNA sense strand
ggaagagcuggcaggaaua

SEQ ID NO: 2098916 - RNA, 19 nt, Homo sapiens
  misc_RNA (1)...(19): siRNA sense strand
cauaggagauagacaagag

SEQ ID NO: 2098917 - RNA, 19 nt, Homo sapiens
  misc_RNA (1)...(19): siRNA sense strand
gaagagcuggcaggaauau

SEQ ID NO: 2098918 - RNA, 19 nt, Homo sapiens
  misc_RNA (1)...(19): siRNA sense strand
acaacuaggucagcauuug

SEQ ID NO: 2098919 - RNA, 19 nt, Homo sapiens
  misc_RNA (1)...(19): siRNA sense strand
ggaauucucagcuuauuuu

SEQ ID NO: 2098920 - RNA, 19 nt, Homo sapiens
  misc_RNA (1)...(19): siRNA sense strand
cggaaacaguguccaggaa

SEQ ID NO: 2098921 - RNA, 19 nt, Homo sapiens
  misc_RNA (1)...(19): siRNA sense strand
gaacucacacgggagagaa

SEQ ID NO: 2098922 - RNA, 19 nt, Homo sapiens
  misc_RNA (1)...(19): siRNA sense strand
gcaauacugggaucucaug

SEQ ID NO: 2098923 - RNA, 19 nt, Homo sapiens
  misc_RNA (1)...(19): siRNA sense strand
acagcugucuccucaagaa

SEQ ID NO: 2098924 - RNA, 19 nt, Homo sapiens
  misc_RNA (1)...(19): siRNA sense strand
gguucacacuggagagaaa

SEQ ID NO: 2098925 - RNA, 19 nt, Homo sapiens
  misc_RNA (1)...(19): siRNA sense strand
ucuaggacaggacaucuua

SEQ ID NO: 2098926 - RNA, 19 nt, Homo sapiens
  misc_RNA (1)...(19): siRNA sense strand
aaagaucccacuuaggaaa

SEQ ID NO: 2098927 - RNA, 19 nt, Homo sapiens
  misc_RNA (1)...(19): siRNA sense strand
agagaagcccuguaaaugu

SEQ ID NO: 2098928 - RNA, 19 nt, Homo sapiens
  misc_RNA (1)...(19): siRNA sense strand
agagagagaccucccagaa

SEQ ID NO: 2098929 - RNA, 19 nt, Homo sapiens
  misc_RNA (1)...(19): siRNA sense strand
gccagagguucacaccaaa

SEQ ID NO: 2098930 - RNA, 19 nt, Homo sapiens
  misc_RNA (1)...(19): siRNA sense strand
ggaguugggacuugagaau

SEQ ID NO: 2098931 - RNA, 19 nt, Homo sapiens
  misc_RNA (1)...(19): siRNA sense strand
ggaugagccaggaugcuuu

SEQ ID NO: 2098932 - RNA, 19 nt, Homo sapiens
  misc_RNA (1)...(19): siRNA sense strand
gacaaggagaaccuaaauu

SEQ ID NO: 2098933 - RNA, 19 nt, Homo sapiens
  misc_RNA (1)...(19): siRNA sense strand
ggaagaccuuuuauaggaa

SEQ ID NO: 2098934 - RNA, 19 nt, Homo sapiens
  misc_RNA (1)...(19): siRNA sense strand
caggagaaauguccaccau

SEQ ID NO: 2098935 - RNA, 19 nt, Homo sapiens
  misc_RNA (1)...(19): siRNA sense strand
ggacaggacaucuuaucag

SEQ ID NO: 2098936 - RNA, 19 nt, Homo sapiens
  misc_RNA (1)...(19): siRNA sense strand
caaagaucccacuuaggaa

SEQ ID NO: 2098937 - RNA, 19 nt, Homo sapiens
  misc_RNA (1)...(19): siRNA sense strand
uaggaauucucagcuuauu

SEQ ID NO: 2098938 - RNA, 19 nt, Homo sapiens
  misc_RNA (1)...(19): siRNA sense strand
aaacaacuaggucagcauu

SEQ ID NO: 2098939 - RNA, 19 nt, Homo sapiens
  misc_RNA (1)...(19): siRNA sense strand
ugagccacaucgugaaaga

SEQ ID NO: 2098940 - RNA, 19 nt, Homo sapiens
  misc_RNA (1)...(19): siRNA sense strand
cagagacuguggcaaugga

SEQ ID NO: 2098941 - RNA, 19 nt, Homo sapiens
  misc_RNA (1)...(19): siRNA sense strand
uuagugacuucucaggauu

SEQ ID NO: 2098942 - RNA, 19 nt, Homo sapiens
  misc_RNA (1)...(19): siRNA sense strand
cgggagagaagcccuguaa

SEQ ID NO: 2098943 - RNA, 19 nt, Homo sapiens
  misc_RNA (1)...(19): siRNA sense strand
gagagagaccucccagaag

SEQ ID NO: 2098944 - RNA, 19 nt, Homo sapiens
  misc_RNA (1)...(19): siRNA sense strand
ugacaaggagaaccuaaau

SEQ ID NO: 2098945 - RNA, 19 nt, Homo sapiens
  misc_RNA (1)...(19): siRNA sense strand
uaucagagaagauggaauc

SEQ ID NO: 2098946 - RNA, 19 nt, Homo sapiens
  misc_RNA (1)...(19): siRNA sense strand
aaaucugaccugacuaauu

SEQ ID NO: 2098947 - RNA, 19 nt, Homo sapiens
  misc_RNA (1)...(19): siRNA sense strand
gagcucgagccuugacaaa

SEQ ID NO: 2098948 - RNA, 19 nt, Homo sapiens
  misc_RNA (1)...(19): siRNA sense strand
acacuggagagaaaccuua

SEQ ID NO: 2098949 - RNA, 19 nt, Homo sapiens
  misc_RNA (1)...(19): siRNA sense strand
aggagaaccuaaauuugga

SEQ ID NO: 2098950 - RNA, 19 nt, Homo sapiens
  misc_RNA (1)...(19): siRNA sense strand
aagagcagauccuagagau

SEQ ID NO: 2098951 - RNA, 19 nt, Homo sapiens
  misc_RNA (1)...(19): siRNA sense strand
uagagauccucauguugga

SEQ ID NO: 2098952 - RNA, 19 nt, Homo sapiens
  misc_RNA (1)...(19): siRNA sense strand
gcuggagaccuaugggaaa

SEQ ID NO: 2098953 - RNA, 19 nt, Homo sapiens
  misc_RNA (1)...(19): siRNA sense strand
ggacaucuuaucagagaag

SEQ ID NO: 2098954 - RNA, 19 nt, Homo sapiens
  misc_RNA (1)...(19): siRNA sense strand
cuggagagaaaccuuauaa

SEQ ID NO: 2098955 - RNA, 19 nt, Homo sapiens
  misc_RNA (1)...(19): siRNA sense strand
ccucaggaguugggacuug

SEQ ID NO: 2098956 - RNA, 19 nt, Homo sapiens
  misc_RNA (1)...(19): siRNA sense strand
aaaguuucauucagagauc

SEQ ID NO: 2098957 - RNA, 19 nt, Homo sapiens
  misc_RNA (1)...(19): siRNA sense strand
gcauuugccuaauccucau

SEQ ID NO: 2098958 - RNA, 19 nt, Homo sapiens
  misc_RNA (1)...(19): siRNA sense strand
agccagagguucacaccaa

SEQ ID NO: 2098959 - RNA, 19 nt, Homo sapiens
  misc_RNA (1)...(19): siRNA sense strand
cccaagacccaccugcaua

SEQ ID NO: 2098960 - RNA, 19 nt, Homo sapiens
  misc_RNA (1)...(19): siRNA sense strand
uccuagagauccucauguu

SEQ ID NO: 2098961 - RNA, 19 nt, Homo sapiens
  misc_RNA (1)...(19): siRNA sense strand
gccaggaugcuuuggagaa

SEQ ID NO: 2098962 - RNA, 19 nt, Homo sapiens
  misc_RNA (1)...(19): siRNA sense strand
ccugacuaauucaauagaa

SEQ ID NO: 2098963 - RNA, 19 nt, Homo sapiens
  misc_RNA (1)...(19): siRNA sense strand
cagcagcaccucaggaaca

SEQ ID NO: 2098964 - RNA, 19 nt, Homo sapiens
  misc_RNA (1)...(19): siRNA sense strand
ucccaaaucugaccugacu

SEQ ID NO: 2098965 - RNA, 19 nt, Homo sapiens
  misc_RNA (1)...(19): siRNA sense strand
caccggagagacauacuuu

SEQ ID NO: 2098966 - RNA, 19 nt, Homo sapiens
  misc_RNA (1)...(19): siRNA sense strand
gagaaauguccaccaugug

SEQ ID NO: 2098967 - RNA, 19 nt, Homo sapiens
  misc_RNA (1)...(19): siRNA sense strand
gaugagccaggaugcuuug

SEQ ID NO: 2098968 - RNA, 19 nt, Homo sapiens
  misc_RNA (1)...(19): siRNA sense strand
aaggagaaccuaaauuugg

SEQ ID NO: 2098969 - RNA, 19 nt, Homo sapiens
  misc_RNA (1)...(19): siRNA sense strand
uuauaggaauucucagcuu

SEQ ID NO: 2098970 - RNA, 19 nt, Homo sapiens
  misc_RNA (1)...(19): siRNA sense strand
uuauaaauguucgcacugu

SEQ ID NO: 2098971 - RNA, 19 nt, Homo sapiens
  misc_RNA (1)...(19): siRNA sense strand
gaaagaaacugaacaaaug

SEQ ID NO: 2098972 - RNA, 19 nt, Homo sapiens
  misc_RNA (1)...(19): siRNA sense strand
gaacaaauguaccaaauug

SEQ ID NO: 2098973 - RNA, 19 nt, Homo sapiens
  misc_RNA (1)...(19): siRNA sense strand
caacuuaaauggaaucuga

SEQ ID NO: 2098974 - RNA, 19 nt, Homo sapiens
  misc_RNA (1)...(19): siRNA sense strand
ggaaagugguugaaacaaa

SEQ ID NO: 2098975 - RNA, 19 nt, Homo sapiens
  misc_RNA (1)...(19): siRNA sense strand
caacagacauuauucucua

SEQ ID NO: 2098976 - RNA, 19 nt, Homo sapiens
  misc_RNA (1)...(19): siRNA sense strand
gaggaaacauuaacagaaa

SEQ ID NO: 2098977 - RNA, 19 nt, Homo sapiens
  misc_RNA (1)...(19): siRNA sense strand
gccgauauguuguauaaua

SEQ ID NO: 2098978 - RNA, 19 nt, Homo sapiens
  misc_RNA (1)...(19): siRNA sense strand
agaaauggcucgaaagaaa

SEQ ID NO: 2098979 - RNA, 19 nt, Homo sapiens
  misc_RNA (1)...(19): siRNA sense strand
gaaccuggauccuauauag

SEQ ID NO: 2098980 - RNA, 19 nt, Homo sapiens
  misc_RNA (1)...(19): siRNA sense strand
gaaacaaagcaacaacuua

SEQ ID NO: 2098981 - RNA, 19 nt, Homo sapiens
  misc_RNA (1)...(19): siRNA sense strand
acaaggagcugauggauga

SEQ ID NO: 2098982 - RNA, 19 nt, Homo sapiens
  misc_RNA (1)...(19): siRNA sense strand
gagaauccuugucaaauga

SEQ ID NO: 2098983 - RNA, 19 nt, Homo sapiens
  misc_RNA (1)...(19): siRNA sense strand
gagaagacuuguuaaggaa

SEQ ID NO: 2098984 - RNA, 19 nt, Homo sapiens
  misc_RNA (1)...(19): siRNA sense strand
ggcauaaacuguugauuga

SEQ ID NO: 2098985 - RNA, 19 nt, Homo sapiens
  misc_RNA (1)...(19): siRNA sense strand
caagaaagcuaacagucaa

SEQ ID NO: 2098986 - RNA, 19 nt, Homo sapiens
  misc_RNA (1)...(19): siRNA sense strand
gaaagugguugaaacaaag

SEQ ID NO: 2098987 - RNA, 19 nt, Homo sapiens
  misc_RNA (1)...(19): siRNA sense strand
gaaaagaaaugccgauaug

SEQ ID NO: 2098988 - RNA, 19 nt, Homo sapiens
  misc_RNA (1)...(19): siRNA sense strand
gaagacuuguuaaggaauu

SEQ ID NO: 2098989 - RNA, 19 nt, Homo sapiens
  misc_RNA (1)...(19): siRNA sense strand
gugaaggucucaacagaaa

SEQ ID NO: 2098990 - RNA, 19 nt, Homo sapiens
  misc_RNA (1)...(19): siRNA sense strand
ccaagaaagacuagaaaua

SEQ ID NO: 2098991 - RNA, 19 nt, Homo sapiens
  misc_RNA (1)...(19): siRNA sense strand
gaagaaagaaacugaacaa

SEQ ID NO: 2098992 - RNA, 19 nt, Homo sapiens
  misc_RNA (1)...(19): siRNA sense strand
gaaacaagcagcaguaucu

SEQ ID NO: 2098993 - RNA, 19 nt, Homo sapiens
  misc_RNA (1)...(19): siRNA sense strand
cuauauagcuucuccucua

SEQ ID NO: 2098994 - RNA, 19 nt, Homo sapiens
  misc_RNA (1)...(19): siRNA sense strand
aaaccgaauuggaaagaua

SEQ ID NO: 2098995 - RNA, 19 nt, Homo sapiens
  misc_RNA (1)...(19): siRNA sense strand
ugagaagacuuguuaagga

SEQ ID NO: 2098996 - RNA, 19 nt, Homo sapiens
  misc_RNA (1)...(19): siRNA sense strand
gaaaugccgauauguugua

SEQ ID NO: 2098997 - RNA, 19 nt, Homo sapiens
  misc_RNA (1)...(19): siRNA sense strand
agaagcagcugaaacaaga

SEQ ID NO: 2098998 - RNA, 19 nt, Homo sapiens
  misc_RNA (1)...(19): siRNA sense strand
gcugauggaugaauauaau

SEQ ID NO: 2098999 - RNA, 19 nt, Homo sapiens
  misc_RNA (1)...(19): siRNA sense strand
gcacagauuuuaagaagaa

SEQ ID NO: 2099000 - RNA, 19 nt, Homo sapiens
  misc_RNA (1)...(19): siRNA sense strand
gaaacacuacagaagaaua

SEQ ID NO: 2099001 - RNA, 19 nt, Homo sapiens
  misc_RNA (1)...(19): siRNA sense strand
gagaaacgaugcccagaag

SEQ ID NO: 2099002 - RNA, 19 nt, Homo sapiens
  misc_RNA (1)...(19): siRNA sense strand
ugaucuaacugcagaagua

SEQ ID NO: 2099003 - RNA, 19 nt, Homo sapiens
  misc_RNA (1)...(19): siRNA sense strand
gugaaacacuacagaagaa

SEQ ID NO: 2099004 - RNA, 19 nt, Homo sapiens
  misc_RNA (1)...(19): siRNA sense strand
gaacaguuaguacaguuaa

SEQ ID NO: 2099005 - RNA, 19 nt, Homo sapiens
  misc_RNA (1)...(19): siRNA sense strand
gcagaaacaagcagcagua

SEQ ID NO: 2099006 - RNA, 19 nt, Homo sapiens
  misc_RNA (1)...(19): siRNA sense strand
gaacaggaugccagaauau

SEQ ID NO: 2099007 - RNA, 19 nt, Homo sapiens
  misc_RNA (1)...(19): siRNA sense strand
gaacucaguagaacuaaug

SEQ ID NO: 2099008 - RNA, 19 nt, Homo sapiens
  misc_RNA (1)...(19): siRNA sense strand
ggaaggagauagaagaaaa

SEQ ID NO: 2099009 - RNA, 19 nt, Homo sapiens
  misc_RNA (1)...(19): siRNA sense strand
uagacuagcugcugcugua

SEQ ID NO: 2099010 - RNA, 19 nt, Homo sapiens
  misc_RNA (1)...(19): siRNA sense strand
gaaccaagaaagacuagaa

SEQ ID NO: 2099011 - RNA, 19 nt, Homo sapiens
  misc_RNA (1)...(19): siRNA sense strand
agaacaggaugccagaaua

SEQ ID NO: 2099012 - RNA, 19 nt, Homo sapiens
  misc_RNA (1)...(19): siRNA sense strand
gaagagagaguuugauuuu

SEQ ID NO: 2099013 - RNA, 19 nt, Homo sapiens
  misc_RNA (1)...(19): siRNA sense strand
ggaagagagaguuugauuu

SEQ ID NO: 2099014 - RNA, 19 nt, Homo sapiens
  misc_RNA (1)...(19): siRNA sense strand
caagaaagacuagaaauag

SEQ ID NO: 2099015 - RNA, 19 nt, Homo sapiens
  misc_RNA (1)...(19): siRNA sense strand
caaaugaacucaguagaac

SEQ ID NO: 2099016 - RNA, 19 nt, Homo sapiens
  misc_RNA (1)...(19): siRNA sense strand
agaaauacauugccaagca

SEQ ID NO: 2099017 - RNA, 19 nt, Homo sapiens
  misc_RNA (1)...(19): siRNA sense strand
gaagugaaaguuagagaau

SEQ ID NO: 2099018 - RNA, 19 nt, Homo sapiens
  misc_RNA (1)...(19): siRNA sense strand
gcugaaacaagaaguagua

SEQ ID NO: 2099019 - RNA, 19 nt, Homo sapiens
  misc_RNA (1)...(19): siRNA sense strand
gaaacaagaaguaguaaac

SEQ ID NO: 2099020 - RNA, 19 nt, Homo sapiens
  misc_RNA (1)...(19): siRNA sense strand
aaucugagaagacuuguua

SEQ ID NO: 2099021 - RNA, 19 nt, Homo sapiens
  misc_RNA (1)...(19): siRNA sense strand
ggaaagauauaaggaacuc

SEQ ID NO: 2099022 - RNA, 19 nt, Homo sapiens
  misc_RNA (1)...(19): siRNA sense strand
uaucucaacuacaaaguga

SEQ ID NO: 2099023 - RNA, 19 nt, Homo sapiens
  misc_RNA (1)...(19): siRNA sense strand
caaagagaccucagccaaa

SEQ ID NO: 2099024 - RNA, 19 nt, Homo sapiens
  misc_RNA (1)...(19): siRNA sense strand
ggacauugaggcugugaaa

SEQ ID NO: 2099025 - RNA, 19 nt, Homo sapiens
  misc_RNA (1)...(19): siRNA sense strand
gcaacuuacuguggagaaa

SEQ ID NO: 2099026 - RNA, 19 nt, Homo sapiens
  misc_RNA (1)...(19): siRNA sense strand
uagaagaagugaaaguuag

SEQ ID NO: 2099027 - RNA, 19 nt, Homo sapiens
  misc_RNA (1)...(19): siRNA sense strand
aaagcaaugugaaacacua

SEQ ID NO: 2099028 - RNA, 19 nt, Homo sapiens
  misc_RNA (1)...(19): siRNA sense strand
gcagauucuuucacuacaa

SEQ ID NO: 2099029 - RNA, 19 nt, Homo sapiens
  misc_RNA (1)...(19): siRNA sense strand
guggacagcugaacaaucu

SEQ ID NO: 2099030 - RNA, 19 nt, Homo sapiens
  misc_RNA (1)...(19): siRNA sense strand
gaaaagacaagcaguacua

SEQ ID NO: 2099031 - RNA, 19 nt, Homo sapiens
  misc_RNA (1)...(19): siRNA sense strand
ggacauggagagcuacuug

SEQ ID NO: 2099032 - RNA, 19 nt, Homo sapiens
  misc_RNA (1)...(19): siRNA sense strand
uuaaggacauggagagcua

SEQ ID NO: 2099033 - RNA, 19 nt, Homo sapiens
  misc_RNA (1)...(19): siRNA sense strand
gaaagagaaagcaggaaga

SEQ ID NO: 2099034 - RNA, 19 nt, Homo sapiens
  misc_RNA (1)...(19): siRNA sense strand
agagaauccuugucaaaug

SEQ ID NO: 2099035 - RNA, 19 nt, Homo sapiens
  misc_RNA (1)...(19): siRNA sense strand
gagagcuacuuguugaaga

SEQ ID NO: 2099036 - RNA, 19 nt, Homo sapiens
  misc_RNA (1)...(19): siRNA sense strand
gaucucuauucacugcuua

SEQ ID NO: 2099037 - RNA, 19 nt, Homo sapiens
  misc_RNA (1)...(19): siRNA sense strand
ucaaaugaacucaguagaa

SEQ ID NO: 2099038 - RNA, 19 nt, Homo sapiens
  misc_RNA (1)...(19): siRNA sense strand
ugauaugucuggccuacaa

SEQ ID NO: 2099039 - RNA, 19 nt, Homo sapiens
  misc_RNA (1)...(19): siRNA sense strand
uaaauggaaucugagaaga

SEQ ID NO: 2099040 - RNA, 19 nt, Homo sapiens
  misc_RNA (1)...(19): siRNA sense strand
caguagaacuaaugagaug

SEQ ID NO: 2099041 - RNA, 19 nt, Homo sapiens
  misc_RNA (1)...(19): siRNA sense strand
cauaaacuguugauugaag

SEQ ID NO: 2099042 - RNA, 19 nt, Homo sapiens
  misc_RNA (1)...(19): siRNA sense strand
gccagaauauuacaagauc

SEQ ID NO: 2099043 - RNA, 19 nt, Homo sapiens
  misc_RNA (1)...(19): siRNA sense strand
gaaucaagauccaguuuug

SEQ ID NO: 2099044 - RNA, 19 nt, Homo sapiens
  misc_RNA (1)...(19): siRNA sense strand
ugaauggcauaaacuguug

SEQ ID NO: 2099045 - RNA, 19 nt, Homo sapiens
  misc_RNA (1)...(19): siRNA sense strand
gaagaggagugugggaaag

SEQ ID NO: 2099046 - RNA, 19 nt, Homo sapiens
  misc_RNA (1)...(19): siRNA sense strand
caaagcaacaacuuaaaug

SEQ ID NO: 2099047 - RNA, 19 nt, Homo sapiens
  misc_RNA (1)...(19): siRNA sense strand
aaacuugauuuccagagaa

SEQ ID NO: 2099048 - RNA, 19 nt, Homo sapiens
  misc_RNA (1)...(19): siRNA sense strand
gaauugaggacaguaagaa

SEQ ID NO: 2099049 - RNA, 19 nt, Homo sapiens
  misc_RNA (1)...(19): siRNA sense strand
cuagaagaagugaaaguua

SEQ ID NO: 2099050 - RNA, 19 nt, Homo sapiens
  misc_RNA (1)...(19): siRNA sense strand
caaggaaggagauagaaga

SEQ ID NO: 2099051 - RNA, 19 nt, Homo sapiens
  misc_RNA (1)...(19): siRNA sense strand
gaaagaauggaucaaugug

SEQ ID NO: 2099052 - RNA, 19 nt, Homo sapiens
  misc_RNA (1)...(19): siRNA sense strand
gcaacaacuuaaauggaau

SEQ ID NO: 2099053 - RNA, 19 nt, Homo sapiens
  misc_RNA (1)...(19): siRNA sense strand
acaggaugccagaauauua

SEQ ID NO: 2099054 - RNA, 19 nt, Homo sapiens
  misc_RNA (1)...(19): siRNA sense strand
gaacucacaaucaaagauc

SEQ ID NO: 2099055 - RNA, 19 nt, Homo sapiens
  misc_RNA (1)...(19): siRNA sense strand
gagcaaggaaggagauaga

SEQ ID NO: 2099056 - RNA, 19 nt, Homo sapiens
  misc_RNA (1)...(19): siRNA sense strand
aagaaagaauggaucaaug

SEQ ID NO: 2099057 - RNA, 19 nt, Homo sapiens
  misc_RNA (1)...(19): siRNA sense strand
uaacugcagacuugccuua

SEQ ID NO: 2099058 - RNA, 19 nt, Homo sapiens
  misc_RNA (1)...(19): siRNA sense strand
aaagaaaugccgauauguu

SEQ ID NO: 2099059 - RNA, 19 nt, Homo sapiens
  misc_RNA (1)...(19): siRNA sense strand
gaaacgaugcccagaagca

SEQ ID NO: 2099060 - RNA, 19 nt, Homo sapiens
  misc_RNA (1)...(19): siRNA sense strand
gagcagaccagauccagau

SEQ ID NO: 2099061 - RNA, 19 nt, Homo sapiens
  misc_RNA (1)...(19): siRNA sense strand
gaggucaguacgcaacuua

SEQ ID NO: 2099062 - RNA, 19 nt, Homo sapiens
  misc_RNA (1)...(19): siRNA sense strand
caaauucagcuccauaaca

SEQ ID NO: 2099063 - RNA, 19 nt, Homo sapiens
  misc_RNA (1)...(19): siRNA sense strand
gacaagaguggguucguuu

SEQ ID NO: 2099064 - RNA, 19 nt, Homo sapiens
  misc_RNA (1)...(19): siRNA sense strand
ggaaucauaccguuguaga

SEQ ID NO: 2099065 - RNA, 19 nt, Homo sapiens
  misc_RNA (1)...(19): siRNA sense strand
ggacagcugaacaaucuga

SEQ ID NO: 2099066 - RNA, 19 nt, Homo sapiens
  misc_RNA (1)...(19): siRNA sense strand
uaacuuggaucugguugug

SEQ ID NO: 2099067 - RNA, 19 nt, Homo sapiens
  misc_RNA (1)...(19): siRNA sense strand
gauagugaacaguuaagaa

SEQ ID NO: 2099068 - RNA, 19 nt, Homo sapiens
  misc_RNA (1)...(19): siRNA sense strand
gaucuggaaucugaaaucu

SEQ ID NO: 2099069 - RNA, 19 nt, Homo sapiens
  misc_RNA (1)...(19): siRNA sense strand
cagcugcuacuaaauauga

SEQ ID NO: 2099070 - RNA, 19 nt, Homo sapiens
  misc_RNA (1)...(19): siRNA sense strand
ggucugcucuuaaggacau

SEQ ID NO: 2099071 - RNA, 19 nt, Homo sapiens
  misc_RNA (1)...(19): siRNA sense strand
gaaagaaacugaacaaaug

SEQ ID NO: 2099072 - RNA, 19 nt, Homo sapiens
  misc_RNA (1)...(19): siRNA sense strand
gaacaaauguaccaaauug

SEQ ID NO: 2099073 - RNA, 19 nt, Homo sapiens
  misc_RNA (1)...(19): siRNA sense strand
caacuuaaauggaaucuga

SEQ ID NO: 2099074 - RNA, 19 nt, Homo sapiens
  misc_RNA (1)...(19): siRNA sense strand
ggaaagugguugaaacaaa

SEQ ID NO: 2099075 - RNA, 19 nt, Homo sapiens
  misc_RNA (1)...(19): siRNA sense strand
caacagacauuauucucua

SEQ ID NO: 2099076 - RNA, 19 nt, Homo sapiens
  misc_RNA (1)...(19): siRNA sense strand
gaggaaacauuaacagaaa

SEQ ID NO: 2099077 - RNA, 19 nt, Homo sapiens
  misc_RNA (1)...(19): siRNA sense strand
gaaacaaagcaacaacuua

SEQ ID NO: 2099078 - RNA, 19 nt, Homo sapiens
  misc_RNA (1)...(19): siRNA sense strand
acaaggagcugauggauga

SEQ ID NO: 2099079 - RNA, 19 nt, Homo sapiens
  misc_RNA (1)...(19): siRNA sense strand
gagaauccuugucaaauga

SEQ ID NO: 2099080 - RNA, 19 nt, Homo sapiens
  misc_RNA (1)...(19): siRNA sense strand
gagaagacuuguuaaggaa

SEQ ID NO: 2099081 - RNA, 19 nt, Homo sapiens
  misc_RNA (1)...(19): siRNA sense strand
ggcauaaacuguugauuga

SEQ ID NO: 2099082 - RNA, 19 nt, Homo sapiens
  misc_RNA (1)...(19): siRNA sense strand
caagaaagcuaacagucaa

SEQ ID NO: 2099083 - RNA, 19 nt, Homo sapiens
  misc_RNA (1)...(19): siRNA sense strand
gaaagugguugaaacaaag

SEQ ID NO: 2099084 - RNA, 19 nt, Homo sapiens
  misc_RNA (1)...(19): siRNA sense strand
gaagacuuguuaaggaauu

SEQ ID NO: 2099085 - RNA, 19 nt, Homo sapiens
  misc_RNA (1)...(19): siRNA sense strand
gugaaggucucaacagaaa

SEQ ID NO: 2099086 - RNA, 19 nt, Homo sapiens
  misc_RNA (1)...(19): siRNA sense strand
ccaagaaagacuagaaaua

SEQ ID NO: 2099087 - RNA, 19 nt, Homo sapiens
  misc_RNA (1)...(19): siRNA sense strand
gaagaaagaaacugaacaa

SEQ ID NO: 2099088 - RNA, 19 nt, Homo sapiens
  misc_RNA (1)...(19): siRNA sense strand
gaaacaagcagcaguaucu

SEQ ID NO: 2099089 - RNA, 19 nt, Homo sapiens
  misc_RNA (1)...(19): siRNA sense strand
aaaccgaauuggaaagaua

SEQ ID NO: 2099090 - RNA, 19 nt, Homo sapiens
  misc_RNA (1)...(19): siRNA sense strand
ugagaagacuuguuaagga

SEQ ID NO: 2099091 - RNA, 19 nt, Homo sapiens
  misc_RNA (1)...(19): siRNA sense strand
agaagcagcugaaacaaga

SEQ ID NO: 2099092 - RNA, 19 nt, Homo sapiens
  misc_RNA (1)...(19): siRNA sense strand
gcugauggaugaauauaau

SEQ ID NO: 2099093 - RNA, 19 nt, Homo sapiens
  misc_RNA (1)...(19): siRNA sense strand
gaaacacuacagaagaaua

SEQ ID NO: 2099094 - RNA, 19 nt, Homo sapiens
  misc_RNA (1)...(19): siRNA sense strand
gagaaacgaugcccagaag

SEQ ID NO: 2099095 - RNA, 19 nt, Homo sapiens
  misc_RNA (1)...(19): siRNA sense strand
gugaaacacuacagaagaa

SEQ ID NO: 2099096 - RNA, 19 nt, Homo sapiens
  misc_RNA (1)...(19): siRNA sense strand
gcagaaacaagcagcagua

SEQ ID NO: 2099097 - RNA, 19 nt, Homo sapiens
  misc_RNA (1)...(19): siRNA sense strand
gaacaggaugccagaauau

SEQ ID NO: 2099098 - RNA, 19 nt, Homo sapiens
  misc_RNA (1)...(19): siRNA sense strand
gaacucaguagaacuaaug

SEQ ID NO: 2099099 - RNA, 19 nt, Homo sapiens
  misc_RNA (1)...(19): siRNA sense strand
ggaaggagauacaagaaaa

SEQ ID NO: 2099100 - RNA, 19 nt, Homo sapiens
  misc_RNA (1)...(19): siRNA sense strand
gaaccaagaaagacuagaa

SEQ ID NO: 2099101 - RNA, 19 nt, Homo sapiens
  misc_RNA (1)...(19): siRNA sense strand
agaacaggaugccagaaua

SEQ ID NO: 2099102 - RNA, 19 nt, Homo sapiens
  misc_RNA (1)...(19): siRNA sense strand
gaagagagaguuugauuuu

SEQ ID NO: 2099103 - RNA, 19 nt, Homo sapiens
  misc_RNA (1)...(19): siRNA sense strand
ggaagagagaguuugauuu

SEQ ID NO: 2099104 - RNA, 19 nt, Homo sapiens
  misc_RNA (1)...(19): siRNA sense strand
caagaaagacuagaaauag

SEQ ID NO: 2099105 - RNA, 19 nt, Homo sapiens
  misc_RNA (1)...(19): siRNA sense strand
gaacaguuagcacaguuaa

SEQ ID NO: 2099106 - RNA, 19 nt, Homo sapiens
  misc_RNA (1)...(19): siRNA sense strand
caaaugaacucaguagaac

SEQ ID NO: 2099107 - RNA, 19 nt, Homo sapiens
  misc_RNA (1)...(19): siRNA sense strand
agaaauacauugccaagca

SEQ ID NO: 2099108 - RNA, 19 nt, Homo sapiens
  misc_RNA (1)...(19): siRNA sense strand
gcugaaacaagaaguagua

SEQ ID NO: 2099109 - RNA, 19 nt, Homo sapiens
  misc_RNA (1)...(19): siRNA sense strand
gaaacaagaaguaguaaac

SEQ ID NO: 2099110 - RNA, 19 nt, Homo sapiens
  misc_RNA (1)...(19): siRNA sense strand
agaaauggcucaaaagaaa

SEQ ID NO: 2099111 - RNA, 19 nt, Homo sapiens
  misc_RNA (1)...(19): siRNA sense strand
ggaaagauauaaggaacuc

SEQ ID NO: 2099112 - RNA, 19 nt, Homo sapiens
  misc_RNA (1)...(19): siRNA sense strand
uaucucaacuacaaaguga

SEQ ID NO: 2099113 - RNA, 19 nt, Homo sapiens
  misc_RNA (1)...(19): siRNA sense strand
caaagagaccucagccaaa

SEQ ID NO: 2099114 - RNA, 19 nt, Homo sapiens
  misc_RNA (1)...(19): siRNA sense strand
aaucugagaagacuuguua

SEQ ID NO: 2099115 - RNA, 19 nt, Homo sapiens
  misc_RNA (1)...(19): siRNA sense strand
ggacauugaggcugugaaa

SEQ ID NO: 2099116 - RNA, 19 nt, Homo sapiens
  misc_RNA (1)...(19): siRNA sense strand
gcaacuuacuguggagaaa

SEQ ID NO: 2099117 - RNA, 19 nt, Homo sapiens
  misc_RNA (1)...(19): siRNA sense strand
aaagcaaugugaaacacua

SEQ ID NO: 2099118 - RNA, 19 nt, Homo sapiens
  misc_RNA (1)...(19): siRNA sense strand
gcagauucuuucacuacaa

SEQ ID NO: 2099119 - RNA, 19 nt, Homo sapiens
  misc_RNA (1)...(19): siRNA sense strand
guggacagcugaacaaucu

SEQ ID NO: 2099120 - RNA, 19 nt, Homo sapiens
  misc_RNA (1)...(19): siRNA sense strand
gaaaagacaagcaguacua

SEQ ID NO: 2099121 - RNA, 19 nt, Homo sapiens
  misc_RNA (1)...(19): siRNA sense strand
ggacauggagagcuacuug

SEQ ID NO: 2099122 - RNA, 19 nt, Homo sapiens
  misc_RNA (1)...(19): siRNA sense strand
uuaaggacauggagagcua

SEQ ID NO: 2099123 - RNA, 19 nt, Homo sapiens
  misc_RNA (1)...(19): siRNA sense strand
gaaagagaaagcaggaaga

SEQ ID NO: 2099124 - RNA, 19 nt, Homo sapiens
  misc_RNA (1)...(19): siRNA sense strand
agagaauccuugucaaaug

SEQ ID NO: 2099125 - RNA, 19 nt, Homo sapiens
  misc_RNA (1)...(19): siRNA sense strand
uaagucaccuugcguugga

SEQ ID NO: 2099126 - RNA, 19 nt, Homo sapiens
  misc_RNA (1)...(19): siRNA sense strand
gaucucuauucacugcuua

SEQ ID NO: 2099127 - RNA, 19 nt, Homo sapiens
  misc_RNA (1)...(19): siRNA sense strand
ucaaaugaacucaguagaa

SEQ ID NO: 2099128 - RNA, 19 nt, Homo sapiens
  misc_RNA (1)...(19): siRNA sense strand
ugauaugucuggccuacaa

SEQ ID NO: 2099129 - RNA, 19 nt, Homo sapiens
  misc_RNA (1)...(19): siRNA sense strand
caguagaacuaaugagaug

SEQ ID NO: 2099130 - RNA, 19 nt, Homo sapiens
  misc_RNA (1)...(19): siRNA sense strand
uaaauggaaucugagaaga

SEQ ID NO: 2099131 - RNA, 19 nt, Homo sapiens
  misc_RNA (1)...(19): siRNA sense strand
cauaaacuguugauugaag

SEQ ID NO: 2099132 - RNA, 19 nt, Homo sapiens
  misc_RNA (1)...(19): siRNA sense strand
caaagcaacaacuuaaaug

SEQ ID NO: 2099133 - RNA, 19 nt, Homo sapiens
  misc_RNA (1)...(19): siRNA sense strand
aaacuugauuuccagagaa

SEQ ID NO: 2099134 - RNA, 19 nt, Homo sapiens
  misc_RNA (1)...(19): siRNA sense strand
gaagaggagugugggaaag

SEQ ID NO: 2099135 - RNA, 19 nt, Homo sapiens
  misc_RNA (1)...(19): siRNA sense strand
gccagaauauuacaagauc

SEQ ID NO: 2099136 - RNA, 19 nt, Homo sapiens
  misc_RNA (1)...(19): siRNA sense strand
gaaagaauggaucaaugug

SEQ ID NO: 2099137 - RNA, 19 nt, Homo sapiens
  misc_RNA (1)...(19): siRNA sense strand
gaauugaggacaguaagaa

SEQ ID NO: 2099138 - RNA, 19 nt, Homo sapiens
  misc_RNA (1)...(19): siRNA sense strand
gcaacaacuuaaauggaau

SEQ ID NO: 2099139 - RNA, 19 nt, Homo sapiens
  misc_RNA (1)...(19): siRNA sense strand
caaggaaggagauacaaga

SEQ ID NO: 2099140 - RNA, 19 nt, Homo sapiens
  misc_RNA (1)...(19): siRNA sense strand
acaggaugccagaauauua

SEQ ID NO: 2099141 - RNA, 19 nt, Homo sapiens
  misc_RNA (1)...(19): siRNA sense strand
gaacucacaaucaaagauc

SEQ ID NO: 2099142 - RNA, 19 nt, Homo sapiens
  misc_RNA (1)...(19): siRNA sense strand
aagaaagaauggaucaaug

SEQ ID NO: 2099143 - RNA, 19 nt, Homo sapiens
  misc_RNA (1)...(19): siRNA sense strand
uagacuggcugcugcugua

SEQ ID NO: 2099144 - RNA, 19 nt, Homo sapiens
  misc_RNA (1)...(19): siRNA sense strand
gaacuagaaauggcucaaa

SEQ ID NO: 2099145 - RNA, 19 nt, Homo sapiens
  misc_RNA (1)...(19): siRNA sense strand
gaaacgaugcccagaagca

SEQ ID NO: 2099146 - RNA, 19 nt, Homo sapiens
  misc_RNA (1)...(19): siRNA sense strand
gagcagaccagauccagau

SEQ ID NO: 2099147 - RNA, 19 nt, Homo sapiens
  misc_RNA (1)...(19): siRNA sense strand
gaggucaguacgcaacuua

SEQ ID NO: 2099148 - RNA, 19 nt, Homo sapiens
  misc_RNA (1)...(19): siRNA sense strand
caaauucagcuccauaaca

SEQ ID NO: 2099149 - RNA, 19 nt, Homo sapiens
  misc_RNA (1)...(19): siRNA sense strand
gacaagaguggguucguuu

SEQ ID NO: 2099150 - RNA, 19 nt, Homo sapiens
  misc_RNA (1)...(19): siRNA sense strand
ggaaucauaccguuguaga

SEQ ID NO: 2099151 - RNA, 19 nt, Homo sapiens
  misc_RNA (1)...(19): siRNA sense strand
ggacagcugaacaaucuga

SEQ ID NO: 2099152 - RNA, 19 nt, Homo sapiens
  misc_RNA (1)...(19): siRNA sense strand
gauagugaacaguuaagaa

SEQ ID NO: 2099153 - RNA, 19 nt, Homo sapiens
  misc_RNA (1)...(19): siRNA sense strand
uaacuuggaucugguugug

SEQ ID NO: 2099154 - RNA, 19 nt, Homo sapiens
  misc_RNA (1)...(19): siRNA sense strand
ucugacagcugagaacaaa

SEQ ID NO: 2099155 - RNA, 19 nt, Homo sapiens
  misc_RNA (1)...(19): siRNA sense strand
ggucugcucuuaaggacau

SEQ ID NO: 2099156 - RNA, 19 nt, Homo sapiens
  misc_RNA (1)...(19): siRNA sense strand
gaucuggaaucugaaaucu

SEQ ID NO: 2099157 - RNA, 19 nt, Homo sapiens
  misc_RNA (1)...(19): siRNA sense strand
cggcauaaacuguugauug

SEQ ID NO: 2099158 - RNA, 19 nt, Homo sapiens
  misc_RNA (1)...(19): siRNA sense strand
cagacauuauucucuauga

SEQ ID NO: 2099159 - RNA, 19 nt, Homo sapiens
  misc_RNA (1)...(19): siRNA sense strand
aaaugaagguugauauguc

SEQ ID NO: 2099160 - RNA, 19 nt, Homo sapiens
  misc_RNA (1)...(19): siRNA sense strand
gaucaaagucagacagcaa

SEQ ID NO: 2099161 - RNA, 19 nt, Homo sapiens
  misc_RNA (1)...(19): siRNA sense strand
ugaggacaguaagaaauaa

SEQ ID NO: 2099162 - RNA, 19 nt, Homo sapiens
  misc_RNA (1)...(19): siRNA sense strand
agaaagagcagaccagauc

SEQ ID NO: 2099163 - RNA, 19 nt, Homo sapiens
  misc_RNA (1)...(19): siRNA sense strand
caacuucaacagacauuau

SEQ ID NO: 2099164 - RNA, 19 nt, Homo sapiens
  misc_RNA (1)...(19): siRNA sense strand
gacaagcaguacuauccaa

SEQ ID NO: 2099165 - RNA, 19 nt, Homo sapiens
  misc_RNA (1)...(19): siRNA sense strand
gaacaaggagcugauggau

SEQ ID NO: 2099166 - RNA, 19 nt, Homo sapiens
  misc_RNA (1)...(19): siRNA sense strand
agauggaacucacaaucaa

SEQ ID NO: 2099167 - RNA, 19 nt, Homo sapiens
  misc_RNA (1)...(19): siRNA sense strand
gcagcugaaacaagaagua

SEQ ID NO: 2099168 - RNA, 19 nt, Homo sapiens
  misc_RNA (1)...(19): siRNA sense strand
ggaauugaggacaguaaga

SEQ ID NO: 2099169 - RNA, 19 nt, Homo sapiens
  misc_RNA (1)...(19): siRNA sense strand
uagugaaggucucaacaga

SEQ ID NO: 2099170 - RNA, 19 nt, Homo sapiens
  misc_RNA (1)...(19): siRNA sense strand
agcaacaacuuaaauggaa

SEQ ID NO: 2099171 - RNA, 19 nt, Homo sapiens
  misc_RNA (1)...(19): siRNA sense strand
gaagcugucucaaagagua

SEQ ID NO: 2099172 - RNA, 19 nt, Homo sapiens
  misc_RNA (1)...(19): siRNA sense strand
ccaagaagcugucucaaag

SEQ ID NO: 2099173 - RNA, 19 nt, Homo sapiens
  misc_RNA (1)...(19): siRNA sense strand
gcaaggcaauaucaucauu

SEQ ID NO: 2099174 - RNA, 19 nt, Homo sapiens
  misc_RNA (1)...(19): siRNA sense strand
gcaaauauaaggucaugaa

SEQ ID NO: 2099175 - RNA, 19 nt, Homo sapiens
  misc_RNA (1)...(19): siRNA sense strand
caaagaguaugcaaaguca

SEQ ID NO: 2099176 - RNA, 19 nt, Homo sapiens
  misc_RNA (1)...(19): siRNA sense strand
gaaaguaaacguaccaaca

SEQ ID NO: 2099177 - RNA, 19 nt, Homo sapiens
  misc_RNA (1)...(19): siRNA sense strand
ggcaauaucaucauuacua

SEQ ID NO: 2099178 - RNA, 19 nt, Homo sapiens
  misc_RNA (1)...(19): siRNA sense strand
aauauaaggucaugaagga

SEQ ID NO: 2099179 - RNA, 19 nt, Homo sapiens
  misc_RNA (1)...(19): siRNA sense strand
auauaacccugacguagua

SEQ ID NO: 2099180 - RNA, 19 nt, Homo sapiens
  misc_RNA (1)...(19): siRNA sense strand
caaggcaauaucaucauua

SEQ ID NO: 2099181 - RNA, 19 nt, Homo sapiens
  misc_RNA (1)...(19): siRNA sense strand
caaagacgcaaggaaagua

SEQ ID NO: 2099182 - RNA, 19 nt, Homo sapiens
  misc_RNA (1)...(19): siRNA sense strand
auacaaagauucggaguca

SEQ ID NO: 2099183 - RNA, 19 nt, Homo sapiens
  misc_RNA (1)...(19): siRNA sense strand
cagcaggaauuaugugaca

SEQ ID NO: 2099184 - RNA, 19 nt, Homo sapiens
  misc_RNA (1)...(19): siRNA sense strand
gcaccaagaagcugucuca

SEQ ID NO: 2099185 - RNA, 19 nt, Homo sapiens
  misc_RNA (1)...(19): siRNA sense strand
ccagaacccaggcaaauau

SEQ ID NO: 2099186 - RNA, 19 nt, Homo sapiens
  misc_RNA (1)...(19): siRNA sense strand
aaaguaaacguaccaacaa

SEQ ID NO: 2099187 - RNA, 19 nt, Homo sapiens
  misc_RNA (1)...(19): siRNA sense strand
aagcaaagacgcaaggaaa

SEQ ID NO: 2099188 - RNA, 19 nt, Homo sapiens
  misc_RNA (1)...(19): siRNA sense strand
gaagcaaagacgcaaggaa

SEQ ID NO: 2099189 - RNA, 19 nt, Homo sapiens
  misc_RNA (1)...(19): siRNA sense strand
ucaagcagcaggaauuaug

SEQ ID NO: 2099190 - RNA, 19 nt, Homo sapiens
  misc_RNA (1)...(19): siRNA sense strand
gcaaagacgcaaggaaagu

SEQ ID NO: 2099191 - RNA, 19 nt, Homo sapiens
  misc_RNA (1)...(19): siRNA sense strand
gggcaaggcaauaucauca

SEQ ID NO: 2099192 - RNA, 19 nt, Homo sapiens
  misc_RNA (1)...(19): siRNA sense strand
guaaacguaccaacaagug

SEQ ID NO: 2099193 - RNA, 19 nt, Homo sapiens
  misc_RNA (1)...(19): siRNA sense strand
gaacccaggcaaauauaag

SEQ ID NO: 2099194 - RNA, 19 nt, Homo sapiens
  misc_RNA (1)...(19): siRNA sense strand
gagucaagcagcaggaauu

SEQ ID NO: 2099195 - RNA, 19 nt, Homo sapiens
  misc_RNA (1)...(19): siRNA sense strand
gcagguugaugucagaaaa

SEQ ID NO: 2099196 - RNA, 19 nt, Homo sapiens
  misc_RNA (1)...(19): siRNA sense strand
ccaaucaccacaucucaga

SEQ ID NO: 2099197 - RNA, 19 nt, Homo sapiens
  misc_RNA (1)...(19): siRNA sense strand
ucagugcccuggaggugaa

SEQ ID NO: 2099198 - RNA, 19 nt, Homo sapiens
  misc_RNA (1)...(19): siRNA sense strand
ggcaugagcagguugaugu

SEQ ID NO: 2099199 - RNA, 19 nt, Homo sapiens
  misc_RNA (1)...(19): siRNA sense strand
aaauauaggagcaccaaga

SEQ ID NO: 2099200 - RNA, 19 nt, Homo sapiens
  misc_RNA (1)...(19): siRNA sense strand
caagaagcugucucaaaga

SEQ ID NO: 2099201 - RNA, 19 nt, Homo sapiens
  misc_RNA (1)...(19): siRNA sense strand
ucaaagaguaugcaaaguc

SEQ ID NO: 2099202 - RNA, 19 nt, Homo sapiens
  misc_RNA (1)...(19): siRNA sense strand
cagaacccaggcaaauaua

SEQ ID NO: 2099203 - RNA, 19 nt, Homo sapiens
  misc_RNA (1)...(19): siRNA sense strand
gccacacccugcagaaaca

SEQ ID NO: 2099204 - RNA, 19 nt, Homo sapiens
  misc_RNA (1)...(19): siRNA sense strand
aagaagcugucucaaagag

SEQ ID NO: 2099205 - RNA, 19 nt, Homo sapiens
  misc_RNA (1)...(19): siRNA sense strand
cauauaacccugacguagu

SEQ ID NO: 2099206 - RNA, 19 nt, Homo sapiens
  misc_RNA (1)...(19): siRNA sense strand
aaagacgcaaggaaaguaa

SEQ ID NO: 2099207 - RNA, 19 nt, Homo sapiens
  misc_RNA (1)...(19): siRNA sense strand
uggaugaggacccggauaa

SEQ ID NO: 2099208 - RNA, 19 nt, Homo sapiens
  misc_RNA (1)...(19): siRNA sense strand
ugagcagguugaugucaga

SEQ ID NO: 2099209 - RNA, 19 nt, Homo sapiens
  misc_RNA (1)...(19): siRNA sense strand
gaaaauacaccaauaaccu

SEQ ID NO: 2099210 - RNA, 19 nt, Homo sapiens
  misc_RNA (1)...(19): siRNA sense strand
aagaguaugcaaagucauu

SEQ ID NO: 2099211 - RNA, 19 nt, Homo sapiens
  misc_RNA (1)...(19): siRNA sense strand
uggccuauucugcauauaa

SEQ ID NO: 2099212 - RNA, 19 nt, Homo sapiens
  misc_RNA (1)...(19): siRNA sense strand
aauauaggagcaccaagaa

SEQ ID NO: 2099213 - RNA, 19 nt, Homo sapiens
  misc_RNA (1)...(19): siRNA sense strand
gucagaaaauacaccaaua

SEQ ID NO: 2099214 - RNA, 19 nt, Homo sapiens
  misc_RNA (1)...(19): siRNA sense strand
ggauugugcaugagaugga

SEQ ID NO: 2099215 - RNA, 19 nt, Homo sapiens
  misc_RNA (1)...(19): siRNA sense strand
ggccuauucugcauauaac

SEQ ID NO: 2099216 - RNA, 19 nt, Homo sapiens
  misc_RNA (1)...(19): siRNA sense strand
ccagaaucauccacugcau

SEQ ID NO: 2099217 - RNA, 19 nt, Homo sapiens
  misc_RNA (1)...(19): siRNA sense strand
auaaggucaugaaggagaa

SEQ ID NO: 2099218 - RNA, 19 nt, Homo sapiens
  misc_RNA (1)...(19): siRNA sense strand
ucucaaagaguaugcaaag

SEQ ID NO: 2099219 - RNA, 19 nt, Homo sapiens
  misc_RNA (1)...(19): siRNA sense strand
cccagaacccaggcaaaua

SEQ ID NO: 2099220 - RNA, 19 nt, Homo sapiens
  misc_RNA (1)...(19): siRNA sense strand
acaaagauucggagucaag

SEQ ID NO: 2099221 - RNA, 19 nt, Homo sapiens
  misc_RNA (1)...(19): siRNA sense strand
aggcaaauauaaggucaug

SEQ ID NO: 2099222 - RNA, 19 nt, Homo sapiens
  misc_RNA (1)...(19): siRNA sense strand
caagcagcaggaauuaugu

SEQ ID NO: 2099223 - RNA, 19 nt, Homo sapiens
  misc_RNA (1)...(19): siRNA sense strand
agucaagcagcaggaauua

SEQ ID NO: 2099224 - RNA, 19 nt, Homo sapiens
  misc_RNA (1)...(19): siRNA sense strand
gauguucauacaaagauuc

SEQ ID NO: 2099225 - RNA, 19 nt, Homo sapiens
  misc_RNA (1)...(19): siRNA sense strand
accaagaagcugucucaaa

SEQ ID NO: 2099226 - RNA, 19 nt, Homo sapiens
  misc_RNA (1)...(19): siRNA sense strand
caaauauaaggucaugaag

SEQ ID NO: 2099227 - RNA, 19 nt, Homo sapiens
  misc_RNA (1)...(19): siRNA sense strand
aaggcaauaucaucauuac

SEQ ID NO: 2099228 - RNA, 19 nt, Homo sapiens
  misc_RNA (1)...(19): siRNA sense strand
cguggccuauucugcauau

SEQ ID NO: 2099229 - RNA, 19 nt, Homo sapiens
  misc_RNA (1)...(19): siRNA sense strand
cgcaaggaaaguaaacgua

SEQ ID NO: 2099230 - RNA, 19 nt, Homo sapiens
  misc_RNA (1)...(19): siRNA sense strand
agaacccaggcaaauauaa

SEQ ID NO: 2099231 - RNA, 19 nt, Homo sapiens
  misc_RNA (1)...(19): siRNA sense strand
gcagacuggacaaaauaua

SEQ ID NO: 2099232 - RNA, 19 nt, Homo sapiens
  misc_RNA (1)...(19): siRNA sense strand
ggagucaagcagcaggaau

SEQ ID NO: 2099233 - RNA, 19 nt, Homo sapiens
  misc_RNA (1)...(19): siRNA sense strand
ccacaaagcugccauuuac

SEQ ID NO: 2099234 - RNA, 19 nt, Homo sapiens
  misc_RNA (1)...(19): siRNA sense strand
gagaucauguuucacguuu

SEQ ID NO: 2099235 - RNA, 19 nt, Homo sapiens
  misc_RNA (1)...(19): siRNA sense strand
caacaacacauucaaauuc

SEQ ID NO: 2099236 - RNA, 19 nt, Homo sapiens
  misc_RNA (1)...(19): siRNA sense strand
gaaagagacacauuggaaa

SEQ ID NO: 2099237 - RNA, 19 nt, Homo sapiens
  misc_RNA (1)...(19): siRNA sense strand
gaagacaaaugggcauaug

SEQ ID NO: 2099238 - RNA, 19 nt, Homo sapiens
  misc_RNA (1)...(19): siRNA sense strand
ggacagggagaucauguuu

SEQ ID NO: 2099239 - RNA, 19 nt, Homo sapiens
  misc_RNA (1)...(19): siRNA sense strand
gauagccuccaauuucuua

SEQ ID NO: 2099240 - RNA, 19 nt, Homo sapiens
  misc_RNA (1)...(19): siRNA sense strand
caugauagccuccaauuuc

SEQ ID NO: 2099241 - RNA, 19 nt, Homo sapiens
  misc_RNA (1)...(19): siRNA sense strand
gggaagaugugcccaccuu

SEQ ID NO: 2099242 - RNA, 19 nt, Homo sapiens
  misc_RNA (1)...(19): siRNA sense strand
gaagaugugcccaccuuug

SEQ ID NO: 2099243 - RNA, 19 nt, Homo sapiens
  misc_RNA (1)...(19): siRNA sense strand
ucaccaagcucaccaaugc

SEQ ID NO: 2099244 - RNA, 19 nt, Homo sapiens
  misc_RNA (1)...(19): siRNA sense strand
acagggagaucauguuuca

SEQ ID NO: 2099245 - RNA, 19 nt, Homo sapiens
  misc_RNA (1)...(19): siRNA sense strand
gagaacgccugcugcaagu

SEQ ID NO: 2099246 - RNA, 19 nt, Homo sapiens
  misc_RNA (1)...(19): siRNA sense strand
gcagagaaagagacacauu

SEQ ID NO: 2099247 - RNA, 19 nt, Homo sapiens
  misc_RNA (1)...(19): siRNA sense strand
gaaauuccgcuuugacaag

SEQ ID NO: 2099248 - RNA, 19 nt, Homo sapiens
  misc_RNA (1)...(19): siRNA sense strand
ggacaaguuugagaaugga

SEQ ID NO: 2099249 - RNA, 19 nt, Homo sapiens
  misc_RNA (1)...(19): siRNA sense strand
cgaucacacugcaggauuu

SEQ ID NO: 2099250 - RNA, 19 nt, Homo sapiens
  misc_RNA (1)...(19): siRNA sense strand
cgagaucgaaccugaaauu

SEQ ID NO: 2099251 - RNA, 19 nt, Homo sapiens
  misc_RNA (1)...(19): siRNA sense strand
gaaccugaaauuccgcuuu

SEQ ID NO: 2099252 - RNA, 19 nt, Homo sapiens
  misc_RNA (1)...(19): siRNA sense strand
ggaaaaggcuccuguacca

SEQ ID NO: 2099253 - RNA, 19 nt, Homo sapiens
  misc_RNA (1)...(19): siRNA sense strand
uggacaaccuucacgauga

SEQ ID NO: 2099254 - RNA, 19 nt, Homo sapiens
  misc_RNA (1)...(19): siRNA sense strand
gaggacaaguuugagaaug

SEQ ID NO: 2099255 - RNA, 19 nt, Homo sapiens
  misc_RNA (1)...(19): siRNA sense strand
ggacaaccuucacgaugag

SEQ ID NO: 2099256 - RNA, 19 nt, Homo sapiens
  misc_RNA (1)...(19): siRNA sense strand
gcauggaggucaccaagac

SEQ ID NO: 2099257 - RNA, 19 nt, Homo sapiens
  misc_RNA (1)...(19): siRNA sense strand
gaggagagcccagcuuuua

SEQ ID NO: 2099258 - RNA, 19 nt, Homo sapiens
  misc_RNA (1)...(19): siRNA sense strand
gaagucaacaacacauuca

SEQ ID NO: 2099259 - RNA, 19 nt, Homo sapiens
  misc_RNA (1)...(19): siRNA sense strand
agaaagagacacauuggaa

SEQ ID NO: 2099260 - RNA, 19 nt, Homo sapiens
  misc_RNA (1)...(19): siRNA sense strand
gcacagagaccccauccua

SEQ ID NO: 2099261 - RNA, 19 nt, Homo sapiens
  misc_RNA (1)...(19): siRNA sense strand
uguucaaccugauuuauga

SEQ ID NO: 2099262 - RNA, 19 nt, Homo sapiens
  misc_RNA (1)...(19): siRNA sense strand
cagaggaggacaaguuuga

SEQ ID NO: 2099263 - RNA, 19 nt, Homo sapiens
  misc_RNA (1)...(19): siRNA sense strand
gacaugauagccuccaauu

SEQ ID NO: 2099264 - RNA, 19 nt, Homo sapiens
  misc_RNA (1)...(19): siRNA sense strand
gggaguuucugcucaccaa

SEQ ID NO: 2099265 - RNA, 19 nt, Homo sapiens
  misc_RNA (1)...(19): siRNA sense strand
gcccagaggaggacaaguu

SEQ ID NO: 2099266 - RNA, 19 nt, Homo sapiens
  misc_RNA (1)...(19): siRNA sense strand
aaucccagcucuccggaaa

SEQ ID NO: 2099267 - RNA, 19 nt, Homo sapiens
  misc_RNA (1)...(19): siRNA sense strand
gaggagcuauuugggaaca

SEQ ID NO: 2099268 - RNA, 19 nt, Homo sapiens
  misc_RNA (1)...(19): siRNA sense strand
ggaaucaguguacacaaca

SEQ ID NO: 2099269 - RNA, 19 nt, Homo sapiens
  misc_RNA (1)...(19): siRNA sense strand
ggagcuauuugggaacaau

SEQ ID NO: 2099270 - RNA, 19 nt, Homo sapiens
  misc_RNA (1)...(19): siRNA sense strand
ggagaucauguuucacguu

SEQ ID NO: 2099271 - RNA, 19 nt, Homo sapiens
  misc_RNA (1)...(19): siRNA sense strand
gagaaagagacacauugga

SEQ ID NO: 2099272 - RNA, 19 nt, Homo sapiens
  misc_RNA (1)...(19): siRNA sense strand
cagagaaagagacacauug

SEQ ID NO: 2099273 - RNA, 19 nt, Homo sapiens
  misc_RNA (1)...(19): siRNA sense strand
gaucauguuucacguuucc

SEQ ID NO: 2099274 - RNA, 19 nt, Homo sapiens
  misc_RNA (1)...(19): siRNA sense strand
gagcaugaagucaacaaca

SEQ ID NO: 2099275 - RNA, 19 nt, Homo sapiens
  misc_RNA (1)...(19): siRNA sense strand
aaagagacacauuggaaau

SEQ ID NO: 2099276 - RNA, 19 nt, Homo sapiens
  misc_RNA (1)...(19): siRNA sense strand
gaaucaguguacacaacau

SEQ ID NO: 2099277 - RNA, 19 nt, Homo sapiens
  misc_RNA (1)...(19): siRNA sense strand
gguccuuuaucauccuauu

SEQ ID NO: 2099278 - RNA, 19 nt, Homo sapiens
  misc_RNA (1)...(19): siRNA sense strand
gaacuccagguccagaugu

SEQ ID NO: 2099279 - RNA, 19 nt, Homo sapiens
  misc_RNA (1)...(19): siRNA sense strand
aaccugaaauuccgcuuug

SEQ ID NO: 2099280 - RNA, 19 nt, Homo sapiens
  misc_RNA (1)...(19): siRNA sense strand
ggaagaugugcccaccuuu

SEQ ID NO: 2099281 - RNA, 19 nt, Homo sapiens
  misc_RNA (1)...(19): siRNA sense strand
ugcaggauuucaaagguuu

SEQ ID NO: 2099282 - RNA, 19 nt, Homo sapiens
  misc_RNA (1)...(19): siRNA sense strand
ggaggacaaguuugagaau

SEQ ID NO: 2099283 - RNA, 19 nt, Homo sapiens
  misc_RNA (1)...(19): siRNA sense strand
gaggaggacaaguuugaga

SEQ ID NO: 2099284 - RNA, 19 nt, Homo sapiens
  misc_RNA (1)...(19): siRNA sense strand
gagacgcccagcagagaaa

SEQ ID NO: 2099285 - RNA, 19 nt, Homo sapiens
  misc_RNA (1)...(19): siRNA sense strand
ggagacgcccagcagagaa

SEQ ID NO: 2099286 - RNA, 19 nt, Homo sapiens
  misc_RNA (1)...(19): siRNA sense strand
caucguggccaucaucuuc

SEQ ID NO: 2099287 - RNA, 19 nt, Homo sapiens
  misc_RNA (1)...(19): siRNA sense strand
cggcaacggugaagaacca

SEQ ID NO: 2099288 - RNA, 19 nt, Homo sapiens
  misc_RNA (1)...(19): siRNA sense strand
cugcaagucggacaaguuu

SEQ ID NO: 2099289 - RNA, 19 nt, Homo sapiens
  misc_RNA (1)...(19): siRNA sense strand
gagccggagucccacagau

SEQ ID NO: 2099290 - RNA, 19 nt, Homo sapiens
  misc_RNA (1)...(19): siRNA sense strand
agcaggagguguuugucua

SEQ ID NO: 2099291 - RNA, 19 nt, Homo sapiens
  misc_RNA (1)...(19): siRNA sense strand
agacaaaugggcauaugga

SEQ ID NO: 2099292 - RNA, 19 nt, Homo sapiens
  misc_RNA (1)...(19): siRNA sense strand
cugcaggauuucaaagguu

SEQ ID NO: 2099293 - RNA, 19 nt, Homo sapiens
  misc_RNA (1)...(19): siRNA sense strand
ugaaauuccgcuuugacaa

SEQ ID NO: 2099294 - RNA, 19 nt, Homo sapiens
  misc_RNA (1)...(19): siRNA sense strand
gcugcaagucggacaaguu

SEQ ID NO: 2099295 - RNA, 19 nt, Homo sapiens
  misc_RNA (1)...(19): siRNA sense strand
uuucuuacaugccuacauc

SEQ ID NO: 2099296 - RNA, 19 nt, Homo sapiens
  misc_RNA (1)...(19): siRNA sense strand
gcaugaagucaacaacaca

SEQ ID NO: 2099297 - RNA, 19 nt, Homo sapiens
  misc_RNA (1)...(19): siRNA sense strand
uccacaaagcugccauuua

SEQ ID NO: 2099298 - RNA, 19 nt, Homo sapiens
  misc_RNA (1)...(19): siRNA sense strand
gugauguccggguccuuua

SEQ ID NO: 2099299 - RNA, 19 nt, Homo sapiens
  misc_RNA (1)...(19): siRNA sense strand
gucaacaacacauucaaau

SEQ ID NO: 2099300 - RNA, 19 nt, Homo sapiens
  misc_RNA (1)...(19): siRNA sense strand
gcucaccaaugccgagaac

SEQ ID NO: 2099301 - RNA, 19 nt, Homo sapiens
  misc_RNA (1)...(19): siRNA sense strand
cagcagagaaagagacaca

SEQ ID NO: 2099302 - RNA, 19 nt, Homo sapiens
  misc_RNA (1)...(19): siRNA sense strand
gagaucgaaccugaaauuc

SEQ ID NO: 2099303 - RNA, 19 nt, Homo sapiens
  misc_RNA (1)...(19): siRNA sense strand
ucaugaaguugaaggaaaa

SEQ ID NO: 2099304 - RNA, 19 nt, Homo sapiens
  misc_RNA (1)...(19): siRNA sense strand
uguuucacguuuccacaaa

SEQ ID NO: 2099305 - RNA, 19 nt, Homo sapiens
  misc_RNA (1)...(19): siRNA sense strand
ugaagucaacaacacauuc

SEQ ID NO: 2099306 - RNA, 19 nt, Homo sapiens
  misc_RNA (1)...(19): siRNA sense strand
cagaagacaaaugggcaua

SEQ ID NO: 2099307 - RNA, 19 nt, Homo sapiens
  misc_RNA (1)...(19): siRNA sense strand
gccagacuauggagaacuc

SEQ ID NO: 2099308 - RNA, 19 nt, Homo sapiens
  misc_RNA (1)...(19): siRNA sense strand
ucaagcaggagguguuugu

SEQ ID NO: 2099309 - RNA, 19 nt, Homo sapiens
  misc_RNA (1)...(19): siRNA sense strand
uggaaucaguguacacaac

SEQ ID NO: 2099310 - RNA, 19 nt, Homo sapiens
  misc_RNA (1)...(19): siRNA sense strand
aggacaaguuugagaaugg

SEQ ID NO: 2099311 - RNA, 19 nt, Homo sapiens
  misc_RNA (1)...(19): siRNA sense strand
gcccggaauucagggaguu

SEQ ID NO: 2099312 - RNA, 19 nt, Homo sapiens
  misc_RNA (1)...(19): siRNA sense strand
cgaccucacccuucaagca

SEQ ID NO: 2099313 - RNA, 19 nt, Homo sapiens
  misc_RNA (1)...(19): siRNA sense strand
gcaggagguguuugucuac

SEQ ID NO: 2099314 - RNA, 19 nt, Homo sapiens
  misc_RNA (1)...(19): siRNA sense strand
gcuccugaccucccagugu

SEQ ID NO: 2099315 - RNA, 19 nt, Homo sapiens
  misc_RNA (1)...(19): siRNA sense strand
ucacacugcaggauuucaa

SEQ ID NO: 2099316 - RNA, 19 nt, Homo sapiens
  misc_RNA (1)...(19): siRNA sense strand
caggagauaaagucugaga

SEQ ID NO: 2099317 - RNA, 19 nt, Homo sapiens
  misc_RNA (1)...(19): siRNA sense strand
ggaaaagugucgggcaaag

SEQ ID NO: 2099318 - RNA, 19 nt, Homo sapiens
  misc_RNA (1)...(19): siRNA sense strand
gagcucgccagacuaugga

SEQ ID NO: 2099319 - RNA, 19 nt, Homo sapiens
  misc_RNA (1)...(19): siRNA sense strand
gauuguguccuaugaugag

SEQ ID NO: 2099320 - RNA, 19 nt, Homo sapiens
  misc_RNA (1)...(19): siRNA sense strand
guguucaaccugauuuaug

SEQ ID NO: 2099321 - RNA, 19 nt, Homo sapiens
  misc_RNA (1)...(19): siRNA sense strand
aacaacacauucaaauucg

SEQ ID NO: 2099322 - RNA, 19 nt, Homo sapiens
  misc_RNA (1)...(19): siRNA sense strand
gggacagggagaucauguu

SEQ ID NO: 2099323 - RNA, 19 nt, Homo sapiens
  misc_RNA (1)...(19): siRNA sense strand
gcuccuguaccagcaguuu

SEQ ID NO: 2099324 - RNA, 19 nt, Homo sapiens
  misc_RNA (1)...(19): siRNA sense strand
cccagaggaggacaaguuu

SEQ ID NO: 2099325 - RNA, 19 nt, Homo sapiens
  misc_RNA (1)...(19): siRNA sense strand
agucaacaacacauucaaa

SEQ ID NO: 2099326 - RNA, 19 nt, Homo sapiens
  misc_RNA (1)...(19): siRNA sense strand
ugacaucguggccaucauc

SEQ ID NO: 2099327 - RNA, 19 nt, Homo sapiens
  misc_RNA (1)...(19): siRNA sense strand
ggaaguggcuuuggaguug

SEQ ID NO: 2099328 - RNA, 19 nt, Homo sapiens
  misc_RNA (1)...(19): siRNA sense strand
ugaaggcccugauucgaaa

SEQ ID NO: 2099329 - RNA, 19 nt, Homo sapiens
  misc_RNA (1)...(19): siRNA sense strand
gaacacucauccucauucu

SEQ ID NO: 2099330 - RNA, 19 nt, Homo sapiens
  misc_RNA (1)...(19): siRNA sense strand
ucaaggaaguggcuuugga

SEQ ID NO: 2099331 - RNA, 19 nt, Homo sapiens
  misc_RNA (1)...(19): siRNA sense strand
gcauguggaucccgcucua

SEQ ID NO: 2099332 - RNA, 19 nt, Homo sapiens
  misc_RNA (1)...(19): siRNA sense strand
ccucauggcuccgagauau

SEQ ID NO: 2099333 - RNA, 19 nt, Homo sapiens
  misc_RNA (1)...(19): siRNA sense strand
caaggacagccucaucuuu

SEQ ID NO: 2099334 - RNA, 19 nt, Homo sapiens
  misc_RNA (1)...(19): siRNA sense strand
ggccaucacugcagacauc

SEQ ID NO: 2099335 - RNA, 19 nt, Homo sapiens
  misc_RNA (1)...(19): siRNA sense strand
ggacauccagcagcacuuu

SEQ ID NO: 2099336 - RNA, 19 nt, Homo sapiens
  misc_RNA (1)...(19): siRNA sense strand
gaacacgcguacgcucaug

SEQ ID NO: 2099337 - RNA, 19 nt, Homo sapiens
  misc_RNA (1)...(19): siRNA sense strand
gcugggcucugccaucuuc

SEQ ID NO: 2099338 - RNA, 19 nt, Homo sapiens
  misc_RNA (1)...(19): siRNA sense strand
ccacugcgcucuucuucgu

SEQ ID NO: 2099339 - RNA, 19 nt, Homo sapiens
  misc_RNA (1)...(19): siRNA sense strand
gagccuauaucuguaucuu

SEQ ID NO: 2099340 - RNA, 19 nt, Homo sapiens
  misc_RNA (1)...(19): siRNA sense strand
ggaacacucauccucauuc

SEQ ID NO: 2099341 - RNA, 19 nt, Homo sapiens
  misc_RNA (1)...(19): siRNA sense strand
gauaugaaggcccugauuc

SEQ ID NO: 2099342 - RNA, 19 nt, Homo sapiens
  misc_RNA (1)...(19): siRNA sense strand
guucaucuguagcuucaug

SEQ ID NO: 2099343 - RNA, 19 nt, Homo sapiens
  misc_RNA (1)...(19): siRNA sense strand
gcaacgugcucaacuaccu

SEQ ID NO: 2099344 - RNA, 19 nt, Homo sapiens
  misc_RNA (1)...(19): siRNA sense strand
ggccugggcuacauuacug

SEQ ID NO: 2099345 - RNA, 19 nt, Homo sapiens
  misc_RNA (1)...(19): siRNA sense strand
gcaguggccugggcuacau

SEQ ID NO: 2099346 - RNA, 19 nt, Homo sapiens
  misc_RNA (1)...(19): siRNA sense strand
caagacauaagcugcauuc

SEQ ID NO: 2099347 - RNA, 19 nt, Homo sapiens
  misc_RNA (1)...(19): siRNA sense strand
gcacaccuaugggcagagu

SEQ ID NO: 2099348 - RNA, 19 nt, Homo sapiens
  misc_RNA (1)...(19): siRNA sense strand
gaguugguaacaagacaua

SEQ ID NO: 2099349 - RNA, 19 nt, Homo sapiens
  misc_RNA (1)...(19): siRNA sense strand
gcgcccaaguugugcagaa

SEQ ID NO: 2099350 - RNA, 19 nt, Homo sapiens
  misc_RNA (1)...(19): siRNA sense strand
gcucugccaucuucaucug

SEQ ID NO: 2099351 - RNA, 19 nt, Homo sapiens
  misc_RNA (1)...(19): siRNA sense strand
gggagacgcugcuguuuuc

SEQ ID NO: 2099352 - RNA, 19 nt, Homo sapiens
  misc_RNA (1)...(19): siRNA sense strand
aaggacagccucaucuuug

SEQ ID NO: 2099353 - RNA, 19 nt, Homo sapiens
  misc_RNA (1)...(19): siRNA sense strand
gcagucaguguucaucugu

SEQ ID NO: 2099354 - RNA, 19 nt, Homo sapiens
  misc_RNA (1)...(19): siRNA sense strand
caagagcagcaucguagga

SEQ ID NO: 2099355 - RNA, 19 nt, Homo sapiens
  misc_RNA (1)...(19): siRNA sense strand
gaucacaggaacacucauc

SEQ ID NO: 2099356 - RNA, 19 nt, Homo sapiens
  misc_RNA (1)...(19): siRNA sense strand
auucucagcugcggcauuu

SEQ ID NO: 2099357 - RNA, 19 nt, Homo sapiens
  misc_RNA (1)...(19): siRNA sense strand
ugggcaacgugcucaacua

SEQ ID NO: 2099358 - RNA, 19 nt, Homo sapiens
  misc_RNA (1)...(19): siRNA sense strand
ucaccugcuuuacgggauu

SEQ ID NO: 2099359 - RNA, 19 nt, Homo sapiens
  misc_RNA (1)...(19): siRNA sense strand
ccacgucggcugucuccuu

SEQ ID NO: 2099360 - RNA, 19 nt, Homo sapiens
  misc_RNA (1)...(19): siRNA sense strand
acaccuaugggcagaguaa

SEQ ID NO: 2099361 - RNA, 19 nt, Homo sapiens
  misc_RNA (1)...(19): siRNA sense strand
guguucaucuguagcuuca

SEQ ID NO: 2099362 - RNA, 19 nt, Homo sapiens
  misc_RNA (1)...(19): siRNA sense strand
ucauuggcuuuaucucaga

SEQ ID NO: 2099363 - RNA, 19 nt, Homo sapiens
  misc_RNA (1)...(19): siRNA sense strand
cagcaggacaggcaagugu

SEQ ID NO: 2099364 - RNA, 19 nt, Homo sapiens
  misc_RNA (1)...(19): siRNA sense strand
agacgcugcuguuuucuaa

SEQ ID NO: 2099365 - RNA, 19 nt, Homo sapiens
  misc_RNA (1)...(19): siRNA sense strand
ccaaggacagccucaucuu

SEQ ID NO: 2099366 - RNA, 19 nt, Homo sapiens
  misc_RNA (1)...(19): siRNA sense strand
ccucauuggcuuuaucuca

SEQ ID NO: 2099367 - RNA, 19 nt, Homo sapiens
  misc_RNA (1)...(19): siRNA sense strand
cagucaguguucaucugua

SEQ ID NO: 2099368 - RNA, 19 nt, Homo sapiens
  misc_RNA (1)...(19): siRNA sense strand
uaucauuggcgaccucuuc

SEQ ID NO: 2099369 - RNA, 19 nt, Homo sapiens
  misc_RNA (1)...(19): siRNA sense strand
gcuuuggaguugguaacaa

SEQ ID NO: 2099370 - RNA, 19 nt, Homo sapiens
  misc_RNA (1)...(19): siRNA sense strand
agacauaagcugcauucca

SEQ ID NO: 2099371 - RNA, 19 nt, Homo sapiens
  misc_RNA (1)...(19): siRNA sense strand
gagacuggcacugggcauu

SEQ ID NO: 2099372 - RNA, 19 nt, Homo sapiens
  misc_RNA (1)...(19): siRNA sense strand
agucaguguucaucuguag

SEQ ID NO: 2099373 - RNA, 19 nt, Homo sapiens
  misc_RNA (1)...(19): siRNA sense strand
cuaccucauuggcuuuauc

SEQ ID NO: 2099374 - RNA, 19 nt, Homo sapiens
  misc_RNA (1)...(19): siRNA sense strand
gcucaugcucugcccuuuc

SEQ ID NO: 2099375 - RNA, 19 nt, Homo sapiens
  misc_RNA (1)...(19): siRNA sense strand
gagcacggcuuccgacuag

SEQ ID NO: 2099376 - RNA, 19 nt, Homo sapiens
  misc_RNA (1)...(19): siRNA sense strand
gggcagaggcugacuucua

SEQ ID NO: 2099377 - RNA, 19 nt, Homo sapiens
  misc_RNA (1)...(19): siRNA sense strand
caaccucaauucccaagga

SEQ ID NO: 2099378 - RNA, 19 nt, Homo sapiens
  misc_RNA (1)...(19): siRNA sense strand
ccacgcagauguagauguc

SEQ ID NO: 2099379 - RNA, 19 nt, Homo sapiens
  misc_RNA (1)...(19): siRNA sense strand
ggcagaggcugacuucuac

SEQ ID NO: 2099380 - RNA, 19 nt, Homo sapiens
  misc_RNA (1)...(19): siRNA sense strand
ccgaagaccugcucaacuc

SEQ ID NO: 2099381 - RNA, 19 nt, Homo sapiens
  misc_RNA (1)...(19): siRNA sense strand
ccaggucucugcgcuuugu

SEQ ID NO: 2099382 - RNA, 19 nt, Homo sapiens
  misc_RNA (1)...(19): siRNA sense strand
uccggcacauccucaauuu

SEQ ID NO: 2099383 - RNA, 19 nt, Homo sapiens
  misc_RNA (1)...(19): siRNA sense strand
gcuccacgcagauguagau

SEQ ID NO: 2099384 - RNA, 19 nt, Homo sapiens
  misc_RNA (1)...(19): siRNA sense strand
gaggggagcccacauuuuc

SEQ ID NO: 2099385 - RNA, 19 nt, Homo sapiens
  misc_RNA (1)...(19): siRNA sense strand
cgagcacggcuuccgacua

SEQ ID NO: 2099386 - RNA, 19 nt, Homo sapiens
  misc_RNA (1)...(19): siRNA sense strand
cuccaggucucugcgcuuu

SEQ ID NO: 2099387 - RNA, 19 nt, Homo sapiens
  misc_RNA (1)...(19): siRNA sense strand
gcaaggccuuccggcacau

SEQ ID NO: 2099388 - RNA, 19 nt, Homo sapiens
  misc_RNA (1)...(19): siRNA sense strand
cugagugucuaggugcuuu

SEQ ID NO: 2099389 - RNA, 19 nt, Homo sapiens
  misc_RNA (1)...(19): siRNA sense strand
gagaaagccuucacuaaua

SEQ ID NO: 2099390 - RNA, 19 nt, Homo sapiens
  misc_RNA (1)...(19): siRNA sense strand
gaacaaaggcuauuucuga

SEQ ID NO: 2099391 - RNA, 19 nt, Homo sapiens
  misc_RNA (1)...(19): siRNA sense strand
gaaauggaaugauaggaua

SEQ ID NO: 2099392 - RNA, 19 nt, Homo sapiens
  misc_RNA (1)...(19): siRNA sense strand
gagaaacccuauaaaugua

SEQ ID NO: 2099393 - RNA, 19 nt, Homo sapiens
  misc_RNA (1)...(19): siRNA sense strand
gauuauggcugcuguguuu

SEQ ID NO: 2099394 - RNA, 19 nt, Homo sapiens
  misc_RNA (1)...(19): siRNA sense strand
ggaaaggccuucauugcuu

SEQ ID NO: 2099395 - RNA, 19 nt, Homo sapiens
  misc_RNA (1)...(19): siRNA sense strand
gggaaagcauucauuaauu

SEQ ID NO: 2099396 - RNA, 19 nt, Homo sapiens
  misc_RNA (1)...(19): siRNA sense strand
gagagaagcccuauaaaug

SEQ ID NO: 2099397 - RNA, 19 nt, Homo sapiens
  misc_RNA (1)...(19): siRNA sense strand
gagagaaaccuuauaaaug

SEQ ID NO: 2099398 - RNA, 19 nt, Homo sapiens
  misc_RNA (1)...(19): siRNA sense strand
gaagaaacacaauugguaa

SEQ ID NO: 2099399 - RNA, 19 nt, Homo sapiens
  misc_RNA (1)...(19): siRNA sense strand
gaucauugcucauucaaca

SEQ ID NO: 2099400 - RNA, 19 nt, Homo sapiens
  misc_RNA (1)...(19): siRNA sense strand
gagagaaacccuauaaaug

SEQ ID NO: 2099401 - RNA, 19 nt, Homo sapiens
  misc_RNA (1)...(19): siRNA sense strand
ggaaaagccuauagaagua

SEQ ID NO: 2099402 - RNA, 19 nt, Homo sapiens
  misc_RNA (1)...(19): siRNA sense strand
ggaaaagccuucagaacua

SEQ ID NO: 2099403 - RNA, 19 nt, Homo sapiens
  misc_RNA (1)...(19): siRNA sense strand
ggagagaaaccauuuaaau

SEQ ID NO: 2099404 - RNA, 19 nt, Homo sapiens
  misc_RNA (1)...(19): siRNA sense strand
acaaguaacucaggcuuua

SEQ ID NO: 2099405 - RNA, 19 nt, Homo sapiens
  misc_RNA (1)...(19): siRNA sense strand
ggagagaaaccauauaaau

SEQ ID NO: 2099406 - RNA, 19 nt, Homo sapiens
  misc_RNA (1)...(19): siRNA sense strand
gaagagaaaccuuaucugu

SEQ ID NO: 2099407 - RNA, 19 nt, Homo sapiens
  misc_RNA (1)...(19): siRNA sense strand
ggagagaaaccuuauaaau

SEQ ID NO: 2099408 - RNA, 19 nt, Homo sapiens
  misc_RNA (1)...(19): siRNA sense strand
gagagaagcccuauaagug

SEQ ID NO: 2099409 - RNA, 19 nt, Homo sapiens
  misc_RNA (1)...(19): siRNA sense strand
caaaggcuauuucugaaga

SEQ ID NO: 2099410 - RNA, 19 nt, Homo sapiens
  misc_RNA (1)...(19): siRNA sense strand
ggaaaagccuucaggagua

SEQ ID NO: 2099411 - RNA, 19 nt, Homo sapiens
  misc_RNA (1)...(19): siRNA sense strand
agaaguaauucaagccuua

SEQ ID NO: 2099412 - RNA, 19 nt, Homo sapiens
  misc_RNA (1)...(19): siRNA sense strand
uagagaaacuuacagagaa

SEQ ID NO: 2099413 - RNA, 19 nt, Homo sapiens
  misc_RNA (1)...(19): siRNA sense strand
acuaauacaucacagcuua

SEQ ID NO: 2099414 - RNA, 19 nt, Homo sapiens
  misc_RNA (1)...(19): siRNA sense strand
ggagagaaacccuauaaau

SEQ ID NO: 2099415 - RNA, 19 nt, Homo sapiens
  misc_RNA (1)...(19): siRNA sense strand
caacaucaaagaacucaua

SEQ ID NO: 2099416 - RNA, 19 nt, Homo sapiens
  misc_RNA (1)...(19): siRNA sense strand
gauaggauauugagauuac

SEQ ID NO: 2099417 - RNA, 19 nt, Homo sapiens
  misc_RNA (1)...(19): siRNA sense strand
caagucauaucuuagugua

SEQ ID NO: 2099418 - RNA, 19 nt, Homo sapiens
  misc_RNA (1)...(19): siRNA sense strand
gaacaagucauaucuuagu

SEQ ID NO: 2099419 - RNA, 19 nt, Homo sapiens
  misc_RNA (1)...(19): siRNA sense strand
ggaaaggguuguauuacuc

SEQ ID NO: 2099420 - RNA, 19 nt, Homo sapiens
  misc_RNA (1)...(19): siRNA sense strand
gagagaaaccauauaaaug

SEQ ID NO: 2099421 - RNA, 19 nt, Homo sapiens
  misc_RNA (1)...(19): siRNA sense strand
agagaaaccuuaucagugu

SEQ ID NO: 2099422 - RNA, 19 nt, Homo sapiens
  misc_RNA (1)...(19): siRNA sense strand
gaugguacaugucacagaa

SEQ ID NO: 2099423 - RNA, 19 nt, Homo sapiens
  misc_RNA (1)...(19): siRNA sense strand
ggagagaagcccuauaaau

SEQ ID NO: 2099424 - RNA, 19 nt, Homo sapiens
  misc_RNA (1)...(19): siRNA sense strand
caagaaggcuacacgaaca

SEQ ID NO: 2099425 - RNA, 19 nt, Homo sapiens
  misc_RNA (1)...(19): siRNA sense strand
agaacuaacucagacuuua

SEQ ID NO: 2099426 - RNA, 19 nt, Homo sapiens
  misc_RNA (1)...(19): siRNA sense strand
ggagaggcccuauaaaugu

SEQ ID NO: 2099427 - RNA, 19 nt, Homo sapiens
  misc_RNA (1)...(19): siRNA sense strand
gaagagaaaccauaucagu

SEQ ID NO: 2099428 - RNA, 19 nt, Homo sapiens
  misc_RNA (1)...(19): siRNA sense strand
aggaacaagucauaucuua

SEQ ID NO: 2099429 - RNA, 19 nt, Homo sapiens
  misc_RNA (1)...(19): siRNA sense strand
gagaaacccuacaaaugug

SEQ ID NO: 2099430 - RNA, 19 nt, Homo sapiens
  misc_RNA (1)...(19): siRNA sense strand
ggcuauuucugaagauuua

SEQ ID NO: 2099431 - RNA, 19 nt, Homo sapiens
  misc_RNA (1)...(19): siRNA sense strand
caucaaagaacucauacua

SEQ ID NO: 2099432 - RNA, 19 nt, Homo sapiens
  misc_RNA (1)...(19): siRNA sense strand
ggauguggcuauagacuuc

SEQ ID NO: 2099433 - RNA, 19 nt, Homo sapiens
  misc_RNA (1)...(19): siRNA sense strand
gaaagcauuuagccagaug

SEQ ID NO: 2099434 - RNA, 19 nt, Homo sapiens
  misc_RNA (1)...(19): siRNA sense strand
gaacaucagcgaauucaca

SEQ ID NO: 2099435 - RNA, 19 nt, Homo sapiens
  misc_RNA (1)...(19): siRNA sense strand
gauuacagauacccauuug

SEQ ID NO: 2099436 - RNA, 19 nt, Homo sapiens
  misc_RNA (1)...(19): siRNA sense strand
caaugaauguggaaagguu

SEQ ID NO: 2099437 - RNA, 19 nt, Homo sapiens
  misc_RNA (1)...(19): siRNA sense strand
ggagugaaacccuauaaau

SEQ ID NO: 2099438 - RNA, 19 nt, Homo sapiens
  misc_RNA (1)...(19): siRNA sense strand
aggaaucggugacauuuaa

SEQ ID NO: 2099439 - RNA, 19 nt, Homo sapiens
  misc_RNA (1)...(19): siRNA sense strand
gaaaggcagcaaagccaua

SEQ ID NO: 2099440 - RNA, 19 nt, Homo sapiens
  misc_RNA (1)...(19): siRNA sense strand
gaaguuacccagccagaug

SEQ ID NO: 2099441 - RNA, 19 nt, Homo sapiens
  misc_RNA (1)...(19): siRNA sense strand
uaacucagacuuuacugua

SEQ ID NO: 2099442 - RNA, 19 nt, Homo sapiens
  misc_RNA (1)...(19): siRNA sense strand
ugagaaacccuacaaaugu

SEQ ID NO: 2099443 - RNA, 19 nt, Homo sapiens
  misc_RNA (1)...(19): siRNA sense strand
gagaaaccuuaucagugua

SEQ ID NO: 2099444 - RNA, 19 nt, Homo sapiens
  misc_RNA (1)...(19): siRNA sense strand
aaacacaauugguaaagga

SEQ ID NO: 2099445 - RNA, 19 nt, Homo sapiens
  misc_RNA (1)...(19): siRNA sense strand
ggaacuagguaugucuuug

SEQ ID NO: 2099446 - RNA, 19 nt, Homo sapiens
  misc_RNA (1)...(19): siRNA sense strand
gugaaacccuauaaauguu

SEQ ID NO: 2099447 - RNA, 19 nt, Homo sapiens
  misc_RNA (1)...(19): siRNA sense strand
gacccacacugaagagaaa

SEQ ID NO: 2099448 - RNA, 19 nt, Homo sapiens
  misc_RNA (1)...(19): siRNA sense strand
ucagagaauucacacuaaa

SEQ ID NO: 2099449 - RNA, 19 nt, Homo sapiens
  misc_RNA (1)...(19): siRNA sense strand
caagaagacucccacuagu

SEQ ID NO: 2099450 - RNA, 19 nt, Homo sapiens
  misc_RNA (1)...(19): siRNA sense strand
ggagagaagcccuauaagu

SEQ ID NO: 2099451 - RNA, 19 nt, Homo sapiens
  misc_RNA (1)...(19): siRNA sense strand
gaacacauacuggagagaa

SEQ ID NO: 2099452 - RNA, 19 nt, Homo sapiens
  misc_RNA (1)...(19): siRNA sense strand
gagaagcccuauaaaugca

SEQ ID NO: 2099453 - RNA, 19 nt, Homo sapiens
  misc_RNA (1)...(19): siRNA sense strand
gaaaccagagggagagauu

SEQ ID NO: 2099454 - RNA, 19 nt, Homo sapiens
  misc_RNA (1)...(19): siRNA sense strand
gggagaggcccuauaaaug

SEQ ID NO: 2099455 - RNA, 19 nt, Homo sapiens
  misc_RNA (1)...(19): siRNA sense strand
gagugaaacccuauaaaug

SEQ ID NO: 2099456 - RNA, 19 nt, Homo sapiens
  misc_RNA (1)...(19): siRNA sense strand
agagaaacccuauaaaugu

SEQ ID NO: 2099457 - RNA, 19 nt, Homo sapiens
  misc_RNA (1)...(19): siRNA sense strand
gcuauagacuucacauugg

SEQ ID NO: 2099458 - RNA, 19 nt, Homo sapiens
  misc_RNA (1)...(19): siRNA sense strand
agaagaaacacaauuggua

SEQ ID NO: 2099459 - RNA, 19 nt, Homo sapiens
  misc_RNA (1)...(19): siRNA sense strand
ggaaauggaaugauaggau

SEQ ID NO: 2099460 - RNA, 19 nt, Homo sapiens
  misc_RNA (1)...(19): siRNA sense strand
gaaggguuauggaaaugga

SEQ ID NO: 2099461 - RNA, 19 nt, Homo sapiens
  misc_RNA (1)...(19): siRNA sense strand
caucagagaauucacacua

SEQ ID NO: 2099462 - RNA, 19 nt, Homo sapiens
  misc_RNA (1)...(19): siRNA sense strand
agacuuuacuguacacuug

SEQ ID NO: 2099463 - RNA, 19 nt, Homo sapiens
  misc_RNA (1)...(19): siRNA sense strand
gagaggcccuauaaaugug

SEQ ID NO: 2099464 - RNA, 19 nt, Homo sapiens
  misc_RNA (1)...(19): siRNA sense strand
ugagaaagccuucacuaau

SEQ ID NO: 2099465 - RNA, 19 nt, Homo sapiens
  misc_RNA (1)...(19): siRNA sense strand
guacaccacagaaugcaua

SEQ ID NO: 2099466 - RNA, 19 nt, Homo sapiens
  misc_RNA (1)...(19): siRNA sense strand
uuaaggauguggcuauaga

SEQ ID NO: 2099467 - RNA, 19 nt, Homo sapiens
  misc_RNA (1)...(19): siRNA sense strand
gaaaagccuucagaacuaa

SEQ ID NO: 2099468 - RNA, 19 nt, Homo sapiens
  misc_RNA (1)...(19): siRNA sense strand
agaggaaccugcacaagga

SEQ ID NO: 2099469 - RNA, 19 nt, Homo sapiens
  misc_RNA (1)...(19): siRNA sense strand
gugagaaacccuacaaaug

SEQ ID NO: 2099470 - RNA, 19 nt, Homo sapiens
  misc_RNA (1)...(19): siRNA sense strand
aggaguaguucgagccuua

SEQ ID NO: 2099471 - RNA, 19 nt, Homo sapiens
  misc_RNA (1)...(19): siRNA sense strand
guggagagaagcccuauaa

SEQ ID NO: 2099472 - RNA, 19 nt, Homo sapiens
  misc_RNA (1)...(19): siRNA sense strand
caggagagaaaccuuauaa

SEQ ID NO: 2099473 - RNA, 19 nt, Homo sapiens
  misc_RNA (1)...(19): siRNA sense strand
caucgcaaauuucacagaa

SEQ ID NO: 2099474 - RNA, 19 nt, Homo sapiens
  misc_RNA (1)...(19): siRNA sense strand
ggaagauaauuugcaagga

SEQ ID NO: 2099475 - RNA, 19 nt, Homo sapiens
  misc_RNA (1)...(19): siRNA sense strand
gaggaugcauacuggagaa

SEQ ID NO: 2099476 - RNA, 19 nt, Homo sapiens
  misc_RNA (1)...(19): siRNA sense strand
aggacuaaaucauaccuua

SEQ ID NO: 2099477 - RNA, 19 nt, Homo sapiens
  misc_RNA (1)...(19): siRNA sense strand
acacuaaagagaaaccuua

SEQ ID NO: 2099478 - RNA, 19 nt, Homo sapiens
  misc_RNA (1)...(19): siRNA sense strand
gaauucacacuaaagagaa

SEQ ID NO: 2099479 - RNA, 19 nt, Homo sapiens
  misc_RNA (1)...(19): siRNA sense strand
gaaacacaauugguaaagg

SEQ ID NO: 2099480 - RNA, 19 nt, Homo sapiens
  misc_RNA (1)...(19): siRNA sense strand
cuacaucagagaauucaua

SEQ ID NO: 2099481 - RNA, 19 nt, Homo sapiens
  misc_RNA (1)...(19): siRNA sense strand
guacaucagaggacccaua

SEQ ID NO: 2099482 - RNA, 19 nt, Homo sapiens
  misc_RNA (1)...(19): siRNA sense strand
ucaaccgcaucgcaaauuu

SEQ ID NO: 2099483 - RNA, 19 nt, Homo sapiens
  misc_RNA (1)...(19): siRNA sense strand
guacauauaagaacucaca

SEQ ID NO: 2099484 - RNA, 19 nt, Homo sapiens
  misc_RNA (1)...(19): siRNA sense strand
uaaaggaaucggugacauu

SEQ ID NO: 2099485 - RNA, 19 nt, Homo sapiens
  misc_RNA (1)...(19): siRNA sense strand
acaaggaugugaugcuaga

SEQ ID NO: 2099486 - RNA, 19 nt, Homo sapiens
  misc_RNA (1)...(19): siRNA sense strand
aaccuuaucugugcaauga

SEQ ID NO: 2099487 - RNA, 19 nt, Homo sapiens
  misc_RNA (1)...(19): siRNA sense strand
gagaauggucugugggauu

SEQ ID NO: 2099488 - RNA, 19 nt, Homo sapiens
  misc_RNA (1)...(19): siRNA sense strand
cagcuaacccuacaucaga

SEQ ID NO: 2099489 - RNA, 19 nt, Homo sapiens
  misc_RNA (1)...(19): siRNA sense strand
gcaacaucaucauuacuaa

SEQ ID NO: 2099490 - RNA, 19 nt, Homo sapiens
  misc_RNA (1)...(19): siRNA sense strand
caaggcaacaucaucauua

SEQ ID NO: 2099491 - RNA, 19 nt, Homo sapiens
  misc_RNA (1)...(19): siRNA sense strand
caucauggcucauuugaca

SEQ ID NO: 2099492 - RNA, 19 nt, Homo sapiens
  misc_RNA (1)...(19): siRNA sense strand
ggucaggccucguauuaca

SEQ ID NO: 2099493 - RNA, 19 nt, Homo sapiens
  misc_RNA (1)...(19): siRNA sense strand
gagggugucuccuggcauu

SEQ ID NO: 2099494 - RNA, 19 nt, Homo sapiens
  misc_RNA (1)...(19): siRNA sense strand
acacugccguccuccuuua

SEQ ID NO: 2099495 - RNA, 19 nt, Homo sapiens
  misc_RNA (1)...(19): siRNA sense strand
gggaugugcuuaucuugga

SEQ ID NO: 2099496 - RNA, 19 nt, Homo sapiens
  misc_RNA (1)...(19): siRNA sense strand
gcaaggcaacaucaucauu

SEQ ID NO: 2099497 - RNA, 19 nt, Homo sapiens
  misc_RNA (1)...(19): siRNA sense strand
ggcaacaucaucauuacua

SEQ ID NO: 2099498 - RNA, 19 nt, Homo sapiens
  misc_RNA (1)...(19): siRNA sense strand
gagcaccucaugaagcuuu

SEQ ID NO: 2099499 - RNA, 19 nt, Homo sapiens
  misc_RNA (1)...(19): siRNA sense strand
caaaggaggugggcuacca

SEQ ID NO: 2099500 - RNA, 19 nt, Homo sapiens
  misc_RNA (1)...(19): siRNA sense strand
gcgcaugcaucauucaaaa

SEQ ID NO: 2099501 - RNA, 19 nt, Homo sapiens
  misc_RNA (1)...(19): siRNA sense strand
gggcaaggcaacaucauca

SEQ ID NO: 2099502 - RNA, 19 nt, Homo sapiens
  misc_RNA (1)...(19): siRNA sense strand
gggagcaccucaugaagcu

SEQ ID NO: 2099503 - RNA, 19 nt, Homo sapiens
  misc_RNA (1)...(19): siRNA sense strand
caacacugccguccuccuu

SEQ ID NO: 2099504 - RNA, 19 nt, Homo sapiens
  misc_RNA (1)...(19): siRNA sense strand
gcaugcaucauucaaaaua

SEQ ID NO: 2099505 - RNA, 19 nt, Homo sapiens
  misc_RNA (1)...(19): siRNA sense strand
gcccagaggaucaagaugu

SEQ ID NO: 2099506 - RNA, 19 nt, Homo sapiens
  misc_RNA (1)...(19): siRNA sense strand
ucaggccucguauuacaua

SEQ ID NO: 2099507 - RNA, 19 nt, Homo sapiens
  misc_RNA (1)...(19): siRNA sense strand
ugccacaccuccacacaga

SEQ ID NO: 2099508 - RNA, 19 nt, Homo sapiens
  misc_RNA (1)...(19): siRNA sense strand
acagggagcaccucaugaa

SEQ ID NO: 2099509 - RNA, 19 nt, Homo sapiens
  misc_RNA (1)...(19): siRNA sense strand
uggaugagcacccggauau

SEQ ID NO: 2099510 - RNA, 19 nt, Homo sapiens
  misc_RNA (1)...(19): siRNA sense strand
gagcaccgucugggaguuu

SEQ ID NO: 2099511 - RNA, 19 nt, Homo sapiens
  misc_RNA (1)...(19): siRNA sense strand
caggagcgacucucucaga

SEQ ID NO: 2099512 - RNA, 19 nt, Homo sapiens
  misc_RNA (1)...(19): siRNA sense strand
gauccaugguuuccuuacu

SEQ ID NO: 2099513 - RNA, 19 nt, Homo sapiens
  misc_RNA (1)...(19): siRNA sense strand
ggagcaccgucugggaguu

SEQ ID NO: 2099514 - RNA, 19 nt, Homo sapiens
  misc_RNA (1)...(19): siRNA sense strand
augcugggauccaugguuu

SEQ ID NO: 2099515 - RNA, 19 nt, Homo sapiens
  misc_RNA (1)...(19): siRNA sense strand
ugugggaugugcuuaucuu

SEQ ID NO: 2099516 - RNA, 19 nt, Homo sapiens
  misc_RNA (1)...(19): siRNA sense strand
auccaugguuuccuuacua

SEQ ID NO: 2099517 - RNA, 19 nt, Homo sapiens
  misc_RNA (1)...(19): siRNA sense strand
acacagggagcaccucaug

SEQ ID NO: 2099518 - RNA, 19 nt, Homo sapiens
  misc_RNA (1)...(19): siRNA sense strand
cccagaggaucaagaugug

SEQ ID NO: 2099519 - RNA, 19 nt, Homo sapiens
  misc_RNA (1)...(19): siRNA sense strand
caacaucaucauuacuaag

SEQ ID NO: 2099520 - RNA, 19 nt, Homo sapiens
  misc_RNA (1)...(19): siRNA sense strand
agauguggccacccuguuu

SEQ ID NO: 2099521 - RNA, 19 nt, Homo sapiens
  misc_RNA (1)...(19): siRNA sense strand
gcauuaggccccucuguga

SEQ ID NO: 2099522 - RNA, 19 nt, Homo sapiens
  misc_RNA (1)...(19): siRNA sense strand
gggauccaugguuuccuua

SEQ ID NO: 2099523 - RNA, 19 nt, Homo sapiens
  misc_RNA (1)...(19): siRNA sense strand
ugggauccaugguuuccuu

SEQ ID NO: 2099524 - RNA, 19 nt, Homo sapiens
  misc_RNA (1)...(19): siRNA sense strand
caugguuuccuuacuacaa

SEQ ID NO: 2099525 - RNA, 19 nt, Homo sapiens
  misc_RNA (1)...(19): siRNA sense strand
gauguggccacccuguuuc

SEQ ID NO: 2099526 - RNA, 19 nt, Homo sapiens
  misc_RNA (1)...(19): siRNA sense strand
ggccucguauuacauaaaa

SEQ ID NO: 2099527 - RNA, 19 nt, Homo sapiens
  misc_RNA (1)...(19): siRNA sense strand
gaugcugggauccaugguu

SEQ ID NO: 2099528 - RNA, 19 nt, Homo sapiens
  misc_RNA (1)...(19): siRNA sense strand
aaggcaacaucaucauuac

SEQ ID NO: 2099529 - RNA, 19 nt, Homo sapiens
  misc_RNA (1)...(19): siRNA sense strand
uuucggagguggcagcuuu

SEQ ID NO: 2099530 - RNA, 19 nt, Homo sapiens
  misc_RNA (1)...(19): siRNA sense strand
ggccuucucucuggaaaug

SEQ ID NO: 2099531 - RNA, 19 nt, Homo sapiens
  misc_RNA (1)...(19): siRNA sense strand
gaguuauggaggcaucuuu

SEQ ID NO: 2099532 - RNA, 19 nt, Homo sapiens
  misc_RNA (1)...(19): siRNA sense strand
cagcuuuggugggaguuau

SEQ ID NO: 2099533 - RNA, 19 nt, Homo sapiens
  misc_RNA (1)...(19): siRNA sense strand
ccuucucucuggaaaugaa

SEQ ID NO: 2099534 - RNA, 19 nt, Homo sapiens
  misc_RNA (1)...(19): siRNA sense strand
gcagcuuuggugggaguua

SEQ ID NO: 2099535 - RNA, 19 nt, Homo sapiens
  misc_RNA (1)...(19): siRNA sense strand
gcuguggccuagagaacug

SEQ ID NO: 2099536 - RNA, 19 nt, Homo sapiens
  misc_RNA (1)...(19): siRNA sense strand
gccagucucuaugcugcua

SEQ ID NO: 2099537 - RNA, 19 nt, Homo sapiens
  misc_RNA (1)...(19): siRNA sense strand
cauuguggccagucucuau

SEQ ID NO: 2099538 - RNA, 19 nt, Homo sapiens
  misc_RNA (1)...(19): siRNA sense strand
gcuucauucucuucacuua

SEQ ID NO: 2099539 - RNA, 19 nt, Homo sapiens
  misc_RNA (1)...(19): siRNA sense strand
gagcuucauucucuucacu

SEQ ID NO: 2099540 - RNA, 19 nt, Homo sapiens
  misc_RNA (1)...(19): siRNA sense strand
aaagucaagagcuucauuc

SEQ ID NO: 2099541 - RNA, 19 nt, Homo sapiens
  misc_RNA (1)...(19): siRNA sense strand
gcaagaagcuuaacgauua

SEQ ID NO: 2099542 - RNA, 19 nt, Homo sapiens
  misc_RNA (1)...(19): siRNA sense strand
gaaggcugguuguauuaua

SEQ ID NO: 2099543 - RNA, 19 nt, Homo sapiens
  misc_RNA (1)...(19): siRNA sense strand
gaugcgaccuucagcgaua

SEQ ID NO: 2099544 - RNA, 19 nt, Homo sapiens
  misc_RNA (1)...(19): siRNA sense strand
ucaagaaugugaaggaaga

SEQ ID NO: 2099545 - RNA, 19 nt, Homo sapiens
  misc_RNA (1)...(19): siRNA sense strand
ugacugaccucaacuucaa

SEQ ID NO: 2099546 - RNA, 19 nt, Homo sapiens
  misc_RNA (1)...(19): siRNA sense strand
gcaucaacaucaucaagaa

SEQ ID NO: 2099547 - RNA, 19 nt, Homo sapiens
  misc_RNA (1)...(19): siRNA sense strand
gagaaggcugguuguauua

SEQ ID NO: 2099548 - RNA, 19 nt, Homo sapiens
  misc_RNA (1)...(19): siRNA sense strand
agagaaggcugguuguauu

SEQ ID NO: 2099549 - RNA, 19 nt, Homo sapiens
  misc_RNA (1)...(19): siRNA sense strand
cgaggacgcugcugcugua

SEQ ID NO: 2099550 - RNA, 19 nt, Homo sapiens
  misc_RNA (1)...(19): siRNA sense strand
ggacgcugcugcuguacaa

SEQ ID NO: 2099551 - RNA, 19 nt, Homo sapiens
  misc_RNA (1)...(19): siRNA sense strand
gaaccuggcccuggucuuu

SEQ ID NO: 2099552 - RNA, 19 nt, Homo sapiens
  misc_RNA (1)...(19): siRNA sense strand
gaccaucgcugaccacucu

SEQ ID NO: 2099553 - RNA, 19 nt, Homo sapiens
  misc_RNA (1)...(19): siRNA sense strand
gaccaccgcugacuucugu

SEQ ID NO: 2099554 - RNA, 19 nt, Homo sapiens
  misc_RNA (1)...(19): siRNA sense strand
ccaggacacuacuaugaaa

SEQ ID NO: 2099555 - RNA, 19 nt, Homo sapiens
  misc_RNA (1)...(19): siRNA sense strand
gaagacggcccugcccaua

SEQ ID NO: 2099556 - RNA, 19 nt, Homo sapiens
  misc_RNA (1)...(19): siRNA sense strand
caagaagcuuaacgauuau

SEQ ID NO: 2099557 - RNA, 19 nt, Homo sapiens
  misc_RNA (1)...(19): siRNA sense strand
ggcaagaccucaaugugau

SEQ ID NO: 2099558 - RNA, 19 nt, Homo sapiens
  misc_RNA (1)...(19): siRNA sense strand
gagagaaggcugguuguau

SEQ ID NO: 2099559 - RNA, 19 nt, Homo sapiens
  misc_RNA (1)...(19): siRNA sense strand
ucgcucagaugacuacuug

SEQ ID NO: 2099560 - RNA, 19 nt, Homo sapiens
  misc_RNA (1)...(19): siRNA sense strand
ggagagaaggcugguugua

SEQ ID NO: 2099561 - RNA, 19 nt, Homo sapiens
  misc_RNA (1)...(19): siRNA sense strand
gagaccggcugguaaaggu

SEQ ID NO: 2099562 - RNA, 19 nt, Homo sapiens
  misc_RNA (1)...(19): siRNA sense strand
aaggcugguuguauuauaa

SEQ ID NO: 2099563 - RNA, 19 nt, Homo sapiens
  misc_RNA (1)...(19): siRNA sense strand
caaauacaacgacuucauc

SEQ ID NO: 2099564 - RNA, 19 nt, Homo sapiens
  misc_RNA (1)...(19): siRNA sense strand
ugacaaauacaacgacuuc

SEQ ID NO: 2099565 - RNA, 19 nt, Homo sapiens
  misc_RNA (1)...(19): siRNA sense strand
ucaaguccuucuuccgaaa

SEQ ID NO: 2099566 - RNA, 19 nt, Homo sapiens
  misc_RNA (1)...(19): siRNA sense strand
acagaugaaccuuggauuu

SEQ ID NO: 2099567 - RNA, 19 nt, Homo sapiens
  misc_RNA (1)...(19): siRNA sense strand
cagaugaaccuuggauuug

SEQ ID NO: 2099568 - RNA, 19 nt, Homo sapiens
  misc_RNA (1)...(19): siRNA sense strand
ccgcugacuucugugaaua

SEQ ID NO: 2099569 - RNA, 19 nt, Homo sapiens
  misc_RNA (1)...(19): siRNA sense strand
auaagcagauucucaccaa

SEQ ID NO: 2099570 - RNA, 19 nt, Homo sapiens
  misc_RNA (1)...(19): siRNA sense strand
gaaagggaacgagccguau

SEQ ID NO: 2099571 - RNA, 19 nt, Homo sapiens
  misc_RNA (1)...(19): siRNA sense strand
ucacugaugacaaauacaa

SEQ ID NO: 2099572 - RNA, 19 nt, Homo sapiens
  misc_RNA (1)...(19): siRNA sense strand
cagcaggccuugucacacu

SEQ ID NO: 2099573 - RNA, 19 nt, Homo sapiens
  misc_RNA (1)...(19): siRNA sense strand
gaaagcgucauugggaaga

SEQ ID NO: 2099574 - RNA, 19 nt, Homo sapiens
  misc_RNA (1)...(19): siRNA sense strand
uggcaagaccucaauguga

SEQ ID NO: 2099575 - RNA, 19 nt, Homo sapiens
  misc_RNA (1)...(19): siRNA sense strand
ucagagcgauccgggagaa

SEQ ID NO: 2099576 - RNA, 19 nt, Homo sapiens
  misc_RNA (1)...(19): siRNA sense strand
gagcuacagcccaucauuc

SEQ ID NO: 2099577 - RNA, 19 nt, Homo sapiens
  misc_RNA (1)...(19): siRNA sense strand
ggagcuacagcccaucauu

SEQ ID NO: 2099578 - RNA, 19 nt, Homo sapiens
  misc_RNA (1)...(19): siRNA sense strand
gaugaaccuuggauuuggu

SEQ ID NO: 2099579 - RNA, 19 nt, Homo sapiens
  misc_RNA (1)...(19): siRNA sense strand
ccauagcucugggcccaaa

SEQ ID NO: 2099580 - RNA, 19 nt, Homo sapiens
  misc_RNA (1)...(19): siRNA sense strand
acuaugaaacgcucaaauu

SEQ ID NO: 2099581 - RNA, 19 nt, Homo sapiens
  misc_RNA (1)...(19): siRNA sense strand
ggacggcuuuggcuucacu

SEQ ID NO: 2099582 - RNA, 19 nt, Homo sapiens
  misc_RNA (1)...(19): siRNA sense strand
gaggacaacaugacagaca

SEQ ID NO: 2099583 - RNA, 19 nt, Homo sapiens
  misc_RNA (1)...(19): siRNA sense strand
gaagaggacaagggagaga

SEQ ID NO: 2099584 - RNA, 19 nt, Homo sapiens
  misc_RNA (1)...(19): siRNA sense strand
ugacuucugugaauaucuc

SEQ ID NO: 2099585 - RNA, 19 nt, Homo sapiens
  misc_RNA (1)...(19): siRNA sense strand
ggacacgcgcuccauugug

SEQ ID NO: 2099586 - RNA, 19 nt, Homo sapiens
  misc_RNA (1)...(19): siRNA sense strand
caggagaccggcugguaaa

SEQ ID NO: 2099587 - RNA, 19 nt, Homo sapiens
  misc_RNA (1)...(19): siRNA sense strand
cuaugaaacgcucaaauuc

SEQ ID NO: 2099588 - RNA, 19 nt, Homo sapiens
  misc_RNA (1)...(19): siRNA sense strand
caucaacaucaucaagaaa

SEQ ID NO: 2099589 - RNA, 19 nt, Homo sapiens
  misc_RNA (1)...(19): siRNA sense strand
gaaggaggaagagaaugga

SEQ ID NO: 2099590 - RNA, 19 nt, Homo sapiens
  misc_RNA (1)...(19): siRNA sense strand
ugucaagaaugugaaggaa

SEQ ID NO: 2099591 - RNA, 19 nt, Homo sapiens
  misc_RNA (1)...(19): siRNA sense strand
caagaggaggcacguguuc

SEQ ID NO: 2099592 - RNA, 19 nt, Homo sapiens
  misc_RNA (1)...(19): siRNA sense strand
caucgaggccaaccgcauu

SEQ ID NO: 2099593 - RNA, 19 nt, Homo sapiens
  misc_RNA (1)...(19): siRNA sense strand
ccaccucccaggaugcuuu

SEQ ID NO: 2099594 - RNA, 19 nt, Homo sapiens
  misc_RNA (1)...(19): siRNA sense strand
ggcaucaacaucaucaaga

SEQ ID NO: 2099595 - RNA, 19 nt, Homo sapiens
  misc_RNA (1)...(19): siRNA sense strand
cugaucagcaagaagcuua

SEQ ID NO: 2099596 - RNA, 19 nt, Homo sapiens
  misc_RNA (1)...(19): siRNA sense strand
gggcaccucugaagaugcu

SEQ ID NO: 2099597 - RNA, 19 nt, Homo sapiens
  misc_RNA (1)...(19): siRNA sense strand
acaggagaccggcugguaa

SEQ ID NO: 2099598 - RNA, 19 nt, Homo sapiens
  misc_RNA (1)...(19): siRNA sense strand
ggacgucugaggacaacau

SEQ ID NO: 2099599 - RNA, 19 nt, Homo sapiens
  misc_RNA (1)...(19): siRNA sense strand
gaaccagcgcguccccuua

SEQ ID NO: 2099600 - RNA, 19 nt, Homo sapiens
  misc_RNA (1)...(19): siRNA sense strand
cacacuggcugucaaacca

SEQ ID NO: 2099601 - RNA, 19 nt, Homo sapiens
  misc_RNA (1)...(19): siRNA sense strand
caggacggcuuuggcuuca

SEQ ID NO: 2099602 - RNA, 19 nt, Homo sapiens
  misc_RNA (1)...(19): siRNA sense strand
accaagcucugaucagcaa

SEQ ID NO: 2099603 - RNA, 19 nt, Homo sapiens
  misc_RNA (1)...(19): siRNA sense strand
gcuccugccucguggacau

SEQ ID NO: 2099604 - RNA, 19 nt, Homo sapiens
  misc_RNA (1)...(19): siRNA sense strand
ucagcgauaucaggagaga

SEQ ID NO: 2099605 - RNA, 19 nt, Homo sapiens
  misc_RNA (1)...(19): siRNA sense strand
gaugcugacgcuccuucua

SEQ ID NO: 2099606 - RNA, 19 nt, Homo sapiens
  misc_RNA (1)...(19): siRNA sense strand
guaguucagccaaguccaa

SEQ ID NO: 2099607 - RNA, 19 nt, Homo sapiens
  misc_RNA (1)...(19): siRNA sense strand
gcagggagcaaggaugaca

SEQ ID NO: 2099608 - RNA, 19 nt, Homo sapiens
  misc_RNA (1)...(19): siRNA sense strand
ccgcagggagcaaggauga

SEQ ID NO: 2099609 - RNA, 19 nt, Homo sapiens
  misc_RNA (1)...(19): siRNA sense strand
aagcagauucucaccaaga

SEQ ID NO: 2099610 - RNA, 19 nt, Homo sapiens
  misc_RNA (1)...(19): siRNA sense strand
ugaaggaggaagagaaugg

SEQ ID NO: 2099611 - RNA, 19 nt, Homo sapiens
  misc_RNA (1)...(19): siRNA sense strand
aaagggaacgagccguauu

SEQ ID NO: 2099612 - RNA, 19 nt, Homo sapiens
  misc_RNA (1)...(19): siRNA sense strand
ucccaggacacuacuauga

SEQ ID NO: 2099613 - RNA, 19 nt, Homo sapiens
  misc_RNA (1)...(19): siRNA sense strand
gcaagaccucaaugugauc

SEQ ID NO: 2099614 - RNA, 19 nt, Homo sapiens
  misc_RNA (1)...(19): siRNA sense strand
uaucgcaaagugagccaua

SEQ ID NO: 2099615 - RNA, 19 nt, Homo sapiens
  misc_RNA (1)...(19): siRNA sense strand
gcugaccaccgcugacuuc

SEQ ID NO: 2099616 - RNA, 19 nt, Homo sapiens
  misc_RNA (1)...(19): siRNA sense strand
agaugaaccuuggauuugg

SEQ ID NO: 2099617 - RNA, 19 nt, Homo sapiens
  misc_RNA (1)...(19): siRNA sense strand
gaggacgucugaggacaac

SEQ ID NO: 2099618 - RNA, 19 nt, Homo sapiens
  misc_RNA (1)...(19): siRNA sense strand
ccaagaggaggcacguguu

SEQ ID NO: 2099619 - RNA, 19 nt, Homo sapiens
  misc_RNA (1)...(19): siRNA sense strand
uggaugaccucggguacau

SEQ ID NO: 2099620 - RNA, 19 nt, Homo sapiens
  misc_RNA (1)...(19): siRNA sense strand
aacaaggacuccggacuca

SEQ ID NO: 2099621 - RNA, 19 nt, Homo sapiens
  misc_RNA (1)...(19): siRNA sense strand
acaaauacaacgacuucau

SEQ ID NO: 2099622 - RNA, 19 nt, Homo sapiens
  misc_RNA (1)...(19): siRNA sense strand
cacaggagaccggcuggua

SEQ ID NO: 2099623 - RNA, 19 nt, Homo sapiens
  misc_RNA (1)...(19): siRNA sense strand
gacagaugaaccuuggauu

SEQ ID NO: 2099624 - RNA, 19 nt, Homo sapiens
  misc_RNA (1)...(19): siRNA sense strand
gcagugcccaacauugagu

SEQ ID NO: 2099625 - RNA, 19 nt, Homo sapiens
  misc_RNA (1)...(19): siRNA sense strand
gcugacuucugugaauauc

SEQ ID NO: 2099626 - RNA, 19 nt, Homo sapiens
  misc_RNA (1)...(19): siRNA sense strand
gcuccaaguccugcgauga

SEQ ID NO: 2099627 - RNA, 19 nt, Homo sapiens
  misc_RNA (1)...(19): siRNA sense strand
ucgcugaccacucugagaa

SEQ ID NO: 2099628 - RNA, 19 nt, Homo sapiens
  misc_RNA (1)...(19): siRNA sense strand
ggaguccacaggcauuuac

SEQ ID NO: 2099629 - RNA, 19 nt, Homo sapiens
  misc_RNA (1)...(19): siRNA sense strand
gggcaucaacaucaucaag

SEQ ID NO: 2099630 - RNA, 19 nt, Homo sapiens
  misc_RNA (1)...(19): siRNA sense strand
cucaaccucugaccucuca

SEQ ID NO: 2099631 - RNA, 19 nt, Homo sapiens
  misc_RNA (1)...(19): siRNA sense strand
augauggacucaacaccuu

SEQ ID NO: 2099632 - RNA, 19 nt, Homo sapiens
  misc_RNA (1)...(19): siRNA sense strand
ggucuccagugccaugaac

SEQ ID NO: 2099633 - RNA, 19 nt, Homo sapiens
  misc_RNA (1)...(19): siRNA sense strand
gggcgcacagugacaacaa

SEQ ID NO: 2099634 - RNA, 19 nt, Homo sapiens
  misc_RNA (1)...(19): siRNA sense strand
gauccagaauagugaugac

SEQ ID NO: 2099635 - RNA, 19 nt, Homo sapiens
  misc_RNA (1)...(19): siRNA sense strand
uuucacugaugacaaauac

SEQ ID NO: 2099636 - RNA, 19 nt, Homo sapiens
  misc_RNA (1)...(19): siRNA sense strand
ugucuaucaugcccaagga

SEQ ID NO: 2099637 - RNA, 19 nt, Homo sapiens
  misc_RNA (1)...(19): siRNA sense strand
agcaagaagcuuaacgauu

SEQ ID NO: 2099638 - RNA, 19 nt, Homo sapiens
  misc_RNA (1)...(19): siRNA sense strand
cagcaagaagcuuaacgau

SEQ ID NO: 2099639 - RNA, 19 nt, Homo sapiens
  misc_RNA (1)...(19): siRNA sense strand
ccaccgcugacuucuguga

SEQ ID NO: 2099640 - RNA, 19 nt, Homo sapiens
  misc_RNA (1)...(19): siRNA sense strand
gugcccaccuggacaacuc

SEQ ID NO: 2099641 - RNA, 19 nt, Homo sapiens
  misc_RNA (1)...(19): siRNA sense strand
gaacagcgccagugacuug

SEQ ID NO: 2099642 - RNA, 19 nt, Homo sapiens
  misc_RNA (1)...(19): siRNA sense strand
ucaaugaccuggagaaauc

SEQ ID NO: 2099643 - RNA, 19 nt, Homo sapiens
  misc_RNA (1)...(19): siRNA sense strand
gaaccucuaucccuguauu

SEQ ID NO: 2099644 - RNA, 19 nt, Homo sapiens
  misc_RNA (1)...(19): siRNA sense strand
ccaacaaucuccugaguca

SEQ ID NO: 2099645 - RNA, 19 nt, Homo sapiens
  misc_RNA (1)...(19): siRNA sense strand
gagacugacuucaacaaga

SEQ ID NO: 2099646 - RNA, 19 nt, Homo sapiens
  misc_RNA (1)...(19): siRNA sense strand
gcccugagcuggaggagaa

SEQ ID NO: 2099647 - RNA, 19 nt, Homo sapiens
  misc_RNA (1)...(19): siRNA sense strand
ggacgaggaugacgaggau

SEQ ID NO: 2099648 - RNA, 19 nt, Homo sapiens
  misc_RNA (1)...(19): siRNA sense strand
gcagcaggcuccucgaaug

SEQ ID NO: 2099649 - RNA, 19 nt, Homo sapiens
  misc_RNA (1)...(19): siRNA sense strand
gcaguauuaucaagaucua

SEQ ID NO: 2099650 - RNA, 19 nt, Homo sapiens
  misc_RNA (1)...(19): siRNA sense strand
gagagaagcucagugucuu

SEQ ID NO: 2099651 - RNA, 19 nt, Homo sapiens
  misc_RNA (1)...(19): siRNA sense strand
ggacacuccuggcaagaga

SEQ ID NO: 2099652 - RNA, 19 nt, Homo sapiens
  misc_RNA (1)...(19): siRNA sense strand
ccacuaaaccaucuaaaga

SEQ ID NO: 2099653 - RNA, 19 nt, Homo sapiens
  misc_RNA (1)...(19): siRNA sense strand
agaaaucgguggagaagau

SEQ ID NO: 2099654 - RNA, 19 nt, Homo sapiens
  misc_RNA (1)...(19): siRNA sense strand
gcacagagaagcccuccaa

SEQ ID NO: 2099655 - RNA, 19 nt, Homo sapiens
  misc_RNA (1)...(19): siRNA sense strand
gagaugagcgggucgaaug

SEQ ID NO: 2099656 - RNA, 19 nt, Homo sapiens
  misc_RNA (1)...(19): siRNA sense strand
gcugaaggagccucucuua

SEQ ID NO: 2099657 - RNA, 19 nt, Homo sapiens
  misc_RNA (1)...(19): siRNA sense strand
caaggacucuggacaugau

SEQ ID NO: 2099658 - RNA, 19 nt, Homo sapiens
  misc_RNA (1)...(19): siRNA sense strand
acaaagcugugucuguuga

SEQ ID NO: 2099659 - RNA, 19 nt, Homo sapiens
  misc_RNA (1)...(19): siRNA sense strand
gcaagcagagggccgagua

SEQ ID NO: 2099660 - RNA, 19 nt, Homo sapiens
  misc_RNA (1)...(19): siRNA sense strand
gagcguggacuucgaaaug

SEQ ID NO: 2099661 - RNA, 19 nt, Homo sapiens
  misc_RNA (1)...(19): siRNA sense strand
gaacggcugcgcuaucuca

SEQ ID NO: 2099662 - RNA, 19 nt, Homo sapiens
  misc_RNA (1)...(19): siRNA sense strand
ucgcagagcuagagguguu

SEQ ID NO: 2099663 - RNA, 19 nt, Homo sapiens
  misc_RNA (1)...(19): siRNA sense strand
cagaaccucuaucccugua

SEQ ID NO: 2099664 - RNA, 19 nt, Homo sapiens
  misc_RNA (1)...(19): siRNA sense strand
gcagagggccgaguacaug

SEQ ID NO: 2099665 - RNA, 19 nt, Homo sapiens
  misc_RNA (1)...(19): siRNA sense strand
ggauggaggagccagagua

SEQ ID NO: 2099666 - RNA, 19 nt, Homo sapiens
  misc_RNA (1)...(19): siRNA sense strand
caagagaagcguggacaaa

SEQ ID NO: 2099667 - RNA, 19 nt, Homo sapiens
  misc_RNA (1)...(19): siRNA sense strand
ugacgaggaucgcaucauc

SEQ ID NO: 2099668 - RNA, 19 nt, Homo sapiens
  misc_RNA (1)...(19): siRNA sense strand
gcacucaucgcgcacaugu

SEQ ID NO: 2099669 - RNA, 19 nt, Homo sapiens
  misc_RNA (1)...(19): siRNA sense strand
ggacucggccuucaucaag

SEQ ID NO: 2099670 - RNA, 19 nt, Homo sapiens
  misc_RNA (1)...(19): siRNA sense strand
gcauggugcuggugaaagg

SEQ ID NO: 2099671 - RNA, 19 nt, Homo sapiens
  misc_RNA (1)...(19): siRNA sense strand
augcuuaagucgcccaaua

SEQ ID NO: 2099672 - RNA, 19 nt, Homo sapiens
  misc_RNA (1)...(19): siRNA sense strand
cagagaagcccuccaaguc

SEQ ID NO: 2099673 - RNA, 19 nt, Homo sapiens
  misc_RNA (1)...(19): siRNA sense strand
ucaaccggcugcuggaaga

SEQ ID NO: 2099674 - RNA, 19 nt, Homo sapiens
  misc_RNA (1)...(19): siRNA sense strand
agagagacgugucccacaa

SEQ ID NO: 2099675 - RNA, 19 nt, Homo sapiens
  misc_RNA (1)...(19): siRNA sense strand
acuaaaccaucuaaagaga

SEQ ID NO: 2099676 - RNA, 19 nt, Homo sapiens
  misc_RNA (1)...(19): siRNA sense strand
ggaccgcaguauuaucaag

SEQ ID NO: 2099677 - RNA, 19 nt, Homo sapiens
  misc_RNA (1)...(19): siRNA sense strand
caagcgugaugccuucaug

SEQ ID NO: 2099678 - RNA, 19 nt, Homo sapiens
  misc_RNA (1)...(19): siRNA sense strand
gaagccacccugagcaaca

SEQ ID NO: 2099679 - RNA, 19 nt, Homo sapiens
  misc_RNA (1)...(19): siRNA sense strand
ggagaaaucgguggagaag

SEQ ID NO: 2099680 - RNA, 19 nt, Homo sapiens
  misc_RNA (1)...(19): siRNA sense strand
ggccugaccaccacacgua

SEQ ID NO: 2099681 - RNA, 19 nt, Homo sapiens
  misc_RNA (1)...(19): siRNA sense strand
caacgacgaggagcuuauu

SEQ ID NO: 2099682 - RNA, 19 nt, Homo sapiens
  misc_RNA (1)...(19): siRNA sense strand
agacugacuucaacaagag

SEQ ID NO: 2099683 - RNA, 19 nt, Homo sapiens
  misc_RNA (1)...(19): siRNA sense strand
gcagauugccagccucaca

SEQ ID NO: 2099684 - RNA, 19 nt, Homo sapiens
  misc_RNA (1)...(19): siRNA sense strand
ccaggcugcugccaacuca

SEQ ID NO: 2099685 - RNA, 19 nt, Homo sapiens
  misc_RNA (1)...(19): siRNA sense strand
caacaagagcguggacuuc

SEQ ID NO: 2099686 - RNA, 19 nt, Homo sapiens
  misc_RNA (1)...(19): siRNA sense strand
cggcagagacugacuucaa

SEQ ID NO: 2099687 - RNA, 19 nt, Homo sapiens
  misc_RNA (1)...(19): siRNA sense strand
caagagcguggacuucgaa

SEQ ID NO: 2099688 - RNA, 19 nt, Homo sapiens
  misc_RNA (1)...(19): siRNA sense strand
cuagagguguuugagagaa

SEQ ID NO: 2099689 - RNA, 19 nt, Homo sapiens
  misc_RNA (1)...(19): siRNA sense strand
gagcuagagguguuugaga

SEQ ID NO: 2099690 - RNA, 19 nt, Homo sapiens
  misc_RNA (1)...(19): siRNA sense strand
gcaagagaagcguggacaa

SEQ ID NO: 2099691 - RNA, 19 nt, Homo sapiens
  misc_RNA (1)...(19): siRNA sense strand
auccaggaccgcaguauua

SEQ ID NO: 2099692 - RNA, 19 nt, Homo sapiens
  misc_RNA (1)...(19): siRNA sense strand
ggcagagacugacuucaac

SEQ ID NO: 2099693 - RNA, 19 nt, Homo sapiens
  misc_RNA (1)...(19): siRNA sense strand
uuacccagcagcucaauga

SEQ ID NO: 2099694 - RNA, 19 nt, Homo sapiens
  misc_RNA (1)...(19): siRNA sense strand
caggaccgcaguauuauca

SEQ ID NO: 2099695 - RNA, 19 nt, Homo sapiens
  misc_RNA (1)...(19): siRNA sense strand
ccgagucgcuggagaccau

SEQ ID NO: 2099696 - RNA, 19 nt, Homo sapiens
  misc_RNA (1)...(19): siRNA sense strand
gacucggccuucaucaaga

SEQ ID NO: 2099697 - RNA, 19 nt, Homo sapiens
  misc_RNA (1)...(19): siRNA sense strand
gcucaaugaccuggagaaa

SEQ ID NO: 2099698 - RNA, 19 nt, Homo sapiens
  misc_RNA (1)...(19): siRNA sense strand
acgaggaccuggcgagcaa

SEQ ID NO: 2099699 - RNA, 19 nt, Homo sapiens
  misc_RNA (1)...(19): siRNA sense strand
ccgccauccucaucaaaga

SEQ ID NO: 2099700 - RNA, 19 nt, Homo sapiens
  misc_RNA (1)...(19): siRNA sense strand
gggcuccucguccgucuuu

SEQ ID NO: 2099701 - RNA, 19 nt, Homo sapiens
  misc_RNA (1)...(19): siRNA sense strand
gaaggugacggcagagacu

SEQ ID NO: 2099702 - RNA, 19 nt, Homo sapiens
  misc_RNA (1)...(19): siRNA sense strand
gcaguguaccacccaugaa

SEQ ID NO: 2099703 - RNA, 19 nt, Homo sapiens
  misc_RNA (1)...(19): siRNA sense strand
augaaccgcuuccgacaga

SEQ ID NO: 2099704 - RNA, 19 nt, Homo sapiens
  misc_RNA (1)...(19): siRNA sense strand
aggaucaucuugacagagu

SEQ ID NO: 2099705 - RNA, 19 nt, Homo sapiens
  misc_RNA (1)...(19): siRNA sense strand
gaggaacggcugcgcuauc

SEQ ID NO: 2099706 - RNA, 19 nt, Homo sapiens
  misc_RNA (1)...(19): siRNA sense strand
gcagagacugacuucaaca

SEQ ID NO: 2099707 - RNA, 19 nt, Homo sapiens
  misc_RNA (1)...(19): siRNA sense strand
gcuagagguguuugagaga

SEQ ID NO: 2099708 - RNA, 19 nt, Homo sapiens
  misc_RNA (1)...(19): siRNA sense strand
gcagcucacgccacacuca

SEQ ID NO: 2099709 - RNA, 19 nt, Homo sapiens
  misc_RNA (1)...(19): siRNA sense strand
gaccgcaguauuaucaaga

SEQ ID NO: 2099710 - RNA, 19 nt, Homo sapiens
  misc_RNA (1)...(19): siRNA sense strand
acaagagcguggacuucga

SEQ ID NO: 2099711 - RNA, 19 nt, Homo sapiens
  misc_RNA (1)...(19): siRNA sense strand
ggcaguguaccacccauga

SEQ ID NO: 2099712 - RNA, 19 nt, Homo sapiens
  misc_RNA (1)...(19): siRNA sense strand
caauaccgccauccucauc

SEQ ID NO: 2099713 - RNA, 19 nt, Homo sapiens
  misc_RNA (1)...(19): siRNA sense strand
ucaaggacucuggacauga

SEQ ID NO: 2099714 - RNA, 19 nt, Homo sapiens
  misc_RNA (1)...(19): siRNA sense strand
ggccagacuugaggaacug

SEQ ID NO: 2099715 - RNA, 19 nt, Homo sapiens
  misc_RNA (1)...(19): siRNA sense strand
ucaacaagagcguggacuu

SEQ ID NO: 2099716 - RNA, 19 nt, Homo sapiens
  misc_RNA (1)...(19): siRNA sense strand
uggcagaccaggcggcaaa

SEQ ID NO: 2099717 - RNA, 19 nt, Homo sapiens
  misc_RNA (1)...(19): siRNA sense strand
cccagcagauggacagcuu

SEQ ID NO: 2099718 - RNA, 19 nt, Homo sapiens
  misc_RNA (1)...(19): siRNA sense strand
ugaaggagccucucuuacc

SEQ ID NO: 2099719 - RNA, 19 nt, Homo sapiens
  misc_RNA (1)...(19): siRNA sense strand
agagaagcguggacaaagc

SEQ ID NO: 2099720 - RNA, 19 nt, Homo sapiens
  misc_RNA (1)...(19): siRNA sense strand
auucuuccaucuccuucua

SEQ ID NO: 2099721 - RNA, 19 nt, Homo sapiens
  misc_RNA (1)...(19): siRNA sense strand
gccacuaaaccaucuaaag

SEQ ID NO: 2099722 - RNA, 19 nt, Homo sapiens
  misc_RNA (1)...(19): siRNA sense strand
gaucaucuugacagagugu

SEQ ID NO: 2099723 - RNA, 19 nt, Homo sapiens
  misc_RNA (1)...(19): siRNA sense strand
uggaccaccugaagagcaa

SEQ ID NO: 2099724 - RNA, 19 nt, Homo sapiens
  misc_RNA (1)...(19): siRNA sense strand
acucaucgcgcacauguuc

SEQ ID NO: 2099725 - RNA, 19 nt, Homo sapiens
  misc_RNA (1)...(19): siRNA sense strand
acucggccuucaucaagaa

SEQ ID NO: 2099726 - RNA, 19 nt, Homo sapiens
  misc_RNA (1)...(19): siRNA sense strand
guacagugccaaggacauc

SEQ ID NO: 2099727 - RNA, 19 nt, Homo sapiens
  misc_RNA (1)...(19): siRNA sense strand
cauccaggaccgcaguauu

SEQ ID NO: 2099728 - RNA, 19 nt, Homo sapiens
  misc_RNA (1)...(19): siRNA sense strand
caggaugggacuccagaga

SEQ ID NO: 2099729 - RNA, 19 nt, Homo sapiens
  misc_RNA (1)...(19): siRNA sense strand
cagaacagcgccagugacu

SEQ ID NO: 2099730 - RNA, 19 nt, Homo sapiens
  misc_RNA (1)...(19): siRNA sense strand
gaaaucgguggagaagauc

SEQ ID NO: 2099731 - RNA, 19 nt, Homo sapiens
  misc_RNA (1)...(19): siRNA sense strand
gcacauguucccgcagaag

SEQ ID NO: 2099732 - RNA, 19 nt, Homo sapiens
  misc_RNA (1)...(19): siRNA sense strand
acagagaagcccuccaagu

SEQ ID NO: 2099733 - RNA, 19 nt, Homo sapiens
  misc_RNA (1)...(19): siRNA sense strand
cagagacugacuucaacaa

SEQ ID NO: 2099734 - RNA, 19 nt, Homo sapiens
  misc_RNA (1)...(19): siRNA sense strand
gagaagcguggacaaagcu

SEQ ID NO: 2099735 - RNA, 19 nt, Homo sapiens
  misc_RNA (1)...(19): siRNA sense strand
ccucuacugcugacaccua

SEQ ID NO: 2099736 - RNA, 19 nt, Homo sapiens
  misc_RNA (1)...(19): siRNA sense strand
uagagguguuugagagaag

SEQ ID NO: 2099737 - RNA, 19 nt, Homo sapiens
  misc_RNA (1)...(19): siRNA sense strand
gaagauaccacuaaucaua

SEQ ID NO: 2099738 - RNA, 19 nt, Homo sapiens
  misc_RNA (1)...(19): siRNA sense strand
gaaaggugcuugcaaugga

SEQ ID NO: 2099739 - RNA, 19 nt, Homo sapiens
  misc_RNA (1)...(19): siRNA sense strand
ggcaagagaucgaauagaa

SEQ ID NO: 2099740 - RNA, 19 nt, Homo sapiens
  misc_RNA (1)...(19): siRNA sense strand
gaaaagacguuaacaggaa

SEQ ID NO: 2099741 - RNA, 19 nt, Homo sapiens
  misc_RNA (1)...(19): siRNA sense strand
ucauagagccaucauauaa

SEQ ID NO: 2099742 - RNA, 19 nt, Homo sapiens
  misc_RNA (1)...(19): siRNA sense strand
gaacgucuacacaguaauu

SEQ ID NO: 2099743 - RNA, 19 nt, Homo sapiens
  misc_RNA (1)...(19): siRNA sense strand
caauggaucuguugacugu

SEQ ID NO: 2099744 - RNA, 19 nt, Homo sapiens
  misc_RNA (1)...(19): siRNA sense strand
acacauguacucuuucuua

SEQ ID NO: 2099745 - RNA, 19 nt, Homo sapiens
  misc_RNA (1)...(19): siRNA sense strand
ggaccacaguuugcaagua

SEQ ID NO: 2099746 - RNA, 19 nt, Homo sapiens
  misc_RNA (1)...(19): siRNA sense strand
ggaaccugauuauucauau

SEQ ID NO: 2099747 - RNA, 19 nt, Homo sapiens
  misc_RNA (1)...(19): siRNA sense strand
guccuuaucuguauggauu

SEQ ID NO: 2099748 - RNA, 19 nt, Homo sapiens
  misc_RNA (1)...(19): siRNA sense strand
gauaugacuuuauggucuu

SEQ ID NO: 2099749 - RNA, 19 nt, Homo sapiens
  misc_RNA (1)...(19): siRNA sense strand
gaccacaguuugcaaguag

SEQ ID NO: 2099750 - RNA, 19 nt, Homo sapiens
  misc_RNA (1)...(19): siRNA sense strand
caagagaucgaauagaaga

SEQ ID NO: 2099751 - RNA, 19 nt, Homo sapiens
  misc_RNA (1)...(19): siRNA sense strand
gugaagauaccacuaauca

SEQ ID NO: 2099752 - RNA, 19 nt, Homo sapiens
  misc_RNA (1)...(19): siRNA sense strand
cccacaaacuucaaacaaa

SEQ ID NO: 2099753 - RNA, 19 nt, Homo sapiens
  misc_RNA (1)...(19): siRNA sense strand
gaaccugauuauucauauc

SEQ ID NO: 2099754 - RNA, 19 nt, Homo sapiens
  misc_RNA (1)...(19): siRNA sense strand
ccacaaacuucaaacaaaa

SEQ ID NO: 2099755 - RNA, 19 nt, Homo sapiens
  misc_RNA (1)...(19): siRNA sense strand
caaguaguacgucuggaua

SEQ ID NO: 2099756 - RNA, 19 nt, Homo sapiens
  misc_RNA (1)...(19): siRNA sense strand
guggaaaggugcuugcaau

SEQ ID NO: 2099757 - RNA, 19 nt, Homo sapiens
  misc_RNA (1)...(19): siRNA sense strand
gcuaaaucuugcccacaaa

SEQ ID NO: 2099758 - RNA, 19 nt, Homo sapiens
  misc_RNA (1)...(19): siRNA sense strand
agcagaaacucaagaagaa

SEQ ID NO: 2099759 - RNA, 19 nt, Homo sapiens
  misc_RNA (1)...(19): siRNA sense strand
uggauagucuaauuucuga

SEQ ID NO: 2099760 - RNA, 19 nt, Homo sapiens
  misc_RNA (1)...(19): siRNA sense strand
ggucuuguauagggagaua

SEQ ID NO: 2099761 - RNA, 19 nt, Homo sapiens
  misc_RNA (1)...(19): siRNA sense strand
ucagauggcuguacguuuu

SEQ ID NO: 2099762 - RNA, 19 nt, Homo sapiens
  misc_RNA (1)...(19): siRNA sense strand
uccagaacauggccucaua

SEQ ID NO: 2099763 - RNA, 19 nt, Homo sapiens
  misc_RNA (1)...(19): siRNA sense strand
gggaaccugauuauucaua

SEQ ID NO: 2099764 - RNA, 19 nt, Homo sapiens
  misc_RNA (1)...(19): siRNA sense strand
ucagcaauaugaagauuag

SEQ ID NO: 2099765 - RNA, 19 nt, Homo sapiens
  misc_RNA (1)...(19): siRNA sense strand
gacagcugauggugaaaga

SEQ ID NO: 2099766 - RNA, 19 nt, Homo sapiens
  misc_RNA (1)...(19): siRNA sense strand
guccaguccuuaucuguau

SEQ ID NO: 2099767 - RNA, 19 nt, Homo sapiens
  misc_RNA (1)...(19): siRNA sense strand
ucgggaaccugauuauuca

SEQ ID NO: 2099768 - RNA, 19 nt, Homo sapiens
  misc_RNA (1)...(19): siRNA sense strand
ugucuggacuuuacacaug

SEQ ID NO: 2099769 - RNA, 19 nt, Homo sapiens
  misc_RNA (1)...(19): siRNA sense strand
uaaagcagaaacucaagaa

SEQ ID NO: 2099770 - RNA, 19 nt, Homo sapiens
  misc_RNA (1)...(19): siRNA sense strand
cauagagccaucauauaaa

SEQ ID NO: 2099771 - RNA, 19 nt, Homo sapiens
  misc_RNA (1)...(19): siRNA sense strand
ucuguugacugugaagaua

SEQ ID NO: 2099772 - RNA, 19 nt, Homo sapiens
  misc_RNA (1)...(19): siRNA sense strand
caaaauaguccaguccuua

SEQ ID NO: 2099773 - RNA, 19 nt, Homo sapiens
  misc_RNA (1)...(19): siRNA sense strand
gcaaguaguacgucuggau

SEQ ID NO: 2099774 - RNA, 19 nt, Homo sapiens
  misc_RNA (1)...(19): siRNA sense strand
gcagaaacucaagaagaaa

SEQ ID NO: 2099775 - RNA, 19 nt, Homo sapiens
  misc_RNA (1)...(19): siRNA sense strand
gcuguugugugguuuguag

SEQ ID NO: 2099776 - RNA, 19 nt, Homo sapiens
  misc_RNA (1)...(19): siRNA sense strand
uaauugcgcuagcuguugu

SEQ ID NO: 2099777 - RNA, 19 nt, Homo sapiens
  misc_RNA (1)...(19): siRNA sense strand
gacguuaacaggaaauaau

SEQ ID NO: 2099778 - RNA, 19 nt, Homo sapiens
  misc_RNA (1)...(19): siRNA sense strand
gagaucgaauagaagacuu

SEQ ID NO: 2099779 - RNA, 19 nt, Homo sapiens
  misc_RNA (1)...(19): siRNA sense strand
ggaaaggugcuugcaaugg

SEQ ID NO: 2099780 - RNA, 19 nt, Homo sapiens
  misc_RNA (1)...(19): siRNA sense strand
ugucauagagccaucauau

SEQ ID NO: 2099781 - RNA, 19 nt, Homo sapiens
  misc_RNA (1)...(19): siRNA sense strand
cacauguacucuuucuuau

SEQ ID NO: 2099782 - RNA, 19 nt, Homo sapiens
  misc_RNA (1)...(19): siRNA sense strand
aagcagaaacucaagaaga

SEQ ID NO: 2099783 - RNA, 19 nt, Homo sapiens
  misc_RNA (1)...(19): siRNA sense strand
aaaugaacgucuacacagu

SEQ ID NO: 2099784 - RNA, 19 nt, Homo sapiens
  misc_RNA (1)...(19): siRNA sense strand
auagggagauacaaugaug

SEQ ID NO: 2099785 - RNA, 19 nt, Homo sapiens
  misc_RNA (1)...(19): siRNA sense strand
cuggacagcugauggugaa

SEQ ID NO: 2099786 - RNA, 19 nt, Homo sapiens
  misc_RNA (1)...(19): siRNA sense strand
gaccugcguuuccguccuu

SEQ ID NO: 2099787 - RNA, 19 nt, Homo sapiens
  misc_RNA (1)...(19): siRNA sense strand
gagccuuugucuggacuuu

SEQ ID NO: 2099788 - RNA, 19 nt, Homo sapiens
  misc_RNA (1)...(19): siRNA sense strand
cagcugauggugaaagauu

SEQ ID NO: 2099789 - RNA, 19 nt, Homo sapiens
  misc_RNA (1)...(19): siRNA sense strand
ccaggcaagagaucgaaua

SEQ ID NO: 2099790 - RNA, 19 nt, Homo sapiens
  misc_RNA (1)...(19): siRNA sense strand
gcaagagaucgaauagaag

SEQ ID NO: 2099791 - RNA, 19 nt, Homo sapiens
  misc_RNA (1)...(19): siRNA sense strand
gcguuuccguccuuaccua

SEQ ID NO: 2099792 - RNA, 19 nt, Homo sapiens
  misc_RNA (1)...(19): siRNA sense strand
ccacaguuugcaaguagua

SEQ ID NO: 2099793 - RNA, 19 nt, Homo sapiens
  misc_RNA (1)...(19): siRNA sense strand
uaagacuguuaaagcagaa

SEQ ID NO: 2099794 - RNA, 19 nt, Homo sapiens
  misc_RNA (1)...(19): siRNA sense strand
gcccacaaacuucaaacaa

SEQ ID NO: 2099795 - RNA, 19 nt, Homo sapiens
  misc_RNA (1)...(19): siRNA sense strand
gucauagagccaucauaua

SEQ ID NO: 2099796 - RNA, 19 nt, Homo sapiens
  misc_RNA (1)...(19): siRNA sense strand
guaauugcgcuagcuguug

SEQ ID NO: 2099797 - RNA, 19 nt, Homo sapiens
  misc_RNA (1)...(19): siRNA sense strand
ggauugggccuaaugaaaa

SEQ ID NO: 2099798 - RNA, 19 nt, Homo sapiens
  misc_RNA (1)...(19): siRNA sense strand
augaacgucuacacaguaa

SEQ ID NO: 2099799 - RNA, 19 nt, Homo sapiens
  misc_RNA (1)...(19): siRNA sense strand
guccuuaccuauggagcua

SEQ ID NO: 2099800 - RNA, 19 nt, Homo sapiens
  misc_RNA (1)...(19): siRNA sense strand
uggauugggccuaaugaaa

SEQ ID NO: 2099801 - RNA, 19 nt, Homo sapiens
  misc_RNA (1)...(19): siRNA sense strand
aaugaacgucuacacagua

SEQ ID NO: 2099802 - RNA, 19 nt, Homo sapiens
  misc_RNA (1)...(19): siRNA sense strand
ccuauggagcuaaaucuug

SEQ ID NO: 2099803 - RNA, 19 nt, Homo sapiens
  misc_RNA (1)...(19): siRNA sense strand
gcauuucaaguuaauccuu

SEQ ID NO: 2099804 - RNA, 19 nt, Homo sapiens
  misc_RNA (1)...(19): siRNA sense strand
gagccaagcauauauuuuc

SEQ ID NO: 2099805 - RNA, 19 nt, Homo sapiens
  misc_RNA (1)...(19): siRNA sense strand
uuagagugcugaagaaaau

SEQ ID NO: 2099806 - RNA, 19 nt, Homo sapiens
  misc_RNA (1)...(19): siRNA sense strand
aaaggugcuugcaauggau

SEQ ID NO: 2099807 - RNA, 19 nt, Homo sapiens
  misc_RNA (1)...(19): siRNA sense strand
gaaaaucuuggauagucua

SEQ ID NO: 2099808 - RNA, 19 nt, Homo sapiens
  misc_RNA (1)...(19): siRNA sense strand
uuucggagccaagcauaua

SEQ ID NO: 2099809 - RNA, 19 nt, Homo sapiens
  misc_RNA (1)...(19): siRNA sense strand
gccuuugucuggacuuuac

SEQ ID NO: 2099810 - RNA, 19 nt, Homo sapiens
  misc_RNA (1)...(19): siRNA sense strand
ccacuaaucauaauauccu

SEQ ID NO: 2099811 - RNA, 19 nt, Homo sapiens
  misc_RNA (1)...(19): siRNA sense strand
auggaucuguugacuguga

SEQ ID NO: 2099812 - RNA, 19 nt, Homo sapiens
  misc_RNA (1)...(19): siRNA sense strand
ggacagcugauggugaaag

SEQ ID NO: 2099813 - RNA, 19 nt, Homo sapiens
  misc_RNA (1)...(19): siRNA sense strand
gcuagcuguugugugguuu

SEQ ID NO: 2099814 - RNA, 19 nt, Homo sapiens
  misc_RNA (1)...(19): siRNA sense strand
augccauucuguugaaauu

SEQ ID NO: 2099815 - RNA, 19 nt, Homo sapiens
  misc_RNA (1)...(19): siRNA sense strand
ccuaucgggaaccugauua

SEQ ID NO: 2099816 - RNA, 19 nt, Homo sapiens
  misc_RNA (1)...(19): siRNA sense strand
agcuaaaucuugcccacaa

SEQ ID NO: 2099817 - RNA, 19 nt, Homo sapiens
  misc_RNA (1)...(19): siRNA sense strand
cggagccaagcauauauuu

SEQ ID NO: 2099818 - RNA, 19 nt, Homo sapiens
  misc_RNA (1)...(19): siRNA sense strand
aaaagacguuaacaggaaa

SEQ ID NO: 2099819 - RNA, 19 nt, Homo sapiens
  misc_RNA (1)...(19): siRNA sense strand
ccuuaccuauggagcuaaa

SEQ ID NO: 2099820 - RNA, 19 nt, Homo sapiens
  misc_RNA (1)...(19): siRNA sense strand
acuuauggauugggccuaa

SEQ ID NO: 2099821 - RNA, 19 nt, Homo sapiens
  misc_RNA (1)...(19): siRNA sense strand
gccauucuguugaaauucc

SEQ ID NO: 2099822 - RNA, 19 nt, Homo sapiens
  misc_RNA (1)...(19): siRNA sense strand
gaagauaccacuaaucaua

SEQ ID NO: 2099823 - RNA, 19 nt, Homo sapiens
  misc_RNA (1)...(19): siRNA sense strand
gaaaggugcuugcaaugga

SEQ ID NO: 2099824 - RNA, 19 nt, Homo sapiens
  misc_RNA (1)...(19): siRNA sense strand
ggcaagagaucgaauagaa

SEQ ID NO: 2099825 - RNA, 19 nt, Homo sapiens
  misc_RNA (1)...(19): siRNA sense strand
gaaaagacguuaacaggaa

SEQ ID NO: 2099826 - RNA, 19 nt, Homo sapiens
  misc_RNA (1)...(19): siRNA sense strand
ucauagagccaucauauaa

SEQ ID NO: 2099827 - RNA, 19 nt, Homo sapiens
  misc_RNA (1)...(19): siRNA sense strand
gaacgucuacacaguaauu

SEQ ID NO: 2099828 - RNA, 19 nt, Homo sapiens
  misc_RNA (1)...(19): siRNA sense strand
caauggaucuguugacugu

SEQ ID NO: 2099829 - RNA, 19 nt, Homo sapiens
  misc_RNA (1)...(19): siRNA sense strand
acacauguacucuuucuua

SEQ ID NO: 2099830 - RNA, 19 nt, Homo sapiens
  misc_RNA (1)...(19): siRNA sense strand
ggaccacaguuugcaagua

SEQ ID NO: 2099831 - RNA, 19 nt, Homo sapiens
  misc_RNA (1)...(19): siRNA sense strand
ggaaccugauuauucauau

SEQ ID NO: 2099832 - RNA, 19 nt, Homo sapiens
  misc_RNA (1)...(19): siRNA sense strand
guccuuaucuguauggauu

SEQ ID NO: 2099833 - RNA, 19 nt, Homo sapiens
  misc_RNA (1)...(19): siRNA sense strand
gauaugacuuuauggucuu

SEQ ID NO: 2099834 - RNA, 19 nt, Homo sapiens
  misc_RNA (1)...(19): siRNA sense strand
gaccacaguuugcaaguag

SEQ ID NO: 2099835 - RNA, 19 nt, Homo sapiens
  misc_RNA (1)...(19): siRNA sense strand
caagagaucgaauagaaga

SEQ ID NO: 2099836 - RNA, 19 nt, Homo sapiens
  misc_RNA (1)...(19): siRNA sense strand
gugaagauaccacuaauca

SEQ ID NO: 2099837 - RNA, 19 nt, Homo sapiens
  misc_RNA (1)...(19): siRNA sense strand
cccacaaacuucaaacaaa

SEQ ID NO: 2099838 - RNA, 19 nt, Homo sapiens
  misc_RNA (1)...(19): siRNA sense strand
gaaccugauuauucauauc

SEQ ID NO: 2099839 - RNA, 19 nt, Homo sapiens
  misc_RNA (1)...(19): siRNA sense strand
ccacaaacuucaaacaaaa

SEQ ID NO: 2099840 - RNA, 19 nt, Homo sapiens
  misc_RNA (1)...(19): siRNA sense strand
caaguaguacgucuggaua

SEQ ID NO: 2099841 - RNA, 19 nt, Homo sapiens
  misc_RNA (1)...(19): siRNA sense strand
guggaaaggugcuugcaau

SEQ ID NO: 2099842 - RNA, 19 nt, Homo sapiens
  misc_RNA (1)...(19): siRNA sense strand
gcuaaaucuugcccacaaa

SEQ ID NO: 2099843 - RNA, 19 nt, Homo sapiens
  misc_RNA (1)...(19): siRNA sense strand
agcagaaacucaagaagaa

SEQ ID NO: 2099844 - RNA, 19 nt, Homo sapiens
  misc_RNA (1)...(19): siRNA sense strand
uggauagucuaauuucuga

SEQ ID NO: 2099845 - RNA, 19 nt, Homo sapiens
  misc_RNA (1)...(19): siRNA sense strand
ggucuuguauagggagaua

SEQ ID NO: 2099846 - RNA, 19 nt, Homo sapiens
  misc_RNA (1)...(19): siRNA sense strand
ucagauggcuguacguuuu

SEQ ID NO: 2099847 - RNA, 19 nt, Homo sapiens
  misc_RNA (1)...(19): siRNA sense strand
uccagaacauggccucaua

SEQ ID NO: 2099848 - RNA, 19 nt, Homo sapiens
  misc_RNA (1)...(19): siRNA sense strand
gggaaccugauuauucaua

SEQ ID NO: 2099849 - RNA, 19 nt, Homo sapiens
  misc_RNA (1)...(19): siRNA sense strand
ucagcaauaugaagauuag

SEQ ID NO: 2099850 - RNA, 19 nt, Homo sapiens
  misc_RNA (1)...(19): siRNA sense strand
gacagcugauggugaaaga

SEQ ID NO: 2099851 - RNA, 19 nt, Homo sapiens
  misc_RNA (1)...(19): siRNA sense strand
guccaguccuuaucuguau

SEQ ID NO: 2099852 - RNA, 19 nt, Homo sapiens
  misc_RNA (1)...(19): siRNA sense strand
ucgggaaccugauuauuca

SEQ ID NO: 2099853 - RNA, 19 nt, Homo sapiens
  misc_RNA (1)...(19): siRNA sense strand
ugucuggacuuuacacaug

SEQ ID NO: 2099854 - RNA, 19 nt, Homo sapiens
  misc_RNA (1)...(19): siRNA sense strand
uaaagcagaaacucaagaa

SEQ ID NO: 2099855 - RNA, 19 nt, Homo sapiens
  misc_RNA (1)...(19): siRNA sense strand
cauagagccaucauauaaa

SEQ ID NO: 2099856 - RNA, 19 nt, Homo sapiens
  misc_RNA (1)...(19): siRNA sense strand
caaaauaguccaguccuua

SEQ ID NO: 2099857 - RNA, 19 nt, Homo sapiens
  misc_RNA (1)...(19): siRNA sense strand
gcaaguaguacgucuggau

SEQ ID NO: 2099858 - RNA, 19 nt, Homo sapiens
  misc_RNA (1)...(19): siRNA sense strand
ucuguugacugugaagaua

SEQ ID NO: 2099859 - RNA, 19 nt, Homo sapiens
  misc_RNA (1)...(19): siRNA sense strand
gcagaaacucaagaagaaa

SEQ ID NO: 2099860 - RNA, 19 nt, Homo sapiens
  misc_RNA (1)...(19): siRNA sense strand
gcuguugugugguuuguag

SEQ ID NO: 2099861 - RNA, 19 nt, Homo sapiens
  misc_RNA (1)...(19): siRNA sense strand
uaauugcgcuagcuguugu

SEQ ID NO: 2099862 - RNA, 19 nt, Homo sapiens
  misc_RNA (1)...(19): siRNA sense strand
gacguuaacaggaaauaau

SEQ ID NO: 2099863 - RNA, 19 nt, Homo sapiens
  misc_RNA (1)...(19): siRNA sense strand
gagaucgaauagaagacuu

SEQ ID NO: 2099864 - RNA, 19 nt, Homo sapiens
  misc_RNA (1)...(19): siRNA sense strand
ggaaaggugcuugcaaugg

SEQ ID NO: 2099865 - RNA, 19 nt, Homo sapiens
  misc_RNA (1)...(19): siRNA sense strand
ugucauagagccaucauau

SEQ ID NO: 2099866 - RNA, 19 nt, Homo sapiens
  misc_RNA (1)...(19): siRNA sense strand
cacauguacucuuucuuau

SEQ ID NO: 2099867 - RNA, 19 nt, Homo sapiens
  misc_RNA (1)...(19): siRNA sense strand
aagcagaaacucaagaaga

SEQ ID NO: 2099868 - RNA, 19 nt, Homo sapiens
  misc_RNA (1)...(19): siRNA sense strand
aaaugaacgucuacacagu

SEQ ID NO: 2099869 - RNA, 19 nt, Homo sapiens
  misc_RNA (1)...(19): siRNA sense strand
auagggagauacaaugaug

SEQ ID NO: 2099870 - RNA, 19 nt, Homo sapiens
  misc_RNA (1)...(19): siRNA sense strand
cuggacagcugauggugaa

SEQ ID NO: 2099871 - RNA, 19 nt, Homo sapiens
  misc_RNA (1)...(19): siRNA sense strand
gaccugcguuuccguccuu

SEQ ID NO: 2099872 - RNA, 19 nt, Homo sapiens
  misc_RNA (1)...(19): siRNA sense strand
gagccuuugucuggacuuu

SEQ ID NO: 2099873 - RNA, 19 nt, Homo sapiens
  misc_RNA (1)...(19): siRNA sense strand
cagcugauggugaaagauu

SEQ ID NO: 2099874 - RNA, 19 nt, Homo sapiens
  misc_RNA (1)...(19): siRNA sense strand
ccaggcaagagaucgaaua

SEQ ID NO: 2099875 - RNA, 19 nt, Homo sapiens
  misc_RNA (1)...(19): siRNA sense strand
gcaagagaucgaauagaag

SEQ ID NO: 2099876 - RNA, 19 nt, Homo sapiens
  misc_RNA (1)...(19): siRNA sense strand
gcguuuccguccuuaccua

SEQ ID NO: 2099877 - RNA, 19 nt, Homo sapiens
  misc_RNA (1)...(19): siRNA sense strand
ccacaguuugcaaguagua

SEQ ID NO: 2099878 - RNA, 19 nt, Homo sapiens
  misc_RNA (1)...(19): siRNA sense strand
uaagacuguuaaagcagaa

SEQ ID NO: 2099879 - RNA, 19 nt, Homo sapiens
  misc_RNA (1)...(19): siRNA sense strand
gcccacaaacuucaaacaa

SEQ ID NO: 2099880 - RNA, 19 nt, Homo sapiens
  misc_RNA (1)...(19): siRNA sense strand
gaugcgaacgugcguccua

SEQ ID NO: 2099881 - RNA, 19 nt, Homo sapiens
  misc_RNA (1)...(19): siRNA sense strand
gucauagagccaucauaua

SEQ ID NO: 2099882 - RNA, 19 nt, Homo sapiens
  misc_RNA (1)...(19): siRNA sense strand
ggauugggccuaaugaaaa

SEQ ID NO: 2099883 - RNA, 19 nt, Homo sapiens
  misc_RNA (1)...(19): siRNA sense strand
guaauugcgcuagcuguug

SEQ ID NO: 2099884 - RNA, 19 nt, Homo sapiens
  misc_RNA (1)...(19): siRNA sense strand
augaacgucuacacaguaa

SEQ ID NO: 2099885 - RNA, 19 nt, Homo sapiens
  misc_RNA (1)...(19): siRNA sense strand
guccuuaccuauggagcua

SEQ ID NO: 2099886 - RNA, 19 nt, Homo sapiens
  misc_RNA (1)...(19): siRNA sense strand
aaugaacgucuacacagua

SEQ ID NO: 2099887 - RNA, 19 nt, Homo sapiens
  misc_RNA (1)...(19): siRNA sense strand
uggauugggccuaaugaaa

SEQ ID NO: 2099888 - RNA, 19 nt, Homo sapiens
  misc_RNA (1)...(19): siRNA sense strand
ccuauggagcuaaaucuug

SEQ ID NO: 2099889 - RNA, 19 nt, Homo sapiens
  misc_RNA (1)...(19): siRNA sense strand
gcauuucaaguuaauccuu

SEQ ID NO: 2099890 - RNA, 19 nt, Homo sapiens
  misc_RNA (1)...(19): siRNA sense strand
gagccaagcauauauuuuc

SEQ ID NO: 2099891 - RNA, 19 nt, Homo sapiens
  misc_RNA (1)...(19): siRNA sense strand
uuagagugcugaagaaaau

SEQ ID NO: 2099892 - RNA, 19 nt, Homo sapiens
  misc_RNA (1)...(19): siRNA sense strand
aaaggugcuugcaauggau

SEQ ID NO: 2099893 - RNA, 19 nt, Homo sapiens
  misc_RNA (1)...(19): siRNA sense strand
gaaaaucuuggauagucua

SEQ ID NO: 2099894 - RNA, 19 nt, Homo sapiens
  misc_RNA (1)...(19): siRNA sense strand
uuucggagccaagcauaua

SEQ ID NO: 2099895 - RNA, 19 nt, Homo sapiens
  misc_RNA (1)...(19): siRNA sense strand
gccuuugucuggacuuuac

SEQ ID NO: 2099896 - RNA, 19 nt, Homo sapiens
  misc_RNA (1)...(19): siRNA sense strand
ccacuaaucauaauauccu

SEQ ID NO: 2099897 - RNA, 19 nt, Homo sapiens
  misc_RNA (1)...(19): siRNA sense strand
auggaucuguugacuguga

SEQ ID NO: 2099898 - RNA, 19 nt, Homo sapiens
  misc_RNA (1)...(19): siRNA sense strand
augccauucuguugaaauu

SEQ ID NO: 2099899 - RNA, 19 nt, Homo sapiens
  misc_RNA (1)...(19): siRNA sense strand
gcuagcuguugugugguuu

SEQ ID NO: 2099900 - RNA, 19 nt, Homo sapiens
  misc_RNA (1)...(19): siRNA sense strand
ggacagcugauggugaaag

SEQ ID NO: 2099901 - RNA, 19 nt, Homo sapiens
  misc_RNA (1)...(19): siRNA sense strand
ccuaucgggaaccugauua

SEQ ID NO: 2099902 - RNA, 19 nt, Homo sapiens
  misc_RNA (1)...(19): siRNA sense strand
agcuaaaucuugcccacaa

SEQ ID NO: 2099903 - RNA, 19 nt, Homo sapiens
  misc_RNA (1)...(19): siRNA sense strand
cggagccaagcauauauuu

SEQ ID NO: 2099904 - RNA, 19 nt, Homo sapiens
  misc_RNA (1)...(19): siRNA sense strand
acuuauggauugggccuaa

SEQ ID NO: 2099905 - RNA, 19 nt, Homo sapiens
  misc_RNA (1)...(19): siRNA sense strand
ccuuaccuauggagcuaaa

SEQ ID NO: 2099906 - RNA, 19 nt, Homo sapiens
  misc_RNA (1)...(19): siRNA sense strand
aaaagacguuaacaggaaa

SEQ ID NO: 2099907 - RNA, 19 nt, Homo sapiens
  misc_RNA (1)...(19): siRNA sense strand
gccauucuguugaaauucc

SEQ ID NO: 2099908 - RNA, 19 nt, Homo sapiens
  misc_RNA (1)...(19): siRNA sense strand
gaaagaaagacuccuguua

SEQ ID NO: 2099909 - RNA, 19 nt, Homo sapiens
  misc_RNA (1)...(19): siRNA sense strand
ccuaagcacucuccuauua

SEQ ID NO: 2099910 - RNA, 19 nt, Homo sapiens
  misc_RNA (1)...(19): siRNA sense strand
caagugagauagaagauuu

SEQ ID NO: 2099911 - RNA, 19 nt, Homo sapiens
  misc_RNA (1)...(19): siRNA sense strand
ggaugcagcugguaaagaa

SEQ ID NO: 2099912 - RNA, 19 nt, Homo sapiens
  misc_RNA (1)...(19): siRNA sense strand
cagaugauguugaaaguuu

SEQ ID NO: 2099913 - RNA, 19 nt, Homo sapiens
  misc_RNA (1)...(19): siRNA sense strand
aaagcuggcuccugaauuu

SEQ ID NO: 2099914 - RNA, 19 nt, Homo sapiens
  misc_RNA (1)...(19): siRNA sense strand
gagggcagauggaagagua

SEQ ID NO: 2099915 - RNA, 19 nt, Homo sapiens
  misc_RNA (1)...(19): siRNA sense strand
aaagaaagacuccuguuaa

SEQ ID NO: 2099916 - RNA, 19 nt, Homo sapiens
  misc_RNA (1)...(19): siRNA sense strand
aagaaagacuccuguuaaa

SEQ ID NO: 2099917 - RNA, 19 nt, Homo sapiens
  misc_RNA (1)...(19): siRNA sense strand
aaagaaggauaacgagaaa

SEQ ID NO: 2099918 - RNA, 19 nt, Homo sapiens
  misc_RNA (1)...(19): siRNA sense strand
uaagcacucuccuauuaaa

SEQ ID NO: 2099919 - RNA, 19 nt, Homo sapiens
  misc_RNA (1)...(19): siRNA sense strand
gcaauuggaccucaucgaa

SEQ ID NO: 2099920 - RNA, 19 nt, Homo sapiens
  misc_RNA (1)...(19): siRNA sense strand
gaucagggaacaaagaauu

SEQ ID NO: 2099921 - RNA, 19 nt, Homo sapiens
  misc_RNA (1)...(19): siRNA sense strand
ggaauccucuccaaagaag

SEQ ID NO: 2099922 - RNA, 19 nt, Homo sapiens
  misc_RNA (1)...(19): siRNA sense strand
gaauugaggagccaagaaa

SEQ ID NO: 2099923 - RNA, 19 nt, Homo sapiens
  misc_RNA (1)...(19): siRNA sense strand
uaaagaaggauaacgagaa

SEQ ID NO: 2099924 - RNA, 19 nt, Homo sapiens
  misc_RNA (1)...(19): siRNA sense strand
gaagauuugccguaccuuu

SEQ ID NO: 2099925 - RNA, 19 nt, Homo sapiens
  misc_RNA (1)...(19): siRNA sense strand
ggaaguacagaaagaaaga

SEQ ID NO: 2099926 - RNA, 19 nt, Homo sapiens
  misc_RNA (1)...(19): siRNA sense strand
aggagaaacuucagucuug

SEQ ID NO: 2099927 - RNA, 19 nt, Homo sapiens
  misc_RNA (1)...(19): siRNA sense strand
gagcguagccgaugcagau

SEQ ID NO: 2099928 - RNA, 19 nt, Homo sapiens
  misc_RNA (1)...(19): siRNA sense strand
gaugggauauucagaggau

SEQ ID NO: 2099929 - RNA, 19 nt, Homo sapiens
  misc_RNA (1)...(19): siRNA sense strand
cuaugaaacugaagagaga

SEQ ID NO: 2099930 - RNA, 19 nt, Homo sapiens
  misc_RNA (1)...(19): siRNA sense strand
caaagaaggaggagacugu

SEQ ID NO: 2099931 - RNA, 19 nt, Homo sapiens
  misc_RNA (1)...(19): siRNA sense strand
ccaaauccuucagaccuuu

SEQ ID NO: 2099932 - RNA, 19 nt, Homo sapiens
  misc_RNA (1)...(19): siRNA sense strand
gauggaagaguaugaggaa

SEQ ID NO: 2099933 - RNA, 19 nt, Homo sapiens
  misc_RNA (1)...(19): siRNA sense strand
gacugcagcucagaaugua

SEQ ID NO: 2099934 - RNA, 19 nt, Homo sapiens
  misc_RNA (1)...(19): siRNA sense strand
gcacccaucccaaggagaa

SEQ ID NO: 2099935 - RNA, 19 nt, Homo sapiens
  misc_RNA (1)...(19): siRNA sense strand
ggaagaguaugaggaagag

SEQ ID NO: 2099936 - RNA, 19 nt, Homo sapiens
  misc_RNA (1)...(19): siRNA sense strand
ggagcuggaugagaagaga

SEQ ID NO: 2099937 - RNA, 19 nt, Homo sapiens
  misc_RNA (1)...(19): siRNA sense strand
ggacgaccauuaccaaaau

SEQ ID NO: 2099938 - RNA, 19 nt, Homo sapiens
  misc_RNA (1)...(19): siRNA sense strand
ggagggaccacucaguaga

SEQ ID NO: 2099939 - RNA, 19 nt, Homo sapiens
  misc_RNA (1)...(19): siRNA sense strand
ugagccagaugauguugaa

SEQ ID NO: 2099940 - RNA, 19 nt, Homo sapiens
  misc_RNA (1)...(19): siRNA sense strand
aaagaaaggaauucaggaa

SEQ ID NO: 2099941 - RNA, 19 nt, Homo sapiens
  misc_RNA (1)...(19): siRNA sense strand
gauguugaaaguuugauga

SEQ ID NO: 2099942 - RNA, 19 nt, Homo sapiens
  misc_RNA (1)...(19): siRNA sense strand
cgggaauccucuccaaaga

SEQ ID NO: 2099943 - RNA, 19 nt, Homo sapiens
  misc_RNA (1)...(19): siRNA sense strand
gaggaucagggaacaaaga

SEQ ID NO: 2099944 - RNA, 19 nt, Homo sapiens
  misc_RNA (1)...(19): siRNA sense strand
ggauugaacguauggaaag

SEQ ID NO: 2099945 - RNA, 19 nt, Homo sapiens
  misc_RNA (1)...(19): siRNA sense strand
gggaauccucuccaaagaa

SEQ ID NO: 2099946 - RNA, 19 nt, Homo sapiens
  misc_RNA (1)...(19): siRNA sense strand
gaaggauaacgagaaagaa

SEQ ID NO: 2099947 - RNA, 19 nt, Homo sapiens
  misc_RNA (1)...(19): siRNA sense strand
caccggacguguaggaaau

SEQ ID NO: 2099948 - RNA, 19 nt, Homo sapiens
  misc_RNA (1)...(19): siRNA sense strand
gccagaugauguugaaagu

SEQ ID NO: 2099949 - RNA, 19 nt, Homo sapiens
  misc_RNA (1)...(19): siRNA sense strand
gaaagggacauaaaaggaa

SEQ ID NO: 2099950 - RNA, 19 nt, Homo sapiens
  misc_RNA (1)...(19): siRNA sense strand
agaaggauaacgagaaaga

SEQ ID NO: 2099951 - RNA, 19 nt, Homo sapiens
  misc_RNA (1)...(19): siRNA sense strand
cgacugcagcucagaaugu

SEQ ID NO: 2099952 - RNA, 19 nt, Homo sapiens
  misc_RNA (1)...(19): siRNA sense strand
gagagaggaaacagagcua

SEQ ID NO: 2099953 - RNA, 19 nt, Homo sapiens
  misc_RNA (1)...(19): siRNA sense strand
gaaucugagccugagguua

SEQ ID NO: 2099954 - RNA, 19 nt, Homo sapiens
  misc_RNA (1)...(19): siRNA sense strand
aacuggagcuggaugagaa

SEQ ID NO: 2099955 - RNA, 19 nt, Homo sapiens
  misc_RNA (1)...(19): siRNA sense strand
cccaucaccguuaccauua

SEQ ID NO: 2099956 - RNA, 19 nt, Homo sapiens
  misc_RNA (1)...(19): siRNA sense strand
cuaagcacucuccuauuaa

SEQ ID NO: 2099957 - RNA, 19 nt, Homo sapiens
  misc_RNA (1)...(19): siRNA sense strand
ggaguggaaagggacauaa

SEQ ID NO: 2099958 - RNA, 19 nt, Homo sapiens
  misc_RNA (1)...(19): siRNA sense strand
ugugguuccuuaucugaaa

SEQ ID NO: 2099959 - RNA, 19 nt, Homo sapiens
  misc_RNA (1)...(19): siRNA sense strand
gaguggaaagggacauaaa

SEQ ID NO: 2099960 - RNA, 19 nt, Homo sapiens
  misc_RNA (1)...(19): siRNA sense strand
gcuccuugcucggauugaa

SEQ ID NO: 2099961 - RNA, 19 nt, Homo sapiens
  misc_RNA (1)...(19): siRNA sense strand
cccaagcccuucucaugug

SEQ ID NO: 2099962 - RNA, 19 nt, Homo sapiens
  misc_RNA (1)...(19): siRNA sense strand
aaggauaacgagaaagaaa

SEQ ID NO: 2099963 - RNA, 19 nt, Homo sapiens
  misc_RNA (1)...(19): siRNA sense strand
uuccuuaucugaaacuguu

SEQ ID NO: 2099964 - RNA, 19 nt, Homo sapiens
  misc_RNA (1)...(19): siRNA sense strand
ggaaagggacauaaaagga

SEQ ID NO: 2099965 - RNA, 19 nt, Homo sapiens
  misc_RNA (1)...(19): siRNA sense strand
ccauuuggaaguacagaaa

SEQ ID NO: 2099966 - RNA, 19 nt, Homo sapiens
  misc_RNA (1)...(19): siRNA sense strand
gcauuuggacgaccauuac

SEQ ID NO: 2099967 - RNA, 19 nt, Homo sapiens
  misc_RNA (1)...(19): siRNA sense strand
cagaggaucagggaacaaa

SEQ ID NO: 2099968 - RNA, 19 nt, Homo sapiens
  misc_RNA (1)...(19): siRNA sense strand
gagaagagaaggaaaagau

SEQ ID NO: 2099969 - RNA, 19 nt, Homo sapiens
  misc_RNA (1)...(19): siRNA sense strand
gaaggaggagacuguagca

SEQ ID NO: 2099970 - RNA, 19 nt, Homo sapiens
  misc_RNA (1)...(19): siRNA sense strand
uuacgggaauccucuccaa

SEQ ID NO: 2099971 - RNA, 19 nt, Homo sapiens
  misc_RNA (1)...(19): siRNA sense strand
aauuggaccucaucgaaca

SEQ ID NO: 2099972 - RNA, 19 nt, Homo sapiens
  misc_RNA (1)...(19): siRNA sense strand
gaugauguugaaaguuuga

SEQ ID NO: 2099973 - RNA, 19 nt, Homo sapiens
  misc_RNA (1)...(19): siRNA sense strand
cugcagcucagaauguaua

SEQ ID NO: 2099974 - RNA, 19 nt, Homo sapiens
  misc_RNA (1)...(19): siRNA sense strand
gaagagagagaggaaacag

SEQ ID NO: 2099975 - RNA, 19 nt, Homo sapiens
  misc_RNA (1)...(19): siRNA sense strand
cuucuugccuguuguagca

SEQ ID NO: 2099976 - RNA, 19 nt, Homo sapiens
  misc_RNA (1)...(19): siRNA sense strand
cuucagaccuuuuggagaa

SEQ ID NO: 2099977 - RNA, 19 nt, Homo sapiens
  misc_RNA (1)...(19): siRNA sense strand
aagaaaggcacaagcuguu

SEQ ID NO: 2099978 - RNA, 19 nt, Homo sapiens
  misc_RNA (1)...(19): siRNA sense strand
gagaggaaacagagcuauc

SEQ ID NO: 2099979 - RNA, 19 nt, Homo sapiens
  misc_RNA (1)...(19): siRNA sense strand
ggaaucugagccugagguu

SEQ ID NO: 2099980 - RNA, 19 nt, Homo sapiens
  misc_RNA (1)...(19): siRNA sense strand
cccaaauccuucagaccuu

SEQ ID NO: 2099981 - RNA, 19 nt, Homo sapiens
  misc_RNA (1)...(19): siRNA sense strand
caugagauccgcgguguuc

SEQ ID NO: 2099982 - RNA, 19 nt, Homo sapiens
  misc_RNA (1)...(19): siRNA sense strand
aaucugagccugagguuac

SEQ ID NO: 2099983 - RNA, 19 nt, Homo sapiens
  misc_RNA (1)...(19): siRNA sense strand
ggauaacgagaaagaaagg

SEQ ID NO: 2099984 - RNA, 19 nt, Homo sapiens
  misc_RNA (1)...(19): siRNA sense strand
gaugagaagagaaggaaaa

SEQ ID NO: 2099985 - RNA, 19 nt, Homo sapiens
  misc_RNA (1)...(19): siRNA sense strand
agucuuggcuguuccuucu

SEQ ID NO: 2099986 - RNA, 19 nt, Homo sapiens
  misc_RNA (1)...(19): siRNA sense strand
caggagaaacuucagucuu

SEQ ID NO: 2099987 - RNA, 19 nt, Homo sapiens
  misc_RNA (1)...(19): siRNA sense strand
aaagaaggaggagacugua

SEQ ID NO: 2099988 - RNA, 19 nt, Homo sapiens
  misc_RNA (1)...(19): siRNA sense strand
uagaagauuugccguaccu

SEQ ID NO: 2099989 - RNA, 19 nt, Homo sapiens
  misc_RNA (1)...(19): siRNA sense strand
uggaagaguaugaggaaga

SEQ ID NO: 2099990 - RNA, 19 nt, Homo sapiens
  misc_RNA (1)...(19): siRNA sense strand
gaucgaggagcugaaguca

SEQ ID NO: 2099991 - RNA, 19 nt, Homo sapiens
  misc_RNA (1)...(19): siRNA sense strand
agaaaggcacaagcuguuu

SEQ ID NO: 2099992 - RNA, 19 nt, Homo sapiens
  misc_RNA (1)...(19): siRNA sense strand
uuucgaagcggcaugcaaa

SEQ ID NO: 2099993 - RNA, 19 nt, Homo sapiens
  misc_RNA (1)...(19): siRNA sense strand
ccaagaaaccccagaaaag

SEQ ID NO: 2099994 - RNA, 19 nt, Homo sapiens
  misc_RNA (1)...(19): siRNA sense strand
ggagaucgaggagcugaag

SEQ ID NO: 2099995 - RNA, 19 nt, Homo sapiens
  misc_RNA (1)...(19): siRNA sense strand
cggauugaacguauggaaa

SEQ ID NO: 2099996 - RNA, 19 nt, Homo sapiens
  misc_RNA (1)...(19): siRNA sense strand
ccgccugccucaaacagau

SEQ ID NO: 2099997 - RNA, 19 nt, Homo sapiens
  misc_RNA (1)...(19): siRNA sense strand
gcaggagaaacuucagucu

SEQ ID NO: 2099998 - RNA, 19 nt, Homo sapiens
  misc_RNA (1)...(19): siRNA sense strand
agaaagaaagacuccuguu

SEQ ID NO: 2099999 - RNA, 19 nt, Homo sapiens
  misc_RNA (1)...(19): siRNA sense strand
aaagggacauaaaaggaaa

SEQ ID NO: 2100000 - RNA, 19 nt, Homo sapiens
  misc_RNA (1)...(19): siRNA sense strand
agagcuaucugagaaaauu

SEQ ID NO: 2100001 - RNA, 19 nt, Homo sapiens
  misc_RNA (1)...(19): siRNA sense strand
ucaagugagauagaagauu

SEQ ID NO: 2100002 - RNA, 19 nt, Homo sapiens
  misc_RNA (1)...(19): siRNA sense strand
agaugauguugaaaguuug

SEQ ID NO: 2100003 - RNA, 19 nt, Homo sapiens
  misc_RNA (1)...(19): siRNA sense strand
gaaaagaugggauauucag

SEQ ID NO: 2100004 - RNA, 19 nt, Homo sapiens
  misc_RNA (1)...(19): siRNA sense strand
ggagaaccuggaugacagu

SEQ ID NO: 2100005 - RNA, 19 nt, Homo sapiens
  misc_RNA (1)...(19): siRNA sense strand
aggcggugcugcccauuca

SEQ ID NO: 2100006 - RNA, 19 nt, Homo sapiens
  misc_RNA (1)...(19): siRNA sense strand
cagcugguaaagaaggaua

SEQ ID NO: 2100007 - RNA, 19 nt, Homo sapiens
  misc_RNA (1)...(19): siRNA sense strand
gauugaacguauggaaagg

SEQ ID NO: 2100008 - RNA, 19 nt, Homo sapiens
  misc_RNA (1)...(19): siRNA sense strand
ugauauacaugaccaggua

SEQ ID NO: 2100009 - RNA, 19 nt, Homo sapiens
  misc_RNA (1)...(19): siRNA sense strand
gaccagguauuccguucua

SEQ ID NO: 2100010 - RNA, 19 nt, Homo sapiens
  misc_RNA (1)...(19): siRNA sense strand
gcaauacacguuuccuuga

SEQ ID NO: 2100011 - RNA, 19 nt, Homo sapiens
  misc_RNA (1)...(19): siRNA sense strand
gcaauuguucugaugauau

SEQ ID NO: 2100012 - RNA, 19 nt, Homo sapiens
  misc_RNA (1)...(19): siRNA sense strand
gcagagcaauacacguuuc

SEQ ID NO: 2100013 - RNA, 19 nt, Homo sapiens
  misc_RNA (1)...(19): siRNA sense strand
ucucaucucuucauacuag

SEQ ID NO: 2100014 - RNA, 19 nt, Homo sapiens
  misc_RNA (1)...(19): siRNA sense strand
gagcaauuguucugaugau

SEQ ID NO: 2100015 - RNA, 19 nt, Homo sapiens
  misc_RNA (1)...(19): siRNA sense strand
gcccauuucucaucucuuc

SEQ ID NO: 2100016 - RNA, 19 nt, Homo sapiens
  misc_RNA (1)...(19): siRNA sense strand
guucugaugauauacauga

SEQ ID NO: 2100017 - RNA, 19 nt, Homo sapiens
  misc_RNA (1)...(19): siRNA sense strand
caauacacguuuccuugag

SEQ ID NO: 2100018 - RNA, 19 nt, Homo sapiens
  misc_RNA (1)...(19): siRNA sense strand
gagcaauacacguuuccuu

SEQ ID NO: 2100019 - RNA, 19 nt, Homo sapiens
  misc_RNA (1)...(19): siRNA sense strand
ccgcagagcaauacacguu

SEQ ID NO: 2100020 - RNA, 19 nt, Homo sapiens
  misc_RNA (1)...(19): siRNA sense strand
cauuucucaucucuucaua

SEQ ID NO: 2100021 - RNA, 19 nt, Homo sapiens
  misc_RNA (1)...(19): siRNA sense strand
aauacacguuuccuugaga

SEQ ID NO: 2100022 - RNA, 19 nt, Homo sapiens
  misc_RNA (1)...(19): siRNA sense strand
uagcucacacuaugcauug

SEQ ID NO: 2100023 - RNA, 19 nt, Homo sapiens
  misc_RNA (1)...(19): siRNA sense strand
gggcuucaccgcagagcaa

SEQ ID NO: 2100024 - RNA, 19 nt, Homo sapiens
  misc_RNA (1)...(19): siRNA sense strand
auacacguuuccuugagaa

SEQ ID NO: 2100025 - RNA, 19 nt, Homo sapiens
  misc_RNA (1)...(19): siRNA sense strand
agcaauuguucugaugaua

SEQ ID NO: 2100026 - RNA, 19 nt, Homo sapiens
  misc_RNA (1)...(19): siRNA sense strand
gaagcccauuucucaucuc

SEQ ID NO: 2100027 - RNA, 19 nt, Homo sapiens
  misc_RNA (1)...(19): siRNA sense strand
uuucucaucucuucauacu

SEQ ID NO: 2100028 - RNA, 19 nt, Homo sapiens
  misc_RNA (1)...(19): siRNA sense strand
caagguggaugucucagaa

SEQ ID NO: 2100029 - RNA, 19 nt, Homo sapiens
  misc_RNA (1)...(19): siRNA sense strand
gcucuggacuccucaccua

SEQ ID NO: 2100030 - RNA, 19 nt, Homo sapiens
  misc_RNA (1)...(19): siRNA sense strand
cauggcagcuggugacuug

SEQ ID NO: 2100031 - RNA, 19 nt, Homo sapiens
  misc_RNA (1)...(19): siRNA sense strand
acaccuaccugcucuguga

SEQ ID NO: 2100032 - RNA, 19 nt, Homo sapiens
  misc_RNA (1)...(19): siRNA sense strand
gcugugagccugcuauuug

SEQ ID NO: 2100033 - RNA, 19 nt, Homo sapiens
  misc_RNA (1)...(19): siRNA sense strand
gcugugauccugucauuug

SEQ ID NO: 2100034 - RNA, 19 nt, Homo sapiens
  misc_RNA (1)...(19): siRNA sense strand
caagacagcuguggaucau

SEQ ID NO: 2100035 - RNA, 19 nt, Homo sapiens
  misc_RNA (1)...(19): siRNA sense strand
ggcaguugcucuucuagga

SEQ ID NO: 2100036 - RNA, 19 nt, Homo sapiens
  misc_RNA (1)...(19): siRNA sense strand
gcagugcuacgauuuccua

SEQ ID NO: 2100037 - RNA, 19 nt, Homo sapiens
  misc_RNA (1)...(19): siRNA sense strand
gugcugugauccugucauu

SEQ ID NO: 2100038 - RNA, 19 nt, Homo sapiens
  misc_RNA (1)...(19): siRNA sense strand
uccuaggacuuucuacaua

SEQ ID NO: 2100039 - RNA, 19 nt, Homo sapiens
  misc_RNA (1)...(19): siRNA sense strand
cgaccaacuuguccuagga

SEQ ID NO: 2100040 - RNA, 19 nt, Homo sapiens
  misc_RNA (1)...(19): siRNA sense strand
caguugcucuucuaggaaa

SEQ ID NO: 2100041 - RNA, 19 nt, Homo sapiens
  misc_RNA (1)...(19): siRNA sense strand
aaacggccuugcagugcua

SEQ ID NO: 2100042 - RNA, 19 nt, Homo sapiens
  misc_RNA (1)...(19): siRNA sense strand
gccaaccuguggucuguga

SEQ ID NO: 2100043 - RNA, 19 nt, Homo sapiens
  misc_RNA (1)...(19): siRNA sense strand
gugauccugucauuuguga

SEQ ID NO: 2100044 - RNA, 19 nt, Homo sapiens
  misc_RNA (1)...(19): siRNA sense strand
gcaagccugccaacugcua

SEQ ID NO: 2100045 - RNA, 19 nt, Homo sapiens
  misc_RNA (1)...(19): siRNA sense strand
gcaagguggaugucucaga

SEQ ID NO: 2100046 - RNA, 19 nt, Homo sapiens
  misc_RNA (1)...(19): siRNA sense strand
cagccugugucacuuccua

SEQ ID NO: 2100047 - RNA, 19 nt, Homo sapiens
  misc_RNA (1)...(19): siRNA sense strand
gcaguugcucuucuaggaa

SEQ ID NO: 2100048 - RNA, 19 nt, Homo sapiens
  misc_RNA (1)...(19): siRNA sense strand
gccagccaguugucuguga

SEQ ID NO: 2100049 - RNA, 19 nt, Homo sapiens
  misc_RNA (1)...(19): siRNA sense strand
caucuugcacugagucuga

SEQ ID NO: 2100050 - RNA, 19 nt, Homo sapiens
  misc_RNA (1)...(19): siRNA sense strand
ccagcccacugaagccaaa

SEQ ID NO: 2100051 - RNA, 19 nt, Homo sapiens
  misc_RNA (1)...(19): siRNA sense strand
ucaccuauaggcagccaua

SEQ ID NO: 2100052 - RNA, 19 nt, Homo sapiens
  misc_RNA (1)...(19): siRNA sense strand
ccagcaagccugccaacug

SEQ ID NO: 2100053 - RNA, 19 nt, Homo sapiens
  misc_RNA (1)...(19): siRNA sense strand
gccaaccaguccucugugu

SEQ ID NO: 2100054 - RNA, 19 nt, Homo sapiens
  misc_RNA (1)...(19): siRNA sense strand
ccuaggacuuucuacauac

SEQ ID NO: 2100055 - RNA, 19 nt, Homo sapiens
  misc_RNA (1)...(19): siRNA sense strand
gccaaccugugugcuuuga

SEQ ID NO: 2100056 - RNA, 19 nt, Homo sapiens
  misc_RNA (1)...(19): siRNA sense strand
uauaggcagccauacauga

SEQ ID NO: 2100057 - RNA, 19 nt, Homo sapiens
  misc_RNA (1)...(19): siRNA sense strand
ccaucugccugcccaguuc

SEQ ID NO: 2100058 - RNA, 19 nt, Homo sapiens
  misc_RNA (1)...(19): siRNA sense strand
gcuuugaggccaccguuug

SEQ ID NO: 2100059 - RNA, 19 nt, Homo sapiens
  misc_RNA (1)...(19): siRNA sense strand
ucaagacagcuguggauca

SEQ ID NO: 2100060 - RNA, 19 nt, Homo sapiens
  misc_RNA (1)...(19): siRNA sense strand
cugccaaccugugugcuuu

SEQ ID NO: 2100061 - RNA, 19 nt, Homo sapiens
  misc_RNA (1)...(19): siRNA sense strand
gccaggcugucugcuguga

SEQ ID NO: 2100062 - RNA, 19 nt, Homo sapiens
  misc_RNA (1)...(19): siRNA sense strand
cauacccaguuccagcaaa

SEQ ID NO: 2100063 - RNA, 19 nt, Homo sapiens
  misc_RNA (1)...(19): siRNA sense strand
gccaacccgugugcuguga

SEQ ID NO: 2100064 - RNA, 19 nt, Homo sapiens
  misc_RNA (1)...(19): siRNA sense strand
ucuggcaguugcucuucua

SEQ ID NO: 2100065 - RNA, 19 nt, Homo sapiens
  misc_RNA (1)...(19): siRNA sense strand
uuugugagccuucuuguuc

SEQ ID NO: 2100066 - RNA, 19 nt, Homo sapiens
  misc_RNA (1)...(19): siRNA sense strand
gcuaccaaccugugugcuu

SEQ ID NO: 2100067 - RNA, 19 nt, Homo sapiens
  misc_RNA (1)...(19): siRNA sense strand
cuaccguccugccugcuau

SEQ ID NO: 2100068 - RNA, 19 nt, Homo sapiens
  misc_RNA (1)...(19): siRNA sense strand
ucuggacuccucaccuaua

SEQ ID NO: 2100069 - RNA, 19 nt, Homo sapiens
  misc_RNA (1)...(19): siRNA sense strand
cagcccuccuguccuguga

SEQ ID NO: 2100070 - RNA, 19 nt, Homo sapiens
  misc_RNA (1)...(19): siRNA sense strand
gugaggccaccaccuguga

SEQ ID NO: 2100071 - RNA, 19 nt, Homo sapiens
  misc_RNA (1)...(19): siRNA sense strand
gccuugcagugcuacgauu

SEQ ID NO: 2100072 - RNA, 19 nt, Homo sapiens
  misc_RNA (1)...(19): siRNA sense strand
gcucuucuaggaaaugcuu

SEQ ID NO: 2100073 - RNA, 19 nt, Homo sapiens
  misc_RNA (1)...(19): siRNA sense strand
gugagccugcuauuuguga

SEQ ID NO: 2100074 - RNA, 19 nt, Homo sapiens
  misc_RNA (1)...(19): siRNA sense strand
cagccuguccucugcaaau

SEQ ID NO: 2100075 - RNA, 19 nt, Homo sapiens
  misc_RNA (1)...(19): siRNA sense strand
caagccugccaacugcuaa

SEQ ID NO: 2100076 - RNA, 19 nt, Homo sapiens
  misc_RNA (1)...(19): siRNA sense strand
gauagcaacucauuacuaa

SEQ ID NO: 2100077 - RNA, 19 nt, Homo sapiens
  misc_RNA (1)...(19): siRNA sense strand
gcacagaacugaauccaau

SEQ ID NO: 2100078 - RNA, 19 nt, Homo sapiens
  misc_RNA (1)...(19): siRNA sense strand
ggaccuggcuggaaaguau

SEQ ID NO: 2100079 - RNA, 19 nt, Homo sapiens
  misc_RNA (1)...(19): siRNA sense strand
gaacugaggucccacuaca

SEQ ID NO: 2100080 - RNA, 19 nt, Homo sapiens
  misc_RNA (1)...(19): siRNA sense strand
gaaguacccugacaaccaa

SEQ ID NO: 2100081 - RNA, 19 nt, Homo sapiens
  misc_RNA (1)...(19): siRNA sense strand
gcaaagaaguacccugaca

SEQ ID NO: 2100082 - RNA, 19 nt, Homo sapiens
  misc_RNA (1)...(19): siRNA sense strand
ggaagcauguucucuaugg

SEQ ID NO: 2100083 - RNA, 19 nt, Homo sapiens
  misc_RNA (1)...(19): siRNA sense strand
gaggaagcauguucucuau

SEQ ID NO: 2100084 - RNA, 19 nt, Homo sapiens
  misc_RNA (1)...(19): siRNA sense strand
gaagaagagaauacaagua

SEQ ID NO: 2100085 - RNA, 19 nt, Homo sapiens
  misc_RNA (1)...(19): siRNA sense strand
cgagauuucccaaagauua

SEQ ID NO: 2100086 - RNA, 19 nt, Homo sapiens
  misc_RNA (1)...(19): siRNA sense strand
gaaaguauggccaagauuc

SEQ ID NO: 2100087 - RNA, 19 nt, Homo sapiens
  misc_RNA (1)...(19): siRNA sense strand
gaaacaacgagacuucaaa

SEQ ID NO: 2100088 - RNA, 19 nt, Homo sapiens
  misc_RNA (1)...(19): siRNA sense strand
agaagaagguaaagaguau

SEQ ID NO: 2100089 - RNA, 19 nt, Homo sapiens
  misc_RNA (1)...(19): siRNA sense strand
ccauauugcugcucucauu

SEQ ID NO: 2100090 - RNA, 19 nt, Homo sapiens
  misc_RNA (1)...(19): siRNA sense strand
gaaaugcaccacaacauca

SEQ ID NO: 2100091 - RNA, 19 nt, Homo sapiens
  misc_RNA (1)...(19): siRNA sense strand
ggaggaagcauguucucua

SEQ ID NO: 2100092 - RNA, 19 nt, Homo sapiens
  misc_RNA (1)...(19): siRNA sense strand
caccaaacauuaaggaaga

SEQ ID NO: 2100093 - RNA, 19 nt, Homo sapiens
  misc_RNA (1)...(19): siRNA sense strand
gaagaaaccaaugcaaaga

SEQ ID NO: 2100094 - RNA, 19 nt, Homo sapiens
  misc_RNA (1)...(19): siRNA sense strand
gcucuaugcagauaaauuu

SEQ ID NO: 2100095 - RNA, 19 nt, Homo sapiens
  misc_RNA (1)...(19): siRNA sense strand
uggcagagguggugaauuc

SEQ ID NO: 2100096 - RNA, 19 nt, Homo sapiens
  misc_RNA (1)...(19): siRNA sense strand
caagauacaccauacaaug

SEQ ID NO: 2100097 - RNA, 19 nt, Homo sapiens
  misc_RNA (1)...(19): siRNA sense strand
ggaccugacuaagcguaua

SEQ ID NO: 2100098 - RNA, 19 nt, Homo sapiens
  misc_RNA (1)...(19): siRNA sense strand
caagcucuaugcagauaaa

SEQ ID NO: 2100099 - RNA, 19 nt, Homo sapiens
  misc_RNA (1)...(19): siRNA sense strand
aagaaaggguuacuggaaa

SEQ ID NO: 2100100 - RNA, 19 nt, Homo sapiens
  misc_RNA (1)...(19): siRNA sense strand
gaagguuucugagcuuaau

SEQ ID NO: 2100101 - RNA, 19 nt, Homo sapiens
  misc_RNA (1)...(19): siRNA sense strand
gaacugaauccaauugaag

SEQ ID NO: 2100102 - RNA, 19 nt, Homo sapiens
  misc_RNA (1)...(19): siRNA sense strand
ugucagaucucuacuacga

SEQ ID NO: 2100103 - RNA, 19 nt, Homo sapiens
  misc_RNA (1)...(19): siRNA sense strand
gcauuacaccaaacauuaa

SEQ ID NO: 2100104 - RNA, 19 nt, Homo sapiens
  misc_RNA (1)...(19): siRNA sense strand
aaagauuacucaagcucua

SEQ ID NO: 2100105 - RNA, 19 nt, Homo sapiens
  misc_RNA (1)...(19): siRNA sense strand
ggaagaaggagcgaugaaa

SEQ ID NO: 2100106 - RNA, 19 nt, Homo sapiens
  misc_RNA (1)...(19): siRNA sense strand
gcagacaaugugaagauaa

SEQ ID NO: 2100107 - RNA, 19 nt, Homo sapiens
  misc_RNA (1)...(19): siRNA sense strand
gcccaucauugcugucuuu

SEQ ID NO: 2100108 - RNA, 19 nt, Homo sapiens
  misc_RNA (1)...(19): siRNA sense strand
cgcaagcacuccugaacua

SEQ ID NO: 2100109 - RNA, 19 nt, Homo sapiens
  misc_RNA (1)...(19): siRNA sense strand
gagcauuacaccaaacauu

SEQ ID NO: 2100110 - RNA, 19 nt, Homo sapiens
  misc_RNA (1)...(19): siRNA sense strand
gaagaaggagcgaugaaag

SEQ ID NO: 2100111 - RNA, 19 nt, Homo sapiens
  misc_RNA (1)...(19): siRNA sense strand
aaagaaaggguuacuggaa

SEQ ID NO: 2100112 - RNA, 19 nt, Homo sapiens
  misc_RNA (1)...(19): siRNA sense strand
cagacaaugugaagauaau

SEQ ID NO: 2100113 - RNA, 19 nt, Homo sapiens
  misc_RNA (1)...(19): siRNA sense strand
gagcagacaaugugaagau

SEQ ID NO: 2100114 - RNA, 19 nt, Homo sapiens
  misc_RNA (1)...(19): siRNA sense strand
gaaugcaagauacaccaua

SEQ ID NO: 2100115 - RNA, 19 nt, Homo sapiens
  misc_RNA (1)...(19): siRNA sense strand
ugaagaagaagaagguaaa

SEQ ID NO: 2100116 - RNA, 19 nt, Homo sapiens
  misc_RNA (1)...(19): siRNA sense strand
aaccugcacucgaguaauu

SEQ ID NO: 2100117 - RNA, 19 nt, Homo sapiens
  misc_RNA (1)...(19): siRNA sense strand
uuaaucagcuuugcacaau

SEQ ID NO: 2100118 - RNA, 19 nt, Homo sapiens
  misc_RNA (1)...(19): siRNA sense strand
ugaaggagcacgagaagga

SEQ ID NO: 2100119 - RNA, 19 nt, Homo sapiens
  misc_RNA (1)...(19): siRNA sense strand
gauacaccauacaaugaga

SEQ ID NO: 2100120 - RNA, 19 nt, Homo sapiens
  misc_RNA (1)...(19): siRNA sense strand
gcacucgaguaauuagcaa

SEQ ID NO: 2100121 - RNA, 19 nt, Homo sapiens
  misc_RNA (1)...(19): siRNA sense strand
aaaccaaugcaaagaagua

SEQ ID NO: 2100122 - RNA, 19 nt, Homo sapiens
  misc_RNA (1)...(19): siRNA sense strand
gaagaagaagguaaagagu

SEQ ID NO: 2100123 - RNA, 19 nt, Homo sapiens
  misc_RNA (1)...(19): siRNA sense strand
caucauugcugucuuugag

SEQ ID NO: 2100124 - RNA, 19 nt, Homo sapiens
  misc_RNA (1)...(19): siRNA sense strand
gaaaagauuugcacagcau

SEQ ID NO: 2100125 - RNA, 19 nt, Homo sapiens
  misc_RNA (1)...(19): siRNA sense strand
aaggagaucuucaggcaau

SEQ ID NO: 2100126 - RNA, 19 nt, Homo sapiens
  misc_RNA (1)...(19): siRNA sense strand
ggaagaaguggacaugauc

SEQ ID NO: 2100127 - RNA, 19 nt, Homo sapiens
  misc_RNA (1)...(19): siRNA sense strand
ugccagaaacggagauuua

SEQ ID NO: 2100128 - RNA, 19 nt, Homo sapiens
  misc_RNA (1)...(19): siRNA sense strand
gacaacgagucaccuguuc

SEQ ID NO: 2100129 - RNA, 19 nt, Homo sapiens
  misc_RNA (1)...(19): siRNA sense strand
gaagaccggaagacagauu

SEQ ID NO: 2100130 - RNA, 19 nt, Homo sapiens
  misc_RNA (1)...(19): siRNA sense strand
gaagaagguaaagaguaua

SEQ ID NO: 2100131 - RNA, 19 nt, Homo sapiens
  misc_RNA (1)...(19): siRNA sense strand
auacauguguguggaguuu

SEQ ID NO: 2100132 - RNA, 19 nt, Homo sapiens
  misc_RNA (1)...(19): siRNA sense strand
gcuguuuggucgcuacuau

SEQ ID NO: 2100133 - RNA, 19 nt, Homo sapiens
  misc_RNA (1)...(19): siRNA sense strand
auucaucggucauaucuga

SEQ ID NO: 2100134 - RNA, 19 nt, Homo sapiens
  misc_RNA (1)...(19): siRNA sense strand
ccacagcucagaugaagga

SEQ ID NO: 2100135 - RNA, 19 nt, Homo sapiens
  misc_RNA (1)...(19): siRNA sense strand
gcaagauacaccauacaau

SEQ ID NO: 2100136 - RNA, 19 nt, Homo sapiens
  misc_RNA (1)...(19): siRNA sense strand
caucucaucuagugcugaa

SEQ ID NO: 2100137 - RNA, 19 nt, Homo sapiens
  misc_RNA (1)...(19): siRNA sense strand
gaagaaguggacaugauca

SEQ ID NO: 2100138 - RNA, 19 nt, Homo sapiens
  misc_RNA (1)...(19): siRNA sense strand
aagaagaagguaaagagua

SEQ ID NO: 2100139 - RNA, 19 nt, Homo sapiens
  misc_RNA (1)...(19): siRNA sense strand
cgacauucaucggucauau

SEQ ID NO: 2100140 - RNA, 19 nt, Homo sapiens
  misc_RNA (1)...(19): siRNA sense strand
caccauacaaugagaauau

SEQ ID NO: 2100141 - RNA, 19 nt, Homo sapiens
  misc_RNA (1)...(19): siRNA sense strand
ggaagucugagcgauauga

SEQ ID NO: 2100142 - RNA, 19 nt, Homo sapiens
  misc_RNA (1)...(19): siRNA sense strand
caaagaaguacccugacaa

SEQ ID NO: 2100143 - RNA, 19 nt, Homo sapiens
  misc_RNA (1)...(19): siRNA sense strand
agaacugaauccaauugaa

SEQ ID NO: 2100144 - RNA, 19 nt, Homo sapiens
  misc_RNA (1)...(19): siRNA sense strand
ggccacagcucagaugaag

SEQ ID NO: 2100145 - RNA, 19 nt, Homo sapiens
  misc_RNA (1)...(19): siRNA sense strand
ggagaucuucaggcaauuu

SEQ ID NO: 2100146 - RNA, 19 nt, Homo sapiens
  misc_RNA (1)...(19): siRNA sense strand
uggaagaaguggacaugau

SEQ ID NO: 2100147 - RNA, 19 nt, Homo sapiens
  misc_RNA (1)...(19): siRNA sense strand
ggaaaguauggccaagauu

SEQ ID NO: 2100148 - RNA, 19 nt, Homo sapiens
  misc_RNA (1)...(19): siRNA sense strand
ugauagcaacucauuacua

SEQ ID NO: 2100149 - RNA, 19 nt, Homo sapiens
  misc_RNA (1)...(19): siRNA sense strand
ucagcgaacucuccacagu

SEQ ID NO: 2100150 - RNA, 19 nt, Homo sapiens
  misc_RNA (1)...(19): siRNA sense strand
ggcaggcccuugacgugaa

SEQ ID NO: 2100151 - RNA, 19 nt, Homo sapiens
  misc_RNA (1)...(19): siRNA sense strand
uugacgagauguccaagaa

SEQ ID NO: 2100152 - RNA, 19 nt, Homo sapiens
  misc_RNA (1)...(19): siRNA sense strand
caacaucaaccgcuuuguc

SEQ ID NO: 2100153 - RNA, 19 nt, Homo sapiens
  misc_RNA (1)...(19): siRNA sense strand
uaaagagccuaagcugaca

SEQ ID NO: 2100154 - RNA, 19 nt, Homo sapiens
  misc_RNA (1)...(19): siRNA sense strand
agcauuacaccaaacauua

SEQ ID NO: 2100155 - RNA, 19 nt, Homo sapiens
  misc_RNA (1)...(19): siRNA sense strand
aagauacaccauacaauga

SEQ ID NO: 2100156 - RNA, 19 nt, Homo sapiens
  misc_RNA (1)...(19): siRNA sense strand
caaaccugcacucgaguaa

SEQ ID NO: 2100157 - RNA, 19 nt, Homo sapiens
  misc_RNA (1)...(19): siRNA sense strand
cgaaaugcaccacaacauc

SEQ ID NO: 2100158 - RNA, 19 nt, Homo sapiens
  misc_RNA (1)...(19): siRNA sense strand
caagauucaugccagaaac

SEQ ID NO: 2100159 - RNA, 19 nt, Homo sapiens
  misc_RNA (1)...(19): siRNA sense strand
ucauugcugucuuugagaa

SEQ ID NO: 2100160 - RNA, 19 nt, Homo sapiens
  misc_RNA (1)...(19): siRNA sense strand
uggaaaguauggccaagau

SEQ ID NO: 2100161 - RNA, 19 nt, Homo sapiens
  misc_RNA (1)...(19): siRNA sense strand
uagcaacucauuacuaaca

SEQ ID NO: 2100162 - RNA, 19 nt, Homo sapiens
  misc_RNA (1)...(19): siRNA sense strand
agaaaccaaugcaaagaag

SEQ ID NO: 2100163 - RNA, 19 nt, Homo sapiens
  misc_RNA (1)...(19): siRNA sense strand
ugaagaaaccaaugcaaag

SEQ ID NO: 2100164 - RNA, 19 nt, Homo sapiens
  misc_RNA (1)...(19): siRNA sense strand
ccaagauucaugccagaaa

SEQ ID NO: 2100165 - RNA, 19 nt, Homo sapiens
  misc_RNA (1)...(19): siRNA sense strand
gaccugacuaagcguauaa

SEQ ID NO: 2100166 - RNA, 19 nt, Homo sapiens
  misc_RNA (1)...(19): siRNA sense strand
gcuacuaucguguggcauu

SEQ ID NO: 2100167 - RNA, 19 nt, Homo sapiens
  misc_RNA (1)...(19): siRNA sense strand
uauaaggacuguuuugaug

SEQ ID NO: 2100168 - RNA, 19 nt, Homo sapiens
  misc_RNA (1)...(19): siRNA sense strand
ccaaauaugccuacaucca

SEQ ID NO: 2100169 - RNA, 19 nt, Homo sapiens
  misc_RNA (1)...(19): siRNA sense strand
gaucagacugcagcucaaa

SEQ ID NO: 2100170 - RNA, 19 nt, Homo sapiens
  misc_RNA (1)...(19): siRNA sense strand
gagaauacaaguaauuagc

SEQ ID NO: 2100171 - RNA, 19 nt, Homo sapiens
  misc_RNA (1)...(19): siRNA sense strand
guguggaguuucucuggaa

SEQ ID NO: 2100172 - RNA, 19 nt, Homo sapiens
  misc_RNA (1)...(19): siRNA sense strand
gacaaccaaguaaagcuuu

SEQ ID NO: 2100173 - RNA, 19 nt, Homo sapiens
  misc_RNA (1)...(19): siRNA sense strand
caucaaccgcuuugucuuc

SEQ ID NO: 2100174 - RNA, 19 nt, Homo sapiens
  misc_RNA (1)...(19): siRNA sense strand
cuacuaucguguggcauuu

SEQ ID NO: 2100175 - RNA, 19 nt, Homo sapiens
  misc_RNA (1)...(19): siRNA sense strand
aagaggaccagcuggagua

SEQ ID NO: 2100176 - RNA, 19 nt, Homo sapiens
  misc_RNA (1)...(19): siRNA sense strand
ggaaaugcauguaaaguaa

SEQ ID NO: 2100177 - RNA, 19 nt, Homo sapiens
  misc_RNA (1)...(19): siRNA sense strand
gcaaguuccugaugauuua

SEQ ID NO: 2100178 - RNA, 19 nt, Homo sapiens
  misc_RNA (1)...(19): siRNA sense strand
gaacuuggauuucguagug

SEQ ID NO: 2100179 - RNA, 19 nt, Homo sapiens
  misc_RNA (1)...(19): siRNA sense strand
ucacguagcccuaaauuua

SEQ ID NO: 2100180 - RNA, 19 nt, Homo sapiens
  misc_RNA (1)...(19): siRNA sense strand
ugaagaagauguaagcaua

SEQ ID NO: 2100181 - RNA, 19 nt, Homo sapiens
  misc_RNA (1)...(19): siRNA sense strand
gaaaucucaucaccuguua

SEQ ID NO: 2100182 - RNA, 19 nt, Homo sapiens
  misc_RNA (1)...(19): siRNA sense strand
ggucauaccuuuagugguu

SEQ ID NO: 2100183 - RNA, 19 nt, Homo sapiens
  misc_RNA (1)...(19): siRNA sense strand
gaacagaaacucuagcauu

SEQ ID NO: 2100184 - RNA, 19 nt, Homo sapiens
  misc_RNA (1)...(19): siRNA sense strand
gaagcaaugucucuugaaa

SEQ ID NO: 2100185 - RNA, 19 nt, Homo sapiens
  misc_RNA (1)...(19): siRNA sense strand
gcacaagaauaaacagauu

SEQ ID NO: 2100186 - RNA, 19 nt, Homo sapiens
  misc_RNA (1)...(19): siRNA sense strand
ccagaaaugucaaacagua

SEQ ID NO: 2100187 - RNA, 19 nt, Homo sapiens
  misc_RNA (1)...(19): siRNA sense strand
caagauaccuuauuuacuc

SEQ ID NO: 2100188 - RNA, 19 nt, Homo sapiens
  misc_RNA (1)...(19): siRNA sense strand
ggaaaaugcuguauuauug

SEQ ID NO: 2100189 - RNA, 19 nt, Homo sapiens
  misc_RNA (1)...(19): siRNA sense strand
ggaacuagauggaggaaau

SEQ ID NO: 2100190 - RNA, 19 nt, Homo sapiens
  misc_RNA (1)...(19): siRNA sense strand
agacggugcucuauuguua

SEQ ID NO: 2100191 - RNA, 19 nt, Homo sapiens
  misc_RNA (1)...(19): siRNA sense strand
aaaugagacuuacguguua

SEQ ID NO: 2100192 - RNA, 19 nt, Homo sapiens
  misc_RNA (1)...(19): siRNA sense strand
aacagaaacucuagcauua

SEQ ID NO: 2100193 - RNA, 19 nt, Homo sapiens
  misc_RNA (1)...(19): siRNA sense strand
ggaauugaauguaggaaau

SEQ ID NO: 2100194 - RNA, 19 nt, Homo sapiens
  misc_RNA (1)...(19): siRNA sense strand
gaaaugauguaucugaucu

SEQ ID NO: 2100195 - RNA, 19 nt, Homo sapiens
  misc_RNA (1)...(19): siRNA sense strand
gaacuuggucagaauuaua

SEQ ID NO: 2100196 - RNA, 19 nt, Homo sapiens
  misc_RNA (1)...(19): siRNA sense strand
ccaaagaaguagcaacuga

SEQ ID NO: 2100197 - RNA, 19 nt, Homo sapiens
  misc_RNA (1)...(19): siRNA sense strand
gaaguuugaugguucagaa

SEQ ID NO: 2100198 - RNA, 19 nt, Homo sapiens
  misc_RNA (1)...(19): siRNA sense strand
cagaagcuauuuaugagua

SEQ ID NO: 2100199 - RNA, 19 nt, Homo sapiens
  misc_RNA (1)...(19): siRNA sense strand
guagauaaguccucugaga

SEQ ID NO: 2100200 - RNA, 19 nt, Homo sapiens
  misc_RNA (1)...(19): siRNA sense strand
cagaaugugugucagauaa

SEQ ID NO: 2100201 - RNA, 19 nt, Homo sapiens
  misc_RNA (1)...(19): siRNA sense strand
caagaccucuggcauuauu

SEQ ID NO: 2100202 - RNA, 19 nt, Homo sapiens
  misc_RNA (1)...(19): siRNA sense strand
gaaaugcacgagaaacuaa

SEQ ID NO: 2100203 - RNA, 19 nt, Homo sapiens
  misc_RNA (1)...(19): siRNA sense strand
ggaagagccuauggaaauu

SEQ ID NO: 2100204 - RNA, 19 nt, Homo sapiens
  misc_RNA (1)...(19): siRNA sense strand
gaugaaggcuuuucuaauu

SEQ ID NO: 2100205 - RNA, 19 nt, Homo sapiens
  misc_RNA (1)...(19): siRNA sense strand
gaacaacucuccccacuau

SEQ ID NO: 2100206 - RNA, 19 nt, Homo sapiens
  misc_RNA (1)...(19): siRNA sense strand
aaacugagauuucugaaca

SEQ ID NO: 2100207 - RNA, 19 nt, Homo sapiens
  misc_RNA (1)...(19): siRNA sense strand
gaccucaucuuccugcuaa

SEQ ID NO: 2100208 - RNA, 19 nt, Homo sapiens
  misc_RNA (1)...(19): siRNA sense strand
gaauauuccuuuacaaguc

SEQ ID NO: 2100209 - RNA, 19 nt, Homo sapiens
  misc_RNA (1)...(19): siRNA sense strand
gaagagaucuggaaaaugg

SEQ ID NO: 2100210 - RNA, 19 nt, Homo sapiens
  misc_RNA (1)...(19): siRNA sense strand
ugaaggcauuguagucuua

SEQ ID NO: 2100211 - RNA, 19 nt, Homo sapiens
  misc_RNA (1)...(19): siRNA sense strand
ccacagagaccuucagauu

SEQ ID NO: 2100212 - RNA, 19 nt, Homo sapiens
  misc_RNA (1)...(19): siRNA sense strand
ggugaugccuuagaacaua

SEQ ID NO: 2100213 - RNA, 19 nt, Homo sapiens
  misc_RNA (1)...(19): siRNA sense strand
cagaucaaaugguaaauga

SEQ ID NO: 2100214 - RNA, 19 nt, Homo sapiens
  misc_RNA (1)...(19): siRNA sense strand
ggacaacucauuagagcua

SEQ ID NO: 2100215 - RNA, 19 nt, Homo sapiens
  misc_RNA (1)...(19): siRNA sense strand
gagaggaaauuugugauau

SEQ ID NO: 2100216 - RNA, 19 nt, Homo sapiens
  misc_RNA (1)...(19): siRNA sense strand
gcauugacuucucaccaua

SEQ ID NO: 2100217 - RNA, 19 nt, Homo sapiens
  misc_RNA (1)...(19): siRNA sense strand
ugaaggaaaugcauguaaa

SEQ ID NO: 2100218 - RNA, 19 nt, Homo sapiens
  misc_RNA (1)...(19): siRNA sense strand
gauacccucuucacuauug

SEQ ID NO: 2100219 - RNA, 19 nt, Homo sapiens
  misc_RNA (1)...(19): siRNA sense strand
ugaugaaguuccuaaagua

SEQ ID NO: 2100220 - RNA, 19 nt, Homo sapiens
  misc_RNA (1)...(19): siRNA sense strand
gaauguuacuguugaagga

SEQ ID NO: 2100221 - RNA, 19 nt, Homo sapiens
  misc_RNA (1)...(19): siRNA sense strand
gaagaagauguaagcauaa

SEQ ID NO: 2100222 - RNA, 19 nt, Homo sapiens
  misc_RNA (1)...(19): siRNA sense strand
ggaaauuugugauauggau

SEQ ID NO: 2100223 - RNA, 19 nt, Homo sapiens
  misc_RNA (1)...(19): siRNA sense strand
ucagauauuucuucgcuuu

SEQ ID NO: 2100224 - RNA, 19 nt, Homo sapiens
  misc_RNA (1)...(19): siRNA sense strand
aacaagaccucuggcauua

SEQ ID NO: 2100225 - RNA, 19 nt, Homo sapiens
  misc_RNA (1)...(19): siRNA sense strand
ggugaagacucguggacua

SEQ ID NO: 2100226 - RNA, 19 nt, Homo sapiens
  misc_RNA (1)...(19): siRNA sense strand
gaucuacacucaucugaag

SEQ ID NO: 2100227 - RNA, 19 nt, Homo sapiens
  misc_RNA (1)...(19): siRNA sense strand
gaggagaucuaaagguugu

SEQ ID NO: 2100228 - RNA, 19 nt, Homo sapiens
  misc_RNA (1)...(19): siRNA sense strand
uacaguaacuucagauuug

SEQ ID NO: 2100229 - RNA, 19 nt, Homo sapiens
  misc_RNA (1)...(19): siRNA sense strand
ucagaaacagcaagaaaua

SEQ ID NO: 2100230 - RNA, 19 nt, Homo sapiens
  misc_RNA (1)...(19): siRNA sense strand
gaagacucguggacuagaa

SEQ ID NO: 2100231 - RNA, 19 nt, Homo sapiens
  misc_RNA (1)...(19): siRNA sense strand
ugaagaagcagcaauagaa

SEQ ID NO: 2100232 - RNA, 19 nt, Homo sapiens
  misc_RNA (1)...(19): siRNA sense strand
gugaggagaucuaaagguu

SEQ ID NO: 2100233 - RNA, 19 nt, Homo sapiens
  misc_RNA (1)...(19): siRNA sense strand
gauaaucagguucaucuuu

SEQ ID NO: 2100234 - RNA, 19 nt, Homo sapiens
  misc_RNA (1)...(19): siRNA sense strand
ggcaaaccuuuauuacuuu

SEQ ID NO: 2100235 - RNA, 19 nt, Homo sapiens
  misc_RNA (1)...(19): siRNA sense strand
gguuuauccugaagaguua

SEQ ID NO: 2100236 - RNA, 19 nt, Homo sapiens
  misc_RNA (1)...(19): siRNA sense strand
cccauuaacugaauugauu

SEQ ID NO: 2100237 - RNA, 19 nt, Homo sapiens
  misc_RNA (1)...(19): siRNA sense strand
gcaaagcaguuggaaaaua

SEQ ID NO: 2100238 - RNA, 19 nt, Homo sapiens
  misc_RNA (1)...(19): siRNA sense strand
ugaaguauuuccuguauca

SEQ ID NO: 2100239 - RNA, 19 nt, Homo sapiens
  misc_RNA (1)...(19): siRNA sense strand
caaagcaguuggaaaauaa

SEQ ID NO: 2100240 - RNA, 19 nt, Homo sapiens
  misc_RNA (1)...(19): siRNA sense strand
uaaacugaaugccaaagaa

SEQ ID NO: 2100241 - RNA, 19 nt, Homo sapiens
  misc_RNA (1)...(19): siRNA sense strand
agacacagcuaaacugaau

SEQ ID NO: 2100242 - RNA, 19 nt, Homo sapiens
  misc_RNA (1)...(19): siRNA sense strand
gaauggaacuaagagauca

SEQ ID NO: 2100243 - RNA, 19 nt, Homo sapiens
  misc_RNA (1)...(19): siRNA sense strand
ggaaacuguugaaaugaug

SEQ ID NO: 2100244 - RNA, 19 nt, Homo sapiens
  misc_RNA (1)...(19): siRNA sense strand
aaaguuaaaucaccacaga

SEQ ID NO: 2100245 - RNA, 19 nt, Homo sapiens
  misc_RNA (1)...(19): siRNA sense strand
ccaagauaauguccaguuu

SEQ ID NO: 2100246 - RNA, 19 nt, Homo sapiens
  misc_RNA (1)...(19): siRNA sense strand
aggcaaaccuuuauuacuu

SEQ ID NO: 2100247 - RNA, 19 nt, Homo sapiens
  misc_RNA (1)...(19): siRNA sense strand
gcaaaugacaguccuagug

SEQ ID NO: 2100248 - RNA, 19 nt, Homo sapiens
  misc_RNA (1)...(19): siRNA sense strand
aagaguccauugcauauaa

SEQ ID NO: 2100249 - RNA, 19 nt, Homo sapiens
  misc_RNA (1)...(19): siRNA sense strand
gaacaaacagggaauaaaa

SEQ ID NO: 2100250 - RNA, 19 nt, Homo sapiens
  misc_RNA (1)...(19): siRNA sense strand
ggaaugugguguaucagau

SEQ ID NO: 2100251 - RNA, 19 nt, Homo sapiens
  misc_RNA (1)...(19): siRNA sense strand
gaacuugauccuucacuug

SEQ ID NO: 2100252 - RNA, 19 nt, Homo sapiens
  misc_RNA (1)...(19): siRNA sense strand
aaacugguauuucugaaga

SEQ ID NO: 2100253 - RNA, 19 nt, Homo sapiens
  misc_RNA (1)...(19): siRNA sense strand
cagccaaacugaaacuuga

SEQ ID NO: 2100254 - RNA, 19 nt, Homo sapiens
  misc_RNA (1)...(19): siRNA sense strand
guauauaguugucugaaca

SEQ ID NO: 2100255 - RNA, 19 nt, Homo sapiens
  misc_RNA (1)...(19): siRNA sense strand
gaacuugugcugugaggaa

SEQ ID NO: 2100256 - RNA, 19 nt, Homo sapiens
  misc_RNA (1)...(19): siRNA sense strand
gaagaacuuggauuucgua

SEQ ID NO: 2100257 - RNA, 19 nt, Homo sapiens
  misc_RNA (1)...(19): siRNA sense strand
ucucaucaccuguuaauaa

SEQ ID NO: 2100258 - RNA, 19 nt, Homo sapiens
  misc_RNA (1)...(19): siRNA sense strand
ucucugagcuaauaauaga

SEQ ID NO: 2100259 - RNA, 19 nt, Homo sapiens
  misc_RNA (1)...(19): siRNA sense strand
gaaaguggaggaaccauca

SEQ ID NO: 2100260 - RNA, 19 nt, Homo sapiens
  misc_RNA (1)...(19): siRNA sense strand
gaaaugagcacugaagaag

SEQ ID NO: 2100261 - RNA, 19 nt, Homo sapiens
  misc_RNA (1)...(19): siRNA sense strand
ggaacugagucuagagaau

SEQ ID NO: 2100262 - RNA, 19 nt, Homo sapiens
  misc_RNA (1)...(19): siRNA sense strand
aagaugauguguuaccuaa

SEQ ID NO: 2100263 - RNA, 19 nt, Homo sapiens
  misc_RNA (1)...(19): siRNA sense strand
uaacaagaccucuggcauu

SEQ ID NO: 2100264 - RNA, 19 nt, Homo sapiens
  misc_RNA (1)...(19): siRNA sense strand
uaaguggcauggagagaaa

SEQ ID NO: 2100265 - RNA, 19 nt, Homo sapiens
  misc_RNA (1)...(19): siRNA sense strand
gaacaagccccaauucaaa

SEQ ID NO: 2100266 - RNA, 19 nt, Homo sapiens
  misc_RNA (1)...(19): siRNA sense strand
uagagaauguuacuguuga

SEQ ID NO: 2100267 - RNA, 19 nt, Homo sapiens
  misc_RNA (1)...(19): siRNA sense strand
gaacugagucuagagaaug

SEQ ID NO: 2100268 - RNA, 19 nt, Homo sapiens
  misc_RNA (1)...(19): siRNA sense strand
gcagaauauuccuuuacaa

SEQ ID NO: 2100269 - RNA, 19 nt, Homo sapiens
  misc_RNA (1)...(19): siRNA sense strand
cagaagaguccauugcaua

SEQ ID NO: 2100270 - RNA, 19 nt, Homo sapiens
  misc_RNA (1)...(19): siRNA sense strand
aaaggaggauucuaagaug

SEQ ID NO: 2100271 - RNA, 19 nt, Homo sapiens
  misc_RNA (1)...(19): siRNA sense strand
ggagaucaccaucccauga

SEQ ID NO: 2100272 - RNA, 19 nt, Homo sapiens
  misc_RNA (1)...(19): siRNA sense strand
cauguugacugcagaaaug

SEQ ID NO: 2100273 - RNA, 19 nt, Homo sapiens
  misc_RNA (1)...(19): siRNA sense strand
gaagagcaucucaggguuu

SEQ ID NO: 2100274 - RNA, 19 nt, Homo sapiens
  misc_RNA (1)...(19): siRNA sense strand
cgaacacgguaucaaacua

SEQ ID NO: 2100275 - RNA, 19 nt, Homo sapiens
  misc_RNA (1)...(19): siRNA sense strand
gaagaguccauugcauaua

SEQ ID NO: 2100276 - RNA, 19 nt, Homo sapiens
  misc_RNA (1)...(19): siRNA sense strand
gaaaggagacagaacauua

SEQ ID NO: 2100277 - RNA, 19 nt, Homo sapiens
  misc_RNA (1)...(19): siRNA sense strand
gaagaacgcucuggguuaa

SEQ ID NO: 2100278 - RNA, 19 nt, Homo sapiens
  misc_RNA (1)...(19): siRNA sense strand
gagaaaaucugaaguguaa

SEQ ID NO: 2100279 - RNA, 19 nt, Homo sapiens
  misc_RNA (1)...(19): siRNA sense strand
gaaaucaguuaugggaaua

SEQ ID NO: 2100280 - RNA, 19 nt, Homo sapiens
  misc_RNA (1)...(19): siRNA sense strand
ggaagaacgcucuggguua

SEQ ID NO: 2100281 - RNA, 19 nt, Homo sapiens
  misc_RNA (1)...(19): siRNA sense strand
ggaaaucaguuaugggaau

SEQ ID NO: 2100282 - RNA, 19 nt, Homo sapiens
  misc_RNA (1)...(19): siRNA sense strand
uaacaaaugugaugacaag

SEQ ID NO: 2100283 - RNA, 19 nt, Homo sapiens
  misc_RNA (1)...(19): siRNA sense strand
gagagaaucuugaaauguc

SEQ ID NO: 2100284 - RNA, 19 nt, Homo sapiens
  misc_RNA (1)...(19): siRNA sense strand
ggaauaugaugcugagaga

SEQ ID NO: 2100285 - RNA, 19 nt, Homo sapiens
  misc_RNA (1)...(19): siRNA sense strand
gauaggaacuuacgaugca

SEQ ID NO: 2100286 - RNA, 19 nt, Homo sapiens
  misc_RNA (1)...(19): siRNA sense strand
caauggaccuguaaucaug

SEQ ID NO: 2100287 - RNA, 19 nt, Homo sapiens
  misc_RNA (1)...(19): siRNA sense strand
gaaacuacuuugaagagau

SEQ ID NO: 2100288 - RNA, 19 nt, Homo sapiens
  misc_RNA (1)...(19): siRNA sense strand
caaaguggauuauggagau

SEQ ID NO: 2100289 - RNA, 19 nt, Homo sapiens
  misc_RNA (1)...(19): siRNA sense strand
ggaagcagaucccaacagu

SEQ ID NO: 2100290 - RNA, 19 nt, Homo sapiens
  misc_RNA (1)...(19): siRNA sense strand
gaaggcaacuccauacacu

SEQ ID NO: 2100291 - RNA, 19 nt, Homo sapiens
  misc_RNA (1)...(19): siRNA sense strand
uaaccaaugucucgaugaa

SEQ ID NO: 2100292 - RNA, 19 nt, Homo sapiens
  misc_RNA (1)...(19): siRNA sense strand
gauaagaaauguugaaacc

SEQ ID NO: 2100293 - RNA, 19 nt, Homo sapiens
  misc_RNA (1)...(19): siRNA sense strand
ucauugaugugauuaguga

SEQ ID NO: 2100294 - RNA, 19 nt, Homo sapiens
  misc_RNA (1)...(19): siRNA sense strand
ggagaugugucagucagaa

SEQ ID NO: 2100295 - RNA, 19 nt, Homo sapiens
  misc_RNA (1)...(19): siRNA sense strand
gacagaaacuacuuugaag

SEQ ID NO: 2100296 - RNA, 19 nt, Homo sapiens
  misc_RNA (1)...(19): siRNA sense strand
caaaugugaugacaagaag

SEQ ID NO: 2100297 - RNA, 19 nt, Homo sapiens
  misc_RNA (1)...(19): siRNA sense strand
gagaggaaaucaguuaugg

SEQ ID NO: 2100298 - RNA, 19 nt, Homo sapiens
  misc_RNA (1)...(19): siRNA sense strand
uuacacugcugacaaagaa

SEQ ID NO: 2100299 - RNA, 19 nt, Homo sapiens
  misc_RNA (1)...(19): siRNA sense strand
ugacagaaacuacuuugaa

SEQ ID NO: 2100300 - RNA, 19 nt, Homo sapiens
  misc_RNA (1)...(19): siRNA sense strand
gaauaaaggaagacaggaa

SEQ ID NO: 2100301 - RNA, 19 nt, Homo sapiens
  misc_RNA (1)...(19): siRNA sense strand
gauguaagauuagaaggau

SEQ ID NO: 2100302 - RNA, 19 nt, Homo sapiens
  misc_RNA (1)...(19): siRNA sense strand
gaucucugcugccugcauu

SEQ ID NO: 2100303 - RNA, 19 nt, Homo sapiens
  misc_RNA (1)...(19): siRNA sense strand
uugaagagauaggaacuua

SEQ ID NO: 2100304 - RNA, 19 nt, Homo sapiens
  misc_RNA (1)...(19): siRNA sense strand
ggagauuugucuacugcaa

SEQ ID NO: 2100305 - RNA, 19 nt, Homo sapiens
  misc_RNA (1)...(19): siRNA sense strand
agaacgcucuggguuaaua

SEQ ID NO: 2100306 - RNA, 19 nt, Homo sapiens
  misc_RNA (1)...(19): siRNA sense strand
gggaaaagcuguguugauu

SEQ ID NO: 2100307 - RNA, 19 nt, Homo sapiens
  misc_RNA (1)...(19): siRNA sense strand
gaacuuacgaugcaggaau

SEQ ID NO: 2100308 - RNA, 19 nt, Homo sapiens
  misc_RNA (1)...(19): siRNA sense strand
gaccuguaaucauguuaaa

SEQ ID NO: 2100309 - RNA, 19 nt, Homo sapiens
  misc_RNA (1)...(19): siRNA sense strand
gaauguaacaaaugugaug

SEQ ID NO: 2100310 - RNA, 19 nt, Homo sapiens
  misc_RNA (1)...(19): siRNA sense strand
uaugagaggaaaucaguua

SEQ ID NO: 2100311 - RNA, 19 nt, Homo sapiens
  misc_RNA (1)...(19): siRNA sense strand
gcauugagggcuguuauuu

SEQ ID NO: 2100312 - RNA, 19 nt, Homo sapiens
  misc_RNA (1)...(19): siRNA sense strand
gugauuugauugcccuuaa

SEQ ID NO: 2100313 - RNA, 19 nt, Homo sapiens
  misc_RNA (1)...(19): siRNA sense strand
gaaauggacaggaggaaag

SEQ ID NO: 2100314 - RNA, 19 nt, Homo sapiens
  misc_RNA (1)...(19): siRNA sense strand
uuagaaggauguaagacaa

SEQ ID NO: 2100315 - RNA, 19 nt, Homo sapiens
  misc_RNA (1)...(19): siRNA sense strand
ggucauaacuuuucuugau

SEQ ID NO: 2100316 - RNA, 19 nt, Homo sapiens
  misc_RNA (1)...(19): siRNA sense strand
aagggcaggucauaacuuu

SEQ ID NO: 2100317 - RNA, 19 nt, Homo sapiens
  misc_RNA (1)...(19): siRNA sense strand
gauuugauugcccuuaaua

SEQ ID NO: 2100318 - RNA, 19 nt, Homo sapiens
  misc_RNA (1)...(19): siRNA sense strand
ccuuggagauuguuacuug

SEQ ID NO: 2100319 - RNA, 19 nt, Homo sapiens
  misc_RNA (1)...(19): siRNA sense strand
ggagagaaucuugaaaugu

SEQ ID NO: 2100320 - RNA, 19 nt, Homo sapiens
  misc_RNA (1)...(19): siRNA sense strand
caacaguggcugcuaagga

SEQ ID NO: 2100321 - RNA, 19 nt, Homo sapiens
  misc_RNA (1)...(19): siRNA sense strand
gugcuuggauguuucuaga

SEQ ID NO: 2100322 - RNA, 19 nt, Homo sapiens
  misc_RNA (1)...(19): siRNA sense strand
ggugagauaagaaauguug

SEQ ID NO: 2100323 - RNA, 19 nt, Homo sapiens
  misc_RNA (1)...(19): siRNA sense strand
cccaagacguuauuacuca

SEQ ID NO: 2100324 - RNA, 19 nt, Homo sapiens
  misc_RNA (1)...(19): siRNA sense strand
ggucaugucaucaacaaga

SEQ ID NO: 2100325 - RNA, 19 nt, Homo sapiens
  misc_RNA (1)...(19): siRNA sense strand
guuacuugcucccauguug

SEQ ID NO: 2100326 - RNA, 19 nt, Homo sapiens
  misc_RNA (1)...(19): siRNA sense strand
gcacuggucaugucaucaa

SEQ ID NO: 2100327 - RNA, 19 nt, Homo sapiens
  misc_RNA (1)...(19): siRNA sense strand
guuaauacgugcccgucuu

SEQ ID NO: 2100328 - RNA, 19 nt, Homo sapiens
  misc_RNA (1)...(19): siRNA sense strand
ggaccuguaaucauguuaa

SEQ ID NO: 2100329 - RNA, 19 nt, Homo sapiens
  misc_RNA (1)...(19): siRNA sense strand
ggaaaggagacagaacauu

SEQ ID NO: 2100330 - RNA, 19 nt, Homo sapiens
  misc_RNA (1)...(19): siRNA sense strand
gauguggguucuuguugau

SEQ ID NO: 2100331 - RNA, 19 nt, Homo sapiens
  misc_RNA (1)...(19): siRNA sense strand
auauucaacugucauggua

SEQ ID NO: 2100332 - RNA, 19 nt, Homo sapiens
  misc_RNA (1)...(19): siRNA sense strand
caagaagggccaggagaaa

SEQ ID NO: 2100333 - RNA, 19 nt, Homo sapiens
  misc_RNA (1)...(19): siRNA sense strand
aacaguggcugcuaaggaa

SEQ ID NO: 2100334 - RNA, 19 nt, Homo sapiens
  misc_RNA (1)...(19): siRNA sense strand
ggauguuucuagacucaau

SEQ ID NO: 2100335 - RNA, 19 nt, Homo sapiens
  misc_RNA (1)...(19): siRNA sense strand
gaaccgaugacuugugcuu

SEQ ID NO: 2100336 - RNA, 19 nt, Homo sapiens
  misc_RNA (1)...(19): siRNA sense strand
ugauguggguucuuguuga

SEQ ID NO: 2100337 - RNA, 19 nt, Homo sapiens
  misc_RNA (1)...(19): siRNA sense strand
gaggaaaggagacagaaca

SEQ ID NO: 2100338 - RNA, 19 nt, Homo sapiens
  misc_RNA (1)...(19): siRNA sense strand
caaguugacauuagagaau

SEQ ID NO: 2100339 - RNA, 19 nt, Homo sapiens
  misc_RNA (1)...(19): siRNA sense strand
gguagaugaugccagugaa

SEQ ID NO: 2100340 - RNA, 19 nt, Homo sapiens
  misc_RNA (1)...(19): siRNA sense strand
aaagcuguguugauuccua

SEQ ID NO: 2100341 - RNA, 19 nt, Homo sapiens
  misc_RNA (1)...(19): siRNA sense strand
gacuugugcuuggauguuu

SEQ ID NO: 2100342 - RNA, 19 nt, Homo sapiens
  misc_RNA (1)...(19): siRNA sense strand
gaaauguugaaaccaauca

SEQ ID NO: 2100343 - RNA, 19 nt, Homo sapiens
  misc_RNA (1)...(19): siRNA sense strand
uggagagaaucuugaaaug

SEQ ID NO: 2100344 - RNA, 19 nt, Homo sapiens
  misc_RNA (1)...(19): siRNA sense strand
ucuuguugaugucuucuua

SEQ ID NO: 2100345 - RNA, 19 nt, Homo sapiens
  misc_RNA (1)...(19): siRNA sense strand
gcacucuccuuagaacugu

SEQ ID NO: 2100346 - RNA, 19 nt, Homo sapiens
  misc_RNA (1)...(19): siRNA sense strand
caaguguagucauuguguu

SEQ ID NO: 2100347 - RNA, 19 nt, Homo sapiens
  misc_RNA (1)...(19): siRNA sense strand
ccaagaagggccaggagaa

SEQ ID NO: 2100348 - RNA, 19 nt, Homo sapiens
  misc_RNA (1)...(19): siRNA sense strand
guagucauuguguuucaua

SEQ ID NO: 2100349 - RNA, 19 nt, Homo sapiens
  misc_RNA (1)...(19): siRNA sense strand
cacacuaucuacucucaga

SEQ ID NO: 2100350 - RNA, 19 nt, Homo sapiens
  misc_RNA (1)...(19): siRNA sense strand
ugcgacauguuaacaguaa

SEQ ID NO: 2100351 - RNA, 19 nt, Homo sapiens
  misc_RNA (1)...(19): siRNA sense strand
ggauggaugaauuuaaaga

SEQ ID NO: 2100352 - RNA, 19 nt, Homo sapiens
  misc_RNA (1)...(19): siRNA sense strand
ucucagaggucaucuuggu

SEQ ID NO: 2100353 - RNA, 19 nt, Homo sapiens
  misc_RNA (1)...(19): siRNA sense strand
cagugaauguaacaaaugu

SEQ ID NO: 2100354 - RNA, 19 nt, Homo sapiens
  misc_RNA (1)...(19): siRNA sense strand
agacucacguugcgacaug

SEQ ID NO: 2100355 - RNA, 19 nt, Homo sapiens
  misc_RNA (1)...(19): siRNA sense strand
cuaaagaugaccaggagaa

SEQ ID NO: 2100356 - RNA, 19 nt, Homo sapiens
  misc_RNA (1)...(19): siRNA sense strand
aaguuuggauggaugaauu

SEQ ID NO: 2100357 - RNA, 19 nt, Homo sapiens
  misc_RNA (1)...(19): siRNA sense strand
acaaaugugaugacaagaa

SEQ ID NO: 2100358 - RNA, 19 nt, Homo sapiens
  misc_RNA (1)...(19): siRNA sense strand
gaagagauaggaacuuacg

SEQ ID NO: 2100359 - RNA, 19 nt, Homo sapiens
  misc_RNA (1)...(19): siRNA sense strand
gugaauguaacaaauguga

SEQ ID NO: 2100360 - RNA, 19 nt, Homo sapiens
  misc_RNA (1)...(19): siRNA sense strand
ugauugcccuuaauagaag

SEQ ID NO: 2100361 - RNA, 19 nt, Homo sapiens
  misc_RNA (1)...(19): siRNA sense strand
auugagggcuguuauuuca

SEQ ID NO: 2100362 - RNA, 19 nt, Homo sapiens
  misc_RNA (1)...(19): siRNA sense strand
gaugugauuagugaugaua

SEQ ID NO: 2100363 - RNA, 19 nt, Homo sapiens
  misc_RNA (1)...(19): siRNA sense strand
agucuacccugaugaacuu

SEQ ID NO: 2100364 - RNA, 19 nt, Homo sapiens
  misc_RNA (1)...(19): siRNA sense strand
gaaaaugaaagagcuguuu

SEQ ID NO: 2100365 - RNA, 19 nt, Homo sapiens
  misc_RNA (1)...(19): siRNA sense strand
uauggcugguggccuauuu

SEQ ID NO: 2100366 - RNA, 19 nt, Homo sapiens
  misc_RNA (1)...(19): siRNA sense strand
uggcaagaauaaaggaaga

SEQ ID NO: 2100367 - RNA, 19 nt, Homo sapiens
  misc_RNA (1)...(19): siRNA sense strand
uagacucaauggaccugua

SEQ ID NO: 2100368 - RNA, 19 nt, Homo sapiens
  misc_RNA (1)...(19): siRNA sense strand
agaaacuacuuugaagaga

SEQ ID NO: 2100369 - RNA, 19 nt, Homo sapiens
  misc_RNA (1)...(19): siRNA sense strand
aagcuguguugauuccuaa

SEQ ID NO: 2100370 - RNA, 19 nt, Homo sapiens
  misc_RNA (1)...(19): siRNA sense strand
guggagagaaucuugaaau

SEQ ID NO: 2100371 - RNA, 19 nt, Homo sapiens
  misc_RNA (1)...(19): siRNA sense strand
uaaagaugaccaggagaaa

SEQ ID NO: 2100372 - RNA, 19 nt, Homo sapiens
  misc_RNA (1)...(19): siRNA sense strand
ucccaacaguggcugcuaa

SEQ ID NO: 2100373 - RNA, 19 nt, Homo sapiens
  misc_RNA (1)...(19): siRNA sense strand
augcaggacuguaguggaa

SEQ ID NO: 2100374 - RNA, 19 nt, Homo sapiens
  misc_RNA (1)...(19): siRNA sense strand
cauaugagaggaaaucagu

SEQ ID NO: 2100375 - RNA, 19 nt, Homo sapiens
  misc_RNA (1)...(19): siRNA sense strand
ugagggcuguuauuucaag

SEQ ID NO: 2100376 - RNA, 19 nt, Homo sapiens
  misc_RNA (1)...(19): siRNA sense strand
ggacagaaguguuaaauaa

SEQ ID NO: 2100377 - RNA, 19 nt, Homo sapiens
  misc_RNA (1)...(19): siRNA sense strand
gaauaaagauggaaaccua

SEQ ID NO: 2100378 - RNA, 19 nt, Homo sapiens
  misc_RNA (1)...(19): siRNA sense strand
gaaggaacaugaaguagaa

SEQ ID NO: 2100379 - RNA, 19 nt, Homo sapiens
  misc_RNA (1)...(19): siRNA sense strand
gagauacgcuuucuucauu

SEQ ID NO: 2100380 - RNA, 19 nt, Homo sapiens
  misc_RNA (1)...(19): siRNA sense strand
gcaacaagcucaaccaaau

SEQ ID NO: 2100381 - RNA, 19 nt, Homo sapiens
  misc_RNA (1)...(19): siRNA sense strand
gaaagcaagugccaaauuc

SEQ ID NO: 2100382 - RNA, 19 nt, Homo sapiens
  misc_RNA (1)...(19): siRNA sense strand
gcauaaagaugucaaguuc

SEQ ID NO: 2100383 - RNA, 19 nt, Homo sapiens
  misc_RNA (1)...(19): siRNA sense strand
ucacaaaccugagaaauga

SEQ ID NO: 2100384 - RNA, 19 nt, Homo sapiens
  misc_RNA (1)...(19): siRNA sense strand
ccaaagcgaucauuuauag

SEQ ID NO: 2100385 - RNA, 19 nt, Homo sapiens
  misc_RNA (1)...(19): siRNA sense strand
gagcagaacccagcauuua

SEQ ID NO: 2100386 - RNA, 19 nt, Homo sapiens
  misc_RNA (1)...(19): siRNA sense strand
ggaccuggcugccuucuau

SEQ ID NO: 2100387 - RNA, 19 nt, Homo sapiens
  misc_RNA (1)...(19): siRNA sense strand
gaacgcggcugugauguga

SEQ ID NO: 2100388 - RNA, 19 nt, Homo sapiens
  misc_RNA (1)...(19): siRNA sense strand
gcacacccuuuaccaagua

SEQ ID NO: 2100389 - RNA, 19 nt, Homo sapiens
  misc_RNA (1)...(19): siRNA sense strand
gaaccuaagugacaagcaa

SEQ ID NO: 2100390 - RNA, 19 nt, Homo sapiens
  misc_RNA (1)...(19): siRNA sense strand
aaacagcagccucauauua

SEQ ID NO: 2100391 - RNA, 19 nt, Homo sapiens
  misc_RNA (1)...(19): siRNA sense strand
guucagaucucuucucaga

SEQ ID NO: 2100392 - RNA, 19 nt, Homo sapiens
  misc_RNA (1)...(19): siRNA sense strand
gaagaaagcaagugccaaa

SEQ ID NO: 2100393 - RNA, 19 nt, Homo sapiens
  misc_RNA (1)...(19): siRNA sense strand
uggaagaucugaguuauuu

SEQ ID NO: 2100394 - RNA, 19 nt, Homo sapiens
  misc_RNA (1)...(19): siRNA sense strand
gauacgcuuucuucauuua

SEQ ID NO: 2100395 - RNA, 19 nt, Homo sapiens
  misc_RNA (1)...(19): siRNA sense strand
caagagaacaggauaacua

SEQ ID NO: 2100396 - RNA, 19 nt, Homo sapiens
  misc_RNA (1)...(19): siRNA sense strand
gaaaauuccugaagaagaa

SEQ ID NO: 2100397 - RNA, 19 nt, Homo sapiens
  misc_RNA (1)...(19): siRNA sense strand
ggagaaggaacaugaagua

SEQ ID NO: 2100398 - RNA, 19 nt, Homo sapiens
  misc_RNA (1)...(19): siRNA sense strand
acaaagacauccacaguga

SEQ ID NO: 2100399 - RNA, 19 nt, Homo sapiens
  misc_RNA (1)...(19): siRNA sense strand
gaagaaaacuugaggaaca

SEQ ID NO: 2100400 - RNA, 19 nt, Homo sapiens
  misc_RNA (1)...(19): siRNA sense strand
gagaggaugcagugaaaua

SEQ ID NO: 2100401 - RNA, 19 nt, Homo sapiens
  misc_RNA (1)...(19): siRNA sense strand
uaaaggcugugcugaagaa

SEQ ID NO: 2100402 - RNA, 19 nt, Homo sapiens
  misc_RNA (1)...(19): siRNA sense strand
caagugggaggauauaaua

SEQ ID NO: 2100403 - RNA, 19 nt, Homo sapiens
  misc_RNA (1)...(19): siRNA sense strand
ccaaggcucucgaauugaa

SEQ ID NO: 2100404 - RNA, 19 nt, Homo sapiens
  misc_RNA (1)...(19): siRNA sense strand
gaaguuaaagcacgauuug

SEQ ID NO: 2100405 - RNA, 19 nt, Homo sapiens
  misc_RNA (1)...(19): siRNA sense strand
gggaagggauuggcucuuu

SEQ ID NO: 2100406 - RNA, 19 nt, Homo sapiens
  misc_RNA (1)...(19): siRNA sense strand
uaagugcgcugccauuugu

SEQ ID NO: 2100407 - RNA, 19 nt, Homo sapiens
  misc_RNA (1)...(19): siRNA sense strand
uaacuaagacuguuucuca

SEQ ID NO: 2100408 - RNA, 19 nt, Homo sapiens
  misc_RNA (1)...(19): siRNA sense strand
ccugauaucuugauuauac

SEQ ID NO: 2100409 - RNA, 19 nt, Homo sapiens
  misc_RNA (1)...(19): siRNA sense strand
aaaccaaagcgaucauuua

SEQ ID NO: 2100410 - RNA, 19 nt, Homo sapiens
  misc_RNA (1)...(19): siRNA sense strand
cuacaggacagaaguguua

SEQ ID NO: 2100411 - RNA, 19 nt, Homo sapiens
  misc_RNA (1)...(19): siRNA sense strand
gagaacaggauaacuaaga

SEQ ID NO: 2100412 - RNA, 19 nt, Homo sapiens
  misc_RNA (1)...(19): siRNA sense strand
gcagugaaauaucuugcuu

SEQ ID NO: 2100413 - RNA, 19 nt, Homo sapiens
  misc_RNA (1)...(19): siRNA sense strand
ugaaggagcuagaagaaag

SEQ ID NO: 2100414 - RNA, 19 nt, Homo sapiens
  misc_RNA (1)...(19): siRNA sense strand
gaagaggagugcaaacaac

SEQ ID NO: 2100415 - RNA, 19 nt, Homo sapiens
  misc_RNA (1)...(19): siRNA sense strand
ggaauggaauaaagaugga

SEQ ID NO: 2100416 - RNA, 19 nt, Homo sapiens
  misc_RNA (1)...(19): siRNA sense strand
gccuggagaugcaguuaua

SEQ ID NO: 2100417 - RNA, 19 nt, Homo sapiens
  misc_RNA (1)...(19): siRNA sense strand
ggaccagauacuagaauua

SEQ ID NO: 2100418 - RNA, 19 nt, Homo sapiens
  misc_RNA (1)...(19): siRNA sense strand
gcaagaggcugugaaacuc

SEQ ID NO: 2100419 - RNA, 19 nt, Homo sapiens
  misc_RNA (1)...(19): siRNA sense strand
guaccaguaugccuuaaga

SEQ ID NO: 2100420 - RNA, 19 nt, Homo sapiens
  misc_RNA (1)...(19): siRNA sense strand
ggaaggaaaugugauguac

SEQ ID NO: 2100421 - RNA, 19 nt, Homo sapiens
  misc_RNA (1)...(19): siRNA sense strand
ugaagaaggagcugcaaua

SEQ ID NO: 2100422 - RNA, 19 nt, Homo sapiens
  misc_RNA (1)...(19): siRNA sense strand
cagaaagggagccaaguua

SEQ ID NO: 2100423 - RNA, 19 nt, Homo sapiens
  misc_RNA (1)...(19): siRNA sense strand
ccaaacagcagccucauau

SEQ ID NO: 2100424 - RNA, 19 nt, Homo sapiens
  misc_RNA (1)...(19): siRNA sense strand
gaaacucugucccaccaau

SEQ ID NO: 2100425 - RNA, 19 nt, Homo sapiens
  misc_RNA (1)...(19): siRNA sense strand
gcaagagcgaagagaaaua

SEQ ID NO: 2100426 - RNA, 19 nt, Homo sapiens
  misc_RNA (1)...(19): siRNA sense strand
gaugagcaugccacaauua

SEQ ID NO: 2100427 - RNA, 19 nt, Homo sapiens
  misc_RNA (1)...(19): siRNA sense strand
gaccagauacuagaauuaa

SEQ ID NO: 2100428 - RNA, 19 nt, Homo sapiens
  misc_RNA (1)...(19): siRNA sense strand
gaaguugauugugacugua

SEQ ID NO: 2100429 - RNA, 19 nt, Homo sapiens
  misc_RNA (1)...(19): siRNA sense strand
gagaugguccagucccuua

SEQ ID NO: 2100430 - RNA, 19 nt, Homo sapiens
  misc_RNA (1)...(19): siRNA sense strand
gggaagacggcaaucauuu

SEQ ID NO: 2100431 - RNA, 19 nt, Homo sapiens
  misc_RNA (1)...(19): siRNA sense strand
gagcaagagcgaagagaaa

SEQ ID NO: 2100432 - RNA, 19 nt, Homo sapiens
  misc_RNA (1)...(19): siRNA sense strand
gaagaucugaguuauuuag

SEQ ID NO: 2100433 - RNA, 19 nt, Homo sapiens
  misc_RNA (1)...(19): siRNA sense strand
caaguccuaugaagccuuu

SEQ ID NO: 2100434 - RNA, 19 nt, Homo sapiens
  misc_RNA (1)...(19): siRNA sense strand
agaaggagcugcaauagac

SEQ ID NO: 2100435 - RNA, 19 nt, Homo sapiens
  misc_RNA (1)...(19): siRNA sense strand
gcagggaugggaagacuuu

SEQ ID NO: 2100436 - RNA, 19 nt, Homo sapiens
  misc_RNA (1)...(19): siRNA sense strand
ucaggaagcccaaguaugu

SEQ ID NO: 2100437 - RNA, 19 nt, Homo sapiens
  misc_RNA (1)...(19): siRNA sense strand
gcaugacugcccucuguua

SEQ ID NO: 2100438 - RNA, 19 nt, Homo sapiens
  misc_RNA (1)...(19): siRNA sense strand
caacaaagacauccacagu

SEQ ID NO: 2100439 - RNA, 19 nt, Homo sapiens
  misc_RNA (1)...(19): siRNA sense strand
gcagaaaauuccugaagaa

SEQ ID NO: 2100440 - RNA, 19 nt, Homo sapiens
  misc_RNA (1)...(19): siRNA sense strand
gaacacagaacuggcagaa

SEQ ID NO: 2100441 - RNA, 19 nt, Homo sapiens
  misc_RNA (1)...(19): siRNA sense strand
ggcuccagcucacuaauaa

SEQ ID NO: 2100442 - RNA, 19 nt, Homo sapiens
  misc_RNA (1)...(19): siRNA sense strand
gagcaugccacaauuacaa

SEQ ID NO: 2100443 - RNA, 19 nt, Homo sapiens
  misc_RNA (1)...(19): siRNA sense strand
cuacggacgucaauuagau

SEQ ID NO: 2100444 - RNA, 19 nt, Homo sapiens
  misc_RNA (1)...(19): siRNA sense strand
gcagaacccagcauuuaga

SEQ ID NO: 2100445 - RNA, 19 nt, Homo sapiens
  misc_RNA (1)...(19): siRNA sense strand
gaaauggcaguaugaaagu

SEQ ID NO: 2100446 - RNA, 19 nt, Homo sapiens
  misc_RNA (1)...(19): siRNA sense strand
ccacucaggaucuucauuu

SEQ ID NO: 2100447 - RNA, 19 nt, Homo sapiens
  misc_RNA (1)...(19): siRNA sense strand
gggaggauauaauaaccaa

SEQ ID NO: 2100448 - RNA, 19 nt, Homo sapiens
  misc_RNA (1)...(19): siRNA sense strand
gaagcccucucucaugcaa

SEQ ID NO: 2100449 - RNA, 19 nt, Homo sapiens
  misc_RNA (1)...(19): siRNA sense strand
ugaggagacugaagaggaa

SEQ ID NO: 2100450 - RNA, 19 nt, Homo sapiens
  misc_RNA (1)...(19): siRNA sense strand
gggcauuggcagauuguua

SEQ ID NO: 2100451 - RNA, 19 nt, Homo sapiens
  misc_RNA (1)...(19): siRNA sense strand
ucacucugcuccuggaauu

SEQ ID NO: 2100452 - RNA, 19 nt, Homo sapiens
  misc_RNA (1)...(19): siRNA sense strand
ggugagccgucuccugauu

SEQ ID NO: 2100453 - RNA, 19 nt, Homo sapiens
  misc_RNA (1)...(19): siRNA sense strand
ucaagggccucaguaagaa

SEQ ID NO: 2100454 - RNA, 19 nt, Homo sapiens
  misc_RNA (1)...(19): siRNA sense strand
caacaagcucaaccaaauu

SEQ ID NO: 2100455 - RNA, 19 nt, Homo sapiens
  misc_RNA (1)...(19): siRNA sense strand
ccaccucacugcagccaaa

SEQ ID NO: 2100456 - RNA, 19 nt, Homo sapiens
  misc_RNA (1)...(19): siRNA sense strand
ccaggaaaguaucuccaaa

SEQ ID NO: 2100457 - RNA, 19 nt, Homo sapiens
  misc_RNA (1)...(19): siRNA sense strand
aaggaaaugugauguacaa

SEQ ID NO: 2100458 - RNA, 19 nt, Homo sapiens
  misc_RNA (1)...(19): siRNA sense strand
uuccaaaccugauaucuug

SEQ ID NO: 2100459 - RNA, 19 nt, Homo sapiens
  misc_RNA (1)...(19): siRNA sense strand
gagggucugucagcauuaa

SEQ ID NO: 2100460 - RNA, 19 nt, Homo sapiens
  misc_RNA (1)...(19): siRNA sense strand
ggauggagaaggaacauga

SEQ ID NO: 2100461 - RNA, 19 nt, Homo sapiens
  misc_RNA (1)...(19): siRNA sense strand
aagagaggaugcagugaaa

SEQ ID NO: 2100462 - RNA, 19 nt, Homo sapiens
  misc_RNA (1)...(19): siRNA sense strand
aaacaccucuugggucuau

SEQ ID NO: 2100463 - RNA, 19 nt, Homo sapiens
  misc_RNA (1)...(19): siRNA sense strand
ggcaaucauuuccaaguug

SEQ ID NO: 2100464 - RNA, 19 nt, Homo sapiens
  misc_RNA (1)...(19): siRNA sense strand
acacagaacuggcagaaaa

SEQ ID NO: 2100465 - RNA, 19 nt, Homo sapiens
  misc_RNA (1)...(19): siRNA sense strand
ggaagggauuggcucuuuc

SEQ ID NO: 2100466 - RNA, 19 nt, Homo sapiens
  misc_RNA (1)...(19): siRNA sense strand
auagauggcuuaaaugaag

SEQ ID NO: 2100467 - RNA, 19 nt, Homo sapiens
  misc_RNA (1)...(19): siRNA sense strand
uuccaaggcucucgaauug

SEQ ID NO: 2100468 - RNA, 19 nt, Homo sapiens
  misc_RNA (1)...(19): siRNA sense strand
gacaugagacccuucaaug

SEQ ID NO: 2100469 - RNA, 19 nt, Homo sapiens
  misc_RNA (1)...(19): siRNA sense strand
uggaauuccuccuuucaaa

SEQ ID NO: 2100470 - RNA, 19 nt, Homo sapiens
  misc_RNA (1)...(19): siRNA sense strand
ggagagggguuccaccuuu

SEQ ID NO: 2100471 - RNA, 19 nt, Homo sapiens
  misc_RNA (1)...(19): siRNA sense strand
gaacaugaaguagaaguca

SEQ ID NO: 2100472 - RNA, 19 nt, Homo sapiens
  misc_RNA (1)...(19): siRNA sense strand
gaagaaggagcugcaauag

SEQ ID NO: 2100473 - RNA, 19 nt, Homo sapiens
  misc_RNA (1)...(19): siRNA sense strand
gaaagggaggcaagaagga

SEQ ID NO: 2100474 - RNA, 19 nt, Homo sapiens
  misc_RNA (1)...(19): siRNA sense strand
gcaagugggaggauauaau

SEQ ID NO: 2100475 - RNA, 19 nt, Homo sapiens
  misc_RNA (1)...(19): siRNA sense strand
gagaaauggcaguaugaaa

SEQ ID NO: 2100476 - RNA, 19 nt, Homo sapiens
  misc_RNA (1)...(19): siRNA sense strand
gggaagaccucacaucuga

SEQ ID NO: 2100477 - RNA, 19 nt, Homo sapiens
  misc_RNA (1)...(19): siRNA sense strand
gaaaugagacaauggagua

SEQ ID NO: 2100478 - RNA, 19 nt, Homo sapiens
  misc_RNA (1)...(19): siRNA sense strand
uaaagaaggugguggaaga

SEQ ID NO: 2100479 - RNA, 19 nt, Homo sapiens
  misc_RNA (1)...(19): siRNA sense strand
ugaaauaccuuuacagcuu

SEQ ID NO: 2100480 - RNA, 19 nt, Homo sapiens
  misc_RNA (1)...(19): siRNA sense strand
acaaauagcuugacuacau

SEQ ID NO: 2100481 - RNA, 19 nt, Homo sapiens
  misc_RNA (1)...(19): siRNA sense strand
caagaaagcagucaaauuc

SEQ ID NO: 2100482 - RNA, 19 nt, Homo sapiens
  misc_RNA (1)...(19): siRNA sense strand
gguauucacucuagcagua

SEQ ID NO: 2100483 - RNA, 19 nt, Homo sapiens
  misc_RNA (1)...(19): siRNA sense strand
gcaacacauuugucauaua

SEQ ID NO: 2100484 - RNA, 19 nt, Homo sapiens
  misc_RNA (1)...(19): siRNA sense strand
gaaauuuguuuguccagaa

SEQ ID NO: 2100485 - RNA, 19 nt, Homo sapiens
  misc_RNA (1)...(19): siRNA sense strand
acagugaacucuauagauu

SEQ ID NO: 2100486 - RNA, 19 nt, Homo sapiens
  misc_RNA (1)...(19): siRNA sense strand
gauaggaacuguuaauacu

SEQ ID NO: 2100487 - RNA, 19 nt, Homo sapiens
  misc_RNA (1)...(19): siRNA sense strand
guccagaacuugcagaauu

SEQ ID NO: 2100488 - RNA, 19 nt, Homo sapiens
  misc_RNA (1)...(19): siRNA sense strand
ccaaaucuacaaacaguua

SEQ ID NO: 2100489 - RNA, 19 nt, Homo sapiens
  misc_RNA (1)...(19): siRNA sense strand
caacacauuugucauauac

SEQ ID NO: 2100490 - RNA, 19 nt, Homo sapiens
  misc_RNA (1)...(19): siRNA sense strand
gaguacaggugguagauga

SEQ ID NO: 2100491 - RNA, 19 nt, Homo sapiens
  misc_RNA (1)...(19): siRNA sense strand
gaauacugcugcccaacaa

SEQ ID NO: 2100492 - RNA, 19 nt, Homo sapiens
  misc_RNA (1)...(19): siRNA sense strand
gagcggguuucuccugaua

SEQ ID NO: 2100493 - RNA, 19 nt, Homo sapiens
  misc_RNA (1)...(19): siRNA sense strand
gcaaacguuucaaguacaa

SEQ ID NO: 2100494 - RNA, 19 nt, Homo sapiens
  misc_RNA (1)...(19): siRNA sense strand
gcacagaauauucagguuu

SEQ ID NO: 2100495 - RNA, 19 nt, Homo sapiens
  misc_RNA (1)...(19): siRNA sense strand
ugacaguccugcagauauu

SEQ ID NO: 2100496 - RNA, 19 nt, Homo sapiens
  misc_RNA (1)...(19): siRNA sense strand
caagauauccuuaccaaca

SEQ ID NO: 2100497 - RNA, 19 nt, Homo sapiens
  misc_RNA (1)...(19): siRNA sense strand
gaugauacuuugauuacug

SEQ ID NO: 2100498 - RNA, 19 nt, Homo sapiens
  misc_RNA (1)...(19): siRNA sense strand
gcaccugucccaacuguaa

SEQ ID NO: 2100499 - RNA, 19 nt, Homo sapiens
  misc_RNA (1)...(19): siRNA sense strand
gaauaccaaugaccuaaca

SEQ ID NO: 2100500 - RNA, 19 nt, Homo sapiens
  misc_RNA (1)...(19): siRNA sense strand
ccaaugaccuaacacacuu

SEQ ID NO: 2100501 - RNA, 19 nt, Homo sapiens
  misc_RNA (1)...(19): siRNA sense strand
ccaaguaguugcuaaugug

SEQ ID NO: 2100502 - RNA, 19 nt, Homo sapiens
  misc_RNA (1)...(19): siRNA sense strand
caggaaauauuacguuugu

SEQ ID NO: 2100503 - RNA, 19 nt, Homo sapiens
  misc_RNA (1)...(19): siRNA sense strand
agaagaaccugauccugaa

SEQ ID NO: 2100504 - RNA, 19 nt, Homo sapiens
  misc_RNA (1)...(19): siRNA sense strand
gaucauuccuggcucuaau

SEQ ID NO: 2100505 - RNA, 19 nt, Homo sapiens
  misc_RNA (1)...(19): siRNA sense strand
gcaaauauucaacaagguu

SEQ ID NO: 2100506 - RNA, 19 nt, Homo sapiens
  misc_RNA (1)...(19): siRNA sense strand
gagaagaaauuuguuuguc

SEQ ID NO: 2100507 - RNA, 19 nt, Homo sapiens
  misc_RNA (1)...(19): siRNA sense strand
ccaacaacaucaagaagga

SEQ ID NO: 2100508 - RNA, 19 nt, Homo sapiens
  misc_RNA (1)...(19): siRNA sense strand
caaauugugcaagguauua

SEQ ID NO: 2100509 - RNA, 19 nt, Homo sapiens
  misc_RNA (1)...(19): siRNA sense strand
cuucagaucuucagggaaa

SEQ ID NO: 2100510 - RNA, 19 nt, Homo sapiens
  misc_RNA (1)...(19): siRNA sense strand
ggucugccaggaaauauua

SEQ ID NO: 2100511 - RNA, 19 nt, Homo sapiens
  misc_RNA (1)...(19): siRNA sense strand
gcaggaggaacaacgcuua

SEQ ID NO: 2100512 - RNA, 19 nt, Homo sapiens
  misc_RNA (1)...(19): siRNA sense strand
guucaaacccucacacuug

SEQ ID NO: 2100513 - RNA, 19 nt, Homo sapiens
  misc_RNA (1)...(19): siRNA sense strand
gcugaauccuggaaccuuu

SEQ ID NO: 2100514 - RNA, 19 nt, Homo sapiens
  misc_RNA (1)...(19): siRNA sense strand
gaucuucagggaaauuaua

SEQ ID NO: 2100515 - RNA, 19 nt, Homo sapiens
  misc_RNA (1)...(19): siRNA sense strand
guacagguauauuacaaca

SEQ ID NO: 2100516 - RNA, 19 nt, Homo sapiens
  misc_RNA (1)...(19): siRNA sense strand
gauagauaguacagguaua

SEQ ID NO: 2100517 - RNA, 19 nt, Homo sapiens
  misc_RNA (1)...(19): siRNA sense strand
ucagauucaucaaauggua

SEQ ID NO: 2100518 - RNA, 19 nt, Homo sapiens
  misc_RNA (1)...(19): siRNA sense strand
ucaaaacgcuuuaugagaa

SEQ ID NO: 2100519 - RNA, 19 nt, Homo sapiens
  misc_RNA (1)...(19): siRNA sense strand
gaaagcagucaaauucaga

SEQ ID NO: 2100520 - RNA, 19 nt, Homo sapiens
  misc_RNA (1)...(19): siRNA sense strand
gccaggaaauauuacguuu

SEQ ID NO: 2100521 - RNA, 19 nt, Homo sapiens
  misc_RNA (1)...(19): siRNA sense strand
ggagaacgcccuuuuguuu

SEQ ID NO: 2100522 - RNA, 19 nt, Homo sapiens
  misc_RNA (1)...(19): siRNA sense strand
uaacauccagaaucucaua

SEQ ID NO: 2100523 - RNA, 19 nt, Homo sapiens
  misc_RNA (1)...(19): siRNA sense strand
caaauagcuugacuacauc

SEQ ID NO: 2100524 - RNA, 19 nt, Homo sapiens
  misc_RNA (1)...(19): siRNA sense strand
gacaauccauggugugcaa

SEQ ID NO: 2100525 - RNA, 19 nt, Homo sapiens
  misc_RNA (1)...(19): siRNA sense strand
ggaccaacaacaucaagaa

SEQ ID NO: 2100526 - RNA, 19 nt, Homo sapiens
  misc_RNA (1)...(19): siRNA sense strand
ggacagguaacuuggcaaa

SEQ ID NO: 2100527 - RNA, 19 nt, Homo sapiens
  misc_RNA (1)...(19): siRNA sense strand
cgagaugauacuuugauua

SEQ ID NO: 2100528 - RNA, 19 nt, Homo sapiens
  misc_RNA (1)...(19): siRNA sense strand
gcgagaugauacuuugauu

SEQ ID NO: 2100529 - RNA, 19 nt, Homo sapiens
  misc_RNA (1)...(19): siRNA sense strand
gguaaagucuaugggaaga

SEQ ID NO: 2100530 - RNA, 19 nt, Homo sapiens
  misc_RNA (1)...(19): siRNA sense strand
gaaggugguggaagaggua

SEQ ID NO: 2100531 - RNA, 19 nt, Homo sapiens
  misc_RNA (1)...(19): siRNA sense strand
ucaagaaagcagucaaauu

SEQ ID NO: 2100532 - RNA, 19 nt, Homo sapiens
  misc_RNA (1)...(19): siRNA sense strand
ucagggauaggaacuguua

SEQ ID NO: 2100533 - RNA, 19 nt, Homo sapiens
  misc_RNA (1)...(19): siRNA sense strand
ggaaauauuacguuuguac

SEQ ID NO: 2100534 - RNA, 19 nt, Homo sapiens
  misc_RNA (1)...(19): siRNA sense strand
gcagucaaauucagaucau

SEQ ID NO: 2100535 - RNA, 19 nt, Homo sapiens
  misc_RNA (1)...(19): siRNA sense strand
cuacaaacaguuacaguga

SEQ ID NO: 2100536 - RNA, 19 nt, Homo sapiens
  misc_RNA (1)...(19): siRNA sense strand
gagaugauacuuugauuac

SEQ ID NO: 2100537 - RNA, 19 nt, Homo sapiens
  misc_RNA (1)...(19): siRNA sense strand
uacucgaagugaugaauua

SEQ ID NO: 2100538 - RNA, 19 nt, Homo sapiens
  misc_RNA (1)...(19): siRNA sense strand
aagcaacacauuugucaua

SEQ ID NO: 2100539 - RNA, 19 nt, Homo sapiens
  misc_RNA (1)...(19): siRNA sense strand
ucaauagugucgaucuaga

SEQ ID NO: 2100540 - RNA, 19 nt, Homo sapiens
  misc_RNA (1)...(19): siRNA sense strand
gggauaggaacuguuaaua

SEQ ID NO: 2100541 - RNA, 19 nt, Homo sapiens
  misc_RNA (1)...(19): siRNA sense strand
gcggguuucuccugauauu

SEQ ID NO: 2100542 - RNA, 19 nt, Homo sapiens
  misc_RNA (1)...(19): siRNA sense strand
gaacacauacaggugagaa

SEQ ID NO: 2100543 - RNA, 19 nt, Homo sapiens
  misc_RNA (1)...(19): siRNA sense strand
uaggaacuguuaauacuuc

SEQ ID NO: 2100544 - RNA, 19 nt, Homo sapiens
  misc_RNA (1)...(19): siRNA sense strand
gcuuauccuugcaaauauu

SEQ ID NO: 2100545 - RNA, 19 nt, Homo sapiens
  misc_RNA (1)...(19): siRNA sense strand
ggucagcagguucaaauug

SEQ ID NO: 2100546 - RNA, 19 nt, Homo sapiens
  misc_RNA (1)...(19): siRNA sense strand
caacacugaaauaccuuua

SEQ ID NO: 2100547 - RNA, 19 nt, Homo sapiens
  misc_RNA (1)...(19): siRNA sense strand
ggugagaagaaauuuguuu

SEQ ID NO: 2100548 - RNA, 19 nt, Homo sapiens
  misc_RNA (1)...(19): siRNA sense strand
uccagaacuugcagaauuu

SEQ ID NO: 2100549 - RNA, 19 nt, Homo sapiens
  misc_RNA (1)...(19): siRNA sense strand
ggaucagauucaucaaaug

SEQ ID NO: 2100550 - RNA, 19 nt, Homo sapiens
  misc_RNA (1)...(19): siRNA sense strand
caacgcuuauccuugcaaa

SEQ ID NO: 2100551 - RNA, 19 nt, Homo sapiens
  misc_RNA (1)...(19): siRNA sense strand
uuacagaggcacagaagaa

SEQ ID NO: 2100552 - RNA, 19 nt, Homo sapiens
  misc_RNA (1)...(19): siRNA sense strand
gguggagccuucacuucaa

SEQ ID NO: 2100553 - RNA, 19 nt, Homo sapiens
  misc_RNA (1)...(19): siRNA sense strand
ggguuucuccugauauuaa

SEQ ID NO: 2100554 - RNA, 19 nt, Homo sapiens
  misc_RNA (1)...(19): siRNA sense strand
ggucaaacccaaguaguug

SEQ ID NO: 2100555 - RNA, 19 nt, Homo sapiens
  misc_RNA (1)...(19): siRNA sense strand
ucacaggcucuucagauaa

SEQ ID NO: 2100556 - RNA, 19 nt, Homo sapiens
  misc_RNA (1)...(19): siRNA sense strand
cacaggcucuucagauaau

SEQ ID NO: 2100557 - RNA, 19 nt, Homo sapiens
  misc_RNA (1)...(19): siRNA sense strand
caccuugccaaacauauua

SEQ ID NO: 2100558 - RNA, 19 nt, Homo sapiens
  misc_RNA (1)...(19): siRNA sense strand
uaugagaagugaccaccuu

SEQ ID NO: 2100559 - RNA, 19 nt, Homo sapiens
  misc_RNA (1)...(19): siRNA sense strand
gcacagaagaacacauaca

SEQ ID NO: 2100560 - RNA, 19 nt, Homo sapiens
  misc_RNA (1)...(19): siRNA sense strand
ugaccuaacacacuuaaga

SEQ ID NO: 2100561 - RNA, 19 nt, Homo sapiens
  misc_RNA (1)...(19): siRNA sense strand
cacagaauauucagguuuc

SEQ ID NO: 2100562 - RNA, 19 nt, Homo sapiens
  misc_RNA (1)...(19): siRNA sense strand
uauauccagucgccuguuu

SEQ ID NO: 2100563 - RNA, 19 nt, Homo sapiens
  misc_RNA (1)...(19): siRNA sense strand
aaacccaaguaguugcuaa

SEQ ID NO: 2100564 - RNA, 19 nt, Homo sapiens
  misc_RNA (1)...(19): siRNA sense strand
gcuaacauccagaaucuca

SEQ ID NO: 2100565 - RNA, 19 nt, Homo sapiens
  misc_RNA (1)...(19): siRNA sense strand
gugucgaucuagauucuuu

SEQ ID NO: 2100566 - RNA, 19 nt, Homo sapiens
  misc_RNA (1)...(19): siRNA sense strand
ggauaggaacuguuaauac

SEQ ID NO: 2100567 - RNA, 19 nt, Homo sapiens
  misc_RNA (1)...(19): siRNA sense strand
ccuaacacacuuaagagua

SEQ ID NO: 2100568 - RNA, 19 nt, Homo sapiens
  misc_RNA (1)...(19): siRNA sense strand
gaucagauucaucaaaugg

SEQ ID NO: 2100569 - RNA, 19 nt, Homo sapiens
  misc_RNA (1)...(19): siRNA sense strand
gaagagacacaggcacaga

SEQ ID NO: 2100570 - RNA, 19 nt, Homo sapiens
  misc_RNA (1)...(19): siRNA sense strand
gcagguucauucuucagau

SEQ ID NO: 2100571 - RNA, 19 nt, Homo sapiens
  misc_RNA (1)...(19): siRNA sense strand
cgacggacauuugauaaac

SEQ ID NO: 2100572 - RNA, 19 nt, Homo sapiens
  misc_RNA (1)...(19): siRNA sense strand
agacacaggcacagaauau

SEQ ID NO: 2100573 - RNA, 19 nt, Homo sapiens
  misc_RNA (1)...(19): siRNA sense strand
acacugaaauaccuuuaca

SEQ ID NO: 2100574 - RNA, 19 nt, Homo sapiens
  misc_RNA (1)...(19): siRNA sense strand
uaacuuggcaaacguuuca

SEQ ID NO: 2100575 - RNA, 19 nt, Homo sapiens
  misc_RNA (1)...(19): siRNA sense strand
guacagcaucuacaacuuc

SEQ ID NO: 2100576 - RNA, 19 nt, Homo sapiens
  misc_RNA (1)...(19): siRNA sense strand
gggaagaccucacaucuga

SEQ ID NO: 2100577 - RNA, 19 nt, Homo sapiens
  misc_RNA (1)...(19): siRNA sense strand
gaaaugagacaauggagua

SEQ ID NO: 2100578 - RNA, 19 nt, Homo sapiens
  misc_RNA (1)...(19): siRNA sense strand
uaaagaaggugguggaaga

SEQ ID NO: 2100579 - RNA, 19 nt, Homo sapiens
  misc_RNA (1)...(19): siRNA sense strand
ugaaauaccuuuacagcuu

SEQ ID NO: 2100580 - RNA, 19 nt, Homo sapiens
  misc_RNA (1)...(19): siRNA sense strand
acaaauagcuugacuacau

SEQ ID NO: 2100581 - RNA, 19 nt, Homo sapiens
  misc_RNA (1)...(19): siRNA sense strand
gguauucacucuagcagua

SEQ ID NO: 2100582 - RNA, 19 nt, Homo sapiens
  misc_RNA (1)...(19): siRNA sense strand
gcaacacauuugucauaua

SEQ ID NO: 2100583 - RNA, 19 nt, Homo sapiens
  misc_RNA (1)...(19): siRNA sense strand
gaaauuuguuuguccagaa

SEQ ID NO: 2100584 - RNA, 19 nt, Homo sapiens
  misc_RNA (1)...(19): siRNA sense strand
acagugaacucuauagauu

SEQ ID NO: 2100585 - RNA, 19 nt, Homo sapiens
  misc_RNA (1)...(19): siRNA sense strand
gauaggaacuguuaauacu

SEQ ID NO: 2100586 - RNA, 19 nt, Homo sapiens
  misc_RNA (1)...(19): siRNA sense strand
guccagaacuugcagaauu

SEQ ID NO: 2100587 - RNA, 19 nt, Homo sapiens
  misc_RNA (1)...(19): siRNA sense strand
ccaaaucuacaaacaguua

SEQ ID NO: 2100588 - RNA, 19 nt, Homo sapiens
  misc_RNA (1)...(19): siRNA sense strand
caacacauuugucauauac

SEQ ID NO: 2100589 - RNA, 19 nt, Homo sapiens
  misc_RNA (1)...(19): siRNA sense strand
gaguacaggugguagauga

SEQ ID NO: 2100590 - RNA, 19 nt, Homo sapiens
  misc_RNA (1)...(19): siRNA sense strand
gaauacugcugcccaacaa

SEQ ID NO: 2100591 - RNA, 19 nt, Homo sapiens
  misc_RNA (1)...(19): siRNA sense strand
gagcggguuucuccugaua

SEQ ID NO: 2100592 - RNA, 19 nt, Homo sapiens
  misc_RNA (1)...(19): siRNA sense strand
gcaaacguuucaaguacaa

SEQ ID NO: 2100593 - RNA, 19 nt, Homo sapiens
  misc_RNA (1)...(19): siRNA sense strand
gcacagaauauucagguuu

SEQ ID NO: 2100594 - RNA, 19 nt, Homo sapiens
  misc_RNA (1)...(19): siRNA sense strand
ugacaguccugcagauauu

SEQ ID NO: 2100595 - RNA, 19 nt, Homo sapiens
  misc_RNA (1)...(19): siRNA sense strand
caagauauccuuaccaaca

SEQ ID NO: 2100596 - RNA, 19 nt, Homo sapiens
  misc_RNA (1)...(19): siRNA sense strand
gaugauacuuugauuacug

SEQ ID NO: 2100597 - RNA, 19 nt, Homo sapiens
  misc_RNA (1)...(19): siRNA sense strand
gcaccugucccaacuguaa

SEQ ID NO: 2100598 - RNA, 19 nt, Homo sapiens
  misc_RNA (1)...(19): siRNA sense strand
gaauaccaaugaccuaaca

SEQ ID NO: 2100599 - RNA, 19 nt, Homo sapiens
  misc_RNA (1)...(19): siRNA sense strand
ccaaugaccuaacacacuu

SEQ ID NO: 2100600 - RNA, 19 nt, Homo sapiens
  misc_RNA (1)...(19): siRNA sense strand
agaagaaccugauccugaa

SEQ ID NO: 2100601 - RNA, 19 nt, Homo sapiens
  misc_RNA (1)...(19): siRNA sense strand
cuucagaucuucagggaaa

SEQ ID NO: 2100602 - RNA, 19 nt, Homo sapiens
  misc_RNA (1)...(19): siRNA sense strand
gcaaauauucaacaagguu

SEQ ID NO: 2100603 - RNA, 19 nt, Homo sapiens
  misc_RNA (1)...(19): siRNA sense strand
gagaagaaauuuguuuguc

SEQ ID NO: 2100604 - RNA, 19 nt, Homo sapiens
  misc_RNA (1)...(19): siRNA sense strand
ccaacaacaucaagaagga

SEQ ID NO: 2100605 - RNA, 19 nt, Homo sapiens
  misc_RNA (1)...(19): siRNA sense strand
caaauugugcaagguauua

SEQ ID NO: 2100606 - RNA, 19 nt, Homo sapiens
  misc_RNA (1)...(19): siRNA sense strand
guacagguauauuacaaca

SEQ ID NO: 2100607 - RNA, 19 nt, Homo sapiens
  misc_RNA (1)...(19): siRNA sense strand
gcaggaggaacaacgcuua

SEQ ID NO: 2100608 - RNA, 19 nt, Homo sapiens
  misc_RNA (1)...(19): siRNA sense strand
guucaaacccucacacuug

SEQ ID NO: 2100609 - RNA, 19 nt, Homo sapiens
  misc_RNA (1)...(19): siRNA sense strand
gcugaauccuggaaccuuu

SEQ ID NO: 2100610 - RNA, 19 nt, Homo sapiens
  misc_RNA (1)...(19): siRNA sense strand
gaucuucagggaaauuaua

SEQ ID NO: 2100611 - RNA, 19 nt, Homo sapiens
  misc_RNA (1)...(19): siRNA sense strand
gauagauaguacagguaua

SEQ ID NO: 2100612 - RNA, 19 nt, Homo sapiens
  misc_RNA (1)...(19): siRNA sense strand
ucaaaacgcuuuaugagaa

SEQ ID NO: 2100613 - RNA, 19 nt, Homo sapiens
  misc_RNA (1)...(19): siRNA sense strand
ggagaacgcccuuuuguuu

SEQ ID NO: 2100614 - RNA, 19 nt, Homo sapiens
  misc_RNA (1)...(19): siRNA sense strand
caaauagcuugacuacauc

SEQ ID NO: 2100615 - RNA, 19 nt, Homo sapiens
  misc_RNA (1)...(19): siRNA sense strand
gacaauccauggugugcaa

SEQ ID NO: 2100616 - RNA, 19 nt, Homo sapiens
  misc_RNA (1)...(19): siRNA sense strand
ggaccaacaacaucaagaa

SEQ ID NO: 2100617 - RNA, 19 nt, Homo sapiens
  misc_RNA (1)...(19): siRNA sense strand
ggacagguaacuuggcaaa

SEQ ID NO: 2100618 - RNA, 19 nt, Homo sapiens
  misc_RNA (1)...(19): siRNA sense strand
cgagaugauacuuugauua

SEQ ID NO: 2100619 - RNA, 19 nt, Homo sapiens
  misc_RNA (1)...(19): siRNA sense strand
gcgagaugauacuuugauu

SEQ ID NO: 2100620 - RNA, 19 nt, Homo sapiens
  misc_RNA (1)...(19): siRNA sense strand
gguaaagucuaugggaaga

SEQ ID NO: 2100621 - RNA, 19 nt, Homo sapiens
  misc_RNA (1)...(19): siRNA sense strand
gaaggugguggaagaggua

SEQ ID NO: 2100622 - RNA, 19 nt, Homo sapiens
  misc_RNA (1)...(19): siRNA sense strand
ucagggauaggaacuguua

SEQ ID NO: 2100623 - RNA, 19 nt, Homo sapiens
  misc_RNA (1)...(19): siRNA sense strand
cuacaaacaguuacaguga

SEQ ID NO: 2100624 - RNA, 19 nt, Homo sapiens
  misc_RNA (1)...(19): siRNA sense strand
gagaugauacuuugauuac

SEQ ID NO: 2100625 - RNA, 19 nt, Homo sapiens
  misc_RNA (1)...(19): siRNA sense strand
uacucgaagugaugaauua

SEQ ID NO: 2100626 - RNA, 19 nt, Homo sapiens
  misc_RNA (1)...(19): siRNA sense strand
aagcaacacauuugucaua

SEQ ID NO: 2100627 - RNA, 19 nt, Homo sapiens
  misc_RNA (1)...(19): siRNA sense strand
gcggguuucuccugauauu

SEQ ID NO: 2100628 - RNA, 19 nt, Homo sapiens
  misc_RNA (1)...(19): siRNA sense strand
gggauaggaacuguuaaua

SEQ ID NO: 2100629 - RNA, 19 nt, Homo sapiens
  misc_RNA (1)...(19): siRNA sense strand
gaacacauacaggugagaa

SEQ ID NO: 2100630 - RNA, 19 nt, Homo sapiens
  misc_RNA (1)...(19): siRNA sense strand
uaggaacuguuaauacuuc

SEQ ID NO: 2100631 - RNA, 19 nt, Homo sapiens
  misc_RNA (1)...(19): siRNA sense strand
gcuuauccuugcaaauauu

SEQ ID NO: 2100632 - RNA, 19 nt, Homo sapiens
  misc_RNA (1)...(19): siRNA sense strand
uccagaacuugcagaauuu

SEQ ID NO: 2100633 - RNA, 19 nt, Homo sapiens
  misc_RNA (1)...(19): siRNA sense strand
caacacugaaauaccuuua

SEQ ID NO: 2100634 - RNA, 19 nt, Homo sapiens
  misc_RNA (1)...(19): siRNA sense strand
ggugagaagaaauuuguuu

SEQ ID NO: 2100635 - RNA, 19 nt, Homo sapiens
  misc_RNA (1)...(19): siRNA sense strand
gguggagccuucacuucaa

SEQ ID NO: 2100636 - RNA, 19 nt, Homo sapiens
  misc_RNA (1)...(19): siRNA sense strand
caacgcuuauccuugcaaa

SEQ ID NO: 2100637 - RNA, 19 nt, Homo sapiens
  misc_RNA (1)...(19): siRNA sense strand
uuacagaggcacagaagaa

SEQ ID NO: 2100638 - RNA, 19 nt, Homo sapiens
  misc_RNA (1)...(19): siRNA sense strand
ggguuucuccugauauuaa

SEQ ID NO: 2100639 - RNA, 19 nt, Homo sapiens
  misc_RNA (1)...(19): siRNA sense strand
uauauccagucgccuguuu

SEQ ID NO: 2100640 - RNA, 19 nt, Homo sapiens
  misc_RNA (1)...(19): siRNA sense strand
caccuugccaaacauauua

SEQ ID NO: 2100641 - RNA, 19 nt, Homo sapiens
  misc_RNA (1)...(19): siRNA sense strand
uaugagaagugaccaccuu

SEQ ID NO: 2100642 - RNA, 19 nt, Homo sapiens
  misc_RNA (1)...(19): siRNA sense strand
gcacagaagaacacauaca

SEQ ID NO: 2100643 - RNA, 19 nt, Homo sapiens
  misc_RNA (1)...(19): siRNA sense strand
ugaccuaacacacuuaaga

SEQ ID NO: 2100644 - RNA, 19 nt, Homo sapiens
  misc_RNA (1)...(19): siRNA sense strand
cacagaauauucagguuuc

SEQ ID NO: 2100645 - RNA, 19 nt, Homo sapiens
  misc_RNA (1)...(19): siRNA sense strand
gcagguucauucuucagau

SEQ ID NO: 2100646 - RNA, 19 nt, Homo sapiens
  misc_RNA (1)...(19): siRNA sense strand
ggauaggaacuguuaauac

SEQ ID NO: 2100647 - RNA, 19 nt, Homo sapiens
  misc_RNA (1)...(19): siRNA sense strand
cgacggacauuugauaaac

SEQ ID NO: 2100648 - RNA, 19 nt, Homo sapiens
  misc_RNA (1)...(19): siRNA sense strand
ccuaacacacuuaagagua

SEQ ID NO: 2100649 - RNA, 19 nt, Homo sapiens
  misc_RNA (1)...(19): siRNA sense strand
gaagagacacaggcacaga

SEQ ID NO: 2100650 - RNA, 19 nt, Homo sapiens
  misc_RNA (1)...(19): siRNA sense strand
agacacaggcacagaauau

SEQ ID NO: 2100651 - RNA, 19 nt, Homo sapiens
  misc_RNA (1)...(19): siRNA sense strand
acacugaaauaccuuuaca

SEQ ID NO: 2100652 - RNA, 19 nt, Homo sapiens
  misc_RNA (1)...(19): siRNA sense strand
uaacuuggcaaacguuuca

SEQ ID NO: 2100653 - RNA, 19 nt, Homo sapiens
  misc_RNA (1)...(19): siRNA sense strand
gauaguacagguauauuac

SEQ ID NO: 2100654 - RNA, 19 nt, Homo sapiens
  misc_RNA (1)...(19): siRNA sense strand
gccaacauccucuucauca

SEQ ID NO: 2100655 - RNA, 19 nt, Homo sapiens
  misc_RNA (1)...(19): siRNA sense strand
acgcuuauccuugcaaaua

SEQ ID NO: 2100656 - RNA, 19 nt, Homo sapiens
  misc_RNA (1)...(19): siRNA sense strand
gaagcugcgcgagaugaua

SEQ ID NO: 2100657 - RNA, 19 nt, Homo sapiens
  misc_RNA (1)...(19): siRNA sense strand
cuaacacacuuaagaguac

SEQ ID NO: 2100658 - RNA, 19 nt, Homo sapiens
  misc_RNA (1)...(19): siRNA sense strand
uggcaaacguuucaaguac

SEQ ID NO: 2100659 - RNA, 19 nt, Homo sapiens
  misc_RNA (1)...(19): siRNA sense strand
gagacacaggcacagaaua

SEQ ID NO: 2100660 - RNA, 19 nt, Homo sapiens
  misc_RNA (1)...(19): siRNA sense strand
acauacaggugagaagaaa

SEQ ID NO: 2100661 - RNA, 19 nt, Homo sapiens
  misc_RNA (1)...(19): siRNA sense strand
gguauuacaccacagacaa

SEQ ID NO: 2100662 - RNA, 19 nt, Homo sapiens
  misc_RNA (1)...(19): siRNA sense strand
gugggcagguucauucuuc

SEQ ID NO: 2100663 - RNA, 19 nt, Homo sapiens
  misc_RNA (1)...(19): siRNA sense strand
uacaaacaguuacagugaa

SEQ ID NO: 2100664 - RNA, 19 nt, Homo sapiens
  misc_RNA (1)...(19): siRNA sense strand
ccagucgccuguuucugaa

SEQ ID NO: 2100665 - RNA, 19 nt, Homo sapiens
  misc_RNA (1)...(19): siRNA sense strand
ggcaaacguuucaaguaca

SEQ ID NO: 2100666 - RNA, 19 nt, Homo sapiens
  misc_RNA (1)...(19): siRNA sense strand
caccagcaaucaagauauc

SEQ ID NO: 2100667 - RNA, 19 nt, Homo sapiens
  misc_RNA (1)...(19): siRNA sense strand
aaacacaaauagcuugacu

SEQ ID NO: 2100668 - RNA, 19 nt, Homo sapiens
  misc_RNA (1)...(19): siRNA sense strand
caacauccucuucaucaca

SEQ ID NO: 2100669 - RNA, 19 nt, Homo sapiens
  misc_RNA (1)...(19): siRNA sense strand
guacugugguaaaagauuu

SEQ ID NO: 2100670 - RNA, 19 nt, Homo sapiens
  misc_RNA (1)...(19): siRNA sense strand
gcucaucugcguuggcauu

SEQ ID NO: 2100671 - RNA, 19 nt, Homo sapiens
  misc_RNA (1)...(19): siRNA sense strand
gacggacauuugauaaaca

SEQ ID NO: 2100672 - RNA, 19 nt, Homo sapiens
  misc_RNA (1)...(19): siRNA sense strand
gugaccaccuugccaaaca

SEQ ID NO: 2100673 - RNA, 19 nt, Homo sapiens
  misc_RNA (1)...(19): siRNA sense strand
gcagcucaguggugauucu

SEQ ID NO: 2100674 - RNA, 19 nt, Homo sapiens
  misc_RNA (1)...(19): siRNA sense strand
gaauuacagaggcacagaa

SEQ ID NO: 2100675 - RNA, 19 nt, Homo sapiens
  misc_RNA (1)...(19): siRNA sense strand
gauguacugugguaaaaga

SEQ ID NO: 2100676 - RNA, 19 nt, Homo sapiens
  misc_RNA (1)...(19): siRNA sense strand
ggucugagcuuugaaacua

SEQ ID NO: 2100677 - RNA, 19 nt, Homo sapiens
  misc_RNA (1)...(19): siRNA sense strand
aaagagagcuguuucuaga

SEQ ID NO: 2100678 - RNA, 19 nt, Homo sapiens
  misc_RNA (1)...(19): siRNA sense strand
gacaacagcaaucaaauua

SEQ ID NO: 2100679 - RNA, 19 nt, Homo sapiens
  misc_RNA (1)...(19): siRNA sense strand
caacagcaaucaaauuaug

SEQ ID NO: 2100680 - RNA, 19 nt, Homo sapiens
  misc_RNA (1)...(19): siRNA sense strand
ggugggaacuauaaugauu

SEQ ID NO: 2100681 - RNA, 19 nt, Homo sapiens
  misc_RNA (1)...(19): siRNA sense strand
ggacaacagcaaucaaauu

SEQ ID NO: 2100682 - RNA, 19 nt, Homo sapiens
  misc_RNA (1)...(19): siRNA sense strand
gauaugaugguuacaauga

SEQ ID NO: 2100683 - RNA, 19 nt, Homo sapiens
  misc_RNA (1)...(19): siRNA sense strand
gcauaauugugaagugaaa

SEQ ID NO: 2100684 - RNA, 19 nt, Homo sapiens
  misc_RNA (1)...(19): siRNA sense strand
ggagguggaucuggcaauu

SEQ ID NO: 2100685 - RNA, 19 nt, Homo sapiens
  misc_RNA (1)...(19): siRNA sense strand
gaugauaguuuacgagaac

SEQ ID NO: 2100686 - RNA, 19 nt, Homo sapiens
  misc_RNA (1)...(19): siRNA sense strand
guucagaaauaccacacua

SEQ ID NO: 2100687 - RNA, 19 nt, Homo sapiens
  misc_RNA (1)...(19): siRNA sense strand
gggcauaauugugaaguga

SEQ ID NO: 2100688 - RNA, 19 nt, Homo sapiens
  misc_RNA (1)...(19): siRNA sense strand
gaagacaggcagaguggaa

SEQ ID NO: 2100689 - RNA, 19 nt, Homo sapiens
  misc_RNA (1)...(19): siRNA sense strand
cagcagagguaguuaugga

SEQ ID NO: 2100690 - RNA, 19 nt, Homo sapiens
  misc_RNA (1)...(19): siRNA sense strand
caaaggaaccagagcaguu

SEQ ID NO: 2100691 - RNA, 19 nt, Homo sapiens
  misc_RNA (1)...(19): siRNA sense strand
ggaagugguggauauggua

SEQ ID NO: 2100692 - RNA, 19 nt, Homo sapiens
  misc_RNA (1)...(19): siRNA sense strand
gaaccaaagagagcuguuu

SEQ ID NO: 2100693 - RNA, 19 nt, Homo sapiens
  misc_RNA (1)...(19): siRNA sense strand
gguccugguuauaguagua

SEQ ID NO: 2100694 - RNA, 19 nt, Homo sapiens
  misc_RNA (1)...(19): siRNA sense strand
gguggaaacuuugguggaa

SEQ ID NO: 2100695 - RNA, 19 nt, Homo sapiens
  misc_RNA (1)...(19): siRNA sense strand
uagagaggauucuguaaag

SEQ ID NO: 2100696 - RNA, 19 nt, Homo sapiens
  misc_RNA (1)...(19): siRNA sense strand
gauugaaaccauagaaguu

SEQ ID NO: 2100697 - RNA, 19 nt, Homo sapiens
  misc_RNA (1)...(19): siRNA sense strand
gaaauuauaguggacaaca

SEQ ID NO: 2100698 - RNA, 19 nt, Homo sapiens
  misc_RNA (1)...(19): siRNA sense strand
ccaaagagagcuguuucua

SEQ ID NO: 2100699 - RNA, 19 nt, Homo sapiens
  misc_RNA (1)...(19): siRNA sense strand
gaugguggauauaauggau

SEQ ID NO: 2100700 - RNA, 19 nt, Homo sapiens
  misc_RNA (1)...(19): siRNA sense strand
gagaggauuugcuuuugua

SEQ ID NO: 2100701 - RNA, 19 nt, Homo sapiens
  misc_RNA (1)...(19): siRNA sense strand
agagagcuguuucuagaga

SEQ ID NO: 2100702 - RNA, 19 nt, Homo sapiens
  misc_RNA (1)...(19): siRNA sense strand
ggagggccaugauccaaag

SEQ ID NO: 2100703 - RNA, 19 nt, Homo sapiens
  misc_RNA (1)...(19): siRNA sense strand
uuaaugggcauaauuguga

SEQ ID NO: 2100704 - RNA, 19 nt, Homo sapiens
  misc_RNA (1)...(19): siRNA sense strand
caaagagagcuguuucuag

SEQ ID NO: 2100705 - RNA, 19 nt, Homo sapiens
  misc_RNA (1)...(19): siRNA sense strand
gaggugaugguggauauaa

SEQ ID NO: 2100706 - RNA, 19 nt, Homo sapiens
  misc_RNA (1)...(19): siRNA sense strand
aaccagagcaguugagaaa

SEQ ID NO: 2100707 - RNA, 19 nt, Homo sapiens
  misc_RNA (1)...(19): siRNA sense strand
cuagagaggauucuguaaa

SEQ ID NO: 2100708 - RNA, 19 nt, Homo sapiens
  misc_RNA (1)...(19): siRNA sense strand
ggagguggaggauaugaug

SEQ ID NO: 2100709 - RNA, 19 nt, Homo sapiens
  misc_RNA (1)...(19): siRNA sense strand
gacuuauucuuguguugaa

SEQ ID NO: 2100710 - RNA, 19 nt, Homo sapiens
  misc_RNA (1)...(19): siRNA sense strand
gaaccagagcaguugagaa

SEQ ID NO: 2100711 - RNA, 19 nt, Homo sapiens
  misc_RNA (1)...(19): siRNA sense strand
agagguggaugcagcaaug

SEQ ID NO: 2100712 - RNA, 19 nt, Homo sapiens
  misc_RNA (1)...(19): siRNA sense strand
caagguugaugggcgugua

SEQ ID NO: 2100713 - RNA, 19 nt, Homo sapiens
  misc_RNA (1)...(19): siRNA sense strand
gcuuugaaacuacagauga

SEQ ID NO: 2100714 - RNA, 19 nt, Homo sapiens
  misc_RNA (1)...(19): siRNA sense strand
caagauugaaaccauagaa

SEQ ID NO: 2100715 - RNA, 19 nt, Homo sapiens
  misc_RNA (1)...(19): siRNA sense strand
ggugguggcagcagaggua

SEQ ID NO: 2100716 - RNA, 19 nt, Homo sapiens
  misc_RNA (1)...(19): siRNA sense strand
gggccaugauccaaaggaa

SEQ ID NO: 2100717 - RNA, 19 nt, Homo sapiens
  misc_RNA (1)...(19): siRNA sense strand
uugagagacuacuuugaaa

SEQ ID NO: 2100718 - RNA, 19 nt, Homo sapiens
  misc_RNA (1)...(19): siRNA sense strand
ggugaugguggauauaaug

SEQ ID NO: 2100719 - RNA, 19 nt, Homo sapiens
  misc_RNA (1)...(19): siRNA sense strand
guggacaacagcaaucaaa

SEQ ID NO: 2100720 - RNA, 19 nt, Homo sapiens
  misc_RNA (1)...(19): siRNA sense strand
gaggauaugaugguuacaa

SEQ ID NO: 2100721 - RNA, 19 nt, Homo sapiens
  misc_RNA (1)...(19): siRNA sense strand
ugguggauauaauggauuu

SEQ ID NO: 2100722 - RNA, 19 nt, Homo sapiens
  misc_RNA (1)...(19): siRNA sense strand
uggaaacuuugguggaaga

SEQ ID NO: 2100723 - RNA, 19 nt, Homo sapiens
  misc_RNA (1)...(19): siRNA sense strand
ccaaggugguggauauggu

SEQ ID NO: 2100724 - RNA, 19 nt, Homo sapiens
  misc_RNA (1)...(19): siRNA sense strand
cagauugugugguaaugag

SEQ ID NO: 2100725 - RNA, 19 nt, Homo sapiens
  misc_RNA (1)...(19): siRNA sense strand
guggugggaacuauaauga

SEQ ID NO: 2100726 - RNA, 19 nt, Homo sapiens
  misc_RNA (1)...(19): siRNA sense strand
ugguggagguggaggauau

SEQ ID NO: 2100727 - RNA, 19 nt, Homo sapiens
  misc_RNA (1)...(19): siRNA sense strand
uaaugggcauaauugugaa

SEQ ID NO: 2100728 - RNA, 19 nt, Homo sapiens
  misc_RNA (1)...(19): siRNA sense strand
ggaggugguggagguaauu

SEQ ID NO: 2100729 - RNA, 19 nt, Homo sapiens
  misc_RNA (1)...(19): siRNA sense strand
gauaguuuacgagaacauu

SEQ ID NO: 2100730 - RNA, 19 nt, Homo sapiens
  misc_RNA (1)...(19): siRNA sense strand
ggauaugaugguuacaaug

SEQ ID NO: 2100731 - RNA, 19 nt, Homo sapiens
  misc_RNA (1)...(19): siRNA sense strand
gagguggaucuggcaauuu

SEQ ID NO: 2100732 - RNA, 19 nt, Homo sapiens
  misc_RNA (1)...(19): siRNA sense strand
acaaugaaggaggaaauuu

SEQ ID NO: 2100733 - RNA, 19 nt, Homo sapiens
  misc_RNA (1)...(19): siRNA sense strand
gguggaggauaugaugguu

SEQ ID NO: 2100734 - RNA, 19 nt, Homo sapiens
  misc_RNA (1)...(19): siRNA sense strand
ugaugggcguguaguggaa

SEQ ID NO: 2100735 - RNA, 19 nt, Homo sapiens
  misc_RNA (1)...(19): siRNA sense strand
gugggaacuauaaugauuu

SEQ ID NO: 2100736 - RNA, 19 nt, Homo sapiens
  misc_RNA (1)...(19): siRNA sense strand
gaggugaugguggcaacua

SEQ ID NO: 2100737 - RNA, 19 nt, Homo sapiens
  misc_RNA (1)...(19): siRNA sense strand
uaauggauuuggaggugau

SEQ ID NO: 2100738 - RNA, 19 nt, Homo sapiens
  misc_RNA (1)...(19): siRNA sense strand
ggaggugaugguggauaua

SEQ ID NO: 2100739 - RNA, 19 nt, Homo sapiens
  misc_RNA (1)...(19): siRNA sense strand
aaaggaaccagagcaguug

SEQ ID NO: 2100740 - RNA, 19 nt, Homo sapiens
  misc_RNA (1)...(19): siRNA sense strand
uuugagagacuacuuugaa

SEQ ID NO: 2100741 - RNA, 19 nt, Homo sapiens
  misc_RNA (1)...(19): siRNA sense strand
gaugaucaugauacaguug

SEQ ID NO: 2100742 - RNA, 19 nt, Homo sapiens
  misc_RNA (1)...(19): siRNA sense strand
caaugaaggaggaaauuuu

SEQ ID NO: 2100743 - RNA, 19 nt, Homo sapiens
  misc_RNA (1)...(19): siRNA sense strand
uaugaugguuacaaugaag

SEQ ID NO: 2100744 - RNA, 19 nt, Homo sapiens
  misc_RNA (1)...(19): siRNA sense strand
uggccgugguggaaacuuu

SEQ ID NO: 2100745 - RNA, 19 nt, Homo sapiens
  misc_RNA (1)...(19): siRNA sense strand
ugacuuauucuuguguuga

SEQ ID NO: 2100746 - RNA, 19 nt, Homo sapiens
  misc_RNA (1)...(19): siRNA sense strand
gugguggugggaacuauaa

SEQ ID NO: 2100747 - RNA, 19 nt, Homo sapiens
  misc_RNA (1)...(19): siRNA sense strand
aggauaugaugguuacaau

SEQ ID NO: 2100748 - RNA, 19 nt, Homo sapiens
  misc_RNA (1)...(19): siRNA sense strand
uggaggauaugaugguuac

SEQ ID NO: 2100749 - RNA, 19 nt, Homo sapiens
  misc_RNA (1)...(19): siRNA sense strand
gaggaggugaugguggaua

SEQ ID NO: 2100750 - RNA, 19 nt, Homo sapiens
  misc_RNA (1)...(19): siRNA sense strand
ggaaccagagcaguugaga

SEQ ID NO: 2100751 - RNA, 19 nt, Homo sapiens
  misc_RNA (1)...(19): siRNA sense strand
gcaagauugaaaccauaga

SEQ ID NO: 2100752 - RNA, 19 nt, Homo sapiens
  misc_RNA (1)...(19): siRNA sense strand
gugcccaucuaacagugaa

SEQ ID NO: 2100753 - RNA, 19 nt, Homo sapiens
  misc_RNA (1)...(19): siRNA sense strand
gaggagggccaugauccaa

SEQ ID NO: 2100754 - RNA, 19 nt, Homo sapiens
  misc_RNA (1)...(19): siRNA sense strand
ugguggaagugguggauau

SEQ ID NO: 2100755 - RNA, 19 nt, Homo sapiens
  misc_RNA (1)...(19): siRNA sense strand
guggaggauaugaugguua

SEQ ID NO: 2100756 - RNA, 19 nt, Homo sapiens
  misc_RNA (1)...(19): siRNA sense strand
ggugguccugguuauagua

SEQ ID NO: 2100757 - RNA, 19 nt, Homo sapiens
  misc_RNA (1)...(19): siRNA sense strand
gcuuugguuuugugacuua

SEQ ID NO: 2100758 - RNA, 19 nt, Homo sapiens
  misc_RNA (1)...(19): siRNA sense strand
aggaggugaugguggauau

SEQ ID NO: 2100759 - RNA, 19 nt, Homo sapiens
  misc_RNA (1)...(19): siRNA sense strand
ggugguggugggaacuaua

SEQ ID NO: 2100760 - RNA, 19 nt, Homo sapiens
  misc_RNA (1)...(19): siRNA sense strand
gugacuuauucuuguguug

SEQ ID NO: 2100761 - RNA, 19 nt, Homo sapiens
  misc_RNA (1)...(19): siRNA sense strand
gguggucugagcuuugaaa

SEQ ID NO: 2100762 - RNA, 19 nt, Homo sapiens
  misc_RNA (1)...(19): siRNA sense strand
agaugauaguuuacgagaa

SEQ ID NO: 2100763 - RNA, 19 nt, Homo sapiens
  misc_RNA (1)...(19): siRNA sense strand
gauaugguagcagaagguu

SEQ ID NO: 2100764 - RNA, 19 nt, Homo sapiens
  misc_RNA (1)...(19): siRNA sense strand
ggauaugguagcagaaggu

SEQ ID NO: 2100765 - RNA, 19 nt, Homo sapiens
  misc_RNA (1)...(19): siRNA sense strand
gguggcagcagagguaguu

SEQ ID NO: 2100766 - RNA, 19 nt, Homo sapiens
  misc_RNA (1)...(19): siRNA sense strand
uuggugguauuaaagaaga

SEQ ID NO: 2100767 - RNA, 19 nt, Homo sapiens
  misc_RNA (1)...(19): siRNA sense strand
gguggugggaacuauaaug

SEQ ID NO: 2100768 - RNA, 19 nt, Homo sapiens
  misc_RNA (1)...(19): siRNA sense strand
accaggauauggaaaccaa

SEQ ID NO: 2100769 - RNA, 19 nt, Homo sapiens
  misc_RNA (1)...(19): siRNA sense strand
uggauauaauggauuugga

SEQ ID NO: 2100770 - RNA, 19 nt, Homo sapiens
  misc_RNA (1)...(19): siRNA sense strand
ggaggagggccaugaucca

SEQ ID NO: 2100771 - RNA, 19 nt, Homo sapiens
  misc_RNA (1)...(19): siRNA sense strand
ggcguguaguggaaccaaa

SEQ ID NO: 2100772 - RNA, 19 nt, Homo sapiens
  misc_RNA (1)...(19): siRNA sense strand
acgagaacauuuugagaaa

SEQ ID NO: 2100773 - RNA, 19 nt, Homo sapiens
  misc_RNA (1)...(19): siRNA sense strand
ggcagcagagguaguuaug

SEQ ID NO: 2100774 - RNA, 19 nt, Homo sapiens
  misc_RNA (1)...(19): siRNA sense strand
gaggugguggagguaauuu

SEQ ID NO: 2100775 - RNA, 19 nt, Homo sapiens
  misc_RNA (1)...(19): siRNA sense strand
uggaaauuauaguggacaa

SEQ ID NO: 2100776 - RNA, 19 nt, Homo sapiens
  misc_RNA (1)...(19): siRNA sense strand
ggucugagcuuugaaacua

SEQ ID NO: 2100777 - RNA, 19 nt, Homo sapiens
  misc_RNA (1)...(19): siRNA sense strand
aaagagagcuguuucuaga

SEQ ID NO: 2100778 - RNA, 19 nt, Homo sapiens
  misc_RNA (1)...(19): siRNA sense strand
gacaacagcaaucaaauua

SEQ ID NO: 2100779 - RNA, 19 nt, Homo sapiens
  misc_RNA (1)...(19): siRNA sense strand
caacagcaaucaaauuaug

SEQ ID NO: 2100780 - RNA, 19 nt, Homo sapiens
  misc_RNA (1)...(19): siRNA sense strand
ggugggaacuauaaugauu

SEQ ID NO: 2100781 - RNA, 19 nt, Homo sapiens
  misc_RNA (1)...(19): siRNA sense strand
ggacaacagcaaucaaauu

SEQ ID NO: 2100782 - RNA, 19 nt, Homo sapiens
  misc_RNA (1)...(19): siRNA sense strand
gauaugaugguuacaauga

SEQ ID NO: 2100783 - RNA, 19 nt, Homo sapiens
  misc_RNA (1)...(19): siRNA sense strand
gcauaauugugaagugaaa

SEQ ID NO: 2100784 - RNA, 19 nt, Homo sapiens
  misc_RNA (1)...(19): siRNA sense strand
ggagguggaucuggcaauu

SEQ ID NO: 2100785 - RNA, 19 nt, Homo sapiens
  misc_RNA (1)...(19): siRNA sense strand
gaugauaguuuacgagaac

SEQ ID NO: 2100786 - RNA, 19 nt, Homo sapiens
  misc_RNA (1)...(19): siRNA sense strand
guucagaaauaccacacua

SEQ ID NO: 2100787 - RNA, 19 nt, Homo sapiens
  misc_RNA (1)...(19): siRNA sense strand
gggcauaauugugaaguga

SEQ ID NO: 2100788 - RNA, 19 nt, Homo sapiens
  misc_RNA (1)...(19): siRNA sense strand
gaagacaggcagaguggaa

SEQ ID NO: 2100789 - RNA, 19 nt, Homo sapiens
  misc_RNA (1)...(19): siRNA sense strand
cagcagagguaguuaugga

SEQ ID NO: 2100790 - RNA, 19 nt, Homo sapiens
  misc_RNA (1)...(19): siRNA sense strand
caaaggaaccagagcaguu

SEQ ID NO: 2100791 - RNA, 19 nt, Homo sapiens
  misc_RNA (1)...(19): siRNA sense strand
ggaagugguggauauggua

SEQ ID NO: 2100792 - RNA, 19 nt, Homo sapiens
  misc_RNA (1)...(19): siRNA sense strand
gaaccaaagagagcuguuu

SEQ ID NO: 2100793 - RNA, 19 nt, Homo sapiens
  misc_RNA (1)...(19): siRNA sense strand
gguccugguuauaguagua

SEQ ID NO: 2100794 - RNA, 19 nt, Homo sapiens
  misc_RNA (1)...(19): siRNA sense strand
gguggaaacuuugguggaa

SEQ ID NO: 2100795 - RNA, 19 nt, Homo sapiens
  misc_RNA (1)...(19): siRNA sense strand
uagagaggauucuguaaag

SEQ ID NO: 2100796 - RNA, 19 nt, Homo sapiens
  misc_RNA (1)...(19): siRNA sense strand
gauugaaaccauagaaguu

SEQ ID NO: 2100797 - RNA, 19 nt, Homo sapiens
  misc_RNA (1)...(19): siRNA sense strand
gaaauuauaguggacaaca

SEQ ID NO: 2100798 - RNA, 19 nt, Homo sapiens
  misc_RNA (1)...(19): siRNA sense strand
ccaaagagagcuguuucua

SEQ ID NO: 2100799 - RNA, 19 nt, Homo sapiens
  misc_RNA (1)...(19): siRNA sense strand
gaugguggauauaauggau

SEQ ID NO: 2100800 - RNA, 19 nt, Homo sapiens
  misc_RNA (1)...(19): siRNA sense strand
gagaggauuugcuuuugua

SEQ ID NO: 2100801 - RNA, 19 nt, Homo sapiens
  misc_RNA (1)...(19): siRNA sense strand
agagagcuguuucuagaga

SEQ ID NO: 2100802 - RNA, 19 nt, Homo sapiens
  misc_RNA (1)...(19): siRNA sense strand
ggagggccaugauccaaag

SEQ ID NO: 2100803 - RNA, 19 nt, Homo sapiens
  misc_RNA (1)...(19): siRNA sense strand
uuaaugggcauaauuguga

SEQ ID NO: 2100804 - RNA, 19 nt, Homo sapiens
  misc_RNA (1)...(19): siRNA sense strand
caaagagagcuguuucuag

SEQ ID NO: 2100805 - RNA, 19 nt, Homo sapiens
  misc_RNA (1)...(19): siRNA sense strand
gaggugaugguggauauaa

SEQ ID NO: 2100806 - RNA, 19 nt, Homo sapiens
  misc_RNA (1)...(19): siRNA sense strand
aaccagagcaguugagaaa

SEQ ID NO: 2100807 - RNA, 19 nt, Homo sapiens
  misc_RNA (1)...(19): siRNA sense strand
cuagagaggauucuguaaa

SEQ ID NO: 2100808 - RNA, 19 nt, Homo sapiens
  misc_RNA (1)...(19): siRNA sense strand
ggagguggaggauaugaug

SEQ ID NO: 2100809 - RNA, 19 nt, Homo sapiens
  misc_RNA (1)...(19): siRNA sense strand
gacuuauucuuguguugaa

SEQ ID NO: 2100810 - RNA, 19 nt, Homo sapiens
  misc_RNA (1)...(19): siRNA sense strand
gaaccagagcaguugagaa

SEQ ID NO: 2100811 - RNA, 19 nt, Homo sapiens
  misc_RNA (1)...(19): siRNA sense strand
agagguggaugcagcaaug

SEQ ID NO: 2100812 - RNA, 19 nt, Homo sapiens
  misc_RNA (1)...(19): siRNA sense strand
caagguugaugggcgugua

SEQ ID NO: 2100813 - RNA, 19 nt, Homo sapiens
  misc_RNA (1)...(19): siRNA sense strand
gcuuugaaacuacagauga

SEQ ID NO: 2100814 - RNA, 19 nt, Homo sapiens
  misc_RNA (1)...(19): siRNA sense strand
caagauugaaaccauagaa

SEQ ID NO: 2100815 - RNA, 19 nt, Homo sapiens
  misc_RNA (1)...(19): siRNA sense strand
ggugguggcagcagaggua

SEQ ID NO: 2100816 - RNA, 19 nt, Homo sapiens
  misc_RNA (1)...(19): siRNA sense strand
gggccaugauccaaaggaa

SEQ ID NO: 2100817 - RNA, 19 nt, Homo sapiens
  misc_RNA (1)...(19): siRNA sense strand
uugagagacuacuuugaaa

SEQ ID NO: 2100818 - RNA, 19 nt, Homo sapiens
  misc_RNA (1)...(19): siRNA sense strand
ggugaugguggauauaaug

SEQ ID NO: 2100819 - RNA, 19 nt, Homo sapiens
  misc_RNA (1)...(19): siRNA sense strand
guggacaacagcaaucaaa

SEQ ID NO: 2100820 - RNA, 19 nt, Homo sapiens
  misc_RNA (1)...(19): siRNA sense strand
gaggauaugaugguuacaa

SEQ ID NO: 2100821 - RNA, 19 nt, Homo sapiens
  misc_RNA (1)...(19): siRNA sense strand
ugguggauauaauggauuu

SEQ ID NO: 2100822 - RNA, 19 nt, Homo sapiens
  misc_RNA (1)...(19): siRNA sense strand
uggaaacuuugguggaaga

SEQ ID NO: 2100823 - RNA, 19 nt, Homo sapiens
  misc_RNA (1)...(19): siRNA sense strand
ccaaggugguggauauggu

SEQ ID NO: 2100824 - RNA, 19 nt, Homo sapiens
  misc_RNA (1)...(19): siRNA sense strand
cagauugugugguaaugag

SEQ ID NO: 2100825 - RNA, 19 nt, Homo sapiens
  misc_RNA (1)...(19): siRNA sense strand
guggugggaacuauaauga

SEQ ID NO: 2100826 - RNA, 19 nt, Homo sapiens
  misc_RNA (1)...(19): siRNA sense strand
ugguggagguggaggauau

SEQ ID NO: 2100827 - RNA, 19 nt, Homo sapiens
  misc_RNA (1)...(19): siRNA sense strand
uaaugggcauaauugugaa

SEQ ID NO: 2100828 - RNA, 19 nt, Homo sapiens
  misc_RNA (1)...(19): siRNA sense strand
ggaggugguggagguaauu

SEQ ID NO: 2100829 - RNA, 19 nt, Homo sapiens
  misc_RNA (1)...(19): siRNA sense strand
gauaguuuacgagaacauu

SEQ ID NO: 2100830 - RNA, 19 nt, Homo sapiens
  misc_RNA (1)...(19): siRNA sense strand
ggauaugaugguuacaaug

SEQ ID NO: 2100831 - RNA, 19 nt, Homo sapiens
  misc_RNA (1)...(19): siRNA sense strand
gagguggaucuggcaauuu

SEQ ID NO: 2100832 - RNA, 19 nt, Homo sapiens
  misc_RNA (1)...(19): siRNA sense strand
acaaugaaggaggaaauuu

SEQ ID NO: 2100833 - RNA, 19 nt, Homo sapiens
  misc_RNA (1)...(19): siRNA sense strand
gguggaggauaugaugguu

SEQ ID NO: 2100834 - RNA, 19 nt, Homo sapiens
  misc_RNA (1)...(19): siRNA sense strand
ugaugggcguguaguggaa

SEQ ID NO: 2100835 - RNA, 19 nt, Homo sapiens
  misc_RNA (1)...(19): siRNA sense strand
gugggaacuauaaugauuu

SEQ ID NO: 2100836 - RNA, 19 nt, Homo sapiens
  misc_RNA (1)...(19): siRNA sense strand
gaggugaugguggcaacua

SEQ ID NO: 2100837 - RNA, 19 nt, Homo sapiens
  misc_RNA (1)...(19): siRNA sense strand
uaauggauuuggaggugau

SEQ ID NO: 2100838 - RNA, 19 nt, Homo sapiens
  misc_RNA (1)...(19): siRNA sense strand
ggaggugaugguggauaua

SEQ ID NO: 2100839 - RNA, 19 nt, Homo sapiens
  misc_RNA (1)...(19): siRNA sense strand
aaaggaaccagagcaguug

SEQ ID NO: 2100840 - RNA, 19 nt, Homo sapiens
  misc_RNA (1)...(19): siRNA sense strand
uuugagagacuacuuugaa

SEQ ID NO: 2100841 - RNA, 19 nt, Homo sapiens
  misc_RNA (1)...(19): siRNA sense strand
gaugaucaugauacaguug

SEQ ID NO: 2100842 - RNA, 19 nt, Homo sapiens
  misc_RNA (1)...(19): siRNA sense strand
caaugaaggaggaaauuuu

SEQ ID NO: 2100843 - RNA, 19 nt, Homo sapiens
  misc_RNA (1)...(19): siRNA sense strand
uaugaugguuacaaugaag

SEQ ID NO: 2100844 - RNA, 19 nt, Homo sapiens
  misc_RNA (1)...(19): siRNA sense strand
uggccgugguggaaacuuu

SEQ ID NO: 2100845 - RNA, 19 nt, Homo sapiens
  misc_RNA (1)...(19): siRNA sense strand
ugacuuauucuuguguuga

SEQ ID NO: 2100846 - RNA, 19 nt, Homo sapiens
  misc_RNA (1)...(19): siRNA sense strand
gugguggugggaacuauaa

SEQ ID NO: 2100847 - RNA, 19 nt, Homo sapiens
  misc_RNA (1)...(19): siRNA sense strand
aggauaugaugguuacaau

SEQ ID NO: 2100848 - RNA, 19 nt, Homo sapiens
  misc_RNA (1)...(19): siRNA sense strand
uggaggauaugaugguuac

SEQ ID NO: 2100849 - RNA, 19 nt, Homo sapiens
  misc_RNA (1)...(19): siRNA sense strand
gaggaggugaugguggaua

SEQ ID NO: 2100850 - RNA, 19 nt, Homo sapiens
  misc_RNA (1)...(19): siRNA sense strand
ggaaccagagcaguugaga

SEQ ID NO: 2100851 - RNA, 19 nt, Homo sapiens
  misc_RNA (1)...(19): siRNA sense strand
gcaagauugaaaccauaga

SEQ ID NO: 2100852 - RNA, 19 nt, Homo sapiens
  misc_RNA (1)...(19): siRNA sense strand
gugcccaucuaacagugaa

SEQ ID NO: 2100853 - RNA, 19 nt, Homo sapiens
  misc_RNA (1)...(19): siRNA sense strand
gaggagggccaugauccaa

SEQ ID NO: 2100854 - RNA, 19 nt, Homo sapiens
  misc_RNA (1)...(19): siRNA sense strand
ugguggaagugguggauau

SEQ ID NO: 2100855 - RNA, 19 nt, Homo sapiens
  misc_RNA (1)...(19): siRNA sense strand
guggaggauaugaugguua

SEQ ID NO: 2100856 - RNA, 19 nt, Homo sapiens
  misc_RNA (1)...(19): siRNA sense strand
ggugguccugguuauagua

SEQ ID NO: 2100857 - RNA, 19 nt, Homo sapiens
  misc_RNA (1)...(19): siRNA sense strand
gcuuugguuuugugacuua

SEQ ID NO: 2100858 - RNA, 19 nt, Homo sapiens
  misc_RNA (1)...(19): siRNA sense strand
aggaggugaugguggauau

SEQ ID NO: 2100859 - RNA, 19 nt, Homo sapiens
  misc_RNA (1)...(19): siRNA sense strand
ggugguggugggaacuaua

SEQ ID NO: 2100860 - RNA, 19 nt, Homo sapiens
  misc_RNA (1)...(19): siRNA sense strand
gugacuuauucuuguguug

SEQ ID NO: 2100861 - RNA, 19 nt, Homo sapiens
  misc_RNA (1)...(19): siRNA sense strand
gguggucugagcuuugaaa

SEQ ID NO: 2100862 - RNA, 19 nt, Homo sapiens
  misc_RNA (1)...(19): siRNA sense strand
agaugauaguuuacgagaa

SEQ ID NO: 2100863 - RNA, 19 nt, Homo sapiens
  misc_RNA (1)...(19): siRNA sense strand
gauaugguagcagaagguu

SEQ ID NO: 2100864 - RNA, 19 nt, Homo sapiens
  misc_RNA (1)...(19): siRNA sense strand
ggauaugguagcagaaggu

SEQ ID NO: 2100865 - RNA, 19 nt, Homo sapiens
  misc_RNA (1)...(19): siRNA sense strand
gguggcagcagagguaguu

SEQ ID NO: 2100866 - RNA, 19 nt, Homo sapiens
  misc_RNA (1)...(19): siRNA sense strand
uuggugguauuaaagaaga

SEQ ID NO: 2100867 - RNA, 19 nt, Homo sapiens
  misc_RNA (1)...(19): siRNA sense strand
gguggugggaacuauaaug

SEQ ID NO: 2100868 - RNA, 19 nt, Homo sapiens
  misc_RNA (1)...(19): siRNA sense strand
accaggauauggaaaccaa

SEQ ID NO: 2100869 - RNA, 19 nt, Homo sapiens
  misc_RNA (1)...(19): siRNA sense strand
uggauauaauggauuugga

SEQ ID NO: 2100870 - RNA, 19 nt, Homo sapiens
  misc_RNA (1)...(19): siRNA sense strand
ggaggagggccaugaucca

SEQ ID NO: 2100871 - RNA, 19 nt, Homo sapiens
  misc_RNA (1)...(19): siRNA sense strand
ggcguguaguggaaccaaa

SEQ ID NO: 2100872 - RNA, 19 nt, Homo sapiens
  misc_RNA (1)...(19): siRNA sense strand
acgagaacauuuugagaaa

SEQ ID NO: 2100873 - RNA, 19 nt, Homo sapiens
  misc_RNA (1)...(19): siRNA sense strand
ggcagcagagguaguuaug

SEQ ID NO: 2100874 - RNA, 19 nt, Homo sapiens
  misc_RNA (1)...(19): siRNA sense strand
gaggugguggagguaauuu

SEQ ID NO: 2100875 - RNA, 19 nt, Homo sapiens
  misc_RNA (1)...(19): siRNA sense strand
uggaaauuauaguggacaa

SEQ ID NO: 2100876 - RNA, 19 nt, Homo sapiens
  misc_RNA (1)...(19): siRNA sense strand
ggaagaagaugaucaauuc

SEQ ID NO: 2100877 - RNA, 19 nt, Homo sapiens
  misc_RNA (1)...(19): siRNA sense strand
gaagagaaguacaaagcua

SEQ ID NO: 2100878 - RNA, 19 nt, Homo sapiens
  misc_RNA (1)...(19): siRNA sense strand
gcaaacaaaugauaggaaa

SEQ ID NO: 2100879 - RNA, 19 nt, Homo sapiens
  misc_RNA (1)...(19): siRNA sense strand
ggagagauccuauaacaaa

SEQ ID NO: 2100880 - RNA, 19 nt, Homo sapiens
  misc_RNA (1)...(19): siRNA sense strand
ggaauguggccucaaauua

SEQ ID NO: 2100881 - RNA, 19 nt, Homo sapiens
  misc_RNA (1)...(19): siRNA sense strand
gaauguggccucaaauuaa

SEQ ID NO: 2100882 - RNA, 19 nt, Homo sapiens
  misc_RNA (1)...(19): siRNA sense strand
gggaaaaccuuaauucaua

SEQ ID NO: 2100883 - RNA, 19 nt, Homo sapiens
  misc_RNA (1)...(19): siRNA sense strand
gcuuagagaugcucacuuu

SEQ ID NO: 2100884 - RNA, 19 nt, Homo sapiens
  misc_RNA (1)...(19): siRNA sense strand
ggauagagauuacuuugau

SEQ ID NO: 2100885 - RNA, 19 nt, Homo sapiens
  misc_RNA (1)...(19): siRNA sense strand
aaagaacucugcaacauga

SEQ ID NO: 2100886 - RNA, 19 nt, Homo sapiens
  misc_RNA (1)...(19): siRNA sense strand
gaaguaaagagguagauaa

SEQ ID NO: 2100887 - RNA, 19 nt, Homo sapiens
  misc_RNA (1)...(19): siRNA sense strand
gaaaccagauguugagcaa

SEQ ID NO: 2100888 - RNA, 19 nt, Homo sapiens
  misc_RNA (1)...(19): siRNA sense strand
acaaagauguuccuucuga

SEQ ID NO: 2100889 - RNA, 19 nt, Homo sapiens
  misc_RNA (1)...(19): siRNA sense strand
gaagguauauucaaagaac

SEQ ID NO: 2100890 - RNA, 19 nt, Homo sapiens
  misc_RNA (1)...(19): siRNA sense strand
gaccagaaguaaagaggua

SEQ ID NO: 2100891 - RNA, 19 nt, Homo sapiens
  misc_RNA (1)...(19): siRNA sense strand
ggaguguucuugaauguau

SEQ ID NO: 2100892 - RNA, 19 nt, Homo sapiens
  misc_RNA (1)...(19): siRNA sense strand
gaaaccagcaaacaaauga

SEQ ID NO: 2100893 - RNA, 19 nt, Homo sapiens
  misc_RNA (1)...(19): siRNA sense strand
agacagauaugaagaacaa

SEQ ID NO: 2100894 - RNA, 19 nt, Homo sapiens
  misc_RNA (1)...(19): siRNA sense strand
gaaguauuaugcuuagaga

SEQ ID NO: 2100895 - RNA, 19 nt, Homo sapiens
  misc_RNA (1)...(19): siRNA sense strand
gaagugaugaagauagaua

SEQ ID NO: 2100896 - RNA, 19 nt, Homo sapiens
  misc_RNA (1)...(19): siRNA sense strand
aaauuaaccuggucucauu

SEQ ID NO: 2100897 - RNA, 19 nt, Homo sapiens
  misc_RNA (1)...(19): siRNA sense strand
agaagaagaugaagaagga

SEQ ID NO: 2100898 - RNA, 19 nt, Homo sapiens
  misc_RNA (1)...(19): siRNA sense strand
uaaggaauguggccucaaa

SEQ ID NO: 2100899 - RNA, 19 nt, Homo sapiens
  misc_RNA (1)...(19): siRNA sense strand
gaaaugacaagcaacuuug

SEQ ID NO: 2100900 - RNA, 19 nt, Homo sapiens
  misc_RNA (1)...(19): siRNA sense strand
gagauccuauaacaaagua

SEQ ID NO: 2100901 - RNA, 19 nt, Homo sapiens
  misc_RNA (1)...(19): siRNA sense strand
caacagaggacauacgaaa

SEQ ID NO: 2100902 - RNA, 19 nt, Homo sapiens
  misc_RNA (1)...(19): siRNA sense strand
caagaggaaucaaugcuau

SEQ ID NO: 2100903 - RNA, 19 nt, Homo sapiens
  misc_RNA (1)...(19): siRNA sense strand
ccuagaaggucuugauuug

SEQ ID NO: 2100904 - RNA, 19 nt, Homo sapiens
  misc_RNA (1)...(19): siRNA sense strand
ugacagagaccaagaaaug

SEQ ID NO: 2100905 - RNA, 19 nt, Homo sapiens
  misc_RNA (1)...(19): siRNA sense strand
aggaacagauuacagauaa

SEQ ID NO: 2100906 - RNA, 19 nt, Homo sapiens
  misc_RNA (1)...(19): siRNA sense strand
gauguuugcuguacggaaa

SEQ ID NO: 2100907 - RNA, 19 nt, Homo sapiens
  misc_RNA (1)...(19): siRNA sense strand
ggaugaaccugcuacaaag

SEQ ID NO: 2100908 - RNA, 19 nt, Homo sapiens
  misc_RNA (1)...(19): siRNA sense strand
gccauucuuugaaggauua

SEQ ID NO: 2100909 - RNA, 19 nt, Homo sapiens
  misc_RNA (1)...(19): siRNA sense strand
ggaacugugugaauacaug

SEQ ID NO: 2100910 - RNA, 19 nt, Homo sapiens
  misc_RNA (1)...(19): siRNA sense strand
caagauggauccuaauuuu

SEQ ID NO: 2100911 - RNA, 19 nt, Homo sapiens
  misc_RNA (1)...(19): siRNA sense strand
acaaacaaguugcgaaaug

SEQ ID NO: 2100912 - RNA, 19 nt, Homo sapiens
  misc_RNA (1)...(19): siRNA sense strand
gcaacaugauacuugauug

SEQ ID NO: 2100913 - RNA, 19 nt, Homo sapiens
  misc_RNA (1)...(19): siRNA sense strand
cugaagaagucaauuaaug

SEQ ID NO: 2100914 - RNA, 19 nt, Homo sapiens
  misc_RNA (1)...(19): siRNA sense strand
gaagaaaccacuacaucau

SEQ ID NO: 2100915 - RNA, 19 nt, Homo sapiens
  misc_RNA (1)...(19): siRNA sense strand
gauguuugcucaccuuuua

SEQ ID NO: 2100916 - RNA, 19 nt, Homo sapiens
  misc_RNA (1)...(19): siRNA sense strand
gaacuccucuccagaagac

SEQ ID NO: 2100917 - RNA, 19 nt, Homo sapiens
  misc_RNA (1)...(19): siRNA sense strand
gaagugauguuugcuguac

SEQ ID NO: 2100918 - RNA, 19 nt, Homo sapiens
  misc_RNA (1)...(19): siRNA sense strand
gaaagaccaacagaugaua

SEQ ID NO: 2100919 - RNA, 19 nt, Homo sapiens
  misc_RNA (1)...(19): siRNA sense strand
cuuauuagcugggcgauuu

SEQ ID NO: 2100920 - RNA, 19 nt, Homo sapiens
  misc_RNA (1)...(19): siRNA sense strand
gccaucaacuucuuuacuu

SEQ ID NO: 2100921 - RNA, 19 nt, Homo sapiens
  misc_RNA (1)...(19): siRNA sense strand
caaacaaguugcgaaaugu

SEQ ID NO: 2100922 - RNA, 19 nt, Homo sapiens
  misc_RNA (1)...(19): siRNA sense strand
agaggacguucuuaugaua

SEQ ID NO: 2100923 - RNA, 19 nt, Homo sapiens
  misc_RNA (1)...(19): siRNA sense strand
aagcauacacaccgaauua

SEQ ID NO: 2100924 - RNA, 19 nt, Homo sapiens
  misc_RNA (1)...(19): siRNA sense strand
uuaauggccuuaucaacaa

SEQ ID NO: 2100925 - RNA, 19 nt, Homo sapiens
  misc_RNA (1)...(19): siRNA sense strand
gagcuggauccucuucuua

SEQ ID NO: 2100926 - RNA, 19 nt, Homo sapiens
  misc_RNA (1)...(19): siRNA sense strand
gaagagaggagagagaaga

SEQ ID NO: 2100927 - RNA, 19 nt, Homo sapiens
  misc_RNA (1)...(19): siRNA sense strand
agacaaagauguuccuucu

SEQ ID NO: 2100928 - RNA, 19 nt, Homo sapiens
  misc_RNA (1)...(19): siRNA sense strand
uaacaaaguacacaucaga

SEQ ID NO: 2100929 - RNA, 19 nt, Homo sapiens
  misc_RNA (1)...(19): siRNA sense strand
ucaacaaagucaacauuuc

SEQ ID NO: 2100930 - RNA, 19 nt, Homo sapiens
  misc_RNA (1)...(19): siRNA sense strand
ggaacagauuacagauaaa

SEQ ID NO: 2100931 - RNA, 19 nt, Homo sapiens
  misc_RNA (1)...(19): siRNA sense strand
ggagaaacccagaaacauc

SEQ ID NO: 2100932 - RNA, 19 nt, Homo sapiens
  misc_RNA (1)...(19): siRNA sense strand
gaaauguugcuaagauguu

SEQ ID NO: 2100933 - RNA, 19 nt, Homo sapiens
  misc_RNA (1)...(19): siRNA sense strand
ggaaagauggauucaagga

SEQ ID NO: 2100934 - RNA, 19 nt, Homo sapiens
  misc_RNA (1)...(19): siRNA sense strand
gagaaguacaaagcuauua

SEQ ID NO: 2100935 - RNA, 19 nt, Homo sapiens
  misc_RNA (1)...(19): siRNA sense strand
gaucaaagucaaaggaaau

SEQ ID NO: 2100936 - RNA, 19 nt, Homo sapiens
  misc_RNA (1)...(19): siRNA sense strand
ucagaaaccagcaaacaaa

SEQ ID NO: 2100937 - RNA, 19 nt, Homo sapiens
  misc_RNA (1)...(19): siRNA sense strand
auacaugggucuuccuaaa

SEQ ID NO: 2100938 - RNA, 19 nt, Homo sapiens
  misc_RNA (1)...(19): siRNA sense strand
guacauggaauccuuugaa

SEQ ID NO: 2100939 - RNA, 19 nt, Homo sapiens
  misc_RNA (1)...(19): siRNA sense strand
gcuauucagucaaguuuag

SEQ ID NO: 2100940 - RNA, 19 nt, Homo sapiens
  misc_RNA (1)...(19): siRNA sense strand
gagaaacccagaaacauca

SEQ ID NO: 2100941 - RNA, 19 nt, Homo sapiens
  misc_RNA (1)...(19): siRNA sense strand
gcauacacaccgaauuaaa

SEQ ID NO: 2100942 - RNA, 19 nt, Homo sapiens
  misc_RNA (1)...(19): siRNA sense strand
gagauuacuuugauuacag

SEQ ID NO: 2100943 - RNA, 19 nt, Homo sapiens
  misc_RNA (1)...(19): siRNA sense strand
gggagaagaagaugaagaa

SEQ ID NO: 2100944 - RNA, 19 nt, Homo sapiens
  misc_RNA (1)...(19): siRNA sense strand
ugaaguagcuauugguuuu

SEQ ID NO: 2100945 - RNA, 19 nt, Homo sapiens
  misc_RNA (1)...(19): siRNA sense strand
ggaaagaccaacagaugau

SEQ ID NO: 2100946 - RNA, 19 nt, Homo sapiens
  misc_RNA (1)...(19): siRNA sense strand
cgaaaaggcuaucgaagaa

SEQ ID NO: 2100947 - RNA, 19 nt, Homo sapiens
  misc_RNA (1)...(19): siRNA sense strand
gucaacauuuccaacauaa

SEQ ID NO: 2100948 - RNA, 19 nt, Homo sapiens
  misc_RNA (1)...(19): siRNA sense strand
aaagaaagaguacauggaa

SEQ ID NO: 2100949 - RNA, 19 nt, Homo sapiens
  misc_RNA (1)...(19): siRNA sense strand
guacacaucagacaaagau

SEQ ID NO: 2100950 - RNA, 19 nt, Homo sapiens
  misc_RNA (1)...(19): siRNA sense strand
aaacaaggacugagagaga

SEQ ID NO: 2100951 - RNA, 19 nt, Homo sapiens
  misc_RNA (1)...(19): siRNA sense strand
gaagacagauaugaagaac

SEQ ID NO: 2100952 - RNA, 19 nt, Homo sapiens
  misc_RNA (1)...(19): siRNA sense strand
aaagaaagaugagcuggau

SEQ ID NO: 2100953 - RNA, 19 nt, Homo sapiens
  misc_RNA (1)...(19): siRNA sense strand
acaguagaguugcgaauga

SEQ ID NO: 2100954 - RNA, 19 nt, Homo sapiens
  misc_RNA (1)...(19): siRNA sense strand
caaagauguuccuucugaa

SEQ ID NO: 2100955 - RNA, 19 nt, Homo sapiens
  misc_RNA (1)...(19): siRNA sense strand
gaacacgggcaccaggaaa

SEQ ID NO: 2100956 - RNA, 19 nt, Homo sapiens
  misc_RNA (1)...(19): siRNA sense strand
gcgaaauguugcuaagaug

SEQ ID NO: 2100957 - RNA, 19 nt, Homo sapiens
  misc_RNA (1)...(19): siRNA sense strand
acacgaaguauuaugcuua

SEQ ID NO: 2100958 - RNA, 19 nt, Homo sapiens
  misc_RNA (1)...(19): siRNA sense strand
agagaaagagaaagagaua

SEQ ID NO: 2100959 - RNA, 19 nt, Homo sapiens
  misc_RNA (1)...(19): siRNA sense strand
aaacaaacaaguugcgaaa

SEQ ID NO: 2100960 - RNA, 19 nt, Homo sapiens
  misc_RNA (1)...(19): siRNA sense strand
gaggagaaacccagaaaca

SEQ ID NO: 2100961 - RNA, 19 nt, Homo sapiens
  misc_RNA (1)...(19): siRNA sense strand
gggaagaccagaaguaaag

SEQ ID NO: 2100962 - RNA, 19 nt, Homo sapiens
  misc_RNA (1)...(19): siRNA sense strand
ggaaucaaugcuauauuug

SEQ ID NO: 2100963 - RNA, 19 nt, Homo sapiens
  misc_RNA (1)...(19): siRNA sense strand
gaugauagcguugaaguag

SEQ ID NO: 2100964 - RNA, 19 nt, Homo sapiens
  misc_RNA (1)...(19): siRNA sense strand
cagcauuaguggcaauuau

SEQ ID NO: 2100965 - RNA, 19 nt, Homo sapiens
  misc_RNA (1)...(19): siRNA sense strand
agucaacauuuccaacaua

SEQ ID NO: 2100966 - RNA, 19 nt, Homo sapiens
  misc_RNA (1)...(19): siRNA sense strand
ggacguucuuaugauagua

SEQ ID NO: 2100967 - RNA, 19 nt, Homo sapiens
  misc_RNA (1)...(19): siRNA sense strand
ucaagugguucaaauugga

SEQ ID NO: 2100968 - RNA, 19 nt, Homo sapiens
  misc_RNA (1)...(19): siRNA sense strand
gaucaaaauucaagugguu

SEQ ID NO: 2100969 - RNA, 19 nt, Homo sapiens
  misc_RNA (1)...(19): siRNA sense strand
guucagagucuuccaguga

SEQ ID NO: 2100970 - RNA, 19 nt, Homo sapiens
  misc_RNA (1)...(19): siRNA sense strand
gaauacaugggucuuccua

SEQ ID NO: 2100971 - RNA, 19 nt, Homo sapiens
  misc_RNA (1)...(19): siRNA sense strand
gaaauuaaccuggucucau

SEQ ID NO: 2100972 - RNA, 19 nt, Homo sapiens
  misc_RNA (1)...(19): siRNA sense strand
ucgaagaaaugacaagcaa

SEQ ID NO: 2100973 - RNA, 19 nt, Homo sapiens
  misc_RNA (1)...(19): siRNA sense strand
uccaggaacugugugaaua

SEQ ID NO: 2100974 - RNA, 19 nt, Homo sapiens
  misc_RNA (1)...(19): siRNA sense strand
gcacucaggcucaagaagu

SEQ ID NO: 2100975 - RNA, 19 nt, Homo sapiens
  misc_RNA (1)...(19): siRNA sense strand
ggacaugggaagaccagaa

SEQ ID NO: 2100976 - RNA, 19 nt, Homo sapiens
  misc_RNA (1)...(19): siRNA sense strand
gaagaaggcaccaaugaaa

SEQ ID NO: 2100977 - RNA, 19 nt, Homo sapiens
  misc_RNA (1)...(19): siRNA sense strand
guacacaccacccaccaua

SEQ ID NO: 2100978 - RNA, 19 nt, Homo sapiens
  misc_RNA (1)...(19): siRNA sense strand
cagcagagcagaucaggaa

SEQ ID NO: 2100979 - RNA, 19 nt, Homo sapiens
  misc_RNA (1)...(19): siRNA sense strand
gaagaagaaggcaccaaug

SEQ ID NO: 2100980 - RNA, 19 nt, Homo sapiens
  misc_RNA (1)...(19): siRNA sense strand
gaaaggccagaaugaauca

SEQ ID NO: 2100981 - RNA, 19 nt, Homo sapiens
  misc_RNA (1)...(19): siRNA sense strand
gagcagaucaggaaaagaa

SEQ ID NO: 2100982 - RNA, 19 nt, Homo sapiens
  misc_RNA (1)...(19): siRNA sense strand
caaaggaagcagagugugu

SEQ ID NO: 2100983 - RNA, 19 nt, Homo sapiens
  misc_RNA (1)...(19): siRNA sense strand
aagaagaaggcaccaauga

SEQ ID NO: 2100984 - RNA, 19 nt, Homo sapiens
  misc_RNA (1)...(19): siRNA sense strand
acacaccacccaccauaaa

SEQ ID NO: 2100985 - RNA, 19 nt, Homo sapiens
  misc_RNA (1)...(19): siRNA sense strand
aaaggaagcagagugugua

SEQ ID NO: 2100986 - RNA, 19 nt, Homo sapiens
  misc_RNA (1)...(19): siRNA sense strand
uaaaagggguuaagcaucu

SEQ ID NO: 2100987 - RNA, 19 nt, Homo sapiens
  misc_RNA (1)...(19): siRNA sense strand
ugaaaggccagaaugaauc

SEQ ID NO: 2100988 - RNA, 19 nt, Homo sapiens
  misc_RNA (1)...(19): siRNA sense strand
aggagcagcgggaccauua

SEQ ID NO: 2100989 - RNA, 19 nt, Homo sapiens
  misc_RNA (1)...(19): siRNA sense strand
agaagaaggcaccaaugaa

SEQ ID NO: 2100990 - RNA, 19 nt, Homo sapiens
  misc_RNA (1)...(19): siRNA sense strand
agcauucccugaagaagaa

SEQ ID NO: 2100991 - RNA, 19 nt, Homo sapiens
  misc_RNA (1)...(19): siRNA sense strand
cacuugugauucucaauga

SEQ ID NO: 2100992 - RNA, 19 nt, Homo sapiens
  misc_RNA (1)...(19): siRNA sense strand
agaaggcaccaaugaaaga

SEQ ID NO: 2100993 - RNA, 19 nt, Homo sapiens
  misc_RNA (1)...(19): siRNA sense strand
cagcauucccugaagaaga

SEQ ID NO: 2100994 - RNA, 19 nt, Homo sapiens
  misc_RNA (1)...(19): siRNA sense strand
caacacacaaggggaauua

SEQ ID NO: 2100995 - RNA, 19 nt, Homo sapiens
  misc_RNA (1)...(19): siRNA sense strand
ggagcagcgggaccauuaa

SEQ ID NO: 2100996 - RNA, 19 nt, Homo sapiens
  misc_RNA (1)...(19): siRNA sense strand
caaggggaauuacagaaug

SEQ ID NO: 2100997 - RNA, 19 nt, Homo sapiens
  misc_RNA (1)...(19): siRNA sense strand
ggguuaagcaucugaaagg

SEQ ID NO: 2100998 - RNA, 19 nt, Homo sapiens
  misc_RNA (1)...(19): siRNA sense strand
agaagaagaaggcaccaau

SEQ ID NO: 2100999 - RNA, 19 nt, Homo sapiens
  misc_RNA (1)...(19): siRNA sense strand
cugaaaggccagaaugaau

SEQ ID NO: 2101000 - RNA, 19 nt, Homo sapiens
  misc_RNA (1)...(19): siRNA sense strand
ccagaaauagaugacaaga

SEQ ID NO: 2101001 - RNA, 19 nt, Homo sapiens
  misc_RNA (1)...(19): siRNA sense strand
gaagcagcagagcagauca

SEQ ID NO: 2101002 - RNA, 19 nt, Homo sapiens
  misc_RNA (1)...(19): siRNA sense strand
gaaggcaccaaugaaagag

SEQ ID NO: 2101003 - RNA, 19 nt, Homo sapiens
  misc_RNA (1)...(19): siRNA sense strand
gcagagcagaucaggaaaa

SEQ ID NO: 2101004 - RNA, 19 nt, Homo sapiens
  misc_RNA (1)...(19): siRNA sense strand
gaaacaggcuauuggcuua

SEQ ID NO: 2101005 - RNA, 19 nt, Homo sapiens
  misc_RNA (1)...(19): siRNA sense strand
gaauauauaugcccaaaga

SEQ ID NO: 2101006 - RNA, 19 nt, Homo sapiens
  misc_RNA (1)...(19): siRNA sense strand
gaaugaagauccaacauau

SEQ ID NO: 2101007 - RNA, 19 nt, Homo sapiens
  misc_RNA (1)...(19): siRNA sense strand
auacagagguucucaaaua

SEQ ID NO: 2101008 - RNA, 19 nt, Homo sapiens
  misc_RNA (1)...(19): siRNA sense strand
caaauuggauacagcuuua

SEQ ID NO: 2101009 - RNA, 19 nt, Homo sapiens
  misc_RNA (1)...(19): siRNA sense strand
gaauaaaccuaaucaguuc

SEQ ID NO: 2101010 - RNA, 19 nt, Homo sapiens
  misc_RNA (1)...(19): siRNA sense strand
gaaguccgcuguugaaaga

SEQ ID NO: 2101011 - RNA, 19 nt, Homo sapiens
  misc_RNA (1)...(19): siRNA sense strand
ggaaugauguguuacagaa

SEQ ID NO: 2101012 - RNA, 19 nt, Homo sapiens
  misc_RNA (1)...(19): siRNA sense strand
gaucaauacuggagaugua

SEQ ID NO: 2101013 - RNA, 19 nt, Homo sapiens
  misc_RNA (1)...(19): siRNA sense strand
gcagugggauccauuugua

SEQ ID NO: 2101014 - RNA, 19 nt, Homo sapiens
  misc_RNA (1)...(19): siRNA sense strand
ggaauaaaccuaaucaguu

SEQ ID NO: 2101015 - RNA, 19 nt, Homo sapiens
  misc_RNA (1)...(19): siRNA sense strand
gaaaucacccuucuccuaa

SEQ ID NO: 2101016 - RNA, 19 nt, Homo sapiens
  misc_RNA (1)...(19): siRNA sense strand
caacagcccugaagaaaca

SEQ ID NO: 2101017 - RNA, 19 nt, Homo sapiens
  misc_RNA (1)...(19): siRNA sense strand
caacggcucugcuaucauu

SEQ ID NO: 2101018 - RNA, 19 nt, Homo sapiens
  misc_RNA (1)...(19): siRNA sense strand
cagaaagacuuacaugaaa

SEQ ID NO: 2101019 - RNA, 19 nt, Homo sapiens
  misc_RNA (1)...(19): siRNA sense strand
gaagacaccuaccuggaaa

SEQ ID NO: 2101020 - RNA, 19 nt, Homo sapiens
  misc_RNA (1)...(19): siRNA sense strand
gcuacuaugugaucuauuu

SEQ ID NO: 2101021 - RNA, 19 nt, Homo sapiens
  misc_RNA (1)...(19): siRNA sense strand
ccacacaaauucaacagua

SEQ ID NO: 2101022 - RNA, 19 nt, Homo sapiens
  misc_RNA (1)...(19): siRNA sense strand
gaagaaacagcuguauuua

SEQ ID NO: 2101023 - RNA, 19 nt, Homo sapiens
  misc_RNA (1)...(19): siRNA sense strand
gcuaugaaaugcaagagua

SEQ ID NO: 2101024 - RNA, 19 nt, Homo sapiens
  misc_RNA (1)...(19): siRNA sense strand
agaaacagcuguauuuaug

SEQ ID NO: 2101025 - RNA, 19 nt, Homo sapiens
  misc_RNA (1)...(19): siRNA sense strand
gaagcagguuauacuauuu

SEQ ID NO: 2101026 - RNA, 19 nt, Homo sapiens
  misc_RNA (1)...(19): siRNA sense strand
gauccagacuuuaaugaaa

SEQ ID NO: 2101027 - RNA, 19 nt, Homo sapiens
  misc_RNA (1)...(19): siRNA sense strand
ucaaagagcugugagagaa

SEQ ID NO: 2101028 - RNA, 19 nt, Homo sapiens
  misc_RNA (1)...(19): siRNA sense strand
ggaauuaugagucaaauga

SEQ ID NO: 2101029 - RNA, 19 nt, Homo sapiens
  misc_RNA (1)...(19): siRNA sense strand
caucagauaucacaaaugu

SEQ ID NO: 2101030 - RNA, 19 nt, Homo sapiens
  misc_RNA (1)...(19): siRNA sense strand
gagaaugccuuggaagauu

SEQ ID NO: 2101031 - RNA, 19 nt, Homo sapiens
  misc_RNA (1)...(19): siRNA sense strand
cagcagagaugcaaguauu

SEQ ID NO: 2101032 - RNA, 19 nt, Homo sapiens
  misc_RNA (1)...(19): siRNA sense strand
guacuuauccaacuacuaa

SEQ ID NO: 2101033 - RNA, 19 nt, Homo sapiens
  misc_RNA (1)...(19): siRNA sense strand
ucaauuaccuccagcuuau

SEQ ID NO: 2101034 - RNA, 19 nt, Homo sapiens
  misc_RNA (1)...(19): siRNA sense strand
gaguucuucuugucaauua

SEQ ID NO: 2101035 - RNA, 19 nt, Homo sapiens
  misc_RNA (1)...(19): siRNA sense strand
ggacauugauccugaugga

SEQ ID NO: 2101036 - RNA, 19 nt, Homo sapiens
  misc_RNA (1)...(19): siRNA sense strand
guucagacuucuacuauug

SEQ ID NO: 2101037 - RNA, 19 nt, Homo sapiens
  misc_RNA (1)...(19): siRNA sense strand
caaauuaguguccaaauga

SEQ ID NO: 2101038 - RNA, 19 nt, Homo sapiens
  misc_RNA (1)...(19): siRNA sense strand
gacaacguuugcaucauua

SEQ ID NO: 2101039 - RNA, 19 nt, Homo sapiens
  misc_RNA (1)...(19): siRNA sense strand
acugacagaugcucaauua

SEQ ID NO: 2101040 - RNA, 19 nt, Homo sapiens
  misc_RNA (1)...(19): siRNA sense strand
ugaagaaacagcuguauuu

SEQ ID NO: 2101041 - RNA, 19 nt, Homo sapiens
  misc_RNA (1)...(19): siRNA sense strand
ggagugaaauacaagaguu

SEQ ID NO: 2101042 - RNA, 19 nt, Homo sapiens
  misc_RNA (1)...(19): siRNA sense strand
ggaggaccauccauaauuc

SEQ ID NO: 2101043 - RNA, 19 nt, Homo sapiens
  misc_RNA (1)...(19): siRNA sense strand
gcaagagguguuacuauuu

SEQ ID NO: 2101044 - RNA, 19 nt, Homo sapiens
  misc_RNA (1)...(19): siRNA sense strand
ugacaacguuugcaucauu

SEQ ID NO: 2101045 - RNA, 19 nt, Homo sapiens
  misc_RNA (1)...(19): siRNA sense strand
ugacugauauuacaaagga

SEQ ID NO: 2101046 - RNA, 19 nt, Homo sapiens
  misc_RNA (1)...(19): siRNA sense strand
ggacccuacugcccucuua

SEQ ID NO: 2101047 - RNA, 19 nt, Homo sapiens
  misc_RNA (1)...(19): siRNA sense strand
gaccaagaauaguguguuu

SEQ ID NO: 2101048 - RNA, 19 nt, Homo sapiens
  misc_RNA (1)...(19): siRNA sense strand
agaauugccuccauuuauu

SEQ ID NO: 2101049 - RNA, 19 nt, Homo sapiens
  misc_RNA (1)...(19): siRNA sense strand
ggcaaauucugaucaauau

SEQ ID NO: 2101050 - RNA, 19 nt, Homo sapiens
  misc_RNA (1)...(19): siRNA sense strand
gaucagaguucuucuuguc

SEQ ID NO: 2101051 - RNA, 19 nt, Homo sapiens
  misc_RNA (1)...(19): siRNA sense strand
gaugugcgcucucaaguag

SEQ ID NO: 2101052 - RNA, 19 nt, Homo sapiens
  misc_RNA (1)...(19): siRNA sense strand
gaaggauccuaguuugcua

SEQ ID NO: 2101053 - RNA, 19 nt, Homo sapiens
  misc_RNA (1)...(19): siRNA sense strand
gggcaaauucugaucaaua

SEQ ID NO: 2101054 - RNA, 19 nt, Homo sapiens
  misc_RNA (1)...(19): siRNA sense strand
gaccaaggauucccauaau

SEQ ID NO: 2101055 - RNA, 19 nt, Homo sapiens
  misc_RNA (1)...(19): siRNA sense strand
ucaaauaugugaagggaau

SEQ ID NO: 2101056 - RNA, 19 nt, Homo sapiens
  misc_RNA (1)...(19): siRNA sense strand
acaaggagcuguugcacuu

SEQ ID NO: 2101057 - RNA, 19 nt, Homo sapiens
  misc_RNA (1)...(19): siRNA sense strand
ugaagcagguuauacuauu

SEQ ID NO: 2101058 - RNA, 19 nt, Homo sapiens
  misc_RNA (1)...(19): siRNA sense strand
gagaauugccuccauuuau

SEQ ID NO: 2101059 - RNA, 19 nt, Homo sapiens
  misc_RNA (1)...(19): siRNA sense strand
gcuauuggcuuacuaaugc

SEQ ID NO: 2101060 - RNA, 19 nt, Homo sapiens
  misc_RNA (1)...(19): siRNA sense strand
cuacugaguuuaaagaaga

SEQ ID NO: 2101061 - RNA, 19 nt, Homo sapiens
  misc_RNA (1)...(19): siRNA sense strand
ggaauaaugaccauaucua

SEQ ID NO: 2101062 - RNA, 19 nt, Homo sapiens
  misc_RNA (1)...(19): siRNA sense strand
ccuagggaaugauguguua

SEQ ID NO: 2101063 - RNA, 19 nt, Homo sapiens
  misc_RNA (1)...(19): siRNA sense strand
cacaacagaguuucuauua

SEQ ID NO: 2101064 - RNA, 19 nt, Homo sapiens
  misc_RNA (1)...(19): siRNA sense strand
gagacuacagcaaagauua

SEQ ID NO: 2101065 - RNA, 19 nt, Homo sapiens
  misc_RNA (1)...(19): siRNA sense strand
gcaagaguauuccauuugg

SEQ ID NO: 2101066 - RNA, 19 nt, Homo sapiens
  misc_RNA (1)...(19): siRNA sense strand
caaucaauguuucagauga

SEQ ID NO: 2101067 - RNA, 19 nt, Homo sapiens
  misc_RNA (1)...(19): siRNA sense strand
ggaaggagcaccgaagaaa

SEQ ID NO: 2101068 - RNA, 19 nt, Homo sapiens
  misc_RNA (1)...(19): siRNA sense strand
ccuaaucaguucauucgua

SEQ ID NO: 2101069 - RNA, 19 nt, Homo sapiens
  misc_RNA (1)...(19): siRNA sense strand
ucacaacgcucuuauacag

SEQ ID NO: 2101070 - RNA, 19 nt, Homo sapiens
  misc_RNA (1)...(19): siRNA sense strand
gaaacaaauuaguguccaa

SEQ ID NO: 2101071 - RNA, 19 nt, Homo sapiens
  misc_RNA (1)...(19): siRNA sense strand
cagagguucucaaauauau

SEQ ID NO: 2101072 - RNA, 19 nt, Homo sapiens
  misc_RNA (1)...(19): siRNA sense strand
gcacaggcuugcucauuag

SEQ ID NO: 2101073 - RNA, 19 nt, Homo sapiens
  misc_RNA (1)...(19): siRNA sense strand
gugcaaaacuguuggguua

SEQ ID NO: 2101074 - RNA, 19 nt, Homo sapiens
  misc_RNA (1)...(19): siRNA sense strand
ggaaacauguccagaaagc

SEQ ID NO: 2101075 - RNA, 19 nt, Homo sapiens
  misc_RNA (1)...(19): siRNA sense strand
ucaaaucccuuccaucagu

SEQ ID NO: 2101076 - RNA, 19 nt, Homo sapiens
  misc_RNA (1)...(19): siRNA sense strand
ggugggacuuccuuccuua

SEQ ID NO: 2101077 - RNA, 19 nt, Homo sapiens
  misc_RNA (1)...(19): siRNA sense strand
ugugaaagcuauaaacgaa

SEQ ID NO: 2101078 - RNA, 19 nt, Homo sapiens
  misc_RNA (1)...(19): siRNA sense strand
gaauugccuccauuuauuu

SEQ ID NO: 2101079 - RNA, 19 nt, Homo sapiens
  misc_RNA (1)...(19): siRNA sense strand
cuacugcccucuuagacua

SEQ ID NO: 2101080 - RNA, 19 nt, Homo sapiens
  misc_RNA (1)...(19): siRNA sense strand
uaagagaguuggcuauugg

SEQ ID NO: 2101081 - RNA, 19 nt, Homo sapiens
  misc_RNA (1)...(19): siRNA sense strand
caagacagagcgagaauug

SEQ ID NO: 2101082 - RNA, 19 nt, Homo sapiens
  misc_RNA (1)...(19): siRNA sense strand
gaaauagugaacaaucuga

SEQ ID NO: 2101083 - RNA, 19 nt, Homo sapiens
  misc_RNA (1)...(19): siRNA sense strand
ugucauagcucuaaguaag

SEQ ID NO: 2101084 - RNA, 19 nt, Homo sapiens
  misc_RNA (1)...(19): siRNA sense strand
gcugugcugucauucuaua

SEQ ID NO: 2101085 - RNA, 19 nt, Homo sapiens
  misc_RNA (1)...(19): siRNA sense strand
gcuagaagcugaggcaaca

SEQ ID NO: 2101086 - RNA, 19 nt, Homo sapiens
  misc_RNA (1)...(19): siRNA sense strand
agaguuggcuauuggaauu

SEQ ID NO: 2101087 - RNA, 19 nt, Homo sapiens
  misc_RNA (1)...(19): siRNA sense strand
gcagagaugcaaguauuaa

SEQ ID NO: 2101088 - RNA, 19 nt, Homo sapiens
  misc_RNA (1)...(19): siRNA sense strand
agaagcauuuaccacauua

SEQ ID NO: 2101089 - RNA, 19 nt, Homo sapiens
  misc_RNA (1)...(19): siRNA sense strand
cagaagcauuuaccacauu

SEQ ID NO: 2101090 - RNA, 19 nt, Homo sapiens
  misc_RNA (1)...(19): siRNA sense strand
gauagucuguauucaguuc

SEQ ID NO: 2101091 - RNA, 19 nt, Homo sapiens
  misc_RNA (1)...(19): siRNA sense strand
gaccucccauguggaauua

SEQ ID NO: 2101092 - RNA, 19 nt, Homo sapiens
  misc_RNA (1)...(19): siRNA sense strand
caggagcacuggacacuau

SEQ ID NO: 2101093 - RNA, 19 nt, Homo sapiens
  misc_RNA (1)...(19): siRNA sense strand
guagucugcuucagccuuu

SEQ ID NO: 2101094 - RNA, 19 nt, Homo sapiens
  misc_RNA (1)...(19): siRNA sense strand
ugaaugaagauccaacaua

SEQ ID NO: 2101095 - RNA, 19 nt, Homo sapiens
  misc_RNA (1)...(19): siRNA sense strand
gaaacagcuguauuuauga

SEQ ID NO: 2101096 - RNA, 19 nt, Homo sapiens
  misc_RNA (1)...(19): siRNA sense strand
caucuacaauuacaucaga

SEQ ID NO: 2101097 - RNA, 19 nt, Homo sapiens
  misc_RNA (1)...(19): siRNA sense strand
ugaauaugcugauguccuu

SEQ ID NO: 2101098 - RNA, 19 nt, Homo sapiens
  misc_RNA (1)...(19): siRNA sense strand
ggaaauucaggaugcuaua

SEQ ID NO: 2101099 - RNA, 19 nt, Homo sapiens
  misc_RNA (1)...(19): siRNA sense strand
gcacaacagaguuucuauu

SEQ ID NO: 2101100 - RNA, 19 nt, Homo sapiens
  misc_RNA (1)...(19): siRNA sense strand
caauaccagucauggaauu

SEQ ID NO: 2101101 - RNA, 19 nt, Homo sapiens
  misc_RNA (1)...(19): siRNA sense strand
gcuaguaaauguaaugaac

SEQ ID NO: 2101102 - RNA, 19 nt, Homo sapiens
  misc_RNA (1)...(19): siRNA sense strand
gcucuuggcuacuuaacau

SEQ ID NO: 2101103 - RNA, 19 nt, Homo sapiens
  misc_RNA (1)...(19): siRNA sense strand
caagagguguuacuauuuu

SEQ ID NO: 2101104 - RNA, 19 nt, Homo sapiens
  misc_RNA (1)...(19): siRNA sense strand
gaaagaaacuuccaugugu

SEQ ID NO: 2101105 - RNA, 19 nt, Homo sapiens
  misc_RNA (1)...(19): siRNA sense strand
gaagaauacuccuuuggua

SEQ ID NO: 2101106 - RNA, 19 nt, Homo sapiens
  misc_RNA (1)...(19): siRNA sense strand
cugaagagcuccucaauaa

SEQ ID NO: 2101107 - RNA, 19 nt, Homo sapiens
  misc_RNA (1)...(19): siRNA sense strand
caaaguaugugugaaguuu

SEQ ID NO: 2101108 - RNA, 19 nt, Homo sapiens
  misc_RNA (1)...(19): siRNA sense strand
aaacaaacauggccucauu

SEQ ID NO: 2101109 - RNA, 19 nt, Homo sapiens
  misc_RNA (1)...(19): siRNA sense strand
cagagaaaguggaagaaua

SEQ ID NO: 2101110 - RNA, 19 nt, Homo sapiens
  misc_RNA (1)...(19): siRNA sense strand
caacgaggcucuagugugu

SEQ ID NO: 2101111 - RNA, 19 nt, Homo sapiens
  misc_RNA (1)...(19): siRNA sense strand
gacaaagaguuccgccuua

SEQ ID NO: 2101112 - RNA, 19 nt, Homo sapiens
  misc_RNA (1)...(19): siRNA sense strand
gagcagaaguuaaucaagu

SEQ ID NO: 2101113 - RNA, 19 nt, Homo sapiens
  misc_RNA (1)...(19): siRNA sense strand
gaggagaccuucaucaaca

SEQ ID NO: 2101114 - RNA, 19 nt, Homo sapiens
  misc_RNA (1)...(19): siRNA sense strand
ggacucacauugacuacuu

SEQ ID NO: 2101115 - RNA, 19 nt, Homo sapiens
  misc_RNA (1)...(19): siRNA sense strand
aaacagaagcucaauauug

SEQ ID NO: 2101116 - RNA, 19 nt, Homo sapiens
  misc_RNA (1)...(19): siRNA sense strand
gaagugugguuauaucugu

SEQ ID NO: 2101117 - RNA, 19 nt, Homo sapiens
  misc_RNA (1)...(19): siRNA sense strand
gaagguacguagagaauac

SEQ ID NO: 2101118 - RNA, 19 nt, Homo sapiens
  misc_RNA (1)...(19): siRNA sense strand
ugacaacuccucuagauuu

SEQ ID NO: 2101119 - RNA, 19 nt, Homo sapiens
  misc_RNA (1)...(19): siRNA sense strand
uaaaggcgauccacuagga

SEQ ID NO: 2101120 - RNA, 19 nt, Homo sapiens
  misc_RNA (1)...(19): siRNA sense strand
ugaaguugcugucccuuaa

SEQ ID NO: 2101121 - RNA, 19 nt, Homo sapiens
  misc_RNA (1)...(19): siRNA sense strand
gggcuuaccuggaaaucaa

SEQ ID NO: 2101122 - RNA, 19 nt, Homo sapiens
  misc_RNA (1)...(19): siRNA sense strand
ggaaugccaugcagauugu

SEQ ID NO: 2101123 - RNA, 19 nt, Homo sapiens
  misc_RNA (1)...(19): siRNA sense strand
ggacuuggccacucucauu

SEQ ID NO: 2101124 - RNA, 19 nt, Homo sapiens
  misc_RNA (1)...(19): siRNA sense strand
ggaggaggcuaggaauaaa

SEQ ID NO: 2101125 - RNA, 19 nt, Homo sapiens
  misc_RNA (1)...(19): siRNA sense strand
ccaguaagcuugucauguc

SEQ ID NO: 2101126 - RNA, 19 nt, Homo sapiens
  misc_RNA (1)...(19): siRNA sense strand
aaacauggccucauuggaa

SEQ ID NO: 2101127 - RNA, 19 nt, Homo sapiens
  misc_RNA (1)...(19): siRNA sense strand
gauaaggaccaauguauuc

SEQ ID NO: 2101128 - RNA, 19 nt, Homo sapiens
  misc_RNA (1)...(19): siRNA sense strand
ccaagaacccaaacuauau

SEQ ID NO: 2101129 - RNA, 19 nt, Homo sapiens
  misc_RNA (1)...(19): siRNA sense strand
ggaaggauucguugacaaa

SEQ ID NO: 2101130 - RNA, 19 nt, Homo sapiens
  misc_RNA (1)...(19): siRNA sense strand
gaauguggcucaggcuuau

SEQ ID NO: 2101131 - RNA, 19 nt, Homo sapiens
  misc_RNA (1)...(19): siRNA sense strand
gaagagcuccucaauaaac

SEQ ID NO: 2101132 - RNA, 19 nt, Homo sapiens
  misc_RNA (1)...(19): siRNA sense strand
aagaguacaucucggauuu

SEQ ID NO: 2101133 - RNA, 19 nt, Homo sapiens
  misc_RNA (1)...(19): siRNA sense strand
aaacaaccgucuccuugaa

SEQ ID NO: 2101134 - RNA, 19 nt, Homo sapiens
  misc_RNA (1)...(19): siRNA sense strand
gaauacaggaacagaaauu

SEQ ID NO: 2101135 - RNA, 19 nt, Homo sapiens
  misc_RNA (1)...(19): siRNA sense strand
ucaaugagcucacaaaaug

SEQ ID NO: 2101136 - RNA, 19 nt, Homo sapiens
  misc_RNA (1)...(19): siRNA sense strand
ucacgaccauugcugcaua

SEQ ID NO: 2101137 - RNA, 19 nt, Homo sapiens
  misc_RNA (1)...(19): siRNA sense strand
ccaaacagaagcucaauau

SEQ ID NO: 2101138 - RNA, 19 nt, Homo sapiens
  misc_RNA (1)...(19): siRNA sense strand
gauauagaauggacucaca

SEQ ID NO: 2101139 - RNA, 19 nt, Homo sapiens
  misc_RNA (1)...(19): siRNA sense strand
gcaugcaguugcugucauu

SEQ ID NO: 2101140 - RNA, 19 nt, Homo sapiens
  misc_RNA (1)...(19): siRNA sense strand
gcacacacuuccugcuaau

SEQ ID NO: 2101141 - RNA, 19 nt, Homo sapiens
  misc_RNA (1)...(19): siRNA sense strand
guguggagguccuauuuaa

SEQ ID NO: 2101142 - RNA, 19 nt, Homo sapiens
  misc_RNA (1)...(19): siRNA sense strand
gcuucaggauccagcauua

SEQ ID NO: 2101143 - RNA, 19 nt, Homo sapiens
  misc_RNA (1)...(19): siRNA sense strand
cucaagaccuuacuuauuc

SEQ ID NO: 2101144 - RNA, 19 nt, Homo sapiens
  misc_RNA (1)...(19): siRNA sense strand
cuaugaaccuugccuagaa

SEQ ID NO: 2101145 - RNA, 19 nt, Homo sapiens
  misc_RNA (1)...(19): siRNA sense strand
gaagaauacaggaacagaa

SEQ ID NO: 2101146 - RNA, 19 nt, Homo sapiens
  misc_RNA (1)...(19): siRNA sense strand
agaagcagcuaguaaagga

SEQ ID NO: 2101147 - RNA, 19 nt, Homo sapiens
  misc_RNA (1)...(19): siRNA sense strand
gaaacuagaagccagugaa

SEQ ID NO: 2101148 - RNA, 19 nt, Homo sapiens
  misc_RNA (1)...(19): siRNA sense strand
gaccauugcugcauauugg

SEQ ID NO: 2101149 - RNA, 19 nt, Homo sapiens
  misc_RNA (1)...(19): siRNA sense strand
gcccgaaucucgagugaau

SEQ ID NO: 2101150 - RNA, 19 nt, Homo sapiens
  misc_RNA (1)...(19): siRNA sense strand
caaagugaauggaguggau

SEQ ID NO: 2101151 - RNA, 19 nt, Homo sapiens
  misc_RNA (1)...(19): siRNA sense strand
gacaacuccucuagauuug

SEQ ID NO: 2101152 - RNA, 19 nt, Homo sapiens
  misc_RNA (1)...(19): siRNA sense strand
gcagaaguuaaucaaguua

SEQ ID NO: 2101153 - RNA, 19 nt, Homo sapiens
  misc_RNA (1)...(19): siRNA sense strand
gcauuaaggcacaaacaaa

SEQ ID NO: 2101154 - RNA, 19 nt, Homo sapiens
  misc_RNA (1)...(19): siRNA sense strand
gcacaacucucagccaaac

SEQ ID NO: 2101155 - RNA, 19 nt, Homo sapiens
  misc_RNA (1)...(19): siRNA sense strand
gcucagaagcagcuaguaa

SEQ ID NO: 2101156 - RNA, 19 nt, Homo sapiens
  misc_RNA (1)...(19): siRNA sense strand
gaucaucauugcugaaguc

SEQ ID NO: 2101157 - RNA, 19 nt, Homo sapiens
  misc_RNA (1)...(19): siRNA sense strand
caaagaugccauugaagaa

SEQ ID NO: 2101158 - RNA, 19 nt, Homo sapiens
  misc_RNA (1)...(19): siRNA sense strand
acaaugaccuucucuaucg

SEQ ID NO: 2101159 - RNA, 19 nt, Homo sapiens
  misc_RNA (1)...(19): siRNA sense strand
aaagaaacuuccauguguu

SEQ ID NO: 2101160 - RNA, 19 nt, Homo sapiens
  misc_RNA (1)...(19): siRNA sense strand
ggacaaaguaugugugaag

SEQ ID NO: 2101161 - RNA, 19 nt, Homo sapiens
  misc_RNA (1)...(19): siRNA sense strand
uaaacaugcuauugcaguu

SEQ ID NO: 2101162 - RNA, 19 nt, Homo sapiens
  misc_RNA (1)...(19): siRNA sense strand
gcucuagugugucaucaga

SEQ ID NO: 2101163 - RNA, 19 nt, Homo sapiens
  misc_RNA (1)...(19): siRNA sense strand
gcucucgguuccucaauga

SEQ ID NO: 2101164 - RNA, 19 nt, Homo sapiens
  misc_RNA (1)...(19): siRNA sense strand
aagaagagcaggaggagua

SEQ ID NO: 2101165 - RNA, 19 nt, Homo sapiens
  misc_RNA (1)...(19): siRNA sense strand
gagcuccucaauaaacuua

SEQ ID NO: 2101166 - RNA, 19 nt, Homo sapiens
  misc_RNA (1)...(19): siRNA sense strand
caagauaaggaccaaugua

SEQ ID NO: 2101167 - RNA, 19 nt, Homo sapiens
  misc_RNA (1)...(19): siRNA sense strand
guucagacaggacaaagua

SEQ ID NO: 2101168 - RNA, 19 nt, Homo sapiens
  misc_RNA (1)...(19): siRNA sense strand
gaagaguacaucucggauu

SEQ ID NO: 2101169 - RNA, 19 nt, Homo sapiens
  misc_RNA (1)...(19): siRNA sense strand
cagcagaaacuuauuuaug

SEQ ID NO: 2101170 - RNA, 19 nt, Homo sapiens
  misc_RNA (1)...(19): siRNA sense strand
ggaaaugccgcacacacuu

SEQ ID NO: 2101171 - RNA, 19 nt, Homo sapiens
  misc_RNA (1)...(19): siRNA sense strand
caaagauauucauccgaaa

SEQ ID NO: 2101172 - RNA, 19 nt, Homo sapiens
  misc_RNA (1)...(19): siRNA sense strand
ggacauuuauggcuuugag

SEQ ID NO: 2101173 - RNA, 19 nt, Homo sapiens
  misc_RNA (1)...(19): siRNA sense strand
gaacgagcauucaguuucc

SEQ ID NO: 2101174 - RNA, 19 nt, Homo sapiens
  misc_RNA (1)...(19): siRNA sense strand
gccaagaggugaaagaaac

SEQ ID NO: 2101175 - RNA, 19 nt, Homo sapiens
  misc_RNA (1)...(19): siRNA sense strand
uaggaggaguaauaaguaa

SEQ ID NO: 2101176 - RNA, 19 nt, Homo sapiens
  misc_RNA (1)...(19): siRNA sense strand
caagaacccaaacuauauu

SEQ ID NO: 2101177 - RNA, 19 nt, Homo sapiens
  misc_RNA (1)...(19): siRNA sense strand
aaagaguuccgccuuagua

SEQ ID NO: 2101178 - RNA, 19 nt, Homo sapiens
  misc_RNA (1)...(19): siRNA sense strand
ccucacaucuuugcccuuu

SEQ ID NO: 2101179 - RNA, 19 nt, Homo sapiens
  misc_RNA (1)...(19): siRNA sense strand
auauugagauuuccgauga

SEQ ID NO: 2101180 - RNA, 19 nt, Homo sapiens
  misc_RNA (1)...(19): siRNA sense strand
guaauucagucuuauaucc

SEQ ID NO: 2101181 - RNA, 19 nt, Homo sapiens
  misc_RNA (1)...(19): siRNA sense strand
ggaaugacaacuccucuag

SEQ ID NO: 2101182 - RNA, 19 nt, Homo sapiens
  misc_RNA (1)...(19): siRNA sense strand
gaaacuuccauguguucua

SEQ ID NO: 2101183 - RNA, 19 nt, Homo sapiens
  misc_RNA (1)...(19): siRNA sense strand
ccucaagaccuuacuuauu

SEQ ID NO: 2101184 - RNA, 19 nt, Homo sapiens
  misc_RNA (1)...(19): siRNA sense strand
ccuuaguaauucagucuua

SEQ ID NO: 2101185 - RNA, 19 nt, Homo sapiens
  misc_RNA (1)...(19): siRNA sense strand
gaguuccgccuuaguaauu

SEQ ID NO: 2101186 - RNA, 19 nt, Homo sapiens
  misc_RNA (1)...(19): siRNA sense strand
aaaccucacuucuggacaa

SEQ ID NO: 2101187 - RNA, 19 nt, Homo sapiens
  misc_RNA (1)...(19): siRNA sense strand
aaacaaugaccuucucuau

SEQ ID NO: 2101188 - RNA, 19 nt, Homo sapiens
  misc_RNA (1)...(19): siRNA sense strand
caacagcuuugagcaguuc

SEQ ID NO: 2101189 - RNA, 19 nt, Homo sapiens
  misc_RNA (1)...(19): siRNA sense strand
guugguaaaucgaaucaau

SEQ ID NO: 2101190 - RNA, 19 nt, Homo sapiens
  misc_RNA (1)...(19): siRNA sense strand
aaacuuccauguguucuau

SEQ ID NO: 2101191 - RNA, 19 nt, Homo sapiens
  misc_RNA (1)...(19): siRNA sense strand
agaaaucucggguuguuaa

SEQ ID NO: 2101192 - RNA, 19 nt, Homo sapiens
  misc_RNA (1)...(19): siRNA sense strand
gaagcagucacgaccauug

SEQ ID NO: 2101193 - RNA, 19 nt, Homo sapiens
  misc_RNA (1)...(19): siRNA sense strand
ggaagaauacuccuuuggu

SEQ ID NO: 2101194 - RNA, 19 nt, Homo sapiens
  misc_RNA (1)...(19): siRNA sense strand
gagguccuauuuaaugaau

SEQ ID NO: 2101195 - RNA, 19 nt, Homo sapiens
  misc_RNA (1)...(19): siRNA sense strand
cagcacacaucuucaacga

SEQ ID NO: 2101196 - RNA, 19 nt, Homo sapiens
  misc_RNA (1)...(19): siRNA sense strand
uggguguucuggacauuua

SEQ ID NO: 2101197 - RNA, 19 nt, Homo sapiens
  misc_RNA (1)...(19): siRNA sense strand
gaauugaccggcauugauc

SEQ ID NO: 2101198 - RNA, 19 nt, Homo sapiens
  misc_RNA (1)...(19): siRNA sense strand
ccucacuucuggacaauau

SEQ ID NO: 2101199 - RNA, 19 nt, Homo sapiens
  misc_RNA (1)...(19): siRNA sense strand
ggagugucccaacauguaa

SEQ ID NO: 2101200 - RNA, 19 nt, Homo sapiens
  misc_RNA (1)...(19): siRNA sense strand
ccaaaagucuggacaaauc

SEQ ID NO: 2101201 - RNA, 19 nt, Homo sapiens
  misc_RNA (1)...(19): siRNA sense strand
gaagaaaagaucaucauug

SEQ ID NO: 2101202 - RNA, 19 nt, Homo sapiens
  misc_RNA (1)...(19): siRNA sense strand
gaaacucaaagaugccauu

SEQ ID NO: 2101203 - RNA, 19 nt, Homo sapiens
  misc_RNA (1)...(19): siRNA sense strand
gacaagaauuggcccucaa

SEQ ID NO: 2101204 - RNA, 19 nt, Homo sapiens
  misc_RNA (1)...(19): siRNA sense strand
gaacgucacucaguuauua

SEQ ID NO: 2101205 - RNA, 19 nt, Homo sapiens
  misc_RNA (1)...(19): siRNA sense strand
aaacugaacugacagauuu

SEQ ID NO: 2101206 - RNA, 19 nt, Homo sapiens
  misc_RNA (1)...(19): siRNA sense strand
ggaagaauaugaugcugua

SEQ ID NO: 2101207 - RNA, 19 nt, Homo sapiens
  misc_RNA (1)...(19): siRNA sense strand
ccacaaaccugaucgugua

SEQ ID NO: 2101208 - RNA, 19 nt, Homo sapiens
  misc_RNA (1)...(19): siRNA sense strand
gaagaucgacuuaaugaaa

SEQ ID NO: 2101209 - RNA, 19 nt, Homo sapiens
  misc_RNA (1)...(19): siRNA sense strand
gaaaggacuuguugcucua

SEQ ID NO: 2101210 - RNA, 19 nt, Homo sapiens
  misc_RNA (1)...(19): siRNA sense strand
ggacaugaaucuaacaagu

SEQ ID NO: 2101211 - RNA, 19 nt, Homo sapiens
  misc_RNA (1)...(19): siRNA sense strand
ggcauuuacuugcuauuua

SEQ ID NO: 2101212 - RNA, 19 nt, Homo sapiens
  misc_RNA (1)...(19): siRNA sense strand
gcuuucagaucacaaguua

SEQ ID NO: 2101213 - RNA, 19 nt, Homo sapiens
  misc_RNA (1)...(19): siRNA sense strand
gaucuugguuccuaucauu

SEQ ID NO: 2101214 - RNA, 19 nt, Homo sapiens
  misc_RNA (1)...(19): siRNA sense strand
gcacagcuguuggucagua

SEQ ID NO: 2101215 - RNA, 19 nt, Homo sapiens
  misc_RNA (1)...(19): siRNA sense strand
gaacuucgacauacuagaa

SEQ ID NO: 2101216 - RNA, 19 nt, Homo sapiens
  misc_RNA (1)...(19): siRNA sense strand
ccaauaacaucacacuuug

SEQ ID NO: 2101217 - RNA, 19 nt, Homo sapiens
  misc_RNA (1)...(19): siRNA sense strand
uaaaugugauccagagaaa

SEQ ID NO: 2101218 - RNA, 19 nt, Homo sapiens
  misc_RNA (1)...(19): siRNA sense strand
gaaacaggaauagcuaaua

SEQ ID NO: 2101219 - RNA, 19 nt, Homo sapiens
  misc_RNA (1)...(19): siRNA sense strand
uaacaacacucaccauuuu

SEQ ID NO: 2101220 - RNA, 19 nt, Homo sapiens
  misc_RNA (1)...(19): siRNA sense strand
gaucauguuucucauuuag

SEQ ID NO: 2101221 - RNA, 19 nt, Homo sapiens
  misc_RNA (1)...(19): siRNA sense strand
acagaagaaucaacuauug

SEQ ID NO: 2101222 - RNA, 19 nt, Homo sapiens
  misc_RNA (1)...(19): siRNA sense strand
guacauaacccaggucauu

SEQ ID NO: 2101223 - RNA, 19 nt, Homo sapiens
  misc_RNA (1)...(19): siRNA sense strand
gaaagagacaguugaagug

SEQ ID NO: 2101224 - RNA, 19 nt, Homo sapiens
  misc_RNA (1)...(19): siRNA sense strand
gcauucccauaaucauuua

SEQ ID NO: 2101225 - RNA, 19 nt, Homo sapiens
  misc_RNA (1)...(19): siRNA sense strand
caaauuccuucuuacauuc

SEQ ID NO: 2101226 - RNA, 19 nt, Homo sapiens
  misc_RNA (1)...(19): siRNA sense strand
gccaauaacaucacacuuu

SEQ ID NO: 2101227 - RNA, 19 nt, Homo sapiens
  misc_RNA (1)...(19): siRNA sense strand
gagagaagcaccacauguu

SEQ ID NO: 2101228 - RNA, 19 nt, Homo sapiens
  misc_RNA (1)...(19): siRNA sense strand
ccacaugaauuaggagauu

SEQ ID NO: 2101229 - RNA, 19 nt, Homo sapiens
  misc_RNA (1)...(19): siRNA sense strand
ggaggaaucaguacuucua

SEQ ID NO: 2101230 - RNA, 19 nt, Homo sapiens
  misc_RNA (1)...(19): siRNA sense strand
gaaacugaacugacagauu

SEQ ID NO: 2101231 - RNA, 19 nt, Homo sapiens
  misc_RNA (1)...(19): siRNA sense strand
gagaagcaccacauguuaa

SEQ ID NO: 2101232 - RNA, 19 nt, Homo sapiens
  misc_RNA (1)...(19): siRNA sense strand
ggauaugcuuccagaaaug

SEQ ID NO: 2101233 - RNA, 19 nt, Homo sapiens
  misc_RNA (1)...(19): siRNA sense strand
uaaugaaacugaacugaca

SEQ ID NO: 2101234 - RNA, 19 nt, Homo sapiens
  misc_RNA (1)...(19): siRNA sense strand
gaagaugaggcaaauauag

SEQ ID NO: 2101235 - RNA, 19 nt, Homo sapiens
  misc_RNA (1)...(19): siRNA sense strand
gaauuuaggauugcucuuu

SEQ ID NO: 2101236 - RNA, 19 nt, Homo sapiens
  misc_RNA (1)...(19): siRNA sense strand
gaaagaaacaggaauagcu

SEQ ID NO: 2101237 - RNA, 19 nt, Homo sapiens
  misc_RNA (1)...(19): siRNA sense strand
ggauugcucuuuggauuug

SEQ ID NO: 2101238 - RNA, 19 nt, Homo sapiens
  misc_RNA (1)...(19): siRNA sense strand
gaaaugaagguacauaugc

SEQ ID NO: 2101239 - RNA, 19 nt, Homo sapiens
  misc_RNA (1)...(19): siRNA sense strand
ugaacugccacaugaauua

SEQ ID NO: 2101240 - RNA, 19 nt, Homo sapiens
  misc_RNA (1)...(19): siRNA sense strand
gacagcagacuuuguauug

SEQ ID NO: 2101241 - RNA, 19 nt, Homo sapiens
  misc_RNA (1)...(19): siRNA sense strand
ccaaggaugcuucaaauuc

SEQ ID NO: 2101242 - RNA, 19 nt, Homo sapiens
  misc_RNA (1)...(19): siRNA sense strand
gcacuacaaacaacaaaga

SEQ ID NO: 2101243 - RNA, 19 nt, Homo sapiens
  misc_RNA (1)...(19): siRNA sense strand
ccuuugcccugcauuguua

SEQ ID NO: 2101244 - RNA, 19 nt, Homo sapiens
  misc_RNA (1)...(19): siRNA sense strand
gaacacagaagaaucaacu

SEQ ID NO: 2101245 - RNA, 19 nt, Homo sapiens
  misc_RNA (1)...(19): siRNA sense strand
gacuuuguauugagcauuu

SEQ ID NO: 2101246 - RNA, 19 nt, Homo sapiens
  misc_RNA (1)...(19): siRNA sense strand
uuacauuccuuguugcauu

SEQ ID NO: 2101247 - RNA, 19 nt, Homo sapiens
  misc_RNA (1)...(19): siRNA sense strand
agaaucaacuauuggaaga

SEQ ID NO: 2101248 - RNA, 19 nt, Homo sapiens
  misc_RNA (1)...(19): siRNA sense strand
caaaucgacagcagacuuu

SEQ ID NO: 2101249 - RNA, 19 nt, Homo sapiens
  misc_RNA (1)...(19): siRNA sense strand
uaggauugcucuuuggauu

SEQ ID NO: 2101250 - RNA, 19 nt, Homo sapiens
  misc_RNA (1)...(19): siRNA sense strand
gcaggcauguuccucuaug

SEQ ID NO: 2101251 - RNA, 19 nt, Homo sapiens
  misc_RNA (1)...(19): siRNA sense strand
guaaagcaagcaauuguau

SEQ ID NO: 2101252 - RNA, 19 nt, Homo sapiens
  misc_RNA (1)...(19): siRNA sense strand
gaaacagaacacagaagaa

SEQ ID NO: 2101253 - RNA, 19 nt, Homo sapiens
  misc_RNA (1)...(19): siRNA sense strand
uacauuccuuguugcauua

SEQ ID NO: 2101254 - RNA, 19 nt, Homo sapiens
  misc_RNA (1)...(19): siRNA sense strand
gaagguacauaugcacaca

SEQ ID NO: 2101255 - RNA, 19 nt, Homo sapiens
  misc_RNA (1)...(19): siRNA sense strand
ggaaucaguacuucuauag

SEQ ID NO: 2101256 - RNA, 19 nt, Homo sapiens
  misc_RNA (1)...(19): siRNA sense strand
ucacauaaccaccagcauu

SEQ ID NO: 2101257 - RNA, 19 nt, Homo sapiens
  misc_RNA (1)...(19): siRNA sense strand
gaaaggaaagaggaagaaa

SEQ ID NO: 2101258 - RNA, 19 nt, Homo sapiens
  misc_RNA (1)...(19): siRNA sense strand
gaacugaugacucgguugu

SEQ ID NO: 2101259 - RNA, 19 nt, Homo sapiens
  misc_RNA (1)...(19): siRNA sense strand
uaaccaaggaugcuucaaa

SEQ ID NO: 2101260 - RNA, 19 nt, Homo sapiens
  misc_RNA (1)...(19): siRNA sense strand
agagaagcaccacauguua

SEQ ID NO: 2101261 - RNA, 19 nt, Homo sapiens
  misc_RNA (1)...(19): siRNA sense strand
cuucuuacauuccuuguug

SEQ ID NO: 2101262 - RNA, 19 nt, Homo sapiens
  misc_RNA (1)...(19): siRNA sense strand
caaugaagaacauggcuuu

SEQ ID NO: 2101263 - RNA, 19 nt, Homo sapiens
  misc_RNA (1)...(19): siRNA sense strand
caucacacuuuggaucuuu

SEQ ID NO: 2101264 - RNA, 19 nt, Homo sapiens
  misc_RNA (1)...(19): siRNA sense strand
gaacguaauggucaugauc

SEQ ID NO: 2101265 - RNA, 19 nt, Homo sapiens
  misc_RNA (1)...(19): siRNA sense strand
ccacaagcauucucaucau

SEQ ID NO: 2101266 - RNA, 19 nt, Homo sapiens
  misc_RNA (1)...(19): siRNA sense strand
gauuacauaccauucauga

SEQ ID NO: 2101267 - RNA, 19 nt, Homo sapiens
  misc_RNA (1)...(19): siRNA sense strand
gaagaaucaacuauuggaa

SEQ ID NO: 2101268 - RNA, 19 nt, Homo sapiens
  misc_RNA (1)...(19): siRNA sense strand
cgaucauguuucucauuua

SEQ ID NO: 2101269 - RNA, 19 nt, Homo sapiens
  misc_RNA (1)...(19): siRNA sense strand
gaacugacagauuuagaag

SEQ ID NO: 2101270 - RNA, 19 nt, Homo sapiens
  misc_RNA (1)...(19): siRNA sense strand
gacaugaaucuaacaaguu

SEQ ID NO: 2101271 - RNA, 19 nt, Homo sapiens
  misc_RNA (1)...(19): siRNA sense strand
ucauguacaucuuccagaa

SEQ ID NO: 2101272 - RNA, 19 nt, Homo sapiens
  misc_RNA (1)...(19): siRNA sense strand
acgaucauguuucucauuu

SEQ ID NO: 2101273 - RNA, 19 nt, Homo sapiens
  misc_RNA (1)...(19): siRNA sense strand
aaagaaacaggaauagcua

SEQ ID NO: 2101274 - RNA, 19 nt, Homo sapiens
  misc_RNA (1)...(19): siRNA sense strand
cacaagcauucucaucauu

SEQ ID NO: 2101275 - RNA, 19 nt, Homo sapiens
  misc_RNA (1)...(19): siRNA sense strand
gagacgcccuucuucaucu

SEQ ID NO: 2101276 - RNA, 19 nt, Homo sapiens
  misc_RNA (1)...(19): siRNA sense strand
ugcauuagcuguaggaaca

SEQ ID NO: 2101277 - RNA, 19 nt, Homo sapiens
  misc_RNA (1)...(19): siRNA sense strand
ugauugcccucuaugaaga

SEQ ID NO: 2101278 - RNA, 19 nt, Homo sapiens
  misc_RNA (1)...(19): siRNA sense strand
gcauggugauggugacaau

SEQ ID NO: 2101279 - RNA, 19 nt, Homo sapiens
  misc_RNA (1)...(19): siRNA sense strand
gugaugggcucgcaauugg

SEQ ID NO: 2101280 - RNA, 19 nt, Homo sapiens
  misc_RNA (1)...(19): siRNA sense strand
caacaagaauccccuccua

SEQ ID NO: 2101281 - RNA, 19 nt, Homo sapiens
  misc_RNA (1)...(19): siRNA sense strand
ugaaacagaacacagaaga

SEQ ID NO: 2101282 - RNA, 19 nt, Homo sapiens
  misc_RNA (1)...(19): siRNA sense strand
uuacauaggcaugcucaua

SEQ ID NO: 2101283 - RNA, 19 nt, Homo sapiens
  misc_RNA (1)...(19): siRNA sense strand
caguugaagugucuguaaa

SEQ ID NO: 2101284 - RNA, 19 nt, Homo sapiens
  misc_RNA (1)...(19): siRNA sense strand
aagcaggcaugacuguaaa

SEQ ID NO: 2101285 - RNA, 19 nt, Homo sapiens
  misc_RNA (1)...(19): siRNA sense strand
ggaggcauuuacuugcuau

SEQ ID NO: 2101286 - RNA, 19 nt, Homo sapiens
  misc_RNA (1)...(19): siRNA sense strand
gcaucagccuggauuugug

SEQ ID NO: 2101287 - RNA, 19 nt, Homo sapiens
  misc_RNA (1)...(19): siRNA sense strand
ugaagaugaggcaaauaua

SEQ ID NO: 2101288 - RNA, 19 nt, Homo sapiens
  misc_RNA (1)...(19): siRNA sense strand
cauaacaacacucaccauu

SEQ ID NO: 2101289 - RNA, 19 nt, Homo sapiens
  misc_RNA (1)...(19): siRNA sense strand
ggcaauucauccuucagaa

SEQ ID NO: 2101290 - RNA, 19 nt, Homo sapiens
  misc_RNA (1)...(19): siRNA sense strand
ccucugcuccuacuaguuu

SEQ ID NO: 2101291 - RNA, 19 nt, Homo sapiens
  misc_RNA (1)...(19): siRNA sense strand
aaacagaacacagaagaau

SEQ ID NO: 2101292 - RNA, 19 nt, Homo sapiens
  misc_RNA (1)...(19): siRNA sense strand
ggcgugaucuugguuccua

SEQ ID NO: 2101293 - RNA, 19 nt, Homo sapiens
  misc_RNA (1)...(19): siRNA sense strand
gcccugcauuguuauauca

SEQ ID NO: 2101294 - RNA, 19 nt, Homo sapiens
  misc_RNA (1)...(19): siRNA sense strand
ggugauugcccucuaugaa

SEQ ID NO: 2101295 - RNA, 19 nt, Homo sapiens
  misc_RNA (1)...(19): siRNA sense strand
uauguagccuugguggaua

SEQ ID NO: 2101296 - RNA, 19 nt, Homo sapiens
  misc_RNA (1)...(19): siRNA sense strand
aaagcaggcaugacuguaa

SEQ ID NO: 2101297 - RNA, 19 nt, Homo sapiens
  misc_RNA (1)...(19): siRNA sense strand
aggaaucaguacuucuaua

SEQ ID NO: 2101298 - RNA, 19 nt, Homo sapiens
  misc_RNA (1)...(19): siRNA sense strand
gcaagcugcugaaaaugaa

SEQ ID NO: 2101299 - RNA, 19 nt, Homo sapiens
  misc_RNA (1)...(19): siRNA sense strand
aaccaaggaugcuucaaau

SEQ ID NO: 2101300 - RNA, 19 nt, Homo sapiens
  misc_RNA (1)...(19): siRNA sense strand
caacaaagaggaaaacaga

SEQ ID NO: 2101301 - RNA, 19 nt, Homo sapiens
  misc_RNA (1)...(19): siRNA sense strand
gcucauaggcacagcuguu

SEQ ID NO: 2101302 - RNA, 19 nt, Homo sapiens
  misc_RNA (1)...(19): siRNA sense strand
aggcaugacuguaaagcaa

SEQ ID NO: 2101303 - RNA, 19 nt, Homo sapiens
  misc_RNA (1)...(19): siRNA sense strand
gaucugaaagaaacaggaa

SEQ ID NO: 2101304 - RNA, 19 nt, Homo sapiens
  misc_RNA (1)...(19): siRNA sense strand
gcagagaucuaacuccaua

SEQ ID NO: 2101305 - RNA, 19 nt, Homo sapiens
  misc_RNA (1)...(19): siRNA sense strand
gcagauaacugaacgagaa

SEQ ID NO: 2101306 - RNA, 19 nt, Homo sapiens
  misc_RNA (1)...(19): siRNA sense strand
gaaaagaccugcagagaaa

SEQ ID NO: 2101307 - RNA, 19 nt, Homo sapiens
  misc_RNA (1)...(19): siRNA sense strand
gaaauagaccuaagugauu

SEQ ID NO: 2101308 - RNA, 19 nt, Homo sapiens
  misc_RNA (1)...(19): siRNA sense strand
gcagaaccaugaccaauga

SEQ ID NO: 2101309 - RNA, 19 nt, Homo sapiens
  misc_RNA (1)...(19): siRNA sense strand
gggagaagauccaauuuau

SEQ ID NO: 2101310 - RNA, 19 nt, Homo sapiens
  misc_RNA (1)...(19): siRNA sense strand
ccgaagagaucacuuacua

SEQ ID NO: 2101311 - RNA, 19 nt, Homo sapiens
  misc_RNA (1)...(19): siRNA sense strand
uagaauaccuugaugaaga

SEQ ID NO: 2101312 - RNA, 19 nt, Homo sapiens
  misc_RNA (1)...(19): siRNA sense strand
gaagaugccucuccagaag

SEQ ID NO: 2101313 - RNA, 19 nt, Homo sapiens
  misc_RNA (1)...(19): siRNA sense strand
gaugggaaaugaaacauga

SEQ ID NO: 2101314 - RNA, 19 nt, Homo sapiens
  misc_RNA (1)...(19): siRNA sense strand
ggauuggacuuuaucauau

SEQ ID NO: 2101315 - RNA, 19 nt, Homo sapiens
  misc_RNA (1)...(19): siRNA sense strand
ggagaaacaacacagaaua

SEQ ID NO: 2101316 - RNA, 19 nt, Homo sapiens
  misc_RNA (1)...(19): siRNA sense strand
agacaaagcuggaggacaa

SEQ ID NO: 2101317 - RNA, 19 nt, Homo sapiens
  misc_RNA (1)...(19): siRNA sense strand
gcagagaaauaagcuauau

SEQ ID NO: 2101318 - RNA, 19 nt, Homo sapiens
  misc_RNA (1)...(19): siRNA sense strand
gaauuaaccucuacgucuu

SEQ ID NO: 2101319 - RNA, 19 nt, Homo sapiens
  misc_RNA (1)...(19): siRNA sense strand
ggaaauagacacagaggaa

SEQ ID NO: 2101320 - RNA, 19 nt, Homo sapiens
  misc_RNA (1)...(19): siRNA sense strand
gaacccagcugugaugaug

SEQ ID NO: 2101321 - RNA, 19 nt, Homo sapiens
  misc_RNA (1)...(19): siRNA sense strand
gaagagaucacuuacuaga

SEQ ID NO: 2101322 - RNA, 19 nt, Homo sapiens
  misc_RNA (1)...(19): siRNA sense strand
ccucagaacucgccaggua

SEQ ID NO: 2101323 - RNA, 19 nt, Homo sapiens
  misc_RNA (1)...(19): siRNA sense strand
ggacagugcugccgaugga

SEQ ID NO: 2101324 - RNA, 19 nt, Homo sapiens
  misc_RNA (1)...(19): siRNA sense strand
ugaagaagaucacgaguuc

SEQ ID NO: 2101325 - RNA, 19 nt, Homo sapiens
  misc_RNA (1)...(19): siRNA sense strand
caagagaacuggaauuggu

SEQ ID NO: 2101326 - RNA, 19 nt, Homo sapiens
  misc_RNA (1)...(19): siRNA sense strand
gaaagacaaugauauccau

SEQ ID NO: 2101327 - RNA, 19 nt, Homo sapiens
  misc_RNA (1)...(19): siRNA sense strand
aagaagagauaaugucgua

SEQ ID NO: 2101328 - RNA, 19 nt, Homo sapiens
  misc_RNA (1)...(19): siRNA sense strand
aggauucacucaaugauua

SEQ ID NO: 2101329 - RNA, 19 nt, Homo sapiens
  misc_RNA (1)...(19): siRNA sense strand
guggguaccuccaguuuaa

SEQ ID NO: 2101330 - RNA, 19 nt, Homo sapiens
  misc_RNA (1)...(19): siRNA sense strand
cgacuaagguuguuacagu

SEQ ID NO: 2101331 - RNA, 19 nt, Homo sapiens
  misc_RNA (1)...(19): siRNA sense strand
uuacuuagaugcuaucgaa

SEQ ID NO: 2101332 - RNA, 19 nt, Homo sapiens
  misc_RNA (1)...(19): siRNA sense strand
guggaaagauucaacaaug

SEQ ID NO: 2101333 - RNA, 19 nt, Homo sapiens
  misc_RNA (1)...(19): siRNA sense strand
gauaacugaacgagaauua

SEQ ID NO: 2101334 - RNA, 19 nt, Homo sapiens
  misc_RNA (1)...(19): siRNA sense strand
gugcacugcugguucuuua

SEQ ID NO: 2101335 - RNA, 19 nt, Homo sapiens
  misc_RNA (1)...(19): siRNA sense strand
ccacgcagcuguccucugu

SEQ ID NO: 2101336 - RNA, 19 nt, Homo sapiens
  misc_RNA (1)...(19): siRNA sense strand
ugaagggacuccaggauug

SEQ ID NO: 2101337 - RNA, 19 nt, Homo sapiens
  misc_RNA (1)...(19): siRNA sense strand
caagauuguugcauuucua

SEQ ID NO: 2101338 - RNA, 19 nt, Homo sapiens
  misc_RNA (1)...(19): siRNA sense strand
gagguuacgucuucuguuc

SEQ ID NO: 2101339 - RNA, 19 nt, Homo sapiens
  misc_RNA (1)...(19): siRNA sense strand
guacaaauaaguccuaugu

SEQ ID NO: 2101340 - RNA, 19 nt, Homo sapiens
  misc_RNA (1)...(19): siRNA sense strand
gaggauaccaugacaauca

SEQ ID NO: 2101341 - RNA, 19 nt, Homo sapiens
  misc_RNA (1)...(19): siRNA sense strand
gaaacaacacagaauauag

SEQ ID NO: 2101342 - RNA, 19 nt, Homo sapiens
  misc_RNA (1)...(19): siRNA sense strand
ucaccgugcugcauucuaa

SEQ ID NO: 2101343 - RNA, 19 nt, Homo sapiens
  misc_RNA (1)...(19): siRNA sense strand
ccagagcgcauacauguuu

SEQ ID NO: 2101344 - RNA, 19 nt, Homo sapiens
  misc_RNA (1)...(19): siRNA sense strand
gugauuggauuggacuuua

SEQ ID NO: 2101345 - RNA, 19 nt, Homo sapiens
  misc_RNA (1)...(19): siRNA sense strand
gaagagauaaugucguaug

SEQ ID NO: 2101346 - RNA, 19 nt, Homo sapiens
  misc_RNA (1)...(19): siRNA sense strand
gaagaacccagcugugaug

SEQ ID NO: 2101347 - RNA, 19 nt, Homo sapiens
  misc_RNA (1)...(19): siRNA sense strand
ggaggaagcugacuuucac

SEQ ID NO: 2101348 - RNA, 19 nt, Homo sapiens
  misc_RNA (1)...(19): siRNA sense strand
ucaaugccaugcuucauau

SEQ ID NO: 2101349 - RNA, 19 nt, Homo sapiens
  misc_RNA (1)...(19): siRNA sense strand
gagaaacaacacagaauau

SEQ ID NO: 2101350 - RNA, 19 nt, Homo sapiens
  misc_RNA (1)...(19): siRNA sense strand
acaaauaaguccuaugucu

SEQ ID NO: 2101351 - RNA, 19 nt, Homo sapiens
  misc_RNA (1)...(19): siRNA sense strand
gagcuuauuugaagaagag

SEQ ID NO: 2101352 - RNA, 19 nt, Homo sapiens
  misc_RNA (1)...(19): siRNA sense strand
cccaauaucuuugaaauuc

SEQ ID NO: 2101353 - RNA, 19 nt, Homo sapiens
  misc_RNA (1)...(19): siRNA sense strand
guucugggcugcaguggaa

SEQ ID NO: 2101354 - RNA, 19 nt, Homo sapiens
  misc_RNA (1)...(19): siRNA sense strand
gggcugcaguggaaagauu

SEQ ID NO: 2101355 - RNA, 19 nt, Homo sapiens
  misc_RNA (1)...(19): siRNA sense strand
ccacugcgaucacuaccuu

SEQ ID NO: 2101356 - RNA, 19 nt, Homo sapiens
  misc_RNA (1)...(19): siRNA sense strand
uuauaaggcucuucucaga

SEQ ID NO: 2101357 - RNA, 19 nt, Homo sapiens
  misc_RNA (1)...(19): siRNA sense strand
gagaacucuuuaacccaua

SEQ ID NO: 2101358 - RNA, 19 nt, Homo sapiens
  misc_RNA (1)...(19): siRNA sense strand
cuuguuagcuuuacauugu

SEQ ID NO: 2101359 - RNA, 19 nt, Homo sapiens
  misc_RNA (1)...(19): siRNA sense strand
gaagaaaccaguacuuuug

SEQ ID NO: 2101360 - RNA, 19 nt, Homo sapiens
  misc_RNA (1)...(19): siRNA sense strand
aaauagaccuaagugauug

SEQ ID NO: 2101361 - RNA, 19 nt, Homo sapiens
  misc_RNA (1)...(19): siRNA sense strand
gggaggaagggcuggauua

SEQ ID NO: 2101362 - RNA, 19 nt, Homo sapiens
  misc_RNA (1)...(19): siRNA sense strand
ggacagcgaccugcucuga

SEQ ID NO: 2101363 - RNA, 19 nt, Homo sapiens
  misc_RNA (1)...(19): siRNA sense strand
gcacaauacuuggagucaa

SEQ ID NO: 2101364 - RNA, 19 nt, Homo sapiens
  misc_RNA (1)...(19): siRNA sense strand
agaaguauuugggcagaua

SEQ ID NO: 2101365 - RNA, 19 nt, Homo sapiens
  misc_RNA (1)...(19): siRNA sense strand
uggaaagauucaacaauga

SEQ ID NO: 2101366 - RNA, 19 nt, Homo sapiens
  misc_RNA (1)...(19): siRNA sense strand
uuacagagaagaacaagaa

SEQ ID NO: 2101367 - RNA, 19 nt, Homo sapiens
  misc_RNA (1)...(19): siRNA sense strand
aaagggauguucuucaauc

SEQ ID NO: 2101368 - RNA, 19 nt, Homo sapiens
  misc_RNA (1)...(19): siRNA sense strand
gaugaaagacaaugauauc

SEQ ID NO: 2101369 - RNA, 19 nt, Homo sapiens
  misc_RNA (1)...(19): siRNA sense strand
gauccuuggucuugcacua

SEQ ID NO: 2101370 - RNA, 19 nt, Homo sapiens
  misc_RNA (1)...(19): siRNA sense strand
uaaguccuaugucugcuuu

SEQ ID NO: 2101371 - RNA, 19 nt, Homo sapiens
  misc_RNA (1)...(19): siRNA sense strand
cagaugcgguacacauuga

SEQ ID NO: 2101372 - RNA, 19 nt, Homo sapiens
  misc_RNA (1)...(19): siRNA sense strand
gagcgucaaccugaucuua

SEQ ID NO: 2101373 - RNA, 19 nt, Homo sapiens
  misc_RNA (1)...(19): siRNA sense strand
gagggacacccaccacuuu

SEQ ID NO: 2101374 - RNA, 19 nt, Homo sapiens
  misc_RNA (1)...(19): siRNA sense strand
acacggugcuccucucuug

SEQ ID NO: 2101375 - RNA, 19 nt, Homo sapiens
  misc_RNA (1)...(19): siRNA sense strand
gccaagagccgucccauca

SEQ ID NO: 2101376 - RNA, 19 nt, Homo sapiens
  misc_RNA (1)...(19): siRNA sense strand
caagagccgucccaucauc

SEQ ID NO: 2101377 - RNA, 19 nt, Homo sapiens
  misc_RNA (1)...(19): siRNA sense strand
caacaaugaacaacgacua

SEQ ID NO: 2101378 - RNA, 19 nt, Homo sapiens
  misc_RNA (1)...(19): siRNA sense strand
gcaaacagagagcuuagug

SEQ ID NO: 2101379 - RNA, 19 nt, Homo sapiens
  misc_RNA (1)...(19): siRNA sense strand
cacauacacaguacaaaua

SEQ ID NO: 2101380 - RNA, 19 nt, Homo sapiens
  misc_RNA (1)...(19): siRNA sense strand
agagaucacuuacuagaag

SEQ ID NO: 2101381 - RNA, 19 nt, Homo sapiens
  misc_RNA (1)...(19): siRNA sense strand
cauccagcauucccuauga

SEQ ID NO: 2101382 - RNA, 19 nt, Homo sapiens
  misc_RNA (1)...(19): siRNA sense strand
gaagaugcuuuuaaucaga

SEQ ID NO: 2101383 - RNA, 19 nt, Homo sapiens
  misc_RNA (1)...(19): siRNA sense strand
uaacaccaccaauccaauu

SEQ ID NO: 2101384 - RNA, 19 nt, Homo sapiens
  misc_RNA (1)...(19): siRNA sense strand
ugaaauagaccuaagugau

SEQ ID NO: 2101385 - RNA, 19 nt, Homo sapiens
  misc_RNA (1)...(19): siRNA sense strand
ugauauccaugacauccua

SEQ ID NO: 2101386 - RNA, 19 nt, Homo sapiens
  misc_RNA (1)...(19): siRNA sense strand
gagaucacuuacuagaaga

SEQ ID NO: 2101387 - RNA, 19 nt, Homo sapiens
  misc_RNA (1)...(19): siRNA sense strand
gcaccaccacuuucauuga

SEQ ID NO: 2101388 - RNA, 19 nt, Homo sapiens
  misc_RNA (1)...(19): siRNA sense strand
gugaucaaaugcucagcua

SEQ ID NO: 2101389 - RNA, 19 nt, Homo sapiens
  misc_RNA (1)...(19): siRNA sense strand
gaucaaaugcucagcuaca

SEQ ID NO: 2101390 - RNA, 19 nt, Homo sapiens
  misc_RNA (1)...(19): siRNA sense strand
gggaguaacggcccaagaa

SEQ ID NO: 2101391 - RNA, 19 nt, Homo sapiens
  misc_RNA (1)...(19): siRNA sense strand
augcagaccuuguuauguu

SEQ ID NO: 2101392 - RNA, 19 nt, Homo sapiens
  misc_RNA (1)...(19): siRNA sense strand
gagaagauccaauuuaucc

SEQ ID NO: 2101393 - RNA, 19 nt, Homo sapiens
  misc_RNA (1)...(19): siRNA sense strand
gggagagagugaccuggaa

SEQ ID NO: 2101394 - RNA, 19 nt, Homo sapiens
  misc_RNA (1)...(19): siRNA sense strand
aaagacaaauuugccaaga

SEQ ID NO: 2101395 - RNA, 19 nt, Homo sapiens
  misc_RNA (1)...(19): siRNA sense strand
gacuaagguuguuacaguu

SEQ ID NO: 2101396 - RNA, 19 nt, Homo sapiens
  misc_RNA (1)...(19): siRNA sense strand
gcccagaaccucauuaucu

SEQ ID NO: 2101397 - RNA, 19 nt, Homo sapiens
  misc_RNA (1)...(19): siRNA sense strand
ggaugaaagacaaugauau

SEQ ID NO: 2101398 - RNA, 19 nt, Homo sapiens
  misc_RNA (1)...(19): siRNA sense strand
uggauuggacuuuaucaua

SEQ ID NO: 2101399 - RNA, 19 nt, Homo sapiens
  misc_RNA (1)...(19): siRNA sense strand
ggacaaggcccagggaagu

SEQ ID NO: 2101400 - RNA, 19 nt, Homo sapiens
  misc_RNA (1)...(19): siRNA sense strand
ccacagugcgggugaggua

SEQ ID NO: 2101401 - RNA, 19 nt, Homo sapiens
  misc_RNA (1)...(19): siRNA sense strand
ggacacccaccacuuugaa

SEQ ID NO: 2101402 - RNA, 19 nt, Homo sapiens
  misc_RNA (1)...(19): siRNA sense strand
cacaauacuuggagucaau

SEQ ID NO: 2101403 - RNA, 19 nt, Homo sapiens
  misc_RNA (1)...(19): siRNA sense strand
ugaccugagugaccuagaa

SEQ ID NO: 2101404 - RNA, 19 nt, Homo sapiens
  misc_RNA (1)...(19): siRNA sense strand
gaaauuaccuccuaucuca

SEQ ID NO: 2101405 - RNA, 19 nt, Homo sapiens
  misc_RNA (1)...(19): siRNA sense strand
caacagagcucuucaucuu

SEQ ID NO: 2101406 - RNA, 19 nt, Homo sapiens
  misc_RNA (1)...(19): siRNA sense strand
ggaggaagcuggaucuuga

SEQ ID NO: 2101407 - RNA, 19 nt, Homo sapiens
  misc_RNA (1)...(19): siRNA sense strand
gaaggcagcaguugaauuu

SEQ ID NO: 2101408 - RNA, 19 nt, Homo sapiens
  misc_RNA (1)...(19): siRNA sense strand
ggaggcgccuucccuaaua

SEQ ID NO: 2101409 - RNA, 19 nt, Homo sapiens
  misc_RNA (1)...(19): siRNA sense strand
caaaggagagcuacaauga

SEQ ID NO: 2101410 - RNA, 19 nt, Homo sapiens
  misc_RNA (1)...(19): siRNA sense strand
gagaaucaccuuuguuuau

SEQ ID NO: 2101411 - RNA, 19 nt, Homo sapiens
  misc_RNA (1)...(19): siRNA sense strand
caucaaggauucugugcua

SEQ ID NO: 2101412 - RNA, 19 nt, Homo sapiens
  misc_RNA (1)...(19): siRNA sense strand
gggagacgcuggaaagaga

SEQ ID NO: 2101413 - RNA, 19 nt, Homo sapiens
  misc_RNA (1)...(19): siRNA sense strand
cagcaaaccucaagauaag

SEQ ID NO: 2101414 - RNA, 19 nt, Homo sapiens
  misc_RNA (1)...(19): siRNA sense strand
aaggagagcuacaaugaaa

SEQ ID NO: 2101415 - RNA, 19 nt, Homo sapiens
  misc_RNA (1)...(19): siRNA sense strand
gaagaggaagggccuagua

SEQ ID NO: 2101416 - RNA, 19 nt, Homo sapiens
  misc_RNA (1)...(19): siRNA sense strand
gaggaagaccacaguauuu

SEQ ID NO: 2101417 - RNA, 19 nt, Homo sapiens
  misc_RNA (1)...(19): siRNA sense strand
gaaacaccaugggaguuaa

SEQ ID NO: 2101418 - RNA, 19 nt, Homo sapiens
  misc_RNA (1)...(19): siRNA sense strand
gaagcuggaucuugaacug

SEQ ID NO: 2101419 - RNA, 19 nt, Homo sapiens
  misc_RNA (1)...(19): siRNA sense strand
ugauacagcucucaacaga

SEQ ID NO: 2101420 - RNA, 19 nt, Homo sapiens
  misc_RNA (1)...(19): siRNA sense strand
gaggacacgucaauagaga

SEQ ID NO: 2101421 - RNA, 19 nt, Homo sapiens
  misc_RNA (1)...(19): siRNA sense strand
caggauacaucaaggauuc

SEQ ID NO: 2101422 - RNA, 19 nt, Homo sapiens
  misc_RNA (1)...(19): siRNA sense strand
ggacagcccuaggacauca

SEQ ID NO: 2101423 - RNA, 19 nt, Homo sapiens
  misc_RNA (1)...(19): siRNA sense strand
cagaagcagccacuuguua

SEQ ID NO: 2101424 - RNA, 19 nt, Homo sapiens
  misc_RNA (1)...(19): siRNA sense strand
gaucucagcgauaaacaaa

SEQ ID NO: 2101425 - RNA, 19 nt, Homo sapiens
  misc_RNA (1)...(19): siRNA sense strand
aaaagaagcaucugcauua

SEQ ID NO: 2101426 - RNA, 19 nt, Homo sapiens
  misc_RNA (1)...(19): siRNA sense strand
ugacaaaucccacauuaca

SEQ ID NO: 2101427 - RNA, 19 nt, Homo sapiens
  misc_RNA (1)...(19): siRNA sense strand
gcaaaccucaagauaagaa

SEQ ID NO: 2101428 - RNA, 19 nt, Homo sapiens
  misc_RNA (1)...(19): siRNA sense strand
agagaaagcccacagaaga

SEQ ID NO: 2101429 - RNA, 19 nt, Homo sapiens
  misc_RNA (1)...(19): siRNA sense strand
gcuuugaaauuaccuccua

SEQ ID NO: 2101430 - RNA, 19 nt, Homo sapiens
  misc_RNA (1)...(19): siRNA sense strand
agugacaaaucccacauua

SEQ ID NO: 2101431 - RNA, 19 nt, Homo sapiens
  misc_RNA (1)...(19): siRNA sense strand
ggacagucaacuuaaugua

SEQ ID NO: 2101432 - RNA, 19 nt, Homo sapiens
  misc_RNA (1)...(19): siRNA sense strand
caacagacaggcccacuau

SEQ ID NO: 2101433 - RNA, 19 nt, Homo sapiens
  misc_RNA (1)...(19): siRNA sense strand
caacuuaauguaccaaaga

SEQ ID NO: 2101434 - RNA, 19 nt, Homo sapiens
  misc_RNA (1)...(19): siRNA sense strand
gccagcagcucaagccuau

SEQ ID NO: 2101435 - RNA, 19 nt, Homo sapiens
  misc_RNA (1)...(19): siRNA sense strand
aggcagaucucagcgauaa

SEQ ID NO: 2101436 - RNA, 19 nt, Homo sapiens
  misc_RNA (1)...(19): siRNA sense strand
uagagaaucaccuuuguuu

SEQ ID NO: 2101437 - RNA, 19 nt, Homo sapiens
  misc_RNA (1)...(19): siRNA sense strand
gcagaggacacgucaauag

SEQ ID NO: 2101438 - RNA, 19 nt, Homo sapiens
  misc_RNA (1)...(19): siRNA sense strand
ucagcaaaccucaagauaa

SEQ ID NO: 2101439 - RNA, 19 nt, Homo sapiens
  misc_RNA (1)...(19): siRNA sense strand
ccaagucucccgaacauga

SEQ ID NO: 2101440 - RNA, 19 nt, Homo sapiens
  misc_RNA (1)...(19): siRNA sense strand
gaagaggaagaccacagua

SEQ ID NO: 2101441 - RNA, 19 nt, Homo sapiens
  misc_RNA (1)...(19): siRNA sense strand
gaacugcacacacuucaag

SEQ ID NO: 2101442 - RNA, 19 nt, Homo sapiens
  misc_RNA (1)...(19): siRNA sense strand
aaacagaaguuagaagucu

SEQ ID NO: 2101443 - RNA, 19 nt, Homo sapiens
  misc_RNA (1)...(19): siRNA sense strand
ggacagagccuggcaacca

SEQ ID NO: 2101444 - RNA, 19 nt, Homo sapiens
  misc_RNA (1)...(19): siRNA sense strand
gcaguugaauuugccaaug

SEQ ID NO: 2101445 - RNA, 19 nt, Homo sapiens
  misc_RNA (1)...(19): siRNA sense strand
ggacaaacagaaguuagaa

SEQ ID NO: 2101446 - RNA, 19 nt, Homo sapiens
  misc_RNA (1)...(19): siRNA sense strand
augaugaccuggagacuuu

SEQ ID NO: 2101447 - RNA, 19 nt, Homo sapiens
  misc_RNA (1)...(19): siRNA sense strand
uaucagccaugaagaggaa

SEQ ID NO: 2101448 - RNA, 19 nt, Homo sapiens
  misc_RNA (1)...(19): siRNA sense strand
aagcaugcguccuuagaaa

SEQ ID NO: 2101449 - RNA, 19 nt, Homo sapiens
  misc_RNA (1)...(19): siRNA sense strand
caauagagaaucaccuuug

SEQ ID NO: 2101450 - RNA, 19 nt, Homo sapiens
  misc_RNA (1)...(19): siRNA sense strand
guagucagcauuuccuaaa

SEQ ID NO: 2101451 - RNA, 19 nt, Homo sapiens
  misc_RNA (1)...(19): siRNA sense strand
acaaaucccacauuacauu

SEQ ID NO: 2101452 - RNA, 19 nt, Homo sapiens
  misc_RNA (1)...(19): siRNA sense strand
gaagcaugcguccuuagaa

SEQ ID NO: 2101453 - RNA, 19 nt, Homo sapiens
  misc_RNA (1)...(19): siRNA sense strand
ggaaggcagcaguugaauu

SEQ ID NO: 2101454 - RNA, 19 nt, Homo sapiens
  misc_RNA (1)...(19): siRNA sense strand
agaaacaccaugggaguua

SEQ ID NO: 2101455 - RNA, 19 nt, Homo sapiens
  misc_RNA (1)...(19): siRNA sense strand
auacagcucucaacagaca

SEQ ID NO: 2101456 - RNA, 19 nt, Homo sapiens
  misc_RNA (1)...(19): siRNA sense strand
ucaaauaucagccaugaag

SEQ ID NO: 2101457 - RNA, 19 nt, Homo sapiens
  misc_RNA (1)...(19): siRNA sense strand
ccaggacagucaacuuaau

SEQ ID NO: 2101458 - RNA, 19 nt, Homo sapiens
  misc_RNA (1)...(19): siRNA sense strand
gaagaaccacccagagucu

SEQ ID NO: 2101459 - RNA, 19 nt, Homo sapiens
  misc_RNA (1)...(19): siRNA sense strand
gaaaagaagcaucugcauu

SEQ ID NO: 2101460 - RNA, 19 nt, Homo sapiens
  misc_RNA (1)...(19): siRNA sense strand
acacgucaauagagaauca

SEQ ID NO: 2101461 - RNA, 19 nt, Homo sapiens
  misc_RNA (1)...(19): siRNA sense strand
acagacaggcccacuauga

SEQ ID NO: 2101462 - RNA, 19 nt, Homo sapiens
  misc_RNA (1)...(19): siRNA sense strand
gcauggacacccaaagaga

SEQ ID NO: 2101463 - RNA, 19 nt, Homo sapiens
  misc_RNA (1)...(19): siRNA sense strand
gagcagggacacacucuca

SEQ ID NO: 2101464 - RNA, 19 nt, Homo sapiens
  misc_RNA (1)...(19): siRNA sense strand
gagccucuuucucccuaaa

SEQ ID NO: 2101465 - RNA, 19 nt, Homo sapiens
  misc_RNA (1)...(19): siRNA sense strand
gauuggagagggagaagaa

SEQ ID NO: 2101466 - RNA, 19 nt, Homo sapiens
  misc_RNA (1)...(19): siRNA sense strand
ggcauucagccaagagaua

SEQ ID NO: 2101467 - RNA, 19 nt, Homo sapiens
  misc_RNA (1)...(19): siRNA sense strand
gaacgugaaacuccacaag

SEQ ID NO: 2101468 - RNA, 19 nt, Homo sapiens
  misc_RNA (1)...(19): siRNA sense strand
ggacacgucaauagagaau

SEQ ID NO: 2101469 - RNA, 19 nt, Homo sapiens
  misc_RNA (1)...(19): siRNA sense strand
gcaucugcauuaccucugu

SEQ ID NO: 2101470 - RNA, 19 nt, Homo sapiens
  misc_RNA (1)...(19): siRNA sense strand
ccagaaagcagcgaagaau

SEQ ID NO: 2101471 - RNA, 19 nt, Homo sapiens
  misc_RNA (1)...(19): siRNA sense strand
acagagcucuucaucuuac

SEQ ID NO: 2101472 - RNA, 19 nt, Homo sapiens
  misc_RNA (1)...(19): siRNA sense strand
gacagagccuggcaaccau

SEQ ID NO: 2101473 - RNA, 19 nt, Homo sapiens
  misc_RNA (1)...(19): siRNA sense strand
gacacacucucaccucaag

SEQ ID NO: 2101474 - RNA, 19 nt, Homo sapiens
  misc_RNA (1)...(19): siRNA sense strand
ccugaagcaugcguccuua

SEQ ID NO: 2101475 - RNA, 19 nt, Homo sapiens
  misc_RNA (1)...(19): siRNA sense strand
gcaaccauaccuccacuuc

SEQ ID NO: 2101476 - RNA, 19 nt, Homo sapiens
  misc_RNA (1)...(19): siRNA sense strand
aauagagaaucaccuuugu

SEQ ID NO: 2101477 - RNA, 19 nt, Homo sapiens
  misc_RNA (1)...(19): siRNA sense strand
gaggaagggccuaguaguc

SEQ ID NO: 2101478 - RNA, 19 nt, Homo sapiens
  misc_RNA (1)...(19): siRNA sense strand
cagcagcucaagccuauga

SEQ ID NO: 2101479 - RNA, 19 nt, Homo sapiens
  misc_RNA (1)...(19): siRNA sense strand
gagaaagcccacagaagag

SEQ ID NO: 2101480 - RNA, 19 nt, Homo sapiens
  misc_RNA (1)...(19): siRNA sense strand
aaagagaaagcccacagaa

SEQ ID NO: 2101481 - RNA, 19 nt, Homo sapiens
  misc_RNA (1)...(19): siRNA sense strand
gagccaauuuaaagccaau

SEQ ID NO: 2101482 - RNA, 19 nt, Homo sapiens
  misc_RNA (1)...(19): siRNA sense strand
cugaagagccaauuuaaag

SEQ ID NO: 2101483 - RNA, 19 nt, Homo sapiens
  misc_RNA (1)...(19): siRNA sense strand
ggugcuuccugcugaaaga

SEQ ID NO: 2101484 - RNA, 19 nt, Homo sapiens
  misc_RNA (1)...(19): siRNA sense strand
agagaaucaccuuuguuua

SEQ ID NO: 2101485 - RNA, 19 nt, Homo sapiens
  misc_RNA (1)...(19): siRNA sense strand
agaggaagaccacaguauu

SEQ ID NO: 2101486 - RNA, 19 nt, Homo sapiens
  misc_RNA (1)...(19): siRNA sense strand
cagaggacacgucaauaga

SEQ ID NO: 2101487 - RNA, 19 nt, Homo sapiens
  misc_RNA (1)...(19): siRNA sense strand
gcucaggccacaacaagau

SEQ ID NO: 2101488 - RNA, 19 nt, Homo sapiens
  misc_RNA (1)...(19): siRNA sense strand
gcaggauacaucaaggauu

SEQ ID NO: 2101489 - RNA, 19 nt, Homo sapiens
  misc_RNA (1)...(19): siRNA sense strand
ccuaaaacuuucaguacua

SEQ ID NO: 2101490 - RNA, 19 nt, Homo sapiens
  misc_RNA (1)...(19): siRNA sense strand
gaagggaagcaaggcaaga

SEQ ID NO: 2101491 - RNA, 19 nt, Homo sapiens
  misc_RNA (1)...(19): siRNA sense strand
uaaacaaaggaacgugaaa

SEQ ID NO: 2101492 - RNA, 19 nt, Homo sapiens
  misc_RNA (1)...(19): siRNA sense strand
gaaccagaggauuacuuga

SEQ ID NO: 2101493 - RNA, 19 nt, Homo sapiens
  misc_RNA (1)...(19): siRNA sense strand
cugcauuaccucugugaua

SEQ ID NO: 2101494 - RNA, 19 nt, Homo sapiens
  misc_RNA (1)...(19): siRNA sense strand
auucaaauaucagccauga

SEQ ID NO: 2101495 - RNA, 19 nt, Homo sapiens
  misc_RNA (1)...(19): siRNA sense strand
ucgggaaccucacucugaa

SEQ ID NO: 2101496 - RNA, 19 nt, Homo sapiens
  misc_RNA (1)...(19): siRNA sense strand
ggacacacucucaccucaa

SEQ ID NO: 2101497 - RNA, 19 nt, Homo sapiens
  misc_RNA (1)...(19): siRNA sense strand
ccucuucccuccuguagca

SEQ ID NO: 2101498 - RNA, 19 nt, Homo sapiens
  misc_RNA (1)...(19): siRNA sense strand
gaagcagccacuuguuaca

SEQ ID NO: 2101499 - RNA, 19 nt, Homo sapiens
  misc_RNA (1)...(19): siRNA sense strand
gaagaccacaguauuucuc

SEQ ID NO: 2101500 - RNA, 19 nt, Homo sapiens
  misc_RNA (1)...(19): siRNA sense strand
gcucaagccuaugaaucug

SEQ ID NO: 2101501 - RNA, 19 nt, Homo sapiens
  misc_RNA (1)...(19): siRNA sense strand
caagaucuuucagguguac

SEQ ID NO: 2101502 - RNA, 19 nt, Homo sapiens
  misc_RNA (1)...(19): siRNA sense strand
ggaagcaaggcaagacaca

SEQ ID NO: 2101503 - RNA, 19 nt, Homo sapiens
  misc_RNA (1)...(19): siRNA sense strand
gucagcaaaccucaagaua

SEQ ID NO: 2101504 - RNA, 19 nt, Homo sapiens
  misc_RNA (1)...(19): siRNA sense strand
ggaaauggcugaagaggaa

SEQ ID NO: 2101505 - RNA, 19 nt, Homo sapiens
  misc_RNA (1)...(19): siRNA sense strand
gaaaugcacuggacuauca

SEQ ID NO: 2101506 - RNA, 19 nt, Homo sapiens
  misc_RNA (1)...(19): siRNA sense strand
gggcagagauuaugaugua

SEQ ID NO: 2101507 - RNA, 19 nt, Homo sapiens
  misc_RNA (1)...(19): siRNA sense strand
gaagacaccucaaauagag

SEQ ID NO: 2101508 - RNA, 19 nt, Homo sapiens
  misc_RNA (1)...(19): siRNA sense strand
ccaaggcccuccucacuaa

SEQ ID NO: 2101509 - RNA, 19 nt, Homo sapiens
  misc_RNA (1)...(19): siRNA sense strand
ggacacagaaggaaagaaa

SEQ ID NO: 2101510 - RNA, 19 nt, Homo sapiens
  misc_RNA (1)...(19): siRNA sense strand
gaaggaaaguggaaaugca

SEQ ID NO: 2101511 - RNA, 19 nt, Homo sapiens
  misc_RNA (1)...(19): siRNA sense strand
caacauggaaucuaaagaa

SEQ ID NO: 2101512 - RNA, 19 nt, Homo sapiens
  misc_RNA (1)...(19): siRNA sense strand
auaaagcgcugauauguuc

SEQ ID NO: 2101513 - RNA, 19 nt, Homo sapiens
  misc_RNA (1)...(19): siRNA sense strand
gaaacaagcccaggaacaa

SEQ ID NO: 2101514 - RNA, 19 nt, Homo sapiens
  misc_RNA (1)...(19): siRNA sense strand
caaauaugaugcccaggaa

SEQ ID NO: 2101515 - RNA, 19 nt, Homo sapiens
  misc_RNA (1)...(19): siRNA sense strand
ggaaaugcaguuagaagaa

SEQ ID NO: 2101516 - RNA, 19 nt, Homo sapiens
  misc_RNA (1)...(19): siRNA sense strand
ggacaggcuucgagcagaa

SEQ ID NO: 2101517 - RNA, 19 nt, Homo sapiens
  misc_RNA (1)...(19): siRNA sense strand
uaugaaaccucaccguuga

SEQ ID NO: 2101518 - RNA, 19 nt, Homo sapiens
  misc_RNA (1)...(19): siRNA sense strand
gaaccuagagccaaucuuc

SEQ ID NO: 2101519 - RNA, 19 nt, Homo sapiens
  misc_RNA (1)...(19): siRNA sense strand
gaaaugcaguuagaagaag

SEQ ID NO: 2101520 - RNA, 19 nt, Homo sapiens
  misc_RNA (1)...(19): siRNA sense strand
gaaagcagcccaggagaga

SEQ ID NO: 2101521 - RNA, 19 nt, Homo sapiens
  misc_RNA (1)...(19): siRNA sense strand
caggagagccucaaaguug

SEQ ID NO: 2101522 - RNA, 19 nt, Homo sapiens
  misc_RNA (1)...(19): siRNA sense strand
gcaguuagaagaagaacaa

SEQ ID NO: 2101523 - RNA, 19 nt, Homo sapiens
  misc_RNA (1)...(19): siRNA sense strand
caugagagggauuugauua

SEQ ID NO: 2101524 - RNA, 19 nt, Homo sapiens
  misc_RNA (1)...(19): siRNA sense strand
ggaagaagccacgaaacaa

SEQ ID NO: 2101525 - RNA, 19 nt, Homo sapiens
  misc_RNA (1)...(19): siRNA sense strand
ggaauuggaaaugcaguua

SEQ ID NO: 2101526 - RNA, 19 nt, Homo sapiens
  misc_RNA (1)...(19): siRNA sense strand
gcagagacguacagaagag

SEQ ID NO: 2101527 - RNA, 19 nt, Homo sapiens
  misc_RNA (1)...(19): siRNA sense strand
uaaauaaagcgcugauaug

SEQ ID NO: 2101528 - RNA, 19 nt, Homo sapiens
  misc_RNA (1)...(19): siRNA sense strand
guagaggacccuuggcuuu

SEQ ID NO: 2101529 - RNA, 19 nt, Homo sapiens
  misc_RNA (1)...(19): siRNA sense strand
gagguugagugcuguguau

SEQ ID NO: 2101530 - RNA, 19 nt, Homo sapiens
  misc_RNA (1)...(19): siRNA sense strand
acagaagacaccucaaaua

SEQ ID NO: 2101531 - RNA, 19 nt, Homo sapiens
  misc_RNA (1)...(19): siRNA sense strand
cacaugaaccuuuaugaaa

SEQ ID NO: 2101532 - RNA, 19 nt, Homo sapiens
  misc_RNA (1)...(19): siRNA sense strand
gcagaaagagccgagauga

SEQ ID NO: 2101533 - RNA, 19 nt, Homo sapiens
  misc_RNA (1)...(19): siRNA sense strand
aaacagaagacaccucaaa

SEQ ID NO: 2101534 - RNA, 19 nt, Homo sapiens
  misc_RNA (1)...(19): siRNA sense strand
gaugucagcuaugaggaaa

SEQ ID NO: 2101535 - RNA, 19 nt, Homo sapiens
  misc_RNA (1)...(19): siRNA sense strand
ccaaguuucucuagaugga

SEQ ID NO: 2101536 - RNA, 19 nt, Homo sapiens
  misc_RNA (1)...(19): siRNA sense strand
gaagaagccacgaaacaag

SEQ ID NO: 2101537 - RNA, 19 nt, Homo sapiens
  misc_RNA (1)...(19): siRNA sense strand
aaacagagacuccaagaag

SEQ ID NO: 2101538 - RNA, 19 nt, Homo sapiens
  misc_RNA (1)...(19): siRNA sense strand
ggaaacagagacuccaaga

SEQ ID NO: 2101539 - RNA, 19 nt, Homo sapiens
  misc_RNA (1)...(19): siRNA sense strand
cagaagacaccucaaauag

SEQ ID NO: 2101540 - RNA, 19 nt, Homo sapiens
  misc_RNA (1)...(19): siRNA sense strand
ggaaacaggaagcagaaga

SEQ ID NO: 2101541 - RNA, 19 nt, Homo sapiens
  misc_RNA (1)...(19): siRNA sense strand
gaaacagagacuccaagaa

SEQ ID NO: 2101542 - RNA, 19 nt, Homo sapiens
  misc_RNA (1)...(19): siRNA sense strand
gagauccgcuugaggaaac

SEQ ID NO: 2101543 - RNA, 19 nt, Homo sapiens
  misc_RNA (1)...(19): siRNA sense strand
gaucaucacccucucagau

SEQ ID NO: 2101544 - RNA, 19 nt, Homo sapiens
  misc_RNA (1)...(19): siRNA sense strand
cagagaaacucaccacaac

SEQ ID NO: 2101545 - RNA, 19 nt, Homo sapiens
  misc_RNA (1)...(19): siRNA sense strand
gcaaaggcaagaggaauug

SEQ ID NO: 2101546 - RNA, 19 nt, Homo sapiens
  misc_RNA (1)...(19): siRNA sense strand
gagccucaaaguuguauaa

SEQ ID NO: 2101547 - RNA, 19 nt, Homo sapiens
  misc_RNA (1)...(19): siRNA sense strand
guguauacaucucuucuuc

SEQ ID NO: 2101548 - RNA, 19 nt, Homo sapiens
  misc_RNA (1)...(19): siRNA sense strand
ggaggaaacugcgagaacu

SEQ ID NO: 2101549 - RNA, 19 nt, Homo sapiens
  misc_RNA (1)...(19): siRNA sense strand
caaaggacucaaaggcuaa

SEQ ID NO: 2101550 - RNA, 19 nt, Homo sapiens
  misc_RNA (1)...(19): siRNA sense strand
gcaagaggaauuggaaaug

SEQ ID NO: 2101551 - RNA, 19 nt, Homo sapiens
  misc_RNA (1)...(19): siRNA sense strand
ucacaugaaccuuuaugaa

SEQ ID NO: 2101552 - RNA, 19 nt, Homo sapiens
  misc_RNA (1)...(19): siRNA sense strand
gagaaacucaccacaacga

SEQ ID NO: 2101553 - RNA, 19 nt, Homo sapiens
  misc_RNA (1)...(19): siRNA sense strand
gaagagaagggagcaggaa

SEQ ID NO: 2101554 - RNA, 19 nt, Homo sapiens
  misc_RNA (1)...(19): siRNA sense strand
guauacaucucuucuucca

SEQ ID NO: 2101555 - RNA, 19 nt, Homo sapiens
  misc_RNA (1)...(19): siRNA sense strand
ugauggaaauggcugaaga

SEQ ID NO: 2101556 - RNA, 19 nt, Homo sapiens
  misc_RNA (1)...(19): siRNA sense strand
gaagcaaaggcaagaggaa

SEQ ID NO: 2101557 - RNA, 19 nt, Homo sapiens
  misc_RNA (1)...(19): siRNA sense strand
gaggaaacugcgagaacua

SEQ ID NO: 2101558 - RNA, 19 nt, Homo sapiens
  misc_RNA (1)...(19): siRNA sense strand
ggcuggagguggagaagaa

SEQ ID NO: 2101559 - RNA, 19 nt, Homo sapiens
  misc_RNA (1)...(19): siRNA sense strand
uaaagaagagagaagaugu

SEQ ID NO: 2101560 - RNA, 19 nt, Homo sapiens
  misc_RNA (1)...(19): siRNA sense strand
cauggaaucuaaagaagag

SEQ ID NO: 2101561 - RNA, 19 nt, Homo sapiens
  misc_RNA (1)...(19): siRNA sense strand
gcugaaccaagacuguuua

SEQ ID NO: 2101562 - RNA, 19 nt, Homo sapiens
  misc_RNA (1)...(19): siRNA sense strand
ggagacaucagccaacauc

SEQ ID NO: 2101563 - RNA, 19 nt, Homo sapiens
  misc_RNA (1)...(19): siRNA sense strand
ccucucagauugcaacugu

SEQ ID NO: 2101564 - RNA, 19 nt, Homo sapiens
  misc_RNA (1)...(19): siRNA sense strand
ggagagccucaaaguugua

SEQ ID NO: 2101565 - RNA, 19 nt, Homo sapiens
  misc_RNA (1)...(19): siRNA sense strand
caagaggaauuggaaaugc

SEQ ID NO: 2101566 - RNA, 19 nt, Homo sapiens
  misc_RNA (1)...(19): siRNA sense strand
agggaaggcugaaccaaga

SEQ ID NO: 2101567 - RNA, 19 nt, Homo sapiens
  misc_RNA (1)...(19): siRNA sense strand
aaauaaagcgcugauaugu

SEQ ID NO: 2101568 - RNA, 19 nt, Homo sapiens
  misc_RNA (1)...(19): siRNA sense strand
ugcgagaacuacagagaaa

SEQ ID NO: 2101569 - RNA, 19 nt, Homo sapiens
  misc_RNA (1)...(19): siRNA sense strand
agaagcagauauugugcaa

SEQ ID NO: 2101570 - RNA, 19 nt, Homo sapiens
  misc_RNA (1)...(19): siRNA sense strand
agaagacaccucaaauaga

SEQ ID NO: 2101571 - RNA, 19 nt, Homo sapiens
  misc_RNA (1)...(19): siRNA sense strand
cagcagagacguacagaag

SEQ ID NO: 2101572 - RNA, 19 nt, Homo sapiens
  misc_RNA (1)...(19): siRNA sense strand
cagccaacaucagucauga

SEQ ID NO: 2101573 - RNA, 19 nt, Homo sapiens
  misc_RNA (1)...(19): siRNA sense strand
gaaacaggaagcagaagag

SEQ ID NO: 2101574 - RNA, 19 nt, Homo sapiens
  misc_RNA (1)...(19): siRNA sense strand
gaagaucaucacccucuca

SEQ ID NO: 2101575 - RNA, 19 nt, Homo sapiens
  misc_RNA (1)...(19): siRNA sense strand
ccagagccaaggaguauga

SEQ ID NO: 2101576 - RNA, 19 nt, Homo sapiens
  misc_RNA (1)...(19): siRNA sense strand
cagaagagauccgcuugag

SEQ ID NO: 2101577 - RNA, 19 nt, Homo sapiens
  misc_RNA (1)...(19): siRNA sense strand
ucaucacccucucagauug

SEQ ID NO: 2101578 - RNA, 19 nt, Homo sapiens
  misc_RNA (1)...(19): siRNA sense strand
uuaacgaggccaagagaaa

SEQ ID NO: 2101579 - RNA, 19 nt, Homo sapiens
  misc_RNA (1)...(19): siRNA sense strand
gcagaggagaggaggcaaa

SEQ ID NO: 2101580 - RNA, 19 nt, Homo sapiens
  misc_RNA (1)...(19): siRNA sense strand
aacagagacuccaagaaga

SEQ ID NO: 2101581 - RNA, 19 nt, Homo sapiens
  misc_RNA (1)...(19): siRNA sense strand
acaugaaccuuuaugaaac

SEQ ID NO: 2101582 - RNA, 19 nt, Homo sapiens
  misc_RNA (1)...(19): siRNA sense strand
gcuaugaggaaacagaaga

SEQ ID NO: 2101583 - RNA, 19 nt, Homo sapiens
  misc_RNA (1)...(19): siRNA sense strand
ucagagaaacucaccacaa

SEQ ID NO: 2101584 - RNA, 19 nt, Homo sapiens
  misc_RNA (1)...(19): siRNA sense strand
ugagugcuguguauacauc

SEQ ID NO: 2101585 - RNA, 19 nt, Homo sapiens
  misc_RNA (1)...(19): siRNA sense strand
aagcagauauugugcaaaa

SEQ ID NO: 2101586 - RNA, 19 nt, Homo sapiens
  misc_RNA (1)...(19): siRNA sense strand
gagagggauuugauuaacg

SEQ ID NO: 2101587 - RNA, 19 nt, Homo sapiens
  misc_RNA (1)...(19): siRNA sense strand
aagacuggcucuggaagaa

SEQ ID NO: 2101588 - RNA, 19 nt, Homo sapiens
  misc_RNA (1)...(19): siRNA sense strand
gccucaaaguuguauaaau

SEQ ID NO: 2101589 - RNA, 19 nt, Homo sapiens
  misc_RNA (1)...(19): siRNA sense strand
gacaggagagccucaaagu

SEQ ID NO: 2101590 - RNA, 19 nt, Homo sapiens
  misc_RNA (1)...(19): siRNA sense strand
ggaggcagcagcucagaag

SEQ ID NO: 2101591 - RNA, 19 nt, Homo sapiens
  misc_RNA (1)...(19): siRNA sense strand
cuggcaacauggaaucuaa

SEQ ID NO: 2101592 - RNA, 19 nt, Homo sapiens
  misc_RNA (1)...(19): siRNA sense strand
agagggauuugauuaacga

SEQ ID NO: 2101593 - RNA, 19 nt, Homo sapiens
  misc_RNA (1)...(19): siRNA sense strand
gcagagauuaugauguaca

SEQ ID NO: 2101594 - RNA, 19 nt, Homo sapiens
  misc_RNA (1)...(19): siRNA sense strand
acagagacuccaagaagaa

SEQ ID NO: 2101595 - RNA, 19 nt, Homo sapiens
  misc_RNA (1)...(19): siRNA sense strand
gaugugaggacccuuccaa

SEQ ID NO: 2101596 - RNA, 19 nt, Homo sapiens
  misc_RNA (1)...(19): siRNA sense strand
ggcagcagcucagaagaca

SEQ ID NO: 2101597 - RNA, 19 nt, Homo sapiens
  misc_RNA (1)...(19): siRNA sense strand
aagccaaguuucucuagau

SEQ ID NO: 2101598 - RNA, 19 nt, Homo sapiens
  misc_RNA (1)...(19): siRNA sense strand
gccaacaucagucaugaga

SEQ ID NO: 2101599 - RNA, 19 nt, Homo sapiens
  misc_RNA (1)...(19): siRNA sense strand
caagaaagacaaaaccaaa

SEQ ID NO: 2101600 - RNA, 19 nt, Homo sapiens
  misc_RNA (1)...(19): siRNA sense strand
cgaaacaagcccaggaaca

SEQ ID NO: 2101601 - RNA, 19 nt, Homo sapiens
  misc_RNA (1)...(19): siRNA sense strand
gcggaaacaggaagcagaa

SEQ ID NO: 2101602 - RNA, 19 nt, Homo sapiens
  misc_RNA (1)...(19): siRNA sense strand
aauuggaaaugcaguuaga

SEQ ID NO: 2101603 - RNA, 19 nt, Homo sapiens
  misc_RNA (1)...(19): siRNA sense strand
ggcuuucucccaaauauga

SEQ ID NO: 2101604 - RNA, 19 nt, Homo sapiens
  misc_RNA (1)...(19): siRNA sense strand
aaacaaggguguacagaua

SEQ ID NO: 2101605 - RNA, 19 nt, Homo sapiens
  misc_RNA (1)...(19): siRNA sense strand
gagcagauuguccauauua

SEQ ID NO: 2101606 - RNA, 19 nt, Homo sapiens
  misc_RNA (1)...(19): siRNA sense strand
caaccuaauucccauauug

SEQ ID NO: 2101607 - RNA, 19 nt, Homo sapiens
  misc_RNA (1)...(19): siRNA sense strand
gaugucaccucuagcauga

SEQ ID NO: 2101608 - RNA, 19 nt, Homo sapiens
  misc_RNA (1)...(19): siRNA sense strand
cagcagaguuuccaaauca

SEQ ID NO: 2101609 - RNA, 19 nt, Homo sapiens
  misc_RNA (1)...(19): siRNA sense strand
gguaauaucaguggaaaua

SEQ ID NO: 2101610 - RNA, 19 nt, Homo sapiens
  misc_RNA (1)...(19): siRNA sense strand
uuaaagacgugaucauuug

SEQ ID NO: 2101611 - RNA, 19 nt, Homo sapiens
  misc_RNA (1)...(19): siRNA sense strand
ggagggagaaccuuuguaa

SEQ ID NO: 2101612 - RNA, 19 nt, Homo sapiens
  misc_RNA (1)...(19): siRNA sense strand
ggagaaacuuguugcacuu

SEQ ID NO: 2101613 - RNA, 19 nt, Homo sapiens
  misc_RNA (1)...(19): siRNA sense strand
gaauggaacuugggugguu

SEQ ID NO: 2101614 - RNA, 19 nt, Homo sapiens
  misc_RNA (1)...(19): siRNA sense strand
gaacugaugaugguaauug

SEQ ID NO: 2101615 - RNA, 19 nt, Homo sapiens
  misc_RNA (1)...(19): siRNA sense strand
caaauaaugacccgaauga

SEQ ID NO: 2101616 - RNA, 19 nt, Homo sapiens
  misc_RNA (1)...(19): siRNA sense strand
gcauaacucuauuugacaa

SEQ ID NO: 2101617 - RNA, 19 nt, Homo sapiens
  misc_RNA (1)...(19): siRNA sense strand
ccacuacacugaaauacug

SEQ ID NO: 2101618 - RNA, 19 nt, Homo sapiens
  misc_RNA (1)...(19): siRNA sense strand
gguggaaggugaagcgaaa

SEQ ID NO: 2101619 - RNA, 19 nt, Homo sapiens
  misc_RNA (1)...(19): siRNA sense strand
gauaugagagugccauuug

SEQ ID NO: 2101620 - RNA, 19 nt, Homo sapiens
  misc_RNA (1)...(19): siRNA sense strand
cgacugaacugaugauggu

SEQ ID NO: 2101621 - RNA, 19 nt, Homo sapiens
  misc_RNA (1)...(19): siRNA sense strand
ggaggaagaagcccugaaa

SEQ ID NO: 2101622 - RNA, 19 nt, Homo sapiens
  misc_RNA (1)...(19): siRNA sense strand
ggaaauaauuacguugauc

SEQ ID NO: 2101623 - RNA, 19 nt, Homo sapiens
  misc_RNA (1)...(19): siRNA sense strand
augcucagcuuuauuauga

SEQ ID NO: 2101624 - RNA, 19 nt, Homo sapiens
  misc_RNA (1)...(19): siRNA sense strand
uagagcagauuguccauau

SEQ ID NO: 2101625 - RNA, 19 nt, Homo sapiens
  misc_RNA (1)...(19): siRNA sense strand
gggaggauauaaugaguuc

SEQ ID NO: 2101626 - RNA, 19 nt, Homo sapiens
  misc_RNA (1)...(19): siRNA sense strand
gguaauugcucaagagaac

SEQ ID NO: 2101627 - RNA, 19 nt, Homo sapiens
  misc_RNA (1)...(19): siRNA sense strand
gaagacaguuuuacucaug

SEQ ID NO: 2101628 - RNA, 19 nt, Homo sapiens
  misc_RNA (1)...(19): siRNA sense strand
gaaacuuguugcacuugga

SEQ ID NO: 2101629 - RNA, 19 nt, Homo sapiens
  misc_RNA (1)...(19): siRNA sense strand
uagcauaacucuauuugac

SEQ ID NO: 2101630 - RNA, 19 nt, Homo sapiens
  misc_RNA (1)...(19): siRNA sense strand
gcaaaaccguggaauccua

SEQ ID NO: 2101631 - RNA, 19 nt, Homo sapiens
  misc_RNA (1)...(19): siRNA sense strand
gaaggccaguuugguauuc

SEQ ID NO: 2101632 - RNA, 19 nt, Homo sapiens
  misc_RNA (1)...(19): siRNA sense strand
gcauacagaaauuagcaua

SEQ ID NO: 2101633 - RNA, 19 nt, Homo sapiens
  misc_RNA (1)...(19): siRNA sense strand
gcagcagaguuuccaaauc

SEQ ID NO: 2101634 - RNA, 19 nt, Homo sapiens
  misc_RNA (1)...(19): siRNA sense strand
uaaguggagucacaagaau

SEQ ID NO: 2101635 - RNA, 19 nt, Homo sapiens
  misc_RNA (1)...(19): siRNA sense strand
aaagagaauuuguggcaau

SEQ ID NO: 2101636 - RNA, 19 nt, Homo sapiens
  misc_RNA (1)...(19): siRNA sense strand
acaaggagguguucacucu

SEQ ID NO: 2101637 - RNA, 19 nt, Homo sapiens
  misc_RNA (1)...(19): siRNA sense strand
aagaauaaguggagucaca

SEQ ID NO: 2101638 - RNA, 19 nt, Homo sapiens
  misc_RNA (1)...(19): siRNA sense strand
uaauuacguugaucugaga

SEQ ID NO: 2101639 - RNA, 19 nt, Homo sapiens
  misc_RNA (1)...(19): siRNA sense strand
gacagcuccuucauacauu

SEQ ID NO: 2101640 - RNA, 19 nt, Homo sapiens
  misc_RNA (1)...(19): siRNA sense strand
gcucagcuuuauuaugaug

SEQ ID NO: 2101641 - RNA, 19 nt, Homo sapiens
  misc_RNA (1)...(19): siRNA sense strand
caugacgacugaacugaug

SEQ ID NO: 2101642 - RNA, 19 nt, Homo sapiens
  misc_RNA (1)...(19): siRNA sense strand
gaaccuuuguaaaccugaa

SEQ ID NO: 2101643 - RNA, 19 nt, Homo sapiens
  misc_RNA (1)...(19): siRNA sense strand
gaugguaauugcucaagag

SEQ ID NO: 2101644 - RNA, 19 nt, Homo sapiens
  misc_RNA (1)...(19): siRNA sense strand
acagcuccuucauacauua

SEQ ID NO: 2101645 - RNA, 19 nt, Homo sapiens
  misc_RNA (1)...(19): siRNA sense strand
gcauugcacacaacauuau

SEQ ID NO: 2101646 - RNA, 19 nt, Homo sapiens
  misc_RNA (1)...(19): siRNA sense strand
gucuugaguuccuaaauga

SEQ ID NO: 2101647 - RNA, 19 nt, Homo sapiens
  misc_RNA (1)...(19): siRNA sense strand
cgaaugacaagugaucuaa

SEQ ID NO: 2101648 - RNA, 19 nt, Homo sapiens
  misc_RNA (1)...(19): siRNA sense strand
ccucuagcaugacgacuga

SEQ ID NO: 2101649 - RNA, 19 nt, Homo sapiens
  misc_RNA (1)...(19): siRNA sense strand
uauagccacuacacugaaa

SEQ ID NO: 2101650 - RNA, 19 nt, Homo sapiens
  misc_RNA (1)...(19): siRNA sense strand
gaagaagcccugaaaacuu

SEQ ID NO: 2101651 - RNA, 19 nt, Homo sapiens
  misc_RNA (1)...(19): siRNA sense strand
ccauaccaaucaggacaua

SEQ ID NO: 2101652 - RNA, 19 nt, Homo sapiens
  misc_RNA (1)...(19): siRNA sense strand
gcacacaguauagccacua

SEQ ID NO: 2101653 - RNA, 19 nt, Homo sapiens
  misc_RNA (1)...(19): siRNA sense strand
ucuggucccugaugaagaa

SEQ ID NO: 2101654 - RNA, 19 nt, Homo sapiens
  misc_RNA (1)...(19): siRNA sense strand
gcucuauggguaccugaua

SEQ ID NO: 2101655 - RNA, 19 nt, Homo sapiens
  misc_RNA (1)...(19): siRNA sense strand
gaacuuguggcagacuauu

SEQ ID NO: 2101656 - RNA, 19 nt, Homo sapiens
  misc_RNA (1)...(19): siRNA sense strand
gacgaguggcgaaguguuu

SEQ ID NO: 2101657 - RNA, 19 nt, Homo sapiens
  misc_RNA (1)...(19): siRNA sense strand
ccaaucaggacauaaagau

SEQ ID NO: 2101658 - RNA, 19 nt, Homo sapiens
  misc_RNA (1)...(19): siRNA sense strand
ccaguuugguauuccgaaa

SEQ ID NO: 2101659 - RNA, 19 nt, Homo sapiens
  misc_RNA (1)...(19): siRNA sense strand
uuaggaauauugagugaag

SEQ ID NO: 2101660 - RNA, 19 nt, Homo sapiens
  misc_RNA (1)...(19): siRNA sense strand
ggagaaccuuuguaaaccu

SEQ ID NO: 2101661 - RNA, 19 nt, Homo sapiens
  misc_RNA (1)...(19): siRNA sense strand
ugggaugcauacagaaauu

SEQ ID NO: 2101662 - RNA, 19 nt, Homo sapiens
  misc_RNA (1)...(19): siRNA sense strand
gggaugcauacagaaauua

SEQ ID NO: 2101663 - RNA, 19 nt, Homo sapiens
  misc_RNA (1)...(19): siRNA sense strand
guggcagacuauuuacaaa

SEQ ID NO: 2101664 - RNA, 19 nt, Homo sapiens
  misc_RNA (1)...(19): siRNA sense strand
gacaagugaucuaauucag

SEQ ID NO: 2101665 - RNA, 19 nt, Homo sapiens
  misc_RNA (1)...(19): siRNA sense strand
gaaguguuugggaugcaua

SEQ ID NO: 2101666 - RNA, 19 nt, Homo sapiens
  misc_RNA (1)...(19): siRNA sense strand
agucuugaguuccuaaaug

SEQ ID NO: 2101667 - RNA, 19 nt, Homo sapiens
  misc_RNA (1)...(19): siRNA sense strand
gagacaagauacauuuuca

SEQ ID NO: 2101668 - RNA, 19 nt, Homo sapiens
  misc_RNA (1)...(19): siRNA sense strand
ugacccgaaugacaaguga

SEQ ID NO: 2101669 - RNA, 19 nt, Homo sapiens
  misc_RNA (1)...(19): siRNA sense strand
caccacaggaagacaauuu

SEQ ID NO: 2101670 - RNA, 19 nt, Homo sapiens
  misc_RNA (1)...(19): siRNA sense strand
caguggaaauaauuacguu

SEQ ID NO: 2101671 - RNA, 19 nt, Homo sapiens
  misc_RNA (1)...(19): siRNA sense strand
cauuaaagacgugaucauu

SEQ ID NO: 2101672 - RNA, 19 nt, Homo sapiens
  misc_RNA (1)...(19): siRNA sense strand
gagggagaaccuuuguaaa

SEQ ID NO: 2101673 - RNA, 19 nt, Homo sapiens
  misc_RNA (1)...(19): siRNA sense strand
ggaagaacaucucaaaagc

SEQ ID NO: 2101674 - RNA, 19 nt, Homo sapiens
  misc_RNA (1)...(19): siRNA sense strand
cagaacuuguggcagacua

SEQ ID NO: 2101675 - RNA, 19 nt, Homo sapiens
  misc_RNA (1)...(19): siRNA sense strand
gcuaaaagaugugugugaa

SEQ ID NO: 2101676 - RNA, 19 nt, Homo sapiens
  misc_RNA (1)...(19): siRNA sense strand
ugacaagugaucuaauuca

SEQ ID NO: 2101677 - RNA, 19 nt, Homo sapiens
  misc_RNA (1)...(19): siRNA sense strand
caacaagcaggcggaagaa

SEQ ID NO: 2101678 - RNA, 19 nt, Homo sapiens
  misc_RNA (1)...(19): siRNA sense strand
gaaaagccacagagucuug

SEQ ID NO: 2101679 - RNA, 19 nt, Homo sapiens
  misc_RNA (1)...(19): siRNA sense strand
gcagaguuuccaaaucaga

SEQ ID NO: 2101680 - RNA, 19 nt, Homo sapiens
  misc_RNA (1)...(19): siRNA sense strand
acaaggguguacagauaug

SEQ ID NO: 2101681 - RNA, 19 nt, Homo sapiens
  misc_RNA (1)...(19): siRNA sense strand
agacagcuccuucauacau

SEQ ID NO: 2101682 - RNA, 19 nt, Homo sapiens
  misc_RNA (1)...(19): siRNA sense strand
agcaugcucagcuuuauua

SEQ ID NO: 2101683 - RNA, 19 nt, Homo sapiens
  misc_RNA (1)...(19): siRNA sense strand
auaaugacccgaaugacaa

SEQ ID NO: 2101684 - RNA, 19 nt, Homo sapiens
  misc_RNA (1)...(19): siRNA sense strand
guggaaauaauuacguuga

SEQ ID NO: 2101685 - RNA, 19 nt, Homo sapiens
  misc_RNA (1)...(19): siRNA sense strand
gggagaaccuuuguaaacc

SEQ ID NO: 2101686 - RNA, 19 nt, Homo sapiens
  misc_RNA (1)...(19): siRNA sense strand
cacacaacguccugagguu

SEQ ID NO: 2101687 - RNA, 19 nt, Homo sapiens
  misc_RNA (1)...(19): siRNA sense strand
ggcggaagaacaucucaaa

SEQ ID NO: 2101688 - RNA, 19 nt, Homo sapiens
  misc_RNA (1)...(19): siRNA sense strand
acaacaagcaggcggaaga

SEQ ID NO: 2101689 - RNA, 19 nt, Homo sapiens
  misc_RNA (1)...(19): siRNA sense strand
aagaagcccugaaaacuug

SEQ ID NO: 2101690 - RNA, 19 nt, Homo sapiens
  misc_RNA (1)...(19): siRNA sense strand
gaaugacaagugaucuaau

SEQ ID NO: 2101691 - RNA, 19 nt, Homo sapiens
  misc_RNA (1)...(19): siRNA sense strand
guagagcagauuguccaua

SEQ ID NO: 2101692 - RNA, 19 nt, Homo sapiens
  misc_RNA (1)...(19): siRNA sense strand
ccugugaaauuugagaaug

SEQ ID NO: 2101693 - RNA, 19 nt, Homo sapiens
  misc_RNA (1)...(19): siRNA sense strand
auggguaccugauagagaa

SEQ ID NO: 2101694 - RNA, 19 nt, Homo sapiens
  misc_RNA (1)...(19): siRNA sense strand
aauaaugacccgaaugaca

SEQ ID NO: 2101695 - RNA, 19 nt, Homo sapiens
  misc_RNA (1)...(19): siRNA sense strand
ggggaccucuucauuauuc

SEQ ID NO: 2101696 - RNA, 19 nt, Homo sapiens
  misc_RNA (1)...(19): siRNA sense strand
gccacagagucuugaguuc

SEQ ID NO: 2101697 - RNA, 19 nt, Homo sapiens
  misc_RNA (1)...(19): siRNA sense strand
auaccaaucaggacauaaa

SEQ ID NO: 2101698 - RNA, 19 nt, Homo sapiens
  misc_RNA (1)...(19): siRNA sense strand
cuaugccugugaaauuuga

SEQ ID NO: 2101699 - RNA, 19 nt, Homo sapiens
  misc_RNA (1)...(19): siRNA sense strand
gugaaggccaguuugguau

SEQ ID NO: 2101700 - RNA, 19 nt, Homo sapiens
  misc_RNA (1)...(19): siRNA sense strand
aagacaauuuggaggcauu

SEQ ID NO: 2101701 - RNA, 19 nt, Homo sapiens
  misc_RNA (1)...(19): siRNA sense strand
uagccacuacacugaaaua

SEQ ID NO: 2101702 - RNA, 19 nt, Homo sapiens
  misc_RNA (1)...(19): siRNA sense strand
gagaaacuuguugcacuug

SEQ ID NO: 2101703 - RNA, 19 nt, Homo sapiens
  misc_RNA (1)...(19): siRNA sense strand
gaaauuugagaauggaacu

SEQ ID NO: 2101704 - RNA, 19 nt, Homo sapiens
  misc_RNA (1)...(19): siRNA sense strand
ggaaugagcagucaacuaa

SEQ ID NO: 2101705 - RNA, 19 nt, Homo sapiens
  misc_RNA (1)...(19): siRNA sense strand
ggagaagggugaagaggaa

SEQ ID NO: 2101706 - RNA, 19 nt, Homo sapiens
  misc_RNA (1)...(19): siRNA sense strand
gggagauccugcuaaauuu

SEQ ID NO: 2101707 - RNA, 19 nt, Homo sapiens
  misc_RNA (1)...(19): siRNA sense strand
ccacugagcuccaccagau

SEQ ID NO: 2101708 - RNA, 19 nt, Homo sapiens
  misc_RNA (1)...(19): siRNA sense strand
gaaguggaguucaccauca

SEQ ID NO: 2101709 - RNA, 19 nt, Homo sapiens
  misc_RNA (1)...(19): siRNA sense strand
gcaagcagccgaaggaaga

SEQ ID NO: 2101710 - RNA, 19 nt, Homo sapiens
  misc_RNA (1)...(19): siRNA sense strand
gaagagacggucccauuug

SEQ ID NO: 2101711 - RNA, 19 nt, Homo sapiens
  misc_RNA (1)...(19): siRNA sense strand
ggagagggaugagaaggaa

SEQ ID NO: 2101712 - RNA, 19 nt, Homo sapiens
  misc_RNA (1)...(19): siRNA sense strand
ucaacaacaucuccaagaa

SEQ ID NO: 2101713 - RNA, 19 nt, Homo sapiens
  misc_RNA (1)...(19): siRNA sense strand
gcucagugcccgugacaua

SEQ ID NO: 2101714 - RNA, 19 nt, Homo sapiens
  misc_RNA (1)...(19): siRNA sense strand
agaagcagcuccugguuga

SEQ ID NO: 2101715 - RNA, 19 nt, Homo sapiens
  misc_RNA (1)...(19): siRNA sense strand
gcaggacaauugccucuuc

SEQ ID NO: 2101716 - RNA, 19 nt, Homo sapiens
  misc_RNA (1)...(19): siRNA sense strand
gacauucucaccacaauaa

SEQ ID NO: 2101717 - RNA, 19 nt, Homo sapiens
  misc_RNA (1)...(19): siRNA sense strand
ggacaacaguuccauacac

SEQ ID NO: 2101718 - RNA, 19 nt, Homo sapiens
  misc_RNA (1)...(19): siRNA sense strand
gcagauuuaugagcuguau

SEQ ID NO: 2101719 - RNA, 19 nt, Homo sapiens
  misc_RNA (1)...(19): siRNA sense strand
cgggagauccugcuaaauu

SEQ ID NO: 2101720 - RNA, 19 nt, Homo sapiens
  misc_RNA (1)...(19): siRNA sense strand
ggaagaagaggagacagaa

SEQ ID NO: 2101721 - RNA, 19 nt, Homo sapiens
  misc_RNA (1)...(19): siRNA sense strand
gaagaagcagcuccugguu

SEQ ID NO: 2101722 - RNA, 19 nt, Homo sapiens
  misc_RNA (1)...(19): siRNA sense strand
gccgggagauccugcuaaa

SEQ ID NO: 2101723 - RNA, 19 nt, Homo sapiens
  misc_RNA (1)...(19): siRNA sense strand
ccagaccgauguccuguca

SEQ ID NO: 2101724 - RNA, 19 nt, Homo sapiens
  misc_RNA (1)...(19): siRNA sense strand
gggcagagcaagcagaguu

SEQ ID NO: 2101725 - RNA, 19 nt, Homo sapiens
  misc_RNA (1)...(19): siRNA sense strand
gguggugccuggacagaau

SEQ ID NO: 2101726 - RNA, 19 nt, Homo sapiens
  misc_RNA (1)...(19): siRNA sense strand
ugaagagacggucccauuu

SEQ ID NO: 2101727 - RNA, 19 nt, Homo sapiens
  misc_RNA (1)...(19): siRNA sense strand
ggugguggcuccugaagag

SEQ ID NO: 2101728 - RNA, 19 nt, Homo sapiens
  misc_RNA (1)...(19): siRNA sense strand
gcagccaaguccucuagau

SEQ ID NO: 2101729 - RNA, 19 nt, Homo sapiens
  misc_RNA (1)...(19): siRNA sense strand
gagcagaugguggaguuaa

SEQ ID NO: 2101730 - RNA, 19 nt, Homo sapiens
  misc_RNA (1)...(19): siRNA sense strand
gggaugagaaggaagagaa

SEQ ID NO: 2101731 - RNA, 19 nt, Homo sapiens
  misc_RNA (1)...(19): siRNA sense strand
ggaggaagaggaggaagaa

SEQ ID NO: 2101732 - RNA, 19 nt, Homo sapiens
  misc_RNA (1)...(19): siRNA sense strand
gacaacaguuccauacacu

SEQ ID NO: 2101733 - RNA, 19 nt, Homo sapiens
  misc_RNA (1)...(19): siRNA sense strand
gagaaggaagagaaaguga

SEQ ID NO: 2101734 - RNA, 19 nt, Homo sapiens
  misc_RNA (1)...(19): siRNA sense strand
caccaucaccgacaugaaa

SEQ ID NO: 2101735 - RNA, 19 nt, Homo sapiens
  misc_RNA (1)...(19): siRNA sense strand
uaugugcacuucaccucua

SEQ ID NO: 2101736 - RNA, 19 nt, Homo sapiens
  misc_RNA (1)...(19): siRNA sense strand
gagcaagcagaguugaauu

SEQ ID NO: 2101737 - RNA, 19 nt, Homo sapiens
  misc_RNA (1)...(19): siRNA sense strand
gaacaugauccagaacauc

SEQ ID NO: 2101738 - RNA, 19 nt, Homo sapiens
  misc_RNA (1)...(19): siRNA sense strand
gcaagaacaggacgagaag

SEQ ID NO: 2101739 - RNA, 19 nt, Homo sapiens
  misc_RNA (1)...(19): siRNA sense strand
ugaaugucauggugaagga

SEQ ID NO: 2101740 - RNA, 19 nt, Homo sapiens
  misc_RNA (1)...(19): siRNA sense strand
gacaugaaagugaagaaga

SEQ ID NO: 2101741 - RNA, 19 nt, Homo sapiens
  misc_RNA (1)...(19): siRNA sense strand
cuacagugcagaccuggua

SEQ ID NO: 2101742 - RNA, 19 nt, Homo sapiens
  misc_RNA (1)...(19): siRNA sense strand
ggacgugcccauacacauc

SEQ ID NO: 2101743 - RNA, 19 nt, Homo sapiens
  misc_RNA (1)...(19): siRNA sense strand
gagaaggaggccaucagaa

SEQ ID NO: 2101744 - RNA, 19 nt, Homo sapiens
  misc_RNA (1)...(19): siRNA sense strand
ggaagaggaggaagaagag

SEQ ID NO: 2101745 - RNA, 19 nt, Homo sapiens
  misc_RNA (1)...(19): siRNA sense strand
acaauugccucuucuccau

SEQ ID NO: 2101746 - RNA, 19 nt, Homo sapiens
  misc_RNA (1)...(19): siRNA sense strand
ccaagugaccagcggauug

SEQ ID NO: 2101747 - RNA, 19 nt, Homo sapiens
  misc_RNA (1)...(19): siRNA sense strand
caagugaccagcggauuga

SEQ ID NO: 2101748 - RNA, 19 nt, Homo sapiens
  misc_RNA (1)...(19): siRNA sense strand
ucaagaaccagcagucugu

SEQ ID NO: 2101749 - RNA, 19 nt, Homo sapiens
  misc_RNA (1)...(19): siRNA sense strand
aagagacggucccauuugu

SEQ ID NO: 2101750 - RNA, 19 nt, Homo sapiens
  misc_RNA (1)...(19): siRNA sense strand
ggagauccugcuaaauuuc

SEQ ID NO: 2101751 - RNA, 19 nt, Homo sapiens
  misc_RNA (1)...(19): siRNA sense strand
aggaggcgcugcuggagaa

SEQ ID NO: 2101752 - RNA, 19 nt, Homo sapiens
  misc_RNA (1)...(19): siRNA sense strand
cuaaguucauggaccagaa

SEQ ID NO: 2101753 - RNA, 19 nt, Homo sapiens
  misc_RNA (1)...(19): siRNA sense strand
ccgacuacuuucuggcuaa

SEQ ID NO: 2101754 - RNA, 19 nt, Homo sapiens
  misc_RNA (1)...(19): siRNA sense strand
gagauccugcuaaauuuca

SEQ ID NO: 2101755 - RNA, 19 nt, Homo sapiens
  misc_RNA (1)...(19): siRNA sense strand
gagaacaugauccagaaca

SEQ ID NO: 2101756 - RNA, 19 nt, Homo sapiens
  misc_RNA (1)...(19): siRNA sense strand
ggaugagaaggaagagaaa

SEQ ID NO: 2101757 - RNA, 19 nt, Homo sapiens
  misc_RNA (1)...(19): siRNA sense strand
aagaagaggagacagaaga

SEQ ID NO: 2101758 - RNA, 19 nt, Homo sapiens
  misc_RNA (1)...(19): siRNA sense strand
agaggaagaagaagaguug

SEQ ID NO: 2101759 - RNA, 19 nt, Homo sapiens
  misc_RNA (1)...(19): siRNA sense strand
gacacugccucccaucaag

SEQ ID NO: 2101760 - RNA, 19 nt, Homo sapiens
  misc_RNA (1)...(19): siRNA sense strand
ucauaggugugacagugaa

SEQ ID NO: 2101761 - RNA, 19 nt, Homo sapiens
  misc_RNA (1)...(19): siRNA sense strand
gccaaguccucuagauuuu

SEQ ID NO: 2101762 - RNA, 19 nt, Homo sapiens
  misc_RNA (1)...(19): siRNA sense strand
aggaggagauagaggagaa

SEQ ID NO: 2101763 - RNA, 19 nt, Homo sapiens
  misc_RNA (1)...(19): siRNA sense strand
gugaagaggaagaagaaga

SEQ ID NO: 2101764 - RNA, 19 nt, Homo sapiens
  misc_RNA (1)...(19): siRNA sense strand
aaugagcagucaacuaagu

SEQ ID NO: 2101765 - RNA, 19 nt, Homo sapiens
  misc_RNA (1)...(19): siRNA sense strand
cagugaagccggagcagaa

SEQ ID NO: 2101766 - RNA, 19 nt, Homo sapiens
  misc_RNA (1)...(19): siRNA sense strand
gggugaagaggaagaagaa

SEQ ID NO: 2101767 - RNA, 19 nt, Homo sapiens
  misc_RNA (1)...(19): siRNA sense strand
ugaagccggagcagaagua

SEQ ID NO: 2101768 - RNA, 19 nt, Homo sapiens
  misc_RNA (1)...(19): siRNA sense strand
caacaguuccauacacucu

SEQ ID NO: 2101769 - RNA, 19 nt, Homo sapiens
  misc_RNA (1)...(19): siRNA sense strand
cgagaaggaggccaucaga

SEQ ID NO: 2101770 - RNA, 19 nt, Homo sapiens
  misc_RNA (1)...(19): siRNA sense strand
gaaggaggagcaagaacag

SEQ ID NO: 2101771 - RNA, 19 nt, Homo sapiens
  misc_RNA (1)...(19): siRNA sense strand
gacagaagaggaggaguug

SEQ ID NO: 2101772 - RNA, 19 nt, Homo sapiens
  misc_RNA (1)...(19): siRNA sense strand
agacagaagaggaggaguu

SEQ ID NO: 2101773 - RNA, 19 nt, Homo sapiens
  misc_RNA (1)...(19): siRNA sense strand
gaagggugaagaggaagaa

SEQ ID NO: 2101774 - RNA, 19 nt, Homo sapiens
  misc_RNA (1)...(19): siRNA sense strand
agacagaccagagcacuau

SEQ ID NO: 2101775 - RNA, 19 nt, Homo sapiens
  misc_RNA (1)...(19): siRNA sense strand
uggagcaggugccguacuu

SEQ ID NO: 2101776 - RNA, 19 nt, Homo sapiens
  misc_RNA (1)...(19): siRNA sense strand
cagccaaguccucuagauu

SEQ ID NO: 2101777 - RNA, 19 nt, Homo sapiens
  misc_RNA (1)...(19): siRNA sense strand
agaccgauguccugucaca

SEQ ID NO: 2101778 - RNA, 19 nt, Homo sapiens
  misc_RNA (1)...(19): siRNA sense strand
ugaaggaggagcaagaaca

SEQ ID NO: 2101779 - RNA, 19 nt, Homo sapiens
  misc_RNA (1)...(19): siRNA sense strand
gaagaagaggagacagaag

SEQ ID NO: 2101780 - RNA, 19 nt, Homo sapiens
  misc_RNA (1)...(19): siRNA sense strand
ccaugaggcuguggaccaa

SEQ ID NO: 2101781 - RNA, 19 nt, Homo sapiens
  misc_RNA (1)...(19): siRNA sense strand
cugaagagacggucccauu

SEQ ID NO: 2101782 - RNA, 19 nt, Homo sapiens
  misc_RNA (1)...(19): siRNA sense strand
agccaaguccucuagauuu

SEQ ID NO: 2101783 - RNA, 19 nt, Homo sapiens
  misc_RNA (1)...(19): siRNA sense strand
aggagcagaugguggaguu

SEQ ID NO: 2101784 - RNA, 19 nt, Homo sapiens
  misc_RNA (1)...(19): siRNA sense strand
uauccaggguugggaaaga

SEQ ID NO: 2101785 - RNA, 19 nt, Homo sapiens
  misc_RNA (1)...(19): siRNA sense strand
acaugaaagugaagaagag

SEQ ID NO: 2101786 - RNA, 19 nt, Homo sapiens
  misc_RNA (1)...(19): siRNA sense strand
gucugugagucccaugaua

SEQ ID NO: 2101787 - RNA, 19 nt, Homo sapiens
  misc_RNA (1)...(19): siRNA sense strand
uuguggaucuucucaccua

SEQ ID NO: 2101788 - RNA, 19 nt, Homo sapiens
  misc_RNA (1)...(19): siRNA sense strand
agaaggaggccaucagaag

SEQ ID NO: 2101789 - RNA, 19 nt, Homo sapiens
  misc_RNA (1)...(19): siRNA sense strand
gauccugcuaaauuucaua

SEQ ID NO: 2101790 - RNA, 19 nt, Homo sapiens
  misc_RNA (1)...(19): siRNA sense strand
ugacauucucaccacaaua

SEQ ID NO: 2101791 - RNA, 19 nt, Homo sapiens
  misc_RNA (1)...(19): siRNA sense strand
ccaugccaccgacuacuuu

SEQ ID NO: 2101792 - RNA, 19 nt, Homo sapiens
  misc_RNA (1)...(19): siRNA sense strand
caacaacaucuccaagaac

SEQ ID NO: 2101793 - RNA, 19 nt, Homo sapiens
  misc_RNA (1)...(19): siRNA sense strand
cagugcccgugacauauga

SEQ ID NO: 2101794 - RNA, 19 nt, Homo sapiens
  misc_RNA (1)...(19): siRNA sense strand
ggaggaagaagaggagaca

SEQ ID NO: 2101795 - RNA, 19 nt, Homo sapiens
  misc_RNA (1)...(19): siRNA sense strand
gcagagcaagcagaguuga

SEQ ID NO: 2101796 - RNA, 19 nt, Homo sapiens
  misc_RNA (1)...(19): siRNA sense strand
aagacaagaacuuccauga

SEQ ID NO: 2101797 - RNA, 19 nt, Homo sapiens
  misc_RNA (1)...(19): siRNA sense strand
ugucacagguucaggaaaa

SEQ ID NO: 2101798 - RNA, 19 nt, Homo sapiens
  misc_RNA (1)...(19): siRNA sense strand
ccugugaaccugcgaggaa

SEQ ID NO: 2101799 - RNA, 19 nt, Homo sapiens
  misc_RNA (1)...(19): siRNA sense strand
cuaaauuucauagguguga

SEQ ID NO: 2101800 - RNA, 19 nt, Homo sapiens
  misc_RNA (1)...(19): siRNA sense strand
caagcagaguugaauucca

SEQ ID NO: 2101801 - RNA, 19 nt, Homo sapiens
  misc_RNA (1)...(19): siRNA sense strand
gagcccaugccaccgacua

SEQ ID NO: 2101802 - RNA, 19 nt, Homo sapiens
  misc_RNA (1)...(19): siRNA sense strand
uaaguucauggaccagaaa

SEQ ID NO: 2101803 - RNA, 19 nt, Homo sapiens
  misc_RNA (1)...(19): siRNA sense strand
ccugcuaaauuucauaggu

SEQ ID NO: 2101804 - RNA, 19 nt, Homo sapiens
  misc_RNA (1)...(19): siRNA sense strand
ggaaugagcagucaacuaa

SEQ ID NO: 2101805 - RNA, 19 nt, Homo sapiens
  misc_RNA (1)...(19): siRNA sense strand
ggagaagggugaagaggaa

SEQ ID NO: 2101806 - RNA, 19 nt, Homo sapiens
  misc_RNA (1)...(19): siRNA sense strand
gggagauccugcuaaauuu

SEQ ID NO: 2101807 - RNA, 19 nt, Homo sapiens
  misc_RNA (1)...(19): siRNA sense strand
ccacugagcuccaccagau

SEQ ID NO: 2101808 - RNA, 19 nt, Homo sapiens
  misc_RNA (1)...(19): siRNA sense strand
gaaguggaguucaccauca

SEQ ID NO: 2101809 - RNA, 19 nt, Homo sapiens
  misc_RNA (1)...(19): siRNA sense strand
gcaagcagccgaaggaaga

SEQ ID NO: 2101810 - RNA, 19 nt, Homo sapiens
  misc_RNA (1)...(19): siRNA sense strand
gaagagacggucccauuug

SEQ ID NO: 2101811 - RNA, 19 nt, Homo sapiens
  misc_RNA (1)...(19): siRNA sense strand
ggagagggaugagaaggaa

SEQ ID NO: 2101812 - RNA, 19 nt, Homo sapiens
  misc_RNA (1)...(19): siRNA sense strand
ucaacaacaucuccaagaa

SEQ ID NO: 2101813 - RNA, 19 nt, Homo sapiens
  misc_RNA (1)...(19): siRNA sense strand
gcucagugcccgugacaua

SEQ ID NO: 2101814 - RNA, 19 nt, Homo sapiens
  misc_RNA (1)...(19): siRNA sense strand
agaagcagcuccugguuga

SEQ ID NO: 2101815 - RNA, 19 nt, Homo sapiens
  misc_RNA (1)...(19): siRNA sense strand
gcaggacaauugccucuuc

SEQ ID NO: 2101816 - RNA, 19 nt, Homo sapiens
  misc_RNA (1)...(19): siRNA sense strand
gacauucucaccacaauaa

SEQ ID NO: 2101817 - RNA, 19 nt, Homo sapiens
  misc_RNA (1)...(19): siRNA sense strand
ggacaacaguuccauacac

SEQ ID NO: 2101818 - RNA, 19 nt, Homo sapiens
  misc_RNA (1)...(19): siRNA sense strand
gcagauuuaugagcuguau

SEQ ID NO: 2101819 - RNA, 19 nt, Homo sapiens
  misc_RNA (1)...(19): siRNA sense strand
cgggagauccugcuaaauu

SEQ ID NO: 2101820 - RNA, 19 nt, Homo sapiens
  misc_RNA (1)...(19): siRNA sense strand
ggaagaagaggagacagaa

SEQ ID NO: 2101821 - RNA, 19 nt, Homo sapiens
  misc_RNA (1)...(19): siRNA sense strand
gaagaagcagcuccugguu

SEQ ID NO: 2101822 - RNA, 19 nt, Homo sapiens
  misc_RNA (1)...(19): siRNA sense strand
gccgggagauccugcuaaa

SEQ ID NO: 2101823 - RNA, 19 nt, Homo sapiens
  misc_RNA (1)...(19): siRNA sense strand
ccagaccgauguccuguca

SEQ ID NO: 2101824 - RNA, 19 nt, Homo sapiens
  misc_RNA (1)...(19): siRNA sense strand
gggcagagcaagcagaguu

SEQ ID NO: 2101825 - RNA, 19 nt, Homo sapiens
  misc_RNA (1)...(19): siRNA sense strand
gguggugccuggacagaau

SEQ ID NO: 2101826 - RNA, 19 nt, Homo sapiens
  misc_RNA (1)...(19): siRNA sense strand
ugaagagacggucccauuu

SEQ ID NO: 2101827 - RNA, 19 nt, Homo sapiens
  misc_RNA (1)...(19): siRNA sense strand
ggugguggcuccugaagag

SEQ ID NO: 2101828 - RNA, 19 nt, Homo sapiens
  misc_RNA (1)...(19): siRNA sense strand
gcagccaaguccucuagau

SEQ ID NO: 2101829 - RNA, 19 nt, Homo sapiens
  misc_RNA (1)...(19): siRNA sense strand
gagcagaugguggaguuaa

SEQ ID NO: 2101830 - RNA, 19 nt, Homo sapiens
  misc_RNA (1)...(19): siRNA sense strand
gggaugagaaggaagagaa

SEQ ID NO: 2101831 - RNA, 19 nt, Homo sapiens
  misc_RNA (1)...(19): siRNA sense strand
ggaggaagaggaggaagaa

SEQ ID NO: 2101832 - RNA, 19 nt, Homo sapiens
  misc_RNA (1)...(19): siRNA sense strand
gacaacaguuccauacacu

SEQ ID NO: 2101833 - RNA, 19 nt, Homo sapiens
  misc_RNA (1)...(19): siRNA sense strand
gagaaggaagagaaaguga

SEQ ID NO: 2101834 - RNA, 19 nt, Homo sapiens
  misc_RNA (1)...(19): siRNA sense strand
caccaucaccgacaugaaa

SEQ ID NO: 2101835 - RNA, 19 nt, Homo sapiens
  misc_RNA (1)...(19): siRNA sense strand
uaugugcacuucaccucua

SEQ ID NO: 2101836 - RNA, 19 nt, Homo sapiens
  misc_RNA (1)...(19): siRNA sense strand
gagcaagcagaguugaauu

SEQ ID NO: 2101837 - RNA, 19 nt, Homo sapiens
  misc_RNA (1)...(19): siRNA sense strand
gaacaugauccagaacauc

SEQ ID NO: 2101838 - RNA, 19 nt, Homo sapiens
  misc_RNA (1)...(19): siRNA sense strand
gcaagaacaggacgagaag

SEQ ID NO: 2101839 - RNA, 19 nt, Homo sapiens
  misc_RNA (1)...(19): siRNA sense strand
ugaaugucauggugaagga

SEQ ID NO: 2101840 - RNA, 19 nt, Homo sapiens
  misc_RNA (1)...(19): siRNA sense strand
gacaugaaagugaagaaga

SEQ ID NO: 2101841 - RNA, 19 nt, Homo sapiens
  misc_RNA (1)...(19): siRNA sense strand
cuacagugcagaccuggua

SEQ ID NO: 2101842 - RNA, 19 nt, Homo sapiens
  misc_RNA (1)...(19): siRNA sense strand
ggacgugcccauacacauc

SEQ ID NO: 2101843 - RNA, 19 nt, Homo sapiens
  misc_RNA (1)...(19): siRNA sense strand
gagaaggaggccaucagaa

SEQ ID NO: 2101844 - RNA, 19 nt, Homo sapiens
  misc_RNA (1)...(19): siRNA sense strand
ggaagaggaggaagaagag

SEQ ID NO: 2101845 - RNA, 19 nt, Homo sapiens
  misc_RNA (1)...(19): siRNA sense strand
acaauugccucuucuccau

SEQ ID NO: 2101846 - RNA, 19 nt, Homo sapiens
  misc_RNA (1)...(19): siRNA sense strand
ccaagugaccagcggauug

SEQ ID NO: 2101847 - RNA, 19 nt, Homo sapiens
  misc_RNA (1)...(19): siRNA sense strand
caagugaccagcggauuga

SEQ ID NO: 2101848 - RNA, 19 nt, Homo sapiens
  misc_RNA (1)...(19): siRNA sense strand
ucaagaaccagcagucugu

SEQ ID NO: 2101849 - RNA, 19 nt, Homo sapiens
  misc_RNA (1)...(19): siRNA sense strand
aagagacggucccauuugu

SEQ ID NO: 2101850 - RNA, 19 nt, Homo sapiens
  misc_RNA (1)...(19): siRNA sense strand
ggagauccugcuaaauuuc

SEQ ID NO: 2101851 - RNA, 19 nt, Homo sapiens
  misc_RNA (1)...(19): siRNA sense strand
aggaggcgcugcuggagaa

SEQ ID NO: 2101852 - RNA, 19 nt, Homo sapiens
  misc_RNA (1)...(19): siRNA sense strand
cuaaguucauggaccagaa

SEQ ID NO: 2101853 - RNA, 19 nt, Homo sapiens
  misc_RNA (1)...(19): siRNA sense strand
ccgacuacuuucuggcuaa

SEQ ID NO: 2101854 - RNA, 19 nt, Homo sapiens
  misc_RNA (1)...(19): siRNA sense strand
gagauccugcuaaauuuca

SEQ ID NO: 2101855 - RNA, 19 nt, Homo sapiens
  misc_RNA (1)...(19): siRNA sense strand
gagaacaugauccagaaca

SEQ ID NO: 2101856 - RNA, 19 nt, Homo sapiens
  misc_RNA (1)...(19): siRNA sense strand
ggaugagaaggaagagaaa

SEQ ID NO: 2101857 - RNA, 19 nt, Homo sapiens
  misc_RNA (1)...(19): siRNA sense strand
aagaagaggagacagaaga

SEQ ID NO: 2101858 - RNA, 19 nt, Homo sapiens
  misc_RNA (1)...(19): siRNA sense strand
agaggaagaagaagaguug

SEQ ID NO: 2101859 - RNA, 19 nt, Homo sapiens
  misc_RNA (1)...(19): siRNA sense strand
gacacugccucccaucaag

SEQ ID NO: 2101860 - RNA, 19 nt, Homo sapiens
  misc_RNA (1)...(19): siRNA sense strand
ucauaggugugacagugaa

SEQ ID NO: 2101861 - RNA, 19 nt, Homo sapiens
  misc_RNA (1)...(19): siRNA sense strand
gccaaguccucuagauuuu

SEQ ID NO: 2101862 - RNA, 19 nt, Homo sapiens
  misc_RNA (1)...(19): siRNA sense strand
aggaggagauagaggagaa

SEQ ID NO: 2101863 - RNA, 19 nt, Homo sapiens
  misc_RNA (1)...(19): siRNA sense strand
gugaagaggaagaagaaga

SEQ ID NO: 2101864 - RNA, 19 nt, Homo sapiens
  misc_RNA (1)...(19): siRNA sense strand
aaugagcagucaacuaagu

SEQ ID NO: 2101865 - RNA, 19 nt, Homo sapiens
  misc_RNA (1)...(19): siRNA sense strand
cagugaagccggagcagaa

SEQ ID NO: 2101866 - RNA, 19 nt, Homo sapiens
  misc_RNA (1)...(19): siRNA sense strand
gggugaagaggaagaagaa

SEQ ID NO: 2101867 - RNA, 19 nt, Homo sapiens
  misc_RNA (1)...(19): siRNA sense strand
ugaagccggagcagaagua

SEQ ID NO: 2101868 - RNA, 19 nt, Homo sapiens
  misc_RNA (1)...(19): siRNA sense strand
caacaguuccauacacucu

SEQ ID NO: 2101869 - RNA, 19 nt, Homo sapiens
  misc_RNA (1)...(19): siRNA sense strand
cgagaaggaggccaucaga

SEQ ID NO: 2101870 - RNA, 19 nt, Homo sapiens
  misc_RNA (1)...(19): siRNA sense strand
gaaggaggagcaagaacag

SEQ ID NO: 2101871 - RNA, 19 nt, Homo sapiens
  misc_RNA (1)...(19): siRNA sense strand
gacagaagaggaggaguug

SEQ ID NO: 2101872 - RNA, 19 nt, Homo sapiens
  misc_RNA (1)...(19): siRNA sense strand
agacagaagaggaggaguu

SEQ ID NO: 2101873 - RNA, 19 nt, Homo sapiens
  misc_RNA (1)...(19): siRNA sense strand
gaagggugaagaggaagaa

SEQ ID NO: 2101874 - RNA, 19 nt, Homo sapiens
  misc_RNA (1)...(19): siRNA sense strand
agacagaccagagcacuau

SEQ ID NO: 2101875 - RNA, 19 nt, Homo sapiens
  misc_RNA (1)...(19): siRNA sense strand
uggagcaggugccguacuu

SEQ ID NO: 2101876 - RNA, 19 nt, Homo sapiens
  misc_RNA (1)...(19): siRNA sense strand
cagccaaguccucuagauu

SEQ ID NO: 2101877 - RNA, 19 nt, Homo sapiens
  misc_RNA (1)...(19): siRNA sense strand
agaccgauguccugucaca

SEQ ID NO: 2101878 - RNA, 19 nt, Homo sapiens
  misc_RNA (1)...(19): siRNA sense strand
ugaaggaggagcaagaaca

SEQ ID NO: 2101879 - RNA, 19 nt, Homo sapiens
  misc_RNA (1)...(19): siRNA sense strand
gaagaagaggagacagaag

SEQ ID NO: 2101880 - RNA, 19 nt, Homo sapiens
  misc_RNA (1)...(19): siRNA sense strand
ccaugaggcuguggaccaa

SEQ ID NO: 2101881 - RNA, 19 nt, Homo sapiens
  misc_RNA (1)...(19): siRNA sense strand
cugaagagacggucccauu

SEQ ID NO: 2101882 - RNA, 19 nt, Homo sapiens
  misc_RNA (1)...(19): siRNA sense strand
agccaaguccucuagauuu

SEQ ID NO: 2101883 - RNA, 19 nt, Homo sapiens
  misc_RNA (1)...(19): siRNA sense strand
aggagcagaugguggaguu

SEQ ID NO: 2101884 - RNA, 19 nt, Homo sapiens
  misc_RNA (1)...(19): siRNA sense strand
uauccaggguugggaaaga

SEQ ID NO: 2101885 - RNA, 19 nt, Homo sapiens
  misc_RNA (1)...(19): siRNA sense strand
acaugaaagugaagaagag

SEQ ID NO: 2101886 - RNA, 19 nt, Homo sapiens
  misc_RNA (1)...(19): siRNA sense strand
gucugugagucccaugaua

SEQ ID NO: 2101887 - RNA, 19 nt, Homo sapiens
  misc_RNA (1)...(19): siRNA sense strand
uuguggaucuucucaccua

SEQ ID NO: 2101888 - RNA, 19 nt, Homo sapiens
  misc_RNA (1)...(19): siRNA sense strand
agaaggaggccaucagaag

SEQ ID NO: 2101889 - RNA, 19 nt, Homo sapiens
  misc_RNA (1)...(19): siRNA sense strand
gauccugcuaaauuucaua

SEQ ID NO: 2101890 - RNA, 19 nt, Homo sapiens
  misc_RNA (1)...(19): siRNA sense strand
ugacauucucaccacaaua

SEQ ID NO: 2101891 - RNA, 19 nt, Homo sapiens
  misc_RNA (1)...(19): siRNA sense strand
ccaugccaccgacuacuuu

SEQ ID NO: 2101892 - RNA, 19 nt, Homo sapiens
  misc_RNA (1)...(19): siRNA sense strand
caacaacaucuccaagaac

SEQ ID NO: 2101893 - RNA, 19 nt, Homo sapiens
  misc_RNA (1)...(19): siRNA sense strand
cagugcccgugacauauga

SEQ ID NO: 2101894 - RNA, 19 nt, Homo sapiens
  misc_RNA (1)...(19): siRNA sense strand
ggaggaagaagaggagaca

SEQ ID NO: 2101895 - RNA, 19 nt, Homo sapiens
  misc_RNA (1)...(19): siRNA sense strand
gcagagcaagcagaguuga

SEQ ID NO: 2101896 - RNA, 19 nt, Homo sapiens
  misc_RNA (1)...(19): siRNA sense strand
aagacaagaacuuccauga

SEQ ID NO: 2101897 - RNA, 19 nt, Homo sapiens
  misc_RNA (1)...(19): siRNA sense strand
ugucacagguucaggaaaa

SEQ ID NO: 2101898 - RNA, 19 nt, Homo sapiens
  misc_RNA (1)...(19): siRNA sense strand
ccugugaaccugcgaggaa

SEQ ID NO: 2101899 - RNA, 19 nt, Homo sapiens
  misc_RNA (1)...(19): siRNA sense strand
cuaaauuucauagguguga

SEQ ID NO: 2101900 - RNA, 19 nt, Homo sapiens
  misc_RNA (1)...(19): siRNA sense strand
caagcagaguugaauucca

SEQ ID NO: 2101901 - RNA, 19 nt, Homo sapiens
  misc_RNA (1)...(19): siRNA sense strand
gagcccaugccaccgacua

SEQ ID NO: 2101902 - RNA, 19 nt, Homo sapiens
  misc_RNA (1)...(19): siRNA sense strand
uaaguucauggaccagaaa

SEQ ID NO: 2101903 - RNA, 19 nt, Homo sapiens
  misc_RNA (1)...(19): siRNA sense strand
ccugcuaaauuucauaggu

SEQ ID NO: 2101904 - RNA, 19 nt, Homo sapiens
  misc_RNA (1)...(19): siRNA sense strand
cagaggagucccugcauua

SEQ ID NO: 2101905 - RNA, 19 nt, Homo sapiens
  misc_RNA (1)...(19): siRNA sense strand
gggagggugugcauuggua

SEQ ID NO: 2101906 - RNA, 19 nt, Homo sapiens
  misc_RNA (1)...(19): siRNA sense strand
aggagucccugcauuauga

SEQ ID NO: 2101907 - RNA, 19 nt, Homo sapiens
  misc_RNA (1)...(19): siRNA sense strand
caaaggcccacgugcauug

SEQ ID NO: 2101908 - RNA, 19 nt, Homo sapiens
  misc_RNA (1)...(19): siRNA sense strand
ucagaggagucccugcauu

SEQ ID NO: 2101909 - RNA, 19 nt, Homo sapiens
  misc_RNA (1)...(19): siRNA sense strand
caauuacaauccagacauc

SEQ ID NO: 2101910 - RNA, 19 nt, Homo sapiens
  misc_RNA (1)...(19): siRNA sense strand
gcaaggaccgccugaacuc

SEQ ID NO: 2101911 - RNA, 19 nt, Homo sapiens
  misc_RNA (1)...(19): siRNA sense strand
gcuuugacuggguguauua

SEQ ID NO: 2101912 - RNA, 19 nt, Homo sapiens
  misc_RNA (1)...(19): siRNA sense strand
gaggagucccugcauuaug

SEQ ID NO: 2101913 - RNA, 19 nt, Homo sapiens
  misc_RNA (1)...(19): siRNA sense strand
cuucagcgaugugcucauu

SEQ ID NO: 2101914 - RNA, 19 nt, Homo sapiens
  misc_RNA (1)...(19): siRNA sense strand
ugaacucgcuggcuaucuc

SEQ ID NO: 2101915 - RNA, 19 nt, Homo sapiens
  misc_RNA (1)...(19): siRNA sense strand
ucagaccgcgaccgcaaua

SEQ ID NO: 2101916 - RNA, 19 nt, Homo sapiens
  misc_RNA (1)...(19): siRNA sense strand
ccgcucaccugcucuuuac

SEQ ID NO: 2101917 - RNA, 19 nt, Homo sapiens
  misc_RNA (1)...(19): siRNA sense strand
gugcauugcuccgucaagu

SEQ ID NO: 2101918 - RNA, 19 nt, Homo sapiens
  misc_RNA (1)...(19): siRNA sense strand
cguggcagcugucucuaca

SEQ ID NO: 2101919 - RNA, 19 nt, Homo sapiens
  misc_RNA (1)...(19): siRNA sense strand
cagacaucaucuucaagga

SEQ ID NO: 2101920 - RNA, 19 nt, Homo sapiens
  misc_RNA (1)...(19): siRNA sense strand
uggcagcugucucuacaca

SEQ ID NO: 2101921 - RNA, 19 nt, Homo sapiens
  misc_RNA (1)...(19): siRNA sense strand
ccaauuacaauccagacau

SEQ ID NO: 2101922 - RNA, 19 nt, Homo sapiens
  misc_RNA (1)...(19): siRNA sense strand
ucagcgaugugcucauuuu

SEQ ID NO: 2101923 - RNA, 19 nt, Homo sapiens
  misc_RNA (1)...(19): siRNA sense strand
gggcgucuccugcuagaag

SEQ ID NO: 2101924 - RNA, 19 nt, Homo sapiens
  misc_RNA (1)...(19): siRNA sense strand
ucacaaagcaugggacacu

SEQ ID NO: 2101925 - RNA, 19 nt, Homo sapiens
  misc_RNA (1)...(19): siRNA sense strand
gaccgcgaccgcaauaagu

SEQ ID NO: 2101926 - RNA, 19 nt, Homo sapiens
  misc_RNA (1)...(19): siRNA sense strand
ccaaugugcccgagaagac

SEQ ID NO: 2101927 - RNA, 19 nt, Homo sapiens
  misc_RNA (1)...(19): siRNA sense strand
ucaaaggcccacgugcauu

SEQ ID NO: 2101928 - RNA, 19 nt, Homo sapiens
  misc_RNA (1)...(19): siRNA sense strand
auccagacaucaucuucaa

SEQ ID NO: 2101929 - RNA, 19 nt, Homo sapiens
  misc_RNA (1)...(19): siRNA sense strand
gcucuuuacggcugacaau

SEQ ID NO: 2101930 - RNA, 19 nt, Homo sapiens
  misc_RNA (1)...(19): siRNA sense strand
ggcuuugacuggguguauu

SEQ ID NO: 2101931 - RNA, 19 nt, Homo sapiens
  misc_RNA (1)...(19): siRNA sense strand
cuggcuaucucggugauga

SEQ ID NO: 2101932 - RNA, 19 nt, Homo sapiens
  misc_RNA (1)...(19): siRNA sense strand
gggaagagcucaagaguaa

SEQ ID NO: 2101933 - RNA, 19 nt, Homo sapiens
  misc_RNA (1)...(19): siRNA sense strand
ggacucagcugcccucaca

SEQ ID NO: 2101934 - RNA, 19 nt, Homo sapiens
  misc_RNA (1)...(19): siRNA sense strand
gaagauggaugggcgcaaa

SEQ ID NO: 2101935 - RNA, 19 nt, Homo sapiens
  misc_RNA (1)...(19): siRNA sense strand
ccacuacgcuucucagagu

SEQ ID NO: 2101936 - RNA, 19 nt, Homo sapiens
  misc_RNA (1)...(19): siRNA sense strand
guacaaggaugggcuggaa

SEQ ID NO: 2101937 - RNA, 19 nt, Homo sapiens
  misc_RNA (1)...(19): siRNA sense strand
gaguacagccugggcauua

SEQ ID NO: 2101938 - RNA, 19 nt, Homo sapiens
  misc_RNA (1)...(19): siRNA sense strand
gaagugggcucugaagacu

SEQ ID NO: 2101939 - RNA, 19 nt, Homo sapiens
  misc_RNA (1)...(19): siRNA sense strand
cuucauccauggugucaua

SEQ ID NO: 2101940 - RNA, 19 nt, Homo sapiens
  misc_RNA (1)...(19): siRNA sense strand
ccaggacaguggcgaguuu

SEQ ID NO: 2101941 - RNA, 19 nt, Homo sapiens
  misc_RNA (1)...(19): siRNA sense strand
gccaucaccuucaauguca

SEQ ID NO: 2101942 - RNA, 19 nt, Homo sapiens
  misc_RNA (1)...(19): siRNA sense strand
gugcugagcugugaacugu

SEQ ID NO: 2101943 - RNA, 19 nt, Homo sapiens
  misc_RNA (1)...(19): siRNA sense strand
uggaggaugugcagguaua

SEQ ID NO: 2101944 - RNA, 19 nt, Homo sapiens
  misc_RNA (1)...(19): siRNA sense strand
gcacauccaccgccucuuc

SEQ ID NO: 2101945 - RNA, 19 nt, Homo sapiens
  misc_RNA (1)...(19): siRNA sense strand
guacaaggaugggcagaag

SEQ ID NO: 2101946 - RNA, 19 nt, Homo sapiens
  misc_RNA (1)...(19): siRNA sense strand
ggaugugugucucgaagug

SEQ ID NO: 2101947 - RNA, 19 nt, Homo sapiens
  misc_RNA (1)...(19): siRNA sense strand
ggucucaggugcgcuggua

SEQ ID NO: 2101948 - RNA, 19 nt, Homo sapiens
  misc_RNA (1)...(19): siRNA sense strand
ucaaagggcccauccugaa

SEQ ID NO: 2101949 - RNA, 19 nt, Homo sapiens
  misc_RNA (1)...(19): siRNA sense strand
ggcgaguacuugugugaaa

SEQ ID NO: 2101950 - RNA, 19 nt, Homo sapiens
  misc_RNA (1)...(19): siRNA sense strand
gcgaguugcugguggugaa

SEQ ID NO: 2101951 - RNA, 19 nt, Homo sapiens
  misc_RNA (1)...(19): siRNA sense strand
gcagccagacucauuguga

SEQ ID NO: 2101952 - RNA, 19 nt, Homo sapiens
  misc_RNA (1)...(19): siRNA sense strand
ggauugccgugcuggaaug

SEQ ID NO: 2101953 - RNA, 19 nt, Homo sapiens
  misc_RNA (1)...(19): siRNA sense strand
ugugugaaauugacgauga

SEQ ID NO: 2101954 - RNA, 19 nt, Homo sapiens
  misc_RNA (1)...(19): siRNA sense strand
ugccauaacuuccgagugu

SEQ ID NO: 2101955 - RNA, 19 nt, Homo sapiens
  misc_RNA (1)...(19): siRNA sense strand
guaccugguuccuuaaugg

SEQ ID NO: 2101956 - RNA, 19 nt, Homo sapiens
  misc_RNA (1)...(19): siRNA sense strand
gaagcucgacguccuggaa

SEQ ID NO: 2101957 - RNA, 19 nt, Homo sapiens
  misc_RNA (1)...(19): siRNA sense strand
gaagggaagaaacacauuc

SEQ ID NO: 2101958 - RNA, 19 nt, Homo sapiens
  misc_RNA (1)...(19): siRNA sense strand
ccacuucucucaguaccuu

SEQ ID NO: 2101959 - RNA, 19 nt, Homo sapiens
  misc_RNA (1)...(19): siRNA sense strand
ggguggugcugacuuguga

SEQ ID NO: 2101960 - RNA, 19 nt, Homo sapiens
  misc_RNA (1)...(19): siRNA sense strand
ggauggcccuggacgaagu

SEQ ID NO: 2101961 - RNA, 19 nt, Homo sapiens
  misc_RNA (1)...(19): siRNA sense strand
gagaugagugugccuacuu

SEQ ID NO: 2101962 - RNA, 19 nt, Homo sapiens
  misc_RNA (1)...(19): siRNA sense strand
ggaagggaagaaacacauu

SEQ ID NO: 2101963 - RNA, 19 nt, Homo sapiens
  misc_RNA (1)...(19): siRNA sense strand
gguucaagccgcaucuuaa

SEQ ID NO: 2101964 - RNA, 19 nt, Homo sapiens
  misc_RNA (1)...(19): siRNA sense strand
ggagaugacucggccuucu

SEQ ID NO: 2101965 - RNA, 19 nt, Homo sapiens
  misc_RNA (1)...(19): siRNA sense strand
gugcugaccugugagcuau

SEQ ID NO: 2101966 - RNA, 19 nt, Homo sapiens
  misc_RNA (1)...(19): siRNA sense strand
ccacgguucugcucaccuu

SEQ ID NO: 2101967 - RNA, 19 nt, Homo sapiens
  misc_RNA (1)...(19): siRNA sense strand
gaaacacauucuggugcuu

SEQ ID NO: 2101968 - RNA, 19 nt, Homo sapiens
  misc_RNA (1)...(19): siRNA sense strand
guacuugugugaaauugac

SEQ ID NO: 2101969 - RNA, 19 nt, Homo sapiens
  misc_RNA (1)...(19): siRNA sense strand
gaaggcagacgaugauggu

SEQ ID NO: 2101970 - RNA, 19 nt, Homo sapiens
  misc_RNA (1)...(19): siRNA sense strand
aaacacauucuggugcuua

SEQ ID NO: 2101971 - RNA, 19 nt, Homo sapiens
  misc_RNA (1)...(19): siRNA sense strand
gcaguuccuugcucuagag

SEQ ID NO: 2101972 - RNA, 19 nt, Homo sapiens
  misc_RNA (1)...(19): siRNA sense strand
gcugaugugugaacugucu

SEQ ID NO: 2101973 - RNA, 19 nt, Homo sapiens
  misc_RNA (1)...(19): siRNA sense strand
uggcaggucuggaggaugu

SEQ ID NO: 2101974 - RNA, 19 nt, Homo sapiens
  misc_RNA (1)...(19): siRNA sense strand
agagaaugcugugcugcua

SEQ ID NO: 2101975 - RNA, 19 nt, Homo sapiens
  misc_RNA (1)...(19): siRNA sense strand
ggaaguggaggcaucagau

SEQ ID NO: 2101976 - RNA, 19 nt, Homo sapiens
  misc_RNA (1)...(19): siRNA sense strand
gagauggcccagaaugguu

SEQ ID NO: 2101977 - RNA, 19 nt, Homo sapiens
  misc_RNA (1)...(19): siRNA sense strand
gcgcaaacaccgucugauc

SEQ ID NO: 2101978 - RNA, 19 nt, Homo sapiens
  misc_RNA (1)...(19): siRNA sense strand
guacaaggacgggcuggaa

SEQ ID NO: 2101979 - RNA, 19 nt, Homo sapiens
  misc_RNA (1)...(19): siRNA sense strand
gcgaguacuugugugaaau

SEQ ID NO: 2101980 - RNA, 19 nt, Homo sapiens
  misc_RNA (1)...(19): siRNA sense strand
cggcgucacuguccaagau

SEQ ID NO: 2101981 - RNA, 19 nt, Homo sapiens
  misc_RNA (1)...(19): siRNA sense strand
ggcaggaagugggcucuga

SEQ ID NO: 2101982 - RNA, 19 nt, Homo sapiens
  misc_RNA (1)...(19): siRNA sense strand
ggaagugggcucugaagac

SEQ ID NO: 2101983 - RNA, 19 nt, Homo sapiens
  misc_RNA (1)...(19): siRNA sense strand
gcaaguacgagcagaucga

SEQ ID NO: 2101984 - RNA, 19 nt, Homo sapiens
  misc_RNA (1)...(19): siRNA sense strand
gucccuggcucuacuggaa

SEQ ID NO: 2101985 - RNA, 19 nt, Homo sapiens
  misc_RNA (1)...(19): siRNA sense strand
ggacagccgcaucuuccuu

SEQ ID NO: 2101986 - RNA, 19 nt, Homo sapiens
  misc_RNA (1)...(19): siRNA sense strand
guguggugcugauguguga

SEQ ID NO: 2101987 - RNA, 19 nt, Homo sapiens
  misc_RNA (1)...(19): siRNA sense strand
cauauacccucgcgaugag

SEQ ID NO: 2101988 - RNA, 19 nt, Homo sapiens
  misc_RNA (1)...(19): siRNA sense strand
gguaccugguuccuuaaug

SEQ ID NO: 2101989 - RNA, 19 nt, Homo sapiens
  misc_RNA (1)...(19): siRNA sense strand
gugcgucgcuggagaugag

SEQ ID NO: 2101990 - RNA, 19 nt, Homo sapiens
  misc_RNA (1)...(19): siRNA sense strand
gcccugcgguaccguauag

SEQ ID NO: 2101991 - RNA, 19 nt, Homo sapiens
  misc_RNA (1)...(19): siRNA sense strand
ggcagacgaugaugguauc

SEQ ID NO: 2101992 - RNA, 19 nt, Homo sapiens
  misc_RNA (1)...(19): siRNA sense strand
ggaaggccaggaugugugu

SEQ ID NO: 2101993 - RNA, 19 nt, Homo sapiens
  misc_RNA (1)...(19): siRNA sense strand
ggagauggcccagaauggu

SEQ ID NO: 2101994 - RNA, 19 nt, Homo sapiens
  misc_RNA (1)...(19): siRNA sense strand
gugcuggaauguaaaguac

SEQ ID NO: 2101995 - RNA, 19 nt, Homo sapiens
  misc_RNA (1)...(19): siRNA sense strand
gugcugaugugugaacugu

SEQ ID NO: 2101996 - RNA, 19 nt, Homo sapiens
  misc_RNA (1)...(19): siRNA sense strand
gcaggaagugggcucugaa

SEQ ID NO: 2101997 - RNA, 19 nt, Homo sapiens
  misc_RNA (1)...(19): siRNA sense strand
gaguacuugugugaaauug

SEQ ID NO: 2101998 - RNA, 19 nt, Homo sapiens
  misc_RNA (1)...(19): siRNA sense strand
guguggugcugaccuguga

SEQ ID NO: 2101999 - RNA, 19 nt, Homo sapiens
  misc_RNA (1)...(19): siRNA sense strand
agacgaugaugguaucuac

SEQ ID NO: 2102000 - RNA, 19 nt, Homo sapiens
  misc_RNA (1)...(19): siRNA sense strand
ucaccuggcugcgcaaugg

SEQ ID NO: 2102001 - RNA, 19 nt, Homo sapiens
  misc_RNA (1)...(19): siRNA sense strand
gggcaagcacgccaaguuc

SEQ ID NO: 2102002 - RNA, 19 nt, Homo sapiens
  misc_RNA (1)...(19): siRNA sense strand
gaagagcucaagaguaacg

SEQ ID NO: 2102003 - RNA, 19 nt, Homo sapiens
  misc_RNA (1)...(19): siRNA sense strand
gacuaccgcuuccgcaucu

SEQ ID NO: 2102004 - RNA, 19 nt, Homo sapiens
  misc_RNA (1)...(19): siRNA sense strand
uugccgugcuggaauguaa

SEQ ID NO: 2102005 - RNA, 19 nt, Homo sapiens
  misc_RNA (1)...(19): siRNA sense strand
gacaggaagggaagaaaca

SEQ ID NO: 2102006 - RNA, 19 nt, Homo sapiens
  misc_RNA (1)...(19): siRNA sense strand
guuccuugcucuagagaca

SEQ ID NO: 2102007 - RNA, 19 nt, Homo sapiens
  misc_RNA (1)...(19): siRNA sense strand
gagaugacucggccuucuu

SEQ ID NO: 2102008 - RNA, 19 nt, Homo sapiens
  misc_RNA (1)...(19): siRNA sense strand
ucguggugcuggagaauga

SEQ ID NO: 2102009 - RNA, 19 nt, Homo sapiens
  misc_RNA (1)...(19): siRNA sense strand
gcacagacucauccugcau

SEQ ID NO: 2102010 - RNA, 19 nt, Homo sapiens
  misc_RNA (1)...(19): siRNA sense strand
gcagggaccgugacuuugc

SEQ ID NO: 2102011 - RNA, 19 nt, Homo sapiens
  misc_RNA (1)...(19): siRNA sense strand
gaauguaaaguacccaacu

SEQ ID NO: 2102012 - RNA, 19 nt, Homo sapiens
  misc_RNA (1)...(19): siRNA sense strand
gcugaaggcagacgaugau

SEQ ID NO: 2102013 - RNA, 19 nt, Homo sapiens
  misc_RNA (1)...(19): siRNA sense strand
caaagggcccauccugaag

SEQ ID NO: 2102014 - RNA, 19 nt, Homo sapiens
  misc_RNA (1)...(19): siRNA sense strand
ggcaugaggccaucaccuu

SEQ ID NO: 2102015 - RNA, 19 nt, Homo sapiens
  misc_RNA (1)...(19): siRNA sense strand
cgaguacuugugugaaauu

SEQ ID NO: 2102016 - RNA, 19 nt, Homo sapiens
  misc_RNA (1)...(19): siRNA sense strand
cagcggacauggccguagu

SEQ ID NO: 2102017 - RNA, 19 nt, Homo sapiens
  misc_RNA (1)...(19): siRNA sense strand
gcaacucccguaccacuac

SEQ ID NO: 2102018 - RNA, 19 nt, Homo sapiens
  misc_RNA (1)...(19): siRNA sense strand
gaggaaggccaggaugugu

SEQ ID NO: 2102019 - RNA, 19 nt, Homo sapiens
  misc_RNA (1)...(19): siRNA sense strand
caagccgcaucuuaaccuu

SEQ ID NO: 2102020 - RNA, 19 nt, Homo sapiens
  misc_RNA (1)...(19): siRNA sense strand
guucgugcaugccauaacu

SEQ ID NO: 2102021 - RNA, 19 nt, Homo sapiens
  misc_RNA (1)...(19): siRNA sense strand
cagcugcccucacaaucca

SEQ ID NO: 2102022 - RNA, 19 nt, Homo sapiens
  misc_RNA (1)...(19): siRNA sense strand
ggagaugagugugccuacu

SEQ ID NO: 2102023 - RNA, 19 nt, Homo sapiens
  misc_RNA (1)...(19): siRNA sense strand
cauauuggcagagauguuc

SEQ ID NO: 2102024 - RNA, 19 nt, Homo sapiens
  misc_RNA (1)...(19): siRNA sense strand
cccaaacucugcgggauuc

SEQ ID NO: 2102025 - RNA, 19 nt, Homo sapiens
  misc_RNA (1)...(19): siRNA sense strand
gcucuacaccugccagucu

SEQ ID NO: 2102026 - RNA, 19 nt, Homo sapiens
  misc_RNA (1)...(19): siRNA sense strand
ccaaggaucgugggcucua

SEQ ID NO: 2102027 - RNA, 19 nt, Homo sapiens
  misc_RNA (1)...(19): siRNA sense strand
gggcgaguuuguaugugau

SEQ ID NO: 2102028 - RNA, 19 nt, Homo sapiens
  misc_RNA (1)...(19): siRNA sense strand
gcaaacaccgucugauccu

SEQ ID NO: 2102029 - RNA, 19 nt, Homo sapiens
  misc_RNA (1)...(19): siRNA sense strand
ggccaucaccuucaauguc

SEQ ID NO: 2102030 - RNA, 19 nt, Homo sapiens
  misc_RNA (1)...(19): siRNA sense strand
cauccauggugucauacug

SEQ ID NO: 2102031 - RNA, 19 nt, Homo sapiens
  misc_RNA (1)...(19): siRNA sense strand
ucugcgggauuccugcuuu

SEQ ID NO: 2102032 - RNA, 19 nt, Homo sapiens
  misc_RNA (1)...(19): siRNA sense strand
gcgcauagguggagaagua

SEQ ID NO: 2102033 - RNA, 19 nt, Homo sapiens
  misc_RNA (1)...(19): siRNA sense strand
aaacuaaccuagccuauuu

SEQ ID NO: 2102034 - RNA, 19 nt, Homo sapiens
  misc_RNA (1)...(19): siRNA sense strand
caaagagccugcagagaaa

SEQ ID NO: 2102035 - RNA, 19 nt, Homo sapiens
  misc_RNA (1)...(19): siRNA sense strand
gaagauuccuccucccaaa

SEQ ID NO: 2102036 - RNA, 19 nt, Homo sapiens
  misc_RNA (1)...(19): siRNA sense strand
gaaaugaaguacccuaucu

SEQ ID NO: 2102037 - RNA, 19 nt, Homo sapiens
  misc_RNA (1)...(19): siRNA sense strand
aaacgugucuuacaugaaa

SEQ ID NO: 2102038 - RNA, 19 nt, Homo sapiens
  misc_RNA (1)...(19): siRNA sense strand
aaaguaagcugcaaauuag

SEQ ID NO: 2102039 - RNA, 19 nt, Homo sapiens
  misc_RNA (1)...(19): siRNA sense strand
uaaccuagccuauuugaaa

SEQ ID NO: 2102040 - RNA, 19 nt, Homo sapiens
  misc_RNA (1)...(19): siRNA sense strand
ccaaagagccugcagagaa

SEQ ID NO: 2102041 - RNA, 19 nt, Homo sapiens
  misc_RNA (1)...(19): siRNA sense strand
gcacggagccauuaccaaa

SEQ ID NO: 2102042 - RNA, 19 nt, Homo sapiens
  misc_RNA (1)...(19): siRNA sense strand
aaugaucgcuugagaaaug

SEQ ID NO: 2102043 - RNA, 19 nt, Homo sapiens
  misc_RNA (1)...(19): siRNA sense strand
gaaguuacgugggcaaaca

SEQ ID NO: 2102044 - RNA, 19 nt, Homo sapiens
  misc_RNA (1)...(19): siRNA sense strand
ugaaguacccuaucuuuga

SEQ ID NO: 2102045 - RNA, 19 nt, Homo sapiens
  misc_RNA (1)...(19): siRNA sense strand
cuaggaagaugcucuguga

SEQ ID NO: 2102046 - RNA, 19 nt, Homo sapiens
  misc_RNA (1)...(19): siRNA sense strand
gaaacuaaccuagccuauu

SEQ ID NO: 2102047 - RNA, 19 nt, Homo sapiens
  misc_RNA (1)...(19): siRNA sense strand
gaaaacgugucuuacauga

SEQ ID NO: 2102048 - RNA, 19 nt, Homo sapiens
  misc_RNA (1)...(19): siRNA sense strand
ggacacauuucuccaguac

SEQ ID NO: 2102049 - RNA, 19 nt, Homo sapiens
  misc_RNA (1)...(19): siRNA sense strand
ccaagaugaugaguucuaa

SEQ ID NO: 2102050 - RNA, 19 nt, Homo sapiens
  misc_RNA (1)...(19): siRNA sense strand
ccagguaccaucaucguua

SEQ ID NO: 2102051 - RNA, 19 nt, Homo sapiens
  misc_RNA (1)...(19): siRNA sense strand
uaugauggcuugguuauuc

SEQ ID NO: 2102052 - RNA, 19 nt, Homo sapiens
  misc_RNA (1)...(19): siRNA sense strand
ggaagacccuuuggacaca

SEQ ID NO: 2102053 - RNA, 19 nt, Homo sapiens
  misc_RNA (1)...(19): siRNA sense strand
cagaaugcgucagauauug

SEQ ID NO: 2102054 - RNA, 19 nt, Homo sapiens
  misc_RNA (1)...(19): siRNA sense strand
caacagaggaacugaaagu

SEQ ID NO: 2102055 - RNA, 19 nt, Homo sapiens
  misc_RNA (1)...(19): siRNA sense strand
ugucaaagcucaggaaugg

SEQ ID NO: 2102056 - RNA, 19 nt, Homo sapiens
  misc_RNA (1)...(19): siRNA sense strand
ccacagcacggagccauua

SEQ ID NO: 2102057 - RNA, 19 nt, Homo sapiens
  misc_RNA (1)...(19): siRNA sense strand
gaaguacccuaucuuugac

SEQ ID NO: 2102058 - RNA, 19 nt, Homo sapiens
  misc_RNA (1)...(19): siRNA sense strand
agaaugaucgcuugagaaa

SEQ ID NO: 2102059 - RNA, 19 nt, Homo sapiens
  misc_RNA (1)...(19): siRNA sense strand
gaugaauauuccaagaaga

SEQ ID NO: 2102060 - RNA, 19 nt, Homo sapiens
  misc_RNA (1)...(19): siRNA sense strand
ccacagcgaugaauauucc

SEQ ID NO: 2102061 - RNA, 19 nt, Homo sapiens
  misc_RNA (1)...(19): siRNA sense strand
ccuccaagaugaugaguuc

SEQ ID NO: 2102062 - RNA, 19 nt, Homo sapiens
  misc_RNA (1)...(19): siRNA sense strand
guucagagccuaaaguaag

SEQ ID NO: 2102063 - RNA, 19 nt, Homo sapiens
  misc_RNA (1)...(19): siRNA sense strand
gccaagacgccaaauguga

SEQ ID NO: 2102064 - RNA, 19 nt, Homo sapiens
  misc_RNA (1)...(19): siRNA sense strand
gacaagaagaagcaauaaa

SEQ ID NO: 2102065 - RNA, 19 nt, Homo sapiens
  misc_RNA (1)...(19): siRNA sense strand
ggucaccagucgacuagga

SEQ ID NO: 2102066 - RNA, 19 nt, Homo sapiens
  misc_RNA (1)...(19): siRNA sense strand
caaccugcuuucucacaga

SEQ ID NO: 2102067 - RNA, 19 nt, Homo sapiens
  misc_RNA (1)...(19): siRNA sense strand
gagaaugaucgcuugagaa

SEQ ID NO: 2102068 - RNA, 19 nt, Homo sapiens
  misc_RNA (1)...(19): siRNA sense strand
gcucaggaaugggauggaa

SEQ ID NO: 2102069 - RNA, 19 nt, Homo sapiens
  misc_RNA (1)...(19): siRNA sense strand
acacauuucuccaguacau

SEQ ID NO: 2102070 - RNA, 19 nt, Homo sapiens
  misc_RNA (1)...(19): siRNA sense strand
augcgaaacuggagaaaga

SEQ ID NO: 2102071 - RNA, 19 nt, Homo sapiens
  misc_RNA (1)...(19): siRNA sense strand
agagaaugaucgcuugaga

SEQ ID NO: 2102072 - RNA, 19 nt, Homo sapiens
  misc_RNA (1)...(19): siRNA sense strand
ccagagagccugucaaagc

SEQ ID NO: 2102073 - RNA, 19 nt, Homo sapiens
  misc_RNA (1)...(19): siRNA sense strand
gaaaucaacagaggaacug

SEQ ID NO: 2102074 - RNA, 19 nt, Homo sapiens
  misc_RNA (1)...(19): siRNA sense strand
cgaugaauauuccaagaag

SEQ ID NO: 2102075 - RNA, 19 nt, Homo sapiens
  misc_RNA (1)...(19): siRNA sense strand
agauauugcucgagagaau

SEQ ID NO: 2102076 - RNA, 19 nt, Homo sapiens
  misc_RNA (1)...(19): siRNA sense strand
ucagaaugcgucagauauu

SEQ ID NO: 2102077 - RNA, 19 nt, Homo sapiens
  misc_RNA (1)...(19): siRNA sense strand
ggaaaugaaguacccuauc

SEQ ID NO: 2102078 - RNA, 19 nt, Homo sapiens
  misc_RNA (1)...(19): siRNA sense strand
gagaaaugaaacuaaccua

SEQ ID NO: 2102079 - RNA, 19 nt, Homo sapiens
  misc_RNA (1)...(19): siRNA sense strand
uagccuauuugaaagagaa

SEQ ID NO: 2102080 - RNA, 19 nt, Homo sapiens
  misc_RNA (1)...(19): siRNA sense strand
gggccaagacgccaaaugu

SEQ ID NO: 2102081 - RNA, 19 nt, Homo sapiens
  misc_RNA (1)...(19): siRNA sense strand
uccaguacauugaggauau

SEQ ID NO: 2102082 - RNA, 19 nt, Homo sapiens
  misc_RNA (1)...(19): siRNA sense strand
aagacaagaagaagcaaua

SEQ ID NO: 2102083 - RNA, 19 nt, Homo sapiens
  misc_RNA (1)...(19): siRNA sense strand
acaagaagaagcaauaaag

SEQ ID NO: 2102084 - RNA, 19 nt, Homo sapiens
  misc_RNA (1)...(19): siRNA sense strand
caacagagccagguaccau

SEQ ID NO: 2102085 - RNA, 19 nt, Homo sapiens
  misc_RNA (1)...(19): siRNA sense strand
gcgaugaauauuccaagaa

SEQ ID NO: 2102086 - RNA, 19 nt, Homo sapiens
  misc_RNA (1)...(19): siRNA sense strand
gaagcgaaauccgaacacu

SEQ ID NO: 2102087 - RNA, 19 nt, Homo sapiens
  misc_RNA (1)...(19): siRNA sense strand
ccagacccgugucgcaaga

SEQ ID NO: 2102088 - RNA, 19 nt, Homo sapiens
  misc_RNA (1)...(19): siRNA sense strand
ggccuaugauggcuugguu

SEQ ID NO: 2102089 - RNA, 19 nt, Homo sapiens
  misc_RNA (1)...(19): siRNA sense strand
ucaggaaggaggacgauga

SEQ ID NO: 2102090 - RNA, 19 nt, Homo sapiens
  misc_RNA (1)...(19): siRNA sense strand
gaagacaagaagaagcaau

SEQ ID NO: 2102091 - RNA, 19 nt, Homo sapiens
  misc_RNA (1)...(19): siRNA sense strand
aaugaaguacccuaucuuu

SEQ ID NO: 2102092 - RNA, 19 nt, Homo sapiens
  misc_RNA (1)...(19): siRNA sense strand
cagagagccugucaaagcu

SEQ ID NO: 2102093 - RNA, 19 nt, Homo sapiens
  misc_RNA (1)...(19): siRNA sense strand
ggaagaggagcccguguac

SEQ ID NO: 2102094 - RNA, 19 nt, Homo sapiens
  misc_RNA (1)...(19): siRNA sense strand
gaugaugaguucuaauccu

SEQ ID NO: 2102095 - RNA, 19 nt, Homo sapiens
  misc_RNA (1)...(19): siRNA sense strand
gaccaucacagcuguucuu

SEQ ID NO: 2102096 - RNA, 19 nt, Homo sapiens
  misc_RNA (1)...(19): siRNA sense strand
gaagcaauaaagcgcauag

SEQ ID NO: 2102097 - RNA, 19 nt, Homo sapiens
  misc_RNA (1)...(19): siRNA sense strand
agagaaaucaacagaggaa

SEQ ID NO: 2102098 - RNA, 19 nt, Homo sapiens
  misc_RNA (1)...(19): siRNA sense strand
gggaugaaggccuaugaug

SEQ ID NO: 2102099 - RNA, 19 nt, Homo sapiens
  misc_RNA (1)...(19): siRNA sense strand
caucaucguuagccaaucg

SEQ ID NO: 2102100 - RNA, 19 nt, Homo sapiens
  misc_RNA (1)...(19): siRNA sense strand
gagcaccucaucagagaca

SEQ ID NO: 2102101 - RNA, 19 nt, Homo sapiens
  misc_RNA (1)...(19): siRNA sense strand
gcuugagaaaugaaacuaa

SEQ ID NO: 2102102 - RNA, 19 nt, Homo sapiens
  misc_RNA (1)...(19): siRNA sense strand
caguucagagccuaaagua

SEQ ID NO: 2102103 - RNA, 19 nt, Homo sapiens
  misc_RNA (1)...(19): siRNA sense strand
ccacggugccugacuugga

SEQ ID NO: 2102104 - RNA, 19 nt, Homo sapiens
  misc_RNA (1)...(19): siRNA sense strand
aagaggagcccguguacau

SEQ ID NO: 2102105 - RNA, 19 nt, Homo sapiens
  misc_RNA (1)...(19): siRNA sense strand
agacaagaagaagcaauaa

SEQ ID NO: 2102106 - RNA, 19 nt, Homo sapiens
  misc_RNA (1)...(19): siRNA sense strand
gaagacccuuuggacacau

SEQ ID NO: 2102107 - RNA, 19 nt, Homo sapiens
  misc_RNA (1)...(19): siRNA sense strand
caaaugugacuucgaccau

SEQ ID NO: 2102108 - RNA, 19 nt, Homo sapiens
  misc_RNA (1)...(19): siRNA sense strand
cagguaccaucaucguuag

SEQ ID NO: 2102109 - RNA, 19 nt, Homo sapiens
  misc_RNA (1)...(19): siRNA sense strand
aaugugacuucgaccauca

SEQ ID NO: 2102110 - RNA, 19 nt, Homo sapiens
  misc_RNA (1)...(19): siRNA sense strand
ucagauauugcucgagaga

SEQ ID NO: 2102111 - RNA, 19 nt, Homo sapiens
  misc_RNA (1)...(19): siRNA sense strand
ccaguacauugaggauaug

SEQ ID NO: 2102112 - RNA, 19 nt, Homo sapiens
  misc_RNA (1)...(19): siRNA sense strand
caagaagaagcaauaaagc

SEQ ID NO: 2102113 - RNA, 19 nt, Homo sapiens
  misc_RNA (1)...(19): siRNA sense strand
ccccauggcuacccuaaaa

SEQ ID NO: 2102114 - RNA, 19 nt, Homo sapiens
  misc_RNA (1)...(19): siRNA sense strand
gcugagcacaucuuucgau

SEQ ID NO: 2102115 - RNA, 19 nt, Homo sapiens
  misc_RNA (1)...(19): siRNA sense strand
cagcugagcacaucuuucg

SEQ ID NO: 2102116 - RNA, 19 nt, Homo sapiens
  misc_RNA (1)...(19): siRNA sense strand
gaagaggagcccguguaca

SEQ ID NO: 2102117 - RNA, 19 nt, Homo sapiens
  misc_RNA (1)...(19): siRNA sense strand
ggaaaacgugucuuacaug

SEQ ID NO: 2102118 - RNA, 19 nt, Homo sapiens
  misc_RNA (1)...(19): siRNA sense strand
cagcuguucuucgcagugu

SEQ ID NO: 2102119 - RNA, 19 nt, Homo sapiens
  misc_RNA (1)...(19): siRNA sense strand
ucuacgaggaaaugaagua

SEQ ID NO: 2102120 - RNA, 19 nt, Homo sapiens
  misc_RNA (1)...(19): siRNA sense strand
gaucgcuugagaaaugaaa

SEQ ID NO: 2102121 - RNA, 19 nt, Homo sapiens
  misc_RNA (1)...(19): siRNA sense strand
aagaugaugaguucuaauc

SEQ ID NO: 2102122 - RNA, 19 nt, Homo sapiens
  misc_RNA (1)...(19): siRNA sense strand
ggagccauuaccaaaguug

SEQ ID NO: 2102123 - RNA, 19 nt, Homo sapiens
  misc_RNA (1)...(19): siRNA sense strand
gauauccuccaagaugaug

SEQ ID NO: 2102124 - RNA, 19 nt, Homo sapiens
  misc_RNA (1)...(19): siRNA sense strand
ccaccuuguuagcgggaaa

SEQ ID NO: 2102125 - RNA, 19 nt, Homo sapiens
  misc_RNA (1)...(19): siRNA sense strand
ccagucgacuaggaagaug

SEQ ID NO: 2102126 - RNA, 19 nt, Homo sapiens
  misc_RNA (1)...(19): siRNA sense strand
cuugagaaaugaaacuaac

SEQ ID NO: 2102127 - RNA, 19 nt, Homo sapiens
  misc_RNA (1)...(19): siRNA sense strand
gauauugcucgagagaaug

SEQ ID NO: 2102128 - RNA, 19 nt, Homo sapiens
  misc_RNA (1)...(19): siRNA sense strand
uuacgacgcugugcauucg

SEQ ID NO: 2102129 - RNA, 19 nt, Homo sapiens
  misc_RNA (1)...(19): siRNA sense strand
ggccaagacgccaaaugug

SEQ ID NO: 2102130 - RNA, 19 nt, Homo sapiens
  misc_RNA (1)...(19): siRNA sense strand
aggaagaggagcccgugua

SEQ ID NO: 2102131 - RNA, 19 nt, Homo sapiens
  misc_RNA (1)...(19): siRNA sense strand
cuaaaguaagcugcaaauu

SEQ ID NO: 2102132 - RNA, 19 nt, Homo sapiens
  misc_RNA (1)...(19): siRNA sense strand
gcagagaagugugcaaaua

SEQ ID NO: 2102133 - RNA, 19 nt, Homo sapiens
  misc_RNA (1)...(19): siRNA sense strand
gaaagugggugauaucuuc

SEQ ID NO: 2102134 - RNA, 19 nt, Homo sapiens
  misc_RNA (1)...(19): siRNA sense strand
gcaaguaugcuacaaauuu

SEQ ID NO: 2102135 - RNA, 19 nt, Homo sapiens
  misc_RNA (1)...(19): siRNA sense strand
ggacccagcuugccaauga

SEQ ID NO: 2102136 - RNA, 19 nt, Homo sapiens
  misc_RNA (1)...(19): siRNA sense strand
ggaaauauaucugaaagga

SEQ ID NO: 2102137 - RNA, 19 nt, Homo sapiens
  misc_RNA (1)...(19): siRNA sense strand
ccagacaucuacugcauua

SEQ ID NO: 2102138 - RNA, 19 nt, Homo sapiens
  misc_RNA (1)...(19): siRNA sense strand
ggaaugaacuggcacauac

SEQ ID NO: 2102139 - RNA, 19 nt, Homo sapiens
  misc_RNA (1)...(19): siRNA sense strand
gcacauacccuguccaaug

SEQ ID NO: 2102140 - RNA, 19 nt, Homo sapiens
  misc_RNA (1)...(19): siRNA sense strand
ggagacaagccacacauua

SEQ ID NO: 2102141 - RNA, 19 nt, Homo sapiens
  misc_RNA (1)...(19): siRNA sense strand
gcacagagagcaucacuga

SEQ ID NO: 2102142 - RNA, 19 nt, Homo sapiens
  misc_RNA (1)...(19): siRNA sense strand
uaacaaggccuaauaccua

SEQ ID NO: 2102143 - RNA, 19 nt, Homo sapiens
  misc_RNA (1)...(19): siRNA sense strand
gaagugugcaaauagauua

SEQ ID NO: 2102144 - RNA, 19 nt, Homo sapiens
  misc_RNA (1)...(19): siRNA sense strand
ggaaugagcuccccaaaau

SEQ ID NO: 2102145 - RNA, 19 nt, Homo sapiens
  misc_RNA (1)...(19): siRNA sense strand
uuauggaucuggacauuua

SEQ ID NO: 2102146 - RNA, 19 nt, Homo sapiens
  misc_RNA (1)...(19): siRNA sense strand
gaaagagacagcagagaaa

SEQ ID NO: 2102147 - RNA, 19 nt, Homo sapiens
  misc_RNA (1)...(19): siRNA sense strand
gaagacaaauacaucaaca

SEQ ID NO: 2102148 - RNA, 19 nt, Homo sapiens
  misc_RNA (1)...(19): siRNA sense strand
caaggaggcugcucugguu

SEQ ID NO: 2102149 - RNA, 19 nt, Homo sapiens
  misc_RNA (1)...(19): siRNA sense strand
gagcagagaagcaaccuaa

SEQ ID NO: 2102150 - RNA, 19 nt, Homo sapiens
  misc_RNA (1)...(19): siRNA sense strand
ggaaacugcuucaaagucu

SEQ ID NO: 2102151 - RNA, 19 nt, Homo sapiens
  misc_RNA (1)...(19): siRNA sense strand
gcacagagcaccugcaaca

SEQ ID NO: 2102152 - RNA, 19 nt, Homo sapiens
  misc_RNA (1)...(19): siRNA sense strand
ggauaaagauguaccuucu

SEQ ID NO: 2102153 - RNA, 19 nt, Homo sapiens
  misc_RNA (1)...(19): siRNA sense strand
ggaaacaaacaucuugaaa

SEQ ID NO: 2102154 - RNA, 19 nt, Homo sapiens
  misc_RNA (1)...(19): siRNA sense strand
gaagugccuuugauucaga

SEQ ID NO: 2102155 - RNA, 19 nt, Homo sapiens
  misc_RNA (1)...(19): siRNA sense strand
gcucagaacugcccacaag

SEQ ID NO: 2102156 - RNA, 19 nt, Homo sapiens
  misc_RNA (1)...(19): siRNA sense strand
gacaagccacacauuauua

SEQ ID NO: 2102157 - RNA, 19 nt, Homo sapiens
  misc_RNA (1)...(19): siRNA sense strand
ggauaugacucacuggaau

SEQ ID NO: 2102158 - RNA, 19 nt, Homo sapiens
  misc_RNA (1)...(19): siRNA sense strand
ggaauggaauugcaacaag

SEQ ID NO: 2102159 - RNA, 19 nt, Homo sapiens
  misc_RNA (1)...(19): siRNA sense strand
ucagugagaucaagaggaa

SEQ ID NO: 2102160 - RNA, 19 nt, Homo sapiens
  misc_RNA (1)...(19): siRNA sense strand
caugauggauaaagaugua

SEQ ID NO: 2102161 - RNA, 19 nt, Homo sapiens
  misc_RNA (1)...(19): siRNA sense strand
gagcaucacugaggaguuc

SEQ ID NO: 2102162 - RNA, 19 nt, Homo sapiens
  misc_RNA (1)...(19): siRNA sense strand
guggauagcugccucugaa

SEQ ID NO: 2102163 - RNA, 19 nt, Homo sapiens
  misc_RNA (1)...(19): siRNA sense strand
gaggaugcccugccaaauu

SEQ ID NO: 2102164 - RNA, 19 nt, Homo sapiens
  misc_RNA (1)...(19): siRNA sense strand
ccacagcccuuuagauucu

SEQ ID NO: 2102165 - RNA, 19 nt, Homo sapiens
  misc_RNA (1)...(19): siRNA sense strand
uccagcagcucuccacuua

SEQ ID NO: 2102166 - RNA, 19 nt, Homo sapiens
  misc_RNA (1)...(19): siRNA sense strand
acagaacgaucuccagaaa

SEQ ID NO: 2102167 - RNA, 19 nt, Homo sapiens
  misc_RNA (1)...(19): siRNA sense strand
gggaacagaccaaacagua

SEQ ID NO: 2102168 - RNA, 19 nt, Homo sapiens
  misc_RNA (1)...(19): siRNA sense strand
gaacacagccuugcagagu

SEQ ID NO: 2102169 - RNA, 19 nt, Homo sapiens
  misc_RNA (1)...(19): siRNA sense strand
gaacugcccacaagauuuc

SEQ ID NO: 2102170 - RNA, 19 nt, Homo sapiens
  misc_RNA (1)...(19): siRNA sense strand
gggagugaguuucugauga

SEQ ID NO: 2102171 - RNA, 19 nt, Homo sapiens
  misc_RNA (1)...(19): siRNA sense strand
caacgaaguucaagucaac

SEQ ID NO: 2102172 - RNA, 19 nt, Homo sapiens
  misc_RNA (1)...(19): siRNA sense strand
agacuuugcggaagaauua

SEQ ID NO: 2102173 - RNA, 19 nt, Homo sapiens
  misc_RNA (1)...(19): siRNA sense strand
acaaauaucccacaccauu

SEQ ID NO: 2102174 - RNA, 19 nt, Homo sapiens
  misc_RNA (1)...(19): siRNA sense strand
ugaaacagaucagagagaa

SEQ ID NO: 2102175 - RNA, 19 nt, Homo sapiens
  misc_RNA (1)...(19): siRNA sense strand
ccaugaaccuugaagaugu

SEQ ID NO: 2102176 - RNA, 19 nt, Homo sapiens
  misc_RNA (1)...(19): siRNA sense strand
ccaaggaaauauaucugaa

SEQ ID NO: 2102177 - RNA, 19 nt, Homo sapiens
  misc_RNA (1)...(19): siRNA sense strand
cagcagcauuggagacuuu

SEQ ID NO: 2102178 - RNA, 19 nt, Homo sapiens
  misc_RNA (1)...(19): siRNA sense strand
ggugagagguggagacaca

SEQ ID NO: 2102179 - RNA, 19 nt, Homo sapiens
  misc_RNA (1)...(19): siRNA sense strand
gagacaagccacacauuau

SEQ ID NO: 2102180 - RNA, 19 nt, Homo sapiens
  misc_RNA (1)...(19): siRNA sense strand
caucuucucccaugauuaa

SEQ ID NO: 2102181 - RNA, 19 nt, Homo sapiens
  misc_RNA (1)...(19): siRNA sense strand
gaaccugaacccuuccuuu

SEQ ID NO: 2102182 - RNA, 19 nt, Homo sapiens
  misc_RNA (1)...(19): siRNA sense strand
ccaacugcaucaucuuuga

SEQ ID NO: 2102183 - RNA, 19 nt, Homo sapiens
  misc_RNA (1)...(19): siRNA sense strand
ucaccaacauguuaauuca

SEQ ID NO: 2102184 - RNA, 19 nt, Homo sapiens
  misc_RNA (1)...(19): siRNA sense strand
ugaacaggguuguggauga

SEQ ID NO: 2102185 - RNA, 19 nt, Homo sapiens
  misc_RNA (1)...(19): siRNA sense strand
aauccacgcuucaaacaaa

SEQ ID NO: 2102186 - RNA, 19 nt, Homo sapiens
  misc_RNA (1)...(19): siRNA sense strand
ggaagucucuguugaaacc

SEQ ID NO: 2102187 - RNA, 19 nt, Homo sapiens
  misc_RNA (1)...(19): siRNA sense strand
ccaggaaucugcagucagu

SEQ ID NO: 2102188 - RNA, 19 nt, Homo sapiens
  misc_RNA (1)...(19): siRNA sense strand
gaaaguaaacagcuaaagg

SEQ ID NO: 2102189 - RNA, 19 nt, Homo sapiens
  misc_RNA (1)...(19): siRNA sense strand
cagagcaccugcaacagaa

SEQ ID NO: 2102190 - RNA, 19 nt, Homo sapiens
  misc_RNA (1)...(19): siRNA sense strand
ggacugaccacaucaccaa

SEQ ID NO: 2102191 - RNA, 19 nt, Homo sapiens
  misc_RNA (1)...(19): siRNA sense strand
cgaaagagacagcagagaa

SEQ ID NO: 2102192 - RNA, 19 nt, Homo sapiens
  misc_RNA (1)...(19): siRNA sense strand
gccaagaucaugaaccuaa

SEQ ID NO: 2102193 - RNA, 19 nt, Homo sapiens
  misc_RNA (1)...(19): siRNA sense strand
gaaaagagggagugaguuu

SEQ ID NO: 2102194 - RNA, 19 nt, Homo sapiens
  misc_RNA (1)...(19): siRNA sense strand
caacacgagucuugucauc

SEQ ID NO: 2102195 - RNA, 19 nt, Homo sapiens
  misc_RNA (1)...(19): siRNA sense strand
gaaauucuggacaccuuaa

SEQ ID NO: 2102196 - RNA, 19 nt, Homo sapiens
  misc_RNA (1)...(19): siRNA sense strand
gaaacaaacaucuugaaac

SEQ ID NO: 2102197 - RNA, 19 nt, Homo sapiens
  misc_RNA (1)...(19): siRNA sense strand
cgugagcgcuugucaaauc

SEQ ID NO: 2102198 - RNA, 19 nt, Homo sapiens
  misc_RNA (1)...(19): siRNA sense strand
caaaucaacugcuuuuaga

SEQ ID NO: 2102199 - RNA, 19 nt, Homo sapiens
  misc_RNA (1)...(19): siRNA sense strand
gaacaggagaaucauggaa

SEQ ID NO: 2102200 - RNA, 19 nt, Homo sapiens
  misc_RNA (1)...(19): siRNA sense strand
caacccagaugacacaagu

SEQ ID NO: 2102201 - RNA, 19 nt, Homo sapiens
  misc_RNA (1)...(19): siRNA sense strand
gaagggagaggauuugagu

SEQ ID NO: 2102202 - RNA, 19 nt, Homo sapiens
  misc_RNA (1)...(19): siRNA sense strand
uaacggaguucucuauggu

SEQ ID NO: 2102203 - RNA, 19 nt, Homo sapiens
  misc_RNA (1)...(19): siRNA sense strand
gaacaggguuguggaugag

SEQ ID NO: 2102204 - RNA, 19 nt, Homo sapiens
  misc_RNA (1)...(19): siRNA sense strand
cauacccuguccaauguua

SEQ ID NO: 2102205 - RNA, 19 nt, Homo sapiens
  misc_RNA (1)...(19): siRNA sense strand
cauggaaacugcuucaaag

SEQ ID NO: 2102206 - RNA, 19 nt, Homo sapiens
  misc_RNA (1)...(19): siRNA sense strand
ugagggacaucgaaagaga

SEQ ID NO: 2102207 - RNA, 19 nt, Homo sapiens
  misc_RNA (1)...(19): siRNA sense strand
caagaacgccagcagcauu

SEQ ID NO: 2102208 - RNA, 19 nt, Homo sapiens
  misc_RNA (1)...(19): siRNA sense strand
caaagcauccagacaucua

SEQ ID NO: 2102209 - RNA, 19 nt, Homo sapiens
  misc_RNA (1)...(19): siRNA sense strand
ggucaacguuucaccagau

SEQ ID NO: 2102210 - RNA, 19 nt, Homo sapiens
  misc_RNA (1)...(19): siRNA sense strand
ggccaacucugcuuguuca

SEQ ID NO: 2102211 - RNA, 19 nt, Homo sapiens
  misc_RNA (1)...(19): siRNA sense strand
gcuccaggcugacagugaa

SEQ ID NO: 2102212 - RNA, 19 nt, Homo sapiens
  misc_RNA (1)...(19): siRNA sense strand
uuacagacuuugcggaaga

SEQ ID NO: 2102213 - RNA, 19 nt, Homo sapiens
  misc_RNA (1)...(19): siRNA sense strand
gagaguauccacccaaaca

SEQ ID NO: 2102214 - RNA, 19 nt, Homo sapiens
  misc_RNA (1)...(19): siRNA sense strand
caggaugcauuuauuagau

SEQ ID NO: 2102215 - RNA, 19 nt, Homo sapiens
  misc_RNA (1)...(19): siRNA sense strand
cagaaaaccuaacaaagaa

SEQ ID NO: 2102216 - RNA, 19 nt, Homo sapiens
  misc_RNA (1)...(19): siRNA sense strand
caacaaauuucugauuggu

SEQ ID NO: 2102217 - RNA, 19 nt, Homo sapiens
  misc_RNA (1)...(19): siRNA sense strand
ugaaauuguuguccuaagu

SEQ ID NO: 2102218 - RNA, 19 nt, Homo sapiens
  misc_RNA (1)...(19): siRNA sense strand
guucaggagucucucgauu

SEQ ID NO: 2102219 - RNA, 19 nt, Homo sapiens
  misc_RNA (1)...(19): siRNA sense strand
aaacaaagcauccagacau

SEQ ID NO: 2102220 - RNA, 19 nt, Homo sapiens
  misc_RNA (1)...(19): siRNA sense strand
acacgagucuugucaucaa

SEQ ID NO: 2102221 - RNA, 19 nt, Homo sapiens
  misc_RNA (1)...(19): siRNA sense strand
gaaauuguuguccuaagug

SEQ ID NO: 2102222 - RNA, 19 nt, Homo sapiens
  misc_RNA (1)...(19): siRNA sense strand
gaagacaacccagaugaca

SEQ ID NO: 2102223 - RNA, 19 nt, Homo sapiens
  misc_RNA (1)...(19): siRNA sense strand
cauagugacagccuugaua

SEQ ID NO: 2102224 - RNA, 19 nt, Homo sapiens
  misc_RNA (1)...(19): siRNA sense strand
agagaagugugcaaauaga

SEQ ID NO: 2102225 - RNA, 19 nt, Homo sapiens
  misc_RNA (1)...(19): siRNA sense strand
uugaguuacugcuggauua

SEQ ID NO: 2102226 - RNA, 19 nt, Homo sapiens
  misc_RNA (1)...(19): siRNA sense strand
ggagugaguuucugaugac

SEQ ID NO: 2102227 - RNA, 19 nt, Homo sapiens
  misc_RNA (1)...(19): siRNA sense strand
gcaggaugcauuuauuaga

SEQ ID NO: 2102228 - RNA, 19 nt, Homo sapiens
  misc_RNA (1)...(19): siRNA sense strand
cugaggaguucuacaggua

SEQ ID NO: 2102229 - RNA, 19 nt, Homo sapiens
  misc_RNA (1)...(19): siRNA sense strand
gcugaagccuccacagaag

SEQ ID NO: 2102230 - RNA, 19 nt, Homo sapiens
  misc_RNA (1)...(19): siRNA sense strand
gggaagugccuuugauuca

SEQ ID NO: 2102231 - RNA, 19 nt, Homo sapiens
  misc_RNA (1)...(19): siRNA sense strand
uuagauggcuuugcucaga

SEQ ID NO: 2102232 - RNA, 19 nt, Homo sapiens
  misc_RNA (1)...(19): siRNA sense strand
caagacggcuaaauuaauu

SEQ ID NO: 2102233 - RNA, 19 nt, Homo sapiens
  misc_RNA (1)...(19): siRNA sense strand
aaacagguaugcacuuaua

SEQ ID NO: 2102234 - RNA, 19 nt, Homo sapiens
  misc_RNA (1)...(19): siRNA sense strand
gaagugugcuuucaucaga

SEQ ID NO: 2102235 - RNA, 19 nt, Homo sapiens
  misc_RNA (1)...(19): siRNA sense strand
gcagacagaugacaaaaua

SEQ ID NO: 2102236 - RNA, 19 nt, Homo sapiens
  misc_RNA (1)...(19): siRNA sense strand
gaacugcagcucaaagaaa

SEQ ID NO: 2102237 - RNA, 19 nt, Homo sapiens
  misc_RNA (1)...(19): siRNA sense strand
gaacagacaaaccaaguga

SEQ ID NO: 2102238 - RNA, 19 nt, Homo sapiens
  misc_RNA (1)...(19): siRNA sense strand
uuacaagacggcuaaauua

SEQ ID NO: 2102239 - RNA, 19 nt, Homo sapiens
  misc_RNA (1)...(19): siRNA sense strand
gguaugcacuuauauguca

SEQ ID NO: 2102240 - RNA, 19 nt, Homo sapiens
  misc_RNA (1)...(19): siRNA sense strand
ucaguucucuaucuguuua

SEQ ID NO: 2102241 - RNA, 19 nt, Homo sapiens
  misc_RNA (1)...(19): siRNA sense strand
gaaggaagaauuugaauac

SEQ ID NO: 2102242 - RNA, 19 nt, Homo sapiens
  misc_RNA (1)...(19): siRNA sense strand
uaaggaaauucaagcauug

SEQ ID NO: 2102243 - RNA, 19 nt, Homo sapiens
  misc_RNA (1)...(19): siRNA sense strand
gaacgaggugcuuuggaua

SEQ ID NO: 2102244 - RNA, 19 nt, Homo sapiens
  misc_RNA (1)...(19): siRNA sense strand
gacaaaaccuucaacugua

SEQ ID NO: 2102245 - RNA, 19 nt, Homo sapiens
  misc_RNA (1)...(19): siRNA sense strand
guuggaagauuaauucugu

SEQ ID NO: 2102246 - RNA, 19 nt, Homo sapiens
  misc_RNA (1)...(19): siRNA sense strand
guaucuuccugaugaauuu

SEQ ID NO: 2102247 - RNA, 19 nt, Homo sapiens
  misc_RNA (1)...(19): siRNA sense strand
caaaacagguaugcacuua

SEQ ID NO: 2102248 - RNA, 19 nt, Homo sapiens
  misc_RNA (1)...(19): siRNA sense strand
gguggaagguucaaguuca

SEQ ID NO: 2102249 - RNA, 19 nt, Homo sapiens
  misc_RNA (1)...(19): siRNA sense strand
ugugguaucuuccugauga

SEQ ID NO: 2102250 - RNA, 19 nt, Homo sapiens
  misc_RNA (1)...(19): siRNA sense strand
caucagacaaccaguuuaa

SEQ ID NO: 2102251 - RNA, 19 nt, Homo sapiens
  misc_RNA (1)...(19): siRNA sense strand
auacagagcagacagauga

SEQ ID NO: 2102252 - RNA, 19 nt, Homo sapiens
  misc_RNA (1)...(19): siRNA sense strand
gaaacaagagacugagaau

SEQ ID NO: 2102253 - RNA, 19 nt, Homo sapiens
  misc_RNA (1)...(19): siRNA sense strand
gauccggacucaaagaaag

SEQ ID NO: 2102254 - RNA, 19 nt, Homo sapiens
  misc_RNA (1)...(19): siRNA sense strand
ggacaaaaccuucaacugu

SEQ ID NO: 2102255 - RNA, 19 nt, Homo sapiens
  misc_RNA (1)...(19): siRNA sense strand
aacaagagacugagaauga

SEQ ID NO: 2102256 - RNA, 19 nt, Homo sapiens
  misc_RNA (1)...(19): siRNA sense strand
caaccaguuuaaugaagaa

SEQ ID NO: 2102257 - RNA, 19 nt, Homo sapiens
  misc_RNA (1)...(19): siRNA sense strand
cagacaaccaguuuaauga

SEQ ID NO: 2102258 - RNA, 19 nt, Homo sapiens
  misc_RNA (1)...(19): siRNA sense strand
ugaacuaaguggagaaucu

SEQ ID NO: 2102259 - RNA, 19 nt, Homo sapiens
  misc_RNA (1)...(19): siRNA sense strand
auuauggguuggaagauua

SEQ ID NO: 2102260 - RNA, 19 nt, Homo sapiens
  misc_RNA (1)...(19): siRNA sense strand
agacaaaccaagugauuga

SEQ ID NO: 2102261 - RNA, 19 nt, Homo sapiens
  misc_RNA (1)...(19): siRNA sense strand
acgauguucuugaugauaa

SEQ ID NO: 2102262 - RNA, 19 nt, Homo sapiens
  misc_RNA (1)...(19): siRNA sense strand
aaacuuacaagacggcuaa

SEQ ID NO: 2102263 - RNA, 19 nt, Homo sapiens
  misc_RNA (1)...(19): siRNA sense strand
guauauuugugguaucuuc

SEQ ID NO: 2102264 - RNA, 19 nt, Homo sapiens
  misc_RNA (1)...(19): siRNA sense strand
ucaaauguguuaccaagac

SEQ ID NO: 2102265 - RNA, 19 nt, Homo sapiens
  misc_RNA (1)...(19): siRNA sense strand
gaacuaaguggagaaucuu

SEQ ID NO: 2102266 - RNA, 19 nt, Homo sapiens
  misc_RNA (1)...(19): siRNA sense strand
gaaguucuagaaaguauag

SEQ ID NO: 2102267 - RNA, 19 nt, Homo sapiens
  misc_RNA (1)...(19): siRNA sense strand
ggaaauucaagcauuggaa

SEQ ID NO: 2102268 - RNA, 19 nt, Homo sapiens
  misc_RNA (1)...(19): siRNA sense strand
uccaagacuuccugaguuu

SEQ ID NO: 2102269 - RNA, 19 nt, Homo sapiens
  misc_RNA (1)...(19): siRNA sense strand
uggcauggcuuugaaggaa

SEQ ID NO: 2102270 - RNA, 19 nt, Homo sapiens
  misc_RNA (1)...(19): siRNA sense strand
gcauggcuuugaaggaaga

SEQ ID NO: 2102271 - RNA, 19 nt, Homo sapiens
  misc_RNA (1)...(19): siRNA sense strand
gacaaccaguuuaaugaag

SEQ ID NO: 2102272 - RNA, 19 nt, Homo sapiens
  misc_RNA (1)...(19): siRNA sense strand
ccuaucaucaaauguguua

SEQ ID NO: 2102273 - RNA, 19 nt, Homo sapiens
  misc_RNA (1)...(19): siRNA sense strand
gaggugcuuuggauagaau

SEQ ID NO: 2102274 - RNA, 19 nt, Homo sapiens
  misc_RNA (1)...(19): siRNA sense strand
acaaccaguuuaaugaaga

SEQ ID NO: 2102275 - RNA, 19 nt, Homo sapiens
  misc_RNA (1)...(19): siRNA sense strand
ucagacaaccaguuuaaug

SEQ ID NO: 2102276 - RNA, 19 nt, Homo sapiens
  misc_RNA (1)...(19): siRNA sense strand
uacaagacggcuaaauuaa

SEQ ID NO: 2102277 - RNA, 19 nt, Homo sapiens
  misc_RNA (1)...(19): siRNA sense strand
caaaauaccagcuacagaa

SEQ ID NO: 2102278 - RNA, 19 nt, Homo sapiens
  misc_RNA (1)...(19): siRNA sense strand
cauaauggcauggcuuuga

SEQ ID NO: 2102279 - RNA, 19 nt, Homo sapiens
  misc_RNA (1)...(19): siRNA sense strand
agaacgaggugcuuuggau

SEQ ID NO: 2102280 - RNA, 19 nt, Homo sapiens
  misc_RNA (1)...(19): siRNA sense strand
ccucaguucucuaucuguu

SEQ ID NO: 2102281 - RNA, 19 nt, Homo sapiens
  misc_RNA (1)...(19): siRNA sense strand
gaagguucaaguucaguug

SEQ ID NO: 2102282 - RNA, 19 nt, Homo sapiens
  misc_RNA (1)...(19): siRNA sense strand
ucaagcauuggaagaauuu

SEQ ID NO: 2102283 - RNA, 19 nt, Homo sapiens
  misc_RNA (1)...(19): siRNA sense strand
cuguuuacaugcuuaauug

SEQ ID NO: 2102284 - RNA, 19 nt, Homo sapiens
  misc_RNA (1)...(19): siRNA sense strand
caaauguguuaccaagaca

SEQ ID NO: 2102285 - RNA, 19 nt, Homo sapiens
  misc_RNA (1)...(19): siRNA sense strand
ccucagugauugaaaccaa

SEQ ID NO: 2102286 - RNA, 19 nt, Homo sapiens
  misc_RNA (1)...(19): siRNA sense strand
caaaccaagugauugaaaa

SEQ ID NO: 2102287 - RNA, 19 nt, Homo sapiens
  misc_RNA (1)...(19): siRNA sense strand
cggcuaaauuaauucuuga

SEQ ID NO: 2102288 - RNA, 19 nt, Homo sapiens
  misc_RNA (1)...(19): siRNA sense strand
ccaguuuaaugaagaaucu

SEQ ID NO: 2102289 - RNA, 19 nt, Homo sapiens
  misc_RNA (1)...(19): siRNA sense strand
caggaagugugcuuucauc

SEQ ID NO: 2102290 - RNA, 19 nt, Homo sapiens
  misc_RNA (1)...(19): siRNA sense strand
ccugaugaauuuacagcaa

SEQ ID NO: 2102291 - RNA, 19 nt, Homo sapiens
  misc_RNA (1)...(19): siRNA sense strand
auaauggcauggcuuugaa

SEQ ID NO: 2102292 - RNA, 19 nt, Homo sapiens
  misc_RNA (1)...(19): siRNA sense strand
acaagacggcuaaauuaau

SEQ ID NO: 2102293 - RNA, 19 nt, Homo sapiens
  misc_RNA (1)...(19): siRNA sense strand
ugcaagaccuggacaagag

SEQ ID NO: 2102294 - RNA, 19 nt, Homo sapiens
  misc_RNA (1)...(19): siRNA sense strand
ucagcgaacugcagcucaa

SEQ ID NO: 2102295 - RNA, 19 nt, Homo sapiens
  misc_RNA (1)...(19): siRNA sense strand
gagaaacaagagacugaga

SEQ ID NO: 2102296 - RNA, 19 nt, Homo sapiens
  misc_RNA (1)...(19): siRNA sense strand
cagaggaaccagaggagaa

SEQ ID NO: 2102297 - RNA, 19 nt, Homo sapiens
  misc_RNA (1)...(19): siRNA sense strand
acagacaaaccaagugauu

SEQ ID NO: 2102298 - RNA, 19 nt, Homo sapiens
  misc_RNA (1)...(19): siRNA sense strand
cuccaagacuuccugaguu

SEQ ID NO: 2102299 - RNA, 19 nt, Homo sapiens
  misc_RNA (1)...(19): siRNA sense strand
gguaucuuccugaugaauu

SEQ ID NO: 2102300 - RNA, 19 nt, Homo sapiens
  misc_RNA (1)...(19): siRNA sense strand
uccuggagcugauucuauu

SEQ ID NO: 2102301 - RNA, 19 nt, Homo sapiens
  misc_RNA (1)...(19): siRNA sense strand
ggaagguucaaguucaguu

SEQ ID NO: 2102302 - RNA, 19 nt, Homo sapiens
  misc_RNA (1)...(19): siRNA sense strand
cuacuucagugccuggaau

SEQ ID NO: 2102303 - RNA, 19 nt, Homo sapiens
  misc_RNA (1)...(19): siRNA sense strand
gcgaacugcagcucaaaga

SEQ ID NO: 2102304 - RNA, 19 nt, Homo sapiens
  misc_RNA (1)...(19): siRNA sense strand
cuuacaagacggcuaaauu

SEQ ID NO: 2102305 - RNA, 19 nt, Homo sapiens
  misc_RNA (1)...(19): siRNA sense strand
agaaagcaaaggaguguga

SEQ ID NO: 2102306 - RNA, 19 nt, Homo sapiens
  misc_RNA (1)...(19): siRNA sense strand
cuacagaacagacaaacca

SEQ ID NO: 2102307 - RNA, 19 nt, Homo sapiens
  misc_RNA (1)...(19): siRNA sense strand
ccaagacuuccugaguuua

SEQ ID NO: 2102308 - RNA, 19 nt, Homo sapiens
  misc_RNA (1)...(19): siRNA sense strand
ccagcccuaucaucaaaug

SEQ ID NO: 2102309 - RNA, 19 nt, Homo sapiens
  misc_RNA (1)...(19): siRNA sense strand
acggcuaaauuaauucuug

SEQ ID NO: 2102310 - RNA, 19 nt, Homo sapiens
  misc_RNA (1)...(19): siRNA sense strand
gauaaggaaauucaagcau

SEQ ID NO: 2102311 - RNA, 19 nt, Homo sapiens
  misc_RNA (1)...(19): siRNA sense strand
aauuauggguuggaagauu

SEQ ID NO: 2102312 - RNA, 19 nt, Homo sapiens
  misc_RNA (1)...(19): siRNA sense strand
agacaaccaguuuaaugaa

SEQ ID NO: 2102313 - RNA, 19 nt, Homo sapiens
  misc_RNA (1)...(19): siRNA sense strand
gaagaggcaggugguggaa

SEQ ID NO: 2102314 - RNA, 19 nt, Homo sapiens
  misc_RNA (1)...(19): siRNA sense strand
caagacuuccugaguuuag

SEQ ID NO: 2102315 - RNA, 19 nt, Homo sapiens
  misc_RNA (1)...(19): siRNA sense strand
uuauaugucagcaguguuu

SEQ ID NO: 2102316 - RNA, 19 nt, Homo sapiens
  misc_RNA (1)...(19): siRNA sense strand
cuccagcccuaucaucaaa

SEQ ID NO: 2102317 - RNA, 19 nt, Homo sapiens
  misc_RNA (1)...(19): siRNA sense strand
gcaagaccuggacaagaga

SEQ ID NO: 2102318 - RNA, 19 nt, Homo sapiens
  misc_RNA (1)...(19): siRNA sense strand
aaagaaagcaaaggagugu

SEQ ID NO: 2102319 - RNA, 19 nt, Homo sapiens
  misc_RNA (1)...(19): siRNA sense strand
cgaggugcuuuggauagaa

SEQ ID NO: 2102320 - RNA, 19 nt, Homo sapiens
  misc_RNA (1)...(19): siRNA sense strand
ugaugaauuuacagcaaga

SEQ ID NO: 2102321 - RNA, 19 nt, Homo sapiens
  misc_RNA (1)...(19): siRNA sense strand
gcccuaucaucaaaugugu

SEQ ID NO: 2102322 - RNA, 19 nt, Homo sapiens
  misc_RNA (1)...(19): siRNA sense strand
gcuccaagacuuccugagu

SEQ ID NO: 2102323 - RNA, 19 nt, Homo sapiens
  misc_RNA (1)...(19): siRNA sense strand
cuaaguggagaaucuuuga

SEQ ID NO: 2102324 - RNA, 19 nt, Homo sapiens
  misc_RNA (1)...(19): siRNA sense strand
ggaagccucagugauugaa

SEQ ID NO: 2102325 - RNA, 19 nt, Homo sapiens
  misc_RNA (1)...(19): siRNA sense strand
agaaacaagagacugagaa

SEQ ID NO: 2102326 - RNA, 19 nt, Homo sapiens
  misc_RNA (1)...(19): siRNA sense strand
acaaaccaagugauugaaa

SEQ ID NO: 2102327 - RNA, 19 nt, Homo sapiens
  misc_RNA (1)...(19): siRNA sense strand
uuggaagaauuuagggaaa

SEQ ID NO: 2102328 - RNA, 19 nt, Homo sapiens
  misc_RNA (1)...(19): siRNA sense strand
gggcccuccuccacaaguu

SEQ ID NO: 2102329 - RNA, 19 nt, Homo sapiens
  misc_RNA (1)...(19): siRNA sense strand
ggaaccagaggagaaacaa

SEQ ID NO: 2102330 - RNA, 19 nt, Homo sapiens
  misc_RNA (1)...(19): siRNA sense strand
ggaagugugcuuucaucag

SEQ ID NO: 2102331 - RNA, 19 nt, Homo sapiens
  misc_RNA (1)...(19): siRNA sense strand
cagaacagacaaaccaagu

SEQ ID NO: 2102332 - RNA, 19 nt, Homo sapiens
  misc_RNA (1)...(19): siRNA sense strand
caagacggcuaaauuaauu

SEQ ID NO: 2102333 - RNA, 19 nt, Homo sapiens
  misc_RNA (1)...(19): siRNA sense strand
aaacagguaugcacuuaua

SEQ ID NO: 2102334 - RNA, 19 nt, Homo sapiens
  misc_RNA (1)...(19): siRNA sense strand
gaagugugcuuucaucaga

SEQ ID NO: 2102335 - RNA, 19 nt, Homo sapiens
  misc_RNA (1)...(19): siRNA sense strand
gcagacagaugacaaaaua

SEQ ID NO: 2102336 - RNA, 19 nt, Homo sapiens
  misc_RNA (1)...(19): siRNA sense strand
gaacugcagcucaaagaaa

SEQ ID NO: 2102337 - RNA, 19 nt, Homo sapiens
  misc_RNA (1)...(19): siRNA sense strand
gaacagacaaaccaaguga

SEQ ID NO: 2102338 - RNA, 19 nt, Homo sapiens
  misc_RNA (1)...(19): siRNA sense strand
uuacaagacggcuaaauua

SEQ ID NO: 2102339 - RNA, 19 nt, Homo sapiens
  misc_RNA (1)...(19): siRNA sense strand
gguaugcacuuauauguca

SEQ ID NO: 2102340 - RNA, 19 nt, Homo sapiens
  misc_RNA (1)...(19): siRNA sense strand
ucaguucucuaucuguuua

SEQ ID NO: 2102341 - RNA, 19 nt, Homo sapiens
  misc_RNA (1)...(19): siRNA sense strand
gaaggaagaauuugaauac

SEQ ID NO: 2102342 - RNA, 19 nt, Homo sapiens
  misc_RNA (1)...(19): siRNA sense strand
uaaggaaauucaagcauug

SEQ ID NO: 2102343 - RNA, 19 nt, Homo sapiens
  misc_RNA (1)...(19): siRNA sense strand
gaacgaggugcuuuggaua

SEQ ID NO: 2102344 - RNA, 19 nt, Homo sapiens
  misc_RNA (1)...(19): siRNA sense strand
gacaaaaccuucaacugua

SEQ ID NO: 2102345 - RNA, 19 nt, Homo sapiens
  misc_RNA (1)...(19): siRNA sense strand
guuggaagauuaauucugu

SEQ ID NO: 2102346 - RNA, 19 nt, Homo sapiens
  misc_RNA (1)...(19): siRNA sense strand
guaucuuccugaugaauuu

SEQ ID NO: 2102347 - RNA, 19 nt, Homo sapiens
  misc_RNA (1)...(19): siRNA sense strand
caaaacagguaugcacuua

SEQ ID NO: 2102348 - RNA, 19 nt, Homo sapiens
  misc_RNA (1)...(19): siRNA sense strand
gguggaagguucaaguuca

SEQ ID NO: 2102349 - RNA, 19 nt, Homo sapiens
  misc_RNA (1)...(19): siRNA sense strand
ugugguaucuuccugauga

SEQ ID NO: 2102350 - RNA, 19 nt, Homo sapiens
  misc_RNA (1)...(19): siRNA sense strand
caucagacaaccaguuuaa

SEQ ID NO: 2102351 - RNA, 19 nt, Homo sapiens
  misc_RNA (1)...(19): siRNA sense strand
auacagagcagacagauga

SEQ ID NO: 2102352 - RNA, 19 nt, Homo sapiens
  misc_RNA (1)...(19): siRNA sense strand
gaaacaagagacugagaau

SEQ ID NO: 2102353 - RNA, 19 nt, Homo sapiens
  misc_RNA (1)...(19): siRNA sense strand
gauccggacucaaagaaag

SEQ ID NO: 2102354 - RNA, 19 nt, Homo sapiens
  misc_RNA (1)...(19): siRNA sense strand
ggacaaaaccuucaacugu

SEQ ID NO: 2102355 - RNA, 19 nt, Homo sapiens
  misc_RNA (1)...(19): siRNA sense strand
aacaagagacugagaauga

SEQ ID NO: 2102356 - RNA, 19 nt, Homo sapiens
  misc_RNA (1)...(19): siRNA sense strand
caaccaguuuaaugaagaa

SEQ ID NO: 2102357 - RNA, 19 nt, Homo sapiens
  misc_RNA (1)...(19): siRNA sense strand
cagacaaccaguuuaauga

SEQ ID NO: 2102358 - RNA, 19 nt, Homo sapiens
  misc_RNA (1)...(19): siRNA sense strand
ugaacuaaguggagaaucu

SEQ ID NO: 2102359 - RNA, 19 nt, Homo sapiens
  misc_RNA (1)...(19): siRNA sense strand
auuauggguuggaagauua

SEQ ID NO: 2102360 - RNA, 19 nt, Homo sapiens
  misc_RNA (1)...(19): siRNA sense strand
agacaaaccaagugauuga

SEQ ID NO: 2102361 - RNA, 19 nt, Homo sapiens
  misc_RNA (1)...(19): siRNA sense strand
acgauguucuugaugauaa

SEQ ID NO: 2102362 - RNA, 19 nt, Homo sapiens
  misc_RNA (1)...(19): siRNA sense strand
aaacuuacaagacggcuaa

SEQ ID NO: 2102363 - RNA, 19 nt, Homo sapiens
  misc_RNA (1)...(19): siRNA sense strand
guauauuugugguaucuuc

SEQ ID NO: 2102364 - RNA, 19 nt, Homo sapiens
  misc_RNA (1)...(19): siRNA sense strand
ucaaauguguuaccaagac

SEQ ID NO: 2102365 - RNA, 19 nt, Homo sapiens
  misc_RNA (1)...(19): siRNA sense strand
gaacuaaguggagaaucuu

SEQ ID NO: 2102366 - RNA, 19 nt, Homo sapiens
  misc_RNA (1)...(19): siRNA sense strand
gaaguucuagaaaguauag

SEQ ID NO: 2102367 - RNA, 19 nt, Homo sapiens
  misc_RNA (1)...(19): siRNA sense strand
ggaaauucaagcauuggaa

SEQ ID NO: 2102368 - RNA, 19 nt, Homo sapiens
  misc_RNA (1)...(19): siRNA sense strand
uccaagacuuccugaguuu

SEQ ID NO: 2102369 - RNA, 19 nt, Homo sapiens
  misc_RNA (1)...(19): siRNA sense strand
uggcauggcuuugaaggaa

SEQ ID NO: 2102370 - RNA, 19 nt, Homo sapiens
  misc_RNA (1)...(19): siRNA sense strand
gcauggcuuugaaggaaga

SEQ ID NO: 2102371 - RNA, 19 nt, Homo sapiens
  misc_RNA (1)...(19): siRNA sense strand
gacaaccaguuuaaugaag

SEQ ID NO: 2102372 - RNA, 19 nt, Homo sapiens
  misc_RNA (1)...(19): siRNA sense strand
ccuaucaucaaauguguua

SEQ ID NO: 2102373 - RNA, 19 nt, Homo sapiens
  misc_RNA (1)...(19): siRNA sense strand
gaggugcuuuggauagaau

SEQ ID NO: 2102374 - RNA, 19 nt, Homo sapiens
  misc_RNA (1)...(19): siRNA sense strand
acaaccaguuuaaugaaga

SEQ ID NO: 2102375 - RNA, 19 nt, Homo sapiens
  misc_RNA (1)...(19): siRNA sense strand
ucagacaaccaguuuaaug

SEQ ID NO: 2102376 - RNA, 19 nt, Homo sapiens
  misc_RNA (1)...(19): siRNA sense strand
uacaagacggcuaaauuaa

SEQ ID NO: 2102377 - RNA, 19 nt, Homo sapiens
  misc_RNA (1)...(19): siRNA sense strand
caaaauaccagcuacagaa

SEQ ID NO: 2102378 - RNA, 19 nt, Homo sapiens
  misc_RNA (1)...(19): siRNA sense strand
cauaauggcauggcuuuga

SEQ ID NO: 2102379 - RNA, 19 nt, Homo sapiens
  misc_RNA (1)...(19): siRNA sense strand
agaacgaggugcuuuggau

SEQ ID NO: 2102380 - RNA, 19 nt, Homo sapiens
  misc_RNA (1)...(19): siRNA sense strand
ccucaguucucuaucuguu

SEQ ID NO: 2102381 - RNA, 19 nt, Homo sapiens
  misc_RNA (1)...(19): siRNA sense strand
gaagguucaaguucaguug

SEQ ID NO: 2102382 - RNA, 19 nt, Homo sapiens
  misc_RNA (1)...(19): siRNA sense strand
ucaagcauuggaagaauuu

SEQ ID NO: 2102383 - RNA, 19 nt, Homo sapiens
  misc_RNA (1)...(19): siRNA sense strand
cuguuuacaugcuuaauug

SEQ ID NO: 2102384 - RNA, 19 nt, Homo sapiens
  misc_RNA (1)...(19): siRNA sense strand
caaauguguuaccaagaca

SEQ ID NO: 2102385 - RNA, 19 nt, Homo sapiens
  misc_RNA (1)...(19): siRNA sense strand
ccucagugauugaaaccaa

SEQ ID NO: 2102386 - RNA, 19 nt, Homo sapiens
  misc_RNA (1)...(19): siRNA sense strand
caaaccaagugauugaaaa

SEQ ID NO: 2102387 - RNA, 19 nt, Homo sapiens
  misc_RNA (1)...(19): siRNA sense strand
cggcuaaauuaauucuuga

SEQ ID NO: 2102388 - RNA, 19 nt, Homo sapiens
  misc_RNA (1)...(19): siRNA sense strand
ccaguuuaaugaagaaucu

SEQ ID NO: 2102389 - RNA, 19 nt, Homo sapiens
  misc_RNA (1)...(19): siRNA sense strand
caggaagugugcuuucauc

SEQ ID NO: 2102390 - RNA, 19 nt, Homo sapiens
  misc_RNA (1)...(19): siRNA sense strand
ccugaugaauuuacagcaa

SEQ ID NO: 2102391 - RNA, 19 nt, Homo sapiens
  misc_RNA (1)...(19): siRNA sense strand
auaauggcauggcuuugaa

SEQ ID NO: 2102392 - RNA, 19 nt, Homo sapiens
  misc_RNA (1)...(19): siRNA sense strand
acaagacggcuaaauuaau

SEQ ID NO: 2102393 - RNA, 19 nt, Homo sapiens
  misc_RNA (1)...(19): siRNA sense strand
ugcaagaccuggacaagag

SEQ ID NO: 2102394 - RNA, 19 nt, Homo sapiens
  misc_RNA (1)...(19): siRNA sense strand
ucagcgaacugcagcucaa

SEQ ID NO: 2102395 - RNA, 19 nt, Homo sapiens
  misc_RNA (1)...(19): siRNA sense strand
gagaaacaagagacugaga

SEQ ID NO: 2102396 - RNA, 19 nt, Homo sapiens
  misc_RNA (1)...(19): siRNA sense strand
cagaggaaccagaggagaa

SEQ ID NO: 2102397 - RNA, 19 nt, Homo sapiens
  misc_RNA (1)...(19): siRNA sense strand
acagacaaaccaagugauu

SEQ ID NO: 2102398 - RNA, 19 nt, Homo sapiens
  misc_RNA (1)...(19): siRNA sense strand
cuccaagacuuccugaguu

SEQ ID NO: 2102399 - RNA, 19 nt, Homo sapiens
  misc_RNA (1)...(19): siRNA sense strand
gguaucuuccugaugaauu

SEQ ID NO: 2102400 - RNA, 19 nt, Homo sapiens
  misc_RNA (1)...(19): siRNA sense strand
uccuggagcugauucuauu

SEQ ID NO: 2102401 - RNA, 19 nt, Homo sapiens
  misc_RNA (1)...(19): siRNA sense strand
ggaagguucaaguucaguu

SEQ ID NO: 2102402 - RNA, 19 nt, Homo sapiens
  misc_RNA (1)...(19): siRNA sense strand
cuacuucagugccuggaau

SEQ ID NO: 2102403 - RNA, 19 nt, Homo sapiens
  misc_RNA (1)...(19): siRNA sense strand
gcgaacugcagcucaaaga

SEQ ID NO: 2102404 - RNA, 19 nt, Homo sapiens
  misc_RNA (1)...(19): siRNA sense strand
cuuacaagacggcuaaauu

SEQ ID NO: 2102405 - RNA, 19 nt, Homo sapiens
  misc_RNA (1)...(19): siRNA sense strand
agaaagcaaaggaguguga

SEQ ID NO: 2102406 - RNA, 19 nt, Homo sapiens
  misc_RNA (1)...(19): siRNA sense strand
cuacagaacagacaaacca

SEQ ID NO: 2102407 - RNA, 19 nt, Homo sapiens
  misc_RNA (1)...(19): siRNA sense strand
ccaagacuuccugaguuua

SEQ ID NO: 2102408 - RNA, 19 nt, Homo sapiens
  misc_RNA (1)...(19): siRNA sense strand
ccagcccuaucaucaaaug

SEQ ID NO: 2102409 - RNA, 19 nt, Homo sapiens
  misc_RNA (1)...(19): siRNA sense strand
acggcuaaauuaauucuug

SEQ ID NO: 2102410 - RNA, 19 nt, Homo sapiens
  misc_RNA (1)...(19): siRNA sense strand
gauaaggaaauucaagcau

SEQ ID NO: 2102411 - RNA, 19 nt, Homo sapiens
  misc_RNA (1)...(19): siRNA sense strand
aauuauggguuggaagauu

SEQ ID NO: 2102412 - RNA, 19 nt, Homo sapiens
  misc_RNA (1)...(19): siRNA sense strand
agacaaccaguuuaaugaa

SEQ ID NO: 2102413 - RNA, 19 nt, Homo sapiens
  misc_RNA (1)...(19): siRNA sense strand
gaagaggcaggugguggaa

SEQ ID NO: 2102414 - RNA, 19 nt, Homo sapiens
  misc_RNA (1)...(19): siRNA sense strand
caagacuuccugaguuuag

SEQ ID NO: 2102415 - RNA, 19 nt, Homo sapiens
  misc_RNA (1)...(19): siRNA sense strand
uuauaugucagcaguguuu

SEQ ID NO: 2102416 - RNA, 19 nt, Homo sapiens
  misc_RNA (1)...(19): siRNA sense strand
cuccagcccuaucaucaaa

SEQ ID NO: 2102417 - RNA, 19 nt, Homo sapiens
  misc_RNA (1)...(19): siRNA sense strand
gcaagaccuggacaagaga

SEQ ID NO: 2102418 - RNA, 19 nt, Homo sapiens
  misc_RNA (1)...(19): siRNA sense strand
aaagaaagcaaaggagugu

SEQ ID NO: 2102419 - RNA, 19 nt, Homo sapiens
  misc_RNA (1)...(19): siRNA sense strand
cgaggugcuuuggauagaa

SEQ ID NO: 2102420 - RNA, 19 nt, Homo sapiens
  misc_RNA (1)...(19): siRNA sense strand
ugaugaauuuacagcaaga

SEQ ID NO: 2102421 - RNA, 19 nt, Homo sapiens
  misc_RNA (1)...(19): siRNA sense strand
gcccuaucaucaaaugugu

SEQ ID NO: 2102422 - RNA, 19 nt, Homo sapiens
  misc_RNA (1)...(19): siRNA sense strand
gcuccaagacuuccugagu

SEQ ID NO: 2102423 - RNA, 19 nt, Homo sapiens
  misc_RNA (1)...(19): siRNA sense strand
cuaaguggagaaucuuuga

SEQ ID NO: 2102424 - RNA, 19 nt, Homo sapiens
  misc_RNA (1)...(19): siRNA sense strand
ggaagccucagugauugaa

SEQ ID NO: 2102425 - RNA, 19 nt, Homo sapiens
  misc_RNA (1)...(19): siRNA sense strand
agaaacaagagacugagaa

SEQ ID NO: 2102426 - RNA, 19 nt, Homo sapiens
  misc_RNA (1)...(19): siRNA sense strand
acaaaccaagugauugaaa

SEQ ID NO: 2102427 - RNA, 19 nt, Homo sapiens
  misc_RNA (1)...(19): siRNA sense strand
uuggaagaauuuagggaaa

SEQ ID NO: 2102428 - RNA, 19 nt, Homo sapiens
  misc_RNA (1)...(19): siRNA sense strand
gggcccuccuccacaaguu

SEQ ID NO: 2102429 - RNA, 19 nt, Homo sapiens
  misc_RNA (1)...(19): siRNA sense strand
ggaaccagaggagaaacaa

SEQ ID NO: 2102430 - RNA, 19 nt, Homo sapiens
  misc_RNA (1)...(19): siRNA sense strand
ggaagugugcuuucaucag

SEQ ID NO: 2102431 - RNA, 19 nt, Homo sapiens
  misc_RNA (1)...(19): siRNA sense strand
cagaacagacaaaccaagu

SEQ ID NO: 2102432 - RNA, 19 nt, Homo sapiens
  misc_RNA (1)...(19): siRNA sense strand
gaacagagcuccuuagguu

SEQ ID NO: 2102433 - RNA, 19 nt, Homo sapiens
  misc_RNA (1)...(19): siRNA sense strand
gaagacaacuagacaagua

SEQ ID NO: 2102434 - RNA, 19 nt, Homo sapiens
  misc_RNA (1)...(19): siRNA sense strand
ggaaaggaauaccugguua

SEQ ID NO: 2102435 - RNA, 19 nt, Homo sapiens
  misc_RNA (1)...(19): siRNA sense strand
gaagauuuccuccagaaua

SEQ ID NO: 2102436 - RNA, 19 nt, Homo sapiens
  misc_RNA (1)...(19): siRNA sense strand
uaacaaggcauuugaugua

SEQ ID NO: 2102437 - RNA, 19 nt, Homo sapiens
  misc_RNA (1)...(19): siRNA sense strand
caagaggaacugauaauaa

SEQ ID NO: 2102438 - RNA, 19 nt, Homo sapiens
  misc_RNA (1)...(19): siRNA sense strand
gcaaauggguacaacuuca

SEQ ID NO: 2102439 - RNA, 19 nt, Homo sapiens
  misc_RNA (1)...(19): siRNA sense strand
uaaagaaggcgaaugaauu

SEQ ID NO: 2102440 - RNA, 19 nt, Homo sapiens
  misc_RNA (1)...(19): siRNA sense strand
uagguugacuucugaauuu

SEQ ID NO: 2102441 - RNA, 19 nt, Homo sapiens
  misc_RNA (1)...(19): siRNA sense strand
gcucauagcagcugucuga

SEQ ID NO: 2102442 - RNA, 19 nt, Homo sapiens
  misc_RNA (1)...(19): siRNA sense strand
caagacagcugaagagaac

SEQ ID NO: 2102443 - RNA, 19 nt, Homo sapiens
  misc_RNA (1)...(19): siRNA sense strand
aggaauaccugguuaaaga

SEQ ID NO: 2102444 - RNA, 19 nt, Homo sapiens
  misc_RNA (1)...(19): siRNA sense strand
gcaagaggaacugauaaua

SEQ ID NO: 2102445 - RNA, 19 nt, Homo sapiens
  misc_RNA (1)...(19): siRNA sense strand
acaacucacugacuucaua

SEQ ID NO: 2102446 - RNA, 19 nt, Homo sapiens
  misc_RNA (1)...(19): siRNA sense strand
agaccaagcugaagauuuc

SEQ ID NO: 2102447 - RNA, 19 nt, Homo sapiens
  misc_RNA (1)...(19): siRNA sense strand
gaaaggaauaccugguuaa

SEQ ID NO: 2102448 - RNA, 19 nt, Homo sapiens
  misc_RNA (1)...(19): siRNA sense strand
gcucaaggcuuuggaagau

SEQ ID NO: 2102449 - RNA, 19 nt, Homo sapiens
  misc_RNA (1)...(19): siRNA sense strand
gaauucugcugucaaagga

SEQ ID NO: 2102450 - RNA, 19 nt, Homo sapiens
  misc_RNA (1)...(19): siRNA sense strand
ugaaggaccuaaugugaau

SEQ ID NO: 2102451 - RNA, 19 nt, Homo sapiens
  misc_RNA (1)...(19): siRNA sense strand
aaagaaggcgaaugaauuu

SEQ ID NO: 2102452 - RNA, 19 nt, Homo sapiens
  misc_RNA (1)...(19): siRNA sense strand
gcagcugucugaagguuga

SEQ ID NO: 2102453 - RNA, 19 nt, Homo sapiens
  misc_RNA (1)...(19): siRNA sense strand
gaaauuggcagcagucaag

SEQ ID NO: 2102454 - RNA, 19 nt, Homo sapiens
  misc_RNA (1)...(19): siRNA sense strand
ugagaauucugcugucaaa

SEQ ID NO: 2102455 - RNA, 19 nt, Homo sapiens
  misc_RNA (1)...(19): siRNA sense strand
uugagaagcugaagaguga

SEQ ID NO: 2102456 - RNA, 19 nt, Homo sapiens
  misc_RNA (1)...(19): siRNA sense strand
guucaucacuuucagacaa

SEQ ID NO: 2102457 - RNA, 19 nt, Homo sapiens
  misc_RNA (1)...(19): siRNA sense strand
ugagagugcugaguccuua

SEQ ID NO: 2102458 - RNA, 19 nt, Homo sapiens
  misc_RNA (1)...(19): siRNA sense strand
gaaaaugccuuagaguuug

SEQ ID NO: 2102459 - RNA, 19 nt, Homo sapiens
  misc_RNA (1)...(19): siRNA sense strand
ccuuagaguuugcuauuaa

SEQ ID NO: 2102460 - RNA, 19 nt, Homo sapiens
  misc_RNA (1)...(19): siRNA sense strand
cauaaaguguggcaaaugg

SEQ ID NO: 2102461 - RNA, 19 nt, Homo sapiens
  misc_RNA (1)...(19): siRNA sense strand
uaagcaagaggaacugaua

SEQ ID NO: 2102462 - RNA, 19 nt, Homo sapiens
  misc_RNA (1)...(19): siRNA sense strand
gcauccagcugacagugaa

SEQ ID NO: 2102463 - RNA, 19 nt, Homo sapiens
  misc_RNA (1)...(19): siRNA sense strand
ggcacaugcugcuuuguuu

SEQ ID NO: 2102464 - RNA, 19 nt, Homo sapiens
  misc_RNA (1)...(19): siRNA sense strand
gcaggaagcagacaagaca

SEQ ID NO: 2102465 - RNA, 19 nt, Homo sapiens
  misc_RNA (1)...(19): siRNA sense strand
gauguuaauuuccuaggau

SEQ ID NO: 2102466 - RNA, 19 nt, Homo sapiens
  misc_RNA (1)...(19): siRNA sense strand
caugaggaauuacacagaa

SEQ ID NO: 2102467 - RNA, 19 nt, Homo sapiens
  misc_RNA (1)...(19): siRNA sense strand
ccagcucucucaccagaaa

SEQ ID NO: 2102468 - RNA, 19 nt, Homo sapiens
  misc_RNA (1)...(19): siRNA sense strand
gaagagaacaaggaucaga

SEQ ID NO: 2102469 - RNA, 19 nt, Homo sapiens
  misc_RNA (1)...(19): siRNA sense strand
caaggcauuugauguacuu

SEQ ID NO: 2102470 - RNA, 19 nt, Homo sapiens
  misc_RNA (1)...(19): siRNA sense strand
uaaugugaauccugaguug

SEQ ID NO: 2102471 - RNA, 19 nt, Homo sapiens
  misc_RNA (1)...(19): siRNA sense strand
gaacggucuuuagcccuuu

SEQ ID NO: 2102472 - RNA, 19 nt, Homo sapiens
  misc_RNA (1)...(19): siRNA sense strand
gguuaaagaaggcgaauga

SEQ ID NO: 2102473 - RNA, 19 nt, Homo sapiens
  misc_RNA (1)...(19): siRNA sense strand
gaaacucagucagcuucaa

SEQ ID NO: 2102474 - RNA, 19 nt, Homo sapiens
  misc_RNA (1)...(19): siRNA sense strand
acagaaguguuuagagguu

SEQ ID NO: 2102475 - RNA, 19 nt, Homo sapiens
  misc_RNA (1)...(19): siRNA sense strand
gaaauuuacaggaacaaag

SEQ ID NO: 2102476 - RNA, 19 nt, Homo sapiens
  misc_RNA (1)...(19): siRNA sense strand
gagucaaguucugcagaua

SEQ ID NO: 2102477 - RNA, 19 nt, Homo sapiens
  misc_RNA (1)...(19): siRNA sense strand
gcccaaucuucuagaaauu

SEQ ID NO: 2102478 - RNA, 19 nt, Homo sapiens
  misc_RNA (1)...(19): siRNA sense strand
ggaauaccugguuaaagaa

SEQ ID NO: 2102479 - RNA, 19 nt, Homo sapiens
  misc_RNA (1)...(19): siRNA sense strand
gccuuagaguuugcuauua

SEQ ID NO: 2102480 - RNA, 19 nt, Homo sapiens
  misc_RNA (1)...(19): siRNA sense strand
gaguugaagcuuaccuuaa

SEQ ID NO: 2102481 - RNA, 19 nt, Homo sapiens
  misc_RNA (1)...(19): siRNA sense strand
gcaacaguggcaagaauug

SEQ ID NO: 2102482 - RNA, 19 nt, Homo sapiens
  misc_RNA (1)...(19): siRNA sense strand
gggcagcucugguguccau

SEQ ID NO: 2102483 - RNA, 19 nt, Homo sapiens
  misc_RNA (1)...(19): siRNA sense strand
cugcacaacugaugcuuug

SEQ ID NO: 2102484 - RNA, 19 nt, Homo sapiens
  misc_RNA (1)...(19): siRNA sense strand
agaauuuggucaacucaug

SEQ ID NO: 2102485 - RNA, 19 nt, Homo sapiens
  misc_RNA (1)...(19): siRNA sense strand
aaacugaugucuugcuuuu

SEQ ID NO: 2102486 - RNA, 19 nt, Homo sapiens
  misc_RNA (1)...(19): siRNA sense strand
gaaacugaugucuugcuuu

SEQ ID NO: 2102487 - RNA, 19 nt, Homo sapiens
  misc_RNA (1)...(19): siRNA sense strand
caagaaaaccagaaaacua

SEQ ID NO: 2102488 - RNA, 19 nt, Homo sapiens
  misc_RNA (1)...(19): siRNA sense strand
cagucaagaugaaaccaaa

SEQ ID NO: 2102489 - RNA, 19 nt, Homo sapiens
  misc_RNA (1)...(19): siRNA sense strand
agugaggcaugaggaauua

SEQ ID NO: 2102490 - RNA, 19 nt, Homo sapiens
  misc_RNA (1)...(19): siRNA sense strand
uuggaagaguugaagcuua

SEQ ID NO: 2102491 - RNA, 19 nt, Homo sapiens
  misc_RNA (1)...(19): siRNA sense strand
ggaucgaauucauaagcaa

SEQ ID NO: 2102492 - RNA, 19 nt, Homo sapiens
  misc_RNA (1)...(19): siRNA sense strand
agucuagguucaucacuuu

SEQ ID NO: 2102493 - RNA, 19 nt, Homo sapiens
  misc_RNA (1)...(19): siRNA sense strand
gagaagacaacuagacaag

SEQ ID NO: 2102494 - RNA, 19 nt, Homo sapiens
  misc_RNA (1)...(19): siRNA sense strand
gcacaugcugcuuuguuug

SEQ ID NO: 2102495 - RNA, 19 nt, Homo sapiens
  misc_RNA (1)...(19): siRNA sense strand
ugaaacugaugucuugcuu

SEQ ID NO: 2102496 - RNA, 19 nt, Homo sapiens
  misc_RNA (1)...(19): siRNA sense strand
gaagaacagagcuccuuag

SEQ ID NO: 2102497 - RNA, 19 nt, Homo sapiens
  misc_RNA (1)...(19): siRNA sense strand
gucaaguucugcagauaug

SEQ ID NO: 2102498 - RNA, 19 nt, Homo sapiens
  misc_RNA (1)...(19): siRNA sense strand
ggagaagacaacuagacaa

SEQ ID NO: 2102499 - RNA, 19 nt, Homo sapiens
  misc_RNA (1)...(19): siRNA sense strand
cagaaguguuuagagguuu

SEQ ID NO: 2102500 - RNA, 19 nt, Homo sapiens
  misc_RNA (1)...(19): siRNA sense strand
cugaagauuuccuccagaa

SEQ ID NO: 2102501 - RNA, 19 nt, Homo sapiens
  misc_RNA (1)...(19): siRNA sense strand
aagcaacaguggcaagaau

SEQ ID NO: 2102502 - RNA, 19 nt, Homo sapiens
  misc_RNA (1)...(19): siRNA sense strand
gugaaggaccuaaugugaa

SEQ ID NO: 2102503 - RNA, 19 nt, Homo sapiens
  misc_RNA (1)...(19): siRNA sense strand
caagaagaauuuggucaac

SEQ ID NO: 2102504 - RNA, 19 nt, Homo sapiens
  misc_RNA (1)...(19): siRNA sense strand
uggcagcagucaagaugaa

SEQ ID NO: 2102505 - RNA, 19 nt, Homo sapiens
  misc_RNA (1)...(19): siRNA sense strand
gacaggagaagacaacuag

SEQ ID NO: 2102506 - RNA, 19 nt, Homo sapiens
  misc_RNA (1)...(19): siRNA sense strand
ugaaaaugccuuagaguuu

SEQ ID NO: 2102507 - RNA, 19 nt, Homo sapiens
  misc_RNA (1)...(19): siRNA sense strand
caacugaugcuuugcaaaa

SEQ ID NO: 2102508 - RNA, 19 nt, Homo sapiens
  misc_RNA (1)...(19): siRNA sense strand
gcaugaggaauuacacaga

SEQ ID NO: 2102509 - RNA, 19 nt, Homo sapiens
  misc_RNA (1)...(19): siRNA sense strand
ugauguacuuggaagaguu

SEQ ID NO: 2102510 - RNA, 19 nt, Homo sapiens
  misc_RNA (1)...(19): siRNA sense strand
caaaggacuacguggagaa

SEQ ID NO: 2102511 - RNA, 19 nt, Homo sapiens
  misc_RNA (1)...(19): siRNA sense strand
ucagugggaccaacaagaa

SEQ ID NO: 2102512 - RNA, 19 nt, Homo sapiens
  misc_RNA (1)...(19): siRNA sense strand
gggcacaugcugcuuuguu

SEQ ID NO: 2102513 - RNA, 19 nt, Homo sapiens
  misc_RNA (1)...(19): siRNA sense strand
uaaaauagaccaagcugaa

SEQ ID NO: 2102514 - RNA, 19 nt, Homo sapiens
  misc_RNA (1)...(19): siRNA sense strand
agaagaacagagcuccuua

SEQ ID NO: 2102515 - RNA, 19 nt, Homo sapiens
  misc_RNA (1)...(19): siRNA sense strand
ggcauuugauguacuugga

SEQ ID NO: 2102516 - RNA, 19 nt, Homo sapiens
  misc_RNA (1)...(19): siRNA sense strand
gcuaacaaggcauuugaug

SEQ ID NO: 2102517 - RNA, 19 nt, Homo sapiens
  misc_RNA (1)...(19): siRNA sense strand
ggacuacguggagaaagaa

SEQ ID NO: 2102518 - RNA, 19 nt, Homo sapiens
  misc_RNA (1)...(19): siRNA sense strand
gaagcaacaguggcaagaa

SEQ ID NO: 2102519 - RNA, 19 nt, Homo sapiens
  misc_RNA (1)...(19): siRNA sense strand
cuaaaggcaagaaauaugu

SEQ ID NO: 2102520 - RNA, 19 nt, Homo sapiens
  misc_RNA (1)...(19): siRNA sense strand
acagagcuccuuagguuga

SEQ ID NO: 2102521 - RNA, 19 nt, Homo sapiens
  misc_RNA (1)...(19): siRNA sense strand
gcacaacugaugcuuugca

SEQ ID NO: 2102522 - RNA, 19 nt, Homo sapiens
  misc_RNA (1)...(19): siRNA sense strand
gaagaauuuggucaacuca

SEQ ID NO: 2102523 - RNA, 19 nt, Homo sapiens
  misc_RNA (1)...(19): siRNA sense strand
agaagaauuuggucaacuc

SEQ ID NO: 2102524 - RNA, 19 nt, Homo sapiens
  misc_RNA (1)...(19): siRNA sense strand
ucaagaagaauuuggucaa

SEQ ID NO: 2102525 - RNA, 19 nt, Homo sapiens
  misc_RNA (1)...(19): siRNA sense strand
caacaguggcaagaauuga

SEQ ID NO: 2102526 - RNA, 19 nt, Homo sapiens
  misc_RNA (1)...(19): siRNA sense strand
ucacugacuucauagaaaa

SEQ ID NO: 2102527 - RNA, 19 nt, Homo sapiens
  misc_RNA (1)...(19): siRNA sense strand
caacaacucacugacuuca

SEQ ID NO: 2102528 - RNA, 19 nt, Homo sapiens
  misc_RNA (1)...(19): siRNA sense strand
guccaugcuugaaagaaga

SEQ ID NO: 2102529 - RNA, 19 nt, Homo sapiens
  misc_RNA (1)...(19): siRNA sense strand
uggaagaguugaagcuuac

SEQ ID NO: 2102530 - RNA, 19 nt, Homo sapiens
  misc_RNA (1)...(19): siRNA sense strand
aaaggaauaccugguuaaa

SEQ ID NO: 2102531 - RNA, 19 nt, Homo sapiens
  misc_RNA (1)...(19): siRNA sense strand
caaauggguacaacuucaa

SEQ ID NO: 2102532 - RNA, 19 nt, Homo sapiens
  misc_RNA (1)...(19): siRNA sense strand
gaaaggaacucagaacaaa

SEQ ID NO: 2102533 - RNA, 19 nt, Homo sapiens
  misc_RNA (1)...(19): siRNA sense strand
ggaaauaaauccacaguuc

SEQ ID NO: 2102534 - RNA, 19 nt, Homo sapiens
  misc_RNA (1)...(19): siRNA sense strand
cagaaggacucacugauua

SEQ ID NO: 2102535 - RNA, 19 nt, Homo sapiens
  misc_RNA (1)...(19): siRNA sense strand
caucagaaaugcugguuua

SEQ ID NO: 2102536 - RNA, 19 nt, Homo sapiens
  misc_RNA (1)...(19): siRNA sense strand
gagaauaguuacacugaaa

SEQ ID NO: 2102537 - RNA, 19 nt, Homo sapiens
  misc_RNA (1)...(19): siRNA sense strand
gauauucucuccaguaguu

SEQ ID NO: 2102538 - RNA, 19 nt, Homo sapiens
  misc_RNA (1)...(19): siRNA sense strand
caaagaaacuguucaaacu

SEQ ID NO: 2102539 - RNA, 19 nt, Homo sapiens
  misc_RNA (1)...(19): siRNA sense strand
ugaaagagacccaugaaua

SEQ ID NO: 2102540 - RNA, 19 nt, Homo sapiens
  misc_RNA (1)...(19): siRNA sense strand
aaagaagucucuagugaaa

SEQ ID NO: 2102541 - RNA, 19 nt, Homo sapiens
  misc_RNA (1)...(19): siRNA sense strand
aaacacagaucuacaguuc

SEQ ID NO: 2102542 - RNA, 19 nt, Homo sapiens
  misc_RNA (1)...(19): siRNA sense strand
gaaagagacccaugaauac

SEQ ID NO: 2102543 - RNA, 19 nt, Homo sapiens
  misc_RNA (1)...(19): siRNA sense strand
guauuuagcugcagagcaa

SEQ ID NO: 2102544 - RNA, 19 nt, Homo sapiens
  misc_RNA (1)...(19): siRNA sense strand
ugucagauguuuccaauga

SEQ ID NO: 2102545 - RNA, 19 nt, Homo sapiens
  misc_RNA (1)...(19): siRNA sense strand
gaucaaauaccacuagaga

SEQ ID NO: 2102546 - RNA, 19 nt, Homo sapiens
  misc_RNA (1)...(19): siRNA sense strand
gcaaauccuggcuccauua

SEQ ID NO: 2102547 - RNA, 19 nt, Homo sapiens
  misc_RNA (1)...(19): siRNA sense strand
uaacacacaaccaccauua

SEQ ID NO: 2102548 - RNA, 19 nt, Homo sapiens
  misc_RNA (1)...(19): siRNA sense strand
ucaaggaacugaaacaaag

SEQ ID NO: 2102549 - RNA, 19 nt, Homo sapiens
  misc_RNA (1)...(19): siRNA sense strand
gcuguaauccucuauguuu

SEQ ID NO: 2102550 - RNA, 19 nt, Homo sapiens
  misc_RNA (1)...(19): siRNA sense strand
ggaaaaggauuuagcagaa

SEQ ID NO: 2102551 - RNA, 19 nt, Homo sapiens
  misc_RNA (1)...(19): siRNA sense strand
gcacaugucaguggucaua

SEQ ID NO: 2102552 - RNA, 19 nt, Homo sapiens
  misc_RNA (1)...(19): siRNA sense strand
cagccuaaauccuaucuuu

SEQ ID NO: 2102553 - RNA, 19 nt, Homo sapiens
  misc_RNA (1)...(19): siRNA sense strand
uggaagaucugaaggcaaa

SEQ ID NO: 2102554 - RNA, 19 nt, Homo sapiens
  misc_RNA (1)...(19): siRNA sense strand
cagaaaugcugguuuauac

SEQ ID NO: 2102555 - RNA, 19 nt, Homo sapiens
  misc_RNA (1)...(19): siRNA sense strand
aauccuaucuuugccauua

SEQ ID NO: 2102556 - RNA, 19 nt, Homo sapiens
  misc_RNA (1)...(19): siRNA sense strand
uaaaagaagucucuaguga

SEQ ID NO: 2102557 - RNA, 19 nt, Homo sapiens
  misc_RNA (1)...(19): siRNA sense strand
caacugaguggcugcguua

SEQ ID NO: 2102558 - RNA, 19 nt, Homo sapiens
  misc_RNA (1)...(19): siRNA sense strand
caugaauacugguuccaua

SEQ ID NO: 2102559 - RNA, 19 nt, Homo sapiens
  misc_RNA (1)...(19): siRNA sense strand
gaagagaauacuaaagaug

SEQ ID NO: 2102560 - RNA, 19 nt, Homo sapiens
  misc_RNA (1)...(19): siRNA sense strand
gaaaugcugguuuauacaa

SEQ ID NO: 2102561 - RNA, 19 nt, Homo sapiens
  misc_RNA (1)...(19): siRNA sense strand
gugacaagcaguacuauaa

SEQ ID NO: 2102562 - RNA, 19 nt, Homo sapiens
  misc_RNA (1)...(19): siRNA sense strand
gaugauauucucuccagua

SEQ ID NO: 2102563 - RNA, 19 nt, Homo sapiens
  misc_RNA (1)...(19): siRNA sense strand
acacagaucuacaguucuu

SEQ ID NO: 2102564 - RNA, 19 nt, Homo sapiens
  misc_RNA (1)...(19): siRNA sense strand
ccagaaagugcaaauaauu

SEQ ID NO: 2102565 - RNA, 19 nt, Homo sapiens
  misc_RNA (1)...(19): siRNA sense strand
cccauuagcagaucaaaua

SEQ ID NO: 2102566 - RNA, 19 nt, Homo sapiens
  misc_RNA (1)...(19): siRNA sense strand
caaagaagcacaugucagu

SEQ ID NO: 2102567 - RNA, 19 nt, Homo sapiens
  misc_RNA (1)...(19): siRNA sense strand
ugggaccacuuucagauua

SEQ ID NO: 2102568 - RNA, 19 nt, Homo sapiens
  misc_RNA (1)...(19): siRNA sense strand
ucaacaaucuucaccaaca

SEQ ID NO: 2102569 - RNA, 19 nt, Homo sapiens
  misc_RNA (1)...(19): siRNA sense strand
cagauuaucccgugaaaga

SEQ ID NO: 2102570 - RNA, 19 nt, Homo sapiens
  misc_RNA (1)...(19): siRNA sense strand
gcccaaaucagaauccaua

SEQ ID NO: 2102571 - RNA, 19 nt, Homo sapiens
  misc_RNA (1)...(19): siRNA sense strand
gcagagcaauuauuagacu

SEQ ID NO: 2102572 - RNA, 19 nt, Homo sapiens
  misc_RNA (1)...(19): siRNA sense strand
gugaagagaauacuaaaga

SEQ ID NO: 2102573 - RNA, 19 nt, Homo sapiens
  misc_RNA (1)...(19): siRNA sense strand
gaauccauauccuuaagug

SEQ ID NO: 2102574 - RNA, 19 nt, Homo sapiens
  misc_RNA (1)...(19): siRNA sense strand
gaacugaaacaaagggaau

SEQ ID NO: 2102575 - RNA, 19 nt, Homo sapiens
  misc_RNA (1)...(19): siRNA sense strand
gaacacaaagaaagaagug

SEQ ID NO: 2102576 - RNA, 19 nt, Homo sapiens
  misc_RNA (1)...(19): siRNA sense strand
gaaacugagcauuuagaaa

SEQ ID NO: 2102577 - RNA, 19 nt, Homo sapiens
  misc_RNA (1)...(19): siRNA sense strand
gaaacucgcugcaaaaugg

SEQ ID NO: 2102578 - RNA, 19 nt, Homo sapiens
  misc_RNA (1)...(19): siRNA sense strand
caaccaccauuaccauuca

SEQ ID NO: 2102579 - RNA, 19 nt, Homo sapiens
  misc_RNA (1)...(19): siRNA sense strand
gcuaagaaaggaaacugua

SEQ ID NO: 2102580 - RNA, 19 nt, Homo sapiens
  misc_RNA (1)...(19): siRNA sense strand
gacaacauucacauucuua

SEQ ID NO: 2102581 - RNA, 19 nt, Homo sapiens
  misc_RNA (1)...(19): siRNA sense strand
gaaucaggcuguuaaaaga

SEQ ID NO: 2102582 - RNA, 19 nt, Homo sapiens
  misc_RNA (1)...(19): siRNA sense strand
uaaagaugcuaccacuguu

SEQ ID NO: 2102583 - RNA, 19 nt, Homo sapiens
  misc_RNA (1)...(19): siRNA sense strand
cuagagaguguuguuauua

SEQ ID NO: 2102584 - RNA, 19 nt, Homo sapiens
  misc_RNA (1)...(19): siRNA sense strand
cugaguggcugcguuauaa

SEQ ID NO: 2102585 - RNA, 19 nt, Homo sapiens
  misc_RNA (1)...(19): siRNA sense strand
gaucacagaagcuuaguuc

SEQ ID NO: 2102586 - RNA, 19 nt, Homo sapiens
  misc_RNA (1)...(19): siRNA sense strand
acaaucaaaugcaacaaug

SEQ ID NO: 2102587 - RNA, 19 nt, Homo sapiens
  misc_RNA (1)...(19): siRNA sense strand
cuggauagguuaauaagug

SEQ ID NO: 2102588 - RNA, 19 nt, Homo sapiens
  misc_RNA (1)...(19): siRNA sense strand
aaagggaauuugcucgaaa

SEQ ID NO: 2102589 - RNA, 19 nt, Homo sapiens
  misc_RNA (1)...(19): siRNA sense strand
ucaauuuccuauagcugua

SEQ ID NO: 2102590 - RNA, 19 nt, Homo sapiens
  misc_RNA (1)...(19): siRNA sense strand
ucagaaaugcugguuuaua

SEQ ID NO: 2102591 - RNA, 19 nt, Homo sapiens
  misc_RNA (1)...(19): siRNA sense strand
gaaauaaauccacaguucu

SEQ ID NO: 2102592 - RNA, 19 nt, Homo sapiens
  misc_RNA (1)...(19): siRNA sense strand
caggaaagaugaaagaaaa

SEQ ID NO: 2102593 - RNA, 19 nt, Homo sapiens
  misc_RNA (1)...(19): siRNA sense strand
gaaaaggauuuagcagaaa

SEQ ID NO: 2102594 - RNA, 19 nt, Homo sapiens
  misc_RNA (1)...(19): siRNA sense strand
ugaaugagacaccaacuga

SEQ ID NO: 2102595 - RNA, 19 nt, Homo sapiens
  misc_RNA (1)...(19): siRNA sense strand
ugaaacacaugagucagaa

SEQ ID NO: 2102596 - RNA, 19 nt, Homo sapiens
  misc_RNA (1)...(19): siRNA sense strand
gcagaagcaggaagacauu

SEQ ID NO: 2102597 - RNA, 19 nt, Homo sapiens
  misc_RNA (1)...(19): siRNA sense strand
uguucaaacucaagagaua

SEQ ID NO: 2102598 - RNA, 19 nt, Homo sapiens
  misc_RNA (1)...(19): siRNA sense strand
caaagaaagcguccgugaa

SEQ ID NO: 2102599 - RNA, 19 nt, Homo sapiens
  misc_RNA (1)...(19): siRNA sense strand
gaguuugacaaucacauua

SEQ ID NO: 2102600 - RNA, 19 nt, Homo sapiens
  misc_RNA (1)...(19): siRNA sense strand
acaauacccugcuugaaca

SEQ ID NO: 2102601 - RNA, 19 nt, Homo sapiens
  misc_RNA (1)...(19): siRNA sense strand
uggugaaacugagcauuua

SEQ ID NO: 2102602 - RNA, 19 nt, Homo sapiens
  misc_RNA (1)...(19): siRNA sense strand
gaacucagaacaaacaaac

SEQ ID NO: 2102603 - RNA, 19 nt, Homo sapiens
  misc_RNA (1)...(19): siRNA sense strand
guagacaacauucacauuc

SEQ ID NO: 2102604 - RNA, 19 nt, Homo sapiens
  misc_RNA (1)...(19): siRNA sense strand
acaggacacucuagaugaa

SEQ ID NO: 2102605 - RNA, 19 nt, Homo sapiens
  misc_RNA (1)...(19): siRNA sense strand
ccacaguucuugacauguc

SEQ ID NO: 2102606 - RNA, 19 nt, Homo sapiens
  misc_RNA (1)...(19): siRNA sense strand
gaagacauaccuguuagug

SEQ ID NO: 2102607 - RNA, 19 nt, Homo sapiens
  misc_RNA (1)...(19): siRNA sense strand
aaugaagacauaccuguua

SEQ ID NO: 2102608 - RNA, 19 nt, Homo sapiens
  misc_RNA (1)...(19): siRNA sense strand
aagaaacuguucaaacuca

SEQ ID NO: 2102609 - RNA, 19 nt, Homo sapiens
  misc_RNA (1)...(19): siRNA sense strand
cgaaauguagcaucuaaau

SEQ ID NO: 2102610 - RNA, 19 nt, Homo sapiens
  misc_RNA (1)...(19): siRNA sense strand
ucaggugccuaauauugaa

SEQ ID NO: 2102611 - RNA, 19 nt, Homo sapiens
  misc_RNA (1)...(19): siRNA sense strand
ccaaugaucccaccacauc

SEQ ID NO: 2102612 - RNA, 19 nt, Homo sapiens
  misc_RNA (1)...(19): siRNA sense strand
cgaaaggaacucagaacaa

SEQ ID NO: 2102613 - RNA, 19 nt, Homo sapiens
  misc_RNA (1)...(19): siRNA sense strand
gaauacugguuccauaaaa

SEQ ID NO: 2102614 - RNA, 19 nt, Homo sapiens
  misc_RNA (1)...(19): siRNA sense strand
gaaagcguccgugaagcua

SEQ ID NO: 2102615 - RNA, 19 nt, Homo sapiens
  misc_RNA (1)...(19): siRNA sense strand
ugacaugucuaaugauugc

SEQ ID NO: 2102616 - RNA, 19 nt, Homo sapiens
  misc_RNA (1)...(19): siRNA sense strand
uguaacagcugagcaaauc

SEQ ID NO: 2102617 - RNA, 19 nt, Homo sapiens
  misc_RNA (1)...(19): siRNA sense strand
gcaucuaaauccaggaaag

SEQ ID NO: 2102618 - RNA, 19 nt, Homo sapiens
  misc_RNA (1)...(19): siRNA sense strand
ggugaauugucagauguuu

SEQ ID NO: 2102619 - RNA, 19 nt, Homo sapiens
  misc_RNA (1)...(19): siRNA sense strand
gacaauucuuccuuaaauc

SEQ ID NO: 2102620 - RNA, 19 nt, Homo sapiens
  misc_RNA (1)...(19): siRNA sense strand
gaacuuacuguuguuggaa

SEQ ID NO: 2102621 - RNA, 19 nt, Homo sapiens
  misc_RNA (1)...(19): siRNA sense strand
gaaauuggaaguagcaaaa

SEQ ID NO: 2102622 - RNA, 19 nt, Homo sapiens
  misc_RNA (1)...(19): siRNA sense strand
ucaaauaccacuagagagu

SEQ ID NO: 2102623 - RNA, 19 nt, Homo sapiens
  misc_RNA (1)...(19): siRNA sense strand
gaaauguagcaucuaaauc

SEQ ID NO: 2102624 - RNA, 19 nt, Homo sapiens
  misc_RNA (1)...(19): siRNA sense strand
gaagaucugaaggcaaauu

SEQ ID NO: 2102625 - RNA, 19 nt, Homo sapiens
  misc_RNA (1)...(19): siRNA sense strand
caaggaaagaugaaugaga

SEQ ID NO: 2102626 - RNA, 19 nt, Homo sapiens
  misc_RNA (1)...(19): siRNA sense strand
gaaaaugaaaccacaagaa

SEQ ID NO: 2102627 - RNA, 19 nt, Homo sapiens
  misc_RNA (1)...(19): siRNA sense strand
aaacaggacacucuagaug

SEQ ID NO: 2102628 - RNA, 19 nt, Homo sapiens
  misc_RNA (1)...(19): siRNA sense strand
aaagaaagcguccgugaag

SEQ ID NO: 2102629 - RNA, 19 nt, Homo sapiens
  misc_RNA (1)...(19): siRNA sense strand
gacaauacccugcuugaac

SEQ ID NO: 2102630 - RNA, 19 nt, Homo sapiens
  misc_RNA (1)...(19): siRNA sense strand
ggagaaaaccaaagaauca

SEQ ID NO: 2102631 - RNA, 19 nt, Homo sapiens
  misc_RNA (1)...(19): siRNA sense strand
caaaagcucuggaagaucu

SEQ ID NO: 2102632 - RNA, 19 nt, Homo sapiens
  misc_RNA (1)...(19): siRNA sense strand
gaaaggaacucagaacaaa

SEQ ID NO: 2102633 - RNA, 19 nt, Homo sapiens
  misc_RNA (1)...(19): siRNA sense strand
ggaaauaaauccacaguuc

SEQ ID NO: 2102634 - RNA, 19 nt, Homo sapiens
  misc_RNA (1)...(19): siRNA sense strand
cagaaggacucacugauua

SEQ ID NO: 2102635 - RNA, 19 nt, Homo sapiens
  misc_RNA (1)...(19): siRNA sense strand
caucagaaaugcugguuua

SEQ ID NO: 2102636 - RNA, 19 nt, Homo sapiens
  misc_RNA (1)...(19): siRNA sense strand
gagaauaguuacacugaaa

SEQ ID NO: 2102637 - RNA, 19 nt, Homo sapiens
  misc_RNA (1)...(19): siRNA sense strand
gauauucucuccaguaguu

SEQ ID NO: 2102638 - RNA, 19 nt, Homo sapiens
  misc_RNA (1)...(19): siRNA sense strand
caaagaaacuguucaaacu

SEQ ID NO: 2102639 - RNA, 19 nt, Homo sapiens
  misc_RNA (1)...(19): siRNA sense strand
ugaaagagacccaugaaua

SEQ ID NO: 2102640 - RNA, 19 nt, Homo sapiens
  misc_RNA (1)...(19): siRNA sense strand
aaagaagucucuagugaaa

SEQ ID NO: 2102641 - RNA, 19 nt, Homo sapiens
  misc_RNA (1)...(19): siRNA sense strand
aaacacagaucuacaguuc

SEQ ID NO: 2102642 - RNA, 19 nt, Homo sapiens
  misc_RNA (1)...(19): siRNA sense strand
gaaagagacccaugaauac

SEQ ID NO: 2102643 - RNA, 19 nt, Homo sapiens
  misc_RNA (1)...(19): siRNA sense strand
guauuuagcugcagagcaa

SEQ ID NO: 2102644 - RNA, 19 nt, Homo sapiens
  misc_RNA (1)...(19): siRNA sense strand
ugucagauguuuccaauga

SEQ ID NO: 2102645 - RNA, 19 nt, Homo sapiens
  misc_RNA (1)...(19): siRNA sense strand
gaucaaauaccacuagaga

SEQ ID NO: 2102646 - RNA, 19 nt, Homo sapiens
  misc_RNA (1)...(19): siRNA sense strand
gcaaauccuggcuccauua

SEQ ID NO: 2102647 - RNA, 19 nt, Homo sapiens
  misc_RNA (1)...(19): siRNA sense strand
uaacacacaaccaccauua

SEQ ID NO: 2102648 - RNA, 19 nt, Homo sapiens
  misc_RNA (1)...(19): siRNA sense strand
ucaaggaacugaaacaaag

SEQ ID NO: 2102649 - RNA, 19 nt, Homo sapiens
  misc_RNA (1)...(19): siRNA sense strand
gcuguaauccucuauguuu

SEQ ID NO: 2102650 - RNA, 19 nt, Homo sapiens
  misc_RNA (1)...(19): siRNA sense strand
ggaaaaggauuuagcagaa

SEQ ID NO: 2102651 - RNA, 19 nt, Homo sapiens
  misc_RNA (1)...(19): siRNA sense strand
gcacaugucaguggucaua

SEQ ID NO: 2102652 - RNA, 19 nt, Homo sapiens
  misc_RNA (1)...(19): siRNA sense strand
cagccuaaauccuaucuuu

SEQ ID NO: 2102653 - RNA, 19 nt, Homo sapiens
  misc_RNA (1)...(19): siRNA sense strand
uggaagaucugaaggcaaa

SEQ ID NO: 2102654 - RNA, 19 nt, Homo sapiens
  misc_RNA (1)...(19): siRNA sense strand
cagaaaugcugguuuauac

SEQ ID NO: 2102655 - RNA, 19 nt, Homo sapiens
  misc_RNA (1)...(19): siRNA sense strand
aauccuaucuuugccauua

SEQ ID NO: 2102656 - RNA, 19 nt, Homo sapiens
  misc_RNA (1)...(19): siRNA sense strand
uaaaagaagucucuaguga

SEQ ID NO: 2102657 - RNA, 19 nt, Homo sapiens
  misc_RNA (1)...(19): siRNA sense strand
caacugaguggcugcguua

SEQ ID NO: 2102658 - RNA, 19 nt, Homo sapiens
  misc_RNA (1)...(19): siRNA sense strand
caugaauacugguuccaua

SEQ ID NO: 2102659 - RNA, 19 nt, Homo sapiens
  misc_RNA (1)...(19): siRNA sense strand
gaagagaauacuaaagaug

SEQ ID NO: 2102660 - RNA, 19 nt, Homo sapiens
  misc_RNA (1)...(19): siRNA sense strand
gaaaugcugguuuauacaa

SEQ ID NO: 2102661 - RNA, 19 nt, Homo sapiens
  misc_RNA (1)...(19): siRNA sense strand
gugacaagcaguacuauaa

SEQ ID NO: 2102662 - RNA, 19 nt, Homo sapiens
  misc_RNA (1)...(19): siRNA sense strand
gaugauauucucuccagua

SEQ ID NO: 2102663 - RNA, 19 nt, Homo sapiens
  misc_RNA (1)...(19): siRNA sense strand
acacagaucuacaguucuu

SEQ ID NO: 2102664 - RNA, 19 nt, Homo sapiens
  misc_RNA (1)...(19): siRNA sense strand
ccagaaagugcaaauaauu

SEQ ID NO: 2102665 - RNA, 19 nt, Homo sapiens
  misc_RNA (1)...(19): siRNA sense strand
cccauuagcagaucaaaua

SEQ ID NO: 2102666 - RNA, 19 nt, Homo sapiens
  misc_RNA (1)...(19): siRNA sense strand
caaagaagcacaugucagu

SEQ ID NO: 2102667 - RNA, 19 nt, Homo sapiens
  misc_RNA (1)...(19): siRNA sense strand
ugggaccacuuucagauua

SEQ ID NO: 2102668 - RNA, 19 nt, Homo sapiens
  misc_RNA (1)...(19): siRNA sense strand
ucaacaaucuucaccaaca

SEQ ID NO: 2102669 - RNA, 19 nt, Homo sapiens
  misc_RNA (1)...(19): siRNA sense strand
cagauuaucccgugaaaga

SEQ ID NO: 2102670 - RNA, 19 nt, Homo sapiens
  misc_RNA (1)...(19): siRNA sense strand
gcccaaaucagaauccaua

SEQ ID NO: 2102671 - RNA, 19 nt, Homo sapiens
  misc_RNA (1)...(19): siRNA sense strand
gcagagcaauuauuagacu

SEQ ID NO: 2102672 - RNA, 19 nt, Homo sapiens
  misc_RNA (1)...(19): siRNA sense strand
gugaagagaauacuaaaga

SEQ ID NO: 2102673 - RNA, 19 nt, Homo sapiens
  misc_RNA (1)...(19): siRNA sense strand
gaauccauauccuuaagug

SEQ ID NO: 2102674 - RNA, 19 nt, Homo sapiens
  misc_RNA (1)...(19): siRNA sense strand
gaacugaaacaaagggaau

SEQ ID NO: 2102675 - RNA, 19 nt, Homo sapiens
  misc_RNA (1)...(19): siRNA sense strand
gaacacaaagaaagaagug

SEQ ID NO: 2102676 - RNA, 19 nt, Homo sapiens
  misc_RNA (1)...(19): siRNA sense strand
gaaacugagcauuuagaaa

SEQ ID NO: 2102677 - RNA, 19 nt, Homo sapiens
  misc_RNA (1)...(19): siRNA sense strand
gaaacucgcugcaaaaugg

SEQ ID NO: 2102678 - RNA, 19 nt, Homo sapiens
  misc_RNA (1)...(19): siRNA sense strand
caaccaccauuaccauuca

SEQ ID NO: 2102679 - RNA, 19 nt, Homo sapiens
  misc_RNA (1)...(19): siRNA sense strand
gcuaagaaaggaaacugua

SEQ ID NO: 2102680 - RNA, 19 nt, Homo sapiens
  misc_RNA (1)...(19): siRNA sense strand
gacaacauucacauucuua

SEQ ID NO: 2102681 - RNA, 19 nt, Homo sapiens
  misc_RNA (1)...(19): siRNA sense strand
gaaucaggcuguuaaaaga

SEQ ID NO: 2102682 - RNA, 19 nt, Homo sapiens
  misc_RNA (1)...(19): siRNA sense strand
uaaagaugcuaccacuguu

SEQ ID NO: 2102683 - RNA, 19 nt, Homo sapiens
  misc_RNA (1)...(19): siRNA sense strand
cuagagaguguuguuauua

SEQ ID NO: 2102684 - RNA, 19 nt, Homo sapiens
  misc_RNA (1)...(19): siRNA sense strand
cugaguggcugcguuauaa

SEQ ID NO: 2102685 - RNA, 19 nt, Homo sapiens
  misc_RNA (1)...(19): siRNA sense strand
gaucacagaagcuuaguuc

SEQ ID NO: 2102686 - RNA, 19 nt, Homo sapiens
  misc_RNA (1)...(19): siRNA sense strand
acaaucaaaugcaacaaug

SEQ ID NO: 2102687 - RNA, 19 nt, Homo sapiens
  misc_RNA (1)...(19): siRNA sense strand
cuggauagguuaauaagug

SEQ ID NO: 2102688 - RNA, 19 nt, Homo sapiens
  misc_RNA (1)...(19): siRNA sense strand
aaagggaauuugcucgaaa

SEQ ID NO: 2102689 - RNA, 19 nt, Homo sapiens
  misc_RNA (1)...(19): siRNA sense strand
ucaauuuccuauagcugua

SEQ ID NO: 2102690 - RNA, 19 nt, Homo sapiens
  misc_RNA (1)...(19): siRNA sense strand
ucagaaaugcugguuuaua

SEQ ID NO: 2102691 - RNA, 19 nt, Homo sapiens
  misc_RNA (1)...(19): siRNA sense strand
gaaauaaauccacaguucu

SEQ ID NO: 2102692 - RNA, 19 nt, Homo sapiens
  misc_RNA (1)...(19): siRNA sense strand
caggaaagaugaaagaaaa

SEQ ID NO: 2102693 - RNA, 19 nt, Homo sapiens
  misc_RNA (1)...(19): siRNA sense strand
gaaaaggauuuagcagaaa

SEQ ID NO: 2102694 - RNA, 19 nt, Homo sapiens
  misc_RNA (1)...(19): siRNA sense strand
ugaaugagacaccaacuga

SEQ ID NO: 2102695 - RNA, 19 nt, Homo sapiens
  misc_RNA (1)...(19): siRNA sense strand
ugaaacacaugagucagaa

SEQ ID NO: 2102696 - RNA, 19 nt, Homo sapiens
  misc_RNA (1)...(19): siRNA sense strand
gcagaagcaggaagacauu

SEQ ID NO: 2102697 - RNA, 19 nt, Homo sapiens
  misc_RNA (1)...(19): siRNA sense strand
uguucaaacucaagagaua

SEQ ID NO: 2102698 - RNA, 19 nt, Homo sapiens
  misc_RNA (1)...(19): siRNA sense strand
caaagaaagcguccgugaa

SEQ ID NO: 2102699 - RNA, 19 nt, Homo sapiens
  misc_RNA (1)...(19): siRNA sense strand
gaguuugacaaucacauua

SEQ ID NO: 2102700 - RNA, 19 nt, Homo sapiens
  misc_RNA (1)...(19): siRNA sense strand
acaauacccugcuugaaca

SEQ ID NO: 2102701 - RNA, 19 nt, Homo sapiens
  misc_RNA (1)...(19): siRNA sense strand
uggugaaacugagcauuua

SEQ ID NO: 2102702 - RNA, 19 nt, Homo sapiens
  misc_RNA (1)...(19): siRNA sense strand
gaacucagaacaaacaaac

SEQ ID NO: 2102703 - RNA, 19 nt, Homo sapiens
  misc_RNA (1)...(19): siRNA sense strand
guagacaacauucacauuc

SEQ ID NO: 2102704 - RNA, 19 nt, Homo sapiens
  misc_RNA (1)...(19): siRNA sense strand
acaggacacucuagaugaa

SEQ ID NO: 2102705 - RNA, 19 nt, Homo sapiens
  misc_RNA (1)...(19): siRNA sense strand
ccacaguucuugacauguc

SEQ ID NO: 2102706 - RNA, 19 nt, Homo sapiens
  misc_RNA (1)...(19): siRNA sense strand
gaagacauaccuguuagug

SEQ ID NO: 2102707 - RNA, 19 nt, Homo sapiens
  misc_RNA (1)...(19): siRNA sense strand
aaugaagacauaccuguua

SEQ ID NO: 2102708 - RNA, 19 nt, Homo sapiens
  misc_RNA (1)...(19): siRNA sense strand
aagaaacuguucaaacuca

SEQ ID NO: 2102709 - RNA, 19 nt, Homo sapiens
  misc_RNA (1)...(19): siRNA sense strand
cgaaauguagcaucuaaau

SEQ ID NO: 2102710 - RNA, 19 nt, Homo sapiens
  misc_RNA (1)...(19): siRNA sense strand
ucaggugccuaauauugaa

SEQ ID NO: 2102711 - RNA, 19 nt, Homo sapiens
  misc_RNA (1)...(19): siRNA sense strand
ccaaugaucccaccacauc

SEQ ID NO: 2102712 - RNA, 19 nt, Homo sapiens
  misc_RNA (1)...(19): siRNA sense strand
cgaaaggaacucagaacaa

SEQ ID NO: 2102713 - RNA, 19 nt, Homo sapiens
  misc_RNA (1)...(19): siRNA sense strand
gaauacugguuccauaaaa

SEQ ID NO: 2102714 - RNA, 19 nt, Homo sapiens
  misc_RNA (1)...(19): siRNA sense strand
gaaagcguccgugaagcua

SEQ ID NO: 2102715 - RNA, 19 nt, Homo sapiens
  misc_RNA (1)...(19): siRNA sense strand
ugacaugucuaaugauugc

SEQ ID NO: 2102716 - RNA, 19 nt, Homo sapiens
  misc_RNA (1)...(19): siRNA sense strand
uguaacagcugagcaaauc

SEQ ID NO: 2102717 - RNA, 19 nt, Homo sapiens
  misc_RNA (1)...(19): siRNA sense strand
gcaucuaaauccaggaaag

SEQ ID NO: 2102718 - RNA, 19 nt, Homo sapiens
  misc_RNA (1)...(19): siRNA sense strand
ggugaauugucagauguuu

SEQ ID NO: 2102719 - RNA, 19 nt, Homo sapiens
  misc_RNA (1)...(19): siRNA sense strand
gacaauucuuccuuaaauc

SEQ ID NO: 2102720 - RNA, 19 nt, Homo sapiens
  misc_RNA (1)...(19): siRNA sense strand
gaacuuacuguuguuggaa

SEQ ID NO: 2102721 - RNA, 19 nt, Homo sapiens
  misc_RNA (1)...(19): siRNA sense strand
gaaauuggaaguagcaaaa

SEQ ID NO: 2102722 - RNA, 19 nt, Homo sapiens
  misc_RNA (1)...(19): siRNA sense strand
ucaaauaccacuagagagu

SEQ ID NO: 2102723 - RNA, 19 nt, Homo sapiens
  misc_RNA (1)...(19): siRNA sense strand
gaaauguagcaucuaaauc

SEQ ID NO: 2102724 - RNA, 19 nt, Homo sapiens
  misc_RNA (1)...(19): siRNA sense strand
gaagaucugaaggcaaauu

SEQ ID NO: 2102725 - RNA, 19 nt, Homo sapiens
  misc_RNA (1)...(19): siRNA sense strand
caaggaaagaugaaugaga

SEQ ID NO: 2102726 - RNA, 19 nt, Homo sapiens
  misc_RNA (1)...(19): siRNA sense strand
gaaaaugaaaccacaagaa

SEQ ID NO: 2102727 - RNA, 19 nt, Homo sapiens
  misc_RNA (1)...(19): siRNA sense strand
aaacaggacacucuagaug

SEQ ID NO: 2102728 - RNA, 19 nt, Homo sapiens
  misc_RNA (1)...(19): siRNA sense strand
aaagaaagcguccgugaag

SEQ ID NO: 2102729 - RNA, 19 nt, Homo sapiens
  misc_RNA (1)...(19): siRNA sense strand
gacaauacccugcuugaac

SEQ ID NO: 2102730 - RNA, 19 nt, Homo sapiens
  misc_RNA (1)...(19): siRNA sense strand
ggagaaaaccaaagaauca

SEQ ID NO: 2102731 - RNA, 19 nt, Homo sapiens
  misc_RNA (1)...(19): siRNA sense strand
caaaagcucuggaagaucu

SEQ ID NO: 2102732 - RNA, 19 nt, Homo sapiens
  misc_RNA (1)...(19): siRNA sense strand
caacagaccucccuauuaa

SEQ ID NO: 2102733 - RNA, 19 nt, Homo sapiens
  misc_RNA (1)...(19): siRNA sense strand
gcacaaagaucuccuuaga

SEQ ID NO: 2102734 - RNA, 19 nt, Homo sapiens
  misc_RNA (1)...(19): siRNA sense strand
caaaguggcugcaaauaaa

SEQ ID NO: 2102735 - RNA, 19 nt, Homo sapiens
  misc_RNA (1)...(19): siRNA sense strand
ggacggcucucuugaauau

SEQ ID NO: 2102736 - RNA, 19 nt, Homo sapiens
  misc_RNA (1)...(19): siRNA sense strand
uaaaggaacugcucaaaga

SEQ ID NO: 2102737 - RNA, 19 nt, Homo sapiens
  misc_RNA (1)...(19): siRNA sense strand
ggacguggcugaauauaag

SEQ ID NO: 2102738 - RNA, 19 nt, Homo sapiens
  misc_RNA (1)...(19): siRNA sense strand
caucacagcugccauuuau

SEQ ID NO: 2102739 - RNA, 19 nt, Homo sapiens
  misc_RNA (1)...(19): siRNA sense strand
caagaugucuaucauguug

SEQ ID NO: 2102740 - RNA, 19 nt, Homo sapiens
  misc_RNA (1)...(19): siRNA sense strand
ggaagucucuccagauauc

SEQ ID NO: 2102741 - RNA, 19 nt, Homo sapiens
  misc_RNA (1)...(19): siRNA sense strand
acaaagaucuccuuagaag

SEQ ID NO: 2102742 - RNA, 19 nt, Homo sapiens
  misc_RNA (1)...(19): siRNA sense strand
gaaaccaagugcccgcauu

SEQ ID NO: 2102743 - RNA, 19 nt, Homo sapiens
  misc_RNA (1)...(19): siRNA sense strand
ccaaaguggcugcaaauaa

SEQ ID NO: 2102744 - RNA, 19 nt, Homo sapiens
  misc_RNA (1)...(19): siRNA sense strand
ggaaagaguggaacgagaa

SEQ ID NO: 2102745 - RNA, 19 nt, Homo sapiens
  misc_RNA (1)...(19): siRNA sense strand
ugucugagauucugcguaa

SEQ ID NO: 2102746 - RNA, 19 nt, Homo sapiens
  misc_RNA (1)...(19): siRNA sense strand
cuccaaagcuuuauucaug

SEQ ID NO: 2102747 - RNA, 19 nt, Homo sapiens
  misc_RNA (1)...(19): siRNA sense strand
ugagggccaugcagaauuu

SEQ ID NO: 2102748 - RNA, 19 nt, Homo sapiens
  misc_RNA (1)...(19): siRNA sense strand
gagaagaacacgccgaguu

SEQ ID NO: 2102749 - RNA, 19 nt, Homo sapiens
  misc_RNA (1)...(19): siRNA sense strand
acaacagaccucccuauua

SEQ ID NO: 2102750 - RNA, 19 nt, Homo sapiens
  misc_RNA (1)...(19): siRNA sense strand
gaagccauccacacucuuu

SEQ ID NO: 2102751 - RNA, 19 nt, Homo sapiens
  misc_RNA (1)...(19): siRNA sense strand
caagaagauuaaaguggaa

SEQ ID NO: 2102752 - RNA, 19 nt, Homo sapiens
  misc_RNA (1)...(19): siRNA sense strand
ucacagcugccauuuauga

SEQ ID NO: 2102753 - RNA, 19 nt, Homo sapiens
  misc_RNA (1)...(19): siRNA sense strand
caacaucacagcugccauu

SEQ ID NO: 2102754 - RNA, 19 nt, Homo sapiens
  misc_RNA (1)...(19): siRNA sense strand
uacaagaugucuaucaugu

SEQ ID NO: 2102755 - RNA, 19 nt, Homo sapiens
  misc_RNA (1)...(19): siRNA sense strand
ggaggaaaaugcugacaaa

SEQ ID NO: 2102756 - RNA, 19 nt, Homo sapiens
  misc_RNA (1)...(19): siRNA sense strand
ccgaggagauguacaaagu

SEQ ID NO: 2102757 - RNA, 19 nt, Homo sapiens
  misc_RNA (1)...(19): siRNA sense strand
ugaagacaguugugccaaa

SEQ ID NO: 2102758 - RNA, 19 nt, Homo sapiens
  misc_RNA (1)...(19): siRNA sense strand
gaaagaguggaacgagaaa

SEQ ID NO: 2102759 - RNA, 19 nt, Homo sapiens
  misc_RNA (1)...(19): siRNA sense strand
gaugaaccagagcacauua

SEQ ID NO: 2102760 - RNA, 19 nt, Homo sapiens
  misc_RNA (1)...(19): siRNA sense strand
gacaguggccgacaugcua

SEQ ID NO: 2102761 - RNA, 19 nt, Homo sapiens
  misc_RNA (1)...(19): siRNA sense strand
gcuacaagaugucuaucau

SEQ ID NO: 2102762 - RNA, 19 nt, Homo sapiens
  misc_RNA (1)...(19): siRNA sense strand
gaacugcucaaagagauga

SEQ ID NO: 2102763 - RNA, 19 nt, Homo sapiens
  misc_RNA (1)...(19): siRNA sense strand
aaaccaagugcccgcauua

SEQ ID NO: 2102764 - RNA, 19 nt, Homo sapiens
  misc_RNA (1)...(19): siRNA sense strand
cgaaauugaccagagauaa

SEQ ID NO: 2102765 - RNA, 19 nt, Homo sapiens
  misc_RNA (1)...(19): siRNA sense strand
gacaacagaccucccuauu

SEQ ID NO: 2102766 - RNA, 19 nt, Homo sapiens
  misc_RNA (1)...(19): siRNA sense strand
agaagaacacgccgaguuu

SEQ ID NO: 2102767 - RNA, 19 nt, Homo sapiens
  misc_RNA (1)...(19): siRNA sense strand
gaagaacacgccgaguuug

SEQ ID NO: 2102768 - RNA, 19 nt, Homo sapiens
  misc_RNA (1)...(19): siRNA sense strand
ggagaacgacagcgaggaa

SEQ ID NO: 2102769 - RNA, 19 nt, Homo sapiens
  misc_RNA (1)...(19): siRNA sense strand
caugagcccuggucuucuu

SEQ ID NO: 2102770 - RNA, 19 nt, Homo sapiens
  misc_RNA (1)...(19): siRNA sense strand
gaagacaguugugccaaaa

SEQ ID NO: 2102771 - RNA, 19 nt, Homo sapiens
  misc_RNA (1)...(19): siRNA sense strand
cagcuuaguccacaacuug

SEQ ID NO: 2102772 - RNA, 19 nt, Homo sapiens
  misc_RNA (1)...(19): siRNA sense strand
ccaaagcuuuauucaugau

SEQ ID NO: 2102773 - RNA, 19 nt, Homo sapiens
  misc_RNA (1)...(19): siRNA sense strand
ggaaaaugcugacaaaagc

SEQ ID NO: 2102774 - RNA, 19 nt, Homo sapiens
  misc_RNA (1)...(19): siRNA sense strand
gagcacauuagccaaagaa

SEQ ID NO: 2102775 - RNA, 19 nt, Homo sapiens
  misc_RNA (1)...(19): siRNA sense strand
gggauccuccaaagcuuua

SEQ ID NO: 2102776 - RNA, 19 nt, Homo sapiens
  misc_RNA (1)...(19): siRNA sense strand
gcauuacagcccaucauga

SEQ ID NO: 2102777 - RNA, 19 nt, Homo sapiens
  misc_RNA (1)...(19): siRNA sense strand
cgugggagguuugaugauu

SEQ ID NO: 2102778 - RNA, 19 nt, Homo sapiens
  misc_RNA (1)...(19): siRNA sense strand
cgguggacguggcugaaua

SEQ ID NO: 2102779 - RNA, 19 nt, Homo sapiens
  misc_RNA (1)...(19): siRNA sense strand
ccaaacacaccaucaucaa

SEQ ID NO: 2102780 - RNA, 19 nt, Homo sapiens
  misc_RNA (1)...(19): siRNA sense strand
gagagggagcggagcauga

SEQ ID NO: 2102781 - RNA, 19 nt, Homo sapiens
  misc_RNA (1)...(19): siRNA sense strand
gaagauuaaaguggaaaga

SEQ ID NO: 2102782 - RNA, 19 nt, Homo sapiens
  misc_RNA (1)...(19): siRNA sense strand
ccagagcacauuagccaaa

SEQ ID NO: 2102783 - RNA, 19 nt, Homo sapiens
  misc_RNA (1)...(19): siRNA sense strand
ccaaggccgugggagguuu

SEQ ID NO: 2102784 - RNA, 19 nt, Homo sapiens
  misc_RNA (1)...(19): siRNA sense strand
guacaagaagauuaaagug

SEQ ID NO: 2102785 - RNA, 19 nt, Homo sapiens
  misc_RNA (1)...(19): siRNA sense strand
ggagaacccaagcccagaa

SEQ ID NO: 2102786 - RNA, 19 nt, Homo sapiens
  misc_RNA (1)...(19): siRNA sense strand
gaauaugacaacagagaag

SEQ ID NO: 2102787 - RNA, 19 nt, Homo sapiens
  misc_RNA (1)...(19): siRNA sense strand
aaacacaccaucaucaagu

SEQ ID NO: 2102788 - RNA, 19 nt, Homo sapiens
  misc_RNA (1)...(19): siRNA sense strand
ucuaucauguugugacguu

SEQ ID NO: 2102789 - RNA, 19 nt, Homo sapiens
  misc_RNA (1)...(19): siRNA sense strand
uccaaagcuuuauucauga

SEQ ID NO: 2102790 - RNA, 19 nt, Homo sapiens
  misc_RNA (1)...(19): siRNA sense strand
gaguuugggagaugguaua

SEQ ID NO: 2102791 - RNA, 19 nt, Homo sapiens
  misc_RNA (1)...(19): siRNA sense strand
gagaugaaccagagcacau

SEQ ID NO: 2102792 - RNA, 19 nt, Homo sapiens
  misc_RNA (1)...(19): siRNA sense strand
gccaaagaaugcccucucu

SEQ ID NO: 2102793 - RNA, 19 nt, Homo sapiens
  misc_RNA (1)...(19): siRNA sense strand
uaaaguggaaagaguggaa

SEQ ID NO: 2102794 - RNA, 19 nt, Homo sapiens
  misc_RNA (1)...(19): siRNA sense strand
acggcucucuugaauauga

SEQ ID NO: 2102795 - RNA, 19 nt, Homo sapiens
  misc_RNA (1)...(19): siRNA sense strand
gagaacccaagcccagaaa

SEQ ID NO: 2102796 - RNA, 19 nt, Homo sapiens
  misc_RNA (1)...(19): siRNA sense strand
cacagggauuguugucuga

SEQ ID NO: 2102797 - RNA, 19 nt, Homo sapiens
  misc_RNA (1)...(19): siRNA sense strand
caaauucaccacaguacuc

SEQ ID NO: 2102798 - RNA, 19 nt, Homo sapiens
  misc_RNA (1)...(19): siRNA sense strand
caaccaagugccaggaguu

SEQ ID NO: 2102799 - RNA, 19 nt, Homo sapiens
  misc_RNA (1)...(19): siRNA sense strand
cucagucucuucuaguaaa

SEQ ID NO: 2102800 - RNA, 19 nt, Homo sapiens
  misc_RNA (1)...(19): siRNA sense strand
gcacacagggauuguuguc

SEQ ID NO: 2102801 - RNA, 19 nt, Homo sapiens
  misc_RNA (1)...(19): siRNA sense strand
gucccaagcugucuuugca

SEQ ID NO: 2102802 - RNA, 19 nt, Homo sapiens
  misc_RNA (1)...(19): siRNA sense strand
gugggagguuugaugauuc

SEQ ID NO: 2102803 - RNA, 19 nt, Homo sapiens
  misc_RNA (1)...(19): siRNA sense strand
agauuaaaguggaaagagu

SEQ ID NO: 2102804 - RNA, 19 nt, Homo sapiens
  misc_RNA (1)...(19): siRNA sense strand
gccaggaguuugggagaug

SEQ ID NO: 2102805 - RNA, 19 nt, Homo sapiens
  misc_RNA (1)...(19): siRNA sense strand
gcaguuggacggcucucuu

SEQ ID NO: 2102806 - RNA, 19 nt, Homo sapiens
  misc_RNA (1)...(19): siRNA sense strand
uuugaugauuccugucuuu

SEQ ID NO: 2102807 - RNA, 19 nt, Homo sapiens
  misc_RNA (1)...(19): siRNA sense strand
ucuugaauaugacaacaga

SEQ ID NO: 2102808 - RNA, 19 nt, Homo sapiens
  misc_RNA (1)...(19): siRNA sense strand
ccacagcgaacgcaugcaa

SEQ ID NO: 2102809 - RNA, 19 nt, Homo sapiens
  misc_RNA (1)...(19): siRNA sense strand
ggacagccucucagucucu

SEQ ID NO: 2102810 - RNA, 19 nt, Homo sapiens
  misc_RNA (1)...(19): siRNA sense strand
gcccaggcccaaggaauaa

SEQ ID NO: 2102811 - RNA, 19 nt, Homo sapiens
  misc_RNA (1)...(19): siRNA sense strand
cugauaaaccaacagauug

SEQ ID NO: 2102812 - RNA, 19 nt, Homo sapiens
  misc_RNA (1)...(19): siRNA sense strand
gaugauuccugucuuuugu

SEQ ID NO: 2102813 - RNA, 19 nt, Homo sapiens
  misc_RNA (1)...(19): siRNA sense strand
ggauuguugucugagauuc

SEQ ID NO: 2102814 - RNA, 19 nt, Homo sapiens
  misc_RNA (1)...(19): siRNA sense strand
gauccaacaggagaugaaa

SEQ ID NO: 2102815 - RNA, 19 nt, Homo sapiens
  misc_RNA (1)...(19): siRNA sense strand
cgacaacagaccucccuau

SEQ ID NO: 2102816 - RNA, 19 nt, Homo sapiens
  misc_RNA (1)...(19): siRNA sense strand
caugcagaauuuccucaau

SEQ ID NO: 2102817 - RNA, 19 nt, Homo sapiens
  misc_RNA (1)...(19): siRNA sense strand
gugaacugcuccgcuggaa

SEQ ID NO: 2102818 - RNA, 19 nt, Homo sapiens
  misc_RNA (1)...(19): siRNA sense strand
cagcaccugccgaaauuga

SEQ ID NO: 2102819 - RNA, 19 nt, Homo sapiens
  misc_RNA (1)...(19): siRNA sense strand
caaacacaccaucaucaag

SEQ ID NO: 2102820 - RNA, 19 nt, Homo sapiens
  misc_RNA (1)...(19): siRNA sense strand
cacaaagaucuccuuagaa

SEQ ID NO: 2102821 - RNA, 19 nt, Homo sapiens
  misc_RNA (1)...(19): siRNA sense strand
uggccgacaugcuacaaga

SEQ ID NO: 2102822 - RNA, 19 nt, Homo sapiens
  misc_RNA (1)...(19): siRNA sense strand
guccaaugcauuuaccaaa

SEQ ID NO: 2102823 - RNA, 19 nt, Homo sapiens
  misc_RNA (1)...(19): siRNA sense strand
ugaauaugacaacagagaa

SEQ ID NO: 2102824 - RNA, 19 nt, Homo sapiens
  misc_RNA (1)...(19): siRNA sense strand
cagggauuguugucugaga

SEQ ID NO: 2102825 - RNA, 19 nt, Homo sapiens
  misc_RNA (1)...(19): siRNA sense strand
cagccaaauucaccacagu

SEQ ID NO: 2102826 - RNA, 19 nt, Homo sapiens
  misc_RNA (1)...(19): siRNA sense strand
uuggacggcucucuugaau

SEQ ID NO: 2102827 - RNA, 19 nt, Homo sapiens
  misc_RNA (1)...(19): siRNA sense strand
ccgaaauugaccagagaua

SEQ ID NO: 2102828 - RNA, 19 nt, Homo sapiens
  misc_RNA (1)...(19): siRNA sense strand
gggauuguugucugagauu

SEQ ID NO: 2102829 - RNA, 19 nt, Homo sapiens
  misc_RNA (1)...(19): siRNA sense strand
ggccagcguccaaugcauu

SEQ ID NO: 2102830 - RNA, 19 nt, Homo sapiens
  misc_RNA (1)...(19): siRNA sense strand
ccucgacaccgacaacaga

SEQ ID NO: 2102831 - RNA, 19 nt, Homo sapiens
  misc_RNA (1)...(19): siRNA sense strand
aacacaccaucaucaaguu

SEQ ID NO: 2102832 - RNA, 19 nt, Homo sapiens
  misc_RNA (1)...(19): siRNA sense strand
caacagaccucccuauuaa

SEQ ID NO: 2102833 - RNA, 19 nt, Homo sapiens
  misc_RNA (1)...(19): siRNA sense strand
gcacaaagaucuccuuaga

SEQ ID NO: 2102834 - RNA, 19 nt, Homo sapiens
  misc_RNA (1)...(19): siRNA sense strand
caaaguggcugcaaauaaa

SEQ ID NO: 2102835 - RNA, 19 nt, Homo sapiens
  misc_RNA (1)...(19): siRNA sense strand
ggacggcucucuugaauau

SEQ ID NO: 2102836 - RNA, 19 nt, Homo sapiens
  misc_RNA (1)...(19): siRNA sense strand
uaaaggaacugcucaaaga

SEQ ID NO: 2102837 - RNA, 19 nt, Homo sapiens
  misc_RNA (1)...(19): siRNA sense strand
ggacguggcugaauauaag

SEQ ID NO: 2102838 - RNA, 19 nt, Homo sapiens
  misc_RNA (1)...(19): siRNA sense strand
caucacagcugccauuuau

SEQ ID NO: 2102839 - RNA, 19 nt, Homo sapiens
  misc_RNA (1)...(19): siRNA sense strand
caagaugucuaucauguug

SEQ ID NO: 2102840 - RNA, 19 nt, Homo sapiens
  misc_RNA (1)...(19): siRNA sense strand
ggaagucucuccagauauc

SEQ ID NO: 2102841 - RNA, 19 nt, Homo sapiens
  misc_RNA (1)...(19): siRNA sense strand
acaaagaucuccuuagaag

SEQ ID NO: 2102842 - RNA, 19 nt, Homo sapiens
  misc_RNA (1)...(19): siRNA sense strand
gaaaccaagugcccgcauu

SEQ ID NO: 2102843 - RNA, 19 nt, Homo sapiens
  misc_RNA (1)...(19): siRNA sense strand
ccaaaguggcugcaaauaa

SEQ ID NO: 2102844 - RNA, 19 nt, Homo sapiens
  misc_RNA (1)...(19): siRNA sense strand
ggaaagaguggaacgagaa

SEQ ID NO: 2102845 - RNA, 19 nt, Homo sapiens
  misc_RNA (1)...(19): siRNA sense strand
ugucugagauucugcguaa

SEQ ID NO: 2102846 - RNA, 19 nt, Homo sapiens
  misc_RNA (1)...(19): siRNA sense strand
cuccaaagcuuuauucaug

SEQ ID NO: 2102847 - RNA, 19 nt, Homo sapiens
  misc_RNA (1)...(19): siRNA sense strand
ugagggccaugcagaauuu

SEQ ID NO: 2102848 - RNA, 19 nt, Homo sapiens
  misc_RNA (1)...(19): siRNA sense strand
gagaagaacacgccgaguu

SEQ ID NO: 2102849 - RNA, 19 nt, Homo sapiens
  misc_RNA (1)...(19): siRNA sense strand
acaacagaccucccuauua

SEQ ID NO: 2102850 - RNA, 19 nt, Homo sapiens
  misc_RNA (1)...(19): siRNA sense strand
gaagccauccacacucuuu

SEQ ID NO: 2102851 - RNA, 19 nt, Homo sapiens
  misc_RNA (1)...(19): siRNA sense strand
caagaagauuaaaguggaa

SEQ ID NO: 2102852 - RNA, 19 nt, Homo sapiens
  misc_RNA (1)...(19): siRNA sense strand
ucacagcugccauuuauga

SEQ ID NO: 2102853 - RNA, 19 nt, Homo sapiens
  misc_RNA (1)...(19): siRNA sense strand
caacaucacagcugccauu

SEQ ID NO: 2102854 - RNA, 19 nt, Homo sapiens
  misc_RNA (1)...(19): siRNA sense strand
uacaagaugucuaucaugu

SEQ ID NO: 2102855 - RNA, 19 nt, Homo sapiens
  misc_RNA (1)...(19): siRNA sense strand
ggaggaaaaugcugacaaa

SEQ ID NO: 2102856 - RNA, 19 nt, Homo sapiens
  misc_RNA (1)...(19): siRNA sense strand
ccgaggagauguacaaagu

SEQ ID NO: 2102857 - RNA, 19 nt, Homo sapiens
  misc_RNA (1)...(19): siRNA sense strand
ugaagacaguugugccaaa

SEQ ID NO: 2102858 - RNA, 19 nt, Homo sapiens
  misc_RNA (1)...(19): siRNA sense strand
gaaagaguggaacgagaaa

SEQ ID NO: 2102859 - RNA, 19 nt, Homo sapiens
  misc_RNA (1)...(19): siRNA sense strand
gaugaaccagagcacauua

SEQ ID NO: 2102860 - RNA, 19 nt, Homo sapiens
  misc_RNA (1)...(19): siRNA sense strand
gacaguggccgacaugcua

SEQ ID NO: 2102861 - RNA, 19 nt, Homo sapiens
  misc_RNA (1)...(19): siRNA sense strand
gcuacaagaugucuaucau

SEQ ID NO: 2102862 - RNA, 19 nt, Homo sapiens
  misc_RNA (1)...(19): siRNA sense strand
gaacugcucaaagagauga

SEQ ID NO: 2102863 - RNA, 19 nt, Homo sapiens
  misc_RNA (1)...(19): siRNA sense strand
aaaccaagugcccgcauua

SEQ ID NO: 2102864 - RNA, 19 nt, Homo sapiens
  misc_RNA (1)...(19): siRNA sense strand
cgaaauugaccagagauaa

SEQ ID NO: 2102865 - RNA, 19 nt, Homo sapiens
  misc_RNA (1)...(19): siRNA sense strand
gacaacagaccucccuauu

SEQ ID NO: 2102866 - RNA, 19 nt, Homo sapiens
  misc_RNA (1)...(19): siRNA sense strand
agaagaacacgccgaguuu

SEQ ID NO: 2102867 - RNA, 19 nt, Homo sapiens
  misc_RNA (1)...(19): siRNA sense strand
gaagaacacgccgaguuug

SEQ ID NO: 2102868 - RNA, 19 nt, Homo sapiens
  misc_RNA (1)...(19): siRNA sense strand
ggagaacgacagcgaggaa

SEQ ID NO: 2102869 - RNA, 19 nt, Homo sapiens
  misc_RNA (1)...(19): siRNA sense strand
caugagcccuggucuucuu

SEQ ID NO: 2102870 - RNA, 19 nt, Homo sapiens
  misc_RNA (1)...(19): siRNA sense strand
gaagacaguugugccaaaa

SEQ ID NO: 2102871 - RNA, 19 nt, Homo sapiens
  misc_RNA (1)...(19): siRNA sense strand
cagcuuaguccacaacuug

SEQ ID NO: 2102872 - RNA, 19 nt, Homo sapiens
  misc_RNA (1)...(19): siRNA sense strand
ccaaagcuuuauucaugau

SEQ ID NO: 2102873 - RNA, 19 nt, Homo sapiens
  misc_RNA (1)...(19): siRNA sense strand
ggaaaaugcugacaaaagc

SEQ ID NO: 2102874 - RNA, 19 nt, Homo sapiens
  misc_RNA (1)...(19): siRNA sense strand
gagcacauuagccaaagaa

SEQ ID NO: 2102875 - RNA, 19 nt, Homo sapiens
  misc_RNA (1)...(19): siRNA sense strand
gggauccuccaaagcuuua

SEQ ID NO: 2102876 - RNA, 19 nt, Homo sapiens
  misc_RNA (1)...(19): siRNA sense strand
gcauuacagcccaucauga

SEQ ID NO: 2102877 - RNA, 19 nt, Homo sapiens
  misc_RNA (1)...(19): siRNA sense strand
gaagauuaaaguggaaaga

SEQ ID NO: 2102878 - RNA, 19 nt, Homo sapiens
  misc_RNA (1)...(19): siRNA sense strand
cgguggacguggcugaaua

SEQ ID NO: 2102879 - RNA, 19 nt, Homo sapiens
  misc_RNA (1)...(19): siRNA sense strand
ccaaacacaccaucaucaa

SEQ ID NO: 2102880 - RNA, 19 nt, Homo sapiens
  misc_RNA (1)...(19): siRNA sense strand
gaggaggauucgcaguuca

SEQ ID NO: 2102881 - RNA, 19 nt, Homo sapiens
  misc_RNA (1)...(19): siRNA sense strand
gagagggagcggagcauga

SEQ ID NO: 2102882 - RNA, 19 nt, Homo sapiens
  misc_RNA (1)...(19): siRNA sense strand
cgugggagguuugaugauu

SEQ ID NO: 2102883 - RNA, 19 nt, Homo sapiens
  misc_RNA (1)...(19): siRNA sense strand
ccagagcacauuagccaaa

SEQ ID NO: 2102884 - RNA, 19 nt, Homo sapiens
  misc_RNA (1)...(19): siRNA sense strand
ccaaggccgugggagguuu

SEQ ID NO: 2102885 - RNA, 19 nt, Homo sapiens
  misc_RNA (1)...(19): siRNA sense strand
guacaagaagauuaaagug

SEQ ID NO: 2102886 - RNA, 19 nt, Homo sapiens
  misc_RNA (1)...(19): siRNA sense strand
ggagaacccaagcccagaa

SEQ ID NO: 2102887 - RNA, 19 nt, Homo sapiens
  misc_RNA (1)...(19): siRNA sense strand
gaauaugacaacagagaag

SEQ ID NO: 2102888 - RNA, 19 nt, Homo sapiens
  misc_RNA (1)...(19): siRNA sense strand
aaacacaccaucaucaagu

SEQ ID NO: 2102889 - RNA, 19 nt, Homo sapiens
  misc_RNA (1)...(19): siRNA sense strand
ucuaucauguugugacguu

SEQ ID NO: 2102890 - RNA, 19 nt, Homo sapiens
  misc_RNA (1)...(19): siRNA sense strand
uccaaagcuuuauucauga

SEQ ID NO: 2102891 - RNA, 19 nt, Homo sapiens
  misc_RNA (1)...(19): siRNA sense strand
gaguuugggagaugguaua

SEQ ID NO: 2102892 - RNA, 19 nt, Homo sapiens
  misc_RNA (1)...(19): siRNA sense strand
gagaugaaccagagcacau

SEQ ID NO: 2102893 - RNA, 19 nt, Homo sapiens
  misc_RNA (1)...(19): siRNA sense strand
gccaaagaaugcccucucu

SEQ ID NO: 2102894 - RNA, 19 nt, Homo sapiens
  misc_RNA (1)...(19): siRNA sense strand
acggcucucuugaauauga

SEQ ID NO: 2102895 - RNA, 19 nt, Homo sapiens
  misc_RNA (1)...(19): siRNA sense strand
gagaacccaagcccagaaa

SEQ ID NO: 2102896 - RNA, 19 nt, Homo sapiens
  misc_RNA (1)...(19): siRNA sense strand
gauucgcaguucaacauca

SEQ ID NO: 2102897 - RNA, 19 nt, Homo sapiens
  misc_RNA (1)...(19): siRNA sense strand
cacagggauuguugucuga

SEQ ID NO: 2102898 - RNA, 19 nt, Homo sapiens
  misc_RNA (1)...(19): siRNA sense strand
caaauucaccacaguacuc

SEQ ID NO: 2102899 - RNA, 19 nt, Homo sapiens
  misc_RNA (1)...(19): siRNA sense strand
uaaaguggaaagaguggaa

SEQ ID NO: 2102900 - RNA, 19 nt, Homo sapiens
  misc_RNA (1)...(19): siRNA sense strand
gugggagguuugaugauuc

SEQ ID NO: 2102901 - RNA, 19 nt, Homo sapiens
  misc_RNA (1)...(19): siRNA sense strand
cucagucucuucuaguaaa

SEQ ID NO: 2102902 - RNA, 19 nt, Homo sapiens
  misc_RNA (1)...(19): siRNA sense strand
gcacacagggauuguuguc

SEQ ID NO: 2102903 - RNA, 19 nt, Homo sapiens
  misc_RNA (1)...(19): siRNA sense strand
gucccaagcugucuuugca

SEQ ID NO: 2102904 - RNA, 19 nt, Homo sapiens
  misc_RNA (1)...(19): siRNA sense strand
agauuaaaguggaaagagu

SEQ ID NO: 2102905 - RNA, 19 nt, Homo sapiens
  misc_RNA (1)...(19): siRNA sense strand
caaccaagugccaggaguu

SEQ ID NO: 2102906 - RNA, 19 nt, Homo sapiens
  misc_RNA (1)...(19): siRNA sense strand
gcccaggcccaaggaauaa

SEQ ID NO: 2102907 - RNA, 19 nt, Homo sapiens
  misc_RNA (1)...(19): siRNA sense strand
ucuugaauaugacaacaga

SEQ ID NO: 2102908 - RNA, 19 nt, Homo sapiens
  misc_RNA (1)...(19): siRNA sense strand
gcaguuggacggcucucuu

SEQ ID NO: 2102909 - RNA, 19 nt, Homo sapiens
  misc_RNA (1)...(19): siRNA sense strand
ccacagcgaacgcaugcaa

SEQ ID NO: 2102910 - RNA, 19 nt, Homo sapiens
  misc_RNA (1)...(19): siRNA sense strand
uuugaugauuccugucuuu

SEQ ID NO: 2102911 - RNA, 19 nt, Homo sapiens
  misc_RNA (1)...(19): siRNA sense strand
ggacagccucucagucucu

SEQ ID NO: 2102912 - RNA, 19 nt, Homo sapiens
  misc_RNA (1)...(19): siRNA sense strand
gccaggaguuugggagaug

SEQ ID NO: 2102913 - RNA, 19 nt, Homo sapiens
  misc_RNA (1)...(19): siRNA sense strand
cugauaaaccaacagauug

SEQ ID NO: 2102914 - RNA, 19 nt, Homo sapiens
  misc_RNA (1)...(19): siRNA sense strand
gaugauuccugucuuuugu

SEQ ID NO: 2102915 - RNA, 19 nt, Homo sapiens
  misc_RNA (1)...(19): siRNA sense strand
ggauuguugucugagauuc

SEQ ID NO: 2102916 - RNA, 19 nt, Homo sapiens
  misc_RNA (1)...(19): siRNA sense strand
gauccaacaggagaugaaa

SEQ ID NO: 2102917 - RNA, 19 nt, Homo sapiens
  misc_RNA (1)...(19): siRNA sense strand
cgacaacagaccucccuau

SEQ ID NO: 2102918 - RNA, 19 nt, Homo sapiens
  misc_RNA (1)...(19): siRNA sense strand
caugcagaauuuccucaau

SEQ ID NO: 2102919 - RNA, 19 nt, Homo sapiens
  misc_RNA (1)...(19): siRNA sense strand
uggccgacaugcuacaaga

SEQ ID NO: 2102920 - RNA, 19 nt, Homo sapiens
  misc_RNA (1)...(19): siRNA sense strand
cagcaccugccgaaauuga

SEQ ID NO: 2102921 - RNA, 19 nt, Homo sapiens
  misc_RNA (1)...(19): siRNA sense strand
caaacacaccaucaucaag

SEQ ID NO: 2102922 - RNA, 19 nt, Homo sapiens
  misc_RNA (1)...(19): siRNA sense strand
cacaaagaucuccuuagaa

SEQ ID NO: 2102923 - RNA, 19 nt, Homo sapiens
  misc_RNA (1)...(19): siRNA sense strand
gugaacugcuccgcuggaa

SEQ ID NO: 2102924 - RNA, 19 nt, Homo sapiens
  misc_RNA (1)...(19): siRNA sense strand
ugaauaugacaacagagaa

SEQ ID NO: 2102925 - RNA, 19 nt, Homo sapiens
  misc_RNA (1)...(19): siRNA sense strand
cagggauuguugucugaga

SEQ ID NO: 2102926 - RNA, 19 nt, Homo sapiens
  misc_RNA (1)...(19): siRNA sense strand
cagccaaauucaccacagu

SEQ ID NO: 2102927 - RNA, 19 nt, Homo sapiens
  misc_RNA (1)...(19): siRNA sense strand
guccaaugcauuuaccaaa

SEQ ID NO: 2102928 - RNA, 19 nt, Homo sapiens
  misc_RNA (1)...(19): siRNA sense strand
ggccagcguccaaugcauu

SEQ ID NO: 2102929 - RNA, 19 nt, Homo sapiens
  misc_RNA (1)...(19): siRNA sense strand
ccgaaauugaccagagaua

SEQ ID NO: 2102930 - RNA, 19 nt, Homo sapiens
  misc_RNA (1)...(19): siRNA sense strand
uuggacggcucucuugaau

SEQ ID NO: 2102931 - RNA, 19 nt, Homo sapiens
  misc_RNA (1)...(19): siRNA sense strand
gggauuguugucugagauu

SEQ ID NO: 2102932 - RNA, 19 nt, Homo sapiens
  misc_RNA (1)...(19): siRNA sense strand
ggaaagugcugaacuauga

SEQ ID NO: 2102933 - RNA, 19 nt, Homo sapiens
  misc_RNA (1)...(19): siRNA sense strand
gugcauaggucucaucauc

SEQ ID NO: 2102934 - RNA, 19 nt, Homo sapiens
  misc_RNA (1)...(19): siRNA sense strand
caaaagaccuggaggauca

SEQ ID NO: 2102935 - RNA, 19 nt, Homo sapiens
  misc_RNA (1)...(19): siRNA sense strand
caucaccacugugcuuaua

SEQ ID NO: 2102936 - RNA, 19 nt, Homo sapiens
  misc_RNA (1)...(19): siRNA sense strand
gcugcgagcugugcuacua

SEQ ID NO: 2102937 - RNA, 19 nt, Homo sapiens
  misc_RNA (1)...(19): siRNA sense strand
gaccuucucuuccagaucu

SEQ ID NO: 2102938 - RNA, 19 nt, Homo sapiens
  misc_RNA (1)...(19): siRNA sense strand
gcauaggucucaucaucca

SEQ ID NO: 2102939 - RNA, 19 nt, Homo sapiens
  misc_RNA (1)...(19): siRNA sense strand
gagcugugcuacuacaagu

SEQ ID NO: 2102940 - RNA, 19 nt, Homo sapiens
  misc_RNA (1)...(19): siRNA sense strand
gcugaacuaugacaagaca

SEQ ID NO: 2102941 - RNA, 19 nt, Homo sapiens
  misc_RNA (1)...(19): siRNA sense strand
gccgagagcuggucaugag

SEQ ID NO: 2102942 - RNA, 19 nt, Homo sapiens
  misc_RNA (1)...(19): siRNA sense strand
gugcugaacuaugacaaga

SEQ ID NO: 2102943 - RNA, 19 nt, Homo sapiens
  misc_RNA (1)...(19): siRNA sense strand
uggcucaucuggucaacuu

SEQ ID NO: 2102944 - RNA, 19 nt, Homo sapiens
  misc_RNA (1)...(19): siRNA sense strand
aguggaaagugcugaacua

SEQ ID NO: 2102945 - RNA, 19 nt, Homo sapiens
  misc_RNA (1)...(19): siRNA sense strand
gagcuggucaugagaguca

SEQ ID NO: 2102946 - RNA, 19 nt, Homo sapiens
  misc_RNA (1)...(19): siRNA sense strand
ggaagucuuugguuuaccu

SEQ ID NO: 2102947 - RNA, 19 nt, Homo sapiens
  misc_RNA (1)...(19): siRNA sense strand
ugaacuaugacaagacaaa

SEQ ID NO: 2102948 - RNA, 19 nt, Homo sapiens
  misc_RNA (1)...(19): siRNA sense strand
cauccugagucacuugaga

SEQ ID NO: 2102949 - RNA, 19 nt, Homo sapiens
  misc_RNA (1)...(19): siRNA sense strand
gcacauccugagucacuug

SEQ ID NO: 2102950 - RNA, 19 nt, Homo sapiens
  misc_RNA (1)...(19): siRNA sense strand
cgggauguauggcuucaug

SEQ ID NO: 2102951 - RNA, 19 nt, Homo sapiens
  misc_RNA (1)...(19): siRNA sense strand
gagagcuggucaugagagu

SEQ ID NO: 2102952 - RNA, 19 nt, Homo sapiens
  misc_RNA (1)...(19): siRNA sense strand
acaccagccuugccucauc

SEQ ID NO: 2102953 - RNA, 19 nt, Homo sapiens
  misc_RNA (1)...(19): siRNA sense strand
gaucugcuacgggauguau

SEQ ID NO: 2102954 - RNA, 19 nt, Homo sapiens
  misc_RNA (1)...(19): siRNA sense strand
ggauguauggcuucaugga

SEQ ID NO: 2102955 - RNA, 19 nt, Homo sapiens
  misc_RNA (1)...(19): siRNA sense strand
guaccacgucaucgccaua

SEQ ID NO: 2102956 - RNA, 19 nt, Homo sapiens
  misc_RNA (1)...(19): siRNA sense strand
caccagccuugccucauca

SEQ ID NO: 2102957 - RNA, 19 nt, Homo sapiens
  misc_RNA (1)...(19): siRNA sense strand
ggacguggugugcauaggu

SEQ ID NO: 2102958 - RNA, 19 nt, Homo sapiens
  misc_RNA (1)...(19): siRNA sense strand
cuacaaguaccacgucauc

SEQ ID NO: 2102959 - RNA, 19 nt, Homo sapiens
  misc_RNA (1)...(19): siRNA sense strand
gcucaucuggucaacuuuc

SEQ ID NO: 2102960 - RNA, 19 nt, Homo sapiens
  misc_RNA (1)...(19): siRNA sense strand
gguguaccgcaucuuuaaa

SEQ ID NO: 2102961 - RNA, 19 nt, Homo sapiens
  misc_RNA (1)...(19): siRNA sense strand
aaggaagucuuugguuuac

SEQ ID NO: 2102962 - RNA, 19 nt, Homo sapiens
  misc_RNA (1)...(19): siRNA sense strand
cauccacccaggccaauau

SEQ ID NO: 2102963 - RNA, 19 nt, Homo sapiens
  misc_RNA (1)...(19): siRNA sense strand
ccucaucgccaguauuucu

SEQ ID NO: 2102964 - RNA, 19 nt, Homo sapiens
  misc_RNA (1)...(19): siRNA sense strand
ugugauggcucggucaagu

SEQ ID NO: 2102965 - RNA, 19 nt, Homo sapiens
  misc_RNA (1)...(19): siRNA sense strand
ucauggacguggugugcau

SEQ ID NO: 2102966 - RNA, 19 nt, Homo sapiens
  misc_RNA (1)...(19): siRNA sense strand
ucaugagagucacgacagu

SEQ ID NO: 2102967 - RNA, 19 nt, Homo sapiens
  misc_RNA (1)...(19): siRNA sense strand
ugaaggacccucgguguac

SEQ ID NO: 2102968 - RNA, 19 nt, Homo sapiens
  misc_RNA (1)...(19): siRNA sense strand
gacggucauugagaagguu

SEQ ID NO: 2102969 - RNA, 19 nt, Homo sapiens
  misc_RNA (1)...(19): siRNA sense strand
ugagaagguucagguugca

SEQ ID NO: 2102970 - RNA, 19 nt, Homo sapiens
  misc_RNA (1)...(19): siRNA sense strand
uggaguacgugcaggugua

SEQ ID NO: 2102971 - RNA, 19 nt, Homo sapiens
  misc_RNA (1)...(19): siRNA sense strand
cuucacgucugccuucuuc

SEQ ID NO: 2102972 - RNA, 19 nt, Homo sapiens
  misc_RNA (1)...(19): siRNA sense strand
ucacgucugccuucuucaa

SEQ ID NO: 2102973 - RNA, 19 nt, Homo sapiens
  misc_RNA (1)...(19): siRNA sense strand
ggcugcagcugugguguuc

SEQ ID NO: 2102974 - RNA, 19 nt, Homo sapiens
  misc_RNA (1)...(19): siRNA sense strand
ugaaggagguuucucaguu

SEQ ID NO: 2102975 - RNA, 19 nt, Homo sapiens
  misc_RNA (1)...(19): siRNA sense strand
gaaggagguuucucaguuc

SEQ ID NO: 2102976 - RNA, 19 nt, Homo sapiens
  misc_RNA (1)...(19): siRNA sense strand
gcacaagccucaagaagac

SEQ ID NO: 2102977 - RNA, 19 nt, Homo sapiens
  misc_RNA (1)...(19): siRNA sense strand
caagacaucugcuucaaag

SEQ ID NO: 2102978 - RNA, 19 nt, Homo sapiens
  misc_RNA (1)...(19): siRNA sense strand
caacaucuccgucuucuca

SEQ ID NO: 2102979 - RNA, 19 nt, Homo sapiens
  misc_RNA (1)...(19): siRNA sense strand
aaagagagcugugaaagca

SEQ ID NO: 2102980 - RNA, 19 nt, Homo sapiens
  misc_RNA (1)...(19): siRNA sense strand
ccaaacaggaaacaaagua

SEQ ID NO: 2102981 - RNA, 19 nt, Homo sapiens
  misc_RNA (1)...(19): siRNA sense strand
gaaacaguaacaacaagaa

SEQ ID NO: 2102982 - RNA, 19 nt, Homo sapiens
  misc_RNA (1)...(19): siRNA sense strand
ggaaacaaaguaagaguca

SEQ ID NO: 2102983 - RNA, 19 nt, Homo sapiens
  misc_RNA (1)...(19): siRNA sense strand
gggcuucucugugaauuug

SEQ ID NO: 2102984 - RNA, 19 nt, Homo sapiens
  misc_RNA (1)...(19): siRNA sense strand
aaacgucccuggcaacugu

SEQ ID NO: 2102985 - RNA, 19 nt, Homo sapiens
  misc_RNA (1)...(19): siRNA sense strand
gcuggaggcuuaugucauc

SEQ ID NO: 2102986 - RNA, 19 nt, Homo sapiens
  misc_RNA (1)...(19): siRNA sense strand
gaauggaggcucuuguguu

SEQ ID NO: 2102987 - RNA, 19 nt, Homo sapiens
  misc_RNA (1)...(19): siRNA sense strand
gacaucugcuucaaagaga

SEQ ID NO: 2102988 - RNA, 19 nt, Homo sapiens
  misc_RNA (1)...(19): siRNA sense strand
aauggaggcucuuguguug

SEQ ID NO: 2102989 - RNA, 19 nt, Homo sapiens
  misc_RNA (1)...(19): siRNA sense strand
gaaagcacaagccucaaga

SEQ ID NO: 2102990 - RNA, 19 nt, Homo sapiens
  misc_RNA (1)...(19): siRNA sense strand
cgacggcccucaagaugga

SEQ ID NO: 2102991 - RNA, 19 nt, Homo sapiens
  misc_RNA (1)...(19): siRNA sense strand
ucaagggacuucgcuguga

SEQ ID NO: 2102992 - RNA, 19 nt, Homo sapiens
  misc_RNA (1)...(19): siRNA sense strand
gcucacccgugcagaaaug

SEQ ID NO: 2102993 - RNA, 19 nt, Homo sapiens
  misc_RNA (1)...(19): siRNA sense strand
caaagagugucaacauggu

SEQ ID NO: 2102994 - RNA, 19 nt, Homo sapiens
  misc_RNA (1)...(19): siRNA sense strand
caaagcagccaccgugaga

SEQ ID NO: 2102995 - RNA, 19 nt, Homo sapiens
  misc_RNA (1)...(19): siRNA sense strand
gaauggcucugcggugugu

SEQ ID NO: 2102996 - RNA, 19 nt, Homo sapiens
  misc_RNA (1)...(19): siRNA sense strand
gagcucgccuguauaaagg

SEQ ID NO: 2102997 - RNA, 19 nt, Homo sapiens
  misc_RNA (1)...(19): siRNA sense strand
ccuggcaacuguucagaaa

SEQ ID NO: 2102998 - RNA, 19 nt, Homo sapiens
  misc_RNA (1)...(19): siRNA sense strand
caaacaggaaacaaaguaa

SEQ ID NO: 2102999 - RNA, 19 nt, Homo sapiens
  misc_RNA (1)...(19): siRNA sense strand
gaacaacaacgggaucauc

SEQ ID NO: 2103000 - RNA, 19 nt, Homo sapiens
  misc_RNA (1)...(19): siRNA sense strand
gcaaggacaucggaaacgu

SEQ ID NO: 2103001 - RNA, 19 nt, Homo sapiens
  misc_RNA (1)...(19): siRNA sense strand
gaacacacagugcccagau

SEQ ID NO: 2103002 - RNA, 19 nt, Homo sapiens
  misc_RNA (1)...(19): siRNA sense strand
ccacuacauuggcaaauac

SEQ ID NO: 2103003 - RNA, 19 nt, Homo sapiens
  misc_RNA (1)...(19): siRNA sense strand
ucagugaagcgaaacagua

SEQ ID NO: 2103004 - RNA, 19 nt, Homo sapiens
  misc_RNA (1)...(19): siRNA sense strand
ucacagccaugcccugcaa

SEQ ID NO: 2103005 - RNA, 19 nt, Homo sapiens
  misc_RNA (1)...(19): siRNA sense strand
gcgaaacaguaacaacaag

SEQ ID NO: 2103006 - RNA, 19 nt, Homo sapiens
  misc_RNA (1)...(19): siRNA sense strand
aggcuuaugucaucaaugu

SEQ ID NO: 2103007 - RNA, 19 nt, Homo sapiens
  misc_RNA (1)...(19): siRNA sense strand
gcuucgaggucaccaaugu

SEQ ID NO: 2103008 - RNA, 19 nt, Homo sapiens
  misc_RNA (1)...(19): siRNA sense strand
gguaccagcucucugugau

SEQ ID NO: 2103009 - RNA, 19 nt, Homo sapiens
  misc_RNA (1)...(19): siRNA sense strand
gaagagugagcgccagguu

SEQ ID NO: 2103010 - RNA, 19 nt, Homo sapiens
  misc_RNA (1)...(19): siRNA sense strand
acgggaagcuggcguccua

SEQ ID NO: 2103011 - RNA, 19 nt, Homo sapiens
  misc_RNA (1)...(19): siRNA sense strand
gucagacacuggagaaauc

SEQ ID NO: 2103012 - RNA, 19 nt, Homo sapiens
  misc_RNA (1)...(19): siRNA sense strand
gcagcaaggacaucggaaa

SEQ ID NO: 2103013 - RNA, 19 nt, Homo sapiens
  misc_RNA (1)...(19): siRNA sense strand
ggaauuacaccugcuugug

SEQ ID NO: 2103014 - RNA, 19 nt, Homo sapiens
  misc_RNA (1)...(19): siRNA sense strand
aaacaaaguaagagucaga

SEQ ID NO: 2103015 - RNA, 19 nt, Homo sapiens
  misc_RNA (1)...(19): siRNA sense strand
ucuuugggcuucucuguga

SEQ ID NO: 2103016 - RNA, 19 nt, Homo sapiens
  misc_RNA (1)...(19): siRNA sense strand
caaauacaagugugacugu

SEQ ID NO: 2103017 - RNA, 19 nt, Homo sapiens
  misc_RNA (1)...(19): siRNA sense strand
agacacuggagaaaucuua

SEQ ID NO: 2103018 - RNA, 19 nt, Homo sapiens
  misc_RNA (1)...(19): siRNA sense strand
gcuuaugucaucaauguga

SEQ ID NO: 2103019 - RNA, 19 nt, Homo sapiens
  misc_RNA (1)...(19): siRNA sense strand
ggaggcuuaugucaucaau

SEQ ID NO: 2103020 - RNA, 19 nt, Homo sapiens
  misc_RNA (1)...(19): siRNA sense strand
acaguaacaacaagaauga

SEQ ID NO: 2103021 - RNA, 19 nt, Homo sapiens
  misc_RNA (1)...(19): siRNA sense strand
gagcucacccgugcagaaa

SEQ ID NO: 2103022 - RNA, 19 nt, Homo sapiens
  misc_RNA (1)...(19): siRNA sense strand
guaccagcucucugugaua

SEQ ID NO: 2103023 - RNA, 19 nt, Homo sapiens
  misc_RNA (1)...(19): siRNA sense strand
ggacgucaggcacuacuuc

SEQ ID NO: 2103024 - RNA, 19 nt, Homo sapiens
  misc_RNA (1)...(19): siRNA sense strand
ccaagacaucugcuucaaa

SEQ ID NO: 2103025 - RNA, 19 nt, Homo sapiens
  misc_RNA (1)...(19): siRNA sense strand
cggcgcagcucgagaacau

SEQ ID NO: 2103026 - RNA, 19 nt, Homo sapiens
  misc_RNA (1)...(19): siRNA sense strand
gcccaccucuacaucauca

SEQ ID NO: 2103027 - RNA, 19 nt, Homo sapiens
  misc_RNA (1)...(19): siRNA sense strand
cagugaagcgaaacaguaa

SEQ ID NO: 2103028 - RNA, 19 nt, Homo sapiens
  misc_RNA (1)...(19): siRNA sense strand
gcaccugcuuccacuacau

SEQ ID NO: 2103029 - RNA, 19 nt, Homo sapiens
  misc_RNA (1)...(19): siRNA sense strand
ucaccaucuucaacuauga

SEQ ID NO: 2103030 - RNA, 19 nt, Homo sapiens
  misc_RNA (1)...(19): siRNA sense strand
guaccgagugaccuucuuu

SEQ ID NO: 2103031 - RNA, 19 nt, Homo sapiens
  misc_RNA (1)...(19): siRNA sense strand
gcaccaagagccgcuaugu

SEQ ID NO: 2103032 - RNA, 19 nt, Homo sapiens
  misc_RNA (1)...(19): siRNA sense strand
uccacuacauuggcaaaua

SEQ ID NO: 2103033 - RNA, 19 nt, Homo sapiens
  misc_RNA (1)...(19): siRNA sense strand
gcucuuguguugaccuagu

SEQ ID NO: 2103034 - RNA, 19 nt, Homo sapiens
  misc_RNA (1)...(19): siRNA sense strand
acaacgggaucaucuccuu

SEQ ID NO: 2103035 - RNA, 19 nt, Homo sapiens
  misc_RNA (1)...(19): siRNA sense strand
ucccagcccugucagaaug

SEQ ID NO: 2103036 - RNA, 19 nt, Homo sapiens
  misc_RNA (1)...(19): siRNA sense strand
cgaaacaguaacaacaaga

SEQ ID NO: 2103037 - RNA, 19 nt, Homo sapiens
  misc_RNA (1)...(19): siRNA sense strand
ggcaagcacugcgagaaag

SEQ ID NO: 2103038 - RNA, 19 nt, Homo sapiens
  misc_RNA (1)...(19): siRNA sense strand
uaaaagagucuaccgaguu

SEQ ID NO: 2103039 - RNA, 19 nt, Homo sapiens
  misc_RNA (1)...(19): siRNA sense strand
cgagcucgccuguauaaag

SEQ ID NO: 2103040 - RNA, 19 nt, Homo sapiens
  misc_RNA (1)...(19): siRNA sense strand
acaggaguguggacagguu

SEQ ID NO: 2103041 - RNA, 19 nt, Homo sapiens
  misc_RNA (1)...(19): siRNA sense strand
gcuucucugugaauuugaa

SEQ ID NO: 2103042 - RNA, 19 nt, Homo sapiens
  misc_RNA (1)...(19): siRNA sense strand
uaccagcucucugugauag

SEQ ID NO: 2103043 - RNA, 19 nt, Homo sapiens
  misc_RNA (1)...(19): siRNA sense strand
cggcagggccuacaacauc

SEQ ID NO: 2103044 - RNA, 19 nt, Homo sapiens
  misc_RNA (1)...(19): siRNA sense strand
cauggaggccggugugaga

SEQ ID NO: 2103045 - RNA, 19 nt, Homo sapiens
  misc_RNA (1)...(19): siRNA sense strand
ucaacacauuccagacugu

SEQ ID NO: 2103046 - RNA, 19 nt, Homo sapiens
  misc_RNA (1)...(19): siRNA sense strand
uaacaacaagaaugacauc

SEQ ID NO: 2103047 - RNA, 19 nt, Homo sapiens
  misc_RNA (1)...(19): siRNA sense strand
gcgcugggcguucagaauc

SEQ ID NO: 2103048 - RNA, 19 nt, Homo sapiens
  misc_RNA (1)...(19): siRNA sense strand
cggaggacgucaggcacua

SEQ ID NO: 2103049 - RNA, 19 nt, Homo sapiens
  misc_RNA (1)...(19): siRNA sense strand
ucugucaccacguguauaa

SEQ ID NO: 2103050 - RNA, 19 nt, Homo sapiens
  misc_RNA (1)...(19): siRNA sense strand
ccagugccuugaaaucgau

SEQ ID NO: 2103051 - RNA, 19 nt, Homo sapiens
  misc_RNA (1)...(19): siRNA sense strand
cagaauggugggaccugua

SEQ ID NO: 2103052 - RNA, 19 nt, Homo sapiens
  misc_RNA (1)...(19): siRNA sense strand
caaagagagcugugaaagc

SEQ ID NO: 2103053 - RNA, 19 nt, Homo sapiens
  misc_RNA (1)...(19): siRNA sense strand
ucaaagagagcugugaaag

SEQ ID NO: 2103054 - RNA, 19 nt, Homo sapiens
  misc_RNA (1)...(19): siRNA sense strand
gaagcgaaacaguaacaac

SEQ ID NO: 2103055 - RNA, 19 nt, Homo sapiens
  misc_RNA (1)...(19): siRNA sense strand
cggcaagcacugcgagaaa

SEQ ID NO: 2103056 - RNA, 19 nt, Homo sapiens
  misc_RNA (1)...(19): siRNA sense strand
caccaaagagugucaacau

SEQ ID NO: 2103057 - RNA, 19 nt, Homo sapiens
  misc_RNA (1)...(19): siRNA sense strand
gacggcagaggaagaguga

SEQ ID NO: 2103058 - RNA, 19 nt, Homo sapiens
  misc_RNA (1)...(19): siRNA sense strand
ccaguggccuuccccauug

SEQ ID NO: 2103059 - RNA, 19 nt, Homo sapiens
  misc_RNA (1)...(19): siRNA sense strand
gugcaggcgacguguacua

SEQ ID NO: 2103060 - RNA, 19 nt, Homo sapiens
  misc_RNA (1)...(19): siRNA sense strand
gacacuggagaaaucuuaa

SEQ ID NO: 2103061 - RNA, 19 nt, Homo sapiens
  misc_RNA (1)...(19): siRNA sense strand
ggcagggccuacaacaucu

SEQ ID NO: 2103062 - RNA, 19 nt, Homo sapiens
  misc_RNA (1)...(19): siRNA sense strand
gcuacgcggucaccuacgu

SEQ ID NO: 2103063 - RNA, 19 nt, Homo sapiens
  misc_RNA (1)...(19): siRNA sense strand
accaaagagugucaacaug

SEQ ID NO: 2103064 - RNA, 19 nt, Homo sapiens
  misc_RNA (1)...(19): siRNA sense strand
gcgaggacugcgccaaaga

SEQ ID NO: 2103065 - RNA, 19 nt, Homo sapiens
  misc_RNA (1)...(19): siRNA sense strand
agacaucugcuucaaagag

SEQ ID NO: 2103066 - RNA, 19 nt, Homo sapiens
  misc_RNA (1)...(19): siRNA sense strand
cuaccgaguucaccaagac

SEQ ID NO: 2103067 - RNA, 19 nt, Homo sapiens
  misc_RNA (1)...(19): siRNA sense strand
aaaagagucuaccgaguuc

SEQ ID NO: 2103068 - RNA, 19 nt, Homo sapiens
  misc_RNA (1)...(19): siRNA sense strand
gagaggagcaccccacaga

SEQ ID NO: 2103069 - RNA, 19 nt, Homo sapiens
  misc_RNA (1)...(19): siRNA sense strand
cuacaacaucuccgucuuc

SEQ ID NO: 2103070 - RNA, 19 nt, Homo sapiens
  misc_RNA (1)...(19): siRNA sense strand
ccuacaacaucuccgucuu

SEQ ID NO: 2103071 - RNA, 19 nt, Homo sapiens
  misc_RNA (1)...(19): siRNA sense strand
ccagcucucugugauagca

SEQ ID NO: 2103072 - RNA, 19 nt, Homo sapiens
  misc_RNA (1)...(19): siRNA sense strand
guaacaacaagaaugacau

SEQ ID NO: 2103073 - RNA, 19 nt, Homo sapiens
  misc_RNA (1)...(19): siRNA sense strand
aagcgaaacaguaacaaca

SEQ ID NO: 2103074 - RNA, 19 nt, Homo sapiens
  misc_RNA (1)...(19): siRNA sense strand
gaccagagcugcuauagua

SEQ ID NO: 2103075 - RNA, 19 nt, Homo sapiens
  misc_RNA (1)...(19): siRNA sense strand
gcaguaaucuugaugguaa

SEQ ID NO: 2103076 - RNA, 19 nt, Homo sapiens
  misc_RNA (1)...(19): siRNA sense strand
cuacagagccugaguauua

SEQ ID NO: 2103077 - RNA, 19 nt, Homo sapiens
  misc_RNA (1)...(19): siRNA sense strand
gaacaaagaugccagaacu

SEQ ID NO: 2103078 - RNA, 19 nt, Homo sapiens
  misc_RNA (1)...(19): siRNA sense strand
gaaggacacuuggaaauug

SEQ ID NO: 2103079 - RNA, 19 nt, Homo sapiens
  misc_RNA (1)...(19): siRNA sense strand
gaacagaucccauuccaau

SEQ ID NO: 2103080 - RNA, 19 nt, Homo sapiens
  misc_RNA (1)...(19): siRNA sense strand
gaagaguucugaccaagga

SEQ ID NO: 2103081 - RNA, 19 nt, Homo sapiens
  misc_RNA (1)...(19): siRNA sense strand
caacggagccggagcuaua

SEQ ID NO: 2103082 - RNA, 19 nt, Homo sapiens
  misc_RNA (1)...(19): siRNA sense strand
gcacaaauauucaucuucu

SEQ ID NO: 2103083 - RNA, 19 nt, Homo sapiens
  misc_RNA (1)...(19): siRNA sense strand
caccagaccuugagcauuu

SEQ ID NO: 2103084 - RNA, 19 nt, Homo sapiens
  misc_RNA (1)...(19): siRNA sense strand
caacgaagaccgagacuuu

SEQ ID NO: 2103085 - RNA, 19 nt, Homo sapiens
  misc_RNA (1)...(19): siRNA sense strand
gaagggaccucugaagaug

SEQ ID NO: 2103086 - RNA, 19 nt, Homo sapiens
  misc_RNA (1)...(19): siRNA sense strand
ggaaacaacuggccccuua

SEQ ID NO: 2103087 - RNA, 19 nt, Homo sapiens
  misc_RNA (1)...(19): siRNA sense strand
gaaagaaagccaagaagga

SEQ ID NO: 2103088 - RNA, 19 nt, Homo sapiens
  misc_RNA (1)...(19): siRNA sense strand
ucagaaacaucaggaauuu

SEQ ID NO: 2103089 - RNA, 19 nt, Homo sapiens
  misc_RNA (1)...(19): siRNA sense strand
ggcaucagcuuuggcauua

SEQ ID NO: 2103090 - RNA, 19 nt, Homo sapiens
  misc_RNA (1)...(19): siRNA sense strand
acacaaggcugacacagaa

SEQ ID NO: 2103091 - RNA, 19 nt, Homo sapiens
  misc_RNA (1)...(19): siRNA sense strand
gaaagaagaauaagucauc

SEQ ID NO: 2103092 - RNA, 19 nt, Homo sapiens
  misc_RNA (1)...(19): siRNA sense strand
gaguagugaugcccuauuu

SEQ ID NO: 2103093 - RNA, 19 nt, Homo sapiens
  misc_RNA (1)...(19): siRNA sense strand
ggaaauggagcuugauuau

SEQ ID NO: 2103094 - RNA, 19 nt, Homo sapiens
  misc_RNA (1)...(19): siRNA sense strand
gaacaaauggauggugaua

SEQ ID NO: 2103095 - RNA, 19 nt, Homo sapiens
  misc_RNA (1)...(19): siRNA sense strand
gagaagaugauaaagauga

SEQ ID NO: 2103096 - RNA, 19 nt, Homo sapiens
  misc_RNA (1)...(19): siRNA sense strand
cagaggagaugacaguaaa

SEQ ID NO: 2103097 - RNA, 19 nt, Homo sapiens
  misc_RNA (1)...(19): siRNA sense strand
ugaagaagguggagaagau

SEQ ID NO: 2103098 - RNA, 19 nt, Homo sapiens
  misc_RNA (1)...(19): siRNA sense strand
caaggaaaguggagaggaa

SEQ ID NO: 2103099 - RNA, 19 nt, Homo sapiens
  misc_RNA (1)...(19): siRNA sense strand
gcaguacaaaucacuaaua

SEQ ID NO: 2103100 - RNA, 19 nt, Homo sapiens
  misc_RNA (1)...(19): siRNA sense strand
gcacacaagcagagauuaa

SEQ ID NO: 2103101 - RNA, 19 nt, Homo sapiens
  misc_RNA (1)...(19): siRNA sense strand
gcauggaaauggagcuuga

SEQ ID NO: 2103102 - RNA, 19 nt, Homo sapiens
  misc_RNA (1)...(19): siRNA sense strand
gcagaacccuccauuucau

SEQ ID NO: 2103103 - RNA, 19 nt, Homo sapiens
  misc_RNA (1)...(19): siRNA sense strand
gaucagaguuuagaaaguc

SEQ ID NO: 2103104 - RNA, 19 nt, Homo sapiens
  misc_RNA (1)...(19): siRNA sense strand
acaaauggauggugauaau

SEQ ID NO: 2103105 - RNA, 19 nt, Homo sapiens
  misc_RNA (1)...(19): siRNA sense strand
gcuuuggcauuaagaauaa

SEQ ID NO: 2103106 - RNA, 19 nt, Homo sapiens
  misc_RNA (1)...(19): siRNA sense strand
ggaaggacacuuggaaauu

SEQ ID NO: 2103107 - RNA, 19 nt, Homo sapiens
  misc_RNA (1)...(19): siRNA sense strand
cugaggagauggagaagua

SEQ ID NO: 2103108 - RNA, 19 nt, Homo sapiens
  misc_RNA (1)...(19): siRNA sense strand
ccagcacacugcaaaguaa

SEQ ID NO: 2103109 - RNA, 19 nt, Homo sapiens
  misc_RNA (1)...(19): siRNA sense strand
gaacaaaacccgaugagaa

SEQ ID NO: 2103110 - RNA, 19 nt, Homo sapiens
  misc_RNA (1)...(19): siRNA sense strand
gaugggagcaguaaucuug

SEQ ID NO: 2103111 - RNA, 19 nt, Homo sapiens
  misc_RNA (1)...(19): siRNA sense strand
gguuaacaauucccacuuu

SEQ ID NO: 2103112 - RNA, 19 nt, Homo sapiens
  misc_RNA (1)...(19): siRNA sense strand
gaggaaaccuagugugagu

SEQ ID NO: 2103113 - RNA, 19 nt, Homo sapiens
  misc_RNA (1)...(19): siRNA sense strand
gagaagauccagucaagga

SEQ ID NO: 2103114 - RNA, 19 nt, Homo sapiens
  misc_RNA (1)...(19): siRNA sense strand
gaucaaaacggcacaaaua

SEQ ID NO: 2103115 - RNA, 19 nt, Homo sapiens
  misc_RNA (1)...(19): siRNA sense strand
ggaagugggcggagagaaa

SEQ ID NO: 2103116 - RNA, 19 nt, Homo sapiens
  misc_RNA (1)...(19): siRNA sense strand
ugaagagucuggcuuggaa

SEQ ID NO: 2103117 - RNA, 19 nt, Homo sapiens
  misc_RNA (1)...(19): siRNA sense strand
caaggauuauguugacaaa

SEQ ID NO: 2103118 - RNA, 19 nt, Homo sapiens
  misc_RNA (1)...(19): siRNA sense strand
gagaggaaaccuaguguga

SEQ ID NO: 2103119 - RNA, 19 nt, Homo sapiens
  misc_RNA (1)...(19): siRNA sense strand
gcaguucucccaagccuaa

SEQ ID NO: 2103120 - RNA, 19 nt, Homo sapiens
  misc_RNA (1)...(19): siRNA sense strand
aaauggagcuugauuaugc

SEQ ID NO: 2103121 - RNA, 19 nt, Homo sapiens
  misc_RNA (1)...(19): siRNA sense strand
guacaaggauuauguugac

SEQ ID NO: 2103122 - RNA, 19 nt, Homo sapiens
  misc_RNA (1)...(19): siRNA sense strand
gcaaagcugaggcaaagaa

SEQ ID NO: 2103123 - RNA, 19 nt, Homo sapiens
  misc_RNA (1)...(19): siRNA sense strand
gcgaagagcaggcaccaaa

SEQ ID NO: 2103124 - RNA, 19 nt, Homo sapiens
  misc_RNA (1)...(19): siRNA sense strand
agagagaguuugcucgaaa

SEQ ID NO: 2103125 - RNA, 19 nt, Homo sapiens
  misc_RNA (1)...(19): siRNA sense strand
gcagaggagaugacaguaa

SEQ ID NO: 2103126 - RNA, 19 nt, Homo sapiens
  misc_RNA (1)...(19): siRNA sense strand
gagagccagugaacaaaug

SEQ ID NO: 2103127 - RNA, 19 nt, Homo sapiens
  misc_RNA (1)...(19): siRNA sense strand
ugaaucagcuacaaauagu

SEQ ID NO: 2103128 - RNA, 19 nt, Homo sapiens
  misc_RNA (1)...(19): siRNA sense strand
gagaacagaucccauucca

SEQ ID NO: 2103129 - RNA, 19 nt, Homo sapiens
  misc_RNA (1)...(19): siRNA sense strand
ccacugcacuucaccuuca

SEQ ID NO: 2103130 - RNA, 19 nt, Homo sapiens
  misc_RNA (1)...(19): siRNA sense strand
gaagauccagucaaggaaa

SEQ ID NO: 2103131 - RNA, 19 nt, Homo sapiens
  misc_RNA (1)...(19): siRNA sense strand
ggauguaagugaucagagu

SEQ ID NO: 2103132 - RNA, 19 nt, Homo sapiens
  misc_RNA (1)...(19): siRNA sense strand
ggaagggaccucugaagau

SEQ ID NO: 2103133 - RNA, 19 nt, Homo sapiens
  misc_RNA (1)...(19): siRNA sense strand
gaaucaauagcaucaguuu

SEQ ID NO: 2103134 - RNA, 19 nt, Homo sapiens
  misc_RNA (1)...(19): siRNA sense strand
gaaguggucccauguucaa

SEQ ID NO: 2103135 - RNA, 19 nt, Homo sapiens
  misc_RNA (1)...(19): siRNA sense strand
ccuauagaaucggauaaua

SEQ ID NO: 2103136 - RNA, 19 nt, Homo sapiens
  misc_RNA (1)...(19): siRNA sense strand
uggagaagaugauaaagau

SEQ ID NO: 2103137 - RNA, 19 nt, Homo sapiens
  misc_RNA (1)...(19): siRNA sense strand
guacaaaucacuaauacca

SEQ ID NO: 2103138 - RNA, 19 nt, Homo sapiens
  misc_RNA (1)...(19): siRNA sense strand
gaugaaucagcuacaaaua

SEQ ID NO: 2103139 - RNA, 19 nt, Homo sapiens
  misc_RNA (1)...(19): siRNA sense strand
uugaugagguuaacaauuc

SEQ ID NO: 2103140 - RNA, 19 nt, Homo sapiens
  misc_RNA (1)...(19): siRNA sense strand
gaagcaaagcugaggcaaa

SEQ ID NO: 2103141 - RNA, 19 nt, Homo sapiens
  misc_RNA (1)...(19): siRNA sense strand
ccaaacugcuacuggagaa

SEQ ID NO: 2103142 - RNA, 19 nt, Homo sapiens
  misc_RNA (1)...(19): siRNA sense strand
caucggagccaacccagua

SEQ ID NO: 2103143 - RNA, 19 nt, Homo sapiens
  misc_RNA (1)...(19): siRNA sense strand
gaugacagcuacagugacu

SEQ ID NO: 2103144 - RNA, 19 nt, Homo sapiens
  misc_RNA (1)...(19): siRNA sense strand
gaaauggagcuugauuaug

SEQ ID NO: 2103145 - RNA, 19 nt, Homo sapiens
  misc_RNA (1)...(19): siRNA sense strand
caucacaacuguucagcau

SEQ ID NO: 2103146 - RNA, 19 nt, Homo sapiens
  misc_RNA (1)...(19): siRNA sense strand
uaagaagugugaagagucu

SEQ ID NO: 2103147 - RNA, 19 nt, Homo sapiens
  misc_RNA (1)...(19): siRNA sense strand
ggagaugacaguaaagcaa

SEQ ID NO: 2103148 - RNA, 19 nt, Homo sapiens
  misc_RNA (1)...(19): siRNA sense strand
gagaagguccugggaagaa

SEQ ID NO: 2103149 - RNA, 19 nt, Homo sapiens
  misc_RNA (1)...(19): siRNA sense strand
ugacuacagugacagauca

SEQ ID NO: 2103150 - RNA, 19 nt, Homo sapiens
  misc_RNA (1)...(19): siRNA sense strand
acacaaaggugaacuucca

SEQ ID NO: 2103151 - RNA, 19 nt, Homo sapiens
  misc_RNA (1)...(19): siRNA sense strand
gagagaguuugcucgaaau

SEQ ID NO: 2103152 - RNA, 19 nt, Homo sapiens
  misc_RNA (1)...(19): siRNA sense strand
aggauuauguugacaaaga

SEQ ID NO: 2103153 - RNA, 19 nt, Homo sapiens
  misc_RNA (1)...(19): siRNA sense strand
cagaagagcugagacaaaa

SEQ ID NO: 2103154 - RNA, 19 nt, Homo sapiens
  misc_RNA (1)...(19): siRNA sense strand
ggaaaccuagugugaguga

SEQ ID NO: 2103155 - RNA, 19 nt, Homo sapiens
  misc_RNA (1)...(19): siRNA sense strand
gcucagaugccucuucaga

SEQ ID NO: 2103156 - RNA, 19 nt, Homo sapiens
  misc_RNA (1)...(19): siRNA sense strand
agaaacaucaggaauuuga

SEQ ID NO: 2103157 - RNA, 19 nt, Homo sapiens
  misc_RNA (1)...(19): siRNA sense strand
gaagguggagaagaugaua

SEQ ID NO: 2103158 - RNA, 19 nt, Homo sapiens
  misc_RNA (1)...(19): siRNA sense strand
gagaagcuacugcugauca

SEQ ID NO: 2103159 - RNA, 19 nt, Homo sapiens
  misc_RNA (1)...(19): siRNA sense strand
caggagcccuucccagaga

SEQ ID NO: 2103160 - RNA, 19 nt, Homo sapiens
  misc_RNA (1)...(19): siRNA sense strand
gagaugaggauagugauga

SEQ ID NO: 2103161 - RNA, 19 nt, Homo sapiens
  misc_RNA (1)...(19): siRNA sense strand
caaagaugccagaacuaaa

SEQ ID NO: 2103162 - RNA, 19 nt, Homo sapiens
  misc_RNA (1)...(19): siRNA sense strand
ugacaagccuauagaaucg

SEQ ID NO: 2103163 - RNA, 19 nt, Homo sapiens
  misc_RNA (1)...(19): siRNA sense strand
ccucaacauuauccaaauu

SEQ ID NO: 2103164 - RNA, 19 nt, Homo sapiens
  misc_RNA (1)...(19): siRNA sense strand
gcacgucccaucuccuuug

SEQ ID NO: 2103165 - RNA, 19 nt, Homo sapiens
  misc_RNA (1)...(19): siRNA sense strand
ggacuucauucguucuaag

SEQ ID NO: 2103166 - RNA, 19 nt, Homo sapiens
  misc_RNA (1)...(19): siRNA sense strand
guacagugaggaagaagaa

SEQ ID NO: 2103167 - RNA, 19 nt, Homo sapiens
  misc_RNA (1)...(19): siRNA sense strand
acaaagaugccagaacuaa

SEQ ID NO: 2103168 - RNA, 19 nt, Homo sapiens
  misc_RNA (1)...(19): siRNA sense strand
uguaagugaucagaguuua

SEQ ID NO: 2103169 - RNA, 19 nt, Homo sapiens
  misc_RNA (1)...(19): siRNA sense strand
aagcaaagcugaggcaaag

SEQ ID NO: 2103170 - RNA, 19 nt, Homo sapiens
  misc_RNA (1)...(19): siRNA sense strand
guuaacaauucccacuuug

SEQ ID NO: 2103171 - RNA, 19 nt, Homo sapiens
  misc_RNA (1)...(19): siRNA sense strand
ggaagaagaagaggaagau

SEQ ID NO: 2103172 - RNA, 19 nt, Homo sapiens
  misc_RNA (1)...(19): siRNA sense strand
acacaaacguaaacacaag

SEQ ID NO: 2103173 - RNA, 19 nt, Homo sapiens
  misc_RNA (1)...(19): siRNA sense strand
caagaaggacccaaacauc

SEQ ID NO: 2103174 - RNA, 19 nt, Homo sapiens
  misc_RNA (1)...(19): siRNA sense strand
gaguugauaucuaccauua

SEQ ID NO: 2103175 - RNA, 19 nt, Homo sapiens
  misc_RNA (1)...(19): siRNA sense strand
gcauuuagauggcuuauca

SEQ ID NO: 2103176 - RNA, 19 nt, Homo sapiens
  misc_RNA (1)...(19): siRNA sense strand
gaagauaaaguccaugaaa

SEQ ID NO: 2103177 - RNA, 19 nt, Homo sapiens
  misc_RNA (1)...(19): siRNA sense strand
ucaaauugguuacggauaa

SEQ ID NO: 2103178 - RNA, 19 nt, Homo sapiens
  misc_RNA (1)...(19): siRNA sense strand
uaaaguccaugaaagcaua

SEQ ID NO: 2103179 - RNA, 19 nt, Homo sapiens
  misc_RNA (1)...(19): siRNA sense strand
gaaagaauccaaucuguca

SEQ ID NO: 2103180 - RNA, 19 nt, Homo sapiens
  misc_RNA (1)...(19): siRNA sense strand
ucagaaauauugccaagaa

SEQ ID NO: 2103181 - RNA, 19 nt, Homo sapiens
  misc_RNA (1)...(19): siRNA sense strand
uuagauggcuuaucacaaa

SEQ ID NO: 2103182 - RNA, 19 nt, Homo sapiens
  misc_RNA (1)...(19): siRNA sense strand
gaagagugcugugaacaau

SEQ ID NO: 2103183 - RNA, 19 nt, Homo sapiens
  misc_RNA (1)...(19): siRNA sense strand
aaacuggucugucugauau

SEQ ID NO: 2103184 - RNA, 19 nt, Homo sapiens
  misc_RNA (1)...(19): siRNA sense strand
ggaagagacagaauaugua

SEQ ID NO: 2103185 - RNA, 19 nt, Homo sapiens
  misc_RNA (1)...(19): siRNA sense strand
aggcuaagcuuaauaaaug

SEQ ID NO: 2103186 - RNA, 19 nt, Homo sapiens
  misc_RNA (1)...(19): siRNA sense strand
cagaguauguucauccuaa

SEQ ID NO: 2103187 - RNA, 19 nt, Homo sapiens
  misc_RNA (1)...(19): siRNA sense strand
caucauggauuuacugguu

SEQ ID NO: 2103188 - RNA, 19 nt, Homo sapiens
  misc_RNA (1)...(19): siRNA sense strand
gcagacaccuacacaaagu

SEQ ID NO: 2103189 - RNA, 19 nt, Homo sapiens
  misc_RNA (1)...(19): siRNA sense strand
gaaaaucucuucaaauugg

SEQ ID NO: 2103190 - RNA, 19 nt, Homo sapiens
  misc_RNA (1)...(19): siRNA sense strand
caguacagcugauguggua

SEQ ID NO: 2103191 - RNA, 19 nt, Homo sapiens
  misc_RNA (1)...(19): siRNA sense strand
ggaugaacuucgagaacua

SEQ ID NO: 2103192 - RNA, 19 nt, Homo sapiens
  misc_RNA (1)...(19): siRNA sense strand
gacagaauauguacuaaag

SEQ ID NO: 2103193 - RNA, 19 nt, Homo sapiens
  misc_RNA (1)...(19): siRNA sense strand
uaacaaagccuggagaaga

SEQ ID NO: 2103194 - RNA, 19 nt, Homo sapiens
  misc_RNA (1)...(19): siRNA sense strand
cauucuaacugucacaaua

SEQ ID NO: 2103195 - RNA, 19 nt, Homo sapiens
  misc_RNA (1)...(19): siRNA sense strand
ccaagaauauccacuuauc

SEQ ID NO: 2103196 - RNA, 19 nt, Homo sapiens
  misc_RNA (1)...(19): siRNA sense strand
ggauuucaaagaccaauua

SEQ ID NO: 2103197 - RNA, 19 nt, Homo sapiens
  misc_RNA (1)...(19): siRNA sense strand
gcucagaaguaugggauaa

SEQ ID NO: 2103198 - RNA, 19 nt, Homo sapiens
  misc_RNA (1)...(19): siRNA sense strand
gaagugaucauucuaacug

SEQ ID NO: 2103199 - RNA, 19 nt, Homo sapiens
  misc_RNA (1)...(19): siRNA sense strand
ccuaugacuuacuuucuua

SEQ ID NO: 2103200 - RNA, 19 nt, Homo sapiens
  misc_RNA (1)...(19): siRNA sense strand
guugauaucuaccauuaug

SEQ ID NO: 2103201 - RNA, 19 nt, Homo sapiens
  misc_RNA (1)...(19): siRNA sense strand
caggagguaucaauuuaaa

SEQ ID NO: 2103202 - RNA, 19 nt, Homo sapiens
  misc_RNA (1)...(19): siRNA sense strand
cagcagaauuucacauuuc

SEQ ID NO: 2103203 - RNA, 19 nt, Homo sapiens
  misc_RNA (1)...(19): siRNA sense strand
caugaccucuuaacagaaa

SEQ ID NO: 2103204 - RNA, 19 nt, Homo sapiens
  misc_RNA (1)...(19): siRNA sense strand
gaacuucaucauggauuua

SEQ ID NO: 2103205 - RNA, 19 nt, Homo sapiens
  misc_RNA (1)...(19): siRNA sense strand
uaugaugacuuaagccauu

SEQ ID NO: 2103206 - RNA, 19 nt, Homo sapiens
  misc_RNA (1)...(19): siRNA sense strand
ccagagaggugaaacaaac

SEQ ID NO: 2103207 - RNA, 19 nt, Homo sapiens
  misc_RNA (1)...(19): siRNA sense strand
ugucugauaucaugaaaga

SEQ ID NO: 2103208 - RNA, 19 nt, Homo sapiens
  misc_RNA (1)...(19): siRNA sense strand
uagaguugaucgcuuaauu

SEQ ID NO: 2103209 - RNA, 19 nt, Homo sapiens
  misc_RNA (1)...(19): siRNA sense strand
uaacaacacuccaguucca

SEQ ID NO: 2103210 - RNA, 19 nt, Homo sapiens
  misc_RNA (1)...(19): siRNA sense strand
ucacagggucauucuaaua

SEQ ID NO: 2103211 - RNA, 19 nt, Homo sapiens
  misc_RNA (1)...(19): siRNA sense strand
uaagacaacauuccaagaa

SEQ ID NO: 2103212 - RNA, 19 nt, Homo sapiens
  misc_RNA (1)...(19): siRNA sense strand
guagaaaggaugaaauugu

SEQ ID NO: 2103213 - RNA, 19 nt, Homo sapiens
  misc_RNA (1)...(19): siRNA sense strand
gccaauagauacagucauc

SEQ ID NO: 2103214 - RNA, 19 nt, Homo sapiens
  misc_RNA (1)...(19): siRNA sense strand
ucagaaguaugggauaauu

SEQ ID NO: 2103215 - RNA, 19 nt, Homo sapiens
  misc_RNA (1)...(19): siRNA sense strand
caaacuggucugucugaua

SEQ ID NO: 2103216 - RNA, 19 nt, Homo sapiens
  misc_RNA (1)...(19): siRNA sense strand
caaauugguuacggauaaa

SEQ ID NO: 2103217 - RNA, 19 nt, Homo sapiens
  misc_RNA (1)...(19): siRNA sense strand
uaaccauucuucagauuuc

SEQ ID NO: 2103218 - RNA, 19 nt, Homo sapiens
  misc_RNA (1)...(19): siRNA sense strand
uaaagcagccaaauggauu

SEQ ID NO: 2103219 - RNA, 19 nt, Homo sapiens
  misc_RNA (1)...(19): siRNA sense strand
cagaauauguacuaaaggu

SEQ ID NO: 2103220 - RNA, 19 nt, Homo sapiens
  misc_RNA (1)...(19): siRNA sense strand
uuacaguggugcagaaaga

SEQ ID NO: 2103221 - RNA, 19 nt, Homo sapiens
  misc_RNA (1)...(19): siRNA sense strand
ggagguaucaauuuaaaca

SEQ ID NO: 2103222 - RNA, 19 nt, Homo sapiens
  misc_RNA (1)...(19): siRNA sense strand
ucagcagaauuucacauuu

SEQ ID NO: 2103223 - RNA, 19 nt, Homo sapiens
  misc_RNA (1)...(19): siRNA sense strand
ucacauagaaggacuaaca

SEQ ID NO: 2103224 - RNA, 19 nt, Homo sapiens
  misc_RNA (1)...(19): siRNA sense strand
caagaugacagagauguuu

SEQ ID NO: 2103225 - RNA, 19 nt, Homo sapiens
  misc_RNA (1)...(19): siRNA sense strand
aacaaagccuggagaagaa

SEQ ID NO: 2103226 - RNA, 19 nt, Homo sapiens
  misc_RNA (1)...(19): siRNA sense strand
uucaggagguaucaauuua

SEQ ID NO: 2103227 - RNA, 19 nt, Homo sapiens
  misc_RNA (1)...(19): siRNA sense strand
guuccuagaugccaagaug

SEQ ID NO: 2103228 - RNA, 19 nt, Homo sapiens
  misc_RNA (1)...(19): siRNA sense strand
cuacugcucuugauagaca

SEQ ID NO: 2103229 - RNA, 19 nt, Homo sapiens
  misc_RNA (1)...(19): siRNA sense strand
agaaaacccuucagcauuu

SEQ ID NO: 2103230 - RNA, 19 nt, Homo sapiens
  misc_RNA (1)...(19): siRNA sense strand
agacaaaugauacagcuaa

SEQ ID NO: 2103231 - RNA, 19 nt, Homo sapiens
  misc_RNA (1)...(19): siRNA sense strand
gagacagaauauguacuaa

SEQ ID NO: 2103232 - RNA, 19 nt, Homo sapiens
  misc_RNA (1)...(19): siRNA sense strand
cagcuugucccgcuaauga

SEQ ID NO: 2103233 - RNA, 19 nt, Homo sapiens
  misc_RNA (1)...(19): siRNA sense strand
gacaauagccgugugaauc

SEQ ID NO: 2103234 - RNA, 19 nt, Homo sapiens
  misc_RNA (1)...(19): siRNA sense strand
cagaaauauugccaagaaa

SEQ ID NO: 2103235 - RNA, 19 nt, Homo sapiens
  misc_RNA (1)...(19): siRNA sense strand
uaacacuccuauuccuuau

SEQ ID NO: 2103236 - RNA, 19 nt, Homo sapiens
  misc_RNA (1)...(19): siRNA sense strand
ucauggauuuacugguuua

SEQ ID NO: 2103237 - RNA, 19 nt, Homo sapiens
  misc_RNA (1)...(19): siRNA sense strand
aauaguagcaauccaauga

SEQ ID NO: 2103238 - RNA, 19 nt, Homo sapiens
  misc_RNA (1)...(19): siRNA sense strand
ggagucuauucacauugua

SEQ ID NO: 2103239 - RNA, 19 nt, Homo sapiens
  misc_RNA (1)...(19): siRNA sense strand
ggauuccuaugacuuacuu

SEQ ID NO: 2103240 - RNA, 19 nt, Homo sapiens
  misc_RNA (1)...(19): siRNA sense strand
caacaacuugguucaaaug

SEQ ID NO: 2103241 - RNA, 19 nt, Homo sapiens
  misc_RNA (1)...(19): siRNA sense strand
gaagagacagaauauguac

SEQ ID NO: 2103242 - RNA, 19 nt, Homo sapiens
  misc_RNA (1)...(19): siRNA sense strand
gucacaauauucagacaaa

SEQ ID NO: 2103243 - RNA, 19 nt, Homo sapiens
  misc_RNA (1)...(19): siRNA sense strand
ucaaauggguuuccccuaa

SEQ ID NO: 2103244 - RNA, 19 nt, Homo sapiens
  misc_RNA (1)...(19): siRNA sense strand
gaacacaagcagauuugca

SEQ ID NO: 2103245 - RNA, 19 nt, Homo sapiens
  misc_RNA (1)...(19): siRNA sense strand
gccaagaauuauccuggaa

SEQ ID NO: 2103246 - RNA, 19 nt, Homo sapiens
  misc_RNA (1)...(19): siRNA sense strand
gauguauggugauaauucu

SEQ ID NO: 2103247 - RNA, 19 nt, Homo sapiens
  misc_RNA (1)...(19): siRNA sense strand
aaauaaagcagccaaaugg

SEQ ID NO: 2103248 - RNA, 19 nt, Homo sapiens
  misc_RNA (1)...(19): siRNA sense strand
gaguauguucauccuaaua

SEQ ID NO: 2103249 - RNA, 19 nt, Homo sapiens
  misc_RNA (1)...(19): siRNA sense strand
uagccagaguugugacuuu

SEQ ID NO: 2103250 - RNA, 19 nt, Homo sapiens
  misc_RNA (1)...(19): siRNA sense strand
gaacuucauauucgucuag

SEQ ID NO: 2103251 - RNA, 19 nt, Homo sapiens
  misc_RNA (1)...(19): siRNA sense strand
ucaacaacuugguucaaau

SEQ ID NO: 2103252 - RNA, 19 nt, Homo sapiens
  misc_RNA (1)...(19): siRNA sense strand
caacuaucauccacaaacu

SEQ ID NO: 2103253 - RNA, 19 nt, Homo sapiens
  misc_RNA (1)...(19): siRNA sense strand
ggaagguccaaagcauuua

SEQ ID NO: 2103254 - RNA, 19 nt, Homo sapiens
  misc_RNA (1)...(19): siRNA sense strand
guccaugaaagcauaaaua

SEQ ID NO: 2103255 - RNA, 19 nt, Homo sapiens
  misc_RNA (1)...(19): siRNA sense strand
guuggauuccuaugacuua

SEQ ID NO: 2103256 - RNA, 19 nt, Homo sapiens
  misc_RNA (1)...(19): siRNA sense strand
caaaauacauaccaagauc

SEQ ID NO: 2103257 - RNA, 19 nt, Homo sapiens
  misc_RNA (1)...(19): siRNA sense strand
caugaaagaaucaggaguu

SEQ ID NO: 2103258 - RNA, 19 nt, Homo sapiens
  misc_RNA (1)...(19): siRNA sense strand
guacagcugaugugguaaa

SEQ ID NO: 2103259 - RNA, 19 nt, Homo sapiens
  misc_RNA (1)...(19): siRNA sense strand
uaaggcauaaucaguguuu

SEQ ID NO: 2103260 - RNA, 19 nt, Homo sapiens
  misc_RNA (1)...(19): siRNA sense strand
ugaggaagguccaaagcau

SEQ ID NO: 2103261 - RNA, 19 nt, Homo sapiens
  misc_RNA (1)...(19): siRNA sense strand
ugaaacaccaacuguagaa

SEQ ID NO: 2103262 - RNA, 19 nt, Homo sapiens
  misc_RNA (1)...(19): siRNA sense strand
gaagcaccacuacagcaaa

SEQ ID NO: 2103263 - RNA, 19 nt, Homo sapiens
  misc_RNA (1)...(19): siRNA sense strand
agagacagaauauguacua

SEQ ID NO: 2103264 - RNA, 19 nt, Homo sapiens
  misc_RNA (1)...(19): siRNA sense strand
agaucaccaugaccucuua

SEQ ID NO: 2103265 - RNA, 19 nt, Homo sapiens
  misc_RNA (1)...(19): siRNA sense strand
gaaagcauaaauaguagca

SEQ ID NO: 2103266 - RNA, 19 nt, Homo sapiens
  misc_RNA (1)...(19): siRNA sense strand
aagauaaaguccaugaaag

SEQ ID NO: 2103267 - RNA, 19 nt, Homo sapiens
  misc_RNA (1)...(19): siRNA sense strand
gaggaagguccaaagcauu

SEQ ID NO: 2103268 - RNA, 19 nt, Homo sapiens
  misc_RNA (1)...(19): siRNA sense strand
agaaguaugggauaauuga

SEQ ID NO: 2103269 - RNA, 19 nt, Homo sapiens
  misc_RNA (1)...(19): siRNA sense strand
cuauucagcucagaaguau

SEQ ID NO: 2103270 - RNA, 19 nt, Homo sapiens
  misc_RNA (1)...(19): siRNA sense strand
guucuaaccauucuucaga

SEQ ID NO: 2103271 - RNA, 19 nt, Homo sapiens
  misc_RNA (1)...(19): siRNA sense strand
uggcuuaacaucagaauau

SEQ ID NO: 2103272 - RNA, 19 nt, Homo sapiens
  misc_RNA (1)...(19): siRNA sense strand
agacaccuacacaaaguua

SEQ ID NO: 2103273 - RNA, 19 nt, Homo sapiens
  misc_RNA (1)...(19): siRNA sense strand
aagcagacaccuacacaaa

SEQ ID NO: 2103274 - RNA, 19 nt, Homo sapiens
  misc_RNA (1)...(19): siRNA sense strand
ggaagaagcuccaagugua

SEQ ID NO: 2103275 - RNA, 19 nt, Homo sapiens
  misc_RNA (1)...(19): siRNA sense strand
guacaacacccucaaauau

SEQ ID NO: 2103276 - RNA, 19 nt, Homo sapiens
  misc_RNA (1)...(19): siRNA sense strand
gcagaggccuugaggacuu

SEQ ID NO: 2103277 - RNA, 19 nt, Homo sapiens
  misc_RNA (1)...(19): siRNA sense strand
gcccagagccuccaggaua

SEQ ID NO: 2103278 - RNA, 19 nt, Homo sapiens
  misc_RNA (1)...(19): siRNA sense strand
gaagaagcuccaaguguau

SEQ ID NO: 2103279 - RNA, 19 nt, Homo sapiens
  misc_RNA (1)...(19): siRNA sense strand
gggcaaagaccugacguuu

SEQ ID NO: 2103280 - RNA, 19 nt, Homo sapiens
  misc_RNA (1)...(19): siRNA sense strand
accaggagguguauaauga

SEQ ID NO: 2103281 - RNA, 19 nt, Homo sapiens
  misc_RNA (1)...(19): siRNA sense strand
ggagcuguguucagaguca

SEQ ID NO: 2103282 - RNA, 19 nt, Homo sapiens
  misc_RNA (1)...(19): siRNA sense strand
gaccugacguuugucuuug

SEQ ID NO: 2103283 - RNA, 19 nt, Homo sapiens
  misc_RNA (1)...(19): siRNA sense strand
cguacaacacccucaaaua

SEQ ID NO: 2103284 - RNA, 19 nt, Homo sapiens
  misc_RNA (1)...(19): siRNA sense strand
cuaagcaguuggcccuaaa

SEQ ID NO: 2103285 - RNA, 19 nt, Homo sapiens
  misc_RNA (1)...(19): siRNA sense strand
gcuaccaggagguguauaa

SEQ ID NO: 2103286 - RNA, 19 nt, Homo sapiens
  misc_RNA (1)...(19): siRNA sense strand
auaaugaacagauccauga

SEQ ID NO: 2103287 - RNA, 19 nt, Homo sapiens
  misc_RNA (1)...(19): siRNA sense strand
ggaacggcgucaccaaggu

SEQ ID NO: 2103288 - RNA, 19 nt, Homo sapiens
  misc_RNA (1)...(19): siRNA sense strand
cgacaugaucacagaguuu

SEQ ID NO: 2103289 - RNA, 19 nt, Homo sapiens
  misc_RNA (1)...(19): siRNA sense strand
ugacccgccugcucaaaga

SEQ ID NO: 2103290 - RNA, 19 nt, Homo sapiens
  misc_RNA (1)...(19): siRNA sense strand
ucgaggugcucaucagcua

SEQ ID NO: 2103291 - RNA, 19 nt, Homo sapiens
  misc_RNA (1)...(19): siRNA sense strand
agaccucaaugccaccuuu

SEQ ID NO: 2103292 - RNA, 19 nt, Homo sapiens
  misc_RNA (1)...(19): siRNA sense strand
ccaagaagaagggcaaaga

SEQ ID NO: 2103293 - RNA, 19 nt, Homo sapiens
  misc_RNA (1)...(19): siRNA sense strand
ggaccguucuaagcaguug

SEQ ID NO: 2103294 - RNA, 19 nt, Homo sapiens
  misc_RNA (1)...(19): siRNA sense strand
ggagguguauaaugaacag

SEQ ID NO: 2103295 - RNA, 19 nt, Homo sapiens
  misc_RNA (1)...(19): siRNA sense strand
gagcgggugcugguguuua

SEQ ID NO: 2103296 - RNA, 19 nt, Homo sapiens
  misc_RNA (1)...(19): siRNA sense strand
gcucaucaacguccucaau

SEQ ID NO: 2103297 - RNA, 19 nt, Homo sapiens
  misc_RNA (1)...(19): siRNA sense strand
gccaagaugagccugauug

SEQ ID NO: 2103298 - RNA, 19 nt, Homo sapiens
  misc_RNA (1)...(19): siRNA sense strand
gaauggaaaggaccucauc

SEQ ID NO: 2103299 - RNA, 19 nt, Homo sapiens
  misc_RNA (1)...(19): siRNA sense strand
ccacaggaccucccaggau

SEQ ID NO: 2103300 - RNA, 19 nt, Homo sapiens
  misc_RNA (1)...(19): siRNA sense strand
acaacacccucaaauaugc

SEQ ID NO: 2103301 - RNA, 19 nt, Homo sapiens
  misc_RNA (1)...(19): siRNA sense strand
gagcagaaccccacacaug

SEQ ID NO: 2103302 - RNA, 19 nt, Homo sapiens
  misc_RNA (1)...(19): siRNA sense strand
caaagcccaguuuccauga

SEQ ID NO: 2103303 - RNA, 19 nt, Homo sapiens
  misc_RNA (1)...(19): siRNA sense strand
uacaacacccucaaauaug

SEQ ID NO: 2103304 - RNA, 19 nt, Homo sapiens
  misc_RNA (1)...(19): siRNA sense strand
caguuuccaugaaugcauu

SEQ ID NO: 2103305 - RNA, 19 nt, Homo sapiens
  misc_RNA (1)...(19): siRNA sense strand
ccaagaugagccugauuga

SEQ ID NO: 2103306 - RNA, 19 nt, Homo sapiens
  misc_RNA (1)...(19): siRNA sense strand
ucccagagcugcccuugag

SEQ ID NO: 2103307 - RNA, 19 nt, Homo sapiens
  misc_RNA (1)...(19): siRNA sense strand
caggagcuguguucagagu

SEQ ID NO: 2103308 - RNA, 19 nt, Homo sapiens
  misc_RNA (1)...(19): siRNA sense strand
gacaugaucacagaguuug

SEQ ID NO: 2103309 - RNA, 19 nt, Homo sapiens
  misc_RNA (1)...(19): siRNA sense strand
ucuaagcaguuggcccuaa

SEQ ID NO: 2103310 - RNA, 19 nt, Homo sapiens
  misc_RNA (1)...(19): siRNA sense strand
gguguauaaugaacagauc

SEQ ID NO: 2103311 - RNA, 19 nt, Homo sapiens
  misc_RNA (1)...(19): siRNA sense strand
cacaucagccaguaugcua

SEQ ID NO: 2103312 - RNA, 19 nt, Homo sapiens
  misc_RNA (1)...(19): siRNA sense strand
gcaaccggaggaauggaaa

SEQ ID NO: 2103313 - RNA, 19 nt, Homo sapiens
  misc_RNA (1)...(19): siRNA sense strand
cucaggagcuguguucaga

SEQ ID NO: 2103314 - RNA, 19 nt, Homo sapiens
  misc_RNA (1)...(19): siRNA sense strand
gaggaagaagcuccaagug

SEQ ID NO: 2103315 - RNA, 19 nt, Homo sapiens
  misc_RNA (1)...(19): siRNA sense strand
uagccgcucugaggaagaa

SEQ ID NO: 2103316 - RNA, 19 nt, Homo sapiens
  misc_RNA (1)...(19): siRNA sense strand
cucgggagcuggacaguca

SEQ ID NO: 2103317 - RNA, 19 nt, Homo sapiens
  misc_RNA (1)...(19): siRNA sense strand
ggaccucugccugcaagaa

SEQ ID NO: 2103318 - RNA, 19 nt, Homo sapiens
  misc_RNA (1)...(19): siRNA sense strand
gccuagagcccuucaagag

SEQ ID NO: 2103319 - RNA, 19 nt, Homo sapiens
  misc_RNA (1)...(19): siRNA sense strand
ggauacacuggcccuguga

SEQ ID NO: 2103320 - RNA, 19 nt, Homo sapiens
  misc_RNA (1)...(19): siRNA sense strand
agaagcgcguugcgaguuc

SEQ ID NO: 2103321 - RNA, 19 nt, Homo sapiens
  misc_RNA (1)...(19): siRNA sense strand
cuuggccgaugcaaaggua

SEQ ID NO: 2103322 - RNA, 19 nt, Homo sapiens
  misc_RNA (1)...(19): siRNA sense strand
aaagcccaguuuccaugaa

SEQ ID NO: 2103323 - RNA, 19 nt, Homo sapiens
  misc_RNA (1)...(19): siRNA sense strand
aagaagaggaggagaccaa

SEQ ID NO: 2103324 - RNA, 19 nt, Homo sapiens
  misc_RNA (1)...(19): siRNA sense strand
ucagcuaccaggaggugua

SEQ ID NO: 2103325 - RNA, 19 nt, Homo sapiens
  misc_RNA (1)...(19): siRNA sense strand
agcgggugcugguguuuaa

SEQ ID NO: 2103326 - RNA, 19 nt, Homo sapiens
  misc_RNA (1)...(19): siRNA sense strand
ccgacaugaucacagaguu

SEQ ID NO: 2103327 - RNA, 19 nt, Homo sapiens
  misc_RNA (1)...(19): siRNA sense strand
ggaagacacacaccaugcu

SEQ ID NO: 2103328 - RNA, 19 nt, Homo sapiens
  misc_RNA (1)...(19): siRNA sense strand
ccuccagccugaccuacga

SEQ ID NO: 2103329 - RNA, 19 nt, Homo sapiens
  misc_RNA (1)...(19): siRNA sense strand
ccuagcaaccggaggaaug

SEQ ID NO: 2103330 - RNA, 19 nt, Homo sapiens
  misc_RNA (1)...(19): siRNA sense strand
ccaggagguguauaaugaa

SEQ ID NO: 2103331 - RNA, 19 nt, Homo sapiens
  misc_RNA (1)...(19): siRNA sense strand
cgcccgacaugaucacaga

SEQ ID NO: 2103332 - RNA, 19 nt, Homo sapiens
  misc_RNA (1)...(19): siRNA sense strand
agccuggacugucacauca

SEQ ID NO: 2103333 - RNA, 19 nt, Homo sapiens
  misc_RNA (1)...(19): siRNA sense strand
aagcccaguuuccaugaau

SEQ ID NO: 2103334 - RNA, 19 nt, Homo sapiens
  misc_RNA (1)...(19): siRNA sense strand
gagcuguguucagagucaa

SEQ ID NO: 2103335 - RNA, 19 nt, Homo sapiens
  misc_RNA (1)...(19): siRNA sense strand
caggagguguauaaugaac

SEQ ID NO: 2103336 - RNA, 19 nt, Homo sapiens
  misc_RNA (1)...(19): siRNA sense strand
ugaggaagaagcuccaagu

SEQ ID NO: 2103337 - RNA, 19 nt, Homo sapiens
  misc_RNA (1)...(19): siRNA sense strand
ucaucaacguccucaaugc

SEQ ID NO: 2103338 - RNA, 19 nt, Homo sapiens
  misc_RNA (1)...(19): siRNA sense strand
gcagcuggugcaagaggaa

SEQ ID NO: 2103339 - RNA, 19 nt, Homo sapiens
  misc_RNA (1)...(19): siRNA sense strand
aggaagaagcuccaagugu

SEQ ID NO: 2103340 - RNA, 19 nt, Homo sapiens
  misc_RNA (1)...(19): siRNA sense strand
ugcaaggacuuucuuucca

SEQ ID NO: 2103341 - RNA, 19 nt, Homo sapiens
  misc_RNA (1)...(19): siRNA sense strand
ucgcugaagagcaauguga

SEQ ID NO: 2103342 - RNA, 19 nt, Homo sapiens
  misc_RNA (1)...(19): siRNA sense strand
cccagaggaugaggaugaa

SEQ ID NO: 2103343 - RNA, 19 nt, Homo sapiens
  misc_RNA (1)...(19): siRNA sense strand
caagaagaagggcaaagac

SEQ ID NO: 2103344 - RNA, 19 nt, Homo sapiens
  misc_RNA (1)...(19): siRNA sense strand
ccugugacccggacuaugg

SEQ ID NO: 2103345 - RNA, 19 nt, Homo sapiens
  misc_RNA (1)...(19): siRNA sense strand
cccagagccuccaggauac

SEQ ID NO: 2103346 - RNA, 19 nt, Homo sapiens
  misc_RNA (1)...(19): siRNA sense strand
cuacaagucugccaucuua

SEQ ID NO: 2103347 - RNA, 19 nt, Homo sapiens
  misc_RNA (1)...(19): siRNA sense strand
ggaauuaucucuuggaauc

SEQ ID NO: 2103348 - RNA, 19 nt, Homo sapiens
  misc_RNA (1)...(19): siRNA sense strand
gcaaaguccuggcauccua

SEQ ID NO: 2103349 - RNA, 19 nt, Homo sapiens
  misc_RNA (1)...(19): siRNA sense strand
ggaccuggaugcccuauau

SEQ ID NO: 2103350 - RNA, 19 nt, Homo sapiens
  misc_RNA (1)...(19): siRNA sense strand
ccacaggaauuaucucuug

SEQ ID NO: 2103351 - RNA, 19 nt, Homo sapiens
  misc_RNA (1)...(19): siRNA sense strand
ccgcauagguucaguguug

SEQ ID NO: 2103352 - RNA, 19 nt, Homo sapiens
  misc_RNA (1)...(19): siRNA sense strand
gcagaucggcuucuccuuu

SEQ ID NO: 2103353 - RNA, 19 nt, Homo sapiens
  misc_RNA (1)...(19): siRNA sense strand
gcaaguaccaggaacagaa

SEQ ID NO: 2103354 - RNA, 19 nt, Homo sapiens
  misc_RNA (1)...(19): siRNA sense strand
ugacggagcuggucugaag

SEQ ID NO: 2103355 - RNA, 19 nt, Homo sapiens
  misc_RNA (1)...(19): siRNA sense strand
caagagguauuguuggaau

SEQ ID NO: 2103356 - RNA, 19 nt, Homo sapiens
  misc_RNA (1)...(19): siRNA sense strand
acaaacacaucaucucaga

SEQ ID NO: 2103357 - RNA, 19 nt, Homo sapiens
  misc_RNA (1)...(19): siRNA sense strand
uggaggcucugaaauguuu

SEQ ID NO: 2103358 - RNA, 19 nt, Homo sapiens
  misc_RNA (1)...(19): siRNA sense strand
cagaucggcuucuccuuug

SEQ ID NO: 2103359 - RNA, 19 nt, Homo sapiens
  misc_RNA (1)...(19): siRNA sense strand
aaacucugauagcugcuua

SEQ ID NO: 2103360 - RNA, 19 nt, Homo sapiens
  misc_RNA (1)...(19): siRNA sense strand
ugaaggagcucagcaagag

SEQ ID NO: 2103361 - RNA, 19 nt, Homo sapiens
  misc_RNA (1)...(19): siRNA sense strand
ggccaaggcuguccugaag

SEQ ID NO: 2103362 - RNA, 19 nt, Homo sapiens
  misc_RNA (1)...(19): siRNA sense strand
gagaagaugcugagugaca

SEQ ID NO: 2103363 - RNA, 19 nt, Homo sapiens
  misc_RNA (1)...(19): siRNA sense strand
ugaaagcugucacccacaa

SEQ ID NO: 2103364 - RNA, 19 nt, Homo sapiens
  misc_RNA (1)...(19): siRNA sense strand
gaacuacagcggaaggaau

SEQ ID NO: 2103365 - RNA, 19 nt, Homo sapiens
  misc_RNA (1)...(19): siRNA sense strand
ccacaaacacaucaucuca

SEQ ID NO: 2103366 - RNA, 19 nt, Homo sapiens
  misc_RNA (1)...(19): siRNA sense strand
ucacucgggccauaagaua

SEQ ID NO: 2103367 - RNA, 19 nt, Homo sapiens
  misc_RNA (1)...(19): siRNA sense strand
agucugccaucuuaaauga

SEQ ID NO: 2103368 - RNA, 19 nt, Homo sapiens
  misc_RNA (1)...(19): siRNA sense strand
gacgaugccucagugauuc

SEQ ID NO: 2103369 - RNA, 19 nt, Homo sapiens
  misc_RNA (1)...(19): siRNA sense strand
gcaaagcccagguaaacuc

SEQ ID NO: 2103370 - RNA, 19 nt, Homo sapiens
  misc_RNA (1)...(19): siRNA sense strand
gagcuggacccucucucua

SEQ ID NO: 2103371 - RNA, 19 nt, Homo sapiens
  misc_RNA (1)...(19): siRNA sense strand
gccaggcuguggugaagaa

SEQ ID NO: 2103372 - RNA, 19 nt, Homo sapiens
  misc_RNA (1)...(19): siRNA sense strand
augagaagaugcugaguga

SEQ ID NO: 2103373 - RNA, 19 nt, Homo sapiens
  misc_RNA (1)...(19): siRNA sense strand
cuggaugcccuauauauuu

SEQ ID NO: 2103374 - RNA, 19 nt, Homo sapiens
  misc_RNA (1)...(19): siRNA sense strand
uaaacucugugccaaccaa

SEQ ID NO: 2103375 - RNA, 19 nt, Homo sapiens
  misc_RNA (1)...(19): siRNA sense strand
ggccagcagccuucuagua

SEQ ID NO: 2103376 - RNA, 19 nt, Homo sapiens
  misc_RNA (1)...(19): siRNA sense strand
gagcggaugcaccucauug

SEQ ID NO: 2103377 - RNA, 19 nt, Homo sapiens
  misc_RNA (1)...(19): siRNA sense strand
gaucggcuucuccuuugua

SEQ ID NO: 2103378 - RNA, 19 nt, Homo sapiens
  misc_RNA (1)...(19): siRNA sense strand
gaucucagaggaugacuuc

SEQ ID NO: 2103379 - RNA, 19 nt, Homo sapiens
  misc_RNA (1)...(19): siRNA sense strand
ggucugaagcugguaguuu

SEQ ID NO: 2103380 - RNA, 19 nt, Homo sapiens
  misc_RNA (1)...(19): siRNA sense strand
gcgaguuccuccuuagcuu

SEQ ID NO: 2103381 - RNA, 19 nt, Homo sapiens
  misc_RNA (1)...(19): siRNA sense strand
gaagugggccaagggaaug

SEQ ID NO: 2103382 - RNA, 19 nt, Homo sapiens
  misc_RNA (1)...(19): siRNA sense strand
ccaagaguccagaccauug

SEQ ID NO: 2103383 - RNA, 19 nt, Homo sapiens
  misc_RNA (1)...(19): siRNA sense strand
guccaucacucgggccaua

SEQ ID NO: 2103384 - RNA, 19 nt, Homo sapiens
  misc_RNA (1)...(19): siRNA sense strand
ccugaacgauggccugaug

SEQ ID NO: 2103385 - RNA, 19 nt, Homo sapiens
  misc_RNA (1)...(19): siRNA sense strand
caggaauuaucucuuggaa

SEQ ID NO: 2103386 - RNA, 19 nt, Homo sapiens
  misc_RNA (1)...(19): siRNA sense strand
ucaaggagucccugcugua

SEQ ID NO: 2103387 - RNA, 19 nt, Homo sapiens
  misc_RNA (1)...(19): siRNA sense strand
gcuuugagcuggucuucuc

SEQ ID NO: 2103388 - RNA, 19 nt, Homo sapiens
  misc_RNA (1)...(19): siRNA sense strand
cgagacagccagagaagug

SEQ ID NO: 2103389 - RNA, 19 nt, Homo sapiens
  misc_RNA (1)...(19): siRNA sense strand
gccauaagauacggaggaa

SEQ ID NO: 2103390 - RNA, 19 nt, Homo sapiens
  misc_RNA (1)...(19): siRNA sense strand
gggcccauccuucuucaaa

SEQ ID NO: 2103391 - RNA, 19 nt, Homo sapiens
  misc_RNA (1)...(19): siRNA sense strand
caagagaauggcuccaaga

SEQ ID NO: 2103392 - RNA, 19 nt, Homo sapiens
  misc_RNA (1)...(19): siRNA sense strand
gagcugaggccggaggaaa

SEQ ID NO: 2103393 - RNA, 19 nt, Homo sapiens
  misc_RNA (1)...(19): siRNA sense strand
aaacacaucaucucagagu

SEQ ID NO: 2103394 - RNA, 19 nt, Homo sapiens
  misc_RNA (1)...(19): siRNA sense strand
gcaccacgacaucaucuuc

SEQ ID NO: 2103395 - RNA, 19 nt, Homo sapiens
  misc_RNA (1)...(19): siRNA sense strand
agacgaugccucagugauu

SEQ ID NO: 2103396 - RNA, 19 nt, Homo sapiens
  misc_RNA (1)...(19): siRNA sense strand
ggagaugccaacaccaugu

SEQ ID NO: 2103397 - RNA, 19 nt, Homo sapiens
  misc_RNA (1)...(19): siRNA sense strand
ggacugagccaagaaacag

SEQ ID NO: 2103398 - RNA, 19 nt, Homo sapiens
  misc_RNA (1)...(19): siRNA sense strand
ccaacggacugagccaaga

SEQ ID NO: 2103399 - RNA, 19 nt, Homo sapiens
  misc_RNA (1)...(19): siRNA sense strand
cagcaaagcccagguaaac

SEQ ID NO: 2103400 - RNA, 19 nt, Homo sapiens
  misc_RNA (1)...(19): siRNA sense strand
gucugaagcugguaguuuc

SEQ ID NO: 2103401 - RNA, 19 nt, Homo sapiens
  misc_RNA (1)...(19): siRNA sense strand
acaagucugccaucuuaaa

SEQ ID NO: 2103402 - RNA, 19 nt, Homo sapiens
  misc_RNA (1)...(19): siRNA sense strand
ugcaguaccugguggcuau

SEQ ID NO: 2103403 - RNA, 19 nt, Homo sapiens
  misc_RNA (1)...(19): siRNA sense strand
gcucgcugcuucgcuguga

SEQ ID NO: 2103404 - RNA, 19 nt, Homo sapiens
  misc_RNA (1)...(19): siRNA sense strand
ucucagaggaugacuucua

SEQ ID NO: 2103405 - RNA, 19 nt, Homo sapiens
  misc_RNA (1)...(19): siRNA sense strand
gcccauguccugugacuca

SEQ ID NO: 2103406 - RNA, 19 nt, Homo sapiens
  misc_RNA (1)...(19): siRNA sense strand
uggagcaccugacguuugu

SEQ ID NO: 2103407 - RNA, 19 nt, Homo sapiens
  misc_RNA (1)...(19): siRNA sense strand
ucucuggccucuauuacug

SEQ ID NO: 2103408 - RNA, 19 nt, Homo sapiens
  misc_RNA (1)...(19): siRNA sense strand
caggaacaaugagaagaug

SEQ ID NO: 2103409 - RNA, 19 nt, Homo sapiens
  misc_RNA (1)...(19): siRNA sense strand
gaccaagcguguguaccuu

SEQ ID NO: 2103410 - RNA, 19 nt, Homo sapiens
  misc_RNA (1)...(19): siRNA sense strand
cagcagccuucuaguacug

SEQ ID NO: 2103411 - RNA, 19 nt, Homo sapiens
  misc_RNA (1)...(19): siRNA sense strand
ugcaagagguauuguugga

SEQ ID NO: 2103412 - RNA, 19 nt, Homo sapiens
  misc_RNA (1)...(19): siRNA sense strand
gcugcuuacuccaagagaa

SEQ ID NO: 2103413 - RNA, 19 nt, Homo sapiens
  misc_RNA (1)...(19): siRNA sense strand
gaaagcugucacccacaaa

SEQ ID NO: 2103414 - RNA, 19 nt, Homo sapiens
  misc_RNA (1)...(19): siRNA sense strand
acacaucaucucagaguug

SEQ ID NO: 2103415 - RNA, 19 nt, Homo sapiens
  misc_RNA (1)...(19): siRNA sense strand
gaaaagugcccaccagaag

SEQ ID NO: 2103416 - RNA, 19 nt, Homo sapiens
  misc_RNA (1)...(19): siRNA sense strand
caggaggugcugaaauuug

SEQ ID NO: 2103417 - RNA, 19 nt, Homo sapiens
  misc_RNA (1)...(19): siRNA sense strand
gcaagagguauuguuggaa

SEQ ID NO: 2103418 - RNA, 19 nt, Homo sapiens
  misc_RNA (1)...(19): siRNA sense strand
caagucugccaucuuaaau

SEQ ID NO: 2103419 - RNA, 19 nt, Homo sapiens
  misc_RNA (1)...(19): siRNA sense strand
caacggacugagccaagaa

SEQ ID NO: 2103420 - RNA, 19 nt, Homo sapiens
  misc_RNA (1)...(19): siRNA sense strand
ugccuucucuggccucuau

SEQ ID NO: 2103421 - RNA, 19 nt, Homo sapiens
  misc_RNA (1)...(19): siRNA sense strand
aggagucccugcuguacuu

SEQ ID NO: 2103422 - RNA, 19 nt, Homo sapiens
  misc_RNA (1)...(19): siRNA sense strand
ccuucgaacucuccuacaa

SEQ ID NO: 2103423 - RNA, 19 nt, Homo sapiens
  misc_RNA (1)...(19): siRNA sense strand
uugcugaccuccaacagau

SEQ ID NO: 2103424 - RNA, 19 nt, Homo sapiens
  misc_RNA (1)...(19): siRNA sense strand
uggaaucuccgcauagguu

SEQ ID NO: 2103425 - RNA, 19 nt, Homo sapiens
  misc_RNA (1)...(19): siRNA sense strand
caagcucugugccuucucu

SEQ ID NO: 2103426 - RNA, 19 nt, Homo sapiens
  misc_RNA (1)...(19): siRNA sense strand
ccaaggcuguccugaagcu

SEQ ID NO: 2103427 - RNA, 19 nt, Homo sapiens
  misc_RNA (1)...(19): siRNA sense strand
gaccuggaugcccuauaua

SEQ ID NO: 2103428 - RNA, 19 nt, Homo sapiens
  misc_RNA (1)...(19): siRNA sense strand
gagguauuguuggaauuca

SEQ ID NO: 2103429 - RNA, 19 nt, Homo sapiens
  misc_RNA (1)...(19): siRNA sense strand
ccaucccggucaucaagaa

SEQ ID NO: 2103430 - RNA, 19 nt, Homo sapiens
  misc_RNA (1)...(19): siRNA sense strand
caaugggcaucuggaagga

SEQ ID NO: 2103431 - RNA, 19 nt, Homo sapiens
  misc_RNA (1)...(19): siRNA sense strand
ggugaacgcgucucuguac

SEQ ID NO: 2103432 - RNA, 19 nt, Homo sapiens
  misc_RNA (1)...(19): siRNA sense strand
ggcgggagccuggaugaaa

SEQ ID NO: 2103433 - RNA, 19 nt, Homo sapiens
  misc_RNA (1)...(19): siRNA sense strand
ugaaggccuugcagaagca

SEQ ID NO: 2103434 - RNA, 19 nt, Homo sapiens
  misc_RNA (1)...(19): siRNA sense strand
gaccugggcacagcaaaug

SEQ ID NO: 2103435 - RNA, 19 nt, Homo sapiens
  misc_RNA (1)...(19): siRNA sense strand
gccagcagccuucuaguac

SEQ ID NO: 2103436 - RNA, 19 nt, Homo sapiens
  misc_RNA (1)...(19): siRNA sense strand
gcaucaggaacaaugagaa

SEQ ID NO: 2103437 - RNA, 19 nt, Homo sapiens
  misc_RNA (1)...(19): siRNA sense strand
cuuggaggcucugaaaugu

SEQ ID NO: 2103438 - RNA, 19 nt, Homo sapiens
  misc_RNA (1)...(19): siRNA sense strand
aaacaagagcuggaucuca

SEQ ID NO: 2103439 - RNA, 19 nt, Homo sapiens
  misc_RNA (1)...(19): siRNA sense strand
agaaggcccaggcucauga

SEQ ID NO: 2103440 - RNA, 19 nt, Homo sapiens
  misc_RNA (1)...(19): siRNA sense strand
ccuggaugcccuauauauu

SEQ ID NO: 2103441 - RNA, 19 nt, Homo sapiens
  misc_RNA (1)...(19): siRNA sense strand
uaccaggaacagaacauuu

SEQ ID NO: 2103442 - RNA, 19 nt, Homo sapiens
  misc_RNA (1)...(19): siRNA sense strand
caguguugcugaccuccaa

SEQ ID NO: 2103443 - RNA, 19 nt, Homo sapiens
  misc_RNA (1)...(19): siRNA sense strand
ggagacgggagcagcugaa

SEQ ID NO: 2103444 - RNA, 19 nt, Homo sapiens
  misc_RNA (1)...(19): siRNA sense strand
gagccuggaugaaaacugu

SEQ ID NO: 2103445 - RNA, 19 nt, Homo sapiens
  misc_RNA (1)...(19): siRNA sense strand
gcgggagccuggaugaaaa

SEQ ID NO: 2103446 - RNA, 19 nt, Homo sapiens
  misc_RNA (1)...(19): siRNA sense strand
gaggaaggguuugaaagua

SEQ ID NO: 2103447 - RNA, 19 nt, Homo sapiens
  misc_RNA (1)...(19): siRNA sense strand
ggacuacuguauccuguuc

SEQ ID NO: 2103448 - RNA, 19 nt, Homo sapiens
  misc_RNA (1)...(19): siRNA sense strand
gacccaggcucccuuguga

SEQ ID NO: 2103449 - RNA, 19 nt, Homo sapiens
  misc_RNA (1)...(19): siRNA sense strand
aggaaggguuugaaaguaa

SEQ ID NO: 2103450 - RNA, 19 nt, Homo sapiens
  misc_RNA (1)...(19): siRNA sense strand
ccucagagcugggccaugu

SEQ ID NO: 2103451 - RNA, 19 nt, Homo sapiens
  misc_RNA (1)...(19): siRNA sense strand
gaccaacagugcucagaca

SEQ ID NO: 2103452 - RNA, 19 nt, Homo sapiens
  misc_RNA (1)...(19): siRNA sense strand
ggaaggguuugaaaguaag

SEQ ID NO: 2103453 - RNA, 19 nt, Homo sapiens
  misc_RNA (1)...(19): siRNA sense strand
ccacuuggauccuaaugag

SEQ ID NO: 2103454 - RNA, 19 nt, Homo sapiens
  misc_RNA (1)...(19): siRNA sense strand
ggagcaaggacuacuguau

SEQ ID NO: 2103455 - RNA, 19 nt, Homo sapiens
  misc_RNA (1)...(19): siRNA sense strand
caagaggaaggguuugaaa

SEQ ID NO: 2103456 - RNA, 19 nt, Homo sapiens
  misc_RNA (1)...(19): siRNA sense strand
caucaucgacuacaacaug

SEQ ID NO: 2103457 - RNA, 19 nt, Homo sapiens
  misc_RNA (1)...(19): siRNA sense strand
gagcaaggacuacuguauc

SEQ ID NO: 2103458 - RNA, 19 nt, Homo sapiens
  misc_RNA (1)...(19): siRNA sense strand
gcuccacuaugcugacaug

SEQ ID NO: 2103459 - RNA, 19 nt, Homo sapiens
  misc_RNA (1)...(19): siRNA sense strand
cagagcccaucaucgacua

SEQ ID NO: 2103460 - RNA, 19 nt, Homo sapiens
  misc_RNA (1)...(19): siRNA sense strand
acaacaugcuggucaucuu

SEQ ID NO: 2103461 - RNA, 19 nt, Homo sapiens
  misc_RNA (1)...(19): siRNA sense strand
caacaugcuggucaucuuc

SEQ ID NO: 2103462 - RNA, 19 nt, Homo sapiens
  misc_RNA (1)...(19): siRNA sense strand
gaggagcugaugccacuga

SEQ ID NO: 2103463 - RNA, 19 nt, Homo sapiens
  misc_RNA (1)...(19): siRNA sense strand
gguuugaaaguaagaaaga

SEQ ID NO: 2103464 - RNA, 19 nt, Homo sapiens
  misc_RNA (1)...(19): siRNA sense strand
guucagcuccgacuacauc

SEQ ID NO: 2103465 - RNA, 19 nt, Homo sapiens
  misc_RNA (1)...(19): siRNA sense strand
agaauuggagcaaggacua

SEQ ID NO: 2103466 - RNA, 19 nt, Homo sapiens
  misc_RNA (1)...(19): siRNA sense strand
aaaguaagaaagagcaugu

SEQ ID NO: 2103467 - RNA, 19 nt, Homo sapiens
  misc_RNA (1)...(19): siRNA sense strand
caccaucccuguggcuaug

SEQ ID NO: 2103468 - RNA, 19 nt, Homo sapiens
  misc_RNA (1)...(19): siRNA sense strand
uggcuaugcuccacuaugc

SEQ ID NO: 2103469 - RNA, 19 nt, Homo sapiens
  misc_RNA (1)...(19): siRNA sense strand
gaaggguuugaaaguaaga

SEQ ID NO: 2103470 - RNA, 19 nt, Homo sapiens
  misc_RNA (1)...(19): siRNA sense strand
agaggaaggguuugaaagu

SEQ ID NO: 2103471 - RNA, 19 nt, Homo sapiens
  misc_RNA (1)...(19): siRNA sense strand
gcaggacacacugggcauu

SEQ ID NO: 2103472 - RNA, 19 nt, Homo sapiens
  misc_RNA (1)...(19): siRNA sense strand
caggacacacugggcauuu

SEQ ID NO: 2103473 - RNA, 19 nt, Homo sapiens
  misc_RNA (1)...(19): siRNA sense strand
ugaugccacugaugccaau

SEQ ID NO: 2103474 - RNA, 19 nt, Homo sapiens
  misc_RNA (1)...(19): siRNA sense strand
gaggaaggguuugaaagua

SEQ ID NO: 2103475 - RNA, 19 nt, Homo sapiens
  misc_RNA (1)...(19): siRNA sense strand
ggacuacuguauccuguuc

SEQ ID NO: 2103476 - RNA, 19 nt, Homo sapiens
  misc_RNA (1)...(19): siRNA sense strand
gacccaggcucccuuguga

SEQ ID NO: 2103477 - RNA, 19 nt, Homo sapiens
  misc_RNA (1)...(19): siRNA sense strand
aggaaggguuugaaaguaa

SEQ ID NO: 2103478 - RNA, 19 nt, Homo sapiens
  misc_RNA (1)...(19): siRNA sense strand
ccucagagcugggccaugu

SEQ ID NO: 2103479 - RNA, 19 nt, Homo sapiens
  misc_RNA (1)...(19): siRNA sense strand
gaccaacagugcucagaca

SEQ ID NO: 2103480 - RNA, 19 nt, Homo sapiens
  misc_RNA (1)...(19): siRNA sense strand
ggaaggguuugaaaguaag

SEQ ID NO: 2103481 - RNA, 19 nt, Homo sapiens
  misc_RNA (1)...(19): siRNA sense strand
ccacuuggauccuaaugag

SEQ ID NO: 2103482 - RNA, 19 nt, Homo sapiens
  misc_RNA (1)...(19): siRNA sense strand
ggagcaaggacuacuguau

SEQ ID NO: 2103483 - RNA, 19 nt, Homo sapiens
  misc_RNA (1)...(19): siRNA sense strand
caagaggaaggguuugaaa

SEQ ID NO: 2103484 - RNA, 19 nt, Homo sapiens
  misc_RNA (1)...(19): siRNA sense strand
caucaucgacuacaacaug

SEQ ID NO: 2103485 - RNA, 19 nt, Homo sapiens
  misc_RNA (1)...(19): siRNA sense strand
gagcaaggacuacuguauc

SEQ ID NO: 2103486 - RNA, 19 nt, Homo sapiens
  misc_RNA (1)...(19): siRNA sense strand
gcuccacuaugcugacaug

SEQ ID NO: 2103487 - RNA, 19 nt, Homo sapiens
  misc_RNA (1)...(19): siRNA sense strand
cagagcccaucaucgacua

SEQ ID NO: 2103488 - RNA, 19 nt, Homo sapiens
  misc_RNA (1)...(19): siRNA sense strand
acaacaugcuggucaucuu

SEQ ID NO: 2103489 - RNA, 19 nt, Homo sapiens
  misc_RNA (1)...(19): siRNA sense strand
caacaugcuggucaucuuc

SEQ ID NO: 2103490 - RNA, 19 nt, Homo sapiens
  misc_RNA (1)...(19): siRNA sense strand
gaggagcugaugccacuga

SEQ ID NO: 2103491 - RNA, 19 nt, Homo sapiens
  misc_RNA (1)...(19): siRNA sense strand
gguuugaaaguaagaaaga

SEQ ID NO: 2103492 - RNA, 19 nt, Homo sapiens
  misc_RNA (1)...(19): siRNA sense strand
guucagcuccgacuacauc

SEQ ID NO: 2103493 - RNA, 19 nt, Homo sapiens
  misc_RNA (1)...(19): siRNA sense strand
agaauuggagcaaggacua

SEQ ID NO: 2103494 - RNA, 19 nt, Homo sapiens
  misc_RNA (1)...(19): siRNA sense strand
aaaguaagaaagagcaugu

SEQ ID NO: 2103495 - RNA, 19 nt, Homo sapiens
  misc_RNA (1)...(19): siRNA sense strand
caccaucccuguggcuaug

SEQ ID NO: 2103496 - RNA, 19 nt, Homo sapiens
  misc_RNA (1)...(19): siRNA sense strand
uggcuaugcuccacuaugc

SEQ ID NO: 2103497 - RNA, 19 nt, Homo sapiens
  misc_RNA (1)...(19): siRNA sense strand
gaaggguuugaaaguaaga

SEQ ID NO: 2103498 - RNA, 19 nt, Homo sapiens
  misc_RNA (1)...(19): siRNA sense strand
agaggaaggguuugaaagu

SEQ ID NO: 2103499 - RNA, 19 nt, Homo sapiens
  misc_RNA (1)...(19): siRNA sense strand
gcaggacacacugggcauu

SEQ ID NO: 2103500 - RNA, 19 nt, Homo sapiens
  misc_RNA (1)...(19): siRNA sense strand
caggacacacugggcauuu

SEQ ID NO: 2103501 - RNA, 19 nt, Homo sapiens
  misc_RNA (1)...(19): siRNA sense strand
ugaugccacugaugccaau

SEQ ID NO: 2103502 - RNA, 19 nt, Homo sapiens
  misc_RNA (1)...(19): siRNA sense strand
gagaggagcugccgaguag

SEQ ID NO: 2103503 - RNA, 19 nt, Homo sapiens
  misc_RNA (1)...(19): siRNA sense strand
ccucgaauauuuauccaua

SEQ ID NO: 2103504 - RNA, 19 nt, Homo sapiens
  misc_RNA (1)...(19): siRNA sense strand
gcgagaagaggaagccuua

SEQ ID NO: 2103505 - RNA, 19 nt, Homo sapiens
  misc_RNA (1)...(19): siRNA sense strand
gaggagcugccgaguagaa

SEQ ID NO: 2103506 - RNA, 19 nt, Homo sapiens
  misc_RNA (1)...(19): siRNA sense strand
ccagagagaaacagaagug

SEQ ID NO: 2103507 - RNA, 19 nt, Homo sapiens
  misc_RNA (1)...(19): siRNA sense strand
ggcggaaccuaguggaauc

SEQ ID NO: 2103508 - RNA, 19 nt, Homo sapiens
  misc_RNA (1)...(19): siRNA sense strand
caucaucgcgugcacaucu

SEQ ID NO: 2103509 - RNA, 19 nt, Homo sapiens
  misc_RNA (1)...(19): siRNA sense strand
cuaguggaaucccaucauc

SEQ ID NO: 2103510 - RNA, 19 nt, Homo sapiens
  misc_RNA (1)...(19): siRNA sense strand
gagaagaggaagccuuagg

SEQ ID NO: 2103511 - RNA, 19 nt, Homo sapiens
  misc_RNA (1)...(19): siRNA sense strand
agagaggagcugccgagua

SEQ ID NO: 2103512 - RNA, 19 nt, Homo sapiens
  misc_RNA (1)...(19): siRNA sense strand
cucugggccucgaauauuu

SEQ ID NO: 2103513 - RNA, 19 nt, Homo sapiens
  misc_RNA (1)...(19): siRNA sense strand
gggaacagcgaggauuaga

SEQ ID NO: 2103514 - RNA, 19 nt, Homo sapiens
  misc_RNA (1)...(19): siRNA sense strand
gucgcaggcaggucucuua

SEQ ID NO: 2103515 - RNA, 19 nt, Homo sapiens
  misc_RNA (1)...(19): siRNA sense strand
ucucugggccucgaauauu

SEQ ID NO: 2103516 - RNA, 19 nt, Homo sapiens
  misc_RNA (1)...(19): siRNA sense strand
ucugggccucgaauauuua

SEQ ID NO: 2103517 - RNA, 19 nt, Homo sapiens
  misc_RNA (1)...(19): siRNA sense strand
gaaggacucucuacagaaa

SEQ ID NO: 2103518 - RNA, 19 nt, Homo sapiens
  misc_RNA (1)...(19): siRNA sense strand
ggucaaagaugguggaauu

SEQ ID NO: 2103519 - RNA, 19 nt, Homo sapiens
  misc_RNA (1)...(19): siRNA sense strand
gcaagaugcuggccaagaa

SEQ ID NO: 2103520 - RNA, 19 nt, Homo sapiens
  misc_RNA (1)...(19): siRNA sense strand
gccgacagcucucagaaua

SEQ ID NO: 2103521 - RNA, 19 nt, Homo sapiens
  misc_RNA (1)...(19): siRNA sense strand
gggccucagugaagaauua

SEQ ID NO: 2103522 - RNA, 19 nt, Homo sapiens
  misc_RNA (1)...(19): siRNA sense strand
ggacuugacuucacugucu

SEQ ID NO: 2103523 - RNA, 19 nt, Homo sapiens
  misc_RNA (1)...(19): siRNA sense strand
caacaucgacaucuggaua

SEQ ID NO: 2103524 - RNA, 19 nt, Homo sapiens
  misc_RNA (1)...(19): siRNA sense strand
cagaaggacucucuacaga

SEQ ID NO: 2103525 - RNA, 19 nt, Homo sapiens
  misc_RNA (1)...(19): siRNA sense strand
uaucaaggcuacagugaau

SEQ ID NO: 2103526 - RNA, 19 nt, Homo sapiens
  misc_RNA (1)...(19): siRNA sense strand
uaaagagacugaggcagaa

SEQ ID NO: 2103527 - RNA, 19 nt, Homo sapiens
  misc_RNA (1)...(19): siRNA sense strand
gcaagcaguuccagcagau

SEQ ID NO: 2103528 - RNA, 19 nt, Homo sapiens
  misc_RNA (1)...(19): siRNA sense strand
aauccaagcugaugaaaca

SEQ ID NO: 2103529 - RNA, 19 nt, Homo sapiens
  misc_RNA (1)...(19): siRNA sense strand
caaagaugguggaauugau

SEQ ID NO: 2103530 - RNA, 19 nt, Homo sapiens
  misc_RNA (1)...(19): siRNA sense strand
uacccuaccugcccuauga

SEQ ID NO: 2103531 - RNA, 19 nt, Homo sapiens
  misc_RNA (1)...(19): siRNA sense strand
ccagagaacuaaagagacu

SEQ ID NO: 2103532 - RNA, 19 nt, Homo sapiens
  misc_RNA (1)...(19): siRNA sense strand
gacagguucuggugggaaa

SEQ ID NO: 2103533 - RNA, 19 nt, Homo sapiens
  misc_RNA (1)...(19): siRNA sense strand
gaucaugaccuggacuuug

SEQ ID NO: 2103534 - RNA, 19 nt, Homo sapiens
  misc_RNA (1)...(19): siRNA sense strand
ccaagcugaugaaacagaa

SEQ ID NO: 2103535 - RNA, 19 nt, Homo sapiens
  misc_RNA (1)...(19): siRNA sense strand
gugcagauuaucaccuuua

SEQ ID NO: 2103536 - RNA, 19 nt, Homo sapiens
  misc_RNA (1)...(19): siRNA sense strand
ccuaugacuucguggauug

SEQ ID NO: 2103537 - RNA, 19 nt, Homo sapiens
  misc_RNA (1)...(19): siRNA sense strand
caagaaauccaagcugaug

SEQ ID NO: 2103538 - RNA, 19 nt, Homo sapiens
  misc_RNA (1)...(19): siRNA sense strand
gaugcuggccaagaaguua

SEQ ID NO: 2103539 - RNA, 19 nt, Homo sapiens
  misc_RNA (1)...(19): siRNA sense strand
ggccagagaacuaaagaga

SEQ ID NO: 2103540 - RNA, 19 nt, Homo sapiens
  misc_RNA (1)...(19): siRNA sense strand
uagaggaguugaacacagu

SEQ ID NO: 2103541 - RNA, 19 nt, Homo sapiens
  misc_RNA (1)...(19): siRNA sense strand
gagccuucgugcagauuau

SEQ ID NO: 2103542 - RNA, 19 nt, Homo sapiens
  misc_RNA (1)...(19): siRNA sense strand
gcagaaggacucucuacag

SEQ ID NO: 2103543 - RNA, 19 nt, Homo sapiens
  misc_RNA (1)...(19): siRNA sense strand
gaaauccaagcugaugaaa

SEQ ID NO: 2103544 - RNA, 19 nt, Homo sapiens
  misc_RNA (1)...(19): siRNA sense strand
ucaacgcucugaccuccuu

SEQ ID NO: 2103545 - RNA, 19 nt, Homo sapiens
  misc_RNA (1)...(19): siRNA sense strand
cgggagguaucuaacaaga

SEQ ID NO: 2103546 - RNA, 19 nt, Homo sapiens
  misc_RNA (1)...(19): siRNA sense strand
ccaaagcccagugugauga

SEQ ID NO: 2103547 - RNA, 19 nt, Homo sapiens
  misc_RNA (1)...(19): siRNA sense strand
caccuucgccuuccgcuuu

SEQ ID NO: 2103548 - RNA, 19 nt, Homo sapiens
  misc_RNA (1)...(19): siRNA sense strand
ucagugggauggagagaag

SEQ ID NO: 2103549 - RNA, 19 nt, Homo sapiens
  misc_RNA (1)...(19): siRNA sense strand
cuggagagcugcgcaacaa

SEQ ID NO: 2103550 - RNA, 19 nt, Homo sapiens
  misc_RNA (1)...(19): siRNA sense strand
ucucgagccucagagcaua

SEQ ID NO: 2103551 - RNA, 19 nt, Homo sapiens
  misc_RNA (1)...(19): siRNA sense strand
ucacaggauccauggcuuu

SEQ ID NO: 2103552 - RNA, 19 nt, Homo sapiens
  misc_RNA (1)...(19): siRNA sense strand
gggacuaccuacccauuuu

SEQ ID NO: 2103553 - RNA, 19 nt, Homo sapiens
  misc_RNA (1)...(19): siRNA sense strand
ggagccuucgugcagauua

SEQ ID NO: 2103554 - RNA, 19 nt, Homo sapiens
  misc_RNA (1)...(19): siRNA sense strand
gaucccagaauuuccaaug

SEQ ID NO: 2103555 - RNA, 19 nt, Homo sapiens
  misc_RNA (1)...(19): siRNA sense strand
gaaguuacugggucucuac

SEQ ID NO: 2103556 - RNA, 19 nt, Homo sapiens
  misc_RNA (1)...(19): siRNA sense strand
cuuggaggauggucaaaga

SEQ ID NO: 2103557 - RNA, 19 nt, Homo sapiens
  misc_RNA (1)...(19): siRNA sense strand
gaugccagcuuuguguaca

SEQ ID NO: 2103558 - RNA, 19 nt, Homo sapiens
  misc_RNA (1)...(19): siRNA sense strand
gcgcacagccauccgcaau

SEQ ID NO: 2103559 - RNA, 19 nt, Homo sapiens
  misc_RNA (1)...(19): siRNA sense strand
ccuccuggcuucccucauc

SEQ ID NO: 2103560 - RNA, 19 nt, Homo sapiens
  misc_RNA (1)...(19): siRNA sense strand
gucagauuguggaucauga

SEQ ID NO: 2103561 - RNA, 19 nt, Homo sapiens
  misc_RNA (1)...(19): siRNA sense strand
aagcugaugaaacagaaua

SEQ ID NO: 2103562 - RNA, 19 nt, Homo sapiens
  misc_RNA (1)...(19): siRNA sense strand
cauaucaaggcuacaguga

SEQ ID NO: 2103563 - RNA, 19 nt, Homo sapiens
  misc_RNA (1)...(19): siRNA sense strand
cagaauuuccaaugucuuc

SEQ ID NO: 2103564 - RNA, 19 nt, Homo sapiens
  misc_RNA (1)...(19): siRNA sense strand
gugaccacaugcagaagug

SEQ ID NO: 2103565 - RNA, 19 nt, Homo sapiens
  misc_RNA (1)...(19): siRNA sense strand
agaaggacucucuacagaa

SEQ ID NO: 2103566 - RNA, 19 nt, Homo sapiens
  misc_RNA (1)...(19): siRNA sense strand
gagcagaaggacucucuac

SEQ ID NO: 2103567 - RNA, 19 nt, Homo sapiens
  misc_RNA (1)...(19): siRNA sense strand
ucacgaacgagcagaagga

SEQ ID NO: 2103568 - RNA, 19 nt, Homo sapiens
  misc_RNA (1)...(19): siRNA sense strand
ugaacacagugcugaagag

SEQ ID NO: 2103569 - RNA, 19 nt, Homo sapiens
  misc_RNA (1)...(19): siRNA sense strand
agaaauccaagcugaugaa

SEQ ID NO: 2103570 - RNA, 19 nt, Homo sapiens
  misc_RNA (1)...(19): siRNA sense strand
ccacaagagcgcagacuac

SEQ ID NO: 2103571 - RNA, 19 nt, Homo sapiens
  misc_RNA (1)...(19): siRNA sense strand
gggcaaccuggguacaauu

SEQ ID NO: 2103572 - RNA, 19 nt, Homo sapiens
  misc_RNA (1)...(19): siRNA sense strand
agaaguuacugggucucua

SEQ ID NO: 2103573 - RNA, 19 nt, Homo sapiens
  misc_RNA (1)...(19): siRNA sense strand
gagcgcagacuaccagaac

SEQ ID NO: 2103574 - RNA, 19 nt, Homo sapiens
  misc_RNA (1)...(19): siRNA sense strand
ggugugggaggagucuuua

SEQ ID NO: 2103575 - RNA, 19 nt, Homo sapiens
  misc_RNA (1)...(19): siRNA sense strand
auaaccggcuggccagaga

SEQ ID NO: 2103576 - RNA, 19 nt, Homo sapiens
  misc_RNA (1)...(19): siRNA sense strand
ccacaucccacacccucuu

SEQ ID NO: 2103577 - RNA, 19 nt, Homo sapiens
  misc_RNA (1)...(19): siRNA sense strand
ggacucaagggaaaugcau

SEQ ID NO: 2103578 - RNA, 19 nt, Homo sapiens
  misc_RNA (1)...(19): siRNA sense strand
aggcauccuugaccaaugu

SEQ ID NO: 2103579 - RNA, 19 nt, Homo sapiens
  misc_RNA (1)...(19): siRNA sense strand
gcuucaggcugcagcaucu

SEQ ID NO: 2103580 - RNA, 19 nt, Homo sapiens
  misc_RNA (1)...(19): siRNA sense strand
acgggagacugcaauaaca

SEQ ID NO: 2103581 - RNA, 19 nt, Homo sapiens
  misc_RNA (1)...(19): siRNA sense strand
cgcagacacuagaggaguu

SEQ ID NO: 2103582 - RNA, 19 nt, Homo sapiens
  misc_RNA (1)...(19): siRNA sense strand
gcugaugaaacagaauaaa

SEQ ID NO: 2103583 - RNA, 19 nt, Homo sapiens
  misc_RNA (1)...(19): siRNA sense strand
gcugcagcaucuaccacaa

SEQ ID NO: 2103584 - RNA, 19 nt, Homo sapiens
  misc_RNA (1)...(19): siRNA sense strand
gaaugaggaggguguucug

SEQ ID NO: 2103585 - RNA, 19 nt, Homo sapiens
  misc_RNA (1)...(19): siRNA sense strand
cccgggagguaucuaacaa

SEQ ID NO: 2103586 - RNA, 19 nt, Homo sapiens
  misc_RNA (1)...(19): siRNA sense strand
cgacagcucucagaauacc

SEQ ID NO: 2103587 - RNA, 19 nt, Homo sapiens
  misc_RNA (1)...(19): siRNA sense strand
caucuccgauacugugagu

SEQ ID NO: 2103588 - RNA, 19 nt, Homo sapiens
  misc_RNA (1)...(19): siRNA sense strand
ccgccuggaugagaauuau

SEQ ID NO: 2103589 - RNA, 19 nt, Homo sapiens
  misc_RNA (1)...(19): siRNA sense strand
uaggugaccacaugcagaa

SEQ ID NO: 2103590 - RNA, 19 nt, Homo sapiens
  misc_RNA (1)...(19): siRNA sense strand
ccacuccacccuacaaguc

SEQ ID NO: 2103591 - RNA, 19 nt, Homo sapiens
  misc_RNA (1)...(19): siRNA sense strand
ggaggguguucuggaccaa

SEQ ID NO: 2103592 - RNA, 19 nt, Homo sapiens
  misc_RNA (1)...(19): siRNA sense strand
ccaagaaauccaagcugau

SEQ ID NO: 2103593 - RNA, 19 nt, Homo sapiens
  misc_RNA (1)...(19): siRNA sense strand
gcagacacuagaggaguug

SEQ ID NO: 2103594 - RNA, 19 nt, Homo sapiens
  misc_RNA (1)...(19): siRNA sense strand
gcucucagaauaccucaag

SEQ ID NO: 2103595 - RNA, 19 nt, Homo sapiens
  misc_RNA (1)...(19): siRNA sense strand
gauuguuggcuaucugaau

SEQ ID NO: 2103596 - RNA, 19 nt, Homo sapiens
  misc_RNA (1)...(19): siRNA sense strand
ugugggaggagucuuuaaa

SEQ ID NO: 2103597 - RNA, 19 nt, Homo sapiens
  misc_RNA (1)...(19): siRNA sense strand
ugcagcaucuaccacaaga

SEQ ID NO: 2103598 - RNA, 19 nt, Homo sapiens
  misc_RNA (1)...(19): siRNA sense strand
aaagaugguggaauugauc

SEQ ID NO: 2103599 - RNA, 19 nt, Homo sapiens
  misc_RNA (1)...(19): siRNA sense strand
gacaacugcuuccccauca

SEQ ID NO: 2103600 - RNA, 19 nt, Homo sapiens
  misc_RNA (1)...(19): siRNA sense strand
auuguuggcuaucugaaug

SEQ ID NO: 2103601 - RNA, 19 nt, Homo sapiens
  misc_RNA (1)...(19): siRNA sense strand
ccucugccaucuccgauac

SEQ ID NO: 2103602 - RNA, 19 nt, Homo sapiens
  misc_RNA (1)...(19): siRNA sense strand
ggucagauuguggaucaug

SEQ ID NO: 2103603 - RNA, 19 nt, Homo sapiens
  misc_RNA (1)...(19): siRNA sense strand
agaccgccaugagcucuga

SEQ ID NO: 2103604 - RNA, 19 nt, Homo sapiens
  misc_RNA (1)...(19): siRNA sense strand
uuugcuaggugaccacaug

SEQ ID NO: 2103605 - RNA, 19 nt, Homo sapiens
  misc_RNA (1)...(19): siRNA sense strand
gcccuuaccgcaccauuac

SEQ ID NO: 2103606 - RNA, 19 nt, Homo sapiens
  misc_RNA (1)...(19): siRNA sense strand
ucuccuggccugccucuug

SEQ ID NO: 2103607 - RNA, 19 nt, Homo sapiens
  misc_RNA (1)...(19): siRNA sense strand
caaccuggguacaauuccu

SEQ ID NO: 2103608 - RNA, 19 nt, Homo sapiens
  misc_RNA (1)...(19): siRNA sense strand
cccagaauuuccaaugucu

SEQ ID NO: 2103609 - RNA, 19 nt, Homo sapiens
  misc_RNA (1)...(19): siRNA sense strand
ggaucaugaccuggacuuu

SEQ ID NO: 2103610 - RNA, 19 nt, Homo sapiens
  misc_RNA (1)...(19): siRNA sense strand
ggggucagauuguggauca

SEQ ID NO: 2103611 - RNA, 19 nt, Homo sapiens
  misc_RNA (1)...(19): siRNA sense strand
ggucccugcucuucaugca

SEQ ID NO: 2103612 - RNA, 19 nt, Homo sapiens
  misc_RNA (1)...(19): siRNA sense strand
gcucagauauuaugucuuu

SEQ ID NO: 2103613 - RNA, 19 nt, Homo sapiens
  misc_RNA (1)...(19): siRNA sense strand
ccagcaagcucaugucaaa

SEQ ID NO: 2103614 - RNA, 19 nt, Homo sapiens
  misc_RNA (1)...(19): siRNA sense strand
ucagauaguugaugaguug

SEQ ID NO: 2103615 - RNA, 19 nt, Homo sapiens
  misc_RNA (1)...(19): siRNA sense strand
ccagguggaugccaacaua

SEQ ID NO: 2103616 - RNA, 19 nt, Homo sapiens
  misc_RNA (1)...(19): siRNA sense strand
cagaugggauuccucauuu

SEQ ID NO: 2103617 - RNA, 19 nt, Homo sapiens
  misc_RNA (1)...(19): siRNA sense strand
ccacauggaugcucuaagu

SEQ ID NO: 2103618 - RNA, 19 nt, Homo sapiens
  misc_RNA (1)...(19): siRNA sense strand
ccuguaggcucagauauua

SEQ ID NO: 2103619 - RNA, 19 nt, Homo sapiens
  misc_RNA (1)...(19): siRNA sense strand
gcagaacucccuuggaaug

SEQ ID NO: 2103620 - RNA, 19 nt, Homo sapiens
  misc_RNA (1)...(19): siRNA sense strand
caaaggaggaagaauuaaa

SEQ ID NO: 2103621 - RNA, 19 nt, Homo sapiens
  misc_RNA (1)...(19): siRNA sense strand
ucaacaagguccucaaaca

SEQ ID NO: 2103622 - RNA, 19 nt, Homo sapiens
  misc_RNA (1)...(19): siRNA sense strand
ugaaggagcaccuaaauca

SEQ ID NO: 2103623 - RNA, 19 nt, Homo sapiens
  misc_RNA (1)...(19): siRNA sense strand
uggcagaacucccuuggaa

SEQ ID NO: 2103624 - RNA, 19 nt, Homo sapiens
  misc_RNA (1)...(19): siRNA sense strand
gagaaucagugcccaacau

SEQ ID NO: 2103625 - RNA, 19 nt, Homo sapiens
  misc_RNA (1)...(19): siRNA sense strand
caacaagguccucaaacaa

SEQ ID NO: 2103626 - RNA, 19 nt, Homo sapiens
  misc_RNA (1)...(19): siRNA sense strand
uuacagaggccaacacauu

SEQ ID NO: 2103627 - RNA, 19 nt, Homo sapiens
  misc_RNA (1)...(19): siRNA sense strand
gcaccuaaaucauaaucca

SEQ ID NO: 2103628 - RNA, 19 nt, Homo sapiens
  misc_RNA (1)...(19): siRNA sense strand
gcacagaagcaacucacaa

SEQ ID NO: 2103629 - RNA, 19 nt, Homo sapiens
  misc_RNA (1)...(19): siRNA sense strand
guacuuacccucugaaagg

SEQ ID NO: 2103630 - RNA, 19 nt, Homo sapiens
  misc_RNA (1)...(19): siRNA sense strand
cauaauccaucuccaucuu

SEQ ID NO: 2103631 - RNA, 19 nt, Homo sapiens
  misc_RNA (1)...(19): siRNA sense strand
agacagaaguaaaccuaga

SEQ ID NO: 2103632 - RNA, 19 nt, Homo sapiens
  misc_RNA (1)...(19): siRNA sense strand
gaggcugucuuucagauag

SEQ ID NO: 2103633 - RNA, 19 nt, Homo sapiens
  misc_RNA (1)...(19): siRNA sense strand
aaaccuagaggcugucuuu

SEQ ID NO: 2103634 - RNA, 19 nt, Homo sapiens
  misc_RNA (1)...(19): siRNA sense strand
gguggagccuguugagaau

SEQ ID NO: 2103635 - RNA, 19 nt, Homo sapiens
  misc_RNA (1)...(19): siRNA sense strand
aaggagcaccuaaaucaua

SEQ ID NO: 2103636 - RNA, 19 nt, Homo sapiens
  misc_RNA (1)...(19): siRNA sense strand
cccaguuccucauagaaua

SEQ ID NO: 2103637 - RNA, 19 nt, Homo sapiens
  misc_RNA (1)...(19): siRNA sense strand
uccaaaggaggaagaauua

SEQ ID NO: 2103638 - RNA, 19 nt, Homo sapiens
  misc_RNA (1)...(19): siRNA sense strand
agaagcaacucacaacaag

SEQ ID NO: 2103639 - RNA, 19 nt, Homo sapiens
  misc_RNA (1)...(19): siRNA sense strand
caacaucuccgucuuacag

SEQ ID NO: 2103640 - RNA, 19 nt, Homo sapiens
  misc_RNA (1)...(19): siRNA sense strand
aggagcaccuaaaucauaa

SEQ ID NO: 2103641 - RNA, 19 nt, Homo sapiens
  misc_RNA (1)...(19): siRNA sense strand
gcaggaagggccaccauuc

SEQ ID NO: 2103642 - RNA, 19 nt, Homo sapiens
  misc_RNA (1)...(19): siRNA sense strand
gcacggaccaguggcugua

SEQ ID NO: 2103643 - RNA, 19 nt, Homo sapiens
  misc_RNA (1)...(19): siRNA sense strand
ucaccugaguacaucuaua

SEQ ID NO: 2103644 - RNA, 19 nt, Homo sapiens
  misc_RNA (1)...(19): siRNA sense strand
aaagacagaaguaaaccua

SEQ ID NO: 2103645 - RNA, 19 nt, Homo sapiens
  misc_RNA (1)...(19): siRNA sense strand
acaagguccucaaacaaug

SEQ ID NO: 2103646 - RNA, 19 nt, Homo sapiens
  misc_RNA (1)...(19): siRNA sense strand
gcccaacaucuccgucuua

SEQ ID NO: 2103647 - RNA, 19 nt, Homo sapiens
  misc_RNA (1)...(19): siRNA sense strand
ccaguucacgugagaauau

SEQ ID NO: 2103648 - RNA, 19 nt, Homo sapiens
  misc_RNA (1)...(19): siRNA sense strand
gaacucccuuggaaugcau

SEQ ID NO: 2103649 - RNA, 19 nt, Homo sapiens
  misc_RNA (1)...(19): siRNA sense strand
gcaacuacuuccagaaucc

SEQ ID NO: 2103650 - RNA, 19 nt, Homo sapiens
  misc_RNA (1)...(19): siRNA sense strand
gcaguccuccuauccaguu

SEQ ID NO: 2103651 - RNA, 19 nt, Homo sapiens
  misc_RNA (1)...(19): siRNA sense strand
gcaagcucaugucaaacug

SEQ ID NO: 2103652 - RNA, 19 nt, Homo sapiens
  misc_RNA (1)...(19): siRNA sense strand
caucuucaguaguauuugu

SEQ ID NO: 2103653 - RNA, 19 nt, Homo sapiens
  misc_RNA (1)...(19): siRNA sense strand
caauuucaccggucauuuc

SEQ ID NO: 2103654 - RNA, 19 nt, Homo sapiens
  misc_RNA (1)...(19): siRNA sense strand
uaacaacagcaauccaugu

SEQ ID NO: 2103655 - RNA, 19 nt, Homo sapiens
  misc_RNA (1)...(19): siRNA sense strand
cgucagaacagaugggauu

SEQ ID NO: 2103656 - RNA, 19 nt, Homo sapiens
  misc_RNA (1)...(19): siRNA sense strand
uaauccaucuccaucuuca

SEQ ID NO: 2103657 - RNA, 19 nt, Homo sapiens
  misc_RNA (1)...(19): siRNA sense strand
gcaacucacaacaaggaaa

SEQ ID NO: 2103658 - RNA, 19 nt, Homo sapiens
  misc_RNA (1)...(19): siRNA sense strand
cagaagcaacucacaacaa

SEQ ID NO: 2103659 - RNA, 19 nt, Homo sapiens
  misc_RNA (1)...(19): siRNA sense strand
gcucuaaguaguuguguca

SEQ ID NO: 2103660 - RNA, 19 nt, Homo sapiens
  misc_RNA (1)...(19): siRNA sense strand
gaaggagcaccuaaaucau

SEQ ID NO: 2103661 - RNA, 19 nt, Homo sapiens
  misc_RNA (1)...(19): siRNA sense strand
cccaaugccucuuccuaug

SEQ ID NO: 2103662 - RNA, 19 nt, Homo sapiens
  misc_RNA (1)...(19): siRNA sense strand
aauuggcccugcaguacua

SEQ ID NO: 2103663 - RNA, 19 nt, Homo sapiens
  misc_RNA (1)...(19): siRNA sense strand
gaugggauuccucauuuca

SEQ ID NO: 2103664 - RNA, 19 nt, Homo sapiens
  misc_RNA (1)...(19): siRNA sense strand
uacagaggccaacacauuu

SEQ ID NO: 2103665 - RNA, 19 nt, Homo sapiens
  misc_RNA (1)...(19): siRNA sense strand
gauaguuugucuccuuacu

SEQ ID NO: 2103666 - RNA, 19 nt, Homo sapiens
  misc_RNA (1)...(19): siRNA sense strand
aaacugaaggagcaccuaa

SEQ ID NO: 2103667 - RNA, 19 nt, Homo sapiens
  misc_RNA (1)...(19): siRNA sense strand
gccaacacauuuuagcuaa

SEQ ID NO: 2103668 - RNA, 19 nt, Homo sapiens
  misc_RNA (1)...(19): siRNA sense strand
guaaagguggagccuguug

SEQ ID NO: 2103669 - RNA, 19 nt, Homo sapiens
  misc_RNA (1)...(19): siRNA sense strand
ucaaugcaguccuccuauc

SEQ ID NO: 2103670 - RNA, 19 nt, Homo sapiens
  misc_RNA (1)...(19): siRNA sense strand
cacaguacuuacccucuga

SEQ ID NO: 2103671 - RNA, 19 nt, Homo sapiens
  misc_RNA (1)...(19): siRNA sense strand
cuccagagguuuccaacug

SEQ ID NO: 2103672 - RNA, 19 nt, Homo sapiens
  misc_RNA (1)...(19): siRNA sense strand
uagugaagacacagguuua

SEQ ID NO: 2103673 - RNA, 19 nt, Homo sapiens
  misc_RNA (1)...(19): siRNA sense strand
ugggauuccucauuucaga

SEQ ID NO: 2103674 - RNA, 19 nt, Homo sapiens
  misc_RNA (1)...(19): siRNA sense strand
cagaccaguucacgugaga

SEQ ID NO: 2103675 - RNA, 19 nt, Homo sapiens
  misc_RNA (1)...(19): siRNA sense strand
gcaagccuacuauccaaca

SEQ ID NO: 2103676 - RNA, 19 nt, Homo sapiens
  misc_RNA (1)...(19): siRNA sense strand
ucgcaagccuacuauccaa

SEQ ID NO: 2103677 - RNA, 19 nt, Homo sapiens
  misc_RNA (1)...(19): siRNA sense strand
uggaaugcauccuggacaa

SEQ ID NO: 2103678 - RNA, 19 nt, Homo sapiens
  misc_RNA (1)...(19): siRNA sense strand
gaaaguccccugaucuuca

SEQ ID NO: 2103679 - RNA, 19 nt, Homo sapiens
  misc_RNA (1)...(19): siRNA sense strand
acagaugggauuccucauu

SEQ ID NO: 2103680 - RNA, 19 nt, Homo sapiens
  misc_RNA (1)...(19): siRNA sense strand
aagcucaugucaaacugaa

SEQ ID NO: 2103681 - RNA, 19 nt, Homo sapiens
  misc_RNA (1)...(19): siRNA sense strand
gauaguugaugaguugcau

SEQ ID NO: 2103682 - RNA, 19 nt, Homo sapiens
  misc_RNA (1)...(19): siRNA sense strand
guucaacaagguccucaaa

SEQ ID NO: 2103683 - RNA, 19 nt, Homo sapiens
  misc_RNA (1)...(19): siRNA sense strand
cauggaugcucuaaguagu

SEQ ID NO: 2103684 - RNA, 19 nt, Homo sapiens
  misc_RNA (1)...(19): siRNA sense strand
ccaaaggaggaagaauuaa

SEQ ID NO: 2103685 - RNA, 19 nt, Homo sapiens
  misc_RNA (1)...(19): siRNA sense strand
uagaggcugucuuucagau

SEQ ID NO: 2103686 - RNA, 19 nt, Homo sapiens
  misc_RNA (1)...(19): siRNA sense strand
caaugccucuuccuaugca

SEQ ID NO: 2103687 - RNA, 19 nt, Homo sapiens
  misc_RNA (1)...(19): siRNA sense strand
gcccagcaccacaucugua

SEQ ID NO: 2103688 - RNA, 19 nt, Homo sapiens
  misc_RNA (1)...(19): siRNA sense strand
uagcaagccuagugaagac

SEQ ID NO: 2103689 - RNA, 19 nt, Homo sapiens
  misc_RNA (1)...(19): siRNA sense strand
cuaaauuggagaugguaaa

SEQ ID NO: 2103690 - RNA, 19 nt, Homo sapiens
  misc_RNA (1)...(19): siRNA sense strand
ccuagaggcugucuuucag

SEQ ID NO: 2103691 - RNA, 19 nt, Homo sapiens
  misc_RNA (1)...(19): siRNA sense strand
aauuggagaugguaaaggu

SEQ ID NO: 2103692 - RNA, 19 nt, Homo sapiens
  misc_RNA (1)...(19): siRNA sense strand
gaggaagaauuaaaagagu

SEQ ID NO: 2103693 - RNA, 19 nt, Homo sapiens
  misc_RNA (1)...(19): siRNA sense strand
gaaugcauccuggacaagu

SEQ ID NO: 2103694 - RNA, 19 nt, Homo sapiens
  misc_RNA (1)...(19): siRNA sense strand
caacucacaacaaggaaag

SEQ ID NO: 2103695 - RNA, 19 nt, Homo sapiens
  misc_RNA (1)...(19): siRNA sense strand
cuagugaagacacagguuu

SEQ ID NO: 2103696 - RNA, 19 nt, Homo sapiens
  misc_RNA (1)...(19): siRNA sense strand
caauccauguucugcaagu

SEQ ID NO: 2103697 - RNA, 19 nt, Homo sapiens
  misc_RNA (1)...(19): siRNA sense strand
ucuuucagauaguugauga

SEQ ID NO: 2103698 - RNA, 19 nt, Homo sapiens
  misc_RNA (1)...(19): siRNA sense strand
ccuccuauccaguugaauu

SEQ ID NO: 2103699 - RNA, 19 nt, Homo sapiens
  misc_RNA (1)...(19): siRNA sense strand
uccagagguuuccaacuga

SEQ ID NO: 2103700 - RNA, 19 nt, Homo sapiens
  misc_RNA (1)...(19): siRNA sense strand
cuuacccucugaaagguuu

SEQ ID NO: 2103701 - RNA, 19 nt, Homo sapiens
  misc_RNA (1)...(19): siRNA sense strand
aagcaacucacaacaagga

SEQ ID NO: 2103702 - RNA, 19 nt, Homo sapiens
  misc_RNA (1)...(19): siRNA sense strand
caggaagggccaccauuca

SEQ ID NO: 2103703 - RNA, 19 nt, Homo sapiens
  misc_RNA (1)...(19): siRNA sense strand
gaaaauacaaagacagaag

SEQ ID NO: 2103704 - RNA, 19 nt, Homo sapiens
  misc_RNA (1)...(19): siRNA sense strand
uggaugcucuaaguaguug

SEQ ID NO: 2103705 - RNA, 19 nt, Homo sapiens
  misc_RNA (1)...(19): siRNA sense strand
ccaauuggcccugcaguac

SEQ ID NO: 2103706 - RNA, 19 nt, Homo sapiens
  misc_RNA (1)...(19): siRNA sense strand
uaaagguggagccuguuga

SEQ ID NO: 2103707 - RNA, 19 nt, Homo sapiens
  misc_RNA (1)...(19): siRNA sense strand
cugaguacaucuauaccau

SEQ ID NO: 2103708 - RNA, 19 nt, Homo sapiens
  misc_RNA (1)...(19): siRNA sense strand
caaggaaaguccccugauc

SEQ ID NO: 2103709 - RNA, 19 nt, Homo sapiens
  misc_RNA (1)...(19): siRNA sense strand
agaauaucuugccgucaga

SEQ ID NO: 2103710 - RNA, 19 nt, Homo sapiens
  misc_RNA (1)...(19): siRNA sense strand
gaccaguucacgugagaau

SEQ ID NO: 2103711 - RNA, 19 nt, Homo sapiens
  misc_RNA (1)...(19): siRNA sense strand
gagcaccuaaaucauaauc

SEQ ID NO: 2103712 - RNA, 19 nt, Homo sapiens
  misc_RNA (1)...(19): siRNA sense strand
gaaacagaccgacauauaa

SEQ ID NO: 2103713 - RNA, 19 nt, Homo sapiens
  misc_RNA (1)...(19): siRNA sense strand
gaucaccuauucauuguuu

SEQ ID NO: 2103714 - RNA, 19 nt, Homo sapiens
  misc_RNA (1)...(19): siRNA sense strand
gcagaucaccuauucauug

SEQ ID NO: 2103715 - RNA, 19 nt, Homo sapiens
  misc_RNA (1)...(19): siRNA sense strand
agacuaaggugguuaugaa

SEQ ID NO: 2103716 - RNA, 19 nt, Homo sapiens
  misc_RNA (1)...(19): siRNA sense strand
gaagaauccuggagaagag

SEQ ID NO: 2103717 - RNA, 19 nt, Homo sapiens
  misc_RNA (1)...(19): siRNA sense strand
caagaagaauccuggagaa

SEQ ID NO: 2103718 - RNA, 19 nt, Homo sapiens
  misc_RNA (1)...(19): siRNA sense strand
agaccgacauauaacauua

SEQ ID NO: 2103719 - RNA, 19 nt, Homo sapiens
  misc_RNA (1)...(19): siRNA sense strand
caccagcuauuuccaagua

SEQ ID NO: 2103720 - RNA, 19 nt, Homo sapiens
  misc_RNA (1)...(19): siRNA sense strand
agaaacagaccgacauaua

SEQ ID NO: 2103721 - RNA, 19 nt, Homo sapiens
  misc_RNA (1)...(19): siRNA sense strand
guuggaaucuaugcaaaua

SEQ ID NO: 2103722 - RNA, 19 nt, Homo sapiens
  misc_RNA (1)...(19): siRNA sense strand
gaguauaggugugaagcua

SEQ ID NO: 2103723 - RNA, 19 nt, Homo sapiens
  misc_RNA (1)...(19): siRNA sense strand
gaacaaaucacugcagauc

SEQ ID NO: 2103724 - RNA, 19 nt, Homo sapiens
  misc_RNA (1)...(19): siRNA sense strand
gcuacuacuuccaggguua

SEQ ID NO: 2103725 - RNA, 19 nt, Homo sapiens
  misc_RNA (1)...(19): siRNA sense strand
gaaaagcuguauuggauug

SEQ ID NO: 2103726 - RNA, 19 nt, Homo sapiens
  misc_RNA (1)...(19): siRNA sense strand
gacuucagcuucacgauug

SEQ ID NO: 2103727 - RNA, 19 nt, Homo sapiens
  misc_RNA (1)...(19): siRNA sense strand
ugaauucccuucuccaugu

SEQ ID NO: 2103728 - RNA, 19 nt, Homo sapiens
  misc_RNA (1)...(19): siRNA sense strand
gcucgcugcccaucaauua

SEQ ID NO: 2103729 - RNA, 19 nt, Homo sapiens
  misc_RNA (1)...(19): siRNA sense strand
cauggaaguuggaaucuau

SEQ ID NO: 2103730 - RNA, 19 nt, Homo sapiens
  misc_RNA (1)...(19): siRNA sense strand
gagaagaggaagaguauag

SEQ ID NO: 2103731 - RNA, 19 nt, Homo sapiens
  misc_RNA (1)...(19): siRNA sense strand
guauaggugugaagcuaaa

SEQ ID NO: 2103732 - RNA, 19 nt, Homo sapiens
  misc_RNA (1)...(19): siRNA sense strand
cacagaagcccaugaauca

SEQ ID NO: 2103733 - RNA, 19 nt, Homo sapiens
  misc_RNA (1)...(19): siRNA sense strand
gaaguuggaaucuaugcaa

SEQ ID NO: 2103734 - RNA, 19 nt, Homo sapiens
  misc_RNA (1)...(19): siRNA sense strand
cuggauaugucuauucuga

SEQ ID NO: 2103735 - RNA, 19 nt, Homo sapiens
  misc_RNA (1)...(19): siRNA sense strand
ggauaugucuauucugaac

SEQ ID NO: 2103736 - RNA, 19 nt, Homo sapiens
  misc_RNA (1)...(19): siRNA sense strand
cagaucaccuauucauugu

SEQ ID NO: 2103737 - RNA, 19 nt, Homo sapiens
  misc_RNA (1)...(19): siRNA sense strand
gagcaagaagccugugauu

SEQ ID NO: 2103738 - RNA, 19 nt, Homo sapiens
  misc_RNA (1)...(19): siRNA sense strand
gcccaucaauuacacuuuc

SEQ ID NO: 2103739 - RNA, 19 nt, Homo sapiens
  misc_RNA (1)...(19): siRNA sense strand
uagaaaagcuguauuggau

SEQ ID NO: 2103740 - RNA, 19 nt, Homo sapiens
  misc_RNA (1)...(19): siRNA sense strand
caaaugcaaagcccaaguu

SEQ ID NO: 2103741 - RNA, 19 nt, Homo sapiens
  misc_RNA (1)...(19): siRNA sense strand
aaacagauugccuaacuau

SEQ ID NO: 2103742 - RNA, 19 nt, Homo sapiens
  misc_RNA (1)...(19): siRNA sense strand
caaguuaccagcuguucaa

SEQ ID NO: 2103743 - RNA, 19 nt, Homo sapiens
  misc_RNA (1)...(19): siRNA sense strand
gaauucccuucuccauguu

SEQ ID NO: 2103744 - RNA, 19 nt, Homo sapiens
  misc_RNA (1)...(19): siRNA sense strand
ggaagaguauaggugugaa

SEQ ID NO: 2103745 - RNA, 19 nt, Homo sapiens
  misc_RNA (1)...(19): siRNA sense strand
ugaaaaccauguugccaua

SEQ ID NO: 2103746 - RNA, 19 nt, Homo sapiens
  misc_RNA (1)...(19): siRNA sense strand
ugaacaggcuccucuucug

SEQ ID NO: 2103747 - RNA, 19 nt, Homo sapiens
  misc_RNA (1)...(19): siRNA sense strand
ucacagaagcccaugaauc

SEQ ID NO: 2103748 - RNA, 19 nt, Homo sapiens
  misc_RNA (1)...(19): siRNA sense strand
caagaaaagcuaugagaaa

SEQ ID NO: 2103749 - RNA, 19 nt, Homo sapiens
  misc_RNA (1)...(19): siRNA sense strand
gaacauuauggucauucaa

SEQ ID NO: 2103750 - RNA, 19 nt, Homo sapiens
  misc_RNA (1)...(19): siRNA sense strand
aaaccauguugccauauca

SEQ ID NO: 2103751 - RNA, 19 nt, Homo sapiens
  misc_RNA (1)...(19): siRNA sense strand
ggauccaggccguguguuu

SEQ ID NO: 2103752 - RNA, 19 nt, Homo sapiens
  misc_RNA (1)...(19): siRNA sense strand
uggaaucuaugcaaauauc

SEQ ID NO: 2103753 - RNA, 19 nt, Homo sapiens
  misc_RNA (1)...(19): siRNA sense strand
ccauggaaguuggaaucua

SEQ ID NO: 2103754 - RNA, 19 nt, Homo sapiens
  misc_RNA (1)...(19): siRNA sense strand
caaagacuaaggugguuau

SEQ ID NO: 2103755 - RNA, 19 nt, Homo sapiens
  misc_RNA (1)...(19): siRNA sense strand
aacauuacauugccucuca

SEQ ID NO: 2103756 - RNA, 19 nt, Homo sapiens
  misc_RNA (1)...(19): siRNA sense strand
uaugaagggucaaaaugua

SEQ ID NO: 2103757 - RNA, 19 nt, Homo sapiens
  misc_RNA (1)...(19): siRNA sense strand
gggagccugcugaauuuaa

SEQ ID NO: 2103758 - RNA, 19 nt, Homo sapiens
  misc_RNA (1)...(19): siRNA sense strand
uuacauugccucucaguca

SEQ ID NO: 2103759 - RNA, 19 nt, Homo sapiens
  misc_RNA (1)...(19): siRNA sense strand
aaaugcaaagcccaaguua

SEQ ID NO: 2103760 - RNA, 19 nt, Homo sapiens
  misc_RNA (1)...(19): siRNA sense strand
acaaaugaauucccuucuc

SEQ ID NO: 2103761 - RNA, 19 nt, Homo sapiens
  misc_RNA (1)...(19): siRNA sense strand
acagaaacagaccgacaua

SEQ ID NO: 2103762 - RNA, 19 nt, Homo sapiens
  misc_RNA (1)...(19): siRNA sense strand
uaaccuaagcaucacagaa

SEQ ID NO: 2103763 - RNA, 19 nt, Homo sapiens
  misc_RNA (1)...(19): siRNA sense strand
gguacugcccaaauacaaa

SEQ ID NO: 2103764 - RNA, 19 nt, Homo sapiens
  misc_RNA (1)...(19): siRNA sense strand
cagauugccuaacuaugca

SEQ ID NO: 2103765 - RNA, 19 nt, Homo sapiens
  misc_RNA (1)...(19): siRNA sense strand
gaagaggaagaguauaggu

SEQ ID NO: 2103766 - RNA, 19 nt, Homo sapiens
  misc_RNA (1)...(19): siRNA sense strand
agaagaauccuggagaaga

SEQ ID NO: 2103767 - RNA, 19 nt, Homo sapiens
  misc_RNA (1)...(19): siRNA sense strand
ccagcuauuuccaaguaug

SEQ ID NO: 2103768 - RNA, 19 nt, Homo sapiens
  misc_RNA (1)...(19): siRNA sense strand
caucacagaagcccaugaa

SEQ ID NO: 2103769 - RNA, 19 nt, Homo sapiens
  misc_RNA (1)...(19): siRNA sense strand
acaaaucacugcagaucac

SEQ ID NO: 2103770 - RNA, 19 nt, Homo sapiens
  misc_RNA (1)...(19): siRNA sense strand
agacacagccauggaaguu

SEQ ID NO: 2103771 - RNA, 19 nt, Homo sapiens
  misc_RNA (1)...(19): siRNA sense strand
cacugcagaucaccuauuc

SEQ ID NO: 2103772 - RNA, 19 nt, Homo sapiens
  misc_RNA (1)...(19): siRNA sense strand
ggagaagaggaagaguaua

SEQ ID NO: 2103773 - RNA, 19 nt, Homo sapiens
  misc_RNA (1)...(19): siRNA sense strand
ggagccugcugaauuuaac

SEQ ID NO: 2103774 - RNA, 19 nt, Homo sapiens
  misc_RNA (1)...(19): siRNA sense strand
ugacuucagcuucacgauu

SEQ ID NO: 2103775 - RNA, 19 nt, Homo sapiens
  misc_RNA (1)...(19): siRNA sense strand
gcugaacauuauggucauu

SEQ ID NO: 2103776 - RNA, 19 nt, Homo sapiens
  misc_RNA (1)...(19): siRNA sense strand
cccaggagcuacaguaugc

SEQ ID NO: 2103777 - RNA, 19 nt, Homo sapiens
  misc_RNA (1)...(19): siRNA sense strand
aagcaaaggaggaaucugu

SEQ ID NO: 2103778 - RNA, 19 nt, Homo sapiens
  misc_RNA (1)...(19): siRNA sense strand
uauggucauucaaacagaa

SEQ ID NO: 2103779 - RNA, 19 nt, Homo sapiens
  misc_RNA (1)...(19): siRNA sense strand
aaacagaccgacauauaac

SEQ ID NO: 2103780 - RNA, 19 nt, Homo sapiens
  misc_RNA (1)...(19): siRNA sense strand
guuaccagcuguucaaaau

SEQ ID NO: 2103781 - RNA, 19 nt, Homo sapiens
  misc_RNA (1)...(19): siRNA sense strand
gcaccaagagagcaagaag

SEQ ID NO: 2103782 - RNA, 19 nt, Homo sapiens
  misc_RNA (1)...(19): siRNA sense strand
ucaaagacuaaggugguua

SEQ ID NO: 2103783 - RNA, 19 nt, Homo sapiens
  misc_RNA (1)...(19): siRNA sense strand
ccauaucaccagcuauuuc

SEQ ID NO: 2103784 - RNA, 19 nt, Homo sapiens
  misc_RNA (1)...(19): siRNA sense strand
uacauugccucucagucaa

SEQ ID NO: 2103785 - RNA, 19 nt, Homo sapiens
  misc_RNA (1)...(19): siRNA sense strand
uggagaagaggaagaguau

SEQ ID NO: 2103786 - RNA, 19 nt, Homo sapiens
  misc_RNA (1)...(19): siRNA sense strand
guugccauaucaccagcua

SEQ ID NO: 2103787 - RNA, 19 nt, Homo sapiens
  misc_RNA (1)...(19): siRNA sense strand
gagagcaagaagccuguga

SEQ ID NO: 2103788 - RNA, 19 nt, Homo sapiens
  misc_RNA (1)...(19): siRNA sense strand
guggugauaauccuaauuc

SEQ ID NO: 2103789 - RNA, 19 nt, Homo sapiens
  misc_RNA (1)...(19): siRNA sense strand
ggugauaauccuaauucug

SEQ ID NO: 2103790 - RNA, 19 nt, Homo sapiens
  misc_RNA (1)...(19): siRNA sense strand
auucugaacucaacuucug

SEQ ID NO: 2103791 - RNA, 19 nt, Homo sapiens
  misc_RNA (1)...(19): siRNA sense strand
gccugugauucuuauaaau

SEQ ID NO: 2103792 - RNA, 19 nt, Homo sapiens
  misc_RNA (1)...(19): siRNA sense strand
agccugugauucuuauaaa

SEQ ID NO: 2103793 - RNA, 19 nt, Homo sapiens
  misc_RNA (1)...(19): siRNA sense strand
cagcuauuuccaaguauga

SEQ ID NO: 2103794 - RNA, 19 nt, Homo sapiens
  misc_RNA (1)...(19): siRNA sense strand
cuaugcaaauauccuugaa

SEQ ID NO: 2103795 - RNA, 19 nt, Homo sapiens
  misc_RNA (1)...(19): siRNA sense strand
aagcuguauuggauuguga

SEQ ID NO: 2103796 - RNA, 19 nt, Homo sapiens
  misc_RNA (1)...(19): siRNA sense strand
cuuccaggguuauuacugu

SEQ ID NO: 2103797 - RNA, 19 nt, Homo sapiens
  misc_RNA (1)...(19): siRNA sense strand
acagauugccuaacuaugc

SEQ ID NO: 2103798 - RNA, 19 nt, Homo sapiens
  misc_RNA (1)...(19): siRNA sense strand
gauccaggccguguguuuc

SEQ ID NO: 2103799 - RNA, 19 nt, Homo sapiens
  misc_RNA (1)...(19): siRNA sense strand
gugaggcaaugaaaacaaa

SEQ ID NO: 2103800 - RNA, 19 nt, Homo sapiens
  misc_RNA (1)...(19): siRNA sense strand
aaguuggaaucuaugcaaa

SEQ ID NO: 2103801 - RNA, 19 nt, Homo sapiens
  misc_RNA (1)...(19): siRNA sense strand
ugccauaucaccagcuauu

SEQ ID NO: 2103802 - RNA, 19 nt, Homo sapiens
  misc_RNA (1)...(19): siRNA sense strand
aagccugugauucuuauaa

SEQ ID NO: 2103803 - RNA, 19 nt, Homo sapiens
  misc_RNA (1)...(19): siRNA sense strand
gaagccugugauucuuaua

SEQ ID NO: 2103804 - RNA, 19 nt, Homo sapiens
  misc_RNA (1)...(19): siRNA sense strand
uuucuucugucacuuguag

SEQ ID NO: 2103805 - RNA, 19 nt, Homo sapiens
  misc_RNA (1)...(19): siRNA sense strand
ucacugcagaucaccuauu

SEQ ID NO: 2103806 - RNA, 19 nt, Homo sapiens
  misc_RNA (1)...(19): siRNA sense strand
ccucuucuggagcauauuu

SEQ ID NO: 2103807 - RNA, 19 nt, Homo sapiens
  misc_RNA (1)...(19): siRNA sense strand
uaauccuaauucuggcuuu

SEQ ID NO: 2103808 - RNA, 19 nt, Homo sapiens
  misc_RNA (1)...(19): siRNA sense strand
gaagaguauaggugugaag

SEQ ID NO: 2103809 - RNA, 19 nt, Homo sapiens
  misc_RNA (1)...(19): siRNA sense strand
ggguacugcccaaauacaa

SEQ ID NO: 2103810 - RNA, 19 nt, Homo sapiens
  misc_RNA (1)...(19): siRNA sense strand
aaaacagauugccuaacua

SEQ ID NO: 2103811 - RNA, 19 nt, Homo sapiens
  misc_RNA (1)...(19): siRNA sense strand
cagggaccguggagacaca

SEQ ID NO: 2103812 - RNA, 19 nt, Homo sapiens
  misc_RNA (1)...(19): siRNA sense strand
cacaagaguuuacaaauga

SEQ ID NO: 2103813 - RNA, 19 nt, Homo sapiens
  misc_RNA (1)...(19): siRNA sense strand
ccacaagaguuuacaaaug

SEQ ID NO: 2103814 - RNA, 19 nt, Homo sapiens
  misc_RNA (1)...(19): siRNA sense strand
gcaacaauaugaauaaguc

SEQ ID NO: 2103815 - RNA, 19 nt, Homo sapiens
  misc_RNA (1)...(19): siRNA sense strand
caacugggaucagcuauga

SEQ ID NO: 2103816 - RNA, 19 nt, Homo sapiens
  misc_RNA (1)...(19): siRNA sense strand
ggacaucuuuggacagguu

SEQ ID NO: 2103817 - RNA, 19 nt, Homo sapiens
  misc_RNA (1)...(19): siRNA sense strand
gaagaaagccaagaagaga

SEQ ID NO: 2103818 - RNA, 19 nt, Homo sapiens
  misc_RNA (1)...(19): siRNA sense strand
ggccaucgcucaggagaua

SEQ ID NO: 2103819 - RNA, 19 nt, Homo sapiens
  misc_RNA (1)...(19): siRNA sense strand
gucgagagcucccuggaua

SEQ ID NO: 2103820 - RNA, 19 nt, Homo sapiens
  misc_RNA (1)...(19): siRNA sense strand
gaagauccaagucauuaaa

SEQ ID NO: 2103821 - RNA, 19 nt, Homo sapiens
  misc_RNA (1)...(19): siRNA sense strand
gaaccguacggauuuauuu

SEQ ID NO: 2103822 - RNA, 19 nt, Homo sapiens
  misc_RNA (1)...(19): siRNA sense strand
gccaauagcaacaauauga

SEQ ID NO: 2103823 - RNA, 19 nt, Homo sapiens
  misc_RNA (1)...(19): siRNA sense strand
ggucgaggauucuuguuug

SEQ ID NO: 2103824 - RNA, 19 nt, Homo sapiens
  misc_RNA (1)...(19): siRNA sense strand
gaacacaccaagaagaugu

SEQ ID NO: 2103825 - RNA, 19 nt, Homo sapiens
  misc_RNA (1)...(19): siRNA sense strand
gagaaagucagacaagcua

SEQ ID NO: 2103826 - RNA, 19 nt, Homo sapiens
  misc_RNA (1)...(19): siRNA sense strand
gauaacagcaaacuagaga

SEQ ID NO: 2103827 - RNA, 19 nt, Homo sapiens
  misc_RNA (1)...(19): siRNA sense strand
gagaagaaagccaagaaga

SEQ ID NO: 2103828 - RNA, 19 nt, Homo sapiens
  misc_RNA (1)...(19): siRNA sense strand
gaagagaaagucagacaag

SEQ ID NO: 2103829 - RNA, 19 nt, Homo sapiens
  misc_RNA (1)...(19): siRNA sense strand
ugaauaagucugagaguga

SEQ ID NO: 2103830 - RNA, 19 nt, Homo sapiens
  misc_RNA (1)...(19): siRNA sense strand
aaugacagcuuugacauga

SEQ ID NO: 2103831 - RNA, 19 nt, Homo sapiens
  misc_RNA (1)...(19): siRNA sense strand
ccaagaagaugugcacaag

SEQ ID NO: 2103832 - RNA, 19 nt, Homo sapiens
  misc_RNA (1)...(19): siRNA sense strand
gauucaggcuccuccaaga

SEQ ID NO: 2103833 - RNA, 19 nt, Homo sapiens
  misc_RNA (1)...(19): siRNA sense strand
gacaacgacugguccuaug

SEQ ID NO: 2103834 - RNA, 19 nt, Homo sapiens
  misc_RNA (1)...(19): siRNA sense strand
gauaaugacagcuuugaca

SEQ ID NO: 2103835 - RNA, 19 nt, Homo sapiens
  misc_RNA (1)...(19): siRNA sense strand
agagcucccuggauaauga

SEQ ID NO: 2103836 - RNA, 19 nt, Homo sapiens
  misc_RNA (1)...(19): siRNA sense strand
gagagugaccaagaagaua

SEQ ID NO: 2103837 - RNA, 19 nt, Homo sapiens
  misc_RNA (1)...(19): siRNA sense strand
ccaagaagauaaugaugac

SEQ ID NO: 2103838 - RNA, 19 nt, Homo sapiens
  misc_RNA (1)...(19): siRNA sense strand
ucgaagauccaagucauua

SEQ ID NO: 2103839 - RNA, 19 nt, Homo sapiens
  misc_RNA (1)...(19): siRNA sense strand
gaaagucagacaagcuaug

SEQ ID NO: 2103840 - RNA, 19 nt, Homo sapiens
  misc_RNA (1)...(19): siRNA sense strand
cugauagcaugaaggauuu

SEQ ID NO: 2103841 - RNA, 19 nt, Homo sapiens
  misc_RNA (1)...(19): siRNA sense strand
caauugcagucgcagcauu

SEQ ID NO: 2103842 - RNA, 19 nt, Homo sapiens
  misc_RNA (1)...(19): siRNA sense strand
gggauucugcuuugaggua

SEQ ID NO: 2103843 - RNA, 19 nt, Homo sapiens
  misc_RNA (1)...(19): siRNA sense strand
gcccacagcacacagauga

SEQ ID NO: 2103844 - RNA, 19 nt, Homo sapiens
  misc_RNA (1)...(19): siRNA sense strand
gcuaaccacgcuuauauuc

SEQ ID NO: 2103845 - RNA, 19 nt, Homo sapiens
  misc_RNA (1)...(19): siRNA sense strand
aagaagaugugcacaaggu

SEQ ID NO: 2103846 - RNA, 19 nt, Homo sapiens
  misc_RNA (1)...(19): siRNA sense strand
uaacagcaaacuagagaug

SEQ ID NO: 2103847 - RNA, 19 nt, Homo sapiens
  misc_RNA (1)...(19): siRNA sense strand
ccugauagcaugaaggauu

SEQ ID NO: 2103848 - RNA, 19 nt, Homo sapiens
  misc_RNA (1)...(19): siRNA sense strand
ccaagaagagaaagucaga

SEQ ID NO: 2103849 - RNA, 19 nt, Homo sapiens
  misc_RNA (1)...(19): siRNA sense strand
acagcaaacuagagauguu

SEQ ID NO: 2103850 - RNA, 19 nt, Homo sapiens
  misc_RNA (1)...(19): siRNA sense strand
acaagaagaagaagccaaa

SEQ ID NO: 2103851 - RNA, 19 nt, Homo sapiens
  misc_RNA (1)...(19): siRNA sense strand
ggccuagguuccaacaaga

SEQ ID NO: 2103852 - RNA, 19 nt, Homo sapiens
  misc_RNA (1)...(19): siRNA sense strand
gcaauucggauccuuuuaa

SEQ ID NO: 2103853 - RNA, 19 nt, Homo sapiens
  misc_RNA (1)...(19): siRNA sense strand
uaaccacgcuuauauuccu

SEQ ID NO: 2103854 - RNA, 19 nt, Homo sapiens
  misc_RNA (1)...(19): siRNA sense strand
cagacaagcuaugguaucu

SEQ ID NO: 2103855 - RNA, 19 nt, Homo sapiens
  misc_RNA (1)...(19): siRNA sense strand
ggcgaaccguacggauuua

SEQ ID NO: 2103856 - RNA, 19 nt, Homo sapiens
  misc_RNA (1)...(19): siRNA sense strand
gaggcgaaccguacggauu

SEQ ID NO: 2103857 - RNA, 19 nt, Homo sapiens
  misc_RNA (1)...(19): siRNA sense strand
agagugaccaagaagauaa

SEQ ID NO: 2103858 - RNA, 19 nt, Homo sapiens
  misc_RNA (1)...(19): siRNA sense strand
ggaagagcaaggagugugu

SEQ ID NO: 2103859 - RNA, 19 nt, Homo sapiens
  misc_RNA (1)...(19): siRNA sense strand
ccaauagcaacaauaugaa

SEQ ID NO: 2103860 - RNA, 19 nt, Homo sapiens
  misc_RNA (1)...(19): siRNA sense strand
aaauggaggaaaugucuuu

SEQ ID NO: 2103861 - RNA, 19 nt, Homo sapiens
  misc_RNA (1)...(19): siRNA sense strand
cgaagauccaagucauuaa

SEQ ID NO: 2103862 - RNA, 19 nt, Homo sapiens
  misc_RNA (1)...(19): siRNA sense strand
agaaagccaagaagagaaa

SEQ ID NO: 2103863 - RNA, 19 nt, Homo sapiens
  misc_RNA (1)...(19): siRNA sense strand
gagaagugccugggaaugg

SEQ ID NO: 2103864 - RNA, 19 nt, Homo sapiens
  misc_RNA (1)...(19): siRNA sense strand
ggagaagaaagccaagaag

SEQ ID NO: 2103865 - RNA, 19 nt, Homo sapiens
  misc_RNA (1)...(19): siRNA sense strand
ccucgaagauccaagucau

SEQ ID NO: 2103866 - RNA, 19 nt, Homo sapiens
  misc_RNA (1)...(19): siRNA sense strand
gaaaauggaggaaaugucu

SEQ ID NO: 2103867 - RNA, 19 nt, Homo sapiens
  misc_RNA (1)...(19): siRNA sense strand
ggagaagugccugggaaug

SEQ ID NO: 2103868 - RNA, 19 nt, Homo sapiens
  misc_RNA (1)...(19): siRNA sense strand
ugacagcuuugacaugacu

SEQ ID NO: 2103869 - RNA, 19 nt, Homo sapiens
  misc_RNA (1)...(19): siRNA sense strand
cugcuaaccacgcuuauau

SEQ ID NO: 2103870 - RNA, 19 nt, Homo sapiens
  misc_RNA (1)...(19): siRNA sense strand
gaagagcaaggaguguguu

SEQ ID NO: 2103871 - RNA, 19 nt, Homo sapiens
  misc_RNA (1)...(19): siRNA sense strand
cggccuagguuccaacaag

SEQ ID NO: 2103872 - RNA, 19 nt, Homo sapiens
  misc_RNA (1)...(19): siRNA sense strand
uggaggaaaugucuuuguc

SEQ ID NO: 2103873 - RNA, 19 nt, Homo sapiens
  misc_RNA (1)...(19): siRNA sense strand
ugacaacgacugguccuau

SEQ ID NO: 2103874 - RNA, 19 nt, Homo sapiens
  misc_RNA (1)...(19): siRNA sense strand
ggacgacacggacccugau

SEQ ID NO: 2103875 - RNA, 19 nt, Homo sapiens
  misc_RNA (1)...(19): siRNA sense strand
cggcuccucugaccucuca

SEQ ID NO: 2103876 - RNA, 19 nt, Homo sapiens
  misc_RNA (1)...(19): siRNA sense strand
aggcgaaccguacggauuu

SEQ ID NO: 2103877 - RNA, 19 nt, Homo sapiens
  misc_RNA (1)...(19): siRNA sense strand
agucagacaagcuauggua

SEQ ID NO: 2103878 - RNA, 19 nt, Homo sapiens
  misc_RNA (1)...(19): siRNA sense strand
ugaccaagaagauaaugau

SEQ ID NO: 2103879 - RNA, 19 nt, Homo sapiens
  misc_RNA (1)...(19): siRNA sense strand
aaagagggguuugaguuuu

SEQ ID NO: 2103880 - RNA, 19 nt, Homo sapiens
  misc_RNA (1)...(19): siRNA sense strand
ccuggauaaugacagcuuu

SEQ ID NO: 2103881 - RNA, 19 nt, Homo sapiens
  misc_RNA (1)...(19): siRNA sense strand
ggaggaaaugucuuugucu

SEQ ID NO: 2103882 - RNA, 19 nt, Homo sapiens
  misc_RNA (1)...(19): siRNA sense strand
gaccaagaagauaaugaug

SEQ ID NO: 2103883 - RNA, 19 nt, Homo sapiens
  misc_RNA (1)...(19): siRNA sense strand
ccaucgcucaggagauaua

SEQ ID NO: 2103884 - RNA, 19 nt, Homo sapiens
  misc_RNA (1)...(19): siRNA sense strand
cgacgcccagcaucuauga

SEQ ID NO: 2103885 - RNA, 19 nt, Homo sapiens
  misc_RNA (1)...(19): siRNA sense strand
guuccaacaagaagaagaa

SEQ ID NO: 2103886 - RNA, 19 nt, Homo sapiens
  misc_RNA (1)...(19): siRNA sense strand
agaagaaagccaagaagag

SEQ ID NO: 2103887 - RNA, 19 nt, Homo sapiens
  misc_RNA (1)...(19): siRNA sense strand
ugagagugaccaagaagau

SEQ ID NO: 2103888 - RNA, 19 nt, Homo sapiens
  misc_RNA (1)...(19): siRNA sense strand
uaaugacagcuuugacaug

SEQ ID NO: 2103889 - RNA, 19 nt, Homo sapiens
  misc_RNA (1)...(19): siRNA sense strand
cgagagcucccuggauaau

SEQ ID NO: 2103890 - RNA, 19 nt, Homo sapiens
  misc_RNA (1)...(19): siRNA sense strand
cggagaagaaagccaagaa

SEQ ID NO: 2103891 - RNA, 19 nt, Homo sapiens
  misc_RNA (1)...(19): siRNA sense strand
gacgacacggacccugaua

SEQ ID NO: 2103892 - RNA, 19 nt, Homo sapiens
  misc_RNA (1)...(19): siRNA sense strand
uguuugggauucugcuuug

SEQ ID NO: 2103893 - RNA, 19 nt, Homo sapiens
  misc_RNA (1)...(19): siRNA sense strand
ccucucacccucugauuca

SEQ ID NO: 2103894 - RNA, 19 nt, Homo sapiens
  misc_RNA (1)...(19): siRNA sense strand
cgaaccguacggauuuauu

SEQ ID NO: 2103895 - RNA, 19 nt, Homo sapiens
  misc_RNA (1)...(19): siRNA sense strand
ggauaacagcaaacuagag

SEQ ID NO: 2103896 - RNA, 19 nt, Homo sapiens
  misc_RNA (1)...(19): siRNA sense strand
ggacccugauagcaugaag

SEQ ID NO: 2103897 - RNA, 19 nt, Homo sapiens
  misc_RNA (1)...(19): siRNA sense strand
acacggacccugauagcau

SEQ ID NO: 2103898 - RNA, 19 nt, Homo sapiens
  misc_RNA (1)...(19): siRNA sense strand
caugaaggauuuugagauc

SEQ ID NO: 2103899 - RNA, 19 nt, Homo sapiens
  misc_RNA (1)...(19): siRNA sense strand
gagcgccgucuccacaaga

SEQ ID NO: 2103900 - RNA, 19 nt, Homo sapiens
  misc_RNA (1)...(19): siRNA sense strand
gggcuuggacaucuuugga

SEQ ID NO: 2103901 - RNA, 19 nt, Homo sapiens
  misc_RNA (1)...(19): siRNA sense strand
accaagaagauaaugauga

SEQ ID NO: 2103902 - RNA, 19 nt, Homo sapiens
  misc_RNA (1)...(19): siRNA sense strand
ugucuggccuggauaacag

SEQ ID NO: 2103903 - RNA, 19 nt, Homo sapiens
  misc_RNA (1)...(19): siRNA sense strand
uggccuggauaacagcaaa

SEQ ID NO: 2103904 - RNA, 19 nt, Homo sapiens
  misc_RNA (1)...(19): siRNA sense strand
aagaaagccaagaagagaa

SEQ ID NO: 2103905 - RNA, 19 nt, Homo sapiens
  misc_RNA (1)...(19): siRNA sense strand
gguccuauggcucggagaa

SEQ ID NO: 2103906 - RNA, 19 nt, Homo sapiens
  misc_RNA (1)...(19): siRNA sense strand
gagguacaccgggcuguca

SEQ ID NO: 2103907 - RNA, 19 nt, Homo sapiens
  misc_RNA (1)...(19): siRNA sense strand
gucugagagugaccaagaa

SEQ ID NO: 2103908 - RNA, 19 nt, Homo sapiens
  misc_RNA (1)...(19): siRNA sense strand
aagaagagaaagucagaca

SEQ ID NO: 2103909 - RNA, 19 nt, Homo sapiens
  misc_RNA (1)...(19): siRNA sense strand
ggauucuuguuugggauuc

SEQ ID NO: 2103910 - RNA, 19 nt, Homo sapiens
  misc_RNA (1)...(19): siRNA sense strand
gagagcucccuggauaaug

SEQ ID NO: 2103911 - RNA, 19 nt, Homo sapiens
  misc_RNA (1)...(19): siRNA sense strand
cuggauaacagcaaacuag

SEQ ID NO: 2103912 - RNA, 19 nt, Homo sapiens
  misc_RNA (1)...(19): siRNA sense strand
gcaagugccuaguaauuug

SEQ ID NO: 2103913 - RNA, 19 nt, Homo sapiens
  misc_RNA (1)...(19): siRNA sense strand
cccaagagcuccagaaauu

SEQ ID NO: 2103914 - RNA, 19 nt, Homo sapiens
  misc_RNA (1)...(19): siRNA sense strand
agacuugccugcacugaua

SEQ ID NO: 2103915 - RNA, 19 nt, Homo sapiens
  misc_RNA (1)...(19): siRNA sense strand
ccacacagguaucaauguu

SEQ ID NO: 2103916 - RNA, 19 nt, Homo sapiens
  misc_RNA (1)...(19): siRNA sense strand
caaagaugcugguggacuu

SEQ ID NO: 2103917 - RNA, 19 nt, Homo sapiens
  misc_RNA (1)...(19): siRNA sense strand
acacagguaucaauguuug

SEQ ID NO: 2103918 - RNA, 19 nt, Homo sapiens
  misc_RNA (1)...(19): siRNA sense strand
gauaacuucuacugugaug

SEQ ID NO: 2103919 - RNA, 19 nt, Homo sapiens
  misc_RNA (1)...(19): siRNA sense strand
acagucaccucuccaaaga

SEQ ID NO: 2103920 - RNA, 19 nt, Homo sapiens
  misc_RNA (1)...(19): siRNA sense strand
gagaaaccaggacaugaaa

SEQ ID NO: 2103921 - RNA, 19 nt, Homo sapiens
  misc_RNA (1)...(19): siRNA sense strand
ccaacuggcucugauacuu

SEQ ID NO: 2103922 - RNA, 19 nt, Homo sapiens
  misc_RNA (1)...(19): siRNA sense strand
acagugggcugcuaguuau

SEQ ID NO: 2103923 - RNA, 19 nt, Homo sapiens
  misc_RNA (1)...(19): siRNA sense strand
gaacaccacacagguauca

SEQ ID NO: 2103924 - RNA, 19 nt, Homo sapiens
  misc_RNA (1)...(19): siRNA sense strand
ccaagacgaucuccuacca

SEQ ID NO: 2103925 - RNA, 19 nt, Homo sapiens
  misc_RNA (1)...(19): siRNA sense strand
cuucugaucucuuauacug

SEQ ID NO: 2103926 - RNA, 19 nt, Homo sapiens
  misc_RNA (1)...(19): siRNA sense strand
uaacuucuacugugauguu

SEQ ID NO: 2103927 - RNA, 19 nt, Homo sapiens
  misc_RNA (1)...(19): siRNA sense strand
ugagaaaccaggacaugaa

SEQ ID NO: 2103928 - RNA, 19 nt, Homo sapiens
  misc_RNA (1)...(19): siRNA sense strand
gaaaccuccuuaucauggu

SEQ ID NO: 2103929 - RNA, 19 nt, Homo sapiens
  misc_RNA (1)...(19): siRNA sense strand
caucaugaacacucaauug

SEQ ID NO: 2103930 - RNA, 19 nt, Homo sapiens
  misc_RNA (1)...(19): siRNA sense strand
gugggaaaccuccuuauca

SEQ ID NO: 2103931 - RNA, 19 nt, Homo sapiens
  misc_RNA (1)...(19): siRNA sense strand
gaucuucauucccuguauc

SEQ ID NO: 2103932 - RNA, 19 nt, Homo sapiens
  misc_RNA (1)...(19): siRNA sense strand
uucauucccuguaucuaua

SEQ ID NO: 2103933 - RNA, 19 nt, Homo sapiens
  misc_RNA (1)...(19): siRNA sense strand
gacccaagagcuccagaaa

SEQ ID NO: 2103934 - RNA, 19 nt, Homo sapiens
  misc_RNA (1)...(19): siRNA sense strand
aacagugggcugcuaguua

SEQ ID NO: 2103935 - RNA, 19 nt, Homo sapiens
  misc_RNA (1)...(19): siRNA sense strand
agaccaagacgaucuccua

SEQ ID NO: 2103936 - RNA, 19 nt, Homo sapiens
  misc_RNA (1)...(19): siRNA sense strand
cgaaaucuagcucucauag

SEQ ID NO: 2103937 - RNA, 19 nt, Homo sapiens
  misc_RNA (1)...(19): siRNA sense strand
ugggaaaccuccuuaucau

SEQ ID NO: 2103938 - RNA, 19 nt, Homo sapiens
  misc_RNA (1)...(19): siRNA sense strand
acagaacaccacacaggua

SEQ ID NO: 2103939 - RNA, 19 nt, Homo sapiens
  misc_RNA (1)...(19): siRNA sense strand
aucaauguuuguccucuua

SEQ ID NO: 2103940 - RNA, 19 nt, Homo sapiens
  misc_RNA (1)...(19): siRNA sense strand
caacuggcucugauacuuc

SEQ ID NO: 2103941 - RNA, 19 nt, Homo sapiens
  misc_RNA (1)...(19): siRNA sense strand
agucaccucuccaaagaug

SEQ ID NO: 2103942 - RNA, 19 nt, Homo sapiens
  misc_RNA (1)...(19): siRNA sense strand
cagaacaccacacagguau

SEQ ID NO: 2103943 - RNA, 19 nt, Homo sapiens
  misc_RNA (1)...(19): siRNA sense strand
gggaaaccuccuuaucaug

SEQ ID NO: 2103944 - RNA, 19 nt, Homo sapiens
  misc_RNA (1)...(19): siRNA sense strand
aagcagccaugaggagauu

SEQ ID NO: 2103945 - RNA, 19 nt, Homo sapiens
  misc_RNA (1)...(19): siRNA sense strand
gaaaccaggacaugaaagc

SEQ ID NO: 2103946 - RNA, 19 nt, Homo sapiens
  misc_RNA (1)...(19): siRNA sense strand
gaaauuccuguuccuucug

SEQ ID NO: 2103947 - RNA, 19 nt, Homo sapiens
  misc_RNA (1)...(19): siRNA sense strand
ccacagucaccucuccaaa

SEQ ID NO: 2103948 - RNA, 19 nt, Homo sapiens
  misc_RNA (1)...(19): siRNA sense strand
caacagugggcugcuaguu

SEQ ID NO: 2103949 - RNA, 19 nt, Homo sapiens
  misc_RNA (1)...(19): siRNA sense strand
uaucaauguuuguccucuu

SEQ ID NO: 2103950 - RNA, 19 nt, Homo sapiens
  misc_RNA (1)...(19): siRNA sense strand
uccaucagcuacacaguca

SEQ ID NO: 2103951 - RNA, 19 nt, Homo sapiens
  misc_RNA (1)...(19): siRNA sense strand
gaucuucuucuuccaccuu

SEQ ID NO: 2103952 - RNA, 19 nt, Homo sapiens
  misc_RNA (1)...(19): siRNA sense strand
ucaccaucaugaacacuca

SEQ ID NO: 2103953 - RNA, 19 nt, Homo sapiens
  misc_RNA (1)...(19): siRNA sense strand
gaucucuuauacugucauc

SEQ ID NO: 2103954 - RNA, 19 nt, Homo sapiens
  misc_RNA (1)...(19): siRNA sense strand
ccacuccauuguccaacug

SEQ ID NO: 2103955 - RNA, 19 nt, Homo sapiens
  misc_RNA (1)...(19): siRNA sense strand
gcuccacacacccauguau

SEQ ID NO: 2103956 - RNA, 19 nt, Homo sapiens
  misc_RNA (1)...(19): siRNA sense strand
aaauuccuguuccuucugu

SEQ ID NO: 2103957 - RNA, 19 nt, Homo sapiens
  misc_RNA (1)...(19): siRNA sense strand
uccacacacccauguauuu

SEQ ID NO: 2103958 - RNA, 19 nt, Homo sapiens
  misc_RNA (1)...(19): siRNA sense strand
caucagcuacacagucaug

SEQ ID NO: 2103959 - RNA, 19 nt, Homo sapiens
  misc_RNA (1)...(19): siRNA sense strand
gcaaggaggaaggcagcuu

SEQ ID NO: 2103960 - RNA, 19 nt, Homo sapiens
  misc_RNA (1)...(19): siRNA sense strand
gguaugucaccaucaugaa

SEQ ID NO: 2103961 - RNA, 19 nt, Homo sapiens
  misc_RNA (1)...(19): siRNA sense strand
gcauggcccagaucuucuu

SEQ ID NO: 2103962 - RNA, 19 nt, Homo sapiens
  misc_RNA (1)...(19): siRNA sense strand
cuucauucccuguaucuau

SEQ ID NO: 2103963 - RNA, 19 nt, Homo sapiens
  misc_RNA (1)...(19): siRNA sense strand
uggcccagaucuucuucuu

SEQ ID NO: 2103964 - RNA, 19 nt, Homo sapiens
  misc_RNA (1)...(19): siRNA sense strand
gaucuacacccugagaaac

SEQ ID NO: 2103965 - RNA, 19 nt, Homo sapiens
  misc_RNA (1)...(19): siRNA sense strand
ugaucuacacccugagaaa

SEQ ID NO: 2103966 - RNA, 19 nt, Homo sapiens
  misc_RNA (1)...(19): siRNA sense strand
ucaugaacacucaauugug

SEQ ID NO: 2103967 - RNA, 19 nt, Homo sapiens
  misc_RNA (1)...(19): siRNA sense strand
caauguuuguccucuuagg

SEQ ID NO: 2103968 - RNA, 19 nt, Homo sapiens
  misc_RNA (1)...(19): siRNA sense strand
ccaagagcuccagaaauuc

SEQ ID NO: 2103969 - RNA, 19 nt, Homo sapiens
  misc_RNA (1)...(19): siRNA sense strand
caagagcuccagaaauucc

SEQ ID NO: 2103970 - RNA, 19 nt, Homo sapiens
  misc_RNA (1)...(19): siRNA sense strand
ccagaaauuccuguuccuu

SEQ ID NO: 2103971 - RNA, 19 nt, Homo sapiens
  misc_RNA (1)...(19): siRNA sense strand
gagacuugccugcacugau

SEQ ID NO: 2103972 - RNA, 19 nt, Homo sapiens
  misc_RNA (1)...(19): siRNA sense strand
gggaggugggacugucuuu

SEQ ID NO: 2103973 - RNA, 19 nt, Homo sapiens
  misc_RNA (1)...(19): siRNA sense strand
ucugugaggugcuauuuaa

SEQ ID NO: 2103974 - RNA, 19 nt, Homo sapiens
  misc_RNA (1)...(19): siRNA sense strand
gaggugcuauuuaaaguuc

SEQ ID NO: 2103975 - RNA, 19 nt, Homo sapiens
  misc_RNA (1)...(19): siRNA sense strand
gagcagaaaggaccuauca

SEQ ID NO: 2103976 - RNA, 19 nt, Homo sapiens
  misc_RNA (1)...(19): siRNA sense strand
gaagauggcgaacaaaugc

SEQ ID NO: 2103977 - RNA, 19 nt, Homo sapiens
  misc_RNA (1)...(19): siRNA sense strand
ccaaagagccacguucaug

SEQ ID NO: 2103978 - RNA, 19 nt, Homo sapiens
  misc_RNA (1)...(19): siRNA sense strand
acaugaagauggcgaacaa

SEQ ID NO: 2103979 - RNA, 19 nt, Homo sapiens
  misc_RNA (1)...(19): siRNA sense strand
gugaggugcuauuuaaagu

SEQ ID NO: 2103980 - RNA, 19 nt, Homo sapiens
  misc_RNA (1)...(19): siRNA sense strand
ccaaguuccuagcacugaa

SEQ ID NO: 2103981 - RNA, 19 nt, Homo sapiens
  misc_RNA (1)...(19): siRNA sense strand
gagccacguucauggaagu

SEQ ID NO: 2103982 - RNA, 19 nt, Homo sapiens
  misc_RNA (1)...(19): siRNA sense strand
ccgaccagguugugcauau

SEQ ID NO: 2103983 - RNA, 19 nt, Homo sapiens
  misc_RNA (1)...(19): siRNA sense strand
ugaagauggcgaacaaaug

SEQ ID NO: 2103984 - RNA, 19 nt, Homo sapiens
  misc_RNA (1)...(19): siRNA sense strand
ccacguucauggaaguuca

SEQ ID NO: 2103985 - RNA, 19 nt, Homo sapiens
  misc_RNA (1)...(19): siRNA sense strand
cagaggcccuauugcuuca

SEQ ID NO: 2103986 - RNA, 19 nt, Homo sapiens
  misc_RNA (1)...(19): siRNA sense strand
aacaaaugcugcucuccuu

SEQ ID NO: 2103987 - RNA, 19 nt, Homo sapiens
  misc_RNA (1)...(19): siRNA sense strand
guucauggaaguucagaga

SEQ ID NO: 2103988 - RNA, 19 nt, Homo sapiens
  misc_RNA (1)...(19): siRNA sense strand
gaagagccauguuuucaac

SEQ ID NO: 2103989 - RNA, 19 nt, Homo sapiens
  misc_RNA (1)...(19): siRNA sense strand
ggcccguccuucuacguuu

SEQ ID NO: 2103990 - RNA, 19 nt, Homo sapiens
  misc_RNA (1)...(19): siRNA sense strand
ucacagaggacugcugguu

SEQ ID NO: 2103991 - RNA, 19 nt, Homo sapiens
  misc_RNA (1)...(19): siRNA sense strand
ccggugagcacauucgauu

SEQ ID NO: 2103992 - RNA, 19 nt, Homo sapiens
  misc_RNA (1)...(19): siRNA sense strand
aaacuuguaucugggucuu

SEQ ID NO: 2103993 - RNA, 19 nt, Homo sapiens
  misc_RNA (1)...(19): siRNA sense strand
cgaccagguugugcauaug

SEQ ID NO: 2103994 - RNA, 19 nt, Homo sapiens
  misc_RNA (1)...(19): siRNA sense strand
gaccagaggcccuauugcu

SEQ ID NO: 2103995 - RNA, 19 nt, Homo sapiens
  misc_RNA (1)...(19): siRNA sense strand
aaagagccacguucaugga

SEQ ID NO: 2103996 - RNA, 19 nt, Homo sapiens
  misc_RNA (1)...(19): siRNA sense strand
gagcugacuccucucaaac

SEQ ID NO: 2103997 - RNA, 19 nt, Homo sapiens
  misc_RNA (1)...(19): siRNA sense strand
ggugagcacauucgauugg

SEQ ID NO: 2103998 - RNA, 19 nt, Homo sapiens
  misc_RNA (1)...(19): siRNA sense strand
gguaaaugagaaacuccaa

SEQ ID NO: 2103999 - RNA, 19 nt, Homo sapiens
  misc_RNA (1)...(19): siRNA sense strand
aaggaccuaucaccucugu

SEQ ID NO: 2104000 - RNA, 19 nt, Homo sapiens
  misc_RNA (1)...(19): siRNA sense strand
ggaagagccauguuuucaa

SEQ ID NO: 2104001 - RNA, 19 nt, Homo sapiens
  misc_RNA (1)...(19): siRNA sense strand
ucugugaggugcuauuuaa

SEQ ID NO: 2104002 - RNA, 19 nt, Homo sapiens
  misc_RNA (1)...(19): siRNA sense strand
gaggugcuauuuaaaguuc

SEQ ID NO: 2104003 - RNA, 19 nt, Homo sapiens
  misc_RNA (1)...(19): siRNA sense strand
gagcagaaaggaccuauca

SEQ ID NO: 2104004 - RNA, 19 nt, Homo sapiens
  misc_RNA (1)...(19): siRNA sense strand
gaagauggcgaacaaaugc

SEQ ID NO: 2104005 - RNA, 19 nt, Homo sapiens
  misc_RNA (1)...(19): siRNA sense strand
ccaaagagccacguucaug

SEQ ID NO: 2104006 - RNA, 19 nt, Homo sapiens
  misc_RNA (1)...(19): siRNA sense strand
acaugaagauggcgaacaa

SEQ ID NO: 2104007 - RNA, 19 nt, Homo sapiens
  misc_RNA (1)...(19): siRNA sense strand
gugaggugcuauuuaaagu

SEQ ID NO: 2104008 - RNA, 19 nt, Homo sapiens
  misc_RNA (1)...(19): siRNA sense strand
ccaaguuccuagcacugaa

SEQ ID NO: 2104009 - RNA, 19 nt, Homo sapiens
  misc_RNA (1)...(19): siRNA sense strand
gagccacguucauggaagu

SEQ ID NO: 2104010 - RNA, 19 nt, Homo sapiens
  misc_RNA (1)...(19): siRNA sense strand
ccgaccagguugugcauau

SEQ ID NO: 2104011 - RNA, 19 nt, Homo sapiens
  misc_RNA (1)...(19): siRNA sense strand
ugaagauggcgaacaaaug

SEQ ID NO: 2104012 - RNA, 19 nt, Homo sapiens
  misc_RNA (1)...(19): siRNA sense strand
ccacguucauggaaguuca

SEQ ID NO: 2104013 - RNA, 19 nt, Homo sapiens
  misc_RNA (1)...(19): siRNA sense strand
cagaggcccuauugcuuca

SEQ ID NO: 2104014 - RNA, 19 nt, Homo sapiens
  misc_RNA (1)...(19): siRNA sense strand
aacaaaugcugcucuccuu

SEQ ID NO: 2104015 - RNA, 19 nt, Homo sapiens
  misc_RNA (1)...(19): siRNA sense strand
guucauggaaguucagaga

SEQ ID NO: 2104016 - RNA, 19 nt, Homo sapiens
  misc_RNA (1)...(19): siRNA sense strand
gaagagccauguuuucaac

SEQ ID NO: 2104017 - RNA, 19 nt, Homo sapiens
  misc_RNA (1)...(19): siRNA sense strand
ggcccguccuucuacguuu

SEQ ID NO: 2104018 - RNA, 19 nt, Homo sapiens
  misc_RNA (1)...(19): siRNA sense strand
ucacagaggacugcugguu

SEQ ID NO: 2104019 - RNA, 19 nt, Homo sapiens
  misc_RNA (1)...(19): siRNA sense strand
ccggugagcacauucgauu

SEQ ID NO: 2104020 - RNA, 19 nt, Homo sapiens
  misc_RNA (1)...(19): siRNA sense strand
aaacuuguaucugggucuu

SEQ ID NO: 2104021 - RNA, 19 nt, Homo sapiens
  misc_RNA (1)...(19): siRNA sense strand
cgaccagguugugcauaug

SEQ ID NO: 2104022 - RNA, 19 nt, Homo sapiens
  misc_RNA (1)...(19): siRNA sense strand
gaccagaggcccuauugcu

SEQ ID NO: 2104023 - RNA, 19 nt, Homo sapiens
  misc_RNA (1)...(19): siRNA sense strand
aaagagccacguucaugga

SEQ ID NO: 2104024 - RNA, 19 nt, Homo sapiens
  misc_RNA (1)...(19): siRNA sense strand
gagcugacuccucucaaac

SEQ ID NO: 2104025 - RNA, 19 nt, Homo sapiens
  misc_RNA (1)...(19): siRNA sense strand
ggugagcacauucgauugg

SEQ ID NO: 2104026 - RNA, 19 nt, Homo sapiens
  misc_RNA (1)...(19): siRNA sense strand
gguaaaugagaaacuccaa

SEQ ID NO: 2104027 - RNA, 19 nt, Homo sapiens
  misc_RNA (1)...(19): siRNA sense strand
aaggaccuaucaccucugu

SEQ ID NO: 2104028 - RNA, 19 nt, Homo sapiens
  misc_RNA (1)...(19): siRNA sense strand
ggaagagccauguuuucaa

SEQ ID NO: 2104029 - RNA, 19 nt, Homo sapiens
  misc_RNA (1)...(19): siRNA sense strand
gaagaaacaugaugagcua

SEQ ID NO: 2104030 - RNA, 19 nt, Homo sapiens
  misc_RNA (1)...(19): siRNA sense strand
gaaauuagaugcagguguu

SEQ ID NO: 2104031 - RNA, 19 nt, Homo sapiens
  misc_RNA (1)...(19): siRNA sense strand
gaaacaagcugacuuugga

SEQ ID NO: 2104032 - RNA, 19 nt, Homo sapiens
  misc_RNA (1)...(19): siRNA sense strand
ggaaugcauuuacugauua

SEQ ID NO: 2104033 - RNA, 19 nt, Homo sapiens
  misc_RNA (1)...(19): siRNA sense strand
caacuacucuuucgaugua

SEQ ID NO: 2104034 - RNA, 19 nt, Homo sapiens
  misc_RNA (1)...(19): siRNA sense strand
gaaugaagcuccuccuaau

SEQ ID NO: 2104035 - RNA, 19 nt, Homo sapiens
  misc_RNA (1)...(19): siRNA sense strand
caaccaaucucuaucuuga

SEQ ID NO: 2104036 - RNA, 19 nt, Homo sapiens
  misc_RNA (1)...(19): siRNA sense strand
agacugggcugcuguauuu

SEQ ID NO: 2104037 - RNA, 19 nt, Homo sapiens
  misc_RNA (1)...(19): siRNA sense strand
caagagaaaucaugacaga

SEQ ID NO: 2104038 - RNA, 19 nt, Homo sapiens
  misc_RNA (1)...(19): siRNA sense strand
gaaacaugaugagcuauaa

SEQ ID NO: 2104039 - RNA, 19 nt, Homo sapiens
  misc_RNA (1)...(19): siRNA sense strand
ggacauauuuauuggaaug

SEQ ID NO: 2104040 - RNA, 19 nt, Homo sapiens
  misc_RNA (1)...(19): siRNA sense strand
ggagggcacuguaaacuug

SEQ ID NO: 2104041 - RNA, 19 nt, Homo sapiens
  misc_RNA (1)...(19): siRNA sense strand
gcagaguucuuacggauau

SEQ ID NO: 2104042 - RNA, 19 nt, Homo sapiens
  misc_RNA (1)...(19): siRNA sense strand
gcgaaccucuguauaacua

SEQ ID NO: 2104043 - RNA, 19 nt, Homo sapiens
  misc_RNA (1)...(19): siRNA sense strand
guacaacugugaagaugaa

SEQ ID NO: 2104044 - RNA, 19 nt, Homo sapiens
  misc_RNA (1)...(19): siRNA sense strand
gaugaacgcuguuacuuag

SEQ ID NO: 2104045 - RNA, 19 nt, Homo sapiens
  misc_RNA (1)...(19): siRNA sense strand
uaacauguaucaccacuuc

SEQ ID NO: 2104046 - RNA, 19 nt, Homo sapiens
  misc_RNA (1)...(19): siRNA sense strand
caaaguggccauuuaagaa

SEQ ID NO: 2104047 - RNA, 19 nt, Homo sapiens
  misc_RNA (1)...(19): siRNA sense strand
gagagaggcuggaggagau

SEQ ID NO: 2104048 - RNA, 19 nt, Homo sapiens
  misc_RNA (1)...(19): siRNA sense strand
gaaauuggagggcacugua

SEQ ID NO: 2104049 - RNA, 19 nt, Homo sapiens
  misc_RNA (1)...(19): siRNA sense strand
ugagucagcugaggacaua

SEQ ID NO: 2104050 - RNA, 19 nt, Homo sapiens
  misc_RNA (1)...(19): siRNA sense strand
ggaaaauccuuaaccaaaa

SEQ ID NO: 2104051 - RNA, 19 nt, Homo sapiens
  misc_RNA (1)...(19): siRNA sense strand
cagcucaacuucagaccua

SEQ ID NO: 2104052 - RNA, 19 nt, Homo sapiens
  misc_RNA (1)...(19): siRNA sense strand
acacaacacggacauauuu

SEQ ID NO: 2104053 - RNA, 19 nt, Homo sapiens
  misc_RNA (1)...(19): siRNA sense strand
uuacucagcacguuaauaa

SEQ ID NO: 2104054 - RNA, 19 nt, Homo sapiens
  misc_RNA (1)...(19): siRNA sense strand
cacccaaaguggccauuua

SEQ ID NO: 2104055 - RNA, 19 nt, Homo sapiens
  misc_RNA (1)...(19): siRNA sense strand
gaaccucuguauaacuaug

SEQ ID NO: 2104056 - RNA, 19 nt, Homo sapiens
  misc_RNA (1)...(19): siRNA sense strand
gcuuguaaaugcacugaaa

SEQ ID NO: 2104057 - RNA, 19 nt, Homo sapiens
  misc_RNA (1)...(19): siRNA sense strand
cauauaagguuccacucaa

SEQ ID NO: 2104058 - RNA, 19 nt, Homo sapiens
  misc_RNA (1)...(19): siRNA sense strand
uagagaagcuaaaguacug

SEQ ID NO: 2104059 - RNA, 19 nt, Homo sapiens
  misc_RNA (1)...(19): siRNA sense strand
ggagcacauucccuucuuu

SEQ ID NO: 2104060 - RNA, 19 nt, Homo sapiens
  misc_RNA (1)...(19): siRNA sense strand
caacacggacauauuuauu

SEQ ID NO: 2104061 - RNA, 19 nt, Homo sapiens
  misc_RNA (1)...(19): siRNA sense strand
uagaagaugcuaaauguga

SEQ ID NO: 2104062 - RNA, 19 nt, Homo sapiens
  misc_RNA (1)...(19): siRNA sense strand
uuacggauauggugaccua

SEQ ID NO: 2104063 - RNA, 19 nt, Homo sapiens
  misc_RNA (1)...(19): siRNA sense strand
uggaaugcauuuacugauu

SEQ ID NO: 2104064 - RNA, 19 nt, Homo sapiens
  misc_RNA (1)...(19): siRNA sense strand
guauagagaacuuggguuu

SEQ ID NO: 2104065 - RNA, 19 nt, Homo sapiens
  misc_RNA (1)...(19): siRNA sense strand
gugagucuauucaggauga

SEQ ID NO: 2104066 - RNA, 19 nt, Homo sapiens
  misc_RNA (1)...(19): siRNA sense strand
ccacuucugugauuucauc

SEQ ID NO: 2104067 - RNA, 19 nt, Homo sapiens
  misc_RNA (1)...(19): siRNA sense strand
ccaaaguggccauuuaaga

SEQ ID NO: 2104068 - RNA, 19 nt, Homo sapiens
  misc_RNA (1)...(19): siRNA sense strand
ggagaugcaugugcucugu

SEQ ID NO: 2104069 - RNA, 19 nt, Homo sapiens
  misc_RNA (1)...(19): siRNA sense strand
gauaagggccaccauccaa

SEQ ID NO: 2104070 - RNA, 19 nt, Homo sapiens
  misc_RNA (1)...(19): siRNA sense strand
gagaggcguucacuacauc

SEQ ID NO: 2104071 - RNA, 19 nt, Homo sapiens
  misc_RNA (1)...(19): siRNA sense strand
gagcacagaauaccggaaa

SEQ ID NO: 2104072 - RNA, 19 nt, Homo sapiens
  misc_RNA (1)...(19): siRNA sense strand
ggaaacaagcugacuuugg

SEQ ID NO: 2104073 - RNA, 19 nt, Homo sapiens
  misc_RNA (1)...(19): siRNA sense strand
caacuaaggaucacacaca

SEQ ID NO: 2104074 - RNA, 19 nt, Homo sapiens
  misc_RNA (1)...(19): siRNA sense strand
caggcgaaccucuguauaa

SEQ ID NO: 2104075 - RNA, 19 nt, Homo sapiens
  misc_RNA (1)...(19): siRNA sense strand
aaaaugagcuuguaaaugc

SEQ ID NO: 2104076 - RNA, 19 nt, Homo sapiens
  misc_RNA (1)...(19): siRNA sense strand
caacuucagaccuauagaa

SEQ ID NO: 2104077 - RNA, 19 nt, Homo sapiens
  misc_RNA (1)...(19): siRNA sense strand
ccagaguggugaaauugga

SEQ ID NO: 2104078 - RNA, 19 nt, Homo sapiens
  misc_RNA (1)...(19): siRNA sense strand
aaguccagauuguugauua

SEQ ID NO: 2104079 - RNA, 19 nt, Homo sapiens
  misc_RNA (1)...(19): siRNA sense strand
agaugaacgcuguuacuua

SEQ ID NO: 2104080 - RNA, 19 nt, Homo sapiens
  misc_RNA (1)...(19): siRNA sense strand
ggacauauuuuggaaacaa

SEQ ID NO: 2104081 - RNA, 19 nt, Homo sapiens
  misc_RNA (1)...(19): siRNA sense strand
guuugucuuuggagucuua

SEQ ID NO: 2104082 - RNA, 19 nt, Homo sapiens
  misc_RNA (1)...(19): siRNA sense strand
agaaugaagcuccuccuaa

SEQ ID NO: 2104083 - RNA, 19 nt, Homo sapiens
  misc_RNA (1)...(19): siRNA sense strand
caagcugacuuuggauaug

SEQ ID NO: 2104084 - RNA, 19 nt, Homo sapiens
  misc_RNA (1)...(19): siRNA sense strand
uaagaaacaccuagagaag

SEQ ID NO: 2104085 - RNA, 19 nt, Homo sapiens
  misc_RNA (1)...(19): siRNA sense strand
uauuugaacuguacaacug

SEQ ID NO: 2104086 - RNA, 19 nt, Homo sapiens
  misc_RNA (1)...(19): siRNA sense strand
acucaagucugguguguuc

SEQ ID NO: 2104087 - RNA, 19 nt, Homo sapiens
  misc_RNA (1)...(19): siRNA sense strand
gcaaccaaucucuaucuug

SEQ ID NO: 2104088 - RNA, 19 nt, Homo sapiens
  misc_RNA (1)...(19): siRNA sense strand
gaagaugaacgcuguuacu

SEQ ID NO: 2104089 - RNA, 19 nt, Homo sapiens
  misc_RNA (1)...(19): siRNA sense strand
cgacacauggaaugcauuu

SEQ ID NO: 2104090 - RNA, 19 nt, Homo sapiens
  misc_RNA (1)...(19): siRNA sense strand
uuauguaucuuguccuuca

SEQ ID NO: 2104091 - RNA, 19 nt, Homo sapiens
  misc_RNA (1)...(19): siRNA sense strand
agaaacaugaugagcuaua

SEQ ID NO: 2104092 - RNA, 19 nt, Homo sapiens
  misc_RNA (1)...(19): siRNA sense strand
cggauauggugaccuauuc

SEQ ID NO: 2104093 - RNA, 19 nt, Homo sapiens
  misc_RNA (1)...(19): siRNA sense strand
cauuugaaguccagauugu

SEQ ID NO: 2104094 - RNA, 19 nt, Homo sapiens
  misc_RNA (1)...(19): siRNA sense strand
ugagaaauccugcaaacca

SEQ ID NO: 2104095 - RNA, 19 nt, Homo sapiens
  misc_RNA (1)...(19): siRNA sense strand
acacggacauauuuauugg

SEQ ID NO: 2104096 - RNA, 19 nt, Homo sapiens
  misc_RNA (1)...(19): siRNA sense strand
uaugagaaauccugcaaac

SEQ ID NO: 2104097 - RNA, 19 nt, Homo sapiens
  misc_RNA (1)...(19): siRNA sense strand
ugagaggcguucacuacau

SEQ ID NO: 2104098 - RNA, 19 nt, Homo sapiens
  misc_RNA (1)...(19): siRNA sense strand
uauauuacucagcacguua

SEQ ID NO: 2104099 - RNA, 19 nt, Homo sapiens
  misc_RNA (1)...(19): siRNA sense strand
augcagguguuaacaugua

SEQ ID NO: 2104100 - RNA, 19 nt, Homo sapiens
  misc_RNA (1)...(19): siRNA sense strand
uauaagaaacaccuagaga

SEQ ID NO: 2104101 - RNA, 19 nt, Homo sapiens
  misc_RNA (1)...(19): siRNA sense strand
gcuauacucagcucaacuu

SEQ ID NO: 2104102 - RNA, 19 nt, Homo sapiens
  misc_RNA (1)...(19): siRNA sense strand
gagcaaccaaucucuaucu

SEQ ID NO: 2104103 - RNA, 19 nt, Homo sapiens
  misc_RNA (1)...(19): siRNA sense strand
agaugcagguguuaacaug

SEQ ID NO: 2104104 - RNA, 19 nt, Homo sapiens
  misc_RNA (1)...(19): siRNA sense strand
cgauguagaagaauuuaug

SEQ ID NO: 2104105 - RNA, 19 nt, Homo sapiens
  misc_RNA (1)...(19): siRNA sense strand
gcauauugccacugucugu

SEQ ID NO: 2104106 - RNA, 19 nt, Homo sapiens
  misc_RNA (1)...(19): siRNA sense strand
gcugagaggcguucacuac

SEQ ID NO: 2104107 - RNA, 19 nt, Homo sapiens
  misc_RNA (1)...(19): siRNA sense strand
ggacaccgggucauauaag

SEQ ID NO: 2104108 - RNA, 19 nt, Homo sapiens
  misc_RNA (1)...(19): siRNA sense strand
agaaacaccuagagaagcu

SEQ ID NO: 2104109 - RNA, 19 nt, Homo sapiens
  misc_RNA (1)...(19): siRNA sense strand
gacucucuuuguccauaua

SEQ ID NO: 2104110 - RNA, 19 nt, Homo sapiens
  misc_RNA (1)...(19): siRNA sense strand
cacaacacggacauauuua

SEQ ID NO: 2104111 - RNA, 19 nt, Homo sapiens
  misc_RNA (1)...(19): siRNA sense strand
gcucaacuucagaccuaua

SEQ ID NO: 2104112 - RNA, 19 nt, Homo sapiens
  misc_RNA (1)...(19): siRNA sense strand
cagguuugguuacccaguu

SEQ ID NO: 2104113 - RNA, 19 nt, Homo sapiens
  misc_RNA (1)...(19): siRNA sense strand
gugaagaugaacgcuguua

SEQ ID NO: 2104114 - RNA, 19 nt, Homo sapiens
  misc_RNA (1)...(19): siRNA sense strand
acggacauauuuauuggaa

SEQ ID NO: 2104115 - RNA, 19 nt, Homo sapiens
  misc_RNA (1)...(19): siRNA sense strand
auaagaaacaccuagagaa

SEQ ID NO: 2104116 - RNA, 19 nt, Homo sapiens
  misc_RNA (1)...(19): siRNA sense strand
ccucugcagucaugguuug

SEQ ID NO: 2104117 - RNA, 19 nt, Homo sapiens
  misc_RNA (1)...(19): siRNA sense strand
caaaagcccucugcaguca

SEQ ID NO: 2104118 - RNA, 19 nt, Homo sapiens
  misc_RNA (1)...(19): siRNA sense strand
cccguuaucuucaguacug

SEQ ID NO: 2104119 - RNA, 19 nt, Homo sapiens
  misc_RNA (1)...(19): siRNA sense strand
aaugaagcuccuccuaaua

SEQ ID NO: 2104120 - RNA, 19 nt, Homo sapiens
  misc_RNA (1)...(19): siRNA sense strand
gggacaccgggucauauaa

SEQ ID NO: 2104121 - RNA, 19 nt, Homo sapiens
  misc_RNA (1)...(19): siRNA sense strand
gaacuguacaacugugaag

SEQ ID NO: 2104122 - RNA, 19 nt, Homo sapiens
  misc_RNA (1)...(19): siRNA sense strand
cuaaggaucacacacaaca

SEQ ID NO: 2104123 - RNA, 19 nt, Homo sapiens
  misc_RNA (1)...(19): siRNA sense strand
gauuacaaguauagagaac

SEQ ID NO: 2104124 - RNA, 19 nt, Homo sapiens
  misc_RNA (1)...(19): siRNA sense strand
cauggaaugcauuuacuga

SEQ ID NO: 2104125 - RNA, 19 nt, Homo sapiens
  misc_RNA (1)...(19): siRNA sense strand
cuauagaagaugcuaaaug

SEQ ID NO: 2104126 - RNA, 19 nt, Homo sapiens
  misc_RNA (1)...(19): siRNA sense strand
uaaccaaaaugagcuugua

SEQ ID NO: 2104127 - RNA, 19 nt, Homo sapiens
  misc_RNA (1)...(19): siRNA sense strand
ggugcaaggagacaagauu

SEQ ID NO: 2104128 - RNA, 19 nt, Homo sapiens
  misc_RNA (1)...(19): siRNA sense strand
uaagguuccacucaacauu

SEQ ID NO: 2104129 - RNA, 19 nt, Homo sapiens
  misc_RNA (1)...(19): siRNA sense strand
ugaagaagaugaagaagaa

SEQ ID NO: 2104130 - RNA, 19 nt, Homo sapiens
  misc_RNA (1)...(19): siRNA sense strand
gcagguaacugacaaagca

SEQ ID NO: 2104131 - RNA, 19 nt, Homo sapiens
  misc_RNA (1)...(19): siRNA sense strand
ugacaaagcauucaaagaa

SEQ ID NO: 2104132 - RNA, 19 nt, Homo sapiens
  misc_RNA (1)...(19): siRNA sense strand
uaacugagcuucgguuuca

SEQ ID NO: 2104133 - RNA, 19 nt, Homo sapiens
  misc_RNA (1)...(19): siRNA sense strand
gcuaacauguugcgugaaa

SEQ ID NO: 2104134 - RNA, 19 nt, Homo sapiens
  misc_RNA (1)...(19): siRNA sense strand
guacaaggccuucaggaaa

SEQ ID NO: 2104135 - RNA, 19 nt, Homo sapiens
  misc_RNA (1)...(19): siRNA sense strand
ugaggugucuccaguuuaa

SEQ ID NO: 2104136 - RNA, 19 nt, Homo sapiens
  misc_RNA (1)...(19): siRNA sense strand
ugaaggaacucaaccugaa

SEQ ID NO: 2104137 - RNA, 19 nt, Homo sapiens
  misc_RNA (1)...(19): siRNA sense strand
ccagaaugguggucacuaa

SEQ ID NO: 2104138 - RNA, 19 nt, Homo sapiens
  misc_RNA (1)...(19): siRNA sense strand
ucaaagggcagcagcaaua

SEQ ID NO: 2104139 - RNA, 19 nt, Homo sapiens
  misc_RNA (1)...(19): siRNA sense strand
gaacucaaccugaacaaca

SEQ ID NO: 2104140 - RNA, 19 nt, Homo sapiens
  misc_RNA (1)...(19): siRNA sense strand
gcaaaggaacaaauuagaa

SEQ ID NO: 2104141 - RNA, 19 nt, Homo sapiens
  misc_RNA (1)...(19): siRNA sense strand
agaaacagaugaagaagau

SEQ ID NO: 2104142 - RNA, 19 nt, Homo sapiens
  misc_RNA (1)...(19): siRNA sense strand
gagcuucgguuucacaauc

SEQ ID NO: 2104143 - RNA, 19 nt, Homo sapiens
  misc_RNA (1)...(19): siRNA sense strand
aaacaacacucuccugaag

SEQ ID NO: 2104144 - RNA, 19 nt, Homo sapiens
  misc_RNA (1)...(19): siRNA sense strand
ccaagaaacagaugaagaa

SEQ ID NO: 2104145 - RNA, 19 nt, Homo sapiens
  misc_RNA (1)...(19): siRNA sense strand
gaaaacauccccaaagaaa

SEQ ID NO: 2104146 - RNA, 19 nt, Homo sapiens
  misc_RNA (1)...(19): siRNA sense strand
agaagaagaugaugaugau

SEQ ID NO: 2104147 - RNA, 19 nt, Homo sapiens
  misc_RNA (1)...(19): siRNA sense strand
caugaggugucuccaguuu

SEQ ID NO: 2104148 - RNA, 19 nt, Homo sapiens
  misc_RNA (1)...(19): siRNA sense strand
gaacagaagaagcugauag

SEQ ID NO: 2104149 - RNA, 19 nt, Homo sapiens
  misc_RNA (1)...(19): siRNA sense strand
caaagcaaaggaacaaauu

SEQ ID NO: 2104150 - RNA, 19 nt, Homo sapiens
  misc_RNA (1)...(19): siRNA sense strand
ccaauuucaucacagguaa

SEQ ID NO: 2104151 - RNA, 19 nt, Homo sapiens
  misc_RNA (1)...(19): siRNA sense strand
caacaucgaguccaauuuc

SEQ ID NO: 2104152 - RNA, 19 nt, Homo sapiens
  misc_RNA (1)...(19): siRNA sense strand
caucacagguaaagggauu

SEQ ID NO: 2104153 - RNA, 19 nt, Homo sapiens
  misc_RNA (1)...(19): siRNA sense strand
gaaugguggucacuaaucu

SEQ ID NO: 2104154 - RNA, 19 nt, Homo sapiens
  misc_RNA (1)...(19): siRNA sense strand
cagcagcaauauccaagaa

SEQ ID NO: 2104155 - RNA, 19 nt, Homo sapiens
  misc_RNA (1)...(19): siRNA sense strand
gcaaagcaaaggaacaaau

SEQ ID NO: 2104156 - RNA, 19 nt, Homo sapiens
  misc_RNA (1)...(19): siRNA sense strand
uuaaugagacgcuaacuga

SEQ ID NO: 2104157 - RNA, 19 nt, Homo sapiens
  misc_RNA (1)...(19): siRNA sense strand
gaagcugauagccauguua

SEQ ID NO: 2104158 - RNA, 19 nt, Homo sapiens
  misc_RNA (1)...(19): siRNA sense strand
gaacaacauugaaaacauc

SEQ ID NO: 2104159 - RNA, 19 nt, Homo sapiens
  misc_RNA (1)...(19): siRNA sense strand
gcagcaauauccaagaaac

SEQ ID NO: 2104160 - RNA, 19 nt, Homo sapiens
  misc_RNA (1)...(19): siRNA sense strand
aaacagaugaagaagauga

SEQ ID NO: 2104161 - RNA, 19 nt, Homo sapiens
  misc_RNA (1)...(19): siRNA sense strand
ggaaucaggauaaacaaag

SEQ ID NO: 2104162 - RNA, 19 nt, Homo sapiens
  misc_RNA (1)...(19): siRNA sense strand
caucaccacucucaacauc

SEQ ID NO: 2104163 - RNA, 19 nt, Homo sapiens
  misc_RNA (1)...(19): siRNA sense strand
gcauuugccuuggcuaaca

SEQ ID NO: 2104164 - RNA, 19 nt, Homo sapiens
  misc_RNA (1)...(19): siRNA sense strand
gacaaagcauucaaagaac

SEQ ID NO: 2104165 - RNA, 19 nt, Homo sapiens
  misc_RNA (1)...(19): siRNA sense strand
gaagaggaaggcaaagcaa

SEQ ID NO: 2104166 - RNA, 19 nt, Homo sapiens
  misc_RNA (1)...(19): siRNA sense strand
ugauagccauguuagagaa

SEQ ID NO: 2104167 - RNA, 19 nt, Homo sapiens
  misc_RNA (1)...(19): siRNA sense strand
gaaucaggauaaacaaagg

SEQ ID NO: 2104168 - RNA, 19 nt, Homo sapiens
  misc_RNA (1)...(19): siRNA sense strand
gugaagaaacgaacagaga

SEQ ID NO: 2104169 - RNA, 19 nt, Homo sapiens
  misc_RNA (1)...(19): siRNA sense strand
gaccagaggcccaagaaca

SEQ ID NO: 2104170 - RNA, 19 nt, Homo sapiens
  misc_RNA (1)...(19): siRNA sense strand
gaagaaacgaacagagaag

SEQ ID NO: 2104171 - RNA, 19 nt, Homo sapiens
  misc_RNA (1)...(19): siRNA sense strand
cuaaucugcucaccaggaa

SEQ ID NO: 2104172 - RNA, 19 nt, Homo sapiens
  misc_RNA (1)...(19): siRNA sense strand
ggaaggcaaagcaaaggaa

SEQ ID NO: 2104173 - RNA, 19 nt, Homo sapiens
  misc_RNA (1)...(19): siRNA sense strand
acaaagcauucaaagaaca

SEQ ID NO: 2104174 - RNA, 19 nt, Homo sapiens
  misc_RNA (1)...(19): siRNA sense strand
acaacacucuccugaagau

SEQ ID NO: 2104175 - RNA, 19 nt, Homo sapiens
  misc_RNA (1)...(19): siRNA sense strand
caaacaacacucuccugaa

SEQ ID NO: 2104176 - RNA, 19 nt, Homo sapiens
  misc_RNA (1)...(19): siRNA sense strand
ccaggaaucaggauaaaca

SEQ ID NO: 2104177 - RNA, 19 nt, Homo sapiens
  misc_RNA (1)...(19): siRNA sense strand
aggagaagaugauggugaa

SEQ ID NO: 2104178 - RNA, 19 nt, Homo sapiens
  misc_RNA (1)...(19): siRNA sense strand
uuacuggacuuugucaaug

SEQ ID NO: 2104179 - RNA, 19 nt, Homo sapiens
  misc_RNA (1)...(19): siRNA sense strand
ccaagaacaaagugagaaa

SEQ ID NO: 2104180 - RNA, 19 nt, Homo sapiens
  misc_RNA (1)...(19): siRNA sense strand
caaagaacagagagacaga

SEQ ID NO: 2104181 - RNA, 19 nt, Homo sapiens
  misc_RNA (1)...(19): siRNA sense strand
gagaagaugauggugaaga

SEQ ID NO: 2104182 - RNA, 19 nt, Homo sapiens
  misc_RNA (1)...(19): siRNA sense strand
aagaagaagaugaugauga

SEQ ID NO: 2104183 - RNA, 19 nt, Homo sapiens
  misc_RNA (1)...(19): siRNA sense strand
gggugcagaugagaaugua

SEQ ID NO: 2104184 - RNA, 19 nt, Homo sapiens
  misc_RNA (1)...(19): siRNA sense strand
gaaauguuacuggacuuug

SEQ ID NO: 2104185 - RNA, 19 nt, Homo sapiens
  misc_RNA (1)...(19): siRNA sense strand
ugaagaaacgaacagagaa

SEQ ID NO: 2104186 - RNA, 19 nt, Homo sapiens
  misc_RNA (1)...(19): siRNA sense strand
aagaagaugaugaugauga

SEQ ID NO: 2104187 - RNA, 19 nt, Homo sapiens
  misc_RNA (1)...(19): siRNA sense strand
cagagaagaggaaggcaaa

SEQ ID NO: 2104188 - RNA, 19 nt, Homo sapiens
  misc_RNA (1)...(19): siRNA sense strand
caccaggaaucaggauaaa

SEQ ID NO: 2104189 - RNA, 19 nt, Homo sapiens
  misc_RNA (1)...(19): siRNA sense strand
gcaauauccaagaaacaga

SEQ ID NO: 2104190 - RNA, 19 nt, Homo sapiens
  misc_RNA (1)...(19): siRNA sense strand
ugaagaagaagaagaugau

SEQ ID NO: 2104191 - RNA, 19 nt, Homo sapiens
  misc_RNA (1)...(19): siRNA sense strand
ugccuuggcuaacauguug

SEQ ID NO: 2104192 - RNA, 19 nt, Homo sapiens
  misc_RNA (1)...(19): siRNA sense strand
aaauguuacuggacuuugu

SEQ ID NO: 2104193 - RNA, 19 nt, Homo sapiens
  misc_RNA (1)...(19): siRNA sense strand
ucaccaggaaucaggauaa

SEQ ID NO: 2104194 - RNA, 19 nt, Homo sapiens
  misc_RNA (1)...(19): siRNA sense strand
ucaccacucucaacaucga

SEQ ID NO: 2104195 - RNA, 19 nt, Homo sapiens
  misc_RNA (1)...(19): siRNA sense strand
cgacgaaggagaagaugau

SEQ ID NO: 2104196 - RNA, 19 nt, Homo sapiens
  misc_RNA (1)...(19): siRNA sense strand
ggaggacccaagccagauu

SEQ ID NO: 2104197 - RNA, 19 nt, Homo sapiens
  misc_RNA (1)...(19): siRNA sense strand
gaagagagugaagaaacga

SEQ ID NO: 2104198 - RNA, 19 nt, Homo sapiens
  misc_RNA (1)...(19): siRNA sense strand
caaugugggugcagaugag

SEQ ID NO: 2104199 - RNA, 19 nt, Homo sapiens
  misc_RNA (1)...(19): siRNA sense strand
gaagaagaagaugaugaug

SEQ ID NO: 2104200 - RNA, 19 nt, Homo sapiens
  misc_RNA (1)...(19): siRNA sense strand
gcuggaagaggaacgaguu

SEQ ID NO: 2104201 - RNA, 19 nt, Homo sapiens
  misc_RNA (1)...(19): siRNA sense strand
gaagaagaagaagaugaug

SEQ ID NO: 2104202 - RNA, 19 nt, Homo sapiens
  misc_RNA (1)...(19): siRNA sense strand
gaagaugauggugaagaga

SEQ ID NO: 2104203 - RNA, 19 nt, Homo sapiens
  misc_RNA (1)...(19): siRNA sense strand
cgaguccaauuucaucaca

SEQ ID NO: 2104204 - RNA, 19 nt, Homo sapiens
  misc_RNA (1)...(19): siRNA sense strand
ggacuuugucaaugcaaug

SEQ ID NO: 2104205 - RNA, 19 nt, Homo sapiens
  misc_RNA (1)...(19): siRNA sense strand
gccagcagguaacugacaa

SEQ ID NO: 2104206 - RNA, 19 nt, Homo sapiens
  misc_RNA (1)...(19): siRNA sense strand
ugaagagagugaagaaacg

SEQ ID NO: 2104207 - RNA, 19 nt, Homo sapiens
  misc_RNA (1)...(19): siRNA sense strand
agaagaugauggugaagag

SEQ ID NO: 2104208 - RNA, 19 nt, Homo sapiens
  misc_RNA (1)...(19): siRNA sense strand
agaugaagaagaugaagaa

SEQ ID NO: 2104209 - RNA, 19 nt, Homo sapiens
  misc_RNA (1)...(19): siRNA sense strand
ggauaaacaaaggcagaaa

SEQ ID NO: 2104210 - RNA, 19 nt, Homo sapiens
  misc_RNA (1)...(19): siRNA sense strand
caaagggcagcagcaauau

SEQ ID NO: 2104211 - RNA, 19 nt, Homo sapiens
  misc_RNA (1)...(19): siRNA sense strand
ugaugaugaugacgacgaa

SEQ ID NO: 2104212 - RNA, 19 nt, Homo sapiens
  misc_RNA (1)...(19): siRNA sense strand
aaaaugauccugacaugaa

SEQ ID NO: 2104213 - RNA, 19 nt, Homo sapiens
  misc_RNA (1)...(19): siRNA sense strand
agaagaagaagaugaugau

SEQ ID NO: 2104214 - RNA, 19 nt, Homo sapiens
  misc_RNA (1)...(19): siRNA sense strand
uaacugacaaagcauucaa

SEQ ID NO: 2104215 - RNA, 19 nt, Homo sapiens
  misc_RNA (1)...(19): siRNA sense strand
caacucaaggaacagaaga

SEQ ID NO: 2104216 - RNA, 19 nt, Homo sapiens
  misc_RNA (1)...(19): siRNA sense strand
acgaguuccugucaccuuu

SEQ ID NO: 2104217 - RNA, 19 nt, Homo sapiens
  misc_RNA (1)...(19): siRNA sense strand
gggauuguggccaucauga

SEQ ID NO: 2104218 - RNA, 19 nt, Homo sapiens
  misc_RNA (1)...(19): siRNA sense strand
ccaaugugggugcagauga

SEQ ID NO: 2104219 - RNA, 19 nt, Homo sapiens
  misc_RNA (1)...(19): siRNA sense strand
caaccugaacaacauugaa

SEQ ID NO: 2104220 - RNA, 19 nt, Homo sapiens
  misc_RNA (1)...(19): siRNA sense strand
uacaaggccuucaggaaac

SEQ ID NO: 2104221 - RNA, 19 nt, Homo sapiens
  misc_RNA (1)...(19): siRNA sense strand
cgaaggagaagaugauggu

SEQ ID NO: 2104222 - RNA, 19 nt, Homo sapiens
  misc_RNA (1)...(19): siRNA sense strand
gcugauagccauguuagag

SEQ ID NO: 2104223 - RNA, 19 nt, Homo sapiens
  misc_RNA (1)...(19): siRNA sense strand
ggaacagaagaagcugaua

SEQ ID NO: 2104224 - RNA, 19 nt, Homo sapiens
  misc_RNA (1)...(19): siRNA sense strand
gauaaacaaaggcagaaac

SEQ ID NO: 2104225 - RNA, 19 nt, Homo sapiens
  misc_RNA (1)...(19): siRNA sense strand
aagaagaagaagaugauga

SEQ ID NO: 2104226 - RNA, 19 nt, Homo sapiens
  misc_RNA (1)...(19): siRNA sense strand
gaguuccugucaccuuugu

SEQ ID NO: 2104227 - RNA, 19 nt, Homo sapiens
  misc_RNA (1)...(19): siRNA sense strand
agaagaugaagaagaagaa

SEQ ID NO: 2104228 - RNA, 19 nt, Homo sapiens
  misc_RNA (1)...(19): siRNA sense strand
gugaagagagugaagaaac

SEQ ID NO: 2104229 - RNA, 19 nt, Homo sapiens
  misc_RNA (1)...(19): siRNA sense strand
ugaagaagaugaagaagaa

SEQ ID NO: 2104230 - RNA, 19 nt, Homo sapiens
  misc_RNA (1)...(19): siRNA sense strand
gcagguaacugacaaagca

SEQ ID NO: 2104231 - RNA, 19 nt, Homo sapiens
  misc_RNA (1)...(19): siRNA sense strand
ugacaaagcauucaaagaa

SEQ ID NO: 2104232 - RNA, 19 nt, Homo sapiens
  misc_RNA (1)...(19): siRNA sense strand
uaacugagcuucgguuuca

SEQ ID NO: 2104233 - RNA, 19 nt, Homo sapiens
  misc_RNA (1)...(19): siRNA sense strand
gcuaacauguugcgugaaa

SEQ ID NO: 2104234 - RNA, 19 nt, Homo sapiens
  misc_RNA (1)...(19): siRNA sense strand
guacaaggccuucaggaaa

SEQ ID NO: 2104235 - RNA, 19 nt, Homo sapiens
  misc_RNA (1)...(19): siRNA sense strand
ugaggugucuccaguuuaa

SEQ ID NO: 2104236 - RNA, 19 nt, Homo sapiens
  misc_RNA (1)...(19): siRNA sense strand
ugaaggaacucaaccugaa

SEQ ID NO: 2104237 - RNA, 19 nt, Homo sapiens
  misc_RNA (1)...(19): siRNA sense strand
ccagaaugguggucacuaa

SEQ ID NO: 2104238 - RNA, 19 nt, Homo sapiens
  misc_RNA (1)...(19): siRNA sense strand
ucaaagggcagcagcaaua

SEQ ID NO: 2104239 - RNA, 19 nt, Homo sapiens
  misc_RNA (1)...(19): siRNA sense strand
gaacucaaccugaacaaca

SEQ ID NO: 2104240 - RNA, 19 nt, Homo sapiens
  misc_RNA (1)...(19): siRNA sense strand
gcaaaggaacaaauuagaa

SEQ ID NO: 2104241 - RNA, 19 nt, Homo sapiens
  misc_RNA (1)...(19): siRNA sense strand
agaaacagaugaagaagau

SEQ ID NO: 2104242 - RNA, 19 nt, Homo sapiens
  misc_RNA (1)...(19): siRNA sense strand
gagcuucgguuucacaauc

SEQ ID NO: 2104243 - RNA, 19 nt, Homo sapiens
  misc_RNA (1)...(19): siRNA sense strand
aaacaacacucuccugaag

SEQ ID NO: 2104244 - RNA, 19 nt, Homo sapiens
  misc_RNA (1)...(19): siRNA sense strand
ccaagaaacagaugaagaa

SEQ ID NO: 2104245 - RNA, 19 nt, Homo sapiens
  misc_RNA (1)...(19): siRNA sense strand
gaaaacauccccaaagaaa

SEQ ID NO: 2104246 - RNA, 19 nt, Homo sapiens
  misc_RNA (1)...(19): siRNA sense strand
agaagaagaugaugaugau

SEQ ID NO: 2104247 - RNA, 19 nt, Homo sapiens
  misc_RNA (1)...(19): siRNA sense strand
caugaggugucuccaguuu

SEQ ID NO: 2104248 - RNA, 19 nt, Homo sapiens
  misc_RNA (1)...(19): siRNA sense strand
gaacagaagaagcugauag

SEQ ID NO: 2104249 - RNA, 19 nt, Homo sapiens
  misc_RNA (1)...(19): siRNA sense strand
caaagcaaaggaacaaauu

SEQ ID NO: 2104250 - RNA, 19 nt, Homo sapiens
  misc_RNA (1)...(19): siRNA sense strand
ccaauuucaucacagguaa

SEQ ID NO: 2104251 - RNA, 19 nt, Homo sapiens
  misc_RNA (1)...(19): siRNA sense strand
caacaucgaguccaauuuc

SEQ ID NO: 2104252 - RNA, 19 nt, Homo sapiens
  misc_RNA (1)...(19): siRNA sense strand
caucacagguaaagggauu

SEQ ID NO: 2104253 - RNA, 19 nt, Homo sapiens
  misc_RNA (1)...(19): siRNA sense strand
gaaugguggucacuaaucu

SEQ ID NO: 2104254 - RNA, 19 nt, Homo sapiens
  misc_RNA (1)...(19): siRNA sense strand
cagcagcaauauccaagaa

SEQ ID NO: 2104255 - RNA, 19 nt, Homo sapiens
  misc_RNA (1)...(19): siRNA sense strand
gcaaagcaaaggaacaaau

SEQ ID NO: 2104256 - RNA, 19 nt, Homo sapiens
  misc_RNA (1)...(19): siRNA sense strand
uuaaugagacgcuaacuga

SEQ ID NO: 2104257 - RNA, 19 nt, Homo sapiens
  misc_RNA (1)...(19): siRNA sense strand
gaagcugauagccauguua

SEQ ID NO: 2104258 - RNA, 19 nt, Homo sapiens
  misc_RNA (1)...(19): siRNA sense strand
gaacaacauugaaaacauc

SEQ ID NO: 2104259 - RNA, 19 nt, Homo sapiens
  misc_RNA (1)...(19): siRNA sense strand
gcagcaauauccaagaaac

SEQ ID NO: 2104260 - RNA, 19 nt, Homo sapiens
  misc_RNA (1)...(19): siRNA sense strand
aaacagaugaagaagauga

SEQ ID NO: 2104261 - RNA, 19 nt, Homo sapiens
  misc_RNA (1)...(19): siRNA sense strand
ggaaucaggauaaacaaag

SEQ ID NO: 2104262 - RNA, 19 nt, Homo sapiens
  misc_RNA (1)...(19): siRNA sense strand
caucaccacucucaacauc

SEQ ID NO: 2104263 - RNA, 19 nt, Homo sapiens
  misc_RNA (1)...(19): siRNA sense strand
gcauuugccuuggcuaaca

SEQ ID NO: 2104264 - RNA, 19 nt, Homo sapiens
  misc_RNA (1)...(19): siRNA sense strand
gacaaagcauucaaagaac

SEQ ID NO: 2104265 - RNA, 19 nt, Homo sapiens
  misc_RNA (1)...(19): siRNA sense strand
gaagaggaaggcaaagcaa

SEQ ID NO: 2104266 - RNA, 19 nt, Homo sapiens
  misc_RNA (1)...(19): siRNA sense strand
ugauagccauguuagagaa

SEQ ID NO: 2104267 - RNA, 19 nt, Homo sapiens
  misc_RNA (1)...(19): siRNA sense strand
gaaucaggauaaacaaagg

SEQ ID NO: 2104268 - RNA, 19 nt, Homo sapiens
  misc_RNA (1)...(19): siRNA sense strand
gugaagaaacgaacagaga

SEQ ID NO: 2104269 - RNA, 19 nt, Homo sapiens
  misc_RNA (1)...(19): siRNA sense strand
gaccagaggcccaagaaca

SEQ ID NO: 2104270 - RNA, 19 nt, Homo sapiens
  misc_RNA (1)...(19): siRNA sense strand
gaagaaacgaacagagaag

SEQ ID NO: 2104271 - RNA, 19 nt, Homo sapiens
  misc_RNA (1)...(19): siRNA sense strand
cuaaucugcucaccaggaa

SEQ ID NO: 2104272 - RNA, 19 nt, Homo sapiens
  misc_RNA (1)...(19): siRNA sense strand
ggaaggcaaagcaaaggaa

SEQ ID NO: 2104273 - RNA, 19 nt, Homo sapiens
  misc_RNA (1)...(19): siRNA sense strand
acaaagcauucaaagaaca

SEQ ID NO: 2104274 - RNA, 19 nt, Homo sapiens
  misc_RNA (1)...(19): siRNA sense strand
acaacacucuccugaagau

SEQ ID NO: 2104275 - RNA, 19 nt, Homo sapiens
  misc_RNA (1)...(19): siRNA sense strand
caaacaacacucuccugaa

SEQ ID NO: 2104276 - RNA, 19 nt, Homo sapiens
  misc_RNA (1)...(19): siRNA sense strand
ccaggaaucaggauaaaca

SEQ ID NO: 2104277 - RNA, 19 nt, Homo sapiens
  misc_RNA (1)...(19): siRNA sense strand
aggagaagaugauggugaa

SEQ ID NO: 2104278 - RNA, 19 nt, Homo sapiens
  misc_RNA (1)...(19): siRNA sense strand
uuacuggacuuugucaaug

SEQ ID NO: 2104279 - RNA, 19 nt, Homo sapiens
  misc_RNA (1)...(19): siRNA sense strand
ccaagaacaaagugagaaa

SEQ ID NO: 2104280 - RNA, 19 nt, Homo sapiens
  misc_RNA (1)...(19): siRNA sense strand
caaagaacagagagacaga

SEQ ID NO: 2104281 - RNA, 19 nt, Homo sapiens
  misc_RNA (1)...(19): siRNA sense strand
gagaagaugauggugaaga

SEQ ID NO: 2104282 - RNA, 19 nt, Homo sapiens
  misc_RNA (1)...(19): siRNA sense strand
aagaagaagaugaugauga

SEQ ID NO: 2104283 - RNA, 19 nt, Homo sapiens
  misc_RNA (1)...(19): siRNA sense strand
gggugcagaugagaaugua

SEQ ID NO: 2104284 - RNA, 19 nt, Homo sapiens
  misc_RNA (1)...(19): siRNA sense strand
gaaauguuacuggacuuug

SEQ ID NO: 2104285 - RNA, 19 nt, Homo sapiens
  misc_RNA (1)...(19): siRNA sense strand
ugaagaaacgaacagagaa

SEQ ID NO: 2104286 - RNA, 19 nt, Homo sapiens
  misc_RNA (1)...(19): siRNA sense strand
aagaagaugaugaugauga

SEQ ID NO: 2104287 - RNA, 19 nt, Homo sapiens
  misc_RNA (1)...(19): siRNA sense strand
cagagaagaggaaggcaaa

SEQ ID NO: 2104288 - RNA, 19 nt, Homo sapiens
  misc_RNA (1)...(19): siRNA sense strand
caccaggaaucaggauaaa

SEQ ID NO: 2104289 - RNA, 19 nt, Homo sapiens
  misc_RNA (1)...(19): siRNA sense strand
gcaauauccaagaaacaga

SEQ ID NO: 2104290 - RNA, 19 nt, Homo sapiens
  misc_RNA (1)...(19): siRNA sense strand
ugaagaagaagaagaugau

SEQ ID NO: 2104291 - RNA, 19 nt, Homo sapiens
  misc_RNA (1)...(19): siRNA sense strand
ugccuuggcuaacauguug

SEQ ID NO: 2104292 - RNA, 19 nt, Homo sapiens
  misc_RNA (1)...(19): siRNA sense strand
aaauguuacuggacuuugu

SEQ ID NO: 2104293 - RNA, 19 nt, Homo sapiens
  misc_RNA (1)...(19): siRNA sense strand
ucaccaggaaucaggauaa

SEQ ID NO: 2104294 - RNA, 19 nt, Homo sapiens
  misc_RNA (1)...(19): siRNA sense strand
ucaccacucucaacaucga

SEQ ID NO: 2104295 - RNA, 19 nt, Homo sapiens
  misc_RNA (1)...(19): siRNA sense strand
cgacgaaggagaagaugau

SEQ ID NO: 2104296 - RNA, 19 nt, Homo sapiens
  misc_RNA (1)...(19): siRNA sense strand
ggaggacccaagccagauu

SEQ ID NO: 2104297 - RNA, 19 nt, Homo sapiens
  misc_RNA (1)...(19): siRNA sense strand
gaagagagugaagaaacga

SEQ ID NO: 2104298 - RNA, 19 nt, Homo sapiens
  misc_RNA (1)...(19): siRNA sense strand
caaugugggugcagaugag

SEQ ID NO: 2104299 - RNA, 19 nt, Homo sapiens
  misc_RNA (1)...(19): siRNA sense strand
gcuggaagaggaacgaguu

SEQ ID NO: 2104300 - RNA, 19 nt, Homo sapiens
  misc_RNA (1)...(19): siRNA sense strand
gaagaagaagaugaugaug

SEQ ID NO: 2104301 - RNA, 19 nt, Homo sapiens
  misc_RNA (1)...(19): siRNA sense strand
gaagaagaagaagaugaug

SEQ ID NO: 2104302 - RNA, 19 nt, Homo sapiens
  misc_RNA (1)...(19): siRNA sense strand
agaagaugauggugaagag

SEQ ID NO: 2104303 - RNA, 19 nt, Homo sapiens
  misc_RNA (1)...(19): siRNA sense strand
cgaguccaauuucaucaca

SEQ ID NO: 2104304 - RNA, 19 nt, Homo sapiens
  misc_RNA (1)...(19): siRNA sense strand
ggacuuugucaaugcaaug

SEQ ID NO: 2104305 - RNA, 19 nt, Homo sapiens
  misc_RNA (1)...(19): siRNA sense strand
gccagcagguaacugacaa

SEQ ID NO: 2104306 - RNA, 19 nt, Homo sapiens
  misc_RNA (1)...(19): siRNA sense strand
ugaagagagugaagaaacg

SEQ ID NO: 2104307 - RNA, 19 nt, Homo sapiens
  misc_RNA (1)...(19): siRNA sense strand
gaagaugauggugaagaga

SEQ ID NO: 2104308 - RNA, 19 nt, Homo sapiens
  misc_RNA (1)...(19): siRNA sense strand
aaaaugauccugacaugaa

SEQ ID NO: 2104309 - RNA, 19 nt, Homo sapiens
  misc_RNA (1)...(19): siRNA sense strand
ggauaaacaaaggcagaaa

SEQ ID NO: 2104310 - RNA, 19 nt, Homo sapiens
  misc_RNA (1)...(19): siRNA sense strand
ugaugaugaugacgacgaa

SEQ ID NO: 2104311 - RNA, 19 nt, Homo sapiens
  misc_RNA (1)...(19): siRNA sense strand
agaugaagaagaugaagaa

SEQ ID NO: 2104312 - RNA, 19 nt, Homo sapiens
  misc_RNA (1)...(19): siRNA sense strand
caaagggcagcagcaauau

SEQ ID NO: 2104313 - RNA, 19 nt, Homo sapiens
  misc_RNA (1)...(19): siRNA sense strand
agaagaagaagaugaugau

SEQ ID NO: 2104314 - RNA, 19 nt, Homo sapiens
  misc_RNA (1)...(19): siRNA sense strand
uaacugacaaagcauucaa

SEQ ID NO: 2104315 - RNA, 19 nt, Homo sapiens
  misc_RNA (1)...(19): siRNA sense strand
caacucaaggaacagaaga

SEQ ID NO: 2104316 - RNA, 19 nt, Homo sapiens
  misc_RNA (1)...(19): siRNA sense strand
acgaguuccugucaccuuu

SEQ ID NO: 2104317 - RNA, 19 nt, Homo sapiens
  misc_RNA (1)...(19): siRNA sense strand
gggauuguggccaucauga

SEQ ID NO: 2104318 - RNA, 19 nt, Homo sapiens
  misc_RNA (1)...(19): siRNA sense strand
ccaaugugggugcagauga

SEQ ID NO: 2104319 - RNA, 19 nt, Homo sapiens
  misc_RNA (1)...(19): siRNA sense strand
caaccugaacaacauugaa

SEQ ID NO: 2104320 - RNA, 19 nt, Homo sapiens
  misc_RNA (1)...(19): siRNA sense strand
uacaaggccuucaggaaac

SEQ ID NO: 2104321 - RNA, 19 nt, Homo sapiens
  misc_RNA (1)...(19): siRNA sense strand
cgaaggagaagaugauggu

SEQ ID NO: 2104322 - RNA, 19 nt, Homo sapiens
  misc_RNA (1)...(19): siRNA sense strand
gcugauagccauguuagag

SEQ ID NO: 2104323 - RNA, 19 nt, Homo sapiens
  misc_RNA (1)...(19): siRNA sense strand
ggaacagaagaagcugaua

SEQ ID NO: 2104324 - RNA, 19 nt, Homo sapiens
  misc_RNA (1)...(19): siRNA sense strand
gauaaacaaaggcagaaac

SEQ ID NO: 2104325 - RNA, 19 nt, Homo sapiens
  misc_RNA (1)...(19): siRNA sense strand
aagaagaagaagaugauga

SEQ ID NO: 2104326 - RNA, 19 nt, Homo sapiens
  misc_RNA (1)...(19): siRNA sense strand
gaguuccugucaccuuugu

SEQ ID NO: 2104327 - RNA, 19 nt, Homo sapiens
  misc_RNA (1)...(19): siRNA sense strand
agaagaugaagaagaagaa

SEQ ID NO: 2104328 - RNA, 19 nt, Homo sapiens
  misc_RNA (1)...(19): siRNA sense strand
gugaagagagugaagaaac

SEQ ID NO: 2104329 - RNA, 19 nt, Homo sapiens
  misc_RNA (1)...(19): siRNA sense strand
caaagaaacuugccaauga

SEQ ID NO: 2104330 - RNA, 19 nt, Homo sapiens
  misc_RNA (1)...(19): siRNA sense strand
caaauuagaugacaacuug

SEQ ID NO: 2104331 - RNA, 19 nt, Homo sapiens
  misc_RNA (1)...(19): siRNA sense strand
ggaaacagcuggagaacuu

SEQ ID NO: 2104332 - RNA, 19 nt, Homo sapiens
  misc_RNA (1)...(19): siRNA sense strand
gcacagaaauccucgauga

SEQ ID NO: 2104333 - RNA, 19 nt, Homo sapiens
  misc_RNA (1)...(19): siRNA sense strand
gaagaaggagaaacuauua

SEQ ID NO: 2104334 - RNA, 19 nt, Homo sapiens
  misc_RNA (1)...(19): siRNA sense strand
ccauagggcugucggauua

SEQ ID NO: 2104335 - RNA, 19 nt, Homo sapiens
  misc_RNA (1)...(19): siRNA sense strand
ggaaugguguuuacucaaa

SEQ ID NO: 2104336 - RNA, 19 nt, Homo sapiens
  misc_RNA (1)...(19): siRNA sense strand
gaaaccagcuggaagacaa

SEQ ID NO: 2104337 - RNA, 19 nt, Homo sapiens
  misc_RNA (1)...(19): siRNA sense strand
gcaguuagaucaccgaguu

SEQ ID NO: 2104338 - RNA, 19 nt, Homo sapiens
  misc_RNA (1)...(19): siRNA sense strand
gguggaagcugcaaagaaa

SEQ ID NO: 2104339 - RNA, 19 nt, Homo sapiens
  misc_RNA (1)...(19): siRNA sense strand
gaugacgggucuucuuaua

SEQ ID NO: 2104340 - RNA, 19 nt, Homo sapiens
  misc_RNA (1)...(19): siRNA sense strand
gaaagucguccaucaauga

SEQ ID NO: 2104341 - RNA, 19 nt, Homo sapiens
  misc_RNA (1)...(19): siRNA sense strand
ggacagcgauaagccauuu

SEQ ID NO: 2104342 - RNA, 19 nt, Homo sapiens
  misc_RNA (1)...(19): siRNA sense strand
gaaaccaucuucaaguuag

SEQ ID NO: 2104343 - RNA, 19 nt, Homo sapiens
  misc_RNA (1)...(19): siRNA sense strand
gcacuuugcugugagguuu

SEQ ID NO: 2104344 - RNA, 19 nt, Homo sapiens
  misc_RNA (1)...(19): siRNA sense strand
ggugaagccucggaaguua

SEQ ID NO: 2104345 - RNA, 19 nt, Homo sapiens
  misc_RNA (1)...(19): siRNA sense strand
gaaaugcuguccacacaca

SEQ ID NO: 2104346 - RNA, 19 nt, Homo sapiens
  misc_RNA (1)...(19): siRNA sense strand
cgaauuagguguggaaaga

SEQ ID NO: 2104347 - RNA, 19 nt, Homo sapiens
  misc_RNA (1)...(19): siRNA sense strand
ugaagaagauccugcuuug

SEQ ID NO: 2104348 - RNA, 19 nt, Homo sapiens
  misc_RNA (1)...(19): siRNA sense strand
gaaaacaaguugccacaaa

SEQ ID NO: 2104349 - RNA, 19 nt, Homo sapiens
  misc_RNA (1)...(19): siRNA sense strand
gcgaaaccaucuucaaguu

SEQ ID NO: 2104350 - RNA, 19 nt, Homo sapiens
  misc_RNA (1)...(19): siRNA sense strand
gagaaaugcuguccacaca

SEQ ID NO: 2104351 - RNA, 19 nt, Homo sapiens
  misc_RNA (1)...(19): siRNA sense strand
gaaagaaacccagccagaa

SEQ ID NO: 2104352 - RNA, 19 nt, Homo sapiens
  misc_RNA (1)...(19): siRNA sense strand
gaagacaaccuggagagua

SEQ ID NO: 2104353 - RNA, 19 nt, Homo sapiens
  misc_RNA (1)...(19): siRNA sense strand
gugcaaacaugguaugcua

SEQ ID NO: 2104354 - RNA, 19 nt, Homo sapiens
  misc_RNA (1)...(19): siRNA sense strand
ugcaagaacuggagaguaa

SEQ ID NO: 2104355 - RNA, 19 nt, Homo sapiens
  misc_RNA (1)...(19): siRNA sense strand
caggaaagauuuaaagaca

SEQ ID NO: 2104356 - RNA, 19 nt, Homo sapiens
  misc_RNA (1)...(19): siRNA sense strand
guacugcguucaaauuaga

SEQ ID NO: 2104357 - RNA, 19 nt, Homo sapiens
  misc_RNA (1)...(19): siRNA sense strand
ucucaagacucagaaguua

SEQ ID NO: 2104358 - RNA, 19 nt, Homo sapiens
  misc_RNA (1)...(19): siRNA sense strand
gcaauggauuugacagaga

SEQ ID NO: 2104359 - RNA, 19 nt, Homo sapiens
  misc_RNA (1)...(19): siRNA sense strand
gcaaguaauggcaguuuaa

SEQ ID NO: 2104360 - RNA, 19 nt, Homo sapiens
  misc_RNA (1)...(19): siRNA sense strand
cgacuuacgguguccauua

SEQ ID NO: 2104361 - RNA, 19 nt, Homo sapiens
  misc_RNA (1)...(19): siRNA sense strand
gcagauccuuucacgaaga

SEQ ID NO: 2104362 - RNA, 19 nt, Homo sapiens
  misc_RNA (1)...(19): siRNA sense strand
ccacgaaggauuucaguuu

SEQ ID NO: 2104363 - RNA, 19 nt, Homo sapiens
  misc_RNA (1)...(19): siRNA sense strand
ccacaaacuuucaccuuca

SEQ ID NO: 2104364 - RNA, 19 nt, Homo sapiens
  misc_RNA (1)...(19): siRNA sense strand
gaggaaugguguuuacuca

SEQ ID NO: 2104365 - RNA, 19 nt, Homo sapiens
  misc_RNA (1)...(19): siRNA sense strand
ggagaaacuauuacaagaa

SEQ ID NO: 2104366 - RNA, 19 nt, Homo sapiens
  misc_RNA (1)...(19): siRNA sense strand
ggcaaguaauggcaguuua

SEQ ID NO: 2104367 - RNA, 19 nt, Homo sapiens
  misc_RNA (1)...(19): siRNA sense strand
uucaaagccuggaacauua

SEQ ID NO: 2104368 - RNA, 19 nt, Homo sapiens
  misc_RNA (1)...(19): siRNA sense strand
guccaucaaugaacaguuu

SEQ ID NO: 2104369 - RNA, 19 nt, Homo sapiens
  misc_RNA (1)...(19): siRNA sense strand
uagaugagauugcaaugga

SEQ ID NO: 2104370 - RNA, 19 nt, Homo sapiens
  misc_RNA (1)...(19): siRNA sense strand
gaaagcaagauuacacaga

SEQ ID NO: 2104371 - RNA, 19 nt, Homo sapiens
  misc_RNA (1)...(19): siRNA sense strand
ccuaguggcuucacauuuc

SEQ ID NO: 2104372 - RNA, 19 nt, Homo sapiens
  misc_RNA (1)...(19): siRNA sense strand
cagcagauccuuucacgaa

SEQ ID NO: 2104373 - RNA, 19 nt, Homo sapiens
  misc_RNA (1)...(19): siRNA sense strand
gagcgaauccauuucagaa

SEQ ID NO: 2104374 - RNA, 19 nt, Homo sapiens
  misc_RNA (1)...(19): siRNA sense strand
gaaaccaggcccaaccauu

SEQ ID NO: 2104375 - RNA, 19 nt, Homo sapiens
  misc_RNA (1)...(19): siRNA sense strand
cgaaaccaucuucaaguua

SEQ ID NO: 2104376 - RNA, 19 nt, Homo sapiens
  misc_RNA (1)...(19): siRNA sense strand
aaaccaggcccaaccauuu

SEQ ID NO: 2104377 - RNA, 19 nt, Homo sapiens
  misc_RNA (1)...(19): siRNA sense strand
caaguuagcagcguuuauu

SEQ ID NO: 2104378 - RNA, 19 nt, Homo sapiens
  misc_RNA (1)...(19): siRNA sense strand
ccaaugagccagaccuuug

SEQ ID NO: 2104379 - RNA, 19 nt, Homo sapiens
  misc_RNA (1)...(19): siRNA sense strand
caaggaaggcugcugcaaa

SEQ ID NO: 2104380 - RNA, 19 nt, Homo sapiens
  misc_RNA (1)...(19): siRNA sense strand
ugacgggucuucuuauaca

SEQ ID NO: 2104381 - RNA, 19 nt, Homo sapiens
  misc_RNA (1)...(19): siRNA sense strand
gaacgucacggcuuagcaa

SEQ ID NO: 2104382 - RNA, 19 nt, Homo sapiens
  misc_RNA (1)...(19): siRNA sense strand
guauugagcgaauccauuu

SEQ ID NO: 2104383 - RNA, 19 nt, Homo sapiens
  misc_RNA (1)...(19): siRNA sense strand
uuacacagaugcgaugaaa

SEQ ID NO: 2104384 - RNA, 19 nt, Homo sapiens
  misc_RNA (1)...(19): siRNA sense strand
gcccaaacuucuagcaaga

SEQ ID NO: 2104385 - RNA, 19 nt, Homo sapiens
  misc_RNA (1)...(19): siRNA sense strand
acuagaacgucacggcuua

SEQ ID NO: 2104386 - RNA, 19 nt, Homo sapiens
  misc_RNA (1)...(19): siRNA sense strand
aaagaaacccagccagaaa

SEQ ID NO: 2104387 - RNA, 19 nt, Homo sapiens
  misc_RNA (1)...(19): siRNA sense strand
gauuucaguuucaagaaga

SEQ ID NO: 2104388 - RNA, 19 nt, Homo sapiens
  misc_RNA (1)...(19): siRNA sense strand
cuuacgguguccauuauua

SEQ ID NO: 2104389 - RNA, 19 nt, Homo sapiens
  misc_RNA (1)...(19): siRNA sense strand
aaacagaaagucauaggaa

SEQ ID NO: 2104390 - RNA, 19 nt, Homo sapiens
  misc_RNA (1)...(19): siRNA sense strand
uugaggagcuuaagaagau

SEQ ID NO: 2104391 - RNA, 19 nt, Homo sapiens
  misc_RNA (1)...(19): siRNA sense strand
gaaggagaaacuauuacaa

SEQ ID NO: 2104392 - RNA, 19 nt, Homo sapiens
  misc_RNA (1)...(19): siRNA sense strand
gaaaaugccaggaaagauu

SEQ ID NO: 2104393 - RNA, 19 nt, Homo sapiens
  misc_RNA (1)...(19): siRNA sense strand
gagauuauaccagugauga

SEQ ID NO: 2104394 - RNA, 19 nt, Homo sapiens
  misc_RNA (1)...(19): siRNA sense strand
gucaagcugugguucagua

SEQ ID NO: 2104395 - RNA, 19 nt, Homo sapiens
  misc_RNA (1)...(19): siRNA sense strand
ggcaaugucuauaauccuu

SEQ ID NO: 2104396 - RNA, 19 nt, Homo sapiens
  misc_RNA (1)...(19): siRNA sense strand
gcuauggcaaugucuauaa

SEQ ID NO: 2104397 - RNA, 19 nt, Homo sapiens
  misc_RNA (1)...(19): siRNA sense strand
gugguuaugucuaugagaa

SEQ ID NO: 2104398 - RNA, 19 nt, Homo sapiens
  misc_RNA (1)...(19): siRNA sense strand
ggucaaagaaacagaaugu

SEQ ID NO: 2104399 - RNA, 19 nt, Homo sapiens
  misc_RNA (1)...(19): siRNA sense strand
aaucaagcacagaguauua

SEQ ID NO: 2104400 - RNA, 19 nt, Homo sapiens
  misc_RNA (1)...(19): siRNA sense strand
ggagugagccagauguugu

SEQ ID NO: 2104401 - RNA, 19 nt, Homo sapiens
  misc_RNA (1)...(19): siRNA sense strand
aaagcaagauuacacagau

SEQ ID NO: 2104402 - RNA, 19 nt, Homo sapiens
  misc_RNA (1)...(19): siRNA sense strand
gaacacaaagggccuccaa

SEQ ID NO: 2104403 - RNA, 19 nt, Homo sapiens
  misc_RNA (1)...(19): siRNA sense strand
cagcaaacagaaagucaua

SEQ ID NO: 2104404 - RNA, 19 nt, Homo sapiens
  misc_RNA (1)...(19): siRNA sense strand
gacuggagcugcugguuca

SEQ ID NO: 2104405 - RNA, 19 nt, Homo sapiens
  misc_RNA (1)...(19): siRNA sense strand
ggacuacagcagauccuuu

SEQ ID NO: 2104406 - RNA, 19 nt, Homo sapiens
  misc_RNA (1)...(19): siRNA sense strand
aaggauaguuugaggaaug

SEQ ID NO: 2104407 - RNA, 19 nt, Homo sapiens
  misc_RNA (1)...(19): siRNA sense strand
caaguucaguaccucauuc

SEQ ID NO: 2104408 - RNA, 19 nt, Homo sapiens
  misc_RNA (1)...(19): siRNA sense strand
ggauuucaguuucaagaag

SEQ ID NO: 2104409 - RNA, 19 nt, Homo sapiens
  misc_RNA (1)...(19): siRNA sense strand
gagaguugcuggaccuagu

SEQ ID NO: 2104410 - RNA, 19 nt, Homo sapiens
  misc_RNA (1)...(19): siRNA sense strand
ggaagcaaagcaaagcaaa

SEQ ID NO: 2104411 - RNA, 19 nt, Homo sapiens
  misc_RNA (1)...(19): siRNA sense strand
ccaaacuucuagcaagaga

SEQ ID NO: 2104412 - RNA, 19 nt, Homo sapiens
  misc_RNA (1)...(19): siRNA sense strand
gcagcgaucaaguucagua

SEQ ID NO: 2104413 - RNA, 19 nt, Homo sapiens
  misc_RNA (1)...(19): siRNA sense strand
ggguacugcguucaaauua

SEQ ID NO: 2104414 - RNA, 19 nt, Homo sapiens
  misc_RNA (1)...(19): siRNA sense strand
uaugcuaacucuucucuca

SEQ ID NO: 2104415 - RNA, 19 nt, Homo sapiens
  misc_RNA (1)...(19): siRNA sense strand
gacuuacgguguccauuau

SEQ ID NO: 2104416 - RNA, 19 nt, Homo sapiens
  misc_RNA (1)...(19): siRNA sense strand
gauuauaccagugaugaaa

SEQ ID NO: 2104417 - RNA, 19 nt, Homo sapiens
  misc_RNA (1)...(19): siRNA sense strand
acaacuugcugccgaguga

SEQ ID NO: 2104418 - RNA, 19 nt, Homo sapiens
  misc_RNA (1)...(19): siRNA sense strand
aggagaaacuauuacaaga

SEQ ID NO: 2104419 - RNA, 19 nt, Homo sapiens
  misc_RNA (1)...(19): siRNA sense strand
gaaacagcuggagaacuua

SEQ ID NO: 2104420 - RNA, 19 nt, Homo sapiens
  misc_RNA (1)...(19): siRNA sense strand
aagcugugguucaguauau

SEQ ID NO: 2104421 - RNA, 19 nt, Homo sapiens
  misc_RNA (1)...(19): siRNA sense strand
gagccaccgucuuccaguu

SEQ ID NO: 2104422 - RNA, 19 nt, Homo sapiens
  misc_RNA (1)...(19): siRNA sense strand
gaaugguguuuacucaaag

SEQ ID NO: 2104423 - RNA, 19 nt, Homo sapiens
  misc_RNA (1)...(19): siRNA sense strand
ggucggaggaggucaaaga

SEQ ID NO: 2104424 - RNA, 19 nt, Homo sapiens
  misc_RNA (1)...(19): siRNA sense strand
caagaacuggagaguaauu

SEQ ID NO: 2104425 - RNA, 19 nt, Homo sapiens
  misc_RNA (1)...(19): siRNA sense strand
gcaauuagucagcaucagu

SEQ ID NO: 2104426 - RNA, 19 nt, Homo sapiens
  misc_RNA (1)...(19): siRNA sense strand
ugaaagagcaacagaacug

SEQ ID NO: 2104427 - RNA, 19 nt, Homo sapiens
  misc_RNA (1)...(19): siRNA sense strand
gcugugagguuuuacauug

SEQ ID NO: 2104428 - RNA, 19 nt, Homo sapiens
  misc_RNA (1)...(19): siRNA sense strand
uaaagaagaaggagaaacu

SEQ ID NO: 2104429 - RNA, 19 nt, Homo sapiens
  misc_RNA (1)...(19): siRNA sense strand
ggaaggagaugaacauucu

SEQ ID NO: 2104430 - RNA, 19 nt, Homo sapiens
  misc_RNA (1)...(19): siRNA sense strand
ugacugcuguaccuuauua

SEQ ID NO: 2104431 - RNA, 19 nt, Homo sapiens
  misc_RNA (1)...(19): siRNA sense strand
gaaggaggccugcaaauuc

SEQ ID NO: 2104432 - RNA, 19 nt, Homo sapiens
  misc_RNA (1)...(19): siRNA sense strand
gacacgagcucucagauau

SEQ ID NO: 2104433 - RNA, 19 nt, Homo sapiens
  misc_RNA (1)...(19): siRNA sense strand
gcaaauucaugacaggauu

SEQ ID NO: 2104434 - RNA, 19 nt, Homo sapiens
  misc_RNA (1)...(19): siRNA sense strand
gcacuagaguauacaauuc

SEQ ID NO: 2104435 - RNA, 19 nt, Homo sapiens
  misc_RNA (1)...(19): siRNA sense strand
gacaucaccuuugaacaua

SEQ ID NO: 2104436 - RNA, 19 nt, Homo sapiens
  misc_RNA (1)...(19): siRNA sense strand
ucagugagauugacccuaa

SEQ ID NO: 2104437 - RNA, 19 nt, Homo sapiens
  misc_RNA (1)...(19): siRNA sense strand
ggaacgacuuucuggauga

SEQ ID NO: 2104438 - RNA, 19 nt, Homo sapiens
  misc_RNA (1)...(19): siRNA sense strand
ggaaggaggccugcaaauu

SEQ ID NO: 2104439 - RNA, 19 nt, Homo sapiens
  misc_RNA (1)...(19): siRNA sense strand
ggacggcacuagaguauac

SEQ ID NO: 2104440 - RNA, 19 nt, Homo sapiens
  misc_RNA (1)...(19): siRNA sense strand
gaaguggaccucuacagaa

SEQ ID NO: 2104441 - RNA, 19 nt, Homo sapiens
  misc_RNA (1)...(19): siRNA sense strand
gaaggaaucuuuguaucca

SEQ ID NO: 2104442 - RNA, 19 nt, Homo sapiens
  misc_RNA (1)...(19): siRNA sense strand
ggucaacggcagagacuua

SEQ ID NO: 2104443 - RNA, 19 nt, Homo sapiens
  misc_RNA (1)...(19): siRNA sense strand
acaaggcgcucaagaagga

SEQ ID NO: 2104444 - RNA, 19 nt, Homo sapiens
  misc_RNA (1)...(19): siRNA sense strand
aaaccgacaucaccuuuga

SEQ ID NO: 2104445 - RNA, 19 nt, Homo sapiens
  misc_RNA (1)...(19): siRNA sense strand
ccaagaaucugcucuccau

SEQ ID NO: 2104446 - RNA, 19 nt, Homo sapiens
  misc_RNA (1)...(19): siRNA sense strand
ggaaguggaccucuacaga

SEQ ID NO: 2104447 - RNA, 19 nt, Homo sapiens
  misc_RNA (1)...(19): siRNA sense strand
caacgagucuuucauuucg

SEQ ID NO: 2104448 - RNA, 19 nt, Homo sapiens
  misc_RNA (1)...(19): siRNA sense strand
gaugacugcuguaccuuau

SEQ ID NO: 2104449 - RNA, 19 nt, Homo sapiens
  misc_RNA (1)...(19): siRNA sense strand
gaagaagaggaauaagaaa

SEQ ID NO: 2104450 - RNA, 19 nt, Homo sapiens
  misc_RNA (1)...(19): siRNA sense strand
gugcagguguugagaagaa

SEQ ID NO: 2104451 - RNA, 19 nt, Homo sapiens
  misc_RNA (1)...(19): siRNA sense strand
ugaagaagaggaauaagaa

SEQ ID NO: 2104452 - RNA, 19 nt, Homo sapiens
  misc_RNA (1)...(19): siRNA sense strand
gcacaaggcgcucaagaag

SEQ ID NO: 2104453 - RNA, 19 nt, Homo sapiens
  misc_RNA (1)...(19): siRNA sense strand
gaagagcgcagcggcauga

SEQ ID NO: 2104454 - RNA, 19 nt, Homo sapiens
  misc_RNA (1)...(19): siRNA sense strand
gaagacgacauugggauuu

SEQ ID NO: 2104455 - RNA, 19 nt, Homo sapiens
  misc_RNA (1)...(19): siRNA sense strand
gcaacgagucuuucauuuc

SEQ ID NO: 2104456 - RNA, 19 nt, Homo sapiens
  misc_RNA (1)...(19): siRNA sense strand
caagcagucugaccgaaau

SEQ ID NO: 2104457 - RNA, 19 nt, Homo sapiens
  misc_RNA (1)...(19): siRNA sense strand
gacgagagcacccguaaug

SEQ ID NO: 2104458 - RNA, 19 nt, Homo sapiens
  misc_RNA (1)...(19): siRNA sense strand
ggaugacugcuguaccuua

SEQ ID NO: 2104459 - RNA, 19 nt, Homo sapiens
  misc_RNA (1)...(19): siRNA sense strand
caaauucaugacaggauua

SEQ ID NO: 2104460 - RNA, 19 nt, Homo sapiens
  misc_RNA (1)...(19): siRNA sense strand
gcaagcagucugaccgaaa

SEQ ID NO: 2104461 - RNA, 19 nt, Homo sapiens
  misc_RNA (1)...(19): siRNA sense strand
cgagaaggagaccgcauua

SEQ ID NO: 2104462 - RNA, 19 nt, Homo sapiens
  misc_RNA (1)...(19): siRNA sense strand
uguggaagcuuucaagaca

SEQ ID NO: 2104463 - RNA, 19 nt, Homo sapiens
  misc_RNA (1)...(19): siRNA sense strand
gaugaacauucucgaacug

SEQ ID NO: 2104464 - RNA, 19 nt, Homo sapiens
  misc_RNA (1)...(19): siRNA sense strand
ggauuuauaucagugagau

SEQ ID NO: 2104465 - RNA, 19 nt, Homo sapiens
  misc_RNA (1)...(19): siRNA sense strand
aagacgacauugggauuua

SEQ ID NO: 2104466 - RNA, 19 nt, Homo sapiens
  misc_RNA (1)...(19): siRNA sense strand
cgacaucaccuuugaacau

SEQ ID NO: 2104467 - RNA, 19 nt, Homo sapiens
  misc_RNA (1)...(19): siRNA sense strand
guggaccucuacagaauga

SEQ ID NO: 2104468 - RNA, 19 nt, Homo sapiens
  misc_RNA (1)...(19): siRNA sense strand
guauacaauuccuuccuau

SEQ ID NO: 2104469 - RNA, 19 nt, Homo sapiens
  misc_RNA (1)...(19): siRNA sense strand
gccaugcaauucacagcua

SEQ ID NO: 2104470 - RNA, 19 nt, Homo sapiens
  misc_RNA (1)...(19): siRNA sense strand
gauugacccuaacagcauu

SEQ ID NO: 2104471 - RNA, 19 nt, Homo sapiens
  misc_RNA (1)...(19): siRNA sense strand
gaagaaaccaaaagucuga

SEQ ID NO: 2104472 - RNA, 19 nt, Homo sapiens
  misc_RNA (1)...(19): siRNA sense strand
agaagaagcacgacgaaga

SEQ ID NO: 2104473 - RNA, 19 nt, Homo sapiens
  misc_RNA (1)...(19): siRNA sense strand
gacauugggauuuauauca

SEQ ID NO: 2104474 - RNA, 19 nt, Homo sapiens
  misc_RNA (1)...(19): siRNA sense strand
ggacgaugaagacgacauu

SEQ ID NO: 2104475 - RNA, 19 nt, Homo sapiens
  misc_RNA (1)...(19): siRNA sense strand
uaacaggcaagcagucuga

SEQ ID NO: 2104476 - RNA, 19 nt, Homo sapiens
  misc_RNA (1)...(19): siRNA sense strand
cagcaacgagucuuucauu

SEQ ID NO: 2104477 - RNA, 19 nt, Homo sapiens
  misc_RNA (1)...(19): siRNA sense strand
uggaugaccugcacaugga

SEQ ID NO: 2104478 - RNA, 19 nt, Homo sapiens
  misc_RNA (1)...(19): siRNA sense strand
gugaaggaaucuuuguauc

SEQ ID NO: 2104479 - RNA, 19 nt, Homo sapiens
  misc_RNA (1)...(19): siRNA sense strand
gcagaagaagcacgacgaa

SEQ ID NO: 2104480 - RNA, 19 nt, Homo sapiens
  misc_RNA (1)...(19): siRNA sense strand
aaggaggccugcaaauuca

SEQ ID NO: 2104481 - RNA, 19 nt, Homo sapiens
  misc_RNA (1)...(19): siRNA sense strand
ggauaaccacgauggauca

SEQ ID NO: 2104482 - RNA, 19 nt, Homo sapiens
  misc_RNA (1)...(19): siRNA sense strand
cacggaagaucccgaagug

SEQ ID NO: 2104483 - RNA, 19 nt, Homo sapiens
  misc_RNA (1)...(19): siRNA sense strand
gaccgcauuauccagauua

SEQ ID NO: 2104484 - RNA, 19 nt, Homo sapiens
  misc_RNA (1)...(19): siRNA sense strand
gaaggagaccgcauuaucc

SEQ ID NO: 2104485 - RNA, 19 nt, Homo sapiens
  misc_RNA (1)...(19): siRNA sense strand
ccaaaccgacaucaccuuu

SEQ ID NO: 2104486 - RNA, 19 nt, Homo sapiens
  misc_RNA (1)...(19): siRNA sense strand
gaagaacaccaaggaccaa

SEQ ID NO: 2104487 - RNA, 19 nt, Homo sapiens
  misc_RNA (1)...(19): siRNA sense strand
gaagaagcacgacgaagac

SEQ ID NO: 2104488 - RNA, 19 nt, Homo sapiens
  misc_RNA (1)...(19): siRNA sense strand
ccucagcccaugaauacua

SEQ ID NO: 2104489 - RNA, 19 nt, Homo sapiens
  misc_RNA (1)...(19): siRNA sense strand
ggagcaaggaggagaggaa

SEQ ID NO: 2104490 - RNA, 19 nt, Homo sapiens
  misc_RNA (1)...(19): siRNA sense strand
agacacgagcucucagaua

SEQ ID NO: 2104491 - RNA, 19 nt, Homo sapiens
  misc_RNA (1)...(19): siRNA sense strand
caagggcgaagaaaccaaa

SEQ ID NO: 2104492 - RNA, 19 nt, Homo sapiens
  misc_RNA (1)...(19): siRNA sense strand
aguauacaauuccuuccua

SEQ ID NO: 2104493 - RNA, 19 nt, Homo sapiens
  misc_RNA (1)...(19): siRNA sense strand
gcuccaggauggcuaacau

SEQ ID NO: 2104494 - RNA, 19 nt, Homo sapiens
  misc_RNA (1)...(19): siRNA sense strand
agaagucggccguggagua

SEQ ID NO: 2104495 - RNA, 19 nt, Homo sapiens
  misc_RNA (1)...(19): siRNA sense strand
gggccagccuccaagaauc

SEQ ID NO: 2104496 - RNA, 19 nt, Homo sapiens
  misc_RNA (1)...(19): siRNA sense strand
cacgagcucucagauauca

SEQ ID NO: 2104497 - RNA, 19 nt, Homo sapiens
  misc_RNA (1)...(19): siRNA sense strand
gcagacacgagcucucaga

SEQ ID NO: 2104498 - RNA, 19 nt, Homo sapiens
  misc_RNA (1)...(19): siRNA sense strand
gaaugaacagccaggacaa

SEQ ID NO: 2104499 - RNA, 19 nt, Homo sapiens
  misc_RNA (1)...(19): siRNA sense strand
ucauggcccucacuaagau

SEQ ID NO: 2104500 - RNA, 19 nt, Homo sapiens
  misc_RNA (1)...(19): siRNA sense strand
gacgacauugggauuuaua

SEQ ID NO: 2104501 - RNA, 19 nt, Homo sapiens
  misc_RNA (1)...(19): siRNA sense strand
ggcacuagaguauacaauu

SEQ ID NO: 2104502 - RNA, 19 nt, Homo sapiens
  misc_RNA (1)...(19): siRNA sense strand
ugaugaagaagaggaauaa

SEQ ID NO: 2104503 - RNA, 19 nt, Homo sapiens
  misc_RNA (1)...(19): siRNA sense strand
cagguuggauugucucaag

SEQ ID NO: 2104504 - RNA, 19 nt, Homo sapiens
  misc_RNA (1)...(19): siRNA sense strand
ucaagcgccuuauccucaa

SEQ ID NO: 2104505 - RNA, 19 nt, Homo sapiens
  misc_RNA (1)...(19): siRNA sense strand
ugacuacauuggagacauc

SEQ ID NO: 2104506 - RNA, 19 nt, Homo sapiens
  misc_RNA (1)...(19): siRNA sense strand
ggauggaugaugacaggaa

SEQ ID NO: 2104507 - RNA, 19 nt, Homo sapiens
  misc_RNA (1)...(19): siRNA sense strand
gaucauccagugaaggaau

SEQ ID NO: 2104508 - RNA, 19 nt, Homo sapiens
  misc_RNA (1)...(19): siRNA sense strand
agaaggagaccgcauuauc

SEQ ID NO: 2104509 - RNA, 19 nt, Homo sapiens
  misc_RNA (1)...(19): siRNA sense strand
aaguggaccucuacagaau

SEQ ID NO: 2104510 - RNA, 19 nt, Homo sapiens
  misc_RNA (1)...(19): siRNA sense strand
ugaauacuacgauccaaau

SEQ ID NO: 2104511 - RNA, 19 nt, Homo sapiens
  misc_RNA (1)...(19): siRNA sense strand
caaggaaggaggccugcaa

SEQ ID NO: 2104512 - RNA, 19 nt, Homo sapiens
  misc_RNA (1)...(19): siRNA sense strand
gcaaggaggagaggaagca

SEQ ID NO: 2104513 - RNA, 19 nt, Homo sapiens
  misc_RNA (1)...(19): siRNA sense strand
ccauaguggugcagguguu

SEQ ID NO: 2104514 - RNA, 19 nt, Homo sapiens
  misc_RNA (1)...(19): siRNA sense strand
uaucggugacuacuguaua

SEQ ID NO: 2104515 - RNA, 19 nt, Homo sapiens
  misc_RNA (1)...(19): siRNA sense strand
gaagaggaauaagaaaauc

SEQ ID NO: 2104516 - RNA, 19 nt, Homo sapiens
  misc_RNA (1)...(19): siRNA sense strand
gcggugagcgagaugaaga

SEQ ID NO: 2104517 - RNA, 19 nt, Homo sapiens
  misc_RNA (1)...(19): siRNA sense strand
ccaaccagcacgagaagga

SEQ ID NO: 2104518 - RNA, 19 nt, Homo sapiens
  misc_RNA (1)...(19): siRNA sense strand
gaauacuacgauccaaaug

SEQ ID NO: 2104519 - RNA, 19 nt, Homo sapiens
  misc_RNA (1)...(19): siRNA sense strand
caucaccuuugaacauauc

SEQ ID NO: 2104520 - RNA, 19 nt, Homo sapiens
  misc_RNA (1)...(19): siRNA sense strand
ugaagacgacauugggauu

SEQ ID NO: 2104521 - RNA, 19 nt, Homo sapiens
  misc_RNA (1)...(19): siRNA sense strand
agcaacgagucuuucauuu

SEQ ID NO: 2104522 - RNA, 19 nt, Homo sapiens
  misc_RNA (1)...(19): siRNA sense strand
gaacgacuuucuggaugac

SEQ ID NO: 2104523 - RNA, 19 nt, Homo sapiens
  misc_RNA (1)...(19): siRNA sense strand
uaucauggcccucacuaag

SEQ ID NO: 2104524 - RNA, 19 nt, Homo sapiens
  misc_RNA (1)...(19): siRNA sense strand
gcacuaccagagcuacaug

SEQ ID NO: 2104525 - RNA, 19 nt, Homo sapiens
  misc_RNA (1)...(19): siRNA sense strand
gagaccgcauuauccagau

SEQ ID NO: 2104526 - RNA, 19 nt, Homo sapiens
  misc_RNA (1)...(19): siRNA sense strand
gcagucugaccgaaauguu

SEQ ID NO: 2104527 - RNA, 19 nt, Homo sapiens
  misc_RNA (1)...(19): siRNA sense strand
gagaaggagaccgcauuau

SEQ ID NO: 2104528 - RNA, 19 nt, Homo sapiens
  misc_RNA (1)...(19): siRNA sense strand
gaagucggccguggaguac

SEQ ID NO: 2104529 - RNA, 19 nt, Homo sapiens
  misc_RNA (1)...(19): siRNA sense strand
gaagguagaugaaauuaca

SEQ ID NO: 2104530 - RNA, 19 nt, Homo sapiens
  misc_RNA (1)...(19): siRNA sense strand
gaacuugugcugcccauua

SEQ ID NO: 2104531 - RNA, 19 nt, Homo sapiens
  misc_RNA (1)...(19): siRNA sense strand
gaguucaucuggugauuua

SEQ ID NO: 2104532 - RNA, 19 nt, Homo sapiens
  misc_RNA (1)...(19): siRNA sense strand
cauaaaggauguggaaaua

SEQ ID NO: 2104533 - RNA, 19 nt, Homo sapiens
  misc_RNA (1)...(19): siRNA sense strand
gaagauagucggagauuug

SEQ ID NO: 2104534 - RNA, 19 nt, Homo sapiens
  misc_RNA (1)...(19): siRNA sense strand
gcaagaggauaaauacaga

SEQ ID NO: 2104535 - RNA, 19 nt, Homo sapiens
  misc_RNA (1)...(19): siRNA sense strand
gaaagaagguaaagacaac

SEQ ID NO: 2104536 - RNA, 19 nt, Homo sapiens
  misc_RNA (1)...(19): siRNA sense strand
agagcaaccuggccuauua

SEQ ID NO: 2104537 - RNA, 19 nt, Homo sapiens
  misc_RNA (1)...(19): siRNA sense strand
gagaaugagucagaaguaa

SEQ ID NO: 2104538 - RNA, 19 nt, Homo sapiens
  misc_RNA (1)...(19): siRNA sense strand
gaaagcaaauggcacaaca

SEQ ID NO: 2104539 - RNA, 19 nt, Homo sapiens
  misc_RNA (1)...(19): siRNA sense strand
aaagaggacuacauuauug

SEQ ID NO: 2104540 - RNA, 19 nt, Homo sapiens
  misc_RNA (1)...(19): siRNA sense strand
caaagaauccaaugaagaa

SEQ ID NO: 2104541 - RNA, 19 nt, Homo sapiens
  misc_RNA (1)...(19): siRNA sense strand
gcaggagcaugaaagaauu

SEQ ID NO: 2104542 - RNA, 19 nt, Homo sapiens
  misc_RNA (1)...(19): siRNA sense strand
gaaagcaucgugccauauu

SEQ ID NO: 2104543 - RNA, 19 nt, Homo sapiens
  misc_RNA (1)...(19): siRNA sense strand
ugacaaguauggugacaaa

SEQ ID NO: 2104544 - RNA, 19 nt, Homo sapiens
  misc_RNA (1)...(19): siRNA sense strand
ccaguuauauccuauucua

SEQ ID NO: 2104545 - RNA, 19 nt, Homo sapiens
  misc_RNA (1)...(19): siRNA sense strand
gaaacacagugggaaauau

SEQ ID NO: 2104546 - RNA, 19 nt, Homo sapiens
  misc_RNA (1)...(19): siRNA sense strand
gaauacccaucguuuguug

SEQ ID NO: 2104547 - RNA, 19 nt, Homo sapiens
  misc_RNA (1)...(19): siRNA sense strand
gcuaaagguucgacuguga

SEQ ID NO: 2104548 - RNA, 19 nt, Homo sapiens
  misc_RNA (1)...(19): siRNA sense strand
ggagaacugucauaugcuu

SEQ ID NO: 2104549 - RNA, 19 nt, Homo sapiens
  misc_RNA (1)...(19): siRNA sense strand
ggaaauauguuuguauggu

SEQ ID NO: 2104550 - RNA, 19 nt, Homo sapiens
  misc_RNA (1)...(19): siRNA sense strand
ccagagggcgucucacuua

SEQ ID NO: 2104551 - RNA, 19 nt, Homo sapiens
  misc_RNA (1)...(19): siRNA sense strand
cgucugaugugggaaauua

SEQ ID NO: 2104552 - RNA, 19 nt, Homo sapiens
  misc_RNA (1)...(19): siRNA sense strand
uuaaagccauggagaauga

SEQ ID NO: 2104553 - RNA, 19 nt, Homo sapiens
  misc_RNA (1)...(19): siRNA sense strand
ucucaagucucugcaaaua

SEQ ID NO: 2104554 - RNA, 19 nt, Homo sapiens
  misc_RNA (1)...(19): siRNA sense strand
gaaguucaguggugugcuu

SEQ ID NO: 2104555 - RNA, 19 nt, Homo sapiens
  misc_RNA (1)...(19): siRNA sense strand
ggaaaucccauaccucaga

SEQ ID NO: 2104556 - RNA, 19 nt, Homo sapiens
  misc_RNA (1)...(19): siRNA sense strand
caggaaauguuguuuggaa

SEQ ID NO: 2104557 - RNA, 19 nt, Homo sapiens
  misc_RNA (1)...(19): siRNA sense strand
cagauuaauuggagaagaa

SEQ ID NO: 2104558 - RNA, 19 nt, Homo sapiens
  misc_RNA (1)...(19): siRNA sense strand
gugcugagcucaaaguugu

SEQ ID NO: 2104559 - RNA, 19 nt, Homo sapiens
  misc_RNA (1)...(19): siRNA sense strand
gaggauaaauacagaucuu

SEQ ID NO: 2104560 - RNA, 19 nt, Homo sapiens
  misc_RNA (1)...(19): siRNA sense strand
aaauugagguuucauggaa

SEQ ID NO: 2104561 - RNA, 19 nt, Homo sapiens
  misc_RNA (1)...(19): siRNA sense strand
ggaaagaagguaaagacaa

SEQ ID NO: 2104562 - RNA, 19 nt, Homo sapiens
  misc_RNA (1)...(19): siRNA sense strand
gagggcgucucacuuacua

SEQ ID NO: 2104563 - RNA, 19 nt, Homo sapiens
  misc_RNA (1)...(19): siRNA sense strand
ggagaaugagucagaagua

SEQ ID NO: 2104564 - RNA, 19 nt, Homo sapiens
  misc_RNA (1)...(19): siRNA sense strand
gaagguaaagacaaccaua

SEQ ID NO: 2104565 - RNA, 19 nt, Homo sapiens
  misc_RNA (1)...(19): siRNA sense strand
ggagagaacacagauagaa

SEQ ID NO: 2104566 - RNA, 19 nt, Homo sapiens
  misc_RNA (1)...(19): siRNA sense strand
gaacacagauagaaaaugg

SEQ ID NO: 2104567 - RNA, 19 nt, Homo sapiens
  misc_RNA (1)...(19): siRNA sense strand
gaaguaacaggauauaaag

SEQ ID NO: 2104568 - RNA, 19 nt, Homo sapiens
  misc_RNA (1)...(19): siRNA sense strand
gaggaaucauccaguaaga

SEQ ID NO: 2104569 - RNA, 19 nt, Homo sapiens
  misc_RNA (1)...(19): siRNA sense strand
gaaguuaaaguggguguuu

SEQ ID NO: 2104570 - RNA, 19 nt, Homo sapiens
  misc_RNA (1)...(19): siRNA sense strand
ggucugaacuugugauaac

SEQ ID NO: 2104571 - RNA, 19 nt, Homo sapiens
  misc_RNA (1)...(19): siRNA sense strand
gaaccaacaagaauaacuu

SEQ ID NO: 2104572 - RNA, 19 nt, Homo sapiens
  misc_RNA (1)...(19): siRNA sense strand
ccauuggguucaacucaua

SEQ ID NO: 2104573 - RNA, 19 nt, Homo sapiens
  misc_RNA (1)...(19): siRNA sense strand
cacccuaugucaaguuaua

SEQ ID NO: 2104574 - RNA, 19 nt, Homo sapiens
  misc_RNA (1)...(19): siRNA sense strand
ggaagccggucugaacuug

SEQ ID NO: 2104575 - RNA, 19 nt, Homo sapiens
  misc_RNA (1)...(19): siRNA sense strand
ccacuguaguugaguuaaa

SEQ ID NO: 2104576 - RNA, 19 nt, Homo sapiens
  misc_RNA (1)...(19): siRNA sense strand
ggaaugccacagacacuaa

SEQ ID NO: 2104577 - RNA, 19 nt, Homo sapiens
  misc_RNA (1)...(19): siRNA sense strand
gggcaccucuacauaucua

SEQ ID NO: 2104578 - RNA, 19 nt, Homo sapiens
  misc_RNA (1)...(19): siRNA sense strand
gcucaaaguuguugcuucu

SEQ ID NO: 2104579 - RNA, 19 nt, Homo sapiens
  misc_RNA (1)...(19): siRNA sense strand
gagagaacacagauagaaa

SEQ ID NO: 2104580 - RNA, 19 nt, Homo sapiens
  misc_RNA (1)...(19): siRNA sense strand
gcugagaauucacgaggaa

SEQ ID NO: 2104581 - RNA, 19 nt, Homo sapiens
  misc_RNA (1)...(19): siRNA sense strand
gcuguuagacaucaucuuu

SEQ ID NO: 2104582 - RNA, 19 nt, Homo sapiens
  misc_RNA (1)...(19): siRNA sense strand
gaaaguggcaggaaaugag

SEQ ID NO: 2104583 - RNA, 19 nt, Homo sapiens
  misc_RNA (1)...(19): siRNA sense strand
uagccuaucuuccucagaa

SEQ ID NO: 2104584 - RNA, 19 nt, Homo sapiens
  misc_RNA (1)...(19): siRNA sense strand
gaaaguuggugggaguuca

SEQ ID NO: 2104585 - RNA, 19 nt, Homo sapiens
  misc_RNA (1)...(19): siRNA sense strand
ggaggacagucuuuauugg

SEQ ID NO: 2104586 - RNA, 19 nt, Homo sapiens
  misc_RNA (1)...(19): siRNA sense strand
gcaagaggauccacuucag

SEQ ID NO: 2104587 - RNA, 19 nt, Homo sapiens
  misc_RNA (1)...(19): siRNA sense strand
gacauuuacugggcuauga

SEQ ID NO: 2104588 - RNA, 19 nt, Homo sapiens
  misc_RNA (1)...(19): siRNA sense strand
agauaugucuuuaggaaug

SEQ ID NO: 2104589 - RNA, 19 nt, Homo sapiens
  misc_RNA (1)...(19): siRNA sense strand
gaaaucccauaccucagau

SEQ ID NO: 2104590 - RNA, 19 nt, Homo sapiens
  misc_RNA (1)...(19): siRNA sense strand
ggauaaauacagaucuuga

SEQ ID NO: 2104591 - RNA, 19 nt, Homo sapiens
  misc_RNA (1)...(19): siRNA sense strand
uacaaguacugaacacaaa

SEQ ID NO: 2104592 - RNA, 19 nt, Homo sapiens
  misc_RNA (1)...(19): siRNA sense strand
gggugaauaugaaccuaaa

SEQ ID NO: 2104593 - RNA, 19 nt, Homo sapiens
  misc_RNA (1)...(19): siRNA sense strand
ggguucaacucauaaagga

SEQ ID NO: 2104594 - RNA, 19 nt, Homo sapiens
  misc_RNA (1)...(19): siRNA sense strand
caaguacugaacacaaaua

SEQ ID NO: 2104595 - RNA, 19 nt, Homo sapiens
  misc_RNA (1)...(19): siRNA sense strand
agucagaaguaacaggaua

SEQ ID NO: 2104596 - RNA, 19 nt, Homo sapiens
  misc_RNA (1)...(19): siRNA sense strand
caucucaagucucugcaaa

SEQ ID NO: 2104597 - RNA, 19 nt, Homo sapiens
  misc_RNA (1)...(19): siRNA sense strand
caaugaauacccaucguuu

SEQ ID NO: 2104598 - RNA, 19 nt, Homo sapiens
  misc_RNA (1)...(19): siRNA sense strand
uaaaggauguggaaauagc

SEQ ID NO: 2104599 - RNA, 19 nt, Homo sapiens
  misc_RNA (1)...(19): siRNA sense strand
gaaauguuguuuggaaugc

SEQ ID NO: 2104600 - RNA, 19 nt, Homo sapiens
  misc_RNA (1)...(19): siRNA sense strand
ggaaauguuguuuggaaug

SEQ ID NO: 2104601 - RNA, 19 nt, Homo sapiens
  misc_RNA (1)...(19): siRNA sense strand
caaaggugaaggaccauuu

SEQ ID NO: 2104602 - RNA, 19 nt, Homo sapiens
  misc_RNA (1)...(19): siRNA sense strand
gauaugucuuuaggaauga

SEQ ID NO: 2104603 - RNA, 19 nt, Homo sapiens
  misc_RNA (1)...(19): siRNA sense strand
caacagcccaacucucuug

SEQ ID NO: 2104604 - RNA, 19 nt, Homo sapiens
  misc_RNA (1)...(19): siRNA sense strand
ggauguuucuguuggugaa

SEQ ID NO: 2104605 - RNA, 19 nt, Homo sapiens
  misc_RNA (1)...(19): siRNA sense strand
ucaaagaauccaaugaaga

SEQ ID NO: 2104606 - RNA, 19 nt, Homo sapiens
  misc_RNA (1)...(19): siRNA sense strand
gaggagagaacacagauag

SEQ ID NO: 2104607 - RNA, 19 nt, Homo sapiens
  misc_RNA (1)...(19): siRNA sense strand
agaauccaaugaagaaguu

SEQ ID NO: 2104608 - RNA, 19 nt, Homo sapiens
  misc_RNA (1)...(19): siRNA sense strand
gaaugagucagaaguaaca

SEQ ID NO: 2104609 - RNA, 19 nt, Homo sapiens
  misc_RNA (1)...(19): siRNA sense strand
aaggaggaaucauccagua

SEQ ID NO: 2104610 - RNA, 19 nt, Homo sapiens
  misc_RNA (1)...(19): siRNA sense strand
uaauguaaccaccaagaaa

SEQ ID NO: 2104611 - RNA, 19 nt, Homo sapiens
  misc_RNA (1)...(19): siRNA sense strand
caaguauggugacaaaugc

SEQ ID NO: 2104612 - RNA, 19 nt, Homo sapiens
  misc_RNA (1)...(19): siRNA sense strand
gaggugcgguacuggaaug

SEQ ID NO: 2104613 - RNA, 19 nt, Homo sapiens
  misc_RNA (1)...(19): siRNA sense strand
cugaagaacuacagaaugg

SEQ ID NO: 2104614 - RNA, 19 nt, Homo sapiens
  misc_RNA (1)...(19): siRNA sense strand
gacagggcaccucuacaua

SEQ ID NO: 2104615 - RNA, 19 nt, Homo sapiens
  misc_RNA (1)...(19): siRNA sense strand
ugugaugggugaauaugaa

SEQ ID NO: 2104616 - RNA, 19 nt, Homo sapiens
  misc_RNA (1)...(19): siRNA sense strand
gaagaugcagguuccuaug

SEQ ID NO: 2104617 - RNA, 19 nt, Homo sapiens
  misc_RNA (1)...(19): siRNA sense strand
gcuaugaggugcgguacug

SEQ ID NO: 2104618 - RNA, 19 nt, Homo sapiens
  misc_RNA (1)...(19): siRNA sense strand
aaaggugaaggaccauuua

SEQ ID NO: 2104619 - RNA, 19 nt, Homo sapiens
  misc_RNA (1)...(19): siRNA sense strand
ugaaacacagugggaaaua

SEQ ID NO: 2104620 - RNA, 19 nt, Homo sapiens
  misc_RNA (1)...(19): siRNA sense strand
uaacuuuggcaccaucuaa

SEQ ID NO: 2104621 - RNA, 19 nt, Homo sapiens
  misc_RNA (1)...(19): siRNA sense strand
aaauggugcccuuacaaua

SEQ ID NO: 2104622 - RNA, 19 nt, Homo sapiens
  misc_RNA (1)...(19): siRNA sense strand
ugggaaauauguuuguaug

SEQ ID NO: 2104623 - RNA, 19 nt, Homo sapiens
  misc_RNA (1)...(19): siRNA sense strand
augcuuggaucuucaauga

SEQ ID NO: 2104624 - RNA, 19 nt, Homo sapiens
  misc_RNA (1)...(19): siRNA sense strand
cauuaaagaggacuacauu

SEQ ID NO: 2104625 - RNA, 19 nt, Homo sapiens
  misc_RNA (1)...(19): siRNA sense strand
gaugaaaguggcaggaaau

SEQ ID NO: 2104626 - RNA, 19 nt, Homo sapiens
  misc_RNA (1)...(19): siRNA sense strand
aaccauagcccaguuauau

SEQ ID NO: 2104627 - RNA, 19 nt, Homo sapiens
  misc_RNA (1)...(19): siRNA sense strand
ugaagaggcaguuccagaa

SEQ ID NO: 2104628 - RNA, 19 nt, Homo sapiens
  misc_RNA (1)...(19): siRNA sense strand
uccagucccugaagaacua

SEQ ID NO: 2104629 - RNA, 19 nt, Homo sapiens
  misc_RNA (1)...(19): siRNA sense strand
ggaagaagcuguagaauuu

SEQ ID NO: 2104630 - RNA, 19 nt, Homo sapiens
  misc_RNA (1)...(19): siRNA sense strand
ggaagggacucaguaauua

SEQ ID NO: 2104631 - RNA, 19 nt, Homo sapiens
  misc_RNA (1)...(19): siRNA sense strand
gcacggagcuggaacacua

SEQ ID NO: 2104632 - RNA, 19 nt, Homo sapiens
  misc_RNA (1)...(19): siRNA sense strand
guaauuagcugguuaaagg

SEQ ID NO: 2104633 - RNA, 19 nt, Homo sapiens
  misc_RNA (1)...(19): siRNA sense strand
gacaagagccuaucaguuu

SEQ ID NO: 2104634 - RNA, 19 nt, Homo sapiens
  misc_RNA (1)...(19): siRNA sense strand
aaacagaucugaugggauu

SEQ ID NO: 2104635 - RNA, 19 nt, Homo sapiens
  misc_RNA (1)...(19): siRNA sense strand
gaaacgcgauuccauauca

SEQ ID NO: 2104636 - RNA, 19 nt, Homo sapiens
  misc_RNA (1)...(19): siRNA sense strand
gaacaaagguaacaauggu

SEQ ID NO: 2104637 - RNA, 19 nt, Homo sapiens
  misc_RNA (1)...(19): siRNA sense strand
caaagacgauuacacacua

SEQ ID NO: 2104638 - RNA, 19 nt, Homo sapiens
  misc_RNA (1)...(19): siRNA sense strand
gaaggcaccuauaugugua

SEQ ID NO: 2104639 - RNA, 19 nt, Homo sapiens
  misc_RNA (1)...(19): siRNA sense strand
gaauuuagaugccaaaguc

SEQ ID NO: 2104640 - RNA, 19 nt, Homo sapiens
  misc_RNA (1)...(19): siRNA sense strand
gaguaaaccugaugaagga

SEQ ID NO: 2104641 - RNA, 19 nt, Homo sapiens
  misc_RNA (1)...(19): siRNA sense strand
ggaagaagaugaugauagg

SEQ ID NO: 2104642 - RNA, 19 nt, Homo sapiens
  misc_RNA (1)...(19): siRNA sense strand
ugaacgaagugcugucuua

SEQ ID NO: 2104643 - RNA, 19 nt, Homo sapiens
  misc_RNA (1)...(19): siRNA sense strand
ucacugauguuacuaagaa

SEQ ID NO: 2104644 - RNA, 19 nt, Homo sapiens
  misc_RNA (1)...(19): siRNA sense strand
aaacaaacauggcacauuc

SEQ ID NO: 2104645 - RNA, 19 nt, Homo sapiens
  misc_RNA (1)...(19): siRNA sense strand
cgagaugacuuccgacaaa

SEQ ID NO: 2104646 - RNA, 19 nt, Homo sapiens
  misc_RNA (1)...(19): siRNA sense strand
guaaagaccacccucuaua

SEQ ID NO: 2104647 - RNA, 19 nt, Homo sapiens
  misc_RNA (1)...(19): siRNA sense strand
gcaagugcauauaucauug

SEQ ID NO: 2104648 - RNA, 19 nt, Homo sapiens
  misc_RNA (1)...(19): siRNA sense strand
gaagcaaccagccuuuaua

SEQ ID NO: 2104649 - RNA, 19 nt, Homo sapiens
  misc_RNA (1)...(19): siRNA sense strand
cgacacagaucuugcauuc

SEQ ID NO: 2104650 - RNA, 19 nt, Homo sapiens
  misc_RNA (1)...(19): siRNA sense strand
aaacggauguugcagauga

SEQ ID NO: 2104651 - RNA, 19 nt, Homo sapiens
  misc_RNA (1)...(19): siRNA sense strand
gccacgagcuugccaguaa

SEQ ID NO: 2104652 - RNA, 19 nt, Homo sapiens
  misc_RNA (1)...(19): siRNA sense strand
gaaggaagcuacguuugug

SEQ ID NO: 2104653 - RNA, 19 nt, Homo sapiens
  misc_RNA (1)...(19): siRNA sense strand
agaggaagcuuuagaaauc

SEQ ID NO: 2104654 - RNA, 19 nt, Homo sapiens
  misc_RNA (1)...(19): siRNA sense strand
gaaguugucauuacugaaa

SEQ ID NO: 2104655 - RNA, 19 nt, Homo sapiens
  misc_RNA (1)...(19): siRNA sense strand
gggaaggaaugacagauga

SEQ ID NO: 2104656 - RNA, 19 nt, Homo sapiens
  misc_RNA (1)...(19): siRNA sense strand
caacaguuccagccaaaua

SEQ ID NO: 2104657 - RNA, 19 nt, Homo sapiens
  misc_RNA (1)...(19): siRNA sense strand
ggaaacggauguugcagau

SEQ ID NO: 2104658 - RNA, 19 nt, Homo sapiens
  misc_RNA (1)...(19): siRNA sense strand
guacagcguuacugaaaug

SEQ ID NO: 2104659 - RNA, 19 nt, Homo sapiens
  misc_RNA (1)...(19): siRNA sense strand
gagccuugauuucugauuu

SEQ ID NO: 2104660 - RNA, 19 nt, Homo sapiens
  misc_RNA (1)...(19): siRNA sense strand
ggagauggaggacuaauga

SEQ ID NO: 2104661 - RNA, 19 nt, Homo sapiens
  misc_RNA (1)...(19): siRNA sense strand
gaauggauagugaaucuaa

SEQ ID NO: 2104662 - RNA, 19 nt, Homo sapiens
  misc_RNA (1)...(19): siRNA sense strand
gaagguaugacaucaaaga

SEQ ID NO: 2104663 - RNA, 19 nt, Homo sapiens
  misc_RNA (1)...(19): siRNA sense strand
ggccacagcucaucaggaa

SEQ ID NO: 2104664 - RNA, 19 nt, Homo sapiens
  misc_RNA (1)...(19): siRNA sense strand
cgacgaagaggaagcuuua

SEQ ID NO: 2104665 - RNA, 19 nt, Homo sapiens
  misc_RNA (1)...(19): siRNA sense strand
gaagaggaagcuuuagaaa

SEQ ID NO: 2104666 - RNA, 19 nt, Homo sapiens
  misc_RNA (1)...(19): siRNA sense strand
ugacaaggaagaaagaaua

SEQ ID NO: 2104667 - RNA, 19 nt, Homo sapiens
  misc_RNA (1)...(19): siRNA sense strand
gcacaaguauuaguguuuc

SEQ ID NO: 2104668 - RNA, 19 nt, Homo sapiens
  misc_RNA (1)...(19): siRNA sense strand
cagcauaacugagcaaauc

SEQ ID NO: 2104669 - RNA, 19 nt, Homo sapiens
  misc_RNA (1)...(19): siRNA sense strand
uaacugagcaaaucacuga

SEQ ID NO: 2104670 - RNA, 19 nt, Homo sapiens
  misc_RNA (1)...(19): siRNA sense strand
gaacgacccacauuucuca

SEQ ID NO: 2104671 - RNA, 19 nt, Homo sapiens
  misc_RNA (1)...(19): siRNA sense strand
aagaugaacuggaagaaga

SEQ ID NO: 2104672 - RNA, 19 nt, Homo sapiens
  misc_RNA (1)...(19): siRNA sense strand
gaagugcugucuuagucaa

SEQ ID NO: 2104673 - RNA, 19 nt, Homo sapiens
  misc_RNA (1)...(19): siRNA sense strand
caaggcacacugcagauua

SEQ ID NO: 2104674 - RNA, 19 nt, Homo sapiens
  misc_RNA (1)...(19): siRNA sense strand
ggaggaagaagcuguagaa

SEQ ID NO: 2104675 - RNA, 19 nt, Homo sapiens
  misc_RNA (1)...(19): siRNA sense strand
gaagaaagaauaaguaucc

SEQ ID NO: 2104676 - RNA, 19 nt, Homo sapiens
  misc_RNA (1)...(19): siRNA sense strand
gaucuggugucuaggaaau

SEQ ID NO: 2104677 - RNA, 19 nt, Homo sapiens
  misc_RNA (1)...(19): siRNA sense strand
agacaaaguucgaauugau

SEQ ID NO: 2104678 - RNA, 19 nt, Homo sapiens
  misc_RNA (1)...(19): siRNA sense strand
gcacacugcagauuaagaa

SEQ ID NO: 2104679 - RNA, 19 nt, Homo sapiens
  misc_RNA (1)...(19): siRNA sense strand
gaugaaggcaccuauaugu

SEQ ID NO: 2104680 - RNA, 19 nt, Homo sapiens
  misc_RNA (1)...(19): siRNA sense strand
aaacugaugaucuccaaua

SEQ ID NO: 2104681 - RNA, 19 nt, Homo sapiens
  misc_RNA (1)...(19): siRNA sense strand
gaggaacuaucuuggugaa

SEQ ID NO: 2104682 - RNA, 19 nt, Homo sapiens
  misc_RNA (1)...(19): siRNA sense strand
gccauucgguccguaauaa

SEQ ID NO: 2104683 - RNA, 19 nt, Homo sapiens
  misc_RNA (1)...(19): siRNA sense strand
uacaagaucuggugucuag

SEQ ID NO: 2104684 - RNA, 19 nt, Homo sapiens
  misc_RNA (1)...(19): siRNA sense strand
gccaagagaucagauuguu

SEQ ID NO: 2104685 - RNA, 19 nt, Homo sapiens
  misc_RNA (1)...(19): siRNA sense strand
ccacgacucugaacugcaa

SEQ ID NO: 2104686 - RNA, 19 nt, Homo sapiens
  misc_RNA (1)...(19): siRNA sense strand
agaaagagcuaggagaugu

SEQ ID NO: 2104687 - RNA, 19 nt, Homo sapiens
  misc_RNA (1)...(19): siRNA sense strand
ggacuaaugagcaauggaa

SEQ ID NO: 2104688 - RNA, 19 nt, Homo sapiens
  misc_RNA (1)...(19): siRNA sense strand
gcagggauguauacuugug

SEQ ID NO: 2104689 - RNA, 19 nt, Homo sapiens
  misc_RNA (1)...(19): siRNA sense strand
aagaggagauggaggacua

SEQ ID NO: 2104690 - RNA, 19 nt, Homo sapiens
  misc_RNA (1)...(19): siRNA sense strand
gcgauuccauaucaacaaa

SEQ ID NO: 2104691 - RNA, 19 nt, Homo sapiens
  misc_RNA (1)...(19): siRNA sense strand
cacugcagauuaagaauuu

SEQ ID NO: 2104692 - RNA, 19 nt, Homo sapiens
  misc_RNA (1)...(19): siRNA sense strand
ugaauuggcugucgaucug

SEQ ID NO: 2104693 - RNA, 19 nt, Homo sapiens
  misc_RNA (1)...(19): siRNA sense strand
gguggugccugcuggguaa

SEQ ID NO: 2104694 - RNA, 19 nt, Homo sapiens
  misc_RNA (1)...(19): siRNA sense strand
gagccacagccaauaauaa

SEQ ID NO: 2104695 - RNA, 19 nt, Homo sapiens
  misc_RNA (1)...(19): siRNA sense strand
ggagugcagugcuggaugu

SEQ ID NO: 2104696 - RNA, 19 nt, Homo sapiens
  misc_RNA (1)...(19): siRNA sense strand
cagcgaccuucuugacaua

SEQ ID NO: 2104697 - RNA, 19 nt, Homo sapiens
  misc_RNA (1)...(19): siRNA sense strand
caacagcauacaugaauug

SEQ ID NO: 2104698 - RNA, 19 nt, Homo sapiens
  misc_RNA (1)...(19): siRNA sense strand
gcaggucacugauguuacu

SEQ ID NO: 2104699 - RNA, 19 nt, Homo sapiens
  misc_RNA (1)...(19): siRNA sense strand
gaacuaucuuggugaagca

SEQ ID NO: 2104700 - RNA, 19 nt, Homo sapiens
  misc_RNA (1)...(19): siRNA sense strand
gccuuuaccuccucucaaa

SEQ ID NO: 2104701 - RNA, 19 nt, Homo sapiens
  misc_RNA (1)...(19): siRNA sense strand
gggauuugguuauucucua

SEQ ID NO: 2104702 - RNA, 19 nt, Homo sapiens
  misc_RNA (1)...(19): siRNA sense strand
acacagaucuugcauucca

SEQ ID NO: 2104703 - RNA, 19 nt, Homo sapiens
  misc_RNA (1)...(19): siRNA sense strand
gcagaaagagcuaggagau

SEQ ID NO: 2104704 - RNA, 19 nt, Homo sapiens
  misc_RNA (1)...(19): siRNA sense strand
gaugaaggaagcuacguuu

SEQ ID NO: 2104705 - RNA, 19 nt, Homo sapiens
  misc_RNA (1)...(19): siRNA sense strand
ggguaauucugauggguuu

SEQ ID NO: 2104706 - RNA, 19 nt, Homo sapiens
  misc_RNA (1)...(19): siRNA sense strand
gauccaagagcaacaauuc

SEQ ID NO: 2104707 - RNA, 19 nt, Homo sapiens
  misc_RNA (1)...(19): siRNA sense strand
gaccaugaguacagaugaa

SEQ ID NO: 2104708 - RNA, 19 nt, Homo sapiens
  misc_RNA (1)...(19): siRNA sense strand
caucaaagacgauuacaca

SEQ ID NO: 2104709 - RNA, 19 nt, Homo sapiens
  misc_RNA (1)...(19): siRNA sense strand
gacaaggaagaaagaauaa

SEQ ID NO: 2104710 - RNA, 19 nt, Homo sapiens
  misc_RNA (1)...(19): siRNA sense strand
gcauugacuucacuaccaa

SEQ ID NO: 2104711 - RNA, 19 nt, Homo sapiens
  misc_RNA (1)...(19): siRNA sense strand
gaagggacucaguaauuau

SEQ ID NO: 2104712 - RNA, 19 nt, Homo sapiens
  misc_RNA (1)...(19): siRNA sense strand
gaaaugcgucucuggaagu

SEQ ID NO: 2104713 - RNA, 19 nt, Homo sapiens
  misc_RNA (1)...(19): siRNA sense strand
aaggacaguuuacagagua

SEQ ID NO: 2104714 - RNA, 19 nt, Homo sapiens
  misc_RNA (1)...(19): siRNA sense strand
ggccaacgcccaccauuga

SEQ ID NO: 2104715 - RNA, 19 nt, Homo sapiens
  misc_RNA (1)...(19): siRNA sense strand
cauauaucauugaggcuuu

SEQ ID NO: 2104716 - RNA, 19 nt, Homo sapiens
  misc_RNA (1)...(19): siRNA sense strand
aaaggaugaugcagacuug

SEQ ID NO: 2104717 - RNA, 19 nt, Homo sapiens
  misc_RNA (1)...(19): siRNA sense strand
gaauugaugacaaggaaga

SEQ ID NO: 2104718 - RNA, 19 nt, Homo sapiens
  misc_RNA (1)...(19): siRNA sense strand
gaaagaaggcagccagaac

SEQ ID NO: 2104719 - RNA, 19 nt, Homo sapiens
  misc_RNA (1)...(19): siRNA sense strand
caaggacaguuuacagagu

SEQ ID NO: 2104720 - RNA, 19 nt, Homo sapiens
  misc_RNA (1)...(19): siRNA sense strand
gcaacgaugcucucagaug

SEQ ID NO: 2104721 - RNA, 19 nt, Homo sapiens
  misc_RNA (1)...(19): siRNA sense strand
ggaauuauccaagaauaca

SEQ ID NO: 2104722 - RNA, 19 nt, Homo sapiens
  misc_RNA (1)...(19): siRNA sense strand
cgagugauguaucgucaga

SEQ ID NO: 2104723 - RNA, 19 nt, Homo sapiens
  misc_RNA (1)...(19): siRNA sense strand
gauacuggcacuuauacuu

SEQ ID NO: 2104724 - RNA, 19 nt, Homo sapiens
  misc_RNA (1)...(19): siRNA sense strand
caacagucaaggacaguuu

SEQ ID NO: 2104725 - RNA, 19 nt, Homo sapiens
  misc_RNA (1)...(19): siRNA sense strand
guuauucucuaccugauca

SEQ ID NO: 2104726 - RNA, 19 nt, Homo sapiens
  misc_RNA (1)...(19): siRNA sense strand
ccaacagcauacaugaauu

SEQ ID NO: 2104727 - RNA, 19 nt, Homo sapiens
  misc_RNA (1)...(19): siRNA sense strand
gcuguuacguuucaaagag

SEQ ID NO: 2104728 - RNA, 19 nt, Homo sapiens
  misc_RNA (1)...(19): siRNA sense strand
ccaaaccgcaggucacuga

SEQ ID NO: 2104729 - RNA, 19 nt, Homo sapiens
  misc_RNA (1)...(19): siRNA sense strand
gcagaaaguuuaaaggaaa

SEQ ID NO: 2104730 - RNA, 19 nt, Homo sapiens
  misc_RNA (1)...(19): siRNA sense strand
caacaaauguaccaaagaa

SEQ ID NO: 2104731 - RNA, 19 nt, Homo sapiens
  misc_RNA (1)...(19): siRNA sense strand
agaaagaggugaugaacua

SEQ ID NO: 2104732 - RNA, 19 nt, Homo sapiens
  misc_RNA (1)...(19): siRNA sense strand
ccaaagcacugacaaagaa

SEQ ID NO: 2104733 - RNA, 19 nt, Homo sapiens
  misc_RNA (1)...(19): siRNA sense strand
gaaagcagauguguuggaa

SEQ ID NO: 2104734 - RNA, 19 nt, Homo sapiens
  misc_RNA (1)...(19): siRNA sense strand
gcaaaucgcucaggagauc

SEQ ID NO: 2104735 - RNA, 19 nt, Homo sapiens
  misc_RNA (1)...(19): siRNA sense strand
gaagucagcugaguuguag

SEQ ID NO: 2104736 - RNA, 19 nt, Homo sapiens
  misc_RNA (1)...(19): siRNA sense strand
ggagugaagugcaagcauu

SEQ ID NO: 2104737 - RNA, 19 nt, Homo sapiens
  misc_RNA (1)...(19): siRNA sense strand
ggaaaugccuccuuauugc

SEQ ID NO: 2104738 - RNA, 19 nt, Homo sapiens
  misc_RNA (1)...(19): siRNA sense strand
cagaagagcaugauauuug

SEQ ID NO: 2104739 - RNA, 19 nt, Homo sapiens
  misc_RNA (1)...(19): siRNA sense strand
caaagcugcugaugucuau

SEQ ID NO: 2104740 - RNA, 19 nt, Homo sapiens
  misc_RNA (1)...(19): siRNA sense strand
caucauagacagcaguuua

SEQ ID NO: 2104741 - RNA, 19 nt, Homo sapiens
  misc_RNA (1)...(19): siRNA sense strand
gcaagguggucaucacaga

SEQ ID NO: 2104742 - RNA, 19 nt, Homo sapiens
  misc_RNA (1)...(19): siRNA sense strand
ggaagucagcugaguugua

SEQ ID NO: 2104743 - RNA, 19 nt, Homo sapiens
  misc_RNA (1)...(19): siRNA sense strand
ggaaggaagucagugagau

SEQ ID NO: 2104744 - RNA, 19 nt, Homo sapiens
  misc_RNA (1)...(19): siRNA sense strand
gagacuggcccuugaagaa

SEQ ID NO: 2104745 - RNA, 19 nt, Homo sapiens
  misc_RNA (1)...(19): siRNA sense strand
agacagcaguuuaucuuuc

SEQ ID NO: 2104746 - RNA, 19 nt, Homo sapiens
  misc_RNA (1)...(19): siRNA sense strand
ggacagcagguucaacuuc

SEQ ID NO: 2104747 - RNA, 19 nt, Homo sapiens
  misc_RNA (1)...(19): siRNA sense strand
gcugaugucuaugcauuug

SEQ ID NO: 2104748 - RNA, 19 nt, Homo sapiens
  misc_RNA (1)...(19): siRNA sense strand
gaacguggugcucuucaug

SEQ ID NO: 2104749 - RNA, 19 nt, Homo sapiens
  misc_RNA (1)...(19): siRNA sense strand
gccgaaagcagauguguug

SEQ ID NO: 2104750 - RNA, 19 nt, Homo sapiens
  misc_RNA (1)...(19): siRNA sense strand
agacgucucuggacaucaa

SEQ ID NO: 2104751 - RNA, 19 nt, Homo sapiens
  misc_RNA (1)...(19): siRNA sense strand
ccaagggcaucguacacaa

SEQ ID NO: 2104752 - RNA, 19 nt, Homo sapiens
  misc_RNA (1)...(19): siRNA sense strand
cuacuucauucaucauaga

SEQ ID NO: 2104753 - RNA, 19 nt, Homo sapiens
  misc_RNA (1)...(19): siRNA sense strand
gaaggaagucagugagauc

SEQ ID NO: 2104754 - RNA, 19 nt, Homo sapiens
  misc_RNA (1)...(19): siRNA sense strand
ugaagugucacaacaaaug

SEQ ID NO: 2104755 - RNA, 19 nt, Homo sapiens
  misc_RNA (1)...(19): siRNA sense strand
ggacguugcacucguuugu

SEQ ID NO: 2104756 - RNA, 19 nt, Homo sapiens
  misc_RNA (1)...(19): siRNA sense strand
uggaaaugccuccuuauug

SEQ ID NO: 2104757 - RNA, 19 nt, Homo sapiens
  misc_RNA (1)...(19): siRNA sense strand
caugauauuuggagugaag

SEQ ID NO: 2104758 - RNA, 19 nt, Homo sapiens
  misc_RNA (1)...(19): siRNA sense strand
gccagaagagcaugauauu

SEQ ID NO: 2104759 - RNA, 19 nt, Homo sapiens
  misc_RNA (1)...(19): siRNA sense strand
ggacgagguggacgacuug

SEQ ID NO: 2104760 - RNA, 19 nt, Homo sapiens
  misc_RNA (1)...(19): siRNA sense strand
ugauggacaugcuggagaa

SEQ ID NO: 2104761 - RNA, 19 nt, Homo sapiens
  misc_RNA (1)...(19): siRNA sense strand
ccaaagcugcugaugucua

SEQ ID NO: 2104762 - RNA, 19 nt, Homo sapiens
  misc_RNA (1)...(19): siRNA sense strand
ugcagaaaguuuaaaggaa

SEQ ID NO: 2104763 - RNA, 19 nt, Homo sapiens
  misc_RNA (1)...(19): siRNA sense strand
caagacgucucuggacauc

SEQ ID NO: 2104764 - RNA, 19 nt, Homo sapiens
  misc_RNA (1)...(19): siRNA sense strand
gcaagucagaggcagaaga

SEQ ID NO: 2104765 - RNA, 19 nt, Homo sapiens
  misc_RNA (1)...(19): siRNA sense strand
cacaacaaauguaccaaag

SEQ ID NO: 2104766 - RNA, 19 nt, Homo sapiens
  misc_RNA (1)...(19): siRNA sense strand
cugcugaugucuaugcauu

SEQ ID NO: 2104767 - RNA, 19 nt, Homo sapiens
  misc_RNA (1)...(19): siRNA sense strand
ucacaacaaauguaccaaa

SEQ ID NO: 2104768 - RNA, 19 nt, Homo sapiens
  misc_RNA (1)...(19): siRNA sense strand
agaagagcaugauauuugg

SEQ ID NO: 2104769 - RNA, 19 nt, Homo sapiens
  misc_RNA (1)...(19): siRNA sense strand
gaagugucacaacaaaugu

SEQ ID NO: 2104770 - RNA, 19 nt, Homo sapiens
  misc_RNA (1)...(19): siRNA sense strand
gaaaugccuccuuauugca

SEQ ID NO: 2104771 - RNA, 19 nt, Homo sapiens
  misc_RNA (1)...(19): siRNA sense strand
cuccaaagcugcugauguc

SEQ ID NO: 2104772 - RNA, 19 nt, Homo sapiens
  misc_RNA (1)...(19): siRNA sense strand
ccagaagagcaugauauuu

SEQ ID NO: 2104773 - RNA, 19 nt, Homo sapiens
  misc_RNA (1)...(19): siRNA sense strand
caacaacccgguggacaga

SEQ ID NO: 2104774 - RNA, 19 nt, Homo sapiens
  misc_RNA (1)...(19): siRNA sense strand
gaacgucuucuaugacaac

SEQ ID NO: 2104775 - RNA, 19 nt, Homo sapiens
  misc_RNA (1)...(19): siRNA sense strand
ucaagaaagaggugaugaa

SEQ ID NO: 2104776 - RNA, 19 nt, Homo sapiens
  misc_RNA (1)...(19): siRNA sense strand
ccagcugccuacuucauuc

SEQ ID NO: 2104777 - RNA, 19 nt, Homo sapiens
  misc_RNA (1)...(19): siRNA sense strand
gagauuguacgcgagauga

SEQ ID NO: 2104778 - RNA, 19 nt, Homo sapiens
  misc_RNA (1)...(19): siRNA sense strand
guacacaaagaucucaaau

SEQ ID NO: 2104779 - RNA, 19 nt, Homo sapiens
  misc_RNA (1)...(19): siRNA sense strand
uuucaacauuucagccuuu

SEQ ID NO: 2104780 - RNA, 19 nt, Homo sapiens
  misc_RNA (1)...(19): siRNA sense strand
caagggcaucguacacaaa

SEQ ID NO: 2104781 - RNA, 19 nt, Homo sapiens
  misc_RNA (1)...(19): siRNA sense strand
ggagauggacggccacaac

SEQ ID NO: 2104782 - RNA, 19 nt, Homo sapiens
  misc_RNA (1)...(19): siRNA sense strand
ccuuauugcagaaaguuua

SEQ ID NO: 2104783 - RNA, 19 nt, Homo sapiens
  misc_RNA (1)...(19): siRNA sense strand
gaagagcaugauauuugga

SEQ ID NO: 2104784 - RNA, 19 nt, Homo sapiens
  misc_RNA (1)...(19): siRNA sense strand
uggagaaacuucccaagcu

SEQ ID NO: 2104785 - RNA, 19 nt, Homo sapiens
  misc_RNA (1)...(19): siRNA sense strand
gagugaagugcaagcauug

SEQ ID NO: 2104786 - RNA, 19 nt, Homo sapiens
  misc_RNA (1)...(19): siRNA sense strand
cagcugccauucuccaaag

SEQ ID NO: 2104787 - RNA, 19 nt, Homo sapiens
  misc_RNA (1)...(19): siRNA sense strand
cauuugggacuguuuggua

SEQ ID NO: 2104788 - RNA, 19 nt, Homo sapiens
  misc_RNA (1)...(19): siRNA sense strand
caggagagacccagcuuca

SEQ ID NO: 2104789 - RNA, 19 nt, Homo sapiens
  misc_RNA (1)...(19): siRNA sense strand
gggaaggaagucagugaga

SEQ ID NO: 2104790 - RNA, 19 nt, Homo sapiens
  misc_RNA (1)...(19): siRNA sense strand
cuucccagcugccuacuuc

SEQ ID NO: 2104791 - RNA, 19 nt, Homo sapiens
  misc_RNA (1)...(19): siRNA sense strand
caacaagacgaggcaaauc

SEQ ID NO: 2104792 - RNA, 19 nt, Homo sapiens
  misc_RNA (1)...(19): siRNA sense strand
caacauuucagccuuugca

SEQ ID NO: 2104793 - RNA, 19 nt, Homo sapiens
  misc_RNA (1)...(19): siRNA sense strand
ugcuggaaaugccuccuua

SEQ ID NO: 2104794 - RNA, 19 nt, Homo sapiens
  misc_RNA (1)...(19): siRNA sense strand
cgaaagcagauguguugga

SEQ ID NO: 2104795 - RNA, 19 nt, Homo sapiens
  misc_RNA (1)...(19): siRNA sense strand
ucaagggcaugggauaucu

SEQ ID NO: 2104796 - RNA, 19 nt, Homo sapiens
  misc_RNA (1)...(19): siRNA sense strand
gggcaucguacacaaagau

SEQ ID NO: 2104797 - RNA, 19 nt, Homo sapiens
  misc_RNA (1)...(19): siRNA sense strand
gacagcaguuuaucuuucc

SEQ ID NO: 2104798 - RNA, 19 nt, Homo sapiens
  misc_RNA (1)...(19): siRNA sense strand
ggacaugcuggagaaacuu

SEQ ID NO: 2104799 - RNA, 19 nt, Homo sapiens
  misc_RNA (1)...(19): siRNA sense strand
ggcagacgcggcaugagaa

SEQ ID NO: 2104800 - RNA, 19 nt, Homo sapiens
  misc_RNA (1)...(19): siRNA sense strand
caagaaagaggugaugaac

SEQ ID NO: 2104801 - RNA, 19 nt, Homo sapiens
  misc_RNA (1)...(19): siRNA sense strand
cuggaaaugccuccuuauu

SEQ ID NO: 2104802 - RNA, 19 nt, Homo sapiens
  misc_RNA (1)...(19): siRNA sense strand
gaggaucagcugccauucu

SEQ ID NO: 2104803 - RNA, 19 nt, Homo sapiens
  misc_RNA (1)...(19): siRNA sense strand
acguugcacucguuuguga

SEQ ID NO: 2104804 - RNA, 19 nt, Homo sapiens
  misc_RNA (1)...(19): siRNA sense strand
ggcggacguugcacucguu

SEQ ID NO: 2104805 - RNA, 19 nt, Homo sapiens
  misc_RNA (1)...(19): siRNA sense strand
auagacagcaguuuaucuu

SEQ ID NO: 2104806 - RNA, 19 nt, Homo sapiens
  misc_RNA (1)...(19): siRNA sense strand
agcaugauauuuggaguga

SEQ ID NO: 2104807 - RNA, 19 nt, Homo sapiens
  misc_RNA (1)...(19): siRNA sense strand
cccaaagcacugacaaaga

SEQ ID NO: 2104808 - RNA, 19 nt, Homo sapiens
  misc_RNA (1)...(19): siRNA sense strand
gggcaugggauaucuucau

SEQ ID NO: 2104809 - RNA, 19 nt, Homo sapiens
  misc_RNA (1)...(19): siRNA sense strand
ucaucaagggcaugggaua

SEQ ID NO: 2104810 - RNA, 19 nt, Homo sapiens
  misc_RNA (1)...(19): siRNA sense strand
ucaacaagacgaggcaaau

SEQ ID NO: 2104811 - RNA, 19 nt, Homo sapiens
  misc_RNA (1)...(19): siRNA sense strand
uagacagcaguuuaucuuu

SEQ ID NO: 2104812 - RNA, 19 nt, Homo sapiens
  misc_RNA (1)...(19): siRNA sense strand
ccauucgccugcuggagau

SEQ ID NO: 2104813 - RNA, 19 nt, Homo sapiens
  misc_RNA (1)...(19): siRNA sense strand
ggcgugagaaccagcuaaa

SEQ ID NO: 2104814 - RNA, 19 nt, Homo sapiens
  misc_RNA (1)...(19): siRNA sense strand
gagagggacggcgugagaa

SEQ ID NO: 2104815 - RNA, 19 nt, Homo sapiens
  misc_RNA (1)...(19): siRNA sense strand
caucaagggcaugggauau

SEQ ID NO: 2104816 - RNA, 19 nt, Homo sapiens
  misc_RNA (1)...(19): siRNA sense strand
acaacaaauguaccaaaga

SEQ ID NO: 2104817 - RNA, 19 nt, Homo sapiens
  misc_RNA (1)...(19): siRNA sense strand
cacagguucuccaccaagu

SEQ ID NO: 2104818 - RNA, 19 nt, Homo sapiens
  misc_RNA (1)...(19): siRNA sense strand
uauuuggagugaagugcaa

SEQ ID NO: 2104819 - RNA, 19 nt, Homo sapiens
  misc_RNA (1)...(19): siRNA sense strand
aggaucagcugccauucuc

SEQ ID NO: 2104820 - RNA, 19 nt, Homo sapiens
  misc_RNA (1)...(19): siRNA sense strand
gagaacguggugcucuuca

SEQ ID NO: 2104821 - RNA, 19 nt, Homo sapiens
  misc_RNA (1)...(19): siRNA sense strand
gaaagaggugaugaacuac

SEQ ID NO: 2104822 - RNA, 19 nt, Homo sapiens
  misc_RNA (1)...(19): siRNA sense strand
aggacgagguggacgacuu

SEQ ID NO: 2104823 - RNA, 19 nt, Homo sapiens
  misc_RNA (1)...(19): siRNA sense strand
uugcagaaaguuuaaagga

SEQ ID NO: 2104824 - RNA, 19 nt, Homo sapiens
  misc_RNA (1)...(19): siRNA sense strand
cugccuacuucauucauca

SEQ ID NO: 2104825 - RNA, 19 nt, Homo sapiens
  misc_RNA (1)...(19): siRNA sense strand
gccccugccuguagaauau

SEQ ID NO: 2104826 - RNA, 19 nt, Homo sapiens
  misc_RNA (1)...(19): siRNA sense strand
gaaacugccuuauugaauu

SEQ ID NO: 2104827 - RNA, 19 nt, Homo sapiens
  misc_RNA (1)...(19): siRNA sense strand
gaacggaccuacagaaagu

SEQ ID NO: 2104828 - RNA, 19 nt, Homo sapiens
  misc_RNA (1)...(19): siRNA sense strand
gggauuagaucuugucauu

SEQ ID NO: 2104829 - RNA, 19 nt, Homo sapiens
  misc_RNA (1)...(19): siRNA sense strand
gaaugucagucuuaaguuu

SEQ ID NO: 2104830 - RNA, 19 nt, Homo sapiens
  misc_RNA (1)...(19): siRNA sense strand
gaagauggguuguuguugu

SEQ ID NO: 2104831 - RNA, 19 nt, Homo sapiens
  misc_RNA (1)...(19): siRNA sense strand
guggauaccuucacccuua

SEQ ID NO: 2104832 - RNA, 19 nt, Homo sapiens
  misc_RNA (1)...(19): siRNA sense strand
gaacuagcaacucagauua

SEQ ID NO: 2104833 - RNA, 19 nt, Homo sapiens
  misc_RNA (1)...(19): siRNA sense strand
gcaauaguaucuucaacuu

SEQ ID NO: 2104834 - RNA, 19 nt, Homo sapiens
  misc_RNA (1)...(19): siRNA sense strand
gauuagaucuugucauuca

SEQ ID NO: 2104835 - RNA, 19 nt, Homo sapiens
  misc_RNA (1)...(19): siRNA sense strand
gaauaagucugaugacaca

SEQ ID NO: 2104836 - RNA, 19 nt, Homo sapiens
  misc_RNA (1)...(19): siRNA sense strand
gguuagaggugaagaauau

SEQ ID NO: 2104837 - RNA, 19 nt, Homo sapiens
  misc_RNA (1)...(19): siRNA sense strand
gcagauguauucuaucaug

SEQ ID NO: 2104838 - RNA, 19 nt, Homo sapiens
  misc_RNA (1)...(19): siRNA sense strand
gagaacagccucuaaguau

SEQ ID NO: 2104839 - RNA, 19 nt, Homo sapiens
  misc_RNA (1)...(19): siRNA sense strand
ggggaaagcucuucaauaa

SEQ ID NO: 2104840 - RNA, 19 nt, Homo sapiens
  misc_RNA (1)...(19): siRNA sense strand
gaacagccucuaaguauga

SEQ ID NO: 2104841 - RNA, 19 nt, Homo sapiens
  misc_RNA (1)...(19): siRNA sense strand
aaaggcagcuguacucaaa

SEQ ID NO: 2104842 - RNA, 19 nt, Homo sapiens
  misc_RNA (1)...(19): siRNA sense strand
gaagaggaaucaggcauga

SEQ ID NO: 2104843 - RNA, 19 nt, Homo sapiens
  misc_RNA (1)...(19): siRNA sense strand
gaacaacuccuucaucuac

SEQ ID NO: 2104844 - RNA, 19 nt, Homo sapiens
  misc_RNA (1)...(19): siRNA sense strand
ggaguuuccuuaucaguau

SEQ ID NO: 2104845 - RNA, 19 nt, Homo sapiens
  misc_RNA (1)...(19): siRNA sense strand
ggaaaaggcuaaucuguga

SEQ ID NO: 2104846 - RNA, 19 nt, Homo sapiens
  misc_RNA (1)...(19): siRNA sense strand
ugacauugauccugaacua

SEQ ID NO: 2104847 - RNA, 19 nt, Homo sapiens
  misc_RNA (1)...(19): siRNA sense strand
ggugauacauugaagcaaa

SEQ ID NO: 2104848 - RNA, 19 nt, Homo sapiens
  misc_RNA (1)...(19): siRNA sense strand
caacuauucuccauucaug

SEQ ID NO: 2104849 - RNA, 19 nt, Homo sapiens
  misc_RNA (1)...(19): siRNA sense strand
ggacauggcuagacuuugc

SEQ ID NO: 2104850 - RNA, 19 nt, Homo sapiens
  misc_RNA (1)...(19): siRNA sense strand
gagguucccugcaggcaua

SEQ ID NO: 2104851 - RNA, 19 nt, Homo sapiens
  misc_RNA (1)...(19): siRNA sense strand
gccaugaucuuccacacua

SEQ ID NO: 2104852 - RNA, 19 nt, Homo sapiens
  misc_RNA (1)...(19): siRNA sense strand
gaaagugaagaacugaaua

SEQ ID NO: 2104853 - RNA, 19 nt, Homo sapiens
  misc_RNA (1)...(19): siRNA sense strand
gaacacaagcgugguauug

SEQ ID NO: 2104854 - RNA, 19 nt, Homo sapiens
  misc_RNA (1)...(19): siRNA sense strand
ggaaagcucuucaauaacc

SEQ ID NO: 2104855 - RNA, 19 nt, Homo sapiens
  misc_RNA (1)...(19): siRNA sense strand
caaauucuaccaugacuuu

SEQ ID NO: 2104856 - RNA, 19 nt, Homo sapiens
  misc_RNA (1)...(19): siRNA sense strand
gaagacaugaacuuguuua

SEQ ID NO: 2104857 - RNA, 19 nt, Homo sapiens
  misc_RNA (1)...(19): siRNA sense strand
ggauaccucugaguccuua

SEQ ID NO: 2104858 - RNA, 19 nt, Homo sapiens
  misc_RNA (1)...(19): siRNA sense strand
gggcugaccuuacuuugga

SEQ ID NO: 2104859 - RNA, 19 nt, Homo sapiens
  misc_RNA (1)...(19): siRNA sense strand
gagcacuucucauggguuu

SEQ ID NO: 2104860 - RNA, 19 nt, Homo sapiens
  misc_RNA (1)...(19): siRNA sense strand
gaaggaacauagugagaag

SEQ ID NO: 2104861 - RNA, 19 nt, Homo sapiens
  misc_RNA (1)...(19): siRNA sense strand
gcccaagccuagcaucuaa

SEQ ID NO: 2104862 - RNA, 19 nt, Homo sapiens
  misc_RNA (1)...(19): siRNA sense strand
guacucaaacguaaucuuu

SEQ ID NO: 2104863 - RNA, 19 nt, Homo sapiens
  misc_RNA (1)...(19): siRNA sense strand
cgaauucugcuauauagua

SEQ ID NO: 2104864 - RNA, 19 nt, Homo sapiens
  misc_RNA (1)...(19): siRNA sense strand
gcaaacuccuuagccauga

SEQ ID NO: 2104865 - RNA, 19 nt, Homo sapiens
  misc_RNA (1)...(19): siRNA sense strand
caagaacccuggcaagaag

SEQ ID NO: 2104866 - RNA, 19 nt, Homo sapiens
  misc_RNA (1)...(19): siRNA sense strand
gcaccuccaucuccaaugu

SEQ ID NO: 2104867 - RNA, 19 nt, Homo sapiens
  misc_RNA (1)...(19): siRNA sense strand
gaaagcagcaagaagaugu

SEQ ID NO: 2104868 - RNA, 19 nt, Homo sapiens
  misc_RNA (1)...(19): siRNA sense strand
agacauugccuuuggguua

SEQ ID NO: 2104869 - RNA, 19 nt, Homo sapiens
  misc_RNA (1)...(19): siRNA sense strand
caacacaacugaaaauaug

SEQ ID NO: 2104870 - RNA, 19 nt, Homo sapiens
  misc_RNA (1)...(19): siRNA sense strand
ugaaaucagucacggagaa

SEQ ID NO: 2104871 - RNA, 19 nt, Homo sapiens
  misc_RNA (1)...(19): siRNA sense strand
cagcaaaguucuaaagagu

SEQ ID NO: 2104872 - RNA, 19 nt, Homo sapiens
  misc_RNA (1)...(19): siRNA sense strand
ggggaaagcuagaaacuaa

SEQ ID NO: 2104873 - RNA, 19 nt, Homo sapiens
  misc_RNA (1)...(19): siRNA sense strand
ugccgaauguacuauauua

SEQ ID NO: 2104874 - RNA, 19 nt, Homo sapiens
  misc_RNA (1)...(19): siRNA sense strand
aaccgaaacugccuuauug

SEQ ID NO: 2104875 - RNA, 19 nt, Homo sapiens
  misc_RNA (1)...(19): siRNA sense strand
gaagcuaauugaagagaca

SEQ ID NO: 2104876 - RNA, 19 nt, Homo sapiens
  misc_RNA (1)...(19): siRNA sense strand
gcuaaugggucgacuugug

SEQ ID NO: 2104877 - RNA, 19 nt, Homo sapiens
  misc_RNA (1)...(19): siRNA sense strand
caccugaucuacucuuaaa

SEQ ID NO: 2104878 - RNA, 19 nt, Homo sapiens
  misc_RNA (1)...(19): siRNA sense strand
gaugaaggaugaaaguaag

SEQ ID NO: 2104879 - RNA, 19 nt, Homo sapiens
  misc_RNA (1)...(19): siRNA sense strand
guguuuggcuccucucuuu

SEQ ID NO: 2104880 - RNA, 19 nt, Homo sapiens
  misc_RNA (1)...(19): siRNA sense strand
gcagcgggcuaacaagaug

SEQ ID NO: 2104881 - RNA, 19 nt, Homo sapiens
  misc_RNA (1)...(19): siRNA sense strand
gaacugaauauccucauca

SEQ ID NO: 2104882 - RNA, 19 nt, Homo sapiens
  misc_RNA (1)...(19): siRNA sense strand
gaaacuucaugauaacuac

SEQ ID NO: 2104883 - RNA, 19 nt, Homo sapiens
  misc_RNA (1)...(19): siRNA sense strand
gugcuuacauguugcagaa

SEQ ID NO: 2104884 - RNA, 19 nt, Homo sapiens
  misc_RNA (1)...(19): siRNA sense strand
cagcuguacucaaacguaa

SEQ ID NO: 2104885 - RNA, 19 nt, Homo sapiens
  misc_RNA (1)...(19): siRNA sense strand
acaagcaacuuuccuauac

SEQ ID NO: 2104886 - RNA, 19 nt, Homo sapiens
  misc_RNA (1)...(19): siRNA sense strand
gaauucugcuauauaguag

SEQ ID NO: 2104887 - RNA, 19 nt, Homo sapiens
  misc_RNA (1)...(19): siRNA sense strand
aagcagauguauucuauca

SEQ ID NO: 2104888 - RNA, 19 nt, Homo sapiens
  misc_RNA (1)...(19): siRNA sense strand
gaagagacagauagguuug

SEQ ID NO: 2104889 - RNA, 19 nt, Homo sapiens
  misc_RNA (1)...(19): siRNA sense strand
cuuaguagauuuacggauu

SEQ ID NO: 2104890 - RNA, 19 nt, Homo sapiens
  misc_RNA (1)...(19): siRNA sense strand
gcuggaagauggguuguug

SEQ ID NO: 2104891 - RNA, 19 nt, Homo sapiens
  misc_RNA (1)...(19): siRNA sense strand
ggaagaugaugaaguuggu

SEQ ID NO: 2104892 - RNA, 19 nt, Homo sapiens
  misc_RNA (1)...(19): siRNA sense strand
uguggaagaugaugaaguu

SEQ ID NO: 2104893 - RNA, 19 nt, Homo sapiens
  misc_RNA (1)...(19): siRNA sense strand
ggaaggaacauagugagaa

SEQ ID NO: 2104894 - RNA, 19 nt, Homo sapiens
  misc_RNA (1)...(19): siRNA sense strand
aaacugccuuauugaauug

SEQ ID NO: 2104895 - RNA, 19 nt, Homo sapiens
  misc_RNA (1)...(19): siRNA sense strand
aaagauugauccacagaug

SEQ ID NO: 2104896 - RNA, 19 nt, Homo sapiens
  misc_RNA (1)...(19): siRNA sense strand
ucgaagacaugaacuuguu

SEQ ID NO: 2104897 - RNA, 19 nt, Homo sapiens
  misc_RNA (1)...(19): siRNA sense strand
gaaucugugucauuacugu

SEQ ID NO: 2104898 - RNA, 19 nt, Homo sapiens
  misc_RNA (1)...(19): siRNA sense strand
ucugaacacuugcaucauu

SEQ ID NO: 2104899 - RNA, 19 nt, Homo sapiens
  misc_RNA (1)...(19): siRNA sense strand
ggagaagugcguaucagaa

SEQ ID NO: 2104900 - RNA, 19 nt, Homo sapiens
  misc_RNA (1)...(19): siRNA sense strand
ggaaagcuagaaacuaaau

SEQ ID NO: 2104901 - RNA, 19 nt, Homo sapiens
  misc_RNA (1)...(19): siRNA sense strand
caaccgaaacugccuuauu

SEQ ID NO: 2104902 - RNA, 19 nt, Homo sapiens
  misc_RNA (1)...(19): siRNA sense strand
aacguaaucuuucuacuga

SEQ ID NO: 2104903 - RNA, 19 nt, Homo sapiens
  misc_RNA (1)...(19): siRNA sense strand
gcugaggacaaguucauua

SEQ ID NO: 2104904 - RNA, 19 nt, Homo sapiens
  misc_RNA (1)...(19): siRNA sense strand
cagaucacauguaccugua

SEQ ID NO: 2104905 - RNA, 19 nt, Homo sapiens
  misc_RNA (1)...(19): siRNA sense strand
gaacuuguuuacccuuucu

SEQ ID NO: 2104906 - RNA, 19 nt, Homo sapiens
  misc_RNA (1)...(19): siRNA sense strand
acacuugcaucauucacua

SEQ ID NO: 2104907 - RNA, 19 nt, Homo sapiens
  misc_RNA (1)...(19): siRNA sense strand
uauguaagaucaacagcaa

SEQ ID NO: 2104908 - RNA, 19 nt, Homo sapiens
  misc_RNA (1)...(19): siRNA sense strand
ggagaacacaagcguggua

SEQ ID NO: 2104909 - RNA, 19 nt, Homo sapiens
  misc_RNA (1)...(19): siRNA sense strand
cagcugcacuuaguagauu

SEQ ID NO: 2104910 - RNA, 19 nt, Homo sapiens
  misc_RNA (1)...(19): siRNA sense strand
gcuacuggaugcuaaagug

SEQ ID NO: 2104911 - RNA, 19 nt, Homo sapiens
  misc_RNA (1)...(19): siRNA sense strand
gaucuucugccaacuauuc

SEQ ID NO: 2104912 - RNA, 19 nt, Homo sapiens
  misc_RNA (1)...(19): siRNA sense strand
cauaaagauuccacagguu

SEQ ID NO: 2104913 - RNA, 19 nt, Homo sapiens
  misc_RNA (1)...(19): siRNA sense strand
gcaaggugaauaagucuga

SEQ ID NO: 2104914 - RNA, 19 nt, Homo sapiens
  misc_RNA (1)...(19): siRNA sense strand
ugaagucuuugcaggauga

SEQ ID NO: 2104915 - RNA, 19 nt, Homo sapiens
  misc_RNA (1)...(19): siRNA sense strand
ccagacggaugacauauac

SEQ ID NO: 2104916 - RNA, 19 nt, Homo sapiens
  misc_RNA (1)...(19): siRNA sense strand
acagauagguuuguagugu

SEQ ID NO: 2104917 - RNA, 19 nt, Homo sapiens
  misc_RNA (1)...(19): siRNA sense strand
gauccuaccuuucauacac

SEQ ID NO: 2104918 - RNA, 19 nt, Homo sapiens
  misc_RNA (1)...(19): siRNA sense strand
agagaaugcugaucacugu

SEQ ID NO: 2104919 - RNA, 19 nt, Homo sapiens
  misc_RNA (1)...(19): siRNA sense strand
gguuggugcuucagaggua

SEQ ID NO: 2104920 - RNA, 19 nt, Homo sapiens
  misc_RNA (1)...(19): siRNA sense strand
ucuaggcacucuucauuug

SEQ ID NO: 2104921 - RNA, 19 nt, Homo sapiens
  misc_RNA (1)...(19): siRNA sense strand
cuucgaagcuucacagcaa

SEQ ID NO: 2104922 - RNA, 19 nt, Homo sapiens
  misc_RNA (1)...(19): siRNA sense strand
ggagcucuaugccucuuug

SEQ ID NO: 2104923 - RNA, 19 nt, Homo sapiens
  misc_RNA (1)...(19): siRNA sense strand
aauuagaacugcagagguu

SEQ ID NO: 2104924 - RNA, 19 nt, Homo sapiens
  misc_RNA (1)...(19): siRNA sense strand
ggaaagugaagaacugaau

SEQ ID NO: 2104925 - RNA, 19 nt, Homo sapiens
  misc_RNA (1)...(19): siRNA sense strand
ugagaacagccucuaagua

SEQ ID NO: 2104926 - RNA, 19 nt, Homo sapiens
  misc_RNA (1)...(19): siRNA sense strand
gcacaaagcuguucugaaa

SEQ ID NO: 2104927 - RNA, 19 nt, Homo sapiens
  misc_RNA (1)...(19): siRNA sense strand
gaacaaaugucuggcuaua

SEQ ID NO: 2104928 - RNA, 19 nt, Homo sapiens
  misc_RNA (1)...(19): siRNA sense strand
gaaagaggcuaaagugaug

SEQ ID NO: 2104929 - RNA, 19 nt, Homo sapiens
  misc_RNA (1)...(19): siRNA sense strand
gaagucaaguuucuacaaa

SEQ ID NO: 2104930 - RNA, 19 nt, Homo sapiens
  misc_RNA (1)...(19): siRNA sense strand
ccaaguaucucgucacaaa

SEQ ID NO: 2104931 - RNA, 19 nt, Homo sapiens
  misc_RNA (1)...(19): siRNA sense strand
gaacagacccggaaauuag

SEQ ID NO: 2104932 - RNA, 19 nt, Homo sapiens
  misc_RNA (1)...(19): siRNA sense strand
ccagagagauugaagcuuu

SEQ ID NO: 2104933 - RNA, 19 nt, Homo sapiens
  misc_RNA (1)...(19): siRNA sense strand
uaagagagcuggacaaucu

SEQ ID NO: 2104934 - RNA, 19 nt, Homo sapiens
  misc_RNA (1)...(19): siRNA sense strand
gaacaucgccucagauuag

SEQ ID NO: 2104935 - RNA, 19 nt, Homo sapiens
  misc_RNA (1)...(19): siRNA sense strand
gagcaggacucugagcuua

SEQ ID NO: 2104936 - RNA, 19 nt, Homo sapiens
  misc_RNA (1)...(19): siRNA sense strand
cuaaccagcuggaauauaa

SEQ ID NO: 2104937 - RNA, 19 nt, Homo sapiens
  misc_RNA (1)...(19): siRNA sense strand
acaaagaucuugaaacuca

SEQ ID NO: 2104938 - RNA, 19 nt, Homo sapiens
  misc_RNA (1)...(19): siRNA sense strand
guaauaugguccuuucuaa

SEQ ID NO: 2104939 - RNA, 19 nt, Homo sapiens
  misc_RNA (1)...(19): siRNA sense strand
gaaaugcucuccacacaag

SEQ ID NO: 2104940 - RNA, 19 nt, Homo sapiens
  misc_RNA (1)...(19): siRNA sense strand
ggaaauagcagcaauuaca

SEQ ID NO: 2104941 - RNA, 19 nt, Homo sapiens
  misc_RNA (1)...(19): siRNA sense strand
ggagaaacuuaucaagaaa

SEQ ID NO: 2104942 - RNA, 19 nt, Homo sapiens
  misc_RNA (1)...(19): siRNA sense strand
gacaaaggaugcaguaaga

SEQ ID NO: 2104943 - RNA, 19 nt, Homo sapiens
  misc_RNA (1)...(19): siRNA sense strand
gaucacagcauuaaugaaa

SEQ ID NO: 2104944 - RNA, 19 nt, Homo sapiens
  misc_RNA (1)...(19): siRNA sense strand
caaagaagauccagagaag

SEQ ID NO: 2104945 - RNA, 19 nt, Homo sapiens
  misc_RNA (1)...(19): siRNA sense strand
gacaacagccuaagaguuu

SEQ ID NO: 2104946 - RNA, 19 nt, Homo sapiens
  misc_RNA (1)...(19): siRNA sense strand
gcagaaauggagaaacuua

SEQ ID NO: 2104947 - RNA, 19 nt, Homo sapiens
  misc_RNA (1)...(19): siRNA sense strand
aagaagagauguuggcuuu

SEQ ID NO: 2104948 - RNA, 19 nt, Homo sapiens
  misc_RNA (1)...(19): siRNA sense strand
ggaagccuccuuuauuuaa

SEQ ID NO: 2104949 - RNA, 19 nt, Homo sapiens
  misc_RNA (1)...(19): siRNA sense strand
gaaaagagcagcuuaaaga

SEQ ID NO: 2104950 - RNA, 19 nt, Homo sapiens
  misc_RNA (1)...(19): siRNA sense strand
aaacucagcguaacaauuu

SEQ ID NO: 2104951 - RNA, 19 nt, Homo sapiens
  misc_RNA (1)...(19): siRNA sense strand
gcagagcucuucuucaaag

SEQ ID NO: 2104952 - RNA, 19 nt, Homo sapiens
  misc_RNA (1)...(19): siRNA sense strand
ggugaaacuugcugacuuu

SEQ ID NO: 2104953 - RNA, 19 nt, Homo sapiens
  misc_RNA (1)...(19): siRNA sense strand
cuaaagugauguccaauga

SEQ ID NO: 2104954 - RNA, 19 nt, Homo sapiens
  misc_RNA (1)...(19): siRNA sense strand
gagaacacuuugcuacuau

SEQ ID NO: 2104955 - RNA, 19 nt, Homo sapiens
  misc_RNA (1)...(19): siRNA sense strand
ggaacagacccggaaauua

SEQ ID NO: 2104956 - RNA, 19 nt, Homo sapiens
  misc_RNA (1)...(19): siRNA sense strand
aaacugagcucacuaacca

SEQ ID NO: 2104957 - RNA, 19 nt, Homo sapiens
  misc_RNA (1)...(19): siRNA sense strand
cagcauggcuuguaaugga

SEQ ID NO: 2104958 - RNA, 19 nt, Homo sapiens
  misc_RNA (1)...(19): siRNA sense strand
uggagaaacuuaucaagaa

SEQ ID NO: 2104959 - RNA, 19 nt, Homo sapiens
  misc_RNA (1)...(19): siRNA sense strand
guagauguguggucucuug

SEQ ID NO: 2104960 - RNA, 19 nt, Homo sapiens
  misc_RNA (1)...(19): siRNA sense strand
gaaggacccugaaauugca

SEQ ID NO: 2104961 - RNA, 19 nt, Homo sapiens
  misc_RNA (1)...(19): siRNA sense strand
gaaauggcaggauauuauu

SEQ ID NO: 2104962 - RNA, 19 nt, Homo sapiens
  misc_RNA (1)...(19): siRNA sense strand
agacaaagaucuugaaacu

SEQ ID NO: 2104963 - RNA, 19 nt, Homo sapiens
  misc_RNA (1)...(19): siRNA sense strand
cgagaacacuuugcuacua

SEQ ID NO: 2104964 - RNA, 19 nt, Homo sapiens
  misc_RNA (1)...(19): siRNA sense strand
acaauaugauggcaaagua

SEQ ID NO: 2104965 - RNA, 19 nt, Homo sapiens
  misc_RNA (1)...(19): siRNA sense strand
ggauuagccuacuuacauu

SEQ ID NO: 2104966 - RNA, 19 nt, Homo sapiens
  misc_RNA (1)...(19): siRNA sense strand
gaagcagagugccagguuu

SEQ ID NO: 2104967 - RNA, 19 nt, Homo sapiens
  misc_RNA (1)...(19): siRNA sense strand
gaagaugcgcugugaguug

SEQ ID NO: 2104968 - RNA, 19 nt, Homo sapiens
  misc_RNA (1)...(19): siRNA sense strand
gaacgagaacuaagacgaa

SEQ ID NO: 2104969 - RNA, 19 nt, Homo sapiens
  misc_RNA (1)...(19): siRNA sense strand
gcugugaguugaucagauu

SEQ ID NO: 2104970 - RNA, 19 nt, Homo sapiens
  misc_RNA (1)...(19): siRNA sense strand
ggagaaagaggcuaaagug

SEQ ID NO: 2104971 - RNA, 19 nt, Homo sapiens
  misc_RNA (1)...(19): siRNA sense strand
ggagggcacucuuagaaca

SEQ ID NO: 2104972 - RNA, 19 nt, Homo sapiens
  misc_RNA (1)...(19): siRNA sense strand
gcaguaugaucacagcauu

SEQ ID NO: 2104973 - RNA, 19 nt, Homo sapiens
  misc_RNA (1)...(19): siRNA sense strand
gaaacucagcguaacaauu

SEQ ID NO: 2104974 - RNA, 19 nt, Homo sapiens
  misc_RNA (1)...(19): siRNA sense strand
gcgaagagaacgagaacua

SEQ ID NO: 2104975 - RNA, 19 nt, Homo sapiens
  misc_RNA (1)...(19): siRNA sense strand
ucacuaaccagcuggaaua

SEQ ID NO: 2104976 - RNA, 19 nt, Homo sapiens
  misc_RNA (1)...(19): siRNA sense strand
ggaagaaaauuacagagaa

SEQ ID NO: 2104977 - RNA, 19 nt, Homo sapiens
  misc_RNA (1)...(19): siRNA sense strand
ggcaggauauuauuaagga

SEQ ID NO: 2104978 - RNA, 19 nt, Homo sapiens
  misc_RNA (1)...(19): siRNA sense strand
ggucacacaugucuuauac

SEQ ID NO: 2104979 - RNA, 19 nt, Homo sapiens
  misc_RNA (1)...(19): siRNA sense strand
gaacuggagcuguugaaug

SEQ ID NO: 2104980 - RNA, 19 nt, Homo sapiens
  misc_RNA (1)...(19): siRNA sense strand
caaagcagaaggagaauau

SEQ ID NO: 2104981 - RNA, 19 nt, Homo sapiens
  misc_RNA (1)...(19): siRNA sense strand
uuaaagaggagcuaaauga

SEQ ID NO: 2104982 - RNA, 19 nt, Homo sapiens
  misc_RNA (1)...(19): siRNA sense strand
gagaaauggcaggauauua

SEQ ID NO: 2104983 - RNA, 19 nt, Homo sapiens
  misc_RNA (1)...(19): siRNA sense strand
cuaagaguuugaagucuaa

SEQ ID NO: 2104984 - RNA, 19 nt, Homo sapiens
  misc_RNA (1)...(19): siRNA sense strand
ccuaagaguuugaagucua

SEQ ID NO: 2104985 - RNA, 19 nt, Homo sapiens
  misc_RNA (1)...(19): siRNA sense strand
gaaaaucccucaagaucga

SEQ ID NO: 2104986 - RNA, 19 nt, Homo sapiens
  misc_RNA (1)...(19): siRNA sense strand
gauguuggcuuugcagaau

SEQ ID NO: 2104987 - RNA, 19 nt, Homo sapiens
  misc_RNA (1)...(19): siRNA sense strand
gaagagauguuggcuuugc

SEQ ID NO: 2104988 - RNA, 19 nt, Homo sapiens
  misc_RNA (1)...(19): siRNA sense strand
gaagagggagauccuagaa

SEQ ID NO: 2104989 - RNA, 19 nt, Homo sapiens
  misc_RNA (1)...(19): siRNA sense strand
gaaaccguguuaauagauc

SEQ ID NO: 2104990 - RNA, 19 nt, Homo sapiens
  misc_RNA (1)...(19): siRNA sense strand
gcaggacucugagcuuaga

SEQ ID NO: 2104991 - RNA, 19 nt, Homo sapiens
  misc_RNA (1)...(19): siRNA sense strand
gauuacagcaucaaacuga

SEQ ID NO: 2104992 - RNA, 19 nt, Homo sapiens
  misc_RNA (1)...(19): siRNA sense strand
gcuaaaggcugagauggau

SEQ ID NO: 2104993 - RNA, 19 nt, Homo sapiens
  misc_RNA (1)...(19): siRNA sense strand
acaaaugucuggcuauaag

SEQ ID NO: 2104994 - RNA, 19 nt, Homo sapiens
  misc_RNA (1)...(19): siRNA sense strand
ggaauauuguuuaggaucu

SEQ ID NO: 2104995 - RNA, 19 nt, Homo sapiens
  misc_RNA (1)...(19): siRNA sense strand
gagcagggcaugagcagaa

SEQ ID NO: 2104996 - RNA, 19 nt, Homo sapiens
  misc_RNA (1)...(19): siRNA sense strand
gauguccaaugaagagaaa

SEQ ID NO: 2104997 - RNA, 19 nt, Homo sapiens
  misc_RNA (1)...(19): siRNA sense strand
gagaugugcguaccaauga

SEQ ID NO: 2104998 - RNA, 19 nt, Homo sapiens
  misc_RNA (1)...(19): siRNA sense strand
ggacaggaacaguuaauag

SEQ ID NO: 2104999 - RNA, 19 nt, Homo sapiens
  misc_RNA (1)...(19): siRNA sense strand
gggauuagccuacuuacau

SEQ ID NO: 2105000 - RNA, 19 nt, Homo sapiens
  misc_RNA (1)...(19): siRNA sense strand
uacaaaggcuguuauuuac

SEQ ID NO: 2105001 - RNA, 19 nt, Homo sapiens
  misc_RNA (1)...(19): siRNA sense strand
caacacaauucagaagaug

SEQ ID NO: 2105002 - RNA, 19 nt, Homo sapiens
  misc_RNA (1)...(19): siRNA sense strand
ggaaugccgucgcuucaag

SEQ ID NO: 2105003 - RNA, 19 nt, Homo sapiens
  misc_RNA (1)...(19): siRNA sense strand
gaauauacagcauuuccaa

SEQ ID NO: 2105004 - RNA, 19 nt, Homo sapiens
  misc_RNA (1)...(19): siRNA sense strand
aaacaggaguggcuuucaa

SEQ ID NO: 2105005 - RNA, 19 nt, Homo sapiens
  misc_RNA (1)...(19): siRNA sense strand
gaaauggagaaacuuauca

SEQ ID NO: 2105006 - RNA, 19 nt, Homo sapiens
  misc_RNA (1)...(19): siRNA sense strand
uguguggucucuuggaaua

SEQ ID NO: 2105007 - RNA, 19 nt, Homo sapiens
  misc_RNA (1)...(19): siRNA sense strand
gaaagcaugagacuagguu

SEQ ID NO: 2105008 - RNA, 19 nt, Homo sapiens
  misc_RNA (1)...(19): siRNA sense strand
agaaauggcaggauauuau

SEQ ID NO: 2105009 - RNA, 19 nt, Homo sapiens
  misc_RNA (1)...(19): siRNA sense strand
gaagaaagaacugaauagu

SEQ ID NO: 2105010 - RNA, 19 nt, Homo sapiens
  misc_RNA (1)...(19): siRNA sense strand
uugcagagcucuucuucaa

SEQ ID NO: 2105011 - RNA, 19 nt, Homo sapiens
  misc_RNA (1)...(19): siRNA sense strand
gcaguaguguuaacagucu

SEQ ID NO: 2105012 - RNA, 19 nt, Homo sapiens
  misc_RNA (1)...(19): siRNA sense strand
guuaauagaucucauucag

SEQ ID NO: 2105013 - RNA, 19 nt, Homo sapiens
  misc_RNA (1)...(19): siRNA sense strand
ucuaaugaauggucugauu

SEQ ID NO: 2105014 - RNA, 19 nt, Homo sapiens
  misc_RNA (1)...(19): siRNA sense strand
gaagccuccuuuauuuaau

SEQ ID NO: 2105015 - RNA, 19 nt, Homo sapiens
  misc_RNA (1)...(19): siRNA sense strand
caaaggcuguuauuuacgu

SEQ ID NO: 2105016 - RNA, 19 nt, Homo sapiens
  misc_RNA (1)...(19): siRNA sense strand
cagaagaaagaacugaaua

SEQ ID NO: 2105017 - RNA, 19 nt, Homo sapiens
  misc_RNA (1)...(19): siRNA sense strand
gagaaagaggcuaaaguga

SEQ ID NO: 2105018 - RNA, 19 nt, Homo sapiens
  misc_RNA (1)...(19): siRNA sense strand
ggacaaaggaugcaguaag

SEQ ID NO: 2105019 - RNA, 19 nt, Homo sapiens
  misc_RNA (1)...(19): siRNA sense strand
gauaucaaagcaggaaaua

SEQ ID NO: 2105020 - RNA, 19 nt, Homo sapiens
  misc_RNA (1)...(19): siRNA sense strand
gagcuuagagaacaaaugu

SEQ ID NO: 2105021 - RNA, 19 nt, Homo sapiens
  misc_RNA (1)...(19): siRNA sense strand
agccaaagcaguaguguua

SEQ ID NO: 2105022 - RNA, 19 nt, Homo sapiens
  misc_RNA (1)...(19): siRNA sense strand
gcaacuuuguagauucuug

SEQ ID NO: 2105023 - RNA, 19 nt, Homo sapiens
  misc_RNA (1)...(19): siRNA sense strand
acagugaugucuaacaguu

SEQ ID NO: 2105024 - RNA, 19 nt, Homo sapiens
  misc_RNA (1)...(19): siRNA sense strand
uaucuuggcugagcaguau

SEQ ID NO: 2105025 - RNA, 19 nt, Homo sapiens
  misc_RNA (1)...(19): siRNA sense strand
acaaaucacacuaucguaa

SEQ ID NO: 2105026 - RNA, 19 nt, Homo sapiens
  misc_RNA (1)...(19): siRNA sense strand
gcacagagcuuccuuccuu

SEQ ID NO: 2105027 - RNA, 19 nt, Homo sapiens
  misc_RNA (1)...(19): siRNA sense strand
gaacggaggagaggauuaa

SEQ ID NO: 2105028 - RNA, 19 nt, Homo sapiens
  misc_RNA (1)...(19): siRNA sense strand
ucaaggaggcggucacaua

SEQ ID NO: 2105029 - RNA, 19 nt, Homo sapiens
  misc_RNA (1)...(19): siRNA sense strand
ggagggugcagccuuguuu

SEQ ID NO: 2105030 - RNA, 19 nt, Homo sapiens
  misc_RNA (1)...(19): siRNA sense strand
gcaacgugcucggccuuug

SEQ ID NO: 2105031 - RNA, 19 nt, Homo sapiens
  misc_RNA (1)...(19): siRNA sense strand
uggaggagaucuuuaacug

SEQ ID NO: 2105032 - RNA, 19 nt, Homo sapiens
  misc_RNA (1)...(19): siRNA sense strand
ucugacaacugaacucuuc

SEQ ID NO: 2105033 - RNA, 19 nt, Homo sapiens
  misc_RNA (1)...(19): siRNA sense strand
uggaagcgaucauacacaa

SEQ ID NO: 2105034 - RNA, 19 nt, Homo sapiens
  misc_RNA (1)...(19): siRNA sense strand
ggccuugacugaguucuuc

SEQ ID NO: 2105035 - RNA, 19 nt, Homo sapiens
  misc_RNA (1)...(19): siRNA sense strand
gguucccucuccaggauuu

SEQ ID NO: 2105036 - RNA, 19 nt, Homo sapiens
  misc_RNA (1)...(19): siRNA sense strand
caaccuggaggagaucuuu

SEQ ID NO: 2105037 - RNA, 19 nt, Homo sapiens
  misc_RNA (1)...(19): siRNA sense strand
gcuacuacccggucaucuu

SEQ ID NO: 2105038 - RNA, 19 nt, Homo sapiens
  misc_RNA (1)...(19): siRNA sense strand
ggacaccagcagacuguuc

SEQ ID NO: 2105039 - RNA, 19 nt, Homo sapiens
  misc_RNA (1)...(19): siRNA sense strand
caaggaggcggucacauac

SEQ ID NO: 2105040 - RNA, 19 nt, Homo sapiens
  misc_RNA (1)...(19): siRNA sense strand
cgaacggaggagaggauua

SEQ ID NO: 2105041 - RNA, 19 nt, Homo sapiens
  misc_RNA (1)...(19): siRNA sense strand
ggugguaggaccuuguguu

SEQ ID NO: 2105042 - RNA, 19 nt, Homo sapiens
  misc_RNA (1)...(19): siRNA sense strand
gcuccgggaugucgaugag

SEQ ID NO: 2105043 - RNA, 19 nt, Homo sapiens
  misc_RNA (1)...(19): siRNA sense strand
gccguucccuucgagaguu

SEQ ID NO: 2105044 - RNA, 19 nt, Homo sapiens
  misc_RNA (1)...(19): siRNA sense strand
cuacuacccggucaucuuc

SEQ ID NO: 2105045 - RNA, 19 nt, Homo sapiens
  misc_RNA (1)...(19): siRNA sense strand
caggagccguucccuucga

SEQ ID NO: 2105046 - RNA, 19 nt, Homo sapiens
  misc_RNA (1)...(19): siRNA sense strand
accacacucugacaacuga

SEQ ID NO: 2105047 - RNA, 19 nt, Homo sapiens
  misc_RNA (1)...(19): siRNA sense strand
uaacuggaagcgaucauac

SEQ ID NO: 2105048 - RNA, 19 nt, Homo sapiens
  misc_RNA (1)...(19): siRNA sense strand
gacaccagcagacuguuca

SEQ ID NO: 2105049 - RNA, 19 nt, Homo sapiens
  misc_RNA (1)...(19): siRNA sense strand
accaaaagcuuccccauca

SEQ ID NO: 2105050 - RNA, 19 nt, Homo sapiens
  misc_RNA (1)...(19): siRNA sense strand
gaccacacucugacaacug

SEQ ID NO: 2105051 - RNA, 19 nt, Homo sapiens
  misc_RNA (1)...(19): siRNA sense strand
gugguaggaccuuguguuc

SEQ ID NO: 2105052 - RNA, 19 nt, Homo sapiens
  misc_RNA (1)...(19): siRNA sense strand
aggaggcggucacauacau

SEQ ID NO: 2105053 - RNA, 19 nt, Homo sapiens
  misc_RNA (1)...(19): siRNA sense strand
gagggugcagccuuguuug

SEQ ID NO: 2105054 - RNA, 19 nt, Homo sapiens
  misc_RNA (1)...(19): siRNA sense strand
gaaagaaguuccaggauau

SEQ ID NO: 2105055 - RNA, 19 nt, Homo sapiens
  misc_RNA (1)...(19): siRNA sense strand
caagugagcucaugaaaga

SEQ ID NO: 2105056 - RNA, 19 nt, Homo sapiens
  misc_RNA (1)...(19): siRNA sense strand
gagauaggcuccugaguau

SEQ ID NO: 2105057 - RNA, 19 nt, Homo sapiens
  misc_RNA (1)...(19): siRNA sense strand
ugaaagaaguuccaggaua

SEQ ID NO: 2105058 - RNA, 19 nt, Homo sapiens
  misc_RNA (1)...(19): siRNA sense strand
gaaggagcauucaugaaga

SEQ ID NO: 2105059 - RNA, 19 nt, Homo sapiens
  misc_RNA (1)...(19): siRNA sense strand
gauaggcuccugaguauuu

SEQ ID NO: 2105060 - RNA, 19 nt, Homo sapiens
  misc_RNA (1)...(19): siRNA sense strand
ggaacagaaugaacagaaa

SEQ ID NO: 2105061 - RNA, 19 nt, Homo sapiens
  misc_RNA (1)...(19): siRNA sense strand
caacgucacuuucccacuu

SEQ ID NO: 2105062 - RNA, 19 nt, Homo sapiens
  misc_RNA (1)...(19): siRNA sense strand
aaacucaucuucgcaauau

SEQ ID NO: 2105063 - RNA, 19 nt, Homo sapiens
  misc_RNA (1)...(19): siRNA sense strand
caauguauauuccaggauu

SEQ ID NO: 2105064 - RNA, 19 nt, Homo sapiens
  misc_RNA (1)...(19): siRNA sense strand
cauguuaucuggaccuuga

SEQ ID NO: 2105065 - RNA, 19 nt, Homo sapiens
  misc_RNA (1)...(19): siRNA sense strand
gaggugugcuuuguucuuu

SEQ ID NO: 2105066 - RNA, 19 nt, Homo sapiens
  misc_RNA (1)...(19): siRNA sense strand
ggauaugacuauaagaaca

SEQ ID NO: 2105067 - RNA, 19 nt, Homo sapiens
  misc_RNA (1)...(19): siRNA sense strand
gagcauucaugaagauguu

SEQ ID NO: 2105068 - RNA, 19 nt, Homo sapiens
  misc_RNA (1)...(19): siRNA sense strand
gaacauggaacagaaugaa

SEQ ID NO: 2105069 - RNA, 19 nt, Homo sapiens
  misc_RNA (1)...(19): siRNA sense strand
caucuugccuuaucucuca

SEQ ID NO: 2105070 - RNA, 19 nt, Homo sapiens
  misc_RNA (1)...(19): siRNA sense strand
gaagucaagugagcucaug

SEQ ID NO: 2105071 - RNA, 19 nt, Homo sapiens
  misc_RNA (1)...(19): siRNA sense strand
gaucaaagcagucucuucu

SEQ ID NO: 2105072 - RNA, 19 nt, Homo sapiens
  misc_RNA (1)...(19): siRNA sense strand
guauauuccaggauuguua

SEQ ID NO: 2105073 - RNA, 19 nt, Homo sapiens
  misc_RNA (1)...(19): siRNA sense strand
aaaucuaggugcagaauca

SEQ ID NO: 2105074 - RNA, 19 nt, Homo sapiens
  misc_RNA (1)...(19): siRNA sense strand
gaacagaaagagcagaagu

SEQ ID NO: 2105075 - RNA, 19 nt, Homo sapiens
  misc_RNA (1)...(19): siRNA sense strand
gcugaggugugcuuuguuc

SEQ ID NO: 2105076 - RNA, 19 nt, Homo sapiens
  misc_RNA (1)...(19): siRNA sense strand
caacgaggaugugagaaag

SEQ ID NO: 2105077 - RNA, 19 nt, Homo sapiens
  misc_RNA (1)...(19): siRNA sense strand
caaacucaucuucgcaaua

SEQ ID NO: 2105078 - RNA, 19 nt, Homo sapiens
  misc_RNA (1)...(19): siRNA sense strand
gaaaauggaauguucagaa

SEQ ID NO: 2105079 - RNA, 19 nt, Homo sapiens
  misc_RNA (1)...(19): siRNA sense strand
gaacagaaugaacagaaag

SEQ ID NO: 2105080 - RNA, 19 nt, Homo sapiens
  misc_RNA (1)...(19): siRNA sense strand
agaagcaucuguagggaau

SEQ ID NO: 2105081 - RNA, 19 nt, Homo sapiens
  misc_RNA (1)...(19): siRNA sense strand
ccagaaggagcauucauga

SEQ ID NO: 2105082 - RNA, 19 nt, Homo sapiens
  misc_RNA (1)...(19): siRNA sense strand
agaaagagcagaagucaag

SEQ ID NO: 2105083 - RNA, 19 nt, Homo sapiens
  misc_RNA (1)...(19): siRNA sense strand
gcaguggcaucaacuuguc

SEQ ID NO: 2105084 - RNA, 19 nt, Homo sapiens
  misc_RNA (1)...(19): siRNA sense strand
gcaggaagcaaaggcauug

SEQ ID NO: 2105085 - RNA, 19 nt, Homo sapiens
  misc_RNA (1)...(19): siRNA sense strand
ccaacgaggaugugagaaa

SEQ ID NO: 2105086 - RNA, 19 nt, Homo sapiens
  misc_RNA (1)...(19): siRNA sense strand
caggauaugacuauaagaa

SEQ ID NO: 2105087 - RNA, 19 nt, Homo sapiens
  misc_RNA (1)...(19): siRNA sense strand
gugagcagcuagacaccaa

SEQ ID NO: 2105088 - RNA, 19 nt, Homo sapiens
  misc_RNA (1)...(19): siRNA sense strand
ucugacagcugaagaagca

SEQ ID NO: 2105089 - RNA, 19 nt, Homo sapiens
  misc_RNA (1)...(19): siRNA sense strand
ggaagcaaaggcauugaau

SEQ ID NO: 2105090 - RNA, 19 nt, Homo sapiens
  misc_RNA (1)...(19): siRNA sense strand
ccacuugacauucuucuuc

SEQ ID NO: 2105091 - RNA, 19 nt, Homo sapiens
  misc_RNA (1)...(19): siRNA sense strand
gauauuucaugaucaaagc

SEQ ID NO: 2105092 - RNA, 19 nt, Homo sapiens
  misc_RNA (1)...(19): siRNA sense strand
gcgagcagcaggaagcaaa

SEQ ID NO: 2105093 - RNA, 19 nt, Homo sapiens
  misc_RNA (1)...(19): siRNA sense strand
ucaauauuguuaccguuca

SEQ ID NO: 2105094 - RNA, 19 nt, Homo sapiens
  misc_RNA (1)...(19): siRNA sense strand
cagaauccacaaacugaaa

SEQ ID NO: 2105095 - RNA, 19 nt, Homo sapiens
  misc_RNA (1)...(19): siRNA sense strand
agaaggagcauucaugaag

SEQ ID NO: 2105096 - RNA, 19 nt, Homo sapiens
  misc_RNA (1)...(19): siRNA sense strand
ggugcagaaucaauauugu

SEQ ID NO: 2105097 - RNA, 19 nt, Homo sapiens
  misc_RNA (1)...(19): siRNA sense strand
gaugugagaaaguucaugu

SEQ ID NO: 2105098 - RNA, 19 nt, Homo sapiens
  misc_RNA (1)...(19): siRNA sense strand
gagaacauggaacagaaug

SEQ ID NO: 2105099 - RNA, 19 nt, Homo sapiens
  misc_RNA (1)...(19): siRNA sense strand
ggugugcuuuguucuuuua

SEQ ID NO: 2105100 - RNA, 19 nt, Homo sapiens
  misc_RNA (1)...(19): siRNA sense strand
ucuaggugcagaaucaaua

SEQ ID NO: 2105101 - RNA, 19 nt, Homo sapiens
  misc_RNA (1)...(19): siRNA sense strand
guuccaggauaugacuaua

SEQ ID NO: 2105102 - RNA, 19 nt, Homo sapiens
  misc_RNA (1)...(19): siRNA sense strand
uguagggaauccagaagga

SEQ ID NO: 2105103 - RNA, 19 nt, Homo sapiens
  misc_RNA (1)...(19): siRNA sense strand
agacagcaguggcaucaac

SEQ ID NO: 2105104 - RNA, 19 nt, Homo sapiens
  misc_RNA (1)...(19): siRNA sense strand
augagaacauggaacagaa

SEQ ID NO: 2105105 - RNA, 19 nt, Homo sapiens
  misc_RNA (1)...(19): siRNA sense strand
agacaccaaugacgagagu

SEQ ID NO: 2105106 - RNA, 19 nt, Homo sapiens
  misc_RNA (1)...(19): siRNA sense strand
gugcagaaucaauauuguu

SEQ ID NO: 2105107 - RNA, 19 nt, Homo sapiens
  misc_RNA (1)...(19): siRNA sense strand
uuaaugagaacauggaaca

SEQ ID NO: 2105108 - RNA, 19 nt, Homo sapiens
  misc_RNA (1)...(19): siRNA sense strand
acgaggaugugagaaaguu

SEQ ID NO: 2105109 - RNA, 19 nt, Homo sapiens
  misc_RNA (1)...(19): siRNA sense strand
gagcagcuagacaccaaug

SEQ ID NO: 2105110 - RNA, 19 nt, Homo sapiens
  misc_RNA (1)...(19): siRNA sense strand
acauucuucuucugucauu

SEQ ID NO: 2105111 - RNA, 19 nt, Homo sapiens
  misc_RNA (1)...(19): siRNA sense strand
ggugaucagcuugaaauuc

SEQ ID NO: 2105112 - RNA, 19 nt, Homo sapiens
  misc_RNA (1)...(19): siRNA sense strand
caucaacuugucaggcuuu

SEQ ID NO: 2105113 - RNA, 19 nt, Homo sapiens
  misc_RNA (1)...(19): siRNA sense strand
guguuuguguggauucaga

SEQ ID NO: 2105114 - RNA, 19 nt, Homo sapiens
  misc_RNA (1)...(19): siRNA sense strand
gaaguuccaggauaugacu

SEQ ID NO: 2105115 - RNA, 19 nt, Homo sapiens
  misc_RNA (1)...(19): siRNA sense strand
gaggaugugagaaaguuca

SEQ ID NO: 2105116 - RNA, 19 nt, Homo sapiens
  misc_RNA (1)...(19): siRNA sense strand
cagaaggagcauucaugaa

SEQ ID NO: 2105117 - RNA, 19 nt, Homo sapiens
  misc_RNA (1)...(19): siRNA sense strand
uggaacagaaugaacagaa

SEQ ID NO: 2105118 - RNA, 19 nt, Homo sapiens
  misc_RNA (1)...(19): siRNA sense strand
gaaaucuaggugcagaauc

SEQ ID NO: 2105119 - RNA, 19 nt, Homo sapiens
  misc_RNA (1)...(19): siRNA sense strand
caaaauacaauccuguguu

SEQ ID NO: 2105120 - RNA, 19 nt, Homo sapiens
  misc_RNA (1)...(19): siRNA sense strand
uccaggauaugacuauaag

SEQ ID NO: 2105121 - RNA, 19 nt, Homo sapiens
  misc_RNA (1)...(19): siRNA sense strand
aaggagcauucaugaagau

SEQ ID NO: 2105122 - RNA, 19 nt, Homo sapiens
  misc_RNA (1)...(19): siRNA sense strand
cagcaguggcaucaacuug

SEQ ID NO: 2105123 - RNA, 19 nt, Homo sapiens
  misc_RNA (1)...(19): siRNA sense strand
uaggugaucagcuugaaau

SEQ ID NO: 2105124 - RNA, 19 nt, Homo sapiens
  misc_RNA (1)...(19): siRNA sense strand
uguacaagauggagauagg

SEQ ID NO: 2105125 - RNA, 19 nt, Homo sapiens
  misc_RNA (1)...(19): siRNA sense strand
ugacgagagugauguuagc

SEQ ID NO: 2105126 - RNA, 19 nt, Homo sapiens
  misc_RNA (1)...(19): siRNA sense strand
acaaacucaucuucgcaau

SEQ ID NO: 2105127 - RNA, 19 nt, Homo sapiens
  misc_RNA (1)...(19): siRNA sense strand
aagagcagaagucaaguga

SEQ ID NO: 2105128 - RNA, 19 nt, Homo sapiens
  misc_RNA (1)...(19): siRNA sense strand
aguuacaucuugccuuauc

SEQ ID NO: 2105129 - RNA, 19 nt, Homo sapiens
  misc_RNA (1)...(19): siRNA sense strand
ggagcauucaugaagaugu

SEQ ID NO: 2105130 - RNA, 19 nt, Homo sapiens
  misc_RNA (1)...(19): siRNA sense strand
gcugaagaagcaucuguag

SEQ ID NO: 2105131 - RNA, 19 nt, Homo sapiens
  misc_RNA (1)...(19): siRNA sense strand
ucagacagcaguggcauca

SEQ ID NO: 2105132 - RNA, 19 nt, Homo sapiens
  misc_RNA (1)...(19): siRNA sense strand
aggcugaggugugcuuugu

SEQ ID NO: 2105133 - RNA, 19 nt, Homo sapiens
  misc_RNA (1)...(19): siRNA sense strand
cuucuucugucauuuaagg

SEQ ID NO: 2105134 - RNA, 19 nt, Homo sapiens
  misc_RNA (1)...(19): siRNA sense strand
ucaagugagcucaugaaag

SEQ ID NO: 2105135 - RNA, 19 nt, Homo sapiens
  misc_RNA (1)...(19): siRNA sense strand
acagaaagagcagaaguca

SEQ ID NO: 2105136 - RNA, 19 nt, Homo sapiens
  misc_RNA (1)...(19): siRNA sense strand
acaccaaugacgagaguga

SEQ ID NO: 2105137 - RNA, 19 nt, Homo sapiens
  misc_RNA (1)...(19): siRNA sense strand
gcagaaucaauauuguuac

SEQ ID NO: 2105138 - RNA, 19 nt, Homo sapiens
  misc_RNA (1)...(19): siRNA sense strand
gcccggaagcagcacauga

SEQ ID NO: 2105139 - RNA, 19 nt, Homo sapiens
  misc_RNA (1)...(19): siRNA sense strand
ucacaguccagccuucuag

SEQ ID NO: 2105140 - RNA, 19 nt, Homo sapiens
  misc_RNA (1)...(19): siRNA sense strand
agaaugggauacggaccaa

SEQ ID NO: 2105141 - RNA, 19 nt, Homo sapiens
  misc_RNA (1)...(19): siRNA sense strand
ccuucuaggugaucagcuu

SEQ ID NO: 2105142 - RNA, 19 nt, Homo sapiens
  misc_RNA (1)...(19): siRNA sense strand
ccaaugacgagagugaugu

SEQ ID NO: 2105143 - RNA, 19 nt, Homo sapiens
  misc_RNA (1)...(19): siRNA sense strand
uuacugcaauguauauucc

SEQ ID NO: 2105144 - RNA, 19 nt, Homo sapiens
  misc_RNA (1)...(19): siRNA sense strand
gacuauaagaacaaacuca

SEQ ID NO: 2105145 - RNA, 19 nt, Homo sapiens
  misc_RNA (1)...(19): siRNA sense strand
gaaagagcagaagucaagu

SEQ ID NO: 2105146 - RNA, 19 nt, Homo sapiens
  misc_RNA (1)...(19): siRNA sense strand
gcagcuacggucccucauc

SEQ ID NO: 2105147 - RNA, 19 nt, Homo sapiens
  misc_RNA (1)...(19): siRNA sense strand
aauguauauuccaggauug

SEQ ID NO: 2105148 - RNA, 19 nt, Homo sapiens
  misc_RNA (1)...(19): siRNA sense strand
caaugacgagagugauguu

SEQ ID NO: 2105149 - RNA, 19 nt, Homo sapiens
  misc_RNA (1)...(19): siRNA sense strand
cagaaucaauauuguuacc

SEQ ID NO: 2105150 - RNA, 19 nt, Homo sapiens
  misc_RNA (1)...(19): siRNA sense strand
gucaagugagcucaugaaa

SEQ ID NO: 2105151 - RNA, 19 nt, Homo sapiens
  misc_RNA (1)...(19): siRNA sense strand
cagaggagcuggccuauga

SEQ ID NO: 2105152 - RNA, 19 nt, Homo sapiens
  misc_RNA (1)...(19): siRNA sense strand
gaagacaucaucaagguau

SEQ ID NO: 2105153 - RNA, 19 nt, Homo sapiens
  misc_RNA (1)...(19): siRNA sense strand
ggacaucuccgcccuagug

SEQ ID NO: 2105154 - RNA, 19 nt, Homo sapiens
  misc_RNA (1)...(19): siRNA sense strand
gaacuucaccagccaguca

SEQ ID NO: 2105155 - RNA, 19 nt, Homo sapiens
  misc_RNA (1)...(19): siRNA sense strand
gcugagagcugccagaaaa

SEQ ID NO: 2105156 - RNA, 19 nt, Homo sapiens
  misc_RNA (1)...(19): siRNA sense strand
ucaccacgcugccgucaga

SEQ ID NO: 2105157 - RNA, 19 nt, Homo sapiens
  misc_RNA (1)...(19): siRNA sense strand
guggagcacuucacacuca

SEQ ID NO: 2105158 - RNA, 19 nt, Homo sapiens
  misc_RNA (1)...(19): siRNA sense strand
ggaaugcgagucugacaau

SEQ ID NO: 2105159 - RNA, 19 nt, Homo sapiens
  misc_RNA (1)...(19): siRNA sense strand
acacagagaucaucaacac

SEQ ID NO: 2105160 - RNA, 19 nt, Homo sapiens
  misc_RNA (1)...(19): siRNA sense strand
gcagcuggacuuugaaaug

SEQ ID NO: 2105161 - RNA, 19 nt, Homo sapiens
  misc_RNA (1)...(19): siRNA sense strand
aagcugcccuugcacauug

SEQ ID NO: 2105162 - RNA, 19 nt, Homo sapiens
  misc_RNA (1)...(19): siRNA sense strand
ggaaagcgaggaugaggau

SEQ ID NO: 2105163 - RNA, 19 nt, Homo sapiens
  misc_RNA (1)...(19): siRNA sense strand
gcaggcaacccgcuggaaa

SEQ ID NO: 2105164 - RNA, 19 nt, Homo sapiens
  misc_RNA (1)...(19): siRNA sense strand
gagcauguggccacuguga

SEQ ID NO: 2105165 - RNA, 19 nt, Homo sapiens
  misc_RNA (1)...(19): siRNA sense strand
ccccggaccugcacaauua

SEQ ID NO: 2105166 - RNA, 19 nt, Homo sapiens
  misc_RNA (1)...(19): siRNA sense strand
gauguggccugggcucaga

SEQ ID NO: 2105167 - RNA, 19 nt, Homo sapiens
  misc_RNA (1)...(19): siRNA sense strand
acaauuacaugcgcagaau

SEQ ID NO: 2105168 - RNA, 19 nt, Homo sapiens
  misc_RNA (1)...(19): siRNA sense strand
ucuugcagcuggacuuuga

SEQ ID NO: 2105169 - RNA, 19 nt, Homo sapiens
  misc_RNA (1)...(19): siRNA sense strand
gagguggaauugccagaag

SEQ ID NO: 2105170 - RNA, 19 nt, Homo sapiens
  misc_RNA (1)...(19): siRNA sense strand
gaggagaaggucagcauca

SEQ ID NO: 2105171 - RNA, 19 nt, Homo sapiens
  misc_RNA (1)...(19): siRNA sense strand
cagcuggacuuugaaaugg

SEQ ID NO: 2105172 - RNA, 19 nt, Homo sapiens
  misc_RNA (1)...(19): siRNA sense strand
gagcagccacaccauccua

SEQ ID NO: 2105173 - RNA, 19 nt, Homo sapiens
  misc_RNA (1)...(19): siRNA sense strand
cucaucaacugcaucguuu

SEQ ID NO: 2105174 - RNA, 19 nt, Homo sapiens
  misc_RNA (1)...(19): siRNA sense strand
gagcuaaccaucgcugaga

SEQ ID NO: 2105175 - RNA, 19 nt, Homo sapiens
  misc_RNA (1)...(19): siRNA sense strand
caccacagcugcccaacag

SEQ ID NO: 2105176 - RNA, 19 nt, Homo sapiens
  misc_RNA (1)...(19): siRNA sense strand
gaaugcgagucugacaaug

SEQ ID NO: 2105177 - RNA, 19 nt, Homo sapiens
  misc_RNA (1)...(19): siRNA sense strand
gcuacgacguccucaaugc

SEQ ID NO: 2105178 - RNA, 19 nt, Homo sapiens
  misc_RNA (1)...(19): siRNA sense strand
cagcugugacuacguguuu

SEQ ID NO: 2105179 - RNA, 19 nt, Homo sapiens
  misc_RNA (1)...(19): siRNA sense strand
ggacagcaaccugaugauc

SEQ ID NO: 2105180 - RNA, 19 nt, Homo sapiens
  misc_RNA (1)...(19): siRNA sense strand
cuacagcccacgagacuau

SEQ ID NO: 2105181 - RNA, 19 nt, Homo sapiens
  misc_RNA (1)...(19): siRNA sense strand
acacgcggcuggccuucuu

SEQ ID NO: 2105182 - RNA, 19 nt, Homo sapiens
  misc_RNA (1)...(19): siRNA sense strand
aaaccaaacgcaagagugu

SEQ ID NO: 2105183 - RNA, 19 nt, Homo sapiens
  misc_RNA (1)...(19): siRNA sense strand
ggacacagagaucaucaac

SEQ ID NO: 2105184 - RNA, 19 nt, Homo sapiens
  misc_RNA (1)...(19): siRNA sense strand
gcucagcauccuccucuau

SEQ ID NO: 2105185 - RNA, 19 nt, Homo sapiens
  misc_RNA (1)...(19): siRNA sense strand
gcaagcgggucaaguucac

SEQ ID NO: 2105186 - RNA, 19 nt, Homo sapiens
  misc_RNA (1)...(19): siRNA sense strand
gaucuugcagcuggacuuu

SEQ ID NO: 2105187 - RNA, 19 nt, Homo sapiens
  misc_RNA (1)...(19): siRNA sense strand
caucuccgcccuaguggaa

SEQ ID NO: 2105188 - RNA, 19 nt, Homo sapiens
  misc_RNA (1)...(19): siRNA sense strand
ggaccugcacaauuacaug

SEQ ID NO: 2105189 - RNA, 19 nt, Homo sapiens
  misc_RNA (1)...(19): siRNA sense strand
aaagcgaggaugaggauga

SEQ ID NO: 2105190 - RNA, 19 nt, Homo sapiens
  misc_RNA (1)...(19): siRNA sense strand
caacacggccauucugacu

SEQ ID NO: 2105191 - RNA, 19 nt, Homo sapiens
  misc_RNA (1)...(19): siRNA sense strand
ggccuucccucugguagug

SEQ ID NO: 2105192 - RNA, 19 nt, Homo sapiens
  misc_RNA (1)...(19): siRNA sense strand
ggagaaggucagcaucaca

SEQ ID NO: 2105193 - RNA, 19 nt, Homo sapiens
  misc_RNA (1)...(19): siRNA sense strand
ggaggucaguccgggaaag

SEQ ID NO: 2105194 - RNA, 19 nt, Homo sapiens
  misc_RNA (1)...(19): siRNA sense strand
uuacaugcgcagaaucaaa

SEQ ID NO: 2105195 - RNA, 19 nt, Homo sapiens
  misc_RNA (1)...(19): siRNA sense strand
gccugacggugaacuggaa

SEQ ID NO: 2105196 - RNA, 19 nt, Homo sapiens
  misc_RNA (1)...(19): siRNA sense strand
acgagacuauggacugcua

SEQ ID NO: 2105197 - RNA, 19 nt, Homo sapiens
  misc_RNA (1)...(19): siRNA sense strand
ggugugacccuuuuaggua

SEQ ID NO: 2105198 - RNA, 19 nt, Homo sapiens
  misc_RNA (1)...(19): siRNA sense strand
ugaagacaucaucaaggua

SEQ ID NO: 2105199 - RNA, 19 nt, Homo sapiens
  misc_RNA (1)...(19): siRNA sense strand
augcgagucugacaaugaa

SEQ ID NO: 2105200 - RNA, 19 nt, Homo sapiens
  misc_RNA (1)...(19): siRNA sense strand
ccucaucaacugcaucguu

SEQ ID NO: 2105201 - RNA, 19 nt, Homo sapiens
  misc_RNA (1)...(19): siRNA sense strand
gaucaucaacacggccauu

SEQ ID NO: 2105202 - RNA, 19 nt, Homo sapiens
  misc_RNA (1)...(19): siRNA sense strand
gcgagucugacaaugaaga

SEQ ID NO: 2105203 - RNA, 19 nt, Homo sapiens
  misc_RNA (1)...(19): siRNA sense strand
acuuugaaauggagaacuu

SEQ ID NO: 2105204 - RNA, 19 nt, Homo sapiens
  misc_RNA (1)...(19): siRNA sense strand
gggucaaguucaccaccuu

SEQ ID NO: 2105205 - RNA, 19 nt, Homo sapiens
  misc_RNA (1)...(19): siRNA sense strand
gcgcaagcgggucaaguuc

SEQ ID NO: 2105206 - RNA, 19 nt, Homo sapiens
  misc_RNA (1)...(19): siRNA sense strand
ugacggugacugaggagaa

SEQ ID NO: 2105207 - RNA, 19 nt, Homo sapiens
  misc_RNA (1)...(19): siRNA sense strand
ucauugccaucgaggugaa

SEQ ID NO: 2105208 - RNA, 19 nt, Homo sapiens
  misc_RNA (1)...(19): siRNA sense strand
gguggaauugccagaaguu

SEQ ID NO: 2105209 - RNA, 19 nt, Homo sapiens
  misc_RNA (1)...(19): siRNA sense strand
ucaaggucauugccaucga

SEQ ID NO: 2105210 - RNA, 19 nt, Homo sapiens
  misc_RNA (1)...(19): siRNA sense strand
gacggugacugaggagaag

SEQ ID NO: 2105211 - RNA, 19 nt, Homo sapiens
  misc_RNA (1)...(19): siRNA sense strand
ucagcauccuccucuaucu

SEQ ID NO: 2105212 - RNA, 19 nt, Homo sapiens
  misc_RNA (1)...(19): siRNA sense strand
aaugcgagucugacaauga

SEQ ID NO: 2105213 - RNA, 19 nt, Homo sapiens
  misc_RNA (1)...(19): siRNA sense strand
caucaacacggccauucug

SEQ ID NO: 2105214 - RNA, 19 nt, Homo sapiens
  misc_RNA (1)...(19): siRNA sense strand
ccaggugcuguucuacgua

SEQ ID NO: 2105215 - RNA, 19 nt, Homo sapiens
  misc_RNA (1)...(19): siRNA sense strand
ggacgaggaggaggaagag

SEQ ID NO: 2105216 - RNA, 19 nt, Homo sapiens
  misc_RNA (1)...(19): siRNA sense strand
caaagaggcugucaagaaa

SEQ ID NO: 2105217 - RNA, 19 nt, Homo sapiens
  misc_RNA (1)...(19): siRNA sense strand
guaaguacauuaugcagua

SEQ ID NO: 2105218 - RNA, 19 nt, Homo sapiens
  misc_RNA (1)...(19): siRNA sense strand
ggaaacauauugacuacuu

SEQ ID NO: 2105219 - RNA, 19 nt, Homo sapiens
  misc_RNA (1)...(19): siRNA sense strand
gaauugcucucuacuaaga

SEQ ID NO: 2105220 - RNA, 19 nt, Homo sapiens
  misc_RNA (1)...(19): siRNA sense strand
gaaagucauuggcuucaaa

SEQ ID NO: 2105221 - RNA, 19 nt, Homo sapiens
  misc_RNA (1)...(19): siRNA sense strand
cagaauugcucucuacuaa

SEQ ID NO: 2105222 - RNA, 19 nt, Homo sapiens
  misc_RNA (1)...(19): siRNA sense strand
gaaggcaaacugagcauua

SEQ ID NO: 2105223 - RNA, 19 nt, Homo sapiens
  misc_RNA (1)...(19): siRNA sense strand
caaggcagcucugacaaua

SEQ ID NO: 2105224 - RNA, 19 nt, Homo sapiens
  misc_RNA (1)...(19): siRNA sense strand
gagcagagguugaaagagu

SEQ ID NO: 2105225 - RNA, 19 nt, Homo sapiens
  misc_RNA (1)...(19): siRNA sense strand
gcaaacagccaacccauga

SEQ ID NO: 2105226 - RNA, 19 nt, Homo sapiens
  misc_RNA (1)...(19): siRNA sense strand
caucaaaggaaccauauua

SEQ ID NO: 2105227 - RNA, 19 nt, Homo sapiens
  misc_RNA (1)...(19): siRNA sense strand
gacaagaaaucuccacaga

SEQ ID NO: 2105228 - RNA, 19 nt, Homo sapiens
  misc_RNA (1)...(19): siRNA sense strand
agacagauaugguugagaa

SEQ ID NO: 2105229 - RNA, 19 nt, Homo sapiens
  misc_RNA (1)...(19): siRNA sense strand
ggauaucuauggcuuugaa

SEQ ID NO: 2105230 - RNA, 19 nt, Homo sapiens
  misc_RNA (1)...(19): siRNA sense strand
gcuacaaagugaagucgua

SEQ ID NO: 2105231 - RNA, 19 nt, Homo sapiens
  misc_RNA (1)...(19): siRNA sense strand
gcugcuaccuuguuuaaga

SEQ ID NO: 2105232 - RNA, 19 nt, Homo sapiens
  misc_RNA (1)...(19): siRNA sense strand
ccacagauauuugaugaug

SEQ ID NO: 2105233 - RNA, 19 nt, Homo sapiens
  misc_RNA (1)...(19): siRNA sense strand
gagacacaauugagcagua

SEQ ID NO: 2105234 - RNA, 19 nt, Homo sapiens
  misc_RNA (1)...(19): siRNA sense strand
ugaagacuaucccucuaua

SEQ ID NO: 2105235 - RNA, 19 nt, Homo sapiens
  misc_RNA (1)...(19): siRNA sense strand
gccaagcccuccuaaaguu

SEQ ID NO: 2105236 - RNA, 19 nt, Homo sapiens
  misc_RNA (1)...(19): siRNA sense strand
caaagucaccgaugaaaug

SEQ ID NO: 2105237 - RNA, 19 nt, Homo sapiens
  misc_RNA (1)...(19): siRNA sense strand
caaauccugugcucaagaa

SEQ ID NO: 2105238 - RNA, 19 nt, Homo sapiens
  misc_RNA (1)...(19): siRNA sense strand
uagacaaccuugcaucaaa

SEQ ID NO: 2105239 - RNA, 19 nt, Homo sapiens
  misc_RNA (1)...(19): siRNA sense strand
uugaagcacuuaacaguaa

SEQ ID NO: 2105240 - RNA, 19 nt, Homo sapiens
  misc_RNA (1)...(19): siRNA sense strand
ggaccaacuuguaguguuc

SEQ ID NO: 2105241 - RNA, 19 nt, Homo sapiens
  misc_RNA (1)...(19): siRNA sense strand
gaugaagacuaucccucua

SEQ ID NO: 2105242 - RNA, 19 nt, Homo sapiens
  misc_RNA (1)...(19): siRNA sense strand
acaaagaggcugucaagaa

SEQ ID NO: 2105243 - RNA, 19 nt, Homo sapiens
  misc_RNA (1)...(19): siRNA sense strand
guugaaagagugaagaaua

SEQ ID NO: 2105244 - RNA, 19 nt, Homo sapiens
  misc_RNA (1)...(19): siRNA sense strand
gcacuuaacaguaaauugg

SEQ ID NO: 2105245 - RNA, 19 nt, Homo sapiens
  misc_RNA (1)...(19): siRNA sense strand
caaugaugcugccgaauuc

SEQ ID NO: 2105246 - RNA, 19 nt, Homo sapiens
  misc_RNA (1)...(19): siRNA sense strand
aaagacacuuguauuguga

SEQ ID NO: 2105247 - RNA, 19 nt, Homo sapiens
  misc_RNA (1)...(19): siRNA sense strand
gauguagucuauucuguca

SEQ ID NO: 2105248 - RNA, 19 nt, Homo sapiens
  misc_RNA (1)...(19): siRNA sense strand
gaucguuacucgcaucaau

SEQ ID NO: 2105249 - RNA, 19 nt, Homo sapiens
  misc_RNA (1)...(19): siRNA sense strand
ucaaaugaccugcgugaaa

SEQ ID NO: 2105250 - RNA, 19 nt, Homo sapiens
  misc_RNA (1)...(19): siRNA sense strand
ggaaaggaccaacuuguag

SEQ ID NO: 2105251 - RNA, 19 nt, Homo sapiens
  misc_RNA (1)...(19): siRNA sense strand
gauggugacacgccucuua

SEQ ID NO: 2105252 - RNA, 19 nt, Homo sapiens
  misc_RNA (1)...(19): siRNA sense strand
ugaaacggaaggacaaaua

SEQ ID NO: 2105253 - RNA, 19 nt, Homo sapiens
  misc_RNA (1)...(19): siRNA sense strand
caaacccaaugacaagaaa

SEQ ID NO: 2105254 - RNA, 19 nt, Homo sapiens
  misc_RNA (1)...(19): siRNA sense strand
gaaacauauugacuacuuc

SEQ ID NO: 2105255 - RNA, 19 nt, Homo sapiens
  misc_RNA (1)...(19): siRNA sense strand
gaagcaagaacaagaggaa

SEQ ID NO: 2105256 - RNA, 19 nt, Homo sapiens
  misc_RNA (1)...(19): siRNA sense strand
acaaagggaucauugcaau

SEQ ID NO: 2105257 - RNA, 19 nt, Homo sapiens
  misc_RNA (1)...(19): siRNA sense strand
caaaugaccugcgugaaac

SEQ ID NO: 2105258 - RNA, 19 nt, Homo sapiens
  misc_RNA (1)...(19): siRNA sense strand
caacuuguaguguuccaua

SEQ ID NO: 2105259 - RNA, 19 nt, Homo sapiens
  misc_RNA (1)...(19): siRNA sense strand
gacuaucccucuauacaau

SEQ ID NO: 2105260 - RNA, 19 nt, Homo sapiens
  misc_RNA (1)...(19): siRNA sense strand
gaagucgucguuucuguga

SEQ ID NO: 2105261 - RNA, 19 nt, Homo sapiens
  misc_RNA (1)...(19): siRNA sense strand
uaaaauggaucccacuaaa

SEQ ID NO: 2105262 - RNA, 19 nt, Homo sapiens
  misc_RNA (1)...(19): siRNA sense strand
gcagaauugcucucuacua

SEQ ID NO: 2105263 - RNA, 19 nt, Homo sapiens
  misc_RNA (1)...(19): siRNA sense strand
gaaagagugaagaauaugu

SEQ ID NO: 2105264 - RNA, 19 nt, Homo sapiens
  misc_RNA (1)...(19): siRNA sense strand
gaagccaguaaguacauua

SEQ ID NO: 2105265 - RNA, 19 nt, Homo sapiens
  misc_RNA (1)...(19): siRNA sense strand
ugugaacccuuacaaguug

SEQ ID NO: 2105266 - RNA, 19 nt, Homo sapiens
  misc_RNA (1)...(19): siRNA sense strand
ccaaacaguguauaagauu

SEQ ID NO: 2105267 - RNA, 19 nt, Homo sapiens
  misc_RNA (1)...(19): siRNA sense strand
ugugggagcucaauuaaag

SEQ ID NO: 2105268 - RNA, 19 nt, Homo sapiens
  misc_RNA (1)...(19): siRNA sense strand
caacaacaguuuugaacaa

SEQ ID NO: 2105269 - RNA, 19 nt, Homo sapiens
  misc_RNA (1)...(19): siRNA sense strand
agucaccgaugaaauguuu

SEQ ID NO: 2105270 - RNA, 19 nt, Homo sapiens
  misc_RNA (1)...(19): siRNA sense strand
gagagcagagguugaaaga

SEQ ID NO: 2105271 - RNA, 19 nt, Homo sapiens
  misc_RNA (1)...(19): siRNA sense strand
caauuugacuggucugagu

SEQ ID NO: 2105272 - RNA, 19 nt, Homo sapiens
  misc_RNA (1)...(19): siRNA sense strand
ugacaauaaucagguacua

SEQ ID NO: 2105273 - RNA, 19 nt, Homo sapiens
  misc_RNA (1)...(19): siRNA sense strand
gaggagauccaaacagugu

SEQ ID NO: 2105274 - RNA, 19 nt, Homo sapiens
  misc_RNA (1)...(19): siRNA sense strand
gugggcauaucaauaacua

SEQ ID NO: 2105275 - RNA, 19 nt, Homo sapiens
  misc_RNA (1)...(19): siRNA sense strand
gugaagaauauguugcuua

SEQ ID NO: 2105276 - RNA, 19 nt, Homo sapiens
  misc_RNA (1)...(19): siRNA sense strand
ucaaugaugcugccgaauu

SEQ ID NO: 2105277 - RNA, 19 nt, Homo sapiens
  misc_RNA (1)...(19): siRNA sense strand
acaaggugaugaagacuau

SEQ ID NO: 2105278 - RNA, 19 nt, Homo sapiens
  misc_RNA (1)...(19): siRNA sense strand
ggaaggacaaauacaugaa

SEQ ID NO: 2105279 - RNA, 19 nt, Homo sapiens
  misc_RNA (1)...(19): siRNA sense strand
ggaaaguggagcugguaaa

SEQ ID NO: 2105280 - RNA, 19 nt, Homo sapiens
  misc_RNA (1)...(19): siRNA sense strand
gaaaggaccaacuuguagu

SEQ ID NO: 2105281 - RNA, 19 nt, Homo sapiens
  misc_RNA (1)...(19): siRNA sense strand
gaaggacaaauacaugaau

SEQ ID NO: 2105282 - RNA, 19 nt, Homo sapiens
  misc_RNA (1)...(19): siRNA sense strand
cuaaaguucuucgccguuu

SEQ ID NO: 2105283 - RNA, 19 nt, Homo sapiens
  misc_RNA (1)...(19): siRNA sense strand
ugaccuuccuucagacaaa

SEQ ID NO: 2105284 - RNA, 19 nt, Homo sapiens
  misc_RNA (1)...(19): siRNA sense strand
cuucacagguauaagauga

SEQ ID NO: 2105285 - RNA, 19 nt, Homo sapiens
  misc_RNA (1)...(19): siRNA sense strand
aguagaauaucuuggacua

SEQ ID NO: 2105286 - RNA, 19 nt, Homo sapiens
  misc_RNA (1)...(19): siRNA sense strand
ggaguuugaucgagauuuu

SEQ ID NO: 2105287 - RNA, 19 nt, Homo sapiens
  misc_RNA (1)...(19): siRNA sense strand
gcuuugaaaucuuugacaa

SEQ ID NO: 2105288 - RNA, 19 nt, Homo sapiens
  misc_RNA (1)...(19): siRNA sense strand
gaaaaugggccacugaaga

SEQ ID NO: 2105289 - RNA, 19 nt, Homo sapiens
  misc_RNA (1)...(19): siRNA sense strand
gcaaaguaguaucuaucau

SEQ ID NO: 2105290 - RNA, 19 nt, Homo sapiens
  misc_RNA (1)...(19): siRNA sense strand
acacgccucuuauugagaa

SEQ ID NO: 2105291 - RNA, 19 nt, Homo sapiens
  misc_RNA (1)...(19): siRNA sense strand
gagcucaauuaaagucuuc

SEQ ID NO: 2105292 - RNA, 19 nt, Homo sapiens
  misc_RNA (1)...(19): siRNA sense strand
aaacggaagccaguaagua

SEQ ID NO: 2105293 - RNA, 19 nt, Homo sapiens
  misc_RNA (1)...(19): siRNA sense strand
uauugagaauggcaaagua

SEQ ID NO: 2105294 - RNA, 19 nt, Homo sapiens
  misc_RNA (1)...(19): siRNA sense strand
ucuauucugucauugguuu

SEQ ID NO: 2105295 - RNA, 19 nt, Homo sapiens
  misc_RNA (1)...(19): siRNA sense strand
gcaaagucaccgaugaaau

SEQ ID NO: 2105296 - RNA, 19 nt, Homo sapiens
  misc_RNA (1)...(19): siRNA sense strand
uaaaggccgugagcuguau

SEQ ID NO: 2105297 - RNA, 19 nt, Homo sapiens
  misc_RNA (1)...(19): siRNA sense strand
gagugcuggugaaucauuu

SEQ ID NO: 2105298 - RNA, 19 nt, Homo sapiens
  misc_RNA (1)...(19): siRNA sense strand
gcgcaucuauacguucauu

SEQ ID NO: 2105299 - RNA, 19 nt, Homo sapiens
  misc_RNA (1)...(19): siRNA sense strand
caagauuucaagcgccuua

SEQ ID NO: 2105300 - RNA, 19 nt, Homo sapiens
  misc_RNA (1)...(19): siRNA sense strand
uguagucuauucugucauu

SEQ ID NO: 2105301 - RNA, 19 nt, Homo sapiens
  misc_RNA (1)...(19): siRNA sense strand
gcacaaagggaucauugca

SEQ ID NO: 2105302 - RNA, 19 nt, Homo sapiens
  misc_RNA (1)...(19): siRNA sense strand
gagaauggcaaaguaguau

SEQ ID NO: 2105303 - RNA, 19 nt, Homo sapiens
  misc_RNA (1)...(19): siRNA sense strand
ggaagccaguaaguacauu

SEQ ID NO: 2105304 - RNA, 19 nt, Homo sapiens
  misc_RNA (1)...(19): siRNA sense strand
agacacuuguauugugaua

SEQ ID NO: 2105305 - RNA, 19 nt, Homo sapiens
  misc_RNA (1)...(19): siRNA sense strand
aaaggaaccauauuacguu

SEQ ID NO: 2105306 - RNA, 19 nt, Homo sapiens
  misc_RNA (1)...(19): siRNA sense strand
caaaggaaccauauuacgu

SEQ ID NO: 2105307 - RNA, 19 nt, Homo sapiens
  misc_RNA (1)...(19): siRNA sense strand
gcaugaaugucggcaaagu

SEQ ID NO: 2105308 - RNA, 19 nt, Homo sapiens
  misc_RNA (1)...(19): siRNA sense strand
ggagcucaauuaaagucuu

SEQ ID NO: 2105309 - RNA, 19 nt, Homo sapiens
  misc_RNA (1)...(19): siRNA sense strand
ucaugugggagcucaauua

SEQ ID NO: 2105310 - RNA, 19 nt, Homo sapiens
  misc_RNA (1)...(19): siRNA sense strand
cuacaacuauauucaugug

SEQ ID NO: 2105311 - RNA, 19 nt, Homo sapiens
  misc_RNA (1)...(19): siRNA sense strand
caauugagcaguauaaagg

SEQ ID NO: 2105312 - RNA, 19 nt, Homo sapiens
  misc_RNA (1)...(19): siRNA sense strand
aagaauauguggccugaag

SEQ ID NO: 2105313 - RNA, 19 nt, Homo sapiens
  misc_RNA (1)...(19): siRNA sense strand
ggugacacgccucuuauug

SEQ ID NO: 2105314 - RNA, 19 nt, Homo sapiens
  misc_RNA (1)...(19): siRNA sense strand
caaccguaaugacaacuca

SEQ ID NO: 2105315 - RNA, 19 nt, Homo sapiens
  misc_RNA (1)...(19): siRNA sense strand
acacuuguauugugauauc

SEQ ID NO: 2105316 - RNA, 19 nt, Homo sapiens
  misc_RNA (1)...(19): siRNA sense strand
ccuaugggcugcucucuca

SEQ ID NO: 2105317 - RNA, 19 nt, Homo sapiens
  misc_RNA (1)...(19): siRNA sense strand
gcuguaugacuguguguuu

SEQ ID NO: 2105318 - RNA, 19 nt, Homo sapiens
  misc_RNA (1)...(19): siRNA sense strand
ccuauucucuccucucucu

SEQ ID NO: 2105319 - RNA, 19 nt, Homo sapiens
  misc_RNA (1)...(19): siRNA sense strand
caugucgucuggucuuugu

SEQ ID NO: 2105320 - RNA, 19 nt, Homo sapiens
  misc_RNA (1)...(19): siRNA sense strand
gugugugugucuccuauuc

SEQ ID NO: 2105321 - RNA, 19 nt, Homo sapiens
  misc_RNA (1)...(19): siRNA sense strand
ggacgguguucgggugagu

SEQ ID NO: 2105322 - RNA, 19 nt, Homo sapiens
  misc_RNA (1)...(19): siRNA sense strand
cgaaaccacaggcgaaguc

SEQ ID NO: 2105323 - RNA, 19 nt, Homo sapiens
  misc_RNA (1)...(19): siRNA sense strand
gugcguguguuuguuugga

SEQ ID NO: 2105324 - RNA, 19 nt, Homo sapiens
  misc_RNA (1)...(19): siRNA sense strand
gugugugugugucuccuau

SEQ ID NO: 2105325 - RNA, 19 nt, Homo sapiens
  misc_RNA (1)...(19): siRNA sense strand
gcacaaagcuacuuaaguu

SEQ ID NO: 2105326 - RNA, 19 nt, Homo sapiens
  misc_RNA (1)...(19): siRNA sense strand
agaaagaggugaagagaua

SEQ ID NO: 2105327 - RNA, 19 nt, Homo sapiens
  misc_RNA (1)...(19): siRNA sense strand
gagauugucugcagaauga

SEQ ID NO: 2105328 - RNA, 19 nt, Homo sapiens
  misc_RNA (1)...(19): siRNA sense strand
ggaaggaaaugaaagagaa

SEQ ID NO: 2105329 - RNA, 19 nt, Homo sapiens
  misc_RNA (1)...(19): siRNA sense strand
gcaccuagauaaauacauu

SEQ ID NO: 2105330 - RNA, 19 nt, Homo sapiens
  misc_RNA (1)...(19): siRNA sense strand
gaggaacuguuacuucuaa

SEQ ID NO: 2105331 - RNA, 19 nt, Homo sapiens
  misc_RNA (1)...(19): siRNA sense strand
ggaaggcucuggauaagga

SEQ ID NO: 2105332 - RNA, 19 nt, Homo sapiens
  misc_RNA (1)...(19): siRNA sense strand
ucaaggacuuugugaauaa

SEQ ID NO: 2105333 - RNA, 19 nt, Homo sapiens
  misc_RNA (1)...(19): siRNA sense strand
ggaagcagauguccaggaa

SEQ ID NO: 2105334 - RNA, 19 nt, Homo sapiens
  misc_RNA (1)...(19): siRNA sense strand
agaaauggcugggaagaua

SEQ ID NO: 2105335 - RNA, 19 nt, Homo sapiens
  misc_RNA (1)...(19): siRNA sense strand
agaagcaccuagauaaaua

SEQ ID NO: 2105336 - RNA, 19 nt, Homo sapiens
  misc_RNA (1)...(19): siRNA sense strand
ggaaauaauucaguccaaa

SEQ ID NO: 2105337 - RNA, 19 nt, Homo sapiens
  misc_RNA (1)...(19): siRNA sense strand
gagaagacccagagaauga

SEQ ID NO: 2105338 - RNA, 19 nt, Homo sapiens
  misc_RNA (1)...(19): siRNA sense strand
ucaaugagcugaagguguu

SEQ ID NO: 2105339 - RNA, 19 nt, Homo sapiens
  misc_RNA (1)...(19): siRNA sense strand
gagaagggaggaacuguua

SEQ ID NO: 2105340 - RNA, 19 nt, Homo sapiens
  misc_RNA (1)...(19): siRNA sense strand
ccaagaagcaccuagauaa

SEQ ID NO: 2105341 - RNA, 19 nt, Homo sapiens
  misc_RNA (1)...(19): siRNA sense strand
gaacgugaaacaucugaua

SEQ ID NO: 2105342 - RNA, 19 nt, Homo sapiens
  misc_RNA (1)...(19): siRNA sense strand
caacuggagcugauuauaa

SEQ ID NO: 2105343 - RNA, 19 nt, Homo sapiens
  misc_RNA (1)...(19): siRNA sense strand
ggacuucagugcauucaug

SEQ ID NO: 2105344 - RNA, 19 nt, Homo sapiens
  misc_RNA (1)...(19): siRNA sense strand
ucgaacagaucaaggaaua

SEQ ID NO: 2105345 - RNA, 19 nt, Homo sapiens
  misc_RNA (1)...(19): siRNA sense strand
ggaagcugcuaaugccaua

SEQ ID NO: 2105346 - RNA, 19 nt, Homo sapiens
  misc_RNA (1)...(19): siRNA sense strand
gagaaaagauguguugaua

SEQ ID NO: 2105347 - RNA, 19 nt, Homo sapiens
  misc_RNA (1)...(19): siRNA sense strand
caaagaacaugcucacauc

SEQ ID NO: 2105348 - RNA, 19 nt, Homo sapiens
  misc_RNA (1)...(19): siRNA sense strand
caucaucucucuucauuuc

SEQ ID NO: 2105349 - RNA, 19 nt, Homo sapiens
  misc_RNA (1)...(19): siRNA sense strand
ucacauacgucaaggaaau

SEQ ID NO: 2105350 - RNA, 19 nt, Homo sapiens
  misc_RNA (1)...(19): siRNA sense strand
ggaccuggauucagaacuu

SEQ ID NO: 2105351 - RNA, 19 nt, Homo sapiens
  misc_RNA (1)...(19): siRNA sense strand
gcaccaggaucuaaaguca

SEQ ID NO: 2105352 - RNA, 19 nt, Homo sapiens
  misc_RNA (1)...(19): siRNA sense strand
gaagauagacuugcucaga

SEQ ID NO: 2105353 - RNA, 19 nt, Homo sapiens
  misc_RNA (1)...(19): siRNA sense strand
gagaugaaacuggaaauaa

SEQ ID NO: 2105354 - RNA, 19 nt, Homo sapiens
  misc_RNA (1)...(19): siRNA sense strand
ugaaacaucugauacaagu

SEQ ID NO: 2105355 - RNA, 19 nt, Homo sapiens
  misc_RNA (1)...(19): siRNA sense strand
ggacaacuggagcugauua

SEQ ID NO: 2105356 - RNA, 19 nt, Homo sapiens
  misc_RNA (1)...(19): siRNA sense strand
ugagucaccugguuaugua

SEQ ID NO: 2105357 - RNA, 19 nt, Homo sapiens
  misc_RNA (1)...(19): siRNA sense strand
cacaagaccucagcaguaa

SEQ ID NO: 2105358 - RNA, 19 nt, Homo sapiens
  misc_RNA (1)...(19): siRNA sense strand
gaaaagauguguugauagu

SEQ ID NO: 2105359 - RNA, 19 nt, Homo sapiens
  misc_RNA (1)...(19): siRNA sense strand
cgagauggcugcugcugaa

SEQ ID NO: 2105360 - RNA, 19 nt, Homo sapiens
  misc_RNA (1)...(19): siRNA sense strand
gaacuguuacuucuaaaga

SEQ ID NO: 2105361 - RNA, 19 nt, Homo sapiens
  misc_RNA (1)...(19): siRNA sense strand
gaacaaaugcuagauacga

SEQ ID NO: 2105362 - RNA, 19 nt, Homo sapiens
  misc_RNA (1)...(19): siRNA sense strand
ccucagagcuggcuuccuu

SEQ ID NO: 2105363 - RNA, 19 nt, Homo sapiens
  misc_RNA (1)...(19): siRNA sense strand
gccaucaucucucuucauu

SEQ ID NO: 2105364 - RNA, 19 nt, Homo sapiens
  misc_RNA (1)...(19): siRNA sense strand
gaacaauaacuccacaaug

SEQ ID NO: 2105365 - RNA, 19 nt, Homo sapiens
  misc_RNA (1)...(19): siRNA sense strand
acacggaccuggauucaga

SEQ ID NO: 2105366 - RNA, 19 nt, Homo sapiens
  misc_RNA (1)...(19): siRNA sense strand
gauacgaguucccuacuuc

SEQ ID NO: 2105367 - RNA, 19 nt, Homo sapiens
  misc_RNA (1)...(19): siRNA sense strand
gaaaguucauuaaguugca

SEQ ID NO: 2105368 - RNA, 19 nt, Homo sapiens
  misc_RNA (1)...(19): siRNA sense strand
ggaggcggcugguggaaau

SEQ ID NO: 2105369 - RNA, 19 nt, Homo sapiens
  misc_RNA (1)...(19): siRNA sense strand
acgcaucccugcuauuuaa

SEQ ID NO: 2105370 - RNA, 19 nt, Homo sapiens
  misc_RNA (1)...(19): siRNA sense strand
gaagagguguaugacuauu

SEQ ID NO: 2105371 - RNA, 19 nt, Homo sapiens
  misc_RNA (1)...(19): siRNA sense strand
ucacaagaccucagcagua

SEQ ID NO: 2105372 - RNA, 19 nt, Homo sapiens
  misc_RNA (1)...(19): siRNA sense strand
cagaggaggagaagaauuu

SEQ ID NO: 2105373 - RNA, 19 nt, Homo sapiens
  misc_RNA (1)...(19): siRNA sense strand
ucagacaguuggcaagaaa

SEQ ID NO: 2105374 - RNA, 19 nt, Homo sapiens
  misc_RNA (1)...(19): siRNA sense strand
ugcaacagccuaugauuua

SEQ ID NO: 2105375 - RNA, 19 nt, Homo sapiens
  misc_RNA (1)...(19): siRNA sense strand
ucaagcacgucuucagauu

SEQ ID NO: 2105376 - RNA, 19 nt, Homo sapiens
  misc_RNA (1)...(19): siRNA sense strand
ccgcagaguugcugaguga

SEQ ID NO: 2105377 - RNA, 19 nt, Homo sapiens
  misc_RNA (1)...(19): siRNA sense strand
gcacuacaccagagacuug

SEQ ID NO: 2105378 - RNA, 19 nt, Homo sapiens
  misc_RNA (1)...(19): siRNA sense strand
gaucaaggaccgagucgaa

SEQ ID NO: 2105379 - RNA, 19 nt, Homo sapiens
  misc_RNA (1)...(19): siRNA sense strand
uugaagagguguaugacua

SEQ ID NO: 2105380 - RNA, 19 nt, Homo sapiens
  misc_RNA (1)...(19): siRNA sense strand
ccaggaagccgcagaguug

SEQ ID NO: 2105381 - RNA, 19 nt, Homo sapiens
  misc_RNA (1)...(19): siRNA sense strand
gaaauuuggcaucgucuug

SEQ ID NO: 2105382 - RNA, 19 nt, Homo sapiens
  misc_RNA (1)...(19): siRNA sense strand
gaugccagcucaccagaug

SEQ ID NO: 2105383 - RNA, 19 nt, Homo sapiens
  misc_RNA (1)...(19): siRNA sense strand
caaccgcugucuguucaua

SEQ ID NO: 2105384 - RNA, 19 nt, Homo sapiens
  misc_RNA (1)...(19): siRNA sense strand
caagaagcaccuagauaaa

SEQ ID NO: 2105385 - RNA, 19 nt, Homo sapiens
  misc_RNA (1)...(19): siRNA sense strand
gcaacagccuaugauuuau

SEQ ID NO: 2105386 - RNA, 19 nt, Homo sapiens
  misc_RNA (1)...(19): siRNA sense strand
gaggagcccuguuccaaag

SEQ ID NO: 2105387 - RNA, 19 nt, Homo sapiens
  misc_RNA (1)...(19): siRNA sense strand
gcacauccuugagcuugaa

SEQ ID NO: 2105388 - RNA, 19 nt, Homo sapiens
  misc_RNA (1)...(19): siRNA sense strand
gcggacaacuucaaugaca

SEQ ID NO: 2105389 - RNA, 19 nt, Homo sapiens
  misc_RNA (1)...(19): siRNA sense strand
ugagagagaagcagcauuu

SEQ ID NO: 2105390 - RNA, 19 nt, Homo sapiens
  misc_RNA (1)...(19): siRNA sense strand
ggagcuacaucagagguuu

SEQ ID NO: 2105391 - RNA, 19 nt, Homo sapiens
  misc_RNA (1)...(19): siRNA sense strand
gauggcugcugcugaagaa

SEQ ID NO: 2105392 - RNA, 19 nt, Homo sapiens
  misc_RNA (1)...(19): siRNA sense strand
gaccuggauucagaacuua

SEQ ID NO: 2105393 - RNA, 19 nt, Homo sapiens
  misc_RNA (1)...(19): siRNA sense strand
gggaggaacuguuacuucu

SEQ ID NO: 2105394 - RNA, 19 nt, Homo sapiens
  misc_RNA (1)...(19): siRNA sense strand
aacaauaacuccacaaugg

SEQ ID NO: 2105395 - RNA, 19 nt, Homo sapiens
  misc_RNA (1)...(19): siRNA sense strand
gggaacaaaugcuagauac

SEQ ID NO: 2105396 - RNA, 19 nt, Homo sapiens
  misc_RNA (1)...(19): siRNA sense strand
gccaagaccuucgagaaau

SEQ ID NO: 2105397 - RNA, 19 nt, Homo sapiens
  misc_RNA (1)...(19): siRNA sense strand
ccaagaccuucgagaaaug

SEQ ID NO: 2105398 - RNA, 19 nt, Homo sapiens
  misc_RNA (1)...(19): siRNA sense strand
aaagagagccugggacuga

SEQ ID NO: 2105399 - RNA, 19 nt, Homo sapiens
  misc_RNA (1)...(19): siRNA sense strand
gauagucuccugaagaugu

SEQ ID NO: 2105400 - RNA, 19 nt, Homo sapiens
  misc_RNA (1)...(19): siRNA sense strand
caucagaggaggagaagaa

SEQ ID NO: 2105401 - RNA, 19 nt, Homo sapiens
  misc_RNA (1)...(19): siRNA sense strand
ggaccuggccuccaucuca

SEQ ID NO: 2105402 - RNA, 19 nt, Homo sapiens
  misc_RNA (1)...(19): siRNA sense strand
gaaggcauugucugcauuu

SEQ ID NO: 2105403 - RNA, 19 nt, Homo sapiens
  misc_RNA (1)...(19): siRNA sense strand
ggaaacuggugagucuuau

SEQ ID NO: 2105404 - RNA, 19 nt, Homo sapiens
  misc_RNA (1)...(19): siRNA sense strand
ggagaaagaggugaagaga

SEQ ID NO: 2105405 - RNA, 19 nt, Homo sapiens
  misc_RNA (1)...(19): siRNA sense strand
gaacggugacuucaguguu

SEQ ID NO: 2105406 - RNA, 19 nt, Homo sapiens
  misc_RNA (1)...(19): siRNA sense strand
ugagugagcccgaagaaga

SEQ ID NO: 2105407 - RNA, 19 nt, Homo sapiens
  misc_RNA (1)...(19): siRNA sense strand
aacuggagcugauuauaaa

SEQ ID NO: 2105408 - RNA, 19 nt, Homo sapiens
  misc_RNA (1)...(19): siRNA sense strand
ggacugucuuucagggauu

SEQ ID NO: 2105409 - RNA, 19 nt, Homo sapiens
  misc_RNA (1)...(19): siRNA sense strand
cgaguucccuacuucaguu

SEQ ID NO: 2105410 - RNA, 19 nt, Homo sapiens
  misc_RNA (1)...(19): siRNA sense strand
gaggaggccuugucaccau

SEQ ID NO: 2105411 - RNA, 19 nt, Homo sapiens
  misc_RNA (1)...(19): siRNA sense strand
ccagagacuugggucauga

SEQ ID NO: 2105412 - RNA, 19 nt, Homo sapiens
  misc_RNA (1)...(19): siRNA sense strand
guucucaacacuuuacuaa

SEQ ID NO: 2105413 - RNA, 19 nt, Homo sapiens
  misc_RNA (1)...(19): siRNA sense strand
caaggacuuugugaauaaa

SEQ ID NO: 2105414 - RNA, 19 nt, Homo sapiens
  misc_RNA (1)...(19): siRNA sense strand
aaagauguguugauagucu

SEQ ID NO: 2105415 - RNA, 19 nt, Homo sapiens
  misc_RNA (1)...(19): siRNA sense strand
ugucugcugugaucacuaa

SEQ ID NO: 2105416 - RNA, 19 nt, Homo sapiens
  misc_RNA (1)...(19): siRNA sense strand
gaauggaggcucacaaagg

SEQ ID NO: 2105417 - RNA, 19 nt, Homo sapiens
  misc_RNA (1)...(19): siRNA sense strand
gacccuugcugcuacgaaa

SEQ ID NO: 2105418 - RNA, 19 nt, Homo sapiens
  misc_RNA (1)...(19): siRNA sense strand
guaucagccuucuuacaga

SEQ ID NO: 2105419 - RNA, 19 nt, Homo sapiens
  misc_RNA (1)...(19): siRNA sense strand
agagguguaugacuauuug

SEQ ID NO: 2105420 - RNA, 19 nt, Homo sapiens
  misc_RNA (1)...(19): siRNA sense strand
ggccaagaccuucgagaaa

SEQ ID NO: 2105421 - RNA, 19 nt, Homo sapiens
  misc_RNA (1)...(19): siRNA sense strand
aauggaggcucacaaagga

SEQ ID NO: 2105422 - RNA, 19 nt, Homo sapiens
  misc_RNA (1)...(19): siRNA sense strand
ccaagaaggagcuacauca

SEQ ID NO: 2105423 - RNA, 19 nt, Homo sapiens
  misc_RNA (1)...(19): siRNA sense strand
cuugacaucuggcaacuga

SEQ ID NO: 2105424 - RNA, 19 nt, Homo sapiens
  misc_RNA (1)...(19): siRNA sense strand
ggucacccuugcagagauu

SEQ ID NO: 2105425 - RNA, 19 nt, Homo sapiens
  misc_RNA (1)...(19): siRNA sense strand
gcacagaacucuuuguuga

SEQ ID NO: 2105426 - RNA, 19 nt, Homo sapiens
  misc_RNA (1)...(19): siRNA sense strand
ggaaagguauucuguuaua

SEQ ID NO: 2105427 - RNA, 19 nt, Homo sapiens
  misc_RNA (1)...(19): siRNA sense strand
ucacagagaucaccacuuu

SEQ ID NO: 2105428 - RNA, 19 nt, Homo sapiens
  misc_RNA (1)...(19): siRNA sense strand
ccaaagaccuuaccaguau

SEQ ID NO: 2105429 - RNA, 19 nt, Homo sapiens
  misc_RNA (1)...(19): siRNA sense strand
gaaauggaaucgagaaaug

SEQ ID NO: 2105430 - RNA, 19 nt, Homo sapiens
  misc_RNA (1)...(19): siRNA sense strand
cgacagagcugcagauuuc

SEQ ID NO: 2105431 - RNA, 19 nt, Homo sapiens
  misc_RNA (1)...(19): siRNA sense strand
gaacauuccucuugugaug

SEQ ID NO: 2105432 - RNA, 19 nt, Homo sapiens
  misc_RNA (1)...(19): siRNA sense strand
ggagaucgcuugagacgaa

SEQ ID NO: 2105433 - RNA, 19 nt, Homo sapiens
  misc_RNA (1)...(19): siRNA sense strand
gcagaaggcuuuuaaauuu

SEQ ID NO: 2105434 - RNA, 19 nt, Homo sapiens
  misc_RNA (1)...(19): siRNA sense strand
gaaagucucuguacgugaa

SEQ ID NO: 2105435 - RNA, 19 nt, Homo sapiens
  misc_RNA (1)...(19): siRNA sense strand
gcaaaggcuucaaauagaa

SEQ ID NO: 2105436 - RNA, 19 nt, Homo sapiens
  misc_RNA (1)...(19): siRNA sense strand
caacaucgcucguggacaa

SEQ ID NO: 2105437 - RNA, 19 nt, Homo sapiens
  misc_RNA (1)...(19): siRNA sense strand
ucaaugauguuguggauaa

SEQ ID NO: 2105438 - RNA, 19 nt, Homo sapiens
  misc_RNA (1)...(19): siRNA sense strand
gcuuaaaucucaacaagaa

SEQ ID NO: 2105439 - RNA, 19 nt, Homo sapiens
  misc_RNA (1)...(19): siRNA sense strand
ggacacaucugcagaacug

SEQ ID NO: 2105440 - RNA, 19 nt, Homo sapiens
  misc_RNA (1)...(19): siRNA sense strand
gcuauaagcuguaucaaag

SEQ ID NO: 2105441 - RNA, 19 nt, Homo sapiens
  misc_RNA (1)...(19): siRNA sense strand
gaagaugagugcagcuuug

SEQ ID NO: 2105442 - RNA, 19 nt, Homo sapiens
  misc_RNA (1)...(19): siRNA sense strand
ucaaagaaguccuguguga

SEQ ID NO: 2105443 - RNA, 19 nt, Homo sapiens
  misc_RNA (1)...(19): siRNA sense strand
gcaaagggaucuagugaag

SEQ ID NO: 2105444 - RNA, 19 nt, Homo sapiens
  misc_RNA (1)...(19): siRNA sense strand
gugaagaucugcauggaaa

SEQ ID NO: 2105445 - RNA, 19 nt, Homo sapiens
  misc_RNA (1)...(19): siRNA sense strand
ggaccugacuccacugauu

SEQ ID NO: 2105446 - RNA, 19 nt, Homo sapiens
  misc_RNA (1)...(19): siRNA sense strand
acacagaauugucaacuaa

SEQ ID NO: 2105447 - RNA, 19 nt, Homo sapiens
  misc_RNA (1)...(19): siRNA sense strand
ggagagacguggugacaug

SEQ ID NO: 2105448 - RNA, 19 nt, Homo sapiens
  misc_RNA (1)...(19): siRNA sense strand
gcacaucauuuccagaaga

SEQ ID NO: 2105449 - RNA, 19 nt, Homo sapiens
  misc_RNA (1)...(19): siRNA sense strand
ccaguggucuuccuccuua

SEQ ID NO: 2105450 - RNA, 19 nt, Homo sapiens
  misc_RNA (1)...(19): siRNA sense strand
gcacggagaugcugacaag

SEQ ID NO: 2105451 - RNA, 19 nt, Homo sapiens
  misc_RNA (1)...(19): siRNA sense strand
ggucagagcuucggaacuu

SEQ ID NO: 2105452 - RNA, 19 nt, Homo sapiens
  misc_RNA (1)...(19): siRNA sense strand
ggaaagccaucgccagguu

SEQ ID NO: 2105453 - RNA, 19 nt, Homo sapiens
  misc_RNA (1)...(19): siRNA sense strand
gaacuggagcaucuagaua

SEQ ID NO: 2105454 - RNA, 19 nt, Homo sapiens
  misc_RNA (1)...(19): siRNA sense strand
gaaaucaguucaagguaca

SEQ ID NO: 2105455 - RNA, 19 nt, Homo sapiens
  misc_RNA (1)...(19): siRNA sense strand
gaacuaugaacaucucuuu

SEQ ID NO: 2105456 - RNA, 19 nt, Homo sapiens
  misc_RNA (1)...(19): siRNA sense strand
ccaaagaggugauagacau

SEQ ID NO: 2105457 - RNA, 19 nt, Homo sapiens
  misc_RNA (1)...(19): siRNA sense strand
cagaaggacugcccaagaa

SEQ ID NO: 2105458 - RNA, 19 nt, Homo sapiens
  misc_RNA (1)...(19): siRNA sense strand
gaacuucaguggcaaggau

SEQ ID NO: 2105459 - RNA, 19 nt, Homo sapiens
  misc_RNA (1)...(19): siRNA sense strand
gaaagacucauaucggaaa

SEQ ID NO: 2105460 - RNA, 19 nt, Homo sapiens
  misc_RNA (1)...(19): siRNA sense strand
caacacaacggaagcuaua

SEQ ID NO: 2105461 - RNA, 19 nt, Homo sapiens
  misc_RNA (1)...(19): siRNA sense strand
gaagacggaugcauugaag

SEQ ID NO: 2105462 - RNA, 19 nt, Homo sapiens
  misc_RNA (1)...(19): siRNA sense strand
gcaagccacugggcauuaa

SEQ ID NO: 2105463 - RNA, 19 nt, Homo sapiens
  misc_RNA (1)...(19): siRNA sense strand
gaaguccugugugaucaua

SEQ ID NO: 2105464 - RNA, 19 nt, Homo sapiens
  misc_RNA (1)...(19): siRNA sense strand
guccauugcucuaagauuu

SEQ ID NO: 2105465 - RNA, 19 nt, Homo sapiens
  misc_RNA (1)...(19): siRNA sense strand
ugaaggaccuggagcaguu

SEQ ID NO: 2105466 - RNA, 19 nt, Homo sapiens
  misc_RNA (1)...(19): siRNA sense strand
gagcacgucuucuuacuag

SEQ ID NO: 2105467 - RNA, 19 nt, Homo sapiens
  misc_RNA (1)...(19): siRNA sense strand
ccaaaucgauccugcugaa

SEQ ID NO: 2105468 - RNA, 19 nt, Homo sapiens
  misc_RNA (1)...(19): siRNA sense strand
ccauaaagcuggucaaggu

SEQ ID NO: 2105469 - RNA, 19 nt, Homo sapiens
  misc_RNA (1)...(19): siRNA sense strand
gcaagaagagagccaguuu

SEQ ID NO: 2105470 - RNA, 19 nt, Homo sapiens
  misc_RNA (1)...(19): siRNA sense strand
gcacagcgcgaugcucuua

SEQ ID NO: 2105471 - RNA, 19 nt, Homo sapiens
  misc_RNA (1)...(19): siRNA sense strand
uaaagaagguggagauguc

SEQ ID NO: 2105472 - RNA, 19 nt, Homo sapiens
  misc_RNA (1)...(19): siRNA sense strand
ggauaagacuccugucauc

SEQ ID NO: 2105473 - RNA, 19 nt, Homo sapiens
  misc_RNA (1)...(19): siRNA sense strand
gaucaaacagaacaucuuu

SEQ ID NO: 2105474 - RNA, 19 nt, Homo sapiens
  misc_RNA (1)...(19): siRNA sense strand
gugcaacaguuucuucgua

SEQ ID NO: 2105475 - RNA, 19 nt, Homo sapiens
  misc_RNA (1)...(19): siRNA sense strand
caacggaggaggaauuaaa

SEQ ID NO: 2105476 - RNA, 19 nt, Homo sapiens
  misc_RNA (1)...(19): siRNA sense strand
agaaagacgucguguacaa

SEQ ID NO: 2105477 - RNA, 19 nt, Homo sapiens
  misc_RNA (1)...(19): siRNA sense strand
ggaggaggaauuaaaguuu

SEQ ID NO: 2105478 - RNA, 19 nt, Homo sapiens
  misc_RNA (1)...(19): siRNA sense strand
gcagcaaaggcuucaaaua

SEQ ID NO: 2105479 - RNA, 19 nt, Homo sapiens
  misc_RNA (1)...(19): siRNA sense strand
caacagcuauuccguggau

SEQ ID NO: 2105480 - RNA, 19 nt, Homo sapiens
  misc_RNA (1)...(19): siRNA sense strand
gcccagagauggccaagga

SEQ ID NO: 2105481 - RNA, 19 nt, Homo sapiens
  misc_RNA (1)...(19): siRNA sense strand
gcaagacccucagcagguu

SEQ ID NO: 2105482 - RNA, 19 nt, Homo sapiens
  misc_RNA (1)...(19): siRNA sense strand
cgacagagacggcaaccua

SEQ ID NO: 2105483 - RNA, 19 nt, Homo sapiens
  misc_RNA (1)...(19): siRNA sense strand
uaccaugccucuuuagaaa

SEQ ID NO: 2105484 - RNA, 19 nt, Homo sapiens
  misc_RNA (1)...(19): siRNA sense strand
ggaacaaacugaggagauc

SEQ ID NO: 2105485 - RNA, 19 nt, Homo sapiens
  misc_RNA (1)...(19): siRNA sense strand
gaacugaaccaccuagaag

SEQ ID NO: 2105486 - RNA, 19 nt, Homo sapiens
  misc_RNA (1)...(19): siRNA sense strand
gcaggaacuucuucagugu

SEQ ID NO: 2105487 - RNA, 19 nt, Homo sapiens
  misc_RNA (1)...(19): siRNA sense strand
gcacaacuccuuugcagau

SEQ ID NO: 2105488 - RNA, 19 nt, Homo sapiens
  misc_RNA (1)...(19): siRNA sense strand
ggaauuuggguguuucuuu

SEQ ID NO: 2105489 - RNA, 19 nt, Homo sapiens
  misc_RNA (1)...(19): siRNA sense strand
cgaauucucuccagcuguu

SEQ ID NO: 2105490 - RNA, 19 nt, Homo sapiens
  misc_RNA (1)...(19): siRNA sense strand
gaggaggaauuaaaguuuc

SEQ ID NO: 2105491 - RNA, 19 nt, Homo sapiens
  misc_RNA (1)...(19): siRNA sense strand
gaaguucguggacaucuuu

SEQ ID NO: 2105492 - RNA, 19 nt, Homo sapiens
  misc_RNA (1)...(19): siRNA sense strand
agagaucuuuggauguuua

SEQ ID NO: 2105493 - RNA, 19 nt, Homo sapiens
  misc_RNA (1)...(19): siRNA sense strand
gaccguaucuucgucuauu

SEQ ID NO: 2105494 - RNA, 19 nt, Homo sapiens
  misc_RNA (1)...(19): siRNA sense strand
cagcaaaggcuucaaauag

SEQ ID NO: 2105495 - RNA, 19 nt, Homo sapiens
  misc_RNA (1)...(19): siRNA sense strand
gguuugggcuacaggguua

SEQ ID NO: 2105496 - RNA, 19 nt, Homo sapiens
  misc_RNA (1)...(19): siRNA sense strand
ggaaggucaucaagagaga

SEQ ID NO: 2105497 - RNA, 19 nt, Homo sapiens
  misc_RNA (1)...(19): siRNA sense strand
cggcagagcagcugguuua

SEQ ID NO: 2105498 - RNA, 19 nt, Homo sapiens
  misc_RNA (1)...(19): siRNA sense strand
ggaaaagaauuacaguuga

SEQ ID NO: 2105499 - RNA, 19 nt, Homo sapiens
  misc_RNA (1)...(19): siRNA sense strand
guacggcgaugaauacaag

SEQ ID NO: 2105500 - RNA, 19 nt, Homo sapiens
  misc_RNA (1)...(19): siRNA sense strand
gcaggcagauggagcacuu

SEQ ID NO: 2105501 - RNA, 19 nt, Homo sapiens
  misc_RNA (1)...(19): siRNA sense strand
agaaagcauucauaacuga

SEQ ID NO: 2105502 - RNA, 19 nt, Homo sapiens
  misc_RNA (1)...(19): siRNA sense strand
caaaaucucucucuccauu

SEQ ID NO: 2105503 - RNA, 19 nt, Homo sapiens
  misc_RNA (1)...(19): siRNA sense strand
uaccaaugcugacaccaua

SEQ ID NO: 2105504 - RNA, 19 nt, Homo sapiens
  misc_RNA (1)...(19): siRNA sense strand
caagaaggaucguaacaac

SEQ ID NO: 2105505 - RNA, 19 nt, Homo sapiens
  misc_RNA (1)...(19): siRNA sense strand
gaagccgucugcagaacuu

SEQ ID NO: 2105506 - RNA, 19 nt, Homo sapiens
  misc_RNA (1)...(19): siRNA sense strand
cuaaagaaaugaggaacaa

SEQ ID NO: 2105507 - RNA, 19 nt, Homo sapiens
  misc_RNA (1)...(19): siRNA sense strand
ccagaauccugaccaucua

SEQ ID NO: 2105508 - RNA, 19 nt, Homo sapiens
  misc_RNA (1)...(19): siRNA sense strand
ggauggaucugugggaguu

SEQ ID NO: 2105509 - RNA, 19 nt, Homo sapiens
  misc_RNA (1)...(19): siRNA sense strand
ucagacgauucacguguua

SEQ ID NO: 2105510 - RNA, 19 nt, Homo sapiens
  misc_RNA (1)...(19): siRNA sense strand
gcacagggaagccauugaa

SEQ ID NO: 2105511 - RNA, 19 nt, Homo sapiens
  misc_RNA (1)...(19): siRNA sense strand
cggaggaacuucaccagaa

SEQ ID NO: 2105512 - RNA, 19 nt, Homo sapiens
  misc_RNA (1)...(19): siRNA sense strand
gggaaaaccaggcuuauua

SEQ ID NO: 2105513 - RNA, 19 nt, Homo sapiens
  misc_RNA (1)...(19): siRNA sense strand
gcccuucaaugucgacuuu

SEQ ID NO: 2105514 - RNA, 19 nt, Homo sapiens
  misc_RNA (1)...(19): siRNA sense strand
ggaaaagugugguccauug

SEQ ID NO: 2105515 - RNA, 19 nt, Homo sapiens
  misc_RNA (1)...(19): siRNA sense strand
cgagaacgcuuccaacaac

SEQ ID NO: 2105516 - RNA, 19 nt, Homo sapiens
  misc_RNA (1)...(19): siRNA sense strand
auggaaagguauucuguua

SEQ ID NO: 2105517 - RNA, 19 nt, Homo sapiens
  misc_RNA (1)...(19): siRNA sense strand
acagaacucuuuguugaaa

SEQ ID NO: 2105518 - RNA, 19 nt, Homo sapiens
  misc_RNA (1)...(19): siRNA sense strand
gaaagacgucguguacaaa

SEQ ID NO: 2105519 - RNA, 19 nt, Homo sapiens
  misc_RNA (1)...(19): siRNA sense strand
ccaugcagcugaucaaaca

SEQ ID NO: 2105520 - RNA, 19 nt, Homo sapiens
  misc_RNA (1)...(19): siRNA sense strand
ggaaaaccaucgccaagaa

SEQ ID NO: 2105521 - RNA, 19 nt, Homo sapiens
  misc_RNA (1)...(19): siRNA sense strand
ggacucgcgugaucacaga

SEQ ID NO: 2105522 - RNA, 19 nt, Homo sapiens
  misc_RNA (1)...(19): siRNA sense strand
ccaaggacguugucaagca

SEQ ID NO: 2105523 - RNA, 19 nt, Homo sapiens
  misc_RNA (1)...(19): siRNA sense strand
gagagaccgugcaggaguu

SEQ ID NO: 2105524 - RNA, 19 nt, Homo sapiens
  misc_RNA (1)...(19): siRNA sense strand
guacagaucccacaaugca

SEQ ID NO: 2105525 - RNA, 19 nt, Homo sapiens
  misc_RNA (1)...(19): siRNA sense strand
ugaagaaccugcucaaaua

SEQ ID NO: 2105526 - RNA, 19 nt, Homo sapiens
  misc_RNA (1)...(19): siRNA sense strand
gcaaagagcugggcagaga

SEQ ID NO: 2105527 - RNA, 19 nt, Homo sapiens
  misc_RNA (1)...(19): siRNA sense strand
caaaguuccuguccucuaa

SEQ ID NO: 2105528 - RNA, 19 nt, Homo sapiens
  misc_RNA (1)...(19): siRNA sense strand
ccaagaagguauccaguga

SEQ ID NO: 2105529 - RNA, 19 nt, Homo sapiens
  misc_RNA (1)...(19): siRNA sense strand
ggacgaggcuaugugauga

SEQ ID NO: 2105530 - RNA, 19 nt, Homo sapiens
  misc_RNA (1)...(19): siRNA sense strand
gcaaagaccgcguagaguu

SEQ ID NO: 2105531 - RNA, 19 nt, Homo sapiens
  misc_RNA (1)...(19): siRNA sense strand
ccacaggccucagcucuuu

SEQ ID NO: 2105532 - RNA, 19 nt, Homo sapiens
  misc_RNA (1)...(19): siRNA sense strand
gcaaagaggcccugagcuu

SEQ ID NO: 2105533 - RNA, 19 nt, Homo sapiens
  misc_RNA (1)...(19): siRNA sense strand
ggaggaagacuuugaguuc

SEQ ID NO: 2105534 - RNA, 19 nt, Homo sapiens
  misc_RNA (1)...(19): siRNA sense strand
uaaagggccucgacuaucu

SEQ ID NO: 2105535 - RNA, 19 nt, Homo sapiens
  misc_RNA (1)...(19): siRNA sense strand
gcaaagacaaagcugguaa

SEQ ID NO: 2105536 - RNA, 19 nt, Homo sapiens
  misc_RNA (1)...(19): siRNA sense strand
ccacaagccaguugccuua

SEQ ID NO: 2105537 - RNA, 19 nt, Homo sapiens
  misc_RNA (1)...(19): siRNA sense strand
ccucauagcucagggauuc

SEQ ID NO: 2105538 - RNA, 19 nt, Homo sapiens
  misc_RNA (1)...(19): siRNA sense strand
caggagcgauggcaagaaa

SEQ ID NO: 2105539 - RNA, 19 nt, Homo sapiens
  misc_RNA (1)...(19): siRNA sense strand
gcccugagcuucuccaaag

SEQ ID NO: 2105540 - RNA, 19 nt, Homo sapiens
  misc_RNA (1)...(19): siRNA sense strand
gcaaaguuccuguccucua

SEQ ID NO: 2105541 - RNA, 19 nt, Homo sapiens
  misc_RNA (1)...(19): siRNA sense strand
cgaccacgcugcacccuau

SEQ ID NO: 2105542 - RNA, 19 nt, Homo sapiens
  misc_RNA (1)...(19): siRNA sense strand
ggaggaagaggacgugcua

SEQ ID NO: 2105543 - RNA, 19 nt, Homo sapiens
  misc_RNA (1)...(19): siRNA sense strand
gcuaaagggccucgacuau

SEQ ID NO: 2105544 - RNA, 19 nt, Homo sapiens
  misc_RNA (1)...(19): siRNA sense strand
gacgaggucucagccauga

SEQ ID NO: 2105545 - RNA, 19 nt, Homo sapiens
  misc_RNA (1)...(19): siRNA sense strand
gcaggaagcgguucucgau

SEQ ID NO: 2105546 - RNA, 19 nt, Homo sapiens
  misc_RNA (1)...(19): siRNA sense strand
agagugaggucaagaucaa

SEQ ID NO: 2105547 - RNA, 19 nt, Homo sapiens
  misc_RNA (1)...(19): siRNA sense strand
ccucagacgugcacucuuc

SEQ ID NO: 2105548 - RNA, 19 nt, Homo sapiens
  misc_RNA (1)...(19): siRNA sense strand
cgaggacccugaaacuaug

SEQ ID NO: 2105549 - RNA, 19 nt, Homo sapiens
  misc_RNA (1)...(19): siRNA sense strand
ggaagcgguucucgaugug

SEQ ID NO: 2105550 - RNA, 19 nt, Homo sapiens
  misc_RNA (1)...(19): siRNA sense strand
cccggaagcuguucuacaa

SEQ ID NO: 2105551 - RNA, 19 nt, Homo sapiens
  misc_RNA (1)...(19): siRNA sense strand
gcagcaacaugguggucaa

SEQ ID NO: 2105552 - RNA, 19 nt, Homo sapiens
  misc_RNA (1)...(19): siRNA sense strand
gcaaggagcggcacaagcu

SEQ ID NO: 2105553 - RNA, 19 nt, Homo sapiens
  misc_RNA (1)...(19): siRNA sense strand
ccacacagcuggucauccu

SEQ ID NO: 2105554 - RNA, 19 nt, Homo sapiens
  misc_RNA (1)...(19): siRNA sense strand
gcaacaugguggucaaggu

SEQ ID NO: 2105555 - RNA, 19 nt, Homo sapiens
  misc_RNA (1)...(19): siRNA sense strand
ggaccuggacucaguagug

SEQ ID NO: 2105556 - RNA, 19 nt, Homo sapiens
  misc_RNA (1)...(19): siRNA sense strand
ucgaauuccuggccucaaa

SEQ ID NO: 2105557 - RNA, 19 nt, Homo sapiens
  misc_RNA (1)...(19): siRNA sense strand
gagaaggcgcaguguaaga

SEQ ID NO: 2105558 - RNA, 19 nt, Homo sapiens
  misc_RNA (1)...(19): siRNA sense strand
gcaagaaugcgcuguacca

SEQ ID NO: 2105559 - RNA, 19 nt, Homo sapiens
  misc_RNA (1)...(19): siRNA sense strand
ugagcaaggugaagcacaa

SEQ ID NO: 2105560 - RNA, 19 nt, Homo sapiens
  misc_RNA (1)...(19): siRNA sense strand
gaggagaggacgaggcuau

SEQ ID NO: 2105561 - RNA, 19 nt, Homo sapiens
  misc_RNA (1)...(19): siRNA sense strand
gcagugcgacggcaagaau

SEQ ID NO: 2105562 - RNA, 19 nt, Homo sapiens
  misc_RNA (1)...(19): siRNA sense strand
gguaaagccgaacuccuaa

SEQ ID NO: 2105563 - RNA, 19 nt, Homo sapiens
  misc_RNA (1)...(19): siRNA sense strand
caguagugguggaauuuga

SEQ ID NO: 2105564 - RNA, 19 nt, Homo sapiens
  misc_RNA (1)...(19): siRNA sense strand
ccacgcuggucucgaauuc

SEQ ID NO: 2105565 - RNA, 19 nt, Homo sapiens
  misc_RNA (1)...(19): siRNA sense strand
gaagaaccugcucaaauac

SEQ ID NO: 2105566 - RNA, 19 nt, Homo sapiens
  misc_RNA (1)...(19): siRNA sense strand
caaagacaaagcugguaaa

SEQ ID NO: 2105567 - RNA, 19 nt, Homo sapiens
  misc_RNA (1)...(19): siRNA sense strand
gcagccacccgacaucuau

SEQ ID NO: 2105568 - RNA, 19 nt, Homo sapiens
  misc_RNA (1)...(19): siRNA sense strand
caggugcgcugggcaagaa

SEQ ID NO: 2105569 - RNA, 19 nt, Homo sapiens
  misc_RNA (1)...(19): siRNA sense strand
uggagaaggcgcaguguaa

SEQ ID NO: 2105570 - RNA, 19 nt, Homo sapiens
  misc_RNA (1)...(19): siRNA sense strand
caaagaccgcguagaguuc

SEQ ID NO: 2105571 - RNA, 19 nt, Homo sapiens
  misc_RNA (1)...(19): siRNA sense strand
uaaaagcggucuggacaaa

SEQ ID NO: 2105572 - RNA, 19 nt, Homo sapiens
  misc_RNA (1)...(19): siRNA sense strand
aggacgagcuggaggaaga

SEQ ID NO: 2105573 - RNA, 19 nt, Homo sapiens
  misc_RNA (1)...(19): siRNA sense strand
uaagacuguuggcaaggaa

SEQ ID NO: 2105574 - RNA, 19 nt, Homo sapiens
  misc_RNA (1)...(19): siRNA sense strand
cagcguggccacacccaua

SEQ ID NO: 2105575 - RNA, 19 nt, Homo sapiens
  misc_RNA (1)...(19): siRNA sense strand
cagcaaagaccgcguagag

SEQ ID NO: 2105576 - RNA, 19 nt, Homo sapiens
  misc_RNA (1)...(19): siRNA sense strand
ggacaaaagcggcuacuuc

SEQ ID NO: 2105577 - RNA, 19 nt, Homo sapiens
  misc_RNA (1)...(19): siRNA sense strand
guaagaagagcagcuguca

SEQ ID NO: 2105578 - RNA, 19 nt, Homo sapiens
  misc_RNA (1)...(19): siRNA sense strand
ucgaggacccugaaacuau

SEQ ID NO: 2105579 - RNA, 19 nt, Homo sapiens
  misc_RNA (1)...(19): siRNA sense strand
gcggugaguuccuggucaa

SEQ ID NO: 2105580 - RNA, 19 nt, Homo sapiens
  misc_RNA (1)...(19): siRNA sense strand
ugguaaagccgaacuccua

SEQ ID NO: 2105581 - RNA, 19 nt, Homo sapiens
  misc_RNA (1)...(19): siRNA sense strand
aggaagcgguucucgaugu

SEQ ID NO: 2105582 - RNA, 19 nt, Homo sapiens
  misc_RNA (1)...(19): siRNA sense strand
gcacuuuagauaagacugu

SEQ ID NO: 2105583 - RNA, 19 nt, Homo sapiens
  misc_RNA (1)...(19): siRNA sense strand
cagaccaucucccacaagu

SEQ ID NO: 2105584 - RNA, 19 nt, Homo sapiens
  misc_RNA (1)...(19): siRNA sense strand
caagcacgaccaugagaga

SEQ ID NO: 2105585 - RNA, 19 nt, Homo sapiens
  misc_RNA (1)...(19): siRNA sense strand
gcacgugcucacucuguug

SEQ ID NO: 2105586 - RNA, 19 nt, Homo sapiens
  misc_RNA (1)...(19): siRNA sense strand
gcauccagcaggaagcaaa

SEQ ID NO: 2105587 - RNA, 19 nt, Homo sapiens
  misc_RNA (1)...(19): siRNA sense strand
agaccaagcugggcaagag

SEQ ID NO: 2105588 - RNA, 19 nt, Homo sapiens
  misc_RNA (1)...(19): siRNA sense strand
gagagugaggucaagauca

SEQ ID NO: 2105589 - RNA, 19 nt, Homo sapiens
  misc_RNA (1)...(19): siRNA sense strand
gcaggagcucuaugcuuug

SEQ ID NO: 2105590 - RNA, 19 nt, Homo sapiens
  misc_RNA (1)...(19): siRNA sense strand
ggcaggaccucuacuaccu

SEQ ID NO: 2105591 - RNA, 19 nt, Homo sapiens
  misc_RNA (1)...(19): siRNA sense strand
ccaagaacaagaccugcaa

SEQ ID NO: 2105592 - RNA, 19 nt, Homo sapiens
  misc_RNA (1)...(19): siRNA sense strand
gccggaagcugagcaaggu

SEQ ID NO: 2105593 - RNA, 19 nt, Homo sapiens
  misc_RNA (1)...(19): siRNA sense strand
ggaggcaggcaguggcuau

SEQ ID NO: 2105594 - RNA, 19 nt, Homo sapiens
  misc_RNA (1)...(19): siRNA sense strand
ggaggaggacgaggaggaa

SEQ ID NO: 2105595 - RNA, 19 nt, Homo sapiens
  misc_RNA (1)...(19): siRNA sense strand
ccaaccagaaggccaagaa

SEQ ID NO: 2105596 - RNA, 19 nt, Homo sapiens
  misc_RNA (1)...(19): siRNA sense strand
gcaguggcuaugacaguga

SEQ ID NO: 2105597 - RNA, 19 nt, Homo sapiens
  misc_RNA (1)...(19): siRNA sense strand
gagaggacgaggcuaugug

SEQ ID NO: 2105598 - RNA, 19 nt, Homo sapiens
  misc_RNA (1)...(19): siRNA sense strand
ccaggccugcugcacuuua

SEQ ID NO: 2105599 - RNA, 19 nt, Homo sapiens
  misc_RNA (1)...(19): siRNA sense strand
acucaguagugguggaauu

SEQ ID NO: 2105600 - RNA, 19 nt, Homo sapiens
  misc_RNA (1)...(19): siRNA sense strand
ggcagaggaucuacucacu

SEQ ID NO: 2105601 - RNA, 19 nt, Homo sapiens
  misc_RNA (1)...(19): siRNA sense strand
ucaagaggcggucggugaa

SEQ ID NO: 2105602 - RNA, 19 nt, Homo sapiens
  misc_RNA (1)...(19): siRNA sense strand
cugcugcacuuuagauaag

SEQ ID NO: 2105603 - RNA, 19 nt, Homo sapiens
  misc_RNA (1)...(19): siRNA sense strand
ggacucagaggaggacugu

SEQ ID NO: 2105604 - RNA, 19 nt, Homo sapiens
  misc_RNA (1)...(19): siRNA sense strand
cuacaagaacugcaaugug

SEQ ID NO: 2105605 - RNA, 19 nt, Homo sapiens
  misc_RNA (1)...(19): siRNA sense strand
cagacgugcacucuucuaa

SEQ ID NO: 2105606 - RNA, 19 nt, Homo sapiens
  misc_RNA (1)...(19): siRNA sense strand
gaauuccuggccucaaaug

SEQ ID NO: 2105607 - RNA, 19 nt, Homo sapiens
  misc_RNA (1)...(19): siRNA sense strand
ggagcgauggcaagaaagu

SEQ ID NO: 2105608 - RNA, 19 nt, Homo sapiens
  misc_RNA (1)...(19): siRNA sense strand
acaagcugcugcgggcuaa

SEQ ID NO: 2105609 - RNA, 19 nt, Homo sapiens
  misc_RNA (1)...(19): siRNA sense strand
ggccuccggugacgaagau

SEQ ID NO: 2105610 - RNA, 19 nt, Homo sapiens
  misc_RNA (1)...(19): siRNA sense strand
agucagaagucucgauguc

SEQ ID NO: 2105611 - RNA, 19 nt, Homo sapiens
  misc_RNA (1)...(19): siRNA sense strand
ggagaggacgaggcuaugu

SEQ ID NO: 2105612 - RNA, 19 nt, Homo sapiens
  misc_RNA (1)...(19): siRNA sense strand
gcaccagcagcacuugaug

SEQ ID NO: 2105613 - RNA, 19 nt, Homo sapiens
  misc_RNA (1)...(19): siRNA sense strand
cagaaggccaagaagaaga

SEQ ID NO: 2105614 - RNA, 19 nt, Homo sapiens
  misc_RNA (1)...(19): siRNA sense strand
gauggaggccaaccagaag

SEQ ID NO: 2105615 - RNA, 19 nt, Homo sapiens
  misc_RNA (1)...(19): siRNA sense strand
agaaggcgcaguguaagaa

SEQ ID NO: 2105616 - RNA, 19 nt, Homo sapiens
  misc_RNA (1)...(19): siRNA sense strand
gaggaagcgcaaacacuca

SEQ ID NO: 2105617 - RNA, 19 nt, Homo sapiens
  misc_RNA (1)...(19): siRNA sense strand
ccucagccucccaaaguuu

SEQ ID NO: 2105618 - RNA, 19 nt, Homo sapiens
  misc_RNA (1)...(19): siRNA sense strand
ggcacgugcucacucuguu

SEQ ID NO: 2105619 - RNA, 19 nt, Homo sapiens
  misc_RNA (1)...(19): siRNA sense strand
caccucagccucccaaagu

SEQ ID NO: 2105620 - RNA, 19 nt, Homo sapiens
  misc_RNA (1)...(19): siRNA sense strand
ggacucaguagugguggaa

SEQ ID NO: 2105621 - RNA, 19 nt, Homo sapiens
  misc_RNA (1)...(19): siRNA sense strand
gagccaagagugccaaggu

SEQ ID NO: 2105622 - RNA, 19 nt, Homo sapiens
  misc_RNA (1)...(19): siRNA sense strand
ggagaaggcgcaguguaag

SEQ ID NO: 2105623 - RNA, 19 nt, Homo sapiens
  misc_RNA (1)...(19): siRNA sense strand
ugggacaccuggccgacaa

SEQ ID NO: 2105624 - RNA, 19 nt, Homo sapiens
  misc_RNA (1)...(19): siRNA sense strand
ugagagagacgagaguuca

SEQ ID NO: 2105625 - RNA, 19 nt, Homo sapiens
  misc_RNA (1)...(19): siRNA sense strand
ggaagacgcugcuggugaa

SEQ ID NO: 2105626 - RNA, 19 nt, Homo sapiens
  misc_RNA (1)...(19): siRNA sense strand
ccacagagccaacgauuga

SEQ ID NO: 2105627 - RNA, 19 nt, Homo sapiens
  misc_RNA (1)...(19): siRNA sense strand
gcaccaaucuuacugacau

SEQ ID NO: 2105628 - RNA, 19 nt, Homo sapiens
  misc_RNA (1)...(19): siRNA sense strand
aaaucgaccuacccuguua

SEQ ID NO: 2105629 - RNA, 19 nt, Homo sapiens
  misc_RNA (1)...(19): siRNA sense strand
gcucuuaggucuccuuucu

SEQ ID NO: 2105630 - RNA, 19 nt, Homo sapiens
  misc_RNA (1)...(19): siRNA sense strand
gaccuacccuguuacaugu

SEQ ID NO: 2105631 - RNA, 19 nt, Homo sapiens
  misc_RNA (1)...(19): siRNA sense strand
gugcugauacucuucaaua

SEQ ID NO: 2105632 - RNA, 19 nt, Homo sapiens
  misc_RNA (1)...(19): siRNA sense strand
gaacaucaccacggcagaa

SEQ ID NO: 2105633 - RNA, 19 nt, Homo sapiens
  misc_RNA (1)...(19): siRNA sense strand
gcugauacucuucaauaaa

SEQ ID NO: 2105634 - RNA, 19 nt, Homo sapiens
  misc_RNA (1)...(19): siRNA sense strand
ugaaggcacuggcuuagca

SEQ ID NO: 2105635 - RNA, 19 nt, Homo sapiens
  misc_RNA (1)...(19): siRNA sense strand
cgaccuacccuguuacaug

SEQ ID NO: 2105636 - RNA, 19 nt, Homo sapiens
  misc_RNA (1)...(19): siRNA sense strand
caucggugcugauacucuu

SEQ ID NO: 2105637 - RNA, 19 nt, Homo sapiens
  misc_RNA (1)...(19): siRNA sense strand
gccguucucuccuguuugu

SEQ ID NO: 2105638 - RNA, 19 nt, Homo sapiens
  misc_RNA (1)...(19): siRNA sense strand
uaaucaggcuuccagacau

SEQ ID NO: 2105639 - RNA, 19 nt, Homo sapiens
  misc_RNA (1)...(19): siRNA sense strand
ccacggaggagaugaaguc

SEQ ID NO: 2105640 - RNA, 19 nt, Homo sapiens
  misc_RNA (1)...(19): siRNA sense strand
uauggaaacugccguucuc

SEQ ID NO: 2105641 - RNA, 19 nt, Homo sapiens
  misc_RNA (1)...(19): siRNA sense strand
ugcugauacucuucaauaa

SEQ ID NO: 2105642 - RNA, 19 nt, Homo sapiens
  misc_RNA (1)...(19): siRNA sense strand
agaacaacuugcagaagca

SEQ ID NO: 2105643 - RNA, 19 nt, Homo sapiens
  misc_RNA (1)...(19): siRNA sense strand
gcagaacaacuugcagaag

SEQ ID NO: 2105644 - RNA, 19 nt, Homo sapiens
  misc_RNA (1)...(19): siRNA sense strand
ugacaucguggcacagaga

SEQ ID NO: 2105645 - RNA, 19 nt, Homo sapiens
  misc_RNA (1)...(19): siRNA sense strand
cugccguucucuccuguuu

SEQ ID NO: 2105646 - RNA, 19 nt, Homo sapiens
  misc_RNA (1)...(19): siRNA sense strand
aaucaggcuuccagacauc

SEQ ID NO: 2105647 - RNA, 19 nt, Homo sapiens
  misc_RNA (1)...(19): siRNA sense strand
caucaccacggcagaaauc

SEQ ID NO: 2105648 - RNA, 19 nt, Homo sapiens
  misc_RNA (1)...(19): siRNA sense strand
gaacaacuugcagaagcau

SEQ ID NO: 2105649 - RNA, 19 nt, Homo sapiens
  misc_RNA (1)...(19): siRNA sense strand
gaagacgcugcuggugaaa

SEQ ID NO: 2105650 - RNA, 19 nt, Homo sapiens
  misc_RNA (1)...(19): siRNA sense strand
uuaaucaggcuuccagaca

SEQ ID NO: 2105651 - RNA, 19 nt, Homo sapiens
  misc_RNA (1)...(19): siRNA sense strand
ccgugaaggcacuggcuua

SEQ ID NO: 2105652 - RNA, 19 nt, Homo sapiens
  misc_RNA (1)...(19): siRNA sense strand
ggaggaggcugagagguuu

SEQ ID NO: 2105653 - RNA, 19 nt, Homo sapiens
  misc_RNA (1)...(19): siRNA sense strand
acaagaagguccugaguga

SEQ ID NO: 2105654 - RNA, 19 nt, Homo sapiens
  misc_RNA (1)...(19): siRNA sense strand
caacggagcccacagacuu

SEQ ID NO: 2105655 - RNA, 19 nt, Homo sapiens
  misc_RNA (1)...(19): siRNA sense strand
caacuucacugcuaacaac

SEQ ID NO: 2105656 - RNA, 19 nt, Homo sapiens
  misc_RNA (1)...(19): siRNA sense strand
ucugacagcugacaacuug

SEQ ID NO: 2105657 - RNA, 19 nt, Homo sapiens
  misc_RNA (1)...(19): siRNA sense strand
gaggugagcacgucuguga

SEQ ID NO: 2105658 - RNA, 19 nt, Homo sapiens
  misc_RNA (1)...(19): siRNA sense strand
agauugagcuggucauuca

SEQ ID NO: 2105659 - RNA, 19 nt, Homo sapiens
  misc_RNA (1)...(19): siRNA sense strand
ggaaggagcccaucuuuug

SEQ ID NO: 2105660 - RNA, 19 nt, Homo sapiens
  misc_RNA (1)...(19): siRNA sense strand
gcagcgagcagaagaggaa

SEQ ID NO: 2105661 - RNA, 19 nt, Homo sapiens
  misc_RNA (1)...(19): siRNA sense strand
gggacaaccuggagaugau

SEQ ID NO: 2105662 - RNA, 19 nt, Homo sapiens
  misc_RNA (1)...(19): siRNA sense strand
ggaagcugccgaagaaugu

SEQ ID NO: 2105663 - RNA, 19 nt, Homo sapiens
  misc_RNA (1)...(19): siRNA sense strand
gcugacaacuuggagaaau

SEQ ID NO: 2105664 - RNA, 19 nt, Homo sapiens
  misc_RNA (1)...(19): siRNA sense strand
gagaggaccugggcggaau

SEQ ID NO: 2105665 - RNA, 19 nt, Homo sapiens
  misc_RNA (1)...(19): siRNA sense strand
agcacgagcuggagauuaa

SEQ ID NO: 2105666 - RNA, 19 nt, Homo sapiens
  misc_RNA (1)...(19): siRNA sense strand
gaagugcggaggcucaaga

SEQ ID NO: 2105667 - RNA, 19 nt, Homo sapiens
  misc_RNA (1)...(19): siRNA sense strand
uugggaagcugccgaagaa

SEQ ID NO: 2105668 - RNA, 19 nt, Homo sapiens
  misc_RNA (1)...(19): siRNA sense strand
ucaacaaccuuagaagauc

SEQ ID NO: 2105669 - RNA, 19 nt, Homo sapiens
  misc_RNA (1)...(19): siRNA sense strand
gcacuuggccuucauugac

SEQ ID NO: 2105670 - RNA, 19 nt, Homo sapiens
  misc_RNA (1)...(19): siRNA sense strand
gggaagaaauccggaaagg

SEQ ID NO: 2105671 - RNA, 19 nt, Homo sapiens
  misc_RNA (1)...(19): siRNA sense strand
aagaagguccugagugaaa

SEQ ID NO: 2105672 - RNA, 19 nt, Homo sapiens
  misc_RNA (1)...(19): siRNA sense strand
gaaguggaucagugagaaa

SEQ ID NO: 2105673 - RNA, 19 nt, Homo sapiens
  misc_RNA (1)...(19): siRNA sense strand
caucaacaaccuuagaaga

SEQ ID NO: 2105674 - RNA, 19 nt, Homo sapiens
  misc_RNA (1)...(19): siRNA sense strand
agaaguggaucagugagaa

SEQ ID NO: 2105675 - RNA, 19 nt, Homo sapiens
  misc_RNA (1)...(19): siRNA sense strand
ccuggaacguccuggauga

SEQ ID NO: 2105676 - RNA, 19 nt, Homo sapiens
  misc_RNA (1)...(19): siRNA sense strand
uucaggagcugcaacagaa

SEQ ID NO: 2105677 - RNA, 19 nt, Homo sapiens
  misc_RNA (1)...(19): siRNA sense strand
gggagaaguggaucaguga

SEQ ID NO: 2105678 - RNA, 19 nt, Homo sapiens
  misc_RNA (1)...(19): siRNA sense strand
ggacaggacgcaggacguu

SEQ ID NO: 2105679 - RNA, 19 nt, Homo sapiens
  misc_RNA (1)...(19): siRNA sense strand
gguguggaccugagucuga

SEQ ID NO: 2105680 - RNA, 19 nt, Homo sapiens
  misc_RNA (1)...(19): siRNA sense strand
aaaccaagaagaucaagga

SEQ ID NO: 2105681 - RNA, 19 nt, Homo sapiens
  misc_RNA (1)...(19): siRNA sense strand
gagaaguggaucagugaga

SEQ ID NO: 2105682 - RNA, 19 nt, Homo sapiens
  misc_RNA (1)...(19): siRNA sense strand
gcaacugcgucaccaccau

SEQ ID NO: 2105683 - RNA, 19 nt, Homo sapiens
  misc_RNA (1)...(19): siRNA sense strand
ugaacgagcagcuuucuag

SEQ ID NO: 2105684 - RNA, 19 nt, Homo sapiens
  misc_RNA (1)...(19): siRNA sense strand
caggaaggagcccaucuuu

SEQ ID NO: 2105685 - RNA, 19 nt, Homo sapiens
  misc_RNA (1)...(19): siRNA sense strand
gaagcaggaggaccagaga

SEQ ID NO: 2105686 - RNA, 19 nt, Homo sapiens
  misc_RNA (1)...(19): siRNA sense strand
aacaggagcugagggaaga

SEQ ID NO: 2105687 - RNA, 19 nt, Homo sapiens
  misc_RNA (1)...(19): siRNA sense strand
ccacagacuuccugaugcu

SEQ ID NO: 2105688 - RNA, 19 nt, Homo sapiens
  misc_RNA (1)...(19): siRNA sense strand
caacuuggagaaauuugga

SEQ ID NO: 2105689 - RNA, 19 nt, Homo sapiens
  misc_RNA (1)...(19): siRNA sense strand
cugacaacuuggagaaauu

SEQ ID NO: 2105690 - RNA, 19 nt, Homo sapiens
  misc_RNA (1)...(19): siRNA sense strand
gaugacgccagcucucuga

SEQ ID NO: 2105691 - RNA, 19 nt, Homo sapiens
  misc_RNA (1)...(19): siRNA sense strand
guggaauggugcuguguuc

SEQ ID NO: 2105692 - RNA, 19 nt, Homo sapiens
  misc_RNA (1)...(19): siRNA sense strand
gaccagagugccaggaaug

SEQ ID NO: 2105693 - RNA, 19 nt, Homo sapiens
  misc_RNA (1)...(19): siRNA sense strand
gggaagcugccgaagaaug

SEQ ID NO: 2105694 - RNA, 19 nt, Homo sapiens
  misc_RNA (1)...(19): siRNA sense strand
gcuaacaacaggagcaaca

SEQ ID NO: 2105695 - RNA, 19 nt, Homo sapiens
  misc_RNA (1)...(19): siRNA sense strand
gcccacagacuuccugaug

SEQ ID NO: 2105696 - RNA, 19 nt, Homo sapiens
  misc_RNA (1)...(19): siRNA sense strand
gagggaagaaauccggaaa

SEQ ID NO: 2105697 - RNA, 19 nt, Homo sapiens
  misc_RNA (1)...(19): siRNA sense strand
ugacaacuuggagaaauuu

SEQ ID NO: 2105698 - RNA, 19 nt, Homo sapiens
  misc_RNA (1)...(19): siRNA sense strand
ggaauggugcuguguucug

SEQ ID NO: 2105699 - RNA, 19 nt, Homo sapiens
  misc_RNA (1)...(19): siRNA sense strand
ggacguucuugcccaggau

SEQ ID NO: 2105700 - RNA, 19 nt, Homo sapiens
  misc_RNA (1)...(19): siRNA sense strand
caccagauggagcugaaua

SEQ ID NO: 2105701 - RNA, 19 nt, Homo sapiens
  misc_RNA (1)...(19): siRNA sense strand
ucauugaccagcugauuga

SEQ ID NO: 2105702 - RNA, 19 nt, Homo sapiens
  misc_RNA (1)...(19): siRNA sense strand
ggagaaauuuggaaaacuc

SEQ ID NO: 2105703 - RNA, 19 nt, Homo sapiens
  misc_RNA (1)...(19): siRNA sense strand
ccacucagcccggaacaau

SEQ ID NO: 2105704 - RNA, 19 nt, Homo sapiens
  misc_RNA (1)...(19): siRNA sense strand
ggagauugagcuggucauu

SEQ ID NO: 2105705 - RNA, 19 nt, Homo sapiens
  misc_RNA (1)...(19): siRNA sense strand
ugacagucccacacacauu

SEQ ID NO: 2105706 - RNA, 19 nt, Homo sapiens
  misc_RNA (1)...(19): siRNA sense strand
gaggaugggacgcugcuau

SEQ ID NO: 2105707 - RNA, 19 nt, Homo sapiens
  misc_RNA (1)...(19): siRNA sense strand
ucaaggcagccaccuguga

SEQ ID NO: 2105708 - RNA, 19 nt, Homo sapiens
  misc_RNA (1)...(19): siRNA sense strand
ucaaggccaacaauacuga

SEQ ID NO: 2105709 - RNA, 19 nt, Homo sapiens
  misc_RNA (1)...(19): siRNA sense strand
ggaguuccagugcccuuga

SEQ ID NO: 2105710 - RNA, 19 nt, Homo sapiens
  misc_RNA (1)...(19): siRNA sense strand
ccaaggaggagagugagaa

SEQ ID NO: 2105711 - RNA, 19 nt, Homo sapiens
  misc_RNA (1)...(19): siRNA sense strand
gacagucccacacacauuc

SEQ ID NO: 2105712 - RNA, 19 nt, Homo sapiens
  misc_RNA (1)...(19): siRNA sense strand
ggugagcacgucugugaug

SEQ ID NO: 2105713 - RNA, 19 nt, Homo sapiens
  misc_RNA (1)...(19): siRNA sense strand
gaugcucccuguggaaugg

SEQ ID NO: 2105714 - RNA, 19 nt, Homo sapiens
  misc_RNA (1)...(19): siRNA sense strand
gcccucaaggccaacaaua

SEQ ID NO: 2105715 - RNA, 19 nt, Homo sapiens
  misc_RNA (1)...(19): siRNA sense strand
gcggugaacgagcagcuuu

SEQ ID NO: 2105716 - RNA, 19 nt, Homo sapiens
  misc_RNA (1)...(19): siRNA sense strand
gagagggacacgcacaaca

SEQ ID NO: 2105717 - RNA, 19 nt, Homo sapiens
  misc_RNA (1)...(19): siRNA sense strand
ggagcugaauacccugaag

SEQ ID NO: 2105718 - RNA, 19 nt, Homo sapiens
  misc_RNA (1)...(19): siRNA sense strand
ggcaccagauggagcugaa

SEQ ID NO: 2105719 - RNA, 19 nt, Homo sapiens
  misc_RNA (1)...(19): siRNA sense strand
uggacgagauggagaaguc

SEQ ID NO: 2105720 - RNA, 19 nt, Homo sapiens
  misc_RNA (1)...(19): siRNA sense strand
gaggaggcugagagguuua

SEQ ID NO: 2105721 - RNA, 19 nt, Homo sapiens
  misc_RNA (1)...(19): siRNA sense strand
cagcugacaacuuggagaa

SEQ ID NO: 2105722 - RNA, 19 nt, Homo sapiens
  misc_RNA (1)...(19): siRNA sense strand
gagaccagagugccaggaa

SEQ ID NO: 2105723 - RNA, 19 nt, Homo sapiens
  misc_RNA (1)...(19): siRNA sense strand
gagauugagcuggucauuc

SEQ ID NO: 2105724 - RNA, 19 nt, Homo sapiens
  misc_RNA (1)...(19): siRNA sense strand
aaugagcgccaccgagaaa

SEQ ID NO: 2105725 - RNA, 19 nt, Homo sapiens
  misc_RNA (1)...(19): siRNA sense strand
gcucccaggccaucaacaa

SEQ ID NO: 2105726 - RNA, 19 nt, Homo sapiens
  misc_RNA (1)...(19): siRNA sense strand
gagaaaaccaagaagauca

SEQ ID NO: 2105727 - RNA, 19 nt, Homo sapiens
  misc_RNA (1)...(19): siRNA sense strand
gcacgagcuggagauuaaa

SEQ ID NO: 2105728 - RNA, 19 nt, Homo sapiens
  misc_RNA (1)...(19): siRNA sense strand
ggacaaccuggagaugaug

SEQ ID NO: 2105729 - RNA, 19 nt, Homo sapiens
  misc_RNA (1)...(19): siRNA sense strand
gccaucaacaaccuuagaa

SEQ ID NO: 2105730 - RNA, 19 nt, Homo sapiens
  misc_RNA (1)...(19): siRNA sense strand
cagcggcacuuggccuuca

SEQ ID NO: 2105731 - RNA, 19 nt, Homo sapiens
  misc_RNA (1)...(19): siRNA sense strand
ucacaggcagcgagcagaa

SEQ ID NO: 2105732 - RNA, 19 nt, Homo sapiens
  misc_RNA (1)...(19): siRNA sense strand
ccaggaaggagcccaucuu

SEQ ID NO: 2105733 - RNA, 19 nt, Homo sapiens
  misc_RNA (1)...(19): siRNA sense strand
caagaagguccugagugaa

SEQ ID NO: 2105734 - RNA, 19 nt, Homo sapiens
  misc_RNA (1)...(19): siRNA sense strand
caagagcuccaaccagacu

SEQ ID NO: 2105735 - RNA, 19 nt, Homo sapiens
  misc_RNA (1)...(19): siRNA sense strand
acagaaacgagcccugaga

SEQ ID NO: 2105736 - RNA, 19 nt, Homo sapiens
  misc_RNA (1)...(19): siRNA sense strand
gcuaucggaggccaagcua

SEQ ID NO: 2105737 - RNA, 19 nt, Homo sapiens
  misc_RNA (1)...(19): siRNA sense strand
ugacagcugacaacuugga

SEQ ID NO: 2105738 - RNA, 19 nt, Homo sapiens
  misc_RNA (1)...(19): siRNA sense strand
gagcuucuuggacgagaug

SEQ ID NO: 2105739 - RNA, 19 nt, Homo sapiens
  misc_RNA (1)...(19): siRNA sense strand
ggagcugagggaagaaauc

SEQ ID NO: 2105740 - RNA, 19 nt, Homo sapiens
  misc_RNA (1)...(19): siRNA sense strand
ggccaucaacaaccuuaga

SEQ ID NO: 2105741 - RNA, 19 nt, Homo sapiens
  misc_RNA (1)...(19): siRNA sense strand
gcgcagcguuaaaacuuug

SEQ ID NO: 2105742 - RNA, 19 nt, Homo sapiens
  misc_RNA (1)...(19): siRNA sense strand
ccugagggcugaguuugag

SEQ ID NO: 2105743 - RNA, 19 nt, Homo sapiens
  misc_RNA (1)...(19): siRNA sense strand
cagacuuccugaugcucuu

SEQ ID NO: 2105744 - RNA, 19 nt, Homo sapiens
  misc_RNA (1)...(19): siRNA sense strand
uaacaacaggagcaacaag

SEQ ID NO: 2105745 - RNA, 19 nt, Homo sapiens
  misc_RNA (1)...(19): siRNA sense strand
caagcuacaaagcaucaug

SEQ ID NO: 2105746 - RNA, 19 nt, Homo sapiens
  misc_RNA (1)...(19): siRNA sense strand
gccaagcuacaaagcauca

SEQ ID NO: 2105747 - RNA, 19 nt, Homo sapiens
  misc_RNA (1)...(19): siRNA sense strand
uaucggaggccaagcuaca

SEQ ID NO: 2105748 - RNA, 19 nt, Homo sapiens
  misc_RNA (1)...(19): siRNA sense strand
ggucaaggagacagagaag

SEQ ID NO: 2105749 - RNA, 19 nt, Homo sapiens
  misc_RNA (1)...(19): siRNA sense strand
gcgcuuacgggacaaguac

SEQ ID NO: 2105750 - RNA, 19 nt, Homo sapiens
  misc_RNA (1)...(19): siRNA sense strand
ggugacagucccacacaca

SEQ ID NO: 2105751 - RNA, 19 nt, Homo sapiens
  misc_RNA (1)...(19): siRNA sense strand
gagauccagaagcugauug

SEQ ID NO: 2105752 - RNA, 19 nt, Homo sapiens
  misc_RNA (1)...(19): siRNA sense strand
gcaaacagcucccgauuag

SEQ ID NO: 2105753 - RNA, 19 nt, Homo sapiens
  misc_RNA (1)...(19): siRNA sense strand
ggagaaagaucaccucgaa

SEQ ID NO: 2105754 - RNA, 19 nt, Homo sapiens
  misc_RNA (1)...(19): siRNA sense strand
caaagcagcucacuaugaa

SEQ ID NO: 2105755 - RNA, 19 nt, Homo sapiens
  misc_RNA (1)...(19): siRNA sense strand
gcaaaccgguucagugcua

SEQ ID NO: 2105756 - RNA, 19 nt, Homo sapiens
  misc_RNA (1)...(19): siRNA sense strand
ccacaaagcagcucacuau

SEQ ID NO: 2105757 - RNA, 19 nt, Homo sapiens
  misc_RNA (1)...(19): siRNA sense strand
ugacaaagacauggaaaua

SEQ ID NO: 2105758 - RNA, 19 nt, Homo sapiens
  misc_RNA (1)...(19): siRNA sense strand
gaagaaacugcccaucgua

SEQ ID NO: 2105759 - RNA, 19 nt, Homo sapiens
  misc_RNA (1)...(19): siRNA sense strand
ggcggaagaucaccacgua

SEQ ID NO: 2105760 - RNA, 19 nt, Homo sapiens
  misc_RNA (1)...(19): siRNA sense strand
gguacuugcuguucuauca

SEQ ID NO: 2105761 - RNA, 19 nt, Homo sapiens
  misc_RNA (1)...(19): siRNA sense strand
gacaaagacauggaaauaa

SEQ ID NO: 2105762 - RNA, 19 nt, Homo sapiens
  misc_RNA (1)...(19): siRNA sense strand
gcaaagagagcaggaugaa

SEQ ID NO: 2105763 - RNA, 19 nt, Homo sapiens
  misc_RNA (1)...(19): siRNA sense strand
ggacuacaucuaugacaaa

SEQ ID NO: 2105764 - RNA, 19 nt, Homo sapiens
  misc_RNA (1)...(19): siRNA sense strand
aaagagagcaggaugaaug

SEQ ID NO: 2105765 - RNA, 19 nt, Homo sapiens
  misc_RNA (1)...(19): siRNA sense strand
gcuccugucuggucuguga

SEQ ID NO: 2105766 - RNA, 19 nt, Homo sapiens
  misc_RNA (1)...(19): siRNA sense strand
gcgaaaagcuuggaaaaug

SEQ ID NO: 2105767 - RNA, 19 nt, Homo sapiens
  misc_RNA (1)...(19): siRNA sense strand
ucacaaagaagcauauuca

SEQ ID NO: 2105768 - RNA, 19 nt, Homo sapiens
  misc_RNA (1)...(19): siRNA sense strand
gcaaggcguuggagagaag

SEQ ID NO: 2105769 - RNA, 19 nt, Homo sapiens
  misc_RNA (1)...(19): siRNA sense strand
ggcacaaccuggccauuga

SEQ ID NO: 2105770 - RNA, 19 nt, Homo sapiens
  misc_RNA (1)...(19): siRNA sense strand
gagauguccucacuguuuc

SEQ ID NO: 2105771 - RNA, 19 nt, Homo sapiens
  misc_RNA (1)...(19): siRNA sense strand
cggacagucucaacaauga

SEQ ID NO: 2105772 - RNA, 19 nt, Homo sapiens
  misc_RNA (1)...(19): siRNA sense strand
cugcaaaggugaugacaau

SEQ ID NO: 2105773 - RNA, 19 nt, Homo sapiens
  misc_RNA (1)...(19): siRNA sense strand
caacaaugacaacaaguau

SEQ ID NO: 2105774 - RNA, 19 nt, Homo sapiens
  misc_RNA (1)...(19): siRNA sense strand
ucacaucccguauaaguug

SEQ ID NO: 2105775 - RNA, 19 nt, Homo sapiens
  misc_RNA (1)...(19): siRNA sense strand
gaaggguacuugcuguucu

SEQ ID NO: 2105776 - RNA, 19 nt, Homo sapiens
  misc_RNA (1)...(19): siRNA sense strand
gcagcucacuaugaagaaa

SEQ ID NO: 2105777 - RNA, 19 nt, Homo sapiens
  misc_RNA (1)...(19): siRNA sense strand
acaaagcagcucacuauga

SEQ ID NO: 2105778 - RNA, 19 nt, Homo sapiens
  misc_RNA (1)...(19): siRNA sense strand
gcaaaggugaugacaaugg

SEQ ID NO: 2105779 - RNA, 19 nt, Homo sapiens
  misc_RNA (1)...(19): siRNA sense strand
ucaacaaugacaacaagua

SEQ ID NO: 2105780 - RNA, 19 nt, Homo sapiens
  misc_RNA (1)...(19): siRNA sense strand
ggacagcgaaggguacuug

SEQ ID NO: 2105781 - RNA, 19 nt, Homo sapiens
  misc_RNA (1)...(19): siRNA sense strand
caaccaaacgggagcuuga

SEQ ID NO: 2105782 - RNA, 19 nt, Homo sapiens
  misc_RNA (1)...(19): siRNA sense strand
ugaagaaacugcccaucgu

SEQ ID NO: 2105783 - RNA, 19 nt, Homo sapiens
  misc_RNA (1)...(19): siRNA sense strand
guacggaggcaucuacugu

SEQ ID NO: 2105784 - RNA, 19 nt, Homo sapiens
  misc_RNA (1)...(19): siRNA sense strand
gcaaggccaaguccuguau

SEQ ID NO: 2105785 - RNA, 19 nt, Homo sapiens
  misc_RNA (1)...(19): siRNA sense strand
ggaagaucaccacguaugu

SEQ ID NO: 2105786 - RNA, 19 nt, Homo sapiens
  misc_RNA (1)...(19): siRNA sense strand
gagcgagggcaacguggua

SEQ ID NO: 2105787 - RNA, 19 nt, Homo sapiens
  misc_RNA (1)...(19): siRNA sense strand
caucauagaccagaucuuc

SEQ ID NO: 2105788 - RNA, 19 nt, Homo sapiens
  misc_RNA (1)...(19): siRNA sense strand
cuacaucuaugacaaagac

SEQ ID NO: 2105789 - RNA, 19 nt, Homo sapiens
  misc_RNA (1)...(19): siRNA sense strand
ccaaggaggagcagcgaaa

SEQ ID NO: 2105790 - RNA, 19 nt, Homo sapiens
  misc_RNA (1)...(19): siRNA sense strand
gaaagaucaccucgaacug

SEQ ID NO: 2105791 - RNA, 19 nt, Homo sapiens
  misc_RNA (1)...(19): siRNA sense strand
gaagaucaccacguaugug

SEQ ID NO: 2105792 - RNA, 19 nt, Homo sapiens
  misc_RNA (1)...(19): siRNA sense strand
acaaugacaacaaguauuc

SEQ ID NO: 2105793 - RNA, 19 nt, Homo sapiens
  misc_RNA (1)...(19): siRNA sense strand
ccucuacugugucuucuuc

SEQ ID NO: 2105794 - RNA, 19 nt, Homo sapiens
  misc_RNA (1)...(19): siRNA sense strand
cagacggacuauacugaga

SEQ ID NO: 2105795 - RNA, 19 nt, Homo sapiens
  misc_RNA (1)...(19): siRNA sense strand
gaucaaccuugggaacaca

SEQ ID NO: 2105796 - RNA, 19 nt, Homo sapiens
  misc_RNA (1)...(19): siRNA sense strand
acggaggcaucuacuguuu

SEQ ID NO: 2105797 - RNA, 19 nt, Homo sapiens
  misc_RNA (1)...(19): siRNA sense strand
caaagacauggaaauaauc

SEQ ID NO: 2105798 - RNA, 19 nt, Homo sapiens
  misc_RNA (1)...(19): siRNA sense strand
ccacggacagucucaacaa

SEQ ID NO: 2105799 - RNA, 19 nt, Homo sapiens
  misc_RNA (1)...(19): siRNA sense strand
caggaugaauggacaguac

SEQ ID NO: 2105800 - RNA, 19 nt, Homo sapiens
  misc_RNA (1)...(19): siRNA sense strand
gacgucaccugccaagucu

SEQ ID NO: 2105801 - RNA, 19 nt, Homo sapiens
  misc_RNA (1)...(19): siRNA sense strand
ucucaacaaugacaacaag

SEQ ID NO: 2105802 - RNA, 19 nt, Homo sapiens
  misc_RNA (1)...(19): siRNA sense strand
acugagagccuaugacaau

SEQ ID NO: 2105803 - RNA, 19 nt, Homo sapiens
  misc_RNA (1)...(19): siRNA sense strand
gcuucaagguggacaacug

SEQ ID NO: 2105804 - RNA, 19 nt, Homo sapiens
  misc_RNA (1)...(19): siRNA sense strand
ugcaaacagcucccgauua

SEQ ID NO: 2105805 - RNA, 19 nt, Homo sapiens
  misc_RNA (1)...(19): siRNA sense strand
cugagagccuaugacaaua

SEQ ID NO: 2105806 - RNA, 19 nt, Homo sapiens
  misc_RNA (1)...(19): siRNA sense strand
ccucacaucccguauaagu

SEQ ID NO: 2105807 - RNA, 19 nt, Homo sapiens
  misc_RNA (1)...(19): siRNA sense strand
ggaggcaucuacuguuuuc

SEQ ID NO: 2105808 - RNA, 19 nt, Homo sapiens
  misc_RNA (1)...(19): siRNA sense strand
aaggguacuugcuguucua

SEQ ID NO: 2105809 - RNA, 19 nt, Homo sapiens
  misc_RNA (1)...(19): siRNA sense strand
uggaaauaaucgccaagga

SEQ ID NO: 2105810 - RNA, 19 nt, Homo sapiens
  misc_RNA (1)...(19): siRNA sense strand
gccaggacuacaucuauga

SEQ ID NO: 2105811 - RNA, 19 nt, Homo sapiens
  misc_RNA (1)...(19): siRNA sense strand
ccacuacaccagcuuuauc

SEQ ID NO: 2105812 - RNA, 19 nt, Homo sapiens
  misc_RNA (1)...(19): siRNA sense strand
uuucauggccuccagcaaa

SEQ ID NO: 2105813 - RNA, 19 nt, Homo sapiens
  misc_RNA (1)...(19): siRNA sense strand
gcacaaccuggccauugau

SEQ ID NO: 2105814 - RNA, 19 nt, Homo sapiens
  misc_RNA (1)...(19): siRNA sense strand
gcaggaugaauggacagua

SEQ ID NO: 2105815 - RNA, 19 nt, Homo sapiens
  misc_RNA (1)...(19): siRNA sense strand
cggaagaucaccacguaug

SEQ ID NO: 2105816 - RNA, 19 nt, Homo sapiens
  misc_RNA (1)...(19): siRNA sense strand
caaccuggccauugaucug

SEQ ID NO: 2105817 - RNA, 19 nt, Homo sapiens
  misc_RNA (1)...(19): siRNA sense strand
aagcagcucacuaugaaga

SEQ ID NO: 2105818 - RNA, 19 nt, Homo sapiens
  misc_RNA (1)...(19): siRNA sense strand
gcuaccaggaguccacaaa

SEQ ID NO: 2105819 - RNA, 19 nt, Homo sapiens
  misc_RNA (1)...(19): siRNA sense strand
agaaagaucaccucgaacu

SEQ ID NO: 2105820 - RNA, 19 nt, Homo sapiens
  misc_RNA (1)...(19): siRNA sense strand
gggacuucuuccugucuga

SEQ ID NO: 2105821 - RNA, 19 nt, Homo sapiens
  misc_RNA (1)...(19): siRNA sense strand
gaagcauauucacgagcau

SEQ ID NO: 2105822 - RNA, 19 nt, Homo sapiens
  misc_RNA (1)...(19): siRNA sense strand
ggccacuacaccagcuuua

SEQ ID NO: 2105823 - RNA, 19 nt, Homo sapiens
  misc_RNA (1)...(19): siRNA sense strand
ggguuggcccucacuauca

SEQ ID NO: 2105824 - RNA, 19 nt, Homo sapiens
  misc_RNA (1)...(19): siRNA sense strand
gugcagcgguugccauagc

SEQ ID NO: 2105825 - RNA, 19 nt, Homo sapiens
  misc_RNA (1)...(19): siRNA sense strand
ggcagcagcgccaagauca

SEQ ID NO: 2105826 - RNA, 19 nt, Homo sapiens
  misc_RNA (1)...(19): siRNA sense strand
ggacugccugcgacgauuc

SEQ ID NO: 2105827 - RNA, 19 nt, Homo sapiens
  misc_RNA (1)...(19): siRNA sense strand
caaacgggagcuugaacug

SEQ ID NO: 2105828 - RNA, 19 nt, Homo sapiens
  misc_RNA (1)...(19): siRNA sense strand
gugccaggacuacaucuau

SEQ ID NO: 2105829 - RNA, 19 nt, Homo sapiens
  misc_RNA (1)...(19): siRNA sense strand
ugucuggucugugagaugu

SEQ ID NO: 2105830 - RNA, 19 nt, Homo sapiens
  misc_RNA (1)...(19): siRNA sense strand
aggacuacaucuaugacaa

SEQ ID NO: 2105831 - RNA, 19 nt, Homo sapiens
  misc_RNA (1)...(19): siRNA sense strand
ggccauugaucugauguac

SEQ ID NO: 2105832 - RNA, 19 nt, Homo sapiens
  misc_RNA (1)...(19): siRNA sense strand
ccaaggccagcaucaagga

SEQ ID NO: 2105833 - RNA, 19 nt, Homo sapiens
  misc_RNA (1)...(19): siRNA sense strand
cacggacagucucaacaau

SEQ ID NO: 2105834 - RNA, 19 nt, Homo sapiens
  misc_RNA (1)...(19): siRNA sense strand
caccagaccagagcacuug

SEQ ID NO: 2105835 - RNA, 19 nt, Homo sapiens
  misc_RNA (1)...(19): siRNA sense strand
ccucacuguuucaggaguu

SEQ ID NO: 2105836 - RNA, 19 nt, Homo sapiens
  misc_RNA (1)...(19): siRNA sense strand
gacuacaucuaugacaaag

SEQ ID NO: 2105837 - RNA, 19 nt, Homo sapiens
  misc_RNA (1)...(19): siRNA sense strand
ugccaggacuacaucuaug

SEQ ID NO: 2105838 - RNA, 19 nt, Homo sapiens
  misc_RNA (1)...(19): siRNA sense strand
gcgaaggguacuugcuguu

SEQ ID NO: 2105839 - RNA, 19 nt, Homo sapiens
  misc_RNA (1)...(19): siRNA sense strand
ccuguuugcuguuguuaac

SEQ ID NO: 2105840 - RNA, 19 nt, Homo sapiens
  misc_RNA (1)...(19): siRNA sense strand
gaaaaugcaaggcguugga

SEQ ID NO: 2105841 - RNA, 19 nt, Homo sapiens
  misc_RNA (1)...(19): siRNA sense strand
cggcacaaccuggccauug

SEQ ID NO: 2105842 - RNA, 19 nt, Homo sapiens
  misc_RNA (1)...(19): siRNA sense strand
gcaccugggcagcuucaag

SEQ ID NO: 2105843 - RNA, 19 nt, Homo sapiens
  misc_RNA (1)...(19): siRNA sense strand
ggacaucagcuuggaucuc

SEQ ID NO: 2105844 - RNA, 19 nt, Homo sapiens
  misc_RNA (1)...(19): siRNA sense strand
agacgucaccugccaaguc

SEQ ID NO: 2105845 - RNA, 19 nt, Homo sapiens
  misc_RNA (1)...(19): siRNA sense strand
gcugaagcacaacccgaaa

SEQ ID NO: 2105846 - RNA, 19 nt, Homo sapiens
  misc_RNA (1)...(19): siRNA sense strand
ccaccgacacugcaaaggu

SEQ ID NO: 2105847 - RNA, 19 nt, Homo sapiens
  misc_RNA (1)...(19): siRNA sense strand
gcagcagcgccaagaucaa

SEQ ID NO: 2105848 - RNA, 19 nt, Homo sapiens
  misc_RNA (1)...(19): siRNA sense strand
gugaugacaaugggaagaa

SEQ ID NO: 2105849 - RNA, 19 nt, Homo sapiens
  misc_RNA (1)...(19): siRNA sense strand
cgaaggguacuugcuguuc

SEQ ID NO: 2105850 - RNA, 19 nt, Homo sapiens
  misc_RNA (1)...(19): siRNA sense strand
caaagagagcaggaugaau

SEQ ID NO: 2105851 - RNA, 19 nt, Homo sapiens
  misc_RNA (1)...(19): siRNA sense strand
caggcggguugcagucaga

SEQ ID NO: 2105852 - RNA, 19 nt, Homo sapiens
  misc_RNA (1)...(19): siRNA sense strand
agaaggagaugaagaaaua

SEQ ID NO: 2105853 - RNA, 19 nt, Homo sapiens
  misc_RNA (1)...(19): siRNA sense strand
cuacauaucugguggcauu

SEQ ID NO: 2105854 - RNA, 19 nt, Homo sapiens
  misc_RNA (1)...(19): siRNA sense strand
ggauuuaacuaucagaaug

SEQ ID NO: 2105855 - RNA, 19 nt, Homo sapiens
  misc_RNA (1)...(19): siRNA sense strand
ggaugagccugcuaucaaa

SEQ ID NO: 2105856 - RNA, 19 nt, Homo sapiens
  misc_RNA (1)...(19): siRNA sense strand
gacaugaacuugcccauca

SEQ ID NO: 2105857 - RNA, 19 nt, Homo sapiens
  misc_RNA (1)...(19): siRNA sense strand
gaauguaauugaccggaaa

SEQ ID NO: 2105858 - RNA, 19 nt, Homo sapiens
  misc_RNA (1)...(19): siRNA sense strand
gaauugugcugauauugau

SEQ ID NO: 2105859 - RNA, 19 nt, Homo sapiens
  misc_RNA (1)...(19): siRNA sense strand
gagacugcauugcuuauug

SEQ ID NO: 2105860 - RNA, 19 nt, Homo sapiens
  misc_RNA (1)...(19): siRNA sense strand
cagaguagcuuuaucaaac

SEQ ID NO: 2105861 - RNA, 19 nt, Homo sapiens
  misc_RNA (1)...(19): siRNA sense strand
acugggaccuuguuacuua

SEQ ID NO: 2105862 - RNA, 19 nt, Homo sapiens
  misc_RNA (1)...(19): siRNA sense strand
gaaacaaggucaaaagaug

SEQ ID NO: 2105863 - RNA, 19 nt, Homo sapiens
  misc_RNA (1)...(19): siRNA sense strand
gggugaauaugacuuugua

SEQ ID NO: 2105864 - RNA, 19 nt, Homo sapiens
  misc_RNA (1)...(19): siRNA sense strand
gaaaucuuguuacuaugga

SEQ ID NO: 2105865 - RNA, 19 nt, Homo sapiens
  misc_RNA (1)...(19): siRNA sense strand
gcacaccuguuacaucuac

SEQ ID NO: 2105866 - RNA, 19 nt, Homo sapiens
  misc_RNA (1)...(19): siRNA sense strand
cuacaggauuuaacuauca

SEQ ID NO: 2105867 - RNA, 19 nt, Homo sapiens
  misc_RNA (1)...(19): siRNA sense strand
uauaaggacuacuucaaug

SEQ ID NO: 2105868 - RNA, 19 nt, Homo sapiens
  misc_RNA (1)...(19): siRNA sense strand
gcgcuaugcugcuguaaca

SEQ ID NO: 2105869 - RNA, 19 nt, Homo sapiens
  misc_RNA (1)...(19): siRNA sense strand
gggaugagccugcuaucaa

SEQ ID NO: 2105870 - RNA, 19 nt, Homo sapiens
  misc_RNA (1)...(19): siRNA sense strand
ucucauugguuguuccuaa

SEQ ID NO: 2105871 - RNA, 19 nt, Homo sapiens
  misc_RNA (1)...(19): siRNA sense strand
cuacuucaauguuccuuau

SEQ ID NO: 2105872 - RNA, 19 nt, Homo sapiens
  misc_RNA (1)...(19): siRNA sense strand
uaauugaccggaaaccaua

SEQ ID NO: 2105873 - RNA, 19 nt, Homo sapiens
  misc_RNA (1)...(19): siRNA sense strand
gaacugggaccuuguuacu

SEQ ID NO: 2105874 - RNA, 19 nt, Homo sapiens
  misc_RNA (1)...(19): siRNA sense strand
caauguuccuuauccucua

SEQ ID NO: 2105875 - RNA, 19 nt, Homo sapiens
  misc_RNA (1)...(19): siRNA sense strand
uuggagagcugaaugacaa

SEQ ID NO: 2105876 - RNA, 19 nt, Homo sapiens
  misc_RNA (1)...(19): siRNA sense strand
agacugcauugcuuauuga

SEQ ID NO: 2105877 - RNA, 19 nt, Homo sapiens
  misc_RNA (1)...(19): siRNA sense strand
guagcuuuaucaaacauga

SEQ ID NO: 2105878 - RNA, 19 nt, Homo sapiens
  misc_RNA (1)...(19): siRNA sense strand
uacgggaaccuuaaagaua

SEQ ID NO: 2105879 - RNA, 19 nt, Homo sapiens
  misc_RNA (1)...(19): siRNA sense strand
ggaaaucuuguuacuaugg

SEQ ID NO: 2105880 - RNA, 19 nt, Homo sapiens
  misc_RNA (1)...(19): siRNA sense strand
gaugaagaaauacaugcua

SEQ ID NO: 2105881 - RNA, 19 nt, Homo sapiens
  misc_RNA (1)...(19): siRNA sense strand
gcaaagcagaacaaggaaa

SEQ ID NO: 2105882 - RNA, 19 nt, Homo sapiens
  misc_RNA (1)...(19): siRNA sense strand
gcuacaggauuuaacuauc

SEQ ID NO: 2105883 - RNA, 19 nt, Homo sapiens
  misc_RNA (1)...(19): siRNA sense strand
aaccauacccugaugauga

SEQ ID NO: 2105884 - RNA, 19 nt, Homo sapiens
  misc_RNA (1)...(19): siRNA sense strand
agacagaguagcuuuauca

SEQ ID NO: 2105885 - RNA, 19 nt, Homo sapiens
  misc_RNA (1)...(19): siRNA sense strand
uauuacagcuucauaugca

SEQ ID NO: 2105886 - RNA, 19 nt, Homo sapiens
  misc_RNA (1)...(19): siRNA sense strand
gagaacugggaccuuguua

SEQ ID NO: 2105887 - RNA, 19 nt, Homo sapiens
  misc_RNA (1)...(19): siRNA sense strand
aauacaugcuacaggauuu

SEQ ID NO: 2105888 - RNA, 19 nt, Homo sapiens
  misc_RNA (1)...(19): siRNA sense strand
gaaaccauacccugaugau

SEQ ID NO: 2105889 - RNA, 19 nt, Homo sapiens
  misc_RNA (1)...(19): siRNA sense strand
caucaaugguuuggaaauc

SEQ ID NO: 2105890 - RNA, 19 nt, Homo sapiens
  misc_RNA (1)...(19): siRNA sense strand
uggcaaagcagaacaagga

SEQ ID NO: 2105891 - RNA, 19 nt, Homo sapiens
  misc_RNA (1)...(19): siRNA sense strand
ccgcacaccuguuacaucu

SEQ ID NO: 2105892 - RNA, 19 nt, Homo sapiens
  misc_RNA (1)...(19): siRNA sense strand
ucaaugguuuggaaaucuu

SEQ ID NO: 2105893 - RNA, 19 nt, Homo sapiens
  misc_RNA (1)...(19): siRNA sense strand
guacgggaaccuuaaagau

SEQ ID NO: 2105894 - RNA, 19 nt, Homo sapiens
  misc_RNA (1)...(19): siRNA sense strand
ggagaacugggaccuuguu

SEQ ID NO: 2105895 - RNA, 19 nt, Homo sapiens
  misc_RNA (1)...(19): siRNA sense strand
ggagaugaagaaauacaug

SEQ ID NO: 2105896 - RNA, 19 nt, Homo sapiens
  misc_RNA (1)...(19): siRNA sense strand
ggaaaccauacccugauga

SEQ ID NO: 2105897 - RNA, 19 nt, Homo sapiens
  misc_RNA (1)...(19): siRNA sense strand
uuacacuccuguuggcaaa

SEQ ID NO: 2105898 - RNA, 19 nt, Homo sapiens
  misc_RNA (1)...(19): siRNA sense strand
gaaauacaugcuacaggau

SEQ ID NO: 2105899 - RNA, 19 nt, Homo sapiens
  misc_RNA (1)...(19): siRNA sense strand
acgggaaccuuaaagauag

SEQ ID NO: 2105900 - RNA, 19 nt, Homo sapiens
  misc_RNA (1)...(19): siRNA sense strand
uaaggacuacuucaauguu

SEQ ID NO: 2105901 - RNA, 19 nt, Homo sapiens
  misc_RNA (1)...(19): siRNA sense strand
ccuguuacaucuacauauc

SEQ ID NO: 2105902 - RNA, 19 nt, Homo sapiens
  misc_RNA (1)...(19): siRNA sense strand
guaauugaccggaaaccau

SEQ ID NO: 2105903 - RNA, 19 nt, Homo sapiens
  misc_RNA (1)...(19): siRNA sense strand
gugaauaugacuuuguaga

SEQ ID NO: 2105904 - RNA, 19 nt, Homo sapiens
  misc_RNA (1)...(19): siRNA sense strand
ggagacugcauugcuuauu

SEQ ID NO: 2105905 - RNA, 19 nt, Homo sapiens
  misc_RNA (1)...(19): siRNA sense strand
uagggagacugcauugcuu

SEQ ID NO: 2105906 - RNA, 19 nt, Homo sapiens
  misc_RNA (1)...(19): siRNA sense strand
gaagaaauacaugcuacag

SEQ ID NO: 2105907 - RNA, 19 nt, Homo sapiens
  misc_RNA (1)...(19): siRNA sense strand
ggugcgcuaugcugcugua

SEQ ID NO: 2105908 - RNA, 19 nt, Homo sapiens
  misc_RNA (1)...(19): siRNA sense strand
cggaaaccauacccugaug

SEQ ID NO: 2105909 - RNA, 19 nt, Homo sapiens
  misc_RNA (1)...(19): siRNA sense strand
agaguagcuuuaucaaaca

SEQ ID NO: 2105910 - RNA, 19 nt, Homo sapiens
  misc_RNA (1)...(19): siRNA sense strand
cauaucugguggcauuugu

SEQ ID NO: 2105911 - RNA, 19 nt, Homo sapiens
  misc_RNA (1)...(19): siRNA sense strand
gauaucucauugguuguuc

SEQ ID NO: 2105912 - RNA, 19 nt, Homo sapiens
  misc_RNA (1)...(19): siRNA sense strand
gguacgggaaccuuaaaga

SEQ ID NO: 2105913 - RNA, 19 nt, Homo sapiens
  misc_RNA (1)...(19): siRNA sense strand
aaauacaugcuacaggauu

SEQ ID NO: 2105914 - RNA, 19 nt, Homo sapiens
  misc_RNA (1)...(19): siRNA sense strand
gaguagcuuuaucaaacau

SEQ ID NO: 2105915 - RNA, 19 nt, Homo sapiens
  misc_RNA (1)...(19): siRNA sense strand
caccuugucuuucccuagu

SEQ ID NO: 2105916 - RNA, 19 nt, Homo sapiens
  misc_RNA (1)...(19): siRNA sense strand
ucauugcuauugcagacuu

SEQ ID NO: 2105917 - RNA, 19 nt, Homo sapiens
  misc_RNA (1)...(19): siRNA sense strand
gugugugugucuguguuua

SEQ ID NO: 2105918 - RNA, 19 nt, Homo sapiens
  misc_RNA (1)...(19): siRNA sense strand
cauugguuguuccuaaaga

SEQ ID NO: 2105919 - RNA, 19 nt, Homo sapiens
  misc_RNA (1)...(19): siRNA sense strand
gucaaaagauggugugugu

SEQ ID NO: 2105920 - RNA, 19 nt, Homo sapiens
  misc_RNA (1)...(19): siRNA sense strand
accauacccugaugaugaa

SEQ ID NO: 2105921 - RNA, 19 nt, Homo sapiens
  misc_RNA (1)...(19): siRNA sense strand
gguuguuccuaaagacaga

SEQ ID NO: 2105922 - RNA, 19 nt, Homo sapiens
  misc_RNA (1)...(19): siRNA sense strand
aaggacuacuucaauguuc

SEQ ID NO: 2105923 - RNA, 19 nt, Homo sapiens
  misc_RNA (1)...(19): siRNA sense strand
caaagcagaacaaggaaaa

SEQ ID NO: 2105924 - RNA, 19 nt, Homo sapiens
  misc_RNA (1)...(19): siRNA sense strand
cagaaggagaugaagaaau

SEQ ID NO: 2105925 - RNA, 19 nt, Homo sapiens
  misc_RNA (1)...(19): siRNA sense strand
acagaguagcuuuaucaaa

SEQ ID NO: 2105926 - RNA, 19 nt, Homo sapiens
  misc_RNA (1)...(19): siRNA sense strand
caaggaaaauuugcauuag

SEQ ID NO: 2105927 - RNA, 19 nt, Homo sapiens
  misc_RNA (1)...(19): siRNA sense strand
gggaccuuguuacuuauag

SEQ ID NO: 2105928 - RNA, 19 nt, Homo sapiens
  misc_RNA (1)...(19): siRNA sense strand
gcuaugcugcuguaacaca

SEQ ID NO: 2105929 - RNA, 19 nt, Homo sapiens
  misc_RNA (1)...(19): siRNA sense strand
cuaucagaaugaagaugaa

SEQ ID NO: 2105930 - RNA, 19 nt, Homo sapiens
  misc_RNA (1)...(19): siRNA sense strand
uuccuuauccucuaccuaa

SEQ ID NO: 2105931 - RNA, 19 nt, Homo sapiens
  misc_RNA (1)...(19): siRNA sense strand
gcagaacaaggaaaauuug

SEQ ID NO: 2105932 - RNA, 19 nt, Homo sapiens
  misc_RNA (1)...(19): siRNA sense strand
cauuuguugugggugaaua

SEQ ID NO: 2105933 - RNA, 19 nt, Homo sapiens
  misc_RNA (1)...(19): siRNA sense strand
ggaccuuguuacuuauagg

SEQ ID NO: 2105934 - RNA, 19 nt, Homo sapiens
  misc_RNA (1)...(19): siRNA sense strand
caaaagauggugugugugu

SEQ ID NO: 2105935 - RNA, 19 nt, Homo sapiens
  misc_RNA (1)...(19): siRNA sense strand
ccagaaggagaugaagaaa

SEQ ID NO: 2105936 - RNA, 19 nt, Homo sapiens
  misc_RNA (1)...(19): siRNA sense strand
cucauugguuguuccuaaa

SEQ ID NO: 2105937 - RNA, 19 nt, Homo sapiens
  misc_RNA (1)...(19): siRNA sense strand
guuuggaaaucuuguuacu

SEQ ID NO: 2105938 - RNA, 19 nt, Homo sapiens
  misc_RNA (1)...(19): siRNA sense strand
acuaucagaaugaagauga

SEQ ID NO: 2105939 - RNA, 19 nt, Homo sapiens
  misc_RNA (1)...(19): siRNA sense strand
gacagaguagcuuuaucaa

SEQ ID NO: 2105940 - RNA, 19 nt, Homo sapiens
  misc_RNA (1)...(19): siRNA sense strand
uaucugguggcauuuguug

SEQ ID NO: 2105941 - RNA, 19 nt, Homo sapiens
  misc_RNA (1)...(19): siRNA sense strand
cgggaaccuuaaagauaga

SEQ ID NO: 2105942 - RNA, 19 nt, Homo sapiens
  misc_RNA (1)...(19): siRNA sense strand
acaugaacuugcccaucaa

SEQ ID NO: 2105943 - RNA, 19 nt, Homo sapiens
  misc_RNA (1)...(19): siRNA sense strand
cagcuggugccauggagaa

SEQ ID NO: 2105944 - RNA, 19 nt, Homo sapiens
  misc_RNA (1)...(19): siRNA sense strand
gaaaauuuaguggaaguga

SEQ ID NO: 2105945 - RNA, 19 nt, Homo sapiens
  misc_RNA (1)...(19): siRNA sense strand
auacaugcuacaggauuua

SEQ ID NO: 2105946 - RNA, 19 nt, Homo sapiens
  misc_RNA (1)...(19): siRNA sense strand
gaacaaggaaaauuugcau

SEQ ID NO: 2105947 - RNA, 19 nt, Homo sapiens
  misc_RNA (1)...(19): siRNA sense strand
uggaaaucuuguuacuaug

SEQ ID NO: 2105948 - RNA, 19 nt, Homo sapiens
  misc_RNA (1)...(19): siRNA sense strand
gggagacugcauugcuuau

SEQ ID NO: 2105949 - RNA, 19 nt, Homo sapiens
  misc_RNA (1)...(19): siRNA sense strand
gaaagacccuggagugaaa

SEQ ID NO: 2105950 - RNA, 19 nt, Homo sapiens
  misc_RNA (1)...(19): siRNA sense strand
gaagcaaacacucugauua

SEQ ID NO: 2105951 - RNA, 19 nt, Homo sapiens
  misc_RNA (1)...(19): siRNA sense strand
gaacauuucuacagugaug

SEQ ID NO: 2105952 - RNA, 19 nt, Homo sapiens
  misc_RNA (1)...(19): siRNA sense strand
gcacuuuccuuccuaaaug

SEQ ID NO: 2105953 - RNA, 19 nt, Homo sapiens
  misc_RNA (1)...(19): siRNA sense strand
uagagaagcugcaguaaug

SEQ ID NO: 2105954 - RNA, 19 nt, Homo sapiens
  misc_RNA (1)...(19): siRNA sense strand
caaacacucugauuaugaa

SEQ ID NO: 2105955 - RNA, 19 nt, Homo sapiens
  misc_RNA (1)...(19): siRNA sense strand
gcaauaccgugaagaacuu

SEQ ID NO: 2105956 - RNA, 19 nt, Homo sapiens
  misc_RNA (1)...(19): siRNA sense strand
gaagguuccaucuuucuua

SEQ ID NO: 2105957 - RNA, 19 nt, Homo sapiens
  misc_RNA (1)...(19): siRNA sense strand
gcaaacacucugauuauga

SEQ ID NO: 2105958 - RNA, 19 nt, Homo sapiens
  misc_RNA (1)...(19): siRNA sense strand
ccacgaugcuauugaagaa

SEQ ID NO: 2105959 - RNA, 19 nt, Homo sapiens
  misc_RNA (1)...(19): siRNA sense strand
gaacaaaacagagaaagua

SEQ ID NO: 2105960 - RNA, 19 nt, Homo sapiens
  misc_RNA (1)...(19): siRNA sense strand
guauuccucuucacuauug

SEQ ID NO: 2105961 - RNA, 19 nt, Homo sapiens
  misc_RNA (1)...(19): siRNA sense strand
ggaaucaggucuggaaucu

SEQ ID NO: 2105962 - RNA, 19 nt, Homo sapiens
  misc_RNA (1)...(19): siRNA sense strand
aaacauguauuccucuuca

SEQ ID NO: 2105963 - RNA, 19 nt, Homo sapiens
  misc_RNA (1)...(19): siRNA sense strand
ccauucaacucaacaauca

SEQ ID NO: 2105964 - RNA, 19 nt, Homo sapiens
  misc_RNA (1)...(19): siRNA sense strand
agaagcagcucccaagugu

SEQ ID NO: 2105965 - RNA, 19 nt, Homo sapiens
  misc_RNA (1)...(19): siRNA sense strand
ugagaaaguugaggaauca

SEQ ID NO: 2105966 - RNA, 19 nt, Homo sapiens
  misc_RNA (1)...(19): siRNA sense strand
caaguaagaagaaugaaug

SEQ ID NO: 2105967 - RNA, 19 nt, Homo sapiens
  misc_RNA (1)...(19): siRNA sense strand
ucuggaaucugaaggaauu

SEQ ID NO: 2105968 - RNA, 19 nt, Homo sapiens
  misc_RNA (1)...(19): siRNA sense strand
aaccaaagccaaagacaua

SEQ ID NO: 2105969 - RNA, 19 nt, Homo sapiens
  misc_RNA (1)...(19): siRNA sense strand
cucaugacauucuucaaua

SEQ ID NO: 2105970 - RNA, 19 nt, Homo sapiens
  misc_RNA (1)...(19): siRNA sense strand
gaaugaagccacgaugcua

SEQ ID NO: 2105971 - RNA, 19 nt, Homo sapiens
  misc_RNA (1)...(19): siRNA sense strand
cuacagugauggcaccaaa

SEQ ID NO: 2105972 - RNA, 19 nt, Homo sapiens
  misc_RNA (1)...(19): siRNA sense strand
cgccaucucucucugauug

SEQ ID NO: 2105973 - RNA, 19 nt, Homo sapiens
  misc_RNA (1)...(19): siRNA sense strand
gaagaauuacuguuagcaa

SEQ ID NO: 2105974 - RNA, 19 nt, Homo sapiens
  misc_RNA (1)...(19): siRNA sense strand
gaaugagucuguggaacau

SEQ ID NO: 2105975 - RNA, 19 nt, Homo sapiens
  misc_RNA (1)...(19): siRNA sense strand
ggaagcugcucaggaggaa

SEQ ID NO: 2105976 - RNA, 19 nt, Homo sapiens
  misc_RNA (1)...(19): siRNA sense strand
guaagaagaaugaaugaag

SEQ ID NO: 2105977 - RNA, 19 nt, Homo sapiens
  misc_RNA (1)...(19): siRNA sense strand
gaaaguuccccugguauua

SEQ ID NO: 2105978 - RNA, 19 nt, Homo sapiens
  misc_RNA (1)...(19): siRNA sense strand
ccauagagaagcugcagua

SEQ ID NO: 2105979 - RNA, 19 nt, Homo sapiens
  misc_RNA (1)...(19): siRNA sense strand
caagcaauaccgugaagaa

SEQ ID NO: 2105980 - RNA, 19 nt, Homo sapiens
  misc_RNA (1)...(19): siRNA sense strand
gaacuacccaccucucucu

SEQ ID NO: 2105981 - RNA, 19 nt, Homo sapiens
  misc_RNA (1)...(19): siRNA sense strand
acacucugauuaugaagaa

SEQ ID NO: 2105982 - RNA, 19 nt, Homo sapiens
  misc_RNA (1)...(19): siRNA sense strand
ccaaacauguauuccucuu

SEQ ID NO: 2105983 - RNA, 19 nt, Homo sapiens
  misc_RNA (1)...(19): siRNA sense strand
caaagccaaagacauauug

SEQ ID NO: 2105984 - RNA, 19 nt, Homo sapiens
  misc_RNA (1)...(19): siRNA sense strand
gaauauauaccugccuuca

SEQ ID NO: 2105985 - RNA, 19 nt, Homo sapiens
  misc_RNA (1)...(19): siRNA sense strand
agagaagagucgacagaga

SEQ ID NO: 2105986 - RNA, 19 nt, Homo sapiens
  misc_RNA (1)...(19): siRNA sense strand
uggaacauuucuacaguga

SEQ ID NO: 2105987 - RNA, 19 nt, Homo sapiens
  misc_RNA (1)...(19): siRNA sense strand
ggacgagacaaugggauuu

SEQ ID NO: 2105988 - RNA, 19 nt, Homo sapiens
  misc_RNA (1)...(19): siRNA sense strand
acucaacaaucaaaccaaa

SEQ ID NO: 2105989 - RNA, 19 nt, Homo sapiens
  misc_RNA (1)...(19): siRNA sense strand
aagcaaacacucugauuau

SEQ ID NO: 2105990 - RNA, 19 nt, Homo sapiens
  misc_RNA (1)...(19): siRNA sense strand
gagaagcugcaguaauguu

SEQ ID NO: 2105991 - RNA, 19 nt, Homo sapiens
  misc_RNA (1)...(19): siRNA sense strand
cuucaucagucuaauggaa

SEQ ID NO: 2105992 - RNA, 19 nt, Homo sapiens
  misc_RNA (1)...(19): siRNA sense strand
auauauaccugccuucauc

SEQ ID NO: 2105993 - RNA, 19 nt, Homo sapiens
  misc_RNA (1)...(19): siRNA sense strand
aagguuccaucuuucuuaa

SEQ ID NO: 2105994 - RNA, 19 nt, Homo sapiens
  misc_RNA (1)...(19): siRNA sense strand
gguuccaucuuucuuaauc

SEQ ID NO: 2105995 - RNA, 19 nt, Homo sapiens
  misc_RNA (1)...(19): siRNA sense strand
ggucuggaaucugaaggaa

SEQ ID NO: 2105996 - RNA, 19 nt, Homo sapiens
  misc_RNA (1)...(19): siRNA sense strand
gaagccacgaugcuauuga

SEQ ID NO: 2105997 - RNA, 19 nt, Homo sapiens
  misc_RNA (1)...(19): siRNA sense strand
ucacgucaaaguacaguuu

SEQ ID NO: 2105998 - RNA, 19 nt, Homo sapiens
  misc_RNA (1)...(19): siRNA sense strand
ccaaguuuaaugcugauaa

SEQ ID NO: 2105999 - RNA, 19 nt, Homo sapiens
  misc_RNA (1)...(19): siRNA sense strand
gaagaagcagcucccaagu

SEQ ID NO: 2106000 - RNA, 19 nt, Homo sapiens
  misc_RNA (1)...(19): siRNA sense strand
ccacaucauccgccuaaug

SEQ ID NO: 2106001 - RNA, 19 nt, Homo sapiens
  misc_RNA (1)...(19): siRNA sense strand
cgaaugagucuguggaaca

SEQ ID NO: 2106002 - RNA, 19 nt, Homo sapiens
  misc_RNA (1)...(19): siRNA sense strand
gaagcugcaguaauguuga

SEQ ID NO: 2106003 - RNA, 19 nt, Homo sapiens
  misc_RNA (1)...(19): siRNA sense strand
ccaaagccaaagacauauu

SEQ ID NO: 2106004 - RNA, 19 nt, Homo sapiens
  misc_RNA (1)...(19): siRNA sense strand
aaagagaagagucgacaga

SEQ ID NO: 2106005 - RNA, 19 nt, Homo sapiens
  misc_RNA (1)...(19): siRNA sense strand
gcccacaucauccgccuaa

SEQ ID NO: 2106006 - RNA, 19 nt, Homo sapiens
  misc_RNA (1)...(19): siRNA sense strand
gagcugcacuuuccuuccu

SEQ ID NO: 2106007 - RNA, 19 nt, Homo sapiens
  misc_RNA (1)...(19): siRNA sense strand
ugaggaaucaggucuggaa

SEQ ID NO: 2106008 - RNA, 19 nt, Homo sapiens
  misc_RNA (1)...(19): siRNA sense strand
caaucaaaccaaagccaaa

SEQ ID NO: 2106009 - RNA, 19 nt, Homo sapiens
  misc_RNA (1)...(19): siRNA sense strand
aagccacgaugcuauugaa

SEQ ID NO: 2106010 - RNA, 19 nt, Homo sapiens
  misc_RNA (1)...(19): siRNA sense strand
gcugcacuuuccuuccuaa

SEQ ID NO: 2106011 - RNA, 19 nt, Homo sapiens
  misc_RNA (1)...(19): siRNA sense strand
augagucuguggaacauuu

SEQ ID NO: 2106012 - RNA, 19 nt, Homo sapiens
  misc_RNA (1)...(19): siRNA sense strand
agaaagacccuggagugaa

SEQ ID NO: 2106013 - RNA, 19 nt, Homo sapiens
  misc_RNA (1)...(19): siRNA sense strand
guagaagcaaacacucuga

SEQ ID NO: 2106014 - RNA, 19 nt, Homo sapiens
  misc_RNA (1)...(19): siRNA sense strand
gacaaaaugugccauagag

SEQ ID NO: 2106015 - RNA, 19 nt, Homo sapiens
  misc_RNA (1)...(19): siRNA sense strand
ccaaaccuuuucuucagua

SEQ ID NO: 2106016 - RNA, 19 nt, Homo sapiens
  misc_RNA (1)...(19): siRNA sense strand
caacugaaaaggaacaaaa

SEQ ID NO: 2106017 - RNA, 19 nt, Homo sapiens
  misc_RNA (1)...(19): siRNA sense strand
cucaggcccucaugacauu

SEQ ID NO: 2106018 - RNA, 19 nt, Homo sapiens
  misc_RNA (1)...(19): siRNA sense strand
ccucaugacauucuucaau

SEQ ID NO: 2106019 - RNA, 19 nt, Homo sapiens
  misc_RNA (1)...(19): siRNA sense strand
caaaaugugccauagagaa

SEQ ID NO: 2106020 - RNA, 19 nt, Homo sapiens
  misc_RNA (1)...(19): siRNA sense strand
ucacucaaguaagaagaau

SEQ ID NO: 2106021 - RNA, 19 nt, Homo sapiens
  misc_RNA (1)...(19): siRNA sense strand
gugauggcaccaaaccuuu

SEQ ID NO: 2106022 - RNA, 19 nt, Homo sapiens
  misc_RNA (1)...(19): siRNA sense strand
gcucaggcccucaugacau

SEQ ID NO: 2106023 - RNA, 19 nt, Homo sapiens
  misc_RNA (1)...(19): siRNA sense strand
aguacaguuucaagccuua

SEQ ID NO: 2106024 - RNA, 19 nt, Homo sapiens
  misc_RNA (1)...(19): siRNA sense strand
ggauguacugcuaaaguca

SEQ ID NO: 2106025 - RNA, 19 nt, Homo sapiens
  misc_RNA (1)...(19): siRNA sense strand
uuugaugccuuuggaauuc

SEQ ID NO: 2106026 - RNA, 19 nt, Homo sapiens
  misc_RNA (1)...(19): siRNA sense strand
aagcagcucccaaguguca

SEQ ID NO: 2106027 - RNA, 19 nt, Homo sapiens
  misc_RNA (1)...(19): siRNA sense strand
gccuaaugcuuaaguacca

SEQ ID NO: 2106028 - RNA, 19 nt, Homo sapiens
  misc_RNA (1)...(19): siRNA sense strand
uguggaacauuucuacagu

SEQ ID NO: 2106029 - RNA, 19 nt, Homo sapiens
  misc_RNA (1)...(19): siRNA sense strand
uugagaaaguugaggaauc

SEQ ID NO: 2106030 - RNA, 19 nt, Homo sapiens
  misc_RNA (1)...(19): siRNA sense strand
aagcugcaguaauguugaa

SEQ ID NO: 2106031 - RNA, 19 nt, Homo sapiens
  misc_RNA (1)...(19): siRNA sense strand
gcaccaaaccuuuucuuca

SEQ ID NO: 2106032 - RNA, 19 nt, Homo sapiens
  misc_RNA (1)...(19): siRNA sense strand
cauguauuccucuucacua

SEQ ID NO: 2106033 - RNA, 19 nt, Homo sapiens
  misc_RNA (1)...(19): siRNA sense strand
caacucaacaaucaaacca

SEQ ID NO: 2106034 - RNA, 19 nt, Homo sapiens
  misc_RNA (1)...(19): siRNA sense strand
ccccaagacuucaaaggua

SEQ ID NO: 2106035 - RNA, 19 nt, Homo sapiens
  misc_RNA (1)...(19): siRNA sense strand
ccaucucucucugauugaa

SEQ ID NO: 2106036 - RNA, 19 nt, Homo sapiens
  misc_RNA (1)...(19): siRNA sense strand
acucaaguaagaagaauga

SEQ ID NO: 2106037 - RNA, 19 nt, Homo sapiens
  misc_RNA (1)...(19): siRNA sense strand
caucauccgccuaaugcuu

SEQ ID NO: 2106038 - RNA, 19 nt, Homo sapiens
  misc_RNA (1)...(19): siRNA sense strand
gauguacugcuaaagucaa

SEQ ID NO: 2106039 - RNA, 19 nt, Homo sapiens
  misc_RNA (1)...(19): siRNA sense strand
aagaaagacccuggaguga

SEQ ID NO: 2106040 - RNA, 19 nt, Homo sapiens
  misc_RNA (1)...(19): siRNA sense strand
cuucaaagguacugcaaaa

SEQ ID NO: 2106041 - RNA, 19 nt, Homo sapiens
  misc_RNA (1)...(19): siRNA sense strand
cuuaaguaccagaagauuu

SEQ ID NO: 2106042 - RNA, 19 nt, Homo sapiens
  misc_RNA (1)...(19): siRNA sense strand
ggacaaaaugugccauaga

SEQ ID NO: 2106043 - RNA, 19 nt, Homo sapiens
  misc_RNA (1)...(19): siRNA sense strand
caggauguacugcuaaagu

SEQ ID NO: 2106044 - RNA, 19 nt, Homo sapiens
  misc_RNA (1)...(19): siRNA sense strand
gaaugaaugaagccacgau

SEQ ID NO: 2106045 - RNA, 19 nt, Homo sapiens
  misc_RNA (1)...(19): siRNA sense strand
agaagcaaacacucugauu

SEQ ID NO: 2106046 - RNA, 19 nt, Homo sapiens
  misc_RNA (1)...(19): siRNA sense strand
gaaaauccgccaucucucu

SEQ ID NO: 2106047 - RNA, 19 nt, Homo sapiens
  misc_RNA (1)...(19): siRNA sense strand
gccacgaugcuauugaaga

SEQ ID NO: 2106048 - RNA, 19 nt, Homo sapiens
  misc_RNA (1)...(19): siRNA sense strand
ccauggccauucaacucaa

SEQ ID NO: 2106049 - RNA, 19 nt, Homo sapiens
  misc_RNA (1)...(19): siRNA sense strand
gaaaugaaaugucaaguug

SEQ ID NO: 2106050 - RNA, 19 nt, Homo sapiens
  misc_RNA (1)...(19): siRNA sense strand
ggaaagaaauuaccuguga

SEQ ID NO: 2106051 - RNA, 19 nt, Homo sapiens
  misc_RNA (1)...(19): siRNA sense strand
gaauaaagcuccuccaaug

SEQ ID NO: 2106052 - RNA, 19 nt, Homo sapiens
  misc_RNA (1)...(19): siRNA sense strand
gcagaaacauuuaguugua

SEQ ID NO: 2106053 - RNA, 19 nt, Homo sapiens
  misc_RNA (1)...(19): siRNA sense strand
caagcaagcugucuucuuu

SEQ ID NO: 2106054 - RNA, 19 nt, Homo sapiens
  misc_RNA (1)...(19): siRNA sense strand
gaaagcagcuagagggaaa

SEQ ID NO: 2106055 - RNA, 19 nt, Homo sapiens
  misc_RNA (1)...(19): siRNA sense strand
ugaaggagaugaauuauug

SEQ ID NO: 2106056 - RNA, 19 nt, Homo sapiens
  misc_RNA (1)...(19): siRNA sense strand
uaggauaucuggugcauua

SEQ ID NO: 2106057 - RNA, 19 nt, Homo sapiens
  misc_RNA (1)...(19): siRNA sense strand
caaagaaacuccugguuga

SEQ ID NO: 2106058 - RNA, 19 nt, Homo sapiens
  misc_RNA (1)...(19): siRNA sense strand
gccaacagcuucuuaauga

SEQ ID NO: 2106059 - RNA, 19 nt, Homo sapiens
  misc_RNA (1)...(19): siRNA sense strand
gaagaccacuaccaucuaa

SEQ ID NO: 2106060 - RNA, 19 nt, Homo sapiens
  misc_RNA (1)...(19): siRNA sense strand
ggagaagacuauuaaguug

SEQ ID NO: 2106061 - RNA, 19 nt, Homo sapiens
  misc_RNA (1)...(19): siRNA sense strand
aaagaagacucacagauuu

SEQ ID NO: 2106062 - RNA, 19 nt, Homo sapiens
  misc_RNA (1)...(19): siRNA sense strand
guaagaggcaucaaauuua

SEQ ID NO: 2106063 - RNA, 19 nt, Homo sapiens
  misc_RNA (1)...(19): siRNA sense strand
caaauauucucaacaguga

SEQ ID NO: 2106064 - RNA, 19 nt, Homo sapiens
  misc_RNA (1)...(19): siRNA sense strand
gaacagcuuucccauuuca

SEQ ID NO: 2106065 - RNA, 19 nt, Homo sapiens
  misc_RNA (1)...(19): siRNA sense strand
ggagaaagagaaaucaaua

SEQ ID NO: 2106066 - RNA, 19 nt, Homo sapiens
  misc_RNA (1)...(19): siRNA sense strand
gaaaccugauucugaaauu

SEQ ID NO: 2106067 - RNA, 19 nt, Homo sapiens
  misc_RNA (1)...(19): siRNA sense strand
gaagggauaguacugaaua

SEQ ID NO: 2106068 - RNA, 19 nt, Homo sapiens
  misc_RNA (1)...(19): siRNA sense strand
gaauugaaauaccuaguug

SEQ ID NO: 2106069 - RNA, 19 nt, Homo sapiens
  misc_RNA (1)...(19): siRNA sense strand
gaucaugugucuuuggaaa

SEQ ID NO: 2106070 - RNA, 19 nt, Homo sapiens
  misc_RNA (1)...(19): siRNA sense strand
agaaugggauggaaagaua

SEQ ID NO: 2106071 - RNA, 19 nt, Homo sapiens
  misc_RNA (1)...(19): siRNA sense strand
ggaaagugcguuuacagua

SEQ ID NO: 2106072 - RNA, 19 nt, Homo sapiens
  misc_RNA (1)...(19): siRNA sense strand
aaagaucucuaccucauuu

SEQ ID NO: 2106073 - RNA, 19 nt, Homo sapiens
  misc_RNA (1)...(19): siRNA sense strand
cuaaacagcuuaacaacug

SEQ ID NO: 2106074 - RNA, 19 nt, Homo sapiens
  misc_RNA (1)...(19): siRNA sense strand
aaagaaagcuaucagaaca

SEQ ID NO: 2106075 - RNA, 19 nt, Homo sapiens
  misc_RNA (1)...(19): siRNA sense strand
gagcauacucuucagguua

SEQ ID NO: 2106076 - RNA, 19 nt, Homo sapiens
  misc_RNA (1)...(19): siRNA sense strand
caaguuguguugaaugaaa

SEQ ID NO: 2106077 - RNA, 19 nt, Homo sapiens
  misc_RNA (1)...(19): siRNA sense strand
ggcaacauaugcagcaaua

SEQ ID NO: 2106078 - RNA, 19 nt, Homo sapiens
  misc_RNA (1)...(19): siRNA sense strand
ccaauuaucucagucuauu

SEQ ID NO: 2106079 - RNA, 19 nt, Homo sapiens
  misc_RNA (1)...(19): siRNA sense strand
guccugaucuuccuucuaa

SEQ ID NO: 2106080 - RNA, 19 nt, Homo sapiens
  misc_RNA (1)...(19): siRNA sense strand
gggauaaaguaauuccuaa

SEQ ID NO: 2106081 - RNA, 19 nt, Homo sapiens
  misc_RNA (1)...(19): siRNA sense strand
uuacagaacccuauuauug

SEQ ID NO: 2106082 - RNA, 19 nt, Homo sapiens
  misc_RNA (1)...(19): siRNA sense strand
aaaguggcauguaugaaua

SEQ ID NO: 2106083 - RNA, 19 nt, Homo sapiens
  misc_RNA (1)...(19): siRNA sense strand
gaacaaauagaucuucuuc

SEQ ID NO: 2106084 - RNA, 19 nt, Homo sapiens
  misc_RNA (1)...(19): siRNA sense strand
gagcugcgaugguuauuuc

SEQ ID NO: 2106085 - RNA, 19 nt, Homo sapiens
  misc_RNA (1)...(19): siRNA sense strand
uaaucaaccugugaaguua

SEQ ID NO: 2106086 - RNA, 19 nt, Homo sapiens
  misc_RNA (1)...(19): siRNA sense strand
uaagaccacuuccugauga

SEQ ID NO: 2106087 - RNA, 19 nt, Homo sapiens
  misc_RNA (1)...(19): siRNA sense strand
uaacaaagaacacuugcua

SEQ ID NO: 2106088 - RNA, 19 nt, Homo sapiens
  misc_RNA (1)...(19): siRNA sense strand
gagaugaauuauugccuaa

SEQ ID NO: 2106089 - RNA, 19 nt, Homo sapiens
  misc_RNA (1)...(19): siRNA sense strand
ugaaggagaugguguagug

SEQ ID NO: 2106090 - RNA, 19 nt, Homo sapiens
  misc_RNA (1)...(19): siRNA sense strand
gcacaucuagcacaaauug

SEQ ID NO: 2106091 - RNA, 19 nt, Homo sapiens
  misc_RNA (1)...(19): siRNA sense strand
caacaaauggcagcacuua

SEQ ID NO: 2106092 - RNA, 19 nt, Homo sapiens
  misc_RNA (1)...(19): siRNA sense strand
caagcugucuucuuuguug

SEQ ID NO: 2106093 - RNA, 19 nt, Homo sapiens
  misc_RNA (1)...(19): siRNA sense strand
ucaaauguaugaugaagga

SEQ ID NO: 2106094 - RNA, 19 nt, Homo sapiens
  misc_RNA (1)...(19): siRNA sense strand
gaaaugaaauacgaacauc

SEQ ID NO: 2106095 - RNA, 19 nt, Homo sapiens
  misc_RNA (1)...(19): siRNA sense strand
ggcacuauaugaugaagua

SEQ ID NO: 2106096 - RNA, 19 nt, Homo sapiens
  misc_RNA (1)...(19): siRNA sense strand
gugaacagguuauaguuga

SEQ ID NO: 2106097 - RNA, 19 nt, Homo sapiens
  misc_RNA (1)...(19): siRNA sense strand
gcucaugccuucaaaccaa

SEQ ID NO: 2106098 - RNA, 19 nt, Homo sapiens
  misc_RNA (1)...(19): siRNA sense strand
gcaagugguuuaucuuuac

SEQ ID NO: 2106099 - RNA, 19 nt, Homo sapiens
  misc_RNA (1)...(19): siRNA sense strand
gaacacauacaguacuuga

SEQ ID NO: 2106100 - RNA, 19 nt, Homo sapiens
  misc_RNA (1)...(19): siRNA sense strand
uaaaggcucuaaugaggaa

SEQ ID NO: 2106101 - RNA, 19 nt, Homo sapiens
  misc_RNA (1)...(19): siRNA sense strand
ucaaggagaaguaguuaua

SEQ ID NO: 2106102 - RNA, 19 nt, Homo sapiens
  misc_RNA (1)...(19): siRNA sense strand
ggaaauacaagacgacaug

SEQ ID NO: 2106103 - RNA, 19 nt, Homo sapiens
  misc_RNA (1)...(19): siRNA sense strand
uagcacaaauugaagauga

SEQ ID NO: 2106104 - RNA, 19 nt, Homo sapiens
  misc_RNA (1)...(19): siRNA sense strand
gaggagagguucaaauugc

SEQ ID NO: 2106105 - RNA, 19 nt, Homo sapiens
  misc_RNA (1)...(19): siRNA sense strand
caagugacauggacugugu

SEQ ID NO: 2106106 - RNA, 19 nt, Homo sapiens
  misc_RNA (1)...(19): siRNA sense strand
cgacaaccauacuggaauu

SEQ ID NO: 2106107 - RNA, 19 nt, Homo sapiens
  misc_RNA (1)...(19): siRNA sense strand
caauucagaucaaacauca

SEQ ID NO: 2106108 - RNA, 19 nt, Homo sapiens
  misc_RNA (1)...(19): siRNA sense strand
uaauaucccucuggaguuu

SEQ ID NO: 2106109 - RNA, 19 nt, Homo sapiens
  misc_RNA (1)...(19): siRNA sense strand
gaacugugccaauugcaaa

SEQ ID NO: 2106110 - RNA, 19 nt, Homo sapiens
  misc_RNA (1)...(19): siRNA sense strand
gaccagagauggagaucga

SEQ ID NO: 2106111 - RNA, 19 nt, Homo sapiens
  misc_RNA (1)...(19): siRNA sense strand
caagaaccuuagaaccaua

SEQ ID NO: 2106112 - RNA, 19 nt, Homo sapiens
  misc_RNA (1)...(19): siRNA sense strand
gggauaguacugaauauuu

SEQ ID NO: 2106113 - RNA, 19 nt, Homo sapiens
  misc_RNA (1)...(19): siRNA sense strand
gaaagaaauuaccugugau

SEQ ID NO: 2106114 - RNA, 19 nt, Homo sapiens
  misc_RNA (1)...(19): siRNA sense strand
uaauuggacuccugagauu

SEQ ID NO: 2106115 - RNA, 19 nt, Homo sapiens
  misc_RNA (1)...(19): siRNA sense strand
gauagcgggugauauuaug

SEQ ID NO: 2106116 - RNA, 19 nt, Homo sapiens
  misc_RNA (1)...(19): siRNA sense strand
gaauacagaucaaauugcu

SEQ ID NO: 2106117 - RNA, 19 nt, Homo sapiens
  misc_RNA (1)...(19): siRNA sense strand
gcaaguaccaacaucugua

SEQ ID NO: 2106118 - RNA, 19 nt, Homo sapiens
  misc_RNA (1)...(19): siRNA sense strand
gaaaauggccuuacugguu

SEQ ID NO: 2106119 - RNA, 19 nt, Homo sapiens
  misc_RNA (1)...(19): siRNA sense strand
gcaauagaaugggauggaa

SEQ ID NO: 2106120 - RNA, 19 nt, Homo sapiens
  misc_RNA (1)...(19): siRNA sense strand
gaaggacugucaugagaag

SEQ ID NO: 2106121 - RNA, 19 nt, Homo sapiens
  misc_RNA (1)...(19): siRNA sense strand
ggacaggaacagcgaauga

SEQ ID NO: 2106122 - RNA, 19 nt, Homo sapiens
  misc_RNA (1)...(19): siRNA sense strand
gauaucuggugcauuauuc

SEQ ID NO: 2106123 - RNA, 19 nt, Homo sapiens
  misc_RNA (1)...(19): siRNA sense strand
gaaaagaucucuaccucau

SEQ ID NO: 2106124 - RNA, 19 nt, Homo sapiens
  misc_RNA (1)...(19): siRNA sense strand
caacagcuucuuaaugaaa

SEQ ID NO: 2106125 - RNA, 19 nt, Homo sapiens
  misc_RNA (1)...(19): siRNA sense strand
ggaaauaaggaucuuuguu

SEQ ID NO: 2106126 - RNA, 19 nt, Homo sapiens
  misc_RNA (1)...(19): siRNA sense strand
ggaugagguuaauuggaua

SEQ ID NO: 2106127 - RNA, 19 nt, Homo sapiens
  misc_RNA (1)...(19): siRNA sense strand
gcacaaauaaauugacguu

SEQ ID NO: 2106128 - RNA, 19 nt, Homo sapiens
  misc_RNA (1)...(19): siRNA sense strand
ccacgcaguuuaaauagug

SEQ ID NO: 2106129 - RNA, 19 nt, Homo sapiens
  misc_RNA (1)...(19): siRNA sense strand
gaucuuaacagucaauuag

SEQ ID NO: 2106130 - RNA, 19 nt, Homo sapiens
  misc_RNA (1)...(19): siRNA sense strand
uaaaggcaguggagauguu

SEQ ID NO: 2106131 - RNA, 19 nt, Homo sapiens
  misc_RNA (1)...(19): siRNA sense strand
ggacauauuguauccaguu

SEQ ID NO: 2106132 - RNA, 19 nt, Homo sapiens
  misc_RNA (1)...(19): siRNA sense strand
gagaaaggcagggcuaauu

SEQ ID NO: 2106133 - RNA, 19 nt, Homo sapiens
  misc_RNA (1)...(19): siRNA sense strand
gaucugcaauucaaguuca

SEQ ID NO: 2106134 - RNA, 19 nt, Homo sapiens
  misc_RNA (1)...(19): siRNA sense strand
ggcaagaauuauaaucuga

SEQ ID NO: 2106135 - RNA, 19 nt, Homo sapiens
  misc_RNA (1)...(19): siRNA sense strand
caacauaugcagcaauaga

SEQ ID NO: 2106136 - RNA, 19 nt, Homo sapiens
  misc_RNA (1)...(19): siRNA sense strand
gaaaggcagggcuaauuug

SEQ ID NO: 2106137 - RNA, 19 nt, Homo sapiens
  misc_RNA (1)...(19): siRNA sense strand
gaagguaccuaagauuguc

SEQ ID NO: 2106138 - RNA, 19 nt, Homo sapiens
  misc_RNA (1)...(19): siRNA sense strand
gaacaagaagaacugaaga

SEQ ID NO: 2106139 - RNA, 19 nt, Homo sapiens
  misc_RNA (1)...(19): siRNA sense strand
caacaggugccacacauug

SEQ ID NO: 2106140 - RNA, 19 nt, Homo sapiens
  misc_RNA (1)...(19): siRNA sense strand
gaaagaacgaauugacuuc

SEQ ID NO: 2106141 - RNA, 19 nt, Homo sapiens
  misc_RNA (1)...(19): siRNA sense strand
uguaagaggcaucaaauuu

SEQ ID NO: 2106142 - RNA, 19 nt, Homo sapiens
  misc_RNA (1)...(19): siRNA sense strand
gaaaacacacagaguauaa

SEQ ID NO: 2106143 - RNA, 19 nt, Homo sapiens
  misc_RNA (1)...(19): siRNA sense strand
gaacagcgaaugaaaauug

SEQ ID NO: 2106144 - RNA, 19 nt, Homo sapiens
  misc_RNA (1)...(19): siRNA sense strand
aaagugaucauucaggaua

SEQ ID NO: 2106145 - RNA, 19 nt, Homo sapiens
  misc_RNA (1)...(19): siRNA sense strand
gcucgagacuuguuaacau

SEQ ID NO: 2106146 - RNA, 19 nt, Homo sapiens
  misc_RNA (1)...(19): siRNA sense strand
gcaccgguacaacauguua

SEQ ID NO: 2106147 - RNA, 19 nt, Homo sapiens
  misc_RNA (1)...(19): siRNA sense strand
ggacgauuaauaccauaua

SEQ ID NO: 2106148 - RNA, 19 nt, Homo sapiens
  misc_RNA (1)...(19): siRNA sense strand
gguacaaccagaacacaua

SEQ ID NO: 2106149 - RNA, 19 nt, Homo sapiens
  misc_RNA (1)...(19): siRNA sense strand
ggaaagaacuggaaaugca

SEQ ID NO: 2106150 - RNA, 19 nt, Homo sapiens
  misc_RNA (1)...(19): siRNA sense strand
gaacuugagugaugacaug

SEQ ID NO: 2106151 - RNA, 19 nt, Homo sapiens
  misc_RNA (1)...(19): siRNA sense strand
gagcgaaccuggagugaug

SEQ ID NO: 2106152 - RNA, 19 nt, Homo sapiens
  misc_RNA (1)...(19): siRNA sense strand
gauuggagcuggaagagaa

SEQ ID NO: 2106153 - RNA, 19 nt, Homo sapiens
  misc_RNA (1)...(19): siRNA sense strand
caaaggaaaucuucaaagg

SEQ ID NO: 2106154 - RNA, 19 nt, Homo sapiens
  misc_RNA (1)...(19): siRNA sense strand
ggacagcgaugccgagagu

SEQ ID NO: 2106155 - RNA, 19 nt, Homo sapiens
  misc_RNA (1)...(19): siRNA sense strand
ggaggaagccaacaucuug

SEQ ID NO: 2106156 - RNA, 19 nt, Homo sapiens
  misc_RNA (1)...(19): siRNA sense strand
acaagaagcugcuggaaca

SEQ ID NO: 2106157 - RNA, 19 nt, Homo sapiens
  misc_RNA (1)...(19): siRNA sense strand
ucaaguacaucgaggaguu

SEQ ID NO: 2106158 - RNA, 19 nt, Homo sapiens
  misc_RNA (1)...(19): siRNA sense strand
agagagaggugcaccagaa

SEQ ID NO: 2106159 - RNA, 19 nt, Homo sapiens
  misc_RNA (1)...(19): siRNA sense strand
agcaggagcuccagaagua

SEQ ID NO: 2106160 - RNA, 19 nt, Homo sapiens
  misc_RNA (1)...(19): siRNA sense strand
ucagcaaguuuaaguuuga

SEQ ID NO: 2106161 - RNA, 19 nt, Homo sapiens
  misc_RNA (1)...(19): siRNA sense strand
gagguggccuucucuguca

SEQ ID NO: 2106162 - RNA, 19 nt, Homo sapiens
  misc_RNA (1)...(19): siRNA sense strand
gaaggugcaggccaaguuu

SEQ ID NO: 2106163 - RNA, 19 nt, Homo sapiens
  misc_RNA (1)...(19): siRNA sense strand
gaccacaaccggcaacuga

SEQ ID NO: 2106164 - RNA, 19 nt, Homo sapiens
  misc_RNA (1)...(19): siRNA sense strand
gcucagcaaguuuaaguuu

SEQ ID NO: 2106165 - RNA, 19 nt, Homo sapiens
  misc_RNA (1)...(19): siRNA sense strand
ggagaaccguggccucaag

SEQ ID NO: 2106166 - RNA, 19 nt, Homo sapiens
  misc_RNA (1)...(19): siRNA sense strand
gaaccuggagugaugagaa

SEQ ID NO: 2106167 - RNA, 19 nt, Homo sapiens
  misc_RNA (1)...(19): siRNA sense strand
gcuggaacaugccuuaaag

SEQ ID NO: 2106168 - RNA, 19 nt, Homo sapiens
  misc_RNA (1)...(19): siRNA sense strand
gaaguacaagucccucuau

SEQ ID NO: 2106169 - RNA, 19 nt, Homo sapiens
  misc_RNA (1)...(19): siRNA sense strand
guggauaucccagaauuaa

SEQ ID NO: 2106170 - RNA, 19 nt, Homo sapiens
  misc_RNA (1)...(19): siRNA sense strand
gaaaggguacagugaguca

SEQ ID NO: 2106171 - RNA, 19 nt, Homo sapiens
  misc_RNA (1)...(19): siRNA sense strand
ggaugagcgugcccgacua

SEQ ID NO: 2106172 - RNA, 19 nt, Homo sapiens
  misc_RNA (1)...(19): siRNA sense strand
ggauaucccagaauuaaca

SEQ ID NO: 2106173 - RNA, 19 nt, Homo sapiens
  misc_RNA (1)...(19): siRNA sense strand
ccagcuggguccacgguaa

SEQ ID NO: 2106174 - RNA, 19 nt, Homo sapiens
  misc_RNA (1)...(19): siRNA sense strand
cagacgaccucaaguacau

SEQ ID NO: 2106175 - RNA, 19 nt, Homo sapiens
  misc_RNA (1)...(19): siRNA sense strand
caccagggauggcccagaa

SEQ ID NO: 2106176 - RNA, 19 nt, Homo sapiens
  misc_RNA (1)...(19): siRNA sense strand
cauggauuaucacaguaua

SEQ ID NO: 2106177 - RNA, 19 nt, Homo sapiens
  misc_RNA (1)...(19): siRNA sense strand
ggaccacgcacccagcauu

SEQ ID NO: 2106178 - RNA, 19 nt, Homo sapiens
  misc_RNA (1)...(19): siRNA sense strand
aagcuugcauggauuauca

SEQ ID NO: 2106179 - RNA, 19 nt, Homo sapiens
  misc_RNA (1)...(19): siRNA sense strand
gagcaccucuaugccuuga

SEQ ID NO: 2106180 - RNA, 19 nt, Homo sapiens
  misc_RNA (1)...(19): siRNA sense strand
gcccagaccacgacaguga

SEQ ID NO: 2106181 - RNA, 19 nt, Homo sapiens
  misc_RNA (1)...(19): siRNA sense strand
gcacaccaccauuaaugau

SEQ ID NO: 2106182 - RNA, 19 nt, Homo sapiens
  misc_RNA (1)...(19): siRNA sense strand
cagaaaggguacagugagu

SEQ ID NO: 2106183 - RNA, 19 nt, Homo sapiens
  misc_RNA (1)...(19): siRNA sense strand
acagaauuguuguggauau

SEQ ID NO: 2106184 - RNA, 19 nt, Homo sapiens
  misc_RNA (1)...(19): siRNA sense strand
gagcucagcaaguuuaagu

SEQ ID NO: 2106185 - RNA, 19 nt, Homo sapiens
  misc_RNA (1)...(19): siRNA sense strand
gaagagaagacugagaaca

SEQ ID NO: 2106186 - RNA, 19 nt, Homo sapiens
  misc_RNA (1)...(19): siRNA sense strand
ggagugaugagaagaaucu

SEQ ID NO: 2106187 - RNA, 19 nt, Homo sapiens
  misc_RNA (1)...(19): siRNA sense strand
acgccaagaugaaggcuuu

SEQ ID NO: 2106188 - RNA, 19 nt, Homo sapiens
  misc_RNA (1)...(19): siRNA sense strand
ggccuucucugucaggaau

SEQ ID NO: 2106189 - RNA, 19 nt, Homo sapiens
  misc_RNA (1)...(19): siRNA sense strand
gaccgaggcuguggcuuuc

SEQ ID NO: 2106190 - RNA, 19 nt, Homo sapiens
  misc_RNA (1)...(19): siRNA sense strand
ugaccgaggcuguggcuuu

SEQ ID NO: 2106191 - RNA, 19 nt, Homo sapiens
  misc_RNA (1)...(19): siRNA sense strand
gcccggauccucaacaaga

SEQ ID NO: 2106192 - RNA, 19 nt, Homo sapiens
  misc_RNA (1)...(19): siRNA sense strand
ucacaaaggaaaucuucaa

SEQ ID NO: 2106193 - RNA, 19 nt, Homo sapiens
  misc_RNA (1)...(19): siRNA sense strand
gaggagacuuuaggcuuca

SEQ ID NO: 2106194 - RNA, 19 nt, Homo sapiens
  misc_RNA (1)...(19): siRNA sense strand
acaaacaggugguggaaaa

SEQ ID NO: 2106195 - RNA, 19 nt, Homo sapiens
  misc_RNA (1)...(19): siRNA sense strand
aagagaagacugagaacaa

SEQ ID NO: 2106196 - RNA, 19 nt, Homo sapiens
  misc_RNA (1)...(19): siRNA sense strand
gugcacaccaccauuaaug

SEQ ID NO: 2106197 - RNA, 19 nt, Homo sapiens
  misc_RNA (1)...(19): siRNA sense strand
gaauucuuguggaggauag

SEQ ID NO: 2106198 - RNA, 19 nt, Homo sapiens
  misc_RNA (1)...(19): siRNA sense strand
gaagacugagaacaaguug

SEQ ID NO: 2106199 - RNA, 19 nt, Homo sapiens
  misc_RNA (1)...(19): siRNA sense strand
gagaacaaguugggagaac

SEQ ID NO: 2106200 - RNA, 19 nt, Homo sapiens
  misc_RNA (1)...(19): siRNA sense strand
ggaagaagaaaaucacaaa

SEQ ID NO: 2106201 - RNA, 19 nt, Homo sapiens
  misc_RNA (1)...(19): siRNA sense strand
gcaauaugccagcgacaag

SEQ ID NO: 2106202 - RNA, 19 nt, Homo sapiens
  misc_RNA (1)...(19): siRNA sense strand
gcucaagugccgucuggaa

SEQ ID NO: 2106203 - RNA, 19 nt, Homo sapiens
  misc_RNA (1)...(19): siRNA sense strand
cacgagcucagcaaguuua

SEQ ID NO: 2106204 - RNA, 19 nt, Homo sapiens
  misc_RNA (1)...(19): siRNA sense strand
aagccgaccagccaaauaa

SEQ ID NO: 2106205 - RNA, 19 nt, Homo sapiens
  misc_RNA (1)...(19): siRNA sense strand
cauguggccuugugcagau

SEQ ID NO: 2106206 - RNA, 19 nt, Homo sapiens
  misc_RNA (1)...(19): siRNA sense strand
gcggcaaggugcucaaacu

SEQ ID NO: 2106207 - RNA, 19 nt, Homo sapiens
  misc_RNA (1)...(19): siRNA sense strand
gcauggauuaucacaguau

SEQ ID NO: 2106208 - RNA, 19 nt, Homo sapiens
  misc_RNA (1)...(19): siRNA sense strand
caggaaacaggcaccaauu

SEQ ID NO: 2106209 - RNA, 19 nt, Homo sapiens
  misc_RNA (1)...(19): siRNA sense strand
ggacagcacagagccuuuc

SEQ ID NO: 2106210 - RNA, 19 nt, Homo sapiens
  misc_RNA (1)...(19): siRNA sense strand
ggaauucuuguggaggaua

SEQ ID NO: 2106211 - RNA, 19 nt, Homo sapiens
  misc_RNA (1)...(19): siRNA sense strand
gcagaacauuuuccucuuc

SEQ ID NO: 2106212 - RNA, 19 nt, Homo sapiens
  misc_RNA (1)...(19): siRNA sense strand
gcagauggaggaggaagga

SEQ ID NO: 2106213 - RNA, 19 nt, Homo sapiens
  misc_RNA (1)...(19): siRNA sense strand
cccacgagcucagcaaguu

SEQ ID NO: 2106214 - RNA, 19 nt, Homo sapiens
  misc_RNA (1)...(19): siRNA sense strand
uggaagagaagacugagaa

SEQ ID NO: 2106215 - RNA, 19 nt, Homo sapiens
  misc_RNA (1)...(19): siRNA sense strand
ggaggaaggagaggaguuc

SEQ ID NO: 2106216 - RNA, 19 nt, Homo sapiens
  misc_RNA (1)...(19): siRNA sense strand
agagaagacugagaacaag

SEQ ID NO: 2106217 - RNA, 19 nt, Homo sapiens
  misc_RNA (1)...(19): siRNA sense strand
uugcauggauuaucacagu

SEQ ID NO: 2106218 - RNA, 19 nt, Homo sapiens
  misc_RNA (1)...(19): siRNA sense strand
agaagaaaaucacaaagga

SEQ ID NO: 2106219 - RNA, 19 nt, Homo sapiens
  misc_RNA (1)...(19): siRNA sense strand
gagcaggugaaccgcauug

SEQ ID NO: 2106220 - RNA, 19 nt, Homo sapiens
  misc_RNA (1)...(19): siRNA sense strand
caacaagaagcugcuggaa

SEQ ID NO: 2106221 - RNA, 19 nt, Homo sapiens
  misc_RNA (1)...(19): siRNA sense strand
aggcagagauggaggacau

SEQ ID NO: 2106222 - RNA, 19 nt, Homo sapiens
  misc_RNA (1)...(19): siRNA sense strand
cucccaagcugcagaggaa

SEQ ID NO: 2106223 - RNA, 19 nt, Homo sapiens
  misc_RNA (1)...(19): siRNA sense strand
aacaagagcugggacuaca

SEQ ID NO: 2106224 - RNA, 19 nt, Homo sapiens
  misc_RNA (1)...(19): siRNA sense strand
acauugaggaggagacuuu

SEQ ID NO: 2106225 - RNA, 19 nt, Homo sapiens
  misc_RNA (1)...(19): siRNA sense strand
aaggagaggaguucacuga

SEQ ID NO: 2106226 - RNA, 19 nt, Homo sapiens
  misc_RNA (1)...(19): siRNA sense strand
ggaggaggaagccaacauc

SEQ ID NO: 2106227 - RNA, 19 nt, Homo sapiens
  misc_RNA (1)...(19): siRNA sense strand
gagcagccacaccgagaug

SEQ ID NO: 2106228 - RNA, 19 nt, Homo sapiens
  misc_RNA (1)...(19): siRNA sense strand
gcugcuggaacaugccuua

SEQ ID NO: 2106229 - RNA, 19 nt, Homo sapiens
  misc_RNA (1)...(19): siRNA sense strand
ccaaagccgaccagccaaa

SEQ ID NO: 2106230 - RNA, 19 nt, Homo sapiens
  misc_RNA (1)...(19): siRNA sense strand
gcccagagcacugccagaa

SEQ ID NO: 2106231 - RNA, 19 nt, Homo sapiens
  misc_RNA (1)...(19): siRNA sense strand
ucgaggaguucaacaagag

SEQ ID NO: 2106232 - RNA, 19 nt, Homo sapiens
  misc_RNA (1)...(19): siRNA sense strand
cacaaaggaaaucuucaaa

SEQ ID NO: 2106233 - RNA, 19 nt, Homo sapiens
  misc_RNA (1)...(19): siRNA sense strand
gaagaaaaucacaaaggaa

SEQ ID NO: 2106234 - RNA, 19 nt, Homo sapiens
  misc_RNA (1)...(19): siRNA sense strand
gaacuggaaccgggagaag

SEQ ID NO: 2106235 - RNA, 19 nt, Homo sapiens
  misc_RNA (1)...(19): siRNA sense strand
aaagauggccaagcuagga

SEQ ID NO: 2106236 - RNA, 19 nt, Homo sapiens
  misc_RNA (1)...(19): siRNA sense strand
gcuaggagagggugcaagu

SEQ ID NO: 2106237 - RNA, 19 nt, Homo sapiens
  misc_RNA (1)...(19): siRNA sense strand
gcagagauuggagcuggaa

SEQ ID NO: 2106238 - RNA, 19 nt, Homo sapiens
  misc_RNA (1)...(19): siRNA sense strand
guggaaagaacuggaaaug

SEQ ID NO: 2106239 - RNA, 19 nt, Homo sapiens
  misc_RNA (1)...(19): siRNA sense strand
ccaggaaacaggcaccaau

SEQ ID NO: 2106240 - RNA, 19 nt, Homo sapiens
  misc_RNA (1)...(19): siRNA sense strand
aaagccgaccagccaaaua

SEQ ID NO: 2106241 - RNA, 19 nt, Homo sapiens
  misc_RNA (1)...(19): siRNA sense strand
uagaagaggaagcggaguu

SEQ ID NO: 2106242 - RNA, 19 nt, Homo sapiens
  misc_RNA (1)...(19): siRNA sense strand
gccuuggguugcagagauu

SEQ ID NO: 2106243 - RNA, 19 nt, Homo sapiens
  misc_RNA (1)...(19): siRNA sense strand
ugaagagccuuggguugca

SEQ ID NO: 2106244 - RNA, 19 nt, Homo sapiens
  misc_RNA (1)...(19): siRNA sense strand
ucaaacugcagcacgagaa

SEQ ID NO: 2106245 - RNA, 19 nt, Homo sapiens
  misc_RNA (1)...(19): siRNA sense strand
ccacgagcucagcaaguuu

SEQ ID NO: 2106246 - RNA, 19 nt, Homo sapiens
  misc_RNA (1)...(19): siRNA sense strand
ugagugaugacaugaagga

SEQ ID NO: 2106247 - RNA, 19 nt, Homo sapiens
  misc_RNA (1)...(19): siRNA sense strand
gagagggcacgccagugaa

SEQ ID NO: 2106248 - RNA, 19 nt, Homo sapiens
  misc_RNA (1)...(19): siRNA sense strand
gcaguuuguagaagaggaa

SEQ ID NO: 2106249 - RNA, 19 nt, Homo sapiens
  misc_RNA (1)...(19): siRNA sense strand
gaagaaagcacgaaguuaa

SEQ ID NO: 2106250 - RNA, 19 nt, Homo sapiens
  misc_RNA (1)...(19): siRNA sense strand
caaacggacuguucaagua

SEQ ID NO: 2106251 - RNA, 19 nt, Homo sapiens
  misc_RNA (1)...(19): siRNA sense strand
gaaacaaaguuacaucugu

SEQ ID NO: 2106252 - RNA, 19 nt, Homo sapiens
  misc_RNA (1)...(19): siRNA sense strand
gaaaggagccgugaggaaa

SEQ ID NO: 2106253 - RNA, 19 nt, Homo sapiens
  misc_RNA (1)...(19): siRNA sense strand
ggaagagaaagaagaauuu

SEQ ID NO: 2106254 - RNA, 19 nt, Homo sapiens
  misc_RNA (1)...(19): siRNA sense strand
ccucuaagcucaaggaguu

SEQ ID NO: 2106255 - RNA, 19 nt, Homo sapiens
  misc_RNA (1)...(19): siRNA sense strand
gaucaccacugcugggaaa

SEQ ID NO: 2106256 - RNA, 19 nt, Homo sapiens
  misc_RNA (1)...(19): siRNA sense strand
agaauuggcugaaggagaa

SEQ ID NO: 2106257 - RNA, 19 nt, Homo sapiens
  misc_RNA (1)...(19): siRNA sense strand
uuacaucugugcccucaua

SEQ ID NO: 2106258 - RNA, 19 nt, Homo sapiens
  misc_RNA (1)...(19): siRNA sense strand
ggaagaaagcacgaaguua

SEQ ID NO: 2106259 - RNA, 19 nt, Homo sapiens
  misc_RNA (1)...(19): siRNA sense strand
ggaggaagaggaagagaaa

SEQ ID NO: 2106260 - RNA, 19 nt, Homo sapiens
  misc_RNA (1)...(19): siRNA sense strand
aagaggcacugaucuauga

SEQ ID NO: 2106261 - RNA, 19 nt, Homo sapiens
  misc_RNA (1)...(19): siRNA sense strand
gacauuugauuggacuuua

SEQ ID NO: 2106262 - RNA, 19 nt, Homo sapiens
  misc_RNA (1)...(19): siRNA sense strand
ugacaucaucuguguauuu

SEQ ID NO: 2106263 - RNA, 19 nt, Homo sapiens
  misc_RNA (1)...(19): siRNA sense strand
gacccaggaugacuacaaa

SEQ ID NO: 2106264 - RNA, 19 nt, Homo sapiens
  misc_RNA (1)...(19): siRNA sense strand
uaugcaagguuguuuggua

SEQ ID NO: 2106265 - RNA, 19 nt, Homo sapiens
  misc_RNA (1)...(19): siRNA sense strand
ggugggagcccucugauga

SEQ ID NO: 2106266 - RNA, 19 nt, Homo sapiens
  misc_RNA (1)...(19): siRNA sense strand
gaaggcgaguuggaagaaa

SEQ ID NO: 2106267 - RNA, 19 nt, Homo sapiens
  misc_RNA (1)...(19): siRNA sense strand
gcaugauguugccgucuuu

SEQ ID NO: 2106268 - RNA, 19 nt, Homo sapiens
  misc_RNA (1)...(19): siRNA sense strand
ggaguucauuggcaacaug

SEQ ID NO: 2106269 - RNA, 19 nt, Homo sapiens
  misc_RNA (1)...(19): siRNA sense strand
gaagaggcacugaucuaug

SEQ ID NO: 2106270 - RNA, 19 nt, Homo sapiens
  misc_RNA (1)...(19): siRNA sense strand
gaagagaaagaagaauuug

SEQ ID NO: 2106271 - RNA, 19 nt, Homo sapiens
  misc_RNA (1)...(19): siRNA sense strand
ggagaacggcccuggcaaa

SEQ ID NO: 2106272 - RNA, 19 nt, Homo sapiens
  misc_RNA (1)...(19): siRNA sense strand
gcaagguuguuugguauca

SEQ ID NO: 2106273 - RNA, 19 nt, Homo sapiens
  misc_RNA (1)...(19): siRNA sense strand
ggaaagucguuguuaccau

SEQ ID NO: 2106274 - RNA, 19 nt, Homo sapiens
  misc_RNA (1)...(19): siRNA sense strand
gguaucaagucaguaauuc

SEQ ID NO: 2106275 - RNA, 19 nt, Homo sapiens
  misc_RNA (1)...(19): siRNA sense strand
uggaggagaugguguugaa

SEQ ID NO: 2106276 - RNA, 19 nt, Homo sapiens
  misc_RNA (1)...(19): siRNA sense strand
ggaagaggaagagaaagaa

SEQ ID NO: 2106277 - RNA, 19 nt, Homo sapiens
  misc_RNA (1)...(19): siRNA sense strand
cagaagaggcacugaucua

SEQ ID NO: 2106278 - RNA, 19 nt, Homo sapiens
  misc_RNA (1)...(19): siRNA sense strand
ggauuucaauggaggagau

SEQ ID NO: 2106279 - RNA, 19 nt, Homo sapiens
  misc_RNA (1)...(19): siRNA sense strand
gaccaaagaagaggacaaa

SEQ ID NO: 2106280 - RNA, 19 nt, Homo sapiens
  misc_RNA (1)...(19): siRNA sense strand
agaguaacccggaguuuga

SEQ ID NO: 2106281 - RNA, 19 nt, Homo sapiens
  misc_RNA (1)...(19): siRNA sense strand
ggacauuugauuggacuuu

SEQ ID NO: 2106282 - RNA, 19 nt, Homo sapiens
  misc_RNA (1)...(19): siRNA sense strand
guucagcugucucuguguu

SEQ ID NO: 2106283 - RNA, 19 nt, Homo sapiens
  misc_RNA (1)...(19): siRNA sense strand
gcuccucuguagaaacauu

SEQ ID NO: 2106284 - RNA, 19 nt, Homo sapiens
  misc_RNA (1)...(19): siRNA sense strand
gagaggaggaagaggaaga

SEQ ID NO: 2106285 - RNA, 19 nt, Homo sapiens
  misc_RNA (1)...(19): siRNA sense strand
ccaucuggcuccucuguag

SEQ ID NO: 2106286 - RNA, 19 nt, Homo sapiens
  misc_RNA (1)...(19): siRNA sense strand
gacaucaucuguguauuuu

SEQ ID NO: 2106287 - RNA, 19 nt, Homo sapiens
  misc_RNA (1)...(19): siRNA sense strand
gcugggaaagucguuguua

SEQ ID NO: 2106288 - RNA, 19 nt, Homo sapiens
  misc_RNA (1)...(19): siRNA sense strand
acccggaccugucguggua

SEQ ID NO: 2106289 - RNA, 19 nt, Homo sapiens
  misc_RNA (1)...(19): siRNA sense strand
cuuggaagaucauagugaa

SEQ ID NO: 2106290 - RNA, 19 nt, Homo sapiens
  misc_RNA (1)...(19): siRNA sense strand
aagaaagcacgaaguuaaa

SEQ ID NO: 2106291 - RNA, 19 nt, Homo sapiens
  misc_RNA (1)...(19): siRNA sense strand
ggucuccguauuccaauuu

SEQ ID NO: 2106292 - RNA, 19 nt, Homo sapiens
  misc_RNA (1)...(19): siRNA sense strand
guacuuggaagaucauagu

SEQ ID NO: 2106293 - RNA, 19 nt, Homo sapiens
  misc_RNA (1)...(19): siRNA sense strand
uuucacugcuggacauuug

SEQ ID NO: 2106294 - RNA, 19 nt, Homo sapiens
  misc_RNA (1)...(19): siRNA sense strand
gaagaggaagagaaagaag

SEQ ID NO: 2106295 - RNA, 19 nt, Homo sapiens
  misc_RNA (1)...(19): siRNA sense strand
cccaaugacuacuaugcaa

SEQ ID NO: 2106296 - RNA, 19 nt, Homo sapiens
  misc_RNA (1)...(19): siRNA sense strand
uggcaaagccgaccucuac

SEQ ID NO: 2106297 - RNA, 19 nt, Homo sapiens
  misc_RNA (1)...(19): siRNA sense strand
agucguuguuaccaucuua

SEQ ID NO: 2106298 - RNA, 19 nt, Homo sapiens
  misc_RNA (1)...(19): siRNA sense strand
caggaugacuacaaaccau

SEQ ID NO: 2106299 - RNA, 19 nt, Homo sapiens
  misc_RNA (1)...(19): siRNA sense strand
gacgaagcagcacagagua

SEQ ID NO: 2106300 - RNA, 19 nt, Homo sapiens
  misc_RNA (1)...(19): siRNA sense strand
ccuggagcaucaccuauca

SEQ ID NO: 2106301 - RNA, 19 nt, Homo sapiens
  misc_RNA (1)...(19): siRNA sense strand
agacgaagcagcacagagu

SEQ ID NO: 2106302 - RNA, 19 nt, Homo sapiens
  misc_RNA (1)...(19): siRNA sense strand
uggaagaaagcacgaaguu

SEQ ID NO: 2106303 - RNA, 19 nt, Homo sapiens
  misc_RNA (1)...(19): siRNA sense strand
ucugugcccucauagcuau

SEQ ID NO: 2106304 - RNA, 19 nt, Homo sapiens
  misc_RNA (1)...(19): siRNA sense strand
gagaaagaagaauuugaag

SEQ ID NO: 2106305 - RNA, 19 nt, Homo sapiens
  misc_RNA (1)...(19): siRNA sense strand
gcaaagccgaccucuacuc

SEQ ID NO: 2106306 - RNA, 19 nt, Homo sapiens
  misc_RNA (1)...(19): siRNA sense strand
ucaagucaguaauucaaac

SEQ ID NO: 2106307 - RNA, 19 nt, Homo sapiens
  misc_RNA (1)...(19): siRNA sense strand
cagaguaacccggaguuug

SEQ ID NO: 2106308 - RNA, 19 nt, Homo sapiens
  misc_RNA (1)...(19): siRNA sense strand
caauggaggagaugguguu

SEQ ID NO: 2106309 - RNA, 19 nt, Homo sapiens
  misc_RNA (1)...(19): siRNA sense strand
agaaaggagccgugaggaa

SEQ ID NO: 2106310 - RNA, 19 nt, Homo sapiens
  misc_RNA (1)...(19): siRNA sense strand
agaggaagagaaagaagaa

SEQ ID NO: 2106311 - RNA, 19 nt, Homo sapiens
  misc_RNA (1)...(19): siRNA sense strand
uggcuccucuguagaaaca

SEQ ID NO: 2106312 - RNA, 19 nt, Homo sapiens
  misc_RNA (1)...(19): siRNA sense strand
gcgagaggaggaagaggaa

SEQ ID NO: 2106313 - RNA, 19 nt, Homo sapiens
  misc_RNA (1)...(19): siRNA sense strand
ucaaacggacuguucaagu

SEQ ID NO: 2106314 - RNA, 19 nt, Homo sapiens
  misc_RNA (1)...(19): siRNA sense strand
uauaccaguuccaauucuu

SEQ ID NO: 2106315 - RNA, 19 nt, Homo sapiens
  misc_RNA (1)...(19): siRNA sense strand
gauguugccgucuuugaca

SEQ ID NO: 2106316 - RNA, 19 nt, Homo sapiens
  misc_RNA (1)...(19): siRNA sense strand
aggaagagaaagaagaauu

SEQ ID NO: 2106317 - RNA, 19 nt, Homo sapiens
  misc_RNA (1)...(19): siRNA sense strand
ggagcccucugaugaaucc

SEQ ID NO: 2106318 - RNA, 19 nt, Homo sapiens
  misc_RNA (1)...(19): siRNA sense strand
ccaaagaagaggacaaagc

SEQ ID NO: 2106319 - RNA, 19 nt, Homo sapiens
  misc_RNA (1)...(19): siRNA sense strand
caagguuguuugguaucaa

SEQ ID NO: 2106320 - RNA, 19 nt, Homo sapiens
  misc_RNA (1)...(19): siRNA sense strand
ugugguacgcaacccauua

SEQ ID NO: 2106321 - RNA, 19 nt, Homo sapiens
  misc_RNA (1)...(19): siRNA sense strand
ugaagaauuggcugaagga

SEQ ID NO: 2106322 - RNA, 19 nt, Homo sapiens
  misc_RNA (1)...(19): siRNA sense strand
agaagaggcacugaucuau

SEQ ID NO: 2106323 - RNA, 19 nt, Homo sapiens
  misc_RNA (1)...(19): siRNA sense strand
gagaacggcccuggcaaag

SEQ ID NO: 2106324 - RNA, 19 nt, Homo sapiens
  misc_RNA (1)...(19): siRNA sense strand
ggaccaaagaagaggacaa

SEQ ID NO: 2106325 - RNA, 19 nt, Homo sapiens
  misc_RNA (1)...(19): siRNA sense strand
ucuuugacaucaucugugu

SEQ ID NO: 2106326 - RNA, 19 nt, Homo sapiens
  misc_RNA (1)...(19): siRNA sense strand
uaauucaaacggacuguuc

SEQ ID NO: 2106327 - RNA, 19 nt, Homo sapiens
  misc_RNA (1)...(19): siRNA sense strand
guuguuugguaucaaguca

SEQ ID NO: 2106328 - RNA, 19 nt, Homo sapiens
  misc_RNA (1)...(19): siRNA sense strand
gccggacguucgacccauu

SEQ ID NO: 2106329 - RNA, 19 nt, Homo sapiens
  misc_RNA (1)...(19): siRNA sense strand
augcaagguuguuugguau

SEQ ID NO: 2106330 - RNA, 19 nt, Homo sapiens
  misc_RNA (1)...(19): siRNA sense strand
ugaaacaaaguuacaucug

SEQ ID NO: 2106331 - RNA, 19 nt, Homo sapiens
  misc_RNA (1)...(19): siRNA sense strand
aggcacugaucuaugaaga

SEQ ID NO: 2106332 - RNA, 19 nt, Homo sapiens
  misc_RNA (1)...(19): siRNA sense strand
cauggucuccguauuccaa

SEQ ID NO: 2106333 - RNA, 19 nt, Homo sapiens
  misc_RNA (1)...(19): siRNA sense strand
aggaagaggaagagaaaga

SEQ ID NO: 2106334 - RNA, 19 nt, Homo sapiens
  misc_RNA (1)...(19): siRNA sense strand
ugaaggcgaguuggaagaa

SEQ ID NO: 2106335 - RNA, 19 nt, Homo sapiens
  misc_RNA (1)...(19): siRNA sense strand
gaccaucuggcuccucugu

SEQ ID NO: 2106336 - RNA, 19 nt, Homo sapiens
  misc_RNA (1)...(19): siRNA sense strand
gucuccguauuccaauuua

SEQ ID NO: 2106337 - RNA, 19 nt, Homo sapiens
  misc_RNA (1)...(19): siRNA sense strand
agaggcaguuccacccaau

SEQ ID NO: 2106338 - RNA, 19 nt, Homo sapiens
  misc_RNA (1)...(19): siRNA sense strand
aagaggaagagaaagaaga

SEQ ID NO: 2106339 - RNA, 19 nt, Homo sapiens
  misc_RNA (1)...(19): siRNA sense strand
ccaugacccaggaugacua

SEQ ID NO: 2106340 - RNA, 19 nt, Homo sapiens
  misc_RNA (1)...(19): siRNA sense strand
gcaguuccacccaaugacu

SEQ ID NO: 2106341 - RNA, 19 nt, Homo sapiens
  misc_RNA (1)...(19): siRNA sense strand
acugaucuaugaagaggau

SEQ ID NO: 2106342 - RNA, 19 nt, Homo sapiens
  misc_RNA (1)...(19): siRNA sense strand
agaaguaucaaaguucaug

SEQ ID NO: 2106343 - RNA, 19 nt, Homo sapiens
  misc_RNA (1)...(19): siRNA sense strand
gaucuaugaagaggauuuc

SEQ ID NO: 2106344 - RNA, 19 nt, Homo sapiens
  misc_RNA (1)...(19): siRNA sense strand
gaguaacccggaguuugaa

SEQ ID NO: 2106345 - RNA, 19 nt, Homo sapiens
  misc_RNA (1)...(19): siRNA sense strand
ugggagcccucugaugaau

SEQ ID NO: 2106346 - RNA, 19 nt, Homo sapiens
  misc_RNA (1)...(19): siRNA sense strand
uugccucuguggccucuaa

SEQ ID NO: 2106347 - RNA, 19 nt, Homo sapiens
  misc_RNA (1)...(19): siRNA sense strand
gugggagcccucugaugaa

SEQ ID NO: 2106348 - RNA, 19 nt, Homo sapiens
  misc_RNA (1)...(19): siRNA sense strand
gaauuugaagaagaaagga

SEQ ID NO: 2106349 - RNA, 19 nt, Homo sapiens
  misc_RNA (1)...(19): siRNA sense strand
ggacaaaucagaugaagaa

SEQ ID NO: 2106350 - RNA, 19 nt, Homo sapiens
  misc_RNA (1)...(19): siRNA sense strand
gauuagacguagcagauua

SEQ ID NO: 2106351 - RNA, 19 nt, Homo sapiens
  misc_RNA (1)...(19): siRNA sense strand
gagccuccaugaaagaaua

SEQ ID NO: 2106352 - RNA, 19 nt, Homo sapiens
  misc_RNA (1)...(19): siRNA sense strand
gaagaagccuccaaaauuc

SEQ ID NO: 2106353 - RNA, 19 nt, Homo sapiens
  misc_RNA (1)...(19): siRNA sense strand
gaauggagguuugacauca

SEQ ID NO: 2106354 - RNA, 19 nt, Homo sapiens
  misc_RNA (1)...(19): siRNA sense strand
gaaugaagaaagggaauua

SEQ ID NO: 2106355 - RNA, 19 nt, Homo sapiens
  misc_RNA (1)...(19): siRNA sense strand
ggaagaagccuccaaaauu

SEQ ID NO: 2106356 - RNA, 19 nt, Homo sapiens
  misc_RNA (1)...(19): siRNA sense strand
gagcggucauugaaucuuu

SEQ ID NO: 2106357 - RNA, 19 nt, Homo sapiens
  misc_RNA (1)...(19): siRNA sense strand
caaaucagaugaagaacuc

SEQ ID NO: 2106358 - RNA, 19 nt, Homo sapiens
  misc_RNA (1)...(19): siRNA sense strand
guacaacccuuugcccauu

SEQ ID NO: 2106359 - RNA, 19 nt, Homo sapiens
  misc_RNA (1)...(19): siRNA sense strand
gcacuggacuaugguuuga

SEQ ID NO: 2106360 - RNA, 19 nt, Homo sapiens
  misc_RNA (1)...(19): siRNA sense strand
gaaggagaaugaagaaagg

SEQ ID NO: 2106361 - RNA, 19 nt, Homo sapiens
  misc_RNA (1)...(19): siRNA sense strand
gagacgacauuccauugaa

SEQ ID NO: 2106362 - RNA, 19 nt, Homo sapiens
  misc_RNA (1)...(19): siRNA sense strand
aaagagugcucaugaaauc

SEQ ID NO: 2106363 - RNA, 19 nt, Homo sapiens
  misc_RNA (1)...(19): siRNA sense strand
gauggugaauggugauauu

SEQ ID NO: 2106364 - RNA, 19 nt, Homo sapiens
  misc_RNA (1)...(19): siRNA sense strand
gaagaagugaugcauauuc

SEQ ID NO: 2106365 - RNA, 19 nt, Homo sapiens
  misc_RNA (1)...(19): siRNA sense strand
uagagcagcuuaucgauca

SEQ ID NO: 2106366 - RNA, 19 nt, Homo sapiens
  misc_RNA (1)...(19): siRNA sense strand
gaagaaggccugggagaug

SEQ ID NO: 2106367 - RNA, 19 nt, Homo sapiens
  misc_RNA (1)...(19): siRNA sense strand
gaagaaacgcugcacaagu

SEQ ID NO: 2106368 - RNA, 19 nt, Homo sapiens
  misc_RNA (1)...(19): siRNA sense strand
ugaaucagaugcaccaaau

SEQ ID NO: 2106369 - RNA, 19 nt, Homo sapiens
  misc_RNA (1)...(19): siRNA sense strand
ggaaacugccggaggcuuu

SEQ ID NO: 2106370 - RNA, 19 nt, Homo sapiens
  misc_RNA (1)...(19): siRNA sense strand
cagaugcaccaaaucauua

SEQ ID NO: 2106371 - RNA, 19 nt, Homo sapiens
  misc_RNA (1)...(19): siRNA sense strand
uggaagaagugaugcauau

SEQ ID NO: 2106372 - RNA, 19 nt, Homo sapiens
  misc_RNA (1)...(19): siRNA sense strand
auagagaugucaugaaguu

SEQ ID NO: 2106373 - RNA, 19 nt, Homo sapiens
  misc_RNA (1)...(19): siRNA sense strand
cuaugaggcugcagaagaa

SEQ ID NO: 2106374 - RNA, 19 nt, Homo sapiens
  misc_RNA (1)...(19): siRNA sense strand
aagaaacgcugcacaaguc

SEQ ID NO: 2106375 - RNA, 19 nt, Homo sapiens
  misc_RNA (1)...(19): siRNA sense strand
gagauuagacguagcagau

SEQ ID NO: 2106376 - RNA, 19 nt, Homo sapiens
  misc_RNA (1)...(19): siRNA sense strand
gaaaagugauggugaaugg

SEQ ID NO: 2106377 - RNA, 19 nt, Homo sapiens
  misc_RNA (1)...(19): siRNA sense strand
gcaaugaugagggcuauga

SEQ ID NO: 2106378 - RNA, 19 nt, Homo sapiens
  misc_RNA (1)...(19): siRNA sense strand
ggaaugggguaaaacuuaa

SEQ ID NO: 2106379 - RNA, 19 nt, Homo sapiens
  misc_RNA (1)...(19): siRNA sense strand
gaaaucauccucgacuuca

SEQ ID NO: 2106380 - RNA, 19 nt, Homo sapiens
  misc_RNA (1)...(19): siRNA sense strand
caaaggaggaauucugcua

SEQ ID NO: 2106381 - RNA, 19 nt, Homo sapiens
  misc_RNA (1)...(19): siRNA sense strand
gauccagaccuccuuuaaa

SEQ ID NO: 2106382 - RNA, 19 nt, Homo sapiens
  misc_RNA (1)...(19): siRNA sense strand
auaaagcacuggacuaugg

SEQ ID NO: 2106383 - RNA, 19 nt, Homo sapiens
  misc_RNA (1)...(19): siRNA sense strand
gcuaugaggcugcagaaga

SEQ ID NO: 2106384 - RNA, 19 nt, Homo sapiens
  misc_RNA (1)...(19): siRNA sense strand
cauugaaucuuugggaauu

SEQ ID NO: 2106385 - RNA, 19 nt, Homo sapiens
  misc_RNA (1)...(19): siRNA sense strand
cuaagucuauggacaaauc

SEQ ID NO: 2106386 - RNA, 19 nt, Homo sapiens
  misc_RNA (1)...(19): siRNA sense strand
ccugggagaugaagaugaa

SEQ ID NO: 2106387 - RNA, 19 nt, Homo sapiens
  misc_RNA (1)...(19): siRNA sense strand
gaacuggacagcucugagu

SEQ ID NO: 2106388 - RNA, 19 nt, Homo sapiens
  misc_RNA (1)...(19): siRNA sense strand
ggagucaucuauggugaau

SEQ ID NO: 2106389 - RNA, 19 nt, Homo sapiens
  misc_RNA (1)...(19): siRNA sense strand
aaagauacaccuugcgaaa

SEQ ID NO: 2106390 - RNA, 19 nt, Homo sapiens
  misc_RNA (1)...(19): siRNA sense strand
cuuaugagauguuaaugga

SEQ ID NO: 2106391 - RNA, 19 nt, Homo sapiens
  misc_RNA (1)...(19): siRNA sense strand
gaugagggauuugaggaau

SEQ ID NO: 2106392 - RNA, 19 nt, Homo sapiens
  misc_RNA (1)...(19): siRNA sense strand
gaagauucaagaaauggaa

SEQ ID NO: 2106393 - RNA, 19 nt, Homo sapiens
  misc_RNA (1)...(19): siRNA sense strand
gcucaucucccuacugaau

SEQ ID NO: 2106394 - RNA, 19 nt, Homo sapiens
  misc_RNA (1)...(19): siRNA sense strand
agacguagcagauuagaug

SEQ ID NO: 2106395 - RNA, 19 nt, Homo sapiens
  misc_RNA (1)...(19): siRNA sense strand
gcucagcucucauccuuuu

SEQ ID NO: 2106396 - RNA, 19 nt, Homo sapiens
  misc_RNA (1)...(19): siRNA sense strand
caaggaagaagccuccaaa

SEQ ID NO: 2106397 - RNA, 19 nt, Homo sapiens
  misc_RNA (1)...(19): siRNA sense strand
gaaguugugugcugcucau

SEQ ID NO: 2106398 - RNA, 19 nt, Homo sapiens
  misc_RNA (1)...(19): siRNA sense strand
agacgacauuccauugaaa

SEQ ID NO: 2106399 - RNA, 19 nt, Homo sapiens
  misc_RNA (1)...(19): siRNA sense strand
ucucagcuauucggucaua

SEQ ID NO: 2106400 - RNA, 19 nt, Homo sapiens
  misc_RNA (1)...(19): siRNA sense strand
caucuacaccgccuugaaa

SEQ ID NO: 2106401 - RNA, 19 nt, Homo sapiens
  misc_RNA (1)...(19): siRNA sense strand
ggaugacauucgcugcaaa

SEQ ID NO: 2106402 - RNA, 19 nt, Homo sapiens
  misc_RNA (1)...(19): siRNA sense strand
gaaaagagcgaugaaucua

SEQ ID NO: 2106403 - RNA, 19 nt, Homo sapiens
  misc_RNA (1)...(19): siRNA sense strand
gagaugucaugaaguugug

SEQ ID NO: 2106404 - RNA, 19 nt, Homo sapiens
  misc_RNA (1)...(19): siRNA sense strand
aauaucagcucaccccuua

SEQ ID NO: 2106405 - RNA, 19 nt, Homo sapiens
  misc_RNA (1)...(19): siRNA sense strand
cagcgugucucccucuuuc

SEQ ID NO: 2106406 - RNA, 19 nt, Homo sapiens
  misc_RNA (1)...(19): siRNA sense strand
cguagcagauuagauguga

SEQ ID NO: 2106407 - RNA, 19 nt, Homo sapiens
  misc_RNA (1)...(19): siRNA sense strand
aagaaggccugggagauga

SEQ ID NO: 2106408 - RNA, 19 nt, Homo sapiens
  misc_RNA (1)...(19): siRNA sense strand
aaaccauacuccacucuuc

SEQ ID NO: 2106409 - RNA, 19 nt, Homo sapiens
  misc_RNA (1)...(19): siRNA sense strand
cugcucaucucccuacuga

SEQ ID NO: 2106410 - RNA, 19 nt, Homo sapiens
  misc_RNA (1)...(19): siRNA sense strand
gaagcugacgguagcaaug

SEQ ID NO: 2106411 - RNA, 19 nt, Homo sapiens
  misc_RNA (1)...(19): siRNA sense strand
gaaaaggaaacgccuacua

SEQ ID NO: 2106412 - RNA, 19 nt, Homo sapiens
  misc_RNA (1)...(19): siRNA sense strand
gcucugagucugaggaaga

SEQ ID NO: 2106413 - RNA, 19 nt, Homo sapiens
  misc_RNA (1)...(19): siRNA sense strand
ucagaugcaccaaaucauu

SEQ ID NO: 2106414 - RNA, 19 nt, Homo sapiens
  misc_RNA (1)...(19): siRNA sense strand
aaauuaagagugcgaaaga

SEQ ID NO: 2106415 - RNA, 19 nt, Homo sapiens
  misc_RNA (1)...(19): siRNA sense strand
gagaggacgaucagugaga

SEQ ID NO: 2106416 - RNA, 19 nt, Homo sapiens
  misc_RNA (1)...(19): siRNA sense strand
cagagaggacgaucaguga

SEQ ID NO: 2106417 - RNA, 19 nt, Homo sapiens
  misc_RNA (1)...(19): siRNA sense strand
ggaagaagugaugcauauu

SEQ ID NO: 2106418 - RNA, 19 nt, Homo sapiens
  misc_RNA (1)...(19): siRNA sense strand
gcagguggaaauccucaaa

SEQ ID NO: 2106419 - RNA, 19 nt, Homo sapiens
  misc_RNA (1)...(19): siRNA sense strand
cuacuaacgugaggcaguu

SEQ ID NO: 2106420 - RNA, 19 nt, Homo sapiens
  misc_RNA (1)...(19): siRNA sense strand
aaagaaaacggguuaagua

SEQ ID NO: 2106421 - RNA, 19 nt, Homo sapiens
  misc_RNA (1)...(19): siRNA sense strand
auccagaccuccuuuaaau

SEQ ID NO: 2106422 - RNA, 19 nt, Homo sapiens
  misc_RNA (1)...(19): siRNA sense strand
auauagagaugucaugaag

SEQ ID NO: 2106423 - RNA, 19 nt, Homo sapiens
  misc_RNA (1)...(19): siRNA sense strand
gacauucgcugcaaaagau

SEQ ID NO: 2106424 - RNA, 19 nt, Homo sapiens
  misc_RNA (1)...(19): siRNA sense strand
guacaggugaugagggauu

SEQ ID NO: 2106425 - RNA, 19 nt, Homo sapiens
  misc_RNA (1)...(19): siRNA sense strand
ccagaggagauuagacgua

SEQ ID NO: 2106426 - RNA, 19 nt, Homo sapiens
  misc_RNA (1)...(19): siRNA sense strand
ggaagaaacgcugcacaag

SEQ ID NO: 2106427 - RNA, 19 nt, Homo sapiens
  misc_RNA (1)...(19): siRNA sense strand
guggaaugccucgcucuua

SEQ ID NO: 2106428 - RNA, 19 nt, Homo sapiens
  misc_RNA (1)...(19): siRNA sense strand
ccagagacgacauuccauu

SEQ ID NO: 2106429 - RNA, 19 nt, Homo sapiens
  misc_RNA (1)...(19): siRNA sense strand
guauucaaccagcaagaaa

SEQ ID NO: 2106430 - RNA, 19 nt, Homo sapiens
  misc_RNA (1)...(19): siRNA sense strand
cugcucagcucucauccuu

SEQ ID NO: 2106431 - RNA, 19 nt, Homo sapiens
  misc_RNA (1)...(19): siRNA sense strand
ugaaggagaaugaagaaag

SEQ ID NO: 2106432 - RNA, 19 nt, Homo sapiens
  misc_RNA (1)...(19): siRNA sense strand
aaaguaguaugaggucaga

SEQ ID NO: 2106433 - RNA, 19 nt, Homo sapiens
  misc_RNA (1)...(19): siRNA sense strand
ggcuauguauuaucugugu

SEQ ID NO: 2106434 - RNA, 19 nt, Homo sapiens
  misc_RNA (1)...(19): siRNA sense strand
caaaauuccugcccauauc

SEQ ID NO: 2106435 - RNA, 19 nt, Homo sapiens
  misc_RNA (1)...(19): siRNA sense strand
ucagcuauucggucauaua

SEQ ID NO: 2106436 - RNA, 19 nt, Homo sapiens
  misc_RNA (1)...(19): siRNA sense strand
ccaacaguauaaagacauc

SEQ ID NO: 2106437 - RNA, 19 nt, Homo sapiens
  misc_RNA (1)...(19): siRNA sense strand
uauggugaauggagguuug

SEQ ID NO: 2106438 - RNA, 19 nt, Homo sapiens
  misc_RNA (1)...(19): siRNA sense strand
aaucagaugcaccaaauca

SEQ ID NO: 2106439 - RNA, 19 nt, Homo sapiens
  misc_RNA (1)...(19): siRNA sense strand
ggucuuauaccugucaguu

SEQ ID NO: 2106440 - RNA, 19 nt, Homo sapiens
  misc_RNA (1)...(19): siRNA sense strand
cagagacgacauuccauug

SEQ ID NO: 2106441 - RNA, 19 nt, Homo sapiens
  misc_RNA (1)...(19): siRNA sense strand
gaaaacggguuaaguaccu

SEQ ID NO: 2106442 - RNA, 19 nt, Homo sapiens
  misc_RNA (1)...(19): siRNA sense strand
agucaucuauggugaaugg

SEQ ID NO: 2106443 - RNA, 19 nt, Homo sapiens
  misc_RNA (1)...(19): siRNA sense strand
ggagagggagguauucaac

SEQ ID NO: 2106444 - RNA, 19 nt, Homo sapiens
  misc_RNA (1)...(19): siRNA sense strand
ugaaaucauccucgacuuc

SEQ ID NO: 2106445 - RNA, 19 nt, Homo sapiens
  misc_RNA (1)...(19): siRNA sense strand
aaaaggaaacgccuacuaa

SEQ ID NO: 2106446 - RNA, 19 nt, Homo sapiens
  misc_RNA (1)...(19): siRNA sense strand
agaaagcugcggccuguau

SEQ ID NO: 2106447 - RNA, 19 nt, Homo sapiens
  misc_RNA (1)...(19): siRNA sense strand
gaguggagagggagguauu

SEQ ID NO: 2106448 - RNA, 19 nt, Homo sapiens
  misc_RNA (1)...(19): siRNA sense strand
uaggauaaccaguguaugg

SEQ ID NO: 2106449 - RNA, 19 nt, Homo sapiens
  misc_RNA (1)...(19): siRNA sense strand
gaacaagcacaucaugauu

SEQ ID NO: 2106450 - RNA, 19 nt, Homo sapiens
  misc_RNA (1)...(19): siRNA sense strand
gcaacaacaacaagauuaa

SEQ ID NO: 2106451 - RNA, 19 nt, Homo sapiens
  misc_RNA (1)...(19): siRNA sense strand
gauccuacgugcaugaaga

SEQ ID NO: 2106452 - RNA, 19 nt, Homo sapiens
  misc_RNA (1)...(19): siRNA sense strand
acaagcacaucaugauuga

SEQ ID NO: 2106453 - RNA, 19 nt, Homo sapiens
  misc_RNA (1)...(19): siRNA sense strand
ggaacaagcacaucaugau

SEQ ID NO: 2106454 - RNA, 19 nt, Homo sapiens
  misc_RNA (1)...(19): siRNA sense strand
ggcaacaacaacaagauua

SEQ ID NO: 2106455 - RNA, 19 nt, Homo sapiens
  misc_RNA (1)...(19): siRNA sense strand
gcacaucaugauugacuug

SEQ ID NO: 2106456 - RNA, 19 nt, Homo sapiens
  misc_RNA (1)...(19): siRNA sense strand
ggacuggcaacaacaacaa

SEQ ID NO: 2106457 - RNA, 19 nt, Homo sapiens
  misc_RNA (1)...(19): siRNA sense strand
cuacgugcaugaagaugga

SEQ ID NO: 2106458 - RNA, 19 nt, Homo sapiens
  misc_RNA (1)...(19): siRNA sense strand
cagcaucgccgagaagguu

SEQ ID NO: 2106459 - RNA, 19 nt, Homo sapiens
  misc_RNA (1)...(19): siRNA sense strand
ugaguuauacgauccaugu

SEQ ID NO: 2106460 - RNA, 19 nt, Homo sapiens
  misc_RNA (1)...(19): siRNA sense strand
ggccacgacugggauccua

SEQ ID NO: 2106461 - RNA, 19 nt, Homo sapiens
  misc_RNA (1)...(19): siRNA sense strand
guuauacgauccauguacu

SEQ ID NO: 2106462 - RNA, 19 nt, Homo sapiens
  misc_RNA (1)...(19): siRNA sense strand
uacgauccauguacuguca

SEQ ID NO: 2106463 - RNA, 19 nt, Homo sapiens
  misc_RNA (1)...(19): siRNA sense strand
aacaagcacaucaugauug

SEQ ID NO: 2106464 - RNA, 19 nt, Homo sapiens
  misc_RNA (1)...(19): siRNA sense strand
guacagcaucgccgagaag

SEQ ID NO: 2106465 - RNA, 19 nt, Homo sapiens
  misc_RNA (1)...(19): siRNA sense strand
gugccugacuucaacaaaa

SEQ ID NO: 2106466 - RNA, 19 nt, Homo sapiens
  misc_RNA (1)...(19): siRNA sense strand
ucuuguggauauuacagaa

SEQ ID NO: 2106467 - RNA, 19 nt, Homo sapiens
  misc_RNA (1)...(19): siRNA sense strand
uggcaacaacaacaagauu

SEQ ID NO: 2106468 - RNA, 19 nt, Homo sapiens
  misc_RNA (1)...(19): siRNA sense strand
gaguuauacgauccaugua

SEQ ID NO: 2106469 - RNA, 19 nt, Homo sapiens
  misc_RNA (1)...(19): siRNA sense strand
caacaacaacaagauuaac

SEQ ID NO: 2106470 - RNA, 19 nt, Homo sapiens
  misc_RNA (1)...(19): siRNA sense strand
ccaaggacuacuccaccaa

SEQ ID NO: 2106471 - RNA, 19 nt, Homo sapiens
  misc_RNA (1)...(19): siRNA sense strand
gaacaagcacaucaugauu

SEQ ID NO: 2106472 - RNA, 19 nt, Homo sapiens
  misc_RNA (1)...(19): siRNA sense strand
gcaacaacaacaagauuaa

SEQ ID NO: 2106473 - RNA, 19 nt, Homo sapiens
  misc_RNA (1)...(19): siRNA sense strand
gauccuacgugcaugaaga

SEQ ID NO: 2106474 - RNA, 19 nt, Homo sapiens
  misc_RNA (1)...(19): siRNA sense strand
acaagcacaucaugauuga

SEQ ID NO: 2106475 - RNA, 19 nt, Homo sapiens
  misc_RNA (1)...(19): siRNA sense strand
ggaacaagcacaucaugau

SEQ ID NO: 2106476 - RNA, 19 nt, Homo sapiens
  misc_RNA (1)...(19): siRNA sense strand
ggcaacaacaacaagauua

SEQ ID NO: 2106477 - RNA, 19 nt, Homo sapiens
  misc_RNA (1)...(19): siRNA sense strand
gcacaucaugauugacuug

SEQ ID NO: 2106478 - RNA, 19 nt, Homo sapiens
  misc_RNA (1)...(19): siRNA sense strand
ggacuggcaacaacaacaa

SEQ ID NO: 2106479 - RNA, 19 nt, Homo sapiens
  misc_RNA (1)...(19): siRNA sense strand
cuacgugcaugaagaugga

SEQ ID NO: 2106480 - RNA, 19 nt, Homo sapiens
  misc_RNA (1)...(19): siRNA sense strand
cagcaucgccgagaagguu

SEQ ID NO: 2106481 - RNA, 19 nt, Homo sapiens
  misc_RNA (1)...(19): siRNA sense strand
ugaguuauacgauccaugu

SEQ ID NO: 2106482 - RNA, 19 nt, Homo sapiens
  misc_RNA (1)...(19): siRNA sense strand
ggccacgacugggauccua

SEQ ID NO: 2106483 - RNA, 19 nt, Homo sapiens
  misc_RNA (1)...(19): siRNA sense strand
guuauacgauccauguacu

SEQ ID NO: 2106484 - RNA, 19 nt, Homo sapiens
  misc_RNA (1)...(19): siRNA sense strand
uacgauccauguacuguca

SEQ ID NO: 2106485 - RNA, 19 nt, Homo sapiens
  misc_RNA (1)...(19): siRNA sense strand
aacaagcacaucaugauug

SEQ ID NO: 2106486 - RNA, 19 nt, Homo sapiens
  misc_RNA (1)...(19): siRNA sense strand
guacagcaucgccgagaag

SEQ ID NO: 2106487 - RNA, 19 nt, Homo sapiens
  misc_RNA (1)...(19): siRNA sense strand
gugccugacuucaacaaaa

SEQ ID NO: 2106488 - RNA, 19 nt, Homo sapiens
  misc_RNA (1)...(19): siRNA sense strand
ucuuguggauauuacagaa

SEQ ID NO: 2106489 - RNA, 19 nt, Homo sapiens
  misc_RNA (1)...(19): siRNA sense strand
uggcaacaacaacaagauu

SEQ ID NO: 2106490 - RNA, 19 nt, Homo sapiens
  misc_RNA (1)...(19): siRNA sense strand
gaguuauacgauccaugua

SEQ ID NO: 2106491 - RNA, 19 nt, Homo sapiens
  misc_RNA (1)...(19): siRNA sense strand
caacaacaacaagauuaac

SEQ ID NO: 2106492 - RNA, 19 nt, Homo sapiens
  misc_RNA (1)...(19): siRNA sense strand
ccaaggacuacuccaccaa

SEQ ID NO: 2106493 - RNA, 19 nt, Homo sapiens
  misc_RNA (1)...(19): siRNA sense strand
gagagaagaugcaaagcuu

SEQ ID NO: 2106494 - RNA, 19 nt, Homo sapiens
  misc_RNA (1)...(19): siRNA sense strand
ggaagaugaucaccgauuc

SEQ ID NO: 2106495 - RNA, 19 nt, Homo sapiens
  misc_RNA (1)...(19): siRNA sense strand
gaauagaccaguuggagaa

SEQ ID NO: 2106496 - RNA, 19 nt, Homo sapiens
  misc_RNA (1)...(19): siRNA sense strand
caacagauuccacuccuuu

SEQ ID NO: 2106497 - RNA, 19 nt, Homo sapiens
  misc_RNA (1)...(19): siRNA sense strand
aacaaauucugcaggauua

SEQ ID NO: 2106498 - RNA, 19 nt, Homo sapiens
  misc_RNA (1)...(19): siRNA sense strand
cagccaagguugacuuuga

SEQ ID NO: 2106499 - RNA, 19 nt, Homo sapiens
  misc_RNA (1)...(19): siRNA sense strand
uauccugucuacucucuua

SEQ ID NO: 2106500 - RNA, 19 nt, Homo sapiens
  misc_RNA (1)...(19): siRNA sense strand
caugaaggcugugcugaaa

SEQ ID NO: 2106501 - RNA, 19 nt, Homo sapiens
  misc_RNA (1)...(19): siRNA sense strand
ggaagugaacauaaacaaa

SEQ ID NO: 2106502 - RNA, 19 nt, Homo sapiens
  misc_RNA (1)...(19): siRNA sense strand
gcacuagaguaucgcacaa

SEQ ID NO: 2106503 - RNA, 19 nt, Homo sapiens
  misc_RNA (1)...(19): siRNA sense strand
gaaacgggccaaccacaga

SEQ ID NO: 2106504 - RNA, 19 nt, Homo sapiens
  misc_RNA (1)...(19): siRNA sense strand
aaauggaacuaaugccaaa

SEQ ID NO: 2106505 - RNA, 19 nt, Homo sapiens
  misc_RNA (1)...(19): siRNA sense strand
uugaucaacuucaggauaa

SEQ ID NO: 2106506 - RNA, 19 nt, Homo sapiens
  misc_RNA (1)...(19): siRNA sense strand
gaagguuccagaagucaaa

SEQ ID NO: 2106507 - RNA, 19 nt, Homo sapiens
  misc_RNA (1)...(19): siRNA sense strand
gcaggauuauuagugaauu

SEQ ID NO: 2106508 - RNA, 19 nt, Homo sapiens
  misc_RNA (1)...(19): siRNA sense strand
ggaccugaaggaaggaaua

SEQ ID NO: 2106509 - RNA, 19 nt, Homo sapiens
  misc_RNA (1)...(19): siRNA sense strand
gggaucaccucaaggcaau

SEQ ID NO: 2106510 - RNA, 19 nt, Homo sapiens
  misc_RNA (1)...(19): siRNA sense strand
ggaaggaauagaccaguug

SEQ ID NO: 2106511 - RNA, 19 nt, Homo sapiens
  misc_RNA (1)...(19): siRNA sense strand
gauuguccauagaaggaua

SEQ ID NO: 2106512 - RNA, 19 nt, Homo sapiens
  misc_RNA (1)...(19): siRNA sense strand
aaacaaauucugcaggauu

SEQ ID NO: 2106513 - RNA, 19 nt, Homo sapiens
  misc_RNA (1)...(19): siRNA sense strand
ccauccaccuuaugcaauu

SEQ ID NO: 2106514 - RNA, 19 nt, Homo sapiens
  misc_RNA (1)...(19): siRNA sense strand
gggccaaccggaaaucuuu

SEQ ID NO: 2106515 - RNA, 19 nt, Homo sapiens
  misc_RNA (1)...(19): siRNA sense strand
cgagaagguuccagaaguc

SEQ ID NO: 2106516 - RNA, 19 nt, Homo sapiens
  misc_RNA (1)...(19): siRNA sense strand
guagaaaacuucccagaca

SEQ ID NO: 2106517 - RNA, 19 nt, Homo sapiens
  misc_RNA (1)...(19): siRNA sense strand
gugcagagcgaauuauaau

SEQ ID NO: 2106518 - RNA, 19 nt, Homo sapiens
  misc_RNA (1)...(19): siRNA sense strand
ugaugcagcugaugagauc

SEQ ID NO: 2106519 - RNA, 19 nt, Homo sapiens
  misc_RNA (1)...(19): siRNA sense strand
uaaagauuguccauagaag

SEQ ID NO: 2106520 - RNA, 19 nt, Homo sapiens
  misc_RNA (1)...(19): siRNA sense strand
gggaagaugaucaccgauu

SEQ ID NO: 2106521 - RNA, 19 nt, Homo sapiens
  misc_RNA (1)...(19): siRNA sense strand
auugggaacuuucuaaaug

SEQ ID NO: 2106522 - RNA, 19 nt, Homo sapiens
  misc_RNA (1)...(19): siRNA sense strand
guccauagaaggauaauca

SEQ ID NO: 2106523 - RNA, 19 nt, Homo sapiens
  misc_RNA (1)...(19): siRNA sense strand
ugaauuugcacuagaguau

SEQ ID NO: 2106524 - RNA, 19 nt, Homo sapiens
  misc_RNA (1)...(19): siRNA sense strand
caagucagccacccaagug

SEQ ID NO: 2106525 - RNA, 19 nt, Homo sapiens
  misc_RNA (1)...(19): siRNA sense strand
gcaagccgaggauccacua

SEQ ID NO: 2106526 - RNA, 19 nt, Homo sapiens
  misc_RNA (1)...(19): siRNA sense strand
ucgagaagguuccagaagu

SEQ ID NO: 2106527 - RNA, 19 nt, Homo sapiens
  misc_RNA (1)...(19): siRNA sense strand
ggacuaugggaacugauga

SEQ ID NO: 2106528 - RNA, 19 nt, Homo sapiens
  misc_RNA (1)...(19): siRNA sense strand
gaucaacuucaggauaauu

SEQ ID NO: 2106529 - RNA, 19 nt, Homo sapiens
  misc_RNA (1)...(19): siRNA sense strand
ccacagagagagaaauaag

SEQ ID NO: 2106530 - RNA, 19 nt, Homo sapiens
  misc_RNA (1)...(19): siRNA sense strand
cauagaaggauaaucaaca

SEQ ID NO: 2106531 - RNA, 19 nt, Homo sapiens
  misc_RNA (1)...(19): siRNA sense strand
cgagcucucugcacgacuu

SEQ ID NO: 2106532 - RNA, 19 nt, Homo sapiens
  misc_RNA (1)...(19): siRNA sense strand
ccacccaagugcccaguca

SEQ ID NO: 2106533 - RNA, 19 nt, Homo sapiens
  misc_RNA (1)...(19): siRNA sense strand
ucugcaggauuauuaguga

SEQ ID NO: 2106534 - RNA, 19 nt, Homo sapiens
  misc_RNA (1)...(19): siRNA sense strand
gggaagugaacauaaacaa

SEQ ID NO: 2106535 - RNA, 19 nt, Homo sapiens
  misc_RNA (1)...(19): siRNA sense strand
ucaaagacacagugcacaa

SEQ ID NO: 2106536 - RNA, 19 nt, Homo sapiens
  misc_RNA (1)...(19): siRNA sense strand
cagaugaugcagcugauga

SEQ ID NO: 2106537 - RNA, 19 nt, Homo sapiens
  misc_RNA (1)...(19): siRNA sense strand
caaauucugcaggauuauu

SEQ ID NO: 2106538 - RNA, 19 nt, Homo sapiens
  misc_RNA (1)...(19): siRNA sense strand
ggagagaagaugcaaagcu

SEQ ID NO: 2106539 - RNA, 19 nt, Homo sapiens
  misc_RNA (1)...(19): siRNA sense strand
uaugucagauggagagaag

SEQ ID NO: 2106540 - RNA, 19 nt, Homo sapiens
  misc_RNA (1)...(19): siRNA sense strand
cgcccaaugucacagauga

SEQ ID NO: 2106541 - RNA, 19 nt, Homo sapiens
  misc_RNA (1)...(19): siRNA sense strand
acugaugacucgcccaaug

SEQ ID NO: 2106542 - RNA, 19 nt, Homo sapiens
  misc_RNA (1)...(19): siRNA sense strand
uaaacaaauucugcaggau

SEQ ID NO: 2106543 - RNA, 19 nt, Homo sapiens
  misc_RNA (1)...(19): siRNA sense strand
aacaacggaugucagaguu

SEQ ID NO: 2106544 - RNA, 19 nt, Homo sapiens
  misc_RNA (1)...(19): siRNA sense strand
aaacaacggaugucagagu

SEQ ID NO: 2106545 - RNA, 19 nt, Homo sapiens
  misc_RNA (1)...(19): siRNA sense strand
uagaccaguuggagaacaa

SEQ ID NO: 2106546 - RNA, 19 nt, Homo sapiens
  misc_RNA (1)...(19): siRNA sense strand
gcugagcacgagaacauga

SEQ ID NO: 2106547 - RNA, 19 nt, Homo sapiens
  misc_RNA (1)...(19): siRNA sense strand
caccgauucuggcaaguuc

SEQ ID NO: 2106548 - RNA, 19 nt, Homo sapiens
  misc_RNA (1)...(19): siRNA sense strand
aaccacagagagagaaaua

SEQ ID NO: 2106549 - RNA, 19 nt, Homo sapiens
  misc_RNA (1)...(19): siRNA sense strand
ccaguuggagaacaauaaa

SEQ ID NO: 2106550 - RNA, 19 nt, Homo sapiens
  misc_RNA (1)...(19): siRNA sense strand
gccauugggaacuuucuaa

SEQ ID NO: 2106551 - RNA, 19 nt, Homo sapiens
  misc_RNA (1)...(19): siRNA sense strand
gaagaugaucaccgauucu

SEQ ID NO: 2106552 - RNA, 19 nt, Homo sapiens
  misc_RNA (1)...(19): siRNA sense strand
gaucaccucaaggcaauug

SEQ ID NO: 2106553 - RNA, 19 nt, Homo sapiens
  misc_RNA (1)...(19): siRNA sense strand
gaccaguuggagaacaaua

SEQ ID NO: 2106554 - RNA, 19 nt, Homo sapiens
  misc_RNA (1)...(19): siRNA sense strand
ggcaaguucuccggcaguu

SEQ ID NO: 2106555 - RNA, 19 nt, Homo sapiens
  misc_RNA (1)...(19): siRNA sense strand
ucuacucucuuagccauug

SEQ ID NO: 2106556 - RNA, 19 nt, Homo sapiens
  misc_RNA (1)...(19): siRNA sense strand
ugacuuugaucaacuucag

SEQ ID NO: 2106557 - RNA, 19 nt, Homo sapiens
  misc_RNA (1)...(19): siRNA sense strand
ccgaugaggagaagcagaa

SEQ ID NO: 2106558 - RNA, 19 nt, Homo sapiens
  misc_RNA (1)...(19): siRNA sense strand
agccgaggauccacuaguu

SEQ ID NO: 2106559 - RNA, 19 nt, Homo sapiens
  misc_RNA (1)...(19): siRNA sense strand
gacuucaccucugggcauu

SEQ ID NO: 2106560 - RNA, 19 nt, Homo sapiens
  misc_RNA (1)...(19): siRNA sense strand
gagaagguuccagaaguca

SEQ ID NO: 2106561 - RNA, 19 nt, Homo sapiens
  misc_RNA (1)...(19): siRNA sense strand
ggaccgcaucgucaaguca

SEQ ID NO: 2106562 - RNA, 19 nt, Homo sapiens
  misc_RNA (1)...(19): siRNA sense strand
caaguucuccggcaguucu

SEQ ID NO: 2106563 - RNA, 19 nt, Homo sapiens
  misc_RNA (1)...(19): siRNA sense strand
aggaaggaauagaccaguu

SEQ ID NO: 2106564 - RNA, 19 nt, Homo sapiens
  misc_RNA (1)...(19): siRNA sense strand
gugaauuugcacuagagua

SEQ ID NO: 2106565 - RNA, 19 nt, Homo sapiens
  misc_RNA (1)...(19): siRNA sense strand
ucaacagauuccacuccuu

SEQ ID NO: 2106566 - RNA, 19 nt, Homo sapiens
  misc_RNA (1)...(19): siRNA sense strand
gacugugcagagcgaauua

SEQ ID NO: 2106567 - RNA, 19 nt, Homo sapiens
  misc_RNA (1)...(19): siRNA sense strand
uaaaacaacggaugucaga

SEQ ID NO: 2106568 - RNA, 19 nt, Homo sapiens
  misc_RNA (1)...(19): siRNA sense strand
gcaaagcuucaugggauca

SEQ ID NO: 2106569 - RNA, 19 nt, Homo sapiens
  misc_RNA (1)...(19): siRNA sense strand
gcuuuauccugucuacucu

SEQ ID NO: 2106570 - RNA, 19 nt, Homo sapiens
  misc_RNA (1)...(19): siRNA sense strand
caauaaaaccuugggcuuu

SEQ ID NO: 2106571 - RNA, 19 nt, Homo sapiens
  misc_RNA (1)...(19): siRNA sense strand
ccauugggaacuuucuaaa

SEQ ID NO: 2106572 - RNA, 19 nt, Homo sapiens
  misc_RNA (1)...(19): siRNA sense strand
ccaggucagccaagguuga

SEQ ID NO: 2106573 - RNA, 19 nt, Homo sapiens
  misc_RNA (1)...(19): siRNA sense strand
aauaagaccagagggaaga

SEQ ID NO: 2106574 - RNA, 19 nt, Homo sapiens
  misc_RNA (1)...(19): siRNA sense strand
uucgggaagugaacauaaa

SEQ ID NO: 2106575 - RNA, 19 nt, Homo sapiens
  misc_RNA (1)...(19): siRNA sense strand
agaaggauaaucaacagau

SEQ ID NO: 2106576 - RNA, 19 nt, Homo sapiens
  misc_RNA (1)...(19): siRNA sense strand
caaagacacagugcacaag

SEQ ID NO: 2106577 - RNA, 19 nt, Homo sapiens
  misc_RNA (1)...(19): siRNA sense strand
cggcugagcacgagaacau

SEQ ID NO: 2106578 - RNA, 19 nt, Homo sapiens
  misc_RNA (1)...(19): siRNA sense strand
ggccauccaccuuaugcaa

SEQ ID NO: 2106579 - RNA, 19 nt, Homo sapiens
  misc_RNA (1)...(19): siRNA sense strand
auagaaggauaaucaacag

SEQ ID NO: 2106580 - RNA, 19 nt, Homo sapiens
  misc_RNA (1)...(19): siRNA sense strand
ucaaggcaauugcaaaaca

SEQ ID NO: 2106581 - RNA, 19 nt, Homo sapiens
  misc_RNA (1)...(19): siRNA sense strand
ugggaacuuucuaaaugga

SEQ ID NO: 2106582 - RNA, 19 nt, Homo sapiens
  misc_RNA (1)...(19): siRNA sense strand
ggauuaugaaacuacagaa

SEQ ID NO: 2106583 - RNA, 19 nt, Homo sapiens
  misc_RNA (1)...(19): siRNA sense strand
aagauuguccauagaagga

SEQ ID NO: 2106584 - RNA, 19 nt, Homo sapiens
  misc_RNA (1)...(19): siRNA sense strand
guuaagcuaccucgagaag

SEQ ID NO: 2106585 - RNA, 19 nt, Homo sapiens
  misc_RNA (1)...(19): siRNA sense strand
gaugaugcagcugaugaga

SEQ ID NO: 2106586 - RNA, 19 nt, Homo sapiens
  misc_RNA (1)...(19): siRNA sense strand
ccuggacuaugggaacuga

SEQ ID NO: 2106587 - RNA, 19 nt, Homo sapiens
  misc_RNA (1)...(19): siRNA sense strand
cacagagagagaaauaaga

SEQ ID NO: 2106588 - RNA, 19 nt, Homo sapiens
  misc_RNA (1)...(19): siRNA sense strand
gcaauucgggaagugaaca

SEQ ID NO: 2106589 - RNA, 19 nt, Homo sapiens
  misc_RNA (1)...(19): siRNA sense strand
uuugaucaacuucaggaua

SEQ ID NO: 2106590 - RNA, 19 nt, Homo sapiens
  misc_RNA (1)...(19): siRNA sense strand
caccaggucagccaagguu

SEQ ID NO: 2106591 - RNA, 19 nt, Homo sapiens
  misc_RNA (1)...(19): siRNA sense strand
gcagucgcuucuccaccau

SEQ ID NO: 2106592 - RNA, 19 nt, Homo sapiens
  misc_RNA (1)...(19): siRNA sense strand
gaauuugcacuagaguauc

SEQ ID NO: 2106593 - RNA, 19 nt, Homo sapiens
  misc_RNA (1)...(19): siRNA sense strand
ggacaaagcuacaugauag

SEQ ID NO: 2106594 - RNA, 19 nt, Homo sapiens
  misc_RNA (1)...(19): siRNA sense strand
gagaauuccuccaaaguua

SEQ ID NO: 2106595 - RNA, 19 nt, Homo sapiens
  misc_RNA (1)...(19): siRNA sense strand
ccaaaggacuugaaacuaa

SEQ ID NO: 2106596 - RNA, 19 nt, Homo sapiens
  misc_RNA (1)...(19): siRNA sense strand
gagaauaaauuuccagguu

SEQ ID NO: 2106597 - RNA, 19 nt, Homo sapiens
  misc_RNA (1)...(19): siRNA sense strand
guaguuggcugccuaauug

SEQ ID NO: 2106598 - RNA, 19 nt, Homo sapiens
  misc_RNA (1)...(19): siRNA sense strand
ggaaagagcaaacgaggua

SEQ ID NO: 2106599 - RNA, 19 nt, Homo sapiens
  misc_RNA (1)...(19): siRNA sense strand
aaacaaagccugugaaaug

SEQ ID NO: 2106600 - RNA, 19 nt, Homo sapiens
  misc_RNA (1)...(19): siRNA sense strand
uaacagagguuucaagaag

SEQ ID NO: 2106601 - RNA, 19 nt, Homo sapiens
  misc_RNA (1)...(19): siRNA sense strand
gaaauugagucagauaaug

SEQ ID NO: 2106602 - RNA, 19 nt, Homo sapiens
  misc_RNA (1)...(19): siRNA sense strand
aaaggaaucuucacaaaug

SEQ ID NO: 2106603 - RNA, 19 nt, Homo sapiens
  misc_RNA (1)...(19): siRNA sense strand
aaacagaaauucaggauuc

SEQ ID NO: 2106604 - RNA, 19 nt, Homo sapiens
  misc_RNA (1)...(19): siRNA sense strand
gagagaugguugacaauga

SEQ ID NO: 2106605 - RNA, 19 nt, Homo sapiens
  misc_RNA (1)...(19): siRNA sense strand
caaaggacuugaaacuaaa

SEQ ID NO: 2106606 - RNA, 19 nt, Homo sapiens
  misc_RNA (1)...(19): siRNA sense strand
gaauaaauuuccagguuca

SEQ ID NO: 2106607 - RNA, 19 nt, Homo sapiens
  misc_RNA (1)...(19): siRNA sense strand
gauuauagaugcaggacaa

SEQ ID NO: 2106608 - RNA, 19 nt, Homo sapiens
  misc_RNA (1)...(19): siRNA sense strand
ggaguaacuuuauauaugg

SEQ ID NO: 2106609 - RNA, 19 nt, Homo sapiens
  misc_RNA (1)...(19): siRNA sense strand
gaagagaccaguguugaaa

SEQ ID NO: 2106610 - RNA, 19 nt, Homo sapiens
  misc_RNA (1)...(19): siRNA sense strand
gaaaucauucuuugccuaa

SEQ ID NO: 2106611 - RNA, 19 nt, Homo sapiens
  misc_RNA (1)...(19): siRNA sense strand
gacaaauacuucaucagaa

SEQ ID NO: 2106612 - RNA, 19 nt, Homo sapiens
  misc_RNA (1)...(19): siRNA sense strand
cacaaaggcuacaacaauu

SEQ ID NO: 2106613 - RNA, 19 nt, Homo sapiens
  misc_RNA (1)...(19): siRNA sense strand
aaagagcaguguagcagua

SEQ ID NO: 2106614 - RNA, 19 nt, Homo sapiens
  misc_RNA (1)...(19): siRNA sense strand
ucaacaggcuccacuaaug

SEQ ID NO: 2106615 - RNA, 19 nt, Homo sapiens
  misc_RNA (1)...(19): siRNA sense strand
gaaacacgcaugaguacaa

SEQ ID NO: 2106616 - RNA, 19 nt, Homo sapiens
  misc_RNA (1)...(19): siRNA sense strand
gcaguuucuuguaauguuu

SEQ ID NO: 2106617 - RNA, 19 nt, Homo sapiens
  misc_RNA (1)...(19): siRNA sense strand
caaagccugugaaauguau

SEQ ID NO: 2106618 - RNA, 19 nt, Homo sapiens
  misc_RNA (1)...(19): siRNA sense strand
ccugugaaauguauacuaa

SEQ ID NO: 2106619 - RNA, 19 nt, Homo sapiens
  misc_RNA (1)...(19): siRNA sense strand
gcaaggaucugaaaagugu

SEQ ID NO: 2106620 - RNA, 19 nt, Homo sapiens
  misc_RNA (1)...(19): siRNA sense strand
caucaaaggcagcaucuaa

SEQ ID NO: 2106621 - RNA, 19 nt, Homo sapiens
  misc_RNA (1)...(19): siRNA sense strand
ccuaaggaguaacuuuaua

SEQ ID NO: 2106622 - RNA, 19 nt, Homo sapiens
  misc_RNA (1)...(19): siRNA sense strand
ggaaacaaaucaggaugug

SEQ ID NO: 2106623 - RNA, 19 nt, Homo sapiens
  misc_RNA (1)...(19): siRNA sense strand
agaaugagaugaagaaguc

SEQ ID NO: 2106624 - RNA, 19 nt, Homo sapiens
  misc_RNA (1)...(19): siRNA sense strand
guaauaaauucucccaaag

SEQ ID NO: 2106625 - RNA, 19 nt, Homo sapiens
  misc_RNA (1)...(19): siRNA sense strand
ucacaaaggcuacaacaau

SEQ ID NO: 2106626 - RNA, 19 nt, Homo sapiens
  misc_RNA (1)...(19): siRNA sense strand
gaugugcaauguaaucguu

SEQ ID NO: 2106627 - RNA, 19 nt, Homo sapiens
  misc_RNA (1)...(19): siRNA sense strand
ucagacagcuugugcuugu

SEQ ID NO: 2106628 - RNA, 19 nt, Homo sapiens
  misc_RNA (1)...(19): siRNA sense strand
gaaauucaggauucucaaa

SEQ ID NO: 2106629 - RNA, 19 nt, Homo sapiens
  misc_RNA (1)...(19): siRNA sense strand
acaauaaguuggacucuca

SEQ ID NO: 2106630 - RNA, 19 nt, Homo sapiens
  misc_RNA (1)...(19): siRNA sense strand
gaagucgguucauacacaa

SEQ ID NO: 2106631 - RNA, 19 nt, Homo sapiens
  misc_RNA (1)...(19): siRNA sense strand
caaaggcuacaacaauuaa

SEQ ID NO: 2106632 - RNA, 19 nt, Homo sapiens
  misc_RNA (1)...(19): siRNA sense strand
uuagagagaugguugacaa

SEQ ID NO: 2106633 - RNA, 19 nt, Homo sapiens
  misc_RNA (1)...(19): siRNA sense strand
gaagaagucgguucauaca

SEQ ID NO: 2106634 - RNA, 19 nt, Homo sapiens
  misc_RNA (1)...(19): siRNA sense strand
ucagaagacuacuagaaga

SEQ ID NO: 2106635 - RNA, 19 nt, Homo sapiens
  misc_RNA (1)...(19): siRNA sense strand
ggcagcaucuaaugauaaa

SEQ ID NO: 2106636 - RNA, 19 nt, Homo sapiens
  misc_RNA (1)...(19): siRNA sense strand
aaacacuucucuucauuuc

SEQ ID NO: 2106637 - RNA, 19 nt, Homo sapiens
  misc_RNA (1)...(19): siRNA sense strand
gaaauucagggucaaguuc

SEQ ID NO: 2106638 - RNA, 19 nt, Homo sapiens
  misc_RNA (1)...(19): siRNA sense strand
cagauaauguagagguaaa

SEQ ID NO: 2106639 - RNA, 19 nt, Homo sapiens
  misc_RNA (1)...(19): siRNA sense strand
uagaagagacgaaacgaaa

SEQ ID NO: 2106640 - RNA, 19 nt, Homo sapiens
  misc_RNA (1)...(19): siRNA sense strand
guauacagcuucaaaucca

SEQ ID NO: 2106641 - RNA, 19 nt, Homo sapiens
  misc_RNA (1)...(19): siRNA sense strand
ucaguaaccagacaucuaa

SEQ ID NO: 2106642 - RNA, 19 nt, Homo sapiens
  misc_RNA (1)...(19): siRNA sense strand
gggacaaagcuacaugaua

SEQ ID NO: 2106643 - RNA, 19 nt, Homo sapiens
  misc_RNA (1)...(19): siRNA sense strand
gcuaaaucuuccagugaaa

SEQ ID NO: 2106644 - RNA, 19 nt, Homo sapiens
  misc_RNA (1)...(19): siRNA sense strand
gaugguugacaaugauuua

SEQ ID NO: 2106645 - RNA, 19 nt, Homo sapiens
  misc_RNA (1)...(19): siRNA sense strand
ggagcaguuucuuguaaug

SEQ ID NO: 2106646 - RNA, 19 nt, Homo sapiens
  misc_RNA (1)...(19): siRNA sense strand
cagcauaguauucucagua

SEQ ID NO: 2106647 - RNA, 19 nt, Homo sapiens
  misc_RNA (1)...(19): siRNA sense strand
gaaagacaaauacuucauc

SEQ ID NO: 2106648 - RNA, 19 nt, Homo sapiens
  misc_RNA (1)...(19): siRNA sense strand
ggaagagaccaguguugaa

SEQ ID NO: 2106649 - RNA, 19 nt, Homo sapiens
  misc_RNA (1)...(19): siRNA sense strand
ucacaaauggaaaguguaa

SEQ ID NO: 2106650 - RNA, 19 nt, Homo sapiens
  misc_RNA (1)...(19): siRNA sense strand
ccagcucugugaagaaauu

SEQ ID NO: 2106651 - RNA, 19 nt, Homo sapiens
  misc_RNA (1)...(19): siRNA sense strand
gagcaaacgagguaguauu

SEQ ID NO: 2106652 - RNA, 19 nt, Homo sapiens
  misc_RNA (1)...(19): siRNA sense strand
acaaaggcuacaacaauua

SEQ ID NO: 2106653 - RNA, 19 nt, Homo sapiens
  misc_RNA (1)...(19): siRNA sense strand
cgauaagaauucagaaaca

SEQ ID NO: 2106654 - RNA, 19 nt, Homo sapiens
  misc_RNA (1)...(19): siRNA sense strand
caaaggcagcaucuaauga

SEQ ID NO: 2106655 - RNA, 19 nt, Homo sapiens
  misc_RNA (1)...(19): siRNA sense strand
uaaguguaauucccauuug

SEQ ID NO: 2106656 - RNA, 19 nt, Homo sapiens
  misc_RNA (1)...(19): siRNA sense strand
gaaaugcaucauccaguga

SEQ ID NO: 2106657 - RNA, 19 nt, Homo sapiens
  misc_RNA (1)...(19): siRNA sense strand
agacaaauacuucaucaga

SEQ ID NO: 2106658 - RNA, 19 nt, Homo sapiens
  misc_RNA (1)...(19): siRNA sense strand
gaaaagcccacagaaauaa

SEQ ID NO: 2106659 - RNA, 19 nt, Homo sapiens
  misc_RNA (1)...(19): siRNA sense strand
gaagaaauugcuggugaaa

SEQ ID NO: 2106660 - RNA, 19 nt, Homo sapiens
  misc_RNA (1)...(19): siRNA sense strand
ggcuaaaucuuccagugaa

SEQ ID NO: 2106661 - RNA, 19 nt, Homo sapiens
  misc_RNA (1)...(19): siRNA sense strand
uaaguuggacucucaaguu

SEQ ID NO: 2106662 - RNA, 19 nt, Homo sapiens
  misc_RNA (1)...(19): siRNA sense strand
gaaacagaaauucaggauu

SEQ ID NO: 2106663 - RNA, 19 nt, Homo sapiens
  misc_RNA (1)...(19): siRNA sense strand
gcuacagaguuauagaaga

SEQ ID NO: 2106664 - RNA, 19 nt, Homo sapiens
  misc_RNA (1)...(19): siRNA sense strand
caauggggcuacagaguua

SEQ ID NO: 2106665 - RNA, 19 nt, Homo sapiens
  misc_RNA (1)...(19): siRNA sense strand
cuaaugugcuauuccagaa

SEQ ID NO: 2106666 - RNA, 19 nt, Homo sapiens
  misc_RNA (1)...(19): siRNA sense strand
ggagauaacaauuccaaag

SEQ ID NO: 2106667 - RNA, 19 nt, Homo sapiens
  misc_RNA (1)...(19): siRNA sense strand
auaaacagcucagccaaga

SEQ ID NO: 2106668 - RNA, 19 nt, Homo sapiens
  misc_RNA (1)...(19): siRNA sense strand
gaaggaaacaaaucaggau

SEQ ID NO: 2106669 - RNA, 19 nt, Homo sapiens
  misc_RNA (1)...(19): siRNA sense strand
gaagaaaagcccacagaaa

SEQ ID NO: 2106670 - RNA, 19 nt, Homo sapiens
  misc_RNA (1)...(19): siRNA sense strand
ugaagaaauugcuggugaa

SEQ ID NO: 2106671 - RNA, 19 nt, Homo sapiens
  misc_RNA (1)...(19): siRNA sense strand
ugauaaagcuacuaaaucc

SEQ ID NO: 2106672 - RNA, 19 nt, Homo sapiens
  misc_RNA (1)...(19): siRNA sense strand
cuacagaguuauagaagag

SEQ ID NO: 2106673 - RNA, 19 nt, Homo sapiens
  misc_RNA (1)...(19): siRNA sense strand
uuaaauaugugggcuggaa

SEQ ID NO: 2106674 - RNA, 19 nt, Homo sapiens
  misc_RNA (1)...(19): siRNA sense strand
gauucagcaucaaauaaga

SEQ ID NO: 2106675 - RNA, 19 nt, Homo sapiens
  misc_RNA (1)...(19): siRNA sense strand
gauaagaauucagaaacag

SEQ ID NO: 2106676 - RNA, 19 nt, Homo sapiens
  misc_RNA (1)...(19): siRNA sense strand
uaaaucagccagaauugga

SEQ ID NO: 2106677 - RNA, 19 nt, Homo sapiens
  misc_RNA (1)...(19): siRNA sense strand
aaagagaauuccuccaaag

SEQ ID NO: 2106678 - RNA, 19 nt, Homo sapiens
  misc_RNA (1)...(19): siRNA sense strand
gaauuucagccaauguuug

SEQ ID NO: 2106679 - RNA, 19 nt, Homo sapiens
  misc_RNA (1)...(19): siRNA sense strand
caaaucaggaugugcaaug

SEQ ID NO: 2106680 - RNA, 19 nt, Homo sapiens
  misc_RNA (1)...(19): siRNA sense strand
agaagucgguucauacaca

SEQ ID NO: 2106681 - RNA, 19 nt, Homo sapiens
  misc_RNA (1)...(19): siRNA sense strand
ccacuaaugugcuauucca

SEQ ID NO: 2106682 - RNA, 19 nt, Homo sapiens
  misc_RNA (1)...(19): siRNA sense strand
caacaggcuccacuaaugu

SEQ ID NO: 2106683 - RNA, 19 nt, Homo sapiens
  misc_RNA (1)...(19): siRNA sense strand
agaaagggcuccugaaaau

SEQ ID NO: 2106684 - RNA, 19 nt, Homo sapiens
  misc_RNA (1)...(19): siRNA sense strand
caaacgagguaguauucuc

SEQ ID NO: 2106685 - RNA, 19 nt, Homo sapiens
  misc_RNA (1)...(19): siRNA sense strand
aaguuggacucucaaguuu

SEQ ID NO: 2106686 - RNA, 19 nt, Homo sapiens
  misc_RNA (1)...(19): siRNA sense strand
aauggaaaguguaaaggaa

SEQ ID NO: 2106687 - RNA, 19 nt, Homo sapiens
  misc_RNA (1)...(19): siRNA sense strand
gaauuggaaacacgcauga

SEQ ID NO: 2106688 - RNA, 19 nt, Homo sapiens
  misc_RNA (1)...(19): siRNA sense strand
aauaaugguucuuccugaa

SEQ ID NO: 2106689 - RNA, 19 nt, Homo sapiens
  misc_RNA (1)...(19): siRNA sense strand
gaccaguguugaaagacaa

SEQ ID NO: 2106690 - RNA, 19 nt, Homo sapiens
  misc_RNA (1)...(19): siRNA sense strand
guccaaaggagacuauaaa

SEQ ID NO: 2106691 - RNA, 19 nt, Homo sapiens
  misc_RNA (1)...(19): siRNA sense strand
uaucaggucagaagaagaa

SEQ ID NO: 2106692 - RNA, 19 nt, Homo sapiens
  misc_RNA (1)...(19): siRNA sense strand
cccaaaguaugcccugaaa

SEQ ID NO: 2106693 - RNA, 19 nt, Homo sapiens
  misc_RNA (1)...(19): siRNA sense strand
gaacuuccuugcaauguua

SEQ ID NO: 2106694 - RNA, 19 nt, Homo sapiens
  misc_RNA (1)...(19): siRNA sense strand
gcagaaagccaaagaguua

SEQ ID NO: 2106695 - RNA, 19 nt, Homo sapiens
  misc_RNA (1)...(19): siRNA sense strand
caaaugagcccaaucuuaa

SEQ ID NO: 2106696 - RNA, 19 nt, Homo sapiens
  misc_RNA (1)...(19): siRNA sense strand
ggaagaaagagaaauguua

SEQ ID NO: 2106697 - RNA, 19 nt, Homo sapiens
  misc_RNA (1)...(19): siRNA sense strand
ggaggaagaugcagaguca

SEQ ID NO: 2106698 - RNA, 19 nt, Homo sapiens
  misc_RNA (1)...(19): siRNA sense strand
gcagaagaauuuacuagga

SEQ ID NO: 2106699 - RNA, 19 nt, Homo sapiens
  misc_RNA (1)...(19): siRNA sense strand
gagaaaggauuuggaagaa

SEQ ID NO: 2106700 - RNA, 19 nt, Homo sapiens
  misc_RNA (1)...(19): siRNA sense strand
gaaaggauuuggaagaaag

SEQ ID NO: 2106701 - RNA, 19 nt, Homo sapiens
  misc_RNA (1)...(19): siRNA sense strand
ccaaagaguuacagcaauu

SEQ ID NO: 2106702 - RNA, 19 nt, Homo sapiens
  misc_RNA (1)...(19): siRNA sense strand
ggaaagccauugaauacug

SEQ ID NO: 2106703 - RNA, 19 nt, Homo sapiens
  misc_RNA (1)...(19): siRNA sense strand
gaacucuagcucacaauua

SEQ ID NO: 2106704 - RNA, 19 nt, Homo sapiens
  misc_RNA (1)...(19): siRNA sense strand
cagaacagcugagauuaaa

SEQ ID NO: 2106705 - RNA, 19 nt, Homo sapiens
  misc_RNA (1)...(19): siRNA sense strand
ugaagaagcugguggaaca

SEQ ID NO: 2106706 - RNA, 19 nt, Homo sapiens
  misc_RNA (1)...(19): siRNA sense strand
ggucacagcucaaauuucu

SEQ ID NO: 2106707 - RNA, 19 nt, Homo sapiens
  misc_RNA (1)...(19): siRNA sense strand
ucaaugaugugacuucuau

SEQ ID NO: 2106708 - RNA, 19 nt, Homo sapiens
  misc_RNA (1)...(19): siRNA sense strand
gaugugaaacucuuaagua

SEQ ID NO: 2106709 - RNA, 19 nt, Homo sapiens
  misc_RNA (1)...(19): siRNA sense strand
gaaguauucucgagcucua

SEQ ID NO: 2106710 - RNA, 19 nt, Homo sapiens
  misc_RNA (1)...(19): siRNA sense strand
gaagagaccacuagaaucu

SEQ ID NO: 2106711 - RNA, 19 nt, Homo sapiens
  misc_RNA (1)...(19): siRNA sense strand
ucaaaugagcccaaucuua

SEQ ID NO: 2106712 - RNA, 19 nt, Homo sapiens
  misc_RNA (1)...(19): siRNA sense strand
gccaagagucguucuaaua

SEQ ID NO: 2106713 - RNA, 19 nt, Homo sapiens
  misc_RNA (1)...(19): siRNA sense strand
caagagucguucuaauaaa

SEQ ID NO: 2106714 - RNA, 19 nt, Homo sapiens
  misc_RNA (1)...(19): siRNA sense strand
ccaagagucguucuaauaa

SEQ ID NO: 2106715 - RNA, 19 nt, Homo sapiens
  misc_RNA (1)...(19): siRNA sense strand
cagaagaauuuacuaggaa

SEQ ID NO: 2106716 - RNA, 19 nt, Homo sapiens
  misc_RNA (1)...(19): siRNA sense strand
uaaagaagauccagaacag

SEQ ID NO: 2106717 - RNA, 19 nt, Homo sapiens
  misc_RNA (1)...(19): siRNA sense strand
caacuauucucauuguuuc

SEQ ID NO: 2106718 - RNA, 19 nt, Homo sapiens
  misc_RNA (1)...(19): siRNA sense strand
gcaacuauucucauuguuu

SEQ ID NO: 2106719 - RNA, 19 nt, Homo sapiens
  misc_RNA (1)...(19): siRNA sense strand
ucaagcaacuauucucauu

SEQ ID NO: 2106720 - RNA, 19 nt, Homo sapiens
  misc_RNA (1)...(19): siRNA sense strand
cuaggaaacuguauguuga

SEQ ID NO: 2106721 - RNA, 19 nt, Homo sapiens
  misc_RNA (1)...(19): siRNA sense strand
gaagcaagauuccacaaaa

SEQ ID NO: 2106722 - RNA, 19 nt, Homo sapiens
  misc_RNA (1)...(19): siRNA sense strand
aaucgaagcagaagaauuu

SEQ ID NO: 2106723 - RNA, 19 nt, Homo sapiens
  misc_RNA (1)...(19): siRNA sense strand
gaaagccauugaauacugu

SEQ ID NO: 2106724 - RNA, 19 nt, Homo sapiens
  misc_RNA (1)...(19): siRNA sense strand
gagccgagaccacaaguaa

SEQ ID NO: 2106725 - RNA, 19 nt, Homo sapiens
  misc_RNA (1)...(19): siRNA sense strand
ggacagcacuuaguaucug

SEQ ID NO: 2106726 - RNA, 19 nt, Homo sapiens
  misc_RNA (1)...(19): siRNA sense strand
ggaacugguuugcuucaga

SEQ ID NO: 2106727 - RNA, 19 nt, Homo sapiens
  misc_RNA (1)...(19): siRNA sense strand
aauaggaacuacuguggua

SEQ ID NO: 2106728 - RNA, 19 nt, Homo sapiens
  misc_RNA (1)...(19): siRNA sense strand
gaagaagagaccacuagaa

SEQ ID NO: 2106729 - RNA, 19 nt, Homo sapiens
  misc_RNA (1)...(19): siRNA sense strand
gcaacaaacucugaauugg

SEQ ID NO: 2106730 - RNA, 19 nt, Homo sapiens
  misc_RNA (1)...(19): siRNA sense strand
gaaacuguauguugaacuc

SEQ ID NO: 2106731 - RNA, 19 nt, Homo sapiens
  misc_RNA (1)...(19): siRNA sense strand
ucagcaaacuguaacaaga

SEQ ID NO: 2106732 - RNA, 19 nt, Homo sapiens
  misc_RNA (1)...(19): siRNA sense strand
gaacaggaacgggagauga

SEQ ID NO: 2106733 - RNA, 19 nt, Homo sapiens
  misc_RNA (1)...(19): siRNA sense strand
aaacaagugaccacaauuu

SEQ ID NO: 2106734 - RNA, 19 nt, Homo sapiens
  misc_RNA (1)...(19): siRNA sense strand
gcucacaauuaaucaagaa

SEQ ID NO: 2106735 - RNA, 19 nt, Homo sapiens
  misc_RNA (1)...(19): siRNA sense strand
ccacuagaaucuggaauug

SEQ ID NO: 2106736 - RNA, 19 nt, Homo sapiens
  misc_RNA (1)...(19): siRNA sense strand
gcagagaaaggauuuggaa

SEQ ID NO: 2106737 - RNA, 19 nt, Homo sapiens
  misc_RNA (1)...(19): siRNA sense strand
gcacaaauaggaacuacug

SEQ ID NO: 2106738 - RNA, 19 nt, Homo sapiens
  misc_RNA (1)...(19): siRNA sense strand
ggacuccaguucaaaucaa

SEQ ID NO: 2106739 - RNA, 19 nt, Homo sapiens
  misc_RNA (1)...(19): siRNA sense strand
gcacacucauucagucaug

SEQ ID NO: 2106740 - RNA, 19 nt, Homo sapiens
  misc_RNA (1)...(19): siRNA sense strand
caacauugaccauucagaa

SEQ ID NO: 2106741 - RNA, 19 nt, Homo sapiens
  misc_RNA (1)...(19): siRNA sense strand
ccaguuuccugcuaauuug

SEQ ID NO: 2106742 - RNA, 19 nt, Homo sapiens
  misc_RNA (1)...(19): siRNA sense strand
ggucaaccuuaaugaagaa

SEQ ID NO: 2106743 - RNA, 19 nt, Homo sapiens
  misc_RNA (1)...(19): siRNA sense strand
caacuacaguguccucaag

SEQ ID NO: 2106744 - RNA, 19 nt, Homo sapiens
  misc_RNA (1)...(19): siRNA sense strand
cuacgaggccuucuagaaa

SEQ ID NO: 2106745 - RNA, 19 nt, Homo sapiens
  misc_RNA (1)...(19): siRNA sense strand
gaacgggagaugaaguauu

SEQ ID NO: 2106746 - RNA, 19 nt, Homo sapiens
  misc_RNA (1)...(19): siRNA sense strand
ccagaacagcugagauuaa

SEQ ID NO: 2106747 - RNA, 19 nt, Homo sapiens
  misc_RNA (1)...(19): siRNA sense strand
gaagaaagagaaauguuac

SEQ ID NO: 2106748 - RNA, 19 nt, Homo sapiens
  misc_RNA (1)...(19): siRNA sense strand
caaguaacauaaccucaag

SEQ ID NO: 2106749 - RNA, 19 nt, Homo sapiens
  misc_RNA (1)...(19): siRNA sense strand
agagaaauguuacuuaagg

SEQ ID NO: 2106750 - RNA, 19 nt, Homo sapiens
  misc_RNA (1)...(19): siRNA sense strand
ucagaaauguggacagaag

SEQ ID NO: 2106751 - RNA, 19 nt, Homo sapiens
  misc_RNA (1)...(19): siRNA sense strand
guacagugccgaacucuag

SEQ ID NO: 2106752 - RNA, 19 nt, Homo sapiens
  misc_RNA (1)...(19): siRNA sense strand
aacaaacucugaauugguu

SEQ ID NO: 2106753 - RNA, 19 nt, Homo sapiens
  misc_RNA (1)...(19): siRNA sense strand
aaauuacucugccuggaaa

SEQ ID NO: 2106754 - RNA, 19 nt, Homo sapiens
  misc_RNA (1)...(19): siRNA sense strand
uacgacaacuucugccuaa

SEQ ID NO: 2106755 - RNA, 19 nt, Homo sapiens
  misc_RNA (1)...(19): siRNA sense strand
guucagggccaguguauau

SEQ ID NO: 2106756 - RNA, 19 nt, Homo sapiens
  misc_RNA (1)...(19): siRNA sense strand
gcacagauacagcauagag

SEQ ID NO: 2106757 - RNA, 19 nt, Homo sapiens
  misc_RNA (1)...(19): siRNA sense strand
gggucaaccuuaaugaaga

SEQ ID NO: 2106758 - RNA, 19 nt, Homo sapiens
  misc_RNA (1)...(19): siRNA sense strand
caaauuacucugccuggaa

SEQ ID NO: 2106759 - RNA, 19 nt, Homo sapiens
  misc_RNA (1)...(19): siRNA sense strand
gcagacuucuagugacaug

SEQ ID NO: 2106760 - RNA, 19 nt, Homo sapiens
  misc_RNA (1)...(19): siRNA sense strand
guugguaucuccucagcaa

SEQ ID NO: 2106761 - RNA, 19 nt, Homo sapiens
  misc_RNA (1)...(19): siRNA sense strand
cuacaacaguaacaacuuc

SEQ ID NO: 2106762 - RNA, 19 nt, Homo sapiens
  misc_RNA (1)...(19): siRNA sense strand
uaacagugguccguugaug

SEQ ID NO: 2106763 - RNA, 19 nt, Homo sapiens
  misc_RNA (1)...(19): siRNA sense strand
gaaaagcgugguugccuua

SEQ ID NO: 2106764 - RNA, 19 nt, Homo sapiens
  misc_RNA (1)...(19): siRNA sense strand
caauccaguuuccugcuaa

SEQ ID NO: 2106765 - RNA, 19 nt, Homo sapiens
  misc_RNA (1)...(19): siRNA sense strand
aaguauaucuggaaagcaa

SEQ ID NO: 2106766 - RNA, 19 nt, Homo sapiens
  misc_RNA (1)...(19): siRNA sense strand
ggaagaagagaccacuaga

SEQ ID NO: 2106767 - RNA, 19 nt, Homo sapiens
  misc_RNA (1)...(19): siRNA sense strand
ucagauagucgccgugaaa

SEQ ID NO: 2106768 - RNA, 19 nt, Homo sapiens
  misc_RNA (1)...(19): siRNA sense strand
ucagggccaguguauauua

SEQ ID NO: 2106769 - RNA, 19 nt, Homo sapiens
  misc_RNA (1)...(19): siRNA sense strand
cagcagacuucuagugaca

SEQ ID NO: 2106770 - RNA, 19 nt, Homo sapiens
  misc_RNA (1)...(19): siRNA sense strand
gugaagaaaugcaagaacu

SEQ ID NO: 2106771 - RNA, 19 nt, Homo sapiens
  misc_RNA (1)...(19): siRNA sense strand
aacucuagcucacaauuaa

SEQ ID NO: 2106772 - RNA, 19 nt, Homo sapiens
  misc_RNA (1)...(19): siRNA sense strand
aagcaacuauucucauugu

SEQ ID NO: 2106773 - RNA, 19 nt, Homo sapiens
  misc_RNA (1)...(19): siRNA sense strand
ccaagaaucacgagaaucu

SEQ ID NO: 2106774 - RNA, 19 nt, Homo sapiens
  misc_RNA (1)...(19): siRNA sense strand
agaagacgaugccagugaa

SEQ ID NO: 2106775 - RNA, 19 nt, Homo sapiens
  misc_RNA (1)...(19): siRNA sense strand
caucauccacuccuucaaa

SEQ ID NO: 2106776 - RNA, 19 nt, Homo sapiens
  misc_RNA (1)...(19): siRNA sense strand
uuacagcaauuggaacuug

SEQ ID NO: 2106777 - RNA, 19 nt, Homo sapiens
  misc_RNA (1)...(19): siRNA sense strand
gaacagcugagauuaaagc

SEQ ID NO: 2106778 - RNA, 19 nt, Homo sapiens
  misc_RNA (1)...(19): siRNA sense strand
ugaccacaauuucacauuc

SEQ ID NO: 2106779 - RNA, 19 nt, Homo sapiens
  misc_RNA (1)...(19): siRNA sense strand
cauccacuccuucaaauga

SEQ ID NO: 2106780 - RNA, 19 nt, Homo sapiens
  misc_RNA (1)...(19): siRNA sense strand
gcugccugcuccucagaua

SEQ ID NO: 2106781 - RNA, 19 nt, Homo sapiens
  misc_RNA (1)...(19): siRNA sense strand
ccucagggacuugauauuu

SEQ ID NO: 2106782 - RNA, 19 nt, Homo sapiens
  misc_RNA (1)...(19): siRNA sense strand
gccaaagaguuacagcaau

SEQ ID NO: 2106783 - RNA, 19 nt, Homo sapiens
  misc_RNA (1)...(19): siRNA sense strand
agaaaggauuuggaagaaa

SEQ ID NO: 2106784 - RNA, 19 nt, Homo sapiens
  misc_RNA (1)...(19): siRNA sense strand
gagaagcagagaaaggauu

SEQ ID NO: 2106785 - RNA, 19 nt, Homo sapiens
  misc_RNA (1)...(19): siRNA sense strand
gucagaagaugaagaagag

SEQ ID NO: 2106786 - RNA, 19 nt, Homo sapiens
  misc_RNA (1)...(19): siRNA sense strand
ggaguugugacacuucauu

SEQ ID NO: 2106787 - RNA, 19 nt, Homo sapiens
  misc_RNA (1)...(19): siRNA sense strand
gugaacaccauaauaccua

SEQ ID NO: 2106788 - RNA, 19 nt, Homo sapiens
  misc_RNA (1)...(19): siRNA sense strand
aacgggagaugaaguauuc

SEQ ID NO: 2106789 - RNA, 19 nt, Homo sapiens
  misc_RNA (1)...(19): siRNA sense strand
aagaagagaccacuagaau

SEQ ID NO: 2106790 - RNA, 19 nt, Homo sapiens
  misc_RNA (1)...(19): siRNA sense strand
ucacagcucaaauuucuug

SEQ ID NO: 2106791 - RNA, 19 nt, Homo sapiens
  misc_RNA (1)...(19): siRNA sense strand
ccaggucacagcucaaauu

SEQ ID NO: 2106792 - RNA, 19 nt, Homo sapiens
  misc_RNA (1)...(19): siRNA sense strand
caacaaacucugaauuggu

SEQ ID NO: 2106793 - RNA, 19 nt, Homo sapiens
  misc_RNA (1)...(19): siRNA sense strand
gcaauuugguucaguauua

SEQ ID NO: 2106794 - RNA, 19 nt, Homo sapiens
  misc_RNA (1)...(19): siRNA sense strand
ggacaagcauuuauacgua

SEQ ID NO: 2106795 - RNA, 19 nt, Homo sapiens
  misc_RNA (1)...(19): siRNA sense strand
gaaugaaacuggcuacuug

SEQ ID NO: 2106796 - RNA, 19 nt, Homo sapiens
  misc_RNA (1)...(19): siRNA sense strand
ccaagaagcuggccaacaa

SEQ ID NO: 2106797 - RNA, 19 nt, Homo sapiens
  misc_RNA (1)...(19): siRNA sense strand
cgaaggagauguagcagaa

SEQ ID NO: 2106798 - RNA, 19 nt, Homo sapiens
  misc_RNA (1)...(19): siRNA sense strand
gauaugauccucgauuuaa

SEQ ID NO: 2106799 - RNA, 19 nt, Homo sapiens
  misc_RNA (1)...(19): siRNA sense strand
gcuauaaccuagaaacgaa

SEQ ID NO: 2106800 - RNA, 19 nt, Homo sapiens
  misc_RNA (1)...(19): siRNA sense strand
agaauucgcucuaacaaga

SEQ ID NO: 2106801 - RNA, 19 nt, Homo sapiens
  misc_RNA (1)...(19): siRNA sense strand
gaaaggaaccuggacagaa

SEQ ID NO: 2106802 - RNA, 19 nt, Homo sapiens
  misc_RNA (1)...(19): siRNA sense strand
gacaagcauuuauacguaa

SEQ ID NO: 2106803 - RNA, 19 nt, Homo sapiens
  misc_RNA (1)...(19): siRNA sense strand
gcaauuggaggaaaucauu

SEQ ID NO: 2106804 - RNA, 19 nt, Homo sapiens
  misc_RNA (1)...(19): siRNA sense strand
ggagugcuauaaccuagaa

SEQ ID NO: 2106805 - RNA, 19 nt, Homo sapiens
  misc_RNA (1)...(19): siRNA sense strand
cuacaagucaucuacaaua

SEQ ID NO: 2106806 - RNA, 19 nt, Homo sapiens
  misc_RNA (1)...(19): siRNA sense strand
gaauaugucccauggcuau

SEQ ID NO: 2106807 - RNA, 19 nt, Homo sapiens
  misc_RNA (1)...(19): siRNA sense strand
gaaaagaagacauggaaaa

SEQ ID NO: 2106808 - RNA, 19 nt, Homo sapiens
  misc_RNA (1)...(19): siRNA sense strand
ccagcaauuugguucagua

SEQ ID NO: 2106809 - RNA, 19 nt, Homo sapiens
  misc_RNA (1)...(19): siRNA sense strand
caagucaucuacaauaugc

SEQ ID NO: 2106810 - RNA, 19 nt, Homo sapiens
  misc_RNA (1)...(19): siRNA sense strand
aaugaucgcuuguaugcaa

SEQ ID NO: 2106811 - RNA, 19 nt, Homo sapiens
  misc_RNA (1)...(19): siRNA sense strand
ggaaaacacaguacaaauu

SEQ ID NO: 2106812 - RNA, 19 nt, Homo sapiens
  misc_RNA (1)...(19): siRNA sense strand
ccgauaugauccucgauuu

SEQ ID NO: 2106813 - RNA, 19 nt, Homo sapiens
  misc_RNA (1)...(19): siRNA sense strand
ggaaugcuaugacccaaaa

SEQ ID NO: 2106814 - RNA, 19 nt, Homo sapiens
  misc_RNA (1)...(19): siRNA sense strand
gcaguuccauugccacaag

SEQ ID NO: 2106815 - RNA, 19 nt, Homo sapiens
  misc_RNA (1)...(19): siRNA sense strand
gcugugcagugcuugauga

SEQ ID NO: 2106816 - RNA, 19 nt, Homo sapiens
  misc_RNA (1)...(19): siRNA sense strand
ggaaugaaacuggcuacuu

SEQ ID NO: 2106817 - RNA, 19 nt, Homo sapiens
  misc_RNA (1)...(19): siRNA sense strand
uuuaauagcuggauucaac

SEQ ID NO: 2106818 - RNA, 19 nt, Homo sapiens
  misc_RNA (1)...(19): siRNA sense strand
cgauaugauccucgauuua

SEQ ID NO: 2106819 - RNA, 19 nt, Homo sapiens
  misc_RNA (1)...(19): siRNA sense strand
aaaggaaccuggacagaac

SEQ ID NO: 2106820 - RNA, 19 nt, Homo sapiens
  misc_RNA (1)...(19): siRNA sense strand
gauccucgauuuaauagcu

SEQ ID NO: 2106821 - RNA, 19 nt, Homo sapiens
  misc_RNA (1)...(19): siRNA sense strand
gcagaauucgcucuaacaa

SEQ ID NO: 2106822 - RNA, 19 nt, Homo sapiens
  misc_RNA (1)...(19): siRNA sense strand
ucccauggcuauauugcua

SEQ ID NO: 2106823 - RNA, 19 nt, Homo sapiens
  misc_RNA (1)...(19): siRNA sense strand
ggcgcuauguguccucuuu

SEQ ID NO: 2106824 - RNA, 19 nt, Homo sapiens
  misc_RNA (1)...(19): siRNA sense strand
aaaggugaccaguggaaua

SEQ ID NO: 2106825 - RNA, 19 nt, Homo sapiens
  misc_RNA (1)...(19): siRNA sense strand
ugacagcauuuaccuugug

SEQ ID NO: 2106826 - RNA, 19 nt, Homo sapiens
  misc_RNA (1)...(19): siRNA sense strand
ggcuacagcuggaguaugg

SEQ ID NO: 2106827 - RNA, 19 nt, Homo sapiens
  misc_RNA (1)...(19): siRNA sense strand
gagccuggccagcagaauu

SEQ ID NO: 2106828 - RNA, 19 nt, Homo sapiens
  misc_RNA (1)...(19): siRNA sense strand
aaugaaugaucgcuuguau

SEQ ID NO: 2106829 - RNA, 19 nt, Homo sapiens
  misc_RNA (1)...(19): siRNA sense strand
gaagagccaguuucuaugc

SEQ ID NO: 2106830 - RNA, 19 nt, Homo sapiens
  misc_RNA (1)...(19): siRNA sense strand
gaacacaaaacgugcaauu

SEQ ID NO: 2106831 - RNA, 19 nt, Homo sapiens
  misc_RNA (1)...(19): siRNA sense strand
ggagaggaccaguggaauc

SEQ ID NO: 2106832 - RNA, 19 nt, Homo sapiens
  misc_RNA (1)...(19): siRNA sense strand
cacuuuggcuguaaugaau

SEQ ID NO: 2106833 - RNA, 19 nt, Homo sapiens
  misc_RNA (1)...(19): siRNA sense strand
gaagcuggccaacaaguac

SEQ ID NO: 2106834 - RNA, 19 nt, Homo sapiens
  misc_RNA (1)...(19): siRNA sense strand
ggugaccaguggaauauac

SEQ ID NO: 2106835 - RNA, 19 nt, Homo sapiens
  misc_RNA (1)...(19): siRNA sense strand
ccaccuugauguaaugcuu

SEQ ID NO: 2106836 - RNA, 19 nt, Homo sapiens
  misc_RNA (1)...(19): siRNA sense strand
gcuaugacccaguaaugga

SEQ ID NO: 2106837 - RNA, 19 nt, Homo sapiens
  misc_RNA (1)...(19): siRNA sense strand
uguacacaauggagaauau

SEQ ID NO: 2106838 - RNA, 19 nt, Homo sapiens
  misc_RNA (1)...(19): siRNA sense strand
gguuggacaagcauuuaua

SEQ ID NO: 2106839 - RNA, 19 nt, Homo sapiens
  misc_RNA (1)...(19): siRNA sense strand
gcgagacccgcaugcagua

SEQ ID NO: 2106840 - RNA, 19 nt, Homo sapiens
  misc_RNA (1)...(19): siRNA sense strand
ccagcagaauucgcucuaa

SEQ ID NO: 2106841 - RNA, 19 nt, Homo sapiens
  misc_RNA (1)...(19): siRNA sense strand
ggaggaagcagcuguuuug

SEQ ID NO: 2106842 - RNA, 19 nt, Homo sapiens
  misc_RNA (1)...(19): siRNA sense strand
guaugcgccugaccucaug

SEQ ID NO: 2106843 - RNA, 19 nt, Homo sapiens
  misc_RNA (1)...(19): siRNA sense strand
gaaugaauggcgcuaugug

SEQ ID NO: 2106844 - RNA, 19 nt, Homo sapiens
  misc_RNA (1)...(19): siRNA sense strand
gaauucgcucuaacaagaa

SEQ ID NO: 2106845 - RNA, 19 nt, Homo sapiens
  misc_RNA (1)...(19): siRNA sense strand
gccuacaagucaucuacaa

SEQ ID NO: 2106846 - RNA, 19 nt, Homo sapiens
  misc_RNA (1)...(19): siRNA sense strand
ugaaugaucgcuuguaugc

SEQ ID NO: 2106847 - RNA, 19 nt, Homo sapiens
  misc_RNA (1)...(19): siRNA sense strand
guaauugguggaaggaaug

SEQ ID NO: 2106848 - RNA, 19 nt, Homo sapiens
  misc_RNA (1)...(19): siRNA sense strand
cguaauugguggaaggaau

SEQ ID NO: 2106849 - RNA, 19 nt, Homo sapiens
  misc_RNA (1)...(19): siRNA sense strand
gcauuuauacguaauuggu

SEQ ID NO: 2106850 - RNA, 19 nt, Homo sapiens
  misc_RNA (1)...(19): siRNA sense strand
guaugcaauuggaggaaau

SEQ ID NO: 2106851 - RNA, 19 nt, Homo sapiens
  misc_RNA (1)...(19): siRNA sense strand
acaagcaggugugcaagau

SEQ ID NO: 2106852 - RNA, 19 nt, Homo sapiens
  misc_RNA (1)...(19): siRNA sense strand
caguuauucugcccucuug

SEQ ID NO: 2106853 - RNA, 19 nt, Homo sapiens
  misc_RNA (1)...(19): siRNA sense strand
agaucucggugcagaacua

SEQ ID NO: 2106854 - RNA, 19 nt, Homo sapiens
  misc_RNA (1)...(19): siRNA sense strand
aacgugcaauucacacuuu

SEQ ID NO: 2106855 - RNA, 19 nt, Homo sapiens
  misc_RNA (1)...(19): siRNA sense strand
ucagcaagauccugcacau

SEQ ID NO: 2106856 - RNA, 19 nt, Homo sapiens
  misc_RNA (1)...(19): siRNA sense strand
uaugucccauggcuauauu

SEQ ID NO: 2106857 - RNA, 19 nt, Homo sapiens
  misc_RNA (1)...(19): siRNA sense strand
cagcagaauucgcucuaac

SEQ ID NO: 2106858 - RNA, 19 nt, Homo sapiens
  misc_RNA (1)...(19): siRNA sense strand
gaucgcuuguaugcaauug

SEQ ID NO: 2106859 - RNA, 19 nt, Homo sapiens
  misc_RNA (1)...(19): siRNA sense strand
auauugcuaugacccagua

SEQ ID NO: 2106860 - RNA, 19 nt, Homo sapiens
  misc_RNA (1)...(19): siRNA sense strand
gaaaaugcuguuauugguu

SEQ ID NO: 2106861 - RNA, 19 nt, Homo sapiens
  misc_RNA (1)...(19): siRNA sense strand
caauuugguucaguauuac

SEQ ID NO: 2106862 - RNA, 19 nt, Homo sapiens
  misc_RNA (1)...(19): siRNA sense strand
ggaggcuacagcuggagua

SEQ ID NO: 2106863 - RNA, 19 nt, Homo sapiens
  misc_RNA (1)...(19): siRNA sense strand
aaacuucuuguucguguug

SEQ ID NO: 2106864 - RNA, 19 nt, Homo sapiens
  misc_RNA (1)...(19): siRNA sense strand
ucgcuuguaugcaauugga

SEQ ID NO: 2106865 - RNA, 19 nt, Homo sapiens
  misc_RNA (1)...(19): siRNA sense strand
agaagcuggccaacaagua

SEQ ID NO: 2106866 - RNA, 19 nt, Homo sapiens
  misc_RNA (1)...(19): siRNA sense strand
guggagaggaccaguggaa

SEQ ID NO: 2106867 - RNA, 19 nt, Homo sapiens
  misc_RNA (1)...(19): siRNA sense strand
caugaacuaccaccugaug

SEQ ID NO: 2106868 - RNA, 19 nt, Homo sapiens
  misc_RNA (1)...(19): siRNA sense strand
agaacucgaaggagaugua

SEQ ID NO: 2106869 - RNA, 19 nt, Homo sapiens
  misc_RNA (1)...(19): siRNA sense strand
uaaugcuuguggaaugcua

SEQ ID NO: 2106870 - RNA, 19 nt, Homo sapiens
  misc_RNA (1)...(19): siRNA sense strand
acacuuuggcuguaaugaa

SEQ ID NO: 2106871 - RNA, 19 nt, Homo sapiens
  misc_RNA (1)...(19): siRNA sense strand
aagaagacauggaaaauac

SEQ ID NO: 2106872 - RNA, 19 nt, Homo sapiens
  misc_RNA (1)...(19): siRNA sense strand
gauguaaugcuuguggaau

SEQ ID NO: 2106873 - RNA, 19 nt, Homo sapiens
  misc_RNA (1)...(19): siRNA sense strand
uaaugaaugaucgcuugua

SEQ ID NO: 2106874 - RNA, 19 nt, Homo sapiens
  misc_RNA (1)...(19): siRNA sense strand
cgggagcagugcacaaugg

SEQ ID NO: 2106875 - RNA, 19 nt, Homo sapiens
  misc_RNA (1)...(19): siRNA sense strand
acgaaugaauggcgcuaug

SEQ ID NO: 2106876 - RNA, 19 nt, Homo sapiens
  misc_RNA (1)...(19): siRNA sense strand
ccaguggaauccgaaugga

SEQ ID NO: 2106877 - RNA, 19 nt, Homo sapiens
  misc_RNA (1)...(19): siRNA sense strand
gaacucgaaggagauguag

SEQ ID NO: 2106878 - RNA, 19 nt, Homo sapiens
  misc_RNA (1)...(19): siRNA sense strand
gcuauuguccagagaaagg

SEQ ID NO: 2106879 - RNA, 19 nt, Homo sapiens
  misc_RNA (1)...(19): siRNA sense strand
gccgauaugauccucgauu

SEQ ID NO: 2106880 - RNA, 19 nt, Homo sapiens
  misc_RNA (1)...(19): siRNA sense strand
ccauggcuauauugcuaug

SEQ ID NO: 2106881 - RNA, 19 nt, Homo sapiens
  misc_RNA (1)...(19): siRNA sense strand
ucucccaccuugauguaau

SEQ ID NO: 2106882 - RNA, 19 nt, Homo sapiens
  misc_RNA (1)...(19): siRNA sense strand
uguaugcaauuggaggaaa

SEQ ID NO: 2106883 - RNA, 19 nt, Homo sapiens
  misc_RNA (1)...(19): siRNA sense strand
aguggaauccgaauggaaa

SEQ ID NO: 2106884 - RNA, 19 nt, Homo sapiens
  misc_RNA (1)...(19): siRNA sense strand
gacagaacucgaaggagau

SEQ ID NO: 2106885 - RNA, 19 nt, Homo sapiens
  misc_RNA (1)...(19): siRNA sense strand
acaagucaucuacaauaug

SEQ ID NO: 2106886 - RNA, 19 nt, Homo sapiens
  misc_RNA (1)...(19): siRNA sense strand
gcgugcaguuccucaacga

SEQ ID NO: 2106887 - RNA, 19 nt, Homo sapiens
  misc_RNA (1)...(19): siRNA sense strand
guacacaauggagaauaug

SEQ ID NO: 2106888 - RNA, 19 nt, Homo sapiens
  misc_RNA (1)...(19): siRNA sense strand
uaaccuagaaacgaaugaa

SEQ ID NO: 2106889 - RNA, 19 nt, Homo sapiens
  misc_RNA (1)...(19): siRNA sense strand
caggaaagaagagccaguu

SEQ ID NO: 2106890 - RNA, 19 nt, Homo sapiens
  misc_RNA (1)...(19): siRNA sense strand
aauucgcucuaacaagaaa

SEQ ID NO: 2106891 - RNA, 19 nt, Homo sapiens
  misc_RNA (1)...(19): siRNA sense strand
aaacgugcaauucacacuu

SEQ ID NO: 2106892 - RNA, 19 nt, Homo sapiens
  misc_RNA (1)...(19): siRNA sense strand
ccuagaaacgaaugaaugg

SEQ ID NO: 2106893 - RNA, 19 nt, Homo sapiens
  misc_RNA (1)...(19): siRNA sense strand
ggaagggccuccaaacuua

SEQ ID NO: 2106894 - RNA, 19 nt, Homo sapiens
  misc_RNA (1)...(19): siRNA sense strand
ucagaaggcucuagaaaua

SEQ ID NO: 2106895 - RNA, 19 nt, Homo sapiens
  misc_RNA (1)...(19): siRNA sense strand
ccaauuagcugcucagaaa

SEQ ID NO: 2106896 - RNA, 19 nt, Homo sapiens
  misc_RNA (1)...(19): siRNA sense strand
caacuuaccuuuaacauca

SEQ ID NO: 2106897 - RNA, 19 nt, Homo sapiens
  misc_RNA (1)...(19): siRNA sense strand
gaaacaugcugacaauaaa

SEQ ID NO: 2106898 - RNA, 19 nt, Homo sapiens
  misc_RNA (1)...(19): siRNA sense strand
ggacacagccagccauuua

SEQ ID NO: 2106899 - RNA, 19 nt, Homo sapiens
  misc_RNA (1)...(19): siRNA sense strand
ucagaaacaucuccaauuu

SEQ ID NO: 2106900 - RNA, 19 nt, Homo sapiens
  misc_RNA (1)...(19): siRNA sense strand
gaacaucccuuugugaguu

SEQ ID NO: 2106901 - RNA, 19 nt, Homo sapiens
  misc_RNA (1)...(19): siRNA sense strand
gaaauuccaccuaaagaua

SEQ ID NO: 2106902 - RNA, 19 nt, Homo sapiens
  misc_RNA (1)...(19): siRNA sense strand
gagcaaagcuguccaaagg

SEQ ID NO: 2106903 - RNA, 19 nt, Homo sapiens
  misc_RNA (1)...(19): siRNA sense strand
ggaaacaugcugacaauaa

SEQ ID NO: 2106904 - RNA, 19 nt, Homo sapiens
  misc_RNA (1)...(19): siRNA sense strand
gauagaagaugaucaguca

SEQ ID NO: 2106905 - RNA, 19 nt, Homo sapiens
  misc_RNA (1)...(19): siRNA sense strand
gaacuugcuucuacugaaa

SEQ ID NO: 2106906 - RNA, 19 nt, Homo sapiens
  misc_RNA (1)...(19): siRNA sense strand
ggagaacacacucaaguua

SEQ ID NO: 2106907 - RNA, 19 nt, Homo sapiens
  misc_RNA (1)...(19): siRNA sense strand
gaagaaaugacaguuguua

SEQ ID NO: 2106908 - RNA, 19 nt, Homo sapiens
  misc_RNA (1)...(19): siRNA sense strand
ugacuuaccuuuaacauca

SEQ ID NO: 2106909 - RNA, 19 nt, Homo sapiens
  misc_RNA (1)...(19): siRNA sense strand
caagucaccugaugggaua

SEQ ID NO: 2106910 - RNA, 19 nt, Homo sapiens
  misc_RNA (1)...(19): siRNA sense strand
gacaagggcuuuagaaugg

SEQ ID NO: 2106911 - RNA, 19 nt, Homo sapiens
  misc_RNA (1)...(19): siRNA sense strand
caacacagcuuuggaaucu

SEQ ID NO: 2106912 - RNA, 19 nt, Homo sapiens
  misc_RNA (1)...(19): siRNA sense strand
gcagauuucucuuccuauu

SEQ ID NO: 2106913 - RNA, 19 nt, Homo sapiens
  misc_RNA (1)...(19): siRNA sense strand
caaaguaguucuucaugug

SEQ ID NO: 2106914 - RNA, 19 nt, Homo sapiens
  misc_RNA (1)...(19): siRNA sense strand
gaacauaaggagucagaaa

SEQ ID NO: 2106915 - RNA, 19 nt, Homo sapiens
  misc_RNA (1)...(19): siRNA sense strand
ggaaauugcagaagaggua

SEQ ID NO: 2106916 - RNA, 19 nt, Homo sapiens
  misc_RNA (1)...(19): siRNA sense strand
gcuuccaucugcuaaauua

SEQ ID NO: 2106917 - RNA, 19 nt, Homo sapiens
  misc_RNA (1)...(19): siRNA sense strand
gaaggaauugcuauagaua

SEQ ID NO: 2106918 - RNA, 19 nt, Homo sapiens
  misc_RNA (1)...(19): siRNA sense strand
gagaguagcuaggacugua

SEQ ID NO: 2106919 - RNA, 19 nt, Homo sapiens
  misc_RNA (1)...(19): siRNA sense strand
gagcuaggauagaagauga

SEQ ID NO: 2106920 - RNA, 19 nt, Homo sapiens
  misc_RNA (1)...(19): siRNA sense strand
aaagagagcuaggauagaa

SEQ ID NO: 2106921 - RNA, 19 nt, Homo sapiens
  misc_RNA (1)...(19): siRNA sense strand
gaucacaguuccacuuuca

SEQ ID NO: 2106922 - RNA, 19 nt, Homo sapiens
  misc_RNA (1)...(19): siRNA sense strand
uaaauccucuguccuaaug

SEQ ID NO: 2106923 - RNA, 19 nt, Homo sapiens
  misc_RNA (1)...(19): siRNA sense strand
agaagaaucugucuaauac

SEQ ID NO: 2106924 - RNA, 19 nt, Homo sapiens
  misc_RNA (1)...(19): siRNA sense strand
ucagagauaucaaagagaa

SEQ ID NO: 2106925 - RNA, 19 nt, Homo sapiens
  misc_RNA (1)...(19): siRNA sense strand
ggacagauaauaagggaaa

SEQ ID NO: 2106926 - RNA, 19 nt, Homo sapiens
  misc_RNA (1)...(19): siRNA sense strand
gcagaugaauuggaacuga

SEQ ID NO: 2106927 - RNA, 19 nt, Homo sapiens
  misc_RNA (1)...(19): siRNA sense strand
gcauagccauuauaccaaa

SEQ ID NO: 2106928 - RNA, 19 nt, Homo sapiens
  misc_RNA (1)...(19): siRNA sense strand
gauaaauccucuguccuaa

SEQ ID NO: 2106929 - RNA, 19 nt, Homo sapiens
  misc_RNA (1)...(19): siRNA sense strand
aaguagagauucagagaua

SEQ ID NO: 2106930 - RNA, 19 nt, Homo sapiens
  misc_RNA (1)...(19): siRNA sense strand
gaaaguagagauucagaga

SEQ ID NO: 2106931 - RNA, 19 nt, Homo sapiens
  misc_RNA (1)...(19): siRNA sense strand
gaaggccaguuuccaaaug

SEQ ID NO: 2106932 - RNA, 19 nt, Homo sapiens
  misc_RNA (1)...(19): siRNA sense strand
uuagaaaccucacauacuu

SEQ ID NO: 2106933 - RNA, 19 nt, Homo sapiens
  misc_RNA (1)...(19): siRNA sense strand
ucagaaaccucaccgaugu

SEQ ID NO: 2106934 - RNA, 19 nt, Homo sapiens
  misc_RNA (1)...(19): siRNA sense strand
aaacaacgcuggagcucaa

SEQ ID NO: 2106935 - RNA, 19 nt, Homo sapiens
  misc_RNA (1)...(19): siRNA sense strand
uuagaaacuuugccucaua

SEQ ID NO: 2106936 - RNA, 19 nt, Homo sapiens
  misc_RNA (1)...(19): siRNA sense strand
ggcaagaaauugagaagga

SEQ ID NO: 2106937 - RNA, 19 nt, Homo sapiens
  misc_RNA (1)...(19): siRNA sense strand
ugauaguccucccaaguua

SEQ ID NO: 2106938 - RNA, 19 nt, Homo sapiens
  misc_RNA (1)...(19): siRNA sense strand
gcaagaaauugagaaggaa

SEQ ID NO: 2106939 - RNA, 19 nt, Homo sapiens
  misc_RNA (1)...(19): siRNA sense strand
gaugauaagcaguuacuaa

SEQ ID NO: 2106940 - RNA, 19 nt, Homo sapiens
  misc_RNA (1)...(19): siRNA sense strand
cugaagauuugcacaauaa

SEQ ID NO: 2106941 - RNA, 19 nt, Homo sapiens
  misc_RNA (1)...(19): siRNA sense strand
guauccaacuuaccuuuaa

SEQ ID NO: 2106942 - RNA, 19 nt, Homo sapiens
  misc_RNA (1)...(19): siRNA sense strand
ggaauccuguguuaugaug

SEQ ID NO: 2106943 - RNA, 19 nt, Homo sapiens
  misc_RNA (1)...(19): siRNA sense strand
gaacaugccaacuacuuga

SEQ ID NO: 2106944 - RNA, 19 nt, Homo sapiens
  misc_RNA (1)...(19): siRNA sense strand
acagagggcuccagcauau

SEQ ID NO: 2106945 - RNA, 19 nt, Homo sapiens
  misc_RNA (1)...(19): siRNA sense strand
cagcagcucuguggaaauu

SEQ ID NO: 2106946 - RNA, 19 nt, Homo sapiens
  misc_RNA (1)...(19): siRNA sense strand
gagaacacacucaaguuaa

SEQ ID NO: 2106947 - RNA, 19 nt, Homo sapiens
  misc_RNA (1)...(19): siRNA sense strand
gcccucagcugcagugauu

SEQ ID NO: 2106948 - RNA, 19 nt, Homo sapiens
  misc_RNA (1)...(19): siRNA sense strand
caagcuccauggaugauaa

SEQ ID NO: 2106949 - RNA, 19 nt, Homo sapiens
  misc_RNA (1)...(19): siRNA sense strand
gaagagguagagacuagua

SEQ ID NO: 2106950 - RNA, 19 nt, Homo sapiens
  misc_RNA (1)...(19): siRNA sense strand
ggaauuaacaacagauuuc

SEQ ID NO: 2106951 - RNA, 19 nt, Homo sapiens
  misc_RNA (1)...(19): siRNA sense strand
gaauuggagucagaggaua

SEQ ID NO: 2106952 - RNA, 19 nt, Homo sapiens
  misc_RNA (1)...(19): siRNA sense strand
gaacugggcaugaaacaag

SEQ ID NO: 2106953 - RNA, 19 nt, Homo sapiens
  misc_RNA (1)...(19): siRNA sense strand
gguagaaauuccaccuaaa

SEQ ID NO: 2106954 - RNA, 19 nt, Homo sapiens
  misc_RNA (1)...(19): siRNA sense strand
acacucaaguuaaauguga

SEQ ID NO: 2106955 - RNA, 19 nt, Homo sapiens
  misc_RNA (1)...(19): siRNA sense strand
aaacugaacaugccaacua

SEQ ID NO: 2106956 - RNA, 19 nt, Homo sapiens
  misc_RNA (1)...(19): siRNA sense strand
aaacagaaccuuggaaaga

SEQ ID NO: 2106957 - RNA, 19 nt, Homo sapiens
  misc_RNA (1)...(19): siRNA sense strand
gaaagucaccuucuguauc

SEQ ID NO: 2106958 - RNA, 19 nt, Homo sapiens
  misc_RNA (1)...(19): siRNA sense strand
ccaaauagcaccuccugaa

SEQ ID NO: 2106959 - RNA, 19 nt, Homo sapiens
  misc_RNA (1)...(19): siRNA sense strand
cagaagagguagagacuag

SEQ ID NO: 2106960 - RNA, 19 nt, Homo sapiens
  misc_RNA (1)...(19): siRNA sense strand
gaagauaacuuggaauccu

SEQ ID NO: 2106961 - RNA, 19 nt, Homo sapiens
  misc_RNA (1)...(19): siRNA sense strand
aaacaaagcacuaguacau

SEQ ID NO: 2106962 - RNA, 19 nt, Homo sapiens
  misc_RNA (1)...(19): siRNA sense strand
cagcagaaccuauuucaug

SEQ ID NO: 2106963 - RNA, 19 nt, Homo sapiens
  misc_RNA (1)...(19): siRNA sense strand
agaacacacucaaguuaaa

SEQ ID NO: 2106964 - RNA, 19 nt, Homo sapiens
  misc_RNA (1)...(19): siRNA sense strand
gugcauaguucugaugaaa

SEQ ID NO: 2106965 - RNA, 19 nt, Homo sapiens
  misc_RNA (1)...(19): siRNA sense strand
aggcuaagcucuuugcaaa

SEQ ID NO: 2106966 - RNA, 19 nt, Homo sapiens
  misc_RNA (1)...(19): siRNA sense strand
agaaggcucuagaaauaaa

SEQ ID NO: 2106967 - RNA, 19 nt, Homo sapiens
  misc_RNA (1)...(19): siRNA sense strand
ugaggaggcugaaagucua

SEQ ID NO: 2106968 - RNA, 19 nt, Homo sapiens
  misc_RNA (1)...(19): siRNA sense strand
gcagcucuguggaaauuau

SEQ ID NO: 2106969 - RNA, 19 nt, Homo sapiens
  misc_RNA (1)...(19): siRNA sense strand
gugcagauuucucuuccua

SEQ ID NO: 2106970 - RNA, 19 nt, Homo sapiens
  misc_RNA (1)...(19): siRNA sense strand
ucacagcccugaggucaaa

SEQ ID NO: 2106971 - RNA, 19 nt, Homo sapiens
  misc_RNA (1)...(19): siRNA sense strand
caaaugagaaagcgagaaa

SEQ ID NO: 2106972 - RNA, 19 nt, Homo sapiens
  misc_RNA (1)...(19): siRNA sense strand
gaaacagggcagauaauuc

SEQ ID NO: 2106973 - RNA, 19 nt, Homo sapiens
  misc_RNA (1)...(19): siRNA sense strand
guacuacagcagucucuua

SEQ ID NO: 2106974 - RNA, 19 nt, Homo sapiens
  misc_RNA (1)...(19): siRNA sense strand
ggaauuaucugucuuuucu

SEQ ID NO: 2106975 - RNA, 19 nt, Homo sapiens
  misc_RNA (1)...(19): siRNA sense strand
ucagaagcaucucuuaugu

SEQ ID NO: 2106976 - RNA, 19 nt, Homo sapiens
  misc_RNA (1)...(19): siRNA sense strand
gaaacuuugccucauauug

SEQ ID NO: 2106977 - RNA, 19 nt, Homo sapiens
  misc_RNA (1)...(19): siRNA sense strand
gaagucccaucugaucaaa

SEQ ID NO: 2106978 - RNA, 19 nt, Homo sapiens
  misc_RNA (1)...(19): siRNA sense strand
cagaaccuauuucauguug

SEQ ID NO: 2106979 - RNA, 19 nt, Homo sapiens
  misc_RNA (1)...(19): siRNA sense strand
gaaaugaaaguagagauuc

SEQ ID NO: 2106980 - RNA, 19 nt, Homo sapiens
  misc_RNA (1)...(19): siRNA sense strand
gcccuacccugcuucaauu

SEQ ID NO: 2106981 - RNA, 19 nt, Homo sapiens
  misc_RNA (1)...(19): siRNA sense strand
gcugaaagucuaaccaauu

SEQ ID NO: 2106982 - RNA, 19 nt, Homo sapiens
  misc_RNA (1)...(19): siRNA sense strand
aagguuagccaacauguua

SEQ ID NO: 2106983 - RNA, 19 nt, Homo sapiens
  misc_RNA (1)...(19): siRNA sense strand
ccucaggugucugugauua

SEQ ID NO: 2106984 - RNA, 19 nt, Homo sapiens
  misc_RNA (1)...(19): siRNA sense strand
ccaggacccucgcagauau

SEQ ID NO: 2106985 - RNA, 19 nt, Homo sapiens
  misc_RNA (1)...(19): siRNA sense strand
ggacaagcaauauaucuca

SEQ ID NO: 2106986 - RNA, 19 nt, Homo sapiens
  misc_RNA (1)...(19): siRNA sense strand
ggauaaggcaagaaauuga

SEQ ID NO: 2106987 - RNA, 19 nt, Homo sapiens
  misc_RNA (1)...(19): siRNA sense strand
aaacuuugccucauauuga

SEQ ID NO: 2106988 - RNA, 19 nt, Homo sapiens
  misc_RNA (1)...(19): siRNA sense strand
gacacaaccuguagcaauc

SEQ ID NO: 2106989 - RNA, 19 nt, Homo sapiens
  misc_RNA (1)...(19): siRNA sense strand
ugaccagaaugaaaugaaa

SEQ ID NO: 2106990 - RNA, 19 nt, Homo sapiens
  misc_RNA (1)...(19): siRNA sense strand
ccaauaugcccaugaaaga

SEQ ID NO: 2106991 - RNA, 19 nt, Homo sapiens
  misc_RNA (1)...(19): siRNA sense strand
caacaggcaucuugaacag

SEQ ID NO: 2106992 - RNA, 19 nt, Homo sapiens
  misc_RNA (1)...(19): siRNA sense strand
agagagaaacguugaaauu

SEQ ID NO: 2106993 - RNA, 19 nt, Homo sapiens
  misc_RNA (1)...(19): siRNA sense strand
ggaagaaccugaaacaaau

SEQ ID NO: 2106994 - RNA, 19 nt, Homo sapiens
  misc_RNA (1)...(19): siRNA sense strand
gaaguauucugauguuuca

SEQ ID NO: 2106995 - RNA, 19 nt, Homo sapiens
  misc_RNA (1)...(19): siRNA sense strand
gaacgauccuaacuacuuc

SEQ ID NO: 2106996 - RNA, 19 nt, Homo sapiens
  misc_RNA (1)...(19): siRNA sense strand
gaacagaaccuggaagaac

SEQ ID NO: 2106997 - RNA, 19 nt, Homo sapiens
  misc_RNA (1)...(19): siRNA sense strand
uggaagaaccugaaacaaa

SEQ ID NO: 2106998 - RNA, 19 nt, Homo sapiens
  misc_RNA (1)...(19): siRNA sense strand
ggccagcccuucccacaau

SEQ ID NO: 2106999 - RNA, 19 nt, Homo sapiens
  misc_RNA (1)...(19): siRNA sense strand
caaauccucgcuucugaaa

SEQ ID NO: 2107000 - RNA, 19 nt, Homo sapiens
  misc_RNA (1)...(19): siRNA sense strand
ugaacgauccuaacuacuu

SEQ ID NO: 2107001 - RNA, 19 nt, Homo sapiens
  misc_RNA (1)...(19): siRNA sense strand
gaaccuggaagaaccugaa

SEQ ID NO: 2107002 - RNA, 19 nt, Homo sapiens
  misc_RNA (1)...(19): siRNA sense strand
uaagccagcuaagaaguau

SEQ ID NO: 2107003 - RNA, 19 nt, Homo sapiens
  misc_RNA (1)...(19): siRNA sense strand
uuaaggaucccaacuuugu

SEQ ID NO: 2107004 - RNA, 19 nt, Homo sapiens
  misc_RNA (1)...(19): siRNA sense strand
cgcaguagcuggcaagaag

SEQ ID NO: 2107005 - RNA, 19 nt, Homo sapiens
  misc_RNA (1)...(19): siRNA sense strand
aacaaauccucgcuucuga

SEQ ID NO: 2107006 - RNA, 19 nt, Homo sapiens
  misc_RNA (1)...(19): siRNA sense strand
gaagccaugagugagaaua

SEQ ID NO: 2107007 - RNA, 19 nt, Homo sapiens
  misc_RNA (1)...(19): siRNA sense strand
gaagaaccugaaacaaauc

SEQ ID NO: 2107008 - RNA, 19 nt, Homo sapiens
  misc_RNA (1)...(19): siRNA sense strand
caacugaacgauccuaacu

SEQ ID NO: 2107009 - RNA, 19 nt, Homo sapiens
  misc_RNA (1)...(19): siRNA sense strand
aaacaaauccucgcuucug

SEQ ID NO: 2107010 - RNA, 19 nt, Homo sapiens
  misc_RNA (1)...(19): siRNA sense strand
auuuaaggaucccaacuuu

SEQ ID NO: 2107011 - RNA, 19 nt, Homo sapiens
  misc_RNA (1)...(19): siRNA sense strand
gaaacaaauccucgcuucu

SEQ ID NO: 2107012 - RNA, 19 nt, Homo sapiens
  misc_RNA (1)...(19): siRNA sense strand
gaauaguccggaacagcaa

SEQ ID NO: 2107013 - RNA, 19 nt, Homo sapiens
  misc_RNA (1)...(19): siRNA sense strand
aauccucgcuucugaaagg

SEQ ID NO: 2107014 - RNA, 19 nt, Homo sapiens
  misc_RNA (1)...(19): siRNA sense strand
uuaagccagcuaagaagua

SEQ ID NO: 2107015 - RNA, 19 nt, Homo sapiens
  misc_RNA (1)...(19): siRNA sense strand
ccuuuaagccagcuaagaa

SEQ ID NO: 2107016 - RNA, 19 nt, Homo sapiens
  misc_RNA (1)...(19): siRNA sense strand
aauggugcccucugaguuu

SEQ ID NO: 2107017 - RNA, 19 nt, Homo sapiens
  misc_RNA (1)...(19): siRNA sense strand
ggcuauggcgccaguaaga

SEQ ID NO: 2107018 - RNA, 19 nt, Homo sapiens
  misc_RNA (1)...(19): siRNA sense strand
acugaacgauccuaacuac

SEQ ID NO: 2107019 - RNA, 19 nt, Homo sapiens
  misc_RNA (1)...(19): siRNA sense strand
uggaagccaugagugagaa

SEQ ID NO: 2107020 - RNA, 19 nt, Homo sapiens
  misc_RNA (1)...(19): siRNA sense strand
aagaacagaaccuggaaga

SEQ ID NO: 2107021 - RNA, 19 nt, Homo sapiens
  misc_RNA (1)...(19): siRNA sense strand
gcaguagcuggcaagaaga

SEQ ID NO: 2107022 - RNA, 19 nt, Homo sapiens
  misc_RNA (1)...(19): siRNA sense strand
cauuuaaggaucccaacuu

SEQ ID NO: 2107023 - RNA, 19 nt, Homo sapiens
  misc_RNA (1)...(19): siRNA sense strand
gcuauggcgccaguaagaa

SEQ ID NO: 2107024 - RNA, 19 nt, Homo sapiens
  misc_RNA (1)...(19): siRNA sense strand
guccggaacagcaagaaga

SEQ ID NO: 2107025 - RNA, 19 nt, Homo sapiens
  misc_RNA (1)...(19): siRNA sense strand
gcuccuccauccuuuaagc

SEQ ID NO: 2107026 - RNA, 19 nt, Homo sapiens
  misc_RNA (1)...(19): siRNA sense strand
aaauggugcccucugaguu

SEQ ID NO: 2107027 - RNA, 19 nt, Homo sapiens
  misc_RNA (1)...(19): siRNA sense strand
agccaugagugagaauaaa

SEQ ID NO: 2107028 - RNA, 19 nt, Homo sapiens
  misc_RNA (1)...(19): siRNA sense strand
auggugcccucugaguuua

SEQ ID NO: 2107029 - RNA, 19 nt, Homo sapiens
  misc_RNA (1)...(19): siRNA sense strand
acaaauccucgcuucugaa

SEQ ID NO: 2107030 - RNA, 19 nt, Homo sapiens
  misc_RNA (1)...(19): siRNA sense strand
agaagaacagaaccuggaa

SEQ ID NO: 2107031 - RNA, 19 nt, Homo sapiens
  misc_RNA (1)...(19): siRNA sense strand
ggaagaaccugaaacaaau

SEQ ID NO: 2107032 - RNA, 19 nt, Homo sapiens
  misc_RNA (1)...(19): siRNA sense strand
gaaguauucugauguuuca

SEQ ID NO: 2107033 - RNA, 19 nt, Homo sapiens
  misc_RNA (1)...(19): siRNA sense strand
gaacgauccuaacuacuuc

SEQ ID NO: 2107034 - RNA, 19 nt, Homo sapiens
  misc_RNA (1)...(19): siRNA sense strand
gaacagaaccuggaagaac

SEQ ID NO: 2107035 - RNA, 19 nt, Homo sapiens
  misc_RNA (1)...(19): siRNA sense strand
uggaagaaccugaaacaaa

SEQ ID NO: 2107036 - RNA, 19 nt, Homo sapiens
  misc_RNA (1)...(19): siRNA sense strand
ggccagcccuucccacaau

SEQ ID NO: 2107037 - RNA, 19 nt, Homo sapiens
  misc_RNA (1)...(19): siRNA sense strand
caaauccucgcuucugaaa

SEQ ID NO: 2107038 - RNA, 19 nt, Homo sapiens
  misc_RNA (1)...(19): siRNA sense strand
ugaacgauccuaacuacuu

SEQ ID NO: 2107039 - RNA, 19 nt, Homo sapiens
  misc_RNA (1)...(19): siRNA sense strand
gaaccuggaagaaccugaa

SEQ ID NO: 2107040 - RNA, 19 nt, Homo sapiens
  misc_RNA (1)...(19): siRNA sense strand
uaagccagcuaagaaguau

SEQ ID NO: 2107041 - RNA, 19 nt, Homo sapiens
  misc_RNA (1)...(19): siRNA sense strand
uuaaggaucccaacuuugu

SEQ ID NO: 2107042 - RNA, 19 nt, Homo sapiens
  misc_RNA (1)...(19): siRNA sense strand
cgcaguagcuggcaagaag

SEQ ID NO: 2107043 - RNA, 19 nt, Homo sapiens
  misc_RNA (1)...(19): siRNA sense strand
aacaaauccucgcuucuga

SEQ ID NO: 2107044 - RNA, 19 nt, Homo sapiens
  misc_RNA (1)...(19): siRNA sense strand
gaagccaugagugagaaua

SEQ ID NO: 2107045 - RNA, 19 nt, Homo sapiens
  misc_RNA (1)...(19): siRNA sense strand
gaagaaccugaaacaaauc

SEQ ID NO: 2107046 - RNA, 19 nt, Homo sapiens
  misc_RNA (1)...(19): siRNA sense strand
caacugaacgauccuaacu

SEQ ID NO: 2107047 - RNA, 19 nt, Homo sapiens
  misc_RNA (1)...(19): siRNA sense strand
aaacaaauccucgcuucug

SEQ ID NO: 2107048 - RNA, 19 nt, Homo sapiens
  misc_RNA (1)...(19): siRNA sense strand
auuuaaggaucccaacuuu

SEQ ID NO: 2107049 - RNA, 19 nt, Homo sapiens
  misc_RNA (1)...(19): siRNA sense strand
gaaacaaauccucgcuucu

SEQ ID NO: 2107050 - RNA, 19 nt, Homo sapiens
  misc_RNA (1)...(19): siRNA sense strand
gaauaguccggaacagcaa

SEQ ID NO: 2107051 - RNA, 19 nt, Homo sapiens
  misc_RNA (1)...(19): siRNA sense strand
aauccucgcuucugaaagg

SEQ ID NO: 2107052 - RNA, 19 nt, Homo sapiens
  misc_RNA (1)...(19): siRNA sense strand
uuaagccagcuaagaagua

SEQ ID NO: 2107053 - RNA, 19 nt, Homo sapiens
  misc_RNA (1)...(19): siRNA sense strand
ccuuuaagccagcuaagaa

SEQ ID NO: 2107054 - RNA, 19 nt, Homo sapiens
  misc_RNA (1)...(19): siRNA sense strand
aauggugcccucugaguuu

SEQ ID NO: 2107055 - RNA, 19 nt, Homo sapiens
  misc_RNA (1)...(19): siRNA sense strand
ggcuauggcgccaguaaga

SEQ ID NO: 2107056 - RNA, 19 nt, Homo sapiens
  misc_RNA (1)...(19): siRNA sense strand
acugaacgauccuaacuac

SEQ ID NO: 2107057 - RNA, 19 nt, Homo sapiens
  misc_RNA (1)...(19): siRNA sense strand
uggaagccaugagugagaa

SEQ ID NO: 2107058 - RNA, 19 nt, Homo sapiens
  misc_RNA (1)...(19): siRNA sense strand
aagaacagaaccuggaaga

SEQ ID NO: 2107059 - RNA, 19 nt, Homo sapiens
  misc_RNA (1)...(19): siRNA sense strand
gcaguagcuggcaagaaga

SEQ ID NO: 2107060 - RNA, 19 nt, Homo sapiens
  misc_RNA (1)...(19): siRNA sense strand
cauuuaaggaucccaacuu

SEQ ID NO: 2107061 - RNA, 19 nt, Homo sapiens
  misc_RNA (1)...(19): siRNA sense strand
gcuauggcgccaguaagaa

SEQ ID NO: 2107062 - RNA, 19 nt, Homo sapiens
  misc_RNA (1)...(19): siRNA sense strand
guccggaacagcaagaaga

SEQ ID NO: 2107063 - RNA, 19 nt, Homo sapiens
  misc_RNA (1)...(19): siRNA sense strand
gcuccuccauccuuuaagc

SEQ ID NO: 2107064 - RNA, 19 nt, Homo sapiens
  misc_RNA (1)...(19): siRNA sense strand
aaauggugcccucugaguu

SEQ ID NO: 2107065 - RNA, 19 nt, Homo sapiens
  misc_RNA (1)...(19): siRNA sense strand
agccaugagugagaauaaa

SEQ ID NO: 2107066 - RNA, 19 nt, Homo sapiens
  misc_RNA (1)...(19): siRNA sense strand
auggugcccucugaguuua

SEQ ID NO: 2107067 - RNA, 19 nt, Homo sapiens
  misc_RNA (1)...(19): siRNA sense strand
acaaauccucgcuucugaa

SEQ ID NO: 2107068 - RNA, 19 nt, Homo sapiens
  misc_RNA (1)...(19): siRNA sense strand
agaagaacagaaccuggaa

SEQ ID NO: 2107069 - RNA, 19 nt, Homo sapiens
  misc_RNA (1)...(19): siRNA sense strand
agacaaagcuucuucuaaa

SEQ ID NO: 2107070 - RNA, 19 nt, Homo sapiens
  misc_RNA (1)...(19): siRNA sense strand
ggaacaucaucaucuauua

SEQ ID NO: 2107071 - RNA, 19 nt, Homo sapiens
  misc_RNA (1)...(19): siRNA sense strand
ccacagaccuacuaucaaa

SEQ ID NO: 2107072 - RNA, 19 nt, Homo sapiens
  misc_RNA (1)...(19): siRNA sense strand
caagaagaauugcacauga

SEQ ID NO: 2107073 - RNA, 19 nt, Homo sapiens
  misc_RNA (1)...(19): siRNA sense strand
gaagaacaaucaguaguau

SEQ ID NO: 2107074 - RNA, 19 nt, Homo sapiens
  misc_RNA (1)...(19): siRNA sense strand
gaacagcagguauccagua

SEQ ID NO: 2107075 - RNA, 19 nt, Homo sapiens
  misc_RNA (1)...(19): siRNA sense strand
cagaaucccuuauagcauu

SEQ ID NO: 2107076 - RNA, 19 nt, Homo sapiens
  misc_RNA (1)...(19): siRNA sense strand
gagcaggagucauuugaga

SEQ ID NO: 2107077 - RNA, 19 nt, Homo sapiens
  misc_RNA (1)...(19): siRNA sense strand
aaauggaacuggaaauuga

SEQ ID NO: 2107078 - RNA, 19 nt, Homo sapiens
  misc_RNA (1)...(19): siRNA sense strand
uaagacacauccagaauca

SEQ ID NO: 2107079 - RNA, 19 nt, Homo sapiens
  misc_RNA (1)...(19): siRNA sense strand
gauaagauaccaucagaga

SEQ ID NO: 2107080 - RNA, 19 nt, Homo sapiens
  misc_RNA (1)...(19): siRNA sense strand
ugaaggaaaugucagauca

SEQ ID NO: 2107081 - RNA, 19 nt, Homo sapiens
  misc_RNA (1)...(19): siRNA sense strand
agacaucuuuguuggauuu

SEQ ID NO: 2107082 - RNA, 19 nt, Homo sapiens
  misc_RNA (1)...(19): siRNA sense strand
caggaagccuaaaggauuu

SEQ ID NO: 2107083 - RNA, 19 nt, Homo sapiens
  misc_RNA (1)...(19): siRNA sense strand
gagacaaagcuucuucuaa

SEQ ID NO: 2107084 - RNA, 19 nt, Homo sapiens
  misc_RNA (1)...(19): siRNA sense strand
cagcagguauccaguagaa

SEQ ID NO: 2107085 - RNA, 19 nt, Homo sapiens
  misc_RNA (1)...(19): siRNA sense strand
gugcaucauugaaggauuu

SEQ ID NO: 2107086 - RNA, 19 nt, Homo sapiens
  misc_RNA (1)...(19): siRNA sense strand
uuaaagaacuggccagagu

SEQ ID NO: 2107087 - RNA, 19 nt, Homo sapiens
  misc_RNA (1)...(19): siRNA sense strand
gcacugcaacccauugaaa

SEQ ID NO: 2107088 - RNA, 19 nt, Homo sapiens
  misc_RNA (1)...(19): siRNA sense strand
uagauaagauaccaucaga

SEQ ID NO: 2107089 - RNA, 19 nt, Homo sapiens
  misc_RNA (1)...(19): siRNA sense strand
aauaaagagugcaucauug

SEQ ID NO: 2107090 - RNA, 19 nt, Homo sapiens
  misc_RNA (1)...(19): siRNA sense strand
ugaagaacaaucaguagua

SEQ ID NO: 2107091 - RNA, 19 nt, Homo sapiens
  misc_RNA (1)...(19): siRNA sense strand
gaacagaaugaacugauca

SEQ ID NO: 2107092 - RNA, 19 nt, Homo sapiens
  misc_RNA (1)...(19): siRNA sense strand
caccaugucucucucagaa

SEQ ID NO: 2107093 - RNA, 19 nt, Homo sapiens
  misc_RNA (1)...(19): siRNA sense strand
ucagagaccacaacaugua

SEQ ID NO: 2107094 - RNA, 19 nt, Homo sapiens
  misc_RNA (1)...(19): siRNA sense strand
ggaagacaguuggguuuca

SEQ ID NO: 2107095 - RNA, 19 nt, Homo sapiens
  misc_RNA (1)...(19): siRNA sense strand
ccagaaucaugcaguuauu

SEQ ID NO: 2107096 - RNA, 19 nt, Homo sapiens
  misc_RNA (1)...(19): siRNA sense strand
cacaggagauucaguagau

SEQ ID NO: 2107097 - RNA, 19 nt, Homo sapiens
  misc_RNA (1)...(19): siRNA sense strand
caucagagaccacaacaug

SEQ ID NO: 2107098 - RNA, 19 nt, Homo sapiens
  misc_RNA (1)...(19): siRNA sense strand
gaccacagaccuacuauca

SEQ ID NO: 2107099 - RNA, 19 nt, Homo sapiens
  misc_RNA (1)...(19): siRNA sense strand
guauagagaaugccaagaa

SEQ ID NO: 2107100 - RNA, 19 nt, Homo sapiens
  misc_RNA (1)...(19): siRNA sense strand
gaaaaugccacaagaagaa

SEQ ID NO: 2107101 - RNA, 19 nt, Homo sapiens
  misc_RNA (1)...(19): siRNA sense strand
gauagaaagcagcaacuga

SEQ ID NO: 2107102 - RNA, 19 nt, Homo sapiens
  misc_RNA (1)...(19): siRNA sense strand
ucaaugcuguggucauaga

SEQ ID NO: 2107103 - RNA, 19 nt, Homo sapiens
  misc_RNA (1)...(19): siRNA sense strand
gcccaguggucaugucaaa

SEQ ID NO: 2107104 - RNA, 19 nt, Homo sapiens
  misc_RNA (1)...(19): siRNA sense strand
agaagaagaucaggcaguu

SEQ ID NO: 2107105 - RNA, 19 nt, Homo sapiens
  misc_RNA (1)...(19): siRNA sense strand
gaggaagacaguuggguuu

SEQ ID NO: 2107106 - RNA, 19 nt, Homo sapiens
  misc_RNA (1)...(19): siRNA sense strand
aagaagaauugcacaugaa

SEQ ID NO: 2107107 - RNA, 19 nt, Homo sapiens
  misc_RNA (1)...(19): siRNA sense strand
ggagacaaagcuucuucua

SEQ ID NO: 2107108 - RNA, 19 nt, Homo sapiens
  misc_RNA (1)...(19): siRNA sense strand
gaagacaguuggguuucau

SEQ ID NO: 2107109 - RNA, 19 nt, Homo sapiens
  misc_RNA (1)...(19): siRNA sense strand
ggaaggagaggaagacagu

SEQ ID NO: 2107110 - RNA, 19 nt, Homo sapiens
  misc_RNA (1)...(19): siRNA sense strand
acaggaagccuaaaggauu

SEQ ID NO: 2107111 - RNA, 19 nt, Homo sapiens
  misc_RNA (1)...(19): siRNA sense strand
gcccaaaccucagcgcuau

SEQ ID NO: 2107112 - RNA, 19 nt, Homo sapiens
  misc_RNA (1)...(19): siRNA sense strand
gcacaccaccucccgguau

SEQ ID NO: 2107113 - RNA, 19 nt, Homo sapiens
  misc_RNA (1)...(19): siRNA sense strand
ggaaaugucagaucaagac

SEQ ID NO: 2107114 - RNA, 19 nt, Homo sapiens
  misc_RNA (1)...(19): siRNA sense strand
gguaugagacaucuuuguu

SEQ ID NO: 2107115 - RNA, 19 nt, Homo sapiens
  misc_RNA (1)...(19): siRNA sense strand
ggaagugacagaggaaaga

SEQ ID NO: 2107116 - RNA, 19 nt, Homo sapiens
  misc_RNA (1)...(19): siRNA sense strand
agucaaugcuguggucaua

SEQ ID NO: 2107117 - RNA, 19 nt, Homo sapiens
  misc_RNA (1)...(19): siRNA sense strand
gcucuucagcuacaguaua

SEQ ID NO: 2107118 - RNA, 19 nt, Homo sapiens
  misc_RNA (1)...(19): siRNA sense strand
aaagacgcauugcaaacuu

SEQ ID NO: 2107119 - RNA, 19 nt, Homo sapiens
  misc_RNA (1)...(19): siRNA sense strand
cugaagaguuggaggagaa

SEQ ID NO: 2107120 - RNA, 19 nt, Homo sapiens
  misc_RNA (1)...(19): siRNA sense strand
caacaggaagccuaaagga

SEQ ID NO: 2107121 - RNA, 19 nt, Homo sapiens
  misc_RNA (1)...(19): siRNA sense strand
gccuguaucagaaauauuu

SEQ ID NO: 2107122 - RNA, 19 nt, Homo sapiens
  misc_RNA (1)...(19): siRNA sense strand
gcacaggagauucaguaga

SEQ ID NO: 2107123 - RNA, 19 nt, Homo sapiens
  misc_RNA (1)...(19): siRNA sense strand
gaaaauggaacuggaaauu

SEQ ID NO: 2107124 - RNA, 19 nt, Homo sapiens
  misc_RNA (1)...(19): siRNA sense strand
gcaacccauugaaacuuug

SEQ ID NO: 2107125 - RNA, 19 nt, Homo sapiens
  misc_RNA (1)...(19): siRNA sense strand
gaacuuggugcugcuagaa

SEQ ID NO: 2107126 - RNA, 19 nt, Homo sapiens
  misc_RNA (1)...(19): siRNA sense strand
gaacuggccagaguaagug

SEQ ID NO: 2107127 - RNA, 19 nt, Homo sapiens
  misc_RNA (1)...(19): siRNA sense strand
uaaagaacuggccagagua

SEQ ID NO: 2107128 - RNA, 19 nt, Homo sapiens
  misc_RNA (1)...(19): siRNA sense strand
aagacgcauugcaaacuua

SEQ ID NO: 2107129 - RNA, 19 nt, Homo sapiens
  misc_RNA (1)...(19): siRNA sense strand
uccaaaagcugauguuaaa

SEQ ID NO: 2107130 - RNA, 19 nt, Homo sapiens
  misc_RNA (1)...(19): siRNA sense strand
gaaggaaaugucagaucaa

SEQ ID NO: 2107131 - RNA, 19 nt, Homo sapiens
  misc_RNA (1)...(19): siRNA sense strand
gcaguuggaagaacagaau

SEQ ID NO: 2107132 - RNA, 19 nt, Homo sapiens
  misc_RNA (1)...(19): siRNA sense strand
ccaaacaguggagagaaua

SEQ ID NO: 2107133 - RNA, 19 nt, Homo sapiens
  misc_RNA (1)...(19): siRNA sense strand
ccaguaacccuucaucauc

SEQ ID NO: 2107134 - RNA, 19 nt, Homo sapiens
  misc_RNA (1)...(19): siRNA sense strand
cuucuaagccuguaucaga

SEQ ID NO: 2107135 - RNA, 19 nt, Homo sapiens
  misc_RNA (1)...(19): siRNA sense strand
ugagacaucuuuguuggau

SEQ ID NO: 2107136 - RNA, 19 nt, Homo sapiens
  misc_RNA (1)...(19): siRNA sense strand
cgacuggauuacaauuguu

SEQ ID NO: 2107137 - RNA, 19 nt, Homo sapiens
  misc_RNA (1)...(19): siRNA sense strand
gacaaagcuucuucuaaaa

SEQ ID NO: 2107138 - RNA, 19 nt, Homo sapiens
  misc_RNA (1)...(19): siRNA sense strand
aaagaacuggccagaguaa

SEQ ID NO: 2107139 - RNA, 19 nt, Homo sapiens
  misc_RNA (1)...(19): siRNA sense strand
gagaccacaacauguaauu

SEQ ID NO: 2107140 - RNA, 19 nt, Homo sapiens
  misc_RNA (1)...(19): siRNA sense strand
gaagaacagaaugaacuga

SEQ ID NO: 2107141 - RNA, 19 nt, Homo sapiens
  misc_RNA (1)...(19): siRNA sense strand
aagcugagcaggagucauu

SEQ ID NO: 2107142 - RNA, 19 nt, Homo sapiens
  misc_RNA (1)...(19): siRNA sense strand
ggaagaacagaaugaacug

SEQ ID NO: 2107143 - RNA, 19 nt, Homo sapiens
  misc_RNA (1)...(19): siRNA sense strand
ugacagccauccuacaaac

SEQ ID NO: 2107144 - RNA, 19 nt, Homo sapiens
  misc_RNA (1)...(19): siRNA sense strand
gaauugcacaugaaggaau

SEQ ID NO: 2107145 - RNA, 19 nt, Homo sapiens
  misc_RNA (1)...(19): siRNA sense strand
gaacuucuaagccuguauc

SEQ ID NO: 2107146 - RNA, 19 nt, Homo sapiens
  misc_RNA (1)...(19): siRNA sense strand
auaaagagugcaucauuga

SEQ ID NO: 2107147 - RNA, 19 nt, Homo sapiens
  misc_RNA (1)...(19): siRNA sense strand
cauccagaaucaugcaguu

SEQ ID NO: 2107148 - RNA, 19 nt, Homo sapiens
  misc_RNA (1)...(19): siRNA sense strand
gaagaucaggcaguuggaa

SEQ ID NO: 2107149 - RNA, 19 nt, Homo sapiens
  misc_RNA (1)...(19): siRNA sense strand
gaaauaaagagugcaucau

SEQ ID NO: 2107150 - RNA, 19 nt, Homo sapiens
  misc_RNA (1)...(19): siRNA sense strand
caugguacuuuccgacuca

SEQ ID NO: 2107151 - RNA, 19 nt, Homo sapiens
  misc_RNA (1)...(19): siRNA sense strand
guaugagacaucuuuguug

SEQ ID NO: 2107152 - RNA, 19 nt, Homo sapiens
  misc_RNA (1)...(19): siRNA sense strand
caccacagccucaccauca

SEQ ID NO: 2107153 - RNA, 19 nt, Homo sapiens
  misc_RNA (1)...(19): siRNA sense strand
cuuggaacaucaucaucua

SEQ ID NO: 2107154 - RNA, 19 nt, Homo sapiens
  misc_RNA (1)...(19): siRNA sense strand
ugcaacccauugaaacuuu

SEQ ID NO: 2107155 - RNA, 19 nt, Homo sapiens
  misc_RNA (1)...(19): siRNA sense strand
aggagaagcucaccauguc

SEQ ID NO: 2107156 - RNA, 19 nt, Homo sapiens
  misc_RNA (1)...(19): siRNA sense strand
cagggugacugaugcuuca

SEQ ID NO: 2107157 - RNA, 19 nt, Homo sapiens
  misc_RNA (1)...(19): siRNA sense strand
cagcuacaguauagagaau

SEQ ID NO: 2107158 - RNA, 19 nt, Homo sapiens
  misc_RNA (1)...(19): siRNA sense strand
uaaagagugcaucauugaa

SEQ ID NO: 2107159 - RNA, 19 nt, Homo sapiens
  misc_RNA (1)...(19): siRNA sense strand
aaaagcagaucucagaaga

SEQ ID NO: 2107160 - RNA, 19 nt, Homo sapiens
  misc_RNA (1)...(19): siRNA sense strand
caugacagccauccuacaa

SEQ ID NO: 2107161 - RNA, 19 nt, Homo sapiens
  misc_RNA (1)...(19): siRNA sense strand
guucaugacagccauccua

SEQ ID NO: 2107162 - RNA, 19 nt, Homo sapiens
  misc_RNA (1)...(19): siRNA sense strand
cugcagaucguguucauga

SEQ ID NO: 2107163 - RNA, 19 nt, Homo sapiens
  misc_RNA (1)...(19): siRNA sense strand
uaucagaacaacaggagaa

SEQ ID NO: 2107164 - RNA, 19 nt, Homo sapiens
  misc_RNA (1)...(19): siRNA sense strand
gcagaucguguucaugaca

SEQ ID NO: 2107165 - RNA, 19 nt, Homo sapiens
  misc_RNA (1)...(19): siRNA sense strand
gagacaucuuuguuggauu

SEQ ID NO: 2107166 - RNA, 19 nt, Homo sapiens
  misc_RNA (1)...(19): siRNA sense strand
aggaauuucugcugaagga

SEQ ID NO: 2107167 - RNA, 19 nt, Homo sapiens
  misc_RNA (1)...(19): siRNA sense strand
guuauugucggcuuucuug

SEQ ID NO: 2107168 - RNA, 19 nt, Homo sapiens
  misc_RNA (1)...(19): siRNA sense strand
agacacauccagaaucaug

SEQ ID NO: 2107169 - RNA, 19 nt, Homo sapiens
  misc_RNA (1)...(19): siRNA sense strand
gaaaagagaaggcucaaug

SEQ ID NO: 2107170 - RNA, 19 nt, Homo sapiens
  misc_RNA (1)...(19): siRNA sense strand
ggacagugaggaugaggaa

SEQ ID NO: 2107171 - RNA, 19 nt, Homo sapiens
  misc_RNA (1)...(19): siRNA sense strand
gcacacaccagagaacaau

SEQ ID NO: 2107172 - RNA, 19 nt, Homo sapiens
  misc_RNA (1)...(19): siRNA sense strand
gcucaauggguccaggaua

SEQ ID NO: 2107173 - RNA, 19 nt, Homo sapiens
  misc_RNA (1)...(19): siRNA sense strand
gucccuguuugcugauuua

SEQ ID NO: 2107174 - RNA, 19 nt, Homo sapiens
  misc_RNA (1)...(19): siRNA sense strand
ggaagaggacagugaggau

SEQ ID NO: 2107175 - RNA, 19 nt, Homo sapiens
  misc_RNA (1)...(19): siRNA sense strand
ggaaagggacugggauuuu

SEQ ID NO: 2107176 - RNA, 19 nt, Homo sapiens
  misc_RNA (1)...(19): siRNA sense strand
ccuguuugcugauuuacug

SEQ ID NO: 2107177 - RNA, 19 nt, Homo sapiens
  misc_RNA (1)...(19): siRNA sense strand
gaugaggaaggccaggaaa

SEQ ID NO: 2107178 - RNA, 19 nt, Homo sapiens
  misc_RNA (1)...(19): siRNA sense strand
ggaugaggaaggccaggaa

SEQ ID NO: 2107179 - RNA, 19 nt, Homo sapiens
  misc_RNA (1)...(19): siRNA sense strand
cucaauggguccaggauag

SEQ ID NO: 2107180 - RNA, 19 nt, Homo sapiens
  misc_RNA (1)...(19): siRNA sense strand
ccaggauagucaugacaag

SEQ ID NO: 2107181 - RNA, 19 nt, Homo sapiens
  misc_RNA (1)...(19): siRNA sense strand
caggaaagggacugggauu

SEQ ID NO: 2107182 - RNA, 19 nt, Homo sapiens
  misc_RNA (1)...(19): siRNA sense strand
aagaggacagugaggauga

SEQ ID NO: 2107183 - RNA, 19 nt, Homo sapiens
  misc_RNA (1)...(19): siRNA sense strand
ggccagcgucuaccuguuc

SEQ ID NO: 2107184 - RNA, 19 nt, Homo sapiens
  misc_RNA (1)...(19): siRNA sense strand
ugcccgcacugacccauga

SEQ ID NO: 2107185 - RNA, 19 nt, Homo sapiens
  misc_RNA (1)...(19): siRNA sense strand
ccaaacagauucaccuuua

SEQ ID NO: 2107186 - RNA, 19 nt, Homo sapiens
  misc_RNA (1)...(19): siRNA sense strand
ggacuuaucuucuucucua

SEQ ID NO: 2107187 - RNA, 19 nt, Homo sapiens
  misc_RNA (1)...(19): siRNA sense strand
gaacagacuuuaaggaaug

SEQ ID NO: 2107188 - RNA, 19 nt, Homo sapiens
  misc_RNA (1)...(19): siRNA sense strand
caacaucacuccuuccuuu

SEQ ID NO: 2107189 - RNA, 19 nt, Homo sapiens
  misc_RNA (1)...(19): siRNA sense strand
ggacaacagugauaugauu

SEQ ID NO: 2107190 - RNA, 19 nt, Homo sapiens
  misc_RNA (1)...(19): siRNA sense strand
gaacugccuuuguaucuuu

SEQ ID NO: 2107191 - RNA, 19 nt, Homo sapiens
  misc_RNA (1)...(19): siRNA sense strand
gaacagaccacacuacauu

SEQ ID NO: 2107192 - RNA, 19 nt, Homo sapiens
  misc_RNA (1)...(19): siRNA sense strand
gaucaccucuuccuucuaa

SEQ ID NO: 2107193 - RNA, 19 nt, Homo sapiens
  misc_RNA (1)...(19): siRNA sense strand
gcaguuacuugacucuuua

SEQ ID NO: 2107194 - RNA, 19 nt, Homo sapiens
  misc_RNA (1)...(19): siRNA sense strand
ggaagucgccuuugucuaa

SEQ ID NO: 2107195 - RNA, 19 nt, Homo sapiens
  misc_RNA (1)...(19): siRNA sense strand
ggaaugcauuagugucuua

SEQ ID NO: 2107196 - RNA, 19 nt, Homo sapiens
  misc_RNA (1)...(19): siRNA sense strand
ggacuucacugauccuuug

SEQ ID NO: 2107197 - RNA, 19 nt, Homo sapiens
  misc_RNA (1)...(19): siRNA sense strand
gggauugguuauugaauua

SEQ ID NO: 2107198 - RNA, 19 nt, Homo sapiens
  misc_RNA (1)...(19): siRNA sense strand
ggaaggaagugaagcaguu

SEQ ID NO: 2107199 - RNA, 19 nt, Homo sapiens
  misc_RNA (1)...(19): siRNA sense strand
gaaacuacagguugaauuu

SEQ ID NO: 2107200 - RNA, 19 nt, Homo sapiens
  misc_RNA (1)...(19): siRNA sense strand
ugacaguggugaagaauaa

SEQ ID NO: 2107201 - RNA, 19 nt, Homo sapiens
  misc_RNA (1)...(19): siRNA sense strand
gaaccaauguggacgaaga

SEQ ID NO: 2107202 - RNA, 19 nt, Homo sapiens
  misc_RNA (1)...(19): siRNA sense strand
ggacagugcucaacaugga

SEQ ID NO: 2107203 - RNA, 19 nt, Homo sapiens
  misc_RNA (1)...(19): siRNA sense strand
gcauaagaaugaagccaua

SEQ ID NO: 2107204 - RNA, 19 nt, Homo sapiens
  misc_RNA (1)...(19): siRNA sense strand
ccacucaccuccuuaacua

SEQ ID NO: 2107205 - RNA, 19 nt, Homo sapiens
  misc_RNA (1)...(19): siRNA sense strand
gcacuggacuuaucuucuu

SEQ ID NO: 2107206 - RNA, 19 nt, Homo sapiens
  misc_RNA (1)...(19): siRNA sense strand
gcgcaucuaucaugaguuu

SEQ ID NO: 2107207 - RNA, 19 nt, Homo sapiens
  misc_RNA (1)...(19): siRNA sense strand
gagaaacucagaauaguaa

SEQ ID NO: 2107208 - RNA, 19 nt, Homo sapiens
  misc_RNA (1)...(19): siRNA sense strand
ugaaguggcuuuaaugguu

SEQ ID NO: 2107209 - RNA, 19 nt, Homo sapiens
  misc_RNA (1)...(19): siRNA sense strand
ggagucugcucucaucuuu

SEQ ID NO: 2107210 - RNA, 19 nt, Homo sapiens
  misc_RNA (1)...(19): siRNA sense strand
ggacagacaagcucacuuu

SEQ ID NO: 2107211 - RNA, 19 nt, Homo sapiens
  misc_RNA (1)...(19): siRNA sense strand
caaguucgaucuuaaacaa

SEQ ID NO: 2107212 - RNA, 19 nt, Homo sapiens
  misc_RNA (1)...(19): siRNA sense strand
gaaaugaagagacguuuga

SEQ ID NO: 2107213 - RNA, 19 nt, Homo sapiens
  misc_RNA (1)...(19): siRNA sense strand
gaagcagguuucauauuug

SEQ ID NO: 2107214 - RNA, 19 nt, Homo sapiens
  misc_RNA (1)...(19): siRNA sense strand
uaaccaaguucgaucuuaa

SEQ ID NO: 2107215 - RNA, 19 nt, Homo sapiens
  misc_RNA (1)...(19): siRNA sense strand
aaaccaccaucacuuaaua

SEQ ID NO: 2107216 - RNA, 19 nt, Homo sapiens
  misc_RNA (1)...(19): siRNA sense strand
uaucuagccuuaucuauga

SEQ ID NO: 2107217 - RNA, 19 nt, Homo sapiens
  misc_RNA (1)...(19): siRNA sense strand
caaugggccuggaauuuaa

SEQ ID NO: 2107218 - RNA, 19 nt, Homo sapiens
  misc_RNA (1)...(19): siRNA sense strand
gaacauggagcgcaucuau

SEQ ID NO: 2107219 - RNA, 19 nt, Homo sapiens
  misc_RNA (1)...(19): siRNA sense strand
gcaagccacccaauuuaua

SEQ ID NO: 2107220 - RNA, 19 nt, Homo sapiens
  misc_RNA (1)...(19): siRNA sense strand
gcugaugucuccugucaaa

SEQ ID NO: 2107221 - RNA, 19 nt, Homo sapiens
  misc_RNA (1)...(19): siRNA sense strand
gauugcaaguggagucuua

SEQ ID NO: 2107222 - RNA, 19 nt, Homo sapiens
  misc_RNA (1)...(19): siRNA sense strand
gaaagugcugcucaucuua

SEQ ID NO: 2107223 - RNA, 19 nt, Homo sapiens
  misc_RNA (1)...(19): siRNA sense strand
gaaauuacucuaccaacaa

SEQ ID NO: 2107224 - RNA, 19 nt, Homo sapiens
  misc_RNA (1)...(19): siRNA sense strand
gggauucucucugaaagua

SEQ ID NO: 2107225 - RNA, 19 nt, Homo sapiens
  misc_RNA (1)...(19): siRNA sense strand
caacuaaaggaaugcauua

SEQ ID NO: 2107226 - RNA, 19 nt, Homo sapiens
  misc_RNA (1)...(19): siRNA sense strand
gcuaaaccaccaucacuua

SEQ ID NO: 2107227 - RNA, 19 nt, Homo sapiens
  misc_RNA (1)...(19): siRNA sense strand
guaaaugggcuguuccuuu

SEQ ID NO: 2107228 - RNA, 19 nt, Homo sapiens
  misc_RNA (1)...(19): siRNA sense strand
gaagucaacuggguuagug

SEQ ID NO: 2107229 - RNA, 19 nt, Homo sapiens
  misc_RNA (1)...(19): siRNA sense strand
agaaguaccuugcacagaa

SEQ ID NO: 2107230 - RNA, 19 nt, Homo sapiens
  misc_RNA (1)...(19): siRNA sense strand
gagacaauguuggaacuaa

SEQ ID NO: 2107231 - RNA, 19 nt, Homo sapiens
  misc_RNA (1)...(19): siRNA sense strand
caacagcccuacucuaugg

SEQ ID NO: 2107232 - RNA, 19 nt, Homo sapiens
  misc_RNA (1)...(19): siRNA sense strand
gaagcgaauugguuauaug

SEQ ID NO: 2107233 - RNA, 19 nt, Homo sapiens
  misc_RNA (1)...(19): siRNA sense strand
ccaguuggauucuccuuaa

SEQ ID NO: 2107234 - RNA, 19 nt, Homo sapiens
  misc_RNA (1)...(19): siRNA sense strand
ccaaugggccuggaauuua

SEQ ID NO: 2107235 - RNA, 19 nt, Homo sapiens
  misc_RNA (1)...(19): siRNA sense strand
uaaugguucuugaagcuua

SEQ ID NO: 2107236 - RNA, 19 nt, Homo sapiens
  misc_RNA (1)...(19): siRNA sense strand
caaguaagcaguauguuga

SEQ ID NO: 2107237 - RNA, 19 nt, Homo sapiens
  misc_RNA (1)...(19): siRNA sense strand
gcucuuagacgauaucauu

SEQ ID NO: 2107238 - RNA, 19 nt, Homo sapiens
  misc_RNA (1)...(19): siRNA sense strand
ugaccaagcucugaagaaa

SEQ ID NO: 2107239 - RNA, 19 nt, Homo sapiens
  misc_RNA (1)...(19): siRNA sense strand
gaauagcucagaagagauu

SEQ ID NO: 2107240 - RNA, 19 nt, Homo sapiens
  misc_RNA (1)...(19): siRNA sense strand
ggacacaggccaagcuuga

SEQ ID NO: 2107241 - RNA, 19 nt, Homo sapiens
  misc_RNA (1)...(19): siRNA sense strand
uccagaggcugcugauuua

SEQ ID NO: 2107242 - RNA, 19 nt, Homo sapiens
  misc_RNA (1)...(19): siRNA sense strand
gaaaguaugaagcagguuu

SEQ ID NO: 2107243 - RNA, 19 nt, Homo sapiens
  misc_RNA (1)...(19): siRNA sense strand
agaauaaacuggccugugu

SEQ ID NO: 2107244 - RNA, 19 nt, Homo sapiens
  misc_RNA (1)...(19): siRNA sense strand
gcagaucaagugaaaguuu

SEQ ID NO: 2107245 - RNA, 19 nt, Homo sapiens
  misc_RNA (1)...(19): siRNA sense strand
caccagaacugcacaagga

SEQ ID NO: 2107246 - RNA, 19 nt, Homo sapiens
  misc_RNA (1)...(19): siRNA sense strand
uggauaagauucugccuuu

SEQ ID NO: 2107247 - RNA, 19 nt, Homo sapiens
  misc_RNA (1)...(19): siRNA sense strand
gcagaaggcaucccacuau

SEQ ID NO: 2107248 - RNA, 19 nt, Homo sapiens
  misc_RNA (1)...(19): siRNA sense strand
gcauuuggcuguuuauguc

SEQ ID NO: 2107249 - RNA, 19 nt, Homo sapiens
  misc_RNA (1)...(19): siRNA sense strand
gaagccauaugcugggauu

SEQ ID NO: 2107250 - RNA, 19 nt, Homo sapiens
  misc_RNA (1)...(19): siRNA sense strand
gugcugaaaucccuacauu

SEQ ID NO: 2107251 - RNA, 19 nt, Homo sapiens
  misc_RNA (1)...(19): siRNA sense strand
ggauaagauucugccuuua

SEQ ID NO: 2107252 - RNA, 19 nt, Homo sapiens
  misc_RNA (1)...(19): siRNA sense strand
gaagagucccugacgugua

SEQ ID NO: 2107253 - RNA, 19 nt, Homo sapiens
  misc_RNA (1)...(19): siRNA sense strand
ugaaagugcugcucaucuu

SEQ ID NO: 2107254 - RNA, 19 nt, Homo sapiens
  misc_RNA (1)...(19): siRNA sense strand
ccagaaacccgcagcauga

SEQ ID NO: 2107255 - RNA, 19 nt, Homo sapiens
  misc_RNA (1)...(19): siRNA sense strand
caccaucacuuaauauugu

SEQ ID NO: 2107256 - RNA, 19 nt, Homo sapiens
  misc_RNA (1)...(19): siRNA sense strand
gcacacauaucuguaagca

SEQ ID NO: 2107257 - RNA, 19 nt, Homo sapiens
  misc_RNA (1)...(19): siRNA sense strand
gguacaagguggacuuuca

SEQ ID NO: 2107258 - RNA, 19 nt, Homo sapiens
  misc_RNA (1)...(19): siRNA sense strand
gcuauucgaugccaaaucu

SEQ ID NO: 2107259 - RNA, 19 nt, Homo sapiens
  misc_RNA (1)...(19): siRNA sense strand
caaggcaguucuuuacuuc

SEQ ID NO: 2107260 - RNA, 19 nt, Homo sapiens
  misc_RNA (1)...(19): siRNA sense strand
gugaggcucuucaauguau

SEQ ID NO: 2107261 - RNA, 19 nt, Homo sapiens
  misc_RNA (1)...(19): siRNA sense strand
gcacucagcccaaugaagu

SEQ ID NO: 2107262 - RNA, 19 nt, Homo sapiens
  misc_RNA (1)...(19): siRNA sense strand
uaaacuggccuguguuauu

SEQ ID NO: 2107263 - RNA, 19 nt, Homo sapiens
  misc_RNA (1)...(19): siRNA sense strand
uaaaugggcuguuccuuuu

SEQ ID NO: 2107264 - RNA, 19 nt, Homo sapiens
  misc_RNA (1)...(19): siRNA sense strand
aagagucccugacguguaa

SEQ ID NO: 2107265 - RNA, 19 nt, Homo sapiens
  misc_RNA (1)...(19): siRNA sense strand
guaagcaguauguugaaua

SEQ ID NO: 2107266 - RNA, 19 nt, Homo sapiens
  misc_RNA (1)...(19): siRNA sense strand
ggcaguuacuugacucuuu

SEQ ID NO: 2107267 - RNA, 19 nt, Homo sapiens
  misc_RNA (1)...(19): siRNA sense strand
aaagaaagcccucucaauc

SEQ ID NO: 2107268 - RNA, 19 nt, Homo sapiens
  misc_RNA (1)...(19): siRNA sense strand
gcuguucacugacuguauu

SEQ ID NO: 2107269 - RNA, 19 nt, Homo sapiens
  misc_RNA (1)...(19): siRNA sense strand
caggaagacugcauacaga

SEQ ID NO: 2107270 - RNA, 19 nt, Homo sapiens
  misc_RNA (1)...(19): siRNA sense strand
gcaagcagcagcuccaaga

SEQ ID NO: 2107271 - RNA, 19 nt, Homo sapiens
  misc_RNA (1)...(19): siRNA sense strand
gaaauugguauccgugcua

SEQ ID NO: 2107272 - RNA, 19 nt, Homo sapiens
  misc_RNA (1)...(19): siRNA sense strand
gaagauacucaguuucaug

SEQ ID NO: 2107273 - RNA, 19 nt, Homo sapiens
  misc_RNA (1)...(19): siRNA sense strand
aaacuggccuguguuauuc

SEQ ID NO: 2107274 - RNA, 19 nt, Homo sapiens
  misc_RNA (1)...(19): siRNA sense strand
gagauuugccuucugacua

SEQ ID NO: 2107275 - RNA, 19 nt, Homo sapiens
  misc_RNA (1)...(19): siRNA sense strand
gcgaauugguuauaugauc

SEQ ID NO: 2107276 - RNA, 19 nt, Homo sapiens
  misc_RNA (1)...(19): siRNA sense strand
caacaagaccucaagagau

SEQ ID NO: 2107277 - RNA, 19 nt, Homo sapiens
  misc_RNA (1)...(19): siRNA sense strand
gauacucaguuucaugaug

SEQ ID NO: 2107278 - RNA, 19 nt, Homo sapiens
  misc_RNA (1)...(19): siRNA sense strand
caggaugacucuugguuau

SEQ ID NO: 2107279 - RNA, 19 nt, Homo sapiens
  misc_RNA (1)...(19): siRNA sense strand
gacgauaucauugucuuua

SEQ ID NO: 2107280 - RNA, 19 nt, Homo sapiens
  misc_RNA (1)...(19): siRNA sense strand
caacaaggcaguucuuuac

SEQ ID NO: 2107281 - RNA, 19 nt, Homo sapiens
  misc_RNA (1)...(19): siRNA sense strand
ccaacaaggcaguucuuua

SEQ ID NO: 2107282 - RNA, 19 nt, Homo sapiens
  misc_RNA (1)...(19): siRNA sense strand
uauuauggcuagaagauga

SEQ ID NO: 2107283 - RNA, 19 nt, Homo sapiens
  misc_RNA (1)...(19): siRNA sense strand
ggaugacucuugguuaugu

SEQ ID NO: 2107284 - RNA, 19 nt, Homo sapiens
  misc_RNA (1)...(19): siRNA sense strand
gaacagguguacccaagcu

SEQ ID NO: 2107285 - RNA, 19 nt, Homo sapiens
  misc_RNA (1)...(19): siRNA sense strand
gaaggaauauucacaguug

SEQ ID NO: 2107286 - RNA, 19 nt, Homo sapiens
  misc_RNA (1)...(19): siRNA sense strand
ggacuuaccucuuggagaa

SEQ ID NO: 2107287 - RNA, 19 nt, Homo sapiens
  misc_RNA (1)...(19): siRNA sense strand
caacucagguacaauauaa

SEQ ID NO: 2107288 - RNA, 19 nt, Homo sapiens
  misc_RNA (1)...(19): siRNA sense strand
aaacagcucuucuacauga

SEQ ID NO: 2107289 - RNA, 19 nt, Homo sapiens
  misc_RNA (1)...(19): siRNA sense strand
gcacaucuaugcccaguug

SEQ ID NO: 2107290 - RNA, 19 nt, Homo sapiens
  misc_RNA (1)...(19): siRNA sense strand
gaacauuaaugccagauca

SEQ ID NO: 2107291 - RNA, 19 nt, Homo sapiens
  misc_RNA (1)...(19): siRNA sense strand
gaagaaagcccaggaccua

SEQ ID NO: 2107292 - RNA, 19 nt, Homo sapiens
  misc_RNA (1)...(19): siRNA sense strand
ccaaccauaucuacacuua

SEQ ID NO: 2107293 - RNA, 19 nt, Homo sapiens
  misc_RNA (1)...(19): siRNA sense strand
ggcaagagcuggagucaga

SEQ ID NO: 2107294 - RNA, 19 nt, Homo sapiens
  misc_RNA (1)...(19): siRNA sense strand
ggacgaugcugaggacuuu

SEQ ID NO: 2107295 - RNA, 19 nt, Homo sapiens
  misc_RNA (1)...(19): siRNA sense strand
agaaggagcuggugcacua

SEQ ID NO: 2107296 - RNA, 19 nt, Homo sapiens
  misc_RNA (1)...(19): siRNA sense strand
caaaguagcuuagaaucug

SEQ ID NO: 2107297 - RNA, 19 nt, Homo sapiens
  misc_RNA (1)...(19): siRNA sense strand
ucaaacagcucuucuacau

SEQ ID NO: 2107298 - RNA, 19 nt, Homo sapiens
  misc_RNA (1)...(19): siRNA sense strand
gcaaguacauccagauugg

SEQ ID NO: 2107299 - RNA, 19 nt, Homo sapiens
  misc_RNA (1)...(19): siRNA sense strand
gauaguuucugccauguug

SEQ ID NO: 2107300 - RNA, 19 nt, Homo sapiens
  misc_RNA (1)...(19): siRNA sense strand
caaaggaacugaccagaac

SEQ ID NO: 2107301 - RNA, 19 nt, Homo sapiens
  misc_RNA (1)...(19): siRNA sense strand
ggaaggacgucugcucuug

SEQ ID NO: 2107302 - RNA, 19 nt, Homo sapiens
  misc_RNA (1)...(19): siRNA sense strand
gcaaccagcugcccuucuu

SEQ ID NO: 2107303 - RNA, 19 nt, Homo sapiens
  misc_RNA (1)...(19): siRNA sense strand
ggugauuccuguaguauau

SEQ ID NO: 2107304 - RNA, 19 nt, Homo sapiens
  misc_RNA (1)...(19): siRNA sense strand
ggaauuaccacaucuuuua

SEQ ID NO: 2107305 - RNA, 19 nt, Homo sapiens
  misc_RNA (1)...(19): siRNA sense strand
caaguuggccuaacaguga

SEQ ID NO: 2107306 - RNA, 19 nt, Homo sapiens
  misc_RNA (1)...(19): siRNA sense strand
gauggugauuccuguagua

SEQ ID NO: 2107307 - RNA, 19 nt, Homo sapiens
  misc_RNA (1)...(19): siRNA sense strand
gaacagcucaacaaccaaa

SEQ ID NO: 2107308 - RNA, 19 nt, Homo sapiens
  misc_RNA (1)...(19): siRNA sense strand
caacaaggagcacaagaaa

SEQ ID NO: 2107309 - RNA, 19 nt, Homo sapiens
  misc_RNA (1)...(19): siRNA sense strand
gcccuuagcuaucuucaug

SEQ ID NO: 2107310 - RNA, 19 nt, Homo sapiens
  misc_RNA (1)...(19): siRNA sense strand
ugagugaccuuuccauuca

SEQ ID NO: 2107311 - RNA, 19 nt, Homo sapiens
  misc_RNA (1)...(19): siRNA sense strand
caacugaagauuuacauga

SEQ ID NO: 2107312 - RNA, 19 nt, Homo sapiens
  misc_RNA (1)...(19): siRNA sense strand
uagaaaagcuggaaaagaa

SEQ ID NO: 2107313 - RNA, 19 nt, Homo sapiens
  misc_RNA (1)...(19): siRNA sense strand
gaagaaucaguccaucaua

SEQ ID NO: 2107314 - RNA, 19 nt, Homo sapiens
  misc_RNA (1)...(19): siRNA sense strand
gcacaaugaugacuuugag

SEQ ID NO: 2107315 - RNA, 19 nt, Homo sapiens
  misc_RNA (1)...(19): siRNA sense strand
acuaguggcugacuuguuu

SEQ ID NO: 2107316 - RNA, 19 nt, Homo sapiens
  misc_RNA (1)...(19): siRNA sense strand
gaacacugucuuaagaauu

SEQ ID NO: 2107317 - RNA, 19 nt, Homo sapiens
  misc_RNA (1)...(19): siRNA sense strand
gcagaucuggccuacaaua

SEQ ID NO: 2107318 - RNA, 19 nt, Homo sapiens
  misc_RNA (1)...(19): siRNA sense strand
ggaauacccaauugaugua

SEQ ID NO: 2107319 - RNA, 19 nt, Homo sapiens
  misc_RNA (1)...(19): siRNA sense strand
aaugaacacugucuuaaga

SEQ ID NO: 2107320 - RNA, 19 nt, Homo sapiens
  misc_RNA (1)...(19): siRNA sense strand
gggccaacaugaggacuua

SEQ ID NO: 2107321 - RNA, 19 nt, Homo sapiens
  misc_RNA (1)...(19): siRNA sense strand
aaaccaacaucgaagagaa

SEQ ID NO: 2107322 - RNA, 19 nt, Homo sapiens
  misc_RNA (1)...(19): siRNA sense strand
uagaaucugacuccaauua

SEQ ID NO: 2107323 - RNA, 19 nt, Homo sapiens
  misc_RNA (1)...(19): siRNA sense strand
gcaagaagaauacaugaag

SEQ ID NO: 2107324 - RNA, 19 nt, Homo sapiens
  misc_RNA (1)...(19): siRNA sense strand
uuaaagagcuugcacuaac

SEQ ID NO: 2107325 - RNA, 19 nt, Homo sapiens
  misc_RNA (1)...(19): siRNA sense strand
gaagaucgaugagcagaac

SEQ ID NO: 2107326 - RNA, 19 nt, Homo sapiens
  misc_RNA (1)...(19): siRNA sense strand
aaaccaaaguagcuuagaa

SEQ ID NO: 2107327 - RNA, 19 nt, Homo sapiens
  misc_RNA (1)...(19): siRNA sense strand
gaccaagccacgcagaaua

SEQ ID NO: 2107328 - RNA, 19 nt, Homo sapiens
  misc_RNA (1)...(19): siRNA sense strand
cagcccagcuccugcaauu

SEQ ID NO: 2107329 - RNA, 19 nt, Homo sapiens
  misc_RNA (1)...(19): siRNA sense strand
gcaacucagguacaauaua

SEQ ID NO: 2107330 - RNA, 19 nt, Homo sapiens
  misc_RNA (1)...(19): siRNA sense strand
acgagaaucuggaccuuaa

SEQ ID NO: 2107331 - RNA, 19 nt, Homo sapiens
  misc_RNA (1)...(19): siRNA sense strand
gcagagauacgacaaccuu

SEQ ID NO: 2107332 - RNA, 19 nt, Homo sapiens
  misc_RNA (1)...(19): siRNA sense strand
cagaaugaacacugucuua

SEQ ID NO: 2107333 - RNA, 19 nt, Homo sapiens
  misc_RNA (1)...(19): siRNA sense strand
gaucuggccuacaauaguc

SEQ ID NO: 2107334 - RNA, 19 nt, Homo sapiens
  misc_RNA (1)...(19): siRNA sense strand
gcagaucaauauccugaag

SEQ ID NO: 2107335 - RNA, 19 nt, Homo sapiens
  misc_RNA (1)...(19): siRNA sense strand
gaaucuggaccuuaaagaa

SEQ ID NO: 2107336 - RNA, 19 nt, Homo sapiens
  misc_RNA (1)...(19): siRNA sense strand
caacacggccuucaucauc

SEQ ID NO: 2107337 - RNA, 19 nt, Homo sapiens
  misc_RNA (1)...(19): siRNA sense strand
gguaacaguggccuuuaua

SEQ ID NO: 2107338 - RNA, 19 nt, Homo sapiens
  misc_RNA (1)...(19): siRNA sense strand
gcccagcuccugcaauuaa

SEQ ID NO: 2107339 - RNA, 19 nt, Homo sapiens
  misc_RNA (1)...(19): siRNA sense strand
uggagaaccucaucaagga

SEQ ID NO: 2107340 - RNA, 19 nt, Homo sapiens
  misc_RNA (1)...(19): siRNA sense strand
gaacaguugccaaucuaug

SEQ ID NO: 2107341 - RNA, 19 nt, Homo sapiens
  misc_RNA (1)...(19): siRNA sense strand
gcugaagaaugaccugaau

SEQ ID NO: 2107342 - RNA, 19 nt, Homo sapiens
  misc_RNA (1)...(19): siRNA sense strand
gagaacagcaggacagcaa

SEQ ID NO: 2107343 - RNA, 19 nt, Homo sapiens
  misc_RNA (1)...(19): siRNA sense strand
aagaauacaugaaggaaca

SEQ ID NO: 2107344 - RNA, 19 nt, Homo sapiens
  misc_RNA (1)...(19): siRNA sense strand
uaaagagcuugcacuaaca

SEQ ID NO: 2107345 - RNA, 19 nt, Homo sapiens
  misc_RNA (1)...(19): siRNA sense strand
ggccagagaugagaagaau

SEQ ID NO: 2107346 - RNA, 19 nt, Homo sapiens
  misc_RNA (1)...(19): siRNA sense strand
uaaccaaggacuacaaaga

SEQ ID NO: 2107347 - RNA, 19 nt, Homo sapiens
  misc_RNA (1)...(19): siRNA sense strand
ugaagaaugaccugaauga

SEQ ID NO: 2107348 - RNA, 19 nt, Homo sapiens
  misc_RNA (1)...(19): siRNA sense strand
caaauccugugccagucua

SEQ ID NO: 2107349 - RNA, 19 nt, Homo sapiens
  misc_RNA (1)...(19): siRNA sense strand
ugcagaaggugaaauauca

SEQ ID NO: 2107350 - RNA, 19 nt, Homo sapiens
  misc_RNA (1)...(19): siRNA sense strand
ccaugaaagucuccaacaa

SEQ ID NO: 2107351 - RNA, 19 nt, Homo sapiens
  misc_RNA (1)...(19): siRNA sense strand
gugaaagagucccaucaga

SEQ ID NO: 2107352 - RNA, 19 nt, Homo sapiens
  misc_RNA (1)...(19): siRNA sense strand
gcugaggacuuugagaaga

SEQ ID NO: 2107353 - RNA, 19 nt, Homo sapiens
  misc_RNA (1)...(19): siRNA sense strand
acaagcagauggccagaga

SEQ ID NO: 2107354 - RNA, 19 nt, Homo sapiens
  misc_RNA (1)...(19): siRNA sense strand
gagaucauccugcagguau

SEQ ID NO: 2107355 - RNA, 19 nt, Homo sapiens
  misc_RNA (1)...(19): siRNA sense strand
agaaagaacagcucaacaa

SEQ ID NO: 2107356 - RNA, 19 nt, Homo sapiens
  misc_RNA (1)...(19): siRNA sense strand
ugaaggcccucaggauuga

SEQ ID NO: 2107357 - RNA, 19 nt, Homo sapiens
  misc_RNA (1)...(19): siRNA sense strand
uaugauaaccaaccuugua

SEQ ID NO: 2107358 - RNA, 19 nt, Homo sapiens
  misc_RNA (1)...(19): siRNA sense strand
cagaugaugagaggaauua

SEQ ID NO: 2107359 - RNA, 19 nt, Homo sapiens
  misc_RNA (1)...(19): siRNA sense strand
gaggaauuaccacaucuuu

SEQ ID NO: 2107360 - RNA, 19 nt, Homo sapiens
  misc_RNA (1)...(19): siRNA sense strand
ucaacgcagugacucuuaa

SEQ ID NO: 2107361 - RNA, 19 nt, Homo sapiens
  misc_RNA (1)...(19): siRNA sense strand
aagaacagcucaacaacca

SEQ ID NO: 2107362 - RNA, 19 nt, Homo sapiens
  misc_RNA (1)...(19): siRNA sense strand
ggacaucuauggguuugag

SEQ ID NO: 2107363 - RNA, 19 nt, Homo sapiens
  misc_RNA (1)...(19): siRNA sense strand
gaaugacccucagcaacug

SEQ ID NO: 2107364 - RNA, 19 nt, Homo sapiens
  misc_RNA (1)...(19): siRNA sense strand
ugaaugagcugaggaaagc

SEQ ID NO: 2107365 - RNA, 19 nt, Homo sapiens
  misc_RNA (1)...(19): siRNA sense strand
gaacagcaggacagcaaga

SEQ ID NO: 2107366 - RNA, 19 nt, Homo sapiens
  misc_RNA (1)...(19): siRNA sense strand
gaaagaacagcucaacaac

SEQ ID NO: 2107367 - RNA, 19 nt, Homo sapiens
  misc_RNA (1)...(19): siRNA sense strand
cuugaaagaugagaaagaa

SEQ ID NO: 2107368 - RNA, 19 nt, Homo sapiens
  misc_RNA (1)...(19): siRNA sense strand
acaaagaguucaagacacu

SEQ ID NO: 2107369 - RNA, 19 nt, Homo sapiens
  misc_RNA (1)...(19): siRNA sense strand
ccacgacaccucacuaugu

SEQ ID NO: 2107370 - RNA, 19 nt, Homo sapiens
  misc_RNA (1)...(19): siRNA sense strand
ggagcaagaagaauacaug

SEQ ID NO: 2107371 - RNA, 19 nt, Homo sapiens
  misc_RNA (1)...(19): siRNA sense strand
gaaugaacacugucuuaag

SEQ ID NO: 2107372 - RNA, 19 nt, Homo sapiens
  misc_RNA (1)...(19): siRNA sense strand
aaugaugacuuugagauga

SEQ ID NO: 2107373 - RNA, 19 nt, Homo sapiens
  misc_RNA (1)...(19): siRNA sense strand
caucaacggcauuaagaaa

SEQ ID NO: 2107374 - RNA, 19 nt, Homo sapiens
  misc_RNA (1)...(19): siRNA sense strand
cagcugaguuaaccaagga

SEQ ID NO: 2107375 - RNA, 19 nt, Homo sapiens
  misc_RNA (1)...(19): siRNA sense strand
gaaggaaaaucucaugaag

SEQ ID NO: 2107376 - RNA, 19 nt, Homo sapiens
  misc_RNA (1)...(19): siRNA sense strand
uagagcggcugaagaagga

SEQ ID NO: 2107377 - RNA, 19 nt, Homo sapiens
  misc_RNA (1)...(19): siRNA sense strand
ccuuaacccugcagaggua

SEQ ID NO: 2107378 - RNA, 19 nt, Homo sapiens
  misc_RNA (1)...(19): siRNA sense strand
gagcaagaagaauacauga

SEQ ID NO: 2107379 - RNA, 19 nt, Homo sapiens
  misc_RNA (1)...(19): siRNA sense strand
gaaagcccaggaccuagaa

SEQ ID NO: 2107380 - RNA, 19 nt, Homo sapiens
  misc_RNA (1)...(19): siRNA sense strand
acgcggagccgaacauuaa

SEQ ID NO: 2107381 - RNA, 19 nt, Homo sapiens
  misc_RNA (1)...(19): siRNA sense strand
ggacagccaccaucaugau

SEQ ID NO: 2107382 - RNA, 19 nt, Homo sapiens
  misc_RNA (1)...(19): siRNA sense strand
gcugcgggcugacaaguuc

SEQ ID NO: 2107383 - RNA, 19 nt, Homo sapiens
  misc_RNA (1)...(19): siRNA sense strand
ccaaaggaacugaccagaa

SEQ ID NO: 2107384 - RNA, 19 nt, Homo sapiens
  misc_RNA (1)...(19): siRNA sense strand
cuuggacccugauugauuu

SEQ ID NO: 2107385 - RNA, 19 nt, Homo sapiens
  misc_RNA (1)...(19): siRNA sense strand
gcaggcagcuuggacauca

SEQ ID NO: 2107386 - RNA, 19 nt, Homo sapiens
  misc_RNA (1)...(19): siRNA sense strand
acaaggagcucagagagaa

SEQ ID NO: 2107387 - RNA, 19 nt, Homo sapiens
  misc_RNA (1)...(19): siRNA sense strand
cugaagagaugccugagaa

SEQ ID NO: 2107388 - RNA, 19 nt, Homo sapiens
  misc_RNA (1)...(19): siRNA sense strand
ggaaggacaggguggguuu

SEQ ID NO: 2107389 - RNA, 19 nt, Homo sapiens
  misc_RNA (1)...(19): siRNA sense strand
gagagaacgacucccagua

SEQ ID NO: 2107390 - RNA, 19 nt, Homo sapiens
  misc_RNA (1)...(19): siRNA sense strand
gacaggaccucuggacuca

SEQ ID NO: 2107391 - RNA, 19 nt, Homo sapiens
  misc_RNA (1)...(19): siRNA sense strand
cugaggagcugccgguuga

SEQ ID NO: 2107392 - RNA, 19 nt, Homo sapiens
  misc_RNA (1)...(19): siRNA sense strand
gcccaaagcagcacaagga

SEQ ID NO: 2107393 - RNA, 19 nt, Homo sapiens
  misc_RNA (1)...(19): siRNA sense strand
ccugggagcugcacgucua

SEQ ID NO: 2107394 - RNA, 19 nt, Homo sapiens
  misc_RNA (1)...(19): siRNA sense strand
gagggacaguggccaccua

SEQ ID NO: 2107395 - RNA, 19 nt, Homo sapiens
  misc_RNA (1)...(19): siRNA sense strand
agagaacgacucccaguaa

SEQ ID NO: 2107396 - RNA, 19 nt, Homo sapiens
  misc_RNA (1)...(19): siRNA sense strand
ccagagagagcagcaauga

SEQ ID NO: 2107397 - RNA, 19 nt, Homo sapiens
  misc_RNA (1)...(19): siRNA sense strand
agagagagcagcaaugaau

SEQ ID NO: 2107398 - RNA, 19 nt, Homo sapiens
  misc_RNA (1)...(19): siRNA sense strand
gagaacgacucccaguaac

SEQ ID NO: 2107399 - RNA, 19 nt, Homo sapiens
  misc_RNA (1)...(19): siRNA sense strand
ccacucagguacugucaag

SEQ ID NO: 2107400 - RNA, 19 nt, Homo sapiens
  misc_RNA (1)...(19): siRNA sense strand
gugauaccaucgagcuuug

SEQ ID NO: 2107401 - RNA, 19 nt, Homo sapiens
  misc_RNA (1)...(19): siRNA sense strand
ggacaguggccaccuagag

SEQ ID NO: 2107402 - RNA, 19 nt, Homo sapiens
  misc_RNA (1)...(19): siRNA sense strand
gacaguggccaccuagaga

SEQ ID NO: 2107403 - RNA, 19 nt, Homo sapiens
  misc_RNA (1)...(19): siRNA sense strand
cgcagcgccuccagugaua

SEQ ID NO: 2107404 - RNA, 19 nt, Homo sapiens
  misc_RNA (1)...(19): siRNA sense strand
gcaggaggcagcucaaggu

SEQ ID NO: 2107405 - RNA, 19 nt, Homo sapiens
  misc_RNA (1)...(19): siRNA sense strand
uauguggccuucugcuguu

SEQ ID NO: 2107406 - RNA, 19 nt, Homo sapiens
  misc_RNA (1)...(19): siRNA sense strand
gagagagcagcaaugaaug

SEQ ID NO: 2107407 - RNA, 19 nt, Homo sapiens
  misc_RNA (1)...(19): siRNA sense strand
gccacgggcugucaucagu

SEQ ID NO: 2107408 - RNA, 19 nt, Homo sapiens
  misc_RNA (1)...(19): siRNA sense strand
uaggguugcucgcgacaga

SEQ ID NO: 2107409 - RNA, 19 nt, Homo sapiens
  misc_RNA (1)...(19): siRNA sense strand
cgauccgccuacaugcuua

SEQ ID NO: 2107410 - RNA, 19 nt, Homo sapiens
  misc_RNA (1)...(19): siRNA sense strand
caggaccucuggacucaca

SEQ ID NO: 2107411 - RNA, 19 nt, Homo sapiens
  misc_RNA (1)...(19): siRNA sense strand
uaacugaugaccuccagau

SEQ ID NO: 2107412 - RNA, 19 nt, Homo sapiens
  misc_RNA (1)...(19): siRNA sense strand
gagguguccugggaaguca

SEQ ID NO: 2107413 - RNA, 19 nt, Homo sapiens
  misc_RNA (1)...(19): siRNA sense strand
gcgauccgccuacaugcuu

SEQ ID NO: 2107414 - RNA, 19 nt, Homo sapiens
  misc_RNA (1)...(19): siRNA sense strand
caguugaggugguguacuc

SEQ ID NO: 2107415 - RNA, 19 nt, Homo sapiens
  misc_RNA (1)...(19): siRNA sense strand
gcccagcacgguacagcua

SEQ ID NO: 2107416 - RNA, 19 nt, Homo sapiens
  misc_RNA (1)...(19): siRNA sense strand
gcugcgauccgccuacaug

SEQ ID NO: 2107417 - RNA, 19 nt, Homo sapiens
  misc_RNA (1)...(19): siRNA sense strand
ugccggagcgacccaauaa

SEQ ID NO: 2107418 - RNA, 19 nt, Homo sapiens
  misc_RNA (1)...(19): siRNA sense strand
gaccugcuguccacauggu

SEQ ID NO: 2107419 - RNA, 19 nt, Homo sapiens
  misc_RNA (1)...(19): siRNA sense strand
cagaccugcuguccacaug

SEQ ID NO: 2107420 - RNA, 19 nt, Homo sapiens
  misc_RNA (1)...(19): siRNA sense strand
caagcaggcugaccuuccu

SEQ ID NO: 2107421 - RNA, 19 nt, Homo sapiens
  misc_RNA (1)...(19): siRNA sense strand
gggccacccucaucucacu

SEQ ID NO: 2107422 - RNA, 19 nt, Homo sapiens
  misc_RNA (1)...(19): siRNA sense strand
ucacaggaacucugauguc

SEQ ID NO: 2107423 - RNA, 19 nt, Homo sapiens
  misc_RNA (1)...(19): siRNA sense strand
gaaggacaggguggguuug

SEQ ID NO: 2107424 - RNA, 19 nt, Homo sapiens
  misc_RNA (1)...(19): siRNA sense strand
cacaaggagcucagagaga

SEQ ID NO: 2107425 - RNA, 19 nt, Homo sapiens
  misc_RNA (1)...(19): siRNA sense strand
ccaggccuuugacguguuc

SEQ ID NO: 2107426 - RNA, 19 nt, Homo sapiens
  misc_RNA (1)...(19): siRNA sense strand
gagagcagcaaugaaugga

SEQ ID NO: 2107427 - RNA, 19 nt, Homo sapiens
  misc_RNA (1)...(19): siRNA sense strand
aagagcuucugcagcaaga

SEQ ID NO: 2107428 - RNA, 19 nt, Homo sapiens
  misc_RNA (1)...(19): siRNA sense strand
gcugaagagaugccugaga

SEQ ID NO: 2107429 - RNA, 19 nt, Homo sapiens
  misc_RNA (1)...(19): siRNA sense strand
gugccggagcgacccaaua

SEQ ID NO: 2107430 - RNA, 19 nt, Homo sapiens
  misc_RNA (1)...(19): siRNA sense strand
gaggagcugccgguugaga

SEQ ID NO: 2107431 - RNA, 19 nt, Homo sapiens
  misc_RNA (1)...(19): siRNA sense strand
gcgacccaauaacugcuau

SEQ ID NO: 2107432 - RNA, 19 nt, Homo sapiens
  misc_RNA (1)...(19): siRNA sense strand
gaacaagacugccaaugga

SEQ ID NO: 2107433 - RNA, 19 nt, Homo sapiens
  misc_RNA (1)...(19): siRNA sense strand
gaacaacaauaucggcauu

SEQ ID NO: 2107434 - RNA, 19 nt, Homo sapiens
  misc_RNA (1)...(19): siRNA sense strand
agauggaccuguugaacua

SEQ ID NO: 2107435 - RNA, 19 nt, Homo sapiens
  misc_RNA (1)...(19): siRNA sense strand
gacaagaugaacaacaaua

SEQ ID NO: 2107436 - RNA, 19 nt, Homo sapiens
  misc_RNA (1)...(19): siRNA sense strand
ggagaacccagaauacaga

SEQ ID NO: 2107437 - RNA, 19 nt, Homo sapiens
  misc_RNA (1)...(19): siRNA sense strand
uggacaagaugaacaacaa

SEQ ID NO: 2107438 - RNA, 19 nt, Homo sapiens
  misc_RNA (1)...(19): siRNA sense strand
caaaaugagucgcaucuuc

SEQ ID NO: 2107439 - RNA, 19 nt, Homo sapiens
  misc_RNA (1)...(19): siRNA sense strand
gaccacgucuccaaaauga

SEQ ID NO: 2107440 - RNA, 19 nt, Homo sapiens
  misc_RNA (1)...(19): siRNA sense strand
caacgaccacgucuccaaa

SEQ ID NO: 2107441 - RNA, 19 nt, Homo sapiens
  misc_RNA (1)...(19): siRNA sense strand
gagcgccaccugugucuga

SEQ ID NO: 2107442 - RNA, 19 nt, Homo sapiens
  misc_RNA (1)...(19): siRNA sense strand
guugaacuaucaguacuug

SEQ ID NO: 2107443 - RNA, 19 nt, Homo sapiens
  misc_RNA (1)...(19): siRNA sense strand
ggaccuagacugugacaac

SEQ ID NO: 2107444 - RNA, 19 nt, Homo sapiens
  misc_RNA (1)...(19): siRNA sense strand
acgaggaccuagacuguga

SEQ ID NO: 2107445 - RNA, 19 nt, Homo sapiens
  misc_RNA (1)...(19): siRNA sense strand
gaagauggaccuguugaac

SEQ ID NO: 2107446 - RNA, 19 nt, Homo sapiens
  misc_RNA (1)...(19): siRNA sense strand
caagaugaacaacaauauc

SEQ ID NO: 2107447 - RNA, 19 nt, Homo sapiens
  misc_RNA (1)...(19): siRNA sense strand
ugaacaagacugccaaugg

SEQ ID NO: 2107448 - RNA, 19 nt, Homo sapiens
  misc_RNA (1)...(19): siRNA sense strand
ggacaagaugaacaacaau

SEQ ID NO: 2107449 - RNA, 19 nt, Homo sapiens
  misc_RNA (1)...(19): siRNA sense strand
gcaagaggaaguucagcau

SEQ ID NO: 2107450 - RNA, 19 nt, Homo sapiens
  misc_RNA (1)...(19): siRNA sense strand
ugacgaggaccuagacugu

SEQ ID NO: 2107451 - RNA, 19 nt, Homo sapiens
  misc_RNA (1)...(19): siRNA sense strand
ugaacuaucaguacuugga

SEQ ID NO: 2107452 - RNA, 19 nt, Homo sapiens
  misc_RNA (1)...(19): siRNA sense strand
aacaauaucggcauucugu

SEQ ID NO: 2107453 - RNA, 19 nt, Homo sapiens
  misc_RNA (1)...(19): siRNA sense strand
gggagaacccagaauacag

SEQ ID NO: 2107454 - RNA, 19 nt, Homo sapiens
  misc_RNA (1)...(19): siRNA sense strand
agaggaaguucagcaugga

SEQ ID NO: 2107455 - RNA, 19 nt, Homo sapiens
  misc_RNA (1)...(19): siRNA sense strand
acaacaauaucggcauucu

SEQ ID NO: 2107456 - RNA, 19 nt, Homo sapiens
  misc_RNA (1)...(19): siRNA sense strand
ccaaucagccccagcaaga

SEQ ID NO: 2107457 - RNA, 19 nt, Homo sapiens
  misc_RNA (1)...(19): siRNA sense strand
caacaauaucggcauucug

SEQ ID NO: 2107458 - RNA, 19 nt, Homo sapiens
  misc_RNA (1)...(19): siRNA sense strand
gcauaugccugugcuggua

SEQ ID NO: 2107459 - RNA, 19 nt, Homo sapiens
  misc_RNA (1)...(19): siRNA sense strand
cgacuucucuucccaaauc

SEQ ID NO: 2107460 - RNA, 19 nt, Homo sapiens
  misc_RNA (1)...(19): siRNA sense strand
ucacugcgccuguuuauga

SEQ ID NO: 2107461 - RNA, 19 nt, Homo sapiens
  misc_RNA (1)...(19): siRNA sense strand
ggagagaugucugcuguca

SEQ ID NO: 2107462 - RNA, 19 nt, Homo sapiens
  misc_RNA (1)...(19): siRNA sense strand
gacaaggacuucagguuca

SEQ ID NO: 2107463 - RNA, 19 nt, Homo sapiens
  misc_RNA (1)...(19): siRNA sense strand
gcacccugauccaauguuu

SEQ ID NO: 2107464 - RNA, 19 nt, Homo sapiens
  misc_RNA (1)...(19): siRNA sense strand
gaacugaagcgcucugcaa

SEQ ID NO: 2107465 - RNA, 19 nt, Homo sapiens
  misc_RNA (1)...(19): siRNA sense strand
ugaacuugcugcccucuuu

SEQ ID NO: 2107466 - RNA, 19 nt, Homo sapiens
  misc_RNA (1)...(19): siRNA sense strand
gacagaggauagugaauuc

SEQ ID NO: 2107467 - RNA, 19 nt, Homo sapiens
  misc_RNA (1)...(19): siRNA sense strand
cgagcucgcugaccaccua

SEQ ID NO: 2107468 - RNA, 19 nt, Homo sapiens
  misc_RNA (1)...(19): siRNA sense strand
ucaaagaacgcgaggagaa

SEQ ID NO: 2107469 - RNA, 19 nt, Homo sapiens
  misc_RNA (1)...(19): siRNA sense strand
cugaagcgcucugcaauga

SEQ ID NO: 2107470 - RNA, 19 nt, Homo sapiens
  misc_RNA (1)...(19): siRNA sense strand
ggaagaaccagcgggcuuu

SEQ ID NO: 2107471 - RNA, 19 nt, Homo sapiens
  misc_RNA (1)...(19): siRNA sense strand
guacagcgaugacgaugac

SEQ ID NO: 2107472 - RNA, 19 nt, Homo sapiens
  misc_RNA (1)...(19): siRNA sense strand
caacucagcugugcacaac

SEQ ID NO: 2107473 - RNA, 19 nt, Homo sapiens
  misc_RNA (1)...(19): siRNA sense strand
ggaagcugguccuugugaa

SEQ ID NO: 2107474 - RNA, 19 nt, Homo sapiens
  misc_RNA (1)...(19): siRNA sense strand
aaagcaagaugaacugaag

SEQ ID NO: 2107475 - RNA, 19 nt, Homo sapiens
  misc_RNA (1)...(19): siRNA sense strand
ggagacagaggauagugaa

SEQ ID NO: 2107476 - RNA, 19 nt, Homo sapiens
  misc_RNA (1)...(19): siRNA sense strand
caaccuggaugaugaugag

SEQ ID NO: 2107477 - RNA, 19 nt, Homo sapiens
  misc_RNA (1)...(19): siRNA sense strand
gcugacgucuucacugcuu

SEQ ID NO: 2107478 - RNA, 19 nt, Homo sapiens
  misc_RNA (1)...(19): siRNA sense strand
caucacagcggucaaguuc

SEQ ID NO: 2107479 - RNA, 19 nt, Homo sapiens
  misc_RNA (1)...(19): siRNA sense strand
ggacuaugccaaacucauc

SEQ ID NO: 2107480 - RNA, 19 nt, Homo sapiens
  misc_RNA (1)...(19): siRNA sense strand
gaggguggaccgacucauu

SEQ ID NO: 2107481 - RNA, 19 nt, Homo sapiens
  misc_RNA (1)...(19): siRNA sense strand
ucugcaaccuggaugauga

SEQ ID NO: 2107482 - RNA, 19 nt, Homo sapiens
  misc_RNA (1)...(19): siRNA sense strand
gaaggaccacuacgacauc

SEQ ID NO: 2107483 - RNA, 19 nt, Homo sapiens
  misc_RNA (1)...(19): siRNA sense strand
gugcgacucuggcuuucuu

SEQ ID NO: 2107484 - RNA, 19 nt, Homo sapiens
  misc_RNA (1)...(19): siRNA sense strand
cgucuucacugcuuacauc

SEQ ID NO: 2107485 - RNA, 19 nt, Homo sapiens
  misc_RNA (1)...(19): siRNA sense strand
ucagugagcaagagaguga

SEQ ID NO: 2107486 - RNA, 19 nt, Homo sapiens
  misc_RNA (1)...(19): siRNA sense strand
caaagcugguucugugaag

SEQ ID NO: 2107487 - RNA, 19 nt, Homo sapiens
  misc_RNA (1)...(19): siRNA sense strand
agacagaggauagugaauu

SEQ ID NO: 2107488 - RNA, 19 nt, Homo sapiens
  misc_RNA (1)...(19): siRNA sense strand
gaacuugcugcccucuuug

SEQ ID NO: 2107489 - RNA, 19 nt, Homo sapiens
  misc_RNA (1)...(19): siRNA sense strand
caucauggccgacuucucu

SEQ ID NO: 2107490 - RNA, 19 nt, Homo sapiens
  misc_RNA (1)...(19): siRNA sense strand
ucaagguccuggcauucuu

SEQ ID NO: 2107491 - RNA, 19 nt, Homo sapiens
  misc_RNA (1)...(19): siRNA sense strand
gauccugagccauauguug

SEQ ID NO: 2107492 - RNA, 19 nt, Homo sapiens
  misc_RNA (1)...(19): siRNA sense strand
gcaagguggugaagaugcu

SEQ ID NO: 2107493 - RNA, 19 nt, Homo sapiens
  misc_RNA (1)...(19): siRNA sense strand
gcggucaaguuccuuaucu

SEQ ID NO: 2107494 - RNA, 19 nt, Homo sapiens
  misc_RNA (1)...(19): siRNA sense strand
ugucggaguugcagaagga

SEQ ID NO: 2107495 - RNA, 19 nt, Homo sapiens
  misc_RNA (1)...(19): siRNA sense strand
gcagguguuccacucauug

SEQ ID NO: 2107496 - RNA, 19 nt, Homo sapiens
  misc_RNA (1)...(19): siRNA sense strand
caacuacaacuacgacagu

SEQ ID NO: 2107497 - RNA, 19 nt, Homo sapiens
  misc_RNA (1)...(19): siRNA sense strand
gggucaagguccuggcauu

SEQ ID NO: 2107498 - RNA, 19 nt, Homo sapiens
  misc_RNA (1)...(19): siRNA sense strand
caacaagcccucgcuaguc

SEQ ID NO: 2107499 - RNA, 19 nt, Homo sapiens
  misc_RNA (1)...(19): siRNA sense strand
gggaagcugguccuuguga

SEQ ID NO: 2107500 - RNA, 19 nt, Homo sapiens
  misc_RNA (1)...(19): siRNA sense strand
cuacgacagugaugaggau

SEQ ID NO: 2107501 - RNA, 19 nt, Homo sapiens
  misc_RNA (1)...(19): siRNA sense strand
gguaucaggcaucaucuuc

SEQ ID NO: 2107502 - RNA, 19 nt, Homo sapiens
  misc_RNA (1)...(19): siRNA sense strand
uccgggaccugcuggauga

SEQ ID NO: 2107503 - RNA, 19 nt, Homo sapiens
  misc_RNA (1)...(19): siRNA sense strand
acucagcugugcacaacaa

SEQ ID NO: 2107504 - RNA, 19 nt, Homo sapiens
  misc_RNA (1)...(19): siRNA sense strand
ugaccuggagcccacguua

SEQ ID NO: 2107505 - RNA, 19 nt, Homo sapiens
  misc_RNA (1)...(19): siRNA sense strand
aggagcagauggagacaga

SEQ ID NO: 2107506 - RNA, 19 nt, Homo sapiens
  misc_RNA (1)...(19): siRNA sense strand
uugaaagcauccagaagga

SEQ ID NO: 2107507 - RNA, 19 nt, Homo sapiens
  misc_RNA (1)...(19): siRNA sense strand
gaagaaccagcgggcuuug

SEQ ID NO: 2107508 - RNA, 19 nt, Homo sapiens
  misc_RNA (1)...(19): siRNA sense strand
gccauauguuggagagaug

SEQ ID NO: 2107509 - RNA, 19 nt, Homo sapiens
  misc_RNA (1)...(19): siRNA sense strand
gcgacaaggacuucagguu

SEQ ID NO: 2107510 - RNA, 19 nt, Homo sapiens
  misc_RNA (1)...(19): siRNA sense strand
gugcagaaccuggcuguca

SEQ ID NO: 2107511 - RNA, 19 nt, Homo sapiens
  misc_RNA (1)...(19): siRNA sense strand
gcucacugcgccuguuuau

SEQ ID NO: 2107512 - RNA, 19 nt, Homo sapiens
  misc_RNA (1)...(19): siRNA sense strand
cacuacagcuugaccuaca

SEQ ID NO: 2107513 - RNA, 19 nt, Homo sapiens
  misc_RNA (1)...(19): siRNA sense strand
gcagauggagacagaggau

SEQ ID NO: 2107514 - RNA, 19 nt, Homo sapiens
  misc_RNA (1)...(19): siRNA sense strand
gccgacuucucuucccaaa

SEQ ID NO: 2107515 - RNA, 19 nt, Homo sapiens
  misc_RNA (1)...(19): siRNA sense strand
gccuuugaaugcauguauu

SEQ ID NO: 2107516 - RNA, 19 nt, Homo sapiens
  misc_RNA (1)...(19): siRNA sense strand
gagcuucaucggagaguuc

SEQ ID NO: 2107517 - RNA, 19 nt, Homo sapiens
  misc_RNA (1)...(19): siRNA sense strand
ucacagcggucaaguuccu

SEQ ID NO: 2107518 - RNA, 19 nt, Homo sapiens
  misc_RNA (1)...(19): siRNA sense strand
ccgaggcacugcacauucu

SEQ ID NO: 2107519 - RNA, 19 nt, Homo sapiens
  misc_RNA (1)...(19): siRNA sense strand
gcuggauccugagccauau

SEQ ID NO: 2107520 - RNA, 19 nt, Homo sapiens
  misc_RNA (1)...(19): siRNA sense strand
gugcaucgcagccuugauc

SEQ ID NO: 2107521 - RNA, 19 nt, Homo sapiens
  misc_RNA (1)...(19): siRNA sense strand
gcauguauucacugcuuga

SEQ ID NO: 2107522 - RNA, 19 nt, Homo sapiens
  misc_RNA (1)...(19): siRNA sense strand
uugggaagcugguccuugu

SEQ ID NO: 2107523 - RNA, 19 nt, Homo sapiens
  misc_RNA (1)...(19): siRNA sense strand
cugcaugggccaccuugua

SEQ ID NO: 2107524 - RNA, 19 nt, Homo sapiens
  misc_RNA (1)...(19): siRNA sense strand
uaucaggcaucaucuucuc

SEQ ID NO: 2107525 - RNA, 19 nt, Homo sapiens
  misc_RNA (1)...(19): siRNA sense strand
ugaauucagugagcaagag

SEQ ID NO: 2107526 - RNA, 19 nt, Homo sapiens
  misc_RNA (1)...(19): siRNA sense strand
gcaaccuggaugaugauga

SEQ ID NO: 2107527 - RNA, 19 nt, Homo sapiens
  misc_RNA (1)...(19): siRNA sense strand
gcacauucuggccucauuc

SEQ ID NO: 2107528 - RNA, 19 nt, Homo sapiens
  misc_RNA (1)...(19): siRNA sense strand
uggaugcccuggccuucuu

SEQ ID NO: 2107529 - RNA, 19 nt, Homo sapiens
  misc_RNA (1)...(19): siRNA sense strand
gcugguaucaggcaucauc

SEQ ID NO: 2107530 - RNA, 19 nt, Homo sapiens
  misc_RNA (1)...(19): siRNA sense strand
gaauucagugagcaagaga

SEQ ID NO: 2107531 - RNA, 19 nt, Homo sapiens
  misc_RNA (1)...(19): siRNA sense strand
ccucugccuccaauacaua

SEQ ID NO: 2107532 - RNA, 19 nt, Homo sapiens
  misc_RNA (1)...(19): siRNA sense strand
ucaaagcugguucugugaa

SEQ ID NO: 2107533 - RNA, 19 nt, Homo sapiens
  misc_RNA (1)...(19): siRNA sense strand
caucugggccuugcuguuc

SEQ ID NO: 2107534 - RNA, 19 nt, Homo sapiens
  misc_RNA (1)...(19): siRNA sense strand
ggucaacgagagcgacaug

SEQ ID NO: 2107535 - RNA, 19 nt, Homo sapiens
  misc_RNA (1)...(19): siRNA sense strand
cgacagugaugaggaugag

SEQ ID NO: 2107536 - RNA, 19 nt, Homo sapiens
  misc_RNA (1)...(19): siRNA sense strand
caacuacgacagugaugag

SEQ ID NO: 2107537 - RNA, 19 nt, Homo sapiens
  misc_RNA (1)...(19): siRNA sense strand
ggaagugccccaaggaaau

SEQ ID NO: 2107538 - RNA, 19 nt, Homo sapiens
  misc_RNA (1)...(19): siRNA sense strand
gacucuggcuuucuucaac

SEQ ID NO: 2107539 - RNA, 19 nt, Homo sapiens
  misc_RNA (1)...(19): siRNA sense strand
gaaggcggugcuccuggaa

SEQ ID NO: 2107540 - RNA, 19 nt, Homo sapiens
  misc_RNA (1)...(19): siRNA sense strand
ugcagaaccuggcugucaa

SEQ ID NO: 2107541 - RNA, 19 nt, Homo sapiens
  misc_RNA (1)...(19): siRNA sense strand
caacgagagcgacaugcau

SEQ ID NO: 2107542 - RNA, 19 nt, Homo sapiens
  misc_RNA (1)...(19): siRNA sense strand
ugaaggaccacuacgacau

SEQ ID NO: 2107543 - RNA, 19 nt, Homo sapiens
  misc_RNA (1)...(19): siRNA sense strand
gugcugguaucaggcauca

SEQ ID NO: 2107544 - RNA, 19 nt, Homo sapiens
  misc_RNA (1)...(19): siRNA sense strand
acaacaagcccucgcuagu

SEQ ID NO: 2107545 - RNA, 19 nt, Homo sapiens
  misc_RNA (1)...(19): siRNA sense strand
caccugugauggccugugu

SEQ ID NO: 2107546 - RNA, 19 nt, Homo sapiens
  misc_RNA (1)...(19): siRNA sense strand
ggugguggccgagugcauu

SEQ ID NO: 2107547 - RNA, 19 nt, Homo sapiens
  misc_RNA (1)...(19): siRNA sense strand
gugaagcaggaguuugaaa

SEQ ID NO: 2107548 - RNA, 19 nt, Homo sapiens
  misc_RNA (1)...(19): siRNA sense strand
gccgugcgacucuggcuuu

SEQ ID NO: 2107549 - RNA, 19 nt, Homo sapiens
  misc_RNA (1)...(19): siRNA sense strand
acgaugacaugagcuggaa

SEQ ID NO: 2107550 - RNA, 19 nt, Homo sapiens
  misc_RNA (1)...(19): siRNA sense strand
gaagcugguccuugugaac

SEQ ID NO: 2107551 - RNA, 19 nt, Homo sapiens
  misc_RNA (1)...(19): siRNA sense strand
ggucaagguccuggcauuc

SEQ ID NO: 2107552 - RNA, 19 nt, Homo sapiens
  misc_RNA (1)...(19): siRNA sense strand
ggccuuccacccacacuug

SEQ ID NO: 2107553 - RNA, 19 nt, Homo sapiens
  misc_RNA (1)...(19): siRNA sense strand
cugaccugcugcccgauuu

SEQ ID NO: 2107554 - RNA, 19 nt, Homo sapiens
  misc_RNA (1)...(19): siRNA sense strand
cagcgaugacgaugacaug

SEQ ID NO: 2107555 - RNA, 19 nt, Homo sapiens
  misc_RNA (1)...(19): siRNA sense strand
gcaggaguuugaaaagcaa

SEQ ID NO: 2107556 - RNA, 19 nt, Homo sapiens
  misc_RNA (1)...(19): siRNA sense strand
augcauguauucacugcuu

SEQ ID NO: 2107557 - RNA, 19 nt, Homo sapiens
  misc_RNA (1)...(19): siRNA sense strand
caaagaacgcgaggagaac

SEQ ID NO: 2107558 - RNA, 19 nt, Homo sapiens
  misc_RNA (1)...(19): siRNA sense strand
gaacauuggugacuauauu

SEQ ID NO: 2107559 - RNA, 19 nt, Homo sapiens
  misc_RNA (1)...(19): siRNA sense strand
gagauuaccuugucuucaa

SEQ ID NO: 2107560 - RNA, 19 nt, Homo sapiens
  misc_RNA (1)...(19): siRNA sense strand
ggagugaucugcugaacau

SEQ ID NO: 2107561 - RNA, 19 nt, Homo sapiens
  misc_RNA (1)...(19): siRNA sense strand
ggcaauagcuuuggcuuug

SEQ ID NO: 2107562 - RNA, 19 nt, Homo sapiens
  misc_RNA (1)...(19): siRNA sense strand
ggagagaccgucacacuga

SEQ ID NO: 2107563 - RNA, 19 nt, Homo sapiens
  misc_RNA (1)...(19): siRNA sense strand
ggcgaugccuguugucuaa

SEQ ID NO: 2107564 - RNA, 19 nt, Homo sapiens
  misc_RNA (1)...(19): siRNA sense strand
ugaagaggcuguagaugga

SEQ ID NO: 2107565 - RNA, 19 nt, Homo sapiens
  misc_RNA (1)...(19): siRNA sense strand
ccacaggugccgucaguua

SEQ ID NO: 2107566 - RNA, 19 nt, Homo sapiens
  misc_RNA (1)...(19): siRNA sense strand
ggaaggaaacucagacuca

SEQ ID NO: 2107567 - RNA, 19 nt, Homo sapiens
  misc_RNA (1)...(19): siRNA sense strand
cggaacaagucagucauua

SEQ ID NO: 2107568 - RNA, 19 nt, Homo sapiens
  misc_RNA (1)...(19): siRNA sense strand
ggagucauguggucaguca

SEQ ID NO: 2107569 - RNA, 19 nt, Homo sapiens
  misc_RNA (1)...(19): siRNA sense strand
ucgaagaccuggagucaug

SEQ ID NO: 2107570 - RNA, 19 nt, Homo sapiens
  misc_RNA (1)...(19): siRNA sense strand
uagaggaggugcccaugaa

SEQ ID NO: 2107571 - RNA, 19 nt, Homo sapiens
  misc_RNA (1)...(19): siRNA sense strand
aaacucagacucagagauu

SEQ ID NO: 2107572 - RNA, 19 nt, Homo sapiens
  misc_RNA (1)...(19): siRNA sense strand
ggacgggacuauggaggaa

SEQ ID NO: 2107573 - RNA, 19 nt, Homo sapiens
  misc_RNA (1)...(19): siRNA sense strand
caacaacguuagccucaag

SEQ ID NO: 2107574 - RNA, 19 nt, Homo sapiens
  misc_RNA (1)...(19): siRNA sense strand
ugagggaacuggagguaug

SEQ ID NO: 2107575 - RNA, 19 nt, Homo sapiens
  misc_RNA (1)...(19): siRNA sense strand
gagagaccgucacacugaa

SEQ ID NO: 2107576 - RNA, 19 nt, Homo sapiens
  misc_RNA (1)...(19): siRNA sense strand
gcgacaggcugcucagugu

SEQ ID NO: 2107577 - RNA, 19 nt, Homo sapiens
  misc_RNA (1)...(19): siRNA sense strand
gaucaucuccgacaucaag

SEQ ID NO: 2107578 - RNA, 19 nt, Homo sapiens
  misc_RNA (1)...(19): siRNA sense strand
ugguggagcugaucaagaa

SEQ ID NO: 2107579 - RNA, 19 nt, Homo sapiens
  misc_RNA (1)...(19): siRNA sense strand
gcugaacauuggugacuau

SEQ ID NO: 2107580 - RNA, 19 nt, Homo sapiens
  misc_RNA (1)...(19): siRNA sense strand
gaccacaggugccgucagu

SEQ ID NO: 2107581 - RNA, 19 nt, Homo sapiens
  misc_RNA (1)...(19): siRNA sense strand
ggguaccgguggccaaauu

SEQ ID NO: 2107582 - RNA, 19 nt, Homo sapiens
  misc_RNA (1)...(19): siRNA sense strand
ucagauggccuccuggaaa

SEQ ID NO: 2107583 - RNA, 19 nt, Homo sapiens
  misc_RNA (1)...(19): siRNA sense strand
ggacgucucccucuacaag

SEQ ID NO: 2107584 - RNA, 19 nt, Homo sapiens
  misc_RNA (1)...(19): siRNA sense strand
gcaauagcuuuggcuuugu

SEQ ID NO: 2107585 - RNA, 19 nt, Homo sapiens
  misc_RNA (1)...(19): siRNA sense strand
gagcugggcaucaccauca

SEQ ID NO: 2107586 - RNA, 19 nt, Homo sapiens
  misc_RNA (1)...(19): siRNA sense strand
gcgaggaccuggugaagcu

SEQ ID NO: 2107587 - RNA, 19 nt, Homo sapiens
  misc_RNA (1)...(19): siRNA sense strand
cgaggcgggugaugucuug

SEQ ID NO: 2107588 - RNA, 19 nt, Homo sapiens
  misc_RNA (1)...(19): siRNA sense strand
gaagaucaagaagcaacua

SEQ ID NO: 2107589 - RNA, 19 nt, Homo sapiens
  misc_RNA (1)...(19): siRNA sense strand
caaggagggcaauagcuuu

SEQ ID NO: 2107590 - RNA, 19 nt, Homo sapiens
  misc_RNA (1)...(19): siRNA sense strand
gcaccgacaaggauggaaa

SEQ ID NO: 2107591 - RNA, 19 nt, Homo sapiens
  misc_RNA (1)...(19): siRNA sense strand
cggcaugacuuugguuuca

SEQ ID NO: 2107592 - RNA, 19 nt, Homo sapiens
  misc_RNA (1)...(19): siRNA sense strand
acgugaagcugcccaagaa

SEQ ID NO: 2107593 - RNA, 19 nt, Homo sapiens
  misc_RNA (1)...(19): siRNA sense strand
acucagagauuaccuuguc

SEQ ID NO: 2107594 - RNA, 19 nt, Homo sapiens
  misc_RNA (1)...(19): siRNA sense strand
ucacccugcucaagaaugu

SEQ ID NO: 2107595 - RNA, 19 nt, Homo sapiens
  misc_RNA (1)...(19): siRNA sense strand
ggaggacgccgugcaaauc

SEQ ID NO: 2107596 - RNA, 19 nt, Homo sapiens
  misc_RNA (1)...(19): siRNA sense strand
gaagaagggaacacaagag

SEQ ID NO: 2107597 - RNA, 19 nt, Homo sapiens
  misc_RNA (1)...(19): siRNA sense strand
gagcaguucacaugcauuc

SEQ ID NO: 2107598 - RNA, 19 nt, Homo sapiens
  misc_RNA (1)...(19): siRNA sense strand
gaacaagucagucauuacc

SEQ ID NO: 2107599 - RNA, 19 nt, Homo sapiens
  misc_RNA (1)...(19): siRNA sense strand
gagaauaaccccaggauca

SEQ ID NO: 2107600 - RNA, 19 nt, Homo sapiens
  misc_RNA (1)...(19): siRNA sense strand
ucaucacccugcucaagaa

SEQ ID NO: 2107601 - RNA, 19 nt, Homo sapiens
  misc_RNA (1)...(19): siRNA sense strand
acaagcuacuggccauuga

SEQ ID NO: 2107602 - RNA, 19 nt, Homo sapiens
  misc_RNA (1)...(19): siRNA sense strand
cgaagaagggaacacaaga

SEQ ID NO: 2107603 - RNA, 19 nt, Homo sapiens
  misc_RNA (1)...(19): siRNA sense strand
ucuuucagguggaguauga

SEQ ID NO: 2107604 - RNA, 19 nt, Homo sapiens
  misc_RNA (1)...(19): siRNA sense strand
gaugggcccuacuccaaag

SEQ ID NO: 2107605 - RNA, 19 nt, Homo sapiens
  misc_RNA (1)...(19): siRNA sense strand
cccagcagaugcccugaaa

SEQ ID NO: 2107606 - RNA, 19 nt, Homo sapiens
  misc_RNA (1)...(19): siRNA sense strand
gaaggacgaggacaacucu

SEQ ID NO: 2107607 - RNA, 19 nt, Homo sapiens
  misc_RNA (1)...(19): siRNA sense strand
ggagccaggcgacaagcua

SEQ ID NO: 2107608 - RNA, 19 nt, Homo sapiens
  misc_RNA (1)...(19): siRNA sense strand
gagcugaucaagaaagaag

SEQ ID NO: 2107609 - RNA, 19 nt, Homo sapiens
  misc_RNA (1)...(19): siRNA sense strand
gaggaggugcccaugaaga

SEQ ID NO: 2107610 - RNA, 19 nt, Homo sapiens
  misc_RNA (1)...(19): siRNA sense strand
gggcaauagcuuuggcuuu

SEQ ID NO: 2107611 - RNA, 19 nt, Homo sapiens
  misc_RNA (1)...(19): siRNA sense strand
gaccuugaaccacgccuuu

SEQ ID NO: 2107612 - RNA, 19 nt, Homo sapiens
  misc_RNA (1)...(19): siRNA sense strand
gagccucuccugcagaaau

SEQ ID NO: 2107613 - RNA, 19 nt, Homo sapiens
  misc_RNA (1)...(19): siRNA sense strand
gaccagugaugcugaugag

SEQ ID NO: 2107614 - RNA, 19 nt, Homo sapiens
  misc_RNA (1)...(19): siRNA sense strand
gaccguguccuguccauca

SEQ ID NO: 2107615 - RNA, 19 nt, Homo sapiens
  misc_RNA (1)...(19): siRNA sense strand
caggaucauuucaaagaca

SEQ ID NO: 2107616 - RNA, 19 nt, Homo sapiens
  misc_RNA (1)...(19): siRNA sense strand
gacuauauucggucuguga

SEQ ID NO: 2107617 - RNA, 19 nt, Homo sapiens
  misc_RNA (1)...(19): siRNA sense strand
gaaacucagacucagagau

SEQ ID NO: 2107618 - RNA, 19 nt, Homo sapiens
  misc_RNA (1)...(19): siRNA sense strand
ggaacaagucagucauuac

SEQ ID NO: 2107619 - RNA, 19 nt, Homo sapiens
  misc_RNA (1)...(19): siRNA sense strand
ccaccucccuccggaacaa

SEQ ID NO: 2107620 - RNA, 19 nt, Homo sapiens
  misc_RNA (1)...(19): siRNA sense strand
gacccuugaugguggaaau

SEQ ID NO: 2107621 - RNA, 19 nt, Homo sapiens
  misc_RNA (1)...(19): siRNA sense strand
caauagcuuuggcuuuguc

SEQ ID NO: 2107622 - RNA, 19 nt, Homo sapiens
  misc_RNA (1)...(19): siRNA sense strand
gaucaucacccugcucaag

SEQ ID NO: 2107623 - RNA, 19 nt, Homo sapiens
  misc_RNA (1)...(19): siRNA sense strand
ugcuggagguggaguauga

SEQ ID NO: 2107624 - RNA, 19 nt, Homo sapiens
  misc_RNA (1)...(19): siRNA sense strand
acucuggcauccaucauga

SEQ ID NO: 2107625 - RNA, 19 nt, Homo sapiens
  misc_RNA (1)...(19): siRNA sense strand
gggcuucuggcgcauguuu

SEQ ID NO: 2107626 - RNA, 19 nt, Homo sapiens
  misc_RNA (1)...(19): siRNA sense strand
gaugaggacccagcagaug

SEQ ID NO: 2107627 - RNA, 19 nt, Homo sapiens
  misc_RNA (1)...(19): siRNA sense strand
ggaaggacgaggacaacuc

SEQ ID NO: 2107628 - RNA, 19 nt, Homo sapiens
  misc_RNA (1)...(19): siRNA sense strand
gggcgaugccuguugucua

SEQ ID NO: 2107629 - RNA, 19 nt, Homo sapiens
  misc_RNA (1)...(19): siRNA sense strand
gggagacaauagcgaacau

SEQ ID NO: 2107630 - RNA, 19 nt, Homo sapiens
  misc_RNA (1)...(19): siRNA sense strand
cacugaagaucaagaagca

SEQ ID NO: 2107631 - RNA, 19 nt, Homo sapiens
  misc_RNA (1)...(19): siRNA sense strand
ggagguggaguucgaugug

SEQ ID NO: 2107632 - RNA, 19 nt, Homo sapiens
  misc_RNA (1)...(19): siRNA sense strand
acaagucagucauuaccau

SEQ ID NO: 2107633 - RNA, 19 nt, Homo sapiens
  misc_RNA (1)...(19): siRNA sense strand
cccaggaucauuucaaaga

SEQ ID NO: 2107634 - RNA, 19 nt, Homo sapiens
  misc_RNA (1)...(19): siRNA sense strand
cagauggccuccuggaaaa

SEQ ID NO: 2107635 - RNA, 19 nt, Homo sapiens
  misc_RNA (1)...(19): siRNA sense strand
ggcuguagauggagggaau

SEQ ID NO: 2107636 - RNA, 19 nt, Homo sapiens
  misc_RNA (1)...(19): siRNA sense strand
ggacgaggacaacucugau

SEQ ID NO: 2107637 - RNA, 19 nt, Homo sapiens
  misc_RNA (1)...(19): siRNA sense strand
gcgaagaagggaacacaag

SEQ ID NO: 2107638 - RNA, 19 nt, Homo sapiens
  misc_RNA (1)...(19): siRNA sense strand
gagaccacauccuguccau

SEQ ID NO: 2107639 - RNA, 19 nt, Homo sapiens
  misc_RNA (1)...(19): siRNA sense strand
gaaagcccagggucuccaa

SEQ ID NO: 2107640 - RNA, 19 nt, Homo sapiens
  misc_RNA (1)...(19): siRNA sense strand
gcgcauguuuggagaagcu

SEQ ID NO: 2107641 - RNA, 19 nt, Homo sapiens
  misc_RNA (1)...(19): siRNA sense strand
gagggcuucuggcgcaugu

SEQ ID NO: 2107642 - RNA, 19 nt, Homo sapiens
  misc_RNA (1)...(19): siRNA sense strand
uguccucccugacugaaga

SEQ ID NO: 2107643 - RNA, 19 nt, Homo sapiens
  misc_RNA (1)...(19): siRNA sense strand
gacaagcuacuggccauug

SEQ ID NO: 2107644 - RNA, 19 nt, Homo sapiens
  misc_RNA (1)...(19): siRNA sense strand
caugaguccucgaacuaca

SEQ ID NO: 2107645 - RNA, 19 nt, Homo sapiens
  misc_RNA (1)...(19): siRNA sense strand
gugaucugcugaacauugg

SEQ ID NO: 2107646 - RNA, 19 nt, Homo sapiens
  misc_RNA (1)...(19): siRNA sense strand
caguggacgucucccucua

SEQ ID NO: 2107647 - RNA, 19 nt, Homo sapiens
  misc_RNA (1)...(19): siRNA sense strand
ggaggaggaggaugauugg

SEQ ID NO: 2107648 - RNA, 19 nt, Homo sapiens
  misc_RNA (1)...(19): siRNA sense strand
cagcagaugcccugaaagg

SEQ ID NO: 2107649 - RNA, 19 nt, Homo sapiens
  misc_RNA (1)...(19): siRNA sense strand
ucacacugaagaucaagaa

SEQ ID NO: 2107650 - RNA, 19 nt, Homo sapiens
  misc_RNA (1)...(19): siRNA sense strand
ggccagcauuucagagaag

SEQ ID NO: 2107651 - RNA, 19 nt, Homo sapiens
  misc_RNA (1)...(19): siRNA sense strand
gugacuauauucggucugu

SEQ ID NO: 2107652 - RNA, 19 nt, Homo sapiens
  misc_RNA (1)...(19): siRNA sense strand
gaucaagaagcaacuagac

SEQ ID NO: 2107653 - RNA, 19 nt, Homo sapiens
  misc_RNA (1)...(19): siRNA sense strand
uggagcugaucaagaaaga

SEQ ID NO: 2107654 - RNA, 19 nt, Homo sapiens
  misc_RNA (1)...(19): siRNA sense strand
acaaggagggcaauagcuu

SEQ ID NO: 2107655 - RNA, 19 nt, Homo sapiens
  misc_RNA (1)...(19): siRNA sense strand
guaccgguggccaaauuga

SEQ ID NO: 2107656 - RNA, 19 nt, Homo sapiens
  misc_RNA (1)...(19): siRNA sense strand
uguuagagcaguucacaug

SEQ ID NO: 2107657 - RNA, 19 nt, Homo sapiens
  misc_RNA (1)...(19): siRNA sense strand
agaaauggaggagcuguug

SEQ ID NO: 2107658 - RNA, 19 nt, Homo sapiens
  misc_RNA (1)...(19): siRNA sense strand
gaacugacuuuacaagaua

SEQ ID NO: 2107659 - RNA, 19 nt, Homo sapiens
  misc_RNA (1)...(19): siRNA sense strand
gaacagacaugcugaguga

SEQ ID NO: 2107660 - RNA, 19 nt, Homo sapiens
  misc_RNA (1)...(19): siRNA sense strand
gaagugacaugcaaggaua

SEQ ID NO: 2107661 - RNA, 19 nt, Homo sapiens
  misc_RNA (1)...(19): siRNA sense strand
gaacaaaggagcaaaugua

SEQ ID NO: 2107662 - RNA, 19 nt, Homo sapiens
  misc_RNA (1)...(19): siRNA sense strand
gcaaaugguugacaccuuu

SEQ ID NO: 2107663 - RNA, 19 nt, Homo sapiens
  misc_RNA (1)...(19): siRNA sense strand
gcugagauguuaauugaua

SEQ ID NO: 2107664 - RNA, 19 nt, Homo sapiens
  misc_RNA (1)...(19): siRNA sense strand
gaaccuagcuccuauugca

SEQ ID NO: 2107665 - RNA, 19 nt, Homo sapiens
  misc_RNA (1)...(19): siRNA sense strand
ccaaaugccuauggaaaua

SEQ ID NO: 2107666 - RNA, 19 nt, Homo sapiens
  misc_RNA (1)...(19): siRNA sense strand
gaucaacacucuuauuaca

SEQ ID NO: 2107667 - RNA, 19 nt, Homo sapiens
  misc_RNA (1)...(19): siRNA sense strand
uaacggagauccugaugaa

SEQ ID NO: 2107668 - RNA, 19 nt, Homo sapiens
  misc_RNA (1)...(19): siRNA sense strand
ucagggagccucaaucuua

SEQ ID NO: 2107669 - RNA, 19 nt, Homo sapiens
  misc_RNA (1)...(19): siRNA sense strand
gcacuuugcugcugcauca

SEQ ID NO: 2107670 - RNA, 19 nt, Homo sapiens
  misc_RNA (1)...(19): siRNA sense strand
gaaaugggcuaacaauggu

SEQ ID NO: 2107671 - RNA, 19 nt, Homo sapiens
  misc_RNA (1)...(19): siRNA sense strand
gcacauagcagcacgguau

SEQ ID NO: 2107672 - RNA, 19 nt, Homo sapiens
  misc_RNA (1)...(19): siRNA sense strand
gaaauacaccucuucaugu

SEQ ID NO: 2107673 - RNA, 19 nt, Homo sapiens
  misc_RNA (1)...(19): siRNA sense strand
gaacaggaguacuuauaca

SEQ ID NO: 2107674 - RNA, 19 nt, Homo sapiens
  misc_RNA (1)...(19): siRNA sense strand
gaaaacaccucuuaugaug

SEQ ID NO: 2107675 - RNA, 19 nt, Homo sapiens
  misc_RNA (1)...(19): siRNA sense strand
ggaaauacaccucuucaug

SEQ ID NO: 2107676 - RNA, 19 nt, Homo sapiens
  misc_RNA (1)...(19): siRNA sense strand
gcaaaccccuuuacauaua

SEQ ID NO: 2107677 - RNA, 19 nt, Homo sapiens
  misc_RNA (1)...(19): siRNA sense strand
gaaugaaccuagcuccuau

SEQ ID NO: 2107678 - RNA, 19 nt, Homo sapiens
  misc_RNA (1)...(19): siRNA sense strand
gaauacuggugcagacuuu

SEQ ID NO: 2107679 - RNA, 19 nt, Homo sapiens
  misc_RNA (1)...(19): siRNA sense strand
gcauggagcugaagugaca

SEQ ID NO: 2107680 - RNA, 19 nt, Homo sapiens
  misc_RNA (1)...(19): siRNA sense strand
gaaguuacaucccgagaag

SEQ ID NO: 2107681 - RNA, 19 nt, Homo sapiens
  misc_RNA (1)...(19): siRNA sense strand
gauagaaaccucaucaaug

SEQ ID NO: 2107682 - RNA, 19 nt, Homo sapiens
  misc_RNA (1)...(19): siRNA sense strand
gaaguucgagcacuaauau

SEQ ID NO: 2107683 - RNA, 19 nt, Homo sapiens
  misc_RNA (1)...(19): siRNA sense strand
caacgcaguucauuauuca

SEQ ID NO: 2107684 - RNA, 19 nt, Homo sapiens
  misc_RNA (1)...(19): siRNA sense strand
ugaaugaccuugaugaaag

SEQ ID NO: 2107685 - RNA, 19 nt, Homo sapiens
  misc_RNA (1)...(19): siRNA sense strand
guagugaaauugcuugugu

SEQ ID NO: 2107686 - RNA, 19 nt, Homo sapiens
  misc_RNA (1)...(19): siRNA sense strand
gaaacuagugccuuguuaa

SEQ ID NO: 2107687 - RNA, 19 nt, Homo sapiens
  misc_RNA (1)...(19): siRNA sense strand
ugaaacuagugccuuguua

SEQ ID NO: 2107688 - RNA, 19 nt, Homo sapiens
  misc_RNA (1)...(19): siRNA sense strand
gugcagaacugacuuuaca

SEQ ID NO: 2107689 - RNA, 19 nt, Homo sapiens
  misc_RNA (1)...(19): siRNA sense strand
ucacugggcuugcuacaau

SEQ ID NO: 2107690 - RNA, 19 nt, Homo sapiens
  misc_RNA (1)...(19): siRNA sense strand
aauaagcccuuuacacuug

SEQ ID NO: 2107691 - RNA, 19 nt, Homo sapiens
  misc_RNA (1)...(19): siRNA sense strand
gaaugaccuugaugaaaga

SEQ ID NO: 2107692 - RNA, 19 nt, Homo sapiens
  misc_RNA (1)...(19): siRNA sense strand
gagcugaagugacaugcaa

SEQ ID NO: 2107693 - RNA, 19 nt, Homo sapiens
  misc_RNA (1)...(19): siRNA sense strand
ucaaguaccuucuagaucu

SEQ ID NO: 2107694 - RNA, 19 nt, Homo sapiens
  misc_RNA (1)...(19): siRNA sense strand
ggacaaacaaauacaguug

SEQ ID NO: 2107695 - RNA, 19 nt, Homo sapiens
  misc_RNA (1)...(19): siRNA sense strand
gcaguugcaucuuguagug

SEQ ID NO: 2107696 - RNA, 19 nt, Homo sapiens
  misc_RNA (1)...(19): siRNA sense strand
ggaaugaaccuagcuccua

SEQ ID NO: 2107697 - RNA, 19 nt, Homo sapiens
  misc_RNA (1)...(19): siRNA sense strand
gccaugagcugcugaucaa

SEQ ID NO: 2107698 - RNA, 19 nt, Homo sapiens
  misc_RNA (1)...(19): siRNA sense strand
gaagcauucugcagauguu

SEQ ID NO: 2107699 - RNA, 19 nt, Homo sapiens
  misc_RNA (1)...(19): siRNA sense strand
ggaaggacagcguugcaua

SEQ ID NO: 2107700 - RNA, 19 nt, Homo sapiens
  misc_RNA (1)...(19): siRNA sense strand
gauacaacgcaguucauua

SEQ ID NO: 2107701 - RNA, 19 nt, Homo sapiens
  misc_RNA (1)...(19): siRNA sense strand
guaaucgacugugaggaua

SEQ ID NO: 2107702 - RNA, 19 nt, Homo sapiens
  misc_RNA (1)...(19): siRNA sense strand
gggaacaggaguacuuaua

SEQ ID NO: 2107703 - RNA, 19 nt, Homo sapiens
  misc_RNA (1)...(19): siRNA sense strand
gcagcagccucuaguggaa

SEQ ID NO: 2107704 - RNA, 19 nt, Homo sapiens
  misc_RNA (1)...(19): siRNA sense strand
cugcugagauguuaauuga

SEQ ID NO: 2107705 - RNA, 19 nt, Homo sapiens
  misc_RNA (1)...(19): siRNA sense strand
gugccaauauuaaugcuuu

SEQ ID NO: 2107706 - RNA, 19 nt, Homo sapiens
  misc_RNA (1)...(19): siRNA sense strand
cgaaggugcugcugagaug

SEQ ID NO: 2107707 - RNA, 19 nt, Homo sapiens
  misc_RNA (1)...(19): siRNA sense strand
caaaggagcaaauguagau

SEQ ID NO: 2107708 - RNA, 19 nt, Homo sapiens
  misc_RNA (1)...(19): siRNA sense strand
gaaugaacuuauagacugu

SEQ ID NO: 2107709 - RNA, 19 nt, Homo sapiens
  misc_RNA (1)...(19): siRNA sense strand
guugacaccuuuacacaga

SEQ ID NO: 2107710 - RNA, 19 nt, Homo sapiens
  misc_RNA (1)...(19): siRNA sense strand
aaauguagaugccaaagau

SEQ ID NO: 2107711 - RNA, 19 nt, Homo sapiens
  misc_RNA (1)...(19): siRNA sense strand
ugugaaggcuguccaaaug

SEQ ID NO: 2107712 - RNA, 19 nt, Homo sapiens
  misc_RNA (1)...(19): siRNA sense strand
ucagaaugcuuacggcuau

SEQ ID NO: 2107713 - RNA, 19 nt, Homo sapiens
  misc_RNA (1)...(19): siRNA sense strand
gagccucaaucuuaguaaa

SEQ ID NO: 2107714 - RNA, 19 nt, Homo sapiens
  misc_RNA (1)...(19): siRNA sense strand
gaucuugaugucagaaaua

SEQ ID NO: 2107715 - RNA, 19 nt, Homo sapiens
  misc_RNA (1)...(19): siRNA sense strand
ggacaaauuugggagaucu

SEQ ID NO: 2107716 - RNA, 19 nt, Homo sapiens
  misc_RNA (1)...(19): siRNA sense strand
gagcuguaaucgacuguga

SEQ ID NO: 2107717 - RNA, 19 nt, Homo sapiens
  misc_RNA (1)...(19): siRNA sense strand
gcagaaaucauugaacuuc

SEQ ID NO: 2107718 - RNA, 19 nt, Homo sapiens
  misc_RNA (1)...(19): siRNA sense strand
ccauaaugcucaagucaau

SEQ ID NO: 2107719 - RNA, 19 nt, Homo sapiens
  misc_RNA (1)...(19): siRNA sense strand
ggaagcaguucagguacuu

SEQ ID NO: 2107720 - RNA, 19 nt, Homo sapiens
  misc_RNA (1)...(19): siRNA sense strand
guucgagcacuaauauuua

SEQ ID NO: 2107721 - RNA, 19 nt, Homo sapiens
  misc_RNA (1)...(19): siRNA sense strand
cgugauaaaugacaacgaa

SEQ ID NO: 2107722 - RNA, 19 nt, Homo sapiens
  misc_RNA (1)...(19): siRNA sense strand
uaagggccauguugaaugu

SEQ ID NO: 2107723 - RNA, 19 nt, Homo sapiens
  misc_RNA (1)...(19): siRNA sense strand
gagcaacaauaagcccuuu

SEQ ID NO: 2107724 - RNA, 19 nt, Homo sapiens
  misc_RNA (1)...(19): siRNA sense strand
ugaggaagcaguucaggua

SEQ ID NO: 2107725 - RNA, 19 nt, Homo sapiens
  misc_RNA (1)...(19): siRNA sense strand
gcauguugcugcccgaaau

SEQ ID NO: 2107726 - RNA, 19 nt, Homo sapiens
  misc_RNA (1)...(19): siRNA sense strand
gcauauaugggucacauug

SEQ ID NO: 2107727 - RNA, 19 nt, Homo sapiens
  misc_RNA (1)...(19): siRNA sense strand
gggccgaugucaauaugaa

SEQ ID NO: 2107728 - RNA, 19 nt, Homo sapiens
  misc_RNA (1)...(19): siRNA sense strand
gcaaggauacaacgcaguu

SEQ ID NO: 2107729 - RNA, 19 nt, Homo sapiens
  misc_RNA (1)...(19): siRNA sense strand
auaaggauguggcugauug

SEQ ID NO: 2107730 - RNA, 19 nt, Homo sapiens
  misc_RNA (1)...(19): siRNA sense strand
ggaaauguauugccaucac

SEQ ID NO: 2107731 - RNA, 19 nt, Homo sapiens
  misc_RNA (1)...(19): siRNA sense strand
cgaaaugggcuaacaaugg

SEQ ID NO: 2107732 - RNA, 19 nt, Homo sapiens
  misc_RNA (1)...(19): siRNA sense strand
gcaagggucaugaaacuag

SEQ ID NO: 2107733 - RNA, 19 nt, Homo sapiens
  misc_RNA (1)...(19): siRNA sense strand
uacauuaggugccagcauu

SEQ ID NO: 2107734 - RNA, 19 nt, Homo sapiens
  misc_RNA (1)...(19): siRNA sense strand
ugaaacuccucuagauguu

SEQ ID NO: 2107735 - RNA, 19 nt, Homo sapiens
  misc_RNA (1)...(19): siRNA sense strand
gaggauaagaauggaaaua

SEQ ID NO: 2107736 - RNA, 19 nt, Homo sapiens
  misc_RNA (1)...(19): siRNA sense strand
ccaaagacagcaaaugguu

SEQ ID NO: 2107737 - RNA, 19 nt, Homo sapiens
  misc_RNA (1)...(19): siRNA sense strand
cagcagacaaucauggaua

SEQ ID NO: 2107738 - RNA, 19 nt, Homo sapiens
  misc_RNA (1)...(19): siRNA sense strand
ugaagaauguguagaugca

SEQ ID NO: 2107739 - RNA, 19 nt, Homo sapiens
  misc_RNA (1)...(19): siRNA sense strand
gaugcuaucuguucucaac

SEQ ID NO: 2107740 - RNA, 19 nt, Homo sapiens
  misc_RNA (1)...(19): siRNA sense strand
gcacuaugcagcuacauca

SEQ ID NO: 2107741 - RNA, 19 nt, Homo sapiens
  misc_RNA (1)...(19): siRNA sense strand
agaaguagcucagaucucu

SEQ ID NO: 2107742 - RNA, 19 nt, Homo sapiens
  misc_RNA (1)...(19): siRNA sense strand
acagagcaguugcaucuug

SEQ ID NO: 2107743 - RNA, 19 nt, Homo sapiens
  misc_RNA (1)...(19): siRNA sense strand
ucaaacuacucuugucuag

SEQ ID NO: 2107744 - RNA, 19 nt, Homo sapiens
  misc_RNA (1)...(19): siRNA sense strand
auagaaaccucaucaaugc

SEQ ID NO: 2107745 - RNA, 19 nt, Homo sapiens
  misc_RNA (1)...(19): siRNA sense strand
agaacugacuuuacaagau

SEQ ID NO: 2107746 - RNA, 19 nt, Homo sapiens
  misc_RNA (1)...(19): siRNA sense strand
cgagacauguguagaacug

SEQ ID NO: 2107747 - RNA, 19 nt, Homo sapiens
  misc_RNA (1)...(19): siRNA sense strand
guagaugcauuacuucaac

SEQ ID NO: 2107748 - RNA, 19 nt, Homo sapiens
  misc_RNA (1)...(19): siRNA sense strand
gcaaagcguggcauacaug

SEQ ID NO: 2107749 - RNA, 19 nt, Homo sapiens
  misc_RNA (1)...(19): siRNA sense strand
ucaacacucuuauuacaag

SEQ ID NO: 2107750 - RNA, 19 nt, Homo sapiens
  misc_RNA (1)...(19): siRNA sense strand
cugaucaacacucuuauua

SEQ ID NO: 2107751 - RNA, 19 nt, Homo sapiens
  misc_RNA (1)...(19): siRNA sense strand
gaucuuggaguugauauga

SEQ ID NO: 2107752 - RNA, 19 nt, Homo sapiens
  misc_RNA (1)...(19): siRNA sense strand
ggaaugaucagcguaguca

SEQ ID NO: 2107753 - RNA, 19 nt, Homo sapiens
  misc_RNA (1)...(19): siRNA sense strand
gucuagaggugccaauauu

SEQ ID NO: 2107754 - RNA, 19 nt, Homo sapiens
  misc_RNA (1)...(19): siRNA sense strand
ugaugaaguucgagcacua

SEQ ID NO: 2107755 - RNA, 19 nt, Homo sapiens
  misc_RNA (1)...(19): siRNA sense strand
cagacuguguuuacucauu

SEQ ID NO: 2107756 - RNA, 19 nt, Homo sapiens
  misc_RNA (1)...(19): siRNA sense strand
gccuaaaccuucugcugaa

SEQ ID NO: 2107757 - RNA, 19 nt, Homo sapiens
  misc_RNA (1)...(19): siRNA sense strand
uggaggagguagaagauga

SEQ ID NO: 2107758 - RNA, 19 nt, Homo sapiens
  misc_RNA (1)...(19): siRNA sense strand
gaaauucguugguguuaua

SEQ ID NO: 2107759 - RNA, 19 nt, Homo sapiens
  misc_RNA (1)...(19): siRNA sense strand
aaacugaucuucacaauga

SEQ ID NO: 2107760 - RNA, 19 nt, Homo sapiens
  misc_RNA (1)...(19): siRNA sense strand
gaagaggccucagguggaa

SEQ ID NO: 2107761 - RNA, 19 nt, Homo sapiens
  misc_RNA (1)...(19): siRNA sense strand
uuacauggcuugacagaug

SEQ ID NO: 2107762 - RNA, 19 nt, Homo sapiens
  misc_RNA (1)...(19): siRNA sense strand
gaagaaggaaucgaaguuu

SEQ ID NO: 2107763 - RNA, 19 nt, Homo sapiens
  misc_RNA (1)...(19): siRNA sense strand
gagaagaaaugcacaacag

SEQ ID NO: 2107764 - RNA, 19 nt, Homo sapiens
  misc_RNA (1)...(19): siRNA sense strand
cagauugucuuucuucaga

SEQ ID NO: 2107765 - RNA, 19 nt, Homo sapiens
  misc_RNA (1)...(19): siRNA sense strand
gaagggcccuguccaagag

SEQ ID NO: 2107766 - RNA, 19 nt, Homo sapiens
  misc_RNA (1)...(19): siRNA sense strand
gagccauccugaucaagaa

SEQ ID NO: 2107767 - RNA, 19 nt, Homo sapiens
  misc_RNA (1)...(19): siRNA sense strand
caaugaaggcuacaucuug

SEQ ID NO: 2107768 - RNA, 19 nt, Homo sapiens
  misc_RNA (1)...(19): siRNA sense strand
ccaagcagauugucuuucu

SEQ ID NO: 2107769 - RNA, 19 nt, Homo sapiens
  misc_RNA (1)...(19): siRNA sense strand
gcacaugagcgaccacuuc

SEQ ID NO: 2107770 - RNA, 19 nt, Homo sapiens
  misc_RNA (1)...(19): siRNA sense strand
gaagucagagagcuuggua

SEQ ID NO: 2107771 - RNA, 19 nt, Homo sapiens
  misc_RNA (1)...(19): siRNA sense strand
gaacgcagucuucuaccuu

SEQ ID NO: 2107772 - RNA, 19 nt, Homo sapiens
  misc_RNA (1)...(19): siRNA sense strand
ucccagaguucauuaagaa

SEQ ID NO: 2107773 - RNA, 19 nt, Homo sapiens
  misc_RNA (1)...(19): siRNA sense strand
agagggagaugguggagaa

SEQ ID NO: 2107774 - RNA, 19 nt, Homo sapiens
  misc_RNA (1)...(19): siRNA sense strand
caucagaagugccggcaau

SEQ ID NO: 2107775 - RNA, 19 nt, Homo sapiens
  misc_RNA (1)...(19): siRNA sense strand
gaaaacugaucuucacaau

SEQ ID NO: 2107776 - RNA, 19 nt, Homo sapiens
  misc_RNA (1)...(19): siRNA sense strand
caaacaacaagcagaagaa

SEQ ID NO: 2107777 - RNA, 19 nt, Homo sapiens
  misc_RNA (1)...(19): siRNA sense strand
acgcgucacuggagaauga

SEQ ID NO: 2107778 - RNA, 19 nt, Homo sapiens
  misc_RNA (1)...(19): siRNA sense strand
ucaagaagaaggaaucgaa

SEQ ID NO: 2107779 - RNA, 19 nt, Homo sapiens
  misc_RNA (1)...(19): siRNA sense strand
agauugcuguuccuccuua

SEQ ID NO: 2107780 - RNA, 19 nt, Homo sapiens
  misc_RNA (1)...(19): siRNA sense strand
auacuacccugucaccauu

SEQ ID NO: 2107781 - RNA, 19 nt, Homo sapiens
  misc_RNA (1)...(19): siRNA sense strand
gggagaugguggagaacuu

SEQ ID NO: 2107782 - RNA, 19 nt, Homo sapiens
  misc_RNA (1)...(19): siRNA sense strand
auggagaucuucacccuuu

SEQ ID NO: 2107783 - RNA, 19 nt, Homo sapiens
  misc_RNA (1)...(19): siRNA sense strand
cuugacagauggaguauuc

SEQ ID NO: 2107784 - RNA, 19 nt, Homo sapiens
  misc_RNA (1)...(19): siRNA sense strand
gcaccgaggaugccagaga

SEQ ID NO: 2107785 - RNA, 19 nt, Homo sapiens
  misc_RNA (1)...(19): siRNA sense strand
ggagaugguggagaacuuu

SEQ ID NO: 2107786 - RNA, 19 nt, Homo sapiens
  misc_RNA (1)...(19): siRNA sense strand
ggauugaacaaguuagaga

SEQ ID NO: 2107787 - RNA, 19 nt, Homo sapiens
  misc_RNA (1)...(19): siRNA sense strand
gcagcucaccugugugcua

SEQ ID NO: 2107788 - RNA, 19 nt, Homo sapiens
  misc_RNA (1)...(19): siRNA sense strand
ccuggaaggugucgaagug

SEQ ID NO: 2107789 - RNA, 19 nt, Homo sapiens
  misc_RNA (1)...(19): siRNA sense strand
gggcuaugaugcuauugug

SEQ ID NO: 2107790 - RNA, 19 nt, Homo sapiens
  misc_RNA (1)...(19): siRNA sense strand
auacagggcuaugaugcua

SEQ ID NO: 2107791 - RNA, 19 nt, Homo sapiens
  misc_RNA (1)...(19): siRNA sense strand
gcagucuucuaccuuggaa

SEQ ID NO: 2107792 - RNA, 19 nt, Homo sapiens
  misc_RNA (1)...(19): siRNA sense strand
ggacggggaugcugaggaa

SEQ ID NO: 2107793 - RNA, 19 nt, Homo sapiens
  misc_RNA (1)...(19): siRNA sense strand
gauugucuuucuucagaga

SEQ ID NO: 2107794 - RNA, 19 nt, Homo sapiens
  misc_RNA (1)...(19): siRNA sense strand
aagaauggccagacaguga

SEQ ID NO: 2107795 - RNA, 19 nt, Homo sapiens
  misc_RNA (1)...(19): siRNA sense strand
ggccucagguggaaaccaa

SEQ ID NO: 2107796 - RNA, 19 nt, Homo sapiens
  misc_RNA (1)...(19): siRNA sense strand
agacaaacaacaagcagaa

SEQ ID NO: 2107797 - RNA, 19 nt, Homo sapiens
  misc_RNA (1)...(19): siRNA sense strand
aagaaggaaucgaaguuuc

SEQ ID NO: 2107798 - RNA, 19 nt, Homo sapiens
  misc_RNA (1)...(19): siRNA sense strand
cagaguucauuaagaagau

SEQ ID NO: 2107799 - RNA, 19 nt, Homo sapiens
  misc_RNA (1)...(19): siRNA sense strand
gaugaagggcccuguccaa

SEQ ID NO: 2107800 - RNA, 19 nt, Homo sapiens
  misc_RNA (1)...(19): siRNA sense strand
aaggcuacaucuuggaauu

SEQ ID NO: 2107801 - RNA, 19 nt, Homo sapiens
  misc_RNA (1)...(19): siRNA sense strand
aaacggccugggaauauuu

SEQ ID NO: 2107802 - RNA, 19 nt, Homo sapiens
  misc_RNA (1)...(19): siRNA sense strand
acagggcuaugaugcuauu

SEQ ID NO: 2107803 - RNA, 19 nt, Homo sapiens
  misc_RNA (1)...(19): siRNA sense strand
gaagauagcaaaaccauac

SEQ ID NO: 2107804 - RNA, 19 nt, Homo sapiens
  misc_RNA (1)...(19): siRNA sense strand
gagcgaccacuuccggaaa

SEQ ID NO: 2107805 - RNA, 19 nt, Homo sapiens
  misc_RNA (1)...(19): siRNA sense strand
agaagugccggcaauacua

SEQ ID NO: 2107806 - RNA, 19 nt, Homo sapiens
  misc_RNA (1)...(19): siRNA sense strand
ccuuggaggugcaugaaga

SEQ ID NO: 2107807 - RNA, 19 nt, Homo sapiens
  misc_RNA (1)...(19): siRNA sense strand
ugaaauucguugguguuau

SEQ ID NO: 2107808 - RNA, 19 nt, Homo sapiens
  misc_RNA (1)...(19): siRNA sense strand
ugaagggcccuguccaaga

SEQ ID NO: 2107809 - RNA, 19 nt, Homo sapiens
  misc_RNA (1)...(19): siRNA sense strand
agaagaaggaaucgaaguu

SEQ ID NO: 2107810 - RNA, 19 nt, Homo sapiens
  misc_RNA (1)...(19): siRNA sense strand
cuccaugucuccaagaaug

SEQ ID NO: 2107811 - RNA, 19 nt, Homo sapiens
  misc_RNA (1)...(19): siRNA sense strand
cgaagagccaucagaagug

SEQ ID NO: 2107812 - RNA, 19 nt, Homo sapiens
  misc_RNA (1)...(19): siRNA sense strand
gcagugcuccggugucuac

SEQ ID NO: 2107813 - RNA, 19 nt, Homo sapiens
  misc_RNA (1)...(19): siRNA sense strand
gauugaacaaguuagagaa

SEQ ID NO: 2107814 - RNA, 19 nt, Homo sapiens
  misc_RNA (1)...(19): siRNA sense strand
gcacugggcacuccaaucc

SEQ ID NO: 2107815 - RNA, 19 nt, Homo sapiens
  misc_RNA (1)...(19): siRNA sense strand
caagcagauugucuuucuu

SEQ ID NO: 2107816 - RNA, 19 nt, Homo sapiens
  misc_RNA (1)...(19): siRNA sense strand
uuagagccauccugaucaa

SEQ ID NO: 2107817 - RNA, 19 nt, Homo sapiens
  misc_RNA (1)...(19): siRNA sense strand
aaacaacaagcagaagaaa

SEQ ID NO: 2107818 - RNA, 19 nt, Homo sapiens
  misc_RNA (1)...(19): siRNA sense strand
ccaccaagcagauugucuu

SEQ ID NO: 2107819 - RNA, 19 nt, Homo sapiens
  misc_RNA (1)...(19): siRNA sense strand
uagauguguccuaugaaua

SEQ ID NO: 2107820 - RNA, 19 nt, Homo sapiens
  misc_RNA (1)...(19): siRNA sense strand
ccgaagagccaucagaagu

SEQ ID NO: 2107821 - RNA, 19 nt, Homo sapiens
  misc_RNA (1)...(19): siRNA sense strand
ccagaguucauuaagaaga

SEQ ID NO: 2107822 - RNA, 19 nt, Homo sapiens
  misc_RNA (1)...(19): siRNA sense strand
cgacagaccagaaacucau

SEQ ID NO: 2107823 - RNA, 19 nt, Homo sapiens
  misc_RNA (1)...(19): siRNA sense strand
gugaggcugugcagaaugg

SEQ ID NO: 2107824 - RNA, 19 nt, Homo sapiens
  misc_RNA (1)...(19): siRNA sense strand
ggugaacgcagucuucuac

SEQ ID NO: 2107825 - RNA, 19 nt, Homo sapiens
  misc_RNA (1)...(19): siRNA sense strand
ucagguggaaaccaagaua

SEQ ID NO: 2107826 - RNA, 19 nt, Homo sapiens
  misc_RNA (1)...(19): siRNA sense strand
cgacagaucucagaaaacu

SEQ ID NO: 2107827 - RNA, 19 nt, Homo sapiens
  misc_RNA (1)...(19): siRNA sense strand
gggugaggcugugcagaau

SEQ ID NO: 2107828 - RNA, 19 nt, Homo sapiens
  misc_RNA (1)...(19): siRNA sense strand
acaaacaacaagcagaaga

SEQ ID NO: 2107829 - RNA, 19 nt, Homo sapiens
  misc_RNA (1)...(19): siRNA sense strand
caacucccgucgucaagac

SEQ ID NO: 2107830 - RNA, 19 nt, Homo sapiens
  misc_RNA (1)...(19): siRNA sense strand
cuaugaugcuauugugguu

SEQ ID NO: 2107831 - RNA, 19 nt, Homo sapiens
  misc_RNA (1)...(19): siRNA sense strand
cggcaauacuacccuguca

SEQ ID NO: 2107832 - RNA, 19 nt, Homo sapiens
  misc_RNA (1)...(19): siRNA sense strand
gaagugccggcaauacuac

SEQ ID NO: 2107833 - RNA, 19 nt, Homo sapiens
  misc_RNA (1)...(19): siRNA sense strand
uuagagaaacgugaugaaa

SEQ ID NO: 2107834 - RNA, 19 nt, Homo sapiens
  misc_RNA (1)...(19): siRNA sense strand
gccagacagugagcgguuu

SEQ ID NO: 2107835 - RNA, 19 nt, Homo sapiens
  misc_RNA (1)...(19): siRNA sense strand
gaaaccaagauagaugugu

SEQ ID NO: 2107836 - RNA, 19 nt, Homo sapiens
  misc_RNA (1)...(19): siRNA sense strand
ggcuacaucuuggaauuag

SEQ ID NO: 2107837 - RNA, 19 nt, Homo sapiens
  misc_RNA (1)...(19): siRNA sense strand
acaggcagaugaggaaauc

SEQ ID NO: 2107838 - RNA, 19 nt, Homo sapiens
  misc_RNA (1)...(19): siRNA sense strand
agaaggaaucgaaguuuca

SEQ ID NO: 2107839 - RNA, 19 nt, Homo sapiens
  misc_RNA (1)...(19): siRNA sense strand
agucuucuaccuuggaaua

SEQ ID NO: 2107840 - RNA, 19 nt, Homo sapiens
  misc_RNA (1)...(19): siRNA sense strand
gagcaagacacuggaugga

SEQ ID NO: 2107841 - RNA, 19 nt, Homo sapiens
  misc_RNA (1)...(19): siRNA sense strand
caccgaggaugccagagau

SEQ ID NO: 2107842 - RNA, 19 nt, Homo sapiens
  misc_RNA (1)...(19): siRNA sense strand
gcuacaucuuggaauuaga

SEQ ID NO: 2107843 - RNA, 19 nt, Homo sapiens
  misc_RNA (1)...(19): siRNA sense strand
guggaaaccaagauagaug

SEQ ID NO: 2107844 - RNA, 19 nt, Homo sapiens
  misc_RNA (1)...(19): siRNA sense strand
ggaaaccaagauagaugug

SEQ ID NO: 2107845 - RNA, 19 nt, Homo sapiens
  misc_RNA (1)...(19): siRNA sense strand
caaguuagagaaacgugau

SEQ ID NO: 2107846 - RNA, 19 nt, Homo sapiens
  misc_RNA (1)...(19): siRNA sense strand
caagaaaaccgacagaucu

SEQ ID NO: 2107847 - RNA, 19 nt, Homo sapiens
  misc_RNA (1)...(19): siRNA sense strand
caccauuccucuccauguc

SEQ ID NO: 2107848 - RNA, 19 nt, Homo sapiens
  misc_RNA (1)...(19): siRNA sense strand
acaacaggcagaugaggaa

SEQ ID NO: 2107849 - RNA, 19 nt, Homo sapiens
  misc_RNA (1)...(19): siRNA sense strand
ugaacaaguuagagaaacg

SEQ ID NO: 2107850 - RNA, 19 nt, Homo sapiens
  misc_RNA (1)...(19): siRNA sense strand
ccaagaauggccagacagu

SEQ ID NO: 2107851 - RNA, 19 nt, Homo sapiens
  misc_RNA (1)...(19): siRNA sense strand
gaaggcuacaucuuggaau

SEQ ID NO: 2107852 - RNA, 19 nt, Homo sapiens
  misc_RNA (1)...(19): siRNA sense strand
gaacaaguuagagaaacgu

SEQ ID NO: 2107853 - RNA, 19 nt, Homo sapiens
  misc_RNA (1)...(19): siRNA sense strand
ccagagaagaaaugcacaa

SEQ ID NO: 2107854 - RNA, 19 nt, Homo sapiens
  misc_RNA (1)...(19): siRNA sense strand
gcggauugaacaaguuaga

SEQ ID NO: 2107855 - RNA, 19 nt, Homo sapiens
  misc_RNA (1)...(19): siRNA sense strand
uggcuugacagauggagua

SEQ ID NO: 2107856 - RNA, 19 nt, Homo sapiens
  misc_RNA (1)...(19): siRNA sense strand
caguaccauuccucuguga

SEQ ID NO: 2107857 - RNA, 19 nt, Homo sapiens
  misc_RNA (1)...(19): siRNA sense strand
gaauuagauugcuguuccu

SEQ ID NO: 2107858 - RNA, 19 nt, Homo sapiens
  misc_RNA (1)...(19): siRNA sense strand
gaacguaucaaucacuuaa

SEQ ID NO: 2107859 - RNA, 19 nt, Homo sapiens
  misc_RNA (1)...(19): siRNA sense strand
aaagccaagucucuacaua

SEQ ID NO: 2107860 - RNA, 19 nt, Homo sapiens
  misc_RNA (1)...(19): siRNA sense strand
cuacacgcccucugaauaa

SEQ ID NO: 2107861 - RNA, 19 nt, Homo sapiens
  misc_RNA (1)...(19): siRNA sense strand
gaggaauuaucgucuugaa

SEQ ID NO: 2107862 - RNA, 19 nt, Homo sapiens
  misc_RNA (1)...(19): siRNA sense strand
ccaagucucuacauaugau

SEQ ID NO: 2107863 - RNA, 19 nt, Homo sapiens
  misc_RNA (1)...(19): siRNA sense strand
gggaacguaucaaucacuu

SEQ ID NO: 2107864 - RNA, 19 nt, Homo sapiens
  misc_RNA (1)...(19): siRNA sense strand
ggaacguaucaaucacuua

SEQ ID NO: 2107865 - RNA, 19 nt, Homo sapiens
  misc_RNA (1)...(19): siRNA sense strand
ucuacacgcccucugaaua

SEQ ID NO: 2107866 - RNA, 19 nt, Homo sapiens
  misc_RNA (1)...(19): siRNA sense strand
ccaaauggaggaauuaucg

SEQ ID NO: 2107867 - RNA, 19 nt, Homo sapiens
  misc_RNA (1)...(19): siRNA sense strand
agccaagucucuacauaug

SEQ ID NO: 2107868 - RNA, 19 nt, Homo sapiens
  misc_RNA (1)...(19): siRNA sense strand
ggagguggcauugcagaug

SEQ ID NO: 2107869 - RNA, 19 nt, Homo sapiens
  misc_RNA (1)...(19): siRNA sense strand
guaucaaucacuuaaggaa

SEQ ID NO: 2107870 - RNA, 19 nt, Homo sapiens
  misc_RNA (1)...(19): siRNA sense strand
gauacaggcaaacagaugu

SEQ ID NO: 2107871 - RNA, 19 nt, Homo sapiens
  misc_RNA (1)...(19): siRNA sense strand
uggaggaauuaucgucuug

SEQ ID NO: 2107872 - RNA, 19 nt, Homo sapiens
  misc_RNA (1)...(19): siRNA sense strand
cuaccaaauggaggaauua

SEQ ID NO: 2107873 - RNA, 19 nt, Homo sapiens
  misc_RNA (1)...(19): siRNA sense strand
uaugauacaggcaaacaga

SEQ ID NO: 2107874 - RNA, 19 nt, Homo sapiens
  misc_RNA (1)...(19): siRNA sense strand
gccaagucucuacauauga

SEQ ID NO: 2107875 - RNA, 19 nt, Homo sapiens
  misc_RNA (1)...(19): siRNA sense strand
ggagacugaagguggcaaa

SEQ ID NO: 2107876 - RNA, 19 nt, Homo sapiens
  misc_RNA (1)...(19): siRNA sense strand
acuaccaaauggaggaauu

SEQ ID NO: 2107877 - RNA, 19 nt, Homo sapiens
  misc_RNA (1)...(19): siRNA sense strand
ucacuuaaggaaacuagau

SEQ ID NO: 2107878 - RNA, 19 nt, Homo sapiens
  misc_RNA (1)...(19): siRNA sense strand
ucucaaagccaagucucua

SEQ ID NO: 2107879 - RNA, 19 nt, Homo sapiens
  misc_RNA (1)...(19): siRNA sense strand
aaacuagaugggagacuga

SEQ ID NO: 2107880 - RNA, 19 nt, Homo sapiens
  misc_RNA (1)...(19): siRNA sense strand
ggaggaauuaucgucuuga

SEQ ID NO: 2107881 - RNA, 19 nt, Homo sapiens
  misc_RNA (1)...(19): siRNA sense strand
uacauaugauacaggcaaa

SEQ ID NO: 2107882 - RNA, 19 nt, Homo sapiens
  misc_RNA (1)...(19): siRNA sense strand
aagccaagucucuacauau

SEQ ID NO: 2107883 - RNA, 19 nt, Homo sapiens
  misc_RNA (1)...(19): siRNA sense strand
caagucucuacauaugaua

SEQ ID NO: 2107884 - RNA, 19 nt, Homo sapiens
  misc_RNA (1)...(19): siRNA sense strand
ugauacaggcaaacagaug

SEQ ID NO: 2107885 - RNA, 19 nt, Homo sapiens
  misc_RNA (1)...(19): siRNA sense strand
gaucacggcugcuccagaa

SEQ ID NO: 2107886 - RNA, 19 nt, Homo sapiens
  misc_RNA (1)...(19): siRNA sense strand
uaacuucccugaugacaga

SEQ ID NO: 2107887 - RNA, 19 nt, Homo sapiens
  misc_RNA (1)...(19): siRNA sense strand
gaacaacuguguguagcaa

SEQ ID NO: 2107888 - RNA, 19 nt, Homo sapiens
  misc_RNA (1)...(19): siRNA sense strand
caugagagcugucgaugug

SEQ ID NO: 2107889 - RNA, 19 nt, Homo sapiens
  misc_RNA (1)...(19): siRNA sense strand
ggagagugguacaggauug

SEQ ID NO: 2107890 - RNA, 19 nt, Homo sapiens
  misc_RNA (1)...(19): siRNA sense strand
gcagacaccuaaccacauc

SEQ ID NO: 2107891 - RNA, 19 nt, Homo sapiens
  misc_RNA (1)...(19): siRNA sense strand
gaugaguccugguuagaug

SEQ ID NO: 2107892 - RNA, 19 nt, Homo sapiens
  misc_RNA (1)...(19): siRNA sense strand
caaaggaaguggagaacag

SEQ ID NO: 2107893 - RNA, 19 nt, Homo sapiens
  misc_RNA (1)...(19): siRNA sense strand
ccacaagccuggguuggaa

SEQ ID NO: 2107894 - RNA, 19 nt, Homo sapiens
  misc_RNA (1)...(19): siRNA sense strand
uuagauggcuacccuguga

SEQ ID NO: 2107895 - RNA, 19 nt, Homo sapiens
  misc_RNA (1)...(19): siRNA sense strand
gaugaaaacguccuaguua

SEQ ID NO: 2107896 - RNA, 19 nt, Homo sapiens
  misc_RNA (1)...(19): siRNA sense strand
ucccauaccugcugucuga

SEQ ID NO: 2107897 - RNA, 19 nt, Homo sapiens
  misc_RNA (1)...(19): siRNA sense strand
guuaagaagcccaagagua

SEQ ID NO: 2107898 - RNA, 19 nt, Homo sapiens
  misc_RNA (1)...(19): siRNA sense strand
gggaugaacugcuguacgu

SEQ ID NO: 2107899 - RNA, 19 nt, Homo sapiens
  misc_RNA (1)...(19): siRNA sense strand
ggagaacagcaaaucauga

SEQ ID NO: 2107900 - RNA, 19 nt, Homo sapiens
  misc_RNA (1)...(19): siRNA sense strand
acagugcccuuuguauuaa

SEQ ID NO: 2107901 - RNA, 19 nt, Homo sapiens
  misc_RNA (1)...(19): siRNA sense strand
caagagcucuguguacaag

SEQ ID NO: 2107902 - RNA, 19 nt, Homo sapiens
  misc_RNA (1)...(19): siRNA sense strand
cuggagauauuaacaguga

SEQ ID NO: 2107903 - RNA, 19 nt, Homo sapiens
  misc_RNA (1)...(19): siRNA sense strand
guucaguucuuccaucuca

SEQ ID NO: 2107904 - RNA, 19 nt, Homo sapiens
  misc_RNA (1)...(19): siRNA sense strand
aaaaggagguggaugauga

SEQ ID NO: 2107905 - RNA, 19 nt, Homo sapiens
  misc_RNA (1)...(19): siRNA sense strand
aggcacacauugacuauga

SEQ ID NO: 2107906 - RNA, 19 nt, Homo sapiens
  misc_RNA (1)...(19): siRNA sense strand
cacauugacuaugaagaua

SEQ ID NO: 2107907 - RNA, 19 nt, Homo sapiens
  misc_RNA (1)...(19): siRNA sense strand
uuaagaagcccaagaguag

SEQ ID NO: 2107908 - RNA, 19 nt, Homo sapiens
  misc_RNA (1)...(19): siRNA sense strand
gcuagcagaugguacucuu

SEQ ID NO: 2107909 - RNA, 19 nt, Homo sapiens
  misc_RNA (1)...(19): siRNA sense strand
gaagacagaggcagaagag

SEQ ID NO: 2107910 - RNA, 19 nt, Homo sapiens
  misc_RNA (1)...(19): siRNA sense strand
aagauaacuucccugauga

SEQ ID NO: 2107911 - RNA, 19 nt, Homo sapiens
  misc_RNA (1)...(19): siRNA sense strand
gaaguuaagaagcccaaga

SEQ ID NO: 2107912 - RNA, 19 nt, Homo sapiens
  misc_RNA (1)...(19): siRNA sense strand
gccuucaccuugcuaugua

SEQ ID NO: 2107913 - RNA, 19 nt, Homo sapiens
  misc_RNA (1)...(19): siRNA sense strand
gcagaugguacucuuggaa

SEQ ID NO: 2107914 - RNA, 19 nt, Homo sapiens
  misc_RNA (1)...(19): siRNA sense strand
gaaguaccagucaacucua

SEQ ID NO: 2107915 - RNA, 19 nt, Homo sapiens
  misc_RNA (1)...(19): siRNA sense strand
ggaagaagauggggacaga

SEQ ID NO: 2107916 - RNA, 19 nt, Homo sapiens
  misc_RNA (1)...(19): siRNA sense strand
ggaaguggagaacagcaaa

SEQ ID NO: 2107917 - RNA, 19 nt, Homo sapiens
  misc_RNA (1)...(19): siRNA sense strand
guauuaaggaugaagagaa

SEQ ID NO: 2107918 - RNA, 19 nt, Homo sapiens
  misc_RNA (1)...(19): siRNA sense strand
gcagugaugaguccugguu

SEQ ID NO: 2107919 - RNA, 19 nt, Homo sapiens
  misc_RNA (1)...(19): siRNA sense strand
gggcaugacccauaguuca

SEQ ID NO: 2107920 - RNA, 19 nt, Homo sapiens
  misc_RNA (1)...(19): siRNA sense strand
ggaagacagaggcagaaga

SEQ ID NO: 2107921 - RNA, 19 nt, Homo sapiens
  misc_RNA (1)...(19): siRNA sense strand
gcgagggcaugacccauag

SEQ ID NO: 2107922 - RNA, 19 nt, Homo sapiens
  misc_RNA (1)...(19): siRNA sense strand
gacagaggcagaagaggaa

SEQ ID NO: 2107923 - RNA, 19 nt, Homo sapiens
  misc_RNA (1)...(19): siRNA sense strand
uggccacccuguccuauga

SEQ ID NO: 2107924 - RNA, 19 nt, Homo sapiens
  misc_RNA (1)...(19): siRNA sense strand
caggauagcuucccauacc

SEQ ID NO: 2107925 - RNA, 19 nt, Homo sapiens
  misc_RNA (1)...(19): siRNA sense strand
gugcuggagucucagaaug

SEQ ID NO: 2107926 - RNA, 19 nt, Homo sapiens
  misc_RNA (1)...(19): siRNA sense strand
gcucggcuuuccugcaaga

SEQ ID NO: 2107927 - RNA, 19 nt, Homo sapiens
  misc_RNA (1)...(19): siRNA sense strand
cacccagccuccaguagaa

SEQ ID NO: 2107928 - RNA, 19 nt, Homo sapiens
  misc_RNA (1)...(19): siRNA sense strand
cagcagaggcccugugauc

SEQ ID NO: 2107929 - RNA, 19 nt, Homo sapiens
  misc_RNA (1)...(19): siRNA sense strand
agacuucuuuggacaggaa

SEQ ID NO: 2107930 - RNA, 19 nt, Homo sapiens
  misc_RNA (1)...(19): siRNA sense strand
gagaacagcaaaucaugag

SEQ ID NO: 2107931 - RNA, 19 nt, Homo sapiens
  misc_RNA (1)...(19): siRNA sense strand
cgaaguaccagucaacucu

SEQ ID NO: 2107932 - RNA, 19 nt, Homo sapiens
  misc_RNA (1)...(19): siRNA sense strand
uauuaaggaugaagagaag

SEQ ID NO: 2107933 - RNA, 19 nt, Homo sapiens
  misc_RNA (1)...(19): siRNA sense strand
auaaucaucugccccuuua

SEQ ID NO: 2107934 - RNA, 19 nt, Homo sapiens
  misc_RNA (1)...(19): siRNA sense strand
gagagcucauggaggauuc

SEQ ID NO: 2107935 - RNA, 19 nt, Homo sapiens
  misc_RNA (1)...(19): siRNA sense strand
guggagacccgccuucguu

SEQ ID NO: 2107936 - RNA, 19 nt, Homo sapiens
  misc_RNA (1)...(19): siRNA sense strand
cauaccugcugucugaaga

SEQ ID NO: 2107937 - RNA, 19 nt, Homo sapiens
  misc_RNA (1)...(19): siRNA sense strand
guucuuccaucucaaaugc

SEQ ID NO: 2107938 - RNA, 19 nt, Homo sapiens
  misc_RNA (1)...(19): siRNA sense strand
gaagcacuuguucugguuu

SEQ ID NO: 2107939 - RNA, 19 nt, Homo sapiens
  misc_RNA (1)...(19): siRNA sense strand
acacauugacuaugaagau

SEQ ID NO: 2107940 - RNA, 19 nt, Homo sapiens
  misc_RNA (1)...(19): siRNA sense strand
aaaccacuguuccugagau

SEQ ID NO: 2107941 - RNA, 19 nt, Homo sapiens
  misc_RNA (1)...(19): siRNA sense strand
gaaaccacuguuccugaga

SEQ ID NO: 2107942 - RNA, 19 nt, Homo sapiens
  misc_RNA (1)...(19): siRNA sense strand
acucuacccuggagauuca

SEQ ID NO: 2107943 - RNA, 19 nt, Homo sapiens
  misc_RNA (1)...(19): siRNA sense strand
cagacgagcugcggagagu

SEQ ID NO: 2107944 - RNA, 19 nt, Homo sapiens
  misc_RNA (1)...(19): siRNA sense strand
caguagggcuggaugaaaa

SEQ ID NO: 2107945 - RNA, 19 nt, Homo sapiens
  misc_RNA (1)...(19): siRNA sense strand
uagcaaaggaaguggagaa

SEQ ID NO: 2107946 - RNA, 19 nt, Homo sapiens
  misc_RNA (1)...(19): siRNA sense strand
ccacccagccuccaguaga

SEQ ID NO: 2107947 - RNA, 19 nt, Homo sapiens
  misc_RNA (1)...(19): siRNA sense strand
cgucuggucuccauuucug

SEQ ID NO: 2107948 - RNA, 19 nt, Homo sapiens
  misc_RNA (1)...(19): siRNA sense strand
cacauacagugcccuuugu

SEQ ID NO: 2107949 - RNA, 19 nt, Homo sapiens
  misc_RNA (1)...(19): siRNA sense strand
gaaguggagaacagcaaau

SEQ ID NO: 2107950 - RNA, 19 nt, Homo sapiens
  misc_RNA (1)...(19): siRNA sense strand
ggcagaagaggaagaagau

SEQ ID NO: 2107951 - RNA, 19 nt, Homo sapiens
  misc_RNA (1)...(19): siRNA sense strand
ugcuagauguggaagcuuu

SEQ ID NO: 2107952 - RNA, 19 nt, Homo sapiens
  misc_RNA (1)...(19): siRNA sense strand
gcaaaggaaguggagaaca

SEQ ID NO: 2107953 - RNA, 19 nt, Homo sapiens
  misc_RNA (1)...(19): siRNA sense strand
gggcuuggaggaagacaga

SEQ ID NO: 2107954 - RNA, 19 nt, Homo sapiens
  misc_RNA (1)...(19): siRNA sense strand
guggugagcagcagugaug

SEQ ID NO: 2107955 - RNA, 19 nt, Homo sapiens
  misc_RNA (1)...(19): siRNA sense strand
gcaggccugugggaaagau

SEQ ID NO: 2107956 - RNA, 19 nt, Homo sapiens
  misc_RNA (1)...(19): siRNA sense strand
ugaaugcuuccgagacuga

SEQ ID NO: 2107957 - RNA, 19 nt, Homo sapiens
  misc_RNA (1)...(19): siRNA sense strand
caugacccauaguucaguu

SEQ ID NO: 2107958 - RNA, 19 nt, Homo sapiens
  misc_RNA (1)...(19): siRNA sense strand
ccauucuuguggaaguuaa

SEQ ID NO: 2107959 - RNA, 19 nt, Homo sapiens
  misc_RNA (1)...(19): siRNA sense strand
ggccauuugugggcaagaa

SEQ ID NO: 2107960 - RNA, 19 nt, Homo sapiens
  misc_RNA (1)...(19): siRNA sense strand
ggugcaggccugugggaaa

SEQ ID NO: 2107961 - RNA, 19 nt, Homo sapiens
  misc_RNA (1)...(19): siRNA sense strand
gagggcaugacccauaguu

SEQ ID NO: 2107962 - RNA, 19 nt, Homo sapiens
  misc_RNA (1)...(19): siRNA sense strand
gaggaagacagaggcagaa

SEQ ID NO: 2107963 - RNA, 19 nt, Homo sapiens
  misc_RNA (1)...(19): siRNA sense strand
gugcaggccugugggaaag

SEQ ID NO: 2107964 - RNA, 19 nt, Homo sapiens
  misc_RNA (1)...(19): siRNA sense strand
ggcacacauugacuaugaa

SEQ ID NO: 2107965 - RNA, 19 nt, Homo sapiens
  misc_RNA (1)...(19): siRNA sense strand
gagauucaucacagaggaa

SEQ ID NO: 2107966 - RNA, 19 nt, Homo sapiens
  misc_RNA (1)...(19): siRNA sense strand
ucaaaugcuagauguggaa

SEQ ID NO: 2107967 - RNA, 19 nt, Homo sapiens
  misc_RNA (1)...(19): siRNA sense strand
ggaacaacuguguguagca

SEQ ID NO: 2107968 - RNA, 19 nt, Homo sapiens
  misc_RNA (1)...(19): siRNA sense strand
gcacacauugacuaugaag

SEQ ID NO: 2107969 - RNA, 19 nt, Homo sapiens
  misc_RNA (1)...(19): siRNA sense strand
caacucuacccuggagauu

SEQ ID NO: 2107970 - RNA, 19 nt, Homo sapiens
  misc_RNA (1)...(19): siRNA sense strand
ucaguucuuccaucucaaa

SEQ ID NO: 2107971 - RNA, 19 nt, Homo sapiens
  misc_RNA (1)...(19): siRNA sense strand
acaacuguguguagcaaag

SEQ ID NO: 2107972 - RNA, 19 nt, Homo sapiens
  misc_RNA (1)...(19): siRNA sense strand
cugcucggcuuuccugcaa

SEQ ID NO: 2107973 - RNA, 19 nt, Homo sapiens
  misc_RNA (1)...(19): siRNA sense strand
gcacuaccaccagcagauc

SEQ ID NO: 2107974 - RNA, 19 nt, Homo sapiens
  misc_RNA (1)...(19): siRNA sense strand
ccugugaucgccaccauug

SEQ ID NO: 2107975 - RNA, 19 nt, Homo sapiens
  misc_RNA (1)...(19): siRNA sense strand
gaucuacggcaacacugau

SEQ ID NO: 2107976 - RNA, 19 nt, Homo sapiens
  misc_RNA (1)...(19): siRNA sense strand
agaucgagauggagaaggu

SEQ ID NO: 2107977 - RNA, 19 nt, Homo sapiens
  misc_RNA (1)...(19): siRNA sense strand
gaugguacucuuggaacaa

SEQ ID NO: 2107978 - RNA, 19 nt, Homo sapiens
  misc_RNA (1)...(19): siRNA sense strand
gcaagugaggagcuucauc

SEQ ID NO: 2107979 - RNA, 19 nt, Homo sapiens
  misc_RNA (1)...(19): siRNA sense strand
cgugaaugcuuccgagacu

SEQ ID NO: 2107980 - RNA, 19 nt, Homo sapiens
  misc_RNA (1)...(19): siRNA sense strand
ucuuccaucucaaaugcua

SEQ ID NO: 2107981 - RNA, 19 nt, Homo sapiens
  misc_RNA (1)...(19): siRNA sense strand
gacccauaguucaguucuu

SEQ ID NO: 2107982 - RNA, 19 nt, Homo sapiens
  misc_RNA (1)...(19): siRNA sense strand
ucaguagggcuggaugaaa

SEQ ID NO: 2107983 - RNA, 19 nt, Homo sapiens
  misc_RNA (1)...(19): siRNA sense strand
ggucaguagggcuggauga

SEQ ID NO: 2107984 - RNA, 19 nt, Homo sapiens
  misc_RNA (1)...(19): siRNA sense strand
guguacaagcugaauguug

SEQ ID NO: 2107985 - RNA, 19 nt, Homo sapiens
  misc_RNA (1)...(19): siRNA sense strand
gcacugagcuguacuuauu

SEQ ID NO: 2107986 - RNA, 19 nt, Homo sapiens
  misc_RNA (1)...(19): siRNA sense strand
caaaugaucuucaguucaa

SEQ ID NO: 2107987 - RNA, 19 nt, Homo sapiens
  misc_RNA (1)...(19): siRNA sense strand
cuaccaagcuucuucauaa

SEQ ID NO: 2107988 - RNA, 19 nt, Homo sapiens
  misc_RNA (1)...(19): siRNA sense strand
cuaaugagauuuacaguug

SEQ ID NO: 2107989 - RNA, 19 nt, Homo sapiens
  misc_RNA (1)...(19): siRNA sense strand
ucagaacgcuccuauaguu

SEQ ID NO: 2107990 - RNA, 19 nt, Homo sapiens
  misc_RNA (1)...(19): siRNA sense strand
gaucuucaguucaauauuc

SEQ ID NO: 2107991 - RNA, 19 nt, Homo sapiens
  misc_RNA (1)...(19): siRNA sense strand
gcacauaaagauccucaua

SEQ ID NO: 2107992 - RNA, 19 nt, Homo sapiens
  misc_RNA (1)...(19): siRNA sense strand
aaucagggcuuuggcauua

SEQ ID NO: 2107993 - RNA, 19 nt, Homo sapiens
  misc_RNA (1)...(19): siRNA sense strand
ccacaucucagucaacuua

SEQ ID NO: 2107994 - RNA, 19 nt, Homo sapiens
  misc_RNA (1)...(19): siRNA sense strand
gguaauuggugaugaacua

SEQ ID NO: 2107995 - RNA, 19 nt, Homo sapiens
  misc_RNA (1)...(19): siRNA sense strand
uggugaagcugaaacauua

SEQ ID NO: 2107996 - RNA, 19 nt, Homo sapiens
  misc_RNA (1)...(19): siRNA sense strand
gcacuuaaacuuucagcua

SEQ ID NO: 2107997 - RNA, 19 nt, Homo sapiens
  misc_RNA (1)...(19): siRNA sense strand
ggugagaucugcugaggaa

SEQ ID NO: 2107998 - RNA, 19 nt, Homo sapiens
  misc_RNA (1)...(19): siRNA sense strand
guacuuauuugcugugcua

SEQ ID NO: 2107999 - RNA, 19 nt, Homo sapiens
  misc_RNA (1)...(19): siRNA sense strand
caagugcauuugauuauga

SEQ ID NO: 2108000 - RNA, 19 nt, Homo sapiens
  misc_RNA (1)...(19): siRNA sense strand
caacaagucugcccucaag

SEQ ID NO: 2108001 - RNA, 19 nt, Homo sapiens
  misc_RNA (1)...(19): siRNA sense strand
gagcugaucccacuacuga

SEQ ID NO: 2108002 - RNA, 19 nt, Homo sapiens
  misc_RNA (1)...(19): siRNA sense strand
caaauggucuacagcaaau

SEQ ID NO: 2108003 - RNA, 19 nt, Homo sapiens
  misc_RNA (1)...(19): siRNA sense strand
gaaagaaggccuccuaggu

SEQ ID NO: 2108004 - RNA, 19 nt, Homo sapiens
  misc_RNA (1)...(19): siRNA sense strand
uuacagaugucccuucuau

SEQ ID NO: 2108005 - RNA, 19 nt, Homo sapiens
  misc_RNA (1)...(19): siRNA sense strand
caucaaacgugcacaaaca

SEQ ID NO: 2108006 - RNA, 19 nt, Homo sapiens
  misc_RNA (1)...(19): siRNA sense strand
caacagcgaugcaucuagu

SEQ ID NO: 2108007 - RNA, 19 nt, Homo sapiens
  misc_RNA (1)...(19): siRNA sense strand
ugaagcuacugaaucuuua

SEQ ID NO: 2108008 - RNA, 19 nt, Homo sapiens
  misc_RNA (1)...(19): siRNA sense strand
ugaaggagcugucuaacca

SEQ ID NO: 2108009 - RNA, 19 nt, Homo sapiens
  misc_RNA (1)...(19): siRNA sense strand
caauuaaucuggcugcaau

SEQ ID NO: 2108010 - RNA, 19 nt, Homo sapiens
  misc_RNA (1)...(19): siRNA sense strand
gcagaaguccucaauagau

SEQ ID NO: 2108011 - RNA, 19 nt, Homo sapiens
  misc_RNA (1)...(19): siRNA sense strand
gagagaguguccaaggaaa

SEQ ID NO: 2108012 - RNA, 19 nt, Homo sapiens
  misc_RNA (1)...(19): siRNA sense strand
uaaucuggcugcaaucaaa

SEQ ID NO: 2108013 - RNA, 19 nt, Homo sapiens
  misc_RNA (1)...(19): siRNA sense strand
ucagaaagcccuugauguu

SEQ ID NO: 2108014 - RNA, 19 nt, Homo sapiens
  misc_RNA (1)...(19): siRNA sense strand
gauaaaagcuucgaugaug

SEQ ID NO: 2108015 - RNA, 19 nt, Homo sapiens
  misc_RNA (1)...(19): siRNA sense strand
ucggaaagcuugugucuuc

SEQ ID NO: 2108016 - RNA, 19 nt, Homo sapiens
  misc_RNA (1)...(19): siRNA sense strand
gauaaagagccuacaauca

SEQ ID NO: 2108017 - RNA, 19 nt, Homo sapiens
  misc_RNA (1)...(19): siRNA sense strand
gaagaguucugaccacaac

SEQ ID NO: 2108018 - RNA, 19 nt, Homo sapiens
  misc_RNA (1)...(19): siRNA sense strand
cugaagcaauccagaauuu

SEQ ID NO: 2108019 - RNA, 19 nt, Homo sapiens
  misc_RNA (1)...(19): siRNA sense strand
aaagaguccuggucaauuc

SEQ ID NO: 2108020 - RNA, 19 nt, Homo sapiens
  misc_RNA (1)...(19): siRNA sense strand
accaauacaucacagaaua

SEQ ID NO: 2108021 - RNA, 19 nt, Homo sapiens
  misc_RNA (1)...(19): siRNA sense strand
uagaaacucuggccaaaca

SEQ ID NO: 2108022 - RNA, 19 nt, Homo sapiens
  misc_RNA (1)...(19): siRNA sense strand
cagaaagcccuugauguua

SEQ ID NO: 2108023 - RNA, 19 nt, Homo sapiens
  misc_RNA (1)...(19): siRNA sense strand
gaucccaggugguuagaga

SEQ ID NO: 2108024 - RNA, 19 nt, Homo sapiens
  misc_RNA (1)...(19): siRNA sense strand
cagaauacuuuaucuccaa

SEQ ID NO: 2108025 - RNA, 19 nt, Homo sapiens
  misc_RNA (1)...(19): siRNA sense strand
gugcugauuucauuauuug

SEQ ID NO: 2108026 - RNA, 19 nt, Homo sapiens
  misc_RNA (1)...(19): siRNA sense strand
uagagaagcuuguauuacu

SEQ ID NO: 2108027 - RNA, 19 nt, Homo sapiens
  misc_RNA (1)...(19): siRNA sense strand
ggauggagcacuuaaacuu

SEQ ID NO: 2108028 - RNA, 19 nt, Homo sapiens
  misc_RNA (1)...(19): siRNA sense strand
gaagcaauccagaauuuca

SEQ ID NO: 2108029 - RNA, 19 nt, Homo sapiens
  misc_RNA (1)...(19): siRNA sense strand
cauagaaacucuggccaaa

SEQ ID NO: 2108030 - RNA, 19 nt, Homo sapiens
  misc_RNA (1)...(19): siRNA sense strand
caagauugguuguuuguac

SEQ ID NO: 2108031 - RNA, 19 nt, Homo sapiens
  misc_RNA (1)...(19): siRNA sense strand
aaagaguucuggcagugua

SEQ ID NO: 2108032 - RNA, 19 nt, Homo sapiens
  misc_RNA (1)...(19): siRNA sense strand
cacuuaaacuuucagcuaa

SEQ ID NO: 2108033 - RNA, 19 nt, Homo sapiens
  misc_RNA (1)...(19): siRNA sense strand
aaaugaagcuacugaaucu

SEQ ID NO: 2108034 - RNA, 19 nt, Homo sapiens
  misc_RNA (1)...(19): siRNA sense strand
caucaaccagcaagauuua

SEQ ID NO: 2108035 - RNA, 19 nt, Homo sapiens
  misc_RNA (1)...(19): siRNA sense strand
ugaccuaguugcagaguug

SEQ ID NO: 2108036 - RNA, 19 nt, Homo sapiens
  misc_RNA (1)...(19): siRNA sense strand
ccaagcuucuucauaauca

SEQ ID NO: 2108037 - RNA, 19 nt, Homo sapiens
  misc_RNA (1)...(19): siRNA sense strand
cagaaguccucaauagaug

SEQ ID NO: 2108038 - RNA, 19 nt, Homo sapiens
  misc_RNA (1)...(19): siRNA sense strand
ggaaauaggccaucaucag

SEQ ID NO: 2108039 - RNA, 19 nt, Homo sapiens
  misc_RNA (1)...(19): siRNA sense strand
gagauuaugccaggucuaa

SEQ ID NO: 2108040 - RNA, 19 nt, Homo sapiens
  misc_RNA (1)...(19): siRNA sense strand
ugaugaugcugaccaguuu

SEQ ID NO: 2108041 - RNA, 19 nt, Homo sapiens
  misc_RNA (1)...(19): siRNA sense strand
gagcucugguguucaaaga

SEQ ID NO: 2108042 - RNA, 19 nt, Homo sapiens
  misc_RNA (1)...(19): siRNA sense strand
gaacucgaagaaacauuaa

SEQ ID NO: 2108043 - RNA, 19 nt, Homo sapiens
  misc_RNA (1)...(19): siRNA sense strand
ggaagcggcaucaguguug

SEQ ID NO: 2108044 - RNA, 19 nt, Homo sapiens
  misc_RNA (1)...(19): siRNA sense strand
uugaaacgcuuggagauaa

SEQ ID NO: 2108045 - RNA, 19 nt, Homo sapiens
  misc_RNA (1)...(19): siRNA sense strand
gaaagcccuugauguuaca

SEQ ID NO: 2108046 - RNA, 19 nt, Homo sapiens
  misc_RNA (1)...(19): siRNA sense strand
uagcaucucuuccacaauc

SEQ ID NO: 2108047 - RNA, 19 nt, Homo sapiens
  misc_RNA (1)...(19): siRNA sense strand
guuagagaagcuuguauua

SEQ ID NO: 2108048 - RNA, 19 nt, Homo sapiens
  misc_RNA (1)...(19): siRNA sense strand
ucccuucuauucagauuua

SEQ ID NO: 2108049 - RNA, 19 nt, Homo sapiens
  misc_RNA (1)...(19): siRNA sense strand
gccaagaagauaugaauga

SEQ ID NO: 2108050 - RNA, 19 nt, Homo sapiens
  misc_RNA (1)...(19): siRNA sense strand
gcagacucauucauuggaa

SEQ ID NO: 2108051 - RNA, 19 nt, Homo sapiens
  misc_RNA (1)...(19): siRNA sense strand
gauggagcacuuaaacuuu

SEQ ID NO: 2108052 - RNA, 19 nt, Homo sapiens
  misc_RNA (1)...(19): siRNA sense strand
uggcagaaguccucaauag

SEQ ID NO: 2108053 - RNA, 19 nt, Homo sapiens
  misc_RNA (1)...(19): siRNA sense strand
gcaucaaccagcaagauuu

SEQ ID NO: 2108054 - RNA, 19 nt, Homo sapiens
  misc_RNA (1)...(19): siRNA sense strand
uaaugagcguguagaagaa

SEQ ID NO: 2108055 - RNA, 19 nt, Homo sapiens
  misc_RNA (1)...(19): siRNA sense strand
ggagcugucuaaccauaau

SEQ ID NO: 2108056 - RNA, 19 nt, Homo sapiens
  misc_RNA (1)...(19): siRNA sense strand
gaucagacccagacaccaa

SEQ ID NO: 2108057 - RNA, 19 nt, Homo sapiens
  misc_RNA (1)...(19): siRNA sense strand
ucauacaaguccacaaaga

SEQ ID NO: 2108058 - RNA, 19 nt, Homo sapiens
  misc_RNA (1)...(19): siRNA sense strand
gagcugcacaguaugauug

SEQ ID NO: 2108059 - RNA, 19 nt, Homo sapiens
  misc_RNA (1)...(19): siRNA sense strand
caaagaguccuggucaauu

SEQ ID NO: 2108060 - RNA, 19 nt, Homo sapiens
  misc_RNA (1)...(19): siRNA sense strand
gaaacucgccuagcagugu

SEQ ID NO: 2108061 - RNA, 19 nt, Homo sapiens
  misc_RNA (1)...(19): siRNA sense strand
acauaaagauccucauaag

SEQ ID NO: 2108062 - RNA, 19 nt, Homo sapiens
  misc_RNA (1)...(19): siRNA sense strand
ugaaacgcuuggagauaaa

SEQ ID NO: 2108063 - RNA, 19 nt, Homo sapiens
  misc_RNA (1)...(19): siRNA sense strand
gaagccauguuugaugaug

SEQ ID NO: 2108064 - RNA, 19 nt, Homo sapiens
  misc_RNA (1)...(19): siRNA sense strand
gaugauggcgauucaaugu

SEQ ID NO: 2108065 - RNA, 19 nt, Homo sapiens
  misc_RNA (1)...(19): siRNA sense strand
cauaaucaccuucgaaaca

SEQ ID NO: 2108066 - RNA, 19 nt, Homo sapiens
  misc_RNA (1)...(19): siRNA sense strand
ggucaucacuuggacaaca

SEQ ID NO: 2108067 - RNA, 19 nt, Homo sapiens
  misc_RNA (1)...(19): siRNA sense strand
ccaaauggucuacagcaaa

SEQ ID NO: 2108068 - RNA, 19 nt, Homo sapiens
  misc_RNA (1)...(19): siRNA sense strand
cuuauuugcugugcuauuu

SEQ ID NO: 2108069 - RNA, 19 nt, Homo sapiens
  misc_RNA (1)...(19): siRNA sense strand
ucuaguggauuucauacaa

SEQ ID NO: 2108070 - RNA, 19 nt, Homo sapiens
  misc_RNA (1)...(19): siRNA sense strand
gugaggagacguucauuug

SEQ ID NO: 2108071 - RNA, 19 nt, Homo sapiens
  misc_RNA (1)...(19): siRNA sense strand
gaaacugacacaggaagaa

SEQ ID NO: 2108072 - RNA, 19 nt, Homo sapiens
  misc_RNA (1)...(19): siRNA sense strand
aagaaucaguggauggaaa

SEQ ID NO: 2108073 - RNA, 19 nt, Homo sapiens
  misc_RNA (1)...(19): siRNA sense strand
agaaagcccuugauguuac

SEQ ID NO: 2108074 - RNA, 19 nt, Homo sapiens
  misc_RNA (1)...(19): siRNA sense strand
uggagacucuaguggauuu

SEQ ID NO: 2108075 - RNA, 19 nt, Homo sapiens
  misc_RNA (1)...(19): siRNA sense strand
ggcaagguauucagcaugu

SEQ ID NO: 2108076 - RNA, 19 nt, Homo sapiens
  misc_RNA (1)...(19): siRNA sense strand
agaacucgaagaaacauua

SEQ ID NO: 2108077 - RNA, 19 nt, Homo sapiens
  misc_RNA (1)...(19): siRNA sense strand
ggagauaaagagccuacaa

SEQ ID NO: 2108078 - RNA, 19 nt, Homo sapiens
  misc_RNA (1)...(19): siRNA sense strand
aaggagcugucuaaccaua

SEQ ID NO: 2108079 - RNA, 19 nt, Homo sapiens
  misc_RNA (1)...(19): siRNA sense strand
ccaagugcauuugauuaug

SEQ ID NO: 2108080 - RNA, 19 nt, Homo sapiens
  misc_RNA (1)...(19): siRNA sense strand
caagguauucagcauguuu

SEQ ID NO: 2108081 - RNA, 19 nt, Homo sapiens
  misc_RNA (1)...(19): siRNA sense strand
gcucgaagaagauaugaau

SEQ ID NO: 2108082 - RNA, 19 nt, Homo sapiens
  misc_RNA (1)...(19): siRNA sense strand
gagaaauccuaaggcauca

SEQ ID NO: 2108083 - RNA, 19 nt, Homo sapiens
  misc_RNA (1)...(19): siRNA sense strand
gacggaagauguggcagaa

SEQ ID NO: 2108084 - RNA, 19 nt, Homo sapiens
  misc_RNA (1)...(19): siRNA sense strand
cgaaaugguaguauuccua

SEQ ID NO: 2108085 - RNA, 19 nt, Homo sapiens
  misc_RNA (1)...(19): siRNA sense strand
uuacguagcucccgaaauu

SEQ ID NO: 2108086 - RNA, 19 nt, Homo sapiens
  misc_RNA (1)...(19): siRNA sense strand
gcucuuagcugacaucuca

SEQ ID NO: 2108087 - RNA, 19 nt, Homo sapiens
  misc_RNA (1)...(19): siRNA sense strand
aaacagacauggaaaucua

SEQ ID NO: 2108088 - RNA, 19 nt, Homo sapiens
  misc_RNA (1)...(19): siRNA sense strand
gcaagagcauggacaagaa

SEQ ID NO: 2108089 - RNA, 19 nt, Homo sapiens
  misc_RNA (1)...(19): siRNA sense strand
gaacuuugcugucgugaag

SEQ ID NO: 2108090 - RNA, 19 nt, Homo sapiens
  misc_RNA (1)...(19): siRNA sense strand
gaaauugcaugaagucuac

SEQ ID NO: 2108091 - RNA, 19 nt, Homo sapiens
  misc_RNA (1)...(19): siRNA sense strand
cuacacagcucaucagguu

SEQ ID NO: 2108092 - RNA, 19 nt, Homo sapiens
  misc_RNA (1)...(19): siRNA sense strand
gagcgucucugauuucuuc

SEQ ID NO: 2108093 - RNA, 19 nt, Homo sapiens
  misc_RNA (1)...(19): siRNA sense strand
ugugagaacugcuuuauug

SEQ ID NO: 2108094 - RNA, 19 nt, Homo sapiens
  misc_RNA (1)...(19): siRNA sense strand
gaaugcagguguugaagga

SEQ ID NO: 2108095 - RNA, 19 nt, Homo sapiens
  misc_RNA (1)...(19): siRNA sense strand
gaaaagaccucgggugaaa

SEQ ID NO: 2108096 - RNA, 19 nt, Homo sapiens
  misc_RNA (1)...(19): siRNA sense strand
caagaaagguugugagaac

SEQ ID NO: 2108097 - RNA, 19 nt, Homo sapiens
  misc_RNA (1)...(19): siRNA sense strand
ucagguggcuguagaagaa

SEQ ID NO: 2108098 - RNA, 19 nt, Homo sapiens
  misc_RNA (1)...(19): siRNA sense strand
ggaaggggaugcuuucaua

SEQ ID NO: 2108099 - RNA, 19 nt, Homo sapiens
  misc_RNA (1)...(19): siRNA sense strand
gcaaagcccucguccacau

SEQ ID NO: 2108100 - RNA, 19 nt, Homo sapiens
  misc_RNA (1)...(19): siRNA sense strand
gaucuucgauaguugagaa

SEQ ID NO: 2108101 - RNA, 19 nt, Homo sapiens
  misc_RNA (1)...(19): siRNA sense strand
gaucauggacuuaugcaaa

SEQ ID NO: 2108102 - RNA, 19 nt, Homo sapiens
  misc_RNA (1)...(19): siRNA sense strand
gaaaugaggacaaaucuac

SEQ ID NO: 2108103 - RNA, 19 nt, Homo sapiens
  misc_RNA (1)...(19): siRNA sense strand
uauuuaagcucgagaauca

SEQ ID NO: 2108104 - RNA, 19 nt, Homo sapiens
  misc_RNA (1)...(19): siRNA sense strand
ggagcaggcuguuuagcaa

SEQ ID NO: 2108105 - RNA, 19 nt, Homo sapiens
  misc_RNA (1)...(19): siRNA sense strand
gacgagcucuuuaacauca

SEQ ID NO: 2108106 - RNA, 19 nt, Homo sapiens
  misc_RNA (1)...(19): siRNA sense strand
ugaccaaccugcaaagcua

SEQ ID NO: 2108107 - RNA, 19 nt, Homo sapiens
  misc_RNA (1)...(19): siRNA sense strand
ggaagggcccaauguauga

SEQ ID NO: 2108108 - RNA, 19 nt, Homo sapiens
  misc_RNA (1)...(19): siRNA sense strand
gagaacugcuuuauuggau

SEQ ID NO: 2108109 - RNA, 19 nt, Homo sapiens
  misc_RNA (1)...(19): siRNA sense strand
guggugagaccuauauuua

SEQ ID NO: 2108110 - RNA, 19 nt, Homo sapiens
  misc_RNA (1)...(19): siRNA sense strand
gguguggccucucuguuaa

SEQ ID NO: 2108111 - RNA, 19 nt, Homo sapiens
  misc_RNA (1)...(19): siRNA sense strand
ggacagaggcccagaggau

SEQ ID NO: 2108112 - RNA, 19 nt, Homo sapiens
  misc_RNA (1)...(19): siRNA sense strand
ccucagaaguugguuauga

SEQ ID NO: 2108113 - RNA, 19 nt, Homo sapiens
  misc_RNA (1)...(19): siRNA sense strand
caaaucuacuaccuugaaa

SEQ ID NO: 2108114 - RNA, 19 nt, Homo sapiens
  misc_RNA (1)...(19): siRNA sense strand
ccgaggagcuuucacuaga

SEQ ID NO: 2108115 - RNA, 19 nt, Homo sapiens
  misc_RNA (1)...(19): siRNA sense strand
ggaaugggaugugagaaca

SEQ ID NO: 2108116 - RNA, 19 nt, Homo sapiens
  misc_RNA (1)...(19): siRNA sense strand
ugagggaggugaagaagga

SEQ ID NO: 2108117 - RNA, 19 nt, Homo sapiens
  misc_RNA (1)...(19): siRNA sense strand
gaaguugguuaugaugcua

SEQ ID NO: 2108118 - RNA, 19 nt, Homo sapiens
  misc_RNA (1)...(19): siRNA sense strand
caagaccaauacagugaaa

SEQ ID NO: 2108119 - RNA, 19 nt, Homo sapiens
  misc_RNA (1)...(19): siRNA sense strand
uagcaaggcucugaaagga

SEQ ID NO: 2108120 - RNA, 19 nt, Homo sapiens
  misc_RNA (1)...(19): siRNA sense strand
cuacuagggucggagauuu

SEQ ID NO: 2108121 - RNA, 19 nt, Homo sapiens
  misc_RNA (1)...(19): siRNA sense strand
gcauucagguggcuguaga

SEQ ID NO: 2108122 - RNA, 19 nt, Homo sapiens
  misc_RNA (1)...(19): siRNA sense strand
gcaaagaaccacugacacu

SEQ ID NO: 2108123 - RNA, 19 nt, Homo sapiens
  misc_RNA (1)...(19): siRNA sense strand
gagcgaggacccagaagaa

SEQ ID NO: 2108124 - RNA, 19 nt, Homo sapiens
  misc_RNA (1)...(19): siRNA sense strand
gaggagcuuucacuagaug

SEQ ID NO: 2108125 - RNA, 19 nt, Homo sapiens
  misc_RNA (1)...(19): siRNA sense strand
gggcaaagcgcacguucaa

SEQ ID NO: 2108126 - RNA, 19 nt, Homo sapiens
  misc_RNA (1)...(19): siRNA sense strand
gaagagaaggacccuggaa

SEQ ID NO: 2108127 - RNA, 19 nt, Homo sapiens
  misc_RNA (1)...(19): siRNA sense strand
ggugagaccuauauuuacu

SEQ ID NO: 2108128 - RNA, 19 nt, Homo sapiens
  misc_RNA (1)...(19): siRNA sense strand
gggaagggcccaauguaug

SEQ ID NO: 2108129 - RNA, 19 nt, Homo sapiens
  misc_RNA (1)...(19): siRNA sense strand
agaccuauauuuacugugu

SEQ ID NO: 2108130 - RNA, 19 nt, Homo sapiens
  misc_RNA (1)...(19): siRNA sense strand
ggaauuauugacccaagaa

SEQ ID NO: 2108131 - RNA, 19 nt, Homo sapiens
  misc_RNA (1)...(19): siRNA sense strand
cauagaaagugugaaguuc

SEQ ID NO: 2108132 - RNA, 19 nt, Homo sapiens
  misc_RNA (1)...(19): siRNA sense strand
ccaggaaucccacucaaga

SEQ ID NO: 2108133 - RNA, 19 nt, Homo sapiens
  misc_RNA (1)...(19): siRNA sense strand
gaaugaccgugugaggaaa

SEQ ID NO: 2108134 - RNA, 19 nt, Homo sapiens
  misc_RNA (1)...(19): siRNA sense strand
gcaaagcgcacguucaaaa

SEQ ID NO: 2108135 - RNA, 19 nt, Homo sapiens
  misc_RNA (1)...(19): siRNA sense strand
gcaacguuccucagaaguu

SEQ ID NO: 2108136 - RNA, 19 nt, Homo sapiens
  misc_RNA (1)...(19): siRNA sense strand
gaccaggacgagcucuuua

SEQ ID NO: 2108137 - RNA, 19 nt, Homo sapiens
  misc_RNA (1)...(19): siRNA sense strand
gagggaaucuggagaaacc

SEQ ID NO: 2108138 - RNA, 19 nt, Homo sapiens
  misc_RNA (1)...(19): siRNA sense strand
gcaugaagucuacgaaaca

SEQ ID NO: 2108139 - RNA, 19 nt, Homo sapiens
  misc_RNA (1)...(19): siRNA sense strand
gagaugaccaaccugcaaa

SEQ ID NO: 2108140 - RNA, 19 nt, Homo sapiens
  misc_RNA (1)...(19): siRNA sense strand
gggaugcuuucauagcuau

SEQ ID NO: 2108141 - RNA, 19 nt, Homo sapiens
  misc_RNA (1)...(19): siRNA sense strand
ggaccaggacgagcucuuu

SEQ ID NO: 2108142 - RNA, 19 nt, Homo sapiens
  misc_RNA (1)...(19): siRNA sense strand
aaagaaccacugacacuga

SEQ ID NO: 2108143 - RNA, 19 nt, Homo sapiens
  misc_RNA (1)...(19): siRNA sense strand
ugaaauugcaugaagucua

SEQ ID NO: 2108144 - RNA, 19 nt, Homo sapiens
  misc_RNA (1)...(19): siRNA sense strand
uaagaaugcagguguugaa

SEQ ID NO: 2108145 - RNA, 19 nt, Homo sapiens
  misc_RNA (1)...(19): siRNA sense strand
cgggugaaauuaucagaug

SEQ ID NO: 2108146 - RNA, 19 nt, Homo sapiens
  misc_RNA (1)...(19): siRNA sense strand
cugaggagcaggcuguuua

SEQ ID NO: 2108147 - RNA, 19 nt, Homo sapiens
  misc_RNA (1)...(19): siRNA sense strand
gaaccacugacacugaaga

SEQ ID NO: 2108148 - RNA, 19 nt, Homo sapiens
  misc_RNA (1)...(19): siRNA sense strand
ggcaagaccaauacaguga

SEQ ID NO: 2108149 - RNA, 19 nt, Homo sapiens
  misc_RNA (1)...(19): siRNA sense strand
cuacgaaacagacauggaa

SEQ ID NO: 2108150 - RNA, 19 nt, Homo sapiens
  misc_RNA (1)...(19): siRNA sense strand
gagcagccaaggccaagaa

SEQ ID NO: 2108151 - RNA, 19 nt, Homo sapiens
  misc_RNA (1)...(19): siRNA sense strand
gaccucgggugaaauuauc

SEQ ID NO: 2108152 - RNA, 19 nt, Homo sapiens
  misc_RNA (1)...(19): siRNA sense strand
gggcaaagaaccacugaca

SEQ ID NO: 2108153 - RNA, 19 nt, Homo sapiens
  misc_RNA (1)...(19): siRNA sense strand
acaaaucuacuaccuugaa

SEQ ID NO: 2108154 - RNA, 19 nt, Homo sapiens
  misc_RNA (1)...(19): siRNA sense strand
ggucggagauuuugugaau

SEQ ID NO: 2108155 - RNA, 19 nt, Homo sapiens
  misc_RNA (1)...(19): siRNA sense strand
aaagaccucgggugaaauu

SEQ ID NO: 2108156 - RNA, 19 nt, Homo sapiens
  misc_RNA (1)...(19): siRNA sense strand
gcaagaccaauacagugaa

SEQ ID NO: 2108157 - RNA, 19 nt, Homo sapiens
  misc_RNA (1)...(19): siRNA sense strand
gagaagugcaagagagaga

SEQ ID NO: 2108158 - RNA, 19 nt, Homo sapiens
  misc_RNA (1)...(19): siRNA sense strand
ggacagcaaggccuaugug

SEQ ID NO: 2108159 - RNA, 19 nt, Homo sapiens
  misc_RNA (1)...(19): siRNA sense strand
gacuggagguggacaugug

SEQ ID NO: 2108160 - RNA, 19 nt, Homo sapiens
  misc_RNA (1)...(19): siRNA sense strand
aagaaccacugacacugaa

SEQ ID NO: 2108161 - RNA, 19 nt, Homo sapiens
  misc_RNA (1)...(19): siRNA sense strand
gagaaggacccuggaaugg

SEQ ID NO: 2108162 - RNA, 19 nt, Homo sapiens
  misc_RNA (1)...(19): siRNA sense strand
ucuacuaccuugaaauugg

SEQ ID NO: 2108163 - RNA, 19 nt, Homo sapiens
  misc_RNA (1)...(19): siRNA sense strand
gaggacaaaucuacuaccu

SEQ ID NO: 2108164 - RNA, 19 nt, Homo sapiens
  misc_RNA (1)...(19): siRNA sense strand
gaaacagacauggaaaucu

SEQ ID NO: 2108165 - RNA, 19 nt, Homo sapiens
  misc_RNA (1)...(19): siRNA sense strand
ggacaagaaagaggacaga

SEQ ID NO: 2108166 - RNA, 19 nt, Homo sapiens
  misc_RNA (1)...(19): siRNA sense strand
caagagcauggacaagaaa

SEQ ID NO: 2108167 - RNA, 19 nt, Homo sapiens
  misc_RNA (1)...(19): siRNA sense strand
caagagcugcagcgaaguu

SEQ ID NO: 2108168 - RNA, 19 nt, Homo sapiens
  misc_RNA (1)...(19): siRNA sense strand
agaaugaccgugugaggaa

SEQ ID NO: 2108169 - RNA, 19 nt, Homo sapiens
  misc_RNA (1)...(19): siRNA sense strand
ggcgaucagugcagacguu

SEQ ID NO: 2108170 - RNA, 19 nt, Homo sapiens
  misc_RNA (1)...(19): siRNA sense strand
aggacgagcucuuuaacau

SEQ ID NO: 2108171 - RNA, 19 nt, Homo sapiens
  misc_RNA (1)...(19): siRNA sense strand
ucagcgaaaugaggacaaa

SEQ ID NO: 2108172 - RNA, 19 nt, Homo sapiens
  misc_RNA (1)...(19): siRNA sense strand
ucauagaaagugugaaguu

SEQ ID NO: 2108173 - RNA, 19 nt, Homo sapiens
  misc_RNA (1)...(19): siRNA sense strand
gaauuauugacccaagaaa

SEQ ID NO: 2108174 - RNA, 19 nt, Homo sapiens
  misc_RNA (1)...(19): siRNA sense strand
gggaagccacucuggaaga

SEQ ID NO: 2108175 - RNA, 19 nt, Homo sapiens
  misc_RNA (1)...(19): siRNA sense strand
guggcuggcuccugagaga

SEQ ID NO: 2108176 - RNA, 19 nt, Homo sapiens
  misc_RNA (1)...(19): siRNA sense strand
ggacgagcucuuuaacauc

SEQ ID NO: 2108177 - RNA, 19 nt, Homo sapiens
  misc_RNA (1)...(19): siRNA sense strand
cgaaaugaggacaaaucua

SEQ ID NO: 2108178 - RNA, 19 nt, Homo sapiens
  misc_RNA (1)...(19): siRNA sense strand
ugaagaucauugacaaguc

SEQ ID NO: 2108179 - RNA, 19 nt, Homo sapiens
  misc_RNA (1)...(19): siRNA sense strand
ggaaaagcauuaugagacu

SEQ ID NO: 2108180 - RNA, 19 nt, Homo sapiens
  misc_RNA (1)...(19): siRNA sense strand
gaagagaaggaggcagaga

SEQ ID NO: 2108181 - RNA, 19 nt, Homo sapiens
  misc_RNA (1)...(19): siRNA sense strand
ugguguggccucucuguua

SEQ ID NO: 2108182 - RNA, 19 nt, Homo sapiens
  misc_RNA (1)...(19): siRNA sense strand
ugagaccuauauuuacugu

SEQ ID NO: 2108183 - RNA, 19 nt, Homo sapiens
  misc_RNA (1)...(19): siRNA sense strand
gguggacagugagaucuug

SEQ ID NO: 2108184 - RNA, 19 nt, Homo sapiens
  misc_RNA (1)...(19): siRNA sense strand
uaugcaacguuccucagaa

SEQ ID NO: 2108185 - RNA, 19 nt, Homo sapiens
  misc_RNA (1)...(19): siRNA sense strand
ggauaaagcuguagaaaug

SEQ ID NO: 2108186 - RNA, 19 nt, Homo sapiens
  misc_RNA (1)...(19): siRNA sense strand
ggaagaagcugaaagguau

SEQ ID NO: 2108187 - RNA, 19 nt, Homo sapiens
  misc_RNA (1)...(19): siRNA sense strand
ugaagaagcugucuaguaa

SEQ ID NO: 2108188 - RNA, 19 nt, Homo sapiens
  misc_RNA (1)...(19): siRNA sense strand
ggaaaccgguuauugcaua

SEQ ID NO: 2108189 - RNA, 19 nt, Homo sapiens
  misc_RNA (1)...(19): siRNA sense strand
gauaagagaugcugccuau

SEQ ID NO: 2108190 - RNA, 19 nt, Homo sapiens
  misc_RNA (1)...(19): siRNA sense strand
gaugauagcauguucguua

SEQ ID NO: 2108191 - RNA, 19 nt, Homo sapiens
  misc_RNA (1)...(19): siRNA sense strand
gcacgagacugguugauga

SEQ ID NO: 2108192 - RNA, 19 nt, Homo sapiens
  misc_RNA (1)...(19): siRNA sense strand
gcacugauuuggaaagaaa

SEQ ID NO: 2108193 - RNA, 19 nt, Homo sapiens
  misc_RNA (1)...(19): siRNA sense strand
gcaccaacauggccuuuaa

SEQ ID NO: 2108194 - RNA, 19 nt, Homo sapiens
  misc_RNA (1)...(19): siRNA sense strand
gaagaaaugcuaaagacua

SEQ ID NO: 2108195 - RNA, 19 nt, Homo sapiens
  misc_RNA (1)...(19): siRNA sense strand
gauaaugacugaccaagug

SEQ ID NO: 2108196 - RNA, 19 nt, Homo sapiens
  misc_RNA (1)...(19): siRNA sense strand
gagacucacugaagaagua

SEQ ID NO: 2108197 - RNA, 19 nt, Homo sapiens
  misc_RNA (1)...(19): siRNA sense strand
gaaaggaggugcauuugag

SEQ ID NO: 2108198 - RNA, 19 nt, Homo sapiens
  misc_RNA (1)...(19): siRNA sense strand
gaacgacucucugcucuug

SEQ ID NO: 2108199 - RNA, 19 nt, Homo sapiens
  misc_RNA (1)...(19): siRNA sense strand
caagagccauucaggauuu

SEQ ID NO: 2108200 - RNA, 19 nt, Homo sapiens
  misc_RNA (1)...(19): siRNA sense strand
caucaaaucuggacaaaca

SEQ ID NO: 2108201 - RNA, 19 nt, Homo sapiens
  misc_RNA (1)...(19): siRNA sense strand
gaacaaagagggcaaagau

SEQ ID NO: 2108202 - RNA, 19 nt, Homo sapiens
  misc_RNA (1)...(19): siRNA sense strand
caaaguaucugagugcaaa

SEQ ID NO: 2108203 - RNA, 19 nt, Homo sapiens
  misc_RNA (1)...(19): siRNA sense strand
gcugaaagguaucaauaaa

SEQ ID NO: 2108204 - RNA, 19 nt, Homo sapiens
  misc_RNA (1)...(19): siRNA sense strand
gacaucaacuucaaucuga

SEQ ID NO: 2108205 - RNA, 19 nt, Homo sapiens
  misc_RNA (1)...(19): siRNA sense strand
gcaaguggccuaccagaaa

SEQ ID NO: 2108206 - RNA, 19 nt, Homo sapiens
  misc_RNA (1)...(19): siRNA sense strand
gaagaucauuuccucauuc

SEQ ID NO: 2108207 - RNA, 19 nt, Homo sapiens
  misc_RNA (1)...(19): siRNA sense strand
gaagcugucuaguaaggua

SEQ ID NO: 2108208 - RNA, 19 nt, Homo sapiens
  misc_RNA (1)...(19): siRNA sense strand
ggcaggagcuggcaaagaa

SEQ ID NO: 2108209 - RNA, 19 nt, Homo sapiens
  misc_RNA (1)...(19): siRNA sense strand
uaagagaugcugccuauuu

SEQ ID NO: 2108210 - RNA, 19 nt, Homo sapiens
  misc_RNA (1)...(19): siRNA sense strand
gggauugccucaucaaaga

SEQ ID NO: 2108211 - RNA, 19 nt, Homo sapiens
  misc_RNA (1)...(19): siRNA sense strand
gauuugaacuugagagaga

SEQ ID NO: 2108212 - RNA, 19 nt, Homo sapiens
  misc_RNA (1)...(19): siRNA sense strand
ggccagggauuccgacaua

SEQ ID NO: 2108213 - RNA, 19 nt, Homo sapiens
  misc_RNA (1)...(19): siRNA sense strand
gcaaauaagaugaaggaaa

SEQ ID NO: 2108214 - RNA, 19 nt, Homo sapiens
  misc_RNA (1)...(19): siRNA sense strand
gcauuuacaucagaucuuu

SEQ ID NO: 2108215 - RNA, 19 nt, Homo sapiens
  misc_RNA (1)...(19): siRNA sense strand
aaacaggucuggcugaaga

SEQ ID NO: 2108216 - RNA, 19 nt, Homo sapiens
  misc_RNA (1)...(19): siRNA sense strand
gauuaaagcugacauuggu

SEQ ID NO: 2108217 - RNA, 19 nt, Homo sapiens
  misc_RNA (1)...(19): siRNA sense strand
caacaaugcugagaaggaa

SEQ ID NO: 2108218 - RNA, 19 nt, Homo sapiens
  misc_RNA (1)...(19): siRNA sense strand
caacuguucuggagucuug

SEQ ID NO: 2108219 - RNA, 19 nt, Homo sapiens
  misc_RNA (1)...(19): siRNA sense strand
cuacaacccugcacugauu

SEQ ID NO: 2108220 - RNA, 19 nt, Homo sapiens
  misc_RNA (1)...(19): siRNA sense strand
caacauggccuuuaacauc

SEQ ID NO: 2108221 - RNA, 19 nt, Homo sapiens
  misc_RNA (1)...(19): siRNA sense strand
ucaggaagaugauuaugaa

SEQ ID NO: 2108222 - RNA, 19 nt, Homo sapiens
  misc_RNA (1)...(19): siRNA sense strand
ucaaagcucuagagucuga

SEQ ID NO: 2108223 - RNA, 19 nt, Homo sapiens
  misc_RNA (1)...(19): siRNA sense strand
gagaagcacuugauaucug

SEQ ID NO: 2108224 - RNA, 19 nt, Homo sapiens
  misc_RNA (1)...(19): siRNA sense strand
guaagcgacuuggcaauuu

SEQ ID NO: 2108225 - RNA, 19 nt, Homo sapiens
  misc_RNA (1)...(19): siRNA sense strand
gacgagaacuuuccucugu

SEQ ID NO: 2108226 - RNA, 19 nt, Homo sapiens
  misc_RNA (1)...(19): siRNA sense strand
cggccaagcugcagaagua

SEQ ID NO: 2108227 - RNA, 19 nt, Homo sapiens
  misc_RNA (1)...(19): siRNA sense strand
gaacucaggaaaccgguua

SEQ ID NO: 2108228 - RNA, 19 nt, Homo sapiens
  misc_RNA (1)...(19): siRNA sense strand
guacauccacuuucuguuu

SEQ ID NO: 2108229 - RNA, 19 nt, Homo sapiens
  misc_RNA (1)...(19): siRNA sense strand
gcagaagaacuuaaagaaa

SEQ ID NO: 2108230 - RNA, 19 nt, Homo sapiens
  misc_RNA (1)...(19): siRNA sense strand
ggaaacaguagaaagcaua

SEQ ID NO: 2108231 - RNA, 19 nt, Homo sapiens
  misc_RNA (1)...(19): siRNA sense strand
ggaaggagggcaaugauga

SEQ ID NO: 2108232 - RNA, 19 nt, Homo sapiens
  misc_RNA (1)...(19): siRNA sense strand
ucacgugccugaaacauga

SEQ ID NO: 2108233 - RNA, 19 nt, Homo sapiens
  misc_RNA (1)...(19): siRNA sense strand
ggaauuggcuaagaccuau

SEQ ID NO: 2108234 - RNA, 19 nt, Homo sapiens
  misc_RNA (1)...(19): siRNA sense strand
ccaaggacauucugagaga

SEQ ID NO: 2108235 - RNA, 19 nt, Homo sapiens
  misc_RNA (1)...(19): siRNA sense strand
ugaagaagcugcuauugca

SEQ ID NO: 2108236 - RNA, 19 nt, Homo sapiens
  misc_RNA (1)...(19): siRNA sense strand
acaaagcucugauggagaa

SEQ ID NO: 2108237 - RNA, 19 nt, Homo sapiens
  misc_RNA (1)...(19): siRNA sense strand
gcaaagaaauccucaaacc

SEQ ID NO: 2108238 - RNA, 19 nt, Homo sapiens
  misc_RNA (1)...(19): siRNA sense strand
gauggaagcuugaaaagaa

SEQ ID NO: 2108239 - RNA, 19 nt, Homo sapiens
  misc_RNA (1)...(19): siRNA sense strand
ggaagauucuauugaagug

SEQ ID NO: 2108240 - RNA, 19 nt, Homo sapiens
  misc_RNA (1)...(19): siRNA sense strand
uggagcagcuggugaagua

SEQ ID NO: 2108241 - RNA, 19 nt, Homo sapiens
  misc_RNA (1)...(19): siRNA sense strand
ggacaucgagcaaagugua

SEQ ID NO: 2108242 - RNA, 19 nt, Homo sapiens
  misc_RNA (1)...(19): siRNA sense strand
ucucaaagcuagacauaga

SEQ ID NO: 2108243 - RNA, 19 nt, Homo sapiens
  misc_RNA (1)...(19): siRNA sense strand
guacaaaggaauuucauug

SEQ ID NO: 2108244 - RNA, 19 nt, Homo sapiens
  misc_RNA (1)...(19): siRNA sense strand
cgagugcacuucagaaaug

SEQ ID NO: 2108245 - RNA, 19 nt, Homo sapiens
  misc_RNA (1)...(19): siRNA sense strand
gcaaagaaggaaagaaaga

SEQ ID NO: 2108246 - RNA, 19 nt, Homo sapiens
  misc_RNA (1)...(19): siRNA sense strand
ccagaggacugucuucaga

SEQ ID NO: 2108247 - RNA, 19 nt, Homo sapiens
  misc_RNA (1)...(19): siRNA sense strand
gcacggcaccggauuaaga

SEQ ID NO: 2108248 - RNA, 19 nt, Homo sapiens
  misc_RNA (1)...(19): siRNA sense strand
ucaagaggguuucggauau

SEQ ID NO: 2108249 - RNA, 19 nt, Homo sapiens
  misc_RNA (1)...(19): siRNA sense strand
gaagccaaguguuuaguuc

SEQ ID NO: 2108250 - RNA, 19 nt, Homo sapiens
  misc_RNA (1)...(19): siRNA sense strand
gcucagggaugccuucuuc

SEQ ID NO: 2108251 - RNA, 19 nt, Homo sapiens
  misc_RNA (1)...(19): siRNA sense strand
ggaaaaguaugaagaaaug

SEQ ID NO: 2108252 - RNA, 19 nt, Homo sapiens
  misc_RNA (1)...(19): siRNA sense strand
aaacucagcccauugaauu

SEQ ID NO: 2108253 - RNA, 19 nt, Homo sapiens
  misc_RNA (1)...(19): siRNA sense strand
agaggaagauucuauugaa

SEQ ID NO: 2108254 - RNA, 19 nt, Homo sapiens
  misc_RNA (1)...(19): siRNA sense strand
gaaauccucaaaccaaauu

SEQ ID NO: 2108255 - RNA, 19 nt, Homo sapiens
  misc_RNA (1)...(19): siRNA sense strand
gaaugacccugggcccaua

SEQ ID NO: 2108256 - RNA, 19 nt, Homo sapiens
  misc_RNA (1)...(19): siRNA sense strand
caaaucaggucccagaaag

SEQ ID NO: 2108257 - RNA, 19 nt, Homo sapiens
  misc_RNA (1)...(19): siRNA sense strand
cgagaacuuuccucuguuu

SEQ ID NO: 2108258 - RNA, 19 nt, Homo sapiens
  misc_RNA (1)...(19): siRNA sense strand
caaaguaaguggagaacca

SEQ ID NO: 2108259 - RNA, 19 nt, Homo sapiens
  misc_RNA (1)...(19): siRNA sense strand
ggaacacgcugaugcacau

SEQ ID NO: 2108260 - RNA, 19 nt, Homo sapiens
  misc_RNA (1)...(19): siRNA sense strand
gaaaaucaacagucacuua

SEQ ID NO: 2108261 - RNA, 19 nt, Homo sapiens
  misc_RNA (1)...(19): siRNA sense strand
gaagaggaagauucuauug

SEQ ID NO: 2108262 - RNA, 19 nt, Homo sapiens
  misc_RNA (1)...(19): siRNA sense strand
cgucuuagaucacugcaaa

SEQ ID NO: 2108263 - RNA, 19 nt, Homo sapiens
  misc_RNA (1)...(19): siRNA sense strand
gacagaauauaacaucaug

SEQ ID NO: 2108264 - RNA, 19 nt, Homo sapiens
  misc_RNA (1)...(19): siRNA sense strand
gaugcugccuauuucuaua

SEQ ID NO: 2108265 - RNA, 19 nt, Homo sapiens
  misc_RNA (1)...(19): siRNA sense strand
ccagaaaggaggugcauuu

SEQ ID NO: 2108266 - RNA, 19 nt, Homo sapiens
  misc_RNA (1)...(19): siRNA sense strand
gauagcauguucguuaaga

SEQ ID NO: 2108267 - RNA, 19 nt, Homo sapiens
  misc_RNA (1)...(19): siRNA sense strand
gugaugagauucaagacuu

SEQ ID NO: 2108268 - RNA, 19 nt, Homo sapiens
  misc_RNA (1)...(19): siRNA sense strand
gggcggaucuacacggaaa

SEQ ID NO: 2108269 - RNA, 19 nt, Homo sapiens
  misc_RNA (1)...(19): siRNA sense strand
gaaggaagguauuguucag

SEQ ID NO: 2108270 - RNA, 19 nt, Homo sapiens
  misc_RNA (1)...(19): siRNA sense strand
cuaaggaccuaucaggauu

SEQ ID NO: 2108271 - RNA, 19 nt, Homo sapiens
  misc_RNA (1)...(19): siRNA sense strand
gagcuacauugcacucuug

SEQ ID NO: 2108272 - RNA, 19 nt, Homo sapiens
  misc_RNA (1)...(19): siRNA sense strand
caacagggaugaugaaaau

SEQ ID NO: 2108273 - RNA, 19 nt, Homo sapiens
  misc_RNA (1)...(19): siRNA sense strand
caucuggagugguggauuu

SEQ ID NO: 2108274 - RNA, 19 nt, Homo sapiens
  misc_RNA (1)...(19): siRNA sense strand
gcagaaacaccauagacaa

SEQ ID NO: 2108275 - RNA, 19 nt, Homo sapiens
  misc_RNA (1)...(19): siRNA sense strand
gcucuauggugaugagauu

SEQ ID NO: 2108276 - RNA, 19 nt, Homo sapiens
  misc_RNA (1)...(19): siRNA sense strand
gcaaaucaggucccagaaa

SEQ ID NO: 2108277 - RNA, 19 nt, Homo sapiens
  misc_RNA (1)...(19): siRNA sense strand
ccaccaccgucuucaaauu

SEQ ID NO: 2108278 - RNA, 19 nt, Homo sapiens
  misc_RNA (1)...(19): siRNA sense strand
gaaggaguacauccacuuu

SEQ ID NO: 2108279 - RNA, 19 nt, Homo sapiens
  misc_RNA (1)...(19): siRNA sense strand
agaaggaaauggucaaauc

SEQ ID NO: 2108280 - RNA, 19 nt, Homo sapiens
  misc_RNA (1)...(19): siRNA sense strand
gagagaagcacuugauauc

SEQ ID NO: 2108281 - RNA, 19 nt, Homo sapiens
  misc_RNA (1)...(19): siRNA sense strand
ggaauuucauugagcuuuc

SEQ ID NO: 2108282 - RNA, 19 nt, Homo sapiens
  misc_RNA (1)...(19): siRNA sense strand
uagaugagcaggaguauga

SEQ ID NO: 2108283 - RNA, 19 nt, Homo sapiens
  misc_RNA (1)...(19): siRNA sense strand
gcguauaccucgcugcuau

SEQ ID NO: 2108284 - RNA, 19 nt, Homo sapiens
  misc_RNA (1)...(19): siRNA sense strand
ccagguggaugccaaguau

SEQ ID NO: 2108285 - RNA, 19 nt, Homo sapiens
  misc_RNA (1)...(19): siRNA sense strand
gcacucagcuccaugucua

SEQ ID NO: 2108286 - RNA, 19 nt, Homo sapiens
  misc_RNA (1)...(19): siRNA sense strand
gaagacggccugugagaua

SEQ ID NO: 2108287 - RNA, 19 nt, Homo sapiens
  misc_RNA (1)...(19): siRNA sense strand
gcaacucgcuggaucuuug

SEQ ID NO: 2108288 - RNA, 19 nt, Homo sapiens
  misc_RNA (1)...(19): siRNA sense strand
gcaggugucucgucagaaa

SEQ ID NO: 2108289 - RNA, 19 nt, Homo sapiens
  misc_RNA (1)...(19): siRNA sense strand
gcacugcccuucucucaga

SEQ ID NO: 2108290 - RNA, 19 nt, Homo sapiens
  misc_RNA (1)...(19): siRNA sense strand
gcugaagggugaugugaaa

SEQ ID NO: 2108291 - RNA, 19 nt, Homo sapiens
  misc_RNA (1)...(19): siRNA sense strand
ucaaugcccucaaccauga

SEQ ID NO: 2108292 - RNA, 19 nt, Homo sapiens
  misc_RNA (1)...(19): siRNA sense strand
guaccaggaugcucuuuga

SEQ ID NO: 2108293 - RNA, 19 nt, Homo sapiens
  misc_RNA (1)...(19): siRNA sense strand
gggcaacccugaugucuca

SEQ ID NO: 2108294 - RNA, 19 nt, Homo sapiens
  misc_RNA (1)...(19): siRNA sense strand
ggaaggcgauggcagaagu

SEQ ID NO: 2108295 - RNA, 19 nt, Homo sapiens
  misc_RNA (1)...(19): siRNA sense strand
gcaaagagaacaccaacga

SEQ ID NO: 2108296 - RNA, 19 nt, Homo sapiens
  misc_RNA (1)...(19): siRNA sense strand
gggaggagauccaaagcaa

SEQ ID NO: 2108297 - RNA, 19 nt, Homo sapiens
  misc_RNA (1)...(19): siRNA sense strand
gcagagaccacccugaaga

SEQ ID NO: 2108298 - RNA, 19 nt, Homo sapiens
  misc_RNA (1)...(19): siRNA sense strand
caaggcugcuggacauuga

SEQ ID NO: 2108299 - RNA, 19 nt, Homo sapiens
  misc_RNA (1)...(19): siRNA sense strand
acaacuggcucaggacaua

SEQ ID NO: 2108300 - RNA, 19 nt, Homo sapiens
  misc_RNA (1)...(19): siRNA sense strand
gaacacaguccucaugucu

SEQ ID NO: 2108301 - RNA, 19 nt, Homo sapiens
  misc_RNA (1)...(19): siRNA sense strand
ccagaaagguguccaagac

SEQ ID NO: 2108302 - RNA, 19 nt, Homo sapiens
  misc_RNA (1)...(19): siRNA sense strand
gaacuggaggccacuguga

SEQ ID NO: 2108303 - RNA, 19 nt, Homo sapiens
  misc_RNA (1)...(19): siRNA sense strand
ggaaagacagacagacaga

SEQ ID NO: 2108304 - RNA, 19 nt, Homo sapiens
  misc_RNA (1)...(19): siRNA sense strand
ccagggagcucacaacacu

SEQ ID NO: 2108305 - RNA, 19 nt, Homo sapiens
  misc_RNA (1)...(19): siRNA sense strand
cagcccagcuuacaacaug

SEQ ID NO: 2108306 - RNA, 19 nt, Homo sapiens
  misc_RNA (1)...(19): siRNA sense strand
gggcaggugucucgucaga

SEQ ID NO: 2108307 - RNA, 19 nt, Homo sapiens
  misc_RNA (1)...(19): siRNA sense strand
ccaggacggucuucggaaa

SEQ ID NO: 2108308 - RNA, 19 nt, Homo sapiens
  misc_RNA (1)...(19): siRNA sense strand
gagacuggaugccauugga

SEQ ID NO: 2108309 - RNA, 19 nt, Homo sapiens
  misc_RNA (1)...(19): siRNA sense strand
ggauggcagucuugggaaa

SEQ ID NO: 2108310 - RNA, 19 nt, Homo sapiens
  misc_RNA (1)...(19): siRNA sense strand
gggcaucuauccagugaca

SEQ ID NO: 2108311 - RNA, 19 nt, Homo sapiens
  misc_RNA (1)...(19): siRNA sense strand
acacaguccucaugucuuc

SEQ ID NO: 2108312 - RNA, 19 nt, Homo sapiens
  misc_RNA (1)...(19): siRNA sense strand
ggagacaucaagagaguau

SEQ ID NO: 2108313 - RNA, 19 nt, Homo sapiens
  misc_RNA (1)...(19): siRNA sense strand
gaacuucccaggaucaucu

SEQ ID NO: 2108314 - RNA, 19 nt, Homo sapiens
  misc_RNA (1)...(19): siRNA sense strand
guucgagacuugcccaaug

SEQ ID NO: 2108315 - RNA, 19 nt, Homo sapiens
  misc_RNA (1)...(19): siRNA sense strand
gaaagaagaagggaagagu

SEQ ID NO: 2108316 - RNA, 19 nt, Homo sapiens
  misc_RNA (1)...(19): siRNA sense strand
ucuagagacucccagcuuu

SEQ ID NO: 2108317 - RNA, 19 nt, Homo sapiens
  misc_RNA (1)...(19): siRNA sense strand
gcaaagaaaccagaaagag

SEQ ID NO: 2108318 - RNA, 19 nt, Homo sapiens
  misc_RNA (1)...(19): siRNA sense strand
gcagugggaauauugaaga

SEQ ID NO: 2108319 - RNA, 19 nt, Homo sapiens
  misc_RNA (1)...(19): siRNA sense strand
gaaagggauggcagucuug

SEQ ID NO: 2108320 - RNA, 19 nt, Homo sapiens
  misc_RNA (1)...(19): siRNA sense strand
caggugaacuucccaggau

SEQ ID NO: 2108321 - RNA, 19 nt, Homo sapiens
  misc_RNA (1)...(19): siRNA sense strand
caggagacaucaagagagu

SEQ ID NO: 2108322 - RNA, 19 nt, Homo sapiens
  misc_RNA (1)...(19): siRNA sense strand
gaucccaccucaccacagu

SEQ ID NO: 2108323 - RNA, 19 nt, Homo sapiens
  misc_RNA (1)...(19): siRNA sense strand
agaaagggauggcagucuu

SEQ ID NO: 2108324 - RNA, 19 nt, Homo sapiens
  misc_RNA (1)...(19): siRNA sense strand
gagaagaaggaacugauuc

SEQ ID NO: 2108325 - RNA, 19 nt, Homo sapiens
  misc_RNA (1)...(19): siRNA sense strand
ccagagggaugagcuaaag

SEQ ID NO: 2108326 - RNA, 19 nt, Homo sapiens
  misc_RNA (1)...(19): siRNA sense strand
ggaacacaguccucauguc

SEQ ID NO: 2108327 - RNA, 19 nt, Homo sapiens
  misc_RNA (1)...(19): siRNA sense strand
cuagagacucccagcuuua

SEQ ID NO: 2108328 - RNA, 19 nt, Homo sapiens
  misc_RNA (1)...(19): siRNA sense strand
caacauuuaucuccaucca

SEQ ID NO: 2108329 - RNA, 19 nt, Homo sapiens
  misc_RNA (1)...(19): siRNA sense strand
caacgaggugagagagaua

SEQ ID NO: 2108330 - RNA, 19 nt, Homo sapiens
  misc_RNA (1)...(19): siRNA sense strand
gagagcaucauccauguuc

SEQ ID NO: 2108331 - RNA, 19 nt, Homo sapiens
  misc_RNA (1)...(19): siRNA sense strand
ggaacgacagaaagaagaa

SEQ ID NO: 2108332 - RNA, 19 nt, Homo sapiens
  misc_RNA (1)...(19): siRNA sense strand
gaaguggucccuggugaug

SEQ ID NO: 2108333 - RNA, 19 nt, Homo sapiens
  misc_RNA (1)...(19): siRNA sense strand
ccaagugggucaccuacag

SEQ ID NO: 2108334 - RNA, 19 nt, Homo sapiens
  misc_RNA (1)...(19): siRNA sense strand
agacaucaagagaguauuu

SEQ ID NO: 2108335 - RNA, 19 nt, Homo sapiens
  misc_RNA (1)...(19): siRNA sense strand
ugaagaggcugugcacaag

SEQ ID NO: 2108336 - RNA, 19 nt, Homo sapiens
  misc_RNA (1)...(19): siRNA sense strand
gcagauagucggaggugau

SEQ ID NO: 2108337 - RNA, 19 nt, Homo sapiens
  misc_RNA (1)...(19): siRNA sense strand
gcaccagcccaauugcaaa

SEQ ID NO: 2108338 - RNA, 19 nt, Homo sapiens
  misc_RNA (1)...(19): siRNA sense strand
ugagaaccgugacugaaca

SEQ ID NO: 2108339 - RNA, 19 nt, Homo sapiens
  misc_RNA (1)...(19): siRNA sense strand
cccuaaaccugcacaccua

SEQ ID NO: 2108340 - RNA, 19 nt, Homo sapiens
  misc_RNA (1)...(19): siRNA sense strand
ccacagugcccacaagauc

SEQ ID NO: 2108341 - RNA, 19 nt, Homo sapiens
  misc_RNA (1)...(19): siRNA sense strand
gccucuaucucccagcuuu

SEQ ID NO: 2108342 - RNA, 19 nt, Homo sapiens
  misc_RNA (1)...(19): siRNA sense strand
ggcuacagguggauguuug

SEQ ID NO: 2108343 - RNA, 19 nt, Homo sapiens
  misc_RNA (1)...(19): siRNA sense strand
aaacugcagucaagaacca

SEQ ID NO: 2108344 - RNA, 19 nt, Homo sapiens
  misc_RNA (1)...(19): siRNA sense strand
gcaaggcugcuggacauug

SEQ ID NO: 2108345 - RNA, 19 nt, Homo sapiens
  misc_RNA (1)...(19): siRNA sense strand
cagccaagguucccacuac

SEQ ID NO: 2108346 - RNA, 19 nt, Homo sapiens
  misc_RNA (1)...(19): siRNA sense strand
uuggccagcugcauagaua

SEQ ID NO: 2108347 - RNA, 19 nt, Homo sapiens
  misc_RNA (1)...(19): siRNA sense strand
ugcaugcgcuggaucuuug

SEQ ID NO: 2108348 - RNA, 19 nt, Homo sapiens
  misc_RNA (1)...(19): siRNA sense strand
cugacagucugcaaagaaa

SEQ ID NO: 2108349 - RNA, 19 nt, Homo sapiens
  misc_RNA (1)...(19): siRNA sense strand
ccaacgaggugagagagau

SEQ ID NO: 2108350 - RNA, 19 nt, Homo sapiens
  misc_RNA (1)...(19): siRNA sense strand
gcaggaagacagucacucu

SEQ ID NO: 2108351 - RNA, 19 nt, Homo sapiens
  misc_RNA (1)...(19): siRNA sense strand
gcaggaacgacagaaagaa

SEQ ID NO: 2108352 - RNA, 19 nt, Homo sapiens
  misc_RNA (1)...(19): siRNA sense strand
gcagcaggaacgacagaaa

SEQ ID NO: 2108353 - RNA, 19 nt, Homo sapiens
  misc_RNA (1)...(19): siRNA sense strand
ggccaccucccgcaaguuu

SEQ ID NO: 2108354 - RNA, 19 nt, Homo sapiens
  misc_RNA (1)...(19): siRNA sense strand
uaacuagcaaggccucuga

SEQ ID NO: 2108355 - RNA, 19 nt, Homo sapiens
  misc_RNA (1)...(19): siRNA sense strand
ccaggcagcagugggaaua

SEQ ID NO: 2108356 - RNA, 19 nt, Homo sapiens
  misc_RNA (1)...(19): siRNA sense strand
ggugguuguucgagacuug

SEQ ID NO: 2108357 - RNA, 19 nt, Homo sapiens
  misc_RNA (1)...(19): siRNA sense strand
gcagagaagaaggaacuga

SEQ ID NO: 2108358 - RNA, 19 nt, Homo sapiens
  misc_RNA (1)...(19): siRNA sense strand
gcagcagcagcaucuguuu

SEQ ID NO: 2108359 - RNA, 19 nt, Homo sapiens
  misc_RNA (1)...(19): siRNA sense strand
ccacaaggaagccucuaga

SEQ ID NO: 2108360 - RNA, 19 nt, Homo sapiens
  misc_RNA (1)...(19): siRNA sense strand
acacugaggcccagaguca

SEQ ID NO: 2108361 - RNA, 19 nt, Homo sapiens
  misc_RNA (1)...(19): siRNA sense strand
uggcaaggcugcuggacau

SEQ ID NO: 2108362 - RNA, 19 nt, Homo sapiens
  misc_RNA (1)...(19): siRNA sense strand
gcccugaccucuguuagca

SEQ ID NO: 2108363 - RNA, 19 nt, Homo sapiens
  misc_RNA (1)...(19): siRNA sense strand
gagcugaagggugauguga

SEQ ID NO: 2108364 - RNA, 19 nt, Homo sapiens
  misc_RNA (1)...(19): siRNA sense strand
acaaggaagccucuagaga

SEQ ID NO: 2108365 - RNA, 19 nt, Homo sapiens
  misc_RNA (1)...(19): siRNA sense strand
ugcaagcccuggagaagga

SEQ ID NO: 2108366 - RNA, 19 nt, Homo sapiens
  misc_RNA (1)...(19): siRNA sense strand
ugaguggccugcacagucu

SEQ ID NO: 2108367 - RNA, 19 nt, Homo sapiens
  misc_RNA (1)...(19): siRNA sense strand
ugacagggcaagccaagga

SEQ ID NO: 2108368 - RNA, 19 nt, Homo sapiens
  misc_RNA (1)...(19): siRNA sense strand
caacugagagcaucaucca

SEQ ID NO: 2108369 - RNA, 19 nt, Homo sapiens
  misc_RNA (1)...(19): siRNA sense strand
ggaauccuucuccaaguuc

SEQ ID NO: 2108370 - RNA, 19 nt, Homo sapiens
  misc_RNA (1)...(19): siRNA sense strand
uagagacucccagcuuuaa

SEQ ID NO: 2108371 - RNA, 19 nt, Homo sapiens
  misc_RNA (1)...(19): siRNA sense strand
caagucaagaucagaaauc

SEQ ID NO: 2108372 - RNA, 19 nt, Homo sapiens
  misc_RNA (1)...(19): siRNA sense strand
caggagagcagcccaugga

SEQ ID NO: 2108373 - RNA, 19 nt, Homo sapiens
  misc_RNA (1)...(19): siRNA sense strand
caucagcagcggcaagcua

SEQ ID NO: 2108374 - RNA, 19 nt, Homo sapiens
  misc_RNA (1)...(19): siRNA sense strand
gugggaauauugaagacau

SEQ ID NO: 2108375 - RNA, 19 nt, Homo sapiens
  misc_RNA (1)...(19): siRNA sense strand
gcagcagugggaauauuga

SEQ ID NO: 2108376 - RNA, 19 nt, Homo sapiens
  misc_RNA (1)...(19): siRNA sense strand
gggcacccuuauauacgaa

SEQ ID NO: 2108377 - RNA, 19 nt, Homo sapiens
  misc_RNA (1)...(19): siRNA sense strand
cggguucuguccacaaguu

SEQ ID NO: 2108378 - RNA, 19 nt, Homo sapiens
  misc_RNA (1)...(19): siRNA sense strand
agacuugcccaaugaguga

SEQ ID NO: 2108379 - RNA, 19 nt, Homo sapiens
  misc_RNA (1)...(19): siRNA sense strand
gauagucggaggugaugug

SEQ ID NO: 2108380 - RNA, 19 nt, Homo sapiens
  misc_RNA (1)...(19): siRNA sense strand
aaagaguguucuggagcua

SEQ ID NO: 2108381 - RNA, 19 nt, Homo sapiens
  misc_RNA (1)...(19): siRNA sense strand
acccugagcuccgcaagaa

SEQ ID NO: 2108382 - RNA, 19 nt, Homo sapiens
  misc_RNA (1)...(19): siRNA sense strand
gagcagcccauggaagguu

SEQ ID NO: 2108383 - RNA, 19 nt, Homo sapiens
  misc_RNA (1)...(19): siRNA sense strand
ucagaaggagccacgacua

SEQ ID NO: 2108384 - RNA, 19 nt, Homo sapiens
  misc_RNA (1)...(19): siRNA sense strand
ccaccucccgcaaguuuga

SEQ ID NO: 2108385 - RNA, 19 nt, Homo sapiens
  misc_RNA (1)...(19): siRNA sense strand
gcacucagcuccaugucua

SEQ ID NO: 2108386 - RNA, 19 nt, Homo sapiens
  misc_RNA (1)...(19): siRNA sense strand
gaagacggccugugagaua

SEQ ID NO: 2108387 - RNA, 19 nt, Homo sapiens
  misc_RNA (1)...(19): siRNA sense strand
gcaacucgcuggaucuuug

SEQ ID NO: 2108388 - RNA, 19 nt, Homo sapiens
  misc_RNA (1)...(19): siRNA sense strand
gcaggugucucgucagaaa

SEQ ID NO: 2108389 - RNA, 19 nt, Homo sapiens
  misc_RNA (1)...(19): siRNA sense strand
gcacugcccuucucucaga

SEQ ID NO: 2108390 - RNA, 19 nt, Homo sapiens
  misc_RNA (1)...(19): siRNA sense strand
gcugaagggugaugugaaa

SEQ ID NO: 2108391 - RNA, 19 nt, Homo sapiens
  misc_RNA (1)...(19): siRNA sense strand
ucaaugcccucaaccauga

SEQ ID NO: 2108392 - RNA, 19 nt, Homo sapiens
  misc_RNA (1)...(19): siRNA sense strand
guaccaggaugcucuuuga

SEQ ID NO: 2108393 - RNA, 19 nt, Homo sapiens
  misc_RNA (1)...(19): siRNA sense strand
gggcaacccugaugucuca

SEQ ID NO: 2108394 - RNA, 19 nt, Homo sapiens
  misc_RNA (1)...(19): siRNA sense strand
ggaaggcgauggcagaagu

SEQ ID NO: 2108395 - RNA, 19 nt, Homo sapiens
  misc_RNA (1)...(19): siRNA sense strand
gcaaagagaacaccaacga

SEQ ID NO: 2108396 - RNA, 19 nt, Homo sapiens
  misc_RNA (1)...(19): siRNA sense strand
gggaggagauccaaagcaa

SEQ ID NO: 2108397 - RNA, 19 nt, Homo sapiens
  misc_RNA (1)...(19): siRNA sense strand
gcagagaccacccugaaga

SEQ ID NO: 2108398 - RNA, 19 nt, Homo sapiens
  misc_RNA (1)...(19): siRNA sense strand
caaggcugcuggacauuga

SEQ ID NO: 2108399 - RNA, 19 nt, Homo sapiens
  misc_RNA (1)...(19): siRNA sense strand
acaacuggcucaggacaua

SEQ ID NO: 2108400 - RNA, 19 nt, Homo sapiens
  misc_RNA (1)...(19): siRNA sense strand
gaacacaguccucaugucu

SEQ ID NO: 2108401 - RNA, 19 nt, Homo sapiens
  misc_RNA (1)...(19): siRNA sense strand
ccagaaagguguccaagac

SEQ ID NO: 2108402 - RNA, 19 nt, Homo sapiens
  misc_RNA (1)...(19): siRNA sense strand
gaacuggaggccacuguga

SEQ ID NO: 2108403 - RNA, 19 nt, Homo sapiens
  misc_RNA (1)...(19): siRNA sense strand
ggaaagacagacagacaga

SEQ ID NO: 2108404 - RNA, 19 nt, Homo sapiens
  misc_RNA (1)...(19): siRNA sense strand
ccagggagcucacaacacu

SEQ ID NO: 2108405 - RNA, 19 nt, Homo sapiens
  misc_RNA (1)...(19): siRNA sense strand
cagcccagcuuacaacaug

SEQ ID NO: 2108406 - RNA, 19 nt, Homo sapiens
  misc_RNA (1)...(19): siRNA sense strand
gggcaggugucucgucaga

SEQ ID NO: 2108407 - RNA, 19 nt, Homo sapiens
  misc_RNA (1)...(19): siRNA sense strand
ccaggacggucuucggaaa

SEQ ID NO: 2108408 - RNA, 19 nt, Homo sapiens
  misc_RNA (1)...(19): siRNA sense strand
gagacuggaugccauugga

SEQ ID NO: 2108409 - RNA, 19 nt, Homo sapiens
  misc_RNA (1)...(19): siRNA sense strand
ggauggcagucuugggaaa

SEQ ID NO: 2108410 - RNA, 19 nt, Homo sapiens
  misc_RNA (1)...(19): siRNA sense strand
gggcaucuauccagugaca

SEQ ID NO: 2108411 - RNA, 19 nt, Homo sapiens
  misc_RNA (1)...(19): siRNA sense strand
acacaguccucaugucuuc

SEQ ID NO: 2108412 - RNA, 19 nt, Homo sapiens
  misc_RNA (1)...(19): siRNA sense strand
ggagacaucaagagaguau

SEQ ID NO: 2108413 - RNA, 19 nt, Homo sapiens
  misc_RNA (1)...(19): siRNA sense strand
gaacuucccaggaucaucu

SEQ ID NO: 2108414 - RNA, 19 nt, Homo sapiens
  misc_RNA (1)...(19): siRNA sense strand
guucgagacuugcccaaug

SEQ ID NO: 2108415 - RNA, 19 nt, Homo sapiens
  misc_RNA (1)...(19): siRNA sense strand
gaaagaagaagggaagagu

SEQ ID NO: 2108416 - RNA, 19 nt, Homo sapiens
  misc_RNA (1)...(19): siRNA sense strand
ucuagagacucccagcuuu

SEQ ID NO: 2108417 - RNA, 19 nt, Homo sapiens
  misc_RNA (1)...(19): siRNA sense strand
gcaaagaaaccagaaagag

SEQ ID NO: 2108418 - RNA, 19 nt, Homo sapiens
  misc_RNA (1)...(19): siRNA sense strand
gcagugggaauauugaaga

SEQ ID NO: 2108419 - RNA, 19 nt, Homo sapiens
  misc_RNA (1)...(19): siRNA sense strand
gaaagggauggcagucuug

SEQ ID NO: 2108420 - RNA, 19 nt, Homo sapiens
  misc_RNA (1)...(19): siRNA sense strand
caggugaacuucccaggau

SEQ ID NO: 2108421 - RNA, 19 nt, Homo sapiens
  misc_RNA (1)...(19): siRNA sense strand
caggagacaucaagagagu

SEQ ID NO: 2108422 - RNA, 19 nt, Homo sapiens
  misc_RNA (1)...(19): siRNA sense strand
gaucccaccucaccacagu

SEQ ID NO: 2108423 - RNA, 19 nt, Homo sapiens
  misc_RNA (1)...(19): siRNA sense strand
agaaagggauggcagucuu

SEQ ID NO: 2108424 - RNA, 19 nt, Homo sapiens
  misc_RNA (1)...(19): siRNA sense strand
gagaagaaggaacugauuc

SEQ ID NO: 2108425 - RNA, 19 nt, Homo sapiens
  misc_RNA (1)...(19): siRNA sense strand
ccagagggaugagcuaaag

SEQ ID NO: 2108426 - RNA, 19 nt, Homo sapiens
  misc_RNA (1)...(19): siRNA sense strand
ggaacacaguccucauguc

SEQ ID NO: 2108427 - RNA, 19 nt, Homo sapiens
  misc_RNA (1)...(19): siRNA sense strand
cuagagacucccagcuuua

SEQ ID NO: 2108428 - RNA, 19 nt, Homo sapiens
  misc_RNA (1)...(19): siRNA sense strand
caacauuuaucuccaucca

SEQ ID NO: 2108429 - RNA, 19 nt, Homo sapiens
  misc_RNA (1)...(19): siRNA sense strand
caacgaggugagagagaua

SEQ ID NO: 2108430 - RNA, 19 nt, Homo sapiens
  misc_RNA (1)...(19): siRNA sense strand
gagagcaucauccauguuc

SEQ ID NO: 2108431 - RNA, 19 nt, Homo sapiens
  misc_RNA (1)...(19): siRNA sense strand
ggaacgacagaaagaagaa

SEQ ID NO: 2108432 - RNA, 19 nt, Homo sapiens
  misc_RNA (1)...(19): siRNA sense strand
gaaguggucccuggugaug

SEQ ID NO: 2108433 - RNA, 19 nt, Homo sapiens
  misc_RNA (1)...(19): siRNA sense strand
ccaagugggucaccuacag

SEQ ID NO: 2108434 - RNA, 19 nt, Homo sapiens
  misc_RNA (1)...(19): siRNA sense strand
agacaucaagagaguauuu

SEQ ID NO: 2108435 - RNA, 19 nt, Homo sapiens
  misc_RNA (1)...(19): siRNA sense strand
ugaagaggcugugcacaag

SEQ ID NO: 2108436 - RNA, 19 nt, Homo sapiens
  misc_RNA (1)...(19): siRNA sense strand
gcagauagucggaggugau

SEQ ID NO: 2108437 - RNA, 19 nt, Homo sapiens
  misc_RNA (1)...(19): siRNA sense strand
gcaccagcccaauugcaaa

SEQ ID NO: 2108438 - RNA, 19 nt, Homo sapiens
  misc_RNA (1)...(19): siRNA sense strand
ugagaaccgugacugaaca

SEQ ID NO: 2108439 - RNA, 19 nt, Homo sapiens
  misc_RNA (1)...(19): siRNA sense strand
cccuaaaccugcacaccua

SEQ ID NO: 2108440 - RNA, 19 nt, Homo sapiens
  misc_RNA (1)...(19): siRNA sense strand
ccacagugcccacaagauc

SEQ ID NO: 2108441 - RNA, 19 nt, Homo sapiens
  misc_RNA (1)...(19): siRNA sense strand
gccucuaucucccagcuuu

SEQ ID NO: 2108442 - RNA, 19 nt, Homo sapiens
  misc_RNA (1)...(19): siRNA sense strand
ggcuacagguggauguuug

SEQ ID NO: 2108443 - RNA, 19 nt, Homo sapiens
  misc_RNA (1)...(19): siRNA sense strand
aaacugcagucaagaacca

SEQ ID NO: 2108444 - RNA, 19 nt, Homo sapiens
  misc_RNA (1)...(19): siRNA sense strand
gcaaggcugcuggacauug

SEQ ID NO: 2108445 - RNA, 19 nt, Homo sapiens
  misc_RNA (1)...(19): siRNA sense strand
cagccaagguucccacuac

SEQ ID NO: 2108446 - RNA, 19 nt, Homo sapiens
  misc_RNA (1)...(19): siRNA sense strand
uuggccagcugcauagaua

SEQ ID NO: 2108447 - RNA, 19 nt, Homo sapiens
  misc_RNA (1)...(19): siRNA sense strand
ugcaugcgcuggaucuuug

SEQ ID NO: 2108448 - RNA, 19 nt, Homo sapiens
  misc_RNA (1)...(19): siRNA sense strand
cugacagucugcaaagaaa

SEQ ID NO: 2108449 - RNA, 19 nt, Homo sapiens
  misc_RNA (1)...(19): siRNA sense strand
ccaacgaggugagagagau

SEQ ID NO: 2108450 - RNA, 19 nt, Homo sapiens
  misc_RNA (1)...(19): siRNA sense strand
gcaggaagacagucacucu

SEQ ID NO: 2108451 - RNA, 19 nt, Homo sapiens
  misc_RNA (1)...(19): siRNA sense strand
gcaggaacgacagaaagaa

SEQ ID NO: 2108452 - RNA, 19 nt, Homo sapiens
  misc_RNA (1)...(19): siRNA sense strand
gcagcaggaacgacagaaa

SEQ ID NO: 2108453 - RNA, 19 nt, Homo sapiens
  misc_RNA (1)...(19): siRNA sense strand
ggccaccucccgcaaguuu

SEQ ID NO: 2108454 - RNA, 19 nt, Homo sapiens
  misc_RNA (1)...(19): siRNA sense strand
uaacuagcaaggccucuga

SEQ ID NO: 2108455 - RNA, 19 nt, Homo sapiens
  misc_RNA (1)...(19): siRNA sense strand
ccaggcagcagugggaaua

SEQ ID NO: 2108456 - RNA, 19 nt, Homo sapiens
  misc_RNA (1)...(19): siRNA sense strand
ggugguuguucgagacuug

SEQ ID NO: 2108457 - RNA, 19 nt, Homo sapiens
  misc_RNA (1)...(19): siRNA sense strand
gcagagaagaaggaacuga

SEQ ID NO: 2108458 - RNA, 19 nt, Homo sapiens
  misc_RNA (1)...(19): siRNA sense strand
gcagcagcagcaucuguuu

SEQ ID NO: 2108459 - RNA, 19 nt, Homo sapiens
  misc_RNA (1)...(19): siRNA sense strand
ccacaaggaagccucuaga

SEQ ID NO: 2108460 - RNA, 19 nt, Homo sapiens
  misc_RNA (1)...(19): siRNA sense strand
acacugaggcccagaguca

SEQ ID NO: 2108461 - RNA, 19 nt, Homo sapiens
  misc_RNA (1)...(19): siRNA sense strand
uggcaaggcugcuggacau

SEQ ID NO: 2108462 - RNA, 19 nt, Homo sapiens
  misc_RNA (1)...(19): siRNA sense strand
gcccugaccucuguuagca

SEQ ID NO: 2108463 - RNA, 19 nt, Homo sapiens
  misc_RNA (1)...(19): siRNA sense strand
gagcugaagggugauguga

SEQ ID NO: 2108464 - RNA, 19 nt, Homo sapiens
  misc_RNA (1)...(19): siRNA sense strand
acaaggaagccucuagaga

SEQ ID NO: 2108465 - RNA, 19 nt, Homo sapiens
  misc_RNA (1)...(19): siRNA sense strand
ugcaagcccuggagaagga

SEQ ID NO: 2108466 - RNA, 19 nt, Homo sapiens
  misc_RNA (1)...(19): siRNA sense strand
ugaguggccugcacagucu

SEQ ID NO: 2108467 - RNA, 19 nt, Homo sapiens
  misc_RNA (1)...(19): siRNA sense strand
ugacagggcaagccaagga

SEQ ID NO: 2108468 - RNA, 19 nt, Homo sapiens
  misc_RNA (1)...(19): siRNA sense strand
caacugagagcaucaucca

SEQ ID NO: 2108469 - RNA, 19 nt, Homo sapiens
  misc_RNA (1)...(19): siRNA sense strand
ggaauccuucuccaaguuc

SEQ ID NO: 2108470 - RNA, 19 nt, Homo sapiens
  misc_RNA (1)...(19): siRNA sense strand
uagagacucccagcuuuaa

SEQ ID NO: 2108471 - RNA, 19 nt, Homo sapiens
  misc_RNA (1)...(19): siRNA sense strand
caagucaagaucagaaauc

SEQ ID NO: 2108472 - RNA, 19 nt, Homo sapiens
  misc_RNA (1)...(19): siRNA sense strand
caggagagcagcccaugga

SEQ ID NO: 2108473 - RNA, 19 nt, Homo sapiens
  misc_RNA (1)...(19): siRNA sense strand
caucagcagcggcaagcua

SEQ ID NO: 2108474 - RNA, 19 nt, Homo sapiens
  misc_RNA (1)...(19): siRNA sense strand
gugggaauauugaagacau

SEQ ID NO: 2108475 - RNA, 19 nt, Homo sapiens
  misc_RNA (1)...(19): siRNA sense strand
gcagcagugggaauauuga

SEQ ID NO: 2108476 - RNA, 19 nt, Homo sapiens
  misc_RNA (1)...(19): siRNA sense strand
gggcacccuuauauacgaa

SEQ ID NO: 2108477 - RNA, 19 nt, Homo sapiens
  misc_RNA (1)...(19): siRNA sense strand
cggguucuguccacaaguu

SEQ ID NO: 2108478 - RNA, 19 nt, Homo sapiens
  misc_RNA (1)...(19): siRNA sense strand
agacuugcccaaugaguga

SEQ ID NO: 2108479 - RNA, 19 nt, Homo sapiens
  misc_RNA (1)...(19): siRNA sense strand
gauagucggaggugaugug

SEQ ID NO: 2108480 - RNA, 19 nt, Homo sapiens
  misc_RNA (1)...(19): siRNA sense strand
aaagaguguucuggagcua

SEQ ID NO: 2108481 - RNA, 19 nt, Homo sapiens
  misc_RNA (1)...(19): siRNA sense strand
acccugagcuccgcaagaa

SEQ ID NO: 2108482 - RNA, 19 nt, Homo sapiens
  misc_RNA (1)...(19): siRNA sense strand
gagcagcccauggaagguu

SEQ ID NO: 2108483 - RNA, 19 nt, Homo sapiens
  misc_RNA (1)...(19): siRNA sense strand
ucagaaggagccacgacua

SEQ ID NO: 2108484 - RNA, 19 nt, Homo sapiens
  misc_RNA (1)...(19): siRNA sense strand
ccaccucccgcaaguuuga

SEQ ID NO: 2108485 - RNA, 19 nt, Homo sapiens
  misc_RNA (1)...(19): siRNA sense strand
ggagaaaccuuaugaaugu

SEQ ID NO: 2108486 - RNA, 19 nt, Homo sapiens
  misc_RNA (1)...(19): siRNA sense strand
gcacacaacucacuacaaa

SEQ ID NO: 2108487 - RNA, 19 nt, Homo sapiens
  misc_RNA (1)...(19): siRNA sense strand
gagagaaguuugagaaauu

SEQ ID NO: 2108488 - RNA, 19 nt, Homo sapiens
  misc_RNA (1)...(19): siRNA sense strand
caaggucauuggauaauua

SEQ ID NO: 2108489 - RNA, 19 nt, Homo sapiens
  misc_RNA (1)...(19): siRNA sense strand
gggagaagcucuaugaaug

SEQ ID NO: 2108490 - RNA, 19 nt, Homo sapiens
  misc_RNA (1)...(19): siRNA sense strand
gaucauguguccaaagaaa

SEQ ID NO: 2108491 - RNA, 19 nt, Homo sapiens
  misc_RNA (1)...(19): siRNA sense strand
gagaagcccuuugaaugua

SEQ ID NO: 2108492 - RNA, 19 nt, Homo sapiens
  misc_RNA (1)...(19): siRNA sense strand
cgagaaaccuuaugagugu

SEQ ID NO: 2108493 - RNA, 19 nt, Homo sapiens
  misc_RNA (1)...(19): siRNA sense strand
ggucagauaucuuaugaau

SEQ ID NO: 2108494 - RNA, 19 nt, Homo sapiens
  misc_RNA (1)...(19): siRNA sense strand
gaacugagaaggaaggauu

SEQ ID NO: 2108495 - RNA, 19 nt, Homo sapiens
  misc_RNA (1)...(19): siRNA sense strand
gagaagcucuaugaaugua

SEQ ID NO: 2108496 - RNA, 19 nt, Homo sapiens
  misc_RNA (1)...(19): siRNA sense strand
gaagauucauucugcauca

SEQ ID NO: 2108497 - RNA, 19 nt, Homo sapiens
  misc_RNA (1)...(19): siRNA sense strand
ggagagaaguuugagaaau

SEQ ID NO: 2108498 - RNA, 19 nt, Homo sapiens
  misc_RNA (1)...(19): siRNA sense strand
ggagaagcccuuugaaugu

SEQ ID NO: 2108499 - RNA, 19 nt, Homo sapiens
  misc_RNA (1)...(19): siRNA sense strand
ggaaggcauucaaucagaa

SEQ ID NO: 2108500 - RNA, 19 nt, Homo sapiens
  misc_RNA (1)...(19): siRNA sense strand
gaggagacauuucacagau

SEQ ID NO: 2108501 - RNA, 19 nt, Homo sapiens
  misc_RNA (1)...(19): siRNA sense strand
gccacaaggucauuggaua

SEQ ID NO: 2108502 - RNA, 19 nt, Homo sapiens
  misc_RNA (1)...(19): siRNA sense strand
gggaaggcauucaaucaga

SEQ ID NO: 2108503 - RNA, 19 nt, Homo sapiens
  misc_RNA (1)...(19): siRNA sense strand
gggagaagcccuuugaaug

SEQ ID NO: 2108504 - RNA, 19 nt, Homo sapiens
  misc_RNA (1)...(19): siRNA sense strand
gaaaagcccuaugaaugua

SEQ ID NO: 2108505 - RNA, 19 nt, Homo sapiens
  misc_RNA (1)...(19): siRNA sense strand
aagugaugcuggagaauua

SEQ ID NO: 2108506 - RNA, 19 nt, Homo sapiens
  misc_RNA (1)...(19): siRNA sense strand
ggagaauuaugcaaaugug

SEQ ID NO: 2108507 - RNA, 19 nt, Homo sapiens
  misc_RNA (1)...(19): siRNA sense strand
gggagaaaccuuaugaaug

SEQ ID NO: 2108508 - RNA, 19 nt, Homo sapiens
  misc_RNA (1)...(19): siRNA sense strand
gaagugaugcuggagaauu

SEQ ID NO: 2108509 - RNA, 19 nt, Homo sapiens
  misc_RNA (1)...(19): siRNA sense strand
gggaagugaugcuggagaa

SEQ ID NO: 2108510 - RNA, 19 nt, Homo sapiens
  misc_RNA (1)...(19): siRNA sense strand
ggauguggcuguguacuuc

SEQ ID NO: 2108511 - RNA, 19 nt, Homo sapiens
  misc_RNA (1)...(19): siRNA sense strand
ggccagaacugagaaggaa

SEQ ID NO: 2108512 - RNA, 19 nt, Homo sapiens
  misc_RNA (1)...(19): siRNA sense strand
ggagacauuucacagauac

SEQ ID NO: 2108513 - RNA, 19 nt, Homo sapiens
  misc_RNA (1)...(19): siRNA sense strand
gagaaaccuuaugaaugua

SEQ ID NO: 2108514 - RNA, 19 nt, Homo sapiens
  misc_RNA (1)...(19): siRNA sense strand
caaaggaucauguguccaa

SEQ ID NO: 2108515 - RNA, 19 nt, Homo sapiens
  misc_RNA (1)...(19): siRNA sense strand
ccuaugaggucaagaaugg

SEQ ID NO: 2108516 - RNA, 19 nt, Homo sapiens
  misc_RNA (1)...(19): siRNA sense strand
guggucagauaucuuauga

SEQ ID NO: 2108517 - RNA, 19 nt, Homo sapiens
  misc_RNA (1)...(19): siRNA sense strand
gagaaaagcccuaugaaug

SEQ ID NO: 2108518 - RNA, 19 nt, Homo sapiens
  misc_RNA (1)...(19): siRNA sense strand
ccacaaggucauuggauaa

SEQ ID NO: 2108519 - RNA, 19 nt, Homo sapiens
  misc_RNA (1)...(19): siRNA sense strand
ucaaagaggagacauuuca

SEQ ID NO: 2108520 - RNA, 19 nt, Homo sapiens
  misc_RNA (1)...(19): siRNA sense strand
ggucaagaauggagagaag

SEQ ID NO: 2108521 - RNA, 19 nt, Homo sapiens
  misc_RNA (1)...(19): siRNA sense strand
uggcagauauuucauucaa

SEQ ID NO: 2108522 - RNA, 19 nt, Homo sapiens
  misc_RNA (1)...(19): siRNA sense strand
cuaguggucagauaucuua

SEQ ID NO: 2108523 - RNA, 19 nt, Homo sapiens
  misc_RNA (1)...(19): siRNA sense strand
caaagaauguggaaaauac

SEQ ID NO: 2108524 - RNA, 19 nt, Homo sapiens
  misc_RNA (1)...(19): siRNA sense strand
ggagaagcucuaugaaugu

SEQ ID NO: 2108525 - RNA, 19 nt, Homo sapiens
  misc_RNA (1)...(19): siRNA sense strand
ggacaauguggcagauauu

SEQ ID NO: 2108526 - RNA, 19 nt, Homo sapiens
  misc_RNA (1)...(19): siRNA sense strand
ggcaaggccuucaguagca

SEQ ID NO: 2108527 - RNA, 19 nt, Homo sapiens
  misc_RNA (1)...(19): siRNA sense strand
gcuggagaauuaugcaaau

SEQ ID NO: 2108528 - RNA, 19 nt, Homo sapiens
  misc_RNA (1)...(19): siRNA sense strand
ggucauuggauaauuaaga

SEQ ID NO: 2108529 - RNA, 19 nt, Homo sapiens
  misc_RNA (1)...(19): siRNA sense strand
gagaaaccuuaugagugua

SEQ ID NO: 2108530 - RNA, 19 nt, Homo sapiens
  misc_RNA (1)...(19): siRNA sense strand
gaaggcauucaaucagaaa

SEQ ID NO: 2108531 - RNA, 19 nt, Homo sapiens
  misc_RNA (1)...(19): siRNA sense strand
gaauguaacgaauguugga

SEQ ID NO: 2108532 - RNA, 19 nt, Homo sapiens
  misc_RNA (1)...(19): siRNA sense strand
agaagcccuuugaauguaa

SEQ ID NO: 2108533 - RNA, 19 nt, Homo sapiens
  misc_RNA (1)...(19): siRNA sense strand
gacaauguggcagauauuu

SEQ ID NO: 2108534 - RNA, 19 nt, Homo sapiens
  misc_RNA (1)...(19): siRNA sense strand
gaaacuacacacucagaag

SEQ ID NO: 2108535 - RNA, 19 nt, Homo sapiens
  misc_RNA (1)...(19): siRNA sense strand
cagcugguguggaagauuc

SEQ ID NO: 2108536 - RNA, 19 nt, Homo sapiens
  misc_RNA (1)...(19): siRNA sense strand
gaagcucuaugaauguaac

SEQ ID NO: 2108537 - RNA, 19 nt, Homo sapiens
  misc_RNA (1)...(19): siRNA sense strand
gaugaggccagaacugaga

SEQ ID NO: 2108538 - RNA, 19 nt, Homo sapiens
  misc_RNA (1)...(19): siRNA sense strand
gaaaccuuaugaguguaaa

SEQ ID NO: 2108539 - RNA, 19 nt, Homo sapiens
  misc_RNA (1)...(19): siRNA sense strand
caauguggcagauauuuca

SEQ ID NO: 2108540 - RNA, 19 nt, Homo sapiens
  misc_RNA (1)...(19): siRNA sense strand
uuaugaauguggacaaugu

SEQ ID NO: 2108541 - RNA, 19 nt, Homo sapiens
  misc_RNA (1)...(19): siRNA sense strand
aggauuaacuccaaaggau

SEQ ID NO: 2108542 - RNA, 19 nt, Homo sapiens
  misc_RNA (1)...(19): siRNA sense strand
aaggaaggauuaacuccaa

SEQ ID NO: 2108543 - RNA, 19 nt, Homo sapiens
  misc_RNA (1)...(19): siRNA sense strand
ccaaagaaacagaguccuu

SEQ ID NO: 2108544 - RNA, 19 nt, Homo sapiens
  misc_RNA (1)...(19): siRNA sense strand
aaacuacacacucagaaga

SEQ ID NO: 2108545 - RNA, 19 nt, Homo sapiens
  misc_RNA (1)...(19): siRNA sense strand
gaauguaaagaguguggaa

SEQ ID NO: 2108546 - RNA, 19 nt, Homo sapiens
  misc_RNA (1)...(19): siRNA sense strand
gcaaagaauguggaaaaua

SEQ ID NO: 2108547 - RNA, 19 nt, Homo sapiens
  misc_RNA (1)...(19): siRNA sense strand
gaaguuugagaaauuagga

SEQ ID NO: 2108548 - RNA, 19 nt, Homo sapiens
  misc_RNA (1)...(19): siRNA sense strand
gggaugaggccagaacuga

SEQ ID NO: 2108549 - RNA, 19 nt, Homo sapiens
  misc_RNA (1)...(19): siRNA sense strand
gaguguaaaguguguggua

SEQ ID NO: 2108550 - RNA, 19 nt, Homo sapiens
  misc_RNA (1)...(19): siRNA sense strand
aggagacauuucacagaua

SEQ ID NO: 2108551 - RNA, 19 nt, Homo sapiens
  misc_RNA (1)...(19): siRNA sense strand
cuaugaauguaacgaaugu

SEQ ID NO: 2108552 - RNA, 19 nt, Homo sapiens
  misc_RNA (1)...(19): siRNA sense strand
acacaacucacuacaaauc

SEQ ID NO: 2108553 - RNA, 19 nt, Homo sapiens
  misc_RNA (1)...(19): siRNA sense strand
gauuaacuccaaaggauca

SEQ ID NO: 2108554 - RNA, 19 nt, Homo sapiens
  misc_RNA (1)...(19): siRNA sense strand
ggcagauauuucauucaaa

SEQ ID NO: 2108555 - RNA, 19 nt, Homo sapiens
  misc_RNA (1)...(19): siRNA sense strand
caagaauggagagaaguuu

SEQ ID NO: 2108556 - RNA, 19 nt, Homo sapiens
  misc_RNA (1)...(19): siRNA sense strand
acaaggucauuggauaauu

SEQ ID NO: 2108557 - RNA, 19 nt, Homo sapiens
  misc_RNA (1)...(19): siRNA sense strand
agaaacagaguccuucaga

SEQ ID NO: 2108558 - RNA, 19 nt, Homo sapiens
  misc_RNA (1)...(19): siRNA sense strand
uggacaauguggcagauau

SEQ ID NO: 2108559 - RNA, 19 nt, Homo sapiens
  misc_RNA (1)...(19): siRNA sense strand
ucacuacaaaucagacaaa

SEQ ID NO: 2108560 - RNA, 19 nt, Homo sapiens
  misc_RNA (1)...(19): siRNA sense strand
acaaaucagacaaauccua

SEQ ID NO: 2108561 - RNA, 19 nt, Homo sapiens
  misc_RNA (1)...(19): siRNA sense strand
uaaagaauguggaaaaggu

SEQ ID NO: 2108562 - RNA, 19 nt, Homo sapiens
  misc_RNA (1)...(19): siRNA sense strand
aggaucauguguccaaaga

SEQ ID NO: 2108563 - RNA, 19 nt, Homo sapiens
  misc_RNA (1)...(19): siRNA sense strand
ucaagaauggagagaaguu

SEQ ID NO: 2108564 - RNA, 19 nt, Homo sapiens
  misc_RNA (1)...(19): siRNA sense strand
uugaggauguggcugugua

SEQ ID NO: 2108565 - RNA, 19 nt, Homo sapiens
  misc_RNA (1)...(19): siRNA sense strand
gaaaagguuuaaguucaga

SEQ ID NO: 2108566 - RNA, 19 nt, Homo sapiens
  misc_RNA (1)...(19): siRNA sense strand
caacucacuacaaaucaga

SEQ ID NO: 2108567 - RNA, 19 nt, Homo sapiens
  misc_RNA (1)...(19): siRNA sense strand
cuacaaaucagacaaaucc

SEQ ID NO: 2108568 - RNA, 19 nt, Homo sapiens
  misc_RNA (1)...(19): siRNA sense strand
acacuggcgagaaaccuua

SEQ ID NO: 2108569 - RNA, 19 nt, Homo sapiens
  misc_RNA (1)...(19): siRNA sense strand
aauucacacuggaaagaaa

SEQ ID NO: 2108570 - RNA, 19 nt, Homo sapiens
  misc_RNA (1)...(19): siRNA sense strand
gagaaggaaggauuaacuc

SEQ ID NO: 2108571 - RNA, 19 nt, Homo sapiens
  misc_RNA (1)...(19): siRNA sense strand
ccuuaugaguguaaagugu

SEQ ID NO: 2108572 - RNA, 19 nt, Homo sapiens
  misc_RNA (1)...(19): siRNA sense strand
ggcauucaaucagaaaaua

SEQ ID NO: 2108573 - RNA, 19 nt, Homo sapiens
  misc_RNA (1)...(19): siRNA sense strand
ugacucagcaucagcgaau

SEQ ID NO: 2108574 - RNA, 19 nt, Homo sapiens
  misc_RNA (1)...(19): siRNA sense strand
ggagaaaagcccuaugaau

SEQ ID NO: 2108575 - RNA, 19 nt, Homo sapiens
  misc_RNA (1)...(19): siRNA sense strand
ggaaaagguuuaaguucag

SEQ ID NO: 2108576 - RNA, 19 nt, Homo sapiens
  misc_RNA (1)...(19): siRNA sense strand
gaaugcaaagaauguggaa

SEQ ID NO: 2108577 - RNA, 19 nt, Homo sapiens
  misc_RNA (1)...(19): siRNA sense strand
ccaggaaccagugaccuuu

SEQ ID NO: 2108578 - RNA, 19 nt, Homo sapiens
  misc_RNA (1)...(19): siRNA sense strand
agucaaagaggagacauuu

SEQ ID NO: 2108579 - RNA, 19 nt, Homo sapiens
  misc_RNA (1)...(19): siRNA sense strand
ucaguugcagcucaaguuu

SEQ ID NO: 2108580 - RNA, 19 nt, Homo sapiens
  misc_RNA (1)...(19): siRNA sense strand
aggaaccagugaccuuuga

SEQ ID NO: 2108581 - RNA, 19 nt, Homo sapiens
  misc_RNA (1)...(19): siRNA sense strand
cuggaaagaaaccauuuaa

SEQ ID NO: 2108582 - RNA, 19 nt, Homo sapiens
  misc_RNA (1)...(19): siRNA sense strand
gcucuaugaauguaacgaa

SEQ ID NO: 2108583 - RNA, 19 nt, Homo sapiens
  misc_RNA (1)...(19): siRNA sense strand
cagaaacuacacacucaga

SEQ ID NO: 2108584 - RNA, 19 nt, Homo sapiens
  misc_RNA (1)...(19): siRNA sense strand
gugggaaggcauucaauca

SEQ ID NO: 2108585 - RNA, 19 nt, Homo sapiens
  misc_RNA (1)...(19): siRNA sense strand
gaacacaacccaacuuuca

SEQ ID NO: 2108586 - RNA, 19 nt, Homo sapiens
  misc_RNA (1)...(19): siRNA sense strand
ggaagaaccugggcaguug

SEQ ID NO: 2108587 - RNA, 19 nt, Homo sapiens
  misc_RNA (1)...(19): siRNA sense strand
ugaaacagcugaaguugug

SEQ ID NO: 2108588 - RNA, 19 nt, Homo sapiens
  misc_RNA (1)...(19): siRNA sense strand
gaagaaugaucaccuccaa

SEQ ID NO: 2108589 - RNA, 19 nt, Homo sapiens
  misc_RNA (1)...(19): siRNA sense strand
uaaugaagauccugagauu

SEQ ID NO: 2108590 - RNA, 19 nt, Homo sapiens
  misc_RNA (1)...(19): siRNA sense strand
aaacugaucccacucauuu

SEQ ID NO: 2108591 - RNA, 19 nt, Homo sapiens
  misc_RNA (1)...(19): siRNA sense strand
ggaacuacuuuaugaacaa

SEQ ID NO: 2108592 - RNA, 19 nt, Homo sapiens
  misc_RNA (1)...(19): siRNA sense strand
ccucguaacuucacaggua

SEQ ID NO: 2108593 - RNA, 19 nt, Homo sapiens
  misc_RNA (1)...(19): siRNA sense strand
caacccaacuuucacaaga

SEQ ID NO: 2108594 - RNA, 19 nt, Homo sapiens
  misc_RNA (1)...(19): siRNA sense strand
gcuuggauguggacaauaa

SEQ ID NO: 2108595 - RNA, 19 nt, Homo sapiens
  misc_RNA (1)...(19): siRNA sense strand
caacaugcauuagagcaaa

SEQ ID NO: 2108596 - RNA, 19 nt, Homo sapiens
  misc_RNA (1)...(19): siRNA sense strand
aagcaagacuggugaugua

SEQ ID NO: 2108597 - RNA, 19 nt, Homo sapiens
  misc_RNA (1)...(19): siRNA sense strand
gcagcaaaguggcaaugaa

SEQ ID NO: 2108598 - RNA, 19 nt, Homo sapiens
  misc_RNA (1)...(19): siRNA sense strand
guaauaccaugcaaagugu

SEQ ID NO: 2108599 - RNA, 19 nt, Homo sapiens
  misc_RNA (1)...(19): siRNA sense strand
acaauuauccguuuacuug

SEQ ID NO: 2108600 - RNA, 19 nt, Homo sapiens
  misc_RNA (1)...(19): siRNA sense strand
gcaaagauucgaauaugga

SEQ ID NO: 2108601 - RNA, 19 nt, Homo sapiens
  misc_RNA (1)...(19): siRNA sense strand
gacagcaucagaagaauuu

SEQ ID NO: 2108602 - RNA, 19 nt, Homo sapiens
  misc_RNA (1)...(19): siRNA sense strand
ccacaucucuacucgugaa

SEQ ID NO: 2108603 - RNA, 19 nt, Homo sapiens
  misc_RNA (1)...(19): siRNA sense strand
ccaaaugccuggaucuucu

SEQ ID NO: 2108604 - RNA, 19 nt, Homo sapiens
  misc_RNA (1)...(19): siRNA sense strand
gacagccucucuccugaaa

SEQ ID NO: 2108605 - RNA, 19 nt, Homo sapiens
  misc_RNA (1)...(19): siRNA sense strand
ccacgguuguugacuauau

SEQ ID NO: 2108606 - RNA, 19 nt, Homo sapiens
  misc_RNA (1)...(19): siRNA sense strand
augaauaccuguccaaaug

SEQ ID NO: 2108607 - RNA, 19 nt, Homo sapiens
  misc_RNA (1)...(19): siRNA sense strand
uuuagaaccugacccagua

SEQ ID NO: 2108608 - RNA, 19 nt, Homo sapiens
  misc_RNA (1)...(19): siRNA sense strand
gcuccacgguuguugacua

SEQ ID NO: 2108609 - RNA, 19 nt, Homo sapiens
  misc_RNA (1)...(19): siRNA sense strand
gcaaggagaaggccagugu

SEQ ID NO: 2108610 - RNA, 19 nt, Homo sapiens
  misc_RNA (1)...(19): siRNA sense strand
gcuaauguuucuggacgua

SEQ ID NO: 2108611 - RNA, 19 nt, Homo sapiens
  misc_RNA (1)...(19): siRNA sense strand
ucuguaaccugcucacuga

SEQ ID NO: 2108612 - RNA, 19 nt, Homo sapiens
  misc_RNA (1)...(19): siRNA sense strand
gaccucaaguugugacaga

SEQ ID NO: 2108613 - RNA, 19 nt, Homo sapiens
  misc_RNA (1)...(19): siRNA sense strand
aaacacccaucaacaguuc

SEQ ID NO: 2108614 - RNA, 19 nt, Homo sapiens
  misc_RNA (1)...(19): siRNA sense strand
gagagagacagcagaaaga

SEQ ID NO: 2108615 - RNA, 19 nt, Homo sapiens
  misc_RNA (1)...(19): siRNA sense strand
ugaaguaacucuggaacau

SEQ ID NO: 2108616 - RNA, 19 nt, Homo sapiens
  misc_RNA (1)...(19): siRNA sense strand
gaacaucaggagagcauuc

SEQ ID NO: 2108617 - RNA, 19 nt, Homo sapiens
  misc_RNA (1)...(19): siRNA sense strand
cuucucaucugucacauug

SEQ ID NO: 2108618 - RNA, 19 nt, Homo sapiens
  misc_RNA (1)...(19): siRNA sense strand
ggaagaaagcaaacugauc

SEQ ID NO: 2108619 - RNA, 19 nt, Homo sapiens
  misc_RNA (1)...(19): siRNA sense strand
gaaggccaguguugauucu

SEQ ID NO: 2108620 - RNA, 19 nt, Homo sapiens
  misc_RNA (1)...(19): siRNA sense strand
ggagaaggccaguguugau

SEQ ID NO: 2108621 - RNA, 19 nt, Homo sapiens
  misc_RNA (1)...(19): siRNA sense strand
uaauguuucuggacguaaa

SEQ ID NO: 2108622 - RNA, 19 nt, Homo sapiens
  misc_RNA (1)...(19): siRNA sense strand
gaaugaucaccuccaauga

SEQ ID NO: 2108623 - RNA, 19 nt, Homo sapiens
  misc_RNA (1)...(19): siRNA sense strand
ccaagugccugucuauacu

SEQ ID NO: 2108624 - RNA, 19 nt, Homo sapiens
  misc_RNA (1)...(19): siRNA sense strand
gcaaaguggcaaugaauac

SEQ ID NO: 2108625 - RNA, 19 nt, Homo sapiens
  misc_RNA (1)...(19): siRNA sense strand
ggagaaacgaacauagaug

SEQ ID NO: 2108626 - RNA, 19 nt, Homo sapiens
  misc_RNA (1)...(19): siRNA sense strand
ggacguaaacacccaucaa

SEQ ID NO: 2108627 - RNA, 19 nt, Homo sapiens
  misc_RNA (1)...(19): siRNA sense strand
gaacuacuuuaugaacaag

SEQ ID NO: 2108628 - RNA, 19 nt, Homo sapiens
  misc_RNA (1)...(19): siRNA sense strand
cugcaaagauucgaauaug

SEQ ID NO: 2108629 - RNA, 19 nt, Homo sapiens
  misc_RNA (1)...(19): siRNA sense strand
gagagcauucuggguaaua

SEQ ID NO: 2108630 - RNA, 19 nt, Homo sapiens
  misc_RNA (1)...(19): siRNA sense strand
gagaaggccaguguugauu

SEQ ID NO: 2108631 - RNA, 19 nt, Homo sapiens
  misc_RNA (1)...(19): siRNA sense strand
caagacuggugauguacau

SEQ ID NO: 2108632 - RNA, 19 nt, Homo sapiens
  misc_RNA (1)...(19): siRNA sense strand
ucauuccacugcuuccuaa

SEQ ID NO: 2108633 - RNA, 19 nt, Homo sapiens
  misc_RNA (1)...(19): siRNA sense strand
guaaacacccaucaacagu

SEQ ID NO: 2108634 - RNA, 19 nt, Homo sapiens
  misc_RNA (1)...(19): siRNA sense strand
guauuucgaccucaaguug

SEQ ID NO: 2108635 - RNA, 19 nt, Homo sapiens
  misc_RNA (1)...(19): siRNA sense strand
ccaaggaggacccaaagga

SEQ ID NO: 2108636 - RNA, 19 nt, Homo sapiens
  misc_RNA (1)...(19): siRNA sense strand
gcaaacugaucccacucau

SEQ ID NO: 2108637 - RNA, 19 nt, Homo sapiens
  misc_RNA (1)...(19): siRNA sense strand
cauucgagaugucuuacuu

SEQ ID NO: 2108638 - RNA, 19 nt, Homo sapiens
  misc_RNA (1)...(19): siRNA sense strand
gcaaugaauaccuguccaa

SEQ ID NO: 2108639 - RNA, 19 nt, Homo sapiens
  misc_RNA (1)...(19): siRNA sense strand
cgaauauggaacuacuuua

SEQ ID NO: 2108640 - RNA, 19 nt, Homo sapiens
  misc_RNA (1)...(19): siRNA sense strand
agauguugcugcucaguug

SEQ ID NO: 2108641 - RNA, 19 nt, Homo sapiens
  misc_RNA (1)...(19): siRNA sense strand
caggagaaacgaacauaga

SEQ ID NO: 2108642 - RNA, 19 nt, Homo sapiens
  misc_RNA (1)...(19): siRNA sense strand
gaucuucucaucugucaca

SEQ ID NO: 2108643 - RNA, 19 nt, Homo sapiens
  misc_RNA (1)...(19): siRNA sense strand
agaaugaucaccuccaaug

SEQ ID NO: 2108644 - RNA, 19 nt, Homo sapiens
  misc_RNA (1)...(19): siRNA sense strand
aagcuucuguuaaggauuc

SEQ ID NO: 2108645 - RNA, 19 nt, Homo sapiens
  misc_RNA (1)...(19): siRNA sense strand
ggacagccucucuccugaa

SEQ ID NO: 2108646 - RNA, 19 nt, Homo sapiens
  misc_RNA (1)...(19): siRNA sense strand
aaguaacucuggaacauca

SEQ ID NO: 2108647 - RNA, 19 nt, Homo sapiens
  misc_RNA (1)...(19): siRNA sense strand
ccugaugccuguagugcuu

SEQ ID NO: 2108648 - RNA, 19 nt, Homo sapiens
  misc_RNA (1)...(19): siRNA sense strand
cacgguuguugacuauaua

SEQ ID NO: 2108649 - RNA, 19 nt, Homo sapiens
  misc_RNA (1)...(19): siRNA sense strand
cugauuagccugcucauuc

SEQ ID NO: 2108650 - RNA, 19 nt, Homo sapiens
  misc_RNA (1)...(19): siRNA sense strand
ggagagcauucuggguaau

SEQ ID NO: 2108651 - RNA, 19 nt, Homo sapiens
  misc_RNA (1)...(19): siRNA sense strand
cagcaaaguggcaaugaau

SEQ ID NO: 2108652 - RNA, 19 nt, Homo sapiens
  misc_RNA (1)...(19): siRNA sense strand
caaagauucgaauauggaa

SEQ ID NO: 2108653 - RNA, 19 nt, Homo sapiens
  misc_RNA (1)...(19): siRNA sense strand
gcauuacucagcaaucuag

SEQ ID NO: 2108654 - RNA, 19 nt, Homo sapiens
  misc_RNA (1)...(19): siRNA sense strand
gcaaucuucuggcucucau

SEQ ID NO: 2108655 - RNA, 19 nt, Homo sapiens
  misc_RNA (1)...(19): siRNA sense strand
uuucagcuauggaacuauu

SEQ ID NO: 2108656 - RNA, 19 nt, Homo sapiens
  misc_RNA (1)...(19): siRNA sense strand
uaaacacccaucaacaguu

SEQ ID NO: 2108657 - RNA, 19 nt, Homo sapiens
  misc_RNA (1)...(19): siRNA sense strand
ucagaaaccacaucucuac

SEQ ID NO: 2108658 - RNA, 19 nt, Homo sapiens
  misc_RNA (1)...(19): siRNA sense strand
gaaguaacucuggaacauc

SEQ ID NO: 2108659 - RNA, 19 nt, Homo sapiens
  misc_RNA (1)...(19): siRNA sense strand
caaacugaucccacucauu

SEQ ID NO: 2108660 - RNA, 19 nt, Homo sapiens
  misc_RNA (1)...(19): siRNA sense strand
ucuccacaauuauccguuu

SEQ ID NO: 2108661 - RNA, 19 nt, Homo sapiens
  misc_RNA (1)...(19): siRNA sense strand
ucgaauauggaacuacuuu

SEQ ID NO: 2108662 - RNA, 19 nt, Homo sapiens
  misc_RNA (1)...(19): siRNA sense strand
uguagugcuucaccucgua

SEQ ID NO: 2108663 - RNA, 19 nt, Homo sapiens
  misc_RNA (1)...(19): siRNA sense strand
gugccugucuauacugguu

SEQ ID NO: 2108664 - RNA, 19 nt, Homo sapiens
  misc_RNA (1)...(19): siRNA sense strand
uuccacugcuuccuaauga

SEQ ID NO: 2108665 - RNA, 19 nt, Homo sapiens
  misc_RNA (1)...(19): siRNA sense strand
cgagagagacagcagaaag

SEQ ID NO: 2108666 - RNA, 19 nt, Homo sapiens
  misc_RNA (1)...(19): siRNA sense strand
gugcuuggauguggacaau

SEQ ID NO: 2108667 - RNA, 19 nt, Homo sapiens
  misc_RNA (1)...(19): siRNA sense strand
uuacucagcaaucuaguug

SEQ ID NO: 2108668 - RNA, 19 nt, Homo sapiens
  misc_RNA (1)...(19): siRNA sense strand
aggagagcauucuggguaa

SEQ ID NO: 2108669 - RNA, 19 nt, Homo sapiens
  misc_RNA (1)...(19): siRNA sense strand
aagaucacauugucagcuu

SEQ ID NO: 2108670 - RNA, 19 nt, Homo sapiens
  misc_RNA (1)...(19): siRNA sense strand
cuuccugguucuucuauau

SEQ ID NO: 2108671 - RNA, 19 nt, Homo sapiens
  misc_RNA (1)...(19): siRNA sense strand
ugacagcaucagaagaauu

SEQ ID NO: 2108672 - RNA, 19 nt, Homo sapiens
  misc_RNA (1)...(19): siRNA sense strand
uuggagagccucaagaaug

SEQ ID NO: 2108673 - RNA, 19 nt, Homo sapiens
  misc_RNA (1)...(19): siRNA sense strand
gaucaccuccaaugagaag

SEQ ID NO: 2108674 - RNA, 19 nt, Homo sapiens
  misc_RNA (1)...(19): siRNA sense strand
guaaccugcucacugaaac

SEQ ID NO: 2108675 - RNA, 19 nt, Homo sapiens
  misc_RNA (1)...(19): siRNA sense strand
ccacgaauccugggugaca

SEQ ID NO: 2108676 - RNA, 19 nt, Homo sapiens
  misc_RNA (1)...(19): siRNA sense strand
caaugaauaccuguccaaa

SEQ ID NO: 2108677 - RNA, 19 nt, Homo sapiens
  misc_RNA (1)...(19): siRNA sense strand
gagauguugcugcucaguu

SEQ ID NO: 2108678 - RNA, 19 nt, Homo sapiens
  misc_RNA (1)...(19): siRNA sense strand
ucuguagacucaggagaaa

SEQ ID NO: 2108679 - RNA, 19 nt, Homo sapiens
  misc_RNA (1)...(19): siRNA sense strand
gcuauggaacuauucuuag

SEQ ID NO: 2108680 - RNA, 19 nt, Homo sapiens
  misc_RNA (1)...(19): siRNA sense strand
caagugaaacagcugaagu

SEQ ID NO: 2108681 - RNA, 19 nt, Homo sapiens
  misc_RNA (1)...(19): siRNA sense strand
gugacauucuuaacuccuu

SEQ ID NO: 2108682 - RNA, 19 nt, Homo sapiens
  misc_RNA (1)...(19): siRNA sense strand
gcaagacuggugauguaca

SEQ ID NO: 2108683 - RNA, 19 nt, Homo sapiens
  misc_RNA (1)...(19): siRNA sense strand
uggagagccucaagaaugc

SEQ ID NO: 2108684 - RNA, 19 nt, Homo sapiens
  misc_RNA (1)...(19): siRNA sense strand
augaucaccuccaaugaga

SEQ ID NO: 2108685 - RNA, 19 nt, Homo sapiens
  misc_RNA (1)...(19): siRNA sense strand
ggacguggcuguguacuuc

SEQ ID NO: 2108686 - RNA, 19 nt, Homo sapiens
  misc_RNA (1)...(19): siRNA sense strand
gaagauauacuuacuuagc

SEQ ID NO: 2108687 - RNA, 19 nt, Homo sapiens
  misc_RNA (1)...(19): siRNA sense strand
gauaggauacuuggaacua

SEQ ID NO: 2108688 - RNA, 19 nt, Homo sapiens
  misc_RNA (1)...(19): siRNA sense strand
gggaugugaugcuggagaa

SEQ ID NO: 2108689 - RNA, 19 nt, Homo sapiens
  misc_RNA (1)...(19): siRNA sense strand
gcuaaagcaguguuacgua

SEQ ID NO: 2108690 - RNA, 19 nt, Homo sapiens
  misc_RNA (1)...(19): siRNA sense strand
aaagcaguguuacguagaa

SEQ ID NO: 2108691 - RNA, 19 nt, Homo sapiens
  misc_RNA (1)...(19): siRNA sense strand
aguguuacguagaauagua

SEQ ID NO: 2108692 - RNA, 19 nt, Homo sapiens
  misc_RNA (1)...(19): siRNA sense strand
gagcaggcuggauaggaua

SEQ ID NO: 2108693 - RNA, 19 nt, Homo sapiens
  misc_RNA (1)...(19): siRNA sense strand
gcuguguacuucacuacga

SEQ ID NO: 2108694 - RNA, 19 nt, Homo sapiens
  misc_RNA (1)...(19): siRNA sense strand
gcaguguuacguagaauag

SEQ ID NO: 2108695 - RNA, 19 nt, Homo sapiens
  misc_RNA (1)...(19): siRNA sense strand
cuggagagcaggcuggaua

SEQ ID NO: 2108696 - RNA, 19 nt, Homo sapiens
  misc_RNA (1)...(19): siRNA sense strand
ccacagggaguccuaagca

SEQ ID NO: 2108697 - RNA, 19 nt, Homo sapiens
  misc_RNA (1)...(19): siRNA sense strand
auaggauacuuggaacuaa

SEQ ID NO: 2108698 - RNA, 19 nt, Homo sapiens
  misc_RNA (1)...(19): siRNA sense strand
agagcaggcuggauaggau

SEQ ID NO: 2108699 - RNA, 19 nt, Homo sapiens
  misc_RNA (1)...(19): siRNA sense strand
gagagcaggcuggauagga

SEQ ID NO: 2108700 - RNA, 19 nt, Homo sapiens
  misc_RNA (1)...(19): siRNA sense strand
uugaggacguggcugugua

SEQ ID NO: 2108701 - RNA, 19 nt, Homo sapiens
  misc_RNA (1)...(19): siRNA sense strand
cagcuuuggucucucaucu

SEQ ID NO: 2108702 - RNA, 19 nt, Homo sapiens
  misc_RNA (1)...(19): siRNA sense strand
acuuggaacuaagaagaua

SEQ ID NO: 2108703 - RNA, 19 nt, Homo sapiens
  misc_RNA (1)...(19): siRNA sense strand
uaaagcaguguuacguaga

SEQ ID NO: 2108704 - RNA, 19 nt, Homo sapiens
  misc_RNA (1)...(19): siRNA sense strand
gcuguguccuuaacaacca

SEQ ID NO: 2108705 - RNA, 19 nt, Homo sapiens
  misc_RNA (1)...(19): siRNA sense strand
cgucaaugcugggaagaca

SEQ ID NO: 2108706 - RNA, 19 nt, Homo sapiens
  misc_RNA (1)...(19): siRNA sense strand
uaggauacuuggaacuaag

SEQ ID NO: 2108707 - RNA, 19 nt, Homo sapiens
  misc_RNA (1)...(19): siRNA sense strand
acagcuguguccuuaacaa

SEQ ID NO: 2108708 - RNA, 19 nt, Homo sapiens
  misc_RNA (1)...(19): siRNA sense strand
gaagacaggagaaaagcuu

SEQ ID NO: 2108709 - RNA, 19 nt, Homo sapiens
  misc_RNA (1)...(19): siRNA sense strand
ccacuuccaaaccagcuuu

SEQ ID NO: 2108710 - RNA, 19 nt, Homo sapiens
  misc_RNA (1)...(19): siRNA sense strand
aagggaaagaguccuguuu

SEQ ID NO: 2108711 - RNA, 19 nt, Homo sapiens
  misc_RNA (1)...(19): siRNA sense strand
auacuuggaacuaagaaga

SEQ ID NO: 2108712 - RNA, 19 nt, Homo sapiens
  misc_RNA (1)...(19): siRNA sense strand
caagggaaagaguccuguu

SEQ ID NO: 2108713 - RNA, 19 nt, Homo sapiens
  misc_RNA (1)...(19): siRNA sense strand
ggaacuaagaagauauacu

SEQ ID NO: 2108714 - RNA, 19 nt, Homo sapiens
  misc_RNA (1)...(19): siRNA sense strand
cuggauaggauacuuggaa

SEQ ID NO: 2108715 - RNA, 19 nt, Homo sapiens
  misc_RNA (1)...(19): siRNA sense strand
ggcuguggccuuuguagug

SEQ ID NO: 2108716 - RNA, 19 nt, Homo sapiens
  misc_RNA (1)...(19): siRNA sense strand
ggagugacauggcagcuuu

SEQ ID NO: 2108717 - RNA, 19 nt, Homo sapiens
  misc_RNA (1)...(19): siRNA sense strand
gaagagaggcuccgagaga

SEQ ID NO: 2108718 - RNA, 19 nt, Homo sapiens
  misc_RNA (1)...(19): siRNA sense strand
ggacauccaagacucagua

SEQ ID NO: 2108719 - RNA, 19 nt, Homo sapiens
  misc_RNA (1)...(19): siRNA sense strand
ugaagucgcugcagaugga

SEQ ID NO: 2108720 - RNA, 19 nt, Homo sapiens
  misc_RNA (1)...(19): siRNA sense strand
gcaaggccauagagcaaga

SEQ ID NO: 2108721 - RNA, 19 nt, Homo sapiens
  misc_RNA (1)...(19): siRNA sense strand
gagcaagaguggacagaag

SEQ ID NO: 2108722 - RNA, 19 nt, Homo sapiens
  misc_RNA (1)...(19): siRNA sense strand
cgauaacgcuggcaaccuu

SEQ ID NO: 2108723 - RNA, 19 nt, Homo sapiens
  misc_RNA (1)...(19): siRNA sense strand
gcugggagcugagaacaga

SEQ ID NO: 2108724 - RNA, 19 nt, Homo sapiens
  misc_RNA (1)...(19): siRNA sense strand
gcagauggacccaguguuc

SEQ ID NO: 2108725 - RNA, 19 nt, Homo sapiens
  misc_RNA (1)...(19): siRNA sense strand
ggaggcagcgggcaagaaa

SEQ ID NO: 2108726 - RNA, 19 nt, Homo sapiens
  misc_RNA (1)...(19): siRNA sense strand
gagcaaggccauagagcaa

SEQ ID NO: 2108727 - RNA, 19 nt, Homo sapiens
  misc_RNA (1)...(19): siRNA sense strand
gagcaaggccugucaucug

SEQ ID NO: 2108728 - RNA, 19 nt, Homo sapiens
  misc_RNA (1)...(19): siRNA sense strand
gcaucagggugucuacaga

SEQ ID NO: 2108729 - RNA, 19 nt, Homo sapiens
  misc_RNA (1)...(19): siRNA sense strand
caccuggucuacaucgaua

SEQ ID NO: 2108730 - RNA, 19 nt, Homo sapiens
  misc_RNA (1)...(19): siRNA sense strand
gcucuucgacuuccuguug

SEQ ID NO: 2108731 - RNA, 19 nt, Homo sapiens
  misc_RNA (1)...(19): siRNA sense strand
caucucaccuggucuacau

SEQ ID NO: 2108732 - RNA, 19 nt, Homo sapiens
  misc_RNA (1)...(19): siRNA sense strand
gaggagggacauuacuuug

SEQ ID NO: 2108733 - RNA, 19 nt, Homo sapiens
  misc_RNA (1)...(19): siRNA sense strand
gguccuguccuuccacgua

SEQ ID NO: 2108734 - RNA, 19 nt, Homo sapiens
  misc_RNA (1)...(19): siRNA sense strand
ucaguggccuggcucuguu

SEQ ID NO: 2108735 - RNA, 19 nt, Homo sapiens
  misc_RNA (1)...(19): siRNA sense strand
ccacugaggcugcccuuca

SEQ ID NO: 2108736 - RNA, 19 nt, Homo sapiens
  misc_RNA (1)...(19): siRNA sense strand
ugaggagggacauuacuuu

SEQ ID NO: 2108737 - RNA, 19 nt, Homo sapiens
  misc_RNA (1)...(19): siRNA sense strand
gcacaaccucacacucuuc

SEQ ID NO: 2108738 - RNA, 19 nt, Homo sapiens
  misc_RNA (1)...(19): siRNA sense strand
aagagaggcuccgagagaa

SEQ ID NO: 2108739 - RNA, 19 nt, Homo sapiens
  misc_RNA (1)...(19): siRNA sense strand
gagggaggaugagguugga

SEQ ID NO: 2108740 - RNA, 19 nt, Homo sapiens
  misc_RNA (1)...(19): siRNA sense strand
uacagaacaugcugcugaa

SEQ ID NO: 2108741 - RNA, 19 nt, Homo sapiens
  misc_RNA (1)...(19): siRNA sense strand
gaggacaagcugaacuuuc

SEQ ID NO: 2108742 - RNA, 19 nt, Homo sapiens
  misc_RNA (1)...(19): siRNA sense strand
auagauggguuuccugagu

SEQ ID NO: 2108743 - RNA, 19 nt, Homo sapiens
  misc_RNA (1)...(19): siRNA sense strand
agaacaugcugcugaaguc

SEQ ID NO: 2108744 - RNA, 19 nt, Homo sapiens
  misc_RNA (1)...(19): siRNA sense strand
cgugaagguucucgcauca

SEQ ID NO: 2108745 - RNA, 19 nt, Homo sapiens
  misc_RNA (1)...(19): siRNA sense strand
gcccaggaacuccaucuug

SEQ ID NO: 2108746 - RNA, 19 nt, Homo sapiens
  misc_RNA (1)...(19): siRNA sense strand
ugggcuggcugcaguauca

SEQ ID NO: 2108747 - RNA, 19 nt, Homo sapiens
  misc_RNA (1)...(19): siRNA sense strand
gagaggcuccgagagaaau

SEQ ID NO: 2108748 - RNA, 19 nt, Homo sapiens
  misc_RNA (1)...(19): siRNA sense strand
ggagauccaggaaccaaag

SEQ ID NO: 2108749 - RNA, 19 nt, Homo sapiens
  misc_RNA (1)...(19): siRNA sense strand
gcugagaacagagccuuga

SEQ ID NO: 2108750 - RNA, 19 nt, Homo sapiens
  misc_RNA (1)...(19): siRNA sense strand
gggcauagauggguuuccu

SEQ ID NO: 2108751 - RNA, 19 nt, Homo sapiens
  misc_RNA (1)...(19): siRNA sense strand
ggagggcauagauggguuu

SEQ ID NO: 2108752 - RNA, 19 nt, Homo sapiens
  misc_RNA (1)...(19): siRNA sense strand
gcugacagaccacgaugug

SEQ ID NO: 2108753 - RNA, 19 nt, Homo sapiens
  misc_RNA (1)...(19): siRNA sense strand
gccuggcgcucuucgacuu

SEQ ID NO: 2108754 - RNA, 19 nt, Homo sapiens
  misc_RNA (1)...(19): siRNA sense strand
gcagcgggcaagaaacaug

SEQ ID NO: 2108755 - RNA, 19 nt, Homo sapiens
  misc_RNA (1)...(19): siRNA sense strand
gagcgacccagaugaggau

SEQ ID NO: 2108756 - RNA, 19 nt, Homo sapiens
  misc_RNA (1)...(19): siRNA sense strand
cagggacgaggacccauaa

SEQ ID NO: 2108757 - RNA, 19 nt, Homo sapiens
  misc_RNA (1)...(19): siRNA sense strand
ucagggacgaggacccaua

SEQ ID NO: 2108758 - RNA, 19 nt, Homo sapiens
  misc_RNA (1)...(19): siRNA sense strand
cagggugucuacagaacau

SEQ ID NO: 2108759 - RNA, 19 nt, Homo sapiens
  misc_RNA (1)...(19): siRNA sense strand
caucagggugucuacagaa

SEQ ID NO: 2108760 - RNA, 19 nt, Homo sapiens
  misc_RNA (1)...(19): siRNA sense strand
gauagcguucugccucuug

SEQ ID NO: 2108761 - RNA, 19 nt, Homo sapiens
  misc_RNA (1)...(19): siRNA sense strand
ugccugagguccuguccuu

SEQ ID NO: 2108762 - RNA, 19 nt, Homo sapiens
  misc_RNA (1)...(19): siRNA sense strand
gaagcugcaagggucagua

SEQ ID NO: 2108763 - RNA, 19 nt, Homo sapiens
  misc_RNA (1)...(19): siRNA sense strand
aggacaagcugaacuuucg

SEQ ID NO: 2108764 - RNA, 19 nt, Homo sapiens
  misc_RNA (1)...(19): siRNA sense strand
agaccacgaugugcagaug

SEQ ID NO: 2108765 - RNA, 19 nt, Homo sapiens
  misc_RNA (1)...(19): siRNA sense strand
cagaacaugcugcugaagu

SEQ ID NO: 2108766 - RNA, 19 nt, Homo sapiens
  misc_RNA (1)...(19): siRNA sense strand
gagugacauggcagcuuua

SEQ ID NO: 2108767 - RNA, 19 nt, Homo sapiens
  misc_RNA (1)...(19): siRNA sense strand
gaacuccaucuuggucugu

SEQ ID NO: 2108768 - RNA, 19 nt, Homo sapiens
  misc_RNA (1)...(19): siRNA sense strand
gggaggugguggacaaagc

SEQ ID NO: 2108769 - RNA, 19 nt, Homo sapiens
  misc_RNA (1)...(19): siRNA sense strand
gcaagaguggacagaagca

SEQ ID NO: 2108770 - RNA, 19 nt, Homo sapiens
  misc_RNA (1)...(19): siRNA sense strand
cagaugaggaucagaacuc

SEQ ID NO: 2108771 - RNA, 19 nt, Homo sapiens
  misc_RNA (1)...(19): siRNA sense strand
gcaccugagcgacccagau

SEQ ID NO: 2108772 - RNA, 19 nt, Homo sapiens
  misc_RNA (1)...(19): siRNA sense strand
gugaggagggacauuacuu

SEQ ID NO: 2108773 - RNA, 19 nt, Homo sapiens
  misc_RNA (1)...(19): siRNA sense strand
cauccaagacucaguacuc

SEQ ID NO: 2108774 - RNA, 19 nt, Homo sapiens
  misc_RNA (1)...(19): siRNA sense strand
gggucaguauggugugaug

SEQ ID NO: 2108775 - RNA, 19 nt, Homo sapiens
  misc_RNA (1)...(19): siRNA sense strand
uggccuggcucuguugaga

SEQ ID NO: 2108776 - RNA, 19 nt, Homo sapiens
  misc_RNA (1)...(19): siRNA sense strand
aagcagaggaucccaccuu

SEQ ID NO: 2108777 - RNA, 19 nt, Homo sapiens
  misc_RNA (1)...(19): siRNA sense strand
gagauccaggaaccaaaga

SEQ ID NO: 2108778 - RNA, 19 nt, Homo sapiens
  misc_RNA (1)...(19): siRNA sense strand
aagcacaaccucacacucu

SEQ ID NO: 2108779 - RNA, 19 nt, Homo sapiens
  misc_RNA (1)...(19): siRNA sense strand
ggagcaaggccugucaucu

SEQ ID NO: 2108780 - RNA, 19 nt, Homo sapiens
  misc_RNA (1)...(19): siRNA sense strand
ucuguggccugaucaagag

SEQ ID NO: 2108781 - RNA, 19 nt, Homo sapiens
  misc_RNA (1)...(19): siRNA sense strand
acucaguacucagcauguu

SEQ ID NO: 2108782 - RNA, 19 nt, Homo sapiens
  misc_RNA (1)...(19): siRNA sense strand
gaaagcugcguggcaagag

SEQ ID NO: 2108783 - RNA, 19 nt, Homo sapiens
  misc_RNA (1)...(19): siRNA sense strand
caccugagcgacccagaug

SEQ ID NO: 2108784 - RNA, 19 nt, Homo sapiens
  misc_RNA (1)...(19): siRNA sense strand
gccuggcucuguugagaag

SEQ ID NO: 2108785 - RNA, 19 nt, Homo sapiens
  misc_RNA (1)...(19): siRNA sense strand
uuaccggcuuggagagcua

SEQ ID NO: 2108786 - RNA, 19 nt, Homo sapiens
  misc_RNA (1)...(19): siRNA sense strand
ggaggaugagguuggagau

SEQ ID NO: 2108787 - RNA, 19 nt, Homo sapiens
  misc_RNA (1)...(19): siRNA sense strand
ggagaaaccuuaugaaugu

SEQ ID NO: 2108788 - RNA, 19 nt, Homo sapiens
  misc_RNA (1)...(19): siRNA sense strand
ggagaagccuuauaaaugu

SEQ ID NO: 2108789 - RNA, 19 nt, Homo sapiens
  misc_RNA (1)...(19): siRNA sense strand
gagaaacccuauaaaugua

SEQ ID NO: 2108790 - RNA, 19 nt, Homo sapiens
  misc_RNA (1)...(19): siRNA sense strand
ggacagaaauccuaucgau

SEQ ID NO: 2108791 - RNA, 19 nt, Homo sapiens
  misc_RNA (1)...(19): siRNA sense strand
ggagaaacccuauaaaugu

SEQ ID NO: 2108792 - RNA, 19 nt, Homo sapiens
  misc_RNA (1)...(19): siRNA sense strand
ggacaacccucaaaugaag

SEQ ID NO: 2108793 - RNA, 19 nt, Homo sapiens
  misc_RNA (1)...(19): siRNA sense strand
gaagggagcagacuagaaa

SEQ ID NO: 2108794 - RNA, 19 nt, Homo sapiens
  misc_RNA (1)...(19): siRNA sense strand
aaucagaucucucaacuug

SEQ ID NO: 2108795 - RNA, 19 nt, Homo sapiens
  misc_RNA (1)...(19): siRNA sense strand
gcacagcucccaucucauu

SEQ ID NO: 2108796 - RNA, 19 nt, Homo sapiens
  misc_RNA (1)...(19): siRNA sense strand
gggagaagccuuauaaaug

SEQ ID NO: 2108797 - RNA, 19 nt, Homo sapiens
  misc_RNA (1)...(19): siRNA sense strand
gggaaagccuucaaucaga

SEQ ID NO: 2108798 - RNA, 19 nt, Homo sapiens
  misc_RNA (1)...(19): siRNA sense strand
ggaucagagucaucuaaua

SEQ ID NO: 2108799 - RNA, 19 nt, Homo sapiens
  misc_RNA (1)...(19): siRNA sense strand
gagaaacccuaugaaugua

SEQ ID NO: 2108800 - RNA, 19 nt, Homo sapiens
  misc_RNA (1)...(19): siRNA sense strand
ggagauguuugugaagaua

SEQ ID NO: 2108801 - RNA, 19 nt, Homo sapiens
  misc_RNA (1)...(19): siRNA sense strand
gaacagagacuggagaugu

SEQ ID NO: 2108802 - RNA, 19 nt, Homo sapiens
  misc_RNA (1)...(19): siRNA sense strand
gagaagccuuauaaaugua

SEQ ID NO: 2108803 - RNA, 19 nt, Homo sapiens
  misc_RNA (1)...(19): siRNA sense strand
ucagaucucucaacuuguu

SEQ ID NO: 2108804 - RNA, 19 nt, Homo sapiens
  misc_RNA (1)...(19): siRNA sense strand
gggagaaacccuauaaaug

SEQ ID NO: 2108805 - RNA, 19 nt, Homo sapiens
  misc_RNA (1)...(19): siRNA sense strand
ggaaaauccuucaaucaaa

SEQ ID NO: 2108806 - RNA, 19 nt, Homo sapiens
  misc_RNA (1)...(19): siRNA sense strand
gagaaacccuaugagugua

SEQ ID NO: 2108807 - RNA, 19 nt, Homo sapiens
  misc_RNA (1)...(19): siRNA sense strand
ggaaagccuucaaucagau

SEQ ID NO: 2108808 - RNA, 19 nt, Homo sapiens
  misc_RNA (1)...(19): siRNA sense strand
ggagcagacuagaaaguga

SEQ ID NO: 2108809 - RNA, 19 nt, Homo sapiens
  misc_RNA (1)...(19): siRNA sense strand
gaaaucucauugaccauca

SEQ ID NO: 2108810 - RNA, 19 nt, Homo sapiens
  misc_RNA (1)...(19): siRNA sense strand
cggaguaaaugucuuauuc

SEQ ID NO: 2108811 - RNA, 19 nt, Homo sapiens
  misc_RNA (1)...(19): siRNA sense strand
ugagaaacccuaugaaugu

SEQ ID NO: 2108812 - RNA, 19 nt, Homo sapiens
  misc_RNA (1)...(19): siRNA sense strand
gaucagagucaucuaauag

SEQ ID NO: 2108813 - RNA, 19 nt, Homo sapiens
  misc_RNA (1)...(19): siRNA sense strand
gaaggacaacccucaaaug

SEQ ID NO: 2108814 - RNA, 19 nt, Homo sapiens
  misc_RNA (1)...(19): siRNA sense strand
gggagaaaccuuaugaaug

SEQ ID NO: 2108815 - RNA, 19 nt, Homo sapiens
  misc_RNA (1)...(19): siRNA sense strand
gaaauccuaucgaugugau

SEQ ID NO: 2108816 - RNA, 19 nt, Homo sapiens
  misc_RNA (1)...(19): siRNA sense strand
gaguaaaugucuuauucga

SEQ ID NO: 2108817 - RNA, 19 nt, Homo sapiens
  misc_RNA (1)...(19): siRNA sense strand
gaaacccuaugaauguaau

SEQ ID NO: 2108818 - RNA, 19 nt, Homo sapiens
  misc_RNA (1)...(19): siRNA sense strand
gagaaaccuuaugaaugua

SEQ ID NO: 2108819 - RNA, 19 nt, Homo sapiens
  misc_RNA (1)...(19): siRNA sense strand
ggucugaguaaaugucuua

SEQ ID NO: 2108820 - RNA, 19 nt, Homo sapiens
  misc_RNA (1)...(19): siRNA sense strand
gaagaagggagcagacuag

SEQ ID NO: 2108821 - RNA, 19 nt, Homo sapiens
  misc_RNA (1)...(19): siRNA sense strand
guacaucagagaacccaua

SEQ ID NO: 2108822 - RNA, 19 nt, Homo sapiens
  misc_RNA (1)...(19): siRNA sense strand
acucauaccucauuauaca

SEQ ID NO: 2108823 - RNA, 19 nt, Homo sapiens
  misc_RNA (1)...(19): siRNA sense strand
gaacauccaccucugucuu

SEQ ID NO: 2108824 - RNA, 19 nt, Homo sapiens
  misc_RNA (1)...(19): siRNA sense strand
gcucauuguucaucucaga

SEQ ID NO: 2108825 - RNA, 19 nt, Homo sapiens
  misc_RNA (1)...(19): siRNA sense strand
ggagagaaacccuaugagu

SEQ ID NO: 2108826 - RNA, 19 nt, Homo sapiens
  misc_RNA (1)...(19): siRNA sense strand
cugaguaaaugucuuauuc

SEQ ID NO: 2108827 - RNA, 19 nt, Homo sapiens
  misc_RNA (1)...(19): siRNA sense strand
gguaaggcauucggucuga

SEQ ID NO: 2108828 - RNA, 19 nt, Homo sapiens
  misc_RNA (1)...(19): siRNA sense strand
ggaaauaauagaugaggau

SEQ ID NO: 2108829 - RNA, 19 nt, Homo sapiens
  misc_RNA (1)...(19): siRNA sense strand
uaaagggacagaaauccua

SEQ ID NO: 2108830 - RNA, 19 nt, Homo sapiens
  misc_RNA (1)...(19): siRNA sense strand
caccagagacuccauaaug

SEQ ID NO: 2108831 - RNA, 19 nt, Homo sapiens
  misc_RNA (1)...(19): siRNA sense strand
gcaaaccucccagcucauu

SEQ ID NO: 2108832 - RNA, 19 nt, Homo sapiens
  misc_RNA (1)...(19): siRNA sense strand
gacuggagauguuugugaa

SEQ ID NO: 2108833 - RNA, 19 nt, Homo sapiens
  misc_RNA (1)...(19): siRNA sense strand
ggucuucaguuauaauucu

SEQ ID NO: 2108834 - RNA, 19 nt, Homo sapiens
  misc_RNA (1)...(19): siRNA sense strand
gaaaagcccuauaaaugca

SEQ ID NO: 2108835 - RNA, 19 nt, Homo sapiens
  misc_RNA (1)...(19): siRNA sense strand
acagaaauccuaucgaugu

SEQ ID NO: 2108836 - RNA, 19 nt, Homo sapiens
  misc_RNA (1)...(19): siRNA sense strand
agagcauucuguuccaaua

SEQ ID NO: 2108837 - RNA, 19 nt, Homo sapiens
  misc_RNA (1)...(19): siRNA sense strand
gaacucaugcuggagagaa

SEQ ID NO: 2108838 - RNA, 19 nt, Homo sapiens
  misc_RNA (1)...(19): siRNA sense strand
gugagaaacccuaugaaug

SEQ ID NO: 2108839 - RNA, 19 nt, Homo sapiens
  misc_RNA (1)...(19): siRNA sense strand
aggcacagcucccaucuca

SEQ ID NO: 2108840 - RNA, 19 nt, Homo sapiens
  misc_RNA (1)...(19): siRNA sense strand
gcucccaucucauucaaca

SEQ ID NO: 2108841 - RNA, 19 nt, Homo sapiens
  misc_RNA (1)...(19): siRNA sense strand
agagaaacccuaugagugu

SEQ ID NO: 2108842 - RNA, 19 nt, Homo sapiens
  misc_RNA (1)...(19): siRNA sense strand
ucaaucagaucucucaacu

SEQ ID NO: 2108843 - RNA, 19 nt, Homo sapiens
  misc_RNA (1)...(19): siRNA sense strand
caacaccagagacuccaua

SEQ ID NO: 2108844 - RNA, 19 nt, Homo sapiens
  misc_RNA (1)...(19): siRNA sense strand
ccauuuaaguguagugagu

SEQ ID NO: 2108845 - RNA, 19 nt, Homo sapiens
  misc_RNA (1)...(19): siRNA sense strand
gcgaauucauacuggagaa

SEQ ID NO: 2108846 - RNA, 19 nt, Homo sapiens
  misc_RNA (1)...(19): siRNA sense strand
ggugagaaacccuaugaau

SEQ ID NO: 2108847 - RNA, 19 nt, Homo sapiens
  misc_RNA (1)...(19): siRNA sense strand
caaaacucauaccucauua

SEQ ID NO: 2108848 - RNA, 19 nt, Homo sapiens
  misc_RNA (1)...(19): siRNA sense strand
gugaaaagcccuauaaaug

SEQ ID NO: 2108849 - RNA, 19 nt, Homo sapiens
  misc_RNA (1)...(19): siRNA sense strand
aaggacaacccucaaauga

SEQ ID NO: 2108850 - RNA, 19 nt, Homo sapiens
  misc_RNA (1)...(19): siRNA sense strand
ggagagcauucuguuccaa

SEQ ID NO: 2108851 - RNA, 19 nt, Homo sapiens
  misc_RNA (1)...(19): siRNA sense strand
gggaaaagcccuaugaaug

SEQ ID NO: 2108852 - RNA, 19 nt, Homo sapiens
  misc_RNA (1)...(19): siRNA sense strand
ugaggaauauaaggaaguu

SEQ ID NO: 2108853 - RNA, 19 nt, Homo sapiens
  misc_RNA (1)...(19): siRNA sense strand
gggaaaagccauacaaaug

SEQ ID NO: 2108854 - RNA, 19 nt, Homo sapiens
  misc_RNA (1)...(19): siRNA sense strand
ggaaaagccauacaaaugu

SEQ ID NO: 2108855 - RNA, 19 nt, Homo sapiens
  misc_RNA (1)...(19): siRNA sense strand
auaaggaaguugaggaaca

SEQ ID NO: 2108856 - RNA, 19 nt, Homo sapiens
  misc_RNA (1)...(19): siRNA sense strand
gaaacccuaugaguguaau

SEQ ID NO: 2108857 - RNA, 19 nt, Homo sapiens
  misc_RNA (1)...(19): siRNA sense strand
uaaggaaguugaggaacau

SEQ ID NO: 2108858 - RNA, 19 nt, Homo sapiens
  misc_RNA (1)...(19): siRNA sense strand
cagaaauccuaucgaugug

SEQ ID NO: 2108859 - RNA, 19 nt, Homo sapiens
  misc_RNA (1)...(19): siRNA sense strand
uuagucagcguuccacuuu

SEQ ID NO: 2108860 - RNA, 19 nt, Homo sapiens
  misc_RNA (1)...(19): siRNA sense strand
ggaguucgcaccucauugg

SEQ ID NO: 2108861 - RNA, 19 nt, Homo sapiens
  misc_RNA (1)...(19): siRNA sense strand
gaacaugaaggaguuuuaa

SEQ ID NO: 2108862 - RNA, 19 nt, Homo sapiens
  misc_RNA (1)...(19): siRNA sense strand
caucagagaacccauacug

SEQ ID NO: 2108863 - RNA, 19 nt, Homo sapiens
  misc_RNA (1)...(19): siRNA sense strand
ggcauucggucugaguaaa

SEQ ID NO: 2108864 - RNA, 19 nt, Homo sapiens
  misc_RNA (1)...(19): siRNA sense strand
ccucccagcucauuguuca

SEQ ID NO: 2108865 - RNA, 19 nt, Homo sapiens
  misc_RNA (1)...(19): siRNA sense strand
cuaucgaugugaugaaugu

SEQ ID NO: 2108866 - RNA, 19 nt, Homo sapiens
  misc_RNA (1)...(19): siRNA sense strand
aaagacagauaugaggaau

SEQ ID NO: 2108867 - RNA, 19 nt, Homo sapiens
  misc_RNA (1)...(19): siRNA sense strand
caccagaggcuucacacaa

SEQ ID NO: 2108868 - RNA, 19 nt, Homo sapiens
  misc_RNA (1)...(19): siRNA sense strand
ucagagucaucuaauagca

SEQ ID NO: 2108869 - RNA, 19 nt, Homo sapiens
  misc_RNA (1)...(19): siRNA sense strand
ugaagaagggagcagacua

SEQ ID NO: 2108870 - RNA, 19 nt, Homo sapiens
  misc_RNA (1)...(19): siRNA sense strand
ucugcacacugguaagaaa

SEQ ID NO: 2108871 - RNA, 19 nt, Homo sapiens
  misc_RNA (1)...(19): siRNA sense strand
caagugaaaagcccuauaa

SEQ ID NO: 2108872 - RNA, 19 nt, Homo sapiens
  misc_RNA (1)...(19): siRNA sense strand
ccagaggcuucacacaagu

SEQ ID NO: 2108873 - RNA, 19 nt, Homo sapiens
  misc_RNA (1)...(19): siRNA sense strand
aagauaccuucaaagaguu

SEQ ID NO: 2108874 - RNA, 19 nt, Homo sapiens
  misc_RNA (1)...(19): siRNA sense strand
cuaugaauguaaugagugu

SEQ ID NO: 2108875 - RNA, 19 nt, Homo sapiens
  misc_RNA (1)...(19): siRNA sense strand
gaaaagcccuaugaaugca

SEQ ID NO: 2108876 - RNA, 19 nt, Homo sapiens
  misc_RNA (1)...(19): siRNA sense strand
ggaaaagcccuaugaaugc

SEQ ID NO: 2108877 - RNA, 19 nt, Homo sapiens
  misc_RNA (1)...(19): siRNA sense strand
uagaaggacaacccucaaa

SEQ ID NO: 2108878 - RNA, 19 nt, Homo sapiens
  misc_RNA (1)...(19): siRNA sense strand
gcucggucaucuucuuaag

SEQ ID NO: 2108879 - RNA, 19 nt, Homo sapiens
  misc_RNA (1)...(19): siRNA sense strand
uaaaggaucagagucaucu

SEQ ID NO: 2108880 - RNA, 19 nt, Homo sapiens
  misc_RNA (1)...(19): siRNA sense strand
gugggaaagccuucaauca

SEQ ID NO: 2108881 - RNA, 19 nt, Homo sapiens
  misc_RNA (1)...(19): siRNA sense strand
uguaaugagugugggaaga

SEQ ID NO: 2108882 - RNA, 19 nt, Homo sapiens
  misc_RNA (1)...(19): siRNA sense strand
agucagcguuccacuuuua

SEQ ID NO: 2108883 - RNA, 19 nt, Homo sapiens
  misc_RNA (1)...(19): siRNA sense strand
gcauucggucugaguaaau

SEQ ID NO: 2108884 - RNA, 19 nt, Homo sapiens
  misc_RNA (1)...(19): siRNA sense strand
gaccaccagagaacccaua

SEQ ID NO: 2108885 - RNA, 19 nt, Homo sapiens
  misc_RNA (1)...(19): siRNA sense strand
cagcucccaucucauucaa

SEQ ID NO: 2108886 - RNA, 19 nt, Homo sapiens
  misc_RNA (1)...(19): siRNA sense strand
cauuauacaccagagaauu

SEQ ID NO: 2108887 - RNA, 19 nt, Homo sapiens
  misc_RNA (1)...(19): siRNA sense strand
ccaaggcccugcagcugua

SEQ ID NO: 2108888 - RNA, 19 nt, Homo sapiens
  misc_RNA (1)...(19): siRNA sense strand
ggaggaggaugaagacaca

SEQ ID NO: 2108889 - RNA, 19 nt, Homo sapiens
  misc_RNA (1)...(19): siRNA sense strand
ggacacugaugcugaccuu

SEQ ID NO: 2108890 - RNA, 19 nt, Homo sapiens
  misc_RNA (1)...(19): siRNA sense strand
gaagcagcaugcccaggaa

SEQ ID NO: 2108891 - RNA, 19 nt, Homo sapiens
  misc_RNA (1)...(19): siRNA sense strand
gagccgagauccaccugau

SEQ ID NO: 2108892 - RNA, 19 nt, Homo sapiens
  misc_RNA (1)...(19): siRNA sense strand
cugcguaggucucaggauu

SEQ ID NO: 2108893 - RNA, 19 nt, Homo sapiens
  misc_RNA (1)...(19): siRNA sense strand
uugagccucuuuccugaua

SEQ ID NO: 2108894 - RNA, 19 nt, Homo sapiens
  misc_RNA (1)...(19): siRNA sense strand
gagcacauccagaaagaag

SEQ ID NO: 2108895 - RNA, 19 nt, Homo sapiens
  misc_RNA (1)...(19): siRNA sense strand
ccgagugccugcagaagau

SEQ ID NO: 2108896 - RNA, 19 nt, Homo sapiens
  misc_RNA (1)...(19): siRNA sense strand
ggacauacggggaaauuga

SEQ ID NO: 2108897 - RNA, 19 nt, Homo sapiens
  misc_RNA (1)...(19): siRNA sense strand
gaaagcugcuccggacacu

SEQ ID NO: 2108898 - RNA, 19 nt, Homo sapiens
  misc_RNA (1)...(19): siRNA sense strand
aguacaagcugcccaugga

SEQ ID NO: 2108899 - RNA, 19 nt, Homo sapiens
  misc_RNA (1)...(19): siRNA sense strand
ggaugaagacacagagaca

SEQ ID NO: 2108900 - RNA, 19 nt, Homo sapiens
  misc_RNA (1)...(19): siRNA sense strand
guuacgagcacauccagaa

SEQ ID NO: 2108901 - RNA, 19 nt, Homo sapiens
  misc_RNA (1)...(19): siRNA sense strand
ccugauccgugacaugaug

SEQ ID NO: 2108902 - RNA, 19 nt, Homo sapiens
  misc_RNA (1)...(19): siRNA sense strand
ugacgagcaaucagaggua

SEQ ID NO: 2108903 - RNA, 19 nt, Homo sapiens
  misc_RNA (1)...(19): siRNA sense strand
acgagcacauccagaaaga

SEQ ID NO: 2108904 - RNA, 19 nt, Homo sapiens
  misc_RNA (1)...(19): siRNA sense strand
gcugcgaguugccuuagag

SEQ ID NO: 2108905 - RNA, 19 nt, Homo sapiens
  misc_RNA (1)...(19): siRNA sense strand
caccugauccgugacauga

SEQ ID NO: 2108906 - RNA, 19 nt, Homo sapiens
  misc_RNA (1)...(19): siRNA sense strand
aagcugcuccggacacuga

SEQ ID NO: 2108907 - RNA, 19 nt, Homo sapiens
  misc_RNA (1)...(19): siRNA sense strand
ucuaccugcugcuucauga

SEQ ID NO: 2108908 - RNA, 19 nt, Homo sapiens
  misc_RNA (1)...(19): siRNA sense strand
gaugaagacacagagacaa

SEQ ID NO: 2108909 - RNA, 19 nt, Homo sapiens
  misc_RNA (1)...(19): siRNA sense strand
ggacagugugggcaguaug

SEQ ID NO: 2108910 - RNA, 19 nt, Homo sapiens
  misc_RNA (1)...(19): siRNA sense strand
gcguaggucucaggauuac

SEQ ID NO: 2108911 - RNA, 19 nt, Homo sapiens
  misc_RNA (1)...(19): siRNA sense strand
gaggacagugugggcagua

SEQ ID NO: 2108912 - RNA, 19 nt, Homo sapiens
  misc_RNA (1)...(19): siRNA sense strand
gcacauccagaaagaagac

SEQ ID NO: 2108913 - RNA, 19 nt, Homo sapiens
  misc_RNA (1)...(19): siRNA sense strand
gaccugcugccacuucuca

SEQ ID NO: 2108914 - RNA, 19 nt, Homo sapiens
  misc_RNA (1)...(19): siRNA sense strand
gaggaugaagacacagaga

SEQ ID NO: 2108915 - RNA, 19 nt, Homo sapiens
  misc_RNA (1)...(19): siRNA sense strand
caugaggcugcaccgcuua

SEQ ID NO: 2108916 - RNA, 19 nt, Homo sapiens
  misc_RNA (1)...(19): siRNA sense strand
ccaccgagugccugcagaa

SEQ ID NO: 2108917 - RNA, 19 nt, Homo sapiens
  misc_RNA (1)...(19): siRNA sense strand
ggcacggugucgaggguau

SEQ ID NO: 2108918 - RNA, 19 nt, Homo sapiens
  misc_RNA (1)...(19): siRNA sense strand
ccaaggcccugcagcugua

SEQ ID NO: 2108919 - RNA, 19 nt, Homo sapiens
  misc_RNA (1)...(19): siRNA sense strand
ggacacugaugcugaccuu

SEQ ID NO: 2108920 - RNA, 19 nt, Homo sapiens
  misc_RNA (1)...(19): siRNA sense strand
gaagcagcaugcccaggaa

SEQ ID NO: 2108921 - RNA, 19 nt, Homo sapiens
  misc_RNA (1)...(19): siRNA sense strand
cugcguaggucucaggauu

SEQ ID NO: 2108922 - RNA, 19 nt, Homo sapiens
  misc_RNA (1)...(19): siRNA sense strand
gaaagcugcuccggacacu

SEQ ID NO: 2108923 - RNA, 19 nt, Homo sapiens
  misc_RNA (1)...(19): siRNA sense strand
ggacagugugggcaguaug

SEQ ID NO: 2108924 - RNA, 19 nt, Homo sapiens
  misc_RNA (1)...(19): siRNA sense strand
aagcugcuccggacacuga

SEQ ID NO: 2108925 - RNA, 19 nt, Homo sapiens
  misc_RNA (1)...(19): siRNA sense strand
gcguaggucucaggauuac

SEQ ID NO: 2108926 - RNA, 19 nt, Homo sapiens
  misc_RNA (1)...(19): siRNA sense strand
gaggacagugugggcagua

SEQ ID NO: 2108927 - RNA, 19 nt, Homo sapiens
  misc_RNA (1)...(19): siRNA sense strand
ccaaggcccugcagcugua

SEQ ID NO: 2108928 - RNA, 19 nt, Homo sapiens
  misc_RNA (1)...(19): siRNA sense strand
ggaggaggaugaagacaca

SEQ ID NO: 2108929 - RNA, 19 nt, Homo sapiens
  misc_RNA (1)...(19): siRNA sense strand
ggacacugaugcugaccuu

SEQ ID NO: 2108930 - RNA, 19 nt, Homo sapiens
  misc_RNA (1)...(19): siRNA sense strand
gaagcagcaugcccaggaa

SEQ ID NO: 2108931 - RNA, 19 nt, Homo sapiens
  misc_RNA (1)...(19): siRNA sense strand
gagccgagauccaccugau

SEQ ID NO: 2108932 - RNA, 19 nt, Homo sapiens
  misc_RNA (1)...(19): siRNA sense strand
uugagccucuuuccugaua

SEQ ID NO: 2108933 - RNA, 19 nt, Homo sapiens
  misc_RNA (1)...(19): siRNA sense strand
gagcacauccagaaagaag

SEQ ID NO: 2108934 - RNA, 19 nt, Homo sapiens
  misc_RNA (1)...(19): siRNA sense strand
ccgagugccugcagaagau

SEQ ID NO: 2108935 - RNA, 19 nt, Homo sapiens
  misc_RNA (1)...(19): siRNA sense strand
ggacauacggggaaauuga

SEQ ID NO: 2108936 - RNA, 19 nt, Homo sapiens
  misc_RNA (1)...(19): siRNA sense strand
gaaagcugcuccggacacu

SEQ ID NO: 2108937 - RNA, 19 nt, Homo sapiens
  misc_RNA (1)...(19): siRNA sense strand
aguacaagcugcccaugga

SEQ ID NO: 2108938 - RNA, 19 nt, Homo sapiens
  misc_RNA (1)...(19): siRNA sense strand
ggaugaagacacagagaca

SEQ ID NO: 2108939 - RNA, 19 nt, Homo sapiens
  misc_RNA (1)...(19): siRNA sense strand
guuacgagcacauccagaa

SEQ ID NO: 2108940 - RNA, 19 nt, Homo sapiens
  misc_RNA (1)...(19): siRNA sense strand
ccugauccgugacaugaug

SEQ ID NO: 2108941 - RNA, 19 nt, Homo sapiens
  misc_RNA (1)...(19): siRNA sense strand
ugacgagcaaucagaggua

SEQ ID NO: 2108942 - RNA, 19 nt, Homo sapiens
  misc_RNA (1)...(19): siRNA sense strand
acgagcacauccagaaaga

SEQ ID NO: 2108943 - RNA, 19 nt, Homo sapiens
  misc_RNA (1)...(19): siRNA sense strand
gcugcgaguugccuuagag

SEQ ID NO: 2108944 - RNA, 19 nt, Homo sapiens
  misc_RNA (1)...(19): siRNA sense strand
caccugauccgugacauga

SEQ ID NO: 2108945 - RNA, 19 nt, Homo sapiens
  misc_RNA (1)...(19): siRNA sense strand
gaugaagacacagagacaa

SEQ ID NO: 2108946 - RNA, 19 nt, Homo sapiens
  misc_RNA (1)...(19): siRNA sense strand
aagcugcuccggacacuga

SEQ ID NO: 2108947 - RNA, 19 nt, Homo sapiens
  misc_RNA (1)...(19): siRNA sense strand
ucuaccugcugcuucauga

SEQ ID NO: 2108948 - RNA, 19 nt, Homo sapiens
  misc_RNA (1)...(19): siRNA sense strand
gaggaugaagacacagaga

SEQ ID NO: 2108949 - RNA, 19 nt, Homo sapiens
  misc_RNA (1)...(19): siRNA sense strand
gcacauccagaaagaagac

SEQ ID NO: 2108950 - RNA, 19 nt, Homo sapiens
  misc_RNA (1)...(19): siRNA sense strand
gaccugcugccacuucuca

SEQ ID NO: 2108951 - RNA, 19 nt, Homo sapiens
  misc_RNA (1)...(19): siRNA sense strand
caugaggcugcaccgcuua

SEQ ID NO: 2108952 - RNA, 19 nt, Homo sapiens
  misc_RNA (1)...(19): siRNA sense strand
ccaccgagugccugcagaa

SEQ ID NO: 2108953 - RNA, 19 nt, Homo sapiens
  misc_RNA (1)...(19): siRNA sense strand
ggcacggugucgaggguau

SEQ ID NO: 2108954 - RNA, 19 nt, Homo sapiens
  misc_RNA (1)...(19): siRNA sense strand
ccaaggcccugcagcugua

SEQ ID NO: 2108955 - RNA, 19 nt, Homo sapiens
  misc_RNA (1)...(19): siRNA sense strand
ggaggaggaugaagacaca

SEQ ID NO: 2108956 - RNA, 19 nt, Homo sapiens
  misc_RNA (1)...(19): siRNA sense strand
ggacacugaugcugaccuu

SEQ ID NO: 2108957 - RNA, 19 nt, Homo sapiens
  misc_RNA (1)...(19): siRNA sense strand
gaagcagcaugcccaggaa

SEQ ID NO: 2108958 - RNA, 19 nt, Homo sapiens
  misc_RNA (1)...(19): siRNA sense strand
gagccgagauccaccugau

SEQ ID NO: 2108959 - RNA, 19 nt, Homo sapiens
  misc_RNA (1)...(19): siRNA sense strand
cugcguaggucucaggauu

SEQ ID NO: 2108960 - RNA, 19 nt, Homo sapiens
  misc_RNA (1)...(19): siRNA sense strand
uugagccucuuuccugaua

SEQ ID NO: 2108961 - RNA, 19 nt, Homo sapiens
  misc_RNA (1)...(19): siRNA sense strand
gagcacauccagaaagaag

SEQ ID NO: 2108962 - RNA, 19 nt, Homo sapiens
  misc_RNA (1)...(19): siRNA sense strand
ccgagugccugcagaagau

SEQ ID NO: 2108963 - RNA, 19 nt, Homo sapiens
  misc_RNA (1)...(19): siRNA sense strand
ggacauacggggaaauuga

SEQ ID NO: 2108964 - RNA, 19 nt, Homo sapiens
  misc_RNA (1)...(19): siRNA sense strand
gaaagcugcuccggacacu

SEQ ID NO: 2108965 - RNA, 19 nt, Homo sapiens
  misc_RNA (1)...(19): siRNA sense strand
aguacaagcugcccaugga

SEQ ID NO: 2108966 - RNA, 19 nt, Homo sapiens
  misc_RNA (1)...(19): siRNA sense strand
ggaugaagacacagagaca

SEQ ID NO: 2108967 - RNA, 19 nt, Homo sapiens
  misc_RNA (1)...(19): siRNA sense strand
guuacgagcacauccagaa

SEQ ID NO: 2108968 - RNA, 19 nt, Homo sapiens
  misc_RNA (1)...(19): siRNA sense strand
ccugauccgugacaugaug

SEQ ID NO: 2108969 - RNA, 19 nt, Homo sapiens
  misc_RNA (1)...(19): siRNA sense strand
ugacgagcaaucagaggua

SEQ ID NO: 2108970 - RNA, 19 nt, Homo sapiens
  misc_RNA (1)...(19): siRNA sense strand
acgagcacauccagaaaga

SEQ ID NO: 2108971 - RNA, 19 nt, Homo sapiens
  misc_RNA (1)...(19): siRNA sense strand
gcugcgaguugccuuagag

SEQ ID NO: 2108972 - RNA, 19 nt, Homo sapiens
  misc_RNA (1)...(19): siRNA sense strand
caccugauccgugacauga

SEQ ID NO: 2108973 - RNA, 19 nt, Homo sapiens
  misc_RNA (1)...(19): siRNA sense strand
aagcugcuccggacacuga

SEQ ID NO: 2108974 - RNA, 19 nt, Homo sapiens
  misc_RNA (1)...(19): siRNA sense strand
ucuaccugcugcuucauga

SEQ ID NO: 2108975 - RNA, 19 nt, Homo sapiens
  misc_RNA (1)...(19): siRNA sense strand
gaugaagacacagagacaa

SEQ ID NO: 2108976 - RNA, 19 nt, Homo sapiens
  misc_RNA (1)...(19): siRNA sense strand
ggacagugugggcaguaug

SEQ ID NO: 2108977 - RNA, 19 nt, Homo sapiens
  misc_RNA (1)...(19): siRNA sense strand
gcguaggucucaggauuac

SEQ ID NO: 2108978 - RNA, 19 nt, Homo sapiens
  misc_RNA (1)...(19): siRNA sense strand
gaggacagugugggcagua

SEQ ID NO: 2108979 - RNA, 19 nt, Homo sapiens
  misc_RNA (1)...(19): siRNA sense strand
gcacauccagaaagaagac

SEQ ID NO: 2108980 - RNA, 19 nt, Homo sapiens
  misc_RNA (1)...(19): siRNA sense strand
gaccugcugccacuucuca

SEQ ID NO: 2108981 - RNA, 19 nt, Homo sapiens
  misc_RNA (1)...(19): siRNA sense strand
gaggaugaagacacagaga

SEQ ID NO: 2108982 - RNA, 19 nt, Homo sapiens
  misc_RNA (1)...(19): siRNA sense strand
caugaggcugcaccgcuua

SEQ ID NO: 2108983 - RNA, 19 nt, Homo sapiens
  misc_RNA (1)...(19): siRNA sense strand
ccaccgagugccugcagaa

SEQ ID NO: 2108984 - RNA, 19 nt, Homo sapiens
  misc_RNA (1)...(19): siRNA sense strand
ggcacggugucgaggguau

SEQ ID NO: 2108985 - RNA, 19 nt, Homo sapiens
  misc_RNA (1)...(19): siRNA sense strand
ggagaaguaugaaagcuuu

SEQ ID NO: 2108986 - RNA, 19 nt, Homo sapiens
  misc_RNA (1)...(19): siRNA sense strand
ggauggaacugugaucaua

SEQ ID NO: 2108987 - RNA, 19 nt, Homo sapiens
  misc_RNA (1)...(19): siRNA sense strand
acaaugaccugucucagua

SEQ ID NO: 2108988 - RNA, 19 nt, Homo sapiens
  misc_RNA (1)...(19): siRNA sense strand
ccaaggagguguuuaagga

SEQ ID NO: 2108989 - RNA, 19 nt, Homo sapiens
  misc_RNA (1)...(19): siRNA sense strand
gcagauggcuguaagugau

SEQ ID NO: 2108990 - RNA, 19 nt, Homo sapiens
  misc_RNA (1)...(19): siRNA sense strand
gcacuugagcucuucuuua

SEQ ID NO: 2108991 - RNA, 19 nt, Homo sapiens
  misc_RNA (1)...(19): siRNA sense strand
gcacgcaguuggagaaugu

SEQ ID NO: 2108992 - RNA, 19 nt, Homo sapiens
  misc_RNA (1)...(19): siRNA sense strand
gaaguacggcguccaguuu

SEQ ID NO: 2108993 - RNA, 19 nt, Homo sapiens
  misc_RNA (1)...(19): siRNA sense strand
gacagaagcugcggaagaa

SEQ ID NO: 2108994 - RNA, 19 nt, Homo sapiens
  misc_RNA (1)...(19): siRNA sense strand
gcacacggaaggaguauuu

SEQ ID NO: 2108995 - RNA, 19 nt, Homo sapiens
  misc_RNA (1)...(19): siRNA sense strand
gaaauggacacguaugcua

SEQ ID NO: 2108996 - RNA, 19 nt, Homo sapiens
  misc_RNA (1)...(19): siRNA sense strand
gugcugaccugcaucauga

SEQ ID NO: 2108997 - RNA, 19 nt, Homo sapiens
  misc_RNA (1)...(19): siRNA sense strand
ggguaaaucuucagaggaa

SEQ ID NO: 2108998 - RNA, 19 nt, Homo sapiens
  misc_RNA (1)...(19): siRNA sense strand
ccagagagccuacagaaug

SEQ ID NO: 2108999 - RNA, 19 nt, Homo sapiens
  misc_RNA (1)...(19): siRNA sense strand
ccaggcugcuccuccauua

SEQ ID NO: 2109000 - RNA, 19 nt, Homo sapiens
  misc_RNA (1)...(19): siRNA sense strand
ucgcagagguugucaguga

SEQ ID NO: 2109001 - RNA, 19 nt, Homo sapiens
  misc_RNA (1)...(19): siRNA sense strand
ugaccuggcuacccgguua

SEQ ID NO: 2109002 - RNA, 19 nt, Homo sapiens
  misc_RNA (1)...(19): siRNA sense strand
uaacucaccuagcaucuuc

SEQ ID NO: 2109003 - RNA, 19 nt, Homo sapiens
  misc_RNA (1)...(19): siRNA sense strand
ggagugagaagcucuuuga

SEQ ID NO: 2109004 - RNA, 19 nt, Homo sapiens
  misc_RNA (1)...(19): siRNA sense strand
ucacucggcucauucagaa

SEQ ID NO: 2109005 - RNA, 19 nt, Homo sapiens
  misc_RNA (1)...(19): siRNA sense strand
gcaccuguauucagucaau

SEQ ID NO: 2109006 - RNA, 19 nt, Homo sapiens
  misc_RNA (1)...(19): siRNA sense strand
ccaaggagaagagcaaaua

SEQ ID NO: 2109007 - RNA, 19 nt, Homo sapiens
  misc_RNA (1)...(19): siRNA sense strand
caacauaagcaacuacuuc

SEQ ID NO: 2109008 - RNA, 19 nt, Homo sapiens
  misc_RNA (1)...(19): siRNA sense strand
gaagcucuuugaaggugua

SEQ ID NO: 2109009 - RNA, 19 nt, Homo sapiens
  misc_RNA (1)...(19): siRNA sense strand
guacauguccagcauaguu

SEQ ID NO: 2109010 - RNA, 19 nt, Homo sapiens
  misc_RNA (1)...(19): siRNA sense strand
gagaagagcaaauacaagu

SEQ ID NO: 2109011 - RNA, 19 nt, Homo sapiens
  misc_RNA (1)...(19): siRNA sense strand
gaagagcaaauacaaguuc

SEQ ID NO: 2109012 - RNA, 19 nt, Homo sapiens
  misc_RNA (1)...(19): siRNA sense strand
ggacagagacaagagaaga

SEQ ID NO: 2109013 - RNA, 19 nt, Homo sapiens
  misc_RNA (1)...(19): siRNA sense strand
cacuugagcucuucuuuau

SEQ ID NO: 2109014 - RNA, 19 nt, Homo sapiens
  misc_RNA (1)...(19): siRNA sense strand
ccacuugccucccauacug

SEQ ID NO: 2109015 - RNA, 19 nt, Homo sapiens
  misc_RNA (1)...(19): siRNA sense strand
gacacuaacucaccuagca

SEQ ID NO: 2109016 - RNA, 19 nt, Homo sapiens
  misc_RNA (1)...(19): siRNA sense strand
gaggaagaguugugcaauc

SEQ ID NO: 2109017 - RNA, 19 nt, Homo sapiens
  misc_RNA (1)...(19): siRNA sense strand
gcuccagucucuccaaugu

SEQ ID NO: 2109018 - RNA, 19 nt, Homo sapiens
  misc_RNA (1)...(19): siRNA sense strand
ggacaccuguggcaucuac

SEQ ID NO: 2109019 - RNA, 19 nt, Homo sapiens
  misc_RNA (1)...(19): siRNA sense strand
ugaaggauguggugaacug

SEQ ID NO: 2109020 - RNA, 19 nt, Homo sapiens
  misc_RNA (1)...(19): siRNA sense strand
cagcaggcgugaugcacua

SEQ ID NO: 2109021 - RNA, 19 nt, Homo sapiens
  misc_RNA (1)...(19): siRNA sense strand
ccucaggccuuacccagaa

SEQ ID NO: 2109022 - RNA, 19 nt, Homo sapiens
  misc_RNA (1)...(19): siRNA sense strand
ugaagggccugcugagugu

SEQ ID NO: 2109023 - RNA, 19 nt, Homo sapiens
  misc_RNA (1)...(19): siRNA sense strand
ggaucgaccucaucuuugg

SEQ ID NO: 2109024 - RNA, 19 nt, Homo sapiens
  misc_RNA (1)...(19): siRNA sense strand
gaauguauacuucuacgau

SEQ ID NO: 2109025 - RNA, 19 nt, Homo sapiens
  misc_RNA (1)...(19): siRNA sense strand
guggagaccugggauguga

SEQ ID NO: 2109026 - RNA, 19 nt, Homo sapiens
  misc_RNA (1)...(19): siRNA sense strand
ccacacagaauguauacuu

SEQ ID NO: 2109027 - RNA, 19 nt, Homo sapiens
  misc_RNA (1)...(19): siRNA sense strand
ggaauucagcgccuucuuc

SEQ ID NO: 2109028 - RNA, 19 nt, Homo sapiens
  misc_RNA (1)...(19): siRNA sense strand
caacuucgaguacuugaug

SEQ ID NO: 2109029 - RNA, 19 nt, Homo sapiens
  misc_RNA (1)...(19): siRNA sense strand
ccaacuacuuccucaacuu

SEQ ID NO: 2109030 - RNA, 19 nt, Homo sapiens
  misc_RNA (1)...(19): siRNA sense strand
gcuaugacaugcuuaugag

SEQ ID NO: 2109031 - RNA, 19 nt, Homo sapiens
  misc_RNA (1)...(19): siRNA sense strand
gcaaucugcucaccaacgu

SEQ ID NO: 2109032 - RNA, 19 nt, Homo sapiens
  misc_RNA (1)...(19): siRNA sense strand
ugaagcagguccagcugaa

SEQ ID NO: 2109033 - RNA, 19 nt, Homo sapiens
  misc_RNA (1)...(19): siRNA sense strand
gaccaaagaggccaaagug

SEQ ID NO: 2109034 - RNA, 19 nt, Homo sapiens
  misc_RNA (1)...(19): siRNA sense strand
gacagaggacuuuguguug

SEQ ID NO: 2109035 - RNA, 19 nt, Homo sapiens
  misc_RNA (1)...(19): siRNA sense strand
gcacugagcgcguggaaac

SEQ ID NO: 2109036 - RNA, 19 nt, Homo sapiens
  misc_RNA (1)...(19): siRNA sense strand
ggacugggagaaccaaaga

SEQ ID NO: 2109037 - RNA, 19 nt, Homo sapiens
  misc_RNA (1)...(19): siRNA sense strand
guucagcacuugagcucuu

SEQ ID NO: 2109038 - RNA, 19 nt, Homo sapiens
  misc_RNA (1)...(19): siRNA sense strand
gggcaucggcuaugauuuc

SEQ ID NO: 2109039 - RNA, 19 nt, Homo sapiens
  misc_RNA (1)...(19): siRNA sense strand
gggccuggcuucaccuuuc

SEQ ID NO: 2109040 - RNA, 19 nt, Homo sapiens
  misc_RNA (1)...(19): siRNA sense strand
ugaccugcaucaugaguga

SEQ ID NO: 2109041 - RNA, 19 nt, Homo sapiens
  misc_RNA (1)...(19): siRNA sense strand
cuacuuccauguccuuaau

SEQ ID NO: 2109042 - RNA, 19 nt, Homo sapiens
  misc_RNA (1)...(19): siRNA sense strand
cacauucccuggaccuauu

SEQ ID NO: 2109043 - RNA, 19 nt, Homo sapiens
  misc_RNA (1)...(19): siRNA sense strand
cccucaaugucuucuauua

SEQ ID NO: 2109044 - RNA, 19 nt, Homo sapiens
  misc_RNA (1)...(19): siRNA sense strand
gguaggcgauguggugcua

SEQ ID NO: 2109045 - RNA, 19 nt, Homo sapiens
  misc_RNA (1)...(19): siRNA sense strand
gcacugggccguguaucaa

SEQ ID NO: 2109046 - RNA, 19 nt, Homo sapiens
  misc_RNA (1)...(19): siRNA sense strand
gaacuugacauggcugugu

SEQ ID NO: 2109047 - RNA, 19 nt, Homo sapiens
  misc_RNA (1)...(19): siRNA sense strand
gcaucaggguggucuguca

SEQ ID NO: 2109048 - RNA, 19 nt, Homo sapiens
  misc_RNA (1)...(19): siRNA sense strand
gauggaaagcugcuauuca

SEQ ID NO: 2109049 - RNA, 19 nt, Homo sapiens
  misc_RNA (1)...(19): siRNA sense strand
guggaucgaccucaucuuu

SEQ ID NO: 2109050 - RNA, 19 nt, Homo sapiens
  misc_RNA (1)...(19): siRNA sense strand
gcauuugcucuucaacuuu

SEQ ID NO: 2109051 - RNA, 19 nt, Homo sapiens
  misc_RNA (1)...(19): siRNA sense strand
ugacagaggacuuuguguu

SEQ ID NO: 2109052 - RNA, 19 nt, Homo sapiens
  misc_RNA (1)...(19): siRNA sense strand
cagggaccauugacaaguu

SEQ ID NO: 2109053 - RNA, 19 nt, Homo sapiens
  misc_RNA (1)...(19): siRNA sense strand
caggaacuguggagugaga

SEQ ID NO: 2109054 - RNA, 19 nt, Homo sapiens
  misc_RNA (1)...(19): siRNA sense strand
aagaagagcaucucacugu

SEQ ID NO: 2109055 - RNA, 19 nt, Homo sapiens
  misc_RNA (1)...(19): siRNA sense strand
gaaaggagaacgggcagau

SEQ ID NO: 2109056 - RNA, 19 nt, Homo sapiens
  misc_RNA (1)...(19): siRNA sense strand
cagcagcggcucaggguuu

SEQ ID NO: 2109057 - RNA, 19 nt, Homo sapiens
  misc_RNA (1)...(19): siRNA sense strand
caguaggccuggcaccaaa

SEQ ID NO: 2109058 - RNA, 19 nt, Homo sapiens
  misc_RNA (1)...(19): siRNA sense strand
uggacgaacucaaggcauu

SEQ ID NO: 2109059 - RNA, 19 nt, Homo sapiens
  misc_RNA (1)...(19): siRNA sense strand
gcucaucccggaauucuuc

SEQ ID NO: 2109060 - RNA, 19 nt, Homo sapiens
  misc_RNA (1)...(19): siRNA sense strand
gcucaagcucuucaucauu

SEQ ID NO: 2109061 - RNA, 19 nt, Homo sapiens
  misc_RNA (1)...(19): siRNA sense strand
uggaaugccugcuaugaca

SEQ ID NO: 2109062 - RNA, 19 nt, Homo sapiens
  misc_RNA (1)...(19): siRNA sense strand
gggccugguucucccauug

SEQ ID NO: 2109063 - RNA, 19 nt, Homo sapiens
  misc_RNA (1)...(19): siRNA sense strand
cugcacauccuccaacuaa

SEQ ID NO: 2109064 - RNA, 19 nt, Homo sapiens
  misc_RNA (1)...(19): siRNA sense strand
gcugaaggccuuuguaggu

SEQ ID NO: 2109065 - RNA, 19 nt, Homo sapiens
  misc_RNA (1)...(19): siRNA sense strand
ucucaaggcuaccuaagca

SEQ ID NO: 2109066 - RNA, 19 nt, Homo sapiens
  misc_RNA (1)...(19): siRNA sense strand
agacagaagcugcggaaga

SEQ ID NO: 2109067 - RNA, 19 nt, Homo sapiens
  misc_RNA (1)...(19): siRNA sense strand
gcacauccuccaacuaaac

SEQ ID NO: 2109068 - RNA, 19 nt, Homo sapiens
  misc_RNA (1)...(19): siRNA sense strand
uugcacgccuggacacuaa

SEQ ID NO: 2109069 - RNA, 19 nt, Homo sapiens
  misc_RNA (1)...(19): siRNA sense strand
gagggcaucggcuaugauu

SEQ ID NO: 2109070 - RNA, 19 nt, Homo sapiens
  misc_RNA (1)...(19): siRNA sense strand
gcuacauccugcuggaaga

SEQ ID NO: 2109071 - RNA, 19 nt, Homo sapiens
  misc_RNA (1)...(19): siRNA sense strand
caaagaccaagcaagaguu

SEQ ID NO: 2109072 - RNA, 19 nt, Homo sapiens
  misc_RNA (1)...(19): siRNA sense strand
gguugucagugauggugua

SEQ ID NO: 2109073 - RNA, 19 nt, Homo sapiens
  misc_RNA (1)...(19): siRNA sense strand
gcaucucacuguccucucu

SEQ ID NO: 2109074 - RNA, 19 nt, Homo sapiens
  misc_RNA (1)...(19): siRNA sense strand
ggcauuaucagcaacuuug

SEQ ID NO: 2109075 - RNA, 19 nt, Homo sapiens
  misc_RNA (1)...(19): siRNA sense strand
cggagcggcuguacgaguu

SEQ ID NO: 2109076 - RNA, 19 nt, Homo sapiens
  misc_RNA (1)...(19): siRNA sense strand
gaccuacaaugaccugucu

SEQ ID NO: 2109077 - RNA, 19 nt, Homo sapiens
  misc_RNA (1)...(19): siRNA sense strand
caacuacuuccucaacuuc

SEQ ID NO: 2109078 - RNA, 19 nt, Homo sapiens
  misc_RNA (1)...(19): siRNA sense strand
cucaagcucuucaucauuc

SEQ ID NO: 2109079 - RNA, 19 nt, Homo sapiens
  misc_RNA (1)...(19): siRNA sense strand
ggaggcagcagaacuggau

SEQ ID NO: 2109080 - RNA, 19 nt, Homo sapiens
  misc_RNA (1)...(19): siRNA sense strand
gcuaugugcucuccaagcu

SEQ ID NO: 2109081 - RNA, 19 nt, Homo sapiens
  misc_RNA (1)...(19): siRNA sense strand
ggaaggaguauuugaccau

SEQ ID NO: 2109082 - RNA, 19 nt, Homo sapiens
  misc_RNA (1)...(19): siRNA sense strand
gcugucauccgcacauuau

SEQ ID NO: 2109083 - RNA, 19 nt, Homo sapiens
  misc_RNA (1)...(19): siRNA sense strand
acacgcaggugcugucauc

SEQ ID NO: 2109084 - RNA, 19 nt, Homo sapiens
  misc_RNA (1)...(19): siRNA sense strand
gcaagaguuuagggacaga

SEQ ID NO: 2109085 - RNA, 19 nt, Homo sapiens
  misc_RNA (1)...(19): siRNA sense strand
ucacuggccuugucaauuu

SEQ ID NO: 2109086 - RNA, 19 nt, Homo sapiens
  misc_RNA (1)...(19): siRNA sense strand
ggcaacaccugcuucauga

SEQ ID NO: 2109087 - RNA, 19 nt, Homo sapiens
  misc_RNA (1)...(19): siRNA sense strand
ggauguagaugcugcuuuc

SEQ ID NO: 2109088 - RNA, 19 nt, Homo sapiens
  misc_RNA (1)...(19): siRNA sense strand
gaccagggauggaaacuuc

SEQ ID NO: 2109089 - RNA, 19 nt, Homo sapiens
  misc_RNA (1)...(19): siRNA sense strand
cagaagaggugauugucaa

SEQ ID NO: 2109090 - RNA, 19 nt, Homo sapiens
  misc_RNA (1)...(19): siRNA sense strand
gcagaaacccugggaaaga

SEQ ID NO: 2109091 - RNA, 19 nt, Homo sapiens
  misc_RNA (1)...(19): siRNA sense strand
gacagggucucgauauguu

SEQ ID NO: 2109092 - RNA, 19 nt, Homo sapiens
  misc_RNA (1)...(19): siRNA sense strand
ggacaccacuaguaagaag

SEQ ID NO: 2109093 - RNA, 19 nt, Homo sapiens
  misc_RNA (1)...(19): siRNA sense strand
gcagaaggaucgagcaaac

SEQ ID NO: 2109094 - RNA, 19 nt, Homo sapiens
  misc_RNA (1)...(19): siRNA sense strand
aagaaugacucguaugaga

SEQ ID NO: 2109095 - RNA, 19 nt, Homo sapiens
  misc_RNA (1)...(19): siRNA sense strand
ccaguggaauuucuucuga

SEQ ID NO: 2109096 - RNA, 19 nt, Homo sapiens
  misc_RNA (1)...(19): siRNA sense strand
gagcagaaacccugggaaa

SEQ ID NO: 2109097 - RNA, 19 nt, Homo sapiens
  misc_RNA (1)...(19): siRNA sense strand
gaugaggaaugacucuuuc

SEQ ID NO: 2109098 - RNA, 19 nt, Homo sapiens
  misc_RNA (1)...(19): siRNA sense strand
gugcacgccugcccaauga

SEQ ID NO: 2109099 - RNA, 19 nt, Homo sapiens
  misc_RNA (1)...(19): siRNA sense strand
guaagaagaagcagaagga

SEQ ID NO: 2109100 - RNA, 19 nt, Homo sapiens
  misc_RNA (1)...(19): siRNA sense strand
gaugcugcuuucacagaua

SEQ ID NO: 2109101 - RNA, 19 nt, Homo sapiens
  misc_RNA (1)...(19): siRNA sense strand
ccucagaguuggcuaagga

SEQ ID NO: 2109102 - RNA, 19 nt, Homo sapiens
  misc_RNA (1)...(19): siRNA sense strand
ugucuucuaugcugagaua

SEQ ID NO: 2109103 - RNA, 19 nt, Homo sapiens
  misc_RNA (1)...(19): siRNA sense strand
gagcaaaccaggagagcaa

SEQ ID NO: 2109104 - RNA, 19 nt, Homo sapiens
  misc_RNA (1)...(19): siRNA sense strand
ucaaugacuugguggaguu

SEQ ID NO: 2109105 - RNA, 19 nt, Homo sapiens
  misc_RNA (1)...(19): siRNA sense strand
ggacuucacgcucaucuuc

SEQ ID NO: 2109106 - RNA, 19 nt, Homo sapiens
  misc_RNA (1)...(19): siRNA sense strand
gccaaggucuccaucacuu

SEQ ID NO: 2109107 - RNA, 19 nt, Homo sapiens
  misc_RNA (1)...(19): siRNA sense strand
ggcacaagaugaggaauga

SEQ ID NO: 2109108 - RNA, 19 nt, Homo sapiens
  misc_RNA (1)...(19): siRNA sense strand
ucaagaaugacucguauga

SEQ ID NO: 2109109 - RNA, 19 nt, Homo sapiens
  misc_RNA (1)...(19): siRNA sense strand
gcaggaguuuguguuggua

SEQ ID NO: 2109110 - RNA, 19 nt, Homo sapiens
  misc_RNA (1)...(19): siRNA sense strand
acacugcucuccacagguu

SEQ ID NO: 2109111 - RNA, 19 nt, Homo sapiens
  misc_RNA (1)...(19): siRNA sense strand
gaggacaccacuaguaaga

SEQ ID NO: 2109112 - RNA, 19 nt, Homo sapiens
  misc_RNA (1)...(19): siRNA sense strand
uggcggagguaauuaagaa

SEQ ID NO: 2109113 - RNA, 19 nt, Homo sapiens
  misc_RNA (1)...(19): siRNA sense strand
gugacaagaucaaugacuu

SEQ ID NO: 2109114 - RNA, 19 nt, Homo sapiens
  misc_RNA (1)...(19): siRNA sense strand
ggagcugggugacgacugu

SEQ ID NO: 2109115 - RNA, 19 nt, Homo sapiens
  misc_RNA (1)...(19): siRNA sense strand
gaggaguuguugcucgauu

SEQ ID NO: 2109116 - RNA, 19 nt, Homo sapiens
  misc_RNA (1)...(19): siRNA sense strand
gaaccuggcguuugucaag

SEQ ID NO: 2109117 - RNA, 19 nt, Homo sapiens
  misc_RNA (1)...(19): siRNA sense strand
acacagagaccguggauuc

SEQ ID NO: 2109118 - RNA, 19 nt, Homo sapiens
  misc_RNA (1)...(19): siRNA sense strand
ccacuggccugaccacaag

SEQ ID NO: 2109119 - RNA, 19 nt, Homo sapiens
  misc_RNA (1)...(19): siRNA sense strand
gagcugcuauccucagagu

SEQ ID NO: 2109120 - RNA, 19 nt, Homo sapiens
  misc_RNA (1)...(19): siRNA sense strand
cagaaacccugggaaagau

SEQ ID NO: 2109121 - RNA, 19 nt, Homo sapiens
  misc_RNA (1)...(19): siRNA sense strand
ggugguagcugaggaagca

SEQ ID NO: 2109122 - RNA, 19 nt, Homo sapiens
  misc_RNA (1)...(19): siRNA sense strand
aggcugagaucaacuacaa

SEQ ID NO: 2109123 - RNA, 19 nt, Homo sapiens
  misc_RNA (1)...(19): siRNA sense strand
gaacagcgucauucagucu

SEQ ID NO: 2109124 - RNA, 19 nt, Homo sapiens
  misc_RNA (1)...(19): siRNA sense strand
gcucaagcgcuucuccuuu

SEQ ID NO: 2109125 - RNA, 19 nt, Homo sapiens
  misc_RNA (1)...(19): siRNA sense strand
gcagugcaccuucuguuuc

SEQ ID NO: 2109126 - RNA, 19 nt, Homo sapiens
  misc_RNA (1)...(19): siRNA sense strand
agaacaagcccuacacaga

SEQ ID NO: 2109127 - RNA, 19 nt, Homo sapiens
  misc_RNA (1)...(19): siRNA sense strand
ggacacagggcuagacagu

SEQ ID NO: 2109128 - RNA, 19 nt, Homo sapiens
  misc_RNA (1)...(19): siRNA sense strand
gaccaaagaggaguuguug

SEQ ID NO: 2109129 - RNA, 19 nt, Homo sapiens
  misc_RNA (1)...(19): siRNA sense strand
guaccagcauccaagugaa

SEQ ID NO: 2109130 - RNA, 19 nt, Homo sapiens
  misc_RNA (1)...(19): siRNA sense strand
uggaauuucuucugagaug

SEQ ID NO: 2109131 - RNA, 19 nt, Homo sapiens
  misc_RNA (1)...(19): siRNA sense strand
cagagaccguggauucaga

SEQ ID NO: 2109132 - RNA, 19 nt, Homo sapiens
  misc_RNA (1)...(19): siRNA sense strand
gggcucagaggagaauuua

SEQ ID NO: 2109133 - RNA, 19 nt, Homo sapiens
  misc_RNA (1)...(19): siRNA sense strand
gcagaagaggugauuguca

SEQ ID NO: 2109134 - RNA, 19 nt, Homo sapiens
  misc_RNA (1)...(19): siRNA sense strand
gccagguugugacgcguua

SEQ ID NO: 2109135 - RNA, 19 nt, Homo sapiens
  misc_RNA (1)...(19): siRNA sense strand
aagaggagcagaccaaaga

SEQ ID NO: 2109136 - RNA, 19 nt, Homo sapiens
  misc_RNA (1)...(19): siRNA sense strand
gcuggaaugugcugaggau

SEQ ID NO: 2109137 - RNA, 19 nt, Homo sapiens
  misc_RNA (1)...(19): siRNA sense strand
acagcaagcccaucaaguu

SEQ ID NO: 2109138 - RNA, 19 nt, Homo sapiens
  misc_RNA (1)...(19): siRNA sense strand
cccaggaguucauggcuuu

SEQ ID NO: 2109139 - RNA, 19 nt, Homo sapiens
  misc_RNA (1)...(19): siRNA sense strand
caacuacaacaacccacua

SEQ ID NO: 2109140 - RNA, 19 nt, Homo sapiens
  misc_RNA (1)...(19): siRNA sense strand
ggaggaagaggaagagaag

SEQ ID NO: 2109141 - RNA, 19 nt, Homo sapiens
  misc_RNA (1)...(19): siRNA sense strand
ggacaccucaagaguacuu

SEQ ID NO: 2109142 - RNA, 19 nt, Homo sapiens
  misc_RNA (1)...(19): siRNA sense strand
gcccagcuacgaucuauau

SEQ ID NO: 2109143 - RNA, 19 nt, Homo sapiens
  misc_RNA (1)...(19): siRNA sense strand
gcugcuauccucagaguug

SEQ ID NO: 2109144 - RNA, 19 nt, Homo sapiens
  misc_RNA (1)...(19): siRNA sense strand
ggaggcagagugcagaaga

SEQ ID NO: 2109145 - RNA, 19 nt, Homo sapiens
  misc_RNA (1)...(19): siRNA sense strand
acauggaggagguggauua

SEQ ID NO: 2109146 - RNA, 19 nt, Homo sapiens
  misc_RNA (1)...(19): siRNA sense strand
gacgagagccagguuguga

SEQ ID NO: 2109147 - RNA, 19 nt, Homo sapiens
  misc_RNA (1)...(19): siRNA sense strand
ggaaugugcugaggaucca

SEQ ID NO: 2109148 - RNA, 19 nt, Homo sapiens
  misc_RNA (1)...(19): siRNA sense strand
caagugaagcuaugaaugc

SEQ ID NO: 2109149 - RNA, 19 nt, Homo sapiens
  misc_RNA (1)...(19): siRNA sense strand
gguaccagcauccaaguga

SEQ ID NO: 2109150 - RNA, 19 nt, Homo sapiens
  misc_RNA (1)...(19): siRNA sense strand
gauacgcuccucugcuuug

SEQ ID NO: 2109151 - RNA, 19 nt, Homo sapiens
  misc_RNA (1)...(19): siRNA sense strand
ggaggaggaggaagaggaa

SEQ ID NO: 2109152 - RNA, 19 nt, Homo sapiens
  misc_RNA (1)...(19): siRNA sense strand
gaaacccugggaaagauga

SEQ ID NO: 2109153 - RNA, 19 nt, Homo sapiens
  misc_RNA (1)...(19): siRNA sense strand
gagcagugcaccuucuguu

SEQ ID NO: 2109154 - RNA, 19 nt, Homo sapiens
  misc_RNA (1)...(19): siRNA sense strand
ggcuggcgcuuguuugaug

SEQ ID NO: 2109155 - RNA, 19 nt, Homo sapiens
  misc_RNA (1)...(19): siRNA sense strand
ccggugcccuugccacaaa

SEQ ID NO: 2109156 - RNA, 19 nt, Homo sapiens
  misc_RNA (1)...(19): siRNA sense strand
gaaugacucguaugagaag

SEQ ID NO: 2109157 - RNA, 19 nt, Homo sapiens
  misc_RNA (1)...(19): siRNA sense strand
gcacagugacaacgguaga

SEQ ID NO: 2109158 - RNA, 19 nt, Homo sapiens
  misc_RNA (1)...(19): siRNA sense strand
cagggacaccucaagagua

SEQ ID NO: 2109159 - RNA, 19 nt, Homo sapiens
  misc_RNA (1)...(19): siRNA sense strand
gcagggacaccucaagagu

SEQ ID NO: 2109160 - RNA, 19 nt, Homo sapiens
  misc_RNA (1)...(19): siRNA sense strand
cagugcaccuucuguuuca

SEQ ID NO: 2109161 - RNA, 19 nt, Homo sapiens
  misc_RNA (1)...(19): siRNA sense strand
gcucucgucuggcggaaca

SEQ ID NO: 2109162 - RNA, 19 nt, Homo sapiens
  misc_RNA (1)...(19): siRNA sense strand
gcauggccuuggagucuca

SEQ ID NO: 2109163 - RNA, 19 nt, Homo sapiens
  misc_RNA (1)...(19): siRNA sense strand
cugauacgcuccucugcuu

SEQ ID NO: 2109164 - RNA, 19 nt, Homo sapiens
  misc_RNA (1)...(19): siRNA sense strand
gacaucugccuucguaaga

SEQ ID NO: 2109165 - RNA, 19 nt, Homo sapiens
  misc_RNA (1)...(19): siRNA sense strand
uggaggacaccacuaguaa

SEQ ID NO: 2109166 - RNA, 19 nt, Homo sapiens
  misc_RNA (1)...(19): siRNA sense strand
uugguggaguucccuguua

SEQ ID NO: 2109167 - RNA, 19 nt, Homo sapiens
  misc_RNA (1)...(19): siRNA sense strand
gcauccaagugaagcuaug

SEQ ID NO: 2109168 - RNA, 19 nt, Homo sapiens
  misc_RNA (1)...(19): siRNA sense strand
gaguaaggccagccaguuc

SEQ ID NO: 2109169 - RNA, 19 nt, Homo sapiens
  misc_RNA (1)...(19): siRNA sense strand
uggcguuugucaagaauga

SEQ ID NO: 2109170 - RNA, 19 nt, Homo sapiens
  misc_RNA (1)...(19): siRNA sense strand
cuaguaagaagaagcagaa

SEQ ID NO: 2109171 - RNA, 19 nt, Homo sapiens
  misc_RNA (1)...(19): siRNA sense strand
ccaaugaucguagcaguca

SEQ ID NO: 2109172 - RNA, 19 nt, Homo sapiens
  misc_RNA (1)...(19): siRNA sense strand
cucaagcgcuucuccuuuc

SEQ ID NO: 2109173 - RNA, 19 nt, Homo sapiens
  misc_RNA (1)...(19): siRNA sense strand
ggagauccuaggaaagaga

SEQ ID NO: 2109174 - RNA, 19 nt, Homo sapiens
  misc_RNA (1)...(19): siRNA sense strand
cacuggccuugucaauuua

SEQ ID NO: 2109175 - RNA, 19 nt, Homo sapiens
  misc_RNA (1)...(19): siRNA sense strand
gaugaacagcuuugcauac

SEQ ID NO: 2109176 - RNA, 19 nt, Homo sapiens
  misc_RNA (1)...(19): siRNA sense strand
gguugaggcugaugaacag

SEQ ID NO: 2109177 - RNA, 19 nt, Homo sapiens
  misc_RNA (1)...(19): siRNA sense strand
uguagaugcugcuuucaca

SEQ ID NO: 2109178 - RNA, 19 nt, Homo sapiens
  misc_RNA (1)...(19): siRNA sense strand
cgaucuauaugcugucauc

SEQ ID NO: 2109179 - RNA, 19 nt, Homo sapiens
  misc_RNA (1)...(19): siRNA sense strand
cugagcaaguucugcauug

SEQ ID NO: 2109180 - RNA, 19 nt, Homo sapiens
  misc_RNA (1)...(19): siRNA sense strand
ccacugcgagcgaaguauu

SEQ ID NO: 2109181 - RNA, 19 nt, Homo sapiens
  misc_RNA (1)...(19): siRNA sense strand
cccaguucuucaucuauaa

SEQ ID NO: 2109182 - RNA, 19 nt, Homo sapiens
  misc_RNA (1)...(19): siRNA sense strand
cagcauccacuccucaaga

SEQ ID NO: 2109183 - RNA, 19 nt, Homo sapiens
  misc_RNA (1)...(19): siRNA sense strand
gaugacagcacagugacaa

SEQ ID NO: 2109184 - RNA, 19 nt, Homo sapiens
  misc_RNA (1)...(19): siRNA sense strand
aagcgcuucuccuuucgua

SEQ ID NO: 2109185 - RNA, 19 nt, Homo sapiens
  misc_RNA (1)...(19): siRNA sense strand
caacgacgccuacgacuuu

SEQ ID NO: 2109186 - RNA, 19 nt, Homo sapiens
  misc_RNA (1)...(19): siRNA sense strand
gcaaguauggcaucaagua

SEQ ID NO: 2109187 - RNA, 19 nt, Homo sapiens
  misc_RNA (1)...(19): siRNA sense strand
ucaaguauauccucaaugu

SEQ ID NO: 2109188 - RNA, 19 nt, Homo sapiens
  misc_RNA (1)...(19): siRNA sense strand
gccagaaccucucccaguu

SEQ ID NO: 2109189 - RNA, 19 nt, Homo sapiens
  misc_RNA (1)...(19): siRNA sense strand
gaagcccgcuccaagaagu

SEQ ID NO: 2109190 - RNA, 19 nt, Homo sapiens
  misc_RNA (1)...(19): siRNA sense strand
caacaucucgcccaacuuc

SEQ ID NO: 2109191 - RNA, 19 nt, Homo sapiens
  misc_RNA (1)...(19): siRNA sense strand
caaggugguuucaacaagu

SEQ ID NO: 2109192 - RNA, 19 nt, Homo sapiens
  misc_RNA (1)...(19): siRNA sense strand
caucaaguauauccucaau

SEQ ID NO: 2109193 - RNA, 19 nt, Homo sapiens
  misc_RNA (1)...(19): siRNA sense strand
ccaaggugguuucaacaag

SEQ ID NO: 2109194 - RNA, 19 nt, Homo sapiens
  misc_RNA (1)...(19): siRNA sense strand
ggcaucagccgcucaguga

SEQ ID NO: 2109195 - RNA, 19 nt, Homo sapiens
  misc_RNA (1)...(19): siRNA sense strand
aguauggcaucaaguauau

SEQ ID NO: 2109196 - RNA, 19 nt, Homo sapiens
  misc_RNA (1)...(19): siRNA sense strand
ggacgugcucggcaaguau

SEQ ID NO: 2109197 - RNA, 19 nt, Homo sapiens
  misc_RNA (1)...(19): siRNA sense strand
ccaccgugcugcucuacga

SEQ ID NO: 2109198 - RNA, 19 nt, Homo sapiens
  misc_RNA (1)...(19): siRNA sense strand
gcggcgaguucaccuacaa

SEQ ID NO: 2109199 - RNA, 19 nt, Homo sapiens
  misc_RNA (1)...(19): siRNA sense strand
aagaugaaccugucacuca

SEQ ID NO: 2109200 - RNA, 19 nt, Homo sapiens
  misc_RNA (1)...(19): siRNA sense strand
gcagugccaccgagucaga

SEQ ID NO: 2109201 - RNA, 19 nt, Homo sapiens
  misc_RNA (1)...(19): siRNA sense strand
agaugaaccugucacucaa

SEQ ID NO: 2109202 - RNA, 19 nt, Homo sapiens
  misc_RNA (1)...(19): siRNA sense strand
gacgaagcccgcuccaaga

SEQ ID NO: 2109203 - RNA, 19 nt, Homo sapiens
  misc_RNA (1)...(19): siRNA sense strand
aaguauggcaucaaguaua

SEQ ID NO: 2109204 - RNA, 19 nt, Homo sapiens
  misc_RNA (1)...(19): siRNA sense strand
cggcaaguauggcaucaag

SEQ ID NO: 2109205 - RNA, 19 nt, Homo sapiens
  misc_RNA (1)...(19): siRNA sense strand
caaugucacacccaaccua

SEQ ID NO: 2109206 - RNA, 19 nt, Homo sapiens
  misc_RNA (1)...(19): siRNA sense strand
aaguauauccucaauguca

SEQ ID NO: 2109207 - RNA, 19 nt, Homo sapiens
  misc_RNA (1)...(19): siRNA sense strand
caaguauggcaucaaguau

SEQ ID NO: 2109208 - RNA, 19 nt, Homo sapiens
  misc_RNA (1)...(19): siRNA sense strand
gacggucacuguggccuau

SEQ ID NO: 2109209 - RNA, 19 nt, Homo sapiens
  misc_RNA (1)...(19): siRNA sense strand
gaggccaucagcuucauug

SEQ ID NO: 2109210 - RNA, 19 nt, Homo sapiens
  misc_RNA (1)...(19): siRNA sense strand
cacaaccuguucccacuca

SEQ ID NO: 2109211 - RNA, 19 nt, Homo sapiens
  misc_RNA (1)...(19): siRNA sense strand
ccaccaaccacaaccuguu

SEQ ID NO: 2109212 - RNA, 19 nt, Homo sapiens
  misc_RNA (1)...(19): siRNA sense strand
aaggugguuucaacaaguu

SEQ ID NO: 2109213 - RNA, 19 nt, Homo sapiens
  misc_RNA (1)...(19): siRNA sense strand
gauccugcccuaccucuac

SEQ ID NO: 2109214 - RNA, 19 nt, Homo sapiens
  misc_RNA (1)...(19): siRNA sense strand
ccuccaaggugguuucaac

SEQ ID NO: 2109215 - RNA, 19 nt, Homo sapiens
  misc_RNA (1)...(19): siRNA sense strand
uggacgugcucggcaagua

SEQ ID NO: 2109216 - RNA, 19 nt, Homo sapiens
  misc_RNA (1)...(19): siRNA sense strand
gguuucaacaaguuucaaa

SEQ ID NO: 2109217 - RNA, 19 nt, Homo sapiens
  misc_RNA (1)...(19): siRNA sense strand
ucgcccaacuucaacuuca

SEQ ID NO: 2109218 - RNA, 19 nt, Homo sapiens
  misc_RNA (1)...(19): siRNA sense strand
gcagaagaugaaccuguca

SEQ ID NO: 2109219 - RNA, 19 nt, Homo sapiens
  misc_RNA (1)...(19): siRNA sense strand
cagcagugccaccgaguca

SEQ ID NO: 2109220 - RNA, 19 nt, Homo sapiens
  misc_RNA (1)...(19): siRNA sense strand
aaccuguucccacucaaua

SEQ ID NO: 2109221 - RNA, 19 nt, Homo sapiens
  misc_RNA (1)...(19): siRNA sense strand
caaccuguucccacucaau

SEQ ID NO: 2109222 - RNA, 19 nt, Homo sapiens
  misc_RNA (1)...(19): siRNA sense strand
gccuacgacuuugucaaga

SEQ ID NO: 2109223 - RNA, 19 nt, Homo sapiens
  misc_RNA (1)...(19): siRNA sense strand
caucagcuucauugacgaa

SEQ ID NO: 2109224 - RNA, 19 nt, Homo sapiens
  misc_RNA (1)...(19): siRNA sense strand
ucaacgacgccuacgacuu

SEQ ID NO: 2109225 - RNA, 19 nt, Homo sapiens
  misc_RNA (1)...(19): siRNA sense strand
caacgacgccuacgacuuu

SEQ ID NO: 2109226 - RNA, 19 nt, Homo sapiens
  misc_RNA (1)...(19): siRNA sense strand
gcaaguauggcaucaagua

SEQ ID NO: 2109227 - RNA, 19 nt, Homo sapiens
  misc_RNA (1)...(19): siRNA sense strand
ucaaguauauccucaaugu

SEQ ID NO: 2109228 - RNA, 19 nt, Homo sapiens
  misc_RNA (1)...(19): siRNA sense strand
gccagaaccucucccaguu

SEQ ID NO: 2109229 - RNA, 19 nt, Homo sapiens
  misc_RNA (1)...(19): siRNA sense strand
gaagcccgcuccaagaagu

SEQ ID NO: 2109230 - RNA, 19 nt, Homo sapiens
  misc_RNA (1)...(19): siRNA sense strand
caacaucucgcccaacuuc

SEQ ID NO: 2109231 - RNA, 19 nt, Homo sapiens
  misc_RNA (1)...(19): siRNA sense strand
caaggugguuucaacaagu

SEQ ID NO: 2109232 - RNA, 19 nt, Homo sapiens
  misc_RNA (1)...(19): siRNA sense strand
caucaaguauauccucaau

SEQ ID NO: 2109233 - RNA, 19 nt, Homo sapiens
  misc_RNA (1)...(19): siRNA sense strand
ccaaggugguuucaacaag

SEQ ID NO: 2109234 - RNA, 19 nt, Homo sapiens
  misc_RNA (1)...(19): siRNA sense strand
ggcaucagccgcucaguga

SEQ ID NO: 2109235 - RNA, 19 nt, Homo sapiens
  misc_RNA (1)...(19): siRNA sense strand
aguauggcaucaaguauau

SEQ ID NO: 2109236 - RNA, 19 nt, Homo sapiens
  misc_RNA (1)...(19): siRNA sense strand
ggacgugcucggcaaguau

SEQ ID NO: 2109237 - RNA, 19 nt, Homo sapiens
  misc_RNA (1)...(19): siRNA sense strand
ccaccgugcugcucuacga

SEQ ID NO: 2109238 - RNA, 19 nt, Homo sapiens
  misc_RNA (1)...(19): siRNA sense strand
gcggcgaguucaccuacaa

SEQ ID NO: 2109239 - RNA, 19 nt, Homo sapiens
  misc_RNA (1)...(19): siRNA sense strand
aagaugaaccugucacuca

SEQ ID NO: 2109240 - RNA, 19 nt, Homo sapiens
  misc_RNA (1)...(19): siRNA sense strand
gcagugccaccgagucaga

SEQ ID NO: 2109241 - RNA, 19 nt, Homo sapiens
  misc_RNA (1)...(19): siRNA sense strand
agaugaaccugucacucaa

SEQ ID NO: 2109242 - RNA, 19 nt, Homo sapiens
  misc_RNA (1)...(19): siRNA sense strand
gacgaagcccgcuccaaga

SEQ ID NO: 2109243 - RNA, 19 nt, Homo sapiens
  misc_RNA (1)...(19): siRNA sense strand
aaguauggcaucaaguaua

SEQ ID NO: 2109244 - RNA, 19 nt, Homo sapiens
  misc_RNA (1)...(19): siRNA sense strand
cggcaaguauggcaucaag

SEQ ID NO: 2109245 - RNA, 19 nt, Homo sapiens
  misc_RNA (1)...(19): siRNA sense strand
caaugucacacccaaccua

SEQ ID NO: 2109246 - RNA, 19 nt, Homo sapiens
  misc_RNA (1)...(19): siRNA sense strand
aaguauauccucaauguca

SEQ ID NO: 2109247 - RNA, 19 nt, Homo sapiens
  misc_RNA (1)...(19): siRNA sense strand
caaguauggcaucaaguau

SEQ ID NO: 2109248 - RNA, 19 nt, Homo sapiens
  misc_RNA (1)...(19): siRNA sense strand
gacggucacuguggccuau

SEQ ID NO: 2109249 - RNA, 19 nt, Homo sapiens
  misc_RNA (1)...(19): siRNA sense strand
gaggccaucagcuucauug

SEQ ID NO: 2109250 - RNA, 19 nt, Homo sapiens
  misc_RNA (1)...(19): siRNA sense strand
cacaaccuguucccacuca

SEQ ID NO: 2109251 - RNA, 19 nt, Homo sapiens
  misc_RNA (1)...(19): siRNA sense strand
ccaccaaccacaaccuguu

SEQ ID NO: 2109252 - RNA, 19 nt, Homo sapiens
  misc_RNA (1)...(19): siRNA sense strand
aaggugguuucaacaaguu

SEQ ID NO: 2109253 - RNA, 19 nt, Homo sapiens
  misc_RNA (1)...(19): siRNA sense strand
gauccugcccuaccucuac

SEQ ID NO: 2109254 - RNA, 19 nt, Homo sapiens
  misc_RNA (1)...(19): siRNA sense strand
ccuccaaggugguuucaac

SEQ ID NO: 2109255 - RNA, 19 nt, Homo sapiens
  misc_RNA (1)...(19): siRNA sense strand
uggacgugcucggcaagua

SEQ ID NO: 2109256 - RNA, 19 nt, Homo sapiens
  misc_RNA (1)...(19): siRNA sense strand
gguuucaacaaguuucaaa

SEQ ID NO: 2109257 - RNA, 19 nt, Homo sapiens
  misc_RNA (1)...(19): siRNA sense strand
ucgcccaacuucaacuuca

SEQ ID NO: 2109258 - RNA, 19 nt, Homo sapiens
  misc_RNA (1)...(19): siRNA sense strand
gcagaagaugaaccuguca

SEQ ID NO: 2109259 - RNA, 19 nt, Homo sapiens
  misc_RNA (1)...(19): siRNA sense strand
cagcagugccaccgaguca

SEQ ID NO: 2109260 - RNA, 19 nt, Homo sapiens
  misc_RNA (1)...(19): siRNA sense strand
aaccuguucccacucaaua

SEQ ID NO: 2109261 - RNA, 19 nt, Homo sapiens
  misc_RNA (1)...(19): siRNA sense strand
caaccuguucccacucaau

SEQ ID NO: 2109262 - RNA, 19 nt, Homo sapiens
  misc_RNA (1)...(19): siRNA sense strand
gccuacgacuuugucaaga

SEQ ID NO: 2109263 - RNA, 19 nt, Homo sapiens
  misc_RNA (1)...(19): siRNA sense strand
caucagcuucauugacgaa

SEQ ID NO: 2109264 - RNA, 19 nt, Homo sapiens
  misc_RNA (1)...(19): siRNA sense strand
ucaacgacgccuacgacuu

SEQ ID NO: 2109265 - RNA, 19 nt, Homo sapiens
  misc_RNA (1)...(19): siRNA sense strand
gggaagagcccuaccauua

SEQ ID NO: 2109266 - RNA, 19 nt, Homo sapiens
  misc_RNA (1)...(19): siRNA sense strand
ggaggacuaugaccaauuu

SEQ ID NO: 2109267 - RNA, 19 nt, Homo sapiens
  misc_RNA (1)...(19): siRNA sense strand
caggagagcuacagugaua

SEQ ID NO: 2109268 - RNA, 19 nt, Homo sapiens
  misc_RNA (1)...(19): siRNA sense strand
ggaacaagauggagcagaa

SEQ ID NO: 2109269 - RNA, 19 nt, Homo sapiens
  misc_RNA (1)...(19): siRNA sense strand
gaagagcccuaccauuaug

SEQ ID NO: 2109270 - RNA, 19 nt, Homo sapiens
  misc_RNA (1)...(19): siRNA sense strand
caacaguccuggagagaaa

SEQ ID NO: 2109271 - RNA, 19 nt, Homo sapiens
  misc_RNA (1)...(19): siRNA sense strand
gaaugaaugugucugagaa

SEQ ID NO: 2109272 - RNA, 19 nt, Homo sapiens
  misc_RNA (1)...(19): siRNA sense strand
caaagacucuggaaugaau

SEQ ID NO: 2109273 - RNA, 19 nt, Homo sapiens
  misc_RNA (1)...(19): siRNA sense strand
gaaagucccuuaugucaac

SEQ ID NO: 2109274 - RNA, 19 nt, Homo sapiens
  misc_RNA (1)...(19): siRNA sense strand
gcgaugagcugcugcacaa

SEQ ID NO: 2109275 - RNA, 19 nt, Homo sapiens
  misc_RNA (1)...(19): siRNA sense strand
gacaggagcuauuugugaa

SEQ ID NO: 2109276 - RNA, 19 nt, Homo sapiens
  misc_RNA (1)...(19): siRNA sense strand
caucagaacuuccuacagu

SEQ ID NO: 2109277 - RNA, 19 nt, Homo sapiens
  misc_RNA (1)...(19): siRNA sense strand
ggagagaaacugcgaauca

SEQ ID NO: 2109278 - RNA, 19 nt, Homo sapiens
  misc_RNA (1)...(19): siRNA sense strand
ggaagagcccuaccauuau

SEQ ID NO: 2109279 - RNA, 19 nt, Homo sapiens
  misc_RNA (1)...(19): siRNA sense strand
gaagagaaagucccuuaug

SEQ ID NO: 2109280 - RNA, 19 nt, Homo sapiens
  misc_RNA (1)...(19): siRNA sense strand
gagagaaacugcgaaucaa

SEQ ID NO: 2109281 - RNA, 19 nt, Homo sapiens
  misc_RNA (1)...(19): siRNA sense strand
gagaaagucccuuauguca

SEQ ID NO: 2109282 - RNA, 19 nt, Homo sapiens
  misc_RNA (1)...(19): siRNA sense strand
ggccagcgcuacaucauga

SEQ ID NO: 2109283 - RNA, 19 nt, Homo sapiens
  misc_RNA (1)...(19): siRNA sense strand
gggcgacacuggcacauga

SEQ ID NO: 2109284 - RNA, 19 nt, Homo sapiens
  misc_RNA (1)...(19): siRNA sense strand
gcagaugaaugcacagaag

SEQ ID NO: 2109285 - RNA, 19 nt, Homo sapiens
  misc_RNA (1)...(19): siRNA sense strand
ggaccuggcuuugcagaau

SEQ ID NO: 2109286 - RNA, 19 nt, Homo sapiens
  misc_RNA (1)...(19): siRNA sense strand
gaccucagaugaugacuca

SEQ ID NO: 2109287 - RNA, 19 nt, Homo sapiens
  misc_RNA (1)...(19): siRNA sense strand
gaucaaugguggagacauc

SEQ ID NO: 2109288 - RNA, 19 nt, Homo sapiens
  misc_RNA (1)...(19): siRNA sense strand
caacgagggcuauuuccua

SEQ ID NO: 2109289 - RNA, 19 nt, Homo sapiens
  misc_RNA (1)...(19): siRNA sense strand
cagaagagaaagucccuua

SEQ ID NO: 2109290 - RNA, 19 nt, Homo sapiens
  misc_RNA (1)...(19): siRNA sense strand
uuaccaagaugggaagaua

SEQ ID NO: 2109291 - RNA, 19 nt, Homo sapiens
  misc_RNA (1)...(19): siRNA sense strand
ggaacucgaccucagauga

SEQ ID NO: 2109292 - RNA, 19 nt, Homo sapiens
  misc_RNA (1)...(19): siRNA sense strand
gaggccaucucccgguuaa

SEQ ID NO: 2109293 - RNA, 19 nt, Homo sapiens
  misc_RNA (1)...(19): siRNA sense strand
ggagaagaccaucagcaaa

SEQ ID NO: 2109294 - RNA, 19 nt, Homo sapiens
  misc_RNA (1)...(19): siRNA sense strand
ccccaaaucuuccacauua

SEQ ID NO: 2109295 - RNA, 19 nt, Homo sapiens
  misc_RNA (1)...(19): siRNA sense strand
ggacuaugaccaauuuaug

SEQ ID NO: 2109296 - RNA, 19 nt, Homo sapiens
  misc_RNA (1)...(19): siRNA sense strand
cagcaaagacucuggaaug

SEQ ID NO: 2109297 - RNA, 19 nt, Homo sapiens
  misc_RNA (1)...(19): siRNA sense strand
ggaggaagaggaagaggaa

SEQ ID NO: 2109298 - RNA, 19 nt, Homo sapiens
  misc_RNA (1)...(19): siRNA sense strand
aagagaaagucccuuaugu

SEQ ID NO: 2109299 - RNA, 19 nt, Homo sapiens
  misc_RNA (1)...(19): siRNA sense strand
gaacgcacccggagaagag

SEQ ID NO: 2109300 - RNA, 19 nt, Homo sapiens
  misc_RNA (1)...(19): siRNA sense strand
gagcuacagugauaugucu

SEQ ID NO: 2109301 - RNA, 19 nt, Homo sapiens
  misc_RNA (1)...(19): siRNA sense strand
gaaauacacagaggacaug

SEQ ID NO: 2109302 - RNA, 19 nt, Homo sapiens
  misc_RNA (1)...(19): siRNA sense strand
gaacucgaccucagaugau

SEQ ID NO: 2109303 - RNA, 19 nt, Homo sapiens
  misc_RNA (1)...(19): siRNA sense strand
gcaaagacucuggaaugaa

SEQ ID NO: 2109304 - RNA, 19 nt, Homo sapiens
  misc_RNA (1)...(19): siRNA sense strand
ccaaauaugaggaggaaga

SEQ ID NO: 2109305 - RNA, 19 nt, Homo sapiens
  misc_RNA (1)...(19): siRNA sense strand
acagugauaugucuaguca

SEQ ID NO: 2109306 - RNA, 19 nt, Homo sapiens
  misc_RNA (1)...(19): siRNA sense strand
ugacaggagcuauuuguga

SEQ ID NO: 2109307 - RNA, 19 nt, Homo sapiens
  misc_RNA (1)...(19): siRNA sense strand
ggaaugaaugugucugaga

SEQ ID NO: 2109308 - RNA, 19 nt, Homo sapiens
  misc_RNA (1)...(19): siRNA sense strand
gcugugcuuuggaagagua

SEQ ID NO: 2109309 - RNA, 19 nt, Homo sapiens
  misc_RNA (1)...(19): siRNA sense strand
agucagaguuucagugaga

SEQ ID NO: 2109310 - RNA, 19 nt, Homo sapiens
  misc_RNA (1)...(19): siRNA sense strand
guccuuguaugcagaauau

SEQ ID NO: 2109311 - RNA, 19 nt, Homo sapiens
  misc_RNA (1)...(19): siRNA sense strand
ggaaugccgagaagacuau

SEQ ID NO: 2109312 - RNA, 19 nt, Homo sapiens
  misc_RNA (1)...(19): siRNA sense strand
cgagggcuauuuccuagga

SEQ ID NO: 2109313 - RNA, 19 nt, Homo sapiens
  misc_RNA (1)...(19): siRNA sense strand
ggauccagcccaugaguga

SEQ ID NO: 2109314 - RNA, 19 nt, Homo sapiens
  misc_RNA (1)...(19): siRNA sense strand
cugaacagguacaccagua

SEQ ID NO: 2109315 - RNA, 19 nt, Homo sapiens
  misc_RNA (1)...(19): siRNA sense strand
gagaagaccaucagcaaac

SEQ ID NO: 2109316 - RNA, 19 nt, Homo sapiens
  misc_RNA (1)...(19): siRNA sense strand
gaaggaugcaucagagcuu

SEQ ID NO: 2109317 - RNA, 19 nt, Homo sapiens
  misc_RNA (1)...(19): siRNA sense strand
gacaaugagguucgauauu

SEQ ID NO: 2109318 - RNA, 19 nt, Homo sapiens
  misc_RNA (1)...(19): siRNA sense strand
gcgggaaugucaggccuuu

SEQ ID NO: 2109319 - RNA, 19 nt, Homo sapiens
  misc_RNA (1)...(19): siRNA sense strand
agugauaugucuagucaga

SEQ ID NO: 2109320 - RNA, 19 nt, Homo sapiens
  misc_RNA (1)...(19): siRNA sense strand
gguucugacuccucugauu

SEQ ID NO: 2109321 - RNA, 19 nt, Homo sapiens
  misc_RNA (1)...(19): siRNA sense strand
acauauagguaucgaccaa

SEQ ID NO: 2109322 - RNA, 19 nt, Homo sapiens
  misc_RNA (1)...(19): siRNA sense strand
guggagacaucgcuguguu

SEQ ID NO: 2109323 - RNA, 19 nt, Homo sapiens
  misc_RNA (1)...(19): siRNA sense strand
gaaucaagcagcuacuaca

SEQ ID NO: 2109324 - RNA, 19 nt, Homo sapiens
  misc_RNA (1)...(19): siRNA sense strand
gagcaccuaucccgauuuu

SEQ ID NO: 2109325 - RNA, 19 nt, Homo sapiens
  misc_RNA (1)...(19): siRNA sense strand
ggagagcuacagugauaug

SEQ ID NO: 2109326 - RNA, 19 nt, Homo sapiens
  misc_RNA (1)...(19): siRNA sense strand
gcagcuucaucaaggaaug

SEQ ID NO: 2109327 - RNA, 19 nt, Homo sapiens
  misc_RNA (1)...(19): siRNA sense strand
caccugugcccaacauaua

SEQ ID NO: 2109328 - RNA, 19 nt, Homo sapiens
  misc_RNA (1)...(19): siRNA sense strand
cgaagcagggccagauauu

SEQ ID NO: 2109329 - RNA, 19 nt, Homo sapiens
  misc_RNA (1)...(19): siRNA sense strand
gagccagggaggacuauga

SEQ ID NO: 2109330 - RNA, 19 nt, Homo sapiens
  misc_RNA (1)...(19): siRNA sense strand
gaagcagggccagauauuc

SEQ ID NO: 2109331 - RNA, 19 nt, Homo sapiens
  misc_RNA (1)...(19): siRNA sense strand
gaccuggcuuugcagaaug

SEQ ID NO: 2109332 - RNA, 19 nt, Homo sapiens
  misc_RNA (1)...(19): siRNA sense strand
ggagacaucgcuguguuug

SEQ ID NO: 2109333 - RNA, 19 nt, Homo sapiens
  misc_RNA (1)...(19): siRNA sense strand
augagcugcugcacaaaua

SEQ ID NO: 2109334 - RNA, 19 nt, Homo sapiens
  misc_RNA (1)...(19): siRNA sense strand
gaugagcugcugcacaaau

SEQ ID NO: 2109335 - RNA, 19 nt, Homo sapiens
  misc_RNA (1)...(19): siRNA sense strand
ugacaacgagggcuauuuc

SEQ ID NO: 2109336 - RNA, 19 nt, Homo sapiens
  misc_RNA (1)...(19): siRNA sense strand
gcaacaugggcacucuuaa

SEQ ID NO: 2109337 - RNA, 19 nt, Homo sapiens
  misc_RNA (1)...(19): siRNA sense strand
agcaaagacucuggaauga

SEQ ID NO: 2109338 - RNA, 19 nt, Homo sapiens
  misc_RNA (1)...(19): siRNA sense strand
ugacaaugagguucgauau

SEQ ID NO: 2109339 - RNA, 19 nt, Homo sapiens
  misc_RNA (1)...(19): siRNA sense strand
ugacucaggcugugcuuug

SEQ ID NO: 2109340 - RNA, 19 nt, Homo sapiens
  misc_RNA (1)...(19): siRNA sense strand
gugaggauccagcccauga

SEQ ID NO: 2109341 - RNA, 19 nt, Homo sapiens
  misc_RNA (1)...(19): siRNA sense strand
gcauccaaguccccaaaua

SEQ ID NO: 2109342 - RNA, 19 nt, Homo sapiens
  misc_RNA (1)...(19): siRNA sense strand
ugauaugucuagucagagu

SEQ ID NO: 2109343 - RNA, 19 nt, Homo sapiens
  misc_RNA (1)...(19): siRNA sense strand
cuauagcugucucccagaa

SEQ ID NO: 2109344 - RNA, 19 nt, Homo sapiens
  misc_RNA (1)...(19): siRNA sense strand
caucaaggaaugccgagaa

SEQ ID NO: 2109345 - RNA, 19 nt, Homo sapiens
  misc_RNA (1)...(19): siRNA sense strand
gagguucgauauugcaacu

SEQ ID NO: 2109346 - RNA, 19 nt, Homo sapiens
  misc_RNA (1)...(19): siRNA sense strand
cggaggagcccaugcugaa

SEQ ID NO: 2109347 - RNA, 19 nt, Homo sapiens
  misc_RNA (1)...(19): siRNA sense strand
caacaugggcacucuuaac

SEQ ID NO: 2109348 - RNA, 19 nt, Homo sapiens
  misc_RNA (1)...(19): siRNA sense strand
ggagcuauuugugaacagu

SEQ ID NO: 2109349 - RNA, 19 nt, Homo sapiens
  misc_RNA (1)...(19): siRNA sense strand
ggccauuccucccgaagca

SEQ ID NO: 2109350 - RNA, 19 nt, Homo sapiens
  misc_RNA (1)...(19): siRNA sense strand
ugacaccugugcccaacau

SEQ ID NO: 2109351 - RNA, 19 nt, Homo sapiens
  misc_RNA (1)...(19): siRNA sense strand
cugagaagcugagcaacau

SEQ ID NO: 2109352 - RNA, 19 nt, Homo sapiens
  misc_RNA (1)...(19): siRNA sense strand
gggaggacuaugaccaauu

SEQ ID NO: 2109353 - RNA, 19 nt, Homo sapiens
  misc_RNA (1)...(19): siRNA sense strand
accaggagauggagggaaa

SEQ ID NO: 2109354 - RNA, 19 nt, Homo sapiens
  misc_RNA (1)...(19): siRNA sense strand
gacacuggcacaugaaaca

SEQ ID NO: 2109355 - RNA, 19 nt, Homo sapiens
  misc_RNA (1)...(19): siRNA sense strand
ugucggaccuggcuuugca

SEQ ID NO: 2109356 - RNA, 19 nt, Homo sapiens
  misc_RNA (1)...(19): siRNA sense strand
gcgaaucaagcagcuacua

SEQ ID NO: 2109357 - RNA, 19 nt, Homo sapiens
  misc_RNA (1)...(19): siRNA sense strand
gaccaucagcaaacucaug

SEQ ID NO: 2109358 - RNA, 19 nt, Homo sapiens
  misc_RNA (1)...(19): siRNA sense strand
cuagucagaguuucaguga

SEQ ID NO: 2109359 - RNA, 19 nt, Homo sapiens
  misc_RNA (1)...(19): siRNA sense strand
gaggaaacgcgaaaacuug

SEQ ID NO: 2109360 - RNA, 19 nt, Homo sapiens
  misc_RNA (1)...(19): siRNA sense strand
ggaaaagacagaagagcaa

SEQ ID NO: 2109361 - RNA, 19 nt, Homo sapiens
  misc_RNA (1)...(19): siRNA sense strand
ggaugcaucagagcuuuga

SEQ ID NO: 2109362 - RNA, 19 nt, Homo sapiens
  misc_RNA (1)...(19): siRNA sense strand
aaggaugcaucagagcuuu

SEQ ID NO: 2109363 - RNA, 19 nt, Homo sapiens
  misc_RNA (1)...(19): siRNA sense strand
ugaugccgcuggagaugga

SEQ ID NO: 2109364 - RNA, 19 nt, Homo sapiens
  misc_RNA (1)...(19): siRNA sense strand
gagcuuugauuuugaugga

SEQ ID NO: 2109365 - RNA, 19 nt, Homo sapiens
  misc_RNA (1)...(19): siRNA sense strand
gggaagagcccuaccauua

SEQ ID NO: 2109366 - RNA, 19 nt, Homo sapiens
  misc_RNA (1)...(19): siRNA sense strand
ggaggacuaugaccaauuu

SEQ ID NO: 2109367 - RNA, 19 nt, Homo sapiens
  misc_RNA (1)...(19): siRNA sense strand
caggagagcuacagugaua

SEQ ID NO: 2109368 - RNA, 19 nt, Homo sapiens
  misc_RNA (1)...(19): siRNA sense strand
ggaacaagauggagcagaa

SEQ ID NO: 2109369 - RNA, 19 nt, Homo sapiens
  misc_RNA (1)...(19): siRNA sense strand
gaagagcccuaccauuaug

SEQ ID NO: 2109370 - RNA, 19 nt, Homo sapiens
  misc_RNA (1)...(19): siRNA sense strand
caacaguccuggagagaaa

SEQ ID NO: 2109371 - RNA, 19 nt, Homo sapiens
  misc_RNA (1)...(19): siRNA sense strand
gaaugaaugugucugagaa

SEQ ID NO: 2109372 - RNA, 19 nt, Homo sapiens
  misc_RNA (1)...(19): siRNA sense strand
caaagacucuggaaugaau

SEQ ID NO: 2109373 - RNA, 19 nt, Homo sapiens
  misc_RNA (1)...(19): siRNA sense strand
gaaagucccuuaugucaac

SEQ ID NO: 2109374 - RNA, 19 nt, Homo sapiens
  misc_RNA (1)...(19): siRNA sense strand
gcgaugagcugcugcacaa

SEQ ID NO: 2109375 - RNA, 19 nt, Homo sapiens
  misc_RNA (1)...(19): siRNA sense strand
gacaggagcuauuugugaa

SEQ ID NO: 2109376 - RNA, 19 nt, Homo sapiens
  misc_RNA (1)...(19): siRNA sense strand
caucagaacuuccuacagu

SEQ ID NO: 2109377 - RNA, 19 nt, Homo sapiens
  misc_RNA (1)...(19): siRNA sense strand
ggagagaaacugcgaauca

SEQ ID NO: 2109378 - RNA, 19 nt, Homo sapiens
  misc_RNA (1)...(19): siRNA sense strand
ggaagagcccuaccauuau

SEQ ID NO: 2109379 - RNA, 19 nt, Homo sapiens
  misc_RNA (1)...(19): siRNA sense strand
gaagagaaagucccuuaug

SEQ ID NO: 2109380 - RNA, 19 nt, Homo sapiens
  misc_RNA (1)...(19): siRNA sense strand
gagagaaacugcgaaucaa

SEQ ID NO: 2109381 - RNA, 19 nt, Homo sapiens
  misc_RNA (1)...(19): siRNA sense strand
gagaaagucccuuauguca

SEQ ID NO: 2109382 - RNA, 19 nt, Homo sapiens
  misc_RNA (1)...(19): siRNA sense strand
ggccagcgcuacaucauga

SEQ ID NO: 2109383 - RNA, 19 nt, Homo sapiens
  misc_RNA (1)...(19): siRNA sense strand
gggcgacacuggcacauga

SEQ ID NO: 2109384 - RNA, 19 nt, Homo sapiens
  misc_RNA (1)...(19): siRNA sense strand
gcagaugaaugcacagaag

SEQ ID NO: 2109385 - RNA, 19 nt, Homo sapiens
  misc_RNA (1)...(19): siRNA sense strand
ggaccuggcuuugcagaau

SEQ ID NO: 2109386 - RNA, 19 nt, Homo sapiens
  misc_RNA (1)...(19): siRNA sense strand
gaccucagaugaugacuca

SEQ ID NO: 2109387 - RNA, 19 nt, Homo sapiens
  misc_RNA (1)...(19): siRNA sense strand
gaucaaugguggagacauc

SEQ ID NO: 2109388 - RNA, 19 nt, Homo sapiens
  misc_RNA (1)...(19): siRNA sense strand
caacgagggcuauuuccua

SEQ ID NO: 2109389 - RNA, 19 nt, Homo sapiens
  misc_RNA (1)...(19): siRNA sense strand
cagaagagaaagucccuua

SEQ ID NO: 2109390 - RNA, 19 nt, Homo sapiens
  misc_RNA (1)...(19): siRNA sense strand
uuaccaagaugggaagaua

SEQ ID NO: 2109391 - RNA, 19 nt, Homo sapiens
  misc_RNA (1)...(19): siRNA sense strand
ggaacucgaccucagauga

SEQ ID NO: 2109392 - RNA, 19 nt, Homo sapiens
  misc_RNA (1)...(19): siRNA sense strand
gaggccaucucccgguuaa

SEQ ID NO: 2109393 - RNA, 19 nt, Homo sapiens
  misc_RNA (1)...(19): siRNA sense strand
ggagaagaccaucagcaaa

SEQ ID NO: 2109394 - RNA, 19 nt, Homo sapiens
  misc_RNA (1)...(19): siRNA sense strand
ccccaaaucuuccacauua

SEQ ID NO: 2109395 - RNA, 19 nt, Homo sapiens
  misc_RNA (1)...(19): siRNA sense strand
ggacuaugaccaauuuaug

SEQ ID NO: 2109396 - RNA, 19 nt, Homo sapiens
  misc_RNA (1)...(19): siRNA sense strand
cagcaaagacucuggaaug

SEQ ID NO: 2109397 - RNA, 19 nt, Homo sapiens
  misc_RNA (1)...(19): siRNA sense strand
ggaggaagaggaagaggaa

SEQ ID NO: 2109398 - RNA, 19 nt, Homo sapiens
  misc_RNA (1)...(19): siRNA sense strand
aagagaaagucccuuaugu

SEQ ID NO: 2109399 - RNA, 19 nt, Homo sapiens
  misc_RNA (1)...(19): siRNA sense strand
gaacgcacccggagaagag

SEQ ID NO: 2109400 - RNA, 19 nt, Homo sapiens
  misc_RNA (1)...(19): siRNA sense strand
gagcuacagugauaugucu

SEQ ID NO: 2109401 - RNA, 19 nt, Homo sapiens
  misc_RNA (1)...(19): siRNA sense strand
gaaauacacagaggacaug

SEQ ID NO: 2109402 - RNA, 19 nt, Homo sapiens
  misc_RNA (1)...(19): siRNA sense strand
gaacucgaccucagaugau

SEQ ID NO: 2109403 - RNA, 19 nt, Homo sapiens
  misc_RNA (1)...(19): siRNA sense strand
gcaaagacucuggaaugaa

SEQ ID NO: 2109404 - RNA, 19 nt, Homo sapiens
  misc_RNA (1)...(19): siRNA sense strand
ccaaauaugaggaggaaga

SEQ ID NO: 2109405 - RNA, 19 nt, Homo sapiens
  misc_RNA (1)...(19): siRNA sense strand
acagugauaugucuaguca

SEQ ID NO: 2109406 - RNA, 19 nt, Homo sapiens
  misc_RNA (1)...(19): siRNA sense strand
ugacaggagcuauuuguga

SEQ ID NO: 2109407 - RNA, 19 nt, Homo sapiens
  misc_RNA (1)...(19): siRNA sense strand
ggaaugaaugugucugaga

SEQ ID NO: 2109408 - RNA, 19 nt, Homo sapiens
  misc_RNA (1)...(19): siRNA sense strand
gcugugcuuuggaagagua

SEQ ID NO: 2109409 - RNA, 19 nt, Homo sapiens
  misc_RNA (1)...(19): siRNA sense strand
agucagaguuucagugaga

SEQ ID NO: 2109410 - RNA, 19 nt, Homo sapiens
  misc_RNA (1)...(19): siRNA sense strand
guccuuguaugcagaauau

SEQ ID NO: 2109411 - RNA, 19 nt, Homo sapiens
  misc_RNA (1)...(19): siRNA sense strand
ggaaugccgagaagacuau

SEQ ID NO: 2109412 - RNA, 19 nt, Homo sapiens
  misc_RNA (1)...(19): siRNA sense strand
cgagggcuauuuccuagga

SEQ ID NO: 2109413 - RNA, 19 nt, Homo sapiens
  misc_RNA (1)...(19): siRNA sense strand
ggauccagcccaugaguga

SEQ ID NO: 2109414 - RNA, 19 nt, Homo sapiens
  misc_RNA (1)...(19): siRNA sense strand
cugaacagguacaccagua

SEQ ID NO: 2109415 - RNA, 19 nt, Homo sapiens
  misc_RNA (1)...(19): siRNA sense strand
gagaagaccaucagcaaac

SEQ ID NO: 2109416 - RNA, 19 nt, Homo sapiens
  misc_RNA (1)...(19): siRNA sense strand
gaaggaugcaucagagcuu

SEQ ID NO: 2109417 - RNA, 19 nt, Homo sapiens
  misc_RNA (1)...(19): siRNA sense strand
gacaaugagguucgauauu

SEQ ID NO: 2109418 - RNA, 19 nt, Homo sapiens
  misc_RNA (1)...(19): siRNA sense strand
gcgggaaugucaggccuuu

SEQ ID NO: 2109419 - RNA, 19 nt, Homo sapiens
  misc_RNA (1)...(19): siRNA sense strand
agugauaugucuagucaga

SEQ ID NO: 2109420 - RNA, 19 nt, Homo sapiens
  misc_RNA (1)...(19): siRNA sense strand
gguucugacuccucugauu

SEQ ID NO: 2109421 - RNA, 19 nt, Homo sapiens
  misc_RNA (1)...(19): siRNA sense strand
acauauagguaucgaccaa

SEQ ID NO: 2109422 - RNA, 19 nt, Homo sapiens
  misc_RNA (1)...(19): siRNA sense strand
guggagacaucgcuguguu

SEQ ID NO: 2109423 - RNA, 19 nt, Homo sapiens
  misc_RNA (1)...(19): siRNA sense strand
gaaucaagcagcuacuaca

SEQ ID NO: 2109424 - RNA, 19 nt, Homo sapiens
  misc_RNA (1)...(19): siRNA sense strand
gagcaccuaucccgauuuu

SEQ ID NO: 2109425 - RNA, 19 nt, Homo sapiens
  misc_RNA (1)...(19): siRNA sense strand
ggagagcuacagugauaug

SEQ ID NO: 2109426 - RNA, 19 nt, Homo sapiens
  misc_RNA (1)...(19): siRNA sense strand
gcagcuucaucaaggaaug

SEQ ID NO: 2109427 - RNA, 19 nt, Homo sapiens
  misc_RNA (1)...(19): siRNA sense strand
caccugugcccaacauaua

SEQ ID NO: 2109428 - RNA, 19 nt, Homo sapiens
  misc_RNA (1)...(19): siRNA sense strand
cgaagcagggccagauauu

SEQ ID NO: 2109429 - RNA, 19 nt, Homo sapiens
  misc_RNA (1)...(19): siRNA sense strand
gagccagggaggacuauga

SEQ ID NO: 2109430 - RNA, 19 nt, Homo sapiens
  misc_RNA (1)...(19): siRNA sense strand
gaagcagggccagauauuc

SEQ ID NO: 2109431 - RNA, 19 nt, Homo sapiens
  misc_RNA (1)...(19): siRNA sense strand
gaccuggcuuugcagaaug

SEQ ID NO: 2109432 - RNA, 19 nt, Homo sapiens
  misc_RNA (1)...(19): siRNA sense strand
ggagacaucgcuguguuug

SEQ ID NO: 2109433 - RNA, 19 nt, Homo sapiens
  misc_RNA (1)...(19): siRNA sense strand
augagcugcugcacaaaua

SEQ ID NO: 2109434 - RNA, 19 nt, Homo sapiens
  misc_RNA (1)...(19): siRNA sense strand
gaugagcugcugcacaaau

SEQ ID NO: 2109435 - RNA, 19 nt, Homo sapiens
  misc_RNA (1)...(19): siRNA sense strand
ugacaacgagggcuauuuc

SEQ ID NO: 2109436 - RNA, 19 nt, Homo sapiens
  misc_RNA (1)...(19): siRNA sense strand
gcaacaugggcacucuuaa

SEQ ID NO: 2109437 - RNA, 19 nt, Homo sapiens
  misc_RNA (1)...(19): siRNA sense strand
agcaaagacucuggaauga

SEQ ID NO: 2109438 - RNA, 19 nt, Homo sapiens
  misc_RNA (1)...(19): siRNA sense strand
ugacaaugagguucgauau

SEQ ID NO: 2109439 - RNA, 19 nt, Homo sapiens
  misc_RNA (1)...(19): siRNA sense strand
ugacucaggcugugcuuug

SEQ ID NO: 2109440 - RNA, 19 nt, Homo sapiens
  misc_RNA (1)...(19): siRNA sense strand
gugaggauccagcccauga

SEQ ID NO: 2109441 - RNA, 19 nt, Homo sapiens
  misc_RNA (1)...(19): siRNA sense strand
gcauccaaguccccaaaua

SEQ ID NO: 2109442 - RNA, 19 nt, Homo sapiens
  misc_RNA (1)...(19): siRNA sense strand
ugauaugucuagucagagu

SEQ ID NO: 2109443 - RNA, 19 nt, Homo sapiens
  misc_RNA (1)...(19): siRNA sense strand
cuauagcugucucccagaa

SEQ ID NO: 2109444 - RNA, 19 nt, Homo sapiens
  misc_RNA (1)...(19): siRNA sense strand
caucaaggaaugccgagaa

SEQ ID NO: 2109445 - RNA, 19 nt, Homo sapiens
  misc_RNA (1)...(19): siRNA sense strand
gagguucgauauugcaacu

SEQ ID NO: 2109446 - RNA, 19 nt, Homo sapiens
  misc_RNA (1)...(19): siRNA sense strand
cggaggagcccaugcugaa

SEQ ID NO: 2109447 - RNA, 19 nt, Homo sapiens
  misc_RNA (1)...(19): siRNA sense strand
caacaugggcacucuuaac

SEQ ID NO: 2109448 - RNA, 19 nt, Homo sapiens
  misc_RNA (1)...(19): siRNA sense strand
ggagcuauuugugaacagu

SEQ ID NO: 2109449 - RNA, 19 nt, Homo sapiens
  misc_RNA (1)...(19): siRNA sense strand
ggccauuccucccgaagca

SEQ ID NO: 2109450 - RNA, 19 nt, Homo sapiens
  misc_RNA (1)...(19): siRNA sense strand
ugacaccugugcccaacau

SEQ ID NO: 2109451 - RNA, 19 nt, Homo sapiens
  misc_RNA (1)...(19): siRNA sense strand
cugagaagcugagcaacau

SEQ ID NO: 2109452 - RNA, 19 nt, Homo sapiens
  misc_RNA (1)...(19): siRNA sense strand
gggaggacuaugaccaauu

SEQ ID NO: 2109453 - RNA, 19 nt, Homo sapiens
  misc_RNA (1)...(19): siRNA sense strand
accaggagauggagggaaa

SEQ ID NO: 2109454 - RNA, 19 nt, Homo sapiens
  misc_RNA (1)...(19): siRNA sense strand
gacacuggcacaugaaaca

SEQ ID NO: 2109455 - RNA, 19 nt, Homo sapiens
  misc_RNA (1)...(19): siRNA sense strand
ugucggaccuggcuuugca

SEQ ID NO: 2109456 - RNA, 19 nt, Homo sapiens
  misc_RNA (1)...(19): siRNA sense strand
gcgaaucaagcagcuacua

SEQ ID NO: 2109457 - RNA, 19 nt, Homo sapiens
  misc_RNA (1)...(19): siRNA sense strand
gaccaucagcaaacucaug

SEQ ID NO: 2109458 - RNA, 19 nt, Homo sapiens
  misc_RNA (1)...(19): siRNA sense strand
cuagucagaguuucaguga

SEQ ID NO: 2109459 - RNA, 19 nt, Homo sapiens
  misc_RNA (1)...(19): siRNA sense strand
gaggaaacgcgaaaacuug

SEQ ID NO: 2109460 - RNA, 19 nt, Homo sapiens
  misc_RNA (1)...(19): siRNA sense strand
ggaaaagacagaagagcaa

SEQ ID NO: 2109461 - RNA, 19 nt, Homo sapiens
  misc_RNA (1)...(19): siRNA sense strand
ggaugcaucagagcuuuga

SEQ ID NO: 2109462 - RNA, 19 nt, Homo sapiens
  misc_RNA (1)...(19): siRNA sense strand
aaggaugcaucagagcuuu

SEQ ID NO: 2109463 - RNA, 19 nt, Homo sapiens
  misc_RNA (1)...(19): siRNA sense strand
ugaugccgcuggagaugga

SEQ ID NO: 2109464 - RNA, 19 nt, Homo sapiens
  misc_RNA (1)...(19): siRNA sense strand
gagcuuugauuuugaugga

SEQ ID NO: 2109465 - RNA, 19 nt, Homo sapiens
  misc_RNA (1)...(19): siRNA sense strand
ugaaacagcuucuugauuu

SEQ ID NO: 2109466 - RNA, 19 nt, Homo sapiens
  misc_RNA (1)...(19): siRNA sense strand
gaaggaagccucuuagauu

SEQ ID NO: 2109467 - RNA, 19 nt, Homo sapiens
  misc_RNA (1)...(19): siRNA sense strand
ggaacuuucugauuuguuu

SEQ ID NO: 2109468 - RNA, 19 nt, Homo sapiens
  misc_RNA (1)...(19): siRNA sense strand
cagcagcgcuccaaauauu

SEQ ID NO: 2109469 - RNA, 19 nt, Homo sapiens
  misc_RNA (1)...(19): siRNA sense strand
ggacggagauauugaucaa

SEQ ID NO: 2109470 - RNA, 19 nt, Homo sapiens
  misc_RNA (1)...(19): siRNA sense strand
aaggaagccucuuagauua

SEQ ID NO: 2109471 - RNA, 19 nt, Homo sapiens
  misc_RNA (1)...(19): siRNA sense strand
agacaaaucucaggauaaa

SEQ ID NO: 2109472 - RNA, 19 nt, Homo sapiens
  misc_RNA (1)...(19): siRNA sense strand
gauccuggcaucauauuua

SEQ ID NO: 2109473 - RNA, 19 nt, Homo sapiens
  misc_RNA (1)...(19): siRNA sense strand
gaaacagcuucuugauuug

SEQ ID NO: 2109474 - RNA, 19 nt, Homo sapiens
  misc_RNA (1)...(19): siRNA sense strand
aaagacaaaucucaggaua

SEQ ID NO: 2109475 - RNA, 19 nt, Homo sapiens
  misc_RNA (1)...(19): siRNA sense strand
cuacagaugucaaugagaa

SEQ ID NO: 2109476 - RNA, 19 nt, Homo sapiens
  misc_RNA (1)...(19): siRNA sense strand
caagagaugauuccaagua

SEQ ID NO: 2109477 - RNA, 19 nt, Homo sapiens
  misc_RNA (1)...(19): siRNA sense strand
acauggaacuuucugauuu

SEQ ID NO: 2109478 - RNA, 19 nt, Homo sapiens
  misc_RNA (1)...(19): siRNA sense strand
gaaccugaauaugccaaua

SEQ ID NO: 2109479 - RNA, 19 nt, Homo sapiens
  misc_RNA (1)...(19): siRNA sense strand
ggaaggcccuggguacauu

SEQ ID NO: 2109480 - RNA, 19 nt, Homo sapiens
  misc_RNA (1)...(19): siRNA sense strand
gaaguuaccagauccuuug

SEQ ID NO: 2109481 - RNA, 19 nt, Homo sapiens
  misc_RNA (1)...(19): siRNA sense strand
ugacgauccuggcaucaua

SEQ ID NO: 2109482 - RNA, 19 nt, Homo sapiens
  misc_RNA (1)...(19): siRNA sense strand
caggauaaauucuaugaug

SEQ ID NO: 2109483 - RNA, 19 nt, Homo sapiens
  misc_RNA (1)...(19): siRNA sense strand
augcuggacuugauuauua

SEQ ID NO: 2109484 - RNA, 19 nt, Homo sapiens
  misc_RNA (1)...(19): siRNA sense strand
gcauucaaguucuggauga

SEQ ID NO: 2109485 - RNA, 19 nt, Homo sapiens
  misc_RNA (1)...(19): siRNA sense strand
ccucuuagauuacauggaa

SEQ ID NO: 2109486 - RNA, 19 nt, Homo sapiens
  misc_RNA (1)...(19): siRNA sense strand
gcaaugaauuuagcuagau

SEQ ID NO: 2109487 - RNA, 19 nt, Homo sapiens
  misc_RNA (1)...(19): siRNA sense strand
gaaagaaggggauggaaua

SEQ ID NO: 2109488 - RNA, 19 nt, Homo sapiens
  misc_RNA (1)...(19): siRNA sense strand
uaaucgugcucuugcuuua

SEQ ID NO: 2109489 - RNA, 19 nt, Homo sapiens
  misc_RNA (1)...(19): siRNA sense strand
gcgaagugguuacuccaaa

SEQ ID NO: 2109490 - RNA, 19 nt, Homo sapiens
  misc_RNA (1)...(19): siRNA sense strand
gcacugagaauguuugcuu

SEQ ID NO: 2109491 - RNA, 19 nt, Homo sapiens
  misc_RNA (1)...(19): siRNA sense strand
aagagaaggauucaaguua

SEQ ID NO: 2109492 - RNA, 19 nt, Homo sapiens
  misc_RNA (1)...(19): siRNA sense strand
gagaugauuccaaguaaga

SEQ ID NO: 2109493 - RNA, 19 nt, Homo sapiens
  misc_RNA (1)...(19): siRNA sense strand
ggaagaaggacccgaguuc

SEQ ID NO: 2109494 - RNA, 19 nt, Homo sapiens
  misc_RNA (1)...(19): siRNA sense strand
aaacuaaccacccaagauu

SEQ ID NO: 2109495 - RNA, 19 nt, Homo sapiens
  misc_RNA (1)...(19): siRNA sense strand
caacugaaacagcuucuug

SEQ ID NO: 2109496 - RNA, 19 nt, Homo sapiens
  misc_RNA (1)...(19): siRNA sense strand
gcauugaauccaaguguuu

SEQ ID NO: 2109497 - RNA, 19 nt, Homo sapiens
  misc_RNA (1)...(19): siRNA sense strand
gccagcagcgcuccaaaua

SEQ ID NO: 2109498 - RNA, 19 nt, Homo sapiens
  misc_RNA (1)...(19): siRNA sense strand
ccuaguagaugaaaucaag

SEQ ID NO: 2109499 - RNA, 19 nt, Homo sapiens
  misc_RNA (1)...(19): siRNA sense strand
gcagaagaccagaugcauu

SEQ ID NO: 2109500 - RNA, 19 nt, Homo sapiens
  misc_RNA (1)...(19): siRNA sense strand
ucgccaagauuaauccuuu

SEQ ID NO: 2109501 - RNA, 19 nt, Homo sapiens
  misc_RNA (1)...(19): siRNA sense strand
aagagaugauuccaaguaa

SEQ ID NO: 2109502 - RNA, 19 nt, Homo sapiens
  misc_RNA (1)...(19): siRNA sense strand
ccaauuguaugcuggacuu

SEQ ID NO: 2109503 - RNA, 19 nt, Homo sapiens
  misc_RNA (1)...(19): siRNA sense strand
ggaagccucuuagauuaca

SEQ ID NO: 2109504 - RNA, 19 nt, Homo sapiens
  misc_RNA (1)...(19): siRNA sense strand
gcagcgcuccaaauauuaa

SEQ ID NO: 2109505 - RNA, 19 nt, Homo sapiens
  misc_RNA (1)...(19): siRNA sense strand
uagauuacauggaacuuuc

SEQ ID NO: 2109506 - RNA, 19 nt, Homo sapiens
  misc_RNA (1)...(19): siRNA sense strand
cauggaacuuucugauuug

SEQ ID NO: 2109507 - RNA, 19 nt, Homo sapiens
  misc_RNA (1)...(19): siRNA sense strand
ucaaugagaagguguguga

SEQ ID NO: 2109508 - RNA, 19 nt, Homo sapiens
  misc_RNA (1)...(19): siRNA sense strand
gaagaagggaagcuugaug

SEQ ID NO: 2109509 - RNA, 19 nt, Homo sapiens
  misc_RNA (1)...(19): siRNA sense strand
gagaaggugugugaaugga

SEQ ID NO: 2109510 - RNA, 19 nt, Homo sapiens
  misc_RNA (1)...(19): siRNA sense strand
ccaccgagccucagagaga

SEQ ID NO: 2109511 - RNA, 19 nt, Homo sapiens
  misc_RNA (1)...(19): siRNA sense strand
gaccagaugcauucaaguu

SEQ ID NO: 2109512 - RNA, 19 nt, Homo sapiens
  misc_RNA (1)...(19): siRNA sense strand
gugaucagcccucaaguga

SEQ ID NO: 2109513 - RNA, 19 nt, Homo sapiens
  misc_RNA (1)...(19): siRNA sense strand
agaaggggauggaauauuu

SEQ ID NO: 2109514 - RNA, 19 nt, Homo sapiens
  misc_RNA (1)...(19): siRNA sense strand
cagaagaccagaugcauuc

SEQ ID NO: 2109515 - RNA, 19 nt, Homo sapiens
  misc_RNA (1)...(19): siRNA sense strand
ucuaugaugugagcuauga

SEQ ID NO: 2109516 - RNA, 19 nt, Homo sapiens
  misc_RNA (1)...(19): siRNA sense strand
gaaagacaaaucucaggau

SEQ ID NO: 2109517 - RNA, 19 nt, Homo sapiens
  misc_RNA (1)...(19): siRNA sense strand
gcugugcucuccuugugaa

SEQ ID NO: 2109518 - RNA, 19 nt, Homo sapiens
  misc_RNA (1)...(19): siRNA sense strand
gaaacagauggaagaggua

SEQ ID NO: 2109519 - RNA, 19 nt, Homo sapiens
  misc_RNA (1)...(19): siRNA sense strand
gaaggcccuggguacauua

SEQ ID NO: 2109520 - RNA, 19 nt, Homo sapiens
  misc_RNA (1)...(19): siRNA sense strand
gaaggauucaaguuacuga

SEQ ID NO: 2109521 - RNA, 19 nt, Homo sapiens
  misc_RNA (1)...(19): siRNA sense strand
gagaaggauucaaguuacu

SEQ ID NO: 2109522 - RNA, 19 nt, Homo sapiens
  misc_RNA (1)...(19): siRNA sense strand
cuccaaauauuaacagaga

SEQ ID NO: 2109523 - RNA, 19 nt, Homo sapiens
  misc_RNA (1)...(19): siRNA sense strand
ggauaaauucuaugaugug

SEQ ID NO: 2109524 - RNA, 19 nt, Homo sapiens
  misc_RNA (1)...(19): siRNA sense strand
ugaaugguccuacaacaga

SEQ ID NO: 2109525 - RNA, 19 nt, Homo sapiens
  misc_RNA (1)...(19): siRNA sense strand
gaagugguuacuccaaaga

SEQ ID NO: 2109526 - RNA, 19 nt, Homo sapiens
  misc_RNA (1)...(19): siRNA sense strand
aggagaggaugaugaagaa

SEQ ID NO: 2109527 - RNA, 19 nt, Homo sapiens
  misc_RNA (1)...(19): siRNA sense strand
gaaaagagaaggauucaag

SEQ ID NO: 2109528 - RNA, 19 nt, Homo sapiens
  misc_RNA (1)...(19): siRNA sense strand
cagcuuugaugucgaggaa

SEQ ID NO: 2109529 - RNA, 19 nt, Homo sapiens
  misc_RNA (1)...(19): siRNA sense strand
uggaagagguaaaaugaua

SEQ ID NO: 2109530 - RNA, 19 nt, Homo sapiens
  misc_RNA (1)...(19): siRNA sense strand
gaaaaggggcugucugguu

SEQ ID NO: 2109531 - RNA, 19 nt, Homo sapiens
  misc_RNA (1)...(19): siRNA sense strand
caacaagagaugauuccaa

SEQ ID NO: 2109532 - RNA, 19 nt, Homo sapiens
  misc_RNA (1)...(19): siRNA sense strand
gcacuggagccuuggauag

SEQ ID NO: 2109533 - RNA, 19 nt, Homo sapiens
  misc_RNA (1)...(19): siRNA sense strand
acaagucuauccaguguag

SEQ ID NO: 2109534 - RNA, 19 nt, Homo sapiens
  misc_RNA (1)...(19): siRNA sense strand
gcucaguguccaauaugua

SEQ ID NO: 2109535 - RNA, 19 nt, Homo sapiens
  misc_RNA (1)...(19): siRNA sense strand
cgaaggaagccucuuagau

SEQ ID NO: 2109536 - RNA, 19 nt, Homo sapiens
  misc_RNA (1)...(19): siRNA sense strand
gaaugguccuacaacagau

SEQ ID NO: 2109537 - RNA, 19 nt, Homo sapiens
  misc_RNA (1)...(19): siRNA sense strand
ggaugaggcucugcgaagu

SEQ ID NO: 2109538 - RNA, 19 nt, Homo sapiens
  misc_RNA (1)...(19): siRNA sense strand
ggucaagccuguggcaaag

SEQ ID NO: 2109539 - RNA, 19 nt, Homo sapiens
  misc_RNA (1)...(19): siRNA sense strand
uacauuaggccuugaagaa

SEQ ID NO: 2109540 - RNA, 19 nt, Homo sapiens
  misc_RNA (1)...(19): siRNA sense strand
gauuggcacugagaauguu

SEQ ID NO: 2109541 - RNA, 19 nt, Homo sapiens
  misc_RNA (1)...(19): siRNA sense strand
gaaagcuacagaugucaau

SEQ ID NO: 2109542 - RNA, 19 nt, Homo sapiens
  misc_RNA (1)...(19): siRNA sense strand
gcugaaugguccuacaaca

SEQ ID NO: 2109543 - RNA, 19 nt, Homo sapiens
  misc_RNA (1)...(19): siRNA sense strand
gcuucucucugguggaauu

SEQ ID NO: 2109544 - RNA, 19 nt, Homo sapiens
  misc_RNA (1)...(19): siRNA sense strand
agagaaggauucaaguuac

SEQ ID NO: 2109545 - RNA, 19 nt, Homo sapiens
  misc_RNA (1)...(19): siRNA sense strand
ccagaugcauucaaguucu

SEQ ID NO: 2109546 - RNA, 19 nt, Homo sapiens
  misc_RNA (1)...(19): siRNA sense strand
cauuaggccuugaagaaag

SEQ ID NO: 2109547 - RNA, 19 nt, Homo sapiens
  misc_RNA (1)...(19): siRNA sense strand
uuucacaucugcagagugu

SEQ ID NO: 2109548 - RNA, 19 nt, Homo sapiens
  misc_RNA (1)...(19): siRNA sense strand
aaagagaaggauucaaguu

SEQ ID NO: 2109549 - RNA, 19 nt, Homo sapiens
  misc_RNA (1)...(19): siRNA sense strand
gucgggaugucauacacua

SEQ ID NO: 2109550 - RNA, 19 nt, Homo sapiens
  misc_RNA (1)...(19): siRNA sense strand
gugcucuccuugugaaaga

SEQ ID NO: 2109551 - RNA, 19 nt, Homo sapiens
  misc_RNA (1)...(19): siRNA sense strand
gcagcaccguuucuugucu

SEQ ID NO: 2109552 - RNA, 19 nt, Homo sapiens
  misc_RNA (1)...(19): siRNA sense strand
uccaauauguaugcaauga

SEQ ID NO: 2109553 - RNA, 19 nt, Homo sapiens
  misc_RNA (1)...(19): siRNA sense strand
ugaauuuauuggcuggaaa

SEQ ID NO: 2109554 - RNA, 19 nt, Homo sapiens
  misc_RNA (1)...(19): siRNA sense strand
ccuguaggcuaauaaugga

SEQ ID NO: 2109555 - RNA, 19 nt, Homo sapiens
  misc_RNA (1)...(19): siRNA sense strand
guaccuaguagaugaaauc

SEQ ID NO: 2109556 - RNA, 19 nt, Homo sapiens
  misc_RNA (1)...(19): siRNA sense strand
gcucuugcuuuaucuaggu

SEQ ID NO: 2109557 - RNA, 19 nt, Homo sapiens
  misc_RNA (1)...(19): siRNA sense strand
gaagaccagaugcauucaa

SEQ ID NO: 2109558 - RNA, 19 nt, Homo sapiens
  misc_RNA (1)...(19): siRNA sense strand
gugcugugcucuccuugug

SEQ ID NO: 2109559 - RNA, 19 nt, Homo sapiens
  misc_RNA (1)...(19): siRNA sense strand
gggcagcaccguuucuugu

SEQ ID NO: 2109560 - RNA, 19 nt, Homo sapiens
  misc_RNA (1)...(19): siRNA sense strand
cugaggaacuggagaagca

SEQ ID NO: 2109561 - RNA, 19 nt, Homo sapiens
  misc_RNA (1)...(19): siRNA sense strand
gaauguuugcuuuguggaa

SEQ ID NO: 2109562 - RNA, 19 nt, Homo sapiens
  misc_RNA (1)...(19): siRNA sense strand
ggauuggcacugagaaugu

SEQ ID NO: 2109563 - RNA, 19 nt, Homo sapiens
  misc_RNA (1)...(19): siRNA sense strand
cauaaacuauuggaacucu

SEQ ID NO: 2109564 - RNA, 19 nt, Homo sapiens
  misc_RNA (1)...(19): siRNA sense strand
uuaaggagaggaugaugaa

SEQ ID NO: 2109565 - RNA, 19 nt, Homo sapiens
  misc_RNA (1)...(19): siRNA sense strand
gauaaagucccuccaauua

SEQ ID NO: 2109566 - RNA, 19 nt, Homo sapiens
  misc_RNA (1)...(19): siRNA sense strand
ucacgaaucuugacaaauu

SEQ ID NO: 2109567 - RNA, 19 nt, Homo sapiens
  misc_RNA (1)...(19): siRNA sense strand
gcaagaagguugugggaaa

SEQ ID NO: 2109568 - RNA, 19 nt, Homo sapiens
  misc_RNA (1)...(19): siRNA sense strand
ccacagggcuucuauccua

SEQ ID NO: 2109569 - RNA, 19 nt, Homo sapiens
  misc_RNA (1)...(19): siRNA sense strand
ggaagaaucugucacgaau

SEQ ID NO: 2109570 - RNA, 19 nt, Homo sapiens
  misc_RNA (1)...(19): siRNA sense strand
uaaagucccuccaauuaaa

SEQ ID NO: 2109571 - RNA, 19 nt, Homo sapiens
  misc_RNA (1)...(19): siRNA sense strand
ggacacagccucaaguuug

SEQ ID NO: 2109572 - RNA, 19 nt, Homo sapiens
  misc_RNA (1)...(19): siRNA sense strand
gagauuugcugauggaaga

SEQ ID NO: 2109573 - RNA, 19 nt, Homo sapiens
  misc_RNA (1)...(19): siRNA sense strand
uaaaucaacucccgacaga

SEQ ID NO: 2109574 - RNA, 19 nt, Homo sapiens
  misc_RNA (1)...(19): siRNA sense strand
ggaggucucugcgauauga

SEQ ID NO: 2109575 - RNA, 19 nt, Homo sapiens
  misc_RNA (1)...(19): siRNA sense strand
ggagguggcauuucuauga

SEQ ID NO: 2109576 - RNA, 19 nt, Homo sapiens
  misc_RNA (1)...(19): siRNA sense strand
gagggaggcauucucauua

SEQ ID NO: 2109577 - RNA, 19 nt, Homo sapiens
  misc_RNA (1)...(19): siRNA sense strand
ggaagaagcauaagaacau

SEQ ID NO: 2109578 - RNA, 19 nt, Homo sapiens
  misc_RNA (1)...(19): siRNA sense strand
cgaaggaccuggcgucuag

SEQ ID NO: 2109579 - RNA, 19 nt, Homo sapiens
  misc_RNA (1)...(19): siRNA sense strand
gagauaaagucccuccaau

SEQ ID NO: 2109580 - RNA, 19 nt, Homo sapiens
  misc_RNA (1)...(19): siRNA sense strand
ugaagcaucugaagacguu

SEQ ID NO: 2109581 - RNA, 19 nt, Homo sapiens
  misc_RNA (1)...(19): siRNA sense strand
gaagaacaggacagagaua

SEQ ID NO: 2109582 - RNA, 19 nt, Homo sapiens
  misc_RNA (1)...(19): siRNA sense strand
ugagaaagaucacgucuac

SEQ ID NO: 2109583 - RNA, 19 nt, Homo sapiens
  misc_RNA (1)...(19): siRNA sense strand
caaauaaugugcaggaaaa

SEQ ID NO: 2109584 - RNA, 19 nt, Homo sapiens
  misc_RNA (1)...(19): siRNA sense strand
caauauugcacaccuuaua

SEQ ID NO: 2109585 - RNA, 19 nt, Homo sapiens
  misc_RNA (1)...(19): siRNA sense strand
ggugcugguugucucauua

SEQ ID NO: 2109586 - RNA, 19 nt, Homo sapiens
  misc_RNA (1)...(19): siRNA sense strand
gauaugauaccagcuguuu

SEQ ID NO: 2109587 - RNA, 19 nt, Homo sapiens
  misc_RNA (1)...(19): siRNA sense strand
gagcaggccagauuuaaau

SEQ ID NO: 2109588 - RNA, 19 nt, Homo sapiens
  misc_RNA (1)...(19): siRNA sense strand
gauggaagaagcauaagaa

SEQ ID NO: 2109589 - RNA, 19 nt, Homo sapiens
  misc_RNA (1)...(19): siRNA sense strand
gaacaggacagagauaaag

SEQ ID NO: 2109590 - RNA, 19 nt, Homo sapiens
  misc_RNA (1)...(19): siRNA sense strand
ggagugccguggugucuuc

SEQ ID NO: 2109591 - RNA, 19 nt, Homo sapiens
  misc_RNA (1)...(19): siRNA sense strand
gaggagcaggccagauuua

SEQ ID NO: 2109592 - RNA, 19 nt, Homo sapiens
  misc_RNA (1)...(19): siRNA sense strand
gaagaagcauaagaacauc

SEQ ID NO: 2109593 - RNA, 19 nt, Homo sapiens
  misc_RNA (1)...(19): siRNA sense strand
gcacgggaauggccaggau

SEQ ID NO: 2109594 - RNA, 19 nt, Homo sapiens
  misc_RNA (1)...(19): siRNA sense strand
gcugauggaagaagcauaa

SEQ ID NO: 2109595 - RNA, 19 nt, Homo sapiens
  misc_RNA (1)...(19): siRNA sense strand
acuaagacgugcccugaaa

SEQ ID NO: 2109596 - RNA, 19 nt, Homo sapiens
  misc_RNA (1)...(19): siRNA sense strand
ggagcaggccagauuuaaa

SEQ ID NO: 2109597 - RNA, 19 nt, Homo sapiens
  misc_RNA (1)...(19): siRNA sense strand
ggaagcacacccuguccua

SEQ ID NO: 2109598 - RNA, 19 nt, Homo sapiens
  misc_RNA (1)...(19): siRNA sense strand
gcagauugaugaguaugau

SEQ ID NO: 2109599 - RNA, 19 nt, Homo sapiens
  misc_RNA (1)...(19): siRNA sense strand
gaagaugggaagauuuauc

SEQ ID NO: 2109600 - RNA, 19 nt, Homo sapiens
  misc_RNA (1)...(19): siRNA sense strand
aaagguuuauggagcgaua

SEQ ID NO: 2109601 - RNA, 19 nt, Homo sapiens
  misc_RNA (1)...(19): siRNA sense strand
cugaagaugggaagauuua

SEQ ID NO: 2109602 - RNA, 19 nt, Homo sapiens
  misc_RNA (1)...(19): siRNA sense strand
gaaaaggaauaccgugugu

SEQ ID NO: 2109603 - RNA, 19 nt, Homo sapiens
  misc_RNA (1)...(19): siRNA sense strand
ggagauccgcgaaggaaga

SEQ ID NO: 2109604 - RNA, 19 nt, Homo sapiens
  misc_RNA (1)...(19): siRNA sense strand
guccauccaucgcauaaga

SEQ ID NO: 2109605 - RNA, 19 nt, Homo sapiens
  misc_RNA (1)...(19): siRNA sense strand
gaacugaagaugggaagau

SEQ ID NO: 2109606 - RNA, 19 nt, Homo sapiens
  misc_RNA (1)...(19): siRNA sense strand
gcacgaagaacaggacaga

SEQ ID NO: 2109607 - RNA, 19 nt, Homo sapiens
  misc_RNA (1)...(19): siRNA sense strand
ggaccggccacucaauauu

SEQ ID NO: 2109608 - RNA, 19 nt, Homo sapiens
  misc_RNA (1)...(19): siRNA sense strand
gaccuggcgucuagagaug

SEQ ID NO: 2109609 - RNA, 19 nt, Homo sapiens
  misc_RNA (1)...(19): siRNA sense strand
cgugagagauggagaaagg

SEQ ID NO: 2109610 - RNA, 19 nt, Homo sapiens
  misc_RNA (1)...(19): siRNA sense strand
caacagaagaagcccuuug

SEQ ID NO: 2109611 - RNA, 19 nt, Homo sapiens
  misc_RNA (1)...(19): siRNA sense strand
acuacaaggugcagauuga

SEQ ID NO: 2109612 - RNA, 19 nt, Homo sapiens
  misc_RNA (1)...(19): siRNA sense strand
gaaucugucacgaaucuug

SEQ ID NO: 2109613 - RNA, 19 nt, Homo sapiens
  misc_RNA (1)...(19): siRNA sense strand
gggaagaaucugucacgaa

SEQ ID NO: 2109614 - RNA, 19 nt, Homo sapiens
  misc_RNA (1)...(19): siRNA sense strand
cgcauaagagcaaagaaua

SEQ ID NO: 2109615 - RNA, 19 nt, Homo sapiens
  misc_RNA (1)...(19): siRNA sense strand
ggaggagcaggccagauuu

SEQ ID NO: 2109616 - RNA, 19 nt, Homo sapiens
  misc_RNA (1)...(19): siRNA sense strand
uggauagcgucaaauaaug

SEQ ID NO: 2109617 - RNA, 19 nt, Homo sapiens
  misc_RNA (1)...(19): siRNA sense strand
gaccggccacucaauauug

SEQ ID NO: 2109618 - RNA, 19 nt, Homo sapiens
  misc_RNA (1)...(19): siRNA sense strand
auaaagucccuccaauuaa

SEQ ID NO: 2109619 - RNA, 19 nt, Homo sapiens
  misc_RNA (1)...(19): siRNA sense strand
ggcaugccguuuagcagaa

SEQ ID NO: 2109620 - RNA, 19 nt, Homo sapiens
  misc_RNA (1)...(19): siRNA sense strand
aagaaucugucacgaaucu

SEQ ID NO: 2109621 - RNA, 19 nt, Homo sapiens
  misc_RNA (1)...(19): siRNA sense strand
ucaaauaaugugcaggaaa

SEQ ID NO: 2109622 - RNA, 19 nt, Homo sapiens
  misc_RNA (1)...(19): siRNA sense strand
ggauagcgucaaauaaugu

SEQ ID NO: 2109623 - RNA, 19 nt, Homo sapiens
  misc_RNA (1)...(19): siRNA sense strand
ggaauggccaggaucagau

SEQ ID NO: 2109624 - RNA, 19 nt, Homo sapiens
  misc_RNA (1)...(19): siRNA sense strand
agggaggcauucucauuaa

SEQ ID NO: 2109625 - RNA, 19 nt, Homo sapiens
  misc_RNA (1)...(19): siRNA sense strand
aggaagagcggaccaagaa

SEQ ID NO: 2109626 - RNA, 19 nt, Homo sapiens
  misc_RNA (1)...(19): siRNA sense strand
gaauggccaggaucagauu

SEQ ID NO: 2109627 - RNA, 19 nt, Homo sapiens
  misc_RNA (1)...(19): siRNA sense strand
gacacagccucaaguuugg

SEQ ID NO: 2109628 - RNA, 19 nt, Homo sapiens
  misc_RNA (1)...(19): siRNA sense strand
gagagacggagaaagguau

SEQ ID NO: 2109629 - RNA, 19 nt, Homo sapiens
  misc_RNA (1)...(19): siRNA sense strand
caccgugcauuauaacaug

SEQ ID NO: 2109630 - RNA, 19 nt, Homo sapiens
  misc_RNA (1)...(19): siRNA sense strand
gcacugggagcugcaaaug

SEQ ID NO: 2109631 - RNA, 19 nt, Homo sapiens
  misc_RNA (1)...(19): siRNA sense strand
aauuauggcaugccguuua

SEQ ID NO: 2109632 - RNA, 19 nt, Homo sapiens
  misc_RNA (1)...(19): siRNA sense strand
gcuguggcccugagaaaga

SEQ ID NO: 2109633 - RNA, 19 nt, Homo sapiens
  misc_RNA (1)...(19): siRNA sense strand
ggaccuggcgucuagagau

SEQ ID NO: 2109634 - RNA, 19 nt, Homo sapiens
  misc_RNA (1)...(19): siRNA sense strand
cggaggagcaggccagauu

SEQ ID NO: 2109635 - RNA, 19 nt, Homo sapiens
  misc_RNA (1)...(19): siRNA sense strand
ggaggcauucucauuaaca

SEQ ID NO: 2109636 - RNA, 19 nt, Homo sapiens
  misc_RNA (1)...(19): siRNA sense strand
agauaaagucccuccaauu

SEQ ID NO: 2109637 - RNA, 19 nt, Homo sapiens
  misc_RNA (1)...(19): siRNA sense strand
agucaaggcgaaagguuua

SEQ ID NO: 2109638 - RNA, 19 nt, Homo sapiens
  misc_RNA (1)...(19): siRNA sense strand
gcauucucauuaacaguca

SEQ ID NO: 2109639 - RNA, 19 nt, Homo sapiens
  misc_RNA (1)...(19): siRNA sense strand
gaacauggaggaggacaac

SEQ ID NO: 2109640 - RNA, 19 nt, Homo sapiens
  misc_RNA (1)...(19): siRNA sense strand
ugcagaaccugaugcuaug

SEQ ID NO: 2109641 - RNA, 19 nt, Homo sapiens
  misc_RNA (1)...(19): siRNA sense strand
cagcauguguuaccaagcu

SEQ ID NO: 2109642 - RNA, 19 nt, Homo sapiens
  misc_RNA (1)...(19): siRNA sense strand
gcauaagagcaaagaauac

SEQ ID NO: 2109643 - RNA, 19 nt, Homo sapiens
  misc_RNA (1)...(19): siRNA sense strand
acaaggugcagauugauga

SEQ ID NO: 2109644 - RNA, 19 nt, Homo sapiens
  misc_RNA (1)...(19): siRNA sense strand
cugcagaaccugaugcuau

SEQ ID NO: 2109645 - RNA, 19 nt, Homo sapiens
  misc_RNA (1)...(19): siRNA sense strand
cacgaaucuugacaaauug

SEQ ID NO: 2109646 - RNA, 19 nt, Homo sapiens
  misc_RNA (1)...(19): siRNA sense strand
gcugcaaacgcccacgaua

SEQ ID NO: 2109647 - RNA, 19 nt, Homo sapiens
  misc_RNA (1)...(19): siRNA sense strand
gaucggaccggccacucaa

SEQ ID NO: 2109648 - RNA, 19 nt, Homo sapiens
  misc_RNA (1)...(19): siRNA sense strand
gaagcacacccuguccuau

SEQ ID NO: 2109649 - RNA, 19 nt, Homo sapiens
  misc_RNA (1)...(19): siRNA sense strand
gaccugaagcaucugaaga

SEQ ID NO: 2109650 - RNA, 19 nt, Homo sapiens
  misc_RNA (1)...(19): siRNA sense strand
ugagagacggagaaaggua

SEQ ID NO: 2109651 - RNA, 19 nt, Homo sapiens
  misc_RNA (1)...(19): siRNA sense strand
gggaauggccaggaucaga

SEQ ID NO: 2109652 - RNA, 19 nt, Homo sapiens
  misc_RNA (1)...(19): siRNA sense strand
ccuuggaucuccugaugga

SEQ ID NO: 2109653 - RNA, 19 nt, Homo sapiens
  misc_RNA (1)...(19): siRNA sense strand
ggugcagauugaugaguau

SEQ ID NO: 2109654 - RNA, 19 nt, Homo sapiens
  misc_RNA (1)...(19): siRNA sense strand
gaggagcagaccaagaaga

SEQ ID NO: 2109655 - RNA, 19 nt, Homo sapiens
  misc_RNA (1)...(19): siRNA sense strand
aaaucaugcugccguguuc

SEQ ID NO: 2109656 - RNA, 19 nt, Homo sapiens
  misc_RNA (1)...(19): siRNA sense strand
aggaggagcagaccaagaa

SEQ ID NO: 2109657 - RNA, 19 nt, Homo sapiens
  misc_RNA (1)...(19): siRNA sense strand
cuggauagcgucaaauaau

SEQ ID NO: 2109658 - RNA, 19 nt, Homo sapiens
  misc_RNA (1)...(19): siRNA sense strand
gccuggauagcgucaaaua

SEQ ID NO: 2109659 - RNA, 19 nt, Homo sapiens
  misc_RNA (1)...(19): siRNA sense strand
gggcaaacucgcuguugga

SEQ ID NO: 2109660 - RNA, 19 nt, Homo sapiens
  misc_RNA (1)...(19): siRNA sense strand
agagggaggcauucucauu

SEQ ID NO: 2109661 - RNA, 19 nt, Homo sapiens
  misc_RNA (1)...(19): siRNA sense strand
caaacgcccacgauacugu

SEQ ID NO: 2109662 - RNA, 19 nt, Homo sapiens
  misc_RNA (1)...(19): siRNA sense strand
agacgugcccugaaacuca

SEQ ID NO: 2109663 - RNA, 19 nt, Homo sapiens
  misc_RNA (1)...(19): siRNA sense strand
caagaagguugugggaaaa

SEQ ID NO: 2109664 - RNA, 19 nt, Homo sapiens
  misc_RNA (1)...(19): siRNA sense strand
aggugcagauugaugagua

SEQ ID NO: 2109665 - RNA, 19 nt, Homo sapiens
  misc_RNA (1)...(19): siRNA sense strand
gcaagugucucuacuguca

SEQ ID NO: 2109666 - RNA, 19 nt, Homo sapiens
  misc_RNA (1)...(19): siRNA sense strand
gcuagaagcugccaucaga

SEQ ID NO: 2109667 - RNA, 19 nt, Homo sapiens
  misc_RNA (1)...(19): siRNA sense strand
gaaauuaacuacccuugca

SEQ ID NO: 2109668 - RNA, 19 nt, Homo sapiens
  misc_RNA (1)...(19): siRNA sense strand
caacgaagcugugaagaau

SEQ ID NO: 2109669 - RNA, 19 nt, Homo sapiens
  misc_RNA (1)...(19): siRNA sense strand
ggacuaugauauuacauug

SEQ ID NO: 2109670 - RNA, 19 nt, Homo sapiens
  misc_RNA (1)...(19): siRNA sense strand
ugaagaaucugaaucugaa

SEQ ID NO: 2109671 - RNA, 19 nt, Homo sapiens
  misc_RNA (1)...(19): siRNA sense strand
caucuggacuaugauauua

SEQ ID NO: 2109672 - RNA, 19 nt, Homo sapiens
  misc_RNA (1)...(19): siRNA sense strand
gaggagcuaucgauaagaa

SEQ ID NO: 2109673 - RNA, 19 nt, Homo sapiens
  misc_RNA (1)...(19): siRNA sense strand
caacaguucaccaccauua

SEQ ID NO: 2109674 - RNA, 19 nt, Homo sapiens
  misc_RNA (1)...(19): siRNA sense strand
gcaagaacaagaauuaaga

SEQ ID NO: 2109675 - RNA, 19 nt, Homo sapiens
  misc_RNA (1)...(19): siRNA sense strand
ggaaccagaaccauuauuu

SEQ ID NO: 2109676 - RNA, 19 nt, Homo sapiens
  misc_RNA (1)...(19): siRNA sense strand
auaaguggcugaugauaaa

SEQ ID NO: 2109677 - RNA, 19 nt, Homo sapiens
  misc_RNA (1)...(19): siRNA sense strand
caaaauaaguggcugauga

SEQ ID NO: 2109678 - RNA, 19 nt, Homo sapiens
  misc_RNA (1)...(19): siRNA sense strand
caucagagccuccuuacaa

SEQ ID NO: 2109679 - RNA, 19 nt, Homo sapiens
  misc_RNA (1)...(19): siRNA sense strand
cgaaggaaauuaucucauc

SEQ ID NO: 2109680 - RNA, 19 nt, Homo sapiens
  misc_RNA (1)...(19): siRNA sense strand
ggaaauggcagucacuaug

SEQ ID NO: 2109681 - RNA, 19 nt, Homo sapiens
  misc_RNA (1)...(19): siRNA sense strand
ggucagagauacauacagu

SEQ ID NO: 2109682 - RNA, 19 nt, Homo sapiens
  misc_RNA (1)...(19): siRNA sense strand
ugaagcacgugcagucuaa

SEQ ID NO: 2109683 - RNA, 19 nt, Homo sapiens
  misc_RNA (1)...(19): siRNA sense strand
ucagagagccuuauagaug

SEQ ID NO: 2109684 - RNA, 19 nt, Homo sapiens
  misc_RNA (1)...(19): siRNA sense strand
gguggaaccagaaccauua

SEQ ID NO: 2109685 - RNA, 19 nt, Homo sapiens
  misc_RNA (1)...(19): siRNA sense strand
gaagcugugaagaauauua

SEQ ID NO: 2109686 - RNA, 19 nt, Homo sapiens
  misc_RNA (1)...(19): siRNA sense strand
ccauugauuugaugcauaa

SEQ ID NO: 2109687 - RNA, 19 nt, Homo sapiens
  misc_RNA (1)...(19): siRNA sense strand
gaaccagaaccauuauuug

SEQ ID NO: 2109688 - RNA, 19 nt, Homo sapiens
  misc_RNA (1)...(19): siRNA sense strand
caacaauaaucuggaaaug

SEQ ID NO: 2109689 - RNA, 19 nt, Homo sapiens
  misc_RNA (1)...(19): siRNA sense strand
caaagaguguggccagaug

SEQ ID NO: 2109690 - RNA, 19 nt, Homo sapiens
  misc_RNA (1)...(19): siRNA sense strand
gaagagcccaguaccaguu

SEQ ID NO: 2109691 - RNA, 19 nt, Homo sapiens
  misc_RNA (1)...(19): siRNA sense strand
gaaggaaauuaucucaucu

SEQ ID NO: 2109692 - RNA, 19 nt, Homo sapiens
  misc_RNA (1)...(19): siRNA sense strand
gaaucugaaucugaacuuu

SEQ ID NO: 2109693 - RNA, 19 nt, Homo sapiens
  misc_RNA (1)...(19): siRNA sense strand
gcaacgaagcugugaagaa

SEQ ID NO: 2109694 - RNA, 19 nt, Homo sapiens
  misc_RNA (1)...(19): siRNA sense strand
uaacuacccuugcagaucu

SEQ ID NO: 2109695 - RNA, 19 nt, Homo sapiens
  misc_RNA (1)...(19): siRNA sense strand
gaaauggcagucacuaugu

SEQ ID NO: 2109696 - RNA, 19 nt, Homo sapiens
  misc_RNA (1)...(19): siRNA sense strand
gaacuucucaccaacuuuc

SEQ ID NO: 2109697 - RNA, 19 nt, Homo sapiens
  misc_RNA (1)...(19): siRNA sense strand
gaagacagccagcuagaag

SEQ ID NO: 2109698 - RNA, 19 nt, Homo sapiens
  misc_RNA (1)...(19): siRNA sense strand
uaaaggauacccaaaugaa

SEQ ID NO: 2109699 - RNA, 19 nt, Homo sapiens
  misc_RNA (1)...(19): siRNA sense strand
ccacaaaccaccaaggauu

SEQ ID NO: 2109700 - RNA, 19 nt, Homo sapiens
  misc_RNA (1)...(19): siRNA sense strand
gucagaagcuaguagaaug

SEQ ID NO: 2109701 - RNA, 19 nt, Homo sapiens
  misc_RNA (1)...(19): siRNA sense strand
ucagagauacauacaguuu

SEQ ID NO: 2109702 - RNA, 19 nt, Homo sapiens
  misc_RNA (1)...(19): siRNA sense strand
cagcaagugucucuacugu

SEQ ID NO: 2109703 - RNA, 19 nt, Homo sapiens
  misc_RNA (1)...(19): siRNA sense strand
caggauagccgcucagaug

SEQ ID NO: 2109704 - RNA, 19 nt, Homo sapiens
  misc_RNA (1)...(19): siRNA sense strand
aagaagagguagagaaucu

SEQ ID NO: 2109705 - RNA, 19 nt, Homo sapiens
  misc_RNA (1)...(19): siRNA sense strand
ucuaaaggauacccaaaug

SEQ ID NO: 2109706 - RNA, 19 nt, Homo sapiens
  misc_RNA (1)...(19): siRNA sense strand
gaaaguguaggaaaacaua

SEQ ID NO: 2109707 - RNA, 19 nt, Homo sapiens
  misc_RNA (1)...(19): siRNA sense strand
gaaagucuccccacaaaga

SEQ ID NO: 2109708 - RNA, 19 nt, Homo sapiens
  misc_RNA (1)...(19): siRNA sense strand
acgaagcugugaagaauau

SEQ ID NO: 2109709 - RNA, 19 nt, Homo sapiens
  misc_RNA (1)...(19): siRNA sense strand
ugaaacagccaaagagugu

SEQ ID NO: 2109710 - RNA, 19 nt, Homo sapiens
  misc_RNA (1)...(19): siRNA sense strand
gcaacaauaaucuggaaau

SEQ ID NO: 2109711 - RNA, 19 nt, Homo sapiens
  misc_RNA (1)...(19): siRNA sense strand
cuugaagcgugcaacaaua

SEQ ID NO: 2109712 - RNA, 19 nt, Homo sapiens
  misc_RNA (1)...(19): siRNA sense strand
ccuuauagaugcaagugaa

SEQ ID NO: 2109713 - RNA, 19 nt, Homo sapiens
  misc_RNA (1)...(19): siRNA sense strand
gugcaacaauaaucuggaa

SEQ ID NO: 2109714 - RNA, 19 nt, Homo sapiens
  misc_RNA (1)...(19): siRNA sense strand
gcagugaggaguucauauc

SEQ ID NO: 2109715 - RNA, 19 nt, Homo sapiens
  misc_RNA (1)...(19): siRNA sense strand
caagugaaaguguaggaaa

SEQ ID NO: 2109716 - RNA, 19 nt, Homo sapiens
  misc_RNA (1)...(19): siRNA sense strand
guucagagagccuuauaga

SEQ ID NO: 2109717 - RNA, 19 nt, Homo sapiens
  misc_RNA (1)...(19): siRNA sense strand
acacacagaagaagaaguu

SEQ ID NO: 2109718 - RNA, 19 nt, Homo sapiens
  misc_RNA (1)...(19): siRNA sense strand
gaaaagaggagaauagaag

SEQ ID NO: 2109719 - RNA, 19 nt, Homo sapiens
  misc_RNA (1)...(19): siRNA sense strand
gauagccgcucagaugaag

SEQ ID NO: 2109720 - RNA, 19 nt, Homo sapiens
  misc_RNA (1)...(19): siRNA sense strand
gcagguuuaucaugacagu

SEQ ID NO: 2109721 - RNA, 19 nt, Homo sapiens
  misc_RNA (1)...(19): siRNA sense strand
ucuggcagguuuaucauga

SEQ ID NO: 2109722 - RNA, 19 nt, Homo sapiens
  misc_RNA (1)...(19): siRNA sense strand
gaauggcaccaguuagaug

SEQ ID NO: 2109723 - RNA, 19 nt, Homo sapiens
  misc_RNA (1)...(19): siRNA sense strand
gagcuaucgauaagaaauu

SEQ ID NO: 2109724 - RNA, 19 nt, Homo sapiens
  misc_RNA (1)...(19): siRNA sense strand
gcacgugcagucuaaagga

SEQ ID NO: 2109725 - RNA, 19 nt, Homo sapiens
  misc_RNA (1)...(19): siRNA sense strand
cagaaagucuccccacaaa

SEQ ID NO: 2109726 - RNA, 19 nt, Homo sapiens
  misc_RNA (1)...(19): siRNA sense strand
gaggaguucauauccguuu

SEQ ID NO: 2109727 - RNA, 19 nt, Homo sapiens
  misc_RNA (1)...(19): siRNA sense strand
uagaauggcaccaguuaga

SEQ ID NO: 2109728 - RNA, 19 nt, Homo sapiens
  misc_RNA (1)...(19): siRNA sense strand
ggacaggucagaagcuagu

SEQ ID NO: 2109729 - RNA, 19 nt, Homo sapiens
  misc_RNA (1)...(19): siRNA sense strand
ggaaggucagagauacaua

SEQ ID NO: 2109730 - RNA, 19 nt, Homo sapiens
  misc_RNA (1)...(19): siRNA sense strand
gugaggaaggucagagaua

SEQ ID NO: 2109731 - RNA, 19 nt, Homo sapiens
  misc_RNA (1)...(19): siRNA sense strand
aauaaguggcugaugauaa

SEQ ID NO: 2109732 - RNA, 19 nt, Homo sapiens
  misc_RNA (1)...(19): siRNA sense strand
ggacaacuggauggacuuu

SEQ ID NO: 2109733 - RNA, 19 nt, Homo sapiens
  misc_RNA (1)...(19): siRNA sense strand
guggaggaaucgcugaaga

SEQ ID NO: 2109734 - RNA, 19 nt, Homo sapiens
  misc_RNA (1)...(19): siRNA sense strand
uggaggagcuaucgauaag

SEQ ID NO: 2109735 - RNA, 19 nt, Homo sapiens
  misc_RNA (1)...(19): siRNA sense strand
ucggcaagaacaagaauua

SEQ ID NO: 2109736 - RNA, 19 nt, Homo sapiens
  misc_RNA (1)...(19): siRNA sense strand
ggagcuaucgauaagaaau

SEQ ID NO: 2109737 - RNA, 19 nt, Homo sapiens
  misc_RNA (1)...(19): siRNA sense strand
cagcugauguugcgguauc

SEQ ID NO: 2109738 - RNA, 19 nt, Homo sapiens
  misc_RNA (1)...(19): siRNA sense strand
ggggauagauguaaaugga

SEQ ID NO: 2109739 - RNA, 19 nt, Homo sapiens
  misc_RNA (1)...(19): siRNA sense strand
ugaugaagaagaagaggua

SEQ ID NO: 2109740 - RNA, 19 nt, Homo sapiens
  misc_RNA (1)...(19): siRNA sense strand
gaugaagaaucugaaucug

SEQ ID NO: 2109741 - RNA, 19 nt, Homo sapiens
  misc_RNA (1)...(19): siRNA sense strand
ggauagccgcucagaugaa

SEQ ID NO: 2109742 - RNA, 19 nt, Homo sapiens
  misc_RNA (1)...(19): siRNA sense strand
aaauggcagucacuauguu

SEQ ID NO: 2109743 - RNA, 19 nt, Homo sapiens
  misc_RNA (1)...(19): siRNA sense strand
auagaaggccgcugacuga

SEQ ID NO: 2109744 - RNA, 19 nt, Homo sapiens
  misc_RNA (1)...(19): siRNA sense strand
gaaacuauucggcaagaac

SEQ ID NO: 2109745 - RNA, 19 nt, Homo sapiens
  misc_RNA (1)...(19): siRNA sense strand
agaagaagagguagagaau

SEQ ID NO: 2109746 - RNA, 19 nt, Homo sapiens
  misc_RNA (1)...(19): siRNA sense strand
ggucagaagcuaguagaau

SEQ ID NO: 2109747 - RNA, 19 nt, Homo sapiens
  misc_RNA (1)...(19): siRNA sense strand
gagcaacgaagcugugaag

SEQ ID NO: 2109748 - RNA, 19 nt, Homo sapiens
  misc_RNA (1)...(19): siRNA sense strand
cccauugauuugaugcaua

SEQ ID NO: 2109749 - RNA, 19 nt, Homo sapiens
  misc_RNA (1)...(19): siRNA sense strand
cuaaaggauacccaaauga

SEQ ID NO: 2109750 - RNA, 19 nt, Homo sapiens
  misc_RNA (1)...(19): siRNA sense strand
gaaggucagagauacauac

SEQ ID NO: 2109751 - RNA, 19 nt, Homo sapiens
  misc_RNA (1)...(19): siRNA sense strand
ugaggaaggucagagauac

SEQ ID NO: 2109752 - RNA, 19 nt, Homo sapiens
  misc_RNA (1)...(19): siRNA sense strand
aauauuauccgggaacauu

SEQ ID NO: 2109753 - RNA, 19 nt, Homo sapiens
  misc_RNA (1)...(19): siRNA sense strand
guucaagacuuugcauguc

SEQ ID NO: 2109754 - RNA, 19 nt, Homo sapiens
  misc_RNA (1)...(19): siRNA sense strand
aguagaauggcaccaguua

SEQ ID NO: 2109755 - RNA, 19 nt, Homo sapiens
  misc_RNA (1)...(19): siRNA sense strand
cagagccuccuuacaagaa

SEQ ID NO: 2109756 - RNA, 19 nt, Homo sapiens
  misc_RNA (1)...(19): siRNA sense strand
gggugaacauggacaacug

SEQ ID NO: 2109757 - RNA, 19 nt, Homo sapiens
  misc_RNA (1)...(19): siRNA sense strand
caacuggauggacuuucua

SEQ ID NO: 2109758 - RNA, 19 nt, Homo sapiens
  misc_RNA (1)...(19): siRNA sense strand
gaagaagagguagagaauc

SEQ ID NO: 2109759 - RNA, 19 nt, Homo sapiens
  misc_RNA (1)...(19): siRNA sense strand
ugucagaccacacacagaa

SEQ ID NO: 2109760 - RNA, 19 nt, Homo sapiens
  misc_RNA (1)...(19): siRNA sense strand
gcaagugaaaguguaggaa

SEQ ID NO: 2109761 - RNA, 19 nt, Homo sapiens
  misc_RNA (1)...(19): siRNA sense strand
aaaagcagauggaguagug

SEQ ID NO: 2109762 - RNA, 19 nt, Homo sapiens
  misc_RNA (1)...(19): siRNA sense strand
cagaacugauccuggaaca

SEQ ID NO: 2109763 - RNA, 19 nt, Homo sapiens
  misc_RNA (1)...(19): siRNA sense strand
gaagcgugcaacaauaauc

SEQ ID NO: 2109764 - RNA, 19 nt, Homo sapiens
  misc_RNA (1)...(19): siRNA sense strand
cacaaaccaccaaggauug

SEQ ID NO: 2109765 - RNA, 19 nt, Homo sapiens
  misc_RNA (1)...(19): siRNA sense strand
guacuuaucugcuugcaua

SEQ ID NO: 2109766 - RNA, 19 nt, Homo sapiens
  misc_RNA (1)...(19): siRNA sense strand
gaugucacguuccuaauua

SEQ ID NO: 2109767 - RNA, 19 nt, Homo sapiens
  misc_RNA (1)...(19): siRNA sense strand
gaacaagcgcguuagaguu

SEQ ID NO: 2109768 - RNA, 19 nt, Homo sapiens
  misc_RNA (1)...(19): siRNA sense strand
uaacaaggcagaacacuau

SEQ ID NO: 2109769 - RNA, 19 nt, Homo sapiens
  misc_RNA (1)...(19): siRNA sense strand
ccacaaacuccaagcguua

SEQ ID NO: 2109770 - RNA, 19 nt, Homo sapiens
  misc_RNA (1)...(19): siRNA sense strand
ucacguuccuaauuacuaa

SEQ ID NO: 2109771 - RNA, 19 nt, Homo sapiens
  misc_RNA (1)...(19): siRNA sense strand
gcugagggcugugcaggua

SEQ ID NO: 2109772 - RNA, 19 nt, Homo sapiens
  misc_RNA (1)...(19): siRNA sense strand
gaaauucgaacaucauagu

SEQ ID NO: 2109773 - RNA, 19 nt, Homo sapiens
  misc_RNA (1)...(19): siRNA sense strand
ccuaauuacuaacauggua

SEQ ID NO: 2109774 - RNA, 19 nt, Homo sapiens
  misc_RNA (1)...(19): siRNA sense strand
guuaagaacaagcgcguua

SEQ ID NO: 2109775 - RNA, 19 nt, Homo sapiens
  misc_RNA (1)...(19): siRNA sense strand
gcacuuuguaccuucuuua

SEQ ID NO: 2109776 - RNA, 19 nt, Homo sapiens
  misc_RNA (1)...(19): siRNA sense strand
gcaagaaggagacaucaca

SEQ ID NO: 2109777 - RNA, 19 nt, Homo sapiens
  misc_RNA (1)...(19): siRNA sense strand
ggagacaucacagcacuuu

SEQ ID NO: 2109778 - RNA, 19 nt, Homo sapiens
  misc_RNA (1)...(19): siRNA sense strand
cuuuguaccuucuuuauug

SEQ ID NO: 2109779 - RNA, 19 nt, Homo sapiens
  misc_RNA (1)...(19): siRNA sense strand
ggaugucacguuccuaauu

SEQ ID NO: 2109780 - RNA, 19 nt, Homo sapiens
  misc_RNA (1)...(19): siRNA sense strand
aggauaaccugaugcagaa

SEQ ID NO: 2109781 - RNA, 19 nt, Homo sapiens
  misc_RNA (1)...(19): siRNA sense strand
ucacagcacuuuguaccuu

SEQ ID NO: 2109782 - RNA, 19 nt, Homo sapiens
  misc_RNA (1)...(19): siRNA sense strand
ccagcucacuucaauggaa

SEQ ID NO: 2109783 - RNA, 19 nt, Homo sapiens
  misc_RNA (1)...(19): siRNA sense strand
guaacaaggcagaacacua

SEQ ID NO: 2109784 - RNA, 19 nt, Homo sapiens
  misc_RNA (1)...(19): siRNA sense strand
uagaaacacaguucaaaga

SEQ ID NO: 2109785 - RNA, 19 nt, Homo sapiens
  misc_RNA (1)...(19): siRNA sense strand
caagcgcguuagaguugua

SEQ ID NO: 2109786 - RNA, 19 nt, Homo sapiens
  misc_RNA (1)...(19): siRNA sense strand
guacucagaagaaaaguua

SEQ ID NO: 2109787 - RNA, 19 nt, Homo sapiens
  misc_RNA (1)...(19): siRNA sense strand
agucaucccucgaagaguu

SEQ ID NO: 2109788 - RNA, 19 nt, Homo sapiens
  misc_RNA (1)...(19): siRNA sense strand
ucaaagaacuagacuucac

SEQ ID NO: 2109789 - RNA, 19 nt, Homo sapiens
  misc_RNA (1)...(19): siRNA sense strand
caccaaggauaaccugaug

SEQ ID NO: 2109790 - RNA, 19 nt, Homo sapiens
  misc_RNA (1)...(19): siRNA sense strand
cagaaauucgaacaucaua

SEQ ID NO: 2109791 - RNA, 19 nt, Homo sapiens
  misc_RNA (1)...(19): siRNA sense strand
gcagaaauucgaacaucau

SEQ ID NO: 2109792 - RNA, 19 nt, Homo sapiens
  misc_RNA (1)...(19): siRNA sense strand
cuacgucauugaaguacuu

SEQ ID NO: 2109793 - RNA, 19 nt, Homo sapiens
  misc_RNA (1)...(19): siRNA sense strand
agaaacacaguucaaagaa

SEQ ID NO: 2109794 - RNA, 19 nt, Homo sapiens
  misc_RNA (1)...(19): siRNA sense strand
guuagaaacacaguucaaa

SEQ ID NO: 2109795 - RNA, 19 nt, Homo sapiens
  misc_RNA (1)...(19): siRNA sense strand
gggcugugcagguaauuga

SEQ ID NO: 2109796 - RNA, 19 nt, Homo sapiens
  misc_RNA (1)...(19): siRNA sense strand
gacaucacagcacuuugua

SEQ ID NO: 2109797 - RNA, 19 nt, Homo sapiens
  misc_RNA (1)...(19): siRNA sense strand
cagcuacgucauugaagua

SEQ ID NO: 2109798 - RNA, 19 nt, Homo sapiens
  misc_RNA (1)...(19): siRNA sense strand
uuauacagcuacgucauug

SEQ ID NO: 2109799 - RNA, 19 nt, Homo sapiens
  misc_RNA (1)...(19): siRNA sense strand
cuaaagugaggcagaugua

SEQ ID NO: 2109800 - RNA, 19 nt, Homo sapiens
  misc_RNA (1)...(19): siRNA sense strand
gaguugauaccaucuguca

SEQ ID NO: 2109801 - RNA, 19 nt, Homo sapiens
  misc_RNA (1)...(19): siRNA sense strand
gccaagcagcccaagauga

SEQ ID NO: 2109802 - RNA, 19 nt, Homo sapiens
  misc_RNA (1)...(19): siRNA sense strand
ggaggagugugggcugcaa

SEQ ID NO: 2109803 - RNA, 19 nt, Homo sapiens
  misc_RNA (1)...(19): siRNA sense strand
ccaagcagcccaagaugag

SEQ ID NO: 2109804 - RNA, 19 nt, Homo sapiens
  misc_RNA (1)...(19): siRNA sense strand
gauaaccugaugcagaaau

SEQ ID NO: 2109805 - RNA, 19 nt, Homo sapiens
  misc_RNA (1)...(19): siRNA sense strand
gcaaaagucaucccucgaa

SEQ ID NO: 2109806 - RNA, 19 nt, Homo sapiens
  misc_RNA (1)...(19): siRNA sense strand
agacaucacagcacuuugu

SEQ ID NO: 2109807 - RNA, 19 nt, Homo sapiens
  misc_RNA (1)...(19): siRNA sense strand
uaagaacaagcgcguuaga

SEQ ID NO: 2109808 - RNA, 19 nt, Homo sapiens
  misc_RNA (1)...(19): siRNA sense strand
gcacuccagcucacuucaa

SEQ ID NO: 2109809 - RNA, 19 nt, Homo sapiens
  misc_RNA (1)...(19): siRNA sense strand
guuccuaauuacuaacaug

SEQ ID NO: 2109810 - RNA, 19 nt, Homo sapiens
  misc_RNA (1)...(19): siRNA sense strand
agaacacuauacugcuaaa

SEQ ID NO: 2109811 - RNA, 19 nt, Homo sapiens
  misc_RNA (1)...(19): siRNA sense strand
aacaagcgcguuagaguug

SEQ ID NO: 2109812 - RNA, 19 nt, Homo sapiens
  misc_RNA (1)...(19): siRNA sense strand
cagaacacuauacugcuaa

SEQ ID NO: 2109813 - RNA, 19 nt, Homo sapiens
  misc_RNA (1)...(19): siRNA sense strand
cagcucacuucaauggaau

SEQ ID NO: 2109814 - RNA, 19 nt, Homo sapiens
  misc_RNA (1)...(19): siRNA sense strand
gcuaaagugaggcagaugu

SEQ ID NO: 2109815 - RNA, 19 nt, Homo sapiens
  misc_RNA (1)...(19): siRNA sense strand
auaaccugaugcagaaauu

SEQ ID NO: 2109816 - RNA, 19 nt, Homo sapiens
  misc_RNA (1)...(19): siRNA sense strand
uugaaguacuuaucugcuu

SEQ ID NO: 2109817 - RNA, 19 nt, Homo sapiens
  misc_RNA (1)...(19): siRNA sense strand
acagcuacgucauugaagu

SEQ ID NO: 2109818 - RNA, 19 nt, Homo sapiens
  misc_RNA (1)...(19): siRNA sense strand
gaagaguugauaccaucug

SEQ ID NO: 2109819 - RNA, 19 nt, Homo sapiens
  misc_RNA (1)...(19): siRNA sense strand
gcaguuaggaccccugaaa

SEQ ID NO: 2109820 - RNA, 19 nt, Homo sapiens
  misc_RNA (1)...(19): siRNA sense strand
auacagcuacgucauugaa

SEQ ID NO: 2109821 - RNA, 19 nt, Homo sapiens
  misc_RNA (1)...(19): siRNA sense strand
ugagggcugugcagguaau

SEQ ID NO: 2109822 - RNA, 19 nt, Homo sapiens
  misc_RNA (1)...(19): siRNA sense strand
ugcagaaauucgaacauca

SEQ ID NO: 2109823 - RNA, 19 nt, Homo sapiens
  misc_RNA (1)...(19): siRNA sense strand
aaacuccaagcguuagaaa

SEQ ID NO: 2109824 - RNA, 19 nt, Homo sapiens
  misc_RNA (1)...(19): siRNA sense strand
ucauugaaguacuuaucug

SEQ ID NO: 2109825 - RNA, 19 nt, Homo sapiens
  misc_RNA (1)...(19): siRNA sense strand
agaacaagcgcguuagagu

SEQ ID NO: 2109826 - RNA, 19 nt, Homo sapiens
  misc_RNA (1)...(19): siRNA sense strand
auacucgugugcuugagaa

SEQ ID NO: 2109827 - RNA, 19 nt, Homo sapiens
  misc_RNA (1)...(19): siRNA sense strand
aaagucaucccucgaagag

SEQ ID NO: 2109828 - RNA, 19 nt, Homo sapiens
  misc_RNA (1)...(19): siRNA sense strand
cacuccagcucacuucaau

SEQ ID NO: 2109829 - RNA, 19 nt, Homo sapiens
  misc_RNA (1)...(19): siRNA sense strand
ccaaggauaaccugaugca

SEQ ID NO: 2109830 - RNA, 19 nt, Homo sapiens
  misc_RNA (1)...(19): siRNA sense strand
aagaguugauaccaucugu

SEQ ID NO: 2109831 - RNA, 19 nt, Homo sapiens
  misc_RNA (1)...(19): siRNA sense strand
caaacuccaagcguuagaa

SEQ ID NO: 2109832 - RNA, 19 nt, Homo sapiens
  misc_RNA (1)...(19): siRNA sense strand
aaagugaggcagauguaca

SEQ ID NO: 2109833 - RNA, 19 nt, Homo sapiens
  misc_RNA (1)...(19): siRNA sense strand
aaccuuagccucuguacuc

SEQ ID NO: 2109834 - RNA, 19 nt, Homo sapiens
  misc_RNA (1)...(19): siRNA sense strand
gagaaggggaaagcaguua

SEQ ID NO: 2109835 - RNA, 19 nt, Homo sapiens
  misc_RNA (1)...(19): siRNA sense strand
aagauggaguagaccacaa

SEQ ID NO: 2109836 - RNA, 19 nt, Homo sapiens
  misc_RNA (1)...(19): siRNA sense strand
caaggcagaacacuauacu

SEQ ID NO: 2109837 - RNA, 19 nt, Homo sapiens
  misc_RNA (1)...(19): siRNA sense strand
gcuauucugggaagaugga

SEQ ID NO: 2109838 - RNA, 19 nt, Homo sapiens
  misc_RNA (1)...(19): siRNA sense strand
ggagugugggcugcaagaa

SEQ ID NO: 2109839 - RNA, 19 nt, Homo sapiens
  misc_RNA (1)...(19): siRNA sense strand
cuagacuucaccaaggaua

SEQ ID NO: 2109840 - RNA, 19 nt, Homo sapiens
  misc_RNA (1)...(19): siRNA sense strand
gaaaugagcuccaguacuc

SEQ ID NO: 2109841 - RNA, 19 nt, Homo sapiens
  misc_RNA (1)...(19): siRNA sense strand
ccaaggaccugcucauuaa

SEQ ID NO: 2109842 - RNA, 19 nt, Homo sapiens
  misc_RNA (1)...(19): siRNA sense strand
ccaaggagcuucuggauuc

SEQ ID NO: 2109843 - RNA, 19 nt, Homo sapiens
  misc_RNA (1)...(19): siRNA sense strand
gagcagcaguuccaauuug

SEQ ID NO: 2109844 - RNA, 19 nt, Homo sapiens
  misc_RNA (1)...(19): siRNA sense strand
ccagaauccugcaaugaua

SEQ ID NO: 2109845 - RNA, 19 nt, Homo sapiens
  misc_RNA (1)...(19): siRNA sense strand
gguguucacuacccuaaua

SEQ ID NO: 2109846 - RNA, 19 nt, Homo sapiens
  misc_RNA (1)...(19): siRNA sense strand
ggcagagccuggagucuua

SEQ ID NO: 2109847 - RNA, 19 nt, Homo sapiens
  misc_RNA (1)...(19): siRNA sense strand
cuaaugaagugcaacauga

SEQ ID NO: 2109848 - RNA, 19 nt, Homo sapiens
  misc_RNA (1)...(19): siRNA sense strand
ggaaugauccucucuucaa

SEQ ID NO: 2109849 - RNA, 19 nt, Homo sapiens
  misc_RNA (1)...(19): siRNA sense strand
gacaucaucuuucccuuug

SEQ ID NO: 2109850 - RNA, 19 nt, Homo sapiens
  misc_RNA (1)...(19): siRNA sense strand
gacagucccucaucagcua

SEQ ID NO: 2109851 - RNA, 19 nt, Homo sapiens
  misc_RNA (1)...(19): siRNA sense strand
ccaaaggcuucaucuguga

SEQ ID NO: 2109852 - RNA, 19 nt, Homo sapiens
  misc_RNA (1)...(19): siRNA sense strand
gugaguaccugggcaagua

SEQ ID NO: 2109853 - RNA, 19 nt, Homo sapiens
  misc_RNA (1)...(19): siRNA sense strand
gcaaugauaaggcgaaguu

SEQ ID NO: 2109854 - RNA, 19 nt, Homo sapiens
  misc_RNA (1)...(19): siRNA sense strand
uaaagcguguuaccauaaa

SEQ ID NO: 2109855 - RNA, 19 nt, Homo sapiens
  misc_RNA (1)...(19): siRNA sense strand
ggacugacccugauuacau

SEQ ID NO: 2109856 - RNA, 19 nt, Homo sapiens
  misc_RNA (1)...(19): siRNA sense strand
gaagaggaagacagugaua

SEQ ID NO: 2109857 - RNA, 19 nt, Homo sapiens
  misc_RNA (1)...(19): siRNA sense strand
cauaaacagugcccucuau

SEQ ID NO: 2109858 - RNA, 19 nt, Homo sapiens
  misc_RNA (1)...(19): siRNA sense strand
gaugcugccuuccugcuaa

SEQ ID NO: 2109859 - RNA, 19 nt, Homo sapiens
  misc_RNA (1)...(19): siRNA sense strand
ugaugagguugaugaauuu

SEQ ID NO: 2109860 - RNA, 19 nt, Homo sapiens
  misc_RNA (1)...(19): siRNA sense strand
gagagcagcaguuccaauu

SEQ ID NO: 2109861 - RNA, 19 nt, Homo sapiens
  misc_RNA (1)...(19): siRNA sense strand
ugacagcccugcccaguuc

SEQ ID NO: 2109862 - RNA, 19 nt, Homo sapiens
  misc_RNA (1)...(19): siRNA sense strand
cugaugagguugaugaauu

SEQ ID NO: 2109863 - RNA, 19 nt, Homo sapiens
  misc_RNA (1)...(19): siRNA sense strand
ggcaguugcuggguaauuu

SEQ ID NO: 2109864 - RNA, 19 nt, Homo sapiens
  misc_RNA (1)...(19): siRNA sense strand
gaucgaugcguccauguuu

SEQ ID NO: 2109865 - RNA, 19 nt, Homo sapiens
  misc_RNA (1)...(19): siRNA sense strand
cagcaaauccgcaccaaga

SEQ ID NO: 2109866 - RNA, 19 nt, Homo sapiens
  misc_RNA (1)...(19): siRNA sense strand
caguucagcucacgugauu

SEQ ID NO: 2109867 - RNA, 19 nt, Homo sapiens
  misc_RNA (1)...(19): siRNA sense strand
agacgacgguggaggguuu

SEQ ID NO: 2109868 - RNA, 19 nt, Homo sapiens
  misc_RNA (1)...(19): siRNA sense strand
gcucagcauuccuacuuug

SEQ ID NO: 2109869 - RNA, 19 nt, Homo sapiens
  misc_RNA (1)...(19): siRNA sense strand
caacaauggcucagagaga

SEQ ID NO: 2109870 - RNA, 19 nt, Homo sapiens
  misc_RNA (1)...(19): siRNA sense strand
gaaggcauguuccgaagac

SEQ ID NO: 2109871 - RNA, 19 nt, Homo sapiens
  misc_RNA (1)...(19): siRNA sense strand
ccacgagaaugcccagaug

SEQ ID NO: 2109872 - RNA, 19 nt, Homo sapiens
  misc_RNA (1)...(19): siRNA sense strand
ccuuugagcuccauaagug

SEQ ID NO: 2109873 - RNA, 19 nt, Homo sapiens
  misc_RNA (1)...(19): siRNA sense strand
uccaggagcugaagcagaa

SEQ ID NO: 2109874 - RNA, 19 nt, Homo sapiens
  misc_RNA (1)...(19): siRNA sense strand
ggucaaagcagugaaguca

SEQ ID NO: 2109875 - RNA, 19 nt, Homo sapiens
  misc_RNA (1)...(19): siRNA sense strand
ccaucgagcuaaugaagug

SEQ ID NO: 2109876 - RNA, 19 nt, Homo sapiens
  misc_RNA (1)...(19): siRNA sense strand
ugagguugaugaauuugaa

SEQ ID NO: 2109877 - RNA, 19 nt, Homo sapiens
  misc_RNA (1)...(19): siRNA sense strand
acagugcccucuauaggaa

SEQ ID NO: 2109878 - RNA, 19 nt, Homo sapiens
  misc_RNA (1)...(19): siRNA sense strand
caucucagaguccuuaauu

SEQ ID NO: 2109879 - RNA, 19 nt, Homo sapiens
  misc_RNA (1)...(19): siRNA sense strand
gaaugauccucucuucaac

SEQ ID NO: 2109880 - RNA, 19 nt, Homo sapiens
  misc_RNA (1)...(19): siRNA sense strand
gaagacagugauagagaga

SEQ ID NO: 2109881 - RNA, 19 nt, Homo sapiens
  misc_RNA (1)...(19): siRNA sense strand
ucagagagaagaucuacuu

SEQ ID NO: 2109882 - RNA, 19 nt, Homo sapiens
  misc_RNA (1)...(19): siRNA sense strand
uccaaggaccugcucauua

SEQ ID NO: 2109883 - RNA, 19 nt, Homo sapiens
  misc_RNA (1)...(19): siRNA sense strand
guacauggaauaugaaggu

SEQ ID NO: 2109884 - RNA, 19 nt, Homo sapiens
  misc_RNA (1)...(19): siRNA sense strand
ggaggaaguggaagaggaa

SEQ ID NO: 2109885 - RNA, 19 nt, Homo sapiens
  misc_RNA (1)...(19): siRNA sense strand
caacgucuggucuaaguau

SEQ ID NO: 2109886 - RNA, 19 nt, Homo sapiens
  misc_RNA (1)...(19): siRNA sense strand
aaaggagaaugcccacuuc

SEQ ID NO: 2109887 - RNA, 19 nt, Homo sapiens
  misc_RNA (1)...(19): siRNA sense strand
gguggaggguuugguauca

SEQ ID NO: 2109888 - RNA, 19 nt, Homo sapiens
  misc_RNA (1)...(19): siRNA sense strand
ugacaucaucuuucccuuu

SEQ ID NO: 2109889 - RNA, 19 nt, Homo sapiens
  misc_RNA (1)...(19): siRNA sense strand
aacaauggcucagagagaa

SEQ ID NO: 2109890 - RNA, 19 nt, Homo sapiens
  misc_RNA (1)...(19): siRNA sense strand
cagcaucucagaguccuua

SEQ ID NO: 2109891 - RNA, 19 nt, Homo sapiens
  misc_RNA (1)...(19): siRNA sense strand
uggaagcaguggaacagaa

SEQ ID NO: 2109892 - RNA, 19 nt, Homo sapiens
  misc_RNA (1)...(19): siRNA sense strand
ucaagcugcucaaucaagu

SEQ ID NO: 2109893 - RNA, 19 nt, Homo sapiens
  misc_RNA (1)...(19): siRNA sense strand
cagaagcuccugcccauuc

SEQ ID NO: 2109894 - RNA, 19 nt, Homo sapiens
  misc_RNA (1)...(19): siRNA sense strand
ccagcucucuguacaugga

SEQ ID NO: 2109895 - RNA, 19 nt, Homo sapiens
  misc_RNA (1)...(19): siRNA sense strand
gcacacccagcucucugua

SEQ ID NO: 2109896 - RNA, 19 nt, Homo sapiens
  misc_RNA (1)...(19): siRNA sense strand
gaaguugagaggcccuuug

SEQ ID NO: 2109897 - RNA, 19 nt, Homo sapiens
  misc_RNA (1)...(19): siRNA sense strand
gcuccagaauccugcaaug

SEQ ID NO: 2109898 - RNA, 19 nt, Homo sapiens
  misc_RNA (1)...(19): siRNA sense strand
ccggaaaccucaagaaagc

SEQ ID NO: 2109899 - RNA, 19 nt, Homo sapiens
  misc_RNA (1)...(19): siRNA sense strand
cgacugcgguacugugagu

SEQ ID NO: 2109900 - RNA, 19 nt, Homo sapiens
  misc_RNA (1)...(19): siRNA sense strand
gaaggaacacagccucaag

SEQ ID NO: 2109901 - RNA, 19 nt, Homo sapiens
  misc_RNA (1)...(19): siRNA sense strand
cagaauccugcaaugauaa

SEQ ID NO: 2109902 - RNA, 19 nt, Homo sapiens
  misc_RNA (1)...(19): siRNA sense strand
gcaaguacuacgucagcaa

SEQ ID NO: 2109903 - RNA, 19 nt, Homo sapiens
  misc_RNA (1)...(19): siRNA sense strand
ccgaagaccaucagaagga

SEQ ID NO: 2109904 - RNA, 19 nt, Homo sapiens
  misc_RNA (1)...(19): siRNA sense strand
ccuggagucuuaccuguca

SEQ ID NO: 2109905 - RNA, 19 nt, Homo sapiens
  misc_RNA (1)...(19): siRNA sense strand
ggaccugugaagaguguaa

SEQ ID NO: 2109906 - RNA, 19 nt, Homo sapiens
  misc_RNA (1)...(19): siRNA sense strand
gacugacccugauuacauc

SEQ ID NO: 2109907 - RNA, 19 nt, Homo sapiens
  misc_RNA (1)...(19): siRNA sense strand
gcuaaugaagugcaacaug

SEQ ID NO: 2109908 - RNA, 19 nt, Homo sapiens
  misc_RNA (1)...(19): siRNA sense strand
agagccagcuguccagugu

SEQ ID NO: 2109909 - RNA, 19 nt, Homo sapiens
  misc_RNA (1)...(19): siRNA sense strand
acacccagcucucuguaca

SEQ ID NO: 2109910 - RNA, 19 nt, Homo sapiens
  misc_RNA (1)...(19): siRNA sense strand
caccuguacucacugaaug

SEQ ID NO: 2109911 - RNA, 19 nt, Homo sapiens
  misc_RNA (1)...(19): siRNA sense strand
ggaagaggaagacagugau

SEQ ID NO: 2109912 - RNA, 19 nt, Homo sapiens
  misc_RNA (1)...(19): siRNA sense strand
gcaaagaaaagccacauuc

SEQ ID NO: 2109913 - RNA, 19 nt, Homo sapiens
  misc_RNA (1)...(19): siRNA sense strand
uaaacagugcccucuauag

SEQ ID NO: 2109914 - RNA, 19 nt, Homo sapiens
  misc_RNA (1)...(19): siRNA sense strand
uaacguuucccgugucugu

SEQ ID NO: 2109915 - RNA, 19 nt, Homo sapiens
  misc_RNA (1)...(19): siRNA sense strand
gucuguaccuucucucaau

SEQ ID NO: 2109916 - RNA, 19 nt, Homo sapiens
  misc_RNA (1)...(19): siRNA sense strand
agacagugauagagagauc

SEQ ID NO: 2109917 - RNA, 19 nt, Homo sapiens
  misc_RNA (1)...(19): siRNA sense strand
guucacuacccuaauaaga

SEQ ID NO: 2109918 - RNA, 19 nt, Homo sapiens
  misc_RNA (1)...(19): siRNA sense strand
gcaguugcuggguaauuug

SEQ ID NO: 2109919 - RNA, 19 nt, Homo sapiens
  misc_RNA (1)...(19): siRNA sense strand
ucagcaacuucuccaagga

SEQ ID NO: 2109920 - RNA, 19 nt, Homo sapiens
  misc_RNA (1)...(19): siRNA sense strand
ucucuagccuccaccaauc

SEQ ID NO: 2109921 - RNA, 19 nt, Homo sapiens
  misc_RNA (1)...(19): siRNA sense strand
cuacccauguggagagaug

SEQ ID NO: 2109922 - RNA, 19 nt, Homo sapiens
  misc_RNA (1)...(19): siRNA sense strand
aggucaagcugcucaauca

SEQ ID NO: 2109923 - RNA, 19 nt, Homo sapiens
  misc_RNA (1)...(19): siRNA sense strand
cugaguaccuggccauugg

SEQ ID NO: 2109924 - RNA, 19 nt, Homo sapiens
  misc_RNA (1)...(19): siRNA sense strand
aaugaaaugagcuccagua

SEQ ID NO: 2109925 - RNA, 19 nt, Homo sapiens
  misc_RNA (1)...(19): siRNA sense strand
gcagguccagcuucucaga

SEQ ID NO: 2109926 - RNA, 19 nt, Homo sapiens
  misc_RNA (1)...(19): siRNA sense strand
caucaucuuucccuuugag

SEQ ID NO: 2109927 - RNA, 19 nt, Homo sapiens
  misc_RNA (1)...(19): siRNA sense strand
aaacagugcccucuauagg

SEQ ID NO: 2109928 - RNA, 19 nt, Homo sapiens
  misc_RNA (1)...(19): siRNA sense strand
guacuacgucagcaacuuc

SEQ ID NO: 2109929 - RNA, 19 nt, Homo sapiens
  misc_RNA (1)...(19): siRNA sense strand
gcccuacucuggucaaagc

SEQ ID NO: 2109930 - RNA, 19 nt, Homo sapiens
  misc_RNA (1)...(19): siRNA sense strand
gcccgcuccuggugacaaa

SEQ ID NO: 2109931 - RNA, 19 nt, Homo sapiens
  misc_RNA (1)...(19): siRNA sense strand
gacgguggaggguuuggua

SEQ ID NO: 2109932 - RNA, 19 nt, Homo sapiens
  misc_RNA (1)...(19): siRNA sense strand
cccaacgucuggucuaagu

SEQ ID NO: 2109933 - RNA, 19 nt, Homo sapiens
  misc_RNA (1)...(19): siRNA sense strand
cagcaaauccuucguuucc

SEQ ID NO: 2109934 - RNA, 19 nt, Homo sapiens
  misc_RNA (1)...(19): siRNA sense strand
gcaaauccgcaccaagaac

SEQ ID NO: 2109935 - RNA, 19 nt, Homo sapiens
  misc_RNA (1)...(19): siRNA sense strand
gucagcagccagaaugauu

SEQ ID NO: 2109936 - RNA, 19 nt, Homo sapiens
  misc_RNA (1)...(19): siRNA sense strand
gccaaggagcuucuggauu

SEQ ID NO: 2109937 - RNA, 19 nt, Homo sapiens
  misc_RNA (1)...(19): siRNA sense strand
auaaacagugcccucuaua

SEQ ID NO: 2109938 - RNA, 19 nt, Homo sapiens
  misc_RNA (1)...(19): siRNA sense strand
cucuguacauggaauauga

SEQ ID NO: 2109939 - RNA, 19 nt, Homo sapiens
  misc_RNA (1)...(19): siRNA sense strand
ucaacgugcaggacauaaa

SEQ ID NO: 2109940 - RNA, 19 nt, Homo sapiens
  misc_RNA (1)...(19): siRNA sense strand
caacaugccuucagcacua

SEQ ID NO: 2109941 - RNA, 19 nt, Homo sapiens
  misc_RNA (1)...(19): siRNA sense strand
gaagaauggcuuuacuuua

SEQ ID NO: 2109942 - RNA, 19 nt, Homo sapiens
  misc_RNA (1)...(19): siRNA sense strand
ggaaucugguggacaauaa

SEQ ID NO: 2109943 - RNA, 19 nt, Homo sapiens
  misc_RNA (1)...(19): siRNA sense strand
ggacaauaaucuacuacau

SEQ ID NO: 2109944 - RNA, 19 nt, Homo sapiens
  misc_RNA (1)...(19): siRNA sense strand
ggagaaagaauucgaguca

SEQ ID NO: 2109945 - RNA, 19 nt, Homo sapiens
  misc_RNA (1)...(19): siRNA sense strand
gaagauaagacuuuagcuu

SEQ ID NO: 2109946 - RNA, 19 nt, Homo sapiens
  misc_RNA (1)...(19): siRNA sense strand
aagaauggcuuuacuuuac

SEQ ID NO: 2109947 - RNA, 19 nt, Homo sapiens
  misc_RNA (1)...(19): siRNA sense strand
cauggaagauaagacuuua

SEQ ID NO: 2109948 - RNA, 19 nt, Homo sapiens
  misc_RNA (1)...(19): siRNA sense strand
gcuggaaucugguggacaa

SEQ ID NO: 2109949 - RNA, 19 nt, Homo sapiens
  misc_RNA (1)...(19): siRNA sense strand
ucagauaggagaaagaauu

SEQ ID NO: 2109950 - RNA, 19 nt, Homo sapiens
  misc_RNA (1)...(19): siRNA sense strand
uggaguugguguucucuua

SEQ ID NO: 2109951 - RNA, 19 nt, Homo sapiens
  misc_RNA (1)...(19): siRNA sense strand
gguggacaauaaucuacua

SEQ ID NO: 2109952 - RNA, 19 nt, Homo sapiens
  misc_RNA (1)...(19): siRNA sense strand
agaaagaauucgagucauc

SEQ ID NO: 2109953 - RNA, 19 nt, Homo sapiens
  misc_RNA (1)...(19): siRNA sense strand
caacaacgcaccaaaauau

SEQ ID NO: 2109954 - RNA, 19 nt, Homo sapiens
  misc_RNA (1)...(19): siRNA sense strand
agaagaauggcuuuacuuu

SEQ ID NO: 2109955 - RNA, 19 nt, Homo sapiens
  misc_RNA (1)...(19): siRNA sense strand
gaauucgagucaucuugga

SEQ ID NO: 2109956 - RNA, 19 nt, Homo sapiens
  misc_RNA (1)...(19): siRNA sense strand
uaagaagaauggcuuuacu

SEQ ID NO: 2109957 - RNA, 19 nt, Homo sapiens
  misc_RNA (1)...(19): siRNA sense strand
uuccaaaggucugcuuaua

SEQ ID NO: 2109958 - RNA, 19 nt, Homo sapiens
  misc_RNA (1)...(19): siRNA sense strand
ugauuggaauugccacaaa

SEQ ID NO: 2109959 - RNA, 19 nt, Homo sapiens
  misc_RNA (1)...(19): siRNA sense strand
ggacauggaagauaagacu

SEQ ID NO: 2109960 - RNA, 19 nt, Homo sapiens
  misc_RNA (1)...(19): siRNA sense strand
caagauacgugcuuuucaa

SEQ ID NO: 2109961 - RNA, 19 nt, Homo sapiens
  misc_RNA (1)...(19): siRNA sense strand
uuagaggacuuccaaaggu

SEQ ID NO: 2109962 - RNA, 19 nt, Homo sapiens
  misc_RNA (1)...(19): siRNA sense strand
ccaaaggucugcuuauacc

SEQ ID NO: 2109963 - RNA, 19 nt, Homo sapiens
  misc_RNA (1)...(19): siRNA sense strand
gaaagaauucgagucaucu

SEQ ID NO: 2109964 - RNA, 19 nt, Homo sapiens
  misc_RNA (1)...(19): siRNA sense strand
gauaagacuuuagcuuuug

SEQ ID NO: 2109965 - RNA, 19 nt, Homo sapiens
  misc_RNA (1)...(19): siRNA sense strand
gaauggcuuuacuuuacau

SEQ ID NO: 2109966 - RNA, 19 nt, Homo sapiens
  misc_RNA (1)...(19): siRNA sense strand
gcaacaacgcaccaaaaua

SEQ ID NO: 2109967 - RNA, 19 nt, Homo sapiens
  misc_RNA (1)...(19): siRNA sense strand
ccaagguuauguggcauug

SEQ ID NO: 2109968 - RNA, 19 nt, Homo sapiens
  misc_RNA (1)...(19): siRNA sense strand
gagaaagaauucgagucau

SEQ ID NO: 2109969 - RNA, 19 nt, Homo sapiens
  misc_RNA (1)...(19): siRNA sense strand
cagcuacaaggccaagaua

SEQ ID NO: 2109970 - RNA, 19 nt, Homo sapiens
  misc_RNA (1)...(19): siRNA sense strand
uggcauugcugggcaguga

SEQ ID NO: 2109971 - RNA, 19 nt, Homo sapiens
  misc_RNA (1)...(19): siRNA sense strand
gauaggagaaagaauucga

SEQ ID NO: 2109972 - RNA, 19 nt, Homo sapiens
  misc_RNA (1)...(19): siRNA sense strand
agaauggcuuuacuuuaca

SEQ ID NO: 2109973 - RNA, 19 nt, Homo sapiens
  misc_RNA (1)...(19): siRNA sense strand
ggcuuuacuuuacaucgaa

SEQ ID NO: 2109974 - RNA, 19 nt, Homo sapiens
  misc_RNA (1)...(19): siRNA sense strand
ugugcaaccugcccagcua

SEQ ID NO: 2109975 - RNA, 19 nt, Homo sapiens
  misc_RNA (1)...(19): siRNA sense strand
aaugacugcuccaggaaug

SEQ ID NO: 2109976 - RNA, 19 nt, Homo sapiens
  misc_RNA (1)...(19): siRNA sense strand
gagaagucaauggcaguuu

SEQ ID NO: 2109977 - RNA, 19 nt, Homo sapiens
  misc_RNA (1)...(19): siRNA sense strand
ucuacuacauaauggagaa

SEQ ID NO: 2109978 - RNA, 19 nt, Homo sapiens
  misc_RNA (1)...(19): siRNA sense strand
ggugcaaggaccaagauug

SEQ ID NO: 2109979 - RNA, 19 nt, Homo sapiens
  misc_RNA (1)...(19): siRNA sense strand
gacuuugguuuaccuugga

SEQ ID NO: 2109980 - RNA, 19 nt, Homo sapiens
  misc_RNA (1)...(19): siRNA sense strand
cagauaggagaaagaauuc

SEQ ID NO: 2109981 - RNA, 19 nt, Homo sapiens
  misc_RNA (1)...(19): siRNA sense strand
ggagaagucaauggcaguu

SEQ ID NO: 2109982 - RNA, 19 nt, Homo sapiens
  misc_RNA (1)...(19): siRNA sense strand
acauggaagauaagacuuu

SEQ ID NO: 2109983 - RNA, 19 nt, Homo sapiens
  misc_RNA (1)...(19): siRNA sense strand
gcuuauacccagcaguuuc

SEQ ID NO: 2109984 - RNA, 19 nt, Homo sapiens
  misc_RNA (1)...(19): siRNA sense strand
gauuggaauugccacaaaa

SEQ ID NO: 2109985 - RNA, 19 nt, Homo sapiens
  misc_RNA (1)...(19): siRNA sense strand
gcuuuacuuuacaucgaaa

SEQ ID NO: 2109986 - RNA, 19 nt, Homo sapiens
  misc_RNA (1)...(19): siRNA sense strand
ccaugcagugccaagguua

SEQ ID NO: 2109987 - RNA, 19 nt, Homo sapiens
  misc_RNA (1)...(19): siRNA sense strand
gcagugccaagguuaugug

SEQ ID NO: 2109988 - RNA, 19 nt, Homo sapiens
  misc_RNA (1)...(19): siRNA sense strand
guauauggcaacacagaag

SEQ ID NO: 2109989 - RNA, 19 nt, Homo sapiens
  misc_RNA (1)...(19): siRNA sense strand
agaagucaauggcaguuuu

SEQ ID NO: 2109990 - RNA, 19 nt, Homo sapiens
  misc_RNA (1)...(19): siRNA sense strand
gaaucugguggacaauaau

SEQ ID NO: 2109991 - RNA, 19 nt, Homo sapiens
  misc_RNA (1)...(19): siRNA sense strand
gauacgugcuuuucaacau

SEQ ID NO: 2109992 - RNA, 19 nt, Homo sapiens
  misc_RNA (1)...(19): siRNA sense strand
aagaagaauggcuuuacuu

SEQ ID NO: 2109993 - RNA, 19 nt, Homo sapiens
  misc_RNA (1)...(19): siRNA sense strand
uggcuuuacuuuacaucga

SEQ ID NO: 2109994 - RNA, 19 nt, Homo sapiens
  misc_RNA (1)...(19): siRNA sense strand
cccaugcagugccaagguu

SEQ ID NO: 2109995 - RNA, 19 nt, Homo sapiens
  misc_RNA (1)...(19): siRNA sense strand
gacuuuagcuuuugaacgu

SEQ ID NO: 2109996 - RNA, 19 nt, Homo sapiens
  misc_RNA (1)...(19): siRNA sense strand
gcaaccugcccagcuacaa

SEQ ID NO: 2109997 - RNA, 19 nt, Homo sapiens
  misc_RNA (1)...(19): siRNA sense strand
cuaaugacugcuccaggaa

SEQ ID NO: 2109998 - RNA, 19 nt, Homo sapiens
  misc_RNA (1)...(19): siRNA sense strand
caaccugcccagcuacaag

SEQ ID NO: 2109999 - RNA, 19 nt, Homo sapiens
  misc_RNA (1)...(19): siRNA sense strand
gcauugcugggcagugaug

SEQ ID NO: 2110000 - RNA, 19 nt, Homo sapiens
  misc_RNA (1)...(19): siRNA sense strand
gcccacaucugcaucaaua

SEQ ID NO: 2110001 - RNA, 19 nt, Homo sapiens
  misc_RNA (1)...(19): siRNA sense strand
gcaaggaguucuaccagau

SEQ ID NO: 2110002 - RNA, 19 nt, Homo sapiens
  misc_RNA (1)...(19): siRNA sense strand
ccagagacuucuacccaua

SEQ ID NO: 2110003 - RNA, 19 nt, Homo sapiens
  misc_RNA (1)...(19): siRNA sense strand
ggagacaaauaucccaaug

SEQ ID NO: 2110004 - RNA, 19 nt, Homo sapiens
  misc_RNA (1)...(19): siRNA sense strand
cagcugaccugggcaagua

SEQ ID NO: 2110005 - RNA, 19 nt, Homo sapiens
  misc_RNA (1)...(19): siRNA sense strand
ccugaucugucccacauua

SEQ ID NO: 2110006 - RNA, 19 nt, Homo sapiens
  misc_RNA (1)...(19): siRNA sense strand
gacaaugcaucccagaaga

SEQ ID NO: 2110007 - RNA, 19 nt, Homo sapiens
  misc_RNA (1)...(19): siRNA sense strand
cauacugucuggauauuga

SEQ ID NO: 2110008 - RNA, 19 nt, Homo sapiens
  misc_RNA (1)...(19): siRNA sense strand
cagaauuugugcaaguuaa

SEQ ID NO: 2110009 - RNA, 19 nt, Homo sapiens
  misc_RNA (1)...(19): siRNA sense strand
gcaccggacucacucuuca

SEQ ID NO: 2110010 - RNA, 19 nt, Homo sapiens
  misc_RNA (1)...(19): siRNA sense strand
ggacacacguggaccuaca

SEQ ID NO: 2110011 - RNA, 19 nt, Homo sapiens
  misc_RNA (1)...(19): siRNA sense strand
gcagugcacggacaacuuu

SEQ ID NO: 2110012 - RNA, 19 nt, Homo sapiens
  misc_RNA (1)...(19): siRNA sense strand
gcagaggaguucccuuuac

SEQ ID NO: 2110013 - RNA, 19 nt, Homo sapiens
  misc_RNA (1)...(19): siRNA sense strand
ucacugagcugcaggaaaa

SEQ ID NO: 2110014 - RNA, 19 nt, Homo sapiens
  misc_RNA (1)...(19): siRNA sense strand
acacaggaaucagacauuu

SEQ ID NO: 2110015 - RNA, 19 nt, Homo sapiens
  misc_RNA (1)...(19): siRNA sense strand
acaaggugcuggccucaaa

SEQ ID NO: 2110016 - RNA, 19 nt, Homo sapiens
  misc_RNA (1)...(19): siRNA sense strand
gaagaacugagacaagaga

SEQ ID NO: 2110017 - RNA, 19 nt, Homo sapiens
  misc_RNA (1)...(19): siRNA sense strand
aagaagaacugagacaaga

SEQ ID NO: 2110018 - RNA, 19 nt, Homo sapiens
  misc_RNA (1)...(19): siRNA sense strand
gaacugagacaagagacuu

SEQ ID NO: 2110019 - RNA, 19 nt, Homo sapiens
  misc_RNA (1)...(19): siRNA sense strand
cagcuucaaucaacuuuca

SEQ ID NO: 2110020 - RNA, 19 nt, Homo sapiens
  misc_RNA (1)...(19): siRNA sense strand
caggcgagcucaccacaug

SEQ ID NO: 2110021 - RNA, 19 nt, Homo sapiens
  misc_RNA (1)...(19): siRNA sense strand
cagcagaggaguucccuuu

SEQ ID NO: 2110022 - RNA, 19 nt, Homo sapiens
  misc_RNA (1)...(19): siRNA sense strand
ugagaagucugagaacaug

SEQ ID NO: 2110023 - RNA, 19 nt, Homo sapiens
  misc_RNA (1)...(19): siRNA sense strand
gaccugggcucuggagaug

SEQ ID NO: 2110024 - RNA, 19 nt, Homo sapiens
  misc_RNA (1)...(19): siRNA sense strand
cccagaagauuacgacguu

SEQ ID NO: 2110025 - RNA, 19 nt, Homo sapiens
  misc_RNA (1)...(19): siRNA sense strand
ggaagcgggagaagccaua

SEQ ID NO: 2110026 - RNA, 19 nt, Homo sapiens
  misc_RNA (1)...(19): siRNA sense strand
cgagugcuguguacuuguu

SEQ ID NO: 2110027 - RNA, 19 nt, Homo sapiens
  misc_RNA (1)...(19): siRNA sense strand
ggacaaugcaucccagaag

SEQ ID NO: 2110028 - RNA, 19 nt, Homo sapiens
  misc_RNA (1)...(19): siRNA sense strand
ggaagaugaugggaagaca

SEQ ID NO: 2110029 - RNA, 19 nt, Homo sapiens
  misc_RNA (1)...(19): siRNA sense strand
ggaggacggcgacagagaa

SEQ ID NO: 2110030 - RNA, 19 nt, Homo sapiens
  misc_RNA (1)...(19): siRNA sense strand
gaugaugggaagacaugua

SEQ ID NO: 2110031 - RNA, 19 nt, Homo sapiens
  misc_RNA (1)...(19): siRNA sense strand
ggacggcgacagagaaauc

SEQ ID NO: 2110032 - RNA, 19 nt, Homo sapiens
  misc_RNA (1)...(19): siRNA sense strand
gagacaaauaucccaauga

SEQ ID NO: 2110033 - RNA, 19 nt, Homo sapiens
  misc_RNA (1)...(19): siRNA sense strand
gauaugaccgggagagaca

SEQ ID NO: 2110034 - RNA, 19 nt, Homo sapiens
  misc_RNA (1)...(19): siRNA sense strand
agacaaauaucccaaugac

SEQ ID NO: 2110035 - RNA, 19 nt, Homo sapiens
  misc_RNA (1)...(19): siRNA sense strand
aaaucgcgacgacuaaaua

SEQ ID NO: 2110036 - RNA, 19 nt, Homo sapiens
  misc_RNA (1)...(19): siRNA sense strand
gggagaagccauacugucu

SEQ ID NO: 2110037 - RNA, 19 nt, Homo sapiens
  misc_RNA (1)...(19): siRNA sense strand
cccuuuaccucaggaauuu

SEQ ID NO: 2110038 - RNA, 19 nt, Homo sapiens
  misc_RNA (1)...(19): siRNA sense strand
ccacaugcaaggaguucua

SEQ ID NO: 2110039 - RNA, 19 nt, Homo sapiens
  misc_RNA (1)...(19): siRNA sense strand
caacagcuucaaucaacuu

SEQ ID NO: 2110040 - RNA, 19 nt, Homo sapiens
  misc_RNA (1)...(19): siRNA sense strand
cuaaauacccgugucugaa

SEQ ID NO: 2110041 - RNA, 19 nt, Homo sapiens
  misc_RNA (1)...(19): siRNA sense strand
caagaagaacugagacaag

SEQ ID NO: 2110042 - RNA, 19 nt, Homo sapiens
  misc_RNA (1)...(19): siRNA sense strand
uggcugacauccgcaauga

SEQ ID NO: 2110043 - RNA, 19 nt, Homo sapiens
  misc_RNA (1)...(19): siRNA sense strand
aggaagagaugguucuaag

SEQ ID NO: 2110044 - RNA, 19 nt, Homo sapiens
  misc_RNA (1)...(19): siRNA sense strand
gaccugggcaaguauauca

SEQ ID NO: 2110045 - RNA, 19 nt, Homo sapiens
  misc_RNA (1)...(19): siRNA sense strand
ccaaugacacuggccauga

SEQ ID NO: 2110046 - RNA, 19 nt, Homo sapiens
  misc_RNA (1)...(19): siRNA sense strand
gccgagugcuguguacuug

SEQ ID NO: 2110047 - RNA, 19 nt, Homo sapiens
  misc_RNA (1)...(19): siRNA sense strand
gccauacugucuggauauu

SEQ ID NO: 2110048 - RNA, 19 nt, Homo sapiens
  misc_RNA (1)...(19): siRNA sense strand
caugagaagucugagaaca

SEQ ID NO: 2110049 - RNA, 19 nt, Homo sapiens
  misc_RNA (1)...(19): siRNA sense strand
caaugacacuggccaugag

SEQ ID NO: 2110050 - RNA, 19 nt, Homo sapiens
  misc_RNA (1)...(19): siRNA sense strand
gaccaacagcuucaaucaa

SEQ ID NO: 2110051 - RNA, 19 nt, Homo sapiens
  misc_RNA (1)...(19): siRNA sense strand
aagccauacugucuggaua

SEQ ID NO: 2110052 - RNA, 19 nt, Homo sapiens
  misc_RNA (1)...(19): siRNA sense strand
gaggacggcgacagagaaa

SEQ ID NO: 2110053 - RNA, 19 nt, Homo sapiens
  misc_RNA (1)...(19): siRNA sense strand
gccaugagaagucugagaa

SEQ ID NO: 2110054 - RNA, 19 nt, Homo sapiens
  misc_RNA (1)...(19): siRNA sense strand
uaaauacccgugucugaag

SEQ ID NO: 2110055 - RNA, 19 nt, Homo sapiens
  misc_RNA (1)...(19): siRNA sense strand
ucagaauuugugcaaguua

SEQ ID NO: 2110056 - RNA, 19 nt, Homo sapiens
  misc_RNA (1)...(19): siRNA sense strand
gcugacauccgcaaugaca

SEQ ID NO: 2110057 - RNA, 19 nt, Homo sapiens
  misc_RNA (1)...(19): siRNA sense strand
gggaccaucuccugaucug

SEQ ID NO: 2110058 - RNA, 19 nt, Homo sapiens
  misc_RNA (1)...(19): siRNA sense strand
caaugcaucccagaagauu

SEQ ID NO: 2110059 - RNA, 19 nt, Homo sapiens
  misc_RNA (1)...(19): siRNA sense strand
aaggaguucuaccagauga

SEQ ID NO: 2110060 - RNA, 19 nt, Homo sapiens
  misc_RNA (1)...(19): siRNA sense strand
ggacacaggaaucagacau

SEQ ID NO: 2110061 - RNA, 19 nt, Homo sapiens
  misc_RNA (1)...(19): siRNA sense strand
ccagaagauuacgacguuu

SEQ ID NO: 2110062 - RNA, 19 nt, Homo sapiens
  misc_RNA (1)...(19): siRNA sense strand
gcaaaaucgcgacgacuaa

SEQ ID NO: 2110063 - RNA, 19 nt, Homo sapiens
  misc_RNA (1)...(19): siRNA sense strand
ggaccugggcucuggagau

SEQ ID NO: 2110064 - RNA, 19 nt, Homo sapiens
  misc_RNA (1)...(19): siRNA sense strand
gaagccauacugucuggau

SEQ ID NO: 2110065 - RNA, 19 nt, Homo sapiens
  misc_RNA (1)...(19): siRNA sense strand
acacguggaccuacagaga

SEQ ID NO: 2110066 - RNA, 19 nt, Homo sapiens
  misc_RNA (1)...(19): siRNA sense strand
cauccaagaagaacugaga

SEQ ID NO: 2110067 - RNA, 19 nt, Homo sapiens
  misc_RNA (1)...(19): siRNA sense strand
gacacaggaaucagacauu

SEQ ID NO: 2110068 - RNA, 19 nt, Homo sapiens
  misc_RNA (1)...(19): siRNA sense strand
cagaagauuacgacguuug

SEQ ID NO: 2110069 - RNA, 19 nt, Homo sapiens
  misc_RNA (1)...(19): siRNA sense strand
ccaagaagaacugagacaa

SEQ ID NO: 2110070 - RNA, 19 nt, Homo sapiens
  misc_RNA (1)...(19): siRNA sense strand
ucaauaccuugggcagcua

SEQ ID NO: 2110071 - RNA, 19 nt, Homo sapiens
  misc_RNA (1)...(19): siRNA sense strand
gcugcaaaggauauaaauu

SEQ ID NO: 2110072 - RNA, 19 nt, Homo sapiens
  misc_RNA (1)...(19): siRNA sense strand
agaccgugcugcagcugaa

SEQ ID NO: 2110073 - RNA, 19 nt, Homo sapiens
  misc_RNA (1)...(19): siRNA sense strand
gaagaugaugggaagacau

SEQ ID NO: 2110074 - RNA, 19 nt, Homo sapiens
  misc_RNA (1)...(19): siRNA sense strand
accaacagcuucaaucaac

SEQ ID NO: 2110075 - RNA, 19 nt, Homo sapiens
  misc_RNA (1)...(19): siRNA sense strand
uuucagaauuugugcaagu

SEQ ID NO: 2110076 - RNA, 19 nt, Homo sapiens
  misc_RNA (1)...(19): siRNA sense strand
caaggaguucuaccagaug

SEQ ID NO: 2110077 - RNA, 19 nt, Homo sapiens
  misc_RNA (1)...(19): siRNA sense strand
ccagagaccaacagcuuca

SEQ ID NO: 2110078 - RNA, 19 nt, Homo sapiens
  misc_RNA (1)...(19): siRNA sense strand
gagaccaacagcuucaauc

SEQ ID NO: 2110079 - RNA, 19 nt, Homo sapiens
  misc_RNA (1)...(19): siRNA sense strand
gagcucaccacaugcuaca

SEQ ID NO: 2110080 - RNA, 19 nt, Homo sapiens
  misc_RNA (1)...(19): siRNA sense strand
ugccgaggcucccugugaa

SEQ ID NO: 2110081 - RNA, 19 nt, Homo sapiens
  misc_RNA (1)...(19): siRNA sense strand
gugcugcaaaggauauaaa

SEQ ID NO: 2110082 - RNA, 19 nt, Homo sapiens
  misc_RNA (1)...(19): siRNA sense strand
caccacaugcuacaggaaa

SEQ ID NO: 2110083 - RNA, 19 nt, Homo sapiens
  misc_RNA (1)...(19): siRNA sense strand
ggaagagaugguucuaagg

SEQ ID NO: 2110084 - RNA, 19 nt, Homo sapiens
  misc_RNA (1)...(19): siRNA sense strand
aaauacccgugucugaagu

SEQ ID NO: 2110085 - RNA, 19 nt, Homo sapiens
  misc_RNA (1)...(19): siRNA sense strand
gaccauccaagaagaacug

SEQ ID NO: 2110086 - RNA, 19 nt, Homo sapiens
  misc_RNA (1)...(19): siRNA sense strand
acuaaauacccgugucuga

SEQ ID NO: 2110087 - RNA, 19 nt, Homo sapiens
  misc_RNA (1)...(19): siRNA sense strand
agaccaacagcuucaauca

SEQ ID NO: 2110088 - RNA, 19 nt, Homo sapiens
  misc_RNA (1)...(19): siRNA sense strand
gaagauuacgacguuugug

SEQ ID NO: 2110089 - RNA, 19 nt, Homo sapiens
  misc_RNA (1)...(19): siRNA sense strand
gcugaccugggcaaguaua

SEQ ID NO: 2110090 - RNA, 19 nt, Homo sapiens
  misc_RNA (1)...(19): siRNA sense strand
aaagugcugcaaaggauau

SEQ ID NO: 2110091 - RNA, 19 nt, Homo sapiens
  misc_RNA (1)...(19): siRNA sense strand
gugaaaagguggugcaaac

SEQ ID NO: 2110092 - RNA, 19 nt, Homo sapiens
  misc_RNA (1)...(19): siRNA sense strand
gagugcuguguacuuguua

SEQ ID NO: 2110093 - RNA, 19 nt, Homo sapiens
  misc_RNA (1)...(19): siRNA sense strand
ugacauccgcaaugacauc

SEQ ID NO: 2110094 - RNA, 19 nt, Homo sapiens
  misc_RNA (1)...(19): siRNA sense strand
caggaagagaugguucuaa

SEQ ID NO: 2110095 - RNA, 19 nt, Homo sapiens
  misc_RNA (1)...(19): siRNA sense strand
caaauaucccaaugacacu

SEQ ID NO: 2110096 - RNA, 19 nt, Homo sapiens
  misc_RNA (1)...(19): siRNA sense strand
acaggaaucagacauuucu

SEQ ID NO: 2110097 - RNA, 19 nt, Homo sapiens
  misc_RNA (1)...(19): siRNA sense strand
ccaacagcuucaaucaacu

SEQ ID NO: 2110098 - RNA, 19 nt, Homo sapiens
  misc_RNA (1)...(19): siRNA sense strand
ggaguucuaccagaugaag

SEQ ID NO: 2110099 - RNA, 19 nt, Homo sapiens
  misc_RNA (1)...(19): siRNA sense strand
cagaggaguucccuuuacc

SEQ ID NO: 2110100 - RNA, 19 nt, Homo sapiens
  misc_RNA (1)...(19): siRNA sense strand
caacaacgaucaugaauug

SEQ ID NO: 2110101 - RNA, 19 nt, Homo sapiens
  misc_RNA (1)...(19): siRNA sense strand
gaucuaagguugaacguaa

SEQ ID NO: 2110102 - RNA, 19 nt, Homo sapiens
  misc_RNA (1)...(19): siRNA sense strand
ggaaucaacuggucacauu

SEQ ID NO: 2110103 - RNA, 19 nt, Homo sapiens
  misc_RNA (1)...(19): siRNA sense strand
gaagucacauuaccagaaa

SEQ ID NO: 2110104 - RNA, 19 nt, Homo sapiens
  misc_RNA (1)...(19): siRNA sense strand
gaaauugacugcuguggau

SEQ ID NO: 2110105 - RNA, 19 nt, Homo sapiens
  misc_RNA (1)...(19): siRNA sense strand
caaauuaucuguccuacau

SEQ ID NO: 2110106 - RNA, 19 nt, Homo sapiens
  misc_RNA (1)...(19): siRNA sense strand
ggaggaacuugaagaaauu

SEQ ID NO: 2110107 - RNA, 19 nt, Homo sapiens
  misc_RNA (1)...(19): siRNA sense strand
gaacgccucugcgaacaaa

SEQ ID NO: 2110108 - RNA, 19 nt, Homo sapiens
  misc_RNA (1)...(19): siRNA sense strand
gugaauaacuucugugaca

SEQ ID NO: 2110109 - RNA, 19 nt, Homo sapiens
  misc_RNA (1)...(19): siRNA sense strand
uuaaugaacugcaaagguu

SEQ ID NO: 2110110 - RNA, 19 nt, Homo sapiens
  misc_RNA (1)...(19): siRNA sense strand
ucaaagaaaucaugaagca

SEQ ID NO: 2110111 - RNA, 19 nt, Homo sapiens
  misc_RNA (1)...(19): siRNA sense strand
gaagagcugaagaggauua

SEQ ID NO: 2110112 - RNA, 19 nt, Homo sapiens
  misc_RNA (1)...(19): siRNA sense strand
gauauuggccauaaucaaa

SEQ ID NO: 2110113 - RNA, 19 nt, Homo sapiens
  misc_RNA (1)...(19): siRNA sense strand
ugaauaauauccgcuguuu

SEQ ID NO: 2110114 - RNA, 19 nt, Homo sapiens
  misc_RNA (1)...(19): siRNA sense strand
cggcauggcuuccgagauu

SEQ ID NO: 2110115 - RNA, 19 nt, Homo sapiens
  misc_RNA (1)...(19): siRNA sense strand
gucuuaaccuuuccaauaa

SEQ ID NO: 2110116 - RNA, 19 nt, Homo sapiens
  misc_RNA (1)...(19): siRNA sense strand
aagaagagcugaagaggau

SEQ ID NO: 2110117 - RNA, 19 nt, Homo sapiens
  misc_RNA (1)...(19): siRNA sense strand
guccagaucuuacaucaug

SEQ ID NO: 2110118 - RNA, 19 nt, Homo sapiens
  misc_RNA (1)...(19): siRNA sense strand
guaaugagcuaagugaagu

SEQ ID NO: 2110119 - RNA, 19 nt, Homo sapiens
  misc_RNA (1)...(19): siRNA sense strand
uggaccagcugccagauua

SEQ ID NO: 2110120 - RNA, 19 nt, Homo sapiens
  misc_RNA (1)...(19): siRNA sense strand
gaagaggaggucaaagaaa

SEQ ID NO: 2110121 - RNA, 19 nt, Homo sapiens
  misc_RNA (1)...(19): siRNA sense strand
gaagaauacauggucaaua

SEQ ID NO: 2110122 - RNA, 19 nt, Homo sapiens
  misc_RNA (1)...(19): siRNA sense strand
ucaaggaaccgcuuagaaa

SEQ ID NO: 2110123 - RNA, 19 nt, Homo sapiens
  misc_RNA (1)...(19): siRNA sense strand
gaauguauaauguccguaa

SEQ ID NO: 2110124 - RNA, 19 nt, Homo sapiens
  misc_RNA (1)...(19): siRNA sense strand
ggaagaggaggucaaagaa

SEQ ID NO: 2110125 - RNA, 19 nt, Homo sapiens
  misc_RNA (1)...(19): siRNA sense strand
ggaggauccuucaccuuga

SEQ ID NO: 2110126 - RNA, 19 nt, Homo sapiens
  misc_RNA (1)...(19): siRNA sense strand
caccuaaccuucugaugaa

SEQ ID NO: 2110127 - RNA, 19 nt, Homo sapiens
  misc_RNA (1)...(19): siRNA sense strand
ggauaaacuuuguaugucu

SEQ ID NO: 2110128 - RNA, 19 nt, Homo sapiens
  misc_RNA (1)...(19): siRNA sense strand
ugauagagguggcuacaga

SEQ ID NO: 2110129 - RNA, 19 nt, Homo sapiens
  misc_RNA (1)...(19): siRNA sense strand
gacaaacaguaucuuacaa

SEQ ID NO: 2110130 - RNA, 19 nt, Homo sapiens
  misc_RNA (1)...(19): siRNA sense strand
gccaagaccucacucaucu

SEQ ID NO: 2110131 - RNA, 19 nt, Homo sapiens
  misc_RNA (1)...(19): siRNA sense strand
ggaagcugauagcagauga

SEQ ID NO: 2110132 - RNA, 19 nt, Homo sapiens
  misc_RNA (1)...(19): siRNA sense strand
aagaauacauggucaauac

SEQ ID NO: 2110133 - RNA, 19 nt, Homo sapiens
  misc_RNA (1)...(19): siRNA sense strand
ccaccuaaccuucugauga

SEQ ID NO: 2110134 - RNA, 19 nt, Homo sapiens
  misc_RNA (1)...(19): siRNA sense strand
gcugauagcagaugaagug

SEQ ID NO: 2110135 - RNA, 19 nt, Homo sapiens
  misc_RNA (1)...(19): siRNA sense strand
gaaucaacuggucacauua

SEQ ID NO: 2110136 - RNA, 19 nt, Homo sapiens
  misc_RNA (1)...(19): siRNA sense strand
ugaucuagaugcuaugauu

SEQ ID NO: 2110137 - RNA, 19 nt, Homo sapiens
  misc_RNA (1)...(19): siRNA sense strand
caauaagcuuggugaucua

SEQ ID NO: 2110138 - RNA, 19 nt, Homo sapiens
  misc_RNA (1)...(19): siRNA sense strand
aagaggaggucaaagaaau

SEQ ID NO: 2110139 - RNA, 19 nt, Homo sapiens
  misc_RNA (1)...(19): siRNA sense strand
acaaggccauuaucacuga

SEQ ID NO: 2110140 - RNA, 19 nt, Homo sapiens
  misc_RNA (1)...(19): siRNA sense strand
uggaggaacuugaagaaau

SEQ ID NO: 2110141 - RNA, 19 nt, Homo sapiens
  misc_RNA (1)...(19): siRNA sense strand
gaaacuggaggaacuugaa

SEQ ID NO: 2110142 - RNA, 19 nt, Homo sapiens
  misc_RNA (1)...(19): siRNA sense strand
ccucacucaucucaauuua

SEQ ID NO: 2110143 - RNA, 19 nt, Homo sapiens
  misc_RNA (1)...(19): siRNA sense strand
ugaacuuccugcccgcuua

SEQ ID NO: 2110144 - RNA, 19 nt, Homo sapiens
  misc_RNA (1)...(19): siRNA sense strand
agacaucuguggcuauuuc

SEQ ID NO: 2110145 - RNA, 19 nt, Homo sapiens
  misc_RNA (1)...(19): siRNA sense strand
acaauaagcuuggugaucu

SEQ ID NO: 2110146 - RNA, 19 nt, Homo sapiens
  misc_RNA (1)...(19): siRNA sense strand
ugacauucccgaaguauug

SEQ ID NO: 2110147 - RNA, 19 nt, Homo sapiens
  misc_RNA (1)...(19): siRNA sense strand
agucuuaaccuuuccaaua

SEQ ID NO: 2110148 - RNA, 19 nt, Homo sapiens
  misc_RNA (1)...(19): siRNA sense strand
gcaaugcccugcgaucagu

SEQ ID NO: 2110149 - RNA, 19 nt, Homo sapiens
  misc_RNA (1)...(19): siRNA sense strand
caaaugugugcccuuguua

SEQ ID NO: 2110150 - RNA, 19 nt, Homo sapiens
  misc_RNA (1)...(19): siRNA sense strand
ucucaggaauguauaaugu

SEQ ID NO: 2110151 - RNA, 19 nt, Homo sapiens
  misc_RNA (1)...(19): siRNA sense strand
ggguagcucugaacggauu

SEQ ID NO: 2110152 - RNA, 19 nt, Homo sapiens
  misc_RNA (1)...(19): siRNA sense strand
gcacaaggccauuaucacu

SEQ ID NO: 2110153 - RNA, 19 nt, Homo sapiens
  misc_RNA (1)...(19): siRNA sense strand
aaacgaagaagaauacaug

SEQ ID NO: 2110154 - RNA, 19 nt, Homo sapiens
  misc_RNA (1)...(19): siRNA sense strand
gagcuagaccugacuggaa

SEQ ID NO: 2110155 - RNA, 19 nt, Homo sapiens
  misc_RNA (1)...(19): siRNA sense strand
caaauaacagccucacaga

SEQ ID NO: 2110156 - RNA, 19 nt, Homo sapiens
  misc_RNA (1)...(19): siRNA sense strand
gaagagacaaacaguaucu

SEQ ID NO: 2110157 - RNA, 19 nt, Homo sapiens
  misc_RNA (1)...(19): siRNA sense strand
cagccacgcuuuccgaaga

SEQ ID NO: 2110158 - RNA, 19 nt, Homo sapiens
  misc_RNA (1)...(19): siRNA sense strand
uaauagcagucuccggaaa

SEQ ID NO: 2110159 - RNA, 19 nt, Homo sapiens
  misc_RNA (1)...(19): siRNA sense strand
caguggaccucucguguug

SEQ ID NO: 2110160 - RNA, 19 nt, Homo sapiens
  misc_RNA (1)...(19): siRNA sense strand
aauauccgcuguuucaaga

SEQ ID NO: 2110161 - RNA, 19 nt, Homo sapiens
  misc_RNA (1)...(19): siRNA sense strand
aauaauauccgcuguuuca

SEQ ID NO: 2110162 - RNA, 19 nt, Homo sapiens
  misc_RNA (1)...(19): siRNA sense strand
guggaccucucguguugua

SEQ ID NO: 2110163 - RNA, 19 nt, Homo sapiens
  misc_RNA (1)...(19): siRNA sense strand
ugaagaaauugaucucagu

SEQ ID NO: 2110164 - RNA, 19 nt, Homo sapiens
  misc_RNA (1)...(19): siRNA sense strand
acaacggccuugacaguga

SEQ ID NO: 2110165 - RNA, 19 nt, Homo sapiens
  misc_RNA (1)...(19): siRNA sense strand
gcaaagguucaccaaguug

SEQ ID NO: 2110166 - RNA, 19 nt, Homo sapiens
  misc_RNA (1)...(19): siRNA sense strand
ggaaagccgcugccucugu

SEQ ID NO: 2110167 - RNA, 19 nt, Homo sapiens
  misc_RNA (1)...(19): siRNA sense strand
gcacaacuuacagacauuu

SEQ ID NO: 2110168 - RNA, 19 nt, Homo sapiens
  misc_RNA (1)...(19): siRNA sense strand
agagacaaacaguaucuua

SEQ ID NO: 2110169 - RNA, 19 nt, Homo sapiens
  misc_RNA (1)...(19): siRNA sense strand
gaucuagaugcuaugauuu

SEQ ID NO: 2110170 - RNA, 19 nt, Homo sapiens
  misc_RNA (1)...(19): siRNA sense strand
aagccagacuuacuacauu

SEQ ID NO: 2110171 - RNA, 19 nt, Homo sapiens
  misc_RNA (1)...(19): siRNA sense strand
gcuacaggcuuuaagaaaa

SEQ ID NO: 2110172 - RNA, 19 nt, Homo sapiens
  misc_RNA (1)...(19): siRNA sense strand
guggauaaacuuuguaugu

SEQ ID NO: 2110173 - RNA, 19 nt, Homo sapiens
  misc_RNA (1)...(19): siRNA sense strand
ccaaggagaaggagaaaca

SEQ ID NO: 2110174 - RNA, 19 nt, Homo sapiens
  misc_RNA (1)...(19): siRNA sense strand
aaacagcacaaggccauua

SEQ ID NO: 2110175 - RNA, 19 nt, Homo sapiens
  misc_RNA (1)...(19): siRNA sense strand
caucaugagcugugaagaa

SEQ ID NO: 2110176 - RNA, 19 nt, Homo sapiens
  misc_RNA (1)...(19): siRNA sense strand
ucccagagaucaagugugu

SEQ ID NO: 2110177 - RNA, 19 nt, Homo sapiens
  misc_RNA (1)...(19): siRNA sense strand
gcagaacccuagccuucca

SEQ ID NO: 2110178 - RNA, 19 nt, Homo sapiens
  misc_RNA (1)...(19): siRNA sense strand
ggucaacagccuccgauga

SEQ ID NO: 2110179 - RNA, 19 nt, Homo sapiens
  misc_RNA (1)...(19): siRNA sense strand
ggagucaugguuacacuga

SEQ ID NO: 2110180 - RNA, 19 nt, Homo sapiens
  misc_RNA (1)...(19): siRNA sense strand
cccuggaacuacugaauaa

SEQ ID NO: 2110181 - RNA, 19 nt, Homo sapiens
  misc_RNA (1)...(19): siRNA sense strand
gaacuugaagaaauugauc

SEQ ID NO: 2110182 - RNA, 19 nt, Homo sapiens
  misc_RNA (1)...(19): siRNA sense strand
guaauuaggaagcugauag

SEQ ID NO: 2110183 - RNA, 19 nt, Homo sapiens
  misc_RNA (1)...(19): siRNA sense strand
cauuaaacauguggaucua

SEQ ID NO: 2110184 - RNA, 19 nt, Homo sapiens
  misc_RNA (1)...(19): siRNA sense strand
cugcaaagguucaccaagu

SEQ ID NO: 2110185 - RNA, 19 nt, Homo sapiens
  misc_RNA (1)...(19): siRNA sense strand
agaccucacucaucucaau

SEQ ID NO: 2110186 - RNA, 19 nt, Homo sapiens
  misc_RNA (1)...(19): siRNA sense strand
guaaaggcaagaugcaguu

SEQ ID NO: 2110187 - RNA, 19 nt, Homo sapiens
  misc_RNA (1)...(19): siRNA sense strand
gaacauggugaucaaggau

SEQ ID NO: 2110188 - RNA, 19 nt, Homo sapiens
  misc_RNA (1)...(19): siRNA sense strand
cauggucaauacauucauu

SEQ ID NO: 2110189 - RNA, 19 nt, Homo sapiens
  misc_RNA (1)...(19): siRNA sense strand
gcugaaagccaucccaaca

SEQ ID NO: 2110190 - RNA, 19 nt, Homo sapiens
  misc_RNA (1)...(19): siRNA sense strand
ucaaauaugugaacuuccu

SEQ ID NO: 2110191 - RNA, 19 nt, Homo sapiens
  misc_RNA (1)...(19): siRNA sense strand
ccgaaguauuggagaaauu

SEQ ID NO: 2110192 - RNA, 19 nt, Homo sapiens
  misc_RNA (1)...(19): siRNA sense strand
uuuguuggauggaaacuuu

SEQ ID NO: 2110193 - RNA, 19 nt, Homo sapiens
  misc_RNA (1)...(19): siRNA sense strand
gccgaaagcuagaaguuuu

SEQ ID NO: 2110194 - RNA, 19 nt, Homo sapiens
  misc_RNA (1)...(19): siRNA sense strand
cagcagaggccagugauga

SEQ ID NO: 2110195 - RNA, 19 nt, Homo sapiens
  misc_RNA (1)...(19): siRNA sense strand
aaaccugccucccaaacug

SEQ ID NO: 2110196 - RNA, 19 nt, Homo sapiens
  misc_RNA (1)...(19): siRNA sense strand
guguggaccugagcuguaa

SEQ ID NO: 2110197 - RNA, 19 nt, Homo sapiens
  misc_RNA (1)...(19): siRNA sense strand
cgaggucuuucccgaaguu

SEQ ID NO: 2110198 - RNA, 19 nt, Homo sapiens
  misc_RNA (1)...(19): siRNA sense strand
auaaccgacuucagaguuu

SEQ ID NO: 2110199 - RNA, 19 nt, Homo sapiens
  misc_RNA (1)...(19): siRNA sense strand
ccgaagagacaaacaguau

SEQ ID NO: 2110200 - RNA, 19 nt, Homo sapiens
  misc_RNA (1)...(19): siRNA sense strand
caacaacgaucaugaauug

SEQ ID NO: 2110201 - RNA, 19 nt, Homo sapiens
  misc_RNA (1)...(19): siRNA sense strand
gaucuaagguugaacguaa

SEQ ID NO: 2110202 - RNA, 19 nt, Homo sapiens
  misc_RNA (1)...(19): siRNA sense strand
ggaaucaacuggucacauu

SEQ ID NO: 2110203 - RNA, 19 nt, Homo sapiens
  misc_RNA (1)...(19): siRNA sense strand
gaagucacauuaccagaaa

SEQ ID NO: 2110204 - RNA, 19 nt, Homo sapiens
  misc_RNA (1)...(19): siRNA sense strand
gaaauugacugcuguggau

SEQ ID NO: 2110205 - RNA, 19 nt, Homo sapiens
  misc_RNA (1)...(19): siRNA sense strand
caaauuaucuguccuacau

SEQ ID NO: 2110206 - RNA, 19 nt, Homo sapiens
  misc_RNA (1)...(19): siRNA sense strand
ggaggaacuugaagaaauu

SEQ ID NO: 2110207 - RNA, 19 nt, Homo sapiens
  misc_RNA (1)...(19): siRNA sense strand
gaacgccucugcgaacaaa

SEQ ID NO: 2110208 - RNA, 19 nt, Homo sapiens
  misc_RNA (1)...(19): siRNA sense strand
gugaauaacuucugugaca

SEQ ID NO: 2110209 - RNA, 19 nt, Homo sapiens
  misc_RNA (1)...(19): siRNA sense strand
uuaaugaacugcaaagguu

SEQ ID NO: 2110210 - RNA, 19 nt, Homo sapiens
  misc_RNA (1)...(19): siRNA sense strand
ucaaagaaaucaugaagca

SEQ ID NO: 2110211 - RNA, 19 nt, Homo sapiens
  misc_RNA (1)...(19): siRNA sense strand
gaagagcugaagaggauua

SEQ ID NO: 2110212 - RNA, 19 nt, Homo sapiens
  misc_RNA (1)...(19): siRNA sense strand
gauauuggccauaaucaaa

SEQ ID NO: 2110213 - RNA, 19 nt, Homo sapiens
  misc_RNA (1)...(19): siRNA sense strand
ugaauaauauccgcuguuu

SEQ ID NO: 2110214 - RNA, 19 nt, Homo sapiens
  misc_RNA (1)...(19): siRNA sense strand
cggcauggcuuccgagauu

SEQ ID NO: 2110215 - RNA, 19 nt, Homo sapiens
  misc_RNA (1)...(19): siRNA sense strand
gucuuaaccuuuccaauaa

SEQ ID NO: 2110216 - RNA, 19 nt, Homo sapiens
  misc_RNA (1)...(19): siRNA sense strand
aagaagagcugaagaggau

SEQ ID NO: 2110217 - RNA, 19 nt, Homo sapiens
  misc_RNA (1)...(19): siRNA sense strand
guccagaucuuacaucaug

SEQ ID NO: 2110218 - RNA, 19 nt, Homo sapiens
  misc_RNA (1)...(19): siRNA sense strand
guaaugagcuaagugaagu

SEQ ID NO: 2110219 - RNA, 19 nt, Homo sapiens
  misc_RNA (1)...(19): siRNA sense strand
uggaccagcugccagauua

SEQ ID NO: 2110220 - RNA, 19 nt, Homo sapiens
  misc_RNA (1)...(19): siRNA sense strand
gaagaggaggucaaagaaa

SEQ ID NO: 2110221 - RNA, 19 nt, Homo sapiens
  misc_RNA (1)...(19): siRNA sense strand
gaagaauacauggucaaua

SEQ ID NO: 2110222 - RNA, 19 nt, Homo sapiens
  misc_RNA (1)...(19): siRNA sense strand
ucaaggaaccgcuuagaaa

SEQ ID NO: 2110223 - RNA, 19 nt, Homo sapiens
  misc_RNA (1)...(19): siRNA sense strand
gaauguauaauguccguaa

SEQ ID NO: 2110224 - RNA, 19 nt, Homo sapiens
  misc_RNA (1)...(19): siRNA sense strand
ggaagaggaggucaaagaa

SEQ ID NO: 2110225 - RNA, 19 nt, Homo sapiens
  misc_RNA (1)...(19): siRNA sense strand
ggaggauccuucaccuuga

SEQ ID NO: 2110226 - RNA, 19 nt, Homo sapiens
  misc_RNA (1)...(19): siRNA sense strand
caccuaaccuucugaugaa

SEQ ID NO: 2110227 - RNA, 19 nt, Homo sapiens
  misc_RNA (1)...(19): siRNA sense strand
ggauaaacuuuguaugucu

SEQ ID NO: 2110228 - RNA, 19 nt, Homo sapiens
  misc_RNA (1)...(19): siRNA sense strand
ugauagagguggcuacaga

SEQ ID NO: 2110229 - RNA, 19 nt, Homo sapiens
  misc_RNA (1)...(19): siRNA sense strand
gacaaacaguaucuuacaa

SEQ ID NO: 2110230 - RNA, 19 nt, Homo sapiens
  misc_RNA (1)...(19): siRNA sense strand
gccaagaccucacucaucu

SEQ ID NO: 2110231 - RNA, 19 nt, Homo sapiens
  misc_RNA (1)...(19): siRNA sense strand
ggaagcugauagcagauga

SEQ ID NO: 2110232 - RNA, 19 nt, Homo sapiens
  misc_RNA (1)...(19): siRNA sense strand
aagaauacauggucaauac

SEQ ID NO: 2110233 - RNA, 19 nt, Homo sapiens
  misc_RNA (1)...(19): siRNA sense strand
ccaccuaaccuucugauga

SEQ ID NO: 2110234 - RNA, 19 nt, Homo sapiens
  misc_RNA (1)...(19): siRNA sense strand
gcugauagcagaugaagug

SEQ ID NO: 2110235 - RNA, 19 nt, Homo sapiens
  misc_RNA (1)...(19): siRNA sense strand
gaaucaacuggucacauua

SEQ ID NO: 2110236 - RNA, 19 nt, Homo sapiens
  misc_RNA (1)...(19): siRNA sense strand
ugaucuagaugcuaugauu

SEQ ID NO: 2110237 - RNA, 19 nt, Homo sapiens
  misc_RNA (1)...(19): siRNA sense strand
caauaagcuuggugaucua

SEQ ID NO: 2110238 - RNA, 19 nt, Homo sapiens
  misc_RNA (1)...(19): siRNA sense strand
aagaggaggucaaagaaau

SEQ ID NO: 2110239 - RNA, 19 nt, Homo sapiens
  misc_RNA (1)...(19): siRNA sense strand
acaaggccauuaucacuga

SEQ ID NO: 2110240 - RNA, 19 nt, Homo sapiens
  misc_RNA (1)...(19): siRNA sense strand
uggaggaacuugaagaaau

SEQ ID NO: 2110241 - RNA, 19 nt, Homo sapiens
  misc_RNA (1)...(19): siRNA sense strand
gaaacuggaggaacuugaa

SEQ ID NO: 2110242 - RNA, 19 nt, Homo sapiens
  misc_RNA (1)...(19): siRNA sense strand
ccucacucaucucaauuua

SEQ ID NO: 2110243 - RNA, 19 nt, Homo sapiens
  misc_RNA (1)...(19): siRNA sense strand
ugaacuuccugcccgcuua

SEQ ID NO: 2110244 - RNA, 19 nt, Homo sapiens
  misc_RNA (1)...(19): siRNA sense strand
agacaucuguggcuauuuc

SEQ ID NO: 2110245 - RNA, 19 nt, Homo sapiens
  misc_RNA (1)...(19): siRNA sense strand
acaauaagcuuggugaucu

SEQ ID NO: 2110246 - RNA, 19 nt, Homo sapiens
  misc_RNA (1)...(19): siRNA sense strand
ugacauucccgaaguauug

SEQ ID NO: 2110247 - RNA, 19 nt, Homo sapiens
  misc_RNA (1)...(19): siRNA sense strand
agucuuaaccuuuccaaua

SEQ ID NO: 2110248 - RNA, 19 nt, Homo sapiens
  misc_RNA (1)...(19): siRNA sense strand
gcaaugcccugcgaucagu

SEQ ID NO: 2110249 - RNA, 19 nt, Homo sapiens
  misc_RNA (1)...(19): siRNA sense strand
caaaugugugcccuuguua

SEQ ID NO: 2110250 - RNA, 19 nt, Homo sapiens
  misc_RNA (1)...(19): siRNA sense strand
ucucaggaauguauaaugu

SEQ ID NO: 2110251 - RNA, 19 nt, Homo sapiens
  misc_RNA (1)...(19): siRNA sense strand
gcacaaggccauuaucacu

SEQ ID NO: 2110252 - RNA, 19 nt, Homo sapiens
  misc_RNA (1)...(19): siRNA sense strand
aaacgaagaagaauacaug

SEQ ID NO: 2110253 - RNA, 19 nt, Homo sapiens
  misc_RNA (1)...(19): siRNA sense strand
gagcuagaccugacuggaa

SEQ ID NO: 2110254 - RNA, 19 nt, Homo sapiens
  misc_RNA (1)...(19): siRNA sense strand
ggguagcucugaacggauu

SEQ ID NO: 2110255 - RNA, 19 nt, Homo sapiens
  misc_RNA (1)...(19): siRNA sense strand
caaauaacagccucacaga

SEQ ID NO: 2110256 - RNA, 19 nt, Homo sapiens
  misc_RNA (1)...(19): siRNA sense strand
gaagagacaaacaguaucu

SEQ ID NO: 2110257 - RNA, 19 nt, Homo sapiens
  misc_RNA (1)...(19): siRNA sense strand
cagccacgcuuuccgaaga

SEQ ID NO: 2110258 - RNA, 19 nt, Homo sapiens
  misc_RNA (1)...(19): siRNA sense strand
uaauagcagucuccggaaa

SEQ ID NO: 2110259 - RNA, 19 nt, Homo sapiens
  misc_RNA (1)...(19): siRNA sense strand
caguggaccucucguguug

SEQ ID NO: 2110260 - RNA, 19 nt, Homo sapiens
  misc_RNA (1)...(19): siRNA sense strand
aauauccgcuguuucaaga

SEQ ID NO: 2110261 - RNA, 19 nt, Homo sapiens
  misc_RNA (1)...(19): siRNA sense strand
aauaauauccgcuguuuca

SEQ ID NO: 2110262 - RNA, 19 nt, Homo sapiens
  misc_RNA (1)...(19): siRNA sense strand
guggaccucucguguugua

SEQ ID NO: 2110263 - RNA, 19 nt, Homo sapiens
  misc_RNA (1)...(19): siRNA sense strand
ugaagaaauugaucucagu

SEQ ID NO: 2110264 - RNA, 19 nt, Homo sapiens
  misc_RNA (1)...(19): siRNA sense strand
acaacggccuugacaguga

SEQ ID NO: 2110265 - RNA, 19 nt, Homo sapiens
  misc_RNA (1)...(19): siRNA sense strand
gcaaagguucaccaaguug

SEQ ID NO: 2110266 - RNA, 19 nt, Homo sapiens
  misc_RNA (1)...(19): siRNA sense strand
ggaaagccgcugccucugu

SEQ ID NO: 2110267 - RNA, 19 nt, Homo sapiens
  misc_RNA (1)...(19): siRNA sense strand
gcacaacuuacagacauuu

SEQ ID NO: 2110268 - RNA, 19 nt, Homo sapiens
  misc_RNA (1)...(19): siRNA sense strand
agagacaaacaguaucuua

SEQ ID NO: 2110269 - RNA, 19 nt, Homo sapiens
  misc_RNA (1)...(19): siRNA sense strand
gaucuagaugcuaugauuu

SEQ ID NO: 2110270 - RNA, 19 nt, Homo sapiens
  misc_RNA (1)...(19): siRNA sense strand
aagccagacuuacuacauu

SEQ ID NO: 2110271 - RNA, 19 nt, Homo sapiens
  misc_RNA (1)...(19): siRNA sense strand
gcuacaggcuuuaagaaaa

SEQ ID NO: 2110272 - RNA, 19 nt, Homo sapiens
  misc_RNA (1)...(19): siRNA sense strand
guggauaaacuuuguaugu

SEQ ID NO: 2110273 - RNA, 19 nt, Homo sapiens
  misc_RNA (1)...(19): siRNA sense strand
ccaaggagaaggagaaaca

SEQ ID NO: 2110274 - RNA, 19 nt, Homo sapiens
  misc_RNA (1)...(19): siRNA sense strand
aaacagcacaaggccauua

SEQ ID NO: 2110275 - RNA, 19 nt, Homo sapiens
  misc_RNA (1)...(19): siRNA sense strand
caucaugagcugugaagaa

SEQ ID NO: 2110276 - RNA, 19 nt, Homo sapiens
  misc_RNA (1)...(19): siRNA sense strand
ucccagagaucaagugugu

SEQ ID NO: 2110277 - RNA, 19 nt, Homo sapiens
  misc_RNA (1)...(19): siRNA sense strand
gcagaacccuagccuucca

SEQ ID NO: 2110278 - RNA, 19 nt, Homo sapiens
  misc_RNA (1)...(19): siRNA sense strand
ggucaacagccuccgauga

SEQ ID NO: 2110279 - RNA, 19 nt, Homo sapiens
  misc_RNA (1)...(19): siRNA sense strand
ggagucaugguuacacuga

SEQ ID NO: 2110280 - RNA, 19 nt, Homo sapiens
  misc_RNA (1)...(19): siRNA sense strand
cccuggaacuacugaauaa

SEQ ID NO: 2110281 - RNA, 19 nt, Homo sapiens
  misc_RNA (1)...(19): siRNA sense strand
gaacuugaagaaauugauc

SEQ ID NO: 2110282 - RNA, 19 nt, Homo sapiens
  misc_RNA (1)...(19): siRNA sense strand
guaauuaggaagcugauag

SEQ ID NO: 2110283 - RNA, 19 nt, Homo sapiens
  misc_RNA (1)...(19): siRNA sense strand
cauuaaacauguggaucua

SEQ ID NO: 2110284 - RNA, 19 nt, Homo sapiens
  misc_RNA (1)...(19): siRNA sense strand
cugcaaagguucaccaagu

SEQ ID NO: 2110285 - RNA, 19 nt, Homo sapiens
  misc_RNA (1)...(19): siRNA sense strand
agaccucacucaucucaau

SEQ ID NO: 2110286 - RNA, 19 nt, Homo sapiens
  misc_RNA (1)...(19): siRNA sense strand
gaacauggugaucaaggau

SEQ ID NO: 2110287 - RNA, 19 nt, Homo sapiens
  misc_RNA (1)...(19): siRNA sense strand
cauggucaauacauucauu

SEQ ID NO: 2110288 - RNA, 19 nt, Homo sapiens
  misc_RNA (1)...(19): siRNA sense strand
gcugaaagccaucccaaca

SEQ ID NO: 2110289 - RNA, 19 nt, Homo sapiens
  misc_RNA (1)...(19): siRNA sense strand
ucaaauaugugaacuuccu

SEQ ID NO: 2110290 - RNA, 19 nt, Homo sapiens
  misc_RNA (1)...(19): siRNA sense strand
guaaaggcaagaugcaguu

SEQ ID NO: 2110291 - RNA, 19 nt, Homo sapiens
  misc_RNA (1)...(19): siRNA sense strand
ccgaaguauuggagaaauu

SEQ ID NO: 2110292 - RNA, 19 nt, Homo sapiens
  misc_RNA (1)...(19): siRNA sense strand
uuuguuggauggaaacuuu

SEQ ID NO: 2110293 - RNA, 19 nt, Homo sapiens
  misc_RNA (1)...(19): siRNA sense strand
gccgaaagcuagaaguuuu

SEQ ID NO: 2110294 - RNA, 19 nt, Homo sapiens
  misc_RNA (1)...(19): siRNA sense strand
cagcagaggccagugauga

SEQ ID NO: 2110295 - RNA, 19 nt, Homo sapiens
  misc_RNA (1)...(19): siRNA sense strand
aaaccugccucccaaacug

SEQ ID NO: 2110296 - RNA, 19 nt, Homo sapiens
  misc_RNA (1)...(19): siRNA sense strand
guguggaccugagcuguaa

SEQ ID NO: 2110297 - RNA, 19 nt, Homo sapiens
  misc_RNA (1)...(19): siRNA sense strand
cgaggucuuucccgaaguu

SEQ ID NO: 2110298 - RNA, 19 nt, Homo sapiens
  misc_RNA (1)...(19): siRNA sense strand
auaaccgacuucagaguuu

SEQ ID NO: 2110299 - RNA, 19 nt, Homo sapiens
  misc_RNA (1)...(19): siRNA sense strand
ccgaagagacaaacaguau

SEQ ID NO: 2110300 - RNA, 19 nt, Homo sapiens
  misc_RNA (1)...(19): siRNA sense strand
gaaccucccugcuaauaau

SEQ ID NO: 2110301 - RNA, 19 nt, Homo sapiens
  misc_RNA (1)...(19): siRNA sense strand
gcuuugaccuccaauagua

SEQ ID NO: 2110302 - RNA, 19 nt, Homo sapiens
  misc_RNA (1)...(19): siRNA sense strand
gcacuggcaacuucuauuu

SEQ ID NO: 2110303 - RNA, 19 nt, Homo sapiens
  misc_RNA (1)...(19): siRNA sense strand
gcaggagccucacagucua

SEQ ID NO: 2110304 - RNA, 19 nt, Homo sapiens
  misc_RNA (1)...(19): siRNA sense strand
gaccuccaauaguaacuua

SEQ ID NO: 2110305 - RNA, 19 nt, Homo sapiens
  misc_RNA (1)...(19): siRNA sense strand
gaagcuccgaguucucuua

SEQ ID NO: 2110306 - RNA, 19 nt, Homo sapiens
  misc_RNA (1)...(19): siRNA sense strand
uaacuuagcagcacauauc

SEQ ID NO: 2110307 - RNA, 19 nt, Homo sapiens
  misc_RNA (1)...(19): siRNA sense strand
gaacugcuggcuccaauca

SEQ ID NO: 2110308 - RNA, 19 nt, Homo sapiens
  misc_RNA (1)...(19): siRNA sense strand
ggaaccucccugcuaauaa

SEQ ID NO: 2110309 - RNA, 19 nt, Homo sapiens
  misc_RNA (1)...(19): siRNA sense strand
ggaucuugcugcacucuuc

SEQ ID NO: 2110310 - RNA, 19 nt, Homo sapiens
  misc_RNA (1)...(19): siRNA sense strand
ucucuuaccucagcuagaa

SEQ ID NO: 2110311 - RNA, 19 nt, Homo sapiens
  misc_RNA (1)...(19): siRNA sense strand
ggacagcccucugguucuc

SEQ ID NO: 2110312 - RNA, 19 nt, Homo sapiens
  misc_RNA (1)...(19): siRNA sense strand
ccggaauccugacuauuga

SEQ ID NO: 2110313 - RNA, 19 nt, Homo sapiens
  misc_RNA (1)...(19): siRNA sense strand
uuaccgagccauucaacua

SEQ ID NO: 2110314 - RNA, 19 nt, Homo sapiens
  misc_RNA (1)...(19): siRNA sense strand
ccaugaagaacuugaguga

SEQ ID NO: 2110315 - RNA, 19 nt, Homo sapiens
  misc_RNA (1)...(19): siRNA sense strand
ccauucaacuagccaagga

SEQ ID NO: 2110316 - RNA, 19 nt, Homo sapiens
  misc_RNA (1)...(19): siRNA sense strand
uugcugcacucuucucuga

SEQ ID NO: 2110317 - RNA, 19 nt, Homo sapiens
  misc_RNA (1)...(19): siRNA sense strand
ccagaacaguugguugugu

SEQ ID NO: 2110318 - RNA, 19 nt, Homo sapiens
  misc_RNA (1)...(19): siRNA sense strand
ugacacaccugccaaugcu

SEQ ID NO: 2110319 - RNA, 19 nt, Homo sapiens
  misc_RNA (1)...(19): siRNA sense strand
cuauugacgucacuucugu

SEQ ID NO: 2110320 - RNA, 19 nt, Homo sapiens
  misc_RNA (1)...(19): siRNA sense strand
ggcaacuucuauuuggaaa

SEQ ID NO: 2110321 - RNA, 19 nt, Homo sapiens
  misc_RNA (1)...(19): siRNA sense strand
gcugcacucuucucugaca

SEQ ID NO: 2110322 - RNA, 19 nt, Homo sapiens
  misc_RNA (1)...(19): siRNA sense strand
ugugagugcaggagcauua

SEQ ID NO: 2110323 - RNA, 19 nt, Homo sapiens
  misc_RNA (1)...(19): siRNA sense strand
uggaugacgugcagacugu

SEQ ID NO: 2110324 - RNA, 19 nt, Homo sapiens
  misc_RNA (1)...(19): siRNA sense strand
gcucugaacuccggaaucc

SEQ ID NO: 2110325 - RNA, 19 nt, Homo sapiens
  misc_RNA (1)...(19): siRNA sense strand
ggacagcagccacgguucu

SEQ ID NO: 2110326 - RNA, 19 nt, Homo sapiens
  misc_RNA (1)...(19): siRNA sense strand
gagccucacagucuacuca

SEQ ID NO: 2110327 - RNA, 19 nt, Homo sapiens
  misc_RNA (1)...(19): siRNA sense strand
caugcaagccagaacaguu

SEQ ID NO: 2110328 - RNA, 19 nt, Homo sapiens
  misc_RNA (1)...(19): siRNA sense strand
uccggaauccugacuauug

SEQ ID NO: 2110329 - RNA, 19 nt, Homo sapiens
  misc_RNA (1)...(19): siRNA sense strand
cggaacugcuggcuccaau

SEQ ID NO: 2110330 - RNA, 19 nt, Homo sapiens
  misc_RNA (1)...(19): siRNA sense strand
gaugacgugcagacuguga

SEQ ID NO: 2110331 - RNA, 19 nt, Homo sapiens
  misc_RNA (1)...(19): siRNA sense strand
cacagucuacucagagaaa

SEQ ID NO: 2110332 - RNA, 19 nt, Homo sapiens
  misc_RNA (1)...(19): siRNA sense strand
ugcaggcacuggcaacuuc

SEQ ID NO: 2110333 - RNA, 19 nt, Homo sapiens
  misc_RNA (1)...(19): siRNA sense strand
cuaucaaccugcaggaucu

SEQ ID NO: 2110334 - RNA, 19 nt, Homo sapiens
  misc_RNA (1)...(19): siRNA sense strand
ugagcucacuaacauggau

SEQ ID NO: 2110335 - RNA, 19 nt, Homo sapiens
  misc_RNA (1)...(19): siRNA sense strand
ucaccacaccgaccucuuc

SEQ ID NO: 2110336 - RNA, 19 nt, Homo sapiens
  misc_RNA (1)...(19): siRNA sense strand
gugacgacccacuggcuuu

SEQ ID NO: 2110337 - RNA, 19 nt, Homo sapiens
  misc_RNA (1)...(19): siRNA sense strand
cagcagcccaggccaaagu

SEQ ID NO: 2110338 - RNA, 19 nt, Homo sapiens
  misc_RNA (1)...(19): siRNA sense strand
ggucggaugaggcucugaa

SEQ ID NO: 2110339 - RNA, 19 nt, Homo sapiens
  misc_RNA (1)...(19): siRNA sense strand
acuggcaacuucuauuugg

SEQ ID NO: 2110340 - RNA, 19 nt, Homo sapiens
  misc_RNA (1)...(19): siRNA sense strand
gcaaugcaggagccucaca

SEQ ID NO: 2110341 - RNA, 19 nt, Homo sapiens
  misc_RNA (1)...(19): siRNA sense strand
gaauuacccuuaugucuuu

SEQ ID NO: 2110342 - RNA, 19 nt, Homo sapiens
  misc_RNA (1)...(19): siRNA sense strand
agaagaaccucauugcuuu

SEQ ID NO: 2110343 - RNA, 19 nt, Homo sapiens
  misc_RNA (1)...(19): siRNA sense strand
ggaauuacccuuaugucuu

SEQ ID NO: 2110344 - RNA, 19 nt, Homo sapiens
  misc_RNA (1)...(19): siRNA sense strand
gcaguggaauuacccuuau

SEQ ID NO: 2110345 - RNA, 19 nt, Homo sapiens
  misc_RNA (1)...(19): siRNA sense strand
gaaccucauugcuuuccaa

SEQ ID NO: 2110346 - RNA, 19 nt, Homo sapiens
  misc_RNA (1)...(19): siRNA sense strand
caggagacaucauggaaga

SEQ ID NO: 2110347 - RNA, 19 nt, Homo sapiens
  misc_RNA (1)...(19): siRNA sense strand
cagaagaauucguagaagu

SEQ ID NO: 2110348 - RNA, 19 nt, Homo sapiens
  misc_RNA (1)...(19): siRNA sense strand
agaagaauucguagaagua

SEQ ID NO: 2110349 - RNA, 19 nt, Homo sapiens
  misc_RNA (1)...(19): siRNA sense strand
gaaguagaaucuguuuguc

SEQ ID NO: 2110350 - RNA, 19 nt, Homo sapiens
  misc_RNA (1)...(19): siRNA sense strand
ccucauugcuuuccaacug

SEQ ID NO: 2110351 - RNA, 19 nt, Homo sapiens
  misc_RNA (1)...(19): siRNA sense strand
guagaaguagaaucuguuu

SEQ ID NO: 2110352 - RNA, 19 nt, Homo sapiens
  misc_RNA (1)...(19): siRNA sense strand
ccaacuaacucaggagaca

SEQ ID NO: 2110353 - RNA, 19 nt, Homo sapiens
  misc_RNA (1)...(19): siRNA sense strand
gucuuucacugccaauuaa

SEQ ID NO: 2110354 - RNA, 19 nt, Homo sapiens
  misc_RNA (1)...(19): siRNA sense strand
ccaauuaaagggcaacaga

SEQ ID NO: 2110355 - RNA, 19 nt, Homo sapiens
  misc_RNA (1)...(19): siRNA sense strand
aagaagaaccucauugcuu

SEQ ID NO: 2110356 - RNA, 19 nt, Homo sapiens
  misc_RNA (1)...(19): siRNA sense strand
uuaacacuuucuccacuuu

SEQ ID NO: 2110357 - RNA, 19 nt, Homo sapiens
  misc_RNA (1)...(19): siRNA sense strand
uaacucaggagacaucaug

SEQ ID NO: 2110358 - RNA, 19 nt, Homo sapiens
  misc_RNA (1)...(19): siRNA sense strand
uaacacuuucuccacuuua

SEQ ID NO: 2110359 - RNA, 19 nt, Homo sapiens
  misc_RNA (1)...(19): siRNA sense strand
aguagaaucuguuugucuu

SEQ ID NO: 2110360 - RNA, 19 nt, Homo sapiens
  misc_RNA (1)...(19): siRNA sense strand
gaagaauucguagaaguag

SEQ ID NO: 2110361 - RNA, 19 nt, Homo sapiens
  misc_RNA (1)...(19): siRNA sense strand
gaacauggggcaauuaaca

SEQ ID NO: 2110362 - RNA, 19 nt, Homo sapiens
  misc_RNA (1)...(19): siRNA sense strand
uuaaagggcaacagaaaug

SEQ ID NO: 2110363 - RNA, 19 nt, Homo sapiens
  misc_RNA (1)...(19): siRNA sense strand
agaaguagaaucuguuugu

SEQ ID NO: 2110364 - RNA, 19 nt, Homo sapiens
  misc_RNA (1)...(19): siRNA sense strand
gaaucuguuugucuucagu

SEQ ID NO: 2110365 - RNA, 19 nt, Homo sapiens
  misc_RNA (1)...(19): siRNA sense strand
gaagaaccucauugcuuuc

SEQ ID NO: 2110366 - RNA, 19 nt, Homo sapiens
  misc_RNA (1)...(19): siRNA sense strand
ugucuuucacugccaauua

SEQ ID NO: 2110367 - RNA, 19 nt, Homo sapiens
  misc_RNA (1)...(19): siRNA sense strand
caauuaaagggcaacagaa

SEQ ID NO: 2110368 - RNA, 19 nt, Homo sapiens
  misc_RNA (1)...(19): siRNA sense strand
cuguuugucuucaguuaaa

SEQ ID NO: 2110369 - RNA, 19 nt, Homo sapiens
  misc_RNA (1)...(19): siRNA sense strand
uagaaucuguuugucuuca

SEQ ID NO: 2110370 - RNA, 19 nt, Homo sapiens
  misc_RNA (1)...(19): siRNA sense strand
aauuaaagggcaacagaaa

SEQ ID NO: 2110371 - RNA, 19 nt, Homo sapiens
  misc_RNA (1)...(19): siRNA sense strand
ucagaagaauucguagaag

SEQ ID NO: 2110372 - RNA, 19 nt, Homo sapiens
  misc_RNA (1)...(19): siRNA sense strand
agaauucguagaaguagaa

SEQ ID NO: 2110373 - RNA, 19 nt, Homo sapiens
  misc_RNA (1)...(19): siRNA sense strand
gaucuugaacuggugcuau

SEQ ID NO: 2110374 - RNA, 19 nt, Homo sapiens
  misc_RNA (1)...(19): siRNA sense strand
caaaagaagaaccucauug

SEQ ID NO: 2110375 - RNA, 19 nt, Homo sapiens
  misc_RNA (1)...(19): siRNA sense strand
ucguagaaguagaaucugu

SEQ ID NO: 2110376 - RNA, 19 nt, Homo sapiens
  misc_RNA (1)...(19): siRNA sense strand
ugcaguggaauuacccuua

SEQ ID NO: 2110377 - RNA, 19 nt, Homo sapiens
  misc_RNA (1)...(19): siRNA sense strand
aacacuuucuccacuuuau

SEQ ID NO: 2110378 - RNA, 19 nt, Homo sapiens
  misc_RNA (1)...(19): siRNA sense strand
aagggcaacagaaauggua

SEQ ID NO: 2110379 - RNA, 19 nt, Homo sapiens
  misc_RNA (1)...(19): siRNA sense strand
aagaauucguagaaguaga

SEQ ID NO: 2110380 - RNA, 19 nt, Homo sapiens
  misc_RNA (1)...(19): siRNA sense strand
uaucagaagaauucguaga

SEQ ID NO: 2110381 - RNA, 19 nt, Homo sapiens
  misc_RNA (1)...(19): siRNA sense strand
caguggaauuacccuuaug

SEQ ID NO: 2110382 - RNA, 19 nt, Homo sapiens
  misc_RNA (1)...(19): siRNA sense strand
gcaauuugguuucuucuug

SEQ ID NO: 2110383 - RNA, 19 nt, Homo sapiens
  misc_RNA (1)...(19): siRNA sense strand
gaauggaguuucugaguug

SEQ ID NO: 2110384 - RNA, 19 nt, Homo sapiens
  misc_RNA (1)...(19): siRNA sense strand
caaaacaacuggcuucgua

SEQ ID NO: 2110385 - RNA, 19 nt, Homo sapiens
  misc_RNA (1)...(19): siRNA sense strand
gaaaagaucucacauacag

SEQ ID NO: 2110386 - RNA, 19 nt, Homo sapiens
  misc_RNA (1)...(19): siRNA sense strand
gaauggagcccaccaagug

SEQ ID NO: 2110387 - RNA, 19 nt, Homo sapiens
  misc_RNA (1)...(19): siRNA sense strand
ggaucaagaugguaaguuc

SEQ ID NO: 2110388 - RNA, 19 nt, Homo sapiens
  misc_RNA (1)...(19): siRNA sense strand
auacaaagaucgacacaau

SEQ ID NO: 2110389 - RNA, 19 nt, Homo sapiens
  misc_RNA (1)...(19): siRNA sense strand
gaacauaauaggcccauuc

SEQ ID NO: 2110390 - RNA, 19 nt, Homo sapiens
  misc_RNA (1)...(19): siRNA sense strand
ccacugcuguucucucaaa

SEQ ID NO: 2110391 - RNA, 19 nt, Homo sapiens
  misc_RNA (1)...(19): siRNA sense strand
ucacgugaauuacaccuuu

SEQ ID NO: 2110392 - RNA, 19 nt, Homo sapiens
  misc_RNA (1)...(19): siRNA sense strand
ccacacaguuuaacauaca

SEQ ID NO: 2110393 - RNA, 19 nt, Homo sapiens
  misc_RNA (1)...(19): siRNA sense strand
gaaauagaagcaaugaaug

SEQ ID NO: 2110394 - RNA, 19 nt, Homo sapiens
  misc_RNA (1)...(19): siRNA sense strand
gauaguacuugacuuugug

SEQ ID NO: 2110395 - RNA, 19 nt, Homo sapiens
  misc_RNA (1)...(19): siRNA sense strand
caacaauuccgugauagua

SEQ ID NO: 2110396 - RNA, 19 nt, Homo sapiens
  misc_RNA (1)...(19): siRNA sense strand
gcagucacgucuccaacaa

SEQ ID NO: 2110397 - RNA, 19 nt, Homo sapiens
  misc_RNA (1)...(19): siRNA sense strand
ccagguauguaauguaaug

SEQ ID NO: 2110398 - RNA, 19 nt, Homo sapiens
  misc_RNA (1)...(19): siRNA sense strand
guaauguaauggaaccaaa

SEQ ID NO: 2110399 - RNA, 19 nt, Homo sapiens
  misc_RNA (1)...(19): siRNA sense strand
ucacugaaauggaugaaca

SEQ ID NO: 2110400 - RNA, 19 nt, Homo sapiens
  misc_RNA (1)...(19): siRNA sense strand
ccaaaccaguauacaaaga

SEQ ID NO: 2110401 - RNA, 19 nt, Homo sapiens
  misc_RNA (1)...(19): siRNA sense strand
ugaauggaguuucugaguu

SEQ ID NO: 2110402 - RNA, 19 nt, Homo sapiens
  misc_RNA (1)...(19): siRNA sense strand
acaaagaucgacacaauug

SEQ ID NO: 2110403 - RNA, 19 nt, Homo sapiens
  misc_RNA (1)...(19): siRNA sense strand
auacaggccugaucaacaa

SEQ ID NO: 2110404 - RNA, 19 nt, Homo sapiens
  misc_RNA (1)...(19): siRNA sense strand
gaucgcauccucaaacuca

SEQ ID NO: 2110405 - RNA, 19 nt, Homo sapiens
  misc_RNA (1)...(19): siRNA sense strand
aagaagacguggacaagga

SEQ ID NO: 2110406 - RNA, 19 nt, Homo sapiens
  misc_RNA (1)...(19): siRNA sense strand
gguauguaauguaauggaa

SEQ ID NO: 2110407 - RNA, 19 nt, Homo sapiens
  misc_RNA (1)...(19): siRNA sense strand
gcauugcccugguuucagu

SEQ ID NO: 2110408 - RNA, 19 nt, Homo sapiens
  misc_RNA (1)...(19): siRNA sense strand
caaugaaacagcccuuauu

SEQ ID NO: 2110409 - RNA, 19 nt, Homo sapiens
  misc_RNA (1)...(19): siRNA sense strand
gaaguccgggaauuucuuu

SEQ ID NO: 2110410 - RNA, 19 nt, Homo sapiens
  misc_RNA (1)...(19): siRNA sense strand
uaaauguccuccacacagu

SEQ ID NO: 2110411 - RNA, 19 nt, Homo sapiens
  misc_RNA (1)...(19): siRNA sense strand
acaacuggcuucguacaaa

SEQ ID NO: 2110412 - RNA, 19 nt, Homo sapiens
  misc_RNA (1)...(19): siRNA sense strand
cauaauaggcccauucaca

SEQ ID NO: 2110413 - RNA, 19 nt, Homo sapiens
  misc_RNA (1)...(19): siRNA sense strand
guaauggaaccaaaccaaa

SEQ ID NO: 2110414 - RNA, 19 nt, Homo sapiens
  misc_RNA (1)...(19): siRNA sense strand
gaugagucccacggaauua

SEQ ID NO: 2110415 - RNA, 19 nt, Homo sapiens
  misc_RNA (1)...(19): siRNA sense strand
ccacggaucaagaugguaa

SEQ ID NO: 2110416 - RNA, 19 nt, Homo sapiens
  misc_RNA (1)...(19): siRNA sense strand
gcagaccaggauucuauaa

SEQ ID NO: 2110417 - RNA, 19 nt, Homo sapiens
  misc_RNA (1)...(19): siRNA sense strand
caaacucaacacugaaauu

SEQ ID NO: 2110418 - RNA, 19 nt, Homo sapiens
  misc_RNA (1)...(19): siRNA sense strand
guucguaacuuggccaugu

SEQ ID NO: 2110419 - RNA, 19 nt, Homo sapiens
  misc_RNA (1)...(19): siRNA sense strand
ggacuugcaaagaaacauu

SEQ ID NO: 2110420 - RNA, 19 nt, Homo sapiens
  misc_RNA (1)...(19): siRNA sense strand
ugacacuccuaaacuguau

SEQ ID NO: 2110421 - RNA, 19 nt, Homo sapiens
  misc_RNA (1)...(19): siRNA sense strand
agaccaggauucuauaaag

SEQ ID NO: 2110422 - RNA, 19 nt, Homo sapiens
  misc_RNA (1)...(19): siRNA sense strand
ggaagaagacguggacaag

SEQ ID NO: 2110423 - RNA, 19 nt, Homo sapiens
  misc_RNA (1)...(19): siRNA sense strand
aaugaaacagcccuuauuu

SEQ ID NO: 2110424 - RNA, 19 nt, Homo sapiens
  misc_RNA (1)...(19): siRNA sense strand
cauguuuccugauaccauu

SEQ ID NO: 2110425 - RNA, 19 nt, Homo sapiens
  misc_RNA (1)...(19): siRNA sense strand
ugauaguacuugacuuugu

SEQ ID NO: 2110426 - RNA, 19 nt, Homo sapiens
  misc_RNA (1)...(19): siRNA sense strand
gaagagcgugacacuccua

SEQ ID NO: 2110427 - RNA, 19 nt, Homo sapiens
  misc_RNA (1)...(19): siRNA sense strand
caucugcaguacaggauau

SEQ ID NO: 2110428 - RNA, 19 nt, Homo sapiens
  misc_RNA (1)...(19): siRNA sense strand
gauuuuaucuggcuuuuca

SEQ ID NO: 2110429 - RNA, 19 nt, Homo sapiens
  misc_RNA (1)...(19): siRNA sense strand
ugaaacagcccuuauuuug

SEQ ID NO: 2110430 - RNA, 19 nt, Homo sapiens
  misc_RNA (1)...(19): siRNA sense strand
aaacagcccuuauuuugga

SEQ ID NO: 2110431 - RNA, 19 nt, Homo sapiens
  misc_RNA (1)...(19): siRNA sense strand
cgugauaguacuugacuuu

SEQ ID NO: 2110432 - RNA, 19 nt, Homo sapiens
  misc_RNA (1)...(19): siRNA sense strand
caacuggcuucguacaaac

SEQ ID NO: 2110433 - RNA, 19 nt, Homo sapiens
  misc_RNA (1)...(19): siRNA sense strand
gaagcaaugaauggaguuu

SEQ ID NO: 2110434 - RNA, 19 nt, Homo sapiens
  misc_RNA (1)...(19): siRNA sense strand
cgacacaauugcugcugau

SEQ ID NO: 2110435 - RNA, 19 nt, Homo sapiens
  misc_RNA (1)...(19): siRNA sense strand
gugaauuacaccuuugaaa

SEQ ID NO: 2110436 - RNA, 19 nt, Homo sapiens
  misc_RNA (1)...(19): siRNA sense strand
cccaagccauucacagcua

SEQ ID NO: 2110437 - RNA, 19 nt, Homo sapiens
  misc_RNA (1)...(19): siRNA sense strand
gcgugacacuccuaaacug

SEQ ID NO: 2110438 - RNA, 19 nt, Homo sapiens
  misc_RNA (1)...(19): siRNA sense strand
ggaauggagcccaccaagu

SEQ ID NO: 2110439 - RNA, 19 nt, Homo sapiens
  misc_RNA (1)...(19): siRNA sense strand
ccaggauucuauaaagcuu

SEQ ID NO: 2110440 - RNA, 19 nt, Homo sapiens
  misc_RNA (1)...(19): siRNA sense strand
gaccaggauucuauaaagc

SEQ ID NO: 2110441 - RNA, 19 nt, Homo sapiens
  misc_RNA (1)...(19): siRNA sense strand
guacaggauaugaagaaau

SEQ ID NO: 2110442 - RNA, 19 nt, Homo sapiens
  misc_RNA (1)...(19): siRNA sense strand
ugauggagauuggcugguu

SEQ ID NO: 2110443 - RNA, 19 nt, Homo sapiens
  misc_RNA (1)...(19): siRNA sense strand
ugggagagcuaggauggaa

SEQ ID NO: 2110444 - RNA, 19 nt, Homo sapiens
  misc_RNA (1)...(19): siRNA sense strand
guacgggguucuuguguga

SEQ ID NO: 2110445 - RNA, 19 nt, Homo sapiens
  misc_RNA (1)...(19): siRNA sense strand
aaacucaacacugaaauuc

SEQ ID NO: 2110446 - RNA, 19 nt, Homo sapiens
  misc_RNA (1)...(19): siRNA sense strand
cacaauugcugcugaugag

SEQ ID NO: 2110447 - RNA, 19 nt, Homo sapiens
  misc_RNA (1)...(19): siRNA sense strand
ugccgccacuucucuuuaa

SEQ ID NO: 2110448 - RNA, 19 nt, Homo sapiens
  misc_RNA (1)...(19): siRNA sense strand
auaggcccauucacacaua

SEQ ID NO: 2110449 - RNA, 19 nt, Homo sapiens
  misc_RNA (1)...(19): siRNA sense strand
ccaagccauucacagcuau

SEQ ID NO: 2110450 - RNA, 19 nt, Homo sapiens
  misc_RNA (1)...(19): siRNA sense strand
gaguuucugaguugaguuu

SEQ ID NO: 2110451 - RNA, 19 nt, Homo sapiens
  misc_RNA (1)...(19): siRNA sense strand
ggaagaggaggaggaggaa

SEQ ID NO: 2110452 - RNA, 19 nt, Homo sapiens
  misc_RNA (1)...(19): siRNA sense strand
caggauaugaagaaauuga

SEQ ID NO: 2110453 - RNA, 19 nt, Homo sapiens
  misc_RNA (1)...(19): siRNA sense strand
gaaaugccccuucacuguu

SEQ ID NO: 2110454 - RNA, 19 nt, Homo sapiens
  misc_RNA (1)...(19): siRNA sense strand
ccagauggauuugggugau

SEQ ID NO: 2110455 - RNA, 19 nt, Homo sapiens
  misc_RNA (1)...(19): siRNA sense strand
aaaccaguauacaaagauc

SEQ ID NO: 2110456 - RNA, 19 nt, Homo sapiens
  misc_RNA (1)...(19): siRNA sense strand
caaugaauggaguuucuga

SEQ ID NO: 2110457 - RNA, 19 nt, Homo sapiens
  misc_RNA (1)...(19): siRNA sense strand
agacauacaggccugauca

SEQ ID NO: 2110458 - RNA, 19 nt, Homo sapiens
  misc_RNA (1)...(19): siRNA sense strand
gcauguaccaggccaccuu

SEQ ID NO: 2110459 - RNA, 19 nt, Homo sapiens
  misc_RNA (1)...(19): siRNA sense strand
gaaaggaaaggauuuuauc

SEQ ID NO: 2110460 - RNA, 19 nt, Homo sapiens
  misc_RNA (1)...(19): siRNA sense strand
gagcuaggauggaaaacau

SEQ ID NO: 2110461 - RNA, 19 nt, Homo sapiens
  misc_RNA (1)...(19): siRNA sense strand
ucaaugaaacagcccuuau

SEQ ID NO: 2110462 - RNA, 19 nt, Homo sapiens
  misc_RNA (1)...(19): siRNA sense strand
aaagagagccuaggagaac

SEQ ID NO: 2110463 - RNA, 19 nt, Homo sapiens
  misc_RNA (1)...(19): siRNA sense strand
caguuuaacauacauggaa

SEQ ID NO: 2110464 - RNA, 19 nt, Homo sapiens
  misc_RNA (1)...(19): siRNA sense strand
gugacacuccuaaacugua

SEQ ID NO: 2110465 - RNA, 19 nt, Homo sapiens
  misc_RNA (1)...(19): siRNA sense strand
guugauuccuccucuuugg

SEQ ID NO: 2110466 - RNA, 19 nt, Homo sapiens
  misc_RNA (1)...(19): siRNA sense strand
acacaauugcugcugauga

SEQ ID NO: 2110467 - RNA, 19 nt, Homo sapiens
  misc_RNA (1)...(19): siRNA sense strand
gcugcgaaguccgggaauu

SEQ ID NO: 2110468 - RNA, 19 nt, Homo sapiens
  misc_RNA (1)...(19): siRNA sense strand
caaaccaguauacaaagau

SEQ ID NO: 2110469 - RNA, 19 nt, Homo sapiens
  misc_RNA (1)...(19): siRNA sense strand
ggguugauuccuccucuuu

SEQ ID NO: 2110470 - RNA, 19 nt, Homo sapiens
  misc_RNA (1)...(19): siRNA sense strand
caguacaggauaugaagaa

SEQ ID NO: 2110471 - RNA, 19 nt, Homo sapiens
  misc_RNA (1)...(19): siRNA sense strand
gcaguacaggauaugaaga

SEQ ID NO: 2110472 - RNA, 19 nt, Homo sapiens
  misc_RNA (1)...(19): siRNA sense strand
gagcgugacacuccuaaac

SEQ ID NO: 2110473 - RNA, 19 nt, Homo sapiens
  misc_RNA (1)...(19): siRNA sense strand
acacuaagggauuguaaca

SEQ ID NO: 2110474 - RNA, 19 nt, Homo sapiens
  misc_RNA (1)...(19): siRNA sense strand
cauacaggccugaucaaca

SEQ ID NO: 2110475 - RNA, 19 nt, Homo sapiens
  misc_RNA (1)...(19): siRNA sense strand
cagaccaggauucuauaaa

SEQ ID NO: 2110476 - RNA, 19 nt, Homo sapiens
  misc_RNA (1)...(19): siRNA sense strand
agccaaaccaguauacaaa

SEQ ID NO: 2110477 - RNA, 19 nt, Homo sapiens
  misc_RNA (1)...(19): siRNA sense strand
ucacacuaagggauuguaa

SEQ ID NO: 2110478 - RNA, 19 nt, Homo sapiens
  misc_RNA (1)...(19): siRNA sense strand
aaauagaagcaaugaaugg

SEQ ID NO: 2110479 - RNA, 19 nt, Homo sapiens
  misc_RNA (1)...(19): siRNA sense strand
cuauagaaaggaaaggauu

SEQ ID NO: 2110480 - RNA, 19 nt, Homo sapiens
  misc_RNA (1)...(19): siRNA sense strand
uugcagaccaggauucuau

SEQ ID NO: 2110481 - RNA, 19 nt, Homo sapiens
  misc_RNA (1)...(19): siRNA sense strand
gcaucugcaguacaggaua

SEQ ID NO: 2110482 - RNA, 19 nt, Homo sapiens
  misc_RNA (1)...(19): siRNA sense strand
caaaugccaagcuaugcua

SEQ ID NO: 2110483 - RNA, 19 nt, Homo sapiens
  misc_RNA (1)...(19): siRNA sense strand
caaacaacagacaaacaaa

SEQ ID NO: 2110484 - RNA, 19 nt, Homo sapiens
  misc_RNA (1)...(19): siRNA sense strand
acaaacaacagacaaacaa

SEQ ID NO: 2110485 - RNA, 19 nt, Homo sapiens
  misc_RNA (1)...(19): siRNA sense strand
gcccauuccuuaccucgau

SEQ ID NO: 2110486 - RNA, 19 nt, Homo sapiens
  misc_RNA (1)...(19): siRNA sense strand
uuaccucgauggaauccuu

SEQ ID NO: 2110487 - RNA, 19 nt, Homo sapiens
  misc_RNA (1)...(19): siRNA sense strand
cuucgggccuagccaaaug

SEQ ID NO: 2110488 - RNA, 19 nt, Homo sapiens
  misc_RNA (1)...(19): siRNA sense strand
ggaauccuuagcccuuaga

SEQ ID NO: 2110489 - RNA, 19 nt, Homo sapiens
  misc_RNA (1)...(19): siRNA sense strand
auggaauccuuagcccuua

SEQ ID NO: 2110490 - RNA, 19 nt, Homo sapiens
  misc_RNA (1)...(19): siRNA sense strand
gaacuuaacugaaauggaa

SEQ ID NO: 2110491 - RNA, 19 nt, Homo sapiens
  misc_RNA (1)...(19): siRNA sense strand
gaaaggagcuucauuccaa

SEQ ID NO: 2110492 - RNA, 19 nt, Homo sapiens
  misc_RNA (1)...(19): siRNA sense strand
ggaagagugugcacaauua

SEQ ID NO: 2110493 - RNA, 19 nt, Homo sapiens
  misc_RNA (1)...(19): siRNA sense strand
gcaaacauauuauccagua

SEQ ID NO: 2110494 - RNA, 19 nt, Homo sapiens
  misc_RNA (1)...(19): siRNA sense strand
ucaaagagcugaccuauca

SEQ ID NO: 2110495 - RNA, 19 nt, Homo sapiens
  misc_RNA (1)...(19): siRNA sense strand
acaaagaccuccuuaauga

SEQ ID NO: 2110496 - RNA, 19 nt, Homo sapiens
  misc_RNA (1)...(19): siRNA sense strand
gagaaacucuguacucuau

SEQ ID NO: 2110497 - RNA, 19 nt, Homo sapiens
  misc_RNA (1)...(19): siRNA sense strand
gaacaaagaccuccuuaau

SEQ ID NO: 2110498 - RNA, 19 nt, Homo sapiens
  misc_RNA (1)...(19): siRNA sense strand
cagaagaacugaagaagaa

SEQ ID NO: 2110499 - RNA, 19 nt, Homo sapiens
  misc_RNA (1)...(19): siRNA sense strand
gaagagcgcuugcaugaag

SEQ ID NO: 2110500 - RNA, 19 nt, Homo sapiens
  misc_RNA (1)...(19): siRNA sense strand
gaggauaucagcaaacuua

SEQ ID NO: 2110501 - RNA, 19 nt, Homo sapiens
  misc_RNA (1)...(19): siRNA sense strand
gcagacaauuacagacuua

SEQ ID NO: 2110502 - RNA, 19 nt, Homo sapiens
  misc_RNA (1)...(19): siRNA sense strand
ggacauugauaucuauuug

SEQ ID NO: 2110503 - RNA, 19 nt, Homo sapiens
  misc_RNA (1)...(19): siRNA sense strand
uuaaagagcuucagacuca

SEQ ID NO: 2110504 - RNA, 19 nt, Homo sapiens
  misc_RNA (1)...(19): siRNA sense strand
aaaagcagcugaagaauua

SEQ ID NO: 2110505 - RNA, 19 nt, Homo sapiens
  misc_RNA (1)...(19): siRNA sense strand
gagaggaacuaccacauau

SEQ ID NO: 2110506 - RNA, 19 nt, Homo sapiens
  misc_RNA (1)...(19): siRNA sense strand
aagcagaacuugaaagaaa

SEQ ID NO: 2110507 - RNA, 19 nt, Homo sapiens
  misc_RNA (1)...(19): siRNA sense strand
gaacaagaaccuccaagaa

SEQ ID NO: 2110508 - RNA, 19 nt, Homo sapiens
  misc_RNA (1)...(19): siRNA sense strand
gaagaagaguguauguuuc

SEQ ID NO: 2110509 - RNA, 19 nt, Homo sapiens
  misc_RNA (1)...(19): siRNA sense strand
ggaagcagauggcacagaa

SEQ ID NO: 2110510 - RNA, 19 nt, Homo sapiens
  misc_RNA (1)...(19): siRNA sense strand
ggaugaugcugaagaauug

SEQ ID NO: 2110511 - RNA, 19 nt, Homo sapiens
  misc_RNA (1)...(19): siRNA sense strand
gaaacucuguacucuauau

SEQ ID NO: 2110512 - RNA, 19 nt, Homo sapiens
  misc_RNA (1)...(19): siRNA sense strand
gagcugaccucacccaaga

SEQ ID NO: 2110513 - RNA, 19 nt, Homo sapiens
  misc_RNA (1)...(19): siRNA sense strand
ggagagagucugagcauaa

SEQ ID NO: 2110514 - RNA, 19 nt, Homo sapiens
  misc_RNA (1)...(19): siRNA sense strand
caaagucaaugcugaaaug

SEQ ID NO: 2110515 - RNA, 19 nt, Homo sapiens
  misc_RNA (1)...(19): siRNA sense strand
gaugaauccuccagaguuu

SEQ ID NO: 2110516 - RNA, 19 nt, Homo sapiens
  misc_RNA (1)...(19): siRNA sense strand
acaaauggcuucccgugua

SEQ ID NO: 2110517 - RNA, 19 nt, Homo sapiens
  misc_RNA (1)...(19): siRNA sense strand
agacaaagcuguggaguga

SEQ ID NO: 2110518 - RNA, 19 nt, Homo sapiens
  misc_RNA (1)...(19): siRNA sense strand
gggaggaacugaaagcaaa

SEQ ID NO: 2110519 - RNA, 19 nt, Homo sapiens
  misc_RNA (1)...(19): siRNA sense strand
gaacauaagagcuuucaug

SEQ ID NO: 2110520 - RNA, 19 nt, Homo sapiens
  misc_RNA (1)...(19): siRNA sense strand
ugacagugcuauaccauuu

SEQ ID NO: 2110521 - RNA, 19 nt, Homo sapiens
  misc_RNA (1)...(19): siRNA sense strand
gaagaaagggaugcacuua

SEQ ID NO: 2110522 - RNA, 19 nt, Homo sapiens
  misc_RNA (1)...(19): siRNA sense strand
caaagguacugcauucuga

SEQ ID NO: 2110523 - RNA, 19 nt, Homo sapiens
  misc_RNA (1)...(19): siRNA sense strand
aaacaaagguacugcauuc

SEQ ID NO: 2110524 - RNA, 19 nt, Homo sapiens
  misc_RNA (1)...(19): siRNA sense strand
ggagugguaccuuauaaua

SEQ ID NO: 2110525 - RNA, 19 nt, Homo sapiens
  misc_RNA (1)...(19): siRNA sense strand
uaccagaggucaaacuaua

SEQ ID NO: 2110526 - RNA, 19 nt, Homo sapiens
  misc_RNA (1)...(19): siRNA sense strand
gaaagcaaauccagaaacu

SEQ ID NO: 2110527 - RNA, 19 nt, Homo sapiens
  misc_RNA (1)...(19): siRNA sense strand
gugaacagcaaacauauua

SEQ ID NO: 2110528 - RNA, 19 nt, Homo sapiens
  misc_RNA (1)...(19): siRNA sense strand
agaaagggaugcacuuauu

SEQ ID NO: 2110529 - RNA, 19 nt, Homo sapiens
  misc_RNA (1)...(19): siRNA sense strand
guuagaagaucaaaucaug

SEQ ID NO: 2110530 - RNA, 19 nt, Homo sapiens
  misc_RNA (1)...(19): siRNA sense strand
cuacagaccugacuuucaa

SEQ ID NO: 2110531 - RNA, 19 nt, Homo sapiens
  misc_RNA (1)...(19): siRNA sense strand
caaaguugguaacgaauau

SEQ ID NO: 2110532 - RNA, 19 nt, Homo sapiens
  misc_RNA (1)...(19): siRNA sense strand
gaaacuaauugaagaagag

SEQ ID NO: 2110533 - RNA, 19 nt, Homo sapiens
  misc_RNA (1)...(19): siRNA sense strand
cauaaacccuuacaaaugg

SEQ ID NO: 2110534 - RNA, 19 nt, Homo sapiens
  misc_RNA (1)...(19): siRNA sense strand
acaagaaccuccaagaaga

SEQ ID NO: 2110535 - RNA, 19 nt, Homo sapiens
  misc_RNA (1)...(19): siRNA sense strand
ggaaauaacuaagaaacag

SEQ ID NO: 2110536 - RNA, 19 nt, Homo sapiens
  misc_RNA (1)...(19): siRNA sense strand
gaaagggaugcacuuauuu

SEQ ID NO: 2110537 - RNA, 19 nt, Homo sapiens
  misc_RNA (1)...(19): siRNA sense strand
gcaagaggaauauaagaaa

SEQ ID NO: 2110538 - RNA, 19 nt, Homo sapiens
  misc_RNA (1)...(19): siRNA sense strand
gagagagucugagcauaaa

SEQ ID NO: 2110539 - RNA, 19 nt, Homo sapiens
  misc_RNA (1)...(19): siRNA sense strand
caacuucacucggcagauu

SEQ ID NO: 2110540 - RNA, 19 nt, Homo sapiens
  misc_RNA (1)...(19): siRNA sense strand
ugaagcaacugcaaagcua

SEQ ID NO: 2110541 - RNA, 19 nt, Homo sapiens
  misc_RNA (1)...(19): siRNA sense strand
uaacagagcagccaagguu

SEQ ID NO: 2110542 - RNA, 19 nt, Homo sapiens
  misc_RNA (1)...(19): siRNA sense strand
caaauucuaucuggacaaa

SEQ ID NO: 2110543 - RNA, 19 nt, Homo sapiens
  misc_RNA (1)...(19): siRNA sense strand
aaacacaagccaaucaaua

SEQ ID NO: 2110544 - RNA, 19 nt, Homo sapiens
  misc_RNA (1)...(19): siRNA sense strand
gaaggaggcucugauaaac

SEQ ID NO: 2110545 - RNA, 19 nt, Homo sapiens
  misc_RNA (1)...(19): siRNA sense strand
ugacucaguuggcaaauga

SEQ ID NO: 2110546 - RNA, 19 nt, Homo sapiens
  misc_RNA (1)...(19): siRNA sense strand
ugagucagaugaauucaaa

SEQ ID NO: 2110547 - RNA, 19 nt, Homo sapiens
  misc_RNA (1)...(19): siRNA sense strand
ggaugaggcucuucuucaa

SEQ ID NO: 2110548 - RNA, 19 nt, Homo sapiens
  misc_RNA (1)...(19): siRNA sense strand
gaagaaauuugaagcucau

SEQ ID NO: 2110549 - RNA, 19 nt, Homo sapiens
  misc_RNA (1)...(19): siRNA sense strand
gagcuuggaugaugcugaa

SEQ ID NO: 2110550 - RNA, 19 nt, Homo sapiens
  misc_RNA (1)...(19): siRNA sense strand
gggcagagguggcagaauc

SEQ ID NO: 2110551 - RNA, 19 nt, Homo sapiens
  misc_RNA (1)...(19): siRNA sense strand
gcagcaaacuugucagaag

SEQ ID NO: 2110552 - RNA, 19 nt, Homo sapiens
  misc_RNA (1)...(19): siRNA sense strand
gaagggaccaagaacuuaa

SEQ ID NO: 2110553 - RNA, 19 nt, Homo sapiens
  misc_RNA (1)...(19): siRNA sense strand
uagauaaggugacucaguu

SEQ ID NO: 2110554 - RNA, 19 nt, Homo sapiens
  misc_RNA (1)...(19): siRNA sense strand
gacaagagcuaaggcaaau

SEQ ID NO: 2110555 - RNA, 19 nt, Homo sapiens
  misc_RNA (1)...(19): siRNA sense strand
agaaaucgaugaccuggaa

SEQ ID NO: 2110556 - RNA, 19 nt, Homo sapiens
  misc_RNA (1)...(19): siRNA sense strand
gaaagaaaggagcuucauu

SEQ ID NO: 2110557 - RNA, 19 nt, Homo sapiens
  misc_RNA (1)...(19): siRNA sense strand
ugaagaugauggaacagua

SEQ ID NO: 2110558 - RNA, 19 nt, Homo sapiens
  misc_RNA (1)...(19): siRNA sense strand
ggcagaaucucaagucaau

SEQ ID NO: 2110559 - RNA, 19 nt, Homo sapiens
  misc_RNA (1)...(19): siRNA sense strand
ggaccaagaacuuaacuga

SEQ ID NO: 2110560 - RNA, 19 nt, Homo sapiens
  misc_RNA (1)...(19): siRNA sense strand
agaaggaacuggcaauuag

SEQ ID NO: 2110561 - RNA, 19 nt, Homo sapiens
  misc_RNA (1)...(19): siRNA sense strand
gaagaagaggagauaaauu

SEQ ID NO: 2110562 - RNA, 19 nt, Homo sapiens
  misc_RNA (1)...(19): siRNA sense strand
agaaguagcuggacugaag

SEQ ID NO: 2110563 - RNA, 19 nt, Homo sapiens
  misc_RNA (1)...(19): siRNA sense strand
gaugagagacuaucuaaag

SEQ ID NO: 2110564 - RNA, 19 nt, Homo sapiens
  misc_RNA (1)...(19): siRNA sense strand
gcauaaaucccaaugugaa

SEQ ID NO: 2110565 - RNA, 19 nt, Homo sapiens
  misc_RNA (1)...(19): siRNA sense strand
ugaagaagaguguauguuu

SEQ ID NO: 2110566 - RNA, 19 nt, Homo sapiens
  misc_RNA (1)...(19): siRNA sense strand
ggaacuaccacauauucua

SEQ ID NO: 2110567 - RNA, 19 nt, Homo sapiens
  misc_RNA (1)...(19): siRNA sense strand
gaccauaaacccuuacaaa

SEQ ID NO: 2110568 - RNA, 19 nt, Homo sapiens
  misc_RNA (1)...(19): siRNA sense strand
gaagaugauggaacaguaa

SEQ ID NO: 2110569 - RNA, 19 nt, Homo sapiens
  misc_RNA (1)...(19): siRNA sense strand
gaacuaccacauauucuau

SEQ ID NO: 2110570 - RNA, 19 nt, Homo sapiens
  misc_RNA (1)...(19): siRNA sense strand
uaaggcaaaugcugagaaa

SEQ ID NO: 2110571 - RNA, 19 nt, Homo sapiens
  misc_RNA (1)...(19): siRNA sense strand
caaacuggagggcaauuua

SEQ ID NO: 2110572 - RNA, 19 nt, Homo sapiens
  misc_RNA (1)...(19): siRNA sense strand
ugacuaaucugaaaucaac

SEQ ID NO: 2110573 - RNA, 19 nt, Homo sapiens
  misc_RNA (1)...(19): siRNA sense strand
aaucaaaguugguaacgaa

SEQ ID NO: 2110574 - RNA, 19 nt, Homo sapiens
  misc_RNA (1)...(19): siRNA sense strand
uggauaaacuucagcuaaa

SEQ ID NO: 2110575 - RNA, 19 nt, Homo sapiens
  misc_RNA (1)...(19): siRNA sense strand
gaugacagcacacaacuga

SEQ ID NO: 2110576 - RNA, 19 nt, Homo sapiens
  misc_RNA (1)...(19): siRNA sense strand
ggcggaaacucgaagauga

SEQ ID NO: 2110577 - RNA, 19 nt, Homo sapiens
  misc_RNA (1)...(19): siRNA sense strand
ucaggucucuucuguguga

SEQ ID NO: 2110578 - RNA, 19 nt, Homo sapiens
  misc_RNA (1)...(19): siRNA sense strand
accaagaacuuaacugaaa

SEQ ID NO: 2110579 - RNA, 19 nt, Homo sapiens
  misc_RNA (1)...(19): siRNA sense strand
gaacagcaaacauauuauc

SEQ ID NO: 2110580 - RNA, 19 nt, Homo sapiens
  misc_RNA (1)...(19): siRNA sense strand
ccauaaacccuuacaaaug

SEQ ID NO: 2110581 - RNA, 19 nt, Homo sapiens
  misc_RNA (1)...(19): siRNA sense strand
ucaaggcaguucuucauug

SEQ ID NO: 2110582 - RNA, 19 nt, Homo sapiens
  misc_RNA (1)...(19): siRNA sense strand
aucaauaccuuuccaagua

SEQ ID NO: 2110583 - RNA, 19 nt, Homo sapiens
  misc_RNA (1)...(19): siRNA sense strand
guagaaagcaaauccagaa

SEQ ID NO: 2110584 - RNA, 19 nt, Homo sapiens
  misc_RNA (1)...(19): siRNA sense strand
cagcaaacuugucagaaga

SEQ ID NO: 2110585 - RNA, 19 nt, Homo sapiens
  misc_RNA (1)...(19): siRNA sense strand
gaagcuaagagcagaauug

SEQ ID NO: 2110586 - RNA, 19 nt, Homo sapiens
  misc_RNA (1)...(19): siRNA sense strand
gagcuucagacucaaauaa

SEQ ID NO: 2110587 - RNA, 19 nt, Homo sapiens
  misc_RNA (1)...(19): siRNA sense strand
gaaacucgaagaugaaugu

SEQ ID NO: 2110588 - RNA, 19 nt, Homo sapiens
  misc_RNA (1)...(19): siRNA sense strand
aagaggagauaaauucuga

SEQ ID NO: 2110589 - RNA, 19 nt, Homo sapiens
  misc_RNA (1)...(19): siRNA sense strand
aauaagagaugagagacua

SEQ ID NO: 2110590 - RNA, 19 nt, Homo sapiens
  misc_RNA (1)...(19): siRNA sense strand
gaggaaggauucauuauuu

SEQ ID NO: 2110591 - RNA, 19 nt, Homo sapiens
  misc_RNA (1)...(19): siRNA sense strand
guaaaugacugcuuugaug

SEQ ID NO: 2110592 - RNA, 19 nt, Homo sapiens
  misc_RNA (1)...(19): siRNA sense strand
caagagagaugccugcaaa

SEQ ID NO: 2110593 - RNA, 19 nt, Homo sapiens
  misc_RNA (1)...(19): siRNA sense strand
gcauagcacugaaauucua

SEQ ID NO: 2110594 - RNA, 19 nt, Homo sapiens
  misc_RNA (1)...(19): siRNA sense strand
ggacauggacucuguggua

SEQ ID NO: 2110595 - RNA, 19 nt, Homo sapiens
  misc_RNA (1)...(19): siRNA sense strand
gcacugaaauucuauaacu

SEQ ID NO: 2110596 - RNA, 19 nt, Homo sapiens
  misc_RNA (1)...(19): siRNA sense strand
caaauaaucucauguuggu

SEQ ID NO: 2110597 - RNA, 19 nt, Homo sapiens
  misc_RNA (1)...(19): siRNA sense strand
gagcauggauggugggaaa

SEQ ID NO: 2110598 - RNA, 19 nt, Homo sapiens
  misc_RNA (1)...(19): siRNA sense strand
ugaaagugaugaacuguuu

SEQ ID NO: 2110599 - RNA, 19 nt, Homo sapiens
  misc_RNA (1)...(19): siRNA sense strand
gaacucaggaugaaugauu

SEQ ID NO: 2110600 - RNA, 19 nt, Homo sapiens
  misc_RNA (1)...(19): siRNA sense strand
gggaaugaaucuugaauca

SEQ ID NO: 2110601 - RNA, 19 nt, Homo sapiens
  misc_RNA (1)...(19): siRNA sense strand
gagcaaaacugcacucaaa

SEQ ID NO: 2110602 - RNA, 19 nt, Homo sapiens
  misc_RNA (1)...(19): siRNA sense strand
aaacugcacucaaaguauu

SEQ ID NO: 2110603 - RNA, 19 nt, Homo sapiens
  misc_RNA (1)...(19): siRNA sense strand
guucaaggcuuucagacaa

SEQ ID NO: 2110604 - RNA, 19 nt, Homo sapiens
  misc_RNA (1)...(19): siRNA sense strand
gacaaaggcugcucucagu

SEQ ID NO: 2110605 - RNA, 19 nt, Homo sapiens
  misc_RNA (1)...(19): siRNA sense strand
agacaucacuggcuuugaa

SEQ ID NO: 2110606 - RNA, 19 nt, Homo sapiens
  misc_RNA (1)...(19): siRNA sense strand
gaucgggaaugaaucuuga

SEQ ID NO: 2110607 - RNA, 19 nt, Homo sapiens
  misc_RNA (1)...(19): siRNA sense strand
ggaggaaggauucauuauu

SEQ ID NO: 2110608 - RNA, 19 nt, Homo sapiens
  misc_RNA (1)...(19): siRNA sense strand
acauuuaagucuccucaua

SEQ ID NO: 2110609 - RNA, 19 nt, Homo sapiens
  misc_RNA (1)...(19): siRNA sense strand
gauauuugcuuuaggaaac

SEQ ID NO: 2110610 - RNA, 19 nt, Homo sapiens
  misc_RNA (1)...(19): siRNA sense strand
ucagaagccugguugaaga

SEQ ID NO: 2110611 - RNA, 19 nt, Homo sapiens
  misc_RNA (1)...(19): siRNA sense strand
gaacccacaagaacauuaa

SEQ ID NO: 2110612 - RNA, 19 nt, Homo sapiens
  misc_RNA (1)...(19): siRNA sense strand
acacgaagcagauaauaaa

SEQ ID NO: 2110613 - RNA, 19 nt, Homo sapiens
  misc_RNA (1)...(19): siRNA sense strand
gaacaaaagugugaaaaca

SEQ ID NO: 2110614 - RNA, 19 nt, Homo sapiens
  misc_RNA (1)...(19): siRNA sense strand
ucuaucaacucuuggcaua

SEQ ID NO: 2110615 - RNA, 19 nt, Homo sapiens
  misc_RNA (1)...(19): siRNA sense strand
gaauauggcaguuacaaca

SEQ ID NO: 2110616 - RNA, 19 nt, Homo sapiens
  misc_RNA (1)...(19): siRNA sense strand
ggaaauuaaugagcacaug

SEQ ID NO: 2110617 - RNA, 19 nt, Homo sapiens
  misc_RNA (1)...(19): siRNA sense strand
gaagacacgaagcagauaa

SEQ ID NO: 2110618 - RNA, 19 nt, Homo sapiens
  misc_RNA (1)...(19): siRNA sense strand
cuacauggaucaucagaca

SEQ ID NO: 2110619 - RNA, 19 nt, Homo sapiens
  misc_RNA (1)...(19): siRNA sense strand
ucaaucaaguccauccaaa

SEQ ID NO: 2110620 - RNA, 19 nt, Homo sapiens
  misc_RNA (1)...(19): siRNA sense strand
gaaaggcugugagcaugga

SEQ ID NO: 2110621 - RNA, 19 nt, Homo sapiens
  misc_RNA (1)...(19): siRNA sense strand
gcauggcccucucaucugu

SEQ ID NO: 2110622 - RNA, 19 nt, Homo sapiens
  misc_RNA (1)...(19): siRNA sense strand
aaauaugucccuucucuuu

SEQ ID NO: 2110623 - RNA, 19 nt, Homo sapiens
  misc_RNA (1)...(19): siRNA sense strand
cauggauggugggaaauua

SEQ ID NO: 2110624 - RNA, 19 nt, Homo sapiens
  misc_RNA (1)...(19): siRNA sense strand
uggaguaaaugacugcuuu

SEQ ID NO: 2110625 - RNA, 19 nt, Homo sapiens
  misc_RNA (1)...(19): siRNA sense strand
gcaaguguaccuggaaauu

SEQ ID NO: 2110626 - RNA, 19 nt, Homo sapiens
  misc_RNA (1)...(19): siRNA sense strand
ggaccuuuaucuugucgaa

SEQ ID NO: 2110627 - RNA, 19 nt, Homo sapiens
  misc_RNA (1)...(19): siRNA sense strand
gagaagugcuggguaacug

SEQ ID NO: 2110628 - RNA, 19 nt, Homo sapiens
  misc_RNA (1)...(19): siRNA sense strand
caucugccuucuccaaauu

SEQ ID NO: 2110629 - RNA, 19 nt, Homo sapiens
  misc_RNA (1)...(19): siRNA sense strand
gcuccuacauggaucauca

SEQ ID NO: 2110630 - RNA, 19 nt, Homo sapiens
  misc_RNA (1)...(19): siRNA sense strand
ucaauaaccaagaagagua

SEQ ID NO: 2110631 - RNA, 19 nt, Homo sapiens
  misc_RNA (1)...(19): siRNA sense strand
ggauuacucgucaaccaua

SEQ ID NO: 2110632 - RNA, 19 nt, Homo sapiens
  misc_RNA (1)...(19): siRNA sense strand
gcaggucagccuccacuuu

SEQ ID NO: 2110633 - RNA, 19 nt, Homo sapiens
  misc_RNA (1)...(19): siRNA sense strand
cugacucccugaccauuua

SEQ ID NO: 2110634 - RNA, 19 nt, Homo sapiens
  misc_RNA (1)...(19): siRNA sense strand
cagggaggcugauguguca

SEQ ID NO: 2110635 - RNA, 19 nt, Homo sapiens
  misc_RNA (1)...(19): siRNA sense strand
uaauaaaggcucccucguu

SEQ ID NO: 2110636 - RNA, 19 nt, Homo sapiens
  misc_RNA (1)...(19): siRNA sense strand
gaaauuaaugagcacaugu

SEQ ID NO: 2110637 - RNA, 19 nt, Homo sapiens
  misc_RNA (1)...(19): siRNA sense strand
uaaaugacugcuuugauga

SEQ ID NO: 2110638 - RNA, 19 nt, Homo sapiens
  misc_RNA (1)...(19): siRNA sense strand
gagagaugccugcaaagga

SEQ ID NO: 2110639 - RNA, 19 nt, Homo sapiens
  misc_RNA (1)...(19): siRNA sense strand
gacacgaagcagauaauaa

SEQ ID NO: 2110640 - RNA, 19 nt, Homo sapiens
  misc_RNA (1)...(19): siRNA sense strand
agauggaagugaugaagaa

SEQ ID NO: 2110641 - RNA, 19 nt, Homo sapiens
  misc_RNA (1)...(19): siRNA sense strand
cauauuacccgagcuacua

SEQ ID NO: 2110642 - RNA, 19 nt, Homo sapiens
  misc_RNA (1)...(19): siRNA sense strand
auaaauaugucccuucucu

SEQ ID NO: 2110643 - RNA, 19 nt, Homo sapiens
  misc_RNA (1)...(19): siRNA sense strand
agguagagcucauugauca

SEQ ID NO: 2110644 - RNA, 19 nt, Homo sapiens
  misc_RNA (1)...(19): siRNA sense strand
caacaucugccuucuccaa

SEQ ID NO: 2110645 - RNA, 19 nt, Homo sapiens
  misc_RNA (1)...(19): siRNA sense strand
caaccugccugcaauacca

SEQ ID NO: 2110646 - RNA, 19 nt, Homo sapiens
  misc_RNA (1)...(19): siRNA sense strand
gcaguuacaacaucaguca

SEQ ID NO: 2110647 - RNA, 19 nt, Homo sapiens
  misc_RNA (1)...(19): siRNA sense strand
caaguguaccuggaaauuu

SEQ ID NO: 2110648 - RNA, 19 nt, Homo sapiens
  misc_RNA (1)...(19): siRNA sense strand
ggguggaccuuuaucuugu

SEQ ID NO: 2110649 - RNA, 19 nt, Homo sapiens
  misc_RNA (1)...(19): siRNA sense strand
uuuguucccuggauucaua

SEQ ID NO: 2110650 - RNA, 19 nt, Homo sapiens
  misc_RNA (1)...(19): siRNA sense strand
cauggacucugugguacua

SEQ ID NO: 2110651 - RNA, 19 nt, Homo sapiens
  misc_RNA (1)...(19): siRNA sense strand
aaacuuuguucccuggauu

SEQ ID NO: 2110652 - RNA, 19 nt, Homo sapiens
  misc_RNA (1)...(19): siRNA sense strand
ggaaauuucagacuucucu

SEQ ID NO: 2110653 - RNA, 19 nt, Homo sapiens
  misc_RNA (1)...(19): siRNA sense strand
ggagguagagcucauugau

SEQ ID NO: 2110654 - RNA, 19 nt, Homo sapiens
  misc_RNA (1)...(19): siRNA sense strand
caaaguauuccaugcaaca

SEQ ID NO: 2110655 - RNA, 19 nt, Homo sapiens
  misc_RNA (1)...(19): siRNA sense strand
gauggugggaaauuaauga

SEQ ID NO: 2110656 - RNA, 19 nt, Homo sapiens
  misc_RNA (1)...(19): siRNA sense strand
gcugaugugucacuucaag

SEQ ID NO: 2110657 - RNA, 19 nt, Homo sapiens
  misc_RNA (1)...(19): siRNA sense strand
gcagaugucagcagcaaca

SEQ ID NO: 2110658 - RNA, 19 nt, Homo sapiens
  misc_RNA (1)...(19): siRNA sense strand
cauagugggcuaccugauu

SEQ ID NO: 2110659 - RNA, 19 nt, Homo sapiens
  misc_RNA (1)...(19): siRNA sense strand
guagagcucauugaucaaa

SEQ ID NO: 2110660 - RNA, 19 nt, Homo sapiens
  misc_RNA (1)...(19): siRNA sense strand
gaaggacuccauccagaca

SEQ ID NO: 2110661 - RNA, 19 nt, Homo sapiens
  misc_RNA (1)...(19): siRNA sense strand
gcaucugucucuccacuac

SEQ ID NO: 2110662 - RNA, 19 nt, Homo sapiens
  misc_RNA (1)...(19): siRNA sense strand
uucccuggauucauaaaua

SEQ ID NO: 2110663 - RNA, 19 nt, Homo sapiens
  misc_RNA (1)...(19): siRNA sense strand
agauucggguggaccuuua

SEQ ID NO: 2110664 - RNA, 19 nt, Homo sapiens
  misc_RNA (1)...(19): siRNA sense strand
cauaaugucaggcaagaga

SEQ ID NO: 2110665 - RNA, 19 nt, Homo sapiens
  misc_RNA (1)...(19): siRNA sense strand
ccaagaagaguaugaaagg

SEQ ID NO: 2110666 - RNA, 19 nt, Homo sapiens
  misc_RNA (1)...(19): siRNA sense strand
aaguguaccuggaaauuuc

SEQ ID NO: 2110667 - RNA, 19 nt, Homo sapiens
  misc_RNA (1)...(19): siRNA sense strand
gagcuacuauccuccaaaa

SEQ ID NO: 2110668 - RNA, 19 nt, Homo sapiens
  misc_RNA (1)...(19): siRNA sense strand
aaucgaagccgacaacugu

SEQ ID NO: 2110669 - RNA, 19 nt, Homo sapiens
  misc_RNA (1)...(19): siRNA sense strand
ccugcuauauacuggauaa

SEQ ID NO: 2110670 - RNA, 19 nt, Homo sapiens
  misc_RNA (1)...(19): siRNA sense strand
ggcauaaugucaggcaaga

SEQ ID NO: 2110671 - RNA, 19 nt, Homo sapiens
  misc_RNA (1)...(19): siRNA sense strand
gcacaccucgggauguaug

SEQ ID NO: 2110672 - RNA, 19 nt, Homo sapiens
  misc_RNA (1)...(19): siRNA sense strand
gggacuggcuguggacaug

SEQ ID NO: 2110673 - RNA, 19 nt, Homo sapiens
  misc_RNA (1)...(19): siRNA sense strand
ugaugaaagugaugaacug

SEQ ID NO: 2110674 - RNA, 19 nt, Homo sapiens
  misc_RNA (1)...(19): siRNA sense strand
ucaaguccauccaaaucga

SEQ ID NO: 2110675 - RNA, 19 nt, Homo sapiens
  misc_RNA (1)...(19): siRNA sense strand
gcgaagacacgaagcagau

SEQ ID NO: 2110676 - RNA, 19 nt, Homo sapiens
  misc_RNA (1)...(19): siRNA sense strand
ggaaggauucauuauuucu

SEQ ID NO: 2110677 - RNA, 19 nt, Homo sapiens
  misc_RNA (1)...(19): siRNA sense strand
uuaaugagcacauguacug

SEQ ID NO: 2110678 - RNA, 19 nt, Homo sapiens
  misc_RNA (1)...(19): siRNA sense strand
agacuucucuaucaacucu

SEQ ID NO: 2110679 - RNA, 19 nt, Homo sapiens
  misc_RNA (1)...(19): siRNA sense strand
caauaaccaagaagaguau

SEQ ID NO: 2110680 - RNA, 19 nt, Homo sapiens
  misc_RNA (1)...(19): siRNA sense strand
caggaauccgggcauauuu

SEQ ID NO: 2110681 - RNA, 19 nt, Homo sapiens
  misc_RNA (1)...(19): siRNA sense strand
cagcauggcccucucaucu

SEQ ID NO: 2110682 - RNA, 19 nt, Homo sapiens
  misc_RNA (1)...(19): siRNA sense strand
gaugucagcagcaacaaca

SEQ ID NO: 2110683 - RNA, 19 nt, Homo sapiens
  misc_RNA (1)...(19): siRNA sense strand
gcguugugauggaguaaau

SEQ ID NO: 2110684 - RNA, 19 nt, Homo sapiens
  misc_RNA (1)...(19): siRNA sense strand
gcaguucaaggcuuucaga

SEQ ID NO: 2110685 - RNA, 19 nt, Homo sapiens
  misc_RNA (1)...(19): siRNA sense strand
uggcauagcacugaaauuc

SEQ ID NO: 2110686 - RNA, 19 nt, Homo sapiens
  misc_RNA (1)...(19): siRNA sense strand
gcucugugcaggcauaaug

SEQ ID NO: 2110687 - RNA, 19 nt, Homo sapiens
  misc_RNA (1)...(19): siRNA sense strand
cugcacaccucgggaugua

SEQ ID NO: 2110688 - RNA, 19 nt, Homo sapiens
  misc_RNA (1)...(19): siRNA sense strand
ggaaacaaaaugcaaaaug

SEQ ID NO: 2110689 - RNA, 19 nt, Homo sapiens
  misc_RNA (1)...(19): siRNA sense strand
ggcagaauauggcaguuac

SEQ ID NO: 2110690 - RNA, 19 nt, Homo sapiens
  misc_RNA (1)...(19): siRNA sense strand
aaacauggcuggaauauuu

SEQ ID NO: 2110691 - RNA, 19 nt, Homo sapiens
  misc_RNA (1)...(19): siRNA sense strand
ggagauugcuucuaacaua

SEQ ID NO: 2110692 - RNA, 19 nt, Homo sapiens
  misc_RNA (1)...(19): siRNA sense strand
gagauaaacugcuuaacua

SEQ ID NO: 2110693 - RNA, 19 nt, Homo sapiens
  misc_RNA (1)...(19): siRNA sense strand
caacuaaagcucucuaaua

SEQ ID NO: 2110694 - RNA, 19 nt, Homo sapiens
  misc_RNA (1)...(19): siRNA sense strand
caauauggcuacagaaauu

SEQ ID NO: 2110695 - RNA, 19 nt, Homo sapiens
  misc_RNA (1)...(19): siRNA sense strand
uguagaagauugucuguua

SEQ ID NO: 2110696 - RNA, 19 nt, Homo sapiens
  misc_RNA (1)...(19): siRNA sense strand
gagauugcuucuaacauaa

SEQ ID NO: 2110697 - RNA, 19 nt, Homo sapiens
  misc_RNA (1)...(19): siRNA sense strand
ucagagaacacuuaucuua

SEQ ID NO: 2110698 - RNA, 19 nt, Homo sapiens
  misc_RNA (1)...(19): siRNA sense strand
gaccauaauugaucagauu

SEQ ID NO: 2110699 - RNA, 19 nt, Homo sapiens
  misc_RNA (1)...(19): siRNA sense strand
ugacaaagaucuugcuaau

SEQ ID NO: 2110700 - RNA, 19 nt, Homo sapiens
  misc_RNA (1)...(19): siRNA sense strand
gaacuacaauaugcaacua

SEQ ID NO: 2110701 - RNA, 19 nt, Homo sapiens
  misc_RNA (1)...(19): siRNA sense strand
agaaagaggugcuugauuc

SEQ ID NO: 2110702 - RNA, 19 nt, Homo sapiens
  misc_RNA (1)...(19): siRNA sense strand
gagaacacuuaucuuauga

SEQ ID NO: 2110703 - RNA, 19 nt, Homo sapiens
  misc_RNA (1)...(19): siRNA sense strand
guagauauaccaaugagua

SEQ ID NO: 2110704 - RNA, 19 nt, Homo sapiens
  misc_RNA (1)...(19): siRNA sense strand
ggaagaaggcauucaagaa

SEQ ID NO: 2110705 - RNA, 19 nt, Homo sapiens
  misc_RNA (1)...(19): siRNA sense strand
uagagcaccuuucuuaauu

SEQ ID NO: 2110706 - RNA, 19 nt, Homo sapiens
  misc_RNA (1)...(19): siRNA sense strand
gcucauagcaccaaaguug

SEQ ID NO: 2110707 - RNA, 19 nt, Homo sapiens
  misc_RNA (1)...(19): siRNA sense strand
gcaccuuucuuaauuccua

SEQ ID NO: 2110708 - RNA, 19 nt, Homo sapiens
  misc_RNA (1)...(19): siRNA sense strand
gaaagcaauuacacuugaa

SEQ ID NO: 2110709 - RNA, 19 nt, Homo sapiens
  misc_RNA (1)...(19): siRNA sense strand
gaauauggaacaugcuaua

SEQ ID NO: 2110710 - RNA, 19 nt, Homo sapiens
  misc_RNA (1)...(19): siRNA sense strand
acaaagaucuugcuaaugc

SEQ ID NO: 2110711 - RNA, 19 nt, Homo sapiens
  misc_RNA (1)...(19): siRNA sense strand
caacaggcgucucuuguca

SEQ ID NO: 2110712 - RNA, 19 nt, Homo sapiens
  misc_RNA (1)...(19): siRNA sense strand
gaacgaagaagaaacaaca

SEQ ID NO: 2110713 - RNA, 19 nt, Homo sapiens
  misc_RNA (1)...(19): siRNA sense strand
uaaagcaagugauaaggaa

SEQ ID NO: 2110714 - RNA, 19 nt, Homo sapiens
  misc_RNA (1)...(19): siRNA sense strand
cauauuccguggcuagaua

SEQ ID NO: 2110715 - RNA, 19 nt, Homo sapiens
  misc_RNA (1)...(19): siRNA sense strand
ggaaugucaggaauauuua

SEQ ID NO: 2110716 - RNA, 19 nt, Homo sapiens
  misc_RNA (1)...(19): siRNA sense strand
gaagaaggcauucaagaag

SEQ ID NO: 2110717 - RNA, 19 nt, Homo sapiens
  misc_RNA (1)...(19): siRNA sense strand
gaaggugcuggaauuaaua

SEQ ID NO: 2110718 - RNA, 19 nt, Homo sapiens
  misc_RNA (1)...(19): siRNA sense strand
gcagacauaaugaccauaa

SEQ ID NO: 2110719 - RNA, 19 nt, Homo sapiens
  misc_RNA (1)...(19): siRNA sense strand
uuauagagcaccuuucuua

SEQ ID NO: 2110720 - RNA, 19 nt, Homo sapiens
  misc_RNA (1)...(19): siRNA sense strand
acacuuaucuuaugaggau

SEQ ID NO: 2110721 - RNA, 19 nt, Homo sapiens
  misc_RNA (1)...(19): siRNA sense strand
aaacuuggacucgcuauua

SEQ ID NO: 2110722 - RNA, 19 nt, Homo sapiens
  misc_RNA (1)...(19): siRNA sense strand
gaacaugauugagaaagca

SEQ ID NO: 2110723 - RNA, 19 nt, Homo sapiens
  misc_RNA (1)...(19): siRNA sense strand
agagaacacuuaucuuaug

SEQ ID NO: 2110724 - RNA, 19 nt, Homo sapiens
  misc_RNA (1)...(19): siRNA sense strand
agaaagcaauuacacuuga

SEQ ID NO: 2110725 - RNA, 19 nt, Homo sapiens
  misc_RNA (1)...(19): siRNA sense strand
gagcuaggcuacuuagagu

SEQ ID NO: 2110726 - RNA, 19 nt, Homo sapiens
  misc_RNA (1)...(19): siRNA sense strand
ggugaaauguccacacugu

SEQ ID NO: 2110727 - RNA, 19 nt, Homo sapiens
  misc_RNA (1)...(19): siRNA sense strand
auaauggucuguagugaaa

SEQ ID NO: 2110728 - RNA, 19 nt, Homo sapiens
  misc_RNA (1)...(19): siRNA sense strand
aaacuccgauuaacaugaa

SEQ ID NO: 2110729 - RNA, 19 nt, Homo sapiens
  misc_RNA (1)...(19): siRNA sense strand
gcucaguggagaaauaaua

SEQ ID NO: 2110730 - RNA, 19 nt, Homo sapiens
  misc_RNA (1)...(19): siRNA sense strand
gcaagucuuuguaccugaa

SEQ ID NO: 2110731 - RNA, 19 nt, Homo sapiens
  misc_RNA (1)...(19): siRNA sense strand
ugaaauguccacacuguaa

SEQ ID NO: 2110732 - RNA, 19 nt, Homo sapiens
  misc_RNA (1)...(19): siRNA sense strand
ccucugcccuuaaauuuga

SEQ ID NO: 2110733 - RNA, 19 nt, Homo sapiens
  misc_RNA (1)...(19): siRNA sense strand
caacagaacaucagaaggu

SEQ ID NO: 2110734 - RNA, 19 nt, Homo sapiens
  misc_RNA (1)...(19): siRNA sense strand
ugaaggugcuggaauuaau

SEQ ID NO: 2110735 - RNA, 19 nt, Homo sapiens
  misc_RNA (1)...(19): siRNA sense strand
ccaguuaaauguaaucuac

SEQ ID NO: 2110736 - RNA, 19 nt, Homo sapiens
  misc_RNA (1)...(19): siRNA sense strand
ggagugaguuaguuggaau

SEQ ID NO: 2110737 - RNA, 19 nt, Homo sapiens
  misc_RNA (1)...(19): siRNA sense strand
ugaguuaguuggaauguca

SEQ ID NO: 2110738 - RNA, 19 nt, Homo sapiens
  misc_RNA (1)...(19): siRNA sense strand
ggagagauaaacugcuuaa

SEQ ID NO: 2110739 - RNA, 19 nt, Homo sapiens
  misc_RNA (1)...(19): siRNA sense strand
auauggagauugcuucuaa

SEQ ID NO: 2110740 - RNA, 19 nt, Homo sapiens
  misc_RNA (1)...(19): siRNA sense strand
uaaagcagcaauugaagaa

SEQ ID NO: 2110741 - RNA, 19 nt, Homo sapiens
  misc_RNA (1)...(19): siRNA sense strand
gaagauugucuguuacgaa

SEQ ID NO: 2110742 - RNA, 19 nt, Homo sapiens
  misc_RNA (1)...(19): siRNA sense strand
gcucuccucucauuaaaca

SEQ ID NO: 2110743 - RNA, 19 nt, Homo sapiens
  misc_RNA (1)...(19): siRNA sense strand
ccaaaggaaucuauaucau

SEQ ID NO: 2110744 - RNA, 19 nt, Homo sapiens
  misc_RNA (1)...(19): siRNA sense strand
agccaaaguuguaacauuu

SEQ ID NO: 2110745 - RNA, 19 nt, Homo sapiens
  misc_RNA (1)...(19): siRNA sense strand
gacauaaugaccauaauug

SEQ ID NO: 2110746 - RNA, 19 nt, Homo sapiens
  misc_RNA (1)...(19): siRNA sense strand
uuggauaccuugugauauu

SEQ ID NO: 2110747 - RNA, 19 nt, Homo sapiens
  misc_RNA (1)...(19): siRNA sense strand
acaguuaccuuugcuagaa

SEQ ID NO: 2110748 - RNA, 19 nt, Homo sapiens
  misc_RNA (1)...(19): siRNA sense strand
uaauaacccuuguugucaa

SEQ ID NO: 2110749 - RNA, 19 nt, Homo sapiens
  misc_RNA (1)...(19): siRNA sense strand
uauaacaugccaucagaua

SEQ ID NO: 2110750 - RNA, 19 nt, Homo sapiens
  misc_RNA (1)...(19): siRNA sense strand
aagauugucuguuacgaaa

SEQ ID NO: 2110751 - RNA, 19 nt, Homo sapiens
  misc_RNA (1)...(19): siRNA sense strand
acauggagcuguagaagau

SEQ ID NO: 2110752 - RNA, 19 nt, Homo sapiens
  misc_RNA (1)...(19): siRNA sense strand
uaucaggccucuuacuguu

SEQ ID NO: 2110753 - RNA, 19 nt, Homo sapiens
  misc_RNA (1)...(19): siRNA sense strand
ucuauuaucaggccucuua

SEQ ID NO: 2110754 - RNA, 19 nt, Homo sapiens
  misc_RNA (1)...(19): siRNA sense strand
gagaucaucagccaguuaa

SEQ ID NO: 2110755 - RNA, 19 nt, Homo sapiens
  misc_RNA (1)...(19): siRNA sense strand
gaucagauuacaaguucua

SEQ ID NO: 2110756 - RNA, 19 nt, Homo sapiens
  misc_RNA (1)...(19): siRNA sense strand
gagaaagcaauuacacuug

SEQ ID NO: 2110757 - RNA, 19 nt, Homo sapiens
  misc_RNA (1)...(19): siRNA sense strand
aaacauggcccuucugcuu

SEQ ID NO: 2110758 - RNA, 19 nt, Homo sapiens
  misc_RNA (1)...(19): siRNA sense strand
ggauaucccaguuaaaugu

SEQ ID NO: 2110759 - RNA, 19 nt, Homo sapiens
  misc_RNA (1)...(19): siRNA sense strand
gaaaauguaugagucuuga

SEQ ID NO: 2110760 - RNA, 19 nt, Homo sapiens
  misc_RNA (1)...(19): siRNA sense strand
caauggagcuggccaacag

SEQ ID NO: 2110761 - RNA, 19 nt, Homo sapiens
  misc_RNA (1)...(19): siRNA sense strand
ccuauaacaugccaucaga

SEQ ID NO: 2110762 - RNA, 19 nt, Homo sapiens
  misc_RNA (1)...(19): siRNA sense strand
cuacuuaauuggguguaua

SEQ ID NO: 2110763 - RNA, 19 nt, Homo sapiens
  misc_RNA (1)...(19): siRNA sense strand
ccaaggcgaagcagacaua

SEQ ID NO: 2110764 - RNA, 19 nt, Homo sapiens
  misc_RNA (1)...(19): siRNA sense strand
ugaggaauuugaacauguu

SEQ ID NO: 2110765 - RNA, 19 nt, Homo sapiens
  misc_RNA (1)...(19): siRNA sense strand
uaugcucaguggagaaaua

SEQ ID NO: 2110766 - RNA, 19 nt, Homo sapiens
  misc_RNA (1)...(19): siRNA sense strand
uggaaugucaggaauauuu

SEQ ID NO: 2110767 - RNA, 19 nt, Homo sapiens
  misc_RNA (1)...(19): siRNA sense strand
gaaacaacagaacaucaga

SEQ ID NO: 2110768 - RNA, 19 nt, Homo sapiens
  misc_RNA (1)...(19): siRNA sense strand
ggauuaauagguucaguug

SEQ ID NO: 2110769 - RNA, 19 nt, Homo sapiens
  misc_RNA (1)...(19): siRNA sense strand
uguaguagauauaccaaug

SEQ ID NO: 2110770 - RNA, 19 nt, Homo sapiens
  misc_RNA (1)...(19): siRNA sense strand
gauaauugacacagacuau

SEQ ID NO: 2110771 - RNA, 19 nt, Homo sapiens
  misc_RNA (1)...(19): siRNA sense strand
guaacaaggaaauagauga

SEQ ID NO: 2110772 - RNA, 19 nt, Homo sapiens
  misc_RNA (1)...(19): siRNA sense strand
gaaauguuaaggagguaaa

SEQ ID NO: 2110773 - RNA, 19 nt, Homo sapiens
  misc_RNA (1)...(19): siRNA sense strand
aagaaggcauucaagaaga

SEQ ID NO: 2110774 - RNA, 19 nt, Homo sapiens
  misc_RNA (1)...(19): siRNA sense strand
acaccaggauuaauagguu

SEQ ID NO: 2110775 - RNA, 19 nt, Homo sapiens
  misc_RNA (1)...(19): siRNA sense strand
aagccaaaguuguaacauu

SEQ ID NO: 2110776 - RNA, 19 nt, Homo sapiens
  misc_RNA (1)...(19): siRNA sense strand
cauguuggauaccuuguga

SEQ ID NO: 2110777 - RNA, 19 nt, Homo sapiens
  misc_RNA (1)...(19): siRNA sense strand
gcuagaaaacuacuacuua

SEQ ID NO: 2110778 - RNA, 19 nt, Homo sapiens
  misc_RNA (1)...(19): siRNA sense strand
agaaggcauucaagaagaa

SEQ ID NO: 2110779 - RNA, 19 nt, Homo sapiens
  misc_RNA (1)...(19): siRNA sense strand
uaggagagauaaacugcuu

SEQ ID NO: 2110780 - RNA, 19 nt, Homo sapiens
  misc_RNA (1)...(19): siRNA sense strand
uggauaccuugugauauua

SEQ ID NO: 2110781 - RNA, 19 nt, Homo sapiens
  misc_RNA (1)...(19): siRNA sense strand
gaagaaacaacagaacauc

SEQ ID NO: 2110782 - RNA, 19 nt, Homo sapiens
  misc_RNA (1)...(19): siRNA sense strand
gaaacacuucuucuugaau

SEQ ID NO: 2110783 - RNA, 19 nt, Homo sapiens
  misc_RNA (1)...(19): siRNA sense strand
ggagaaauaauaggagaga

SEQ ID NO: 2110784 - RNA, 19 nt, Homo sapiens
  misc_RNA (1)...(19): siRNA sense strand
agucaaaggagaaagauuu

SEQ ID NO: 2110785 - RNA, 19 nt, Homo sapiens
  misc_RNA (1)...(19): siRNA sense strand
guuuagggauugaucaaau

SEQ ID NO: 2110786 - RNA, 19 nt, Homo sapiens
  misc_RNA (1)...(19): siRNA sense strand
uaaaagagcuaggcuacuu

SEQ ID NO: 2110787 - RNA, 19 nt, Homo sapiens
  misc_RNA (1)...(19): siRNA sense strand
aaagccagguuuagggauu

SEQ ID NO: 2110788 - RNA, 19 nt, Homo sapiens
  misc_RNA (1)...(19): siRNA sense strand
gaagaaagaaauguuaagg

SEQ ID NO: 2110789 - RNA, 19 nt, Homo sapiens
  misc_RNA (1)...(19): siRNA sense strand
uaacaugccaucagauaca

SEQ ID NO: 2110790 - RNA, 19 nt, Homo sapiens
  misc_RNA (1)...(19): siRNA sense strand
gaagagcugugcagaauuu

SEQ ID NO: 2110791 - RNA, 19 nt, Homo sapiens
  misc_RNA (1)...(19): siRNA sense strand
gaggacagaucucuacaua

SEQ ID NO: 2110792 - RNA, 19 nt, Homo sapiens
  misc_RNA (1)...(19): siRNA sense strand
gcacagcaguccacagauu

SEQ ID NO: 2110793 - RNA, 19 nt, Homo sapiens
  misc_RNA (1)...(19): siRNA sense strand
cgaaagcucuccaguaaau

SEQ ID NO: 2110794 - RNA, 19 nt, Homo sapiens
  misc_RNA (1)...(19): siRNA sense strand
gauggaaucuaucggcuuu

SEQ ID NO: 2110795 - RNA, 19 nt, Homo sapiens
  misc_RNA (1)...(19): siRNA sense strand
gaaaggagcuagggacaca

SEQ ID NO: 2110796 - RNA, 19 nt, Homo sapiens
  misc_RNA (1)...(19): siRNA sense strand
gcagaaagcgcaugucaga

SEQ ID NO: 2110797 - RNA, 19 nt, Homo sapiens
  misc_RNA (1)...(19): siRNA sense strand
gcugugaccugacggagua

SEQ ID NO: 2110798 - RNA, 19 nt, Homo sapiens
  misc_RNA (1)...(19): siRNA sense strand
gaaggcaucuccacaagca

SEQ ID NO: 2110799 - RNA, 19 nt, Homo sapiens
  misc_RNA (1)...(19): siRNA sense strand
gugcuaaucuugaaacaga

SEQ ID NO: 2110800 - RNA, 19 nt, Homo sapiens
  misc_RNA (1)...(19): siRNA sense strand
ucaaagaaguggaaaucaa

SEQ ID NO: 2110801 - RNA, 19 nt, Homo sapiens
  misc_RNA (1)...(19): siRNA sense strand
ucagaaaccugccaaagau

SEQ ID NO: 2110802 - RNA, 19 nt, Homo sapiens
  misc_RNA (1)...(19): siRNA sense strand
ggauguaacccauucagua

SEQ ID NO: 2110803 - RNA, 19 nt, Homo sapiens
  misc_RNA (1)...(19): siRNA sense strand
gaacaucuccgagcccuuu

SEQ ID NO: 2110804 - RNA, 19 nt, Homo sapiens
  misc_RNA (1)...(19): siRNA sense strand
cgaaggagcugcagucucu

SEQ ID NO: 2110805 - RNA, 19 nt, Homo sapiens
  misc_RNA (1)...(19): siRNA sense strand
gaaggcaggucuugaggau

SEQ ID NO: 2110806 - RNA, 19 nt, Homo sapiens
  misc_RNA (1)...(19): siRNA sense strand
ccucaggucuaaagaaauu

SEQ ID NO: 2110807 - RNA, 19 nt, Homo sapiens
  misc_RNA (1)...(19): siRNA sense strand
ggacaaccuucuuucuuca

SEQ ID NO: 2110808 - RNA, 19 nt, Homo sapiens
  misc_RNA (1)...(19): siRNA sense strand
gagaacagccugccugaga

SEQ ID NO: 2110809 - RNA, 19 nt, Homo sapiens
  misc_RNA (1)...(19): siRNA sense strand
ggagucaccucaaacauac

SEQ ID NO: 2110810 - RNA, 19 nt, Homo sapiens
  misc_RNA (1)...(19): siRNA sense strand
gggacaaccuucuuucuuc

SEQ ID NO: 2110811 - RNA, 19 nt, Homo sapiens
  misc_RNA (1)...(19): siRNA sense strand
gcaaggcgcugaacaucuc

SEQ ID NO: 2110812 - RNA, 19 nt, Homo sapiens
  misc_RNA (1)...(19): siRNA sense strand
gaggguggcuuugauguga

SEQ ID NO: 2110813 - RNA, 19 nt, Homo sapiens
  misc_RNA (1)...(19): siRNA sense strand
gaucagacuccaaaucaaa

SEQ ID NO: 2110814 - RNA, 19 nt, Homo sapiens
  misc_RNA (1)...(19): siRNA sense strand
cuuaugagcucuaugagaa

SEQ ID NO: 2110815 - RNA, 19 nt, Homo sapiens
  misc_RNA (1)...(19): siRNA sense strand
gagcugugcagaauuuaua

SEQ ID NO: 2110816 - RNA, 19 nt, Homo sapiens
  misc_RNA (1)...(19): siRNA sense strand
agcgaaagcucuccaguaa

SEQ ID NO: 2110817 - RNA, 19 nt, Homo sapiens
  misc_RNA (1)...(19): siRNA sense strand
caagggaaauuucaaucga

SEQ ID NO: 2110818 - RNA, 19 nt, Homo sapiens
  misc_RNA (1)...(19): siRNA sense strand
gugauugaguucauauuga

SEQ ID NO: 2110819 - RNA, 19 nt, Homo sapiens
  misc_RNA (1)...(19): siRNA sense strand
ggguuacacuuaggaauaa

SEQ ID NO: 2110820 - RNA, 19 nt, Homo sapiens
  misc_RNA (1)...(19): siRNA sense strand
gaacgacagcccuagcaaa

SEQ ID NO: 2110821 - RNA, 19 nt, Homo sapiens
  misc_RNA (1)...(19): siRNA sense strand
gaaccaggcucgucuaacc

SEQ ID NO: 2110822 - RNA, 19 nt, Homo sapiens
  misc_RNA (1)...(19): siRNA sense strand
cagcggagaucaguaauuc

SEQ ID NO: 2110823 - RNA, 19 nt, Homo sapiens
  misc_RNA (1)...(19): siRNA sense strand
gcccugaucuggccugaga

SEQ ID NO: 2110824 - RNA, 19 nt, Homo sapiens
  misc_RNA (1)...(19): siRNA sense strand
ccucagagccuaaucuuau

SEQ ID NO: 2110825 - RNA, 19 nt, Homo sapiens
  misc_RNA (1)...(19): siRNA sense strand
gaagacucauccaggaaau

SEQ ID NO: 2110826 - RNA, 19 nt, Homo sapiens
  misc_RNA (1)...(19): siRNA sense strand
gaaauugaagccacugguu

SEQ ID NO: 2110827 - RNA, 19 nt, Homo sapiens
  misc_RNA (1)...(19): siRNA sense strand
caagaucccggagccauua

SEQ ID NO: 2110828 - RNA, 19 nt, Homo sapiens
  misc_RNA (1)...(19): siRNA sense strand
ccaaaggucacauggauga

SEQ ID NO: 2110829 - RNA, 19 nt, Homo sapiens
  misc_RNA (1)...(19): siRNA sense strand
gaaaagaaaccaagggaaa

SEQ ID NO: 2110830 - RNA, 19 nt, Homo sapiens
  misc_RNA (1)...(19): siRNA sense strand
caacuggcccgaauccaaa

SEQ ID NO: 2110831 - RNA, 19 nt, Homo sapiens
  misc_RNA (1)...(19): siRNA sense strand
gaguagaaaugggagugua

SEQ ID NO: 2110832 - RNA, 19 nt, Homo sapiens
  misc_RNA (1)...(19): siRNA sense strand
gaacagccugccugagauu

SEQ ID NO: 2110833 - RNA, 19 nt, Homo sapiens
  misc_RNA (1)...(19): siRNA sense strand
ugagauggaugaagaugau

SEQ ID NO: 2110834 - RNA, 19 nt, Homo sapiens
  misc_RNA (1)...(19): siRNA sense strand
gaagugggaggcaaauaga

SEQ ID NO: 2110835 - RNA, 19 nt, Homo sapiens
  misc_RNA (1)...(19): siRNA sense strand
ccaguggacucucgagguu

SEQ ID NO: 2110836 - RNA, 19 nt, Homo sapiens
  misc_RNA (1)...(19): siRNA sense strand
gcaagaguuuggcucagau

SEQ ID NO: 2110837 - RNA, 19 nt, Homo sapiens
  misc_RNA (1)...(19): siRNA sense strand
ggaagaagugggaggcaaa

SEQ ID NO: 2110838 - RNA, 19 nt, Homo sapiens
  misc_RNA (1)...(19): siRNA sense strand
ggacauuguugcucaugca

SEQ ID NO: 2110839 - RNA, 19 nt, Homo sapiens
  misc_RNA (1)...(19): siRNA sense strand
aggaggagcucucaucguu

SEQ ID NO: 2110840 - RNA, 19 nt, Homo sapiens
  misc_RNA (1)...(19): siRNA sense strand
caaagaaguggaaaucaau

SEQ ID NO: 2110841 - RNA, 19 nt, Homo sapiens
  misc_RNA (1)...(19): siRNA sense strand
ugacuuaugagcucuauga

SEQ ID NO: 2110842 - RNA, 19 nt, Homo sapiens
  misc_RNA (1)...(19): siRNA sense strand
gcugaccucuucugguuug

SEQ ID NO: 2110843 - RNA, 19 nt, Homo sapiens
  misc_RNA (1)...(19): siRNA sense strand
caacuuggacccugccauu

SEQ ID NO: 2110844 - RNA, 19 nt, Homo sapiens
  misc_RNA (1)...(19): siRNA sense strand
gcaaaguuacagcuaaaga

SEQ ID NO: 2110845 - RNA, 19 nt, Homo sapiens
  misc_RNA (1)...(19): siRNA sense strand
guaaaucaaagaaguggaa

SEQ ID NO: 2110846 - RNA, 19 nt, Homo sapiens
  misc_RNA (1)...(19): siRNA sense strand
ggaucagacuccaaaucaa

SEQ ID NO: 2110847 - RNA, 19 nt, Homo sapiens
  misc_RNA (1)...(19): siRNA sense strand
gcacccaggagagagauua

SEQ ID NO: 2110848 - RNA, 19 nt, Homo sapiens
  misc_RNA (1)...(19): siRNA sense strand
agcagaagcugaaacgaaa

SEQ ID NO: 2110849 - RNA, 19 nt, Homo sapiens
  misc_RNA (1)...(19): siRNA sense strand
ccgcaaaguuacagcuaaa

SEQ ID NO: 2110850 - RNA, 19 nt, Homo sapiens
  misc_RNA (1)...(19): siRNA sense strand
gaguuuggcucagaucaau

SEQ ID NO: 2110851 - RNA, 19 nt, Homo sapiens
  misc_RNA (1)...(19): siRNA sense strand
ggaaagcucaaaggaagaa

SEQ ID NO: 2110852 - RNA, 19 nt, Homo sapiens
  misc_RNA (1)...(19): siRNA sense strand
ucauuuaguucaccuggaa

SEQ ID NO: 2110853 - RNA, 19 nt, Homo sapiens
  misc_RNA (1)...(19): siRNA sense strand
ccacacuguccuugaguua

SEQ ID NO: 2110854 - RNA, 19 nt, Homo sapiens
  misc_RNA (1)...(19): siRNA sense strand
ggaaagcucgggacaggau

SEQ ID NO: 2110855 - RNA, 19 nt, Homo sapiens
  misc_RNA (1)...(19): siRNA sense strand
gaaccuccuucauggucaa

SEQ ID NO: 2110856 - RNA, 19 nt, Homo sapiens
  misc_RNA (1)...(19): siRNA sense strand
cagcugugcuaaucuugaa

SEQ ID NO: 2110857 - RNA, 19 nt, Homo sapiens
  misc_RNA (1)...(19): siRNA sense strand
ugagaucucuagccucugu

SEQ ID NO: 2110858 - RNA, 19 nt, Homo sapiens
  misc_RNA (1)...(19): siRNA sense strand
gcaaacagccccaaagaug

SEQ ID NO: 2110859 - RNA, 19 nt, Homo sapiens
  misc_RNA (1)...(19): siRNA sense strand
gcuacuauccgaccagcua

SEQ ID NO: 2110860 - RNA, 19 nt, Homo sapiens
  misc_RNA (1)...(19): siRNA sense strand
aaaugaccaucccuaagaa

SEQ ID NO: 2110861 - RNA, 19 nt, Homo sapiens
  misc_RNA (1)...(19): siRNA sense strand
ggcaagaguuuggcucaga

SEQ ID NO: 2110862 - RNA, 19 nt, Homo sapiens
  misc_RNA (1)...(19): siRNA sense strand
gcaagaucccggagccauu

SEQ ID NO: 2110863 - RNA, 19 nt, Homo sapiens
  misc_RNA (1)...(19): siRNA sense strand
gggcacagcaguccacaga

SEQ ID NO: 2110864 - RNA, 19 nt, Homo sapiens
  misc_RNA (1)...(19): siRNA sense strand
cagcugaagucccaagaca

SEQ ID NO: 2110865 - RNA, 19 nt, Homo sapiens
  misc_RNA (1)...(19): siRNA sense strand
ccugggagcuugccuugug

SEQ ID NO: 2110866 - RNA, 19 nt, Homo sapiens
  misc_RNA (1)...(19): siRNA sense strand
gacaggauguuccauacgu

SEQ ID NO: 2110867 - RNA, 19 nt, Homo sapiens
  misc_RNA (1)...(19): siRNA sense strand
agaaagcgcaugucagaga

SEQ ID NO: 2110868 - RNA, 19 nt, Homo sapiens
  misc_RNA (1)...(19): siRNA sense strand
caacuccaguccugcuuuc

SEQ ID NO: 2110869 - RNA, 19 nt, Homo sapiens
  misc_RNA (1)...(19): siRNA sense strand
uugaagagcugugcagaau

SEQ ID NO: 2110870 - RNA, 19 nt, Homo sapiens
  misc_RNA (1)...(19): siRNA sense strand
caaagauguuggguauguu

SEQ ID NO: 2110871 - RNA, 19 nt, Homo sapiens
  misc_RNA (1)...(19): siRNA sense strand
gguggugauugaguucaua

SEQ ID NO: 2110872 - RNA, 19 nt, Homo sapiens
  misc_RNA (1)...(19): siRNA sense strand
ucaaacauacaacggcuaa

SEQ ID NO: 2110873 - RNA, 19 nt, Homo sapiens
  misc_RNA (1)...(19): siRNA sense strand
gagaagacucauccaggaa

SEQ ID NO: 2110874 - RNA, 19 nt, Homo sapiens
  misc_RNA (1)...(19): siRNA sense strand
cggaacagcugaagguuuu

SEQ ID NO: 2110875 - RNA, 19 nt, Homo sapiens
  misc_RNA (1)...(19): siRNA sense strand
ggugauugaguucauauug

SEQ ID NO: 2110876 - RNA, 19 nt, Homo sapiens
  misc_RNA (1)...(19): siRNA sense strand
gaccuuggaauaccugauu

SEQ ID NO: 2110877 - RNA, 19 nt, Homo sapiens
  misc_RNA (1)...(19): siRNA sense strand
gaccucuucugguuugaga

SEQ ID NO: 2110878 - RNA, 19 nt, Homo sapiens
  misc_RNA (1)...(19): siRNA sense strand
uugcugaccucuucugguu

SEQ ID NO: 2110879 - RNA, 19 nt, Homo sapiens
  misc_RNA (1)...(19): siRNA sense strand
cacagcaguccacagauua

SEQ ID NO: 2110880 - RNA, 19 nt, Homo sapiens
  misc_RNA (1)...(19): siRNA sense strand
gccauucucuagauagcaa

SEQ ID NO: 2110881 - RNA, 19 nt, Homo sapiens
  misc_RNA (1)...(19): siRNA sense strand
aaagaaaccaagggaaauu

SEQ ID NO: 2110882 - RNA, 19 nt, Homo sapiens
  misc_RNA (1)...(19): siRNA sense strand
cagaauuuauagagacuca

SEQ ID NO: 2110883 - RNA, 19 nt, Homo sapiens
  misc_RNA (1)...(19): siRNA sense strand
gcacaaggcccagguacag

SEQ ID NO: 2110884 - RNA, 19 nt, Homo sapiens
  misc_RNA (1)...(19): siRNA sense strand
ggaaauugaggacagaucu

SEQ ID NO: 2110885 - RNA, 19 nt, Homo sapiens
  misc_RNA (1)...(19): siRNA sense strand
cgacagcccuagcaaaucc

SEQ ID NO: 2110886 - RNA, 19 nt, Homo sapiens
  misc_RNA (1)...(19): siRNA sense strand
ugaagccacugguugcaau

SEQ ID NO: 2110887 - RNA, 19 nt, Homo sapiens
  misc_RNA (1)...(19): siRNA sense strand
gggacaggauguuccauac

SEQ ID NO: 2110888 - RNA, 19 nt, Homo sapiens
  misc_RNA (1)...(19): siRNA sense strand
acgagaggcuggugagaug

SEQ ID NO: 2110889 - RNA, 19 nt, Homo sapiens
  misc_RNA (1)...(19): siRNA sense strand
gcuuugaugugagcaguga

SEQ ID NO: 2110890 - RNA, 19 nt, Homo sapiens
  misc_RNA (1)...(19): siRNA sense strand
gaagaaauaucaucaagga

SEQ ID NO: 2110891 - RNA, 19 nt, Homo sapiens
  misc_RNA (1)...(19): siRNA sense strand
gaaccuaucuucagucaga

SEQ ID NO: 2110892 - RNA, 19 nt, Homo sapiens
  misc_RNA (1)...(19): siRNA sense strand
caacaccuaugaaggauua

SEQ ID NO: 2110893 - RNA, 19 nt, Homo sapiens
  misc_RNA (1)...(19): siRNA sense strand
gaaaugacguccaaugaag

SEQ ID NO: 2110894 - RNA, 19 nt, Homo sapiens
  misc_RNA (1)...(19): siRNA sense strand
ggaaauggcugugaucuac

SEQ ID NO: 2110895 - RNA, 19 nt, Homo sapiens
  misc_RNA (1)...(19): siRNA sense strand
ggaaagaaucgcuauaaau

SEQ ID NO: 2110896 - RNA, 19 nt, Homo sapiens
  misc_RNA (1)...(19): siRNA sense strand
ccaaagagcuggugagacu

SEQ ID NO: 2110897 - RNA, 19 nt, Homo sapiens
  misc_RNA (1)...(19): siRNA sense strand
ggaaagagaaagaauauag

SEQ ID NO: 2110898 - RNA, 19 nt, Homo sapiens
  misc_RNA (1)...(19): siRNA sense strand
uaaaagagcuguugaggaa

SEQ ID NO: 2110899 - RNA, 19 nt, Homo sapiens
  misc_RNA (1)...(19): siRNA sense strand
gaagggaaguuggagagaa

SEQ ID NO: 2110900 - RNA, 19 nt, Homo sapiens
  misc_RNA (1)...(19): siRNA sense strand
cagcaagguuggacuauga

SEQ ID NO: 2110901 - RNA, 19 nt, Homo sapiens
  misc_RNA (1)...(19): siRNA sense strand
gagaagaaauaucaucaag

SEQ ID NO: 2110902 - RNA, 19 nt, Homo sapiens
  misc_RNA (1)...(19): siRNA sense strand
gaagggacauaaggagaaa

SEQ ID NO: 2110903 - RNA, 19 nt, Homo sapiens
  misc_RNA (1)...(19): siRNA sense strand
gauccugucccaccauuua

SEQ ID NO: 2110904 - RNA, 19 nt, Homo sapiens
  misc_RNA (1)...(19): siRNA sense strand
ggagauuguugcugaguug

SEQ ID NO: 2110905 - RNA, 19 nt, Homo sapiens
  misc_RNA (1)...(19): siRNA sense strand
gcugugaucuaccuucaaa

SEQ ID NO: 2110906 - RNA, 19 nt, Homo sapiens
  misc_RNA (1)...(19): siRNA sense strand
ggaaaugacguccaaugaa

SEQ ID NO: 2110907 - RNA, 19 nt, Homo sapiens
  misc_RNA (1)...(19): siRNA sense strand
ucagaggacuuuguaguaa

SEQ ID NO: 2110908 - RNA, 19 nt, Homo sapiens
  misc_RNA (1)...(19): siRNA sense strand
ugaaugaaauggagaggaa

SEQ ID NO: 2110909 - RNA, 19 nt, Homo sapiens
  misc_RNA (1)...(19): siRNA sense strand
ggaggaaaaugaugaauga

SEQ ID NO: 2110910 - RNA, 19 nt, Homo sapiens
  misc_RNA (1)...(19): siRNA sense strand
auaaggcacuguuggauaa

SEQ ID NO: 2110911 - RNA, 19 nt, Homo sapiens
  misc_RNA (1)...(19): siRNA sense strand
ucagaugccuaaagaaguu

SEQ ID NO: 2110912 - RNA, 19 nt, Homo sapiens
  misc_RNA (1)...(19): siRNA sense strand
uagagaagauggcugagaa

SEQ ID NO: 2110913 - RNA, 19 nt, Homo sapiens
  misc_RNA (1)...(19): siRNA sense strand
ggaccucugucucgucuug

SEQ ID NO: 2110914 - RNA, 19 nt, Homo sapiens
  misc_RNA (1)...(19): siRNA sense strand
cagaauauguaguauguca

SEQ ID NO: 2110915 - RNA, 19 nt, Homo sapiens
  misc_RNA (1)...(19): siRNA sense strand
gugaagagaaucagaauga

SEQ ID NO: 2110916 - RNA, 19 nt, Homo sapiens
  misc_RNA (1)...(19): siRNA sense strand
gaggaggacgagauauuua

SEQ ID NO: 2110917 - RNA, 19 nt, Homo sapiens
  misc_RNA (1)...(19): siRNA sense strand
gcaagugacccuggccuua

SEQ ID NO: 2110918 - RNA, 19 nt, Homo sapiens
  misc_RNA (1)...(19): siRNA sense strand
ucaaacagauccauacucu

SEQ ID NO: 2110919 - RNA, 19 nt, Homo sapiens
  misc_RNA (1)...(19): siRNA sense strand
cucaaaugcugccauguua

SEQ ID NO: 2110920 - RNA, 19 nt, Homo sapiens
  misc_RNA (1)...(19): siRNA sense strand
gggcagaaauagagaagau

SEQ ID NO: 2110921 - RNA, 19 nt, Homo sapiens
  misc_RNA (1)...(19): siRNA sense strand
gaacaagccagggcagaaa

SEQ ID NO: 2110922 - RNA, 19 nt, Homo sapiens
  misc_RNA (1)...(19): siRNA sense strand
agucaugucucccagauuu

SEQ ID NO: 2110923 - RNA, 19 nt, Homo sapiens
  misc_RNA (1)...(19): siRNA sense strand
guaggaaagagaaagaaua

SEQ ID NO: 2110924 - RNA, 19 nt, Homo sapiens
  misc_RNA (1)...(19): siRNA sense strand
gcacgcauguaucaacaau

SEQ ID NO: 2110925 - RNA, 19 nt, Homo sapiens
  misc_RNA (1)...(19): siRNA sense strand
gagaaaaguucccagguuu

SEQ ID NO: 2110926 - RNA, 19 nt, Homo sapiens
  misc_RNA (1)...(19): siRNA sense strand
caacucagaggacuuugua

SEQ ID NO: 2110927 - RNA, 19 nt, Homo sapiens
  misc_RNA (1)...(19): siRNA sense strand
gaauauagaagggaaguug

SEQ ID NO: 2110928 - RNA, 19 nt, Homo sapiens
  misc_RNA (1)...(19): siRNA sense strand
uauccaagcuacccugauu

SEQ ID NO: 2110929 - RNA, 19 nt, Homo sapiens
  misc_RNA (1)...(19): siRNA sense strand
cuaccuagaagacauaaua

SEQ ID NO: 2110930 - RNA, 19 nt, Homo sapiens
  misc_RNA (1)...(19): siRNA sense strand
ggaggaggacgagauauuu

SEQ ID NO: 2110931 - RNA, 19 nt, Homo sapiens
  misc_RNA (1)...(19): siRNA sense strand
ucagagagcaggagauuga

SEQ ID NO: 2110932 - RNA, 19 nt, Homo sapiens
  misc_RNA (1)...(19): siRNA sense strand
gaggaagcgugaagagaau

SEQ ID NO: 2110933 - RNA, 19 nt, Homo sapiens
  misc_RNA (1)...(19): siRNA sense strand
gaagauggcugagaaaauc

SEQ ID NO: 2110934 - RNA, 19 nt, Homo sapiens
  misc_RNA (1)...(19): siRNA sense strand
caacaacucagaggacuuu

SEQ ID NO: 2110935 - RNA, 19 nt, Homo sapiens
  misc_RNA (1)...(19): siRNA sense strand
gaaucagaaugaagugaau

SEQ ID NO: 2110936 - RNA, 19 nt, Homo sapiens
  misc_RNA (1)...(19): siRNA sense strand
gcacagcggaaacauauuc

SEQ ID NO: 2110937 - RNA, 19 nt, Homo sapiens
  misc_RNA (1)...(19): siRNA sense strand
uagcagacauguuugacuu

SEQ ID NO: 2110938 - RNA, 19 nt, Homo sapiens
  misc_RNA (1)...(19): siRNA sense strand
ggaagggacauaaggagaa

SEQ ID NO: 2110939 - RNA, 19 nt, Homo sapiens
  misc_RNA (1)...(19): siRNA sense strand
gaucuaccuucaaaaguua

SEQ ID NO: 2110940 - RNA, 19 nt, Homo sapiens
  misc_RNA (1)...(19): siRNA sense strand
uuaugaagauccugaaguu

SEQ ID NO: 2110941 - RNA, 19 nt, Homo sapiens
  misc_RNA (1)...(19): siRNA sense strand
uggaaagaaucgcuauaaa

SEQ ID NO: 2110942 - RNA, 19 nt, Homo sapiens
  misc_RNA (1)...(19): siRNA sense strand
ugaaguuacuggaaagaau

SEQ ID NO: 2110943 - RNA, 19 nt, Homo sapiens
  misc_RNA (1)...(19): siRNA sense strand
cagaggacuuuguaguaaa

SEQ ID NO: 2110944 - RNA, 19 nt, Homo sapiens
  misc_RNA (1)...(19): siRNA sense strand
gaccauacacaggcaaaua

SEQ ID NO: 2110945 - RNA, 19 nt, Homo sapiens
  misc_RNA (1)...(19): siRNA sense strand
uauaagcuccuaccuagaa

SEQ ID NO: 2110946 - RNA, 19 nt, Homo sapiens
  misc_RNA (1)...(19): siRNA sense strand
gaagggcacuagcagacau

SEQ ID NO: 2110947 - RNA, 19 nt, Homo sapiens
  misc_RNA (1)...(19): siRNA sense strand
gaagaagaagaaauggaaa

SEQ ID NO: 2110948 - RNA, 19 nt, Homo sapiens
  misc_RNA (1)...(19): siRNA sense strand
caaugaagaagaagaaaug

SEQ ID NO: 2110949 - RNA, 19 nt, Homo sapiens
  misc_RNA (1)...(19): siRNA sense strand
ucuguacgauccauuguuu

SEQ ID NO: 2110950 - RNA, 19 nt, Homo sapiens
  misc_RNA (1)...(19): siRNA sense strand
uacgauccauuguuuauug

SEQ ID NO: 2110951 - RNA, 19 nt, Homo sapiens
  misc_RNA (1)...(19): siRNA sense strand
cagaaugaagugaauauga

SEQ ID NO: 2110952 - RNA, 19 nt, Homo sapiens
  misc_RNA (1)...(19): siRNA sense strand
ccauguuacuugagaaaga

SEQ ID NO: 2110953 - RNA, 19 nt, Homo sapiens
  misc_RNA (1)...(19): siRNA sense strand
caucagaucauccacaguu

SEQ ID NO: 2110954 - RNA, 19 nt, Homo sapiens
  misc_RNA (1)...(19): siRNA sense strand
ugaagaagaagaaauggaa

SEQ ID NO: 2110955 - RNA, 19 nt, Homo sapiens
  misc_RNA (1)...(19): siRNA sense strand
gagagaagaaauaucauca

SEQ ID NO: 2110956 - RNA, 19 nt, Homo sapiens
  misc_RNA (1)...(19): siRNA sense strand
ucagaaaacuuguaggaaa

SEQ ID NO: 2110957 - RNA, 19 nt, Homo sapiens
  misc_RNA (1)...(19): siRNA sense strand
ccacaacugacgcuucuuu

SEQ ID NO: 2110958 - RNA, 19 nt, Homo sapiens
  misc_RNA (1)...(19): siRNA sense strand
gcacaaggugucacugguu

SEQ ID NO: 2110959 - RNA, 19 nt, Homo sapiens
  misc_RNA (1)...(19): siRNA sense strand
cauaaggcacuguuggaua

SEQ ID NO: 2110960 - RNA, 19 nt, Homo sapiens
  misc_RNA (1)...(19): siRNA sense strand
uaaagucauuaccaccaaa

SEQ ID NO: 2110961 - RNA, 19 nt, Homo sapiens
  misc_RNA (1)...(19): siRNA sense strand
gguuaaaguucaccauagu

SEQ ID NO: 2110962 - RNA, 19 nt, Homo sapiens
  misc_RNA (1)...(19): siRNA sense strand
ggcacuagcagacauguuu

SEQ ID NO: 2110963 - RNA, 19 nt, Homo sapiens
  misc_RNA (1)...(19): siRNA sense strand
gaaauggaaauggcuguga

SEQ ID NO: 2110964 - RNA, 19 nt, Homo sapiens
  misc_RNA (1)...(19): siRNA sense strand
gcagcaagguuggacuaug

SEQ ID NO: 2110965 - RNA, 19 nt, Homo sapiens
  misc_RNA (1)...(19): siRNA sense strand
ggacauaaggagaaacaca

SEQ ID NO: 2110966 - RNA, 19 nt, Homo sapiens
  misc_RNA (1)...(19): siRNA sense strand
gaauaugaagcacuugaau

SEQ ID NO: 2110967 - RNA, 19 nt, Homo sapiens
  misc_RNA (1)...(19): siRNA sense strand
gaagagaaucagaaugaag

SEQ ID NO: 2110968 - RNA, 19 nt, Homo sapiens
  misc_RNA (1)...(19): siRNA sense strand
gagaagaggaggaaaauga

SEQ ID NO: 2110969 - RNA, 19 nt, Homo sapiens
  misc_RNA (1)...(19): siRNA sense strand
ggauuauucugauuaugca

SEQ ID NO: 2110970 - RNA, 19 nt, Homo sapiens
  misc_RNA (1)...(19): siRNA sense strand
cugaguugguuuauaguuu

SEQ ID NO: 2110971 - RNA, 19 nt, Homo sapiens
  misc_RNA (1)...(19): siRNA sense strand
gggaggaggacgagauauu

SEQ ID NO: 2110972 - RNA, 19 nt, Homo sapiens
  misc_RNA (1)...(19): siRNA sense strand
acuacuaucucaacaccua

SEQ ID NO: 2110973 - RNA, 19 nt, Homo sapiens
  misc_RNA (1)...(19): siRNA sense strand
gagugacaccucccaguuu

SEQ ID NO: 2110974 - RNA, 19 nt, Homo sapiens
  misc_RNA (1)...(19): siRNA sense strand
gaauacugcagaagaacaa

SEQ ID NO: 2110975 - RNA, 19 nt, Homo sapiens
  misc_RNA (1)...(19): siRNA sense strand
cuagaagacauaauacuga

SEQ ID NO: 2110976 - RNA, 19 nt, Homo sapiens
  misc_RNA (1)...(19): siRNA sense strand
uaguggaacuugagucaug

SEQ ID NO: 2110977 - RNA, 19 nt, Homo sapiens
  misc_RNA (1)...(19): siRNA sense strand
gaaguuggagagaagaaau

SEQ ID NO: 2110978 - RNA, 19 nt, Homo sapiens
  misc_RNA (1)...(19): siRNA sense strand
gauccauuguuuauugugu

SEQ ID NO: 2110979 - RNA, 19 nt, Homo sapiens
  misc_RNA (1)...(19): siRNA sense strand
ugaggaagcgugaagagaa

SEQ ID NO: 2110980 - RNA, 19 nt, Homo sapiens
  misc_RNA (1)...(19): siRNA sense strand
gagauucgccuggaaguuc

SEQ ID NO: 2110981 - RNA, 19 nt, Homo sapiens
  misc_RNA (1)...(19): siRNA sense strand
gaaguuacuggaaagaauc

SEQ ID NO: 2110982 - RNA, 19 nt, Homo sapiens
  misc_RNA (1)...(19): siRNA sense strand
aaaguucaccauaguacua

SEQ ID NO: 2110983 - RNA, 19 nt, Homo sapiens
  misc_RNA (1)...(19): siRNA sense strand
gaggauccaugccuuuguc

SEQ ID NO: 2110984 - RNA, 19 nt, Homo sapiens
  misc_RNA (1)...(19): siRNA sense strand
caugauguuugaagggaaa

SEQ ID NO: 2110985 - RNA, 19 nt, Homo sapiens
  misc_RNA (1)...(19): siRNA sense strand
acgcauguaucaacaauca

SEQ ID NO: 2110986 - RNA, 19 nt, Homo sapiens
  misc_RNA (1)...(19): siRNA sense strand
ugaagagaaucagaaugaa

SEQ ID NO: 2110987 - RNA, 19 nt, Homo sapiens
  misc_RNA (1)...(19): siRNA sense strand
gcauguaucaacaaucaga

SEQ ID NO: 2110988 - RNA, 19 nt, Homo sapiens
  misc_RNA (1)...(19): siRNA sense strand
gacguccaaugaagaagaa

SEQ ID NO: 2110989 - RNA, 19 nt, Homo sapiens
  misc_RNA (1)...(19): siRNA sense strand
ggagagaagaaauaucauc

SEQ ID NO: 2110990 - RNA, 19 nt, Homo sapiens
  misc_RNA (1)...(19): siRNA sense strand
gaagaaauaucaucaagga

SEQ ID NO: 2110991 - RNA, 19 nt, Homo sapiens
  misc_RNA (1)...(19): siRNA sense strand
gaaccuaucuucagucaga

SEQ ID NO: 2110992 - RNA, 19 nt, Homo sapiens
  misc_RNA (1)...(19): siRNA sense strand
caacaccuaugaaggauua

SEQ ID NO: 2110993 - RNA, 19 nt, Homo sapiens
  misc_RNA (1)...(19): siRNA sense strand
gaaaugacguccaaugaag

SEQ ID NO: 2110994 - RNA, 19 nt, Homo sapiens
  misc_RNA (1)...(19): siRNA sense strand
ggaaauggcugugaucuac

SEQ ID NO: 2110995 - RNA, 19 nt, Homo sapiens
  misc_RNA (1)...(19): siRNA sense strand
ggaaagaaucgcuauaaau

SEQ ID NO: 2110996 - RNA, 19 nt, Homo sapiens
  misc_RNA (1)...(19): siRNA sense strand
ccaaagagcuggugagacu

SEQ ID NO: 2110997 - RNA, 19 nt, Homo sapiens
  misc_RNA (1)...(19): siRNA sense strand
ggaaagagaaagaauauag

SEQ ID NO: 2110998 - RNA, 19 nt, Homo sapiens
  misc_RNA (1)...(19): siRNA sense strand
uaaaagagcuguugaggaa

SEQ ID NO: 2110999 - RNA, 19 nt, Homo sapiens
  misc_RNA (1)...(19): siRNA sense strand
gaagggaaguuggagagaa

SEQ ID NO: 2111000 - RNA, 19 nt, Homo sapiens
  misc_RNA (1)...(19): siRNA sense strand
cagcaagguuggacuauga

SEQ ID NO: 2111001 - RNA, 19 nt, Homo sapiens
  misc_RNA (1)...(19): siRNA sense strand
gagaagaaauaucaucaag

SEQ ID NO: 2111002 - RNA, 19 nt, Homo sapiens
  misc_RNA (1)...(19): siRNA sense strand
gaagggacauaaggagaaa

SEQ ID NO: 2111003 - RNA, 19 nt, Homo sapiens
  misc_RNA (1)...(19): siRNA sense strand
gauccugucccaccauuua

SEQ ID NO: 2111004 - RNA, 19 nt, Homo sapiens
  misc_RNA (1)...(19): siRNA sense strand
ggagauuguugcugaguug

SEQ ID NO: 2111005 - RNA, 19 nt, Homo sapiens
  misc_RNA (1)...(19): siRNA sense strand
gcugugaucuaccuucaaa

SEQ ID NO: 2111006 - RNA, 19 nt, Homo sapiens
  misc_RNA (1)...(19): siRNA sense strand
ggaaaugacguccaaugaa

SEQ ID NO: 2111007 - RNA, 19 nt, Homo sapiens
  misc_RNA (1)...(19): siRNA sense strand
ucagaggacuuuguaguaa

SEQ ID NO: 2111008 - RNA, 19 nt, Homo sapiens
  misc_RNA (1)...(19): siRNA sense strand
ugaaugaaauggagaggaa

SEQ ID NO: 2111009 - RNA, 19 nt, Homo sapiens
  misc_RNA (1)...(19): siRNA sense strand
ggaggaaaaugaugaauga

SEQ ID NO: 2111010 - RNA, 19 nt, Homo sapiens
  misc_RNA (1)...(19): siRNA sense strand
auaaggcacuguuggauaa

SEQ ID NO: 2111011 - RNA, 19 nt, Homo sapiens
  misc_RNA (1)...(19): siRNA sense strand
ucagaugccuaaagaaguu

SEQ ID NO: 2111012 - RNA, 19 nt, Homo sapiens
  misc_RNA (1)...(19): siRNA sense strand
uagagaagauggcugagaa

SEQ ID NO: 2111013 - RNA, 19 nt, Homo sapiens
  misc_RNA (1)...(19): siRNA sense strand
ggaccucugucucgucuug

SEQ ID NO: 2111014 - RNA, 19 nt, Homo sapiens
  misc_RNA (1)...(19): siRNA sense strand
cagaauauguaguauguca

SEQ ID NO: 2111015 - RNA, 19 nt, Homo sapiens
  misc_RNA (1)...(19): siRNA sense strand
gugaagagaaucagaauga

SEQ ID NO: 2111016 - RNA, 19 nt, Homo sapiens
  misc_RNA (1)...(19): siRNA sense strand
gaggaggacgagauauuua

SEQ ID NO: 2111017 - RNA, 19 nt, Homo sapiens
  misc_RNA (1)...(19): siRNA sense strand
gcaagugacccuggccuua

SEQ ID NO: 2111018 - RNA, 19 nt, Homo sapiens
  misc_RNA (1)...(19): siRNA sense strand
ucaaacagauccauacucu

SEQ ID NO: 2111019 - RNA, 19 nt, Homo sapiens
  misc_RNA (1)...(19): siRNA sense strand
cucaaaugcugccauguua

SEQ ID NO: 2111020 - RNA, 19 nt, Homo sapiens
  misc_RNA (1)...(19): siRNA sense strand
gggcagaaauagagaagau

SEQ ID NO: 2111021 - RNA, 19 nt, Homo sapiens
  misc_RNA (1)...(19): siRNA sense strand
gaacaagccagggcagaaa

SEQ ID NO: 2111022 - RNA, 19 nt, Homo sapiens
  misc_RNA (1)...(19): siRNA sense strand
agucaugucucccagauuu

SEQ ID NO: 2111023 - RNA, 19 nt, Homo sapiens
  misc_RNA (1)...(19): siRNA sense strand
guaggaaagagaaagaaua

SEQ ID NO: 2111024 - RNA, 19 nt, Homo sapiens
  misc_RNA (1)...(19): siRNA sense strand
gcacgcauguaucaacaau

SEQ ID NO: 2111025 - RNA, 19 nt, Homo sapiens
  misc_RNA (1)...(19): siRNA sense strand
gagaaaaguucccagguuu

SEQ ID NO: 2111026 - RNA, 19 nt, Homo sapiens
  misc_RNA (1)...(19): siRNA sense strand
caacucagaggacuuugua

SEQ ID NO: 2111027 - RNA, 19 nt, Homo sapiens
  misc_RNA (1)...(19): siRNA sense strand
gaauauagaagggaaguug

SEQ ID NO: 2111028 - RNA, 19 nt, Homo sapiens
  misc_RNA (1)...(19): siRNA sense strand
uauccaagcuacccugauu

SEQ ID NO: 2111029 - RNA, 19 nt, Homo sapiens
  misc_RNA (1)...(19): siRNA sense strand
cuaccuagaagacauaaua

SEQ ID NO: 2111030 - RNA, 19 nt, Homo sapiens
  misc_RNA (1)...(19): siRNA sense strand
ggaggaggacgagauauuu

SEQ ID NO: 2111031 - RNA, 19 nt, Homo sapiens
  misc_RNA (1)...(19): siRNA sense strand
ucagagagcaggagauuga

SEQ ID NO: 2111032 - RNA, 19 nt, Homo sapiens
  misc_RNA (1)...(19): siRNA sense strand
gaggaagcgugaagagaau

SEQ ID NO: 2111033 - RNA, 19 nt, Homo sapiens
  misc_RNA (1)...(19): siRNA sense strand
gaagauggcugagaaaauc

SEQ ID NO: 2111034 - RNA, 19 nt, Homo sapiens
  misc_RNA (1)...(19): siRNA sense strand
caacaacucagaggacuuu

SEQ ID NO: 2111035 - RNA, 19 nt, Homo sapiens
  misc_RNA (1)...(19): siRNA sense strand
gaaucagaaugaagugaau

SEQ ID NO: 2111036 - RNA, 19 nt, Homo sapiens
  misc_RNA (1)...(19): siRNA sense strand
gcacagcggaaacauauuc

SEQ ID NO: 2111037 - RNA, 19 nt, Homo sapiens
  misc_RNA (1)...(19): siRNA sense strand
uagcagacauguuugacuu

SEQ ID NO: 2111038 - RNA, 19 nt, Homo sapiens
  misc_RNA (1)...(19): siRNA sense strand
ggaagggacauaaggagaa

SEQ ID NO: 2111039 - RNA, 19 nt, Homo sapiens
  misc_RNA (1)...(19): siRNA sense strand
gaucuaccuucaaaaguua

SEQ ID NO: 2111040 - RNA, 19 nt, Homo sapiens
  misc_RNA (1)...(19): siRNA sense strand
uuaugaagauccugaaguu

SEQ ID NO: 2111041 - RNA, 19 nt, Homo sapiens
  misc_RNA (1)...(19): siRNA sense strand
uggaaagaaucgcuauaaa

SEQ ID NO: 2111042 - RNA, 19 nt, Homo sapiens
  misc_RNA (1)...(19): siRNA sense strand
ugaaguuacuggaaagaau

SEQ ID NO: 2111043 - RNA, 19 nt, Homo sapiens
  misc_RNA (1)...(19): siRNA sense strand
cagaggacuuuguaguaaa

SEQ ID NO: 2111044 - RNA, 19 nt, Homo sapiens
  misc_RNA (1)...(19): siRNA sense strand
gaccauacacaggcaaaua

SEQ ID NO: 2111045 - RNA, 19 nt, Homo sapiens
  misc_RNA (1)...(19): siRNA sense strand
uauaagcuccuaccuagaa

SEQ ID NO: 2111046 - RNA, 19 nt, Homo sapiens
  misc_RNA (1)...(19): siRNA sense strand
gaagggcacuagcagacau

SEQ ID NO: 2111047 - RNA, 19 nt, Homo sapiens
  misc_RNA (1)...(19): siRNA sense strand
gaagaagaagaaauggaaa

SEQ ID NO: 2111048 - RNA, 19 nt, Homo sapiens
  misc_RNA (1)...(19): siRNA sense strand
caaugaagaagaagaaaug

SEQ ID NO: 2111049 - RNA, 19 nt, Homo sapiens
  misc_RNA (1)...(19): siRNA sense strand
ucuguacgauccauuguuu

SEQ ID NO: 2111050 - RNA, 19 nt, Homo sapiens
  misc_RNA (1)...(19): siRNA sense strand
uacgauccauuguuuauug

SEQ ID NO: 2111051 - RNA, 19 nt, Homo sapiens
  misc_RNA (1)...(19): siRNA sense strand
cagaaugaagugaauauga

SEQ ID NO: 2111052 - RNA, 19 nt, Homo sapiens
  misc_RNA (1)...(19): siRNA sense strand
ccauguuacuugagaaaga

SEQ ID NO: 2111053 - RNA, 19 nt, Homo sapiens
  misc_RNA (1)...(19): siRNA sense strand
caucagaucauccacaguu

SEQ ID NO: 2111054 - RNA, 19 nt, Homo sapiens
  misc_RNA (1)...(19): siRNA sense strand
ugaagaagaagaaauggaa

SEQ ID NO: 2111055 - RNA, 19 nt, Homo sapiens
  misc_RNA (1)...(19): siRNA sense strand
gagagaagaaauaucauca

SEQ ID NO: 2111056 - RNA, 19 nt, Homo sapiens
  misc_RNA (1)...(19): siRNA sense strand
ucagaaaacuuguaggaaa

SEQ ID NO: 2111057 - RNA, 19 nt, Homo sapiens
  misc_RNA (1)...(19): siRNA sense strand
ccacaacugacgcuucuuu

SEQ ID NO: 2111058 - RNA, 19 nt, Homo sapiens
  misc_RNA (1)...(19): siRNA sense strand
gcacaaggugucacugguu

SEQ ID NO: 2111059 - RNA, 19 nt, Homo sapiens
  misc_RNA (1)...(19): siRNA sense strand
cauaaggcacuguuggaua

SEQ ID NO: 2111060 - RNA, 19 nt, Homo sapiens
  misc_RNA (1)...(19): siRNA sense strand
uaaagucauuaccaccaaa

SEQ ID NO: 2111061 - RNA, 19 nt, Homo sapiens
  misc_RNA (1)...(19): siRNA sense strand
gguuaaaguucaccauagu

SEQ ID NO: 2111062 - RNA, 19 nt, Homo sapiens
  misc_RNA (1)...(19): siRNA sense strand
ggcacuagcagacauguuu

SEQ ID NO: 2111063 - RNA, 19 nt, Homo sapiens
  misc_RNA (1)...(19): siRNA sense strand
gaaauggaaauggcuguga

SEQ ID NO: 2111064 - RNA, 19 nt, Homo sapiens
  misc_RNA (1)...(19): siRNA sense strand
gcagcaagguuggacuaug

SEQ ID NO: 2111065 - RNA, 19 nt, Homo sapiens
  misc_RNA (1)...(19): siRNA sense strand
ggacauaaggagaaacaca

SEQ ID NO: 2111066 - RNA, 19 nt, Homo sapiens
  misc_RNA (1)...(19): siRNA sense strand
gaauaugaagcacuugaau

SEQ ID NO: 2111067 - RNA, 19 nt, Homo sapiens
  misc_RNA (1)...(19): siRNA sense strand
gaagagaaucagaaugaag

SEQ ID NO: 2111068 - RNA, 19 nt, Homo sapiens
  misc_RNA (1)...(19): siRNA sense strand
gagaagaggaggaaaauga

SEQ ID NO: 2111069 - RNA, 19 nt, Homo sapiens
  misc_RNA (1)...(19): siRNA sense strand
ggauuauucugauuaugca

SEQ ID NO: 2111070 - RNA, 19 nt, Homo sapiens
  misc_RNA (1)...(19): siRNA sense strand
cugaguugguuuauaguuu

SEQ ID NO: 2111071 - RNA, 19 nt, Homo sapiens
  misc_RNA (1)...(19): siRNA sense strand
gggaggaggacgagauauu

SEQ ID NO: 2111072 - RNA, 19 nt, Homo sapiens
  misc_RNA (1)...(19): siRNA sense strand
acuacuaucucaacaccua

SEQ ID NO: 2111073 - RNA, 19 nt, Homo sapiens
  misc_RNA (1)...(19): siRNA sense strand
gagugacaccucccaguuu

SEQ ID NO: 2111074 - RNA, 19 nt, Homo sapiens
  misc_RNA (1)...(19): siRNA sense strand
gaauacugcagaagaacaa

SEQ ID NO: 2111075 - RNA, 19 nt, Homo sapiens
  misc_RNA (1)...(19): siRNA sense strand
cuagaagacauaauacuga

SEQ ID NO: 2111076 - RNA, 19 nt, Homo sapiens
  misc_RNA (1)...(19): siRNA sense strand
uaguggaacuugagucaug

SEQ ID NO: 2111077 - RNA, 19 nt, Homo sapiens
  misc_RNA (1)...(19): siRNA sense strand
gaaguuggagagaagaaau

SEQ ID NO: 2111078 - RNA, 19 nt, Homo sapiens
  misc_RNA (1)...(19): siRNA sense strand
gauccauuguuuauugugu

SEQ ID NO: 2111079 - RNA, 19 nt, Homo sapiens
  misc_RNA (1)...(19): siRNA sense strand
ugaggaagcgugaagagaa

SEQ ID NO: 2111080 - RNA, 19 nt, Homo sapiens
  misc_RNA (1)...(19): siRNA sense strand
gagauucgccuggaaguuc

SEQ ID NO: 2111081 - RNA, 19 nt, Homo sapiens
  misc_RNA (1)...(19): siRNA sense strand
gaaguuacuggaaagaauc

SEQ ID NO: 2111082 - RNA, 19 nt, Homo sapiens
  misc_RNA (1)...(19): siRNA sense strand
aaaguucaccauaguacua

SEQ ID NO: 2111083 - RNA, 19 nt, Homo sapiens
  misc_RNA (1)...(19): siRNA sense strand
gaggauccaugccuuuguc

SEQ ID NO: 2111084 - RNA, 19 nt, Homo sapiens
  misc_RNA (1)...(19): siRNA sense strand
caugauguuugaagggaaa

SEQ ID NO: 2111085 - RNA, 19 nt, Homo sapiens
  misc_RNA (1)...(19): siRNA sense strand
acgcauguaucaacaauca

SEQ ID NO: 2111086 - RNA, 19 nt, Homo sapiens
  misc_RNA (1)...(19): siRNA sense strand
ugaagagaaucagaaugaa

SEQ ID NO: 2111087 - RNA, 19 nt, Homo sapiens
  misc_RNA (1)...(19): siRNA sense strand
gcauguaucaacaaucaga

SEQ ID NO: 2111088 - RNA, 19 nt, Homo sapiens
  misc_RNA (1)...(19): siRNA sense strand
gacguccaaugaagaagaa

SEQ ID NO: 2111089 - RNA, 19 nt, Homo sapiens
  misc_RNA (1)...(19): siRNA sense strand
ggagagaagaaauaucauc

SEQ ID NO: 2111090 - RNA, 19 nt, Homo sapiens
  misc_RNA (1)...(19): siRNA sense strand
caacauagguucuaaagug

SEQ ID NO: 2111091 - RNA, 19 nt, Homo sapiens
  misc_RNA (1)...(19): siRNA sense strand
aaagugacgucauaugaua

SEQ ID NO: 2111092 - RNA, 19 nt, Homo sapiens
  misc_RNA (1)...(19): siRNA sense strand
gguauuaugugacaacaaa

SEQ ID NO: 2111093 - RNA, 19 nt, Homo sapiens
  misc_RNA (1)...(19): siRNA sense strand
cgagagauccucaaccuua

SEQ ID NO: 2111094 - RNA, 19 nt, Homo sapiens
  misc_RNA (1)...(19): siRNA sense strand
guucuaaagugacgucaua

SEQ ID NO: 2111095 - RNA, 19 nt, Homo sapiens
  misc_RNA (1)...(19): siRNA sense strand
agaaaucccaccagaauua

SEQ ID NO: 2111096 - RNA, 19 nt, Homo sapiens
  misc_RNA (1)...(19): siRNA sense strand
acaauaacuugcugacaua

SEQ ID NO: 2111097 - RNA, 19 nt, Homo sapiens
  misc_RNA (1)...(19): siRNA sense strand
ggaggaaauuucauuaaag

SEQ ID NO: 2111098 - RNA, 19 nt, Homo sapiens
  misc_RNA (1)...(19): siRNA sense strand
ggaaaucugccuucucuga

SEQ ID NO: 2111099 - RNA, 19 nt, Homo sapiens
  misc_RNA (1)...(19): siRNA sense strand
ggaaauccauugguuguuc

SEQ ID NO: 2111100 - RNA, 19 nt, Homo sapiens
  misc_RNA (1)...(19): siRNA sense strand
gcacgcugcuggccaagaa

SEQ ID NO: 2111101 - RNA, 19 nt, Homo sapiens
  misc_RNA (1)...(19): siRNA sense strand
gaaaguucuucuugguuga

SEQ ID NO: 2111102 - RNA, 19 nt, Homo sapiens
  misc_RNA (1)...(19): siRNA sense strand
aagcauaccuccucaacuu

SEQ ID NO: 2111103 - RNA, 19 nt, Homo sapiens
  misc_RNA (1)...(19): siRNA sense strand
gcacggaccauuaagauuc

SEQ ID NO: 2111104 - RNA, 19 nt, Homo sapiens
  misc_RNA (1)...(19): siRNA sense strand
gaagaugaagcuaguguug

SEQ ID NO: 2111105 - RNA, 19 nt, Homo sapiens
  misc_RNA (1)...(19): siRNA sense strand
ugccuucucugaauuauuu

SEQ ID NO: 2111106 - RNA, 19 nt, Homo sapiens
  misc_RNA (1)...(19): siRNA sense strand
gagagauccucaaccuuau

SEQ ID NO: 2111107 - RNA, 19 nt, Homo sapiens
  misc_RNA (1)...(19): siRNA sense strand
gaguugaguuuacgaggaa

SEQ ID NO: 2111108 - RNA, 19 nt, Homo sapiens
  misc_RNA (1)...(19): siRNA sense strand
aaagaaaucccaccagaau

SEQ ID NO: 2111109 - RNA, 19 nt, Homo sapiens
  misc_RNA (1)...(19): siRNA sense strand
cccuaagucuucacaauaa

SEQ ID NO: 2111110 - RNA, 19 nt, Homo sapiens
  misc_RNA (1)...(19): siRNA sense strand
gaaaucugccuucucugaa

SEQ ID NO: 2111111 - RNA, 19 nt, Homo sapiens
  misc_RNA (1)...(19): siRNA sense strand
cacaauaacuugcugacau

SEQ ID NO: 2111112 - RNA, 19 nt, Homo sapiens
  misc_RNA (1)...(19): siRNA sense strand
gcaauugcccaaacccaaa

SEQ ID NO: 2111113 - RNA, 19 nt, Homo sapiens
  misc_RNA (1)...(19): siRNA sense strand
cggcugagaucgagaacuu

SEQ ID NO: 2111114 - RNA, 19 nt, Homo sapiens
  misc_RNA (1)...(19): siRNA sense strand
gcaaccaacugcagagcau

SEQ ID NO: 2111115 - RNA, 19 nt, Homo sapiens
  misc_RNA (1)...(19): siRNA sense strand
uaggaaaucugccuucucu

SEQ ID NO: 2111116 - RNA, 19 nt, Homo sapiens
  misc_RNA (1)...(19): siRNA sense strand
cuaaagugacgucauauga

SEQ ID NO: 2111117 - RNA, 19 nt, Homo sapiens
  misc_RNA (1)...(19): siRNA sense strand
guuuauaucuuggaggaaa

SEQ ID NO: 2111118 - RNA, 19 nt, Homo sapiens
  misc_RNA (1)...(19): siRNA sense strand
cuacuuguguucaccagaa

SEQ ID NO: 2111119 - RNA, 19 nt, Homo sapiens
  misc_RNA (1)...(19): siRNA sense strand
guggaggagucuacuuuga

SEQ ID NO: 2111120 - RNA, 19 nt, Homo sapiens
  misc_RNA (1)...(19): siRNA sense strand
uaaagaaaucccaccagaa

SEQ ID NO: 2111121 - RNA, 19 nt, Homo sapiens
  misc_RNA (1)...(19): siRNA sense strand
gaggaaauccauugguugu

SEQ ID NO: 2111122 - RNA, 19 nt, Homo sapiens
  misc_RNA (1)...(19): siRNA sense strand
caacaaaauccaaagcaua

SEQ ID NO: 2111123 - RNA, 19 nt, Homo sapiens
  misc_RNA (1)...(19): siRNA sense strand
ggacagcaccccaaauuau

SEQ ID NO: 2111124 - RNA, 19 nt, Homo sapiens
  misc_RNA (1)...(19): siRNA sense strand
caaccuuauucauuuggaa

SEQ ID NO: 2111125 - RNA, 19 nt, Homo sapiens
  misc_RNA (1)...(19): siRNA sense strand
gaucaacauagguucuaaa

SEQ ID NO: 2111126 - RNA, 19 nt, Homo sapiens
  misc_RNA (1)...(19): siRNA sense strand
aacauagguucuaaaguga

SEQ ID NO: 2111127 - RNA, 19 nt, Homo sapiens
  misc_RNA (1)...(19): siRNA sense strand
uaaagugacgucauaugau

SEQ ID NO: 2111128 - RNA, 19 nt, Homo sapiens
  misc_RNA (1)...(19): siRNA sense strand
gcacgcagaaugcagaaag

SEQ ID NO: 2111129 - RNA, 19 nt, Homo sapiens
  misc_RNA (1)...(19): siRNA sense strand
ccucaaccuuauucauuug

SEQ ID NO: 2111130 - RNA, 19 nt, Homo sapiens
  misc_RNA (1)...(19): siRNA sense strand
acgaggaaauccauugguu

SEQ ID NO: 2111131 - RNA, 19 nt, Homo sapiens
  misc_RNA (1)...(19): siRNA sense strand
gagcaucccggcugagauc

SEQ ID NO: 2111132 - RNA, 19 nt, Homo sapiens
  misc_RNA (1)...(19): siRNA sense strand
aaaucugccuucucugaau

SEQ ID NO: 2111133 - RNA, 19 nt, Homo sapiens
  misc_RNA (1)...(19): siRNA sense strand
uagcugcacggaccauuaa

SEQ ID NO: 2111134 - RNA, 19 nt, Homo sapiens
  misc_RNA (1)...(19): siRNA sense strand
uccucaaccuuauucauuu

SEQ ID NO: 2111135 - RNA, 19 nt, Homo sapiens
  misc_RNA (1)...(19): siRNA sense strand
gcauaccuccucaacuuuc

SEQ ID NO: 2111136 - RNA, 19 nt, Homo sapiens
  misc_RNA (1)...(19): siRNA sense strand
aaucugccuucucugaauu

SEQ ID NO: 2111137 - RNA, 19 nt, Homo sapiens
  misc_RNA (1)...(19): siRNA sense strand
gaaaucccaccagaauuag

SEQ ID NO: 2111138 - RNA, 19 nt, Homo sapiens
  misc_RNA (1)...(19): siRNA sense strand
ucccuaagucuucacaaua

SEQ ID NO: 2111139 - RNA, 19 nt, Homo sapiens
  misc_RNA (1)...(19): siRNA sense strand
ccaccagaauuaggaaauc

SEQ ID NO: 2111140 - RNA, 19 nt, Homo sapiens
  misc_RNA (1)...(19): siRNA sense strand
cgaucaacauagguucuaa

SEQ ID NO: 2111141 - RNA, 19 nt, Homo sapiens
  misc_RNA (1)...(19): siRNA sense strand
auaacuugcugacauaucu

SEQ ID NO: 2111142 - RNA, 19 nt, Homo sapiens
  misc_RNA (1)...(19): siRNA sense strand
gagauccucaaccuuauuc

SEQ ID NO: 2111143 - RNA, 19 nt, Homo sapiens
  misc_RNA (1)...(19): siRNA sense strand
gcagaguuuagaguguuua

SEQ ID NO: 2111144 - RNA, 19 nt, Homo sapiens
  misc_RNA (1)...(19): siRNA sense strand
cagcuccacuucccagagu

SEQ ID NO: 2111145 - RNA, 19 nt, Homo sapiens
  misc_RNA (1)...(19): siRNA sense strand
caacucuccuggaauuagc

SEQ ID NO: 2111146 - RNA, 19 nt, Homo sapiens
  misc_RNA (1)...(19): siRNA sense strand
aaguaucgccucccacuga

SEQ ID NO: 2111147 - RNA, 19 nt, Homo sapiens
  misc_RNA (1)...(19): siRNA sense strand
uuaaauuuguggacuucug

SEQ ID NO: 2111148 - RNA, 19 nt, Homo sapiens
  misc_RNA (1)...(19): siRNA sense strand
uaucuuggaggaaauuuca

SEQ ID NO: 2111149 - RNA, 19 nt, Homo sapiens
  misc_RNA (1)...(19): siRNA sense strand
guguggaggagucuacuuu

SEQ ID NO: 2111150 - RNA, 19 nt, Homo sapiens
  misc_RNA (1)...(19): siRNA sense strand
ggaccauuaagauucgaaa

SEQ ID NO: 2111151 - RNA, 19 nt, Homo sapiens
  misc_RNA (1)...(19): siRNA sense strand
ccuaugauccuccaacucu

SEQ ID NO: 2111152 - RNA, 19 nt, Homo sapiens
  misc_RNA (1)...(19): siRNA sense strand
caaagcauaccuccucaac

SEQ ID NO: 2111153 - RNA, 19 nt, Homo sapiens
  misc_RNA (1)...(19): siRNA sense strand
acaguuacauucacuucgu

SEQ ID NO: 2111154 - RNA, 19 nt, Homo sapiens
  misc_RNA (1)...(19): siRNA sense strand
ccacugaugcacuacuugu

SEQ ID NO: 2111155 - RNA, 19 nt, Homo sapiens
  misc_RNA (1)...(19): siRNA sense strand
gcuccgaucaacauagguu

SEQ ID NO: 2111156 - RNA, 19 nt, Homo sapiens
  misc_RNA (1)...(19): siRNA sense strand
cagaagaugaagcuagugu

SEQ ID NO: 2111157 - RNA, 19 nt, Homo sapiens
  misc_RNA (1)...(19): siRNA sense strand
caaccucagcggcaacugu

SEQ ID NO: 2111158 - RNA, 19 nt, Homo sapiens
  misc_RNA (1)...(19): siRNA sense strand
cauaccuccucaacuuuca

SEQ ID NO: 2111159 - RNA, 19 nt, Homo sapiens
  misc_RNA (1)...(19): siRNA sense strand
caguuacauucacuucguu

SEQ ID NO: 2111160 - RNA, 19 nt, Homo sapiens
  misc_RNA (1)...(19): siRNA sense strand
uuagcugcacggaccauua

SEQ ID NO: 2111161 - RNA, 19 nt, Homo sapiens
  misc_RNA (1)...(19): siRNA sense strand
uaaauuuguggacuucugu

SEQ ID NO: 2111162 - RNA, 19 nt, Homo sapiens
  misc_RNA (1)...(19): siRNA sense strand
cugaugcacuacuuguguu

SEQ ID NO: 2111163 - RNA, 19 nt, Homo sapiens
  misc_RNA (1)...(19): siRNA sense strand
gugccugccucgcucuuag

SEQ ID NO: 2111164 - RNA, 19 nt, Homo sapiens
  misc_RNA (1)...(19): siRNA sense strand
cuuggaggaaauuucauua

SEQ ID NO: 2111165 - RNA, 19 nt, Homo sapiens
  misc_RNA (1)...(19): siRNA sense strand
uugcagaguuuagaguguu

SEQ ID NO: 2111166 - RNA, 19 nt, Homo sapiens
  misc_RNA (1)...(19): siRNA sense strand
aagaaaucccaccagaauu

SEQ ID NO: 2111167 - RNA, 19 nt, Homo sapiens
  misc_RNA (1)...(19): siRNA sense strand
ucacaguuacauucacuuc

SEQ ID NO: 2111168 - RNA, 19 nt, Homo sapiens
  misc_RNA (1)...(19): siRNA sense strand
agaugaagcuaguguugcu

SEQ ID NO: 2111169 - RNA, 19 nt, Homo sapiens
  misc_RNA (1)...(19): siRNA sense strand
cucagaagaugaagcuagu

SEQ ID NO: 2111170 - RNA, 19 nt, Homo sapiens
  misc_RNA (1)...(19): siRNA sense strand
auccauugguuguucguuu

SEQ ID NO: 2111171 - RNA, 19 nt, Homo sapiens
  misc_RNA (1)...(19): siRNA sense strand
ggaagaguugaguuuacga

SEQ ID NO: 2111172 - RNA, 19 nt, Homo sapiens
  misc_RNA (1)...(19): siRNA sense strand
caccagaauuaggaaaucu

SEQ ID NO: 2111173 - RNA, 19 nt, Homo sapiens
  misc_RNA (1)...(19): siRNA sense strand
ugcagaguuuagaguguuu

SEQ ID NO: 2111174 - RNA, 19 nt, Homo sapiens
  misc_RNA (1)...(19): siRNA sense strand
gauccucaaccuuauucau

SEQ ID NO: 2111175 - RNA, 19 nt, Homo sapiens
  misc_RNA (1)...(19): siRNA sense strand
gcugcacggaccauuaaga

SEQ ID NO: 2111176 - RNA, 19 nt, Homo sapiens
  misc_RNA (1)...(19): siRNA sense strand
ccaacucuccuggaauuag

SEQ ID NO: 2111177 - RNA, 19 nt, Homo sapiens
  misc_RNA (1)...(19): siRNA sense strand
ucaaccuuauucauuugga

SEQ ID NO: 2111178 - RNA, 19 nt, Homo sapiens
  misc_RNA (1)...(19): siRNA sense strand
gaaaggagcugugcuaaca

SEQ ID NO: 2111179 - RNA, 19 nt, Homo sapiens
  misc_RNA (1)...(19): siRNA sense strand
gcacaaacauauccagaaa

SEQ ID NO: 2111180 - RNA, 19 nt, Homo sapiens
  misc_RNA (1)...(19): siRNA sense strand
gcaaacugcuaauagguua

SEQ ID NO: 2111181 - RNA, 19 nt, Homo sapiens
  misc_RNA (1)...(19): siRNA sense strand
caacagaaauagugucauu

SEQ ID NO: 2111182 - RNA, 19 nt, Homo sapiens
  misc_RNA (1)...(19): siRNA sense strand
gaaggaaagugguaaugaa

SEQ ID NO: 2111183 - RNA, 19 nt, Homo sapiens
  misc_RNA (1)...(19): siRNA sense strand
gaacaaggcaauugaacua

SEQ ID NO: 2111184 - RNA, 19 nt, Homo sapiens
  misc_RNA (1)...(19): siRNA sense strand
caauugaacuauccacuaa

SEQ ID NO: 2111185 - RNA, 19 nt, Homo sapiens
  misc_RNA (1)...(19): siRNA sense strand
gaggauagcacgaacauuu

SEQ ID NO: 2111186 - RNA, 19 nt, Homo sapiens
  misc_RNA (1)...(19): siRNA sense strand
gauaagaaaugguaccaau

SEQ ID NO: 2111187 - RNA, 19 nt, Homo sapiens
  misc_RNA (1)...(19): siRNA sense strand
gaaagaggaaauacacaua

SEQ ID NO: 2111188 - RNA, 19 nt, Homo sapiens
  misc_RNA (1)...(19): siRNA sense strand
ggagauuucuuuaccaguu

SEQ ID NO: 2111189 - RNA, 19 nt, Homo sapiens
  misc_RNA (1)...(19): siRNA sense strand
gaaacgcccuauccaaaug

SEQ ID NO: 2111190 - RNA, 19 nt, Homo sapiens
  misc_RNA (1)...(19): siRNA sense strand
ggaagaggcucgcagaagu

SEQ ID NO: 2111191 - RNA, 19 nt, Homo sapiens
  misc_RNA (1)...(19): siRNA sense strand
gaugguaguuugacuuuau

SEQ ID NO: 2111192 - RNA, 19 nt, Homo sapiens
  misc_RNA (1)...(19): siRNA sense strand
gaaaugguaccaauucuga

SEQ ID NO: 2111193 - RNA, 19 nt, Homo sapiens
  misc_RNA (1)...(19): siRNA sense strand
gagauuucuuuaccaguua

SEQ ID NO: 2111194 - RNA, 19 nt, Homo sapiens
  misc_RNA (1)...(19): siRNA sense strand
guacauuccucucauugaa

SEQ ID NO: 2111195 - RNA, 19 nt, Homo sapiens
  misc_RNA (1)...(19): siRNA sense strand
gagaacaggugcuauacga

SEQ ID NO: 2111196 - RNA, 19 nt, Homo sapiens
  misc_RNA (1)...(19): siRNA sense strand
gcgaaugccuccaggauau

SEQ ID NO: 2111197 - RNA, 19 nt, Homo sapiens
  misc_RNA (1)...(19): siRNA sense strand
gacaugaaauuacaacaga

SEQ ID NO: 2111198 - RNA, 19 nt, Homo sapiens
  misc_RNA (1)...(19): siRNA sense strand
ucuaguaucuccaguauug

SEQ ID NO: 2111199 - RNA, 19 nt, Homo sapiens
  misc_RNA (1)...(19): siRNA sense strand
gcaauuacaguacuugaaa

SEQ ID NO: 2111200 - RNA, 19 nt, Homo sapiens
  misc_RNA (1)...(19): siRNA sense strand
uaggagagcuggaagagaa

SEQ ID NO: 2111201 - RNA, 19 nt, Homo sapiens
  misc_RNA (1)...(19): siRNA sense strand
aagcagaacuuguuauuca

SEQ ID NO: 2111202 - RNA, 19 nt, Homo sapiens
  misc_RNA (1)...(19): siRNA sense strand
cagcgaaccauucauaaua

SEQ ID NO: 2111203 - RNA, 19 nt, Homo sapiens
  misc_RNA (1)...(19): siRNA sense strand
caagaaaugugugauaauc

SEQ ID NO: 2111204 - RNA, 19 nt, Homo sapiens
  misc_RNA (1)...(19): siRNA sense strand
gaaccuccacaacagauua

SEQ ID NO: 2111205 - RNA, 19 nt, Homo sapiens
  misc_RNA (1)...(19): siRNA sense strand
gccaagaaaugugugauaa

SEQ ID NO: 2111206 - RNA, 19 nt, Homo sapiens
  misc_RNA (1)...(19): siRNA sense strand
cagcauacuuugcagauug

SEQ ID NO: 2111207 - RNA, 19 nt, Homo sapiens
  misc_RNA (1)...(19): siRNA sense strand
gcagaugaacaaagguuua

SEQ ID NO: 2111208 - RNA, 19 nt, Homo sapiens
  misc_RNA (1)...(19): siRNA sense strand
ggaaugguguuaaucaucu

SEQ ID NO: 2111209 - RNA, 19 nt, Homo sapiens
  misc_RNA (1)...(19): siRNA sense strand
agaaagaucucauuguagu

SEQ ID NO: 2111210 - RNA, 19 nt, Homo sapiens
  misc_RNA (1)...(19): siRNA sense strand
aauaggagaucaucaguau

SEQ ID NO: 2111211 - RNA, 19 nt, Homo sapiens
  misc_RNA (1)...(19): siRNA sense strand
aaacagcgaaccauucaua

SEQ ID NO: 2111212 - RNA, 19 nt, Homo sapiens
  misc_RNA (1)...(19): siRNA sense strand
ucaugcagauggaucaaua

SEQ ID NO: 2111213 - RNA, 19 nt, Homo sapiens
  misc_RNA (1)...(19): siRNA sense strand
gcaauugaacuauccacua

SEQ ID NO: 2111214 - RNA, 19 nt, Homo sapiens
  misc_RNA (1)...(19): siRNA sense strand
gaacaggugcuauacgaau

SEQ ID NO: 2111215 - RNA, 19 nt, Homo sapiens
  misc_RNA (1)...(19): siRNA sense strand
ccgaauggguggauuaaug

SEQ ID NO: 2111216 - RNA, 19 nt, Homo sapiens
  misc_RNA (1)...(19): siRNA sense strand
gcaagucuccuaccucaga

SEQ ID NO: 2111217 - RNA, 19 nt, Homo sapiens
  misc_RNA (1)...(19): siRNA sense strand
cagcagacaugaaauuaca

SEQ ID NO: 2111218 - RNA, 19 nt, Homo sapiens
  misc_RNA (1)...(19): siRNA sense strand
uaucaggagucucugcaua

SEQ ID NO: 2111219 - RNA, 19 nt, Homo sapiens
  misc_RNA (1)...(19): siRNA sense strand
gcagauggaucaauaaaau

SEQ ID NO: 2111220 - RNA, 19 nt, Homo sapiens
  misc_RNA (1)...(19): siRNA sense strand
gcucuaguaucuccaguau

SEQ ID NO: 2111221 - RNA, 19 nt, Homo sapiens
  misc_RNA (1)...(19): siRNA sense strand
gugcuaacauucuccugua

SEQ ID NO: 2111222 - RNA, 19 nt, Homo sapiens
  misc_RNA (1)...(19): siRNA sense strand
gaaauucaggaaacuuuga

SEQ ID NO: 2111223 - RNA, 19 nt, Homo sapiens
  misc_RNA (1)...(19): siRNA sense strand
gaagaaaaccgagaaaauu

SEQ ID NO: 2111224 - RNA, 19 nt, Homo sapiens
  misc_RNA (1)...(19): siRNA sense strand
caaccacggucuccucgaa

SEQ ID NO: 2111225 - RNA, 19 nt, Homo sapiens
  misc_RNA (1)...(19): siRNA sense strand
caacagauuacuagucuug

SEQ ID NO: 2111226 - RNA, 19 nt, Homo sapiens
  misc_RNA (1)...(19): siRNA sense strand
gaaggcaaacugcuaauag

SEQ ID NO: 2111227 - RNA, 19 nt, Homo sapiens
  misc_RNA (1)...(19): siRNA sense strand
gagaggaaauucaggaaac

SEQ ID NO: 2111228 - RNA, 19 nt, Homo sapiens
  misc_RNA (1)...(19): siRNA sense strand
ggauugcacuugaugaaag

SEQ ID NO: 2111229 - RNA, 19 nt, Homo sapiens
  misc_RNA (1)...(19): siRNA sense strand
cccaagagaugaaggcaaa

SEQ ID NO: 2111230 - RNA, 19 nt, Homo sapiens
  misc_RNA (1)...(19): siRNA sense strand
ggaccgaauggguggauua

SEQ ID NO: 2111231 - RNA, 19 nt, Homo sapiens
  misc_RNA (1)...(19): siRNA sense strand
gcgaaccauucauaauauu

SEQ ID NO: 2111232 - RNA, 19 nt, Homo sapiens
  misc_RNA (1)...(19): siRNA sense strand
gaccugguguugauugcua

SEQ ID NO: 2111233 - RNA, 19 nt, Homo sapiens
  misc_RNA (1)...(19): siRNA sense strand
uaagaaaugguaccaauuc

SEQ ID NO: 2111234 - RNA, 19 nt, Homo sapiens
  misc_RNA (1)...(19): siRNA sense strand
gaaauucagcgguuaacau

SEQ ID NO: 2111235 - RNA, 19 nt, Homo sapiens
  misc_RNA (1)...(19): siRNA sense strand
ggaaagugguaaugaacuc

SEQ ID NO: 2111236 - RNA, 19 nt, Homo sapiens
  misc_RNA (1)...(19): siRNA sense strand
gaagaccaccauuucgaaa

SEQ ID NO: 2111237 - RNA, 19 nt, Homo sapiens
  misc_RNA (1)...(19): siRNA sense strand
gaagacccauuugccauuc

SEQ ID NO: 2111238 - RNA, 19 nt, Homo sapiens
  misc_RNA (1)...(19): siRNA sense strand
cuauaggagucaagcauaa

SEQ ID NO: 2111239 - RNA, 19 nt, Homo sapiens
  misc_RNA (1)...(19): siRNA sense strand
ggaacgaauuacuuacugu

SEQ ID NO: 2111240 - RNA, 19 nt, Homo sapiens
  misc_RNA (1)...(19): siRNA sense strand
gacgagaacaggugcuaua

SEQ ID NO: 2111241 - RNA, 19 nt, Homo sapiens
  misc_RNA (1)...(19): siRNA sense strand
caaaugugguggucaugug

SEQ ID NO: 2111242 - RNA, 19 nt, Homo sapiens
  misc_RNA (1)...(19): siRNA sense strand
gaggaaguguuuaaaauga

SEQ ID NO: 2111243 - RNA, 19 nt, Homo sapiens
  misc_RNA (1)...(19): siRNA sense strand
ggaagacccauuugccauu

SEQ ID NO: 2111244 - RNA, 19 nt, Homo sapiens
  misc_RNA (1)...(19): siRNA sense strand
gaucugacacaaagcaauu

SEQ ID NO: 2111245 - RNA, 19 nt, Homo sapiens
  misc_RNA (1)...(19): siRNA sense strand
gaugaaggcaaacugcuaa

SEQ ID NO: 2111246 - RNA, 19 nt, Homo sapiens
  misc_RNA (1)...(19): siRNA sense strand
uguagaagaccaaguuuaa

SEQ ID NO: 2111247 - RNA, 19 nt, Homo sapiens
  misc_RNA (1)...(19): siRNA sense strand
uaacauacagccaagaaau

SEQ ID NO: 2111248 - RNA, 19 nt, Homo sapiens
  misc_RNA (1)...(19): siRNA sense strand
ggaagaccaccauuucgaa

SEQ ID NO: 2111249 - RNA, 19 nt, Homo sapiens
  misc_RNA (1)...(19): siRNA sense strand
ccacagcauuagccuuuga

SEQ ID NO: 2111250 - RNA, 19 nt, Homo sapiens
  misc_RNA (1)...(19): siRNA sense strand
gaccagugcagaagcauuu

SEQ ID NO: 2111251 - RNA, 19 nt, Homo sapiens
  misc_RNA (1)...(19): siRNA sense strand
aaacagaggcuuucucaag

SEQ ID NO: 2111252 - RNA, 19 nt, Homo sapiens
  misc_RNA (1)...(19): siRNA sense strand
aaauucagcgguuaacaua

SEQ ID NO: 2111253 - RNA, 19 nt, Homo sapiens
  misc_RNA (1)...(19): siRNA sense strand
agacuugccuuuauguuca

SEQ ID NO: 2111254 - RNA, 19 nt, Homo sapiens
  misc_RNA (1)...(19): siRNA sense strand
gugaaacgcccuauccaaa

SEQ ID NO: 2111255 - RNA, 19 nt, Homo sapiens
  misc_RNA (1)...(19): siRNA sense strand
gccauacuccauucucuua

SEQ ID NO: 2111256 - RNA, 19 nt, Homo sapiens
  misc_RNA (1)...(19): siRNA sense strand
cauacuccauucucuuaaa

SEQ ID NO: 2111257 - RNA, 19 nt, Homo sapiens
  misc_RNA (1)...(19): siRNA sense strand
ggagacaucuuuuauacug

SEQ ID NO: 2111258 - RNA, 19 nt, Homo sapiens
  misc_RNA (1)...(19): siRNA sense strand
cagaaauagugucauuaga

SEQ ID NO: 2111259 - RNA, 19 nt, Homo sapiens
  misc_RNA (1)...(19): siRNA sense strand
cagauuguccuccggauuu

SEQ ID NO: 2111260 - RNA, 19 nt, Homo sapiens
  misc_RNA (1)...(19): siRNA sense strand
caucuaccuuuccagagua

SEQ ID NO: 2111261 - RNA, 19 nt, Homo sapiens
  misc_RNA (1)...(19): siRNA sense strand
cagaaaaucuuggcuauug

SEQ ID NO: 2111262 - RNA, 19 nt, Homo sapiens
  misc_RNA (1)...(19): siRNA sense strand
ggacuccuuugcacggaaa

SEQ ID NO: 2111263 - RNA, 19 nt, Homo sapiens
  misc_RNA (1)...(19): siRNA sense strand
cagcccagcuuccuucuuc

SEQ ID NO: 2111264 - RNA, 19 nt, Homo sapiens
  misc_RNA (1)...(19): siRNA sense strand
aauaaggaguggccaauca

SEQ ID NO: 2111265 - RNA, 19 nt, Homo sapiens
  misc_RNA (1)...(19): siRNA sense strand
gagaucaucaguauacaau

SEQ ID NO: 2111266 - RNA, 19 nt, Homo sapiens
  misc_RNA (1)...(19): siRNA sense strand
ccaaacaacauagaugaaa

SEQ ID NO: 2111267 - RNA, 19 nt, Homo sapiens
  misc_RNA (1)...(19): siRNA sense strand
guucauugcagacaacuuu

SEQ ID NO: 2111268 - RNA, 19 nt, Homo sapiens
  misc_RNA (1)...(19): siRNA sense strand
cggaguauuuccagauuug

SEQ ID NO: 2111269 - RNA, 19 nt, Homo sapiens
  misc_RNA (1)...(19): siRNA sense strand
ggacaugcuaggagauuug

SEQ ID NO: 2111270 - RNA, 19 nt, Homo sapiens
  misc_RNA (1)...(19): siRNA sense strand
uaaugcaaccgccauauga

SEQ ID NO: 2111271 - RNA, 19 nt, Homo sapiens
  misc_RNA (1)...(19): siRNA sense strand
ccauugaccuauauagauc

SEQ ID NO: 2111272 - RNA, 19 nt, Homo sapiens
  misc_RNA (1)...(19): siRNA sense strand
aagcucagcauauggaaua

SEQ ID NO: 2111273 - RNA, 19 nt, Homo sapiens
  misc_RNA (1)...(19): siRNA sense strand
uuacaguacuugaaaugga

SEQ ID NO: 2111274 - RNA, 19 nt, Homo sapiens
  misc_RNA (1)...(19): siRNA sense strand
agaccaaguuuaaccauca

SEQ ID NO: 2111275 - RNA, 19 nt, Homo sapiens
  misc_RNA (1)...(19): siRNA sense strand
gaacagaaagaggaaauac

SEQ ID NO: 2111276 - RNA, 19 nt, Homo sapiens
  misc_RNA (1)...(19): siRNA sense strand
ggaacagaaagaggaaaua

SEQ ID NO: 2111277 - RNA, 19 nt, Homo sapiens
  misc_RNA (1)...(19): siRNA sense strand
gauugcacuugaugaaaga

SEQ ID NO: 2111278 - RNA, 19 nt, Homo sapiens
  misc_RNA (1)...(19): siRNA sense strand
ggagaaagcauguguauua

SEQ ID NO: 2111279 - RNA, 19 nt, Homo sapiens
  misc_RNA (1)...(19): siRNA sense strand
gaaaugaugucaagaguuc

SEQ ID NO: 2111280 - RNA, 19 nt, Homo sapiens
  misc_RNA (1)...(19): siRNA sense strand
gaaagcauguguauuaugu

SEQ ID NO: 2111281 - RNA, 19 nt, Homo sapiens
  misc_RNA (1)...(19): siRNA sense strand
ggaaagggcucacucacaa

SEQ ID NO: 2111282 - RNA, 19 nt, Homo sapiens
  misc_RNA (1)...(19): siRNA sense strand
guaaagccuuccuuaguua

SEQ ID NO: 2111283 - RNA, 19 nt, Homo sapiens
  misc_RNA (1)...(19): siRNA sense strand
ugaaugagcugcagaagaa

SEQ ID NO: 2111284 - RNA, 19 nt, Homo sapiens
  misc_RNA (1)...(19): siRNA sense strand
ggacacugcuugaaagaaa

SEQ ID NO: 2111285 - RNA, 19 nt, Homo sapiens
  misc_RNA (1)...(19): siRNA sense strand
cauaagagaccuuugauua

SEQ ID NO: 2111286 - RNA, 19 nt, Homo sapiens
  misc_RNA (1)...(19): siRNA sense strand
ggaaagaauucucuaagug

SEQ ID NO: 2111287 - RNA, 19 nt, Homo sapiens
  misc_RNA (1)...(19): siRNA sense strand
ggguacaacuguucucuua

SEQ ID NO: 2111288 - RNA, 19 nt, Homo sapiens
  misc_RNA (1)...(19): siRNA sense strand
ucagagguguucaaauuua

SEQ ID NO: 2111289 - RNA, 19 nt, Homo sapiens
  misc_RNA (1)...(19): siRNA sense strand
gaagguaaaugugcaggua

SEQ ID NO: 2111290 - RNA, 19 nt, Homo sapiens
  misc_RNA (1)...(19): siRNA sense strand
gaaaggaccuagugcagau

SEQ ID NO: 2111291 - RNA, 19 nt, Homo sapiens
  misc_RNA (1)...(19): siRNA sense strand
gcaagcaaguuuaaucaga

SEQ ID NO: 2111292 - RNA, 19 nt, Homo sapiens
  misc_RNA (1)...(19): siRNA sense strand
gaaggaagaccgagaauca

SEQ ID NO: 2111293 - RNA, 19 nt, Homo sapiens
  misc_RNA (1)...(19): siRNA sense strand
ggagauaaacgaugaaaug

SEQ ID NO: 2111294 - RNA, 19 nt, Homo sapiens
  misc_RNA (1)...(19): siRNA sense strand
cagaguaccuuauuacguu

SEQ ID NO: 2111295 - RNA, 19 nt, Homo sapiens
  misc_RNA (1)...(19): siRNA sense strand
uaaaguggauccaacaaug

SEQ ID NO: 2111296 - RNA, 19 nt, Homo sapiens
  misc_RNA (1)...(19): siRNA sense strand
gcacagccuuguauggaaa

SEQ ID NO: 2111297 - RNA, 19 nt, Homo sapiens
  misc_RNA (1)...(19): siRNA sense strand
uaagguugcugaagccaua

SEQ ID NO: 2111298 - RNA, 19 nt, Homo sapiens
  misc_RNA (1)...(19): siRNA sense strand
gaaagagggugugcagaau

SEQ ID NO: 2111299 - RNA, 19 nt, Homo sapiens
  misc_RNA (1)...(19): siRNA sense strand
ggaauuagcagagauguga

SEQ ID NO: 2111300 - RNA, 19 nt, Homo sapiens
  misc_RNA (1)...(19): siRNA sense strand
gcauugaaguugagaacaa

SEQ ID NO: 2111301 - RNA, 19 nt, Homo sapiens
  misc_RNA (1)...(19): siRNA sense strand
ugaccaaucugaaauuaga

SEQ ID NO: 2111302 - RNA, 19 nt, Homo sapiens
  misc_RNA (1)...(19): siRNA sense strand
uuucagagguguucaaauu

SEQ ID NO: 2111303 - RNA, 19 nt, Homo sapiens
  misc_RNA (1)...(19): siRNA sense strand
gaaagaauucucuaagugu

SEQ ID NO: 2111304 - RNA, 19 nt, Homo sapiens
  misc_RNA (1)...(19): siRNA sense strand
gacaauaacacuucucauu

SEQ ID NO: 2111305 - RNA, 19 nt, Homo sapiens
  misc_RNA (1)...(19): siRNA sense strand
ugucuaaacuugcaucauu

SEQ ID NO: 2111306 - RNA, 19 nt, Homo sapiens
  misc_RNA (1)...(19): siRNA sense strand
gcccagagauagagauuug

SEQ ID NO: 2111307 - RNA, 19 nt, Homo sapiens
  misc_RNA (1)...(19): siRNA sense strand
gagaaagcauguguauuau

SEQ ID NO: 2111308 - RNA, 19 nt, Homo sapiens
  misc_RNA (1)...(19): siRNA sense strand
ugaaagaaaucuaccuugu

SEQ ID NO: 2111309 - RNA, 19 nt, Homo sapiens
  misc_RNA (1)...(19): siRNA sense strand
augaggaccuuaagcauua

SEQ ID NO: 2111310 - RNA, 19 nt, Homo sapiens
  misc_RNA (1)...(19): siRNA sense strand
acugagagcuuguccuuaa

SEQ ID NO: 2111311 - RNA, 19 nt, Homo sapiens
  misc_RNA (1)...(19): siRNA sense strand
caagauaauggaagacaua

SEQ ID NO: 2111312 - RNA, 19 nt, Homo sapiens
  misc_RNA (1)...(19): siRNA sense strand
ccaaacaacacccagauaa

SEQ ID NO: 2111313 - RNA, 19 nt, Homo sapiens
  misc_RNA (1)...(19): siRNA sense strand
gacaggaaaugccaaacaa

SEQ ID NO: 2111314 - RNA, 19 nt, Homo sapiens
  misc_RNA (1)...(19): siRNA sense strand
gaaagaagaggcagaugug

SEQ ID NO: 2111315 - RNA, 19 nt, Homo sapiens
  misc_RNA (1)...(19): siRNA sense strand
cagaagggcuaauggaaau

SEQ ID NO: 2111316 - RNA, 19 nt, Homo sapiens
  misc_RNA (1)...(19): siRNA sense strand
gucacuagaucuucccuua

SEQ ID NO: 2111317 - RNA, 19 nt, Homo sapiens
  misc_RNA (1)...(19): siRNA sense strand
uagaauggcaguauaauga

SEQ ID NO: 2111318 - RNA, 19 nt, Homo sapiens
  misc_RNA (1)...(19): siRNA sense strand
uaagagaccuuugauuaag

SEQ ID NO: 2111319 - RNA, 19 nt, Homo sapiens
  misc_RNA (1)...(19): siRNA sense strand
gaacaggaaacuugggauu

SEQ ID NO: 2111320 - RNA, 19 nt, Homo sapiens
  misc_RNA (1)...(19): siRNA sense strand
gcagauguguauaaagcaa

SEQ ID NO: 2111321 - RNA, 19 nt, Homo sapiens
  misc_RNA (1)...(19): siRNA sense strand
cagguaaacuggaaagaau

SEQ ID NO: 2111322 - RNA, 19 nt, Homo sapiens
  misc_RNA (1)...(19): siRNA sense strand
gaaaugaggcguugucacu

SEQ ID NO: 2111323 - RNA, 19 nt, Homo sapiens
  misc_RNA (1)...(19): siRNA sense strand
ucagugaguuuauagaaug

SEQ ID NO: 2111324 - RNA, 19 nt, Homo sapiens
  misc_RNA (1)...(19): siRNA sense strand
cauaauugaugccauugaa

SEQ ID NO: 2111325 - RNA, 19 nt, Homo sapiens
  misc_RNA (1)...(19): siRNA sense strand
gaaagaaaucuaccuugug

SEQ ID NO: 2111326 - RNA, 19 nt, Homo sapiens
  misc_RNA (1)...(19): siRNA sense strand
gcaaaugcucagugccuua

SEQ ID NO: 2111327 - RNA, 19 nt, Homo sapiens
  misc_RNA (1)...(19): siRNA sense strand
uaaaugugcagguaaguuu

SEQ ID NO: 2111328 - RNA, 19 nt, Homo sapiens
  misc_RNA (1)...(19): siRNA sense strand
ucaaugaguuaacuucaga

SEQ ID NO: 2111329 - RNA, 19 nt, Homo sapiens
  misc_RNA (1)...(19): siRNA sense strand
ccacaacacucucuagcau

SEQ ID NO: 2111330 - RNA, 19 nt, Homo sapiens
  misc_RNA (1)...(19): siRNA sense strand
ccaauuauucugccaauga

SEQ ID NO: 2111331 - RNA, 19 nt, Homo sapiens
  misc_RNA (1)...(19): siRNA sense strand
cuacaagaccugauugaaa

SEQ ID NO: 2111332 - RNA, 19 nt, Homo sapiens
  misc_RNA (1)...(19): siRNA sense strand
cagaugugauuguaaauuc

SEQ ID NO: 2111333 - RNA, 19 nt, Homo sapiens
  misc_RNA (1)...(19): siRNA sense strand
gauaauggaagacauaauc

SEQ ID NO: 2111334 - RNA, 19 nt, Homo sapiens
  misc_RNA (1)...(19): siRNA sense strand
gcaacucagucucugucua

SEQ ID NO: 2111335 - RNA, 19 nt, Homo sapiens
  misc_RNA (1)...(19): siRNA sense strand
gcucagugccuuaaauuau

SEQ ID NO: 2111336 - RNA, 19 nt, Homo sapiens
  misc_RNA (1)...(19): siRNA sense strand
gaaaucagaggauguccaa

SEQ ID NO: 2111337 - RNA, 19 nt, Homo sapiens
  misc_RNA (1)...(19): siRNA sense strand
ggagauaucacgaaagaag

SEQ ID NO: 2111338 - RNA, 19 nt, Homo sapiens
  misc_RNA (1)...(19): siRNA sense strand
gaaaggaucagcccagucu

SEQ ID NO: 2111339 - RNA, 19 nt, Homo sapiens
  misc_RNA (1)...(19): siRNA sense strand
ugugaaagaugacaggauu

SEQ ID NO: 2111340 - RNA, 19 nt, Homo sapiens
  misc_RNA (1)...(19): siRNA sense strand
acacaaagggccacaguuu

SEQ ID NO: 2111341 - RNA, 19 nt, Homo sapiens
  misc_RNA (1)...(19): siRNA sense strand
gaagacauaaucagagaau

SEQ ID NO: 2111342 - RNA, 19 nt, Homo sapiens
  misc_RNA (1)...(19): siRNA sense strand
aguaaagccuuccuuaguu

SEQ ID NO: 2111343 - RNA, 19 nt, Homo sapiens
  misc_RNA (1)...(19): siRNA sense strand
guacaacuguucucuuaac

SEQ ID NO: 2111344 - RNA, 19 nt, Homo sapiens
  misc_RNA (1)...(19): siRNA sense strand
caggaaagcugcccuacca

SEQ ID NO: 2111345 - RNA, 19 nt, Homo sapiens
  misc_RNA (1)...(19): siRNA sense strand
agaaucagcugaaaacuuu

SEQ ID NO: 2111346 - RNA, 19 nt, Homo sapiens
  misc_RNA (1)...(19): siRNA sense strand
ggagaagccucugaucaag

SEQ ID NO: 2111347 - RNA, 19 nt, Homo sapiens
  misc_RNA (1)...(19): siRNA sense strand
gaaaugguagcacaucuuc

SEQ ID NO: 2111348 - RNA, 19 nt, Homo sapiens
  misc_RNA (1)...(19): siRNA sense strand
aagcaguucuuccaggaua

SEQ ID NO: 2111349 - RNA, 19 nt, Homo sapiens
  misc_RNA (1)...(19): siRNA sense strand
uagagaagauugagaggau

SEQ ID NO: 2111350 - RNA, 19 nt, Homo sapiens
  misc_RNA (1)...(19): siRNA sense strand
gauaugaagcagcagaauu

SEQ ID NO: 2111351 - RNA, 19 nt, Homo sapiens
  misc_RNA (1)...(19): siRNA sense strand
ggcaguauaaugacaauaa

SEQ ID NO: 2111352 - RNA, 19 nt, Homo sapiens
  misc_RNA (1)...(19): siRNA sense strand
gaaauugaggcgaugauca

SEQ ID NO: 2111353 - RNA, 19 nt, Homo sapiens
  misc_RNA (1)...(19): siRNA sense strand
gauggacacugcuugaaag

SEQ ID NO: 2111354 - RNA, 19 nt, Homo sapiens
  misc_RNA (1)...(19): siRNA sense strand
gagauaaacgaugaaauga

SEQ ID NO: 2111355 - RNA, 19 nt, Homo sapiens
  misc_RNA (1)...(19): siRNA sense strand
ggccgacugugaccagaua

SEQ ID NO: 2111356 - RNA, 19 nt, Homo sapiens
  misc_RNA (1)...(19): siRNA sense strand
gcaucaggucuaaauauaa

SEQ ID NO: 2111357 - RNA, 19 nt, Homo sapiens
  misc_RNA (1)...(19): siRNA sense strand
guacuuacuggaaucuaua

SEQ ID NO: 2111358 - RNA, 19 nt, Homo sapiens
  misc_RNA (1)...(19): siRNA sense strand
gaugcaggcuagagaugaa

SEQ ID NO: 2111359 - RNA, 19 nt, Homo sapiens
  misc_RNA (1)...(19): siRNA sense strand
acauuucccuggaccauaa

SEQ ID NO: 2111360 - RNA, 19 nt, Homo sapiens
  misc_RNA (1)...(19): siRNA sense strand
aaacagaaucagcaacuuu

SEQ ID NO: 2111361 - RNA, 19 nt, Homo sapiens
  misc_RNA (1)...(19): siRNA sense strand
ugaagacuuuguccagaaa

SEQ ID NO: 2111362 - RNA, 19 nt, Homo sapiens
  misc_RNA (1)...(19): siRNA sense strand
gaaaggagaagccucugau

SEQ ID NO: 2111363 - RNA, 19 nt, Homo sapiens
  misc_RNA (1)...(19): siRNA sense strand
agaaugaaguaaugaagga

SEQ ID NO: 2111364 - RNA, 19 nt, Homo sapiens
  misc_RNA (1)...(19): siRNA sense strand
ccaaagauaaagaagguaa

SEQ ID NO: 2111365 - RNA, 19 nt, Homo sapiens
  misc_RNA (1)...(19): siRNA sense strand
ggccaaagauaaagaaggu

SEQ ID NO: 2111366 - RNA, 19 nt, Homo sapiens
  misc_RNA (1)...(19): siRNA sense strand
cucagugccuuaaauuaua

SEQ ID NO: 2111367 - RNA, 19 nt, Homo sapiens
  misc_RNA (1)...(19): siRNA sense strand
gguagcacaucuucacuca

SEQ ID NO: 2111368 - RNA, 19 nt, Homo sapiens
  misc_RNA (1)...(19): siRNA sense strand
cagugaacuugaacacaua

SEQ ID NO: 2111369 - RNA, 19 nt, Homo sapiens
  misc_RNA (1)...(19): siRNA sense strand
gauagagauuuguuacgau

SEQ ID NO: 2111370 - RNA, 19 nt, Homo sapiens
  misc_RNA (1)...(19): siRNA sense strand
ccacaaaacucgacuucaa

SEQ ID NO: 2111371 - RNA, 19 nt, Homo sapiens
  misc_RNA (1)...(19): siRNA sense strand
cacaaagggccacaguuua

SEQ ID NO: 2111372 - RNA, 19 nt, Homo sapiens
  misc_RNA (1)...(19): siRNA sense strand
gaucaagagaguucgauug

SEQ ID NO: 2111373 - RNA, 19 nt, Homo sapiens
  misc_RNA (1)...(19): siRNA sense strand
gaccauaagagaccuuuga

SEQ ID NO: 2111374 - RNA, 19 nt, Homo sapiens
  misc_RNA (1)...(19): siRNA sense strand
uagcacaucuucacucaag

SEQ ID NO: 2111375 - RNA, 19 nt, Homo sapiens
  misc_RNA (1)...(19): siRNA sense strand
ggauggacacugcuugaaa

SEQ ID NO: 2111376 - RNA, 19 nt, Homo sapiens
  misc_RNA (1)...(19): siRNA sense strand
gaagauuggcuccaucauc

SEQ ID NO: 2111377 - RNA, 19 nt, Homo sapiens
  misc_RNA (1)...(19): siRNA sense strand
gcagaugugauuguaaauu

SEQ ID NO: 2111378 - RNA, 19 nt, Homo sapiens
  misc_RNA (1)...(19): siRNA sense strand
gaggacagcuccaacauga

SEQ ID NO: 2111379 - RNA, 19 nt, Homo sapiens
  misc_RNA (1)...(19): siRNA sense strand
ucaagacccugaacaagaa

SEQ ID NO: 2111380 - RNA, 19 nt, Homo sapiens
  misc_RNA (1)...(19): siRNA sense strand
ggaacuaccucuucagacu

SEQ ID NO: 2111381 - RNA, 19 nt, Homo sapiens
  misc_RNA (1)...(19): siRNA sense strand
gccaaugucucucuucuuc

SEQ ID NO: 2111382 - RNA, 19 nt, Homo sapiens
  misc_RNA (1)...(19): siRNA sense strand
gaccucaucuauggaguuu

SEQ ID NO: 2111383 - RNA, 19 nt, Homo sapiens
  misc_RNA (1)...(19): siRNA sense strand
gggcaucuccugcuucuug

SEQ ID NO: 2111384 - RNA, 19 nt, Homo sapiens
  misc_RNA (1)...(19): siRNA sense strand
gcaagagaacgugcacuaa

SEQ ID NO: 2111385 - RNA, 19 nt, Homo sapiens
  misc_RNA (1)...(19): siRNA sense strand
guacacgacuacuuacuac

SEQ ID NO: 2111386 - RNA, 19 nt, Homo sapiens
  misc_RNA (1)...(19): siRNA sense strand
gagccaacuucuacccauu

SEQ ID NO: 2111387 - RNA, 19 nt, Homo sapiens
  misc_RNA (1)...(19): siRNA sense strand
auauugggcuguuugcaua

SEQ ID NO: 2111388 - RNA, 19 nt, Homo sapiens
  misc_RNA (1)...(19): siRNA sense strand
gcaaccaugugagcacuug

SEQ ID NO: 2111389 - RNA, 19 nt, Homo sapiens
  misc_RNA (1)...(19): siRNA sense strand
gagcaggaccucaucuaug

SEQ ID NO: 2111390 - RNA, 19 nt, Homo sapiens
  misc_RNA (1)...(19): siRNA sense strand
gcaguggugcugaaauuug

SEQ ID NO: 2111391 - RNA, 19 nt, Homo sapiens
  misc_RNA (1)...(19): siRNA sense strand
cgagcucgauccugugauu

SEQ ID NO: 2111392 - RNA, 19 nt, Homo sapiens
  misc_RNA (1)...(19): siRNA sense strand
gcuaagggcacucacauca

SEQ ID NO: 2111393 - RNA, 19 nt, Homo sapiens
  misc_RNA (1)...(19): siRNA sense strand
cagcgccucuuccugauga

SEQ ID NO: 2111394 - RNA, 19 nt, Homo sapiens
  misc_RNA (1)...(19): siRNA sense strand
ugacagagccaacuucuac

SEQ ID NO: 2111395 - RNA, 19 nt, Homo sapiens
  misc_RNA (1)...(19): siRNA sense strand
gcacucacaucagcugcuu

SEQ ID NO: 2111396 - RNA, 19 nt, Homo sapiens
  misc_RNA (1)...(19): siRNA sense strand
cugcaguggugcugaaauu

SEQ ID NO: 2111397 - RNA, 19 nt, Homo sapiens
  misc_RNA (1)...(19): siRNA sense strand
ccagugagcccagcaguga

SEQ ID NO: 2111398 - RNA, 19 nt, Homo sapiens
  misc_RNA (1)...(19): siRNA sense strand
gccaggaacuaccucuuca

SEQ ID NO: 2111399 - RNA, 19 nt, Homo sapiens
  misc_RNA (1)...(19): siRNA sense strand
acacaggccugcccagaag

SEQ ID NO: 2111400 - RNA, 19 nt, Homo sapiens
  misc_RNA (1)...(19): siRNA sense strand
gccaacugcuccaggaaug

SEQ ID NO: 2111401 - RNA, 19 nt, Homo sapiens
  misc_RNA (1)...(19): siRNA sense strand
gcucuaccauguacucuac

SEQ ID NO: 2111402 - RNA, 19 nt, Homo sapiens
  misc_RNA (1)...(19): siRNA sense strand
cugaauggaauguaugaua

SEQ ID NO: 2111403 - RNA, 19 nt, Homo sapiens
  misc_RNA (1)...(19): siRNA sense strand
guacacacccauggaauuc

SEQ ID NO: 2111404 - RNA, 19 nt, Homo sapiens
  misc_RNA (1)...(19): siRNA sense strand
gguucaaucucauccacuu

SEQ ID NO: 2111405 - RNA, 19 nt, Homo sapiens
  misc_RNA (1)...(19): siRNA sense strand
gcuucgcacugcccaauau

SEQ ID NO: 2111406 - RNA, 19 nt, Homo sapiens
  misc_RNA (1)...(19): siRNA sense strand
gccggaagguguucaugug

SEQ ID NO: 2111407 - RNA, 19 nt, Homo sapiens
  misc_RNA (1)...(19): siRNA sense strand
gaggacacauggaccacau

SEQ ID NO: 2111408 - RNA, 19 nt, Homo sapiens
  misc_RNA (1)...(19): siRNA sense strand
cccaggaugucuccaguga

SEQ ID NO: 2111409 - RNA, 19 nt, Homo sapiens
  misc_RNA (1)...(19): siRNA sense strand
ccaaccauuugcacuacaa

SEQ ID NO: 2111410 - RNA, 19 nt, Homo sapiens
  misc_RNA (1)...(19): siRNA sense strand
ccacgggcaucuccugcuu

SEQ ID NO: 2111411 - RNA, 19 nt, Homo sapiens
  misc_RNA (1)...(19): siRNA sense strand
aagacacgcucuaccaugu

SEQ ID NO: 2111412 - RNA, 19 nt, Homo sapiens
  misc_RNA (1)...(19): siRNA sense strand
caaccaacguaaacagcau

SEQ ID NO: 2111413 - RNA, 19 nt, Homo sapiens
  misc_RNA (1)...(19): siRNA sense strand
gaggaggagugucagaacu

SEQ ID NO: 2111414 - RNA, 19 nt, Homo sapiens
  misc_RNA (1)...(19): siRNA sense strand
cuugaucccugaugacaga

SEQ ID NO: 2111415 - RNA, 19 nt, Homo sapiens
  misc_RNA (1)...(19): siRNA sense strand
ggacacauggaccacauuc

SEQ ID NO: 2111416 - RNA, 19 nt, Homo sapiens
  misc_RNA (1)...(19): siRNA sense strand
gauauugggcuguuugcau

SEQ ID NO: 2111417 - RNA, 19 nt, Homo sapiens
  misc_RNA (1)...(19): siRNA sense strand
acacacccauggaauucaa

SEQ ID NO: 2111418 - RNA, 19 nt, Homo sapiens
  misc_RNA (1)...(19): siRNA sense strand
caaugucucucuucuucag

SEQ ID NO: 2111419 - RNA, 19 nt, Homo sapiens
  misc_RNA (1)...(19): siRNA sense strand
cguggcagccuaugauauu

SEQ ID NO: 2111420 - RNA, 19 nt, Homo sapiens
  misc_RNA (1)...(19): siRNA sense strand
ggaggagugucagaacuac

SEQ ID NO: 2111421 - RNA, 19 nt, Homo sapiens
  misc_RNA (1)...(19): siRNA sense strand
cagagugggccuccaguga

SEQ ID NO: 2111422 - RNA, 19 nt, Homo sapiens
  misc_RNA (1)...(19): siRNA sense strand
gacucagccuugccaaugu

SEQ ID NO: 2111423 - RNA, 19 nt, Homo sapiens
  misc_RNA (1)...(19): siRNA sense strand
caagagaacgugcacuaac

SEQ ID NO: 2111424 - RNA, 19 nt, Homo sapiens
  misc_RNA (1)...(19): siRNA sense strand
gagguccccuucuacuaua

SEQ ID NO: 2111425 - RNA, 19 nt, Homo sapiens
  misc_RNA (1)...(19): siRNA sense strand
aaccucagccggacuauug

SEQ ID NO: 2111426 - RNA, 19 nt, Homo sapiens
  misc_RNA (1)...(19): siRNA sense strand
gaugcauccucgugcugaa

SEQ ID NO: 2111427 - RNA, 19 nt, Homo sapiens
  misc_RNA (1)...(19): siRNA sense strand
auaacuugaucccugauga

SEQ ID NO: 2111428 - RNA, 19 nt, Homo sapiens
  misc_RNA (1)...(19): siRNA sense strand
cccacuaccuucccugaug

SEQ ID NO: 2111429 - RNA, 19 nt, Homo sapiens
  misc_RNA (1)...(19): siRNA sense strand
ggaccucaucuauggaguu

SEQ ID NO: 2111430 - RNA, 19 nt, Homo sapiens
  misc_RNA (1)...(19): siRNA sense strand
gcaaagcugcaggcauaga

SEQ ID NO: 2111431 - RNA, 19 nt, Homo sapiens
  misc_RNA (1)...(19): siRNA sense strand
gaaccucagccggacuauu

SEQ ID NO: 2111432 - RNA, 19 nt, Homo sapiens
  misc_RNA (1)...(19): siRNA sense strand
gcacacggaggaggcacua

SEQ ID NO: 2111433 - RNA, 19 nt, Homo sapiens
  misc_RNA (1)...(19): siRNA sense strand
cauagacuccuugcucuug

SEQ ID NO: 2111434 - RNA, 19 nt, Homo sapiens
  misc_RNA (1)...(19): siRNA sense strand
gccggacuauugagaagau

SEQ ID NO: 2111435 - RNA, 19 nt, Homo sapiens
  misc_RNA (1)...(19): siRNA sense strand
agacugaggaggaguguca

SEQ ID NO: 2111436 - RNA, 19 nt, Homo sapiens
  misc_RNA (1)...(19): siRNA sense strand
aaaguacacacccauggaa

SEQ ID NO: 2111437 - RNA, 19 nt, Homo sapiens
  misc_RNA (1)...(19): siRNA sense strand
gcucuacccaugcaucugu

SEQ ID NO: 2111438 - RNA, 19 nt, Homo sapiens
  misc_RNA (1)...(19): siRNA sense strand
agcaggaccucaucuaugg

SEQ ID NO: 2111439 - RNA, 19 nt, Homo sapiens
  misc_RNA (1)...(19): siRNA sense strand
ccuaugauauugggcuguu

SEQ ID NO: 2111440 - RNA, 19 nt, Homo sapiens
  misc_RNA (1)...(19): siRNA sense strand
gcacugcccaauauaacuc

SEQ ID NO: 2111441 - RNA, 19 nt, Homo sapiens
  misc_RNA (1)...(19): siRNA sense strand
gcauagacuccuugcucuu

SEQ ID NO: 2111442 - RNA, 19 nt, Homo sapiens
  misc_RNA (1)...(19): siRNA sense strand
gacacgcucuaccauguac

SEQ ID NO: 2111443 - RNA, 19 nt, Homo sapiens
  misc_RNA (1)...(19): siRNA sense strand
cuaaagacacgcucuacca

SEQ ID NO: 2111444 - RNA, 19 nt, Homo sapiens
  misc_RNA (1)...(19): siRNA sense strand
gggaaccucagccggacua

SEQ ID NO: 2111445 - RNA, 19 nt, Homo sapiens
  misc_RNA (1)...(19): siRNA sense strand
ucucccagcuggcuuugga

SEQ ID NO: 2111446 - RNA, 19 nt, Homo sapiens
  misc_RNA (1)...(19): siRNA sense strand
caggaacuaccucuucaga

SEQ ID NO: 2111447 - RNA, 19 nt, Homo sapiens
  misc_RNA (1)...(19): siRNA sense strand
caacggugcuuccccaaca

SEQ ID NO: 2111448 - RNA, 19 nt, Homo sapiens
  misc_RNA (1)...(19): siRNA sense strand
cgcaagagaacgugcacua

SEQ ID NO: 2111449 - RNA, 19 nt, Homo sapiens
  misc_RNA (1)...(19): siRNA sense strand
gcuguuugcauacuucuuc

SEQ ID NO: 2111450 - RNA, 19 nt, Homo sapiens
  misc_RNA (1)...(19): siRNA sense strand
agacucagccuugccaaug

SEQ ID NO: 2111451 - RNA, 19 nt, Homo sapiens
  misc_RNA (1)...(19): siRNA sense strand
uguacacgacuacuuacua

SEQ ID NO: 2111452 - RNA, 19 nt, Homo sapiens
  misc_RNA (1)...(19): siRNA sense strand
uaaagacacgcucuaccau

SEQ ID NO: 2111453 - RNA, 19 nt, Homo sapiens
  misc_RNA (1)...(19): siRNA sense strand
caacuccacagcugucauc

SEQ ID NO: 2111454 - RNA, 19 nt, Homo sapiens
  misc_RNA (1)...(19): siRNA sense strand
aaagcaaagggaagacuga

SEQ ID NO: 2111455 - RNA, 19 nt, Homo sapiens
  misc_RNA (1)...(19): siRNA sense strand
cgugcugaauggaauguau

SEQ ID NO: 2111456 - RNA, 19 nt, Homo sapiens
  misc_RNA (1)...(19): siRNA sense strand
caacagcuaagggcacuca

SEQ ID NO: 2111457 - RNA, 19 nt, Homo sapiens
  misc_RNA (1)...(19): siRNA sense strand
gugcaggguucaaucucau

SEQ ID NO: 2111458 - RNA, 19 nt, Homo sapiens
  misc_RNA (1)...(19): siRNA sense strand
acacauggaccacauucau

SEQ ID NO: 2111459 - RNA, 19 nt, Homo sapiens
  misc_RNA (1)...(19): siRNA sense strand
cagccggacuauugagaag

SEQ ID NO: 2111460 - RNA, 19 nt, Homo sapiens
  misc_RNA (1)...(19): siRNA sense strand
gaugacagagccaacuucu

SEQ ID NO: 2111461 - RNA, 19 nt, Homo sapiens
  misc_RNA (1)...(19): siRNA sense strand
gugcugaaauuugcaaagc

SEQ ID NO: 2111462 - RNA, 19 nt, Homo sapiens
  misc_RNA (1)...(19): siRNA sense strand
cagcgagauucccgucauc

SEQ ID NO: 2111463 - RNA, 19 nt, Homo sapiens
  misc_RNA (1)...(19): siRNA sense strand
guggcagccuaugauauug

SEQ ID NO: 2111464 - RNA, 19 nt, Homo sapiens
  misc_RNA (1)...(19): siRNA sense strand
guguggaaccaaugccuuu

SEQ ID NO: 2111465 - RNA, 19 nt, Homo sapiens
  misc_RNA (1)...(19): siRNA sense strand
cgaggacagcuccaacaug

SEQ ID NO: 2111466 - RNA, 19 nt, Homo sapiens
  misc_RNA (1)...(19): siRNA sense strand
agacacgcucuaccaugua

SEQ ID NO: 2111467 - RNA, 19 nt, Homo sapiens
  misc_RNA (1)...(19): siRNA sense strand
uauaacuccaaguggcuua

SEQ ID NO: 2111468 - RNA, 19 nt, Homo sapiens
  misc_RNA (1)...(19): siRNA sense strand
gcagcagaccaauguguac

SEQ ID NO: 2111469 - RNA, 19 nt, Homo sapiens
  misc_RNA (1)...(19): siRNA sense strand
ccaaccccauccccaauuu

SEQ ID NO: 2111470 - RNA, 19 nt, Homo sapiens
  misc_RNA (1)...(19): siRNA sense strand
cccaauauaacuccaagug

SEQ ID NO: 2111471 - RNA, 19 nt, Homo sapiens
  misc_RNA (1)...(19): siRNA sense strand
ugugcaggguucaaucuca

SEQ ID NO: 2111472 - RNA, 19 nt, Homo sapiens
  misc_RNA (1)...(19): siRNA sense strand
acacggaggaggcacuaug

SEQ ID NO: 2111473 - RNA, 19 nt, Homo sapiens
  misc_RNA (1)...(19): siRNA sense strand
caagugcagcagcaacugu

SEQ ID NO: 2111474 - RNA, 19 nt, Homo sapiens
  misc_RNA (1)...(19): siRNA sense strand
aaacuucguggcagccuau

SEQ ID NO: 2111475 - RNA, 19 nt, Homo sapiens
  misc_RNA (1)...(19): siRNA sense strand
uuaaugagccaaacuucgu

SEQ ID NO: 2111476 - RNA, 19 nt, Homo sapiens
  misc_RNA (1)...(19): siRNA sense strand
agaccggucccaacgagaa

SEQ ID NO: 2111477 - RNA, 19 nt, Homo sapiens
  misc_RNA (1)...(19): siRNA sense strand
accaauguguacacgacua

SEQ ID NO: 2111478 - RNA, 19 nt, Homo sapiens
  misc_RNA (1)...(19): siRNA sense strand
gagaaucacuguuuacgua

SEQ ID NO: 2111479 - RNA, 19 nt, Homo sapiens
  misc_RNA (1)...(19): siRNA sense strand
gaacaugcgugugggaauu

SEQ ID NO: 2111480 - RNA, 19 nt, Homo sapiens
  misc_RNA (1)...(19): siRNA sense strand
gcagguagacgaccgauuu

SEQ ID NO: 2111481 - RNA, 19 nt, Homo sapiens
  misc_RNA (1)...(19): siRNA sense strand
caaccaagguggcauugaa

SEQ ID NO: 2111482 - RNA, 19 nt, Homo sapiens
  misc_RNA (1)...(19): siRNA sense strand
gcaaugaugagcucuacua

SEQ ID NO: 2111483 - RNA, 19 nt, Homo sapiens
  misc_RNA (1)...(19): siRNA sense strand
gcaaccagguguccaagga

SEQ ID NO: 2111484 - RNA, 19 nt, Homo sapiens
  misc_RNA (1)...(19): siRNA sense strand
gcaaguuccuccugaccuu

SEQ ID NO: 2111485 - RNA, 19 nt, Homo sapiens
  misc_RNA (1)...(19): siRNA sense strand
gaaucacuguuuacguauu

SEQ ID NO: 2111486 - RNA, 19 nt, Homo sapiens
  misc_RNA (1)...(19): siRNA sense strand
cagcuugucuccaauguuc

SEQ ID NO: 2111487 - RNA, 19 nt, Homo sapiens
  misc_RNA (1)...(19): siRNA sense strand
gaugagcucuacuaucagu

SEQ ID NO: 2111488 - RNA, 19 nt, Homo sapiens
  misc_RNA (1)...(19): siRNA sense strand
ccauagacuucuucaacaa

SEQ ID NO: 2111489 - RNA, 19 nt, Homo sapiens
  misc_RNA (1)...(19): siRNA sense strand
ggaccguguucuucaucua

SEQ ID NO: 2111490 - RNA, 19 nt, Homo sapiens
  misc_RNA (1)...(19): siRNA sense strand
ggaugaaguggaugaguuu

SEQ ID NO: 2111491 - RNA, 19 nt, Homo sapiens
  misc_RNA (1)...(19): siRNA sense strand
gcacaggaacuggucauga

SEQ ID NO: 2111492 - RNA, 19 nt, Homo sapiens
  misc_RNA (1)...(19): siRNA sense strand
gaagaucgggcucaacauc

SEQ ID NO: 2111493 - RNA, 19 nt, Homo sapiens
  misc_RNA (1)...(19): siRNA sense strand
ccgcagagaaucacuguuu

SEQ ID NO: 2111494 - RNA, 19 nt, Homo sapiens
  misc_RNA (1)...(19): siRNA sense strand
gaaguacuccaagcaggua

SEQ ID NO: 2111495 - RNA, 19 nt, Homo sapiens
  misc_RNA (1)...(19): siRNA sense strand
gagccugacuuagagaaga

SEQ ID NO: 2111496 - RNA, 19 nt, Homo sapiens
  misc_RNA (1)...(19): siRNA sense strand
gcgagaugaugaccuacuu

SEQ ID NO: 2111497 - RNA, 19 nt, Homo sapiens
  misc_RNA (1)...(19): siRNA sense strand
gccauagacuucuucaaca

SEQ ID NO: 2111498 - RNA, 19 nt, Homo sapiens
  misc_RNA (1)...(19): siRNA sense strand
gaucuacuccugcguaaag

SEQ ID NO: 2111499 - RNA, 19 nt, Homo sapiens
  misc_RNA (1)...(19): siRNA sense strand
gcaggaggauaugauguuc

SEQ ID NO: 2111500 - RNA, 19 nt, Homo sapiens
  misc_RNA (1)...(19): siRNA sense strand
gcaggacgcauccacauca

SEQ ID NO: 2111501 - RNA, 19 nt, Homo sapiens
  misc_RNA (1)...(19): siRNA sense strand
cgcagagaaucacuguuua

SEQ ID NO: 2111502 - RNA, 19 nt, Homo sapiens
  misc_RNA (1)...(19): siRNA sense strand
caacgugagcauccuguuu

SEQ ID NO: 2111503 - RNA, 19 nt, Homo sapiens
  misc_RNA (1)...(19): siRNA sense strand
acacucaacuaccugaaug

SEQ ID NO: 2111504 - RNA, 19 nt, Homo sapiens
  misc_RNA (1)...(19): siRNA sense strand
gcauccaggucaccacaga

SEQ ID NO: 2111505 - RNA, 19 nt, Homo sapiens
  misc_RNA (1)...(19): siRNA sense strand
ucaaugagcacuccuucaa

SEQ ID NO: 2111506 - RNA, 19 nt, Homo sapiens
  misc_RNA (1)...(19): siRNA sense strand
ucaaggcacuggccgacuu

SEQ ID NO: 2111507 - RNA, 19 nt, Homo sapiens
  misc_RNA (1)...(19): siRNA sense strand
gugcgaacccugaggauga

SEQ ID NO: 2111508 - RNA, 19 nt, Homo sapiens
  misc_RNA (1)...(19): siRNA sense strand
ucaacaacuuccagaugaa

SEQ ID NO: 2111509 - RNA, 19 nt, Homo sapiens
  misc_RNA (1)...(19): siRNA sense strand
gcacaggagcacaacauca

SEQ ID NO: 2111510 - RNA, 19 nt, Homo sapiens
  misc_RNA (1)...(19): siRNA sense strand
gaaguucccgucggacaaa

SEQ ID NO: 2111511 - RNA, 19 nt, Homo sapiens
  misc_RNA (1)...(19): siRNA sense strand
caucaucaucucagucuuu

SEQ ID NO: 2111512 - RNA, 19 nt, Homo sapiens
  misc_RNA (1)...(19): siRNA sense strand
ggucaccgccaacgccaua

SEQ ID NO: 2111513 - RNA, 19 nt, Homo sapiens
  misc_RNA (1)...(19): siRNA sense strand
ugauggaccagaugaagua

SEQ ID NO: 2111514 - RNA, 19 nt, Homo sapiens
  misc_RNA (1)...(19): siRNA sense strand
ggaaacugcaggccacaga

SEQ ID NO: 2111515 - RNA, 19 nt, Homo sapiens
  misc_RNA (1)...(19): siRNA sense strand
gcgcaacgccuaccucaag

SEQ ID NO: 2111516 - RNA, 19 nt, Homo sapiens
  misc_RNA (1)...(19): siRNA sense strand
uucaacaacuuccagauga

SEQ ID NO: 2111517 - RNA, 19 nt, Homo sapiens
  misc_RNA (1)...(19): siRNA sense strand
gcuucuaccugaccuguuc

SEQ ID NO: 2111518 - RNA, 19 nt, Homo sapiens
  misc_RNA (1)...(19): siRNA sense strand
caagaugaaccgccagaga

SEQ ID NO: 2111519 - RNA, 19 nt, Homo sapiens
  misc_RNA (1)...(19): siRNA sense strand
agauuuacauccagaaaca

SEQ ID NO: 2111520 - RNA, 19 nt, Homo sapiens
  misc_RNA (1)...(19): siRNA sense strand
gccaugaucgccaagauga

SEQ ID NO: 2111521 - RNA, 19 nt, Homo sapiens
  misc_RNA (1)...(19): siRNA sense strand
cgaccgauuuggugccuau

SEQ ID NO: 2111522 - RNA, 19 nt, Homo sapiens
  misc_RNA (1)...(19): siRNA sense strand
gggcaaaggcgagaugaug

SEQ ID NO: 2111523 - RNA, 19 nt, Homo sapiens
  misc_RNA (1)...(19): siRNA sense strand
caucauggcugugcuuugc

SEQ ID NO: 2111524 - RNA, 19 nt, Homo sapiens
  misc_RNA (1)...(19): siRNA sense strand
gugaucuacuccugcguaa

SEQ ID NO: 2111525 - RNA, 19 nt, Homo sapiens
  misc_RNA (1)...(19): siRNA sense strand
ggcaaaggcgagaugauga

SEQ ID NO: 2111526 - RNA, 19 nt, Homo sapiens
  misc_RNA (1)...(19): siRNA sense strand
gagcacuccuucaacaacu

SEQ ID NO: 2111527 - RNA, 19 nt, Homo sapiens
  misc_RNA (1)...(19): siRNA sense strand
aaugagcacuccuucaaca

SEQ ID NO: 2111528 - RNA, 19 nt, Homo sapiens
  misc_RNA (1)...(19): siRNA sense strand
aggaugaaguggaugaguu

SEQ ID NO: 2111529 - RNA, 19 nt, Homo sapiens
  misc_RNA (1)...(19): siRNA sense strand
aaggcgagaugaugaccua

SEQ ID NO: 2111530 - RNA, 19 nt, Homo sapiens
  misc_RNA (1)...(19): siRNA sense strand
cacgaaagccucaguacga

SEQ ID NO: 2111531 - RNA, 19 nt, Homo sapiens
  misc_RNA (1)...(19): siRNA sense strand
ccaucgagcucaucuacgu

SEQ ID NO: 2111532 - RNA, 19 nt, Homo sapiens
  misc_RNA (1)...(19): siRNA sense strand
caagcuggccgcagagaau

SEQ ID NO: 2111533 - RNA, 19 nt, Homo sapiens
  misc_RNA (1)...(19): siRNA sense strand
ugaccuacuuccucaaugg

SEQ ID NO: 2111534 - RNA, 19 nt, Homo sapiens
  misc_RNA (1)...(19): siRNA sense strand
gggcaagacccacaucaag

SEQ ID NO: 2111535 - RNA, 19 nt, Homo sapiens
  misc_RNA (1)...(19): siRNA sense strand
ugagaucaucgcugacuuu

SEQ ID NO: 2111536 - RNA, 19 nt, Homo sapiens
  misc_RNA (1)...(19): siRNA sense strand
ccaaggcuacacucaacua

SEQ ID NO: 2111537 - RNA, 19 nt, Homo sapiens
  misc_RNA (1)...(19): siRNA sense strand
aagaugaaccgccagagaa

SEQ ID NO: 2111538 - RNA, 19 nt, Homo sapiens
  misc_RNA (1)...(19): siRNA sense strand
uggagaagaucaagaccau

SEQ ID NO: 2111539 - RNA, 19 nt, Homo sapiens
  misc_RNA (1)...(19): siRNA sense strand
gcagagaaucacuguuuac

SEQ ID NO: 2111540 - RNA, 19 nt, Homo sapiens
  misc_RNA (1)...(19): siRNA sense strand
gaaagccucaguacgacau

SEQ ID NO: 2111541 - RNA, 19 nt, Homo sapiens
  misc_RNA (1)...(19): siRNA sense strand
ggagucggccgucaacuac

SEQ ID NO: 2111542 - RNA, 19 nt, Homo sapiens
  misc_RNA (1)...(19): siRNA sense strand
caagaacgcccaggagagu

SEQ ID NO: 2111543 - RNA, 19 nt, Homo sapiens
  misc_RNA (1)...(19): siRNA sense strand
caccaaggcuacacucaac

SEQ ID NO: 2111544 - RNA, 19 nt, Homo sapiens
  misc_RNA (1)...(19): siRNA sense strand
uugauaggcuucggucuga

SEQ ID NO: 2111545 - RNA, 19 nt, Homo sapiens
  misc_RNA (1)...(19): siRNA sense strand
ugaaguggaugaguuucug

SEQ ID NO: 2111546 - RNA, 19 nt, Homo sapiens
  misc_RNA (1)...(19): siRNA sense strand
gccugcggcuacucaauga

SEQ ID NO: 2111547 - RNA, 19 nt, Homo sapiens
  misc_RNA (1)...(19): siRNA sense strand
caucaucucagucuuugug

SEQ ID NO: 2111548 - RNA, 19 nt, Homo sapiens
  misc_RNA (1)...(19): siRNA sense strand
gcccugagcaugcaaccaa

SEQ ID NO: 2111549 - RNA, 19 nt, Homo sapiens
  misc_RNA (1)...(19): siRNA sense strand
ggaagaucgugcgguccaa

SEQ ID NO: 2111550 - RNA, 19 nt, Homo sapiens
  misc_RNA (1)...(19): siRNA sense strand
gauauuccgcuccaagaag

SEQ ID NO: 2111551 - RNA, 19 nt, Homo sapiens
  misc_RNA (1)...(19): siRNA sense strand
ucuccgaguucuacguuga

SEQ ID NO: 2111552 - RNA, 19 nt, Homo sapiens
  misc_RNA (1)...(19): siRNA sense strand
cagacccucuccaggaaga

SEQ ID NO: 2111553 - RNA, 19 nt, Homo sapiens
  misc_RNA (1)...(19): siRNA sense strand
ugaccuuggugguguuugu

SEQ ID NO: 2111554 - RNA, 19 nt, Homo sapiens
  misc_RNA (1)...(19): siRNA sense strand
gcgcaaugaugagcucuac

SEQ ID NO: 2111555 - RNA, 19 nt, Homo sapiens
  misc_RNA (1)...(19): siRNA sense strand
gaugaccuacuuccucaau

SEQ ID NO: 2111556 - RNA, 19 nt, Homo sapiens
  misc_RNA (1)...(19): siRNA sense strand
gagaucaucgcugacuuug

SEQ ID NO: 2111557 - RNA, 19 nt, Homo sapiens
  misc_RNA (1)...(19): siRNA sense strand
cacaggaacuggucaugac

SEQ ID NO: 2111558 - RNA, 19 nt, Homo sapiens
  misc_RNA (1)...(19): siRNA sense strand
ccauauucaugcucagcuu

SEQ ID NO: 2111559 - RNA, 19 nt, Homo sapiens
  misc_RNA (1)...(19): siRNA sense strand
uagagaagaaguacuccaa

SEQ ID NO: 2111560 - RNA, 19 nt, Homo sapiens
  misc_RNA (1)...(19): siRNA sense strand
gcacccagaagcggaaaga

SEQ ID NO: 2111561 - RNA, 19 nt, Homo sapiens
  misc_RNA (1)...(19): siRNA sense strand
cggagucggccgucaacua

SEQ ID NO: 2111562 - RNA, 19 nt, Homo sapiens
  misc_RNA (1)...(19): siRNA sense strand
gaugaacagcacccugguu

SEQ ID NO: 2111563 - RNA, 19 nt, Homo sapiens
  misc_RNA (1)...(19): siRNA sense strand
cccagaagcggaaagaaga

SEQ ID NO: 2111564 - RNA, 19 nt, Homo sapiens
  misc_RNA (1)...(19): siRNA sense strand
caagcaggaggauaugaug

SEQ ID NO: 2111565 - RNA, 19 nt, Homo sapiens
  misc_RNA (1)...(19): siRNA sense strand
gggcacgaaagccucagua

SEQ ID NO: 2111566 - RNA, 19 nt, Homo sapiens
  misc_RNA (1)...(19): siRNA sense strand
guaccagcgcuacuucuuc

SEQ ID NO: 2111567 - RNA, 19 nt, Homo sapiens
  misc_RNA (1)...(19): siRNA sense strand
ccaacgccauagacuucuu

SEQ ID NO: 2111568 - RNA, 19 nt, Homo sapiens
  misc_RNA (1)...(19): siRNA sense strand
gaucgugcgguccaagaug

SEQ ID NO: 2111569 - RNA, 19 nt, Homo sapiens
  misc_RNA (1)...(19): siRNA sense strand
gacgccaggagcauugaua

SEQ ID NO: 2111570 - RNA, 19 nt, Homo sapiens
  misc_RNA (1)...(19): siRNA sense strand
gauguuccauaagauuuac

SEQ ID NO: 2111571 - RNA, 19 nt, Homo sapiens
  misc_RNA (1)...(19): siRNA sense strand
caaggcacuggccgacuuu

SEQ ID NO: 2111572 - RNA, 19 nt, Homo sapiens
  misc_RNA (1)...(19): siRNA sense strand
ugcagacccucuccaggaa

SEQ ID NO: 2111573 - RNA, 19 nt, Homo sapiens
  misc_RNA (1)...(19): siRNA sense strand
ugacaggggugaacgugaa

SEQ ID NO: 2111574 - RNA, 19 nt, Homo sapiens
  misc_RNA (1)...(19): siRNA sense strand
uccauaagauuuacaucca

SEQ ID NO: 2111575 - RNA, 19 nt, Homo sapiens
  misc_RNA (1)...(19): siRNA sense strand
gaacccugaggaugaagug

SEQ ID NO: 2111576 - RNA, 19 nt, Homo sapiens
  misc_RNA (1)...(19): siRNA sense strand
ugaagcugauggaccagau

SEQ ID NO: 2111577 - RNA, 19 nt, Homo sapiens
  misc_RNA (1)...(19): siRNA sense strand
ggaagcuggugcucaugcu

SEQ ID NO: 2111578 - RNA, 19 nt, Homo sapiens
  misc_RNA (1)...(19): siRNA sense strand
gagaaucacuguuuacgua

SEQ ID NO: 2111579 - RNA, 19 nt, Homo sapiens
  misc_RNA (1)...(19): siRNA sense strand
gaacaugcgugugggaauu

SEQ ID NO: 2111580 - RNA, 19 nt, Homo sapiens
  misc_RNA (1)...(19): siRNA sense strand
gcagguagacgaccgauuu

SEQ ID NO: 2111581 - RNA, 19 nt, Homo sapiens
  misc_RNA (1)...(19): siRNA sense strand
caaccaagguggcauugaa

SEQ ID NO: 2111582 - RNA, 19 nt, Homo sapiens
  misc_RNA (1)...(19): siRNA sense strand
gcaaugaugagcucuacua

SEQ ID NO: 2111583 - RNA, 19 nt, Homo sapiens
  misc_RNA (1)...(19): siRNA sense strand
gcaaccagguguccaagga

SEQ ID NO: 2111584 - RNA, 19 nt, Homo sapiens
  misc_RNA (1)...(19): siRNA sense strand
gcaaguuccuccugaccuu

SEQ ID NO: 2111585 - RNA, 19 nt, Homo sapiens
  misc_RNA (1)...(19): siRNA sense strand
gaaucacuguuuacguauu

SEQ ID NO: 2111586 - RNA, 19 nt, Homo sapiens
  misc_RNA (1)...(19): siRNA sense strand
cagcuugucuccaauguuc

SEQ ID NO: 2111587 - RNA, 19 nt, Homo sapiens
  misc_RNA (1)...(19): siRNA sense strand
gaugagcucuacuaucagu

SEQ ID NO: 2111588 - RNA, 19 nt, Homo sapiens
  misc_RNA (1)...(19): siRNA sense strand
ccauagacuucuucaacaa

SEQ ID NO: 2111589 - RNA, 19 nt, Homo sapiens
  misc_RNA (1)...(19): siRNA sense strand
ggaccguguucuucaucua

SEQ ID NO: 2111590 - RNA, 19 nt, Homo sapiens
  misc_RNA (1)...(19): siRNA sense strand
ggaugaaguggaugaguuu

SEQ ID NO: 2111591 - RNA, 19 nt, Homo sapiens
  misc_RNA (1)...(19): siRNA sense strand
gcacaggaacuggucauga

SEQ ID NO: 2111592 - RNA, 19 nt, Homo sapiens
  misc_RNA (1)...(19): siRNA sense strand
gaagaucgggcucaacauc

SEQ ID NO: 2111593 - RNA, 19 nt, Homo sapiens
  misc_RNA (1)...(19): siRNA sense strand
ccgcagagaaucacuguuu

SEQ ID NO: 2111594 - RNA, 19 nt, Homo sapiens
  misc_RNA (1)...(19): siRNA sense strand
gaaguacuccaagcaggua

SEQ ID NO: 2111595 - RNA, 19 nt, Homo sapiens
  misc_RNA (1)...(19): siRNA sense strand
gagccugacuuagagaaga

SEQ ID NO: 2111596 - RNA, 19 nt, Homo sapiens
  misc_RNA (1)...(19): siRNA sense strand
gcgagaugaugaccuacuu

SEQ ID NO: 2111597 - RNA, 19 nt, Homo sapiens
  misc_RNA (1)...(19): siRNA sense strand
gccauagacuucuucaaca

SEQ ID NO: 2111598 - RNA, 19 nt, Homo sapiens
  misc_RNA (1)...(19): siRNA sense strand
gaucuacuccugcguaaag

SEQ ID NO: 2111599 - RNA, 19 nt, Homo sapiens
  misc_RNA (1)...(19): siRNA sense strand
gcaggaggauaugauguuc

SEQ ID NO: 2111600 - RNA, 19 nt, Homo sapiens
  misc_RNA (1)...(19): siRNA sense strand
gcaggacgcauccacauca

SEQ ID NO: 2111601 - RNA, 19 nt, Homo sapiens
  misc_RNA (1)...(19): siRNA sense strand
cgcagagaaucacuguuua

SEQ ID NO: 2111602 - RNA, 19 nt, Homo sapiens
  misc_RNA (1)...(19): siRNA sense strand
caacgugagcauccuguuu

SEQ ID NO: 2111603 - RNA, 19 nt, Homo sapiens
  misc_RNA (1)...(19): siRNA sense strand
acacucaacuaccugaaug

SEQ ID NO: 2111604 - RNA, 19 nt, Homo sapiens
  misc_RNA (1)...(19): siRNA sense strand
gcauccaggucaccacaga

SEQ ID NO: 2111605 - RNA, 19 nt, Homo sapiens
  misc_RNA (1)...(19): siRNA sense strand
ucaaugagcacuccuucaa

SEQ ID NO: 2111606 - RNA, 19 nt, Homo sapiens
  misc_RNA (1)...(19): siRNA sense strand
ucaaggcacuggccgacuu

SEQ ID NO: 2111607 - RNA, 19 nt, Homo sapiens
  misc_RNA (1)...(19): siRNA sense strand
gugcgaacccugaggauga

SEQ ID NO: 2111608 - RNA, 19 nt, Homo sapiens
  misc_RNA (1)...(19): siRNA sense strand
ucaacaacuuccagaugaa

SEQ ID NO: 2111609 - RNA, 19 nt, Homo sapiens
  misc_RNA (1)...(19): siRNA sense strand
gcacaggagcacaacauca

SEQ ID NO: 2111610 - RNA, 19 nt, Homo sapiens
  misc_RNA (1)...(19): siRNA sense strand
gaaguucccgucggacaaa

SEQ ID NO: 2111611 - RNA, 19 nt, Homo sapiens
  misc_RNA (1)...(19): siRNA sense strand
caucaucaucucagucuuu

SEQ ID NO: 2111612 - RNA, 19 nt, Homo sapiens
  misc_RNA (1)...(19): siRNA sense strand
ggucaccgccaacgccaua

SEQ ID NO: 2111613 - RNA, 19 nt, Homo sapiens
  misc_RNA (1)...(19): siRNA sense strand
ugauggaccagaugaagua

SEQ ID NO: 2111614 - RNA, 19 nt, Homo sapiens
  misc_RNA (1)...(19): siRNA sense strand
ggaaacugcaggccacaga

SEQ ID NO: 2111615 - RNA, 19 nt, Homo sapiens
  misc_RNA (1)...(19): siRNA sense strand
gcgcaacgccuaccucaag

SEQ ID NO: 2111616 - RNA, 19 nt, Homo sapiens
  misc_RNA (1)...(19): siRNA sense strand
uucaacaacuuccagauga

SEQ ID NO: 2111617 - RNA, 19 nt, Homo sapiens
  misc_RNA (1)...(19): siRNA sense strand
gcuucuaccugaccuguuc

SEQ ID NO: 2111618 - RNA, 19 nt, Homo sapiens
  misc_RNA (1)...(19): siRNA sense strand
caagaugaaccgccagaga

SEQ ID NO: 2111619 - RNA, 19 nt, Homo sapiens
  misc_RNA (1)...(19): siRNA sense strand
agauuuacauccagaaaca

SEQ ID NO: 2111620 - RNA, 19 nt, Homo sapiens
  misc_RNA (1)...(19): siRNA sense strand
gccaugaucgccaagauga

SEQ ID NO: 2111621 - RNA, 19 nt, Homo sapiens
  misc_RNA (1)...(19): siRNA sense strand
cgaccgauuuggugccuau

SEQ ID NO: 2111622 - RNA, 19 nt, Homo sapiens
  misc_RNA (1)...(19): siRNA sense strand
gggcaaaggcgagaugaug

SEQ ID NO: 2111623 - RNA, 19 nt, Homo sapiens
  misc_RNA (1)...(19): siRNA sense strand
caucauggcugugcuuugc

SEQ ID NO: 2111624 - RNA, 19 nt, Homo sapiens
  misc_RNA (1)...(19): siRNA sense strand
gugaucuacuccugcguaa

SEQ ID NO: 2111625 - RNA, 19 nt, Homo sapiens
  misc_RNA (1)...(19): siRNA sense strand
ggcaaaggcgagaugauga

SEQ ID NO: 2111626 - RNA, 19 nt, Homo sapiens
  misc_RNA (1)...(19): siRNA sense strand
gagcacuccuucaacaacu

SEQ ID NO: 2111627 - RNA, 19 nt, Homo sapiens
  misc_RNA (1)...(19): siRNA sense strand
aaugagcacuccuucaaca

SEQ ID NO: 2111628 - RNA, 19 nt, Homo sapiens
  misc_RNA (1)...(19): siRNA sense strand
aggaugaaguggaugaguu

SEQ ID NO: 2111629 - RNA, 19 nt, Homo sapiens
  misc_RNA (1)...(19): siRNA sense strand
aaggcgagaugaugaccua

SEQ ID NO: 2111630 - RNA, 19 nt, Homo sapiens
  misc_RNA (1)...(19): siRNA sense strand
cacgaaagccucaguacga

SEQ ID NO: 2111631 - RNA, 19 nt, Homo sapiens
  misc_RNA (1)...(19): siRNA sense strand
ccaucgagcucaucuacgu

SEQ ID NO: 2111632 - RNA, 19 nt, Homo sapiens
  misc_RNA (1)...(19): siRNA sense strand
caagcuggccgcagagaau

SEQ ID NO: 2111633 - RNA, 19 nt, Homo sapiens
  misc_RNA (1)...(19): siRNA sense strand
ugaccuacuuccucaaugg

SEQ ID NO: 2111634 - RNA, 19 nt, Homo sapiens
  misc_RNA (1)...(19): siRNA sense strand
gggcaagacccacaucaag

SEQ ID NO: 2111635 - RNA, 19 nt, Homo sapiens
  misc_RNA (1)...(19): siRNA sense strand
ugagaucaucgcugacuuu

SEQ ID NO: 2111636 - RNA, 19 nt, Homo sapiens
  misc_RNA (1)...(19): siRNA sense strand
ccaaggcuacacucaacua

SEQ ID NO: 2111637 - RNA, 19 nt, Homo sapiens
  misc_RNA (1)...(19): siRNA sense strand
aagaugaaccgccagagaa

SEQ ID NO: 2111638 - RNA, 19 nt, Homo sapiens
  misc_RNA (1)...(19): siRNA sense strand
uggagaagaucaagaccau

SEQ ID NO: 2111639 - RNA, 19 nt, Homo sapiens
  misc_RNA (1)...(19): siRNA sense strand
gcagagaaucacuguuuac

SEQ ID NO: 2111640 - RNA, 19 nt, Homo sapiens
  misc_RNA (1)...(19): siRNA sense strand
gaaagccucaguacgacau

SEQ ID NO: 2111641 - RNA, 19 nt, Homo sapiens
  misc_RNA (1)...(19): siRNA sense strand
ggagucggccgucaacuac

SEQ ID NO: 2111642 - RNA, 19 nt, Homo sapiens
  misc_RNA (1)...(19): siRNA sense strand
caagaacgcccaggagagu

SEQ ID NO: 2111643 - RNA, 19 nt, Homo sapiens
  misc_RNA (1)...(19): siRNA sense strand
caccaaggcuacacucaac

SEQ ID NO: 2111644 - RNA, 19 nt, Homo sapiens
  misc_RNA (1)...(19): siRNA sense strand
uugauaggcuucggucuga

SEQ ID NO: 2111645 - RNA, 19 nt, Homo sapiens
  misc_RNA (1)...(19): siRNA sense strand
ugaaguggaugaguuucug

SEQ ID NO: 2111646 - RNA, 19 nt, Homo sapiens
  misc_RNA (1)...(19): siRNA sense strand
gccugcggcuacucaauga

SEQ ID NO: 2111647 - RNA, 19 nt, Homo sapiens
  misc_RNA (1)...(19): siRNA sense strand
caucaucucagucuuugug

SEQ ID NO: 2111648 - RNA, 19 nt, Homo sapiens
  misc_RNA (1)...(19): siRNA sense strand
gcccugagcaugcaaccaa

SEQ ID NO: 2111649 - RNA, 19 nt, Homo sapiens
  misc_RNA (1)...(19): siRNA sense strand
ggaagaucgugcgguccaa

SEQ ID NO: 2111650 - RNA, 19 nt, Homo sapiens
  misc_RNA (1)...(19): siRNA sense strand
gauauuccgcuccaagaag

SEQ ID NO: 2111651 - RNA, 19 nt, Homo sapiens
  misc_RNA (1)...(19): siRNA sense strand
ucuccgaguucuacguuga

SEQ ID NO: 2111652 - RNA, 19 nt, Homo sapiens
  misc_RNA (1)...(19): siRNA sense strand
cagacccucuccaggaaga

SEQ ID NO: 2111653 - RNA, 19 nt, Homo sapiens
  misc_RNA (1)...(19): siRNA sense strand
ugaccuuggugguguuugu

SEQ ID NO: 2111654 - RNA, 19 nt, Homo sapiens
  misc_RNA (1)...(19): siRNA sense strand
gcgcaaugaugagcucuac

SEQ ID NO: 2111655 - RNA, 19 nt, Homo sapiens
  misc_RNA (1)...(19): siRNA sense strand
gaugaccuacuuccucaau

SEQ ID NO: 2111656 - RNA, 19 nt, Homo sapiens
  misc_RNA (1)...(19): siRNA sense strand
gagaucaucgcugacuuug

SEQ ID NO: 2111657 - RNA, 19 nt, Homo sapiens
  misc_RNA (1)...(19): siRNA sense strand
cacaggaacuggucaugac

SEQ ID NO: 2111658 - RNA, 19 nt, Homo sapiens
  misc_RNA (1)...(19): siRNA sense strand
ccauauucaugcucagcuu

SEQ ID NO: 2111659 - RNA, 19 nt, Homo sapiens
  misc_RNA (1)...(19): siRNA sense strand
uagagaagaaguacuccaa

SEQ ID NO: 2111660 - RNA, 19 nt, Homo sapiens
  misc_RNA (1)...(19): siRNA sense strand
gcacccagaagcggaaaga

SEQ ID NO: 2111661 - RNA, 19 nt, Homo sapiens
  misc_RNA (1)...(19): siRNA sense strand
cggagucggccgucaacua

SEQ ID NO: 2111662 - RNA, 19 nt, Homo sapiens
  misc_RNA (1)...(19): siRNA sense strand
gaugaacagcacccugguu

SEQ ID NO: 2111663 - RNA, 19 nt, Homo sapiens
  misc_RNA (1)...(19): siRNA sense strand
cccagaagcggaaagaaga

SEQ ID NO: 2111664 - RNA, 19 nt, Homo sapiens
  misc_RNA (1)...(19): siRNA sense strand
caagcaggaggauaugaug

SEQ ID NO: 2111665 - RNA, 19 nt, Homo sapiens
  misc_RNA (1)...(19): siRNA sense strand
gggcacgaaagccucagua

SEQ ID NO: 2111666 - RNA, 19 nt, Homo sapiens
  misc_RNA (1)...(19): siRNA sense strand
guaccagcgcuacuucuuc

SEQ ID NO: 2111667 - RNA, 19 nt, Homo sapiens
  misc_RNA (1)...(19): siRNA sense strand
ccaacgccauagacuucuu

SEQ ID NO: 2111668 - RNA, 19 nt, Homo sapiens
  misc_RNA (1)...(19): siRNA sense strand
gaucgugcgguccaagaug

SEQ ID NO: 2111669 - RNA, 19 nt, Homo sapiens
  misc_RNA (1)...(19): siRNA sense strand
gacgccaggagcauugaua

SEQ ID NO: 2111670 - RNA, 19 nt, Homo sapiens
  misc_RNA (1)...(19): siRNA sense strand
gauguuccauaagauuuac

SEQ ID NO: 2111671 - RNA, 19 nt, Homo sapiens
  misc_RNA (1)...(19): siRNA sense strand
caaggcacuggccgacuuu

SEQ ID NO: 2111672 - RNA, 19 nt, Homo sapiens
  misc_RNA (1)...(19): siRNA sense strand
ugcagacccucuccaggaa

SEQ ID NO: 2111673 - RNA, 19 nt, Homo sapiens
  misc_RNA (1)...(19): siRNA sense strand
ugacaggggugaacgugaa

SEQ ID NO: 2111674 - RNA, 19 nt, Homo sapiens
  misc_RNA (1)...(19): siRNA sense strand
uccauaagauuuacaucca

SEQ ID NO: 2111675 - RNA, 19 nt, Homo sapiens
  misc_RNA (1)...(19): siRNA sense strand
gaacccugaggaugaagug

SEQ ID NO: 2111676 - RNA, 19 nt, Homo sapiens
  misc_RNA (1)...(19): siRNA sense strand
ugaagcugauggaccagau

SEQ ID NO: 2111677 - RNA, 19 nt, Homo sapiens
  misc_RNA (1)...(19): siRNA sense strand
ggaagcuggugcucaugcu

SEQ ID NO: 2111678 - RNA, 19 nt, Homo sapiens
  misc_RNA (1)...(19): siRNA sense strand
gaaguaacaucucauccua

SEQ ID NO: 2111679 - RNA, 19 nt, Homo sapiens
  misc_RNA (1)...(19): siRNA sense strand
gcacaaaugucuccaacuu

SEQ ID NO: 2111680 - RNA, 19 nt, Homo sapiens
  misc_RNA (1)...(19): siRNA sense strand
gagcucaacuucuuauauu

SEQ ID NO: 2111681 - RNA, 19 nt, Homo sapiens
  misc_RNA (1)...(19): siRNA sense strand
gaacaaacuucaccauuuu

SEQ ID NO: 2111682 - RNA, 19 nt, Homo sapiens
  misc_RNA (1)...(19): siRNA sense strand
ggacacugaugcugaguuu

SEQ ID NO: 2111683 - RNA, 19 nt, Homo sapiens
  misc_RNA (1)...(19): siRNA sense strand
ggaagaugcugccuggaaa

SEQ ID NO: 2111684 - RNA, 19 nt, Homo sapiens
  misc_RNA (1)...(19): siRNA sense strand
agaacaaacuucaccauuu

SEQ ID NO: 2111685 - RNA, 19 nt, Homo sapiens
  misc_RNA (1)...(19): siRNA sense strand
gaaaguacagagaagcuua

SEQ ID NO: 2111686 - RNA, 19 nt, Homo sapiens
  misc_RNA (1)...(19): siRNA sense strand
gaaagucauuacagaauca

SEQ ID NO: 2111687 - RNA, 19 nt, Homo sapiens
  misc_RNA (1)...(19): siRNA sense strand
gauauaggcuugaaaauga

SEQ ID NO: 2111688 - RNA, 19 nt, Homo sapiens
  misc_RNA (1)...(19): siRNA sense strand
gaaaggaaccgagugauug

SEQ ID NO: 2111689 - RNA, 19 nt, Homo sapiens
  misc_RNA (1)...(19): siRNA sense strand
cgagaacgcugcgaucuuu

SEQ ID NO: 2111690 - RNA, 19 nt, Homo sapiens
  misc_RNA (1)...(19): siRNA sense strand
caacaacaguguccucuuc

SEQ ID NO: 2111691 - RNA, 19 nt, Homo sapiens
  misc_RNA (1)...(19): siRNA sense strand
gcacagcuauugaacaaag

SEQ ID NO: 2111692 - RNA, 19 nt, Homo sapiens
  misc_RNA (1)...(19): siRNA sense strand
gcaguggaaucgagaagaa

SEQ ID NO: 2111693 - RNA, 19 nt, Homo sapiens
  misc_RNA (1)...(19): siRNA sense strand
caccaaagcuguaacaaca

SEQ ID NO: 2111694 - RNA, 19 nt, Homo sapiens
  misc_RNA (1)...(19): siRNA sense strand
gaaauacuaguuccucaaa

SEQ ID NO: 2111695 - RNA, 19 nt, Homo sapiens
  misc_RNA (1)...(19): siRNA sense strand
ggaagagucccgaauguga

SEQ ID NO: 2111696 - RNA, 19 nt, Homo sapiens
  misc_RNA (1)...(19): siRNA sense strand
caaaagaaaugaccacaaa

SEQ ID NO: 2111697 - RNA, 19 nt, Homo sapiens
  misc_RNA (1)...(19): siRNA sense strand
gagaagaaacaguagagua

SEQ ID NO: 2111698 - RNA, 19 nt, Homo sapiens
  misc_RNA (1)...(19): siRNA sense strand
ccgagaagcuauugaaaug

SEQ ID NO: 2111699 - RNA, 19 nt, Homo sapiens
  misc_RNA (1)...(19): siRNA sense strand
ccaaagcuguaacaacaaa

SEQ ID NO: 2111700 - RNA, 19 nt, Homo sapiens
  misc_RNA (1)...(19): siRNA sense strand
gcugacccauccugaaaua

SEQ ID NO: 2111701 - RNA, 19 nt, Homo sapiens
  misc_RNA (1)...(19): siRNA sense strand
guacagagaagcuuaacaa

SEQ ID NO: 2111702 - RNA, 19 nt, Homo sapiens
  misc_RNA (1)...(19): siRNA sense strand
ugacaaugcuccauaguag

SEQ ID NO: 2111703 - RNA, 19 nt, Homo sapiens
  misc_RNA (1)...(19): siRNA sense strand
caaacaaccuugccacagu

SEQ ID NO: 2111704 - RNA, 19 nt, Homo sapiens
  misc_RNA (1)...(19): siRNA sense strand
cagagaagcuuaacaacuc

SEQ ID NO: 2111705 - RNA, 19 nt, Homo sapiens
  misc_RNA (1)...(19): siRNA sense strand
guggagagcucaacuucuu

SEQ ID NO: 2111706 - RNA, 19 nt, Homo sapiens
  misc_RNA (1)...(19): siRNA sense strand
uaagcaaacucaucuucaa

SEQ ID NO: 2111707 - RNA, 19 nt, Homo sapiens
  misc_RNA (1)...(19): siRNA sense strand
uuucagacaucaacaauga

SEQ ID NO: 2111708 - RNA, 19 nt, Homo sapiens
  misc_RNA (1)...(19): siRNA sense strand
acaaaugucuccaacuuuc

SEQ ID NO: 2111709 - RNA, 19 nt, Homo sapiens
  misc_RNA (1)...(19): siRNA sense strand
caacuuagcacaaaugucu

SEQ ID NO: 2111710 - RNA, 19 nt, Homo sapiens
  misc_RNA (1)...(19): siRNA sense strand
gagaagcuauugaaaugca

SEQ ID NO: 2111711 - RNA, 19 nt, Homo sapiens
  misc_RNA (1)...(19): siRNA sense strand
aaugaaaccugcaugaguu

SEQ ID NO: 2111712 - RNA, 19 nt, Homo sapiens
  misc_RNA (1)...(19): siRNA sense strand
gaugcugccuggaaacauu

SEQ ID NO: 2111713 - RNA, 19 nt, Homo sapiens
  misc_RNA (1)...(19): siRNA sense strand
ccacaaagcuuggcguuac

SEQ ID NO: 2111714 - RNA, 19 nt, Homo sapiens
  misc_RNA (1)...(19): siRNA sense strand
ccucaaaucucaacagaag

SEQ ID NO: 2111715 - RNA, 19 nt, Homo sapiens
  misc_RNA (1)...(19): siRNA sense strand
agaguucgaugaaagaauu

SEQ ID NO: 2111716 - RNA, 19 nt, Homo sapiens
  misc_RNA (1)...(19): siRNA sense strand
cgugacagaguuuaaauua

SEQ ID NO: 2111717 - RNA, 19 nt, Homo sapiens
  misc_RNA (1)...(19): siRNA sense strand
agaagaaacaguagaguaa

SEQ ID NO: 2111718 - RNA, 19 nt, Homo sapiens
  misc_RNA (1)...(19): siRNA sense strand
gaaucgagaagaaacagua

SEQ ID NO: 2111719 - RNA, 19 nt, Homo sapiens
  misc_RNA (1)...(19): siRNA sense strand
cauccaaccuuccguccua

SEQ ID NO: 2111720 - RNA, 19 nt, Homo sapiens
  misc_RNA (1)...(19): siRNA sense strand
ccuaucagcuuaucacugu

SEQ ID NO: 2111721 - RNA, 19 nt, Homo sapiens
  misc_RNA (1)...(19): siRNA sense strand
ggaaaccccuaucagcuua

SEQ ID NO: 2111722 - RNA, 19 nt, Homo sapiens
  misc_RNA (1)...(19): siRNA sense strand
cccaaggacuccagaauug

SEQ ID NO: 2111723 - RNA, 19 nt, Homo sapiens
  misc_RNA (1)...(19): siRNA sense strand
gaaccuucgugacagaguu

SEQ ID NO: 2111724 - RNA, 19 nt, Homo sapiens
  misc_RNA (1)...(19): siRNA sense strand
ucccaaaucugccaccuuu

SEQ ID NO: 2111725 - RNA, 19 nt, Homo sapiens
  misc_RNA (1)...(19): siRNA sense strand
uaacagaguccuccacaga

SEQ ID NO: 2111726 - RNA, 19 nt, Homo sapiens
  misc_RNA (1)...(19): siRNA sense strand
gagaaagucauuacagaau

SEQ ID NO: 2111727 - RNA, 19 nt, Homo sapiens
  misc_RNA (1)...(19): siRNA sense strand
gauaggaguuauucagagu

SEQ ID NO: 2111728 - RNA, 19 nt, Homo sapiens
  misc_RNA (1)...(19): siRNA sense strand
gauaugcaauuugguuaga

SEQ ID NO: 2111729 - RNA, 19 nt, Homo sapiens
  misc_RNA (1)...(19): siRNA sense strand
gaugaaagcagaagaagag

SEQ ID NO: 2111730 - RNA, 19 nt, Homo sapiens
  misc_RNA (1)...(19): siRNA sense strand
ucacggcauucuugcauuu

SEQ ID NO: 2111731 - RNA, 19 nt, Homo sapiens
  misc_RNA (1)...(19): siRNA sense strand
ucucagaggcggaucuuua

SEQ ID NO: 2111732 - RNA, 19 nt, Homo sapiens
  misc_RNA (1)...(19): siRNA sense strand
aaacaaagacaaugcaugu

SEQ ID NO: 2111733 - RNA, 19 nt, Homo sapiens
  misc_RNA (1)...(19): siRNA sense strand
cagaagaagagacuacuuu

SEQ ID NO: 2111734 - RNA, 19 nt, Homo sapiens
  misc_RNA (1)...(19): siRNA sense strand
caugagagguggagagauc

SEQ ID NO: 2111735 - RNA, 19 nt, Homo sapiens
  misc_RNA (1)...(19): siRNA sense strand
aagagaaagucauuacaga

SEQ ID NO: 2111736 - RNA, 19 nt, Homo sapiens
  misc_RNA (1)...(19): siRNA sense strand
gaagaagagacuacuuuua

SEQ ID NO: 2111737 - RNA, 19 nt, Homo sapiens
  misc_RNA (1)...(19): siRNA sense strand
gacccauccugaaauacua

SEQ ID NO: 2111738 - RNA, 19 nt, Homo sapiens
  misc_RNA (1)...(19): siRNA sense strand
uaacaacaaacucuccuuu

SEQ ID NO: 2111739 - RNA, 19 nt, Homo sapiens
  misc_RNA (1)...(19): siRNA sense strand
ggaagucccaugucucaga

SEQ ID NO: 2111740 - RNA, 19 nt, Homo sapiens
  misc_RNA (1)...(19): siRNA sense strand
uggcacagcuauugaacaa

SEQ ID NO: 2111741 - RNA, 19 nt, Homo sapiens
  misc_RNA (1)...(19): siRNA sense strand
gagcugaccacgccuucua

SEQ ID NO: 2111742 - RNA, 19 nt, Homo sapiens
  misc_RNA (1)...(19): siRNA sense strand
gcaccaacuuagcacaaau

SEQ ID NO: 2111743 - RNA, 19 nt, Homo sapiens
  misc_RNA (1)...(19): siRNA sense strand
gagauaggaguuauucaga

SEQ ID NO: 2111744 - RNA, 19 nt, Homo sapiens
  misc_RNA (1)...(19): siRNA sense strand
gcggaagagucccgaaugu

SEQ ID NO: 2111745 - RNA, 19 nt, Homo sapiens
  misc_RNA (1)...(19): siRNA sense strand
caacuaccauucugaagac

SEQ ID NO: 2111746 - RNA, 19 nt, Homo sapiens
  misc_RNA (1)...(19): siRNA sense strand
gucacaaucccaccauuua

SEQ ID NO: 2111747 - RNA, 19 nt, Homo sapiens
  misc_RNA (1)...(19): siRNA sense strand
ucggaaagcuugaauucau

SEQ ID NO: 2111748 - RNA, 19 nt, Homo sapiens
  misc_RNA (1)...(19): siRNA sense strand
gacaguauaacccgucuuu

SEQ ID NO: 2111749 - RNA, 19 nt, Homo sapiens
  misc_RNA (1)...(19): siRNA sense strand
aaagggauaugcaauuugg

SEQ ID NO: 2111750 - RNA, 19 nt, Homo sapiens
  misc_RNA (1)...(19): siRNA sense strand
cuccagagcuccucaguca

SEQ ID NO: 2111751 - RNA, 19 nt, Homo sapiens
  misc_RNA (1)...(19): siRNA sense strand
caacaguguccuccaaaga

SEQ ID NO: 2111752 - RNA, 19 nt, Homo sapiens
  misc_RNA (1)...(19): siRNA sense strand
uaaggaauccagaacuuga

SEQ ID NO: 2111753 - RNA, 19 nt, Homo sapiens
  misc_RNA (1)...(19): siRNA sense strand
cugcaugaguugcccauuu

SEQ ID NO: 2111754 - RNA, 19 nt, Homo sapiens
  misc_RNA (1)...(19): siRNA sense strand
uuucagcguuaccuaguua

SEQ ID NO: 2111755 - RNA, 19 nt, Homo sapiens
  misc_RNA (1)...(19): siRNA sense strand
aauuuggacuuacgucuuu

SEQ ID NO: 2111756 - RNA, 19 nt, Homo sapiens
  misc_RNA (1)...(19): siRNA sense strand
gaucucuccuggcugcauu

SEQ ID NO: 2111757 - RNA, 19 nt, Homo sapiens
  misc_RNA (1)...(19): siRNA sense strand
cuauugaaaugcaugagaa

SEQ ID NO: 2111758 - RNA, 19 nt, Homo sapiens
  misc_RNA (1)...(19): siRNA sense strand
gggauaugcaauuugguua

SEQ ID NO: 2111759 - RNA, 19 nt, Homo sapiens
  misc_RNA (1)...(19): siRNA sense strand
acaaagacaaugcauguug

SEQ ID NO: 2111760 - RNA, 19 nt, Homo sapiens
  misc_RNA (1)...(19): siRNA sense strand
gcaguguggaugugaauga

SEQ ID NO: 2111761 - RNA, 19 nt, Homo sapiens
  misc_RNA (1)...(19): siRNA sense strand
aaacauuggccagaaagua

SEQ ID NO: 2111762 - RNA, 19 nt, Homo sapiens
  misc_RNA (1)...(19): siRNA sense strand
ggaauaugcucagccuucu

SEQ ID NO: 2111763 - RNA, 19 nt, Homo sapiens
  misc_RNA (1)...(19): siRNA sense strand
gggauuagcuacggucaag

SEQ ID NO: 2111764 - RNA, 19 nt, Homo sapiens
  misc_RNA (1)...(19): siRNA sense strand
acagccaugugcaacaaua

SEQ ID NO: 2111765 - RNA, 19 nt, Homo sapiens
  misc_RNA (1)...(19): siRNA sense strand
ugacggauguguacuacuc

SEQ ID NO: 2111766 - RNA, 19 nt, Homo sapiens
  misc_RNA (1)...(19): siRNA sense strand
gagcaugugaagauggaua

SEQ ID NO: 2111767 - RNA, 19 nt, Homo sapiens
  misc_RNA (1)...(19): siRNA sense strand
cugauaggaugcagaaaug

SEQ ID NO: 2111768 - RNA, 19 nt, Homo sapiens
  misc_RNA (1)...(19): siRNA sense strand
gaaaaugagaucaccaaaa

SEQ ID NO: 2111769 - RNA, 19 nt, Homo sapiens
  misc_RNA (1)...(19): siRNA sense strand
ucuccuggcugcauuucua

SEQ ID NO: 2111770 - RNA, 19 nt, Homo sapiens
  misc_RNA (1)...(19): siRNA sense strand
gaaagcagaagaagagacu

SEQ ID NO: 2111771 - RNA, 19 nt, Homo sapiens
  misc_RNA (1)...(19): siRNA sense strand
uguaaggaauccagaacuu

SEQ ID NO: 2111772 - RNA, 19 nt, Homo sapiens
  misc_RNA (1)...(19): siRNA sense strand
ccaaugugacgcuauuuga

SEQ ID NO: 2111773 - RNA, 19 nt, Homo sapiens
  misc_RNA (1)...(19): siRNA sense strand
gcugugaacccuugucuuc

SEQ ID NO: 2111774 - RNA, 19 nt, Homo sapiens
  misc_RNA (1)...(19): siRNA sense strand
acaccuaccugucaucuac

SEQ ID NO: 2111775 - RNA, 19 nt, Homo sapiens
  misc_RNA (1)...(19): siRNA sense strand
gaggaagucacacagcauu

SEQ ID NO: 2111776 - RNA, 19 nt, Homo sapiens
  misc_RNA (1)...(19): siRNA sense strand
gaaaaugaaaccugcauga

SEQ ID NO: 2111777 - RNA, 19 nt, Homo sapiens
  misc_RNA (1)...(19): siRNA sense strand
ugaaaugcaugagaaugga

SEQ ID NO: 2111778 - RNA, 19 nt, Homo sapiens
  misc_RNA (1)...(19): siRNA sense strand
agagaaagcuauugaagua

SEQ ID NO: 2111779 - RNA, 19 nt, Homo sapiens
  misc_RNA (1)...(19): siRNA sense strand
gcaauaaauucgaccauga

SEQ ID NO: 2111780 - RNA, 19 nt, Homo sapiens
  misc_RNA (1)...(19): siRNA sense strand
gaaggaagcugccauuuug

SEQ ID NO: 2111781 - RNA, 19 nt, Homo sapiens
  misc_RNA (1)...(19): siRNA sense strand
ggacaggagacuuauuaua

SEQ ID NO: 2111782 - RNA, 19 nt, Homo sapiens
  misc_RNA (1)...(19): siRNA sense strand
ggagaagauuggugucaaa

SEQ ID NO: 2111783 - RNA, 19 nt, Homo sapiens
  misc_RNA (1)...(19): siRNA sense strand
gcagagagaacaacacuug

SEQ ID NO: 2111784 - RNA, 19 nt, Homo sapiens
  misc_RNA (1)...(19): siRNA sense strand
ggaauauaaucaacaagug

SEQ ID NO: 2111785 - RNA, 19 nt, Homo sapiens
  misc_RNA (1)...(19): siRNA sense strand
uggauuaucugaagagaaa

SEQ ID NO: 2111786 - RNA, 19 nt, Homo sapiens
  misc_RNA (1)...(19): siRNA sense strand
ccaaggagauaaagaauac

SEQ ID NO: 2111787 - RNA, 19 nt, Homo sapiens
  misc_RNA (1)...(19): siRNA sense strand
gaagauuggugucaaaauu

SEQ ID NO: 2111788 - RNA, 19 nt, Homo sapiens
  misc_RNA (1)...(19): siRNA sense strand
gugauaggauuucauauuc

SEQ ID NO: 2111789 - RNA, 19 nt, Homo sapiens
  misc_RNA (1)...(19): siRNA sense strand
caaaacagcuacuugauga

SEQ ID NO: 2111790 - RNA, 19 nt, Homo sapiens
  misc_RNA (1)...(19): siRNA sense strand
gaagugcugucagaaauca

SEQ ID NO: 2111791 - RNA, 19 nt, Homo sapiens
  misc_RNA (1)...(19): siRNA sense strand
aaauuuggcugggaauaua

SEQ ID NO: 2111792 - RNA, 19 nt, Homo sapiens
  misc_RNA (1)...(19): siRNA sense strand
ugucagaaaucacuaauca

SEQ ID NO: 2111793 - RNA, 19 nt, Homo sapiens
  misc_RNA (1)...(19): siRNA sense strand
gaaggaacagaaacaauug

SEQ ID NO: 2111794 - RNA, 19 nt, Homo sapiens
  misc_RNA (1)...(19): siRNA sense strand
ggucgugacuccuguacaa

SEQ ID NO: 2111795 - RNA, 19 nt, Homo sapiens
  misc_RNA (1)...(19): siRNA sense strand
gaaauuuggcugggaauau

SEQ ID NO: 2111796 - RNA, 19 nt, Homo sapiens
  misc_RNA (1)...(19): siRNA sense strand
ggugauaggauuucauauu

SEQ ID NO: 2111797 - RNA, 19 nt, Homo sapiens
  misc_RNA (1)...(19): siRNA sense strand
gaagagaaagcuauugaag

SEQ ID NO: 2111798 - RNA, 19 nt, Homo sapiens
  misc_RNA (1)...(19): siRNA sense strand
gcaucucgcucaacucugu

SEQ ID NO: 2111799 - RNA, 19 nt, Homo sapiens
  misc_RNA (1)...(19): siRNA sense strand
ugaaggaacagaaacaauu

SEQ ID NO: 2111800 - RNA, 19 nt, Homo sapiens
  misc_RNA (1)...(19): siRNA sense strand
ggagauaaagaauacugua

SEQ ID NO: 2111801 - RNA, 19 nt, Homo sapiens
  misc_RNA (1)...(19): siRNA sense strand
guaaauguagguuguauuc

SEQ ID NO: 2111802 - RNA, 19 nt, Homo sapiens
  misc_RNA (1)...(19): siRNA sense strand
cgugaggucuucugugaaa

SEQ ID NO: 2111803 - RNA, 19 nt, Homo sapiens
  misc_RNA (1)...(19): siRNA sense strand
uaaauccacugaaggaaca

SEQ ID NO: 2111804 - RNA, 19 nt, Homo sapiens
  misc_RNA (1)...(19): siRNA sense strand
gaaaggccacgguauuuag

SEQ ID NO: 2111805 - RNA, 19 nt, Homo sapiens
  misc_RNA (1)...(19): siRNA sense strand
caagaagugcugucagaaa

SEQ ID NO: 2111806 - RNA, 19 nt, Homo sapiens
  misc_RNA (1)...(19): siRNA sense strand
gacuagacaucacucagaa

SEQ ID NO: 2111807 - RNA, 19 nt, Homo sapiens
  misc_RNA (1)...(19): siRNA sense strand
ggacuagacaucacucaga

SEQ ID NO: 2111808 - RNA, 19 nt, Homo sapiens
  misc_RNA (1)...(19): siRNA sense strand
gcucacuccugucgccaua

SEQ ID NO: 2111809 - RNA, 19 nt, Homo sapiens
  misc_RNA (1)...(19): siRNA sense strand
gaagauuuggcauaugauu

SEQ ID NO: 2111810 - RNA, 19 nt, Homo sapiens
  misc_RNA (1)...(19): siRNA sense strand
ucaggaagauuuggcauau

SEQ ID NO: 2111811 - RNA, 19 nt, Homo sapiens
  misc_RNA (1)...(19): siRNA sense strand
aggaagauuuggcauauga

SEQ ID NO: 2111812 - RNA, 19 nt, Homo sapiens
  misc_RNA (1)...(19): siRNA sense strand
gacaggagacuuauuauac

SEQ ID NO: 2111813 - RNA, 19 nt, Homo sapiens
  misc_RNA (1)...(19): siRNA sense strand
cuggaaagcugaaaguguu

SEQ ID NO: 2111814 - RNA, 19 nt, Homo sapiens
  misc_RNA (1)...(19): siRNA sense strand
ucagaaaucacuaaucaga

SEQ ID NO: 2111815 - RNA, 19 nt, Homo sapiens
  misc_RNA (1)...(19): siRNA sense strand
ugaaaggccacgguauuua

SEQ ID NO: 2111816 - RNA, 19 nt, Homo sapiens
  misc_RNA (1)...(19): siRNA sense strand
cgaauguaaugucuuggaa

SEQ ID NO: 2111817 - RNA, 19 nt, Homo sapiens
  misc_RNA (1)...(19): siRNA sense strand
gggagguguucacgacuuu

SEQ ID NO: 2111818 - RNA, 19 nt, Homo sapiens
  misc_RNA (1)...(19): siRNA sense strand
aagaagugcugucagaaau

SEQ ID NO: 2111819 - RNA, 19 nt, Homo sapiens
  misc_RNA (1)...(19): siRNA sense strand
cagagugguuuguuacaga

SEQ ID NO: 2111820 - RNA, 19 nt, Homo sapiens
  misc_RNA (1)...(19): siRNA sense strand
ugaaaguguuggcuaaauc

SEQ ID NO: 2111821 - RNA, 19 nt, Homo sapiens
  misc_RNA (1)...(19): siRNA sense strand
aaggacaggagacuuauua

SEQ ID NO: 2111822 - RNA, 19 nt, Homo sapiens
  misc_RNA (1)...(19): siRNA sense strand
aaagaaaguuauggugcua

SEQ ID NO: 2111823 - RNA, 19 nt, Homo sapiens
  misc_RNA (1)...(19): siRNA sense strand
uguaaugucuuggaacuug

SEQ ID NO: 2111824 - RNA, 19 nt, Homo sapiens
  misc_RNA (1)...(19): siRNA sense strand
agaccaaugugccauaugu

SEQ ID NO: 2111825 - RNA, 19 nt, Homo sapiens
  misc_RNA (1)...(19): siRNA sense strand
gugggugccucuuauguug

SEQ ID NO: 2111826 - RNA, 19 nt, Homo sapiens
  misc_RNA (1)...(19): siRNA sense strand
ggugaaaggccacgguauu

SEQ ID NO: 2111827 - RNA, 19 nt, Homo sapiens
  misc_RNA (1)...(19): siRNA sense strand
gaauaaagugcauguaggu

SEQ ID NO: 2111828 - RNA, 19 nt, Homo sapiens
  misc_RNA (1)...(19): siRNA sense strand
caauugaaggagucuauaa

SEQ ID NO: 2111829 - RNA, 19 nt, Homo sapiens
  misc_RNA (1)...(19): siRNA sense strand
gaaauucauaccugugaug

SEQ ID NO: 2111830 - RNA, 19 nt, Homo sapiens
  misc_RNA (1)...(19): siRNA sense strand
guagguggaugugaccaaa

SEQ ID NO: 2111831 - RNA, 19 nt, Homo sapiens
  misc_RNA (1)...(19): siRNA sense strand
ggcuacagguugucucuga

SEQ ID NO: 2111832 - RNA, 19 nt, Homo sapiens
  misc_RNA (1)...(19): siRNA sense strand
guucuggccucuugaaugg

SEQ ID NO: 2111833 - RNA, 19 nt, Homo sapiens
  misc_RNA (1)...(19): siRNA sense strand
guaaugucuuggaacuuga

SEQ ID NO: 2111834 - RNA, 19 nt, Homo sapiens
  misc_RNA (1)...(19): siRNA sense strand
ggaaauucauaccugugau

SEQ ID NO: 2111835 - RNA, 19 nt, Homo sapiens
  misc_RNA (1)...(19): siRNA sense strand
gugaaaggccacgguauuu

SEQ ID NO: 2111836 - RNA, 19 nt, Homo sapiens
  misc_RNA (1)...(19): siRNA sense strand
cacaucagcucucuaaacu

SEQ ID NO: 2111837 - RNA, 19 nt, Homo sapiens
  misc_RNA (1)...(19): siRNA sense strand
ggaaauuuggcugggaaua

SEQ ID NO: 2111838 - RNA, 19 nt, Homo sapiens
  misc_RNA (1)...(19): siRNA sense strand
ggccaggguucaagaagug

SEQ ID NO: 2111839 - RNA, 19 nt, Homo sapiens
  misc_RNA (1)...(19): siRNA sense strand
ugagaagucccaaucagaa

SEQ ID NO: 2111840 - RNA, 19 nt, Homo sapiens
  misc_RNA (1)...(19): siRNA sense strand
ggagucgaauguaaugucu

SEQ ID NO: 2111841 - RNA, 19 nt, Homo sapiens
  misc_RNA (1)...(19): siRNA sense strand
gaacggacugaaucacaga

SEQ ID NO: 2111842 - RNA, 19 nt, Homo sapiens
  misc_RNA (1)...(19): siRNA sense strand
cgaccaugaucgggugaua

SEQ ID NO: 2111843 - RNA, 19 nt, Homo sapiens
  misc_RNA (1)...(19): siRNA sense strand
gcuacuugaugacaccauu

SEQ ID NO: 2111844 - RNA, 19 nt, Homo sapiens
  misc_RNA (1)...(19): siRNA sense strand
gggaauauaaucaacaagu

SEQ ID NO: 2111845 - RNA, 19 nt, Homo sapiens
  misc_RNA (1)...(19): siRNA sense strand
gccuagaugucacaguuau

SEQ ID NO: 2111846 - RNA, 19 nt, Homo sapiens
  misc_RNA (1)...(19): siRNA sense strand
ucaacucugugucugauca

SEQ ID NO: 2111847 - RNA, 19 nt, Homo sapiens
  misc_RNA (1)...(19): siRNA sense strand
gaguaugguugcuguggau

SEQ ID NO: 2111848 - RNA, 19 nt, Homo sapiens
  misc_RNA (1)...(19): siRNA sense strand
gcugcuagcucagagacuu

SEQ ID NO: 2111849 - RNA, 19 nt, Homo sapiens
  misc_RNA (1)...(19): siRNA sense strand
cccgugaggucuucuguga

SEQ ID NO: 2111850 - RNA, 19 nt, Homo sapiens
  misc_RNA (1)...(19): siRNA sense strand
gcucaacucugugucugau

SEQ ID NO: 2111851 - RNA, 19 nt, Homo sapiens
  misc_RNA (1)...(19): siRNA sense strand
caucaucgguggugguucu

SEQ ID NO: 2111852 - RNA, 19 nt, Homo sapiens
  misc_RNA (1)...(19): siRNA sense strand
guacucgggugaaagaacu

SEQ ID NO: 2111853 - RNA, 19 nt, Homo sapiens
  misc_RNA (1)...(19): siRNA sense strand
uggccuagaugucacaguu

SEQ ID NO: 2111854 - RNA, 19 nt, Homo sapiens
  misc_RNA (1)...(19): siRNA sense strand
agaaaguuauggugcuaga

SEQ ID NO: 2111855 - RNA, 19 nt, Homo sapiens
  misc_RNA (1)...(19): siRNA sense strand
guucacgacuuuggaaauc

SEQ ID NO: 2111856 - RNA, 19 nt, Homo sapiens
  misc_RNA (1)...(19): siRNA sense strand
gaugacaccauuggaauuc

SEQ ID NO: 2111857 - RNA, 19 nt, Homo sapiens
  misc_RNA (1)...(19): siRNA sense strand
caaaagcgauucagaacca

SEQ ID NO: 2111858 - RNA, 19 nt, Homo sapiens
  misc_RNA (1)...(19): siRNA sense strand
gggcaggcauuaugugacu

SEQ ID NO: 2111859 - RNA, 19 nt, Homo sapiens
  misc_RNA (1)...(19): siRNA sense strand
agucgaauguaaugucuug

SEQ ID NO: 2111860 - RNA, 19 nt, Homo sapiens
  misc_RNA (1)...(19): siRNA sense strand
guaugguugcuguggauua

SEQ ID NO: 2111861 - RNA, 19 nt, Homo sapiens
  misc_RNA (1)...(19): siRNA sense strand
caaugugccauaugucuau

SEQ ID NO: 2111862 - RNA, 19 nt, Homo sapiens
  misc_RNA (1)...(19): siRNA sense strand
ugaaggagucuauaacaca

SEQ ID NO: 2111863 - RNA, 19 nt, Homo sapiens
  misc_RNA (1)...(19): siRNA sense strand
uggccuaugucaauuccua

SEQ ID NO: 2111864 - RNA, 19 nt, Homo sapiens
  misc_RNA (1)...(19): siRNA sense strand
gcuguggccuaugucaauu

SEQ ID NO: 2111865 - RNA, 19 nt, Homo sapiens
  misc_RNA (1)...(19): siRNA sense strand
ccauaguacucgggugaaa

SEQ ID NO: 2111866 - RNA, 19 nt, Homo sapiens
  misc_RNA (1)...(19): siRNA sense strand
auaucagagugguuuguua

SEQ ID NO: 2111867 - RNA, 19 nt, Homo sapiens
  misc_RNA (1)...(19): siRNA sense strand
gagguuacccaaggauuug

SEQ ID NO: 2111868 - RNA, 19 nt, Homo sapiens
  misc_RNA (1)...(19): siRNA sense strand
ugagguuacccaaggauuu

SEQ ID NO: 2111869 - RNA, 19 nt, Homo sapiens
  misc_RNA (1)...(19): siRNA sense strand
ggagcagcauggugugaag

SEQ ID NO: 2111870 - RNA, 19 nt, Homo sapiens
  misc_RNA (1)...(19): siRNA sense strand
gggccaggguucaagaagu

SEQ ID NO: 2111871 - RNA, 19 nt, Homo sapiens
  misc_RNA (1)...(19): siRNA sense strand
ccaaacgccggugagguua

SEQ ID NO: 2111872 - RNA, 19 nt, Homo sapiens
  misc_RNA (1)...(19): siRNA sense strand
gaaaauaggcuuggagaag

SEQ ID NO: 2111873 - RNA, 19 nt, Homo sapiens
  misc_RNA (1)...(19): siRNA sense strand
gacagggacuggcagaaaa

SEQ ID NO: 2111874 - RNA, 19 nt, Homo sapiens
  misc_RNA (1)...(19): siRNA sense strand
caggagacuuauuauacug

SEQ ID NO: 2111875 - RNA, 19 nt, Homo sapiens
  misc_RNA (1)...(19): siRNA sense strand
uuaugugacucaaggaaau

SEQ ID NO: 2111876 - RNA, 19 nt, Homo sapiens
  misc_RNA (1)...(19): siRNA sense strand
gugaauaaagugcauguag

SEQ ID NO: 2111877 - RNA, 19 nt, Homo sapiens
  misc_RNA (1)...(19): siRNA sense strand
agaaaacugugcccaauau

SEQ ID NO: 2111878 - RNA, 19 nt, Homo sapiens
  misc_RNA (1)...(19): siRNA sense strand
gcacagagauucccugaag

SEQ ID NO: 2111879 - RNA, 19 nt, Homo sapiens
  misc_RNA (1)...(19): siRNA sense strand
uaagaggacugacaagaaa

SEQ ID NO: 2111880 - RNA, 19 nt, Homo sapiens
  misc_RNA (1)...(19): siRNA sense strand
gccaaggucuuacacauga

SEQ ID NO: 2111881 - RNA, 19 nt, Homo sapiens
  misc_RNA (1)...(19): siRNA sense strand
ccaggaagcugaaggugaa

SEQ ID NO: 2111882 - RNA, 19 nt, Homo sapiens
  misc_RNA (1)...(19): siRNA sense strand
uuaaggaguuugaggaauu

SEQ ID NO: 2111883 - RNA, 19 nt, Homo sapiens
  misc_RNA (1)...(19): siRNA sense strand
ggaaucggcacuuugauga

SEQ ID NO: 2111884 - RNA, 19 nt, Homo sapiens
  misc_RNA (1)...(19): siRNA sense strand
ucaagauccuggagauauu

SEQ ID NO: 2111885 - RNA, 19 nt, Homo sapiens
  misc_RNA (1)...(19): siRNA sense strand
caagggagcauuauaucuu

SEQ ID NO: 2111886 - RNA, 19 nt, Homo sapiens
  misc_RNA (1)...(19): siRNA sense strand
gcaagaaaaugcgcuuuaa

SEQ ID NO: 2111887 - RNA, 19 nt, Homo sapiens
  misc_RNA (1)...(19): siRNA sense strand
cgggucaucuucuggauaa

SEQ ID NO: 2111888 - RNA, 19 nt, Homo sapiens
  misc_RNA (1)...(19): siRNA sense strand
uaaggaguuugaggaauuu

SEQ ID NO: 2111889 - RNA, 19 nt, Homo sapiens
  misc_RNA (1)...(19): siRNA sense strand
cuaagacucccaucaauga

SEQ ID NO: 2111890 - RNA, 19 nt, Homo sapiens
  misc_RNA (1)...(19): siRNA sense strand
agagguggcuggagaacaa

SEQ ID NO: 2111891 - RNA, 19 nt, Homo sapiens
  misc_RNA (1)...(19): siRNA sense strand
ugaaaaugcucccgucuuu

SEQ ID NO: 2111892 - RNA, 19 nt, Homo sapiens
  misc_RNA (1)...(19): siRNA sense strand
ggacucugcccgucuaaga

SEQ ID NO: 2111893 - RNA, 19 nt, Homo sapiens
  misc_RNA (1)...(19): siRNA sense strand
gcuggaagcucuguaaguc

SEQ ID NO: 2111894 - RNA, 19 nt, Homo sapiens
  misc_RNA (1)...(19): siRNA sense strand
ucaagcaguuccagcagaa

SEQ ID NO: 2111895 - RNA, 19 nt, Homo sapiens
  misc_RNA (1)...(19): siRNA sense strand
ccacugcaagggagcauua

SEQ ID NO: 2111896 - RNA, 19 nt, Homo sapiens
  misc_RNA (1)...(19): siRNA sense strand
ggugagaaccagagaauca

SEQ ID NO: 2111897 - RNA, 19 nt, Homo sapiens
  misc_RNA (1)...(19): siRNA sense strand
gcucuucaguuguguucaa

SEQ ID NO: 2111898 - RNA, 19 nt, Homo sapiens
  misc_RNA (1)...(19): siRNA sense strand
gagaacaagcccagcauca

SEQ ID NO: 2111899 - RNA, 19 nt, Homo sapiens
  misc_RNA (1)...(19): siRNA sense strand
gcacaacuuucuggucuac

SEQ ID NO: 2111900 - RNA, 19 nt, Homo sapiens
  misc_RNA (1)...(19): siRNA sense strand
accaagagguggaggauau

SEQ ID NO: 2111901 - RNA, 19 nt, Homo sapiens
  misc_RNA (1)...(19): siRNA sense strand
cuaagaggacugacaagaa

SEQ ID NO: 2111902 - RNA, 19 nt, Homo sapiens
  misc_RNA (1)...(19): siRNA sense strand
ugaaggguccgcucaagaa

SEQ ID NO: 2111903 - RNA, 19 nt, Homo sapiens
  misc_RNA (1)...(19): siRNA sense strand
gccuggcgcucuucaguug

SEQ ID NO: 2111904 - RNA, 19 nt, Homo sapiens
  misc_RNA (1)...(19): siRNA sense strand
cugcauagccgcaagauca

SEQ ID NO: 2111905 - RNA, 19 nt, Homo sapiens
  misc_RNA (1)...(19): siRNA sense strand
caagaaaacgccaaagaaa

SEQ ID NO: 2111906 - RNA, 19 nt, Homo sapiens
  misc_RNA (1)...(19): siRNA sense strand
uggaggauauagugaucua

SEQ ID NO: 2111907 - RNA, 19 nt, Homo sapiens
  misc_RNA (1)...(19): siRNA sense strand
caagauccuggagauauuu

SEQ ID NO: 2111908 - RNA, 19 nt, Homo sapiens
  misc_RNA (1)...(19): siRNA sense strand
gcaagggagcauuauaucu

SEQ ID NO: 2111909 - RNA, 19 nt, Homo sapiens
  misc_RNA (1)...(19): siRNA sense strand
ucuggaagcuagagauauc

SEQ ID NO: 2111910 - RNA, 19 nt, Homo sapiens
  misc_RNA (1)...(19): siRNA sense strand
gggaaucggcacuuugaug

SEQ ID NO: 2111911 - RNA, 19 nt, Homo sapiens
  misc_RNA (1)...(19): siRNA sense strand
aagggagcauuauaucuug

SEQ ID NO: 2111912 - RNA, 19 nt, Homo sapiens
  misc_RNA (1)...(19): siRNA sense strand
gguggaggauauagugauc

SEQ ID NO: 2111913 - RNA, 19 nt, Homo sapiens
  misc_RNA (1)...(19): siRNA sense strand
ccaggagacaagaucauuu

SEQ ID NO: 2111914 - RNA, 19 nt, Homo sapiens
  misc_RNA (1)...(19): siRNA sense strand
gaagcucuguaaguccuau

SEQ ID NO: 2111915 - RNA, 19 nt, Homo sapiens
  misc_RNA (1)...(19): siRNA sense strand
uggaggagauggaggaagu

SEQ ID NO: 2111916 - RNA, 19 nt, Homo sapiens
  misc_RNA (1)...(19): siRNA sense strand
gcagagugcccagccaaau

SEQ ID NO: 2111917 - RNA, 19 nt, Homo sapiens
  misc_RNA (1)...(19): siRNA sense strand
ccaguggucugcagcaaac

SEQ ID NO: 2111918 - RNA, 19 nt, Homo sapiens
  misc_RNA (1)...(19): siRNA sense strand
guucaucgcggcuguaaag

SEQ ID NO: 2111919 - RNA, 19 nt, Homo sapiens
  misc_RNA (1)...(19): siRNA sense strand
guucuggaagcuagagaua

SEQ ID NO: 2111920 - RNA, 19 nt, Homo sapiens
  misc_RNA (1)...(19): siRNA sense strand
gcagucggagucccucuga

SEQ ID NO: 2111921 - RNA, 19 nt, Homo sapiens
  misc_RNA (1)...(19): siRNA sense strand
uacaagcaguggucuaugg

SEQ ID NO: 2111922 - RNA, 19 nt, Homo sapiens
  misc_RNA (1)...(19): siRNA sense strand
gaaccaagagguggaggau

SEQ ID NO: 2111923 - RNA, 19 nt, Homo sapiens
  misc_RNA (1)...(19): siRNA sense strand
ccaugacccuggaggagau

SEQ ID NO: 2111924 - RNA, 19 nt, Homo sapiens
  misc_RNA (1)...(19): siRNA sense strand
caugaaagccuugcuguac

SEQ ID NO: 2111925 - RNA, 19 nt, Homo sapiens
  misc_RNA (1)...(19): siRNA sense strand
gugggaaucggcacuuuga

SEQ ID NO: 2111926 - RNA, 19 nt, Homo sapiens
  misc_RNA (1)...(19): siRNA sense strand
ccaaagaaaagcaagaaaa

SEQ ID NO: 2111927 - RNA, 19 nt, Homo sapiens
  misc_RNA (1)...(19): siRNA sense strand
uaaagagguggcuggagaa

SEQ ID NO: 2111928 - RNA, 19 nt, Homo sapiens
  misc_RNA (1)...(19): siRNA sense strand
ugacccacgcccauuauga

SEQ ID NO: 2111929 - RNA, 19 nt, Homo sapiens
  misc_RNA (1)...(19): siRNA sense strand
ggaacaagaacuacaugac

SEQ ID NO: 2111930 - RNA, 19 nt, Homo sapiens
  misc_RNA (1)...(19): siRNA sense strand
caagaucauuuuccagaug

SEQ ID NO: 2111931 - RNA, 19 nt, Homo sapiens
  misc_RNA (1)...(19): siRNA sense strand
ggcacaacuuucuggucua

SEQ ID NO: 2111932 - RNA, 19 nt, Homo sapiens
  misc_RNA (1)...(19): siRNA sense strand
ccaagagguggaggauaua

SEQ ID NO: 2111933 - RNA, 19 nt, Homo sapiens
  misc_RNA (1)...(19): siRNA sense strand
cuagaguccuuuggugaug

SEQ ID NO: 2111934 - RNA, 19 nt, Homo sapiens
  misc_RNA (1)...(19): siRNA sense strand
gggaagcacaacaccauca

SEQ ID NO: 2111935 - RNA, 19 nt, Homo sapiens
  misc_RNA (1)...(19): siRNA sense strand
agaguccuuuggugaugua

SEQ ID NO: 2111936 - RNA, 19 nt, Homo sapiens
  misc_RNA (1)...(19): siRNA sense strand
acaugacccacgcccauua

SEQ ID NO: 2111937 - RNA, 19 nt, Homo sapiens
  misc_RNA (1)...(19): siRNA sense strand
ucaugaaagccuugcugua

SEQ ID NO: 2111938 - RNA, 19 nt, Homo sapiens
  misc_RNA (1)...(19): siRNA sense strand
ggccaaggucuuacacaug

SEQ ID NO: 2111939 - RNA, 19 nt, Homo sapiens
  misc_RNA (1)...(19): siRNA sense strand
gcuagaguccuuuggugau

SEQ ID NO: 2111940 - RNA, 19 nt, Homo sapiens
  misc_RNA (1)...(19): siRNA sense strand
gacccacgcccauuaugau

SEQ ID NO: 2111941 - RNA, 19 nt, Homo sapiens
  misc_RNA (1)...(19): siRNA sense strand
uugaggaauuuaccaggaa

SEQ ID NO: 2111942 - RNA, 19 nt, Homo sapiens
  misc_RNA (1)...(19): siRNA sense strand
cugcaagggagcauuauau

SEQ ID NO: 2111943 - RNA, 19 nt, Homo sapiens
  misc_RNA (1)...(19): siRNA sense strand
cagagugcccagccaaaug

SEQ ID NO: 2111944 - RNA, 19 nt, Homo sapiens
  misc_RNA (1)...(19): siRNA sense strand
gaaggguccgcucaagaag

SEQ ID NO: 2111945 - RNA, 19 nt, Homo sapiens
  misc_RNA (1)...(19): siRNA sense strand
uggauauccuggccaauac

SEQ ID NO: 2111946 - RNA, 19 nt, Homo sapiens
  misc_RNA (1)...(19): siRNA sense strand
gcuacuacucugacuggaa

SEQ ID NO: 2111947 - RNA, 19 nt, Homo sapiens
  misc_RNA (1)...(19): siRNA sense strand
ggagcuagaguccuuuggu

SEQ ID NO: 2111948 - RNA, 19 nt, Homo sapiens
  misc_RNA (1)...(19): siRNA sense strand
gaaggucuuuucuccgaau

SEQ ID NO: 2111949 - RNA, 19 nt, Homo sapiens
  misc_RNA (1)...(19): siRNA sense strand
gaguucaucgcggcuguaa

SEQ ID NO: 2111950 - RNA, 19 nt, Homo sapiens
  misc_RNA (1)...(19): siRNA sense strand
gagacaagaucauuuucca

SEQ ID NO: 2111951 - RNA, 19 nt, Homo sapiens
  misc_RNA (1)...(19): siRNA sense strand
gaagcaggagguggauuca

SEQ ID NO: 2111952 - RNA, 19 nt, Homo sapiens
  misc_RNA (1)...(19): siRNA sense strand
ucuaagacucccaucaaug

SEQ ID NO: 2111953 - RNA, 19 nt, Homo sapiens
  misc_RNA (1)...(19): siRNA sense strand
gagguggaggauauaguga

SEQ ID NO: 2111954 - RNA, 19 nt, Homo sapiens
  misc_RNA (1)...(19): siRNA sense strand
ugucggucauguacuccua

SEQ ID NO: 2111955 - RNA, 19 nt, Homo sapiens
  misc_RNA (1)...(19): siRNA sense strand
uaagacucccaucaaugaa

SEQ ID NO: 2111956 - RNA, 19 nt, Homo sapiens
  misc_RNA (1)...(19): siRNA sense strand
aaaaugcucccgucuuuga

SEQ ID NO: 2111957 - RNA, 19 nt, Homo sapiens
  misc_RNA (1)...(19): siRNA sense strand
gauccugaaccggucauug

SEQ ID NO: 2111958 - RNA, 19 nt, Homo sapiens
  misc_RNA (1)...(19): siRNA sense strand
cagcuucaaaguucuggaa

SEQ ID NO: 2111959 - RNA, 19 nt, Homo sapiens
  misc_RNA (1)...(19): siRNA sense strand
auggauauccuggccaaua

SEQ ID NO: 2111960 - RNA, 19 nt, Homo sapiens
  misc_RNA (1)...(19): siRNA sense strand
agaagcaggagguggauuc

SEQ ID NO: 2111961 - RNA, 19 nt, Homo sapiens
  misc_RNA (1)...(19): siRNA sense strand
gacaagaaaacgccaaaga

SEQ ID NO: 2111962 - RNA, 19 nt, Homo sapiens
  misc_RNA (1)...(19): siRNA sense strand
guacccaggagacaagauc

SEQ ID NO: 2111963 - RNA, 19 nt, Homo sapiens
  misc_RNA (1)...(19): siRNA sense strand
cuaccaggaccaccaggaa

SEQ ID NO: 2111964 - RNA, 19 nt, Homo sapiens
  misc_RNA (1)...(19): siRNA sense strand
aaaugcgcuuuaaggaguu

SEQ ID NO: 2111965 - RNA, 19 nt, Homo sapiens
  misc_RNA (1)...(19): siRNA sense strand
cuaugaagcguaccacagu

SEQ ID NO: 2111966 - RNA, 19 nt, Homo sapiens
  misc_RNA (1)...(19): siRNA sense strand
ucuaagaggacugacaaga

SEQ ID NO: 2111967 - RNA, 19 nt, Homo sapiens
  misc_RNA (1)...(19): siRNA sense strand
ggaggcuacuacucugacu

SEQ ID NO: 2111968 - RNA, 19 nt, Homo sapiens
  misc_RNA (1)...(19): siRNA sense strand
uaacagagcuccaccagaa

SEQ ID NO: 2111969 - RNA, 19 nt, Homo sapiens
  misc_RNA (1)...(19): siRNA sense strand
gggacaagcuugcauagua

SEQ ID NO: 2111970 - RNA, 19 nt, Homo sapiens
  misc_RNA (1)...(19): siRNA sense strand
gaacgcaugugcugagauu

SEQ ID NO: 2111971 - RNA, 19 nt, Homo sapiens
  misc_RNA (1)...(19): siRNA sense strand
caacguugcugaauacuug

SEQ ID NO: 2111972 - RNA, 19 nt, Homo sapiens
  misc_RNA (1)...(19): siRNA sense strand
gagauugccucacucauuc

SEQ ID NO: 2111973 - RNA, 19 nt, Homo sapiens
  misc_RNA (1)...(19): siRNA sense strand
gcagugaacaguuauuuga

SEQ ID NO: 2111974 - RNA, 19 nt, Homo sapiens
  misc_RNA (1)...(19): siRNA sense strand
ggacaagcuugcauaguag

SEQ ID NO: 2111975 - RNA, 19 nt, Homo sapiens
  misc_RNA (1)...(19): siRNA sense strand
ggagaacauuaacgugauu

SEQ ID NO: 2111976 - RNA, 19 nt, Homo sapiens
  misc_RNA (1)...(19): siRNA sense strand
gaaagcagacagaaucaga

SEQ ID NO: 2111977 - RNA, 19 nt, Homo sapiens
  misc_RNA (1)...(19): siRNA sense strand
ggagugauuucaaacuuuc

SEQ ID NO: 2111978 - RNA, 19 nt, Homo sapiens
  misc_RNA (1)...(19): siRNA sense strand
gggagugauuucaaacuuu

SEQ ID NO: 2111979 - RNA, 19 nt, Homo sapiens
  misc_RNA (1)...(19): siRNA sense strand
ggaggcaaaucccaagaug

SEQ ID NO: 2111980 - RNA, 19 nt, Homo sapiens
  misc_RNA (1)...(19): siRNA sense strand
guucagcacuuuauuccuu

SEQ ID NO: 2111981 - RNA, 19 nt, Homo sapiens
  misc_RNA (1)...(19): siRNA sense strand
ucagagggacuauuccuua

SEQ ID NO: 2111982 - RNA, 19 nt, Homo sapiens
  misc_RNA (1)...(19): siRNA sense strand
cgacaacguugcugaauac

SEQ ID NO: 2111983 - RNA, 19 nt, Homo sapiens
  misc_RNA (1)...(19): siRNA sense strand
ucagagagguagagcagaa

SEQ ID NO: 2111984 - RNA, 19 nt, Homo sapiens
  misc_RNA (1)...(19): siRNA sense strand
cagagggacuauuccuuaa

SEQ ID NO: 2111985 - RNA, 19 nt, Homo sapiens
  misc_RNA (1)...(19): siRNA sense strand
gcacaaaggcugccauugc

SEQ ID NO: 2111986 - RNA, 19 nt, Homo sapiens
  misc_RNA (1)...(19): siRNA sense strand
ccaccagaaugaaaucuug

SEQ ID NO: 2111987 - RNA, 19 nt, Homo sapiens
  misc_RNA (1)...(19): siRNA sense strand
gcagacagaaucagaacaa

SEQ ID NO: 2111988 - RNA, 19 nt, Homo sapiens
  misc_RNA (1)...(19): siRNA sense strand
aaaagaaacuugagcacua

SEQ ID NO: 2111989 - RNA, 19 nt, Homo sapiens
  misc_RNA (1)...(19): siRNA sense strand
uagaagggcuggagaaugc

SEQ ID NO: 2111990 - RNA, 19 nt, Homo sapiens
  misc_RNA (1)...(19): siRNA sense strand
ggagaugacagcuguuaug

SEQ ID NO: 2111991 - RNA, 19 nt, Homo sapiens
  misc_RNA (1)...(19): siRNA sense strand
gaggagcgauauagaugug

SEQ ID NO: 2111992 - RNA, 19 nt, Homo sapiens
  misc_RNA (1)...(19): siRNA sense strand
ccagagagauugccucacu

SEQ ID NO: 2111993 - RNA, 19 nt, Homo sapiens
  misc_RNA (1)...(19): siRNA sense strand
gcaccuaccagcucugcua

SEQ ID NO: 2111994 - RNA, 19 nt, Homo sapiens
  misc_RNA (1)...(19): siRNA sense strand
uggaagaacagcuaaauga

SEQ ID NO: 2111995 - RNA, 19 nt, Homo sapiens
  misc_RNA (1)...(19): siRNA sense strand
gcucugcuaugauggaaau

SEQ ID NO: 2111996 - RNA, 19 nt, Homo sapiens
  misc_RNA (1)...(19): siRNA sense strand
ccagaaagcagacagaauc

SEQ ID NO: 2111997 - RNA, 19 nt, Homo sapiens
  misc_RNA (1)...(19): siRNA sense strand
ggagcgauauagaugugaa

SEQ ID NO: 2111998 - RNA, 19 nt, Homo sapiens
  misc_RNA (1)...(19): siRNA sense strand
gaacagcuaaaugaccuaa

SEQ ID NO: 2111999 - RNA, 19 nt, Homo sapiens
  misc_RNA (1)...(19): siRNA sense strand
gggacgcccucuucagcua

SEQ ID NO: 2112000 - RNA, 19 nt, Homo sapiens
  misc_RNA (1)...(19): siRNA sense strand
uaccagcucugcuaugaug

SEQ ID NO: 2112001 - RNA, 19 nt, Homo sapiens
  misc_RNA (1)...(19): siRNA sense strand
auauagaugugaacgauug

SEQ ID NO: 2112002 - RNA, 19 nt, Homo sapiens
  misc_RNA (1)...(19): siRNA sense strand
gaucgaacgguuggaagua

SEQ ID NO: 2112003 - RNA, 19 nt, Homo sapiens
  misc_RNA (1)...(19): siRNA sense strand
cgauauagaugugaacgau

SEQ ID NO: 2112004 - RNA, 19 nt, Homo sapiens
  misc_RNA (1)...(19): siRNA sense strand
caaacacccuggacaugca

SEQ ID NO: 2112005 - RNA, 19 nt, Homo sapiens
  misc_RNA (1)...(19): siRNA sense strand
caaccugaaggacucuuua

SEQ ID NO: 2112006 - RNA, 19 nt, Homo sapiens
  misc_RNA (1)...(19): siRNA sense strand
gaaaucugcccaaacuauc

SEQ ID NO: 2112007 - RNA, 19 nt, Homo sapiens
  misc_RNA (1)...(19): siRNA sense strand
gaagcucacagaacaaauc

SEQ ID NO: 2112008 - RNA, 19 nt, Homo sapiens
  misc_RNA (1)...(19): siRNA sense strand
gaagaagaaccagaaaucu

SEQ ID NO: 2112009 - RNA, 19 nt, Homo sapiens
  misc_RNA (1)...(19): siRNA sense strand
ccuaccagcucugcuauga

SEQ ID NO: 2112010 - RNA, 19 nt, Homo sapiens
  misc_RNA (1)...(19): siRNA sense strand
gaaugaaaucuugaacuug

SEQ ID NO: 2112011 - RNA, 19 nt, Homo sapiens
  misc_RNA (1)...(19): siRNA sense strand
acgacaacguugcugaaua

SEQ ID NO: 2112012 - RNA, 19 nt, Homo sapiens
  misc_RNA (1)...(19): siRNA sense strand
ucacagaacaaaucaagau

SEQ ID NO: 2112013 - RNA, 19 nt, Homo sapiens
  misc_RNA (1)...(19): siRNA sense strand
guaagcagccuugcccaaa

SEQ ID NO: 2112014 - RNA, 19 nt, Homo sapiens
  misc_RNA (1)...(19): siRNA sense strand
gugaaggugugguggauag

SEQ ID NO: 2112015 - RNA, 19 nt, Homo sapiens
  misc_RNA (1)...(19): siRNA sense strand
augcagagcucaggauuug

SEQ ID NO: 2112016 - RNA, 19 nt, Homo sapiens
  misc_RNA (1)...(19): siRNA sense strand
ggacgacaacguugcugaa

SEQ ID NO: 2112017 - RNA, 19 nt, Homo sapiens
  misc_RNA (1)...(19): siRNA sense strand
gcagagcucaggauuugau

SEQ ID NO: 2112018 - RNA, 19 nt, Homo sapiens
  misc_RNA (1)...(19): siRNA sense strand
gagaagaagaaccagaaau

SEQ ID NO: 2112019 - RNA, 19 nt, Homo sapiens
  misc_RNA (1)...(19): siRNA sense strand
gcagauccagaaccugaaa

SEQ ID NO: 2112020 - RNA, 19 nt, Homo sapiens
  misc_RNA (1)...(19): siRNA sense strand
ggaacuggcaagcauggaa

SEQ ID NO: 2112021 - RNA, 19 nt, Homo sapiens
  misc_RNA (1)...(19): siRNA sense strand
gaugugaacgauuggaaga

SEQ ID NO: 2112022 - RNA, 19 nt, Homo sapiens
  misc_RNA (1)...(19): siRNA sense strand
uacaugagauccaggagau

SEQ ID NO: 2112023 - RNA, 19 nt, Homo sapiens
  misc_RNA (1)...(19): siRNA sense strand
ccacaaugcuuuggagaac

SEQ ID NO: 2112024 - RNA, 19 nt, Homo sapiens
  misc_RNA (1)...(19): siRNA sense strand
agagauugccucacucauu

SEQ ID NO: 2112025 - RNA, 19 nt, Homo sapiens
  misc_RNA (1)...(19): siRNA sense strand
agaaaucugcccaaacuau

SEQ ID NO: 2112026 - RNA, 19 nt, Homo sapiens
  misc_RNA (1)...(19): siRNA sense strand
gaagucuggucaggagaug

SEQ ID NO: 2112027 - RNA, 19 nt, Homo sapiens
  misc_RNA (1)...(19): siRNA sense strand
gcaccagggucugaaggau

SEQ ID NO: 2112028 - RNA, 19 nt, Homo sapiens
  misc_RNA (1)...(19): siRNA sense strand
ggacguucagcacuuuauu

SEQ ID NO: 2112029 - RNA, 19 nt, Homo sapiens
  misc_RNA (1)...(19): siRNA sense strand
gagcuccaccagaaugaaa

SEQ ID NO: 2112030 - RNA, 19 nt, Homo sapiens
  misc_RNA (1)...(19): siRNA sense strand
ggaaacccaggccagacua

SEQ ID NO: 2112031 - RNA, 19 nt, Homo sapiens
  misc_RNA (1)...(19): siRNA sense strand
gggaaggcuuugggaguga

SEQ ID NO: 2112032 - RNA, 19 nt, Homo sapiens
  misc_RNA (1)...(19): siRNA sense strand
agaagaagaaccagaaauc

SEQ ID NO: 2112033 - RNA, 19 nt, Homo sapiens
  misc_RNA (1)...(19): siRNA sense strand
acagcuaaaugaccuaaca

SEQ ID NO: 2112034 - RNA, 19 nt, Homo sapiens
  misc_RNA (1)...(19): siRNA sense strand
ugaaggauguaggagcaaa

SEQ ID NO: 2112035 - RNA, 19 nt, Homo sapiens
  misc_RNA (1)...(19): siRNA sense strand
ugaaauggaucuggaaagc

SEQ ID NO: 2112036 - RNA, 19 nt, Homo sapiens
  misc_RNA (1)...(19): siRNA sense strand
ucgcguaucaguccuauga

SEQ ID NO: 2112037 - RNA, 19 nt, Homo sapiens
  misc_RNA (1)...(19): siRNA sense strand
aggauuugaugcacuacua

SEQ ID NO: 2112038 - RNA, 19 nt, Homo sapiens
  misc_RNA (1)...(19): siRNA sense strand
gggcagugaacaguuauuu

SEQ ID NO: 2112039 - RNA, 19 nt, Homo sapiens
  misc_RNA (1)...(19): siRNA sense strand
cgcaggaggucaucagugu

SEQ ID NO: 2112040 - RNA, 19 nt, Homo sapiens
  misc_RNA (1)...(19): siRNA sense strand
caggagaugacagcuguua

SEQ ID NO: 2112041 - RNA, 19 nt, Homo sapiens
  misc_RNA (1)...(19): siRNA sense strand
ggaaagccagaacgcaugu

SEQ ID NO: 2112042 - RNA, 19 nt, Homo sapiens
  misc_RNA (1)...(19): siRNA sense strand
aaacaaacacccuggacau

SEQ ID NO: 2112043 - RNA, 19 nt, Homo sapiens
  misc_RNA (1)...(19): siRNA sense strand
ugccaacagugcagacaaa

SEQ ID NO: 2112044 - RNA, 19 nt, Homo sapiens
  misc_RNA (1)...(19): siRNA sense strand
cacaaaggcugccauugcu

SEQ ID NO: 2112045 - RNA, 19 nt, Homo sapiens
  misc_RNA (1)...(19): siRNA sense strand
uugaugcacuacuacauga

SEQ ID NO: 2112046 - RNA, 19 nt, Homo sapiens
  misc_RNA (1)...(19): siRNA sense strand
uuucaaacuuucagucuag

SEQ ID NO: 2112047 - RNA, 19 nt, Homo sapiens
  misc_RNA (1)...(19): siRNA sense strand
caacagugcagacaaacag

SEQ ID NO: 2112048 - RNA, 19 nt, Homo sapiens
  misc_RNA (1)...(19): siRNA sense strand
gcucacagaacaaaucaag

SEQ ID NO: 2112049 - RNA, 19 nt, Homo sapiens
  misc_RNA (1)...(19): siRNA sense strand
cagacagaaucagaacaaa

SEQ ID NO: 2112050 - RNA, 19 nt, Homo sapiens
  misc_RNA (1)...(19): siRNA sense strand
aaagaaacuugagcacuac

SEQ ID NO: 2112051 - RNA, 19 nt, Homo sapiens
  misc_RNA (1)...(19): siRNA sense strand
acaggacguucagcacuuu

SEQ ID NO: 2112052 - RNA, 19 nt, Homo sapiens
  misc_RNA (1)...(19): siRNA sense strand
gauauagaugugaacgauu

SEQ ID NO: 2112053 - RNA, 19 nt, Homo sapiens
  misc_RNA (1)...(19): siRNA sense strand
ggucuucauccacaacuga

SEQ ID NO: 2112054 - RNA, 19 nt, Homo sapiens
  misc_RNA (1)...(19): siRNA sense strand
ggaagaacagcuaaaugac

SEQ ID NO: 2112055 - RNA, 19 nt, Homo sapiens
  misc_RNA (1)...(19): siRNA sense strand
gcauccagcuccaaaacaa

SEQ ID NO: 2112056 - RNA, 19 nt, Homo sapiens
  misc_RNA (1)...(19): siRNA sense strand
ugggagugauuucaaacuu

SEQ ID NO: 2112057 - RNA, 19 nt, Homo sapiens
  misc_RNA (1)...(19): siRNA sense strand
ucaaagcccagagagauug

SEQ ID NO: 2112058 - RNA, 19 nt, Homo sapiens
  misc_RNA (1)...(19): siRNA sense strand
ccgcaucaagcaagucuuu

SEQ ID NO: 2112059 - RNA, 19 nt, Homo sapiens
  misc_RNA (1)...(19): siRNA sense strand
ggaggagcgauauagaugu

SEQ ID NO: 2112060 - RNA, 19 nt, Homo sapiens
  misc_RNA (1)...(19): siRNA sense strand
ugugguggauagugucaaa

SEQ ID NO: 2112061 - RNA, 19 nt, Homo sapiens
  misc_RNA (1)...(19): siRNA sense strand
cgagugccacccaagauga

SEQ ID NO: 2112062 - RNA, 19 nt, Homo sapiens
  misc_RNA (1)...(19): siRNA sense strand
gaacuugaagcaggaacug

SEQ ID NO: 2112063 - RNA, 19 nt, Homo sapiens
  misc_RNA (1)...(19): siRNA sense strand
caucagugucuccacauga

SEQ ID NO: 2112064 - RNA, 19 nt, Homo sapiens
  misc_RNA (1)...(19): siRNA sense strand
ggaagucuggucaggagau

SEQ ID NO: 2112065 - RNA, 19 nt, Homo sapiens
  misc_RNA (1)...(19): siRNA sense strand
caagcaagucuuugagaag

SEQ ID NO: 2112066 - RNA, 19 nt, Homo sapiens
  misc_RNA (1)...(19): siRNA sense strand
uggagaacauuaacgugau

SEQ ID NO: 2112067 - RNA, 19 nt, Homo sapiens
  misc_RNA (1)...(19): siRNA sense strand
guagugaagaagauuguuc

SEQ ID NO: 2112068 - RNA, 19 nt, Homo sapiens
  misc_RNA (1)...(19): siRNA sense strand
agagagagauuccuuauua

SEQ ID NO: 2112069 - RNA, 19 nt, Homo sapiens
  misc_RNA (1)...(19): siRNA sense strand
cuacauagguauuucauug

SEQ ID NO: 2112070 - RNA, 19 nt, Homo sapiens
  misc_RNA (1)...(19): siRNA sense strand
ucacucagcuuccaaaguu

SEQ ID NO: 2112071 - RNA, 19 nt, Homo sapiens
  misc_RNA (1)...(19): siRNA sense strand
acagaagcauugagauuua

SEQ ID NO: 2112072 - RNA, 19 nt, Homo sapiens
  misc_RNA (1)...(19): siRNA sense strand
auaaggaucuggcauguuu

SEQ ID NO: 2112073 - RNA, 19 nt, Homo sapiens
  misc_RNA (1)...(19): siRNA sense strand
gcauugagauuuagaacug

SEQ ID NO: 2112074 - RNA, 19 nt, Homo sapiens
  misc_RNA (1)...(19): siRNA sense strand
ggaaauauucuucaacaga

SEQ ID NO: 2112075 - RNA, 19 nt, Homo sapiens
  misc_RNA (1)...(19): siRNA sense strand
gcaaagagaagagauuauu

SEQ ID NO: 2112076 - RNA, 19 nt, Homo sapiens
  misc_RNA (1)...(19): siRNA sense strand
gcugguaacuacauaggua

SEQ ID NO: 2112077 - RNA, 19 nt, Homo sapiens
  misc_RNA (1)...(19): siRNA sense strand
uaacaaaucaguggccuua

SEQ ID NO: 2112078 - RNA, 19 nt, Homo sapiens
  misc_RNA (1)...(19): siRNA sense strand
gagcaaagagaagagauua

SEQ ID NO: 2112079 - RNA, 19 nt, Homo sapiens
  misc_RNA (1)...(19): siRNA sense strand
ggagauacaacugcuauaa

SEQ ID NO: 2112080 - RNA, 19 nt, Homo sapiens
  misc_RNA (1)...(19): siRNA sense strand
gaucaauaaugccauaaca

SEQ ID NO: 2112081 - RNA, 19 nt, Homo sapiens
  misc_RNA (1)...(19): siRNA sense strand
cccaauaccuuagaaguaa

SEQ ID NO: 2112082 - RNA, 19 nt, Homo sapiens
  misc_RNA (1)...(19): siRNA sense strand
guacggaaauauucuucaa

SEQ ID NO: 2112083 - RNA, 19 nt, Homo sapiens
  misc_RNA (1)...(19): siRNA sense strand
ggagacauuugcagcauca

SEQ ID NO: 2112084 - RNA, 19 nt, Homo sapiens
  misc_RNA (1)...(19): siRNA sense strand
guauucagguucaaugcua

SEQ ID NO: 2112085 - RNA, 19 nt, Homo sapiens
  misc_RNA (1)...(19): siRNA sense strand
ggaguucaaccucacauuu

SEQ ID NO: 2112086 - RNA, 19 nt, Homo sapiens
  misc_RNA (1)...(19): siRNA sense strand
gauaugcuuugugcccuua

SEQ ID NO: 2112087 - RNA, 19 nt, Homo sapiens
  misc_RNA (1)...(19): siRNA sense strand
gagcaauauuugaaucuuc

SEQ ID NO: 2112088 - RNA, 19 nt, Homo sapiens
  misc_RNA (1)...(19): siRNA sense strand
gaaaauacagcacugauga

SEQ ID NO: 2112089 - RNA, 19 nt, Homo sapiens
  misc_RNA (1)...(19): siRNA sense strand
cagcauuacugucccaaga

SEQ ID NO: 2112090 - RNA, 19 nt, Homo sapiens
  misc_RNA (1)...(19): siRNA sense strand
gagagagauuccuuauuag

SEQ ID NO: 2112091 - RNA, 19 nt, Homo sapiens
  misc_RNA (1)...(19): siRNA sense strand
gaacucaugcgauuacuac

SEQ ID NO: 2112092 - RNA, 19 nt, Homo sapiens
  misc_RNA (1)...(19): siRNA sense strand
acaaaucaguggccuuaug

SEQ ID NO: 2112093 - RNA, 19 nt, Homo sapiens
  misc_RNA (1)...(19): siRNA sense strand
cagguucaaugcuaauauu

SEQ ID NO: 2112094 - RNA, 19 nt, Homo sapiens
  misc_RNA (1)...(19): siRNA sense strand
ggaugucguugcuucaaau

SEQ ID NO: 2112095 - RNA, 19 nt, Homo sapiens
  misc_RNA (1)...(19): siRNA sense strand
caacuuugcagaugcugua

SEQ ID NO: 2112096 - RNA, 19 nt, Homo sapiens
  misc_RNA (1)...(19): siRNA sense strand
gaaguauaagcgugucuuu

SEQ ID NO: 2112097 - RNA, 19 nt, Homo sapiens
  misc_RNA (1)...(19): siRNA sense strand
cauauaaucccaauaccuu

SEQ ID NO: 2112098 - RNA, 19 nt, Homo sapiens
  misc_RNA (1)...(19): siRNA sense strand
caacagagagagauuccuu

SEQ ID NO: 2112099 - RNA, 19 nt, Homo sapiens
  misc_RNA (1)...(19): siRNA sense strand
gggcaaguacggaaauauu

SEQ ID NO: 2112100 - RNA, 19 nt, Homo sapiens
  misc_RNA (1)...(19): siRNA sense strand
cucaugcgauuacuacaua

SEQ ID NO: 2112101 - RNA, 19 nt, Homo sapiens
  misc_RNA (1)...(19): siRNA sense strand
gauccggcaaccuauaaua

SEQ ID NO: 2112102 - RNA, 19 nt, Homo sapiens
  misc_RNA (1)...(19): siRNA sense strand
gcacuuacagaaacauguu

SEQ ID NO: 2112103 - RNA, 19 nt, Homo sapiens
  misc_RNA (1)...(19): siRNA sense strand
gaucuggcauguuucuaca

SEQ ID NO: 2112104 - RNA, 19 nt, Homo sapiens
  misc_RNA (1)...(19): siRNA sense strand
gggaugucguugcuucaaa

SEQ ID NO: 2112105 - RNA, 19 nt, Homo sapiens
  misc_RNA (1)...(19): siRNA sense strand
ucucucagauuaucaagga

SEQ ID NO: 2112106 - RNA, 19 nt, Homo sapiens
  misc_RNA (1)...(19): siRNA sense strand
aauaauccaugcagcaguu

SEQ ID NO: 2112107 - RNA, 19 nt, Homo sapiens
  misc_RNA (1)...(19): siRNA sense strand
ccggcaaccuauaauauug

SEQ ID NO: 2112108 - RNA, 19 nt, Homo sapiens
  misc_RNA (1)...(19): siRNA sense strand
uaaaagaguucuagcacuu

SEQ ID NO: 2112109 - RNA, 19 nt, Homo sapiens
  misc_RNA (1)...(19): siRNA sense strand
uauggaggauuuaguagau

SEQ ID NO: 2112110 - RNA, 19 nt, Homo sapiens
  misc_RNA (1)...(19): siRNA sense strand
uaaaagcacucaaaagaag

SEQ ID NO: 2112111 - RNA, 19 nt, Homo sapiens
  misc_RNA (1)...(19): siRNA sense strand
cagcaugccuguugaugag

SEQ ID NO: 2112112 - RNA, 19 nt, Homo sapiens
  misc_RNA (1)...(19): siRNA sense strand
agagauuccuuauuagcaa

SEQ ID NO: 2112113 - RNA, 19 nt, Homo sapiens
  misc_RNA (1)...(19): siRNA sense strand
ggauuuaguagauugcauu

SEQ ID NO: 2112114 - RNA, 19 nt, Homo sapiens
  misc_RNA (1)...(19): siRNA sense strand
ucacaucuuuagcagaguu

SEQ ID NO: 2112115 - RNA, 19 nt, Homo sapiens
  misc_RNA (1)...(19): siRNA sense strand
augaauccaucacaucuuu

SEQ ID NO: 2112116 - RNA, 19 nt, Homo sapiens
  misc_RNA (1)...(19): siRNA sense strand
cuuuagaauucgagcaaua

SEQ ID NO: 2112117 - RNA, 19 nt, Homo sapiens
  misc_RNA (1)...(19): siRNA sense strand
guaacuacauagguauuuc

SEQ ID NO: 2112118 - RNA, 19 nt, Homo sapiens
  misc_RNA (1)...(19): siRNA sense strand
caaccucacauuucguaaa

SEQ ID NO: 2112119 - RNA, 19 nt, Homo sapiens
  misc_RNA (1)...(19): siRNA sense strand
gcauuacugucccaagaag

SEQ ID NO: 2112120 - RNA, 19 nt, Homo sapiens
  misc_RNA (1)...(19): siRNA sense strand
gguauuucauugcggauca

SEQ ID NO: 2112121 - RNA, 19 nt, Homo sapiens
  misc_RNA (1)...(19): siRNA sense strand
caucagcccuguuggaaaa

SEQ ID NO: 2112122 - RNA, 19 nt, Homo sapiens
  misc_RNA (1)...(19): siRNA sense strand
uuacagaagcauugagauu

SEQ ID NO: 2112123 - RNA, 19 nt, Homo sapiens
  misc_RNA (1)...(19): siRNA sense strand
cuacagagcacagaacaga

SEQ ID NO: 2112124 - RNA, 19 nt, Homo sapiens
  misc_RNA (1)...(19): siRNA sense strand
ccuuagaaguaacaaauca

SEQ ID NO: 2112125 - RNA, 19 nt, Homo sapiens
  misc_RNA (1)...(19): siRNA sense strand
gaaggagauacaacugcua

SEQ ID NO: 2112126 - RNA, 19 nt, Homo sapiens
  misc_RNA (1)...(19): siRNA sense strand
gccuuuaggagaaguauuu

SEQ ID NO: 2112127 - RNA, 19 nt, Homo sapiens
  misc_RNA (1)...(19): siRNA sense strand
cuacauauaaucccaauac

SEQ ID NO: 2112128 - RNA, 19 nt, Homo sapiens
  misc_RNA (1)...(19): siRNA sense strand
agaauucgagcaauauuug

SEQ ID NO: 2112129 - RNA, 19 nt, Homo sapiens
  misc_RNA (1)...(19): siRNA sense strand
uacagaagcauugagauuu

SEQ ID NO: 2112130 - RNA, 19 nt, Homo sapiens
  misc_RNA (1)...(19): siRNA sense strand
cagaugcuguauucagguu

SEQ ID NO: 2112131 - RNA, 19 nt, Homo sapiens
  misc_RNA (1)...(19): siRNA sense strand
gagagauuccuuauuagca

SEQ ID NO: 2112132 - RNA, 19 nt, Homo sapiens
  misc_RNA (1)...(19): siRNA sense strand
gacauucggagccuguuaa

SEQ ID NO: 2112133 - RNA, 19 nt, Homo sapiens
  misc_RNA (1)...(19): siRNA sense strand
aaauaaggaucuggcaugu

SEQ ID NO: 2112134 - RNA, 19 nt, Homo sapiens
  misc_RNA (1)...(19): siRNA sense strand
aaauuaauccugcaaccaa

SEQ ID NO: 2112135 - RNA, 19 nt, Homo sapiens
  misc_RNA (1)...(19): siRNA sense strand
gaugcuguauucagguuca

SEQ ID NO: 2112136 - RNA, 19 nt, Homo sapiens
  misc_RNA (1)...(19): siRNA sense strand
guaauagagauguuugugu

SEQ ID NO: 2112137 - RNA, 19 nt, Homo sapiens
  misc_RNA (1)...(19): siRNA sense strand
ggaacucaugcgauuacua

SEQ ID NO: 2112138 - RNA, 19 nt, Homo sapiens
  misc_RNA (1)...(19): siRNA sense strand
gaauucgagcaauauuuga

SEQ ID NO: 2112139 - RNA, 19 nt, Homo sapiens
  misc_RNA (1)...(19): siRNA sense strand
gaguucaaccucacauuuc

SEQ ID NO: 2112140 - RNA, 19 nt, Homo sapiens
  misc_RNA (1)...(19): siRNA sense strand
uuacucagcaugccuguug

SEQ ID NO: 2112141 - RNA, 19 nt, Homo sapiens
  misc_RNA (1)...(19): siRNA sense strand
gcaaguacggaaauauucu

SEQ ID NO: 2112142 - RNA, 19 nt, Homo sapiens
  misc_RNA (1)...(19): siRNA sense strand
caaggaggauuuuguauac

SEQ ID NO: 2112143 - RNA, 19 nt, Homo sapiens
  misc_RNA (1)...(19): siRNA sense strand
gagauacaacugcuauaag

SEQ ID NO: 2112144 - RNA, 19 nt, Homo sapiens
  misc_RNA (1)...(19): siRNA sense strand
gaagcauugagauuuagaa

SEQ ID NO: 2112145 - RNA, 19 nt, Homo sapiens
  misc_RNA (1)...(19): siRNA sense strand
gagcacagaacagaacuuc

SEQ ID NO: 2112146 - RNA, 19 nt, Homo sapiens
  misc_RNA (1)...(19): siRNA sense strand
acggaaauauucuucaaca

SEQ ID NO: 2112147 - RNA, 19 nt, Homo sapiens
  misc_RNA (1)...(19): siRNA sense strand
gaauccaucacaucuuuag

SEQ ID NO: 2112148 - RNA, 19 nt, Homo sapiens
  misc_RNA (1)...(19): siRNA sense strand
gguaacuacauagguauuu

SEQ ID NO: 2112149 - RNA, 19 nt, Homo sapiens
  misc_RNA (1)...(19): siRNA sense strand
ugaaggauuuguagaucuc

SEQ ID NO: 2112150 - RNA, 19 nt, Homo sapiens
  misc_RNA (1)...(19): siRNA sense strand
aagaagcaacaacggaaua

SEQ ID NO: 2112151 - RNA, 19 nt, Homo sapiens
  misc_RNA (1)...(19): siRNA sense strand
guaaaagcacucaaaagaa

SEQ ID NO: 2112152 - RNA, 19 nt, Homo sapiens
  misc_RNA (1)...(19): siRNA sense strand
acugaucaauaaugccaua

SEQ ID NO: 2112153 - RNA, 19 nt, Homo sapiens
  misc_RNA (1)...(19): siRNA sense strand
aaaugacaccaacccauaa

SEQ ID NO: 2112154 - RNA, 19 nt, Homo sapiens
  misc_RNA (1)...(19): siRNA sense strand
auacagcacugaugaaucc

SEQ ID NO: 2112155 - RNA, 19 nt, Homo sapiens
  misc_RNA (1)...(19): siRNA sense strand
cgagcaauauuugaaucuu

SEQ ID NO: 2112156 - RNA, 19 nt, Homo sapiens
  misc_RNA (1)...(19): siRNA sense strand
ccaugcugguaacuacaua

SEQ ID NO: 2112157 - RNA, 19 nt, Homo sapiens
  misc_RNA (1)...(19): siRNA sense strand
uggaggauuuaguagauug

SEQ ID NO: 2112158 - RNA, 19 nt, Homo sapiens
  misc_RNA (1)...(19): siRNA sense strand
ggaggauuuuguauacuuu

SEQ ID NO: 2112159 - RNA, 19 nt, Homo sapiens
  misc_RNA (1)...(19): siRNA sense strand
augcggaacuugagaguca

SEQ ID NO: 2112160 - RNA, 19 nt, Homo sapiens
  misc_RNA (1)...(19): siRNA sense strand
uagcuacgccuccaaaugg

SEQ ID NO: 2112161 - RNA, 19 nt, Homo sapiens
  misc_RNA (1)...(19): siRNA sense strand
gagaaguauuugcguuggu

SEQ ID NO: 2112162 - RNA, 19 nt, Homo sapiens
  misc_RNA (1)...(19): siRNA sense strand
caaaucaguggccuuaugg

SEQ ID NO: 2112163 - RNA, 19 nt, Homo sapiens
  misc_RNA (1)...(19): siRNA sense strand
cagaagcauugagauuuag

SEQ ID NO: 2112164 - RNA, 19 nt, Homo sapiens
  misc_RNA (1)...(19): siRNA sense strand
agauacaacugcuauaagc

SEQ ID NO: 2112165 - RNA, 19 nt, Homo sapiens
  misc_RNA (1)...(19): siRNA sense strand
gcaucagcccuguuggaaa

SEQ ID NO: 2112166 - RNA, 19 nt, Homo sapiens
  misc_RNA (1)...(19): siRNA sense strand
ggcaaguacggaaauauuc

SEQ ID NO: 2112167 - RNA, 19 nt, Homo sapiens
  misc_RNA (1)...(19): siRNA sense strand
caacaacggaauaauccau

SEQ ID NO: 2112168 - RNA, 19 nt, Homo sapiens
  misc_RNA (1)...(19): siRNA sense strand
gaaaguggaucaauuaaga

SEQ ID NO: 2112169 - RNA, 19 nt, Homo sapiens
  misc_RNA (1)...(19): siRNA sense strand
gaagaaaguggaucaauua

SEQ ID NO: 2112170 - RNA, 19 nt, Homo sapiens
  misc_RNA (1)...(19): siRNA sense strand
gaacaaagcuucucuucuc

SEQ ID NO: 2112171 - RNA, 19 nt, Homo sapiens
  misc_RNA (1)...(19): siRNA sense strand
caagagcacuuuaucagua

SEQ ID NO: 2112172 - RNA, 19 nt, Homo sapiens
  misc_RNA (1)...(19): siRNA sense strand
uaacugagcuccuagagaa

SEQ ID NO: 2112173 - RNA, 19 nt, Homo sapiens
  misc_RNA (1)...(19): siRNA sense strand
gaacaauccucauggagaa

SEQ ID NO: 2112174 - RNA, 19 nt, Homo sapiens
  misc_RNA (1)...(19): siRNA sense strand
caaaggaugcuuacaaaua

SEQ ID NO: 2112175 - RNA, 19 nt, Homo sapiens
  misc_RNA (1)...(19): siRNA sense strand
gagaagaacugaaagauac

SEQ ID NO: 2112176 - RNA, 19 nt, Homo sapiens
  misc_RNA (1)...(19): siRNA sense strand
gaaaugaggcgccugauga

SEQ ID NO: 2112177 - RNA, 19 nt, Homo sapiens
  misc_RNA (1)...(19): siRNA sense strand
gcaguuggcuuuagagguu

SEQ ID NO: 2112178 - RNA, 19 nt, Homo sapiens
  misc_RNA (1)...(19): siRNA sense strand
gagaacaggugaaugaaau

SEQ ID NO: 2112179 - RNA, 19 nt, Homo sapiens
  misc_RNA (1)...(19): siRNA sense strand
ggaaggugauaaagaaauu

SEQ ID NO: 2112180 - RNA, 19 nt, Homo sapiens
  misc_RNA (1)...(19): siRNA sense strand
gagagaagaucacggaaau

SEQ ID NO: 2112181 - RNA, 19 nt, Homo sapiens
  misc_RNA (1)...(19): siRNA sense strand
uuagagaggugcacagaua

SEQ ID NO: 2112182 - RNA, 19 nt, Homo sapiens
  misc_RNA (1)...(19): siRNA sense strand
caaacaggcuuucaaguca

SEQ ID NO: 2112183 - RNA, 19 nt, Homo sapiens
  misc_RNA (1)...(19): siRNA sense strand
gagaaacucuggaaaccuu

SEQ ID NO: 2112184 - RNA, 19 nt, Homo sapiens
  misc_RNA (1)...(19): siRNA sense strand
gaagaacaauccucaugga

SEQ ID NO: 2112185 - RNA, 19 nt, Homo sapiens
  misc_RNA (1)...(19): siRNA sense strand
ggaaguugccugaagauuu

SEQ ID NO: 2112186 - RNA, 19 nt, Homo sapiens
  misc_RNA (1)...(19): siRNA sense strand
uaggaaagcuuacuucaga

SEQ ID NO: 2112187 - RNA, 19 nt, Homo sapiens
  misc_RNA (1)...(19): siRNA sense strand
acaauaagcucagaucaaa

SEQ ID NO: 2112188 - RNA, 19 nt, Homo sapiens
  misc_RNA (1)...(19): siRNA sense strand
ugaagaaaguggaucaauu

SEQ ID NO: 2112189 - RNA, 19 nt, Homo sapiens
  misc_RNA (1)...(19): siRNA sense strand
ggaaagcucagaucucgua

SEQ ID NO: 2112190 - RNA, 19 nt, Homo sapiens
  misc_RNA (1)...(19): siRNA sense strand
ggagcagagugaauuagua

SEQ ID NO: 2112191 - RNA, 19 nt, Homo sapiens
  misc_RNA (1)...(19): siRNA sense strand
gacagcagauaaacugaua

SEQ ID NO: 2112192 - RNA, 19 nt, Homo sapiens
  misc_RNA (1)...(19): siRNA sense strand
gaagguugcuauuuuguua

SEQ ID NO: 2112193 - RNA, 19 nt, Homo sapiens
  misc_RNA (1)...(19): siRNA sense strand
gaaauacacacauaccaaa

SEQ ID NO: 2112194 - RNA, 19 nt, Homo sapiens
  misc_RNA (1)...(19): siRNA sense strand
ggaggaagaugagaaugaa

SEQ ID NO: 2112195 - RNA, 19 nt, Homo sapiens
  misc_RNA (1)...(19): siRNA sense strand
gaaguugccugaagauuuu

SEQ ID NO: 2112196 - RNA, 19 nt, Homo sapiens
  misc_RNA (1)...(19): siRNA sense strand
aagaaagccuagagaauuu

SEQ ID NO: 2112197 - RNA, 19 nt, Homo sapiens
  misc_RNA (1)...(19): siRNA sense strand
gaacaagcaacuccagaaa

SEQ ID NO: 2112198 - RNA, 19 nt, Homo sapiens
  misc_RNA (1)...(19): siRNA sense strand
uaagaaagccuagagaauu

SEQ ID NO: 2112199 - RNA, 19 nt, Homo sapiens
  misc_RNA (1)...(19): siRNA sense strand
cgaaagagaagacaaagaa

SEQ ID NO: 2112200 - RNA, 19 nt, Homo sapiens
  misc_RNA (1)...(19): siRNA sense strand
guauuuggcugaagaacaa

SEQ ID NO: 2112201 - RNA, 19 nt, Homo sapiens
  misc_RNA (1)...(19): siRNA sense strand
acaaauagacagcuaagua

SEQ ID NO: 2112202 - RNA, 19 nt, Homo sapiens
  misc_RNA (1)...(19): siRNA sense strand
ucaaagaucagaaacauga

SEQ ID NO: 2112203 - RNA, 19 nt, Homo sapiens
  misc_RNA (1)...(19): siRNA sense strand
gaaggagcagagugaauua

SEQ ID NO: 2112204 - RNA, 19 nt, Homo sapiens
  misc_RNA (1)...(19): siRNA sense strand
ugggaucucuucuauuaua

SEQ ID NO: 2112205 - RNA, 19 nt, Homo sapiens
  misc_RNA (1)...(19): siRNA sense strand
gaucaaaggaugcuuacaa

SEQ ID NO: 2112206 - RNA, 19 nt, Homo sapiens
  misc_RNA (1)...(19): siRNA sense strand
uggaaacucuuuaugcuuu

SEQ ID NO: 2112207 - RNA, 19 nt, Homo sapiens
  misc_RNA (1)...(19): siRNA sense strand
auugggaucucuucuauua

SEQ ID NO: 2112208 - RNA, 19 nt, Homo sapiens
  misc_RNA (1)...(19): siRNA sense strand
caaaugugaucuccuggaa

SEQ ID NO: 2112209 - RNA, 19 nt, Homo sapiens
  misc_RNA (1)...(19): siRNA sense strand
caacaauauugcugaauca

SEQ ID NO: 2112210 - RNA, 19 nt, Homo sapiens
  misc_RNA (1)...(19): siRNA sense strand
gaaaagaagccaccuauga

SEQ ID NO: 2112211 - RNA, 19 nt, Homo sapiens
  misc_RNA (1)...(19): siRNA sense strand
cugaagcaaugguuuguua

SEQ ID NO: 2112212 - RNA, 19 nt, Homo sapiens
  misc_RNA (1)...(19): siRNA sense strand
uuaaggaucucauggauuc

SEQ ID NO: 2112213 - RNA, 19 nt, Homo sapiens
  misc_RNA (1)...(19): siRNA sense strand
ccagauauaucauuggaau

SEQ ID NO: 2112214 - RNA, 19 nt, Homo sapiens
  misc_RNA (1)...(19): siRNA sense strand
gaagaaauaggaccuuuua

SEQ ID NO: 2112215 - RNA, 19 nt, Homo sapiens
  misc_RNA (1)...(19): siRNA sense strand
gacuagagguguuacaaga

SEQ ID NO: 2112216 - RNA, 19 nt, Homo sapiens
  misc_RNA (1)...(19): siRNA sense strand
gucaauagaugaugcuuau

SEQ ID NO: 2112217 - RNA, 19 nt, Homo sapiens
  misc_RNA (1)...(19): siRNA sense strand
aaaggaugcuuacaaauag

SEQ ID NO: 2112218 - RNA, 19 nt, Homo sapiens
  misc_RNA (1)...(19): siRNA sense strand
gaagagaguggcauucaga

SEQ ID NO: 2112219 - RNA, 19 nt, Homo sapiens
  misc_RNA (1)...(19): siRNA sense strand
gaagagcucagaagagaga

SEQ ID NO: 2112220 - RNA, 19 nt, Homo sapiens
  misc_RNA (1)...(19): siRNA sense strand
gaagauuuacagccuuaua

SEQ ID NO: 2112221 - RNA, 19 nt, Homo sapiens
  misc_RNA (1)...(19): siRNA sense strand
cuuaacaaguugauccuua

SEQ ID NO: 2112222 - RNA, 19 nt, Homo sapiens
  misc_RNA (1)...(19): siRNA sense strand
ggcaaugacucgaaguuug

SEQ ID NO: 2112223 - RNA, 19 nt, Homo sapiens
  misc_RNA (1)...(19): siRNA sense strand
gauauguucugcaauucaa

SEQ ID NO: 2112224 - RNA, 19 nt, Homo sapiens
  misc_RNA (1)...(19): siRNA sense strand
acacagaaaguccauauuu

SEQ ID NO: 2112225 - RNA, 19 nt, Homo sapiens
  misc_RNA (1)...(19): siRNA sense strand
aaauagcaauggaucagua

SEQ ID NO: 2112226 - RNA, 19 nt, Homo sapiens
  misc_RNA (1)...(19): siRNA sense strand
gaaauccugugccguucuu

SEQ ID NO: 2112227 - RNA, 19 nt, Homo sapiens
  misc_RNA (1)...(19): siRNA sense strand
gaauuugucuacagugauc

SEQ ID NO: 2112228 - RNA, 19 nt, Homo sapiens
  misc_RNA (1)...(19): siRNA sense strand
gcaugaugacuaugacuua

SEQ ID NO: 2112229 - RNA, 19 nt, Homo sapiens
  misc_RNA (1)...(19): siRNA sense strand
cgagaagaacugaaagaua

SEQ ID NO: 2112230 - RNA, 19 nt, Homo sapiens
  misc_RNA (1)...(19): siRNA sense strand
caagaacaguugaacaaag

SEQ ID NO: 2112231 - RNA, 19 nt, Homo sapiens
  misc_RNA (1)...(19): siRNA sense strand
guaccacccugauaagaau

SEQ ID NO: 2112232 - RNA, 19 nt, Homo sapiens
  misc_RNA (1)...(19): siRNA sense strand
ggacagggaccgcaugaug

SEQ ID NO: 2112233 - RNA, 19 nt, Homo sapiens
  misc_RNA (1)...(19): siRNA sense strand
ccaaaggaauguuaaaugc

SEQ ID NO: 2112234 - RNA, 19 nt, Homo sapiens
  misc_RNA (1)...(19): siRNA sense strand
gaaugaaacugaccuugcu

SEQ ID NO: 2112235 - RNA, 19 nt, Homo sapiens
  misc_RNA (1)...(19): siRNA sense strand
aagcagauuugguuccaua

SEQ ID NO: 2112236 - RNA, 19 nt, Homo sapiens
  misc_RNA (1)...(19): siRNA sense strand
gguccaaagguucgaauua

SEQ ID NO: 2112237 - RNA, 19 nt, Homo sapiens
  misc_RNA (1)...(19): siRNA sense strand
gaucagaauuugucuacag

SEQ ID NO: 2112238 - RNA, 19 nt, Homo sapiens
  misc_RNA (1)...(19): siRNA sense strand
aagaagauuuacagccuua

SEQ ID NO: 2112239 - RNA, 19 nt, Homo sapiens
  misc_RNA (1)...(19): siRNA sense strand
caauagaugaugcuuauga

SEQ ID NO: 2112240 - RNA, 19 nt, Homo sapiens
  misc_RNA (1)...(19): siRNA sense strand
gcugaucggaugcauguua

SEQ ID NO: 2112241 - RNA, 19 nt, Homo sapiens
  misc_RNA (1)...(19): siRNA sense strand
ugaagcugcuguacauauu

SEQ ID NO: 2112242 - RNA, 19 nt, Homo sapiens
  misc_RNA (1)...(19): siRNA sense strand
ucauggagcuggucaagug

SEQ ID NO: 2112243 - RNA, 19 nt, Homo sapiens
  misc_RNA (1)...(19): siRNA sense strand
gaguagaaauggcuuugga

SEQ ID NO: 2112244 - RNA, 19 nt, Homo sapiens
  misc_RNA (1)...(19): siRNA sense strand
gaucaugccaaagaacuua

SEQ ID NO: 2112245 - RNA, 19 nt, Homo sapiens
  misc_RNA (1)...(19): siRNA sense strand
cacagaaaguccauauuug

SEQ ID NO: 2112246 - RNA, 19 nt, Homo sapiens
  misc_RNA (1)...(19): siRNA sense strand
caguguggcugcucaguuu

SEQ ID NO: 2112247 - RNA, 19 nt, Homo sapiens
  misc_RNA (1)...(19): siRNA sense strand
gcaaugguuuguuacuuag

SEQ ID NO: 2112248 - RNA, 19 nt, Homo sapiens
  misc_RNA (1)...(19): siRNA sense strand
gacaagaacaguugaacaa

SEQ ID NO: 2112249 - RNA, 19 nt, Homo sapiens
  misc_RNA (1)...(19): siRNA sense strand
acagcuaaguagacauuua

SEQ ID NO: 2112250 - RNA, 19 nt, Homo sapiens
  misc_RNA (1)...(19): siRNA sense strand
gagauaaaguguccacaac

SEQ ID NO: 2112251 - RNA, 19 nt, Homo sapiens
  misc_RNA (1)...(19): siRNA sense strand
gaugagagcaagauuagga

SEQ ID NO: 2112252 - RNA, 19 nt, Homo sapiens
  misc_RNA (1)...(19): siRNA sense strand
uggcagaugucacgaagaa

SEQ ID NO: 2112253 - RNA, 19 nt, Homo sapiens
  misc_RNA (1)...(19): siRNA sense strand
cagaauuugucuacaguga

SEQ ID NO: 2112254 - RNA, 19 nt, Homo sapiens
  misc_RNA (1)...(19): siRNA sense strand
ugacaaaacuuauggauca

SEQ ID NO: 2112255 - RNA, 19 nt, Homo sapiens
  misc_RNA (1)...(19): siRNA sense strand
gcaagauuaggaaagcuua

SEQ ID NO: 2112256 - RNA, 19 nt, Homo sapiens
  misc_RNA (1)...(19): siRNA sense strand
agcaaugguuuguuacuua

SEQ ID NO: 2112257 - RNA, 19 nt, Homo sapiens
  misc_RNA (1)...(19): siRNA sense strand
ugaccuugcuacccuuaua

SEQ ID NO: 2112258 - RNA, 19 nt, Homo sapiens
  misc_RNA (1)...(19): siRNA sense strand
gugcacagauaaacuugaa

SEQ ID NO: 2112259 - RNA, 19 nt, Homo sapiens
  misc_RNA (1)...(19): siRNA sense strand
gaaagcagauuugguucca

SEQ ID NO: 2112260 - RNA, 19 nt, Homo sapiens
  misc_RNA (1)...(19): siRNA sense strand
gcaauuaaucgaauguuuc

SEQ ID NO: 2112261 - RNA, 19 nt, Homo sapiens
  misc_RNA (1)...(19): siRNA sense strand
gagaagaacaauccucaug

SEQ ID NO: 2112262 - RNA, 19 nt, Homo sapiens
  misc_RNA (1)...(19): siRNA sense strand
gauaaaguguccacaacag

SEQ ID NO: 2112263 - RNA, 19 nt, Homo sapiens
  misc_RNA (1)...(19): siRNA sense strand
ccaagacugugucaacaau

SEQ ID NO: 2112264 - RNA, 19 nt, Homo sapiens
  misc_RNA (1)...(19): siRNA sense strand
gaggguauuuggcugaaga

SEQ ID NO: 2112265 - RNA, 19 nt, Homo sapiens
  misc_RNA (1)...(19): siRNA sense strand
acagguguguggauacaua

SEQ ID NO: 2112266 - RNA, 19 nt, Homo sapiens
  misc_RNA (1)...(19): siRNA sense strand
uguggaaggugauaaagaa

SEQ ID NO: 2112267 - RNA, 19 nt, Homo sapiens
  misc_RNA (1)...(19): siRNA sense strand
uaagaauccuuguggacuu

SEQ ID NO: 2112268 - RNA, 19 nt, Homo sapiens
  misc_RNA (1)...(19): siRNA sense strand
cauagugacucuuggcuua

SEQ ID NO: 2112269 - RNA, 19 nt, Homo sapiens
  misc_RNA (1)...(19): siRNA sense strand
gggaaacgaucaaguaucu

SEQ ID NO: 2112270 - RNA, 19 nt, Homo sapiens
  misc_RNA (1)...(19): siRNA sense strand
gaaacgaucaaguaucuga

SEQ ID NO: 2112271 - RNA, 19 nt, Homo sapiens
  misc_RNA (1)...(19): siRNA sense strand
gagauccagucccuugaaa

SEQ ID NO: 2112272 - RNA, 19 nt, Homo sapiens
  misc_RNA (1)...(19): siRNA sense strand
gcaugaagaggaagaagaa

SEQ ID NO: 2112273 - RNA, 19 nt, Homo sapiens
  misc_RNA (1)...(19): siRNA sense strand
ggacagcgaggacgaaauc

SEQ ID NO: 2112274 - RNA, 19 nt, Homo sapiens
  misc_RNA (1)...(19): siRNA sense strand
ggacaaaccgcagcacaga

SEQ ID NO: 2112275 - RNA, 19 nt, Homo sapiens
  misc_RNA (1)...(19): siRNA sense strand
ccaccauccugcugacaaa

SEQ ID NO: 2112276 - RNA, 19 nt, Homo sapiens
  misc_RNA (1)...(19): siRNA sense strand
gaccgaagcgcuggcauuu

SEQ ID NO: 2112277 - RNA, 19 nt, Homo sapiens
  misc_RNA (1)...(19): siRNA sense strand
uaaguuuccugcugaucuu

SEQ ID NO: 2112278 - RNA, 19 nt, Homo sapiens
  misc_RNA (1)...(19): siRNA sense strand
ccacagcucuaccagacau

SEQ ID NO: 2112279 - RNA, 19 nt, Homo sapiens
  misc_RNA (1)...(19): siRNA sense strand
aaaaggggcugguaauuca

SEQ ID NO: 2112280 - RNA, 19 nt, Homo sapiens
  misc_RNA (1)...(19): siRNA sense strand
ggagauccagucccuugaa

SEQ ID NO: 2112281 - RNA, 19 nt, Homo sapiens
  misc_RNA (1)...(19): siRNA sense strand
ccgaagcgcuggcauuugc

SEQ ID NO: 2112282 - RNA, 19 nt, Homo sapiens
  misc_RNA (1)...(19): siRNA sense strand
cugcugaucuuggcacuga

SEQ ID NO: 2112283 - RNA, 19 nt, Homo sapiens
  misc_RNA (1)...(19): siRNA sense strand
acacugggaugguccuugu

SEQ ID NO: 2112284 - RNA, 19 nt, Homo sapiens
  misc_RNA (1)...(19): siRNA sense strand
gaaguuuacaggcccucua

SEQ ID NO: 2112285 - RNA, 19 nt, Homo sapiens
  misc_RNA (1)...(19): siRNA sense strand
gaaaaggggcugguaauuc

SEQ ID NO: 2112286 - RNA, 19 nt, Homo sapiens
  misc_RNA (1)...(19): siRNA sense strand
ccacagccacaggcaauuu

SEQ ID NO: 2112287 - RNA, 19 nt, Homo sapiens
  misc_RNA (1)...(19): siRNA sense strand
ggauaucgccugggugauc

SEQ ID NO: 2112288 - RNA, 19 nt, Homo sapiens
  misc_RNA (1)...(19): siRNA sense strand
guuuacaggcccucuauug

SEQ ID NO: 2112289 - RNA, 19 nt, Homo sapiens
  misc_RNA (1)...(19): siRNA sense strand
ggaacaacaccaucaccau

SEQ ID NO: 2112290 - RNA, 19 nt, Homo sapiens
  misc_RNA (1)...(19): siRNA sense strand
aaccugagcuacuggaaca

SEQ ID NO: 2112291 - RNA, 19 nt, Homo sapiens
  misc_RNA (1)...(19): siRNA sense strand
gagaacaaccugagcuacu

SEQ ID NO: 2112292 - RNA, 19 nt, Homo sapiens
  misc_RNA (1)...(19): siRNA sense strand
ccucuauugccaacuguua

SEQ ID NO: 2112293 - RNA, 19 nt, Homo sapiens
  misc_RNA (1)...(19): siRNA sense strand
ugugggaaacgaucaagua

SEQ ID NO: 2112294 - RNA, 19 nt, Homo sapiens
  misc_RNA (1)...(19): siRNA sense strand
gaucuacaagggcaacuuc

SEQ ID NO: 2112295 - RNA, 19 nt, Homo sapiens
  misc_RNA (1)...(19): siRNA sense strand
gaaggacagcgaggacgaa

SEQ ID NO: 2112296 - RNA, 19 nt, Homo sapiens
  misc_RNA (1)...(19): siRNA sense strand
agaacaaccugagcuacug

SEQ ID NO: 2112297 - RNA, 19 nt, Homo sapiens
  misc_RNA (1)...(19): siRNA sense strand
ccaguccucucuccacagu

SEQ ID NO: 2112298 - RNA, 19 nt, Homo sapiens
  misc_RNA (1)...(19): siRNA sense strand
gagccaaggaggagacugu

SEQ ID NO: 2112299 - RNA, 19 nt, Homo sapiens
  misc_RNA (1)...(19): siRNA sense strand
cgaccacagugcccagcaa

SEQ ID NO: 2112300 - RNA, 19 nt, Homo sapiens
  misc_RNA (1)...(19): siRNA sense strand
acucuuggcuuacuguuac

SEQ ID NO: 2112301 - RNA, 19 nt, Homo sapiens
  misc_RNA (1)...(19): siRNA sense strand
caaggagggacaccagaug

SEQ ID NO: 2112302 - RNA, 19 nt, Homo sapiens
  misc_RNA (1)...(19): siRNA sense strand
ccacagugcccagcaauac

SEQ ID NO: 2112303 - RNA, 19 nt, Homo sapiens
  misc_RNA (1)...(19): siRNA sense strand
ccaauggcgacuauagaga

SEQ ID NO: 2112304 - RNA, 19 nt, Homo sapiens
  misc_RNA (1)...(19): siRNA sense strand
gacucuuggcuuacuguua

SEQ ID NO: 2112305 - RNA, 19 nt, Homo sapiens
  misc_RNA (1)...(19): siRNA sense strand
cagcgaggacgaaauccaa

SEQ ID NO: 2112306 - RNA, 19 nt, Homo sapiens
  misc_RNA (1)...(19): siRNA sense strand
ggucucagaaagcacuauu

SEQ ID NO: 2112307 - RNA, 19 nt, Homo sapiens
  misc_RNA (1)...(19): siRNA sense strand
cuacaagggcaacuucaca

SEQ ID NO: 2112308 - RNA, 19 nt, Homo sapiens
  misc_RNA (1)...(19): siRNA sense strand
ggacagcagggaacaucuc

SEQ ID NO: 2112309 - RNA, 19 nt, Homo sapiens
  misc_RNA (1)...(19): siRNA sense strand
ugccugagcaagauggaua

SEQ ID NO: 2112310 - RNA, 19 nt, Homo sapiens
  misc_RNA (1)...(19): siRNA sense strand
gugggaaacgaucaaguau

SEQ ID NO: 2112311 - RNA, 19 nt, Homo sapiens
  misc_RNA (1)...(19): siRNA sense strand
acugggaugguccuuguua

SEQ ID NO: 2112312 - RNA, 19 nt, Homo sapiens
  misc_RNA (1)...(19): siRNA sense strand
ugaccgaagcgcuggcauu

SEQ ID NO: 2112313 - RNA, 19 nt, Homo sapiens
  misc_RNA (1)...(19): siRNA sense strand
ccacaggcaauuuccucaa

SEQ ID NO: 2112314 - RNA, 19 nt, Homo sapiens
  misc_RNA (1)...(19): siRNA sense strand
cugggaugguccuuguuaa

SEQ ID NO: 2112315 - RNA, 19 nt, Homo sapiens
  misc_RNA (1)...(19): siRNA sense strand
acggugugcugcaugaaga

SEQ ID NO: 2112316 - RNA, 19 nt, Homo sapiens
  misc_RNA (1)...(19): siRNA sense strand
ccaaggagggacaccagau

SEQ ID NO: 2112317 - RNA, 19 nt, Homo sapiens
  misc_RNA (1)...(19): siRNA sense strand
ccuccagggucucagaaag

SEQ ID NO: 2112318 - RNA, 19 nt, Homo sapiens
  misc_RNA (1)...(19): siRNA sense strand
cggagaacaaccugagcua

SEQ ID NO: 2112319 - RNA, 19 nt, Homo sapiens
  misc_RNA (1)...(19): siRNA sense strand
ccgccaacccggagaacaa

SEQ ID NO: 2112320 - RNA, 19 nt, Homo sapiens
  misc_RNA (1)...(19): siRNA sense strand
ggcccucuauugccaacug

SEQ ID NO: 2112321 - RNA, 19 nt, Homo sapiens
  misc_RNA (1)...(19): siRNA sense strand
gaagaaggcccuacagauu

SEQ ID NO: 2112322 - RNA, 19 nt, Homo sapiens
  misc_RNA (1)...(19): siRNA sense strand
gaaacaaggucagcaaaga

SEQ ID NO: 2112323 - RNA, 19 nt, Homo sapiens
  misc_RNA (1)...(19): siRNA sense strand
ggaacgaaguguuugaguu

SEQ ID NO: 2112324 - RNA, 19 nt, Homo sapiens
  misc_RNA (1)...(19): siRNA sense strand
gauaucagccucaacauug

SEQ ID NO: 2112325 - RNA, 19 nt, Homo sapiens
  misc_RNA (1)...(19): siRNA sense strand
cguaugagcugacuccaaa

SEQ ID NO: 2112326 - RNA, 19 nt, Homo sapiens
  misc_RNA (1)...(19): siRNA sense strand
cugaggaccuuuaccuuua

SEQ ID NO: 2112327 - RNA, 19 nt, Homo sapiens
  misc_RNA (1)...(19): siRNA sense strand
ugaaggugcuugaugauga

SEQ ID NO: 2112328 - RNA, 19 nt, Homo sapiens
  misc_RNA (1)...(19): siRNA sense strand
gaaaggcccucugcucauc

SEQ ID NO: 2112329 - RNA, 19 nt, Homo sapiens
  misc_RNA (1)...(19): siRNA sense strand
ggagagugccugcaacuug

SEQ ID NO: 2112330 - RNA, 19 nt, Homo sapiens
  misc_RNA (1)...(19): siRNA sense strand
gcuuugaccuggcagauau

SEQ ID NO: 2112331 - RNA, 19 nt, Homo sapiens
  misc_RNA (1)...(19): siRNA sense strand
ucgaauuccuugacaauga

SEQ ID NO: 2112332 - RNA, 19 nt, Homo sapiens
  misc_RNA (1)...(19): siRNA sense strand
gaaaggaagugggcauguc

SEQ ID NO: 2112333 - RNA, 19 nt, Homo sapiens
  misc_RNA (1)...(19): siRNA sense strand
ggaagaaggcccuacagau

SEQ ID NO: 2112334 - RNA, 19 nt, Homo sapiens
  misc_RNA (1)...(19): siRNA sense strand
gaagacacauacaaguaag

SEQ ID NO: 2112335 - RNA, 19 nt, Homo sapiens
  misc_RNA (1)...(19): siRNA sense strand
ucaagaaaguggcuaccaa

SEQ ID NO: 2112336 - RNA, 19 nt, Homo sapiens
  misc_RNA (1)...(19): siRNA sense strand
gcagauaucagccucaaca

SEQ ID NO: 2112337 - RNA, 19 nt, Homo sapiens
  misc_RNA (1)...(19): siRNA sense strand
cuacagcauuuccggagua

SEQ ID NO: 2112338 - RNA, 19 nt, Homo sapiens
  misc_RNA (1)...(19): siRNA sense strand
gaguggcuuucauugcuua

SEQ ID NO: 2112339 - RNA, 19 nt, Homo sapiens
  misc_RNA (1)...(19): siRNA sense strand
gcaucggccuacagcauuu

SEQ ID NO: 2112340 - RNA, 19 nt, Homo sapiens
  misc_RNA (1)...(19): siRNA sense strand
gcaagaagacacauacaag

SEQ ID NO: 2112341 - RNA, 19 nt, Homo sapiens
  misc_RNA (1)...(19): siRNA sense strand
cgaauuccuugacaaugaa

SEQ ID NO: 2112342 - RNA, 19 nt, Homo sapiens
  misc_RNA (1)...(19): siRNA sense strand
ccaacagagugguggauga

SEQ ID NO: 2112343 - RNA, 19 nt, Homo sapiens
  misc_RNA (1)...(19): siRNA sense strand
ggagugugcucugggaaug

SEQ ID NO: 2112344 - RNA, 19 nt, Homo sapiens
  misc_RNA (1)...(19): siRNA sense strand
cuaccugaauggugaauau

SEQ ID NO: 2112345 - RNA, 19 nt, Homo sapiens
  misc_RNA (1)...(19): siRNA sense strand
agaaggcccuacagauuug

SEQ ID NO: 2112346 - RNA, 19 nt, Homo sapiens
  misc_RNA (1)...(19): siRNA sense strand
agaagacacauacaaguaa

SEQ ID NO: 2112347 - RNA, 19 nt, Homo sapiens
  misc_RNA (1)...(19): siRNA sense strand
cuacguccgugucuacuug

SEQ ID NO: 2112348 - RNA, 19 nt, Homo sapiens
  misc_RNA (1)...(19): siRNA sense strand
aagaaggcccuacagauuu

SEQ ID NO: 2112349 - RNA, 19 nt, Homo sapiens
  misc_RNA (1)...(19): siRNA sense strand
gaccugaagcccuaaagaa

SEQ ID NO: 2112350 - RNA, 19 nt, Homo sapiens
  misc_RNA (1)...(19): siRNA sense strand
aagaagacacauacaagua

SEQ ID NO: 2112351 - RNA, 19 nt, Homo sapiens
  misc_RNA (1)...(19): siRNA sense strand
guguggagcugcagaagau

SEQ ID NO: 2112352 - RNA, 19 nt, Homo sapiens
  misc_RNA (1)...(19): siRNA sense strand
ggaguggcuuucauugcuu

SEQ ID NO: 2112353 - RNA, 19 nt, Homo sapiens
  misc_RNA (1)...(19): siRNA sense strand
ggacuggccugaccaaccu

SEQ ID NO: 2112354 - RNA, 19 nt, Homo sapiens
  misc_RNA (1)...(19): siRNA sense strand
aaagacaccugggcagaga

SEQ ID NO: 2112355 - RNA, 19 nt, Homo sapiens
  misc_RNA (1)...(19): siRNA sense strand
gagcccacaucccaagaga

SEQ ID NO: 2112356 - RNA, 19 nt, Homo sapiens
  misc_RNA (1)...(19): siRNA sense strand
ggagaugucaugaccaaca

SEQ ID NO: 2112357 - RNA, 19 nt, Homo sapiens
  misc_RNA (1)...(19): siRNA sense strand
ugaagcaccuacagaucaa

SEQ ID NO: 2112358 - RNA, 19 nt, Homo sapiens
  misc_RNA (1)...(19): siRNA sense strand
ugacugugccugugaagaa

SEQ ID NO: 2112359 - RNA, 19 nt, Homo sapiens
  misc_RNA (1)...(19): siRNA sense strand
gcccucugcucaucaagaa

SEQ ID NO: 2112360 - RNA, 19 nt, Homo sapiens
  misc_RNA (1)...(19): siRNA sense strand
gaucauggaaagcaaguuc

SEQ ID NO: 2112361 - RNA, 19 nt, Homo sapiens
  misc_RNA (1)...(19): siRNA sense strand
gaagugggcaugucguaag

SEQ ID NO: 2112362 - RNA, 19 nt, Homo sapiens
  misc_RNA (1)...(19): siRNA sense strand
caagaagacacauacaagu

SEQ ID NO: 2112363 - RNA, 19 nt, Homo sapiens
  misc_RNA (1)...(19): siRNA sense strand
gagaaacccuuuugacuac

SEQ ID NO: 2112364 - RNA, 19 nt, Homo sapiens
  misc_RNA (1)...(19): siRNA sense strand
ggaagugggcaugucguaa

SEQ ID NO: 2112365 - RNA, 19 nt, Homo sapiens
  misc_RNA (1)...(19): siRNA sense strand
ccaaauggacagcccagaa

SEQ ID NO: 2112366 - RNA, 19 nt, Homo sapiens
  misc_RNA (1)...(19): siRNA sense strand
aaagugggcagcguguuua

SEQ ID NO: 2112367 - RNA, 19 nt, Homo sapiens
  misc_RNA (1)...(19): siRNA sense strand
ggaccugaagcccuaaaga

SEQ ID NO: 2112368 - RNA, 19 nt, Homo sapiens
  misc_RNA (1)...(19): siRNA sense strand
gaaggugcuugaugaugac

SEQ ID NO: 2112369 - RNA, 19 nt, Homo sapiens
  misc_RNA (1)...(19): siRNA sense strand
ccugaggaccuuuaccuuu

SEQ ID NO: 2112370 - RNA, 19 nt, Homo sapiens
  misc_RNA (1)...(19): siRNA sense strand
cuaccaccguugccacuga

SEQ ID NO: 2112371 - RNA, 19 nt, Homo sapiens
  misc_RNA (1)...(19): siRNA sense strand
cagguguucuccuucuuug

SEQ ID NO: 2112372 - RNA, 19 nt, Homo sapiens
  misc_RNA (1)...(19): siRNA sense strand
gucaaggcacacacuaaua

SEQ ID NO: 2112373 - RNA, 19 nt, Homo sapiens
  misc_RNA (1)...(19): siRNA sense strand
cagcagcaccugggaugua

SEQ ID NO: 2112374 - RNA, 19 nt, Homo sapiens
  misc_RNA (1)...(19): siRNA sense strand
augcugaccucacucuuga

SEQ ID NO: 2112375 - RNA, 19 nt, Homo sapiens
  misc_RNA (1)...(19): siRNA sense strand
ggcaagaagacacauacaa

SEQ ID NO: 2112376 - RNA, 19 nt, Homo sapiens
  misc_RNA (1)...(19): siRNA sense strand
cgaaguguuugaguucaug

SEQ ID NO: 2112377 - RNA, 19 nt, Homo sapiens
  misc_RNA (1)...(19): siRNA sense strand
gagcaucggccuacagcau

SEQ ID NO: 2112378 - RNA, 19 nt, Homo sapiens
  misc_RNA (1)...(19): siRNA sense strand
cgagaaacccuuuugacua

SEQ ID NO: 2112379 - RNA, 19 nt, Homo sapiens
  misc_RNA (1)...(19): siRNA sense strand
gcucuacuuuggacagaag

SEQ ID NO: 2112380 - RNA, 19 nt, Homo sapiens
  misc_RNA (1)...(19): siRNA sense strand
caaauggacagcccagaag

SEQ ID NO: 2112381 - RNA, 19 nt, Homo sapiens
  misc_RNA (1)...(19): siRNA sense strand
aaggacguauccaggagua

SEQ ID NO: 2112382 - RNA, 19 nt, Homo sapiens
  misc_RNA (1)...(19): siRNA sense strand
guaggcaagaagacacaua

SEQ ID NO: 2112383 - RNA, 19 nt, Homo sapiens
  misc_RNA (1)...(19): siRNA sense strand
uguuugaguucauggugua

SEQ ID NO: 2112384 - RNA, 19 nt, Homo sapiens
  misc_RNA (1)...(19): siRNA sense strand
ccagguguucuccuucuuu

SEQ ID NO: 2112385 - RNA, 19 nt, Homo sapiens
  misc_RNA (1)...(19): siRNA sense strand
ugacuguguucuuccuuca

SEQ ID NO: 2112386 - RNA, 19 nt, Homo sapiens
  misc_RNA (1)...(19): siRNA sense strand
ccagaaacaaggucagcaa

SEQ ID NO: 2112387 - RNA, 19 nt, Homo sapiens
  misc_RNA (1)...(19): siRNA sense strand
gagaugucaugaccaacag

SEQ ID NO: 2112388 - RNA, 19 nt, Homo sapiens
  misc_RNA (1)...(19): siRNA sense strand
cagcauuuccggaguagga

SEQ ID NO: 2112389 - RNA, 19 nt, Homo sapiens
  misc_RNA (1)...(19): siRNA sense strand
ucaaggcacacacuaauac

SEQ ID NO: 2112390 - RNA, 19 nt, Homo sapiens
  misc_RNA (1)...(19): siRNA sense strand
uguccucgcucaacuccuu

SEQ ID NO: 2112391 - RNA, 19 nt, Homo sapiens
  misc_RNA (1)...(19): siRNA sense strand
cagaaacaaggucagcaaa

SEQ ID NO: 2112392 - RNA, 19 nt, Homo sapiens
  misc_RNA (1)...(19): siRNA sense strand
ugagugguuuguccugaau

SEQ ID NO: 2112393 - RNA, 19 nt, Homo sapiens
  misc_RNA (1)...(19): siRNA sense strand
ggcagcguguuuaccaaga

SEQ ID NO: 2112394 - RNA, 19 nt, Homo sapiens
  misc_RNA (1)...(19): siRNA sense strand
aaagcaaguuccgggagaa

SEQ ID NO: 2112395 - RNA, 19 nt, Homo sapiens
  misc_RNA (1)...(19): siRNA sense strand
gacggcagcugggugagau

SEQ ID NO: 2112396 - RNA, 19 nt, Homo sapiens
  misc_RNA (1)...(19): siRNA sense strand
gguguucuccuucuuugug

SEQ ID NO: 2112397 - RNA, 19 nt, Homo sapiens
  misc_RNA (1)...(19): siRNA sense strand
caccuggaacgaaguguuu

SEQ ID NO: 2112398 - RNA, 19 nt, Homo sapiens
  misc_RNA (1)...(19): siRNA sense strand
gcccacaucccaagagaca

SEQ ID NO: 2112399 - RNA, 19 nt, Homo sapiens
  misc_RNA (1)...(19): siRNA sense strand
agaaaccuaacaccaugua

SEQ ID NO: 2112400 - RNA, 19 nt, Homo sapiens
  misc_RNA (1)...(19): siRNA sense strand
gcagcguguuuaccaagag

SEQ ID NO: 2112401 - RNA, 19 nt, Homo sapiens
  misc_RNA (1)...(19): siRNA sense strand
gacccugcuucugauacua

SEQ ID NO: 2112402 - RNA, 19 nt, Homo sapiens
  misc_RNA (1)...(19): siRNA sense strand
ucuccagguuugccagaaa

SEQ ID NO: 2112403 - RNA, 19 nt, Homo sapiens
  misc_RNA (1)...(19): siRNA sense strand
cagcagggguggaaaagug

SEQ ID NO: 2112404 - RNA, 19 nt, Homo sapiens
  misc_RNA (1)...(19): siRNA sense strand
cuuggccucuucuugcuuu

SEQ ID NO: 2112405 - RNA, 19 nt, Homo sapiens
  misc_RNA (1)...(19): siRNA sense strand
ucaacuccuuggccucuuc

SEQ ID NO: 2112406 - RNA, 19 nt, Homo sapiens
  misc_RNA (1)...(19): siRNA sense strand
ggaccuuuaccuuuaccaa

SEQ ID NO: 2112407 - RNA, 19 nt, Homo sapiens
  misc_RNA (1)...(19): siRNA sense strand
uggugaauaucgagccaaa

SEQ ID NO: 2112408 - RNA, 19 nt, Homo sapiens
  misc_RNA (1)...(19): siRNA sense strand
ggcuuucauugcuuacuga

SEQ ID NO: 2112409 - RNA, 19 nt, Homo sapiens
  misc_RNA (1)...(19): siRNA sense strand
gcauccaccugaggaccuu

SEQ ID NO: 2112410 - RNA, 19 nt, Homo sapiens
  misc_RNA (1)...(19): siRNA sense strand
cugaagcaccuacagauca

SEQ ID NO: 2112411 - RNA, 19 nt, Homo sapiens
  misc_RNA (1)...(19): siRNA sense strand
ucagcgugcuaaucaaugg

SEQ ID NO: 2112412 - RNA, 19 nt, Homo sapiens
  misc_RNA (1)...(19): siRNA sense strand
agauaucagccucaacauu

SEQ ID NO: 2112413 - RNA, 19 nt, Homo sapiens
  misc_RNA (1)...(19): siRNA sense strand
cgagugggccaacaagauc

SEQ ID NO: 2112414 - RNA, 19 nt, Homo sapiens
  misc_RNA (1)...(19): siRNA sense strand
cugaagcccuaaagaaagg

SEQ ID NO: 2112415 - RNA, 19 nt, Homo sapiens
  misc_RNA (1)...(19): siRNA sense strand
agaccuguaugaugaggau

SEQ ID NO: 2112416 - RNA, 19 nt, Homo sapiens
  misc_RNA (1)...(19): siRNA sense strand
uggaguggcuuucauugcu

SEQ ID NO: 2112417 - RNA, 19 nt, Homo sapiens
  misc_RNA (1)...(19): siRNA sense strand
gggcaugucguaagaagac

SEQ ID NO: 2112418 - RNA, 19 nt, Homo sapiens
  misc_RNA (1)...(19): siRNA sense strand
ucacccagacccaugaaau

SEQ ID NO: 2112419 - RNA, 19 nt, Homo sapiens
  misc_RNA (1)...(19): siRNA sense strand
ccugaauggugaauaucga

SEQ ID NO: 2112420 - RNA, 19 nt, Homo sapiens
  misc_RNA (1)...(19): siRNA sense strand
caaagcccaaccucaggaa

SEQ ID NO: 2112421 - RNA, 19 nt, Homo sapiens
  misc_RNA (1)...(19): siRNA sense strand
gaacauauccuugccauua

SEQ ID NO: 2112422 - RNA, 19 nt, Homo sapiens
  misc_RNA (1)...(19): siRNA sense strand
gaacaaggcuaugcagaua

SEQ ID NO: 2112423 - RNA, 19 nt, Homo sapiens
  misc_RNA (1)...(19): siRNA sense strand
gaucgcaacuucucaaauu

SEQ ID NO: 2112424 - RNA, 19 nt, Homo sapiens
  misc_RNA (1)...(19): siRNA sense strand
uauaagagcuaccgaaauu

SEQ ID NO: 2112425 - RNA, 19 nt, Homo sapiens
  misc_RNA (1)...(19): siRNA sense strand
guacaaagaugaaucagau

SEQ ID NO: 2112426 - RNA, 19 nt, Homo sapiens
  misc_RNA (1)...(19): siRNA sense strand
gauaagacaucaacugaga

SEQ ID NO: 2112427 - RNA, 19 nt, Homo sapiens
  misc_RNA (1)...(19): siRNA sense strand
ggacaaggcaugaaauuug

SEQ ID NO: 2112428 - RNA, 19 nt, Homo sapiens
  misc_RNA (1)...(19): siRNA sense strand
gaagaaccauggaggaaug

SEQ ID NO: 2112429 - RNA, 19 nt, Homo sapiens
  misc_RNA (1)...(19): siRNA sense strand
gcaaggaaacuuacagaaa

SEQ ID NO: 2112430 - RNA, 19 nt, Homo sapiens
  misc_RNA (1)...(19): siRNA sense strand
gaucauagacuuuccauca

SEQ ID NO: 2112431 - RNA, 19 nt, Homo sapiens
  misc_RNA (1)...(19): siRNA sense strand
gaaaauggaucuugacaau

SEQ ID NO: 2112432 - RNA, 19 nt, Homo sapiens
  misc_RNA (1)...(19): siRNA sense strand
ggagaugagugaaguguuc

SEQ ID NO: 2112433 - RNA, 19 nt, Homo sapiens
  misc_RNA (1)...(19): siRNA sense strand
ggagaagacccaaguauca

SEQ ID NO: 2112434 - RNA, 19 nt, Homo sapiens
  misc_RNA (1)...(19): siRNA sense strand
ccaaagacauucuccauac

SEQ ID NO: 2112435 - RNA, 19 nt, Homo sapiens
  misc_RNA (1)...(19): siRNA sense strand
ggauaaacccuuugaggaa

SEQ ID NO: 2112436 - RNA, 19 nt, Homo sapiens
  misc_RNA (1)...(19): siRNA sense strand
guaccuauguuguucagaa

SEQ ID NO: 2112437 - RNA, 19 nt, Homo sapiens
  misc_RNA (1)...(19): siRNA sense strand
gcugaaguguuuacugaaa

SEQ ID NO: 2112438 - RNA, 19 nt, Homo sapiens
  misc_RNA (1)...(19): siRNA sense strand
caaggaaacuuacagaaac

SEQ ID NO: 2112439 - RNA, 19 nt, Homo sapiens
  misc_RNA (1)...(19): siRNA sense strand
auagaagucuggcaagaua

SEQ ID NO: 2112440 - RNA, 19 nt, Homo sapiens
  misc_RNA (1)...(19): siRNA sense strand
ggcaaaugcucuacaguug

SEQ ID NO: 2112441 - RNA, 19 nt, Homo sapiens
  misc_RNA (1)...(19): siRNA sense strand
aaacgaagccauugugaaa

SEQ ID NO: 2112442 - RNA, 19 nt, Homo sapiens
  misc_RNA (1)...(19): siRNA sense strand
gggaagauauaaaugugaa

SEQ ID NO: 2112443 - RNA, 19 nt, Homo sapiens
  misc_RNA (1)...(19): siRNA sense strand
ggagaaagacgauaucagu

SEQ ID NO: 2112444 - RNA, 19 nt, Homo sapiens
  misc_RNA (1)...(19): siRNA sense strand
ggaaguacuuugccagaca

SEQ ID NO: 2112445 - RNA, 19 nt, Homo sapiens
  misc_RNA (1)...(19): siRNA sense strand
agaagaaacuaaagagaug

SEQ ID NO: 2112446 - RNA, 19 nt, Homo sapiens
  misc_RNA (1)...(19): siRNA sense strand
ccacaugguuaaauuuguu

SEQ ID NO: 2112447 - RNA, 19 nt, Homo sapiens
  misc_RNA (1)...(19): siRNA sense strand
ugagugaaguguucgauga

SEQ ID NO: 2112448 - RNA, 19 nt, Homo sapiens
  misc_RNA (1)...(19): siRNA sense strand
gauggcaguucaccuggua

SEQ ID NO: 2112449 - RNA, 19 nt, Homo sapiens
  misc_RNA (1)...(19): siRNA sense strand
gaagaagaaacuaaagaga

SEQ ID NO: 2112450 - RNA, 19 nt, Homo sapiens
  misc_RNA (1)...(19): siRNA sense strand
gaagaaaccagcaaaauug

SEQ ID NO: 2112451 - RNA, 19 nt, Homo sapiens
  misc_RNA (1)...(19): siRNA sense strand
guaguuaugugaccuuauc

SEQ ID NO: 2112452 - RNA, 19 nt, Homo sapiens
  misc_RNA (1)...(19): siRNA sense strand
gaaccuccacaaauaguaa

SEQ ID NO: 2112453 - RNA, 19 nt, Homo sapiens
  misc_RNA (1)...(19): siRNA sense strand
gggaauaucguucuuggaa

SEQ ID NO: 2112454 - RNA, 19 nt, Homo sapiens
  misc_RNA (1)...(19): siRNA sense strand
ccacacagcucugaauuac

SEQ ID NO: 2112455 - RNA, 19 nt, Homo sapiens
  misc_RNA (1)...(19): siRNA sense strand
cgaaauucuuccuaugaaa

SEQ ID NO: 2112456 - RNA, 19 nt, Homo sapiens
  misc_RNA (1)...(19): siRNA sense strand
gagaacagcuagccuuugc

SEQ ID NO: 2112457 - RNA, 19 nt, Homo sapiens
  misc_RNA (1)...(19): siRNA sense strand
gaaccagccaucacuaaug

SEQ ID NO: 2112458 - RNA, 19 nt, Homo sapiens
  misc_RNA (1)...(19): siRNA sense strand
ugaaggaguucgucuguca

SEQ ID NO: 2112459 - RNA, 19 nt, Homo sapiens
  misc_RNA (1)...(19): siRNA sense strand
aaacuuucaugaccuacua

SEQ ID NO: 2112460 - RNA, 19 nt, Homo sapiens
  misc_RNA (1)...(19): siRNA sense strand
caacuuagagguuaaucaa

SEQ ID NO: 2112461 - RNA, 19 nt, Homo sapiens
  misc_RNA (1)...(19): siRNA sense strand
cccuauguauucuguauua

SEQ ID NO: 2112462 - RNA, 19 nt, Homo sapiens
  misc_RNA (1)...(19): siRNA sense strand
gaaacuuacagaaacauga

SEQ ID NO: 2112463 - RNA, 19 nt, Homo sapiens
  misc_RNA (1)...(19): siRNA sense strand
gaaacgaagccauugugaa

SEQ ID NO: 2112464 - RNA, 19 nt, Homo sapiens
  misc_RNA (1)...(19): siRNA sense strand
gaccuacuauauacucaaa

SEQ ID NO: 2112465 - RNA, 19 nt, Homo sapiens
  misc_RNA (1)...(19): siRNA sense strand
gaagaaccagccaucacua

SEQ ID NO: 2112466 - RNA, 19 nt, Homo sapiens
  misc_RNA (1)...(19): siRNA sense strand
gagaaucaacauuucauug

SEQ ID NO: 2112467 - RNA, 19 nt, Homo sapiens
  misc_RNA (1)...(19): siRNA sense strand
aaagaaauccagacaguug

SEQ ID NO: 2112468 - RNA, 19 nt, Homo sapiens
  misc_RNA (1)...(19): siRNA sense strand
ugaaggagauguccauuuu

SEQ ID NO: 2112469 - RNA, 19 nt, Homo sapiens
  misc_RNA (1)...(19): siRNA sense strand
gcucauagggaagauauaa

SEQ ID NO: 2112470 - RNA, 19 nt, Homo sapiens
  misc_RNA (1)...(19): siRNA sense strand
gagaaugccgccucuguga

SEQ ID NO: 2112471 - RNA, 19 nt, Homo sapiens
  misc_RNA (1)...(19): siRNA sense strand
cauagacuuuccaucagua

SEQ ID NO: 2112472 - RNA, 19 nt, Homo sapiens
  misc_RNA (1)...(19): siRNA sense strand
gcagggaguacaaagauga

SEQ ID NO: 2112473 - RNA, 19 nt, Homo sapiens
  misc_RNA (1)...(19): siRNA sense strand
gaaucaacauuucauuggu

SEQ ID NO: 2112474 - RNA, 19 nt, Homo sapiens
  misc_RNA (1)...(19): siRNA sense strand
caaaucccuuggagaauca

SEQ ID NO: 2112475 - RNA, 19 nt, Homo sapiens
  misc_RNA (1)...(19): siRNA sense strand
cuaaagagaugcccaagcu

SEQ ID NO: 2112476 - RNA, 19 nt, Homo sapiens
  misc_RNA (1)...(19): siRNA sense strand
guauccaacuuagagguua

SEQ ID NO: 2112477 - RNA, 19 nt, Homo sapiens
  misc_RNA (1)...(19): siRNA sense strand
gggagugguuaaagaagaa

SEQ ID NO: 2112478 - RNA, 19 nt, Homo sapiens
  misc_RNA (1)...(19): siRNA sense strand
caacugagacaagaacaaa

SEQ ID NO: 2112479 - RNA, 19 nt, Homo sapiens
  misc_RNA (1)...(19): siRNA sense strand
gaaaagaaaggaagaucua

SEQ ID NO: 2112480 - RNA, 19 nt, Homo sapiens
  misc_RNA (1)...(19): siRNA sense strand
guaaacacccugaccaaca

SEQ ID NO: 2112481 - RNA, 19 nt, Homo sapiens
  misc_RNA (1)...(19): siRNA sense strand
ccuagugucuauccguaua

SEQ ID NO: 2112482 - RNA, 19 nt, Homo sapiens
  misc_RNA (1)...(19): siRNA sense strand
gacaaggcaugaaauuugg

SEQ ID NO: 2112483 - RNA, 19 nt, Homo sapiens
  misc_RNA (1)...(19): siRNA sense strand
gggcaaaugcucuacaguu

SEQ ID NO: 2112484 - RNA, 19 nt, Homo sapiens
  misc_RNA (1)...(19): siRNA sense strand
gacaucaacugagacaaga

SEQ ID NO: 2112485 - RNA, 19 nt, Homo sapiens
  misc_RNA (1)...(19): siRNA sense strand
ggaacaaggcuaugcagau

SEQ ID NO: 2112486 - RNA, 19 nt, Homo sapiens
  misc_RNA (1)...(19): siRNA sense strand
ccgaaauucuuccuaugaa

SEQ ID NO: 2112487 - RNA, 19 nt, Homo sapiens
  misc_RNA (1)...(19): siRNA sense strand
guaaugaugggaaaccaaa

SEQ ID NO: 2112488 - RNA, 19 nt, Homo sapiens
  misc_RNA (1)...(19): siRNA sense strand
ggaaaauguuguccuuuga

SEQ ID NO: 2112489 - RNA, 19 nt, Homo sapiens
  misc_RNA (1)...(19): siRNA sense strand
ucaaaucccuuggagaauc

SEQ ID NO: 2112490 - RNA, 19 nt, Homo sapiens
  misc_RNA (1)...(19): siRNA sense strand
ggaaacgaagccauuguga

SEQ ID NO: 2112491 - RNA, 19 nt, Homo sapiens
  misc_RNA (1)...(19): siRNA sense strand
acacagcucugaauuacca

SEQ ID NO: 2112492 - RNA, 19 nt, Homo sapiens
  misc_RNA (1)...(19): siRNA sense strand
cagauaagacaucaacuga

SEQ ID NO: 2112493 - RNA, 19 nt, Homo sapiens
  misc_RNA (1)...(19): siRNA sense strand
gcagauaagacaucaacug

SEQ ID NO: 2112494 - RNA, 19 nt, Homo sapiens
  misc_RNA (1)...(19): siRNA sense strand
ggaggaaggagcacggaaa

SEQ ID NO: 2112495 - RNA, 19 nt, Homo sapiens
  misc_RNA (1)...(19): siRNA sense strand
acgcugaauuuccaagaua

SEQ ID NO: 2112496 - RNA, 19 nt, Homo sapiens
  misc_RNA (1)...(19): siRNA sense strand
agaaagaaguccacaacca

SEQ ID NO: 2112497 - RNA, 19 nt, Homo sapiens
  misc_RNA (1)...(19): siRNA sense strand
caagaacaaaugaggauug

SEQ ID NO: 2112498 - RNA, 19 nt, Homo sapiens
  misc_RNA (1)...(19): siRNA sense strand
gcaagauaguaaggaagaa

SEQ ID NO: 2112499 - RNA, 19 nt, Homo sapiens
  misc_RNA (1)...(19): siRNA sense strand
ggaagaagaaacuaaagag

SEQ ID NO: 2112500 - RNA, 19 nt, Homo sapiens
  misc_RNA (1)...(19): siRNA sense strand
gcauggagaugagugaagu

SEQ ID NO: 2112501 - RNA, 19 nt, Homo sapiens
  misc_RNA (1)...(19): siRNA sense strand
cuaccgaaauucuuccuau

SEQ ID NO: 2112502 - RNA, 19 nt, Homo sapiens
  misc_RNA (1)...(19): siRNA sense strand
gccaaagacauucuccaua

SEQ ID NO: 2112503 - RNA, 19 nt, Homo sapiens
  misc_RNA (1)...(19): siRNA sense strand
ggccaaggaucacaaaugc

SEQ ID NO: 2112504 - RNA, 19 nt, Homo sapiens
  misc_RNA (1)...(19): siRNA sense strand
ggaguucgucugucaguau

SEQ ID NO: 2112505 - RNA, 19 nt, Homo sapiens
  misc_RNA (1)...(19): siRNA sense strand
caaaaucuccaaacaauga

SEQ ID NO: 2112506 - RNA, 19 nt, Homo sapiens
  misc_RNA (1)...(19): siRNA sense strand
gugaacaaaugcaugauac

SEQ ID NO: 2112507 - RNA, 19 nt, Homo sapiens
  misc_RNA (1)...(19): siRNA sense strand
ggagaaucaacauuucauu

SEQ ID NO: 2112508 - RNA, 19 nt, Homo sapiens
  misc_RNA (1)...(19): siRNA sense strand
gaguucgucugucaguauu

SEQ ID NO: 2112509 - RNA, 19 nt, Homo sapiens
  misc_RNA (1)...(19): siRNA sense strand
ggaguacaaagaugaauca

SEQ ID NO: 2112510 - RNA, 19 nt, Homo sapiens
  misc_RNA (1)...(19): siRNA sense strand
gaauuuccaagauacugua

SEQ ID NO: 2112511 - RNA, 19 nt, Homo sapiens
  misc_RNA (1)...(19): siRNA sense strand
gugcaaacguaguuaugug

SEQ ID NO: 2112512 - RNA, 19 nt, Homo sapiens
  misc_RNA (1)...(19): siRNA sense strand
acgcugaaguguuuacuga

SEQ ID NO: 2112513 - RNA, 19 nt, Homo sapiens
  misc_RNA (1)...(19): siRNA sense strand
aaaugaggauugccagaug

SEQ ID NO: 2112514 - RNA, 19 nt, Homo sapiens
  misc_RNA (1)...(19): siRNA sense strand
gagcaaaaccacaaauauu

SEQ ID NO: 2112515 - RNA, 19 nt, Homo sapiens
  misc_RNA (1)...(19): siRNA sense strand
gauaaaguggguagguuug

SEQ ID NO: 2112516 - RNA, 19 nt, Homo sapiens
  misc_RNA (1)...(19): siRNA sense strand
cagauaaaguggguagguu

SEQ ID NO: 2112517 - RNA, 19 nt, Homo sapiens
  misc_RNA (1)...(19): siRNA sense strand
uccagaaccuuuauuaucu

SEQ ID NO: 2112518 - RNA, 19 nt, Homo sapiens
  misc_RNA (1)...(19): siRNA sense strand
ggauguaccuguuuuaucu

SEQ ID NO: 2112519 - RNA, 19 nt, Homo sapiens
  misc_RNA (1)...(19): siRNA sense strand
caaaauccaugaaagaauc

SEQ ID NO: 2112520 - RNA, 19 nt, Homo sapiens
  misc_RNA (1)...(19): siRNA sense strand
guaaauacccagcagaacu

SEQ ID NO: 2112521 - RNA, 19 nt, Homo sapiens
  misc_RNA (1)...(19): siRNA sense strand
gaaacaaaguuaugucaga

SEQ ID NO: 2112522 - RNA, 19 nt, Homo sapiens
  misc_RNA (1)...(19): siRNA sense strand
gguggaagcuuuauucuau

SEQ ID NO: 2112523 - RNA, 19 nt, Homo sapiens
  misc_RNA (1)...(19): siRNA sense strand
gaacaucauuuguacucua

SEQ ID NO: 2112524 - RNA, 19 nt, Homo sapiens
  misc_RNA (1)...(19): siRNA sense strand
guacaacucuucagccaaa

SEQ ID NO: 2112525 - RNA, 19 nt, Homo sapiens
  misc_RNA (1)...(19): siRNA sense strand
ggaugaaucugaauuggaa

SEQ ID NO: 2112526 - RNA, 19 nt, Homo sapiens
  misc_RNA (1)...(19): siRNA sense strand
uagaagagaugcugaaaga

SEQ ID NO: 2112527 - RNA, 19 nt, Homo sapiens
  misc_RNA (1)...(19): siRNA sense strand
gaaaugcugugccaagaau

SEQ ID NO: 2112528 - RNA, 19 nt, Homo sapiens
  misc_RNA (1)...(19): siRNA sense strand
gaaagagacaagaaagaua

SEQ ID NO: 2112529 - RNA, 19 nt, Homo sapiens
  misc_RNA (1)...(19): siRNA sense strand
gggauuaacuccaaggaaa

SEQ ID NO: 2112530 - RNA, 19 nt, Homo sapiens
  misc_RNA (1)...(19): siRNA sense strand
gagccuauauuuaaaguug

SEQ ID NO: 2112531 - RNA, 19 nt, Homo sapiens
  misc_RNA (1)...(19): siRNA sense strand
ugaagcugcugaagaaaua

SEQ ID NO: 2112532 - RNA, 19 nt, Homo sapiens
  misc_RNA (1)...(19): siRNA sense strand
ucacaaagauucuccuaga

SEQ ID NO: 2112533 - RNA, 19 nt, Homo sapiens
  misc_RNA (1)...(19): siRNA sense strand
gguaaugacuugcuucaga

SEQ ID NO: 2112534 - RNA, 19 nt, Homo sapiens
  misc_RNA (1)...(19): siRNA sense strand
gcaccuggcucacaugaug

SEQ ID NO: 2112535 - RNA, 19 nt, Homo sapiens
  misc_RNA (1)...(19): siRNA sense strand
gaaauaguggauugcauua

SEQ ID NO: 2112536 - RNA, 19 nt, Homo sapiens
  misc_RNA (1)...(19): siRNA sense strand
gaacagagaaaucaacaau

SEQ ID NO: 2112537 - RNA, 19 nt, Homo sapiens
  misc_RNA (1)...(19): siRNA sense strand
ucagaaagaucucauaaag

SEQ ID NO: 2112538 - RNA, 19 nt, Homo sapiens
  misc_RNA (1)...(19): siRNA sense strand
gaagaaagagccagagaga

SEQ ID NO: 2112539 - RNA, 19 nt, Homo sapiens
  misc_RNA (1)...(19): siRNA sense strand
gauccaagcacuacuaauu

SEQ ID NO: 2112540 - RNA, 19 nt, Homo sapiens
  misc_RNA (1)...(19): siRNA sense strand
agaaagaucucauaaagag

SEQ ID NO: 2112541 - RNA, 19 nt, Homo sapiens
  misc_RNA (1)...(19): siRNA sense strand
ccugauacaucgaaugaua

SEQ ID NO: 2112542 - RNA, 19 nt, Homo sapiens
  misc_RNA (1)...(19): siRNA sense strand
gcucaaaguuaugaaguuu

SEQ ID NO: 2112543 - RNA, 19 nt, Homo sapiens
  misc_RNA (1)...(19): siRNA sense strand
ccaaaucagucuuccaaug

SEQ ID NO: 2112544 - RNA, 19 nt, Homo sapiens
  misc_RNA (1)...(19): siRNA sense strand
ucacugagauccgcucuuu

SEQ ID NO: 2112545 - RNA, 19 nt, Homo sapiens
  misc_RNA (1)...(19): siRNA sense strand
gaacagcguuuccguccau

SEQ ID NO: 2112546 - RNA, 19 nt, Homo sapiens
  misc_RNA (1)...(19): siRNA sense strand
gaacaggaagaauuaaaga

SEQ ID NO: 2112547 - RNA, 19 nt, Homo sapiens
  misc_RNA (1)...(19): siRNA sense strand
gaaugaaagugcccgugaa

SEQ ID NO: 2112548 - RNA, 19 nt, Homo sapiens
  misc_RNA (1)...(19): siRNA sense strand
cagauuaagucgauuugaa

SEQ ID NO: 2112549 - RNA, 19 nt, Homo sapiens
  misc_RNA (1)...(19): siRNA sense strand
caaaucagucuuccaauga

SEQ ID NO: 2112550 - RNA, 19 nt, Homo sapiens
  misc_RNA (1)...(19): siRNA sense strand
uaaugcagcuaaagaagaa

SEQ ID NO: 2112551 - RNA, 19 nt, Homo sapiens
  misc_RNA (1)...(19): siRNA sense strand
aaaggaacaggaagaauua

SEQ ID NO: 2112552 - RNA, 19 nt, Homo sapiens
  misc_RNA (1)...(19): siRNA sense strand
gccuagaacugaugaagaa

SEQ ID NO: 2112553 - RNA, 19 nt, Homo sapiens
  misc_RNA (1)...(19): siRNA sense strand
cagaggauguuccagauga

SEQ ID NO: 2112554 - RNA, 19 nt, Homo sapiens
  misc_RNA (1)...(19): siRNA sense strand
gaaaucaacaauccuaugu

SEQ ID NO: 2112555 - RNA, 19 nt, Homo sapiens
  misc_RNA (1)...(19): siRNA sense strand
agagagaaauugcggcuuu

SEQ ID NO: 2112556 - RNA, 19 nt, Homo sapiens
  misc_RNA (1)...(19): siRNA sense strand
gaaucucgcuccaaagaca

SEQ ID NO: 2112557 - RNA, 19 nt, Homo sapiens
  misc_RNA (1)...(19): siRNA sense strand
cuacagagauaaacuucuu

SEQ ID NO: 2112558 - RNA, 19 nt, Homo sapiens
  misc_RNA (1)...(19): siRNA sense strand
ugaagaagauacucaaagu

SEQ ID NO: 2112559 - RNA, 19 nt, Homo sapiens
  misc_RNA (1)...(19): siRNA sense strand
ggaugcaacugaagacuca

SEQ ID NO: 2112560 - RNA, 19 nt, Homo sapiens
  misc_RNA (1)...(19): siRNA sense strand
uccaagcacuacuaauuua

SEQ ID NO: 2112561 - RNA, 19 nt, Homo sapiens
  misc_RNA (1)...(19): siRNA sense strand
gaucagagcguucagaaag

SEQ ID NO: 2112562 - RNA, 19 nt, Homo sapiens
  misc_RNA (1)...(19): siRNA sense strand
agaagaaagugaagaugaa

SEQ ID NO: 2112563 - RNA, 19 nt, Homo sapiens
  misc_RNA (1)...(19): siRNA sense strand
gcaaugguuuucugucuua

SEQ ID NO: 2112564 - RNA, 19 nt, Homo sapiens
  misc_RNA (1)...(19): siRNA sense strand
gaacagagggauaaauugg

SEQ ID NO: 2112565 - RNA, 19 nt, Homo sapiens
  misc_RNA (1)...(19): siRNA sense strand
guacuugcauggaauguca

SEQ ID NO: 2112566 - RNA, 19 nt, Homo sapiens
  misc_RNA (1)...(19): siRNA sense strand
gaacaugaaacagaugaaa

SEQ ID NO: 2112567 - RNA, 19 nt, Homo sapiens
  misc_RNA (1)...(19): siRNA sense strand
agaaagaguuagaaagaga

SEQ ID NO: 2112568 - RNA, 19 nt, Homo sapiens
  misc_RNA (1)...(19): siRNA sense strand
agucuaaguucucuaagua

SEQ ID NO: 2112569 - RNA, 19 nt, Homo sapiens
  misc_RNA (1)...(19): siRNA sense strand
ggaauuauuugaccagcau

SEQ ID NO: 2112570 - RNA, 19 nt, Homo sapiens
  misc_RNA (1)...(19): siRNA sense strand
uggaagauuuggaccguua

SEQ ID NO: 2112571 - RNA, 19 nt, Homo sapiens
  misc_RNA (1)...(19): siRNA sense strand
caaaguugcuaaugcuuca

SEQ ID NO: 2112572 - RNA, 19 nt, Homo sapiens
  misc_RNA (1)...(19): siRNA sense strand
guagauggaauuccuauug

SEQ ID NO: 2112573 - RNA, 19 nt, Homo sapiens
  misc_RNA (1)...(19): siRNA sense strand
gaaggaagugaugguaaua

SEQ ID NO: 2112574 - RNA, 19 nt, Homo sapiens
  misc_RNA (1)...(19): siRNA sense strand
ccacacaggucucauaaaa

SEQ ID NO: 2112575 - RNA, 19 nt, Homo sapiens
  misc_RNA (1)...(19): siRNA sense strand
gggauaaauuggaagaaau

SEQ ID NO: 2112576 - RNA, 19 nt, Homo sapiens
  misc_RNA (1)...(19): siRNA sense strand
ggaauuugcucgcccugau

SEQ ID NO: 2112577 - RNA, 19 nt, Homo sapiens
  misc_RNA (1)...(19): siRNA sense strand
gaagugaugguaauaaagu

SEQ ID NO: 2112578 - RNA, 19 nt, Homo sapiens
  misc_RNA (1)...(19): siRNA sense strand
acagaugaaugaagaaaug

SEQ ID NO: 2112579 - RNA, 19 nt, Homo sapiens
  misc_RNA (1)...(19): siRNA sense strand
agagaaagagaaagaguua

SEQ ID NO: 2112580 - RNA, 19 nt, Homo sapiens
  misc_RNA (1)...(19): siRNA sense strand
ugaagaacaucauuuguac

SEQ ID NO: 2112581 - RNA, 19 nt, Homo sapiens
  misc_RNA (1)...(19): siRNA sense strand
cuuaaagcauucaguauug

SEQ ID NO: 2112582 - RNA, 19 nt, Homo sapiens
  misc_RNA (1)...(19): siRNA sense strand
gagccaaacuucgugaaau

SEQ ID NO: 2112583 - RNA, 19 nt, Homo sapiens
  misc_RNA (1)...(19): siRNA sense strand
gaagaagauacucaaaguu

SEQ ID NO: 2112584 - RNA, 19 nt, Homo sapiens
  misc_RNA (1)...(19): siRNA sense strand
aaacauuaauccacagaug

SEQ ID NO: 2112585 - RNA, 19 nt, Homo sapiens
  misc_RNA (1)...(19): siRNA sense strand
uagauggaauuccuauuga

SEQ ID NO: 2112586 - RNA, 19 nt, Homo sapiens
  misc_RNA (1)...(19): siRNA sense strand
agaaagagaacgagaaaga

SEQ ID NO: 2112587 - RNA, 19 nt, Homo sapiens
  misc_RNA (1)...(19): siRNA sense strand
ugaaggaagugaugguaau

SEQ ID NO: 2112588 - RNA, 19 nt, Homo sapiens
  misc_RNA (1)...(19): siRNA sense strand
gagaaagagacaagaaaga

SEQ ID NO: 2112589 - RNA, 19 nt, Homo sapiens
  misc_RNA (1)...(19): siRNA sense strand
guacucuaauccaaucaaa

SEQ ID NO: 2112590 - RNA, 19 nt, Homo sapiens
  misc_RNA (1)...(19): siRNA sense strand
gaacgugaugagagacaua

SEQ ID NO: 2112591 - RNA, 19 nt, Homo sapiens
  misc_RNA (1)...(19): siRNA sense strand
gaaagagaaagaguuagaa

SEQ ID NO: 2112592 - RNA, 19 nt, Homo sapiens
  misc_RNA (1)...(19): siRNA sense strand
cccuaaugcuccuauguua

SEQ ID NO: 2112593 - RNA, 19 nt, Homo sapiens
  misc_RNA (1)...(19): siRNA sense strand
agaaagagccagagagaga

SEQ ID NO: 2112594 - RNA, 19 nt, Homo sapiens
  misc_RNA (1)...(19): siRNA sense strand
ggagauccaagcacuacua

SEQ ID NO: 2112595 - RNA, 19 nt, Homo sapiens
  misc_RNA (1)...(19): siRNA sense strand
agaagaacaugaaacagau

SEQ ID NO: 2112596 - RNA, 19 nt, Homo sapiens
  misc_RNA (1)...(19): siRNA sense strand
gaaagaguuagaaagagaa

SEQ ID NO: 2112597 - RNA, 19 nt, Homo sapiens
  misc_RNA (1)...(19): siRNA sense strand
gaauagaagagaugcugaa

SEQ ID NO: 2112598 - RNA, 19 nt, Homo sapiens
  misc_RNA (1)...(19): siRNA sense strand
gagcgccagucgacuauuc

SEQ ID NO: 2112599 - RNA, 19 nt, Homo sapiens
  misc_RNA (1)...(19): siRNA sense strand
gagaaagaguuagaaagag

SEQ ID NO: 2112600 - RNA, 19 nt, Homo sapiens
  misc_RNA (1)...(19): siRNA sense strand
agagaaagaguuagaaaga

SEQ ID NO: 2112601 - RNA, 19 nt, Homo sapiens
  misc_RNA (1)...(19): siRNA sense strand
gggaagcuguggaugaauc

SEQ ID NO: 2112602 - RNA, 19 nt, Homo sapiens
  misc_RNA (1)...(19): siRNA sense strand
uacuauagguggaagcuuu

SEQ ID NO: 2112603 - RNA, 19 nt, Homo sapiens
  misc_RNA (1)...(19): siRNA sense strand
uagaacugaugaagaaaga

SEQ ID NO: 2112604 - RNA, 19 nt, Homo sapiens
  misc_RNA (1)...(19): siRNA sense strand
gaaaggaagaggcgacaca

SEQ ID NO: 2112605 - RNA, 19 nt, Homo sapiens
  misc_RNA (1)...(19): siRNA sense strand
gaccuaagagcccaagaaa

SEQ ID NO: 2112606 - RNA, 19 nt, Homo sapiens
  misc_RNA (1)...(19): siRNA sense strand
cagaagagcaagaaacaga

SEQ ID NO: 2112607 - RNA, 19 nt, Homo sapiens
  misc_RNA (1)...(19): siRNA sense strand
gaauuugcucgcccugaua

SEQ ID NO: 2112608 - RNA, 19 nt, Homo sapiens
  misc_RNA (1)...(19): siRNA sense strand
gaaagagccagagagagaa

SEQ ID NO: 2112609 - RNA, 19 nt, Homo sapiens
  misc_RNA (1)...(19): siRNA sense strand
gagagaaagagaaagaguu

SEQ ID NO: 2112610 - RNA, 19 nt, Homo sapiens
  misc_RNA (1)...(19): siRNA sense strand
ucaaggccauuuacaaucu

SEQ ID NO: 2112611 - RNA, 19 nt, Homo sapiens
  misc_RNA (1)...(19): siRNA sense strand
acagagggauaaauuggaa

SEQ ID NO: 2112612 - RNA, 19 nt, Homo sapiens
  misc_RNA (1)...(19): siRNA sense strand
aaagggagcacuuaaggaa

SEQ ID NO: 2112613 - RNA, 19 nt, Homo sapiens
  misc_RNA (1)...(19): siRNA sense strand
caaagugguuaucccaaca

SEQ ID NO: 2112614 - RNA, 19 nt, Homo sapiens
  misc_RNA (1)...(19): siRNA sense strand
gaaguuagguugggguaaa

SEQ ID NO: 2112615 - RNA, 19 nt, Homo sapiens
  misc_RNA (1)...(19): siRNA sense strand
uuuguggccuuuaugaaua

SEQ ID NO: 2112616 - RNA, 19 nt, Homo sapiens
  misc_RNA (1)...(19): siRNA sense strand
cugguguucuugaugauua

SEQ ID NO: 2112617 - RNA, 19 nt, Homo sapiens
  misc_RNA (1)...(19): siRNA sense strand
gagacaagaaagauaaaga

SEQ ID NO: 2112618 - RNA, 19 nt, Homo sapiens
  misc_RNA (1)...(19): siRNA sense strand
cugaagaaauaguggauug

SEQ ID NO: 2112619 - RNA, 19 nt, Homo sapiens
  misc_RNA (1)...(19): siRNA sense strand
gugaagggccaauguuuga

SEQ ID NO: 2112620 - RNA, 19 nt, Homo sapiens
  misc_RNA (1)...(19): siRNA sense strand
gagagaaauugcggcuuug

SEQ ID NO: 2112621 - RNA, 19 nt, Homo sapiens
  misc_RNA (1)...(19): siRNA sense strand
caacagcgcuucagaacug

SEQ ID NO: 2112622 - RNA, 19 nt, Homo sapiens
  misc_RNA (1)...(19): siRNA sense strand
ugaaacagcagaaauauga

SEQ ID NO: 2112623 - RNA, 19 nt, Homo sapiens
  misc_RNA (1)...(19): siRNA sense strand
gcaagcgcauggagaaaga

SEQ ID NO: 2112624 - RNA, 19 nt, Homo sapiens
  misc_RNA (1)...(19): siRNA sense strand
uaagaagccucuggacauu

SEQ ID NO: 2112625 - RNA, 19 nt, Homo sapiens
  misc_RNA (1)...(19): siRNA sense strand
gcagaaauaugagaucaac

SEQ ID NO: 2112626 - RNA, 19 nt, Homo sapiens
  misc_RNA (1)...(19): siRNA sense strand
guaagaagccucuggacau

SEQ ID NO: 2112627 - RNA, 19 nt, Homo sapiens
  misc_RNA (1)...(19): siRNA sense strand
ccgaggagcaggaauauga

SEQ ID NO: 2112628 - RNA, 19 nt, Homo sapiens
  misc_RNA (1)...(19): siRNA sense strand
agaagccucuggacauuga

SEQ ID NO: 2112629 - RNA, 19 nt, Homo sapiens
  misc_RNA (1)...(19): siRNA sense strand
gagcaacagcgcuucagaa

SEQ ID NO: 2112630 - RNA, 19 nt, Homo sapiens
  misc_RNA (1)...(19): siRNA sense strand
acucaucgauguacauuuc

SEQ ID NO: 2112631 - RNA, 19 nt, Homo sapiens
  misc_RNA (1)...(19): siRNA sense strand
cagcagaaauaugagauca

SEQ ID NO: 2112632 - RNA, 19 nt, Homo sapiens
  misc_RNA (1)...(19): siRNA sense strand
gcccagaaguuccguaagg

SEQ ID NO: 2112633 - RNA, 19 nt, Homo sapiens
  misc_RNA (1)...(19): siRNA sense strand
gaacagaagcgugguaagc

SEQ ID NO: 2112634 - RNA, 19 nt, Homo sapiens
  misc_RNA (1)...(19): siRNA sense strand
gcagacacucaucgaugua

SEQ ID NO: 2112635 - RNA, 19 nt, Homo sapiens
  misc_RNA (1)...(19): siRNA sense strand
ggaggaggaagaagaggaa

SEQ ID NO: 2112636 - RNA, 19 nt, Homo sapiens
  misc_RNA (1)...(19): siRNA sense strand
agaggaugaugccaagaaa

SEQ ID NO: 2112637 - RNA, 19 nt, Homo sapiens
  misc_RNA (1)...(19): siRNA sense strand
gcagaacagaagcguggua

SEQ ID NO: 2112638 - RNA, 19 nt, Homo sapiens
  misc_RNA (1)...(19): siRNA sense strand
agaaggugcuguccaacau

SEQ ID NO: 2112639 - RNA, 19 nt, Homo sapiens
  misc_RNA (1)...(19): siRNA sense strand
ggucaaggcagaacagaag

SEQ ID NO: 2112640 - RNA, 19 nt, Homo sapiens
  misc_RNA (1)...(19): siRNA sense strand
gcuggagucugagaaguuc

SEQ ID NO: 2112641 - RNA, 19 nt, Homo sapiens
  misc_RNA (1)...(19): siRNA sense strand
acaccgaggagcaggaaua

SEQ ID NO: 2112642 - RNA, 19 nt, Homo sapiens
  misc_RNA (1)...(19): siRNA sense strand
ggagcgcguugacuucgau

SEQ ID NO: 2112643 - RNA, 19 nt, Homo sapiens
  misc_RNA (1)...(19): siRNA sense strand
aaaagaaggugcuguccaa

SEQ ID NO: 2112644 - RNA, 19 nt, Homo sapiens
  misc_RNA (1)...(19): siRNA sense strand
ggagcugguugccuugaag

SEQ ID NO: 2112645 - RNA, 19 nt, Homo sapiens
  misc_RNA (1)...(19): siRNA sense strand
ggaggaagaggagcugguu

SEQ ID NO: 2112646 - RNA, 19 nt, Homo sapiens
  misc_RNA (1)...(19): siRNA sense strand
cagaggaugaugccaagaa

SEQ ID NO: 2112647 - RNA, 19 nt, Homo sapiens
  misc_RNA (1)...(19): siRNA sense strand
gaugaggaaggaagaggaa

SEQ ID NO: 2112648 - RNA, 19 nt, Homo sapiens
  misc_RNA (1)...(19): siRNA sense strand
gaaggugcuguccaacaug

SEQ ID NO: 2112649 - RNA, 19 nt, Homo sapiens
  misc_RNA (1)...(19): siRNA sense strand
ggaggaggaggaggaagaa

SEQ ID NO: 2112650 - RNA, 19 nt, Homo sapiens
  misc_RNA (1)...(19): siRNA sense strand
aggagaagaugaggaagga

SEQ ID NO: 2112651 - RNA, 19 nt, Homo sapiens
  misc_RNA (1)...(19): siRNA sense strand
aaacagcagaaauaugaga

SEQ ID NO: 2112652 - RNA, 19 nt, Homo sapiens
  misc_RNA (1)...(19): siRNA sense strand
gagaucaacgugcuguaca

SEQ ID NO: 2112653 - RNA, 19 nt, Homo sapiens
  misc_RNA (1)...(19): siRNA sense strand
ugcagacacucaucgaugu

SEQ ID NO: 2112654 - RNA, 19 nt, Homo sapiens
  misc_RNA (1)...(19): siRNA sense strand
cagaacagaagcgugguaa

SEQ ID NO: 2112655 - RNA, 19 nt, Homo sapiens
  misc_RNA (1)...(19): siRNA sense strand
ggacaccgaggagcaggaa

SEQ ID NO: 2112656 - RNA, 19 nt, Homo sapiens
  misc_RNA (1)...(19): siRNA sense strand
ggaggaggaggaagaagag

SEQ ID NO: 2112657 - RNA, 19 nt, Homo sapiens
  misc_RNA (1)...(19): siRNA sense strand
cguggugccuccuuugauc

SEQ ID NO: 2112658 - RNA, 19 nt, Homo sapiens
  misc_RNA (1)...(19): siRNA sense strand
agaucaacgugcuguacaa

SEQ ID NO: 2112659 - RNA, 19 nt, Homo sapiens
  misc_RNA (1)...(19): siRNA sense strand
cggaggagaagaugaggaa

SEQ ID NO: 2112660 - RNA, 19 nt, Homo sapiens
  misc_RNA (1)...(19): siRNA sense strand
gaagaggaagaggccaaga

SEQ ID NO: 2112661 - RNA, 19 nt, Homo sapiens
  misc_RNA (1)...(19): siRNA sense strand
agaaauaugagaucaacgu

SEQ ID NO: 2112662 - RNA, 19 nt, Homo sapiens
  misc_RNA (1)...(19): siRNA sense strand
ugaggaaggaagaggaaga

SEQ ID NO: 2112663 - RNA, 19 nt, Homo sapiens
  misc_RNA (1)...(19): siRNA sense strand
aagaggaagaggccaagaa

SEQ ID NO: 2112664 - RNA, 19 nt, Homo sapiens
  misc_RNA (1)...(19): siRNA sense strand
gaagcgggcagaggaugau

SEQ ID NO: 2112665 - RNA, 19 nt, Homo sapiens
  misc_RNA (1)...(19): siRNA sense strand
cggaggaggaggaggaaga

SEQ ID NO: 2112666 - RNA, 19 nt, Homo sapiens
  misc_RNA (1)...(19): siRNA sense strand
gaaacagcagaaauaugag

SEQ ID NO: 2112667 - RNA, 19 nt, Homo sapiens
  misc_RNA (1)...(19): siRNA sense strand
ugagaaguucgaccugaug

SEQ ID NO: 2112668 - RNA, 19 nt, Homo sapiens
  misc_RNA (1)...(19): siRNA sense strand
caagaagcgggcagaggau

SEQ ID NO: 2112669 - RNA, 19 nt, Homo sapiens
  misc_RNA (1)...(19): siRNA sense strand
gggagcgcguugacuucga

SEQ ID NO: 2112670 - RNA, 19 nt, Homo sapiens
  misc_RNA (1)...(19): siRNA sense strand
gcaacagcgcuucagaacu

SEQ ID NO: 2112671 - RNA, 19 nt, Homo sapiens
  misc_RNA (1)...(19): siRNA sense strand
cugagaaguucgaccugau

SEQ ID NO: 2112672 - RNA, 19 nt, Homo sapiens
  misc_RNA (1)...(19): siRNA sense strand
gaggaacgccccaaaccaa

SEQ ID NO: 2112673 - RNA, 19 nt, Homo sapiens
  misc_RNA (1)...(19): siRNA sense strand
gcaucuccacgcucuguaa

SEQ ID NO: 2112674 - RNA, 19 nt, Homo sapiens
  misc_RNA (1)...(19): siRNA sense strand
caggucagcguguggcuaa

SEQ ID NO: 2112675 - RNA, 19 nt, Homo sapiens
  misc_RNA (1)...(19): siRNA sense strand
gcuggaaggcccacaucug

SEQ ID NO: 2112676 - RNA, 19 nt, Homo sapiens
  misc_RNA (1)...(19): siRNA sense strand
gaaccaaacucagaagauu

SEQ ID NO: 2112677 - RNA, 19 nt, Homo sapiens
  misc_RNA (1)...(19): siRNA sense strand
gaggugauauuaacuauga

SEQ ID NO: 2112678 - RNA, 19 nt, Homo sapiens
  misc_RNA (1)...(19): siRNA sense strand
acauucagcuuucuacuua

SEQ ID NO: 2112679 - RNA, 19 nt, Homo sapiens
  misc_RNA (1)...(19): siRNA sense strand
ccuagucucuuacaacuuu

SEQ ID NO: 2112680 - RNA, 19 nt, Homo sapiens
  misc_RNA (1)...(19): siRNA sense strand
cguaacaucuucaaugcua

SEQ ID NO: 2112681 - RNA, 19 nt, Homo sapiens
  misc_RNA (1)...(19): siRNA sense strand
gcacacaggcagaacagua

SEQ ID NO: 2112682 - RNA, 19 nt, Homo sapiens
  misc_RNA (1)...(19): siRNA sense strand
gaggaaauccaguuguuaa

SEQ ID NO: 2112683 - RNA, 19 nt, Homo sapiens
  misc_RNA (1)...(19): siRNA sense strand
gaagaaagcaaggguaguu

SEQ ID NO: 2112684 - RNA, 19 nt, Homo sapiens
  misc_RNA (1)...(19): siRNA sense strand
ggacagcuccacacaaaga

SEQ ID NO: 2112685 - RNA, 19 nt, Homo sapiens
  misc_RNA (1)...(19): siRNA sense strand
gaagauuacuaugaugaug

SEQ ID NO: 2112686 - RNA, 19 nt, Homo sapiens
  misc_RNA (1)...(19): siRNA sense strand
aaagaggcaucaacaaaug

SEQ ID NO: 2112687 - RNA, 19 nt, Homo sapiens
  misc_RNA (1)...(19): siRNA sense strand
gcgcuucgcuuugauccua

SEQ ID NO: 2112688 - RNA, 19 nt, Homo sapiens
  misc_RNA (1)...(19): siRNA sense strand
gggcagcauuuauucacua

SEQ ID NO: 2112689 - RNA, 19 nt, Homo sapiens
  misc_RNA (1)...(19): siRNA sense strand
caaagaggcaucaacaaau

SEQ ID NO: 2112690 - RNA, 19 nt, Homo sapiens
  misc_RNA (1)...(19): siRNA sense strand
ggaggaaauccaguuguua

SEQ ID NO: 2112691 - RNA, 19 nt, Homo sapiens
  misc_RNA (1)...(19): siRNA sense strand
caaacgagguccccgguua

SEQ ID NO: 2112692 - RNA, 19 nt, Homo sapiens
  misc_RNA (1)...(19): siRNA sense strand
acaaagaggcaucaacaaa

SEQ ID NO: 2112693 - RNA, 19 nt, Homo sapiens
  misc_RNA (1)...(19): siRNA sense strand
aaacaggaggugauauuaa

SEQ ID NO: 2112694 - RNA, 19 nt, Homo sapiens
  misc_RNA (1)...(19): siRNA sense strand
ccagacagccuccagaaga

SEQ ID NO: 2112695 - RNA, 19 nt, Homo sapiens
  misc_RNA (1)...(19): siRNA sense strand
agaagucuaucgauccaaa

SEQ ID NO: 2112696 - RNA, 19 nt, Homo sapiens
  misc_RNA (1)...(19): siRNA sense strand
gggaaaacccuaucucuuu

SEQ ID NO: 2112697 - RNA, 19 nt, Homo sapiens
  misc_RNA (1)...(19): siRNA sense strand
ggaaauccaguuguuaaau

SEQ ID NO: 2112698 - RNA, 19 nt, Homo sapiens
  misc_RNA (1)...(19): siRNA sense strand
caccaccucugccuuaaug

SEQ ID NO: 2112699 - RNA, 19 nt, Homo sapiens
  misc_RNA (1)...(19): siRNA sense strand
acagauuuguuucauguga

SEQ ID NO: 2112700 - RNA, 19 nt, Homo sapiens
  misc_RNA (1)...(19): siRNA sense strand
aaacaggauuccaacaaca

SEQ ID NO: 2112701 - RNA, 19 nt, Homo sapiens
  misc_RNA (1)...(19): siRNA sense strand
cucaguaacuuaucaacaa

SEQ ID NO: 2112702 - RNA, 19 nt, Homo sapiens
  misc_RNA (1)...(19): siRNA sense strand
gggccucucuagcaacuug

SEQ ID NO: 2112703 - RNA, 19 nt, Homo sapiens
  misc_RNA (1)...(19): siRNA sense strand
uaaacaggauuccaacaac

SEQ ID NO: 2112704 - RNA, 19 nt, Homo sapiens
  misc_RNA (1)...(19): siRNA sense strand
uacagaagcuaaacaggau

SEQ ID NO: 2112705 - RNA, 19 nt, Homo sapiens
  misc_RNA (1)...(19): siRNA sense strand
caaaagacccucagagaga

SEQ ID NO: 2112706 - RNA, 19 nt, Homo sapiens
  misc_RNA (1)...(19): siRNA sense strand
ggcagcauuuauucacuaa

SEQ ID NO: 2112707 - RNA, 19 nt, Homo sapiens
  misc_RNA (1)...(19): siRNA sense strand
ggagguucuugaaauuugu

SEQ ID NO: 2112708 - RNA, 19 nt, Homo sapiens
  misc_RNA (1)...(19): siRNA sense strand
agacaaccguaacaucuuc

SEQ ID NO: 2112709 - RNA, 19 nt, Homo sapiens
  misc_RNA (1)...(19): siRNA sense strand
ccucugccuuaauguauuu

SEQ ID NO: 2112710 - RNA, 19 nt, Homo sapiens
  misc_RNA (1)...(19): siRNA sense strand
gugcaccaccucugccuua

SEQ ID NO: 2112711 - RNA, 19 nt, Homo sapiens
  misc_RNA (1)...(19): siRNA sense strand
aaauaacuccagccucuaa

SEQ ID NO: 2112712 - RNA, 19 nt, Homo sapiens
  misc_RNA (1)...(19): siRNA sense strand
caacaaaugcacaaauacu

SEQ ID NO: 2112713 - RNA, 19 nt, Homo sapiens
  misc_RNA (1)...(19): siRNA sense strand
uggagguucuugaaauuug

SEQ ID NO: 2112714 - RNA, 19 nt, Homo sapiens
  misc_RNA (1)...(19): siRNA sense strand
gaacuguuguguccaugcu

SEQ ID NO: 2112715 - RNA, 19 nt, Homo sapiens
  misc_RNA (1)...(19): siRNA sense strand
gaucuccaucccuacguua

SEQ ID NO: 2112716 - RNA, 19 nt, Homo sapiens
  misc_RNA (1)...(19): siRNA sense strand
cacaugaagauuacuauga

SEQ ID NO: 2112717 - RNA, 19 nt, Homo sapiens
  misc_RNA (1)...(19): siRNA sense strand
gcacaugaagauuacuaug

SEQ ID NO: 2112718 - RNA, 19 nt, Homo sapiens
  misc_RNA (1)...(19): siRNA sense strand
gcuuugauccuagcgcuua

SEQ ID NO: 2112719 - RNA, 19 nt, Homo sapiens
  misc_RNA (1)...(19): siRNA sense strand
ccaacuaccaggaaauuuc

SEQ ID NO: 2112720 - RNA, 19 nt, Homo sapiens
  misc_RNA (1)...(19): siRNA sense strand
cagacagccuccagaagau

SEQ ID NO: 2112721 - RNA, 19 nt, Homo sapiens
  misc_RNA (1)...(19): siRNA sense strand
gaaaauacacuuggagguu

SEQ ID NO: 2112722 - RNA, 19 nt, Homo sapiens
  misc_RNA (1)...(19): siRNA sense strand
cuaaacaggauuccaacaa

SEQ ID NO: 2112723 - RNA, 19 nt, Homo sapiens
  misc_RNA (1)...(19): siRNA sense strand
gagacaaccguaacaucuu

SEQ ID NO: 2112724 - RNA, 19 nt, Homo sapiens
  misc_RNA (1)...(19): siRNA sense strand
gccagggccucucuagcaa

SEQ ID NO: 2112725 - RNA, 19 nt, Homo sapiens
  misc_RNA (1)...(19): siRNA sense strand
ggagugguguaggaguaaa

SEQ ID NO: 2112726 - RNA, 19 nt, Homo sapiens
  misc_RNA (1)...(19): siRNA sense strand
acaaaugcacaaauacuga

SEQ ID NO: 2112727 - RNA, 19 nt, Homo sapiens
  misc_RNA (1)...(19): siRNA sense strand
ggagacauucagcuuucua

SEQ ID NO: 2112728 - RNA, 19 nt, Homo sapiens
  misc_RNA (1)...(19): siRNA sense strand
gaaauuucccguggagcuu

SEQ ID NO: 2112729 - RNA, 19 nt, Homo sapiens
  misc_RNA (1)...(19): siRNA sense strand
uaacuccagccucuaagaa

SEQ ID NO: 2112730 - RNA, 19 nt, Homo sapiens
  misc_RNA (1)...(19): siRNA sense strand
acacaaagaggcaucaaca

SEQ ID NO: 2112731 - RNA, 19 nt, Homo sapiens
  misc_RNA (1)...(19): siRNA sense strand
ccaccucugccuuaaugua

SEQ ID NO: 2112732 - RNA, 19 nt, Homo sapiens
  misc_RNA (1)...(19): siRNA sense strand
aggaggaaauccaguuguu

SEQ ID NO: 2112733 - RNA, 19 nt, Homo sapiens
  misc_RNA (1)...(19): siRNA sense strand
cuuggagguucuugaaauu

SEQ ID NO: 2112734 - RNA, 19 nt, Homo sapiens
  misc_RNA (1)...(19): siRNA sense strand
ccaugcaccuacagggaaa

SEQ ID NO: 2112735 - RNA, 19 nt, Homo sapiens
  misc_RNA (1)...(19): siRNA sense strand
aggaguaaaucagaaagaa

SEQ ID NO: 2112736 - RNA, 19 nt, Homo sapiens
  misc_RNA (1)...(19): siRNA sense strand
gacauucagcuuucuacuu

SEQ ID NO: 2112737 - RNA, 19 nt, Homo sapiens
  misc_RNA (1)...(19): siRNA sense strand
caugaagauuacuaugaug

SEQ ID NO: 2112738 - RNA, 19 nt, Homo sapiens
  misc_RNA (1)...(19): siRNA sense strand
gccaugaaccaaacucaga

SEQ ID NO: 2112739 - RNA, 19 nt, Homo sapiens
  misc_RNA (1)...(19): siRNA sense strand
cccuaucucuuucuaccua

SEQ ID NO: 2112740 - RNA, 19 nt, Homo sapiens
  misc_RNA (1)...(19): siRNA sense strand
ugggagugguguaggagua

SEQ ID NO: 2112741 - RNA, 19 nt, Homo sapiens
  misc_RNA (1)...(19): siRNA sense strand
gagagacaaccguaacauc

SEQ ID NO: 2112742 - RNA, 19 nt, Homo sapiens
  misc_RNA (1)...(19): siRNA sense strand
guaacaucuucaaugcuau

SEQ ID NO: 2112743 - RNA, 19 nt, Homo sapiens
  misc_RNA (1)...(19): siRNA sense strand
gauccuagcgcuuacaaaa

SEQ ID NO: 2112744 - RNA, 19 nt, Homo sapiens
  misc_RNA (1)...(19): siRNA sense strand
guaaaaggcagcaucaaga

SEQ ID NO: 2112745 - RNA, 19 nt, Homo sapiens
  misc_RNA (1)...(19): siRNA sense strand
cuacguuacuccaggaaag

SEQ ID NO: 2112746 - RNA, 19 nt, Homo sapiens
  misc_RNA (1)...(19): siRNA sense strand
gccauucccuugugugcau

SEQ ID NO: 2112747 - RNA, 19 nt, Homo sapiens
  misc_RNA (1)...(19): siRNA sense strand
caggaggugauauuaacua

SEQ ID NO: 2112748 - RNA, 19 nt, Homo sapiens
  misc_RNA (1)...(19): siRNA sense strand
caaaacaggaggugauauu

SEQ ID NO: 2112749 - RNA, 19 nt, Homo sapiens
  misc_RNA (1)...(19): siRNA sense strand
ugaagggccagaaagaaga

SEQ ID NO: 2112750 - RNA, 19 nt, Homo sapiens
  misc_RNA (1)...(19): siRNA sense strand
gaagcacacaggcagaaca

SEQ ID NO: 2112751 - RNA, 19 nt, Homo sapiens
  misc_RNA (1)...(19): siRNA sense strand
ccugauggugauauuaaua

SEQ ID NO: 2112752 - RNA, 19 nt, Homo sapiens
  misc_RNA (1)...(19): siRNA sense strand
caaaaguguuggccaugaa

SEQ ID NO: 2112753 - RNA, 19 nt, Homo sapiens
  misc_RNA (1)...(19): siRNA sense strand
cugugucaaucauuaguaa

SEQ ID NO: 2112754 - RNA, 19 nt, Homo sapiens
  misc_RNA (1)...(19): siRNA sense strand
aaagagaggaagaaagcaa

SEQ ID NO: 2112755 - RNA, 19 nt, Homo sapiens
  misc_RNA (1)...(19): siRNA sense strand
cacacaggcagaacaguaa

SEQ ID NO: 2112756 - RNA, 19 nt, Homo sapiens
  misc_RNA (1)...(19): siRNA sense strand
guacuauuccucucuaucg

SEQ ID NO: 2112757 - RNA, 19 nt, Homo sapiens
  misc_RNA (1)...(19): siRNA sense strand
gguguaggaguaaaucaga

SEQ ID NO: 2112758 - RNA, 19 nt, Homo sapiens
  misc_RNA (1)...(19): siRNA sense strand
caucaacaaaugcacaaau

SEQ ID NO: 2112759 - RNA, 19 nt, Homo sapiens
  misc_RNA (1)...(19): siRNA sense strand
ggugaccaucuucauguuu

SEQ ID NO: 2112760 - RNA, 19 nt, Homo sapiens
  misc_RNA (1)...(19): siRNA sense strand
acaaccugaugaacucuga

SEQ ID NO: 2112761 - RNA, 19 nt, Homo sapiens
  misc_RNA (1)...(19): siRNA sense strand
aauagcacaugaagauuac

SEQ ID NO: 2112762 - RNA, 19 nt, Homo sapiens
  misc_RNA (1)...(19): siRNA sense strand
cccacucacucaccgauug

SEQ ID NO: 2112763 - RNA, 19 nt, Homo sapiens
  misc_RNA (1)...(19): siRNA sense strand
uaauccugauggugauauu

SEQ ID NO: 2112764 - RNA, 19 nt, Homo sapiens
  misc_RNA (1)...(19): siRNA sense strand
aacaggaggugauauuaac

SEQ ID NO: 2112765 - RNA, 19 nt, Homo sapiens
  misc_RNA (1)...(19): siRNA sense strand
ucucuaucguguacgcuuu

SEQ ID NO: 2112766 - RNA, 19 nt, Homo sapiens
  misc_RNA (1)...(19): siRNA sense strand
aagaaagcaaggguaguua

SEQ ID NO: 2112767 - RNA, 19 nt, Homo sapiens
  misc_RNA (1)...(19): siRNA sense strand
guguaggaguaaaucagaa

SEQ ID NO: 2112768 - RNA, 19 nt, Homo sapiens
  misc_RNA (1)...(19): siRNA sense strand
agucagaaaccagaucuuu

SEQ ID NO: 2112769 - RNA, 19 nt, Homo sapiens
  misc_RNA (1)...(19): siRNA sense strand
caaaugcacaaauacugau

SEQ ID NO: 2112770 - RNA, 19 nt, Homo sapiens
  misc_RNA (1)...(19): siRNA sense strand
acucuagccuguggaaaga

SEQ ID NO: 2112771 - RNA, 19 nt, Homo sapiens
  misc_RNA (1)...(19): siRNA sense strand
gcacauggugguccagaac

SEQ ID NO: 2112772 - RNA, 19 nt, Homo sapiens
  misc_RNA (1)...(19): siRNA sense strand
uguggaaagagaaucauaa

SEQ ID NO: 2112773 - RNA, 19 nt, Homo sapiens
  misc_RNA (1)...(19): siRNA sense strand
acuuggagguucuugaaau

SEQ ID NO: 2112774 - RNA, 19 nt, Homo sapiens
  misc_RNA (1)...(19): siRNA sense strand
acacuuggagguucuugaa

SEQ ID NO: 2112775 - RNA, 19 nt, Homo sapiens
  misc_RNA (1)...(19): siRNA sense strand
gacugggagugguguagga

SEQ ID NO: 2112776 - RNA, 19 nt, Homo sapiens
  misc_RNA (1)...(19): siRNA sense strand
gaagaaacacugacauuua

SEQ ID NO: 2112777 - RNA, 19 nt, Homo sapiens
  misc_RNA (1)...(19): siRNA sense strand
aaaggaagauugcucagua

SEQ ID NO: 2112778 - RNA, 19 nt, Homo sapiens
  misc_RNA (1)...(19): siRNA sense strand
gaaguugccuuaucaccuu

SEQ ID NO: 2112779 - RNA, 19 nt, Homo sapiens
  misc_RNA (1)...(19): siRNA sense strand
gacagaagcauccauauuu

SEQ ID NO: 2112780 - RNA, 19 nt, Homo sapiens
  misc_RNA (1)...(19): siRNA sense strand
cagcaaaugugcaaaggua

SEQ ID NO: 2112781 - RNA, 19 nt, Homo sapiens
  misc_RNA (1)...(19): siRNA sense strand
ggugacggcuugcugaaua

SEQ ID NO: 2112782 - RNA, 19 nt, Homo sapiens
  misc_RNA (1)...(19): siRNA sense strand
gaaugaguuuccuguuaua

SEQ ID NO: 2112783 - RNA, 19 nt, Homo sapiens
  misc_RNA (1)...(19): siRNA sense strand
gacgagaccuuuauuuguu

SEQ ID NO: 2112784 - RNA, 19 nt, Homo sapiens
  misc_RNA (1)...(19): siRNA sense strand
caagaaagaucaccuaacu

SEQ ID NO: 2112785 - RNA, 19 nt, Homo sapiens
  misc_RNA (1)...(19): siRNA sense strand
gaugaugaccuuucuagua

SEQ ID NO: 2112786 - RNA, 19 nt, Homo sapiens
  misc_RNA (1)...(19): siRNA sense strand
cagagcaguucaugauuua

SEQ ID NO: 2112787 - RNA, 19 nt, Homo sapiens
  misc_RNA (1)...(19): siRNA sense strand
aagaaugaguuuccuguua

SEQ ID NO: 2112788 - RNA, 19 nt, Homo sapiens
  misc_RNA (1)...(19): siRNA sense strand
caacuugcuucuccuuuaa

SEQ ID NO: 2112789 - RNA, 19 nt, Homo sapiens
  misc_RNA (1)...(19): siRNA sense strand
uaaagaagauccugauagu

SEQ ID NO: 2112790 - RNA, 19 nt, Homo sapiens
  misc_RNA (1)...(19): siRNA sense strand
ggacagugcagaugaaauu

SEQ ID NO: 2112791 - RNA, 19 nt, Homo sapiens
  misc_RNA (1)...(19): siRNA sense strand
ugaggaagcugauaagaau

SEQ ID NO: 2112792 - RNA, 19 nt, Homo sapiens
  misc_RNA (1)...(19): siRNA sense strand
gcacggcucuucacuaugg

SEQ ID NO: 2112793 - RNA, 19 nt, Homo sapiens
  misc_RNA (1)...(19): siRNA sense strand
gagcuacagugacaagaaa

SEQ ID NO: 2112794 - RNA, 19 nt, Homo sapiens
  misc_RNA (1)...(19): siRNA sense strand
gaagcagaguccagaugua

SEQ ID NO: 2112795 - RNA, 19 nt, Homo sapiens
  misc_RNA (1)...(19): siRNA sense strand
gaaagaugcaugaguguga

SEQ ID NO: 2112796 - RNA, 19 nt, Homo sapiens
  misc_RNA (1)...(19): siRNA sense strand
ucaacuugcuucuccuuua

SEQ ID NO: 2112797 - RNA, 19 nt, Homo sapiens
  misc_RNA (1)...(19): siRNA sense strand
ugacauaccugaccuacau

SEQ ID NO: 2112798 - RNA, 19 nt, Homo sapiens
  misc_RNA (1)...(19): siRNA sense strand
ggaagcguccuuucucaua

SEQ ID NO: 2112799 - RNA, 19 nt, Homo sapiens
  misc_RNA (1)...(19): siRNA sense strand
gaagacgagugcaaauuca

SEQ ID NO: 2112800 - RNA, 19 nt, Homo sapiens
  misc_RNA (1)...(19): siRNA sense strand
gcaaauucaagcuccauua

SEQ ID NO: 2112801 - RNA, 19 nt, Homo sapiens
  misc_RNA (1)...(19): siRNA sense strand
ggacacagaugaucaagcu

SEQ ID NO: 2112802 - RNA, 19 nt, Homo sapiens
  misc_RNA (1)...(19): siRNA sense strand
ggaagaaacacugacauuu

SEQ ID NO: 2112803 - RNA, 19 nt, Homo sapiens
  misc_RNA (1)...(19): siRNA sense strand
aaaggaaaguggaaagaaa

SEQ ID NO: 2112804 - RNA, 19 nt, Homo sapiens
  misc_RNA (1)...(19): siRNA sense strand
ucagagcaguucaugauuu

SEQ ID NO: 2112805 - RNA, 19 nt, Homo sapiens
  misc_RNA (1)...(19): siRNA sense strand
gccaguagauuguuguaaa

SEQ ID NO: 2112806 - RNA, 19 nt, Homo sapiens
  misc_RNA (1)...(19): siRNA sense strand
ucagggaacuuugacauuu

SEQ ID NO: 2112807 - RNA, 19 nt, Homo sapiens
  misc_RNA (1)...(19): siRNA sense strand
cuaacaaccugugaauaua

SEQ ID NO: 2112808 - RNA, 19 nt, Homo sapiens
  misc_RNA (1)...(19): siRNA sense strand
aagaagauccugauaguuu

SEQ ID NO: 2112809 - RNA, 19 nt, Homo sapiens
  misc_RNA (1)...(19): siRNA sense strand
caacgaacacaguuuauga

SEQ ID NO: 2112810 - RNA, 19 nt, Homo sapiens
  misc_RNA (1)...(19): siRNA sense strand
cagcucauccugaaaguua

SEQ ID NO: 2112811 - RNA, 19 nt, Homo sapiens
  misc_RNA (1)...(19): siRNA sense strand
gagcaguucaugauuuaua

SEQ ID NO: 2112812 - RNA, 19 nt, Homo sapiens
  misc_RNA (1)...(19): siRNA sense strand
ugacauauuuaacccauug

SEQ ID NO: 2112813 - RNA, 19 nt, Homo sapiens
  misc_RNA (1)...(19): siRNA sense strand
gcugaaacguggaaccaaa

SEQ ID NO: 2112814 - RNA, 19 nt, Homo sapiens
  misc_RNA (1)...(19): siRNA sense strand
aaacuggagucacuguuaa

SEQ ID NO: 2112815 - RNA, 19 nt, Homo sapiens
  misc_RNA (1)...(19): siRNA sense strand
ggacgaaugaugcaguuaa

SEQ ID NO: 2112816 - RNA, 19 nt, Homo sapiens
  misc_RNA (1)...(19): siRNA sense strand
cauagcaaccuagaaauua

SEQ ID NO: 2112817 - RNA, 19 nt, Homo sapiens
  misc_RNA (1)...(19): siRNA sense strand
ugaguuuccuguuauauug

SEQ ID NO: 2112818 - RNA, 19 nt, Homo sapiens
  misc_RNA (1)...(19): siRNA sense strand
gccaagugcuauauucaaa

SEQ ID NO: 2112819 - RNA, 19 nt, Homo sapiens
  misc_RNA (1)...(19): siRNA sense strand
gagaaacggcuacuguaaa

SEQ ID NO: 2112820 - RNA, 19 nt, Homo sapiens
  misc_RNA (1)...(19): siRNA sense strand
caaaagacauugaaggaaa

SEQ ID NO: 2112821 - RNA, 19 nt, Homo sapiens
  misc_RNA (1)...(19): siRNA sense strand
gagaaucacugcaguaucc

SEQ ID NO: 2112822 - RNA, 19 nt, Homo sapiens
  misc_RNA (1)...(19): siRNA sense strand
caagacagcggccuuagaa

SEQ ID NO: 2112823 - RNA, 19 nt, Homo sapiens
  misc_RNA (1)...(19): siRNA sense strand
gaagacacacagcagagua

SEQ ID NO: 2112824 - RNA, 19 nt, Homo sapiens
  misc_RNA (1)...(19): siRNA sense strand
gagacgagaccuuuauuug

SEQ ID NO: 2112825 - RNA, 19 nt, Homo sapiens
  misc_RNA (1)...(19): siRNA sense strand
gccaagcagugaugauaaa

SEQ ID NO: 2112826 - RNA, 19 nt, Homo sapiens
  misc_RNA (1)...(19): siRNA sense strand
gacgaaugaugcaguuaaa

SEQ ID NO: 2112827 - RNA, 19 nt, Homo sapiens
  misc_RNA (1)...(19): siRNA sense strand
gguggaaucuuucauaagg

SEQ ID NO: 2112828 - RNA, 19 nt, Homo sapiens
  misc_RNA (1)...(19): siRNA sense strand
caaaccagaugaugaccuu

SEQ ID NO: 2112829 - RNA, 19 nt, Homo sapiens
  misc_RNA (1)...(19): siRNA sense strand
agauaaagauggcagaaga

SEQ ID NO: 2112830 - RNA, 19 nt, Homo sapiens
  misc_RNA (1)...(19): siRNA sense strand
gcugaauauugaagagaua

SEQ ID NO: 2112831 - RNA, 19 nt, Homo sapiens
  misc_RNA (1)...(19): siRNA sense strand
gagcagccuuguggaaauu

SEQ ID NO: 2112832 - RNA, 19 nt, Homo sapiens
  misc_RNA (1)...(19): siRNA sense strand
gaaagcaaccugccuggau

SEQ ID NO: 2112833 - RNA, 19 nt, Homo sapiens
  misc_RNA (1)...(19): siRNA sense strand
augaugaccuuucuaguaa

SEQ ID NO: 2112834 - RNA, 19 nt, Homo sapiens
  misc_RNA (1)...(19): siRNA sense strand
gauaaagaagauccugaua

SEQ ID NO: 2112835 - RNA, 19 nt, Homo sapiens
  misc_RNA (1)...(19): siRNA sense strand
cagguggaaucuuucauaa

SEQ ID NO: 2112836 - RNA, 19 nt, Homo sapiens
  misc_RNA (1)...(19): siRNA sense strand
agaaugaguuuccuguuau

SEQ ID NO: 2112837 - RNA, 19 nt, Homo sapiens
  misc_RNA (1)...(19): siRNA sense strand
gaacuuugacauuugaaga

SEQ ID NO: 2112838 - RNA, 19 nt, Homo sapiens
  misc_RNA (1)...(19): siRNA sense strand
gagcagagugcgcaauauu

SEQ ID NO: 2112839 - RNA, 19 nt, Homo sapiens
  misc_RNA (1)...(19): siRNA sense strand
gaagcguccuuucucauag

SEQ ID NO: 2112840 - RNA, 19 nt, Homo sapiens
  misc_RNA (1)...(19): siRNA sense strand
ucaccuaacuguggaagaa

SEQ ID NO: 2112841 - RNA, 19 nt, Homo sapiens
  misc_RNA (1)...(19): siRNA sense strand
gagccaagcagugaugaua

SEQ ID NO: 2112842 - RNA, 19 nt, Homo sapiens
  misc_RNA (1)...(19): siRNA sense strand
ggaagcuuguguccuuuga

SEQ ID NO: 2112843 - RNA, 19 nt, Homo sapiens
  misc_RNA (1)...(19): siRNA sense strand
ggagagagggcacaaguca

SEQ ID NO: 2112844 - RNA, 19 nt, Homo sapiens
  misc_RNA (1)...(19): siRNA sense strand
caaucaggcucucacaguu

SEQ ID NO: 2112845 - RNA, 19 nt, Homo sapiens
  misc_RNA (1)...(19): siRNA sense strand
gaaaacaauucccauuaug

SEQ ID NO: 2112846 - RNA, 19 nt, Homo sapiens
  misc_RNA (1)...(19): siRNA sense strand
gagccaaauucaaggcaaa

SEQ ID NO: 2112847 - RNA, 19 nt, Homo sapiens
  misc_RNA (1)...(19): siRNA sense strand
guuacacucucacuucaaa

SEQ ID NO: 2112848 - RNA, 19 nt, Homo sapiens
  misc_RNA (1)...(19): siRNA sense strand
gcaguuaaaccgagccaaa

SEQ ID NO: 2112849 - RNA, 19 nt, Homo sapiens
  misc_RNA (1)...(19): siRNA sense strand
gagagcaaguaccagugua

SEQ ID NO: 2112850 - RNA, 19 nt, Homo sapiens
  misc_RNA (1)...(19): siRNA sense strand
gagaacagcugggcauguc

SEQ ID NO: 2112851 - RNA, 19 nt, Homo sapiens
  misc_RNA (1)...(19): siRNA sense strand
aaagggaaagcaaguauaa

SEQ ID NO: 2112852 - RNA, 19 nt, Homo sapiens
  misc_RNA (1)...(19): siRNA sense strand
guacggaagcgauccauug

SEQ ID NO: 2112853 - RNA, 19 nt, Homo sapiens
  misc_RNA (1)...(19): siRNA sense strand
acagaagcauccauauuug

SEQ ID NO: 2112854 - RNA, 19 nt, Homo sapiens
  misc_RNA (1)...(19): siRNA sense strand
caaggcaaauggcaauugu

SEQ ID NO: 2112855 - RNA, 19 nt, Homo sapiens
  misc_RNA (1)...(19): siRNA sense strand
gaagcagaccuuugaggaa

SEQ ID NO: 2112856 - RNA, 19 nt, Homo sapiens
  misc_RNA (1)...(19): siRNA sense strand
caaagucguuagagccuau

SEQ ID NO: 2112857 - RNA, 19 nt, Homo sapiens
  misc_RNA (1)...(19): siRNA sense strand
aaaaugggcuuccaagaaa

SEQ ID NO: 2112858 - RNA, 19 nt, Homo sapiens
  misc_RNA (1)...(19): siRNA sense strand
gcacugaauuaucaaucug

SEQ ID NO: 2112859 - RNA, 19 nt, Homo sapiens
  misc_RNA (1)...(19): siRNA sense strand
ggccacgcaugaaggcuua

SEQ ID NO: 2112860 - RNA, 19 nt, Homo sapiens
  misc_RNA (1)...(19): siRNA sense strand
aagaaaugguggagauaaa

SEQ ID NO: 2112861 - RNA, 19 nt, Homo sapiens
  misc_RNA (1)...(19): siRNA sense strand
caagaaaugguggagauaa

SEQ ID NO: 2112862 - RNA, 19 nt, Homo sapiens
  misc_RNA (1)...(19): siRNA sense strand
gacgaucccucaugaccaa

SEQ ID NO: 2112863 - RNA, 19 nt, Homo sapiens
  misc_RNA (1)...(19): siRNA sense strand
gagaaucagggaacuuuga

SEQ ID NO: 2112864 - RNA, 19 nt, Homo sapiens
  misc_RNA (1)...(19): siRNA sense strand
guaauuucccaucuuauug

SEQ ID NO: 2112865 - RNA, 19 nt, Homo sapiens
  misc_RNA (1)...(19): siRNA sense strand
ucaaaugccacaagcaauu

SEQ ID NO: 2112866 - RNA, 19 nt, Homo sapiens
  misc_RNA (1)...(19): siRNA sense strand
gggagaaccacaucaaaug

SEQ ID NO: 2112867 - RNA, 19 nt, Homo sapiens
  misc_RNA (1)...(19): siRNA sense strand
gcucugcuccacaaagaua

SEQ ID NO: 2112868 - RNA, 19 nt, Homo sapiens
  misc_RNA (1)...(19): siRNA sense strand
acacauaaccaucaaugaa

SEQ ID NO: 2112869 - RNA, 19 nt, Homo sapiens
  misc_RNA (1)...(19): siRNA sense strand
gcagaggacccaugaccaa

SEQ ID NO: 2112870 - RNA, 19 nt, Homo sapiens
  misc_RNA (1)...(19): siRNA sense strand
aguguaauuucccaucuua

SEQ ID NO: 2112871 - RNA, 19 nt, Homo sapiens
  misc_RNA (1)...(19): siRNA sense strand
gaaaccuucugggagcuuu

SEQ ID NO: 2112872 - RNA, 19 nt, Homo sapiens
  misc_RNA (1)...(19): siRNA sense strand
gggaagaaacacugacauu

SEQ ID NO: 2112873 - RNA, 19 nt, Homo sapiens
  misc_RNA (1)...(19): siRNA sense strand
guagaugacaauggauuua

SEQ ID NO: 2112874 - RNA, 19 nt, Homo sapiens
  misc_RNA (1)...(19): siRNA sense strand
agaaacggcuacuguaaag

SEQ ID NO: 2112875 - RNA, 19 nt, Homo sapiens
  misc_RNA (1)...(19): siRNA sense strand
caaagcaggaugccaauca

SEQ ID NO: 2112876 - RNA, 19 nt, Homo sapiens
  misc_RNA (1)...(19): siRNA sense strand
gcacaaagccugucacauu

SEQ ID NO: 2112877 - RNA, 19 nt, Homo sapiens
  misc_RNA (1)...(19): siRNA sense strand
gaacuaugcuuguuauaug

SEQ ID NO: 2112878 - RNA, 19 nt, Homo sapiens
  misc_RNA (1)...(19): siRNA sense strand
gaauagcugugugaaauua

SEQ ID NO: 2112879 - RNA, 19 nt, Homo sapiens
  misc_RNA (1)...(19): siRNA sense strand
gaagauacauuugagguuu

SEQ ID NO: 2112880 - RNA, 19 nt, Homo sapiens
  misc_RNA (1)...(19): siRNA sense strand
gaagaaggcccaauuuauu

SEQ ID NO: 2112881 - RNA, 19 nt, Homo sapiens
  misc_RNA (1)...(19): siRNA sense strand
ggacaaagcuguaaaaugu

SEQ ID NO: 2112882 - RNA, 19 nt, Homo sapiens
  misc_RNA (1)...(19): siRNA sense strand
gaaagaauaugaugagaag

SEQ ID NO: 2112883 - RNA, 19 nt, Homo sapiens
  misc_RNA (1)...(19): siRNA sense strand
ccagaagccugaaacuuua

SEQ ID NO: 2112884 - RNA, 19 nt, Homo sapiens
  misc_RNA (1)...(19): siRNA sense strand
gaagaugcauaaagaaaug

SEQ ID NO: 2112885 - RNA, 19 nt, Homo sapiens
  misc_RNA (1)...(19): siRNA sense strand
ugagaaaccucuuagauug

SEQ ID NO: 2112886 - RNA, 19 nt, Homo sapiens
  misc_RNA (1)...(19): siRNA sense strand
cacaaagccugucacauua

SEQ ID NO: 2112887 - RNA, 19 nt, Homo sapiens
  misc_RNA (1)...(19): siRNA sense strand
gcaaagaacuaugcuuguu

SEQ ID NO: 2112888 - RNA, 19 nt, Homo sapiens
  misc_RNA (1)...(19): siRNA sense strand
gauaccagcuugugaagaa

SEQ ID NO: 2112889 - RNA, 19 nt, Homo sapiens
  misc_RNA (1)...(19): siRNA sense strand
gaaauacaguuuggauuga

SEQ ID NO: 2112890 - RNA, 19 nt, Homo sapiens
  misc_RNA (1)...(19): siRNA sense strand
guagaaagcaguucaauau

SEQ ID NO: 2112891 - RNA, 19 nt, Homo sapiens
  misc_RNA (1)...(19): siRNA sense strand
ggaagaaggcccaauuuau

SEQ ID NO: 2112892 - RNA, 19 nt, Homo sapiens
  misc_RNA (1)...(19): siRNA sense strand
caauugggcuccauaaaga

SEQ ID NO: 2112893 - RNA, 19 nt, Homo sapiens
  misc_RNA (1)...(19): siRNA sense strand
ggaaauacaguuuggauug

SEQ ID NO: 2112894 - RNA, 19 nt, Homo sapiens
  misc_RNA (1)...(19): siRNA sense strand
uagaacaucucaucaaaga

SEQ ID NO: 2112895 - RNA, 19 nt, Homo sapiens
  misc_RNA (1)...(19): siRNA sense strand
aaaccucugucauugauua

SEQ ID NO: 2112896 - RNA, 19 nt, Homo sapiens
  misc_RNA (1)...(19): siRNA sense strand
guccauaucugaaggcuuu

SEQ ID NO: 2112897 - RNA, 19 nt, Homo sapiens
  misc_RNA (1)...(19): siRNA sense strand
ggagaaguuuggauuguau

SEQ ID NO: 2112898 - RNA, 19 nt, Homo sapiens
  misc_RNA (1)...(19): siRNA sense strand
caaagaacuaugcuuguua

SEQ ID NO: 2112899 - RNA, 19 nt, Homo sapiens
  misc_RNA (1)...(19): siRNA sense strand
ggacacgggugcagaagga

SEQ ID NO: 2112900 - RNA, 19 nt, Homo sapiens
  misc_RNA (1)...(19): siRNA sense strand
cuagguacauucaucauaa

SEQ ID NO: 2112901 - RNA, 19 nt, Homo sapiens
  misc_RNA (1)...(19): siRNA sense strand
ccgcagagcuguacgaguu

SEQ ID NO: 2112902 - RNA, 19 nt, Homo sapiens
  misc_RNA (1)...(19): siRNA sense strand
ggaagaagauacauuugag

SEQ ID NO: 2112903 - RNA, 19 nt, Homo sapiens
  misc_RNA (1)...(19): siRNA sense strand
gaaggccucuuuguccaua

SEQ ID NO: 2112904 - RNA, 19 nt, Homo sapiens
  misc_RNA (1)...(19): siRNA sense strand
caagaacauuccagucaaa

SEQ ID NO: 2112905 - RNA, 19 nt, Homo sapiens
  misc_RNA (1)...(19): siRNA sense strand
gaaaccugcugacaacgaa

SEQ ID NO: 2112906 - RNA, 19 nt, Homo sapiens
  misc_RNA (1)...(19): siRNA sense strand
ggaagaagaaguuaaguuc

SEQ ID NO: 2112907 - RNA, 19 nt, Homo sapiens
  misc_RNA (1)...(19): siRNA sense strand
gcuugaagaugcauaaaga

SEQ ID NO: 2112908 - RNA, 19 nt, Homo sapiens
  misc_RNA (1)...(19): siRNA sense strand
ucaaaucaauuacgucuuc

SEQ ID NO: 2112909 - RNA, 19 nt, Homo sapiens
  misc_RNA (1)...(19): siRNA sense strand
gaacaucucaucaaagagu

SEQ ID NO: 2112910 - RNA, 19 nt, Homo sapiens
  misc_RNA (1)...(19): siRNA sense strand
ugacugagaagaaagaaua

SEQ ID NO: 2112911 - RNA, 19 nt, Homo sapiens
  misc_RNA (1)...(19): siRNA sense strand
gcaagugcuuuaagucaga

SEQ ID NO: 2112912 - RNA, 19 nt, Homo sapiens
  misc_RNA (1)...(19): siRNA sense strand
aaagaggcauaaccauaua

SEQ ID NO: 2112913 - RNA, 19 nt, Homo sapiens
  misc_RNA (1)...(19): siRNA sense strand
caaauaagcguguugaauc

SEQ ID NO: 2112914 - RNA, 19 nt, Homo sapiens
  misc_RNA (1)...(19): siRNA sense strand
gaaaagauguucaaggaau

SEQ ID NO: 2112915 - RNA, 19 nt, Homo sapiens
  misc_RNA (1)...(19): siRNA sense strand
agacaguacugacauugua

SEQ ID NO: 2112916 - RNA, 19 nt, Homo sapiens
  misc_RNA (1)...(19): siRNA sense strand
caacagguaguacaucuuu

SEQ ID NO: 2112917 - RNA, 19 nt, Homo sapiens
  misc_RNA (1)...(19): siRNA sense strand
acgcgaagaugcuaagaua

SEQ ID NO: 2112918 - RNA, 19 nt, Homo sapiens
  misc_RNA (1)...(19): siRNA sense strand
gaacacauagaacaacuga

SEQ ID NO: 2112919 - RNA, 19 nt, Homo sapiens
  misc_RNA (1)...(19): siRNA sense strand
gaauggaauccgaagguua

SEQ ID NO: 2112920 - RNA, 19 nt, Homo sapiens
  misc_RNA (1)...(19): siRNA sense strand
cagcacgugucaagauaua

SEQ ID NO: 2112921 - RNA, 19 nt, Homo sapiens
  misc_RNA (1)...(19): siRNA sense strand
gaagaaagaauaugaugag

SEQ ID NO: 2112922 - RNA, 19 nt, Homo sapiens
  misc_RNA (1)...(19): siRNA sense strand
aagaauagcugugugaaau

SEQ ID NO: 2112923 - RNA, 19 nt, Homo sapiens
  misc_RNA (1)...(19): siRNA sense strand
ccucuuagauugacugaga

SEQ ID NO: 2112924 - RNA, 19 nt, Homo sapiens
  misc_RNA (1)...(19): siRNA sense strand
uaaauagugccaugaauga

SEQ ID NO: 2112925 - RNA, 19 nt, Homo sapiens
  misc_RNA (1)...(19): siRNA sense strand
guacaucuuugccuagaau

SEQ ID NO: 2112926 - RNA, 19 nt, Homo sapiens
  misc_RNA (1)...(19): siRNA sense strand
ggaagccaaugaacagaug

SEQ ID NO: 2112927 - RNA, 19 nt, Homo sapiens
  misc_RNA (1)...(19): siRNA sense strand
gaagaauagcugugugaaa

SEQ ID NO: 2112928 - RNA, 19 nt, Homo sapiens
  misc_RNA (1)...(19): siRNA sense strand
cagauuaugugcuguggaa

SEQ ID NO: 2112929 - RNA, 19 nt, Homo sapiens
  misc_RNA (1)...(19): siRNA sense strand
gaacauuuccacacacuuc

SEQ ID NO: 2112930 - RNA, 19 nt, Homo sapiens
  misc_RNA (1)...(19): siRNA sense strand
gauaaacacauggaucuuu

SEQ ID NO: 2112931 - RNA, 19 nt, Homo sapiens
  misc_RNA (1)...(19): siRNA sense strand
gaaacaccauugcaucucu

SEQ ID NO: 2112932 - RNA, 19 nt, Homo sapiens
  misc_RNA (1)...(19): siRNA sense strand
gcagggccauugucaaauc

SEQ ID NO: 2112933 - RNA, 19 nt, Homo sapiens
  misc_RNA (1)...(19): siRNA sense strand
gcacaaucucugcaacaua

SEQ ID NO: 2112934 - RNA, 19 nt, Homo sapiens
  misc_RNA (1)...(19): siRNA sense strand
ucagcacccuccuucaaua

SEQ ID NO: 2112935 - RNA, 19 nt, Homo sapiens
  misc_RNA (1)...(19): siRNA sense strand
gaacauuccagucaaaucu

SEQ ID NO: 2112936 - RNA, 19 nt, Homo sapiens
  misc_RNA (1)...(19): siRNA sense strand
acacauagaacaacugaaa

SEQ ID NO: 2112937 - RNA, 19 nt, Homo sapiens
  misc_RNA (1)...(19): siRNA sense strand
gaagguuacuagguacauu

SEQ ID NO: 2112938 - RNA, 19 nt, Homo sapiens
  misc_RNA (1)...(19): siRNA sense strand
gaucuucaccugcucugua

SEQ ID NO: 2112939 - RNA, 19 nt, Homo sapiens
  misc_RNA (1)...(19): siRNA sense strand
ccaagaacauuccagucaa

SEQ ID NO: 2112940 - RNA, 19 nt, Homo sapiens
  misc_RNA (1)...(19): siRNA sense strand
cauccgaguuguaguagaa

SEQ ID NO: 2112941 - RNA, 19 nt, Homo sapiens
  misc_RNA (1)...(19): siRNA sense strand
ggaacaaacauauagaaca

SEQ ID NO: 2112942 - RNA, 19 nt, Homo sapiens
  misc_RNA (1)...(19): siRNA sense strand
ccucugucauugauuauaa

SEQ ID NO: 2112943 - RNA, 19 nt, Homo sapiens
  misc_RNA (1)...(19): siRNA sense strand
gccaagcccuaccuucauu

SEQ ID NO: 2112944 - RNA, 19 nt, Homo sapiens
  misc_RNA (1)...(19): siRNA sense strand
aaacauccgaguuguagua

SEQ ID NO: 2112945 - RNA, 19 nt, Homo sapiens
  misc_RNA (1)...(19): siRNA sense strand
guagagagccagguguuaa

SEQ ID NO: 2112946 - RNA, 19 nt, Homo sapiens
  misc_RNA (1)...(19): siRNA sense strand
ggugaaaccugcugacaac

SEQ ID NO: 2112947 - RNA, 19 nt, Homo sapiens
  misc_RNA (1)...(19): siRNA sense strand
agaaauaguguguaaggua

SEQ ID NO: 2112948 - RNA, 19 nt, Homo sapiens
  misc_RNA (1)...(19): siRNA sense strand
gagaaaccucuuagauuga

SEQ ID NO: 2112949 - RNA, 19 nt, Homo sapiens
  misc_RNA (1)...(19): siRNA sense strand
gagauucaccuaaagacaa

SEQ ID NO: 2112950 - RNA, 19 nt, Homo sapiens
  misc_RNA (1)...(19): siRNA sense strand
gauccuggcuuugggaaau

SEQ ID NO: 2112951 - RNA, 19 nt, Homo sapiens
  misc_RNA (1)...(19): siRNA sense strand
aguucuggcucucaaauua

SEQ ID NO: 2112952 - RNA, 19 nt, Homo sapiens
  misc_RNA (1)...(19): siRNA sense strand
gagaagaauagcuguguga

SEQ ID NO: 2112953 - RNA, 19 nt, Homo sapiens
  misc_RNA (1)...(19): siRNA sense strand
uaagucagaagucaaauga

SEQ ID NO: 2112954 - RNA, 19 nt, Homo sapiens
  misc_RNA (1)...(19): siRNA sense strand
ucaaaugagaaaccucuua

SEQ ID NO: 2112955 - RNA, 19 nt, Homo sapiens
  misc_RNA (1)...(19): siRNA sense strand
gggcauugauaauccagaa

SEQ ID NO: 2112956 - RNA, 19 nt, Homo sapiens
  misc_RNA (1)...(19): siRNA sense strand
ucucaaugcugaaaugaau

SEQ ID NO: 2112957 - RNA, 19 nt, Homo sapiens
  misc_RNA (1)...(19): siRNA sense strand
gaacagggagauaagaaag

SEQ ID NO: 2112958 - RNA, 19 nt, Homo sapiens
  misc_RNA (1)...(19): siRNA sense strand
caacagcacgugucaagau

SEQ ID NO: 2112959 - RNA, 19 nt, Homo sapiens
  misc_RNA (1)...(19): siRNA sense strand
ucucugaucuccagcaguu

SEQ ID NO: 2112960 - RNA, 19 nt, Homo sapiens
  misc_RNA (1)...(19): siRNA sense strand
uagauugacugagaagaaa

SEQ ID NO: 2112961 - RNA, 19 nt, Homo sapiens
  misc_RNA (1)...(19): siRNA sense strand
gagaagaaagaauaugaug

SEQ ID NO: 2112962 - RNA, 19 nt, Homo sapiens
  misc_RNA (1)...(19): siRNA sense strand
ugacauccuuguagaguuc

SEQ ID NO: 2112963 - RNA, 19 nt, Homo sapiens
  misc_RNA (1)...(19): siRNA sense strand
acacauggaucuuuaugca

SEQ ID NO: 2112964 - RNA, 19 nt, Homo sapiens
  misc_RNA (1)...(19): siRNA sense strand
gaaagccaaaucugucuug

SEQ ID NO: 2112965 - RNA, 19 nt, Homo sapiens
  misc_RNA (1)...(19): siRNA sense strand
caucaaagaguucaugaau

SEQ ID NO: 2112966 - RNA, 19 nt, Homo sapiens
  misc_RNA (1)...(19): siRNA sense strand
aagaaggcccaauuuauuu

SEQ ID NO: 2112967 - RNA, 19 nt, Homo sapiens
  misc_RNA (1)...(19): siRNA sense strand
uacaagucauuaccaagua

SEQ ID NO: 2112968 - RNA, 19 nt, Homo sapiens
  misc_RNA (1)...(19): siRNA sense strand
cuaccaguguugacaguuu

SEQ ID NO: 2112969 - RNA, 19 nt, Homo sapiens
  misc_RNA (1)...(19): siRNA sense strand
gcuauucaguacuuucaga

SEQ ID NO: 2112970 - RNA, 19 nt, Homo sapiens
  misc_RNA (1)...(19): siRNA sense strand
gaaacuuuaucuggaaaca

SEQ ID NO: 2112971 - RNA, 19 nt, Homo sapiens
  misc_RNA (1)...(19): siRNA sense strand
uaagauaccagcuugugaa

SEQ ID NO: 2112972 - RNA, 19 nt, Homo sapiens
  misc_RNA (1)...(19): siRNA sense strand
aaacggacuugcccaggaa

SEQ ID NO: 2112973 - RNA, 19 nt, Homo sapiens
  misc_RNA (1)...(19): siRNA sense strand
agucagaagucaaaugaga

SEQ ID NO: 2112974 - RNA, 19 nt, Homo sapiens
  misc_RNA (1)...(19): siRNA sense strand
cauauaugcugauccagau

SEQ ID NO: 2112975 - RNA, 19 nt, Homo sapiens
  misc_RNA (1)...(19): siRNA sense strand
ccagguggaagccagauua

SEQ ID NO: 2112976 - RNA, 19 nt, Homo sapiens
  misc_RNA (1)...(19): siRNA sense strand
caacgucucuucaauguua

SEQ ID NO: 2112977 - RNA, 19 nt, Homo sapiens
  misc_RNA (1)...(19): siRNA sense strand
gaacaauggugcauacuuu

SEQ ID NO: 2112978 - RNA, 19 nt, Homo sapiens
  misc_RNA (1)...(19): siRNA sense strand
ggugaagacuguaaauaua

SEQ ID NO: 2112979 - RNA, 19 nt, Homo sapiens
  misc_RNA (1)...(19): siRNA sense strand
gaagagcuguauucaugua

SEQ ID NO: 2112980 - RNA, 19 nt, Homo sapiens
  misc_RNA (1)...(19): siRNA sense strand
gcaggaagauggaauuaug

SEQ ID NO: 2112981 - RNA, 19 nt, Homo sapiens
  misc_RNA (1)...(19): siRNA sense strand
gaaggaacagcauuaguua

SEQ ID NO: 2112982 - RNA, 19 nt, Homo sapiens
  misc_RNA (1)...(19): siRNA sense strand
uggagaagauggacaaaua

SEQ ID NO: 2112983 - RNA, 19 nt, Homo sapiens
  misc_RNA (1)...(19): siRNA sense strand
gaagggcgcuuuauuucau

SEQ ID NO: 2112984 - RNA, 19 nt, Homo sapiens
  misc_RNA (1)...(19): siRNA sense strand
acaggaggcugaaauagua

SEQ ID NO: 2112985 - RNA, 19 nt, Homo sapiens
  misc_RNA (1)...(19): siRNA sense strand
gaugauauuuacccuauug

SEQ ID NO: 2112986 - RNA, 19 nt, Homo sapiens
  misc_RNA (1)...(19): siRNA sense strand
gcuguuggaucguuucaua

SEQ ID NO: 2112987 - RNA, 19 nt, Homo sapiens
  misc_RNA (1)...(19): siRNA sense strand
uaguaaagcuuccugauga

SEQ ID NO: 2112988 - RNA, 19 nt, Homo sapiens
  misc_RNA (1)...(19): siRNA sense strand
gcaauccagaucaauauua

SEQ ID NO: 2112989 - RNA, 19 nt, Homo sapiens
  misc_RNA (1)...(19): siRNA sense strand
gcacuggaauuggcuguaa

SEQ ID NO: 2112990 - RNA, 19 nt, Homo sapiens
  misc_RNA (1)...(19): siRNA sense strand
ggaaauugcucuggaucaa

SEQ ID NO: 2112991 - RNA, 19 nt, Homo sapiens
  misc_RNA (1)...(19): siRNA sense strand
cagaaggucuccaaauaga

SEQ ID NO: 2112992 - RNA, 19 nt, Homo sapiens
  misc_RNA (1)...(19): siRNA sense strand
ggaaagggcacuggaauug

SEQ ID NO: 2112993 - RNA, 19 nt, Homo sapiens
  misc_RNA (1)...(19): siRNA sense strand
cagcaagaguauagguuua

SEQ ID NO: 2112994 - RNA, 19 nt, Homo sapiens
  misc_RNA (1)...(19): siRNA sense strand
gauacucgauuuauagugu

SEQ ID NO: 2112995 - RNA, 19 nt, Homo sapiens
  misc_RNA (1)...(19): siRNA sense strand
ugcagaaggucuccaaaua

SEQ ID NO: 2112996 - RNA, 19 nt, Homo sapiens
  misc_RNA (1)...(19): siRNA sense strand
gaaggucuccaaauagauu

SEQ ID NO: 2112997 - RNA, 19 nt, Homo sapiens
  misc_RNA (1)...(19): siRNA sense strand
gaacagcauuaguuacagu

SEQ ID NO: 2112998 - RNA, 19 nt, Homo sapiens
  misc_RNA (1)...(19): siRNA sense strand
gaaggaagaacaaauuauc

SEQ ID NO: 2112999 - RNA, 19 nt, Homo sapiens
  misc_RNA (1)...(19): siRNA sense strand
ggaauuggcuguaaaauac

SEQ ID NO: 2113000 - RNA, 19 nt, Homo sapiens
  misc_RNA (1)...(19): siRNA sense strand
ugaaagggaugcaagugaa

SEQ ID NO: 2113001 - RNA, 19 nt, Homo sapiens
  misc_RNA (1)...(19): siRNA sense strand
accaaagcaucaagaauua

SEQ ID NO: 2113002 - RNA, 19 nt, Homo sapiens
  misc_RNA (1)...(19): siRNA sense strand
gcaagaguauagguuuaaa

SEQ ID NO: 2113003 - RNA, 19 nt, Homo sapiens
  misc_RNA (1)...(19): siRNA sense strand
ggaaagccguuaggugaug

SEQ ID NO: 2113004 - RNA, 19 nt, Homo sapiens
  misc_RNA (1)...(19): siRNA sense strand
ggagaagauggacaaauaa

SEQ ID NO: 2113005 - RNA, 19 nt, Homo sapiens
  misc_RNA (1)...(19): siRNA sense strand
caagcaauccagaucaaua

SEQ ID NO: 2113006 - RNA, 19 nt, Homo sapiens
  misc_RNA (1)...(19): siRNA sense strand
uuacuggaauuccgugaua

SEQ ID NO: 2113007 - RNA, 19 nt, Homo sapiens
  misc_RNA (1)...(19): siRNA sense strand
gaaagcucaugauggcauu

SEQ ID NO: 2113008 - RNA, 19 nt, Homo sapiens
  misc_RNA (1)...(19): siRNA sense strand
uaugacuacugcagaaaua

SEQ ID NO: 2113009 - RNA, 19 nt, Homo sapiens
  misc_RNA (1)...(19): siRNA sense strand
gggaaggaagaacaaauua

SEQ ID NO: 2113010 - RNA, 19 nt, Homo sapiens
  misc_RNA (1)...(19): siRNA sense strand
gaaacgauuugggaaggaa

SEQ ID NO: 2113011 - RNA, 19 nt, Homo sapiens
  misc_RNA (1)...(19): siRNA sense strand
gaacuggaacacaccaauu

SEQ ID NO: 2113012 - RNA, 19 nt, Homo sapiens
  misc_RNA (1)...(19): siRNA sense strand
gaagaugcugugagacuuu

SEQ ID NO: 2113013 - RNA, 19 nt, Homo sapiens
  misc_RNA (1)...(19): siRNA sense strand
gaaacaaacccaggcagaa

SEQ ID NO: 2113014 - RNA, 19 nt, Homo sapiens
  misc_RNA (1)...(19): siRNA sense strand
aaacgauacuugcauuaug

SEQ ID NO: 2113015 - RNA, 19 nt, Homo sapiens
  misc_RNA (1)...(19): siRNA sense strand
ggaagaugcugugagacuu

SEQ ID NO: 2113016 - RNA, 19 nt, Homo sapiens
  misc_RNA (1)...(19): siRNA sense strand
caagauacucgauuuauag

SEQ ID NO: 2113017 - RNA, 19 nt, Homo sapiens
  misc_RNA (1)...(19): siRNA sense strand
guuaggugauggaaaguuu

SEQ ID NO: 2113018 - RNA, 19 nt, Homo sapiens
  misc_RNA (1)...(19): siRNA sense strand
ggagaauuauuugcuguug

SEQ ID NO: 2113019 - RNA, 19 nt, Homo sapiens
  misc_RNA (1)...(19): siRNA sense strand
ggaacucggucaaugaucu

SEQ ID NO: 2113020 - RNA, 19 nt, Homo sapiens
  misc_RNA (1)...(19): siRNA sense strand
gagaagauggacaaauaaa

SEQ ID NO: 2113021 - RNA, 19 nt, Homo sapiens
  misc_RNA (1)...(19): siRNA sense strand
caaauuaucaagcuuggaa

SEQ ID NO: 2113022 - RNA, 19 nt, Homo sapiens
  misc_RNA (1)...(19): siRNA sense strand
ggaacacaccaauuauauu

SEQ ID NO: 2113023 - RNA, 19 nt, Homo sapiens
  misc_RNA (1)...(19): siRNA sense strand
uuaaaccucuucaaccaaa

SEQ ID NO: 2113024 - RNA, 19 nt, Homo sapiens
  misc_RNA (1)...(19): siRNA sense strand
gguaaacaggaaacuaaua

SEQ ID NO: 2113025 - RNA, 19 nt, Homo sapiens
  misc_RNA (1)...(19): siRNA sense strand
ggaaauggacaugucguuu

SEQ ID NO: 2113026 - RNA, 19 nt, Homo sapiens
  misc_RNA (1)...(19): siRNA sense strand
gcagaaggucuccaaauag

SEQ ID NO: 2113027 - RNA, 19 nt, Homo sapiens
  misc_RNA (1)...(19): siRNA sense strand
ugaaggaacagcauuaguu

SEQ ID NO: 2113028 - RNA, 19 nt, Homo sapiens
  misc_RNA (1)...(19): siRNA sense strand
ggaaggaagaacaaauuau

SEQ ID NO: 2113029 - RNA, 19 nt, Homo sapiens
  misc_RNA (1)...(19): siRNA sense strand
uaugaagggcgcuuuauuu

SEQ ID NO: 2113030 - RNA, 19 nt, Homo sapiens
  misc_RNA (1)...(19): siRNA sense strand
ucaaccaaaugcuaaaguu

SEQ ID NO: 2113031 - RNA, 19 nt, Homo sapiens
  misc_RNA (1)...(19): siRNA sense strand
uuugaacuaugcacacuua

SEQ ID NO: 2113032 - RNA, 19 nt, Homo sapiens
  misc_RNA (1)...(19): siRNA sense strand
ggacuuaccaaugauagaa

SEQ ID NO: 2113033 - RNA, 19 nt, Homo sapiens
  misc_RNA (1)...(19): siRNA sense strand
gaaccaaagcaucaagaau

SEQ ID NO: 2113034 - RNA, 19 nt, Homo sapiens
  misc_RNA (1)...(19): siRNA sense strand
gcccacauacuacuguuua

SEQ ID NO: 2113035 - RNA, 19 nt, Homo sapiens
  misc_RNA (1)...(19): siRNA sense strand
caacacuggcagcauauuu

SEQ ID NO: 2113036 - RNA, 19 nt, Homo sapiens
  misc_RNA (1)...(19): siRNA sense strand
ucaaagacugggaugcuua

SEQ ID NO: 2113037 - RNA, 19 nt, Homo sapiens
  misc_RNA (1)...(19): siRNA sense strand
caaccaaaugcuaaaguuu

SEQ ID NO: 2113038 - RNA, 19 nt, Homo sapiens
  misc_RNA (1)...(19): siRNA sense strand
gaacauacaggaggcugaa

SEQ ID NO: 2113039 - RNA, 19 nt, Homo sapiens
  misc_RNA (1)...(19): siRNA sense strand
ggaacuuguuaaccaguga

SEQ ID NO: 2113040 - RNA, 19 nt, Homo sapiens
  misc_RNA (1)...(19): siRNA sense strand
gaaauugcucuggaucaaa

SEQ ID NO: 2113041 - RNA, 19 nt, Homo sapiens
  misc_RNA (1)...(19): siRNA sense strand
guaaugauaccauagcaau

SEQ ID NO: 2113042 - RNA, 19 nt, Homo sapiens
  misc_RNA (1)...(19): siRNA sense strand
acuuuacgcuugugugaua

SEQ ID NO: 2113043 - RNA, 19 nt, Homo sapiens
  misc_RNA (1)...(19): siRNA sense strand
gcucaugauggcauuauuu

SEQ ID NO: 2113044 - RNA, 19 nt, Homo sapiens
  misc_RNA (1)...(19): siRNA sense strand
cacaaguucugaugguaaa

SEQ ID NO: 2113045 - RNA, 19 nt, Homo sapiens
  misc_RNA (1)...(19): siRNA sense strand
gaaagagagcaaucaucaa

SEQ ID NO: 2113046 - RNA, 19 nt, Homo sapiens
  misc_RNA (1)...(19): siRNA sense strand
acaggaaacuaauaaacga

SEQ ID NO: 2113047 - RNA, 19 nt, Homo sapiens
  misc_RNA (1)...(19): siRNA sense strand
guaaagcuuccugaugaua

SEQ ID NO: 2113048 - RNA, 19 nt, Homo sapiens
  misc_RNA (1)...(19): siRNA sense strand
aaccaaagcaucaagaauu

SEQ ID NO: 2113049 - RNA, 19 nt, Homo sapiens
  misc_RNA (1)...(19): siRNA sense strand
agaaagagagcaaucauca

SEQ ID NO: 2113050 - RNA, 19 nt, Homo sapiens
  misc_RNA (1)...(19): siRNA sense strand
ggagacauuugguaaacag

SEQ ID NO: 2113051 - RNA, 19 nt, Homo sapiens
  misc_RNA (1)...(19): siRNA sense strand
ggaugcaagugaauuuagu

SEQ ID NO: 2113052 - RNA, 19 nt, Homo sapiens
  misc_RNA (1)...(19): siRNA sense strand
uauaagguaugggauaguu

SEQ ID NO: 2113053 - RNA, 19 nt, Homo sapiens
  misc_RNA (1)...(19): siRNA sense strand
cauuaaaccucuucaacca

SEQ ID NO: 2113054 - RNA, 19 nt, Homo sapiens
  misc_RNA (1)...(19): siRNA sense strand
aaacaaacccaggcagaaa

SEQ ID NO: 2113055 - RNA, 19 nt, Homo sapiens
  misc_RNA (1)...(19): siRNA sense strand
uugauacaguucuugcuua

SEQ ID NO: 2113056 - RNA, 19 nt, Homo sapiens
  misc_RNA (1)...(19): siRNA sense strand
guggucauaugcauuagaa

SEQ ID NO: 2113057 - RNA, 19 nt, Homo sapiens
  misc_RNA (1)...(19): siRNA sense strand
agaauuauuugcuguugga

SEQ ID NO: 2113058 - RNA, 19 nt, Homo sapiens
  misc_RNA (1)...(19): siRNA sense strand
ggaacaauggugcauacuu

SEQ ID NO: 2113059 - RNA, 19 nt, Homo sapiens
  misc_RNA (1)...(19): siRNA sense strand
ggaaacuaauaaacgauac

SEQ ID NO: 2113060 - RNA, 19 nt, Homo sapiens
  misc_RNA (1)...(19): siRNA sense strand
aaagcuuccugaugauauu

SEQ ID NO: 2113061 - RNA, 19 nt, Homo sapiens
  misc_RNA (1)...(19): siRNA sense strand
ucaucugauuuccaaguua

SEQ ID NO: 2113062 - RNA, 19 nt, Homo sapiens
  misc_RNA (1)...(19): siRNA sense strand
gacauuugguaaacaggaa

SEQ ID NO: 2113063 - RNA, 19 nt, Homo sapiens
  misc_RNA (1)...(19): siRNA sense strand
agacugggaugcuuagauc

SEQ ID NO: 2113064 - RNA, 19 nt, Homo sapiens
  misc_RNA (1)...(19): siRNA sense strand
gaaauggacaugucguuuu

SEQ ID NO: 2113065 - RNA, 19 nt, Homo sapiens
  misc_RNA (1)...(19): siRNA sense strand
caacucaaauaguaaagcu

SEQ ID NO: 2113066 - RNA, 19 nt, Homo sapiens
  misc_RNA (1)...(19): siRNA sense strand
gggaaagggcacuggaauu

SEQ ID NO: 2113067 - RNA, 19 nt, Homo sapiens
  misc_RNA (1)...(19): siRNA sense strand
cauacaggaggcugaaaua

SEQ ID NO: 2113068 - RNA, 19 nt, Homo sapiens
  misc_RNA (1)...(19): siRNA sense strand
caauauccuuuguggacuu

SEQ ID NO: 2113069 - RNA, 19 nt, Homo sapiens
  misc_RNA (1)...(19): siRNA sense strand
uaucaagcuuggaacaaug

SEQ ID NO: 2113070 - RNA, 19 nt, Homo sapiens
  misc_RNA (1)...(19): siRNA sense strand
uaagagacaaagcugauga

SEQ ID NO: 2113071 - RNA, 19 nt, Homo sapiens
  misc_RNA (1)...(19): siRNA sense strand
gcuaaucgagauaugacua

SEQ ID NO: 2113072 - RNA, 19 nt, Homo sapiens
  misc_RNA (1)...(19): siRNA sense strand
ucacaaguucugaugguaa

SEQ ID NO: 2113073 - RNA, 19 nt, Homo sapiens
  misc_RNA (1)...(19): siRNA sense strand
cugaugauauuuacccuau

SEQ ID NO: 2113074 - RNA, 19 nt, Homo sapiens
  misc_RNA (1)...(19): siRNA sense strand
gaauauguaagcaguucaa

SEQ ID NO: 2113075 - RNA, 19 nt, Homo sapiens
  misc_RNA (1)...(19): siRNA sense strand
ggaacgauacaugcaauau

SEQ ID NO: 2113076 - RNA, 19 nt, Homo sapiens
  misc_RNA (1)...(19): siRNA sense strand
ggaaaggccuucauucaua

SEQ ID NO: 2113077 - RNA, 19 nt, Homo sapiens
  misc_RNA (1)...(19): siRNA sense strand
gaagucagguagaccauuu

SEQ ID NO: 2113078 - RNA, 19 nt, Homo sapiens
  misc_RNA (1)...(19): siRNA sense strand
caacaucacagaauucaua

SEQ ID NO: 2113079 - RNA, 19 nt, Homo sapiens
  misc_RNA (1)...(19): siRNA sense strand
ggaauucacacaaauauga

SEQ ID NO: 2113080 - RNA, 19 nt, Homo sapiens
  misc_RNA (1)...(19): siRNA sense strand
agagaaaccuuacaaaugu

SEQ ID NO: 2113081 - RNA, 19 nt, Homo sapiens
  misc_RNA (1)...(19): siRNA sense strand
gagagaaaccuuacaaaug

SEQ ID NO: 2113082 - RNA, 19 nt, Homo sapiens
  misc_RNA (1)...(19): siRNA sense strand
gagagaagccuuaugaaug

SEQ ID NO: 2113083 - RNA, 19 nt, Homo sapiens
  misc_RNA (1)...(19): siRNA sense strand
gaagggaauucacacaaau

SEQ ID NO: 2113084 - RNA, 19 nt, Homo sapiens
  misc_RNA (1)...(19): siRNA sense strand
agcaaaggcucaaaucuua

SEQ ID NO: 2113085 - RNA, 19 nt, Homo sapiens
  misc_RNA (1)...(19): siRNA sense strand
gaaagucaaugguggaaag

SEQ ID NO: 2113086 - RNA, 19 nt, Homo sapiens
  misc_RNA (1)...(19): siRNA sense strand
gagagaagcccuaugaaug

SEQ ID NO: 2113087 - RNA, 19 nt, Homo sapiens
  misc_RNA (1)...(19): siRNA sense strand
gaaaggccuucauucauag

SEQ ID NO: 2113088 - RNA, 19 nt, Homo sapiens
  misc_RNA (1)...(19): siRNA sense strand
cagcuugaaucacugaaua

SEQ ID NO: 2113089 - RNA, 19 nt, Homo sapiens
  misc_RNA (1)...(19): siRNA sense strand
cagacaguguuuacaaaua

SEQ ID NO: 2113090 - RNA, 19 nt, Homo sapiens
  misc_RNA (1)...(19): siRNA sense strand
caacaaaugucugaaaguc

SEQ ID NO: 2113091 - RNA, 19 nt, Homo sapiens
  misc_RNA (1)...(19): siRNA sense strand
gaagcaccuuucauucaaa

SEQ ID NO: 2113092 - RNA, 19 nt, Homo sapiens
  misc_RNA (1)...(19): siRNA sense strand
ggagagaaaccuuacaaau

SEQ ID NO: 2113093 - RNA, 19 nt, Homo sapiens
  misc_RNA (1)...(19): siRNA sense strand
gagaaaccauaugaaugua

SEQ ID NO: 2113094 - RNA, 19 nt, Homo sapiens
  misc_RNA (1)...(19): siRNA sense strand
ggagagaaaccauaugaau

SEQ ID NO: 2113095 - RNA, 19 nt, Homo sapiens
  misc_RNA (1)...(19): siRNA sense strand
agagaagccuuaugaaugu

SEQ ID NO: 2113096 - RNA, 19 nt, Homo sapiens
  misc_RNA (1)...(19): siRNA sense strand
gaaacccaauaguguggua

SEQ ID NO: 2113097 - RNA, 19 nt, Homo sapiens
  misc_RNA (1)...(19): siRNA sense strand
gagagaaacccaauagugu

SEQ ID NO: 2113098 - RNA, 19 nt, Homo sapiens
  misc_RNA (1)...(19): siRNA sense strand
ggagagaaacccaauagug

SEQ ID NO: 2113099 - RNA, 19 nt, Homo sapiens
  misc_RNA (1)...(19): siRNA sense strand
agccaugucucaucacuua

SEQ ID NO: 2113100 - RNA, 19 nt, Homo sapiens
  misc_RNA (1)...(19): siRNA sense strand
caucaaagaguacauaaug

SEQ ID NO: 2113101 - RNA, 19 nt, Homo sapiens
  misc_RNA (1)...(19): siRNA sense strand
ggucaucccugcuucaaca

SEQ ID NO: 2113102 - RNA, 19 nt, Homo sapiens
  misc_RNA (1)...(19): siRNA sense strand
ggagagaagccuuaugaau

SEQ ID NO: 2113103 - RNA, 19 nt, Homo sapiens
  misc_RNA (1)...(19): siRNA sense strand
ucaaagaauucacacuaug

SEQ ID NO: 2113104 - RNA, 19 nt, Homo sapiens
  misc_RNA (1)...(19): siRNA sense strand
gagagaaaccauaugaaug

SEQ ID NO: 2113105 - RNA, 19 nt, Homo sapiens
  misc_RNA (1)...(19): siRNA sense strand
guucaaaccuuaccguaca

SEQ ID NO: 2113106 - RNA, 19 nt, Homo sapiens
  misc_RNA (1)...(19): siRNA sense strand
ggagagaagcccuaugaau

SEQ ID NO: 2113107 - RNA, 19 nt, Homo sapiens
  misc_RNA (1)...(19): siRNA sense strand
caucaaagaauucacacua

SEQ ID NO: 2113108 - RNA, 19 nt, Homo sapiens
  misc_RNA (1)...(19): siRNA sense strand
acaaaugucugaaagucuu

SEQ ID NO: 2113109 - RNA, 19 nt, Homo sapiens
  misc_RNA (1)...(19): siRNA sense strand
ccaauagugugguaagugu

SEQ ID NO: 2113110 - RNA, 19 nt, Homo sapiens
  misc_RNA (1)...(19): siRNA sense strand
gagaaaagccauauaaaug

SEQ ID NO: 2113111 - RNA, 19 nt, Homo sapiens
  misc_RNA (1)...(19): siRNA sense strand
cagaagagaaacuguauga

SEQ ID NO: 2113112 - RNA, 19 nt, Homo sapiens
  misc_RNA (1)...(19): siRNA sense strand
agaagcaccuuucauucaa

SEQ ID NO: 2113113 - RNA, 19 nt, Homo sapiens
  misc_RNA (1)...(19): siRNA sense strand
ggaauuaucaacaaagaag

SEQ ID NO: 2113114 - RNA, 19 nt, Homo sapiens
  misc_RNA (1)...(19): siRNA sense strand
gagaagccuuaugaaugua

SEQ ID NO: 2113115 - RNA, 19 nt, Homo sapiens
  misc_RNA (1)...(19): siRNA sense strand
ugcuguagcucacaccuua

SEQ ID NO: 2113116 - RNA, 19 nt, Homo sapiens
  misc_RNA (1)...(19): siRNA sense strand
ugugagaaaucuuacagaa

SEQ ID NO: 2113117 - RNA, 19 nt, Homo sapiens
  misc_RNA (1)...(19): siRNA sense strand
ugucagaaaugcaggaaau

SEQ ID NO: 2113118 - RNA, 19 nt, Homo sapiens
  misc_RNA (1)...(19): siRNA sense strand
cagcaauucucaccucuag

SEQ ID NO: 2113119 - RNA, 19 nt, Homo sapiens
  misc_RNA (1)...(19): siRNA sense strand
cgacaucugauaagccaua

SEQ ID NO: 2113120 - RNA, 19 nt, Homo sapiens
  misc_RNA (1)...(19): siRNA sense strand
gagagaaaaucuauacaug

SEQ ID NO: 2113121 - RNA, 19 nt, Homo sapiens
  misc_RNA (1)...(19): siRNA sense strand
agucgugugucccaucuua

SEQ ID NO: 2113122 - RNA, 19 nt, Homo sapiens
  misc_RNA (1)...(19): siRNA sense strand
cagcaucagaguauucaua

SEQ ID NO: 2113123 - RNA, 19 nt, Homo sapiens
  misc_RNA (1)...(19): siRNA sense strand
ggagaaacaauaugaaugc

SEQ ID NO: 2113124 - RNA, 19 nt, Homo sapiens
  misc_RNA (1)...(19): siRNA sense strand
gaauucacacuauggagaa

SEQ ID NO: 2113125 - RNA, 19 nt, Homo sapiens
  misc_RNA (1)...(19): siRNA sense strand
caggagagaagcccuauga

SEQ ID NO: 2113126 - RNA, 19 nt, Homo sapiens
  misc_RNA (1)...(19): siRNA sense strand
gauugaaacccuacgaaug

SEQ ID NO: 2113127 - RNA, 19 nt, Homo sapiens
  misc_RNA (1)...(19): siRNA sense strand
gaaugcaacaaaugucuga

SEQ ID NO: 2113128 - RNA, 19 nt, Homo sapiens
  misc_RNA (1)...(19): siRNA sense strand
agagaaaccauaugaaugu

SEQ ID NO: 2113129 - RNA, 19 nt, Homo sapiens
  misc_RNA (1)...(19): siRNA sense strand
gcuucaacaucacagaauu

SEQ ID NO: 2113130 - RNA, 19 nt, Homo sapiens
  misc_RNA (1)...(19): siRNA sense strand
gcagacaguguuuacaaau

SEQ ID NO: 2113131 - RNA, 19 nt, Homo sapiens
  misc_RNA (1)...(19): siRNA sense strand
cuaugaaugucgugaaugu

SEQ ID NO: 2113132 - RNA, 19 nt, Homo sapiens
  misc_RNA (1)...(19): siRNA sense strand
ucagguagaccauuucaga

SEQ ID NO: 2113133 - RNA, 19 nt, Homo sapiens
  misc_RNA (1)...(19): siRNA sense strand
uagcaaaggcucaaaucuu

SEQ ID NO: 2113134 - RNA, 19 nt, Homo sapiens
  misc_RNA (1)...(19): siRNA sense strand
gagaaaaucuauacaugca

SEQ ID NO: 2113135 - RNA, 19 nt, Homo sapiens
  misc_RNA (1)...(19): siRNA sense strand
gcaauucucaccucuagag

SEQ ID NO: 2113136 - RNA, 19 nt, Homo sapiens
  misc_RNA (1)...(19): siRNA sense strand
agacaguguuuacaaauac

SEQ ID NO: 2113137 - RNA, 19 nt, Homo sapiens
  misc_RNA (1)...(19): siRNA sense strand
uagaagcaccuuucauuca

SEQ ID NO: 2113138 - RNA, 19 nt, Homo sapiens
  misc_RNA (1)...(19): siRNA sense strand
ggagaaaagccauauaaau

SEQ ID NO: 2113139 - RNA, 19 nt, Homo sapiens
  misc_RNA (1)...(19): siRNA sense strand
agucaaugguggaaagaaa

SEQ ID NO: 2113140 - RNA, 19 nt, Homo sapiens
  misc_RNA (1)...(19): siRNA sense strand
gagaagcccuaugaauguc

SEQ ID NO: 2113141 - RNA, 19 nt, Homo sapiens
  misc_RNA (1)...(19): siRNA sense strand
ucaaagaguacauaaugga

SEQ ID NO: 2113142 - RNA, 19 nt, Homo sapiens
  misc_RNA (1)...(19): siRNA sense strand
ggaaggccuuuagccaugu

SEQ ID NO: 2113143 - RNA, 19 nt, Homo sapiens
  misc_RNA (1)...(19): siRNA sense strand
agagaagcccuaugaaugu

SEQ ID NO: 2113144 - RNA, 19 nt, Homo sapiens
  misc_RNA (1)...(19): siRNA sense strand
ucucaucacuuacuaacca

SEQ ID NO: 2113145 - RNA, 19 nt, Homo sapiens
  misc_RNA (1)...(19): siRNA sense strand
gcaaacagucaauccucaa

SEQ ID NO: 2113146 - RNA, 19 nt, Homo sapiens
  misc_RNA (1)...(19): siRNA sense strand
aaagguaugauuccagauu

SEQ ID NO: 2113147 - RNA, 19 nt, Homo sapiens
  misc_RNA (1)...(19): siRNA sense strand
guggaaaggccuucauuca

SEQ ID NO: 2113148 - RNA, 19 nt, Homo sapiens
  misc_RNA (1)...(19): siRNA sense strand
uguaugaacuguggaaagu

SEQ ID NO: 2113149 - RNA, 19 nt, Homo sapiens
  misc_RNA (1)...(19): siRNA sense strand
gaauguaugaacuguggaa

SEQ ID NO: 2113150 - RNA, 19 nt, Homo sapiens
  misc_RNA (1)...(19): siRNA sense strand
aaucgccacuggagaauuc

SEQ ID NO: 2113151 - RNA, 19 nt, Homo sapiens
  misc_RNA (1)...(19): siRNA sense strand
gugaaugugggaagacuuu

SEQ ID NO: 2113152 - RNA, 19 nt, Homo sapiens
  misc_RNA (1)...(19): siRNA sense strand
gagaaacaauaugaaugca

SEQ ID NO: 2113153 - RNA, 19 nt, Homo sapiens
  misc_RNA (1)...(19): siRNA sense strand
caaagaauucacacuaugg

SEQ ID NO: 2113154 - RNA, 19 nt, Homo sapiens
  misc_RNA (1)...(19): siRNA sense strand
gaagccuuaugaauguaga

SEQ ID NO: 2113155 - RNA, 19 nt, Homo sapiens
  misc_RNA (1)...(19): siRNA sense strand
acacuauggagaaacaaua

SEQ ID NO: 2113156 - RNA, 19 nt, Homo sapiens
  misc_RNA (1)...(19): siRNA sense strand
ugggaaagcuuuuagcaaa

SEQ ID NO: 2113157 - RNA, 19 nt, Homo sapiens
  misc_RNA (1)...(19): siRNA sense strand
guacaucagagaauucaca

SEQ ID NO: 2113158 - RNA, 19 nt, Homo sapiens
  misc_RNA (1)...(19): siRNA sense strand
ucacugaauaugcauuuga

SEQ ID NO: 2113159 - RNA, 19 nt, Homo sapiens
  misc_RNA (1)...(19): siRNA sense strand
uuuagaagcaccuuucauu

SEQ ID NO: 2113160 - RNA, 19 nt, Homo sapiens
  misc_RNA (1)...(19): siRNA sense strand
uaccguacaucagagaauu

SEQ ID NO: 2113161 - RNA, 19 nt, Homo sapiens
  misc_RNA (1)...(19): siRNA sense strand
uguauuaaaugugggaaga

SEQ ID NO: 2113162 - RNA, 19 nt, Homo sapiens
  misc_RNA (1)...(19): siRNA sense strand
gcaacaaaugucugaaagu

SEQ ID NO: 2113163 - RNA, 19 nt, Homo sapiens
  misc_RNA (1)...(19): siRNA sense strand
gcacucacacuggagagaa

SEQ ID NO: 2113164 - RNA, 19 nt, Homo sapiens
  misc_RNA (1)...(19): siRNA sense strand
ggaaaacaaggaauuauca

SEQ ID NO: 2113165 - RNA, 19 nt, Homo sapiens
  misc_RNA (1)...(19): siRNA sense strand
aguagccucucauuucuug

SEQ ID NO: 2113166 - RNA, 19 nt, Homo sapiens
  misc_RNA (1)...(19): siRNA sense strand
uuuaguagccucucauuuc

SEQ ID NO: 2113167 - RNA, 19 nt, Homo sapiens
  misc_RNA (1)...(19): siRNA sense strand
cuaugagugucguauaugu

SEQ ID NO: 2113168 - RNA, 19 nt, Homo sapiens
  misc_RNA (1)...(19): siRNA sense strand
aagguaugauuccagauug

SEQ ID NO: 2113169 - RNA, 19 nt, Homo sapiens
  misc_RNA (1)...(19): siRNA sense strand
gaauucauacuggagagaa

SEQ ID NO: 2113170 - RNA, 19 nt, Homo sapiens
  misc_RNA (1)...(19): siRNA sense strand
cuacgaaugcaguauaugu

SEQ ID NO: 2113171 - RNA, 19 nt, Homo sapiens
  misc_RNA (1)...(19): siRNA sense strand
gaaugugggaaggccuuua

SEQ ID NO: 2113172 - RNA, 19 nt, Homo sapiens
  misc_RNA (1)...(19): siRNA sense strand
uuaguagccucucauuucu

SEQ ID NO: 2113173 - RNA, 19 nt, Homo sapiens
  misc_RNA (1)...(19): siRNA sense strand
ugcagacaguguuuacaaa

SEQ ID NO: 2113174 - RNA, 19 nt, Homo sapiens
  misc_RNA (1)...(19): siRNA sense strand
caucacagaauucauacug

SEQ ID NO: 2113175 - RNA, 19 nt, Homo sapiens
  misc_RNA (1)...(19): siRNA sense strand
caucccugcuucaacauca

SEQ ID NO: 2113176 - RNA, 19 nt, Homo sapiens
  misc_RNA (1)...(19): siRNA sense strand
gggaaagccugucguuaua

SEQ ID NO: 2113177 - RNA, 19 nt, Homo sapiens
  misc_RNA (1)...(19): siRNA sense strand
ugacagcucuuccuuaauu

SEQ ID NO: 2113178 - RNA, 19 nt, Homo sapiens
  misc_RNA (1)...(19): siRNA sense strand
gcacagagauccucaagag

SEQ ID NO: 2113179 - RNA, 19 nt, Homo sapiens
  misc_RNA (1)...(19): siRNA sense strand
ggaauaacccuuacacaug

SEQ ID NO: 2113180 - RNA, 19 nt, Homo sapiens
  misc_RNA (1)...(19): siRNA sense strand
ggaaaggguuuagcaagaa

SEQ ID NO: 2113181 - RNA, 19 nt, Homo sapiens
  misc_RNA (1)...(19): siRNA sense strand
ggagagaagcccuauguuu

SEQ ID NO: 2113182 - RNA, 19 nt, Homo sapiens
  misc_RNA (1)...(19): siRNA sense strand
gagagaagcccuauguuug

SEQ ID NO: 2113183 - RNA, 19 nt, Homo sapiens
  misc_RNA (1)...(19): siRNA sense strand
gggaaaggguuuagcaaga

SEQ ID NO: 2113184 - RNA, 19 nt, Homo sapiens
  misc_RNA (1)...(19): siRNA sense strand
gaaagccugucguuauaug

SEQ ID NO: 2113185 - RNA, 19 nt, Homo sapiens
  misc_RNA (1)...(19): siRNA sense strand
ccugagaaguugaguuaua

SEQ ID NO: 2113186 - RNA, 19 nt, Homo sapiens
  misc_RNA (1)...(19): siRNA sense strand
caaagaauguggcaaagca

SEQ ID NO: 2113187 - RNA, 19 nt, Homo sapiens
  misc_RNA (1)...(19): siRNA sense strand
gagaagcccuauguuugua

SEQ ID NO: 2113188 - RNA, 19 nt, Homo sapiens
  misc_RNA (1)...(19): siRNA sense strand
gaaaagaccccaugacuga

SEQ ID NO: 2113189 - RNA, 19 nt, Homo sapiens
  misc_RNA (1)...(19): siRNA sense strand
gagagaaacccuuugaaug

SEQ ID NO: 2113190 - RNA, 19 nt, Homo sapiens
  misc_RNA (1)...(19): siRNA sense strand
aaagagauaugcccugaga

SEQ ID NO: 2113191 - RNA, 19 nt, Homo sapiens
  misc_RNA (1)...(19): siRNA sense strand
gauaugcccugagaaguug

SEQ ID NO: 2113192 - RNA, 19 nt, Homo sapiens
  misc_RNA (1)...(19): siRNA sense strand
uuauauggcugaugucauu

SEQ ID NO: 2113193 - RNA, 19 nt, Homo sapiens
  misc_RNA (1)...(19): siRNA sense strand
acgcaccgcuccacauuua

SEQ ID NO: 2113194 - RNA, 19 nt, Homo sapiens
  misc_RNA (1)...(19): siRNA sense strand
ugugacagcucuuccuuaa

SEQ ID NO: 2113195 - RNA, 19 nt, Homo sapiens
  misc_RNA (1)...(19): siRNA sense strand
ggagagaaacccuuugaau

SEQ ID NO: 2113196 - RNA, 19 nt, Homo sapiens
  misc_RNA (1)...(19): siRNA sense strand
gaccuucacuggagaggaa

SEQ ID NO: 2113197 - RNA, 19 nt, Homo sapiens
  misc_RNA (1)...(19): siRNA sense strand
aaccagagcugaucuaucu

SEQ ID NO: 2113198 - RNA, 19 nt, Homo sapiens
  misc_RNA (1)...(19): siRNA sense strand
gcccugagaaguugaguua

SEQ ID NO: 2113199 - RNA, 19 nt, Homo sapiens
  misc_RNA (1)...(19): siRNA sense strand
gcugaucuaucuacuggaa

SEQ ID NO: 2113200 - RNA, 19 nt, Homo sapiens
  misc_RNA (1)...(19): siRNA sense strand
cgacauaagaggacccaua

SEQ ID NO: 2113201 - RNA, 19 nt, Homo sapiens
  misc_RNA (1)...(19): siRNA sense strand
cagagauccucaagagauu

SEQ ID NO: 2113202 - RNA, 19 nt, Homo sapiens
  misc_RNA (1)...(19): siRNA sense strand
gagaaacccuuugaaugca

SEQ ID NO: 2113203 - RNA, 19 nt, Homo sapiens
  misc_RNA (1)...(19): siRNA sense strand
gauucacacuggagagaaa

SEQ ID NO: 2113204 - RNA, 19 nt, Homo sapiens
  misc_RNA (1)...(19): siRNA sense strand
gaaaggguuuagcaagaag

SEQ ID NO: 2113205 - RNA, 19 nt, Homo sapiens
  misc_RNA (1)...(19): siRNA sense strand
gcauuaguaucauuugaag

SEQ ID NO: 2113206 - RNA, 19 nt, Homo sapiens
  misc_RNA (1)...(19): siRNA sense strand
caacauaugaggauucaca

SEQ ID NO: 2113207 - RNA, 19 nt, Homo sapiens
  misc_RNA (1)...(19): siRNA sense strand
ggagagaaacccuaugagu

SEQ ID NO: 2113208 - RNA, 19 nt, Homo sapiens
  misc_RNA (1)...(19): siRNA sense strand
ggagauaagcccuaugagu

SEQ ID NO: 2113209 - RNA, 19 nt, Homo sapiens
  misc_RNA (1)...(19): siRNA sense strand
agucugggcuuaaggguuu

SEQ ID NO: 2113210 - RNA, 19 nt, Homo sapiens
  misc_RNA (1)...(19): siRNA sense strand
cugagaaguugaguuauaa

SEQ ID NO: 2113211 - RNA, 19 nt, Homo sapiens
  misc_RNA (1)...(19): siRNA sense strand
acucaucgcuccacuuuca

SEQ ID NO: 2113212 - RNA, 19 nt, Homo sapiens
  misc_RNA (1)...(19): siRNA sense strand
ugugacaacuuugcuuuaa

SEQ ID NO: 2113213 - RNA, 19 nt, Homo sapiens
  misc_RNA (1)...(19): siRNA sense strand
ccacauuuauccagcacaa

SEQ ID NO: 2113214 - RNA, 19 nt, Homo sapiens
  misc_RNA (1)...(19): siRNA sense strand
ggagagaagcccuuugagu

SEQ ID NO: 2113215 - RNA, 19 nt, Homo sapiens
  misc_RNA (1)...(19): siRNA sense strand
gaugauagucugggcuuaa

SEQ ID NO: 2113216 - RNA, 19 nt, Homo sapiens
  misc_RNA (1)...(19): siRNA sense strand
gaagcccuauguuuguaga

SEQ ID NO: 2113217 - RNA, 19 nt, Homo sapiens
  misc_RNA (1)...(19): siRNA sense strand
gauucauacuggaaagaaa

SEQ ID NO: 2113218 - RNA, 19 nt, Homo sapiens
  misc_RNA (1)...(19): siRNA sense strand
uacuacagcuccucauuug

SEQ ID NO: 2113219 - RNA, 19 nt, Homo sapiens
  misc_RNA (1)...(19): siRNA sense strand
ccacuuucauccgacauaa

SEQ ID NO: 2113220 - RNA, 19 nt, Homo sapiens
  misc_RNA (1)...(19): siRNA sense strand
gaacucacacuggagagaa

SEQ ID NO: 2113221 - RNA, 19 nt, Homo sapiens
  misc_RNA (1)...(19): siRNA sense strand
uacuauagcucuuccuuca

SEQ ID NO: 2113222 - RNA, 19 nt, Homo sapiens
  misc_RNA (1)...(19): siRNA sense strand
gaaacccuuugaaugcaau

SEQ ID NO: 2113223 - RNA, 19 nt, Homo sapiens
  misc_RNA (1)...(19): siRNA sense strand
gaaagauucauaccagagu

SEQ ID NO: 2113224 - RNA, 19 nt, Homo sapiens
  misc_RNA (1)...(19): siRNA sense strand
gugcaaagaauguggcaaa

SEQ ID NO: 2113225 - RNA, 19 nt, Homo sapiens
  misc_RNA (1)...(19): siRNA sense strand
uuacccaaccugcaaauuu

SEQ ID NO: 2113226 - RNA, 19 nt, Homo sapiens
  misc_RNA (1)...(19): siRNA sense strand
caaagaaugugggaaagcu

SEQ ID NO: 2113227 - RNA, 19 nt, Homo sapiens
  misc_RNA (1)...(19): siRNA sense strand
ugacaacuuugcuuuaacu

SEQ ID NO: 2113228 - RNA, 19 nt, Homo sapiens
  misc_RNA (1)...(19): siRNA sense strand
cacaagaugcucuccauga

SEQ ID NO: 2113229 - RNA, 19 nt, Homo sapiens
  misc_RNA (1)...(19): siRNA sense strand
ugacugaugcaaggaauaa

SEQ ID NO: 2113230 - RNA, 19 nt, Homo sapiens
  misc_RNA (1)...(19): siRNA sense strand
ucacggagcaccagcguau

SEQ ID NO: 2113231 - RNA, 19 nt, Homo sapiens
  misc_RNA (1)...(19): siRNA sense strand
gaacuugaggccaggaaca

SEQ ID NO: 2113232 - RNA, 19 nt, Homo sapiens
  misc_RNA (1)...(19): siRNA sense strand
ggaaagccugucguuauau

SEQ ID NO: 2113233 - RNA, 19 nt, Homo sapiens
  misc_RNA (1)...(19): siRNA sense strand
ggagugaagcccuaugagu

SEQ ID NO: 2113234 - RNA, 19 nt, Homo sapiens
  misc_RNA (1)...(19): siRNA sense strand
gcaaagaaugugagaaagc

SEQ ID NO: 2113235 - RNA, 19 nt, Homo sapiens
  misc_RNA (1)...(19): siRNA sense strand
acagagauccucaagagau

SEQ ID NO: 2113236 - RNA, 19 nt, Homo sapiens
  misc_RNA (1)...(19): siRNA sense strand
aaagauucauaccagaguu

SEQ ID NO: 2113237 - RNA, 19 nt, Homo sapiens
  misc_RNA (1)...(19): siRNA sense strand
caccaucgaaagauucaua

SEQ ID NO: 2113238 - RNA, 19 nt, Homo sapiens
  misc_RNA (1)...(19): siRNA sense strand
agagaaacccuuugaaugc

SEQ ID NO: 2113239 - RNA, 19 nt, Homo sapiens
  misc_RNA (1)...(19): siRNA sense strand
uuacucaucgcuccacuuu

SEQ ID NO: 2113240 - RNA, 19 nt, Homo sapiens
  misc_RNA (1)...(19): siRNA sense strand
uuacuacagcuccucauuu

SEQ ID NO: 2113241 - RNA, 19 nt, Homo sapiens
  misc_RNA (1)...(19): siRNA sense strand
ugggaaagccugucguuau

SEQ ID NO: 2113242 - RNA, 19 nt, Homo sapiens
  misc_RNA (1)...(19): siRNA sense strand
gaaugugggaaaggguuua

SEQ ID NO: 2113243 - RNA, 19 nt, Homo sapiens
  misc_RNA (1)...(19): siRNA sense strand
ggaaugugggaaaggguuu

SEQ ID NO: 2113244 - RNA, 19 nt, Homo sapiens
  misc_RNA (1)...(19): siRNA sense strand
gcccuauguuuguagagaa

SEQ ID NO: 2113245 - RNA, 19 nt, Homo sapiens
  misc_RNA (1)...(19): siRNA sense strand
agauaugcccugagaaguu

SEQ ID NO: 2113246 - RNA, 19 nt, Homo sapiens
  misc_RNA (1)...(19): siRNA sense strand
agagaagcccuauguuugu

SEQ ID NO: 2113247 - RNA, 19 nt, Homo sapiens
  misc_RNA (1)...(19): siRNA sense strand
gauucacacuggagagaag

SEQ ID NO: 2113248 - RNA, 19 nt, Homo sapiens
  misc_RNA (1)...(19): siRNA sense strand
ggugagaagccuuaugagu

SEQ ID NO: 2113249 - RNA, 19 nt, Homo sapiens
  misc_RNA (1)...(19): siRNA sense strand
gucguuauauggcugaugu

SEQ ID NO: 2113250 - RNA, 19 nt, Homo sapiens
  misc_RNA (1)...(19): siRNA sense strand
ggcauuaguaucauuugaa

SEQ ID NO: 2113251 - RNA, 19 nt, Homo sapiens
  misc_RNA (1)...(19): siRNA sense strand
acaagaugcucuccaugag

SEQ ID NO: 2113252 - RNA, 19 nt, Homo sapiens
  misc_RNA (1)...(19): siRNA sense strand
uggcauuaguaucauuuga

SEQ ID NO: 2113253 - RNA, 19 nt, Homo sapiens
  misc_RNA (1)...(19): siRNA sense strand
acacuggugagaagccuua

SEQ ID NO: 2113254 - RNA, 19 nt, Homo sapiens
  misc_RNA (1)...(19): siRNA sense strand
gacauaagaggacccauac

SEQ ID NO: 2113255 - RNA, 19 nt, Homo sapiens
  misc_RNA (1)...(19): siRNA sense strand
ucacgcaccgcuccacauu

SEQ ID NO: 2113256 - RNA, 19 nt, Homo sapiens
  misc_RNA (1)...(19): siRNA sense strand
ggauucauacuggaaagaa

SEQ ID NO: 2113257 - RNA, 19 nt, Homo sapiens
  misc_RNA (1)...(19): siRNA sense strand
ucacccaccgcucuucuuu

SEQ ID NO: 2113258 - RNA, 19 nt, Homo sapiens
  misc_RNA (1)...(19): siRNA sense strand
gaggauucauacuggaaag

SEQ ID NO: 2113259 - RNA, 19 nt, Homo sapiens
  misc_RNA (1)...(19): siRNA sense strand
agaaacccuuugaaugcaa

SEQ ID NO: 2113260 - RNA, 19 nt, Homo sapiens
  misc_RNA (1)...(19): siRNA sense strand
ggcguuggcauuaguauca

SEQ ID NO: 2113261 - RNA, 19 nt, Homo sapiens
  misc_RNA (1)...(19): siRNA sense strand
gcucuuccuuaauucaaca

SEQ ID NO: 2113262 - RNA, 19 nt, Homo sapiens
  misc_RNA (1)...(19): siRNA sense strand
gcaccgcuccacauuuauc

SEQ ID NO: 2113263 - RNA, 19 nt, Homo sapiens
  misc_RNA (1)...(19): siRNA sense strand
ccggagauaagcccuauga

SEQ ID NO: 2113264 - RNA, 19 nt, Homo sapiens
  misc_RNA (1)...(19): siRNA sense strand
agccuucugugacaacuuu

SEQ ID NO: 2113265 - RNA, 19 nt, Homo sapiens
  misc_RNA (1)...(19): siRNA sense strand
gaaugcaaagaaugugaga

SEQ ID NO: 2113266 - RNA, 19 nt, Homo sapiens
  misc_RNA (1)...(19): siRNA sense strand
gggaaggccuuuugugaca

SEQ ID NO: 2113267 - RNA, 19 nt, Homo sapiens
  misc_RNA (1)...(19): siRNA sense strand
gauuuggagccagaugaua

SEQ ID NO: 2113268 - RNA, 19 nt, Homo sapiens
  misc_RNA (1)...(19): siRNA sense strand
cuauagcucuuccuucacu

SEQ ID NO: 2113269 - RNA, 19 nt, Homo sapiens
  misc_RNA (1)...(19): siRNA sense strand
ccggagagaagcccuuuga

SEQ ID NO: 2113270 - RNA, 19 nt, Homo sapiens
  misc_RNA (1)...(19): siRNA sense strand
cucauuugcucaacauaug

SEQ ID NO: 2113271 - RNA, 19 nt, Homo sapiens
  misc_RNA (1)...(19): siRNA sense strand
ugaucuaucuacuggaaca

SEQ ID NO: 2113272 - RNA, 19 nt, Homo sapiens
  misc_RNA (1)...(19): siRNA sense strand
ccaaaccagagcugaucua

SEQ ID NO: 2113273 - RNA, 19 nt, Homo sapiens
  misc_RNA (1)...(19): siRNA sense strand
augcaaagaaugugagaaa

SEQ ID NO: 2113274 - RNA, 19 nt, Homo sapiens
  misc_RNA (1)...(19): siRNA sense strand
gacagcucuuccuuaauuc

SEQ ID NO: 2113275 - RNA, 19 nt, Homo sapiens
  misc_RNA (1)...(19): siRNA sense strand
gagcaccagcguauucaca

SEQ ID NO: 2113276 - RNA, 19 nt, Homo sapiens
  misc_RNA (1)...(19): siRNA sense strand
gaagaaagcaccauugaga

SEQ ID NO: 2113277 - RNA, 19 nt, Homo sapiens
  misc_RNA (1)...(19): siRNA sense strand
aaagcaccauugagaauua

SEQ ID NO: 2113278 - RNA, 19 nt, Homo sapiens
  misc_RNA (1)...(19): siRNA sense strand
gaacuggcacgcccucuuu

SEQ ID NO: 2113279 - RNA, 19 nt, Homo sapiens
  misc_RNA (1)...(19): siRNA sense strand
gaaagcaccauugagaauu

SEQ ID NO: 2113280 - RNA, 19 nt, Homo sapiens
  misc_RNA (1)...(19): siRNA sense strand
guuuaaggcugaugaguuc

SEQ ID NO: 2113281 - RNA, 19 nt, Homo sapiens
  misc_RNA (1)...(19): siRNA sense strand
aaauugcgaucugcguuua

SEQ ID NO: 2113282 - RNA, 19 nt, Homo sapiens
  misc_RNA (1)...(19): siRNA sense strand
caaauugcgaucugcguuu

SEQ ID NO: 2113283 - RNA, 19 nt, Homo sapiens
  misc_RNA (1)...(19): siRNA sense strand
gaggaagaaagcaccauug

SEQ ID NO: 2113284 - RNA, 19 nt, Homo sapiens
  misc_RNA (1)...(19): siRNA sense strand
caacugggaugccuuuccu

SEQ ID NO: 2113285 - RNA, 19 nt, Homo sapiens
  misc_RNA (1)...(19): siRNA sense strand
ggaagaaagcaccauugag

SEQ ID NO: 2113286 - RNA, 19 nt, Homo sapiens
  misc_RNA (1)...(19): siRNA sense strand
agaaagcaccauugagaau

SEQ ID NO: 2113287 - RNA, 19 nt, Homo sapiens
  misc_RNA (1)...(19): siRNA sense strand
uccugaacaucgacaaauu

SEQ ID NO: 2113288 - RNA, 19 nt, Homo sapiens
  misc_RNA (1)...(19): siRNA sense strand
aaacuuccuuuccucaacu

SEQ ID NO: 2113289 - RNA, 19 nt, Homo sapiens
  misc_RNA (1)...(19): siRNA sense strand
aagaaagcaccauugagaa

SEQ ID NO: 2113290 - RNA, 19 nt, Homo sapiens
  misc_RNA (1)...(19): siRNA sense strand
ccugaacaucgacaaauug

SEQ ID NO: 2113291 - RNA, 19 nt, Homo sapiens
  misc_RNA (1)...(19): siRNA sense strand
aggaagaaagcaccauuga

SEQ ID NO: 2113292 - RNA, 19 nt, Homo sapiens
  misc_RNA (1)...(19): siRNA sense strand
ugaggaagaaagcaccauu

SEQ ID NO: 2113293 - RNA, 19 nt, Homo sapiens
  misc_RNA (1)...(19): siRNA sense strand
ggacugaggagcgcaacuc

SEQ ID NO: 2113294 - RNA, 19 nt, Homo sapiens
  misc_RNA (1)...(19): siRNA sense strand
cguuuaaggcugaugaguu

SEQ ID NO: 2113295 - RNA, 19 nt, Homo sapiens
  misc_RNA (1)...(19): siRNA sense strand
ccucaacugggaugccuuu

SEQ ID NO: 2113296 - RNA, 19 nt, Homo sapiens
  misc_RNA (1)...(19): siRNA sense strand
ugggaugccuuuccuaagc

SEQ ID NO: 2113297 - RNA, 19 nt, Homo sapiens
  misc_RNA (1)...(19): siRNA sense strand
gggaugccuuuccuaagcu

SEQ ID NO: 2113298 - RNA, 19 nt, Homo sapiens
  misc_RNA (1)...(19): siRNA sense strand
ucacgacccgaggccuuua

SEQ ID NO: 2113299 - RNA, 19 nt, Homo sapiens
  misc_RNA (1)...(19): siRNA sense strand
gaacaucuaucucaugcua

SEQ ID NO: 2113300 - RNA, 19 nt, Homo sapiens
  misc_RNA (1)...(19): siRNA sense strand
gauugcaaaugaugaguua

SEQ ID NO: 2113301 - RNA, 19 nt, Homo sapiens
  misc_RNA (1)...(19): siRNA sense strand
caacaugcuucuacgcuuu

SEQ ID NO: 2113302 - RNA, 19 nt, Homo sapiens
  misc_RNA (1)...(19): siRNA sense strand
ccaagaagcugcccuacau

SEQ ID NO: 2113303 - RNA, 19 nt, Homo sapiens
  misc_RNA (1)...(19): siRNA sense strand
ggacaugaccacaggcaua

SEQ ID NO: 2113304 - RNA, 19 nt, Homo sapiens
  misc_RNA (1)...(19): siRNA sense strand
ugauugggccucauuauua

SEQ ID NO: 2113305 - RNA, 19 nt, Homo sapiens
  misc_RNA (1)...(19): siRNA sense strand
gaagaggcccugcaccaaa

SEQ ID NO: 2113306 - RNA, 19 nt, Homo sapiens
  misc_RNA (1)...(19): siRNA sense strand
ggaaaggugaagaaucaua

SEQ ID NO: 2113307 - RNA, 19 nt, Homo sapiens
  misc_RNA (1)...(19): siRNA sense strand
ugagagaccugauagagau

SEQ ID NO: 2113308 - RNA, 19 nt, Homo sapiens
  misc_RNA (1)...(19): siRNA sense strand
cuaaagcucuccaccauca

SEQ ID NO: 2113309 - RNA, 19 nt, Homo sapiens
  misc_RNA (1)...(19): siRNA sense strand
gaacagcacccuggaaauc

SEQ ID NO: 2113310 - RNA, 19 nt, Homo sapiens
  misc_RNA (1)...(19): siRNA sense strand
gcaggccucuucuucauca

SEQ ID NO: 2113311 - RNA, 19 nt, Homo sapiens
  misc_RNA (1)...(19): siRNA sense strand
cauagaagcugaugaaucc

SEQ ID NO: 2113312 - RNA, 19 nt, Homo sapiens
  misc_RNA (1)...(19): siRNA sense strand
guucuaugcugccaaauuc

SEQ ID NO: 2113313 - RNA, 19 nt, Homo sapiens
  misc_RNA (1)...(19): siRNA sense strand
gaaaucagcgcucgagaag

SEQ ID NO: 2113314 - RNA, 19 nt, Homo sapiens
  misc_RNA (1)...(19): siRNA sense strand
agagugacauugaugguuu

SEQ ID NO: 2113315 - RNA, 19 nt, Homo sapiens
  misc_RNA (1)...(19): siRNA sense strand
ggaaaucagcgcucgagaa

SEQ ID NO: 2113316 - RNA, 19 nt, Homo sapiens
  misc_RNA (1)...(19): siRNA sense strand
gaagcuuguucuccuguga

SEQ ID NO: 2113317 - RNA, 19 nt, Homo sapiens
  misc_RNA (1)...(19): siRNA sense strand
ggaaccugauccuggagua

SEQ ID NO: 2113318 - RNA, 19 nt, Homo sapiens
  misc_RNA (1)...(19): siRNA sense strand
cagaggcccugauugcaaa

SEQ ID NO: 2113319 - RNA, 19 nt, Homo sapiens
  misc_RNA (1)...(19): siRNA sense strand
cagcauguuugacucacua

SEQ ID NO: 2113320 - RNA, 19 nt, Homo sapiens
  misc_RNA (1)...(19): siRNA sense strand
ggagcugccugguaugcaa

SEQ ID NO: 2113321 - RNA, 19 nt, Homo sapiens
  misc_RNA (1)...(19): siRNA sense strand
gauaccaaccugagaguga

SEQ ID NO: 2113322 - RNA, 19 nt, Homo sapiens
  misc_RNA (1)...(19): siRNA sense strand
gacaaaggcuucuauuacc

SEQ ID NO: 2113323 - RNA, 19 nt, Homo sapiens
  misc_RNA (1)...(19): siRNA sense strand
gcauagaagcugaugaauc

SEQ ID NO: 2113324 - RNA, 19 nt, Homo sapiens
  misc_RNA (1)...(19): siRNA sense strand
gcaaaugaugaguuagauu

SEQ ID NO: 2113325 - RNA, 19 nt, Homo sapiens
  misc_RNA (1)...(19): siRNA sense strand
aaucagcgcucgagaagag

SEQ ID NO: 2113326 - RNA, 19 nt, Homo sapiens
  misc_RNA (1)...(19): siRNA sense strand
ggggaaaggugaagaauca

SEQ ID NO: 2113327 - RNA, 19 nt, Homo sapiens
  misc_RNA (1)...(19): siRNA sense strand
gauugggccucauuauuac

SEQ ID NO: 2113328 - RNA, 19 nt, Homo sapiens
  misc_RNA (1)...(19): siRNA sense strand
agacaaaggcuucuauuac

SEQ ID NO: 2113329 - RNA, 19 nt, Homo sapiens
  misc_RNA (1)...(19): siRNA sense strand
ugggucugcucauuuauuu

SEQ ID NO: 2113330 - RNA, 19 nt, Homo sapiens
  misc_RNA (1)...(19): siRNA sense strand
gaucgcaggccucuucuuc

SEQ ID NO: 2113331 - RNA, 19 nt, Homo sapiens
  misc_RNA (1)...(19): siRNA sense strand
aagacaaaggcuucuauua

SEQ ID NO: 2113332 - RNA, 19 nt, Homo sapiens
  misc_RNA (1)...(19): siRNA sense strand
ggauauggcaucuggaaca

SEQ ID NO: 2113333 - RNA, 19 nt, Homo sapiens
  misc_RNA (1)...(19): siRNA sense strand
acaucuaucucaugcuaaa

SEQ ID NO: 2113334 - RNA, 19 nt, Homo sapiens
  misc_RNA (1)...(19): siRNA sense strand
gaaaggugaagaaucauac

SEQ ID NO: 2113335 - RNA, 19 nt, Homo sapiens
  misc_RNA (1)...(19): siRNA sense strand
uccauaggcuucaacaaug

SEQ ID NO: 2113336 - RNA, 19 nt, Homo sapiens
  misc_RNA (1)...(19): siRNA sense strand
ccauaggcuucaacaaugu

SEQ ID NO: 2113337 - RNA, 19 nt, Homo sapiens
  misc_RNA (1)...(19): siRNA sense strand
ccaagaacuuaccauccuu

SEQ ID NO: 2113338 - RNA, 19 nt, Homo sapiens
  misc_RNA (1)...(19): siRNA sense strand
ucaucugccugacagcaua

SEQ ID NO: 2113339 - RNA, 19 nt, Homo sapiens
  misc_RNA (1)...(19): siRNA sense strand
ccaacacguccaucccuua

SEQ ID NO: 2113340 - RNA, 19 nt, Homo sapiens
  misc_RNA (1)...(19): siRNA sense strand
gaggagcacaccaagaaga

SEQ ID NO: 2113341 - RNA, 19 nt, Homo sapiens
  misc_RNA (1)...(19): siRNA sense strand
ggugccauauuauaccauu

SEQ ID NO: 2113342 - RNA, 19 nt, Homo sapiens
  misc_RNA (1)...(19): siRNA sense strand
caacacguccaucccuuau

SEQ ID NO: 2113343 - RNA, 19 nt, Homo sapiens
  misc_RNA (1)...(19): siRNA sense strand
gauccuggaguaccugauu

SEQ ID NO: 2113344 - RNA, 19 nt, Homo sapiens
  misc_RNA (1)...(19): siRNA sense strand
uugugggucugcucauuua

SEQ ID NO: 2113345 - RNA, 19 nt, Homo sapiens
  misc_RNA (1)...(19): siRNA sense strand
gccaagaacuuaccauccu

SEQ ID NO: 2113346 - RNA, 19 nt, Homo sapiens
  misc_RNA (1)...(19): siRNA sense strand
agcgugaucuuaacucuga

SEQ ID NO: 2113347 - RNA, 19 nt, Homo sapiens
  misc_RNA (1)...(19): siRNA sense strand
gcugaugaauccgaaaaua

SEQ ID NO: 2113348 - RNA, 19 nt, Homo sapiens
  misc_RNA (1)...(19): siRNA sense strand
agccgucgcauccauauua

SEQ ID NO: 2113349 - RNA, 19 nt, Homo sapiens
  misc_RNA (1)...(19): siRNA sense strand
ucagacaagucaaccuaca

SEQ ID NO: 2113350 - RNA, 19 nt, Homo sapiens
  misc_RNA (1)...(19): siRNA sense strand
ggaaaucagacaagucaac

SEQ ID NO: 2113351 - RNA, 19 nt, Homo sapiens
  misc_RNA (1)...(19): siRNA sense strand
guccaucccuuaugcuauc

SEQ ID NO: 2113352 - RNA, 19 nt, Homo sapiens
  misc_RNA (1)...(19): siRNA sense strand
ucugugagcgugaucuuaa

SEQ ID NO: 2113353 - RNA, 19 nt, Homo sapiens
  misc_RNA (1)...(19): siRNA sense strand
aaagcaaacacaaacagaa

SEQ ID NO: 2113354 - RNA, 19 nt, Homo sapiens
  misc_RNA (1)...(19): siRNA sense strand
caaaggcuucuauuaccaa

SEQ ID NO: 2113355 - RNA, 19 nt, Homo sapiens
  misc_RNA (1)...(19): siRNA sense strand
caucuuugguucugacuac

SEQ ID NO: 2113356 - RNA, 19 nt, Homo sapiens
  misc_RNA (1)...(19): siRNA sense strand
ccacggcacauggaacuaa

SEQ ID NO: 2113357 - RNA, 19 nt, Homo sapiens
  misc_RNA (1)...(19): siRNA sense strand
cagcuugagagaccugaua

SEQ ID NO: 2113358 - RNA, 19 nt, Homo sapiens
  misc_RNA (1)...(19): siRNA sense strand
ggaacagcacccuggaaau

SEQ ID NO: 2113359 - RNA, 19 nt, Homo sapiens
  misc_RNA (1)...(19): siRNA sense strand
ugugggcacuggcauguau

SEQ ID NO: 2113360 - RNA, 19 nt, Homo sapiens
  misc_RNA (1)...(19): siRNA sense strand
gucauuguguccuucauca

SEQ ID NO: 2113361 - RNA, 19 nt, Homo sapiens
  misc_RNA (1)...(19): siRNA sense strand
caguggaccucaucucucu

SEQ ID NO: 2113362 - RNA, 19 nt, Homo sapiens
  misc_RNA (1)...(19): siRNA sense strand
ggagaggaagccaagaauc

SEQ ID NO: 2113363 - RNA, 19 nt, Homo sapiens
  misc_RNA (1)...(19): siRNA sense strand
gugucuugcuccuucgaua

SEQ ID NO: 2113364 - RNA, 19 nt, Homo sapiens
  misc_RNA (1)...(19): siRNA sense strand
gagcaaaagcaaacacaaa

SEQ ID NO: 2113365 - RNA, 19 nt, Homo sapiens
  misc_RNA (1)...(19): siRNA sense strand
acaaaggcuucuauuacca

SEQ ID NO: 2113366 - RNA, 19 nt, Homo sapiens
  misc_RNA (1)...(19): siRNA sense strand
aaucagacaagucaaccua

SEQ ID NO: 2113367 - RNA, 19 nt, Homo sapiens
  misc_RNA (1)...(19): siRNA sense strand
cugaggagcacaccaagaa

SEQ ID NO: 2113368 - RNA, 19 nt, Homo sapiens
  misc_RNA (1)...(19): siRNA sense strand
gagagugacauugaugguu

SEQ ID NO: 2113369 - RNA, 19 nt, Homo sapiens
  misc_RNA (1)...(19): siRNA sense strand
gagcagcauguuugacuca

SEQ ID NO: 2113370 - RNA, 19 nt, Homo sapiens
  misc_RNA (1)...(19): siRNA sense strand
ucacauggauccgguuugc

SEQ ID NO: 2113371 - RNA, 19 nt, Homo sapiens
  misc_RNA (1)...(19): siRNA sense strand
cauuguguccuucaucauu

SEQ ID NO: 2113372 - RNA, 19 nt, Homo sapiens
  misc_RNA (1)...(19): siRNA sense strand
ggccucuucuucaucaaug

SEQ ID NO: 2113373 - RNA, 19 nt, Homo sapiens
  misc_RNA (1)...(19): siRNA sense strand
caugaucgcaggccucuuc

SEQ ID NO: 2113374 - RNA, 19 nt, Homo sapiens
  misc_RNA (1)...(19): siRNA sense strand
gcaguauggguguucauca

SEQ ID NO: 2113375 - RNA, 19 nt, Homo sapiens
  misc_RNA (1)...(19): siRNA sense strand
gguucuaugcugccaaauu

SEQ ID NO: 2113376 - RNA, 19 nt, Homo sapiens
  misc_RNA (1)...(19): siRNA sense strand
ugucagaugcgaaggcaaa

SEQ ID NO: 2113377 - RNA, 19 nt, Homo sapiens
  misc_RNA (1)...(19): siRNA sense strand
caucgugaccaucauuguu

SEQ ID NO: 2113378 - RNA, 19 nt, Homo sapiens
  misc_RNA (1)...(19): siRNA sense strand
gcaaacacaaacagaacuc

SEQ ID NO: 2113379 - RNA, 19 nt, Homo sapiens
  misc_RNA (1)...(19): siRNA sense strand
uagcaaagcgaagagcaaa

SEQ ID NO: 2113380 - RNA, 19 nt, Homo sapiens
  misc_RNA (1)...(19): siRNA sense strand
gauauggcaucuggaacag

SEQ ID NO: 2113381 - RNA, 19 nt, Homo sapiens
  misc_RNA (1)...(19): siRNA sense strand
caaguuaaagaagcugauu

SEQ ID NO: 2113382 - RNA, 19 nt, Homo sapiens
  misc_RNA (1)...(19): siRNA sense strand
gcacuguuggucagcuuga

SEQ ID NO: 2113383 - RNA, 19 nt, Homo sapiens
  misc_RNA (1)...(19): siRNA sense strand
cgaugccgagggucauuua

SEQ ID NO: 2113384 - RNA, 19 nt, Homo sapiens
  misc_RNA (1)...(19): siRNA sense strand
acacguccaucccuuaugc

SEQ ID NO: 2113385 - RNA, 19 nt, Homo sapiens
  misc_RNA (1)...(19): siRNA sense strand
gagaggaagccaagaaucc

SEQ ID NO: 2113386 - RNA, 19 nt, Homo sapiens
  misc_RNA (1)...(19): siRNA sense strand
caguauggguguucaucau

SEQ ID NO: 2113387 - RNA, 19 nt, Homo sapiens
  misc_RNA (1)...(19): siRNA sense strand
gugcugaaccuggcaguau

SEQ ID NO: 2113388 - RNA, 19 nt, Homo sapiens
  misc_RNA (1)...(19): siRNA sense strand
ucgcaggccucuucuucau

SEQ ID NO: 2113389 - RNA, 19 nt, Homo sapiens
  misc_RNA (1)...(19): siRNA sense strand
uggaacagcacccuggaaa

SEQ ID NO: 2113390 - RNA, 19 nt, Homo sapiens
  misc_RNA (1)...(19): siRNA sense strand
gagaugcucauagggaaau

SEQ ID NO: 2113391 - RNA, 19 nt, Homo sapiens
  misc_RNA (1)...(19): siRNA sense strand
cgccaccacuggagaggaa

SEQ ID NO: 2113392 - RNA, 19 nt, Homo sapiens
  misc_RNA (1)...(19): siRNA sense strand
caggaucugccuacaccua

SEQ ID NO: 2113393 - RNA, 19 nt, Homo sapiens
  misc_RNA (1)...(19): siRNA sense strand
aagaggcccugcaccaaag

SEQ ID NO: 2113394 - RNA, 19 nt, Homo sapiens
  misc_RNA (1)...(19): siRNA sense strand
ggugaacaucuaucucaug

SEQ ID NO: 2113395 - RNA, 19 nt, Homo sapiens
  misc_RNA (1)...(19): siRNA sense strand
ccaugcuggugaacaucua

SEQ ID NO: 2113396 - RNA, 19 nt, Homo sapiens
  misc_RNA (1)...(19): siRNA sense strand
ggaccuggugucauugugu

SEQ ID NO: 2113397 - RNA, 19 nt, Homo sapiens
  misc_RNA (1)...(19): siRNA sense strand
cgucgcauccauauuauca

SEQ ID NO: 2113398 - RNA, 19 nt, Homo sapiens
  misc_RNA (1)...(19): siRNA sense strand
guagcaaagcgaagagcaa

SEQ ID NO: 2113399 - RNA, 19 nt, Homo sapiens
  misc_RNA (1)...(19): siRNA sense strand
gaaagguggucccuacauu

SEQ ID NO: 2113400 - RNA, 19 nt, Homo sapiens
  misc_RNA (1)...(19): siRNA sense strand
gaggaaagccaaaguagau

SEQ ID NO: 2113401 - RNA, 19 nt, Homo sapiens
  misc_RNA (1)...(19): siRNA sense strand
ggagaggaaagccaaagua

SEQ ID NO: 2113402 - RNA, 19 nt, Homo sapiens
  misc_RNA (1)...(19): siRNA sense strand
uggagacgcugcugacaaa

SEQ ID NO: 2113403 - RNA, 19 nt, Homo sapiens
  misc_RNA (1)...(19): siRNA sense strand
ucaaggcccugcacgauca

SEQ ID NO: 2113404 - RNA, 19 nt, Homo sapiens
  misc_RNA (1)...(19): siRNA sense strand
uggagaagcuacugaaaca

SEQ ID NO: 2113405 - RNA, 19 nt, Homo sapiens
  misc_RNA (1)...(19): siRNA sense strand
caucugggccuacaucuug

SEQ ID NO: 2113406 - RNA, 19 nt, Homo sapiens
  misc_RNA (1)...(19): siRNA sense strand
ucagaggacugucaagaag

SEQ ID NO: 2113407 - RNA, 19 nt, Homo sapiens
  misc_RNA (1)...(19): siRNA sense strand
gggcagaaauccaggaacu

SEQ ID NO: 2113408 - RNA, 19 nt, Homo sapiens
  misc_RNA (1)...(19): siRNA sense strand
gaucuacuccacaugaaga

SEQ ID NO: 2113409 - RNA, 19 nt, Homo sapiens
  misc_RNA (1)...(19): siRNA sense strand
ugaagaggcuggagaagcu

SEQ ID NO: 2113410 - RNA, 19 nt, Homo sapiens
  misc_RNA (1)...(19): siRNA sense strand
ggaaaccuacucugguaug

SEQ ID NO: 2113411 - RNA, 19 nt, Homo sapiens
  misc_RNA (1)...(19): siRNA sense strand
ggggaaaccuacucuggua

SEQ ID NO: 2113412 - RNA, 19 nt, Homo sapiens
  misc_RNA (1)...(19): siRNA sense strand
gggaucuacuccacaugaa

SEQ ID NO: 2113413 - RNA, 19 nt, Homo sapiens
  misc_RNA (1)...(19): siRNA sense strand
gaaaccuacucugguaugg

SEQ ID NO: 2113414 - RNA, 19 nt, Homo sapiens
  misc_RNA (1)...(19): siRNA sense strand
gaugaccacuuuggcacuu

SEQ ID NO: 2113415 - RNA, 19 nt, Homo sapiens
  misc_RNA (1)...(19): siRNA sense strand
ggaaagccaaaguagaugu

SEQ ID NO: 2113416 - RNA, 19 nt, Homo sapiens
  misc_RNA (1)...(19): siRNA sense strand
gagaggaaagccaaaguag

SEQ ID NO: 2113417 - RNA, 19 nt, Homo sapiens
  misc_RNA (1)...(19): siRNA sense strand
aaagguggucccuacauuu

SEQ ID NO: 2113418 - RNA, 19 nt, Homo sapiens
  misc_RNA (1)...(19): siRNA sense strand
ggaggaaguccggcauuug

SEQ ID NO: 2113419 - RNA, 19 nt, Homo sapiens
  misc_RNA (1)...(19): siRNA sense strand
gauccaggcaucccaggaa

SEQ ID NO: 2113420 - RNA, 19 nt, Homo sapiens
  misc_RNA (1)...(19): siRNA sense strand
gaaagccaaaguagaugug

SEQ ID NO: 2113421 - RNA, 19 nt, Homo sapiens
  misc_RNA (1)...(19): siRNA sense strand
ucauagcgcugagccacaa

SEQ ID NO: 2113422 - RNA, 19 nt, Homo sapiens
  misc_RNA (1)...(19): siRNA sense strand
gcugggaucuacuccacau

SEQ ID NO: 2113423 - RNA, 19 nt, Homo sapiens
  misc_RNA (1)...(19): siRNA sense strand
gggcccaguuccugcagaa

SEQ ID NO: 2113424 - RNA, 19 nt, Homo sapiens
  misc_RNA (1)...(19): siRNA sense strand
ugaaggagcggcaagucuu

SEQ ID NO: 2113425 - RNA, 19 nt, Homo sapiens
  misc_RNA (1)...(19): siRNA sense strand
gcugggcggucgaagagau

SEQ ID NO: 2113426 - RNA, 19 nt, Homo sapiens
  misc_RNA (1)...(19): siRNA sense strand
agaggacugucaagaagau

SEQ ID NO: 2113427 - RNA, 19 nt, Homo sapiens
  misc_RNA (1)...(19): siRNA sense strand
guccaugguucaucucauc

SEQ ID NO: 2113428 - RNA, 19 nt, Homo sapiens
  misc_RNA (1)...(19): siRNA sense strand
cagcauacgcuccgagauc

SEQ ID NO: 2113429 - RNA, 19 nt, Homo sapiens
  misc_RNA (1)...(19): siRNA sense strand
aggaggaaguccggcauuu

SEQ ID NO: 2113430 - RNA, 19 nt, Homo sapiens
  misc_RNA (1)...(19): siRNA sense strand
gaggaaguccggcauuugc

SEQ ID NO: 2113431 - RNA, 19 nt, Homo sapiens
  misc_RNA (1)...(19): siRNA sense strand
gaagaggcuggagaagcua

SEQ ID NO: 2113432 - RNA, 19 nt, Homo sapiens
  misc_RNA (1)...(19): siRNA sense strand
ugauggagcgagacacuga

SEQ ID NO: 2113433 - RNA, 19 nt, Homo sapiens
  misc_RNA (1)...(19): siRNA sense strand
gcugacaucugggccuaca

SEQ ID NO: 2113434 - RNA, 19 nt, Homo sapiens
  misc_RNA (1)...(19): siRNA sense strand
ccaaggggcuccagcuuca

SEQ ID NO: 2113435 - RNA, 19 nt, Homo sapiens
  misc_RNA (1)...(19): siRNA sense strand
ccacgguccucccauccau

SEQ ID NO: 2113436 - RNA, 19 nt, Homo sapiens
  misc_RNA (1)...(19): siRNA sense strand
gcucaaggcccugcacgau

SEQ ID NO: 2113437 - RNA, 19 nt, Homo sapiens
  misc_RNA (1)...(19): siRNA sense strand
gcuuggcgacacagagaua

SEQ ID NO: 2113438 - RNA, 19 nt, Homo sapiens
  misc_RNA (1)...(19): siRNA sense strand
gucagaggacugucaagaa

SEQ ID NO: 2113439 - RNA, 19 nt, Homo sapiens
  misc_RNA (1)...(19): siRNA sense strand
ugcaggacauggagaggaa

SEQ ID NO: 2113440 - RNA, 19 nt, Homo sapiens
  misc_RNA (1)...(19): siRNA sense strand
gggcuuggcgacacagaga

SEQ ID NO: 2113441 - RNA, 19 nt, Homo sapiens
  misc_RNA (1)...(19): siRNA sense strand
gaggaggaaguccggcauu

SEQ ID NO: 2113442 - RNA, 19 nt, Homo sapiens
  misc_RNA (1)...(19): siRNA sense strand
ggaugggcuuggcgacaca

SEQ ID NO: 2113443 - RNA, 19 nt, Homo sapiens
  misc_RNA (1)...(19): siRNA sense strand
aaguagaugugaccuuugg

SEQ ID NO: 2113444 - RNA, 19 nt, Homo sapiens
  misc_RNA (1)...(19): siRNA sense strand
gguggucccuacauuugag

SEQ ID NO: 2113445 - RNA, 19 nt, Homo sapiens
  misc_RNA (1)...(19): siRNA sense strand
gcacgucagcacacucaag

SEQ ID NO: 2113446 - RNA, 19 nt, Homo sapiens
  misc_RNA (1)...(19): siRNA sense strand
guagaugugaccuuuggau

SEQ ID NO: 2113447 - RNA, 19 nt, Homo sapiens
  misc_RNA (1)...(19): siRNA sense strand
gcuggagaagcuacugaaa

SEQ ID NO: 2113448 - RNA, 19 nt, Homo sapiens
  misc_RNA (1)...(19): siRNA sense strand
ucaagaagauccggggaaa

SEQ ID NO: 2113449 - RNA, 19 nt, Homo sapiens
  misc_RNA (1)...(19): siRNA sense strand
ggaaacucggccagcaaga

SEQ ID NO: 2113450 - RNA, 19 nt, Homo sapiens
  misc_RNA (1)...(19): siRNA sense strand
agaggaaagccaaaguaga

SEQ ID NO: 2113451 - RNA, 19 nt, Homo sapiens
  misc_RNA (1)...(19): siRNA sense strand
gaagauccggggaaaccua

SEQ ID NO: 2113452 - RNA, 19 nt, Homo sapiens
  misc_RNA (1)...(19): siRNA sense strand
cagcaugugcacagucaga

SEQ ID NO: 2113453 - RNA, 19 nt, Homo sapiens
  misc_RNA (1)...(19): siRNA sense strand
aagguggucccuacauuug

SEQ ID NO: 2113454 - RNA, 19 nt, Homo sapiens
  misc_RNA (1)...(19): siRNA sense strand
cgaaagguggucccuacau

SEQ ID NO: 2113455 - RNA, 19 nt, Homo sapiens
  misc_RNA (1)...(19): siRNA sense strand
agacgcugcugacaaacca

SEQ ID NO: 2113456 - RNA, 19 nt, Homo sapiens
  misc_RNA (1)...(19): siRNA sense strand
ugagaggcaggugcugaua

SEQ ID NO: 2113457 - RNA, 19 nt, Homo sapiens
  misc_RNA (1)...(19): siRNA sense strand
gaaacucggccagcaagac

SEQ ID NO: 2113458 - RNA, 19 nt, Homo sapiens
  misc_RNA (1)...(19): siRNA sense strand
cagaggacugucaagaaga

SEQ ID NO: 2113459 - RNA, 19 nt, Homo sapiens
  misc_RNA (1)...(19): siRNA sense strand
aacaggcacuggagcgaau

SEQ ID NO: 2113460 - RNA, 19 nt, Homo sapiens
  misc_RNA (1)...(19): siRNA sense strand
gcaggcacgucagcacacu

SEQ ID NO: 2113461 - RNA, 19 nt, Homo sapiens
  misc_RNA (1)...(19): siRNA sense strand
agaggcaggugcugauacu

SEQ ID NO: 2113462 - RNA, 19 nt, Homo sapiens
  misc_RNA (1)...(19): siRNA sense strand
gggaaaccuacucugguau

SEQ ID NO: 2113463 - RNA, 19 nt, Homo sapiens
  misc_RNA (1)...(19): siRNA sense strand
guggagacgcugcugacaa

SEQ ID NO: 2113464 - RNA, 19 nt, Homo sapiens
  misc_RNA (1)...(19): siRNA sense strand
ugacaucugggccuacauc

SEQ ID NO: 2113465 - RNA, 19 nt, Homo sapiens
  misc_RNA (1)...(19): siRNA sense strand
ugggaucuacuccacauga

SEQ ID NO: 2113466 - RNA, 19 nt, Homo sapiens
  misc_RNA (1)...(19): siRNA sense strand
gagcugauggagcgagaca

SEQ ID NO: 2113467 - RNA, 19 nt, Homo sapiens
  misc_RNA (1)...(19): siRNA sense strand
ccaaaguagaugugaccuu

SEQ ID NO: 2113468 - RNA, 19 nt, Homo sapiens
  misc_RNA (1)...(19): siRNA sense strand
gagacaugcuggaaaggua

SEQ ID NO: 2113469 - RNA, 19 nt, Homo sapiens
  misc_RNA (1)...(19): siRNA sense strand
gcagagacaugcuggaaag

SEQ ID NO: 2113470 - RNA, 19 nt, Homo sapiens
  misc_RNA (1)...(19): siRNA sense strand
gcucagcucucaccguuug

SEQ ID NO: 2113471 - RNA, 19 nt, Homo sapiens
  misc_RNA (1)...(19): siRNA sense strand
gcucaucccuggcaagcuu

SEQ ID NO: 2113472 - RNA, 19 nt, Homo sapiens
  misc_RNA (1)...(19): siRNA sense strand
gggcaugaauuacgagaag

SEQ ID NO: 2113473 - RNA, 19 nt, Homo sapiens
  misc_RNA (1)...(19): siRNA sense strand
gggagcagagacacaauaa

SEQ ID NO: 2113474 - RNA, 19 nt, Homo sapiens
  misc_RNA (1)...(19): siRNA sense strand
gcacagccugggacucuug

SEQ ID NO: 2113475 - RNA, 19 nt, Homo sapiens
  misc_RNA (1)...(19): siRNA sense strand
ccauucagcuguggcaguu

SEQ ID NO: 2113476 - RNA, 19 nt, Homo sapiens
  misc_RNA (1)...(19): siRNA sense strand
gcacggacuguaccauuuc

SEQ ID NO: 2113477 - RNA, 19 nt, Homo sapiens
  misc_RNA (1)...(19): siRNA sense strand
cgcacggacuguaccauuu

SEQ ID NO: 2113478 - RNA, 19 nt, Homo sapiens
  misc_RNA (1)...(19): siRNA sense strand
ggccuucgcuacuacuauc

SEQ ID NO: 2113479 - RNA, 19 nt, Homo sapiens
  misc_RNA (1)...(19): siRNA sense strand
gcgcacggacuguaccauu

SEQ ID NO: 2113480 - RNA, 19 nt, Homo sapiens
  misc_RNA (1)...(19): siRNA sense strand
ccaccgaggucccauucag

SEQ ID NO: 2113481 - RNA, 19 nt, Homo sapiens
  misc_RNA (1)...(19): siRNA sense strand
ggaaagguacaagcucauc

SEQ ID NO: 2113482 - RNA, 19 nt, Homo sapiens
  misc_RNA (1)...(19): siRNA sense strand
cuuaucgccugcagaagga

SEQ ID NO: 2113483 - RNA, 19 nt, Homo sapiens
  misc_RNA (1)...(19): siRNA sense strand
agucggaccgugccaguuu

SEQ ID NO: 2113484 - RNA, 19 nt, Homo sapiens
  misc_RNA (1)...(19): siRNA sense strand
gggccucugcugacccuaa

SEQ ID NO: 2113485 - RNA, 19 nt, Homo sapiens
  misc_RNA (1)...(19): siRNA sense strand
caacaccagcugggacugu

SEQ ID NO: 2113486 - RNA, 19 nt, Homo sapiens
  misc_RNA (1)...(19): siRNA sense strand
ggucaaagauuaaagguua

SEQ ID NO: 2113487 - RNA, 19 nt, Homo sapiens
  misc_RNA (1)...(19): siRNA sense strand
ugaagaaggugacugauua

SEQ ID NO: 2113488 - RNA, 19 nt, Homo sapiens
  misc_RNA (1)...(19): siRNA sense strand
agaagaaggucaaagauua

SEQ ID NO: 2113489 - RNA, 19 nt, Homo sapiens
  misc_RNA (1)...(19): siRNA sense strand
gaacauacgggcaaguuua

SEQ ID NO: 2113490 - RNA, 19 nt, Homo sapiens
  misc_RNA (1)...(19): siRNA sense strand
uaagcgagcucaaagguua

SEQ ID NO: 2113491 - RNA, 19 nt, Homo sapiens
  misc_RNA (1)...(19): siRNA sense strand
ucaggaaacucuuaugaua

SEQ ID NO: 2113492 - RNA, 19 nt, Homo sapiens
  misc_RNA (1)...(19): siRNA sense strand
caacagaaauuccaugaug

SEQ ID NO: 2113493 - RNA, 19 nt, Homo sapiens
  misc_RNA (1)...(19): siRNA sense strand
gaaacaaaccgcccaauga

SEQ ID NO: 2113494 - RNA, 19 nt, Homo sapiens
  misc_RNA (1)...(19): siRNA sense strand
gcaagaaagagacuacuua

SEQ ID NO: 2113495 - RNA, 19 nt, Homo sapiens
  misc_RNA (1)...(19): siRNA sense strand
gaacugagcccaucuugga

SEQ ID NO: 2113496 - RNA, 19 nt, Homo sapiens
  misc_RNA (1)...(19): siRNA sense strand
gcacaagccucugcuaguu

SEQ ID NO: 2113497 - RNA, 19 nt, Homo sapiens
  misc_RNA (1)...(19): siRNA sense strand
gcucaaagguuaaaguuuc

SEQ ID NO: 2113498 - RNA, 19 nt, Homo sapiens
  misc_RNA (1)...(19): siRNA sense strand
gaaauuccaugaugaacug

SEQ ID NO: 2113499 - RNA, 19 nt, Homo sapiens
  misc_RNA (1)...(19): siRNA sense strand
aaagaaugcuguggaaaua

SEQ ID NO: 2113500 - RNA, 19 nt, Homo sapiens
  misc_RNA (1)...(19): siRNA sense strand
gaauggaaaugcuuguuug

SEQ ID NO: 2113501 - RNA, 19 nt, Homo sapiens
  misc_RNA (1)...(19): siRNA sense strand
agaauaagcuacgaguuua

SEQ ID NO: 2113502 - RNA, 19 nt, Homo sapiens
  misc_RNA (1)...(19): siRNA sense strand
uaagagaacuccggauuga

SEQ ID NO: 2113503 - RNA, 19 nt, Homo sapiens
  misc_RNA (1)...(19): siRNA sense strand
gcauacaucugcagggaaa

SEQ ID NO: 2113504 - RNA, 19 nt, Homo sapiens
  misc_RNA (1)...(19): siRNA sense strand
gauggaguauuuaugcaua

SEQ ID NO: 2113505 - RNA, 19 nt, Homo sapiens
  misc_RNA (1)...(19): siRNA sense strand
ggaaaugcuuguuugcuau

SEQ ID NO: 2113506 - RNA, 19 nt, Homo sapiens
  misc_RNA (1)...(19): siRNA sense strand
gaaccuugaugauuagaga

SEQ ID NO: 2113507 - RNA, 19 nt, Homo sapiens
  misc_RNA (1)...(19): siRNA sense strand
cgacauacccagacugaua

SEQ ID NO: 2113508 - RNA, 19 nt, Homo sapiens
  misc_RNA (1)...(19): siRNA sense strand
gaacagagacaagcagaaa

SEQ ID NO: 2113509 - RNA, 19 nt, Homo sapiens
  misc_RNA (1)...(19): siRNA sense strand
gaagaaggucaaagauuaa

SEQ ID NO: 2113510 - RNA, 19 nt, Homo sapiens
  misc_RNA (1)...(19): siRNA sense strand
cgagaaagcuauugagauc

SEQ ID NO: 2113511 - RNA, 19 nt, Homo sapiens
  misc_RNA (1)...(19): siRNA sense strand
agaagccacuguaccauua

SEQ ID NO: 2113512 - RNA, 19 nt, Homo sapiens
  misc_RNA (1)...(19): siRNA sense strand
gguuaaaguuucuauguga

SEQ ID NO: 2113513 - RNA, 19 nt, Homo sapiens
  misc_RNA (1)...(19): siRNA sense strand
ggaaggcuguauacauuau

SEQ ID NO: 2113514 - RNA, 19 nt, Homo sapiens
  misc_RNA (1)...(19): siRNA sense strand
gcaaacaauuggaagaaca

SEQ ID NO: 2113515 - RNA, 19 nt, Homo sapiens
  misc_RNA (1)...(19): siRNA sense strand
agaaugcuguggaaauaua

SEQ ID NO: 2113516 - RNA, 19 nt, Homo sapiens
  misc_RNA (1)...(19): siRNA sense strand
gaaaauggccugaugcuuu

SEQ ID NO: 2113517 - RNA, 19 nt, Homo sapiens
  misc_RNA (1)...(19): siRNA sense strand
ucaccgaccugaucaagaa

SEQ ID NO: 2113518 - RNA, 19 nt, Homo sapiens
  misc_RNA (1)...(19): siRNA sense strand
gcaacgagcaguacaaugu

SEQ ID NO: 2113519 - RNA, 19 nt, Homo sapiens
  misc_RNA (1)...(19): siRNA sense strand
ggcaaagucuauaaucuga

SEQ ID NO: 2113520 - RNA, 19 nt, Homo sapiens
  misc_RNA (1)...(19): siRNA sense strand
gaagcgaucuggccacagu

SEQ ID NO: 2113521 - RNA, 19 nt, Homo sapiens
  misc_RNA (1)...(19): siRNA sense strand
gaauauaagcgcaaacaau

SEQ ID NO: 2113522 - RNA, 19 nt, Homo sapiens
  misc_RNA (1)...(19): siRNA sense strand
cauaugauuucaagaguga

SEQ ID NO: 2113523 - RNA, 19 nt, Homo sapiens
  misc_RNA (1)...(19): siRNA sense strand
caacagaacaauugaugaa

SEQ ID NO: 2113524 - RNA, 19 nt, Homo sapiens
  misc_RNA (1)...(19): siRNA sense strand
ggaaugaguccuagugaga

SEQ ID NO: 2113525 - RNA, 19 nt, Homo sapiens
  misc_RNA (1)...(19): siRNA sense strand
gaagaauccagggacauua

SEQ ID NO: 2113526 - RNA, 19 nt, Homo sapiens
  misc_RNA (1)...(19): siRNA sense strand
ggacuuggaaggcuguaua

SEQ ID NO: 2113527 - RNA, 19 nt, Homo sapiens
  misc_RNA (1)...(19): siRNA sense strand
acauuuggauggaguauuu

SEQ ID NO: 2113528 - RNA, 19 nt, Homo sapiens
  misc_RNA (1)...(19): siRNA sense strand
ggaauggaaaugcuuguuu

SEQ ID NO: 2113529 - RNA, 19 nt, Homo sapiens
  misc_RNA (1)...(19): siRNA sense strand
gaccgaagcucuugguuac

SEQ ID NO: 2113530 - RNA, 19 nt, Homo sapiens
  misc_RNA (1)...(19): siRNA sense strand
caaacucaaugaagcaaga

SEQ ID NO: 2113531 - RNA, 19 nt, Homo sapiens
  misc_RNA (1)...(19): siRNA sense strand
ccgcagggaucuuugaauu

SEQ ID NO: 2113532 - RNA, 19 nt, Homo sapiens
  misc_RNA (1)...(19): siRNA sense strand
gcaccagcauaaagugauu

SEQ ID NO: 2113533 - RNA, 19 nt, Homo sapiens
  misc_RNA (1)...(19): siRNA sense strand
aaacaccuauggccggaua

SEQ ID NO: 2113534 - RNA, 19 nt, Homo sapiens
  misc_RNA (1)...(19): siRNA sense strand
gcagggaucuuugaauugg

SEQ ID NO: 2113535 - RNA, 19 nt, Homo sapiens
  misc_RNA (1)...(19): siRNA sense strand
cuacauaccaucucauauu

SEQ ID NO: 2113536 - RNA, 19 nt, Homo sapiens
  misc_RNA (1)...(19): siRNA sense strand
gaacaggccaaacucaaug

SEQ ID NO: 2113537 - RNA, 19 nt, Homo sapiens
  misc_RNA (1)...(19): siRNA sense strand
gagcagagacaguuagaga

SEQ ID NO: 2113538 - RNA, 19 nt, Homo sapiens
  misc_RNA (1)...(19): siRNA sense strand
gaggaauacuuucauugga

SEQ ID NO: 2113539 - RNA, 19 nt, Homo sapiens
  misc_RNA (1)...(19): siRNA sense strand
ggaagaaaucaaacaagaa

SEQ ID NO: 2113540 - RNA, 19 nt, Homo sapiens
  misc_RNA (1)...(19): siRNA sense strand
gugauugccuuaaagaaug

SEQ ID NO: 2113541 - RNA, 19 nt, Homo sapiens
  misc_RNA (1)...(19): siRNA sense strand
gaagaagacauuccaccaa

SEQ ID NO: 2113542 - RNA, 19 nt, Homo sapiens
  misc_RNA (1)...(19): siRNA sense strand
ggaauauugcuacauacua

SEQ ID NO: 2113543 - RNA, 19 nt, Homo sapiens
  misc_RNA (1)...(19): siRNA sense strand
ugaacaagcucuacuucug

SEQ ID NO: 2113544 - RNA, 19 nt, Homo sapiens
  misc_RNA (1)...(19): siRNA sense strand
aagaagacauuccaccaaa

SEQ ID NO: 2113545 - RNA, 19 nt, Homo sapiens
  misc_RNA (1)...(19): siRNA sense strand
ggcauuagccaaagaacua

SEQ ID NO: 2113546 - RNA, 19 nt, Homo sapiens
  misc_RNA (1)...(19): siRNA sense strand
uggaaaugcuuguuugcua

SEQ ID NO: 2113547 - RNA, 19 nt, Homo sapiens
  misc_RNA (1)...(19): siRNA sense strand
aaacccagaugccacauau

SEQ ID NO: 2113548 - RNA, 19 nt, Homo sapiens
  misc_RNA (1)...(19): siRNA sense strand
caaagucuauaaucugauc

SEQ ID NO: 2113549 - RNA, 19 nt, Homo sapiens
  misc_RNA (1)...(19): siRNA sense strand
aaacaaaccgcccaaugaa

SEQ ID NO: 2113550 - RNA, 19 nt, Homo sapiens
  misc_RNA (1)...(19): siRNA sense strand
auugagagcugcuugguaa

SEQ ID NO: 2113551 - RNA, 19 nt, Homo sapiens
  misc_RNA (1)...(19): siRNA sense strand
ucggaguccuucagcauua

SEQ ID NO: 2113552 - RNA, 19 nt, Homo sapiens
  misc_RNA (1)...(19): siRNA sense strand
uaaaacagauggaauggaa

SEQ ID NO: 2113553 - RNA, 19 nt, Homo sapiens
  misc_RNA (1)...(19): siRNA sense strand
gcucgaagccuggaugaaa

SEQ ID NO: 2113554 - RNA, 19 nt, Homo sapiens
  misc_RNA (1)...(19): siRNA sense strand
gguagaagaaggucaaaga

SEQ ID NO: 2113555 - RNA, 19 nt, Homo sapiens
  misc_RNA (1)...(19): siRNA sense strand
gcuccuaaaccguaucaua

SEQ ID NO: 2113556 - RNA, 19 nt, Homo sapiens
  misc_RNA (1)...(19): siRNA sense strand
aagaauaagcuacgaguuu

SEQ ID NO: 2113557 - RNA, 19 nt, Homo sapiens
  misc_RNA (1)...(19): siRNA sense strand
aggaagaaaucaaacaaga

SEQ ID NO: 2113558 - RNA, 19 nt, Homo sapiens
  misc_RNA (1)...(19): siRNA sense strand
ggaaacaggacauuuggau

SEQ ID NO: 2113559 - RNA, 19 nt, Homo sapiens
  misc_RNA (1)...(19): siRNA sense strand
uaaagaaugcuguggaaau

SEQ ID NO: 2113560 - RNA, 19 nt, Homo sapiens
  misc_RNA (1)...(19): siRNA sense strand
gcagauggaugugcuagag

SEQ ID NO: 2113561 - RNA, 19 nt, Homo sapiens
  misc_RNA (1)...(19): siRNA sense strand
caaugaagcaagaaagauu

SEQ ID NO: 2113562 - RNA, 19 nt, Homo sapiens
  misc_RNA (1)...(19): siRNA sense strand
gaaggugaaaccagaagaa

SEQ ID NO: 2113563 - RNA, 19 nt, Homo sapiens
  misc_RNA (1)...(19): siRNA sense strand
cagaaguuauugccuguga

SEQ ID NO: 2113564 - RNA, 19 nt, Homo sapiens
  misc_RNA (1)...(19): siRNA sense strand
guuauugccugugaugaaa

SEQ ID NO: 2113565 - RNA, 19 nt, Homo sapiens
  misc_RNA (1)...(19): siRNA sense strand
ucaugacccucaacagaaa

SEQ ID NO: 2113566 - RNA, 19 nt, Homo sapiens
  misc_RNA (1)...(19): siRNA sense strand
gagaaaugcccacgucugu

SEQ ID NO: 2113567 - RNA, 19 nt, Homo sapiens
  misc_RNA (1)...(19): siRNA sense strand
uuggaaggcuguauacauu

SEQ ID NO: 2113568 - RNA, 19 nt, Homo sapiens
  misc_RNA (1)...(19): siRNA sense strand
ugaagaggaugaggaauca

SEQ ID NO: 2113569 - RNA, 19 nt, Homo sapiens
  misc_RNA (1)...(19): siRNA sense strand
ccaaaggugccucaaagaa

SEQ ID NO: 2113570 - RNA, 19 nt, Homo sapiens
  misc_RNA (1)...(19): siRNA sense strand
caaggaccauauugauaga

SEQ ID NO: 2113571 - RNA, 19 nt, Homo sapiens
  misc_RNA (1)...(19): siRNA sense strand
gagagcugcuugguaaaga

SEQ ID NO: 2113572 - RNA, 19 nt, Homo sapiens
  misc_RNA (1)...(19): siRNA sense strand
ccgcagcucuguuuacuag

SEQ ID NO: 2113573 - RNA, 19 nt, Homo sapiens
  misc_RNA (1)...(19): siRNA sense strand
acacacugguuuccaugua

SEQ ID NO: 2113574 - RNA, 19 nt, Homo sapiens
  misc_RNA (1)...(19): siRNA sense strand
gcuacgaguuuacuaucuu

SEQ ID NO: 2113575 - RNA, 19 nt, Homo sapiens
  misc_RNA (1)...(19): siRNA sense strand
caagaaacgauucaacuca

SEQ ID NO: 2113576 - RNA, 19 nt, Homo sapiens
  misc_RNA (1)...(19): siRNA sense strand
gaacuuguuggaaauggaa

SEQ ID NO: 2113577 - RNA, 19 nt, Homo sapiens
  misc_RNA (1)...(19): siRNA sense strand
aagaagaggaggagaauga

SEQ ID NO: 2113578 - RNA, 19 nt, Homo sapiens
  misc_RNA (1)...(19): siRNA sense strand
gcaguacaaugugggaaug

SEQ ID NO: 2113579 - RNA, 19 nt, Homo sapiens
  misc_RNA (1)...(19): siRNA sense strand
aaaggugccucaaagaaca

SEQ ID NO: 2113580 - RNA, 19 nt, Homo sapiens
  misc_RNA (1)...(19): siRNA sense strand
gcagaggccuguggagaag

SEQ ID NO: 2113581 - RNA, 19 nt, Homo sapiens
  misc_RNA (1)...(19): siRNA sense strand
ccaaagaacuaagagaacu

SEQ ID NO: 2113582 - RNA, 19 nt, Homo sapiens
  misc_RNA (1)...(19): siRNA sense strand
cuacgaguuuacuaucuuu

SEQ ID NO: 2113583 - RNA, 19 nt, Homo sapiens
  misc_RNA (1)...(19): siRNA sense strand
gaaacgauucaacucagaa

SEQ ID NO: 2113584 - RNA, 19 nt, Homo sapiens
  misc_RNA (1)...(19): siRNA sense strand
cgacacaccagaaaucaga

SEQ ID NO: 2113585 - RNA, 19 nt, Homo sapiens
  misc_RNA (1)...(19): siRNA sense strand
caaugaagaaggugacuga

SEQ ID NO: 2113586 - RNA, 19 nt, Homo sapiens
  misc_RNA (1)...(19): siRNA sense strand
gagagaaacuguauaaauc

SEQ ID NO: 2113587 - RNA, 19 nt, Homo sapiens
  misc_RNA (1)...(19): siRNA sense strand
guacauaccuuaaucaaca

SEQ ID NO: 2113588 - RNA, 19 nt, Homo sapiens
  misc_RNA (1)...(19): siRNA sense strand
ugacaaaccuuaugaaugu

SEQ ID NO: 2113589 - RNA, 19 nt, Homo sapiens
  misc_RNA (1)...(19): siRNA sense strand
gagaaacccuauaauugua

SEQ ID NO: 2113590 - RNA, 19 nt, Homo sapiens
  misc_RNA (1)...(19): siRNA sense strand
ugacagaccuuaugaaugu

SEQ ID NO: 2113591 - RNA, 19 nt, Homo sapiens
  misc_RNA (1)...(19): siRNA sense strand
gagaaacccuaucauugua

SEQ ID NO: 2113592 - RNA, 19 nt, Homo sapiens
  misc_RNA (1)...(19): siRNA sense strand
gagaaacccuaucauugua

SEQ ID NO: 2113593 - RNA, 19 nt, Homo sapiens
  misc_RNA (1)...(19): siRNA sense strand
gagaaacccuaucauugua

SEQ ID NO: 2113594 - RNA, 19 nt, Homo sapiens
  misc_RNA (1)...(19): siRNA sense strand
gagaaacccuauuguugua

SEQ ID NO: 2113595 - RNA, 19 nt, Homo sapiens
  misc_RNA (1)...(19): siRNA sense strand
caacauaaacgaauccaua

SEQ ID NO: 2113596 - RNA, 19 nt, Homo sapiens
  misc_RNA (1)...(19): siRNA sense strand
ugagaaaccuuaucaaugu

SEQ ID NO: 2113597 - RNA, 19 nt, Homo sapiens
  misc_RNA (1)...(19): siRNA sense strand
gugagaagcucuaugauug

SEQ ID NO: 2113598 - RNA, 19 nt, Homo sapiens
  misc_RNA (1)...(19): siRNA sense strand
ugagaaaccuuaugaaugu

SEQ ID NO: 2113599 - RNA, 19 nt, Homo sapiens
  misc_RNA (1)...(19): siRNA sense strand
gaaguaacaucaucucagu

SEQ ID NO: 2113600 - RNA, 19 nt, Homo sapiens
  misc_RNA (1)...(19): siRNA sense strand
gagaaacccuaucacugua

SEQ ID NO: 2113601 - RNA, 19 nt, Homo sapiens
  misc_RNA (1)...(19): siRNA sense strand
gcucagaacuuacacaaca

SEQ ID NO: 2113602 - RNA, 19 nt, Homo sapiens
  misc_RNA (1)...(19): siRNA sense strand
caacaucggagaauucaua

SEQ ID NO: 2113603 - RNA, 19 nt, Homo sapiens
  misc_RNA (1)...(19): siRNA sense strand
ugagaaaccuuaugauugu

SEQ ID NO: 2113604 - RNA, 19 nt, Homo sapiens
  misc_RNA (1)...(19): siRNA sense strand
ugagaaaccuuaugauugu

SEQ ID NO: 2113605 - RNA, 19 nt, Homo sapiens
  misc_RNA (1)...(19): siRNA sense strand
ggagagaaacuguauaaau

SEQ ID NO: 2113606 - RNA, 19 nt, Homo sapiens
  misc_RNA (1)...(19): siRNA sense strand
ugagaaaccuuaucgaugu

SEQ ID NO: 2113607 - RNA, 19 nt, Homo sapiens
  misc_RNA (1)...(19): siRNA sense strand
gagaaacccuaugauugua

SEQ ID NO: 2113608 - RNA, 19 nt, Homo sapiens
  misc_RNA (1)...(19): siRNA sense strand
gagaaacccuaugaaugua

SEQ ID NO: 2113609 - RNA, 19 nt, Homo sapiens
  misc_RNA (1)...(19): siRNA sense strand
gagaaacccuaugaaugua

SEQ ID NO: 2113610 - RNA, 19 nt, Homo sapiens
  misc_RNA (1)...(19): siRNA sense strand
gagaaacccuaugauugua

SEQ ID NO: 2113611 - RNA, 19 nt, Homo sapiens
  misc_RNA (1)...(19): siRNA sense strand
gagaagcucuaugauugua

SEQ ID NO: 2113612 - RNA, 19 nt, Homo sapiens
  misc_RNA (1)...(19): siRNA sense strand
gagaaacccuaugauugua

SEQ ID NO: 2113613 - RNA, 19 nt, Homo sapiens
  misc_RNA (1)...(19): siRNA sense strand
gagaaacccuaugauugua

SEQ ID NO: 2113614 - RNA, 19 nt, Homo sapiens
  misc_RNA (1)...(19): siRNA sense strand
gagaaacccuaugauugua

SEQ ID NO: 2113615 - RNA, 19 nt, Homo sapiens
  misc_RNA (1)...(19): siRNA sense strand
gagaaacccuaugauugua

SEQ ID NO: 2113616 - RNA, 19 nt, Homo sapiens
  misc_RNA (1)...(19): siRNA sense strand
gcucacaucuuauucaaca

SEQ ID NO: 2113617 - RNA, 19 nt, Homo sapiens
  misc_RNA (1)...(19): siRNA sense strand
caacaucaacgaauccaua

SEQ ID NO: 2113618 - RNA, 19 nt, Homo sapiens
  misc_RNA (1)...(19): siRNA sense strand
gagaaacccuaugauggua

SEQ ID NO: 2113619 - RNA, 19 nt, Homo sapiens
  misc_RNA (1)...(19): siRNA sense strand
aaagagcccuggaugguuu

SEQ ID NO: 2113620 - RNA, 19 nt, Homo sapiens
  misc_RNA (1)...(19): siRNA sense strand
gaaggccuuucaucacuuu

SEQ ID NO: 2113621 - RNA, 19 nt, Homo sapiens
  misc_RNA (1)...(19): siRNA sense strand
gaaacccuaugauuguaaa

SEQ ID NO: 2113622 - RNA, 19 nt, Homo sapiens
  misc_RNA (1)...(19): siRNA sense strand
gaaacccuaugauuguaaa

SEQ ID NO: 2113623 - RNA, 19 nt, Homo sapiens
  misc_RNA (1)...(19): siRNA sense strand
caacauuggagaauucaua

SEQ ID NO: 2113624 - RNA, 19 nt, Homo sapiens
  misc_RNA (1)...(19): siRNA sense strand
ggacucagccgacaucaga

SEQ ID NO: 2113625 - RNA, 19 nt, Homo sapiens
  misc_RNA (1)...(19): siRNA sense strand
guacacaccuuacucuaca

SEQ ID NO: 2113626 - RNA, 19 nt, Homo sapiens
  misc_RNA (1)...(19): siRNA sense strand
caacacuacuucaacauca

SEQ ID NO: 2113627 - RNA, 19 nt, Homo sapiens
  misc_RNA (1)...(19): siRNA sense strand
gaaaagcccugugcaugua

SEQ ID NO: 2113628 - RNA, 19 nt, Homo sapiens
  misc_RNA (1)...(19): siRNA sense strand
cgagaaacccuaugaaugu

SEQ ID NO: 2113629 - RNA, 19 nt, Homo sapiens
  misc_RNA (1)...(19): siRNA sense strand
cgagaaacccuaugaaugu

SEQ ID NO: 2113630 - RNA, 19 nt, Homo sapiens
  misc_RNA (1)...(19): siRNA sense strand
gagaaacccuaugacugua

SEQ ID NO: 2113631 - RNA, 19 nt, Homo sapiens
  misc_RNA (1)...(19): siRNA sense strand
gaacaucagcgaauucaca

SEQ ID NO: 2113632 - RNA, 19 nt, Homo sapiens
  misc_RNA (1)...(19): siRNA sense strand
caacaucaacaaauccaua

SEQ ID NO: 2113633 - RNA, 19 nt, Homo sapiens
  misc_RNA (1)...(19): siRNA sense strand
gugagaaacccuauaauug

SEQ ID NO: 2113634 - RNA, 19 nt, Homo sapiens
  misc_RNA (1)...(19): siRNA sense strand
ggugagaaacccuauaauu

SEQ ID NO: 2113635 - RNA, 19 nt, Homo sapiens
  misc_RNA (1)...(19): siRNA sense strand
gagaaaccguaugauugua

SEQ ID NO: 2113636 - RNA, 19 nt, Homo sapiens
  misc_RNA (1)...(19): siRNA sense strand
gagaauucaugaccuaaca

SEQ ID NO: 2113637 - RNA, 19 nt, Homo sapiens
  misc_RNA (1)...(19): siRNA sense strand
gcucaacacuaaaucaaca

SEQ ID NO: 2113638 - RNA, 19 nt, Homo sapiens
  misc_RNA (1)...(19): siRNA sense strand
ucagagaauucaugaccua

SEQ ID NO: 2113639 - RNA, 19 nt, Homo sapiens
  misc_RNA (1)...(19): siRNA sense strand
ugagaaacccuaugaaugu

SEQ ID NO: 2113640 - RNA, 19 nt, Homo sapiens
  misc_RNA (1)...(19): siRNA sense strand
gcucaacacuaauucaaca

SEQ ID NO: 2113641 - RNA, 19 nt, Homo sapiens
  misc_RNA (1)...(19): siRNA sense strand
gauguaagaccaaagauuc

SEQ ID NO: 2113642 - RNA, 19 nt, Homo sapiens
  misc_RNA (1)...(19): siRNA sense strand
gaauucaugaccuaacaua

SEQ ID NO: 2113643 - RNA, 19 nt, Homo sapiens
  misc_RNA (1)...(19): siRNA sense strand
caccaaacaucacaguauu

SEQ ID NO: 2113644 - RNA, 19 nt, Homo sapiens
  misc_RNA (1)...(19): siRNA sense strand
ugagaaaccuuaucauugc

SEQ ID NO: 2113645 - RNA, 19 nt, Homo sapiens
  misc_RNA (1)...(19): siRNA sense strand
ucacucagcucuaauucga

SEQ ID NO: 2113646 - RNA, 19 nt, Homo sapiens
  misc_RNA (1)...(19): siRNA sense strand
caacacuaauucaacauca

SEQ ID NO: 2113647 - RNA, 19 nt, Homo sapiens
  misc_RNA (1)...(19): siRNA sense strand
caacacuaauugaacauca

SEQ ID NO: 2113648 - RNA, 19 nt, Homo sapiens
  misc_RNA (1)...(19): siRNA sense strand
caacacuaauucaacauca

SEQ ID NO: 2113649 - RNA, 19 nt, Homo sapiens
  misc_RNA (1)...(19): siRNA sense strand
caacacuaauucaacauca

SEQ ID NO: 2113650 - RNA, 19 nt, Homo sapiens
  misc_RNA (1)...(19): siRNA sense strand
caacacuaauucaacauca

SEQ ID NO: 2113651 - RNA, 19 nt, Homo sapiens
  misc_RNA (1)...(19): siRNA sense strand
gcacaucuuauucaacauu

SEQ ID NO: 2113652 - RNA, 19 nt, Homo sapiens
  misc_RNA (1)...(19): siRNA sense strand
gugagaaaccuuaugauug

SEQ ID NO: 2113653 - RNA, 19 nt, Homo sapiens
  misc_RNA (1)...(19): siRNA sense strand
gcucagcacuaauucaaca

SEQ ID NO: 2113654 - RNA, 19 nt, Homo sapiens
  misc_RNA (1)...(19): siRNA sense strand
gugagaaaccuuaucauug

SEQ ID NO: 2113655 - RNA, 19 nt, Homo sapiens
  misc_RNA (1)...(19): siRNA sense strand
gcucuaugauuguaaggaa

SEQ ID NO: 2113656 - RNA, 19 nt, Homo sapiens
  misc_RNA (1)...(19): siRNA sense strand
gcucaggacuaauucaaca

SEQ ID NO: 2113657 - RNA, 19 nt, Homo sapiens
  misc_RNA (1)...(19): siRNA sense strand
gugagaaaccuuaugauug

SEQ ID NO: 2113658 - RNA, 19 nt, Homo sapiens
  misc_RNA (1)...(19): siRNA sense strand
gcucaacacuacuucaaca

SEQ ID NO: 2113659 - RNA, 19 nt, Homo sapiens
  misc_RNA (1)...(19): siRNA sense strand
gcucagcacuaauucaaca

SEQ ID NO: 2113660 - RNA, 19 nt, Homo sapiens
  misc_RNA (1)...(19): siRNA sense strand
ggaaugcaaaggccaguuu

SEQ ID NO: 2113661 - RNA, 19 nt, Homo sapiens
  misc_RNA (1)...(19): siRNA sense strand
ggugagaaaccuuaugauu

SEQ ID NO: 2113662 - RNA, 19 nt, Homo sapiens
  misc_RNA (1)...(19): siRNA sense strand
uaaagaaugugggaaaucu

SEQ ID NO: 2113663 - RNA, 19 nt, Homo sapiens
  misc_RNA (1)...(19): siRNA sense strand
uaaagaaugugggaaaucu

SEQ ID NO: 2113664 - RNA, 19 nt, Homo sapiens
  misc_RNA (1)...(19): siRNA sense strand
ggugagaaaccuuaucauu

SEQ ID NO: 2113665 - RNA, 19 nt, Homo sapiens
  misc_RNA (1)...(19): siRNA sense strand
uaaagaaugugggaaaucu

SEQ ID NO: 2113666 - RNA, 19 nt, Homo sapiens
  misc_RNA (1)...(19): siRNA sense strand
ggugagaaaccuuaugauu

SEQ ID NO: 2113667 - RNA, 19 nt, Homo sapiens
  misc_RNA (1)...(19): siRNA sense strand
ugagaaacccuauaauugu

SEQ ID NO: 2113668 - RNA, 19 nt, Homo sapiens
  misc_RNA (1)...(19): siRNA sense strand
uaaagaaugugggaaaucu

SEQ ID NO: 2113669 - RNA, 19 nt, Homo sapiens
  misc_RNA (1)...(19): siRNA sense strand
gagauguaaugauggagaa

SEQ ID NO: 2113670 - RNA, 19 nt, Homo sapiens
  misc_RNA (1)...(19): siRNA sense strand
ggaaggccuuucaucacuu

SEQ ID NO: 2113671 - RNA, 19 nt, Homo sapiens
  misc_RNA (1)...(19): siRNA sense strand
gcgagaaacccuaugaaug

SEQ ID NO: 2113672 - RNA, 19 nt, Homo sapiens
  misc_RNA (1)...(19): siRNA sense strand
gggaaggccuuuagauguc

SEQ ID NO: 2113673 - RNA, 19 nt, Homo sapiens
  misc_RNA (1)...(19): siRNA sense strand
gagaaaccuuaugauugua

SEQ ID NO: 2113674 - RNA, 19 nt, Homo sapiens
  misc_RNA (1)...(19): siRNA sense strand
gcgagaaacccuaugaaug

SEQ ID NO: 2113675 - RNA, 19 nt, Homo sapiens
  misc_RNA (1)...(19): siRNA sense strand
gaugagaaacccuaugaug

SEQ ID NO: 2113676 - RNA, 19 nt, Homo sapiens
  misc_RNA (1)...(19): siRNA sense strand
gagaaaccuuaugaaugua

SEQ ID NO: 2113677 - RNA, 19 nt, Homo sapiens
  misc_RNA (1)...(19): siRNA sense strand
gagaaaccuuaugauugua

SEQ ID NO: 2113678 - RNA, 19 nt, Homo sapiens
  misc_RNA (1)...(19): siRNA sense strand
gcucagcacuacuucaaca

SEQ ID NO: 2113679 - RNA, 19 nt, Homo sapiens
  misc_RNA (1)...(19): siRNA sense strand
gugagaaacccuaugauug

SEQ ID NO: 2113680 - RNA, 19 nt, Homo sapiens
  misc_RNA (1)...(19): siRNA sense strand
caacaucggcgaauucaca

SEQ ID NO: 2113681 - RNA, 19 nt, Homo sapiens
  misc_RNA (1)...(19): siRNA sense strand
gugagaaacccuaucauug

SEQ ID NO: 2113682 - RNA, 19 nt, Homo sapiens
  misc_RNA (1)...(19): siRNA sense strand
gugagaaacccuaugauug

SEQ ID NO: 2113683 - RNA, 19 nt, Homo sapiens
  misc_RNA (1)...(19): siRNA sense strand
gaaagagcccuggaugguu

SEQ ID NO: 2113684 - RNA, 19 nt, Homo sapiens
  misc_RNA (1)...(19): siRNA sense strand
gugagaaacccuaugauug

SEQ ID NO: 2113685 - RNA, 19 nt, Homo sapiens
  misc_RNA (1)...(19): siRNA sense strand
gugagaaacccuaucauug

SEQ ID NO: 2113686 - RNA, 19 nt, Homo sapiens
  misc_RNA (1)...(19): siRNA sense strand
caaagaagauuaagacuca

SEQ ID NO: 2113687 - RNA, 19 nt, Homo sapiens
  misc_RNA (1)...(19): siRNA sense strand
agaagaaucugacuacauu

SEQ ID NO: 2113688 - RNA, 19 nt, Homo sapiens
  misc_RNA (1)...(19): siRNA sense strand
gaucaaaccucaccucucu

SEQ ID NO: 2113689 - RNA, 19 nt, Homo sapiens
  misc_RNA (1)...(19): siRNA sense strand
gaagaugacauggaaauuu

SEQ ID NO: 2113690 - RNA, 19 nt, Homo sapiens
  misc_RNA (1)...(19): siRNA sense strand
ggucaaugcuuucauccua

SEQ ID NO: 2113691 - RNA, 19 nt, Homo sapiens
  misc_RNA (1)...(19): siRNA sense strand
ccuagaagauguacaguuu

SEQ ID NO: 2113692 - RNA, 19 nt, Homo sapiens
  misc_RNA (1)...(19): siRNA sense strand
gaagcaaguuuaccuaaca

SEQ ID NO: 2113693 - RNA, 19 nt, Homo sapiens
  misc_RNA (1)...(19): siRNA sense strand
gccaagaccugcucuauuc

SEQ ID NO: 2113694 - RNA, 19 nt, Homo sapiens
  misc_RNA (1)...(19): siRNA sense strand
ggacaagaaugggccagua

SEQ ID NO: 2113695 - RNA, 19 nt, Homo sapiens
  misc_RNA (1)...(19): siRNA sense strand
gcaauaaucacagcguuua

SEQ ID NO: 2113696 - RNA, 19 nt, Homo sapiens
  misc_RNA (1)...(19): siRNA sense strand
aaaccucaccucucuauua

SEQ ID NO: 2113697 - RNA, 19 nt, Homo sapiens
  misc_RNA (1)...(19): siRNA sense strand
caaaugagacccuucaaga

SEQ ID NO: 2113698 - RNA, 19 nt, Homo sapiens
  misc_RNA (1)...(19): siRNA sense strand
gagguguucuucuguauau

SEQ ID NO: 2113699 - RNA, 19 nt, Homo sapiens
  misc_RNA (1)...(19): siRNA sense strand
cagaagauauuaagaaguc

SEQ ID NO: 2113700 - RNA, 19 nt, Homo sapiens
  misc_RNA (1)...(19): siRNA sense strand
gaagguccaugcagaucaa

SEQ ID NO: 2113701 - RNA, 19 nt, Homo sapiens
  misc_RNA (1)...(19): siRNA sense strand
ccacugcccuugacuuaga

SEQ ID NO: 2113702 - RNA, 19 nt, Homo sapiens
  misc_RNA (1)...(19): siRNA sense strand
ggaaaaggcuggauuugga

SEQ ID NO: 2113703 - RNA, 19 nt, Homo sapiens
  misc_RNA (1)...(19): siRNA sense strand
cucuagagcuuccaaauaa

SEQ ID NO: 2113704 - RNA, 19 nt, Homo sapiens
  misc_RNA (1)...(19): siRNA sense strand
aaaugaagaugacauggaa

SEQ ID NO: 2113705 - RNA, 19 nt, Homo sapiens
  misc_RNA (1)...(19): siRNA sense strand
uggaauggcagaugauuua

SEQ ID NO: 2113706 - RNA, 19 nt, Homo sapiens
  misc_RNA (1)...(19): siRNA sense strand
gaaaauugccacugcuuua

SEQ ID NO: 2113707 - RNA, 19 nt, Homo sapiens
  misc_RNA (1)...(19): siRNA sense strand
guaaugggcuugacaucuc

SEQ ID NO: 2113708 - RNA, 19 nt, Homo sapiens
  misc_RNA (1)...(19): siRNA sense strand
cugacuacauuacccauua

SEQ ID NO: 2113709 - RNA, 19 nt, Homo sapiens
  misc_RNA (1)...(19): siRNA sense strand
caucaaccaucuuggaguu

SEQ ID NO: 2113710 - RNA, 19 nt, Homo sapiens
  misc_RNA (1)...(19): siRNA sense strand
gauacaaggugaugcugau

SEQ ID NO: 2113711 - RNA, 19 nt, Homo sapiens
  misc_RNA (1)...(19): siRNA sense strand
gcuagacggugcugagaau

SEQ ID NO: 2113712 - RNA, 19 nt, Homo sapiens
  misc_RNA (1)...(19): siRNA sense strand
gagaggauuucaagaaggu

SEQ ID NO: 2113713 - RNA, 19 nt, Homo sapiens
  misc_RNA (1)...(19): siRNA sense strand
gaagaagccagaaaagaua

SEQ ID NO: 2113714 - RNA, 19 nt, Homo sapiens
  misc_RNA (1)...(19): siRNA sense strand
gaagaaucugacuacauua

SEQ ID NO: 2113715 - RNA, 19 nt, Homo sapiens
  misc_RNA (1)...(19): siRNA sense strand
gaccugcucuauucauaug

SEQ ID NO: 2113716 - RNA, 19 nt, Homo sapiens
  misc_RNA (1)...(19): siRNA sense strand
gagcagcaguggucaaugc

SEQ ID NO: 2113717 - RNA, 19 nt, Homo sapiens
  misc_RNA (1)...(19): siRNA sense strand
gaugcgaccugcuaaugau

SEQ ID NO: 2113718 - RNA, 19 nt, Homo sapiens
  misc_RNA (1)...(19): siRNA sense strand
gaugagaugcgaccugcua

SEQ ID NO: 2113719 - RNA, 19 nt, Homo sapiens
  misc_RNA (1)...(19): siRNA sense strand
guuauggaauggcagauga

SEQ ID NO: 2113720 - RNA, 19 nt, Homo sapiens
  misc_RNA (1)...(19): siRNA sense strand
caguugauccucaguuaua

SEQ ID NO: 2113721 - RNA, 19 nt, Homo sapiens
  misc_RNA (1)...(19): siRNA sense strand
gggagaggauuucaagaag

SEQ ID NO: 2113722 - RNA, 19 nt, Homo sapiens
  misc_RNA (1)...(19): siRNA sense strand
gagagaaugaagcaaguuu

SEQ ID NO: 2113723 - RNA, 19 nt, Homo sapiens
  misc_RNA (1)...(19): siRNA sense strand
gaucgcacuccugaaauua

SEQ ID NO: 2113724 - RNA, 19 nt, Homo sapiens
  misc_RNA (1)...(19): siRNA sense strand
ucucaaggcugaagucauc

SEQ ID NO: 2113725 - RNA, 19 nt, Homo sapiens
  misc_RNA (1)...(19): siRNA sense strand
uagaagauguacaguuugu

SEQ ID NO: 2113726 - RNA, 19 nt, Homo sapiens
  misc_RNA (1)...(19): siRNA sense strand
gagcaaucgcugcaacuuu

SEQ ID NO: 2113727 - RNA, 19 nt, Homo sapiens
  misc_RNA (1)...(19): siRNA sense strand
cagcucagguuuacuucaa

SEQ ID NO: 2113728 - RNA, 19 nt, Homo sapiens
  misc_RNA (1)...(19): siRNA sense strand
caagaaugggccaguagua

SEQ ID NO: 2113729 - RNA, 19 nt, Homo sapiens
  misc_RNA (1)...(19): siRNA sense strand
aagaugacauggaaauuuc

SEQ ID NO: 2113730 - RNA, 19 nt, Homo sapiens
  misc_RNA (1)...(19): siRNA sense strand
gaacaguugauccucaguu

SEQ ID NO: 2113731 - RNA, 19 nt, Homo sapiens
  misc_RNA (1)...(19): siRNA sense strand
uaucgauccuugugauuug

SEQ ID NO: 2113732 - RNA, 19 nt, Homo sapiens
  misc_RNA (1)...(19): siRNA sense strand
aacaguugauccucaguua

SEQ ID NO: 2113733 - RNA, 19 nt, Homo sapiens
  misc_RNA (1)...(19): siRNA sense strand
gaacagcuuuuggcaauau

SEQ ID NO: 2113734 - RNA, 19 nt, Homo sapiens
  misc_RNA (1)...(19): siRNA sense strand
ggcagaagauauuaagaag

SEQ ID NO: 2113735 - RNA, 19 nt, Homo sapiens
  misc_RNA (1)...(19): siRNA sense strand
aagcaggacuugauguguu

SEQ ID NO: 2113736 - RNA, 19 nt, Homo sapiens
  misc_RNA (1)...(19): siRNA sense strand
caaccuucaugaaaccauu

SEQ ID NO: 2113737 - RNA, 19 nt, Homo sapiens
  misc_RNA (1)...(19): siRNA sense strand
acaaggugaugcugauuau

SEQ ID NO: 2113738 - RNA, 19 nt, Homo sapiens
  misc_RNA (1)...(19): siRNA sense strand
guauaucgauccuugugau

SEQ ID NO: 2113739 - RNA, 19 nt, Homo sapiens
  misc_RNA (1)...(19): siRNA sense strand
ucacaguacuuagacaaug

SEQ ID NO: 2113740 - RNA, 19 nt, Homo sapiens
  misc_RNA (1)...(19): siRNA sense strand
ggagguguucuucuguaua

SEQ ID NO: 2113741 - RNA, 19 nt, Homo sapiens
  misc_RNA (1)...(19): siRNA sense strand
gaauggcagaugauuuaaa

SEQ ID NO: 2113742 - RNA, 19 nt, Homo sapiens
  misc_RNA (1)...(19): siRNA sense strand
ggacauggagaaggaacua

SEQ ID NO: 2113743 - RNA, 19 nt, Homo sapiens
  misc_RNA (1)...(19): siRNA sense strand
gauauagcuuuagaaguuc

SEQ ID NO: 2113744 - RNA, 19 nt, Homo sapiens
  misc_RNA (1)...(19): siRNA sense strand
ccucaccucucuauuagug

SEQ ID NO: 2113745 - RNA, 19 nt, Homo sapiens
  misc_RNA (1)...(19): siRNA sense strand
cacaguacuuagacaauga

SEQ ID NO: 2113746 - RNA, 19 nt, Homo sapiens
  misc_RNA (1)...(19): siRNA sense strand
gauccucaguuauaucaag

SEQ ID NO: 2113747 - RNA, 19 nt, Homo sapiens
  misc_RNA (1)...(19): siRNA sense strand
agacaaugaugaccuucaa

SEQ ID NO: 2113748 - RNA, 19 nt, Homo sapiens
  misc_RNA (1)...(19): siRNA sense strand
caauaucaguucuauacag

SEQ ID NO: 2113749 - RNA, 19 nt, Homo sapiens
  misc_RNA (1)...(19): siRNA sense strand
uaacacgucuuugcaaggu

SEQ ID NO: 2113750 - RNA, 19 nt, Homo sapiens
  misc_RNA (1)...(19): siRNA sense strand
uuaauucagcucagguuua

SEQ ID NO: 2113751 - RNA, 19 nt, Homo sapiens
  misc_RNA (1)...(19): siRNA sense strand
aaagauggccuaucagaag

SEQ ID NO: 2113752 - RNA, 19 nt, Homo sapiens
  misc_RNA (1)...(19): siRNA sense strand
ccagaaaccaauaucaguu

SEQ ID NO: 2113753 - RNA, 19 nt, Homo sapiens
  misc_RNA (1)...(19): siRNA sense strand
acacgucuuugcaagguaa

SEQ ID NO: 2113754 - RNA, 19 nt, Homo sapiens
  misc_RNA (1)...(19): siRNA sense strand
gccaaaagcuagaaccaaa

SEQ ID NO: 2113755 - RNA, 19 nt, Homo sapiens
  misc_RNA (1)...(19): siRNA sense strand
ccaaagacugugaauccua

SEQ ID NO: 2113756 - RNA, 19 nt, Homo sapiens
  misc_RNA (1)...(19): siRNA sense strand
aauugccacugcuuuauaa

SEQ ID NO: 2113757 - RNA, 19 nt, Homo sapiens
  misc_RNA (1)...(19): siRNA sense strand
gucaaugcuuucauccuaa

SEQ ID NO: 2113758 - RNA, 19 nt, Homo sapiens
  misc_RNA (1)...(19): siRNA sense strand
aagaccugcucuauucaua

SEQ ID NO: 2113759 - RNA, 19 nt, Homo sapiens
  misc_RNA (1)...(19): siRNA sense strand
cauuagaggguccaaguuu

SEQ ID NO: 2113760 - RNA, 19 nt, Homo sapiens
  misc_RNA (1)...(19): siRNA sense strand
aaggugaugcugauuauuu

SEQ ID NO: 2113761 - RNA, 19 nt, Homo sapiens
  misc_RNA (1)...(19): siRNA sense strand
gaaaccaauaucaguucua

SEQ ID NO: 2113762 - RNA, 19 nt, Homo sapiens
  misc_RNA (1)...(19): siRNA sense strand
acaaauugcccuucagaug

SEQ ID NO: 2113763 - RNA, 19 nt, Homo sapiens
  misc_RNA (1)...(19): siRNA sense strand
gcaacugguaguagagaaa

SEQ ID NO: 2113764 - RNA, 19 nt, Homo sapiens
  misc_RNA (1)...(19): siRNA sense strand
ccagaccgaacuauuguuu

SEQ ID NO: 2113765 - RNA, 19 nt, Homo sapiens
  misc_RNA (1)...(19): siRNA sense strand
gcaugcaaguucagacagu

SEQ ID NO: 2113766 - RNA, 19 nt, Homo sapiens
  misc_RNA (1)...(19): siRNA sense strand
gggagagaaugaagcaagu

SEQ ID NO: 2113767 - RNA, 19 nt, Homo sapiens
  misc_RNA (1)...(19): siRNA sense strand
gaacuagaggagucugguu

SEQ ID NO: 2113768 - RNA, 19 nt, Homo sapiens
  misc_RNA (1)...(19): siRNA sense strand
ccagaccgguauaucauag

SEQ ID NO: 2113769 - RNA, 19 nt, Homo sapiens
  misc_RNA (1)...(19): siRNA sense strand
gcagugaagaagccagaaa

SEQ ID NO: 2113770 - RNA, 19 nt, Homo sapiens
  misc_RNA (1)...(19): siRNA sense strand
caagaagaaucugacuaca

SEQ ID NO: 2113771 - RNA, 19 nt, Homo sapiens
  misc_RNA (1)...(19): siRNA sense strand
ucucuagagcuuccaaaua

SEQ ID NO: 2113772 - RNA, 19 nt, Homo sapiens
  misc_RNA (1)...(19): siRNA sense strand
agaucgcacuccugaaauu

SEQ ID NO: 2113773 - RNA, 19 nt, Homo sapiens
  misc_RNA (1)...(19): siRNA sense strand
cgaugugaguuauggaaug

SEQ ID NO: 2113774 - RNA, 19 nt, Homo sapiens
  misc_RNA (1)...(19): siRNA sense strand
ugacuacauuacccauuau

SEQ ID NO: 2113775 - RNA, 19 nt, Homo sapiens
  misc_RNA (1)...(19): siRNA sense strand
ucagaaauuugguacaacu

SEQ ID NO: 2113776 - RNA, 19 nt, Homo sapiens
  misc_RNA (1)...(19): siRNA sense strand
uaauucagcucagguuuac

SEQ ID NO: 2113777 - RNA, 19 nt, Homo sapiens
  misc_RNA (1)...(19): siRNA sense strand
gagaugcgaccugcuaaug

SEQ ID NO: 2113778 - RNA, 19 nt, Homo sapiens
  misc_RNA (1)...(19): siRNA sense strand
gagaccagaccgaacuauu

SEQ ID NO: 2113779 - RNA, 19 nt, Homo sapiens
  misc_RNA (1)...(19): siRNA sense strand
gacauggaaauuucaaaga

SEQ ID NO: 2113780 - RNA, 19 nt, Homo sapiens
  misc_RNA (1)...(19): siRNA sense strand
uacaaggugaugcugauua

SEQ ID NO: 2113781 - RNA, 19 nt, Homo sapiens
  misc_RNA (1)...(19): siRNA sense strand
gaccagaccgaacuauugu

SEQ ID NO: 2113782 - RNA, 19 nt, Homo sapiens
  misc_RNA (1)...(19): siRNA sense strand
gagcuuccaaauaaugaaa

SEQ ID NO: 2113783 - RNA, 19 nt, Homo sapiens
  misc_RNA (1)...(19): siRNA sense strand
aaauugccacugcuuuaua

SEQ ID NO: 2113784 - RNA, 19 nt, Homo sapiens
  misc_RNA (1)...(19): siRNA sense strand
ggaauggcagaugauuuaa

SEQ ID NO: 2113785 - RNA, 19 nt, Homo sapiens
  misc_RNA (1)...(19): siRNA sense strand
gaugugaguuauggaaugg

SEQ ID NO: 2113786 - RNA, 19 nt, Homo sapiens
  misc_RNA (1)...(19): siRNA sense strand
gaagagggauggagacaua

SEQ ID NO: 2113787 - RNA, 19 nt, Homo sapiens
  misc_RNA (1)...(19): siRNA sense strand
uaagaaagcucaggaguua

SEQ ID NO: 2113788 - RNA, 19 nt, Homo sapiens
  misc_RNA (1)...(19): siRNA sense strand
gagaaaugcuucacaguaa

SEQ ID NO: 2113789 - RNA, 19 nt, Homo sapiens
  misc_RNA (1)...(19): siRNA sense strand
uaacugugcuuuggaauua

SEQ ID NO: 2113790 - RNA, 19 nt, Homo sapiens
  misc_RNA (1)...(19): siRNA sense strand
gacaagaacucauuaaaca

SEQ ID NO: 2113791 - RNA, 19 nt, Homo sapiens
  misc_RNA (1)...(19): siRNA sense strand
ggaaguagauguucaacug

SEQ ID NO: 2113792 - RNA, 19 nt, Homo sapiens
  misc_RNA (1)...(19): siRNA sense strand
gaagagaaagcuacuaauu

SEQ ID NO: 2113793 - RNA, 19 nt, Homo sapiens
  misc_RNA (1)...(19): siRNA sense strand
gcauggaacuuaccuaugu

SEQ ID NO: 2113794 - RNA, 19 nt, Homo sapiens
  misc_RNA (1)...(19): siRNA sense strand
ugucaaagcugaaggauga

SEQ ID NO: 2113795 - RNA, 19 nt, Homo sapiens
  misc_RNA (1)...(19): siRNA sense strand
gaauagaacuuccagugau

SEQ ID NO: 2113796 - RNA, 19 nt, Homo sapiens
  misc_RNA (1)...(19): siRNA sense strand
gaacagcuguaacaacaau

SEQ ID NO: 2113797 - RNA, 19 nt, Homo sapiens
  misc_RNA (1)...(19): siRNA sense strand
agagaaagcuacuaauuug

SEQ ID NO: 2113798 - RNA, 19 nt, Homo sapiens
  misc_RNA (1)...(19): siRNA sense strand
aaagugagauugggaauaa

SEQ ID NO: 2113799 - RNA, 19 nt, Homo sapiens
  misc_RNA (1)...(19): siRNA sense strand
gauaugaaauucugacugu

SEQ ID NO: 2113800 - RNA, 19 nt, Homo sapiens
  misc_RNA (1)...(19): siRNA sense strand
uaaaggagauaacugagaa

SEQ ID NO: 2113801 - RNA, 19 nt, Homo sapiens
  misc_RNA (1)...(19): siRNA sense strand
gaacaagacaucaaacuuc

SEQ ID NO: 2113802 - RNA, 19 nt, Homo sapiens
  misc_RNA (1)...(19): siRNA sense strand
gaaagacaagaacucauua

SEQ ID NO: 2113803 - RNA, 19 nt, Homo sapiens
  misc_RNA (1)...(19): siRNA sense strand
gaaggacauucaugaagaa

SEQ ID NO: 2113804 - RNA, 19 nt, Homo sapiens
  misc_RNA (1)...(19): siRNA sense strand
gaagaaaucaagguucaua

SEQ ID NO: 2113805 - RNA, 19 nt, Homo sapiens
  misc_RNA (1)...(19): siRNA sense strand
aauaaaggcugcucaagaa

SEQ ID NO: 2113806 - RNA, 19 nt, Homo sapiens
  misc_RNA (1)...(19): siRNA sense strand
ggacguauuccuagaagua

SEQ ID NO: 2113807 - RNA, 19 nt, Homo sapiens
  misc_RNA (1)...(19): siRNA sense strand
ugaaacaucucaaccauca

SEQ ID NO: 2113808 - RNA, 19 nt, Homo sapiens
  misc_RNA (1)...(19): siRNA sense strand
acacaggccuauuauguaa

SEQ ID NO: 2113809 - RNA, 19 nt, Homo sapiens
  misc_RNA (1)...(19): siRNA sense strand
ggacauucaugaagaaaca

SEQ ID NO: 2113810 - RNA, 19 nt, Homo sapiens
  misc_RNA (1)...(19): siRNA sense strand
ggacuugcguagaaucaaa

SEQ ID NO: 2113811 - RNA, 19 nt, Homo sapiens
  misc_RNA (1)...(19): siRNA sense strand
gaacuuaggaaauuguuga

SEQ ID NO: 2113812 - RNA, 19 nt, Homo sapiens
  misc_RNA (1)...(19): siRNA sense strand
gcaaggucaucuaggagua

SEQ ID NO: 2113813 - RNA, 19 nt, Homo sapiens
  misc_RNA (1)...(19): siRNA sense strand
gaaauucugacuguuguua

SEQ ID NO: 2113814 - RNA, 19 nt, Homo sapiens
  misc_RNA (1)...(19): siRNA sense strand
ggaaauuguugauauccuu

SEQ ID NO: 2113815 - RNA, 19 nt, Homo sapiens
  misc_RNA (1)...(19): siRNA sense strand
agaaucagcucauaaagau

SEQ ID NO: 2113816 - RNA, 19 nt, Homo sapiens
  misc_RNA (1)...(19): siRNA sense strand
gaaagcuacuaauuuggaa

SEQ ID NO: 2113817 - RNA, 19 nt, Homo sapiens
  misc_RNA (1)...(19): siRNA sense strand
acaaugaacuccaauaugg

SEQ ID NO: 2113818 - RNA, 19 nt, Homo sapiens
  misc_RNA (1)...(19): siRNA sense strand
aguaguagcucuaguaaug

SEQ ID NO: 2113819 - RNA, 19 nt, Homo sapiens
  misc_RNA (1)...(19): siRNA sense strand
caucaaacuucgugaaaug

SEQ ID NO: 2113820 - RNA, 19 nt, Homo sapiens
  misc_RNA (1)...(19): siRNA sense strand
ugaagaaacagcaagguua

SEQ ID NO: 2113821 - RNA, 19 nt, Homo sapiens
  misc_RNA (1)...(19): siRNA sense strand
ggaagaacaagacaucaaa

SEQ ID NO: 2113822 - RNA, 19 nt, Homo sapiens
  misc_RNA (1)...(19): siRNA sense strand
gaagaucaguugucaaagc

SEQ ID NO: 2113823 - RNA, 19 nt, Homo sapiens
  misc_RNA (1)...(19): siRNA sense strand
uaaagaaggacauucauga

SEQ ID NO: 2113824 - RNA, 19 nt, Homo sapiens
  misc_RNA (1)...(19): siRNA sense strand
ggaauaacacagaguuuga

SEQ ID NO: 2113825 - RNA, 19 nt, Homo sapiens
  misc_RNA (1)...(19): siRNA sense strand
ugagauggcuucaauacug

SEQ ID NO: 2113826 - RNA, 19 nt, Homo sapiens
  misc_RNA (1)...(19): siRNA sense strand
gaaauucaacggcuggaaa

SEQ ID NO: 2113827 - RNA, 19 nt, Homo sapiens
  misc_RNA (1)...(19): siRNA sense strand
agaaagaacuugauaaagc

SEQ ID NO: 2113828 - RNA, 19 nt, Homo sapiens
  misc_RNA (1)...(19): siRNA sense strand
ccaugaaacuaguagaauu

SEQ ID NO: 2113829 - RNA, 19 nt, Homo sapiens
  misc_RNA (1)...(19): siRNA sense strand
uaacacagaguuugagaaa

SEQ ID NO: 2113830 - RNA, 19 nt, Homo sapiens
  misc_RNA (1)...(19): siRNA sense strand
caaacauacuuucaacaga

SEQ ID NO: 2113831 - RNA, 19 nt, Homo sapiens
  misc_RNA (1)...(19): siRNA sense strand
ggauaaagcagcacaagau

SEQ ID NO: 2113832 - RNA, 19 nt, Homo sapiens
  misc_RNA (1)...(19): siRNA sense strand
ggaaauccgucuuuugaaa

SEQ ID NO: 2113833 - RNA, 19 nt, Homo sapiens
  misc_RNA (1)...(19): siRNA sense strand
aaacaaugcuugcgucaca

SEQ ID NO: 2113834 - RNA, 19 nt, Homo sapiens
  misc_RNA (1)...(19): siRNA sense strand
caagaaggcacauaguaaa

SEQ ID NO: 2113835 - RNA, 19 nt, Homo sapiens
  misc_RNA (1)...(19): siRNA sense strand
caagggagcgugagacuga

SEQ ID NO: 2113836 - RNA, 19 nt, Homo sapiens
  misc_RNA (1)...(19): siRNA sense strand
cgagaaaugcuucacagua

SEQ ID NO: 2113837 - RNA, 19 nt, Homo sapiens
  misc_RNA (1)...(19): siRNA sense strand
cuauguaacuguuucugua

SEQ ID NO: 2113838 - RNA, 19 nt, Homo sapiens
  misc_RNA (1)...(19): siRNA sense strand
ggccauugcucaaagagaa

SEQ ID NO: 2113839 - RNA, 19 nt, Homo sapiens
  misc_RNA (1)...(19): siRNA sense strand
uaagcaggauuugaugaua

SEQ ID NO: 2113840 - RNA, 19 nt, Homo sapiens
  misc_RNA (1)...(19): siRNA sense strand
agaaggacauucaugaaga

SEQ ID NO: 2113841 - RNA, 19 nt, Homo sapiens
  misc_RNA (1)...(19): siRNA sense strand
agggugagcuggauucuuu

SEQ ID NO: 2113842 - RNA, 19 nt, Homo sapiens
  misc_RNA (1)...(19): siRNA sense strand
gaaagugagauugggaaua

SEQ ID NO: 2113843 - RNA, 19 nt, Homo sapiens
  misc_RNA (1)...(19): siRNA sense strand
gcacaacaagaugauaaua

SEQ ID NO: 2113844 - RNA, 19 nt, Homo sapiens
  misc_RNA (1)...(19): siRNA sense strand
ccagaaguaugcacaacaa

SEQ ID NO: 2113845 - RNA, 19 nt, Homo sapiens
  misc_RNA (1)...(19): siRNA sense strand
uugagaagcugaagaauag

SEQ ID NO: 2113846 - RNA, 19 nt, Homo sapiens
  misc_RNA (1)...(19): siRNA sense strand
ucaagaaggcacauaguaa

SEQ ID NO: 2113847 - RNA, 19 nt, Homo sapiens
  misc_RNA (1)...(19): siRNA sense strand
aagcaagagcucucaauua

SEQ ID NO: 2113848 - RNA, 19 nt, Homo sapiens
  misc_RNA (1)...(19): siRNA sense strand
ggccuccucuucacuagua

SEQ ID NO: 2113849 - RNA, 19 nt, Homo sapiens
  misc_RNA (1)...(19): siRNA sense strand
caaacuucgugaaaugaaa

SEQ ID NO: 2113850 - RNA, 19 nt, Homo sapiens
  misc_RNA (1)...(19): siRNA sense strand
aaacacaggccuauuaugu

SEQ ID NO: 2113851 - RNA, 19 nt, Homo sapiens
  misc_RNA (1)...(19): siRNA sense strand
gcaauuauacacagcaaug

SEQ ID NO: 2113852 - RNA, 19 nt, Homo sapiens
  misc_RNA (1)...(19): siRNA sense strand
gaaauugaaggaacucguu

SEQ ID NO: 2113853 - RNA, 19 nt, Homo sapiens
  misc_RNA (1)...(19): siRNA sense strand
gaacuuccagugauuuaga

SEQ ID NO: 2113854 - RNA, 19 nt, Homo sapiens
  misc_RNA (1)...(19): siRNA sense strand
cagcucaguauucauauua

SEQ ID NO: 2113855 - RNA, 19 nt, Homo sapiens
  misc_RNA (1)...(19): siRNA sense strand
gaucagagaaagaacuuga

SEQ ID NO: 2113856 - RNA, 19 nt, Homo sapiens
  misc_RNA (1)...(19): siRNA sense strand
gugaugaacugaaugaucu

SEQ ID NO: 2113857 - RNA, 19 nt, Homo sapiens
  misc_RNA (1)...(19): siRNA sense strand
caagaugaguuacgugagu

SEQ ID NO: 2113858 - RNA, 19 nt, Homo sapiens
  misc_RNA (1)...(19): siRNA sense strand
agaacaagcuacuggaaga

SEQ ID NO: 2113859 - RNA, 19 nt, Homo sapiens
  misc_RNA (1)...(19): siRNA sense strand
gaacacaauagaacagaug

SEQ ID NO: 2113860 - RNA, 19 nt, Homo sapiens
  misc_RNA (1)...(19): siRNA sense strand
gaagagcgaacugaagaaa

SEQ ID NO: 2113861 - RNA, 19 nt, Homo sapiens
  misc_RNA (1)...(19): siRNA sense strand
uggaagauaugcuaaagga

SEQ ID NO: 2113862 - RNA, 19 nt, Homo sapiens
  misc_RNA (1)...(19): siRNA sense strand
gcuacuaauuuggaagaua

SEQ ID NO: 2113863 - RNA, 19 nt, Homo sapiens
  misc_RNA (1)...(19): siRNA sense strand
gcuggagcguuuccuguuu

SEQ ID NO: 2113864 - RNA, 19 nt, Homo sapiens
  misc_RNA (1)...(19): siRNA sense strand
cggagaaugucacgguuaa

SEQ ID NO: 2113865 - RNA, 19 nt, Homo sapiens
  misc_RNA (1)...(19): siRNA sense strand
gaacgaggagaacaagcua

SEQ ID NO: 2113866 - RNA, 19 nt, Homo sapiens
  misc_RNA (1)...(19): siRNA sense strand
caagagcucucaauuacac

SEQ ID NO: 2113867 - RNA, 19 nt, Homo sapiens
  misc_RNA (1)...(19): siRNA sense strand
uaauaaaggcugcucaaga

SEQ ID NO: 2113868 - RNA, 19 nt, Homo sapiens
  misc_RNA (1)...(19): siRNA sense strand
gggagaaauuaauucagaa

SEQ ID NO: 2113869 - RNA, 19 nt, Homo sapiens
  misc_RNA (1)...(19): siRNA sense strand
gcagcucaguauucauauu

SEQ ID NO: 2113870 - RNA, 19 nt, Homo sapiens
  misc_RNA (1)...(19): siRNA sense strand
gaaacagcaagguuacaaa

SEQ ID NO: 2113871 - RNA, 19 nt, Homo sapiens
  misc_RNA (1)...(19): siRNA sense strand
caauagaacagaugcagaa

SEQ ID NO: 2113872 - RNA, 19 nt, Homo sapiens
  misc_RNA (1)...(19): siRNA sense strand
ugaaagacaagaacucauu

SEQ ID NO: 2113873 - RNA, 19 nt, Homo sapiens
  misc_RNA (1)...(19): siRNA sense strand
gauaaagcagcacaagauu

SEQ ID NO: 2113874 - RNA, 19 nt, Homo sapiens
  misc_RNA (1)...(19): siRNA sense strand
gaaguaugcacaacaagau

SEQ ID NO: 2113875 - RNA, 19 nt, Homo sapiens
  misc_RNA (1)...(19): siRNA sense strand
cgacagaucagagaaagaa

SEQ ID NO: 2113876 - RNA, 19 nt, Homo sapiens
  misc_RNA (1)...(19): siRNA sense strand
gcacaagauuuucguaaga

SEQ ID NO: 2113877 - RNA, 19 nt, Homo sapiens
  misc_RNA (1)...(19): siRNA sense strand
gagcguuuccuguuuggua

SEQ ID NO: 2113878 - RNA, 19 nt, Homo sapiens
  misc_RNA (1)...(19): siRNA sense strand
cgucagagcucuagaucuc

SEQ ID NO: 2113879 - RNA, 19 nt, Homo sapiens
  misc_RNA (1)...(19): siRNA sense strand
gcugaagaauagauaugaa

SEQ ID NO: 2113880 - RNA, 19 nt, Homo sapiens
  misc_RNA (1)...(19): siRNA sense strand
caaacaaugaacuccaaua

SEQ ID NO: 2113881 - RNA, 19 nt, Homo sapiens
  misc_RNA (1)...(19): siRNA sense strand
gaaggaaguagauguucaa

SEQ ID NO: 2113882 - RNA, 19 nt, Homo sapiens
  misc_RNA (1)...(19): siRNA sense strand
ucaauuacacagucucuuu

SEQ ID NO: 2113883 - RNA, 19 nt, Homo sapiens
  misc_RNA (1)...(19): siRNA sense strand
aaagaaaucuacgcucuag

SEQ ID NO: 2113884 - RNA, 19 nt, Homo sapiens
  misc_RNA (1)...(19): siRNA sense strand
ucagcaaggucaucuagga

SEQ ID NO: 2113885 - RNA, 19 nt, Homo sapiens
  misc_RNA (1)...(19): siRNA sense strand
uagaaagagugaccaaaca

SEQ ID NO: 2113886 - RNA, 19 nt, Homo sapiens
  misc_RNA (1)...(19): siRNA sense strand
gaagagaaaccaagaauuu

SEQ ID NO: 2113887 - RNA, 19 nt, Homo sapiens
  misc_RNA (1)...(19): siRNA sense strand
gaauuuaucuccaaaggaa

SEQ ID NO: 2113888 - RNA, 19 nt, Homo sapiens
  misc_RNA (1)...(19): siRNA sense strand
gaauaucaguggcuucaua

SEQ ID NO: 2113889 - RNA, 19 nt, Homo sapiens
  misc_RNA (1)...(19): siRNA sense strand
gaaauuagaucaccacaac

SEQ ID NO: 2113890 - RNA, 19 nt, Homo sapiens
  misc_RNA (1)...(19): siRNA sense strand
gaacuuacccgacaucaga

SEQ ID NO: 2113891 - RNA, 19 nt, Homo sapiens
  misc_RNA (1)...(19): siRNA sense strand
ggucagaacucacacauca

SEQ ID NO: 2113892 - RNA, 19 nt, Homo sapiens
  misc_RNA (1)...(19): siRNA sense strand
ggagagaaauccugugaau

SEQ ID NO: 2113893 - RNA, 19 nt, Homo sapiens
  misc_RNA (1)...(19): siRNA sense strand
gagaaacccuauaagugua

SEQ ID NO: 2113894 - RNA, 19 nt, Homo sapiens
  misc_RNA (1)...(19): siRNA sense strand
agagaaaccucauaaaugu

SEQ ID NO: 2113895 - RNA, 19 nt, Homo sapiens
  misc_RNA (1)...(19): siRNA sense strand
gagagaaaccucauaaaug

SEQ ID NO: 2113896 - RNA, 19 nt, Homo sapiens
  misc_RNA (1)...(19): siRNA sense strand
ggagagaaaccucauaaau

SEQ ID NO: 2113897 - RNA, 19 nt, Homo sapiens
  misc_RNA (1)...(19): siRNA sense strand
guggaaagguguacaguug

SEQ ID NO: 2113898 - RNA, 19 nt, Homo sapiens
  misc_RNA (1)...(19): siRNA sense strand
ggaaauguaagaaugcuuu

SEQ ID NO: 2113899 - RNA, 19 nt, Homo sapiens
  misc_RNA (1)...(19): siRNA sense strand
gcacagcccauagagaaua

SEQ ID NO: 2113900 - RNA, 19 nt, Homo sapiens
  misc_RNA (1)...(19): siRNA sense strand
cgucguggcucagaacuua

SEQ ID NO: 2113901 - RNA, 19 nt, Homo sapiens
  misc_RNA (1)...(19): siRNA sense strand
gauccauacugaugagaaa

SEQ ID NO: 2113902 - RNA, 19 nt, Homo sapiens
  misc_RNA (1)...(19): siRNA sense strand
gaaagacgcuaugaaugca

SEQ ID NO: 2113903 - RNA, 19 nt, Homo sapiens
  misc_RNA (1)...(19): siRNA sense strand
ggaaagguguacaguugug

SEQ ID NO: 2113904 - RNA, 19 nt, Homo sapiens
  misc_RNA (1)...(19): siRNA sense strand
aaagaaugguguccagauu

SEQ ID NO: 2113905 - RNA, 19 nt, Homo sapiens
  misc_RNA (1)...(19): siRNA sense strand
gagaaacccuacgagugua

SEQ ID NO: 2113906 - RNA, 19 nt, Homo sapiens
  misc_RNA (1)...(19): siRNA sense strand
gauaauccauacuggugaa

SEQ ID NO: 2113907 - RNA, 19 nt, Homo sapiens
  misc_RNA (1)...(19): siRNA sense strand
gagucuacaucaaagaauu

SEQ ID NO: 2113908 - RNA, 19 nt, Homo sapiens
  misc_RNA (1)...(19): siRNA sense strand
ccaagaauuuaucuccaaa

SEQ ID NO: 2113909 - RNA, 19 nt, Homo sapiens
  misc_RNA (1)...(19): siRNA sense strand
ggaagagaaaccaagaauu

SEQ ID NO: 2113910 - RNA, 19 nt, Homo sapiens
  misc_RNA (1)...(19): siRNA sense strand
ccucauaaauguaaggaau

SEQ ID NO: 2113911 - RNA, 19 nt, Homo sapiens
  misc_RNA (1)...(19): siRNA sense strand
caaccucagagcauuaaua

SEQ ID NO: 2113912 - RNA, 19 nt, Homo sapiens
  misc_RNA (1)...(19): siRNA sense strand
caucagacgcuucaugaaa

SEQ ID NO: 2113913 - RNA, 19 nt, Homo sapiens
  misc_RNA (1)...(19): siRNA sense strand
gaaccugaauguggagaau

SEQ ID NO: 2113914 - RNA, 19 nt, Homo sapiens
  misc_RNA (1)...(19): siRNA sense strand
ugagaaacccuauaagugu

SEQ ID NO: 2113915 - RNA, 19 nt, Homo sapiens
  misc_RNA (1)...(19): siRNA sense strand
cgacaucaaagaauccaua

SEQ ID NO: 2113916 - RNA, 19 nt, Homo sapiens
  misc_RNA (1)...(19): siRNA sense strand
gggaaggcuuucauucgaa

SEQ ID NO: 2113917 - RNA, 19 nt, Homo sapiens
  misc_RNA (1)...(19): siRNA sense strand
ggccagaguuaucagagaa

SEQ ID NO: 2113918 - RNA, 19 nt, Homo sapiens
  misc_RNA (1)...(19): siRNA sense strand
ggugaaagacgcuaugaau

SEQ ID NO: 2113919 - RNA, 19 nt, Homo sapiens
  misc_RNA (1)...(19): siRNA sense strand
caaauuagucagcaucaga

SEQ ID NO: 2113920 - RNA, 19 nt, Homo sapiens
  misc_RNA (1)...(19): siRNA sense strand
gaccagcuguaauaccauu

SEQ ID NO: 2113921 - RNA, 19 nt, Homo sapiens
  misc_RNA (1)...(19): siRNA sense strand
ggagaaggccagaguuauc

SEQ ID NO: 2113922 - RNA, 19 nt, Homo sapiens
  misc_RNA (1)...(19): siRNA sense strand
ggaugcaucuuggugagaa

SEQ ID NO: 2113923 - RNA, 19 nt, Homo sapiens
  misc_RNA (1)...(19): siRNA sense strand
cauuaauacuggagagaaa

SEQ ID NO: 2113924 - RNA, 19 nt, Homo sapiens
  misc_RNA (1)...(19): siRNA sense strand
caggagaaggccagaguua

SEQ ID NO: 2113925 - RNA, 19 nt, Homo sapiens
  misc_RNA (1)...(19): siRNA sense strand
gagaaaccucauaaaugua

SEQ ID NO: 2113926 - RNA, 19 nt, Homo sapiens
  misc_RNA (1)...(19): siRNA sense strand
uuucagaccagcuguaaua

SEQ ID NO: 2113927 - RNA, 19 nt, Homo sapiens
  misc_RNA (1)...(19): siRNA sense strand
gugcacagcccauagagaa

SEQ ID NO: 2113928 - RNA, 19 nt, Homo sapiens
  misc_RNA (1)...(19): siRNA sense strand
ugagaaacccuacgagugu

SEQ ID NO: 2113929 - RNA, 19 nt, Homo sapiens
  misc_RNA (1)...(19): siRNA sense strand
ggaauuacucaaccucaga

SEQ ID NO: 2113930 - RNA, 19 nt, Homo sapiens
  misc_RNA (1)...(19): siRNA sense strand
caucaaagaauucauacug

SEQ ID NO: 2113931 - RNA, 19 nt, Homo sapiens
  misc_RNA (1)...(19): siRNA sense strand
cagcugagucuacaucaaa

SEQ ID NO: 2113932 - RNA, 19 nt, Homo sapiens
  misc_RNA (1)...(19): siRNA sense strand
gugagaaacccuauaagug

SEQ ID NO: 2113933 - RNA, 19 nt, Homo sapiens
  misc_RNA (1)...(19): siRNA sense strand
acacacagcugagccuuca

SEQ ID NO: 2113934 - RNA, 19 nt, Homo sapiens
  misc_RNA (1)...(19): siRNA sense strand
gaaugcaggaaauguaaga

SEQ ID NO: 2113935 - RNA, 19 nt, Homo sapiens
  misc_RNA (1)...(19): siRNA sense strand
ccagucauguccuauucaa

SEQ ID NO: 2113936 - RNA, 19 nt, Homo sapiens
  misc_RNA (1)...(19): siRNA sense strand
ccauaaauguaaggaaugu

SEQ ID NO: 2113937 - RNA, 19 nt, Homo sapiens
  misc_RNA (1)...(19): siRNA sense strand
ccucagagcauuaauacug

SEQ ID NO: 2113938 - RNA, 19 nt, Homo sapiens
  misc_RNA (1)...(19): siRNA sense strand
gagaauaucaguggcuuca

SEQ ID NO: 2113939 - RNA, 19 nt, Homo sapiens
  misc_RNA (1)...(19): siRNA sense strand
cugcacagcuuaaucuaca

SEQ ID NO: 2113940 - RNA, 19 nt, Homo sapiens
  misc_RNA (1)...(19): siRNA sense strand
ggugagaaacccuauaagu

SEQ ID NO: 2113941 - RNA, 19 nt, Homo sapiens
  misc_RNA (1)...(19): siRNA sense strand
gugaaugcaggaaauguaa

SEQ ID NO: 2113942 - RNA, 19 nt, Homo sapiens
  misc_RNA (1)...(19): siRNA sense strand
gagaaggccagaguuauca

SEQ ID NO: 2113943 - RNA, 19 nt, Homo sapiens
  misc_RNA (1)...(19): siRNA sense strand
gagaaauccugugaaugca

SEQ ID NO: 2113944 - RNA, 19 nt, Homo sapiens
  misc_RNA (1)...(19): siRNA sense strand
gagaaaccaagaauuuauc

SEQ ID NO: 2113945 - RNA, 19 nt, Homo sapiens
  misc_RNA (1)...(19): siRNA sense strand
cagaccagcuguaauacca

SEQ ID NO: 2113946 - RNA, 19 nt, Homo sapiens
  misc_RNA (1)...(19): siRNA sense strand
ugaaagacgcuaugaaugc

SEQ ID NO: 2113947 - RNA, 19 nt, Homo sapiens
  misc_RNA (1)...(19): siRNA sense strand
guaagaaugcuuuuaggua

SEQ ID NO: 2113948 - RNA, 19 nt, Homo sapiens
  misc_RNA (1)...(19): siRNA sense strand
gcagugcacagcccauaga

SEQ ID NO: 2113949 - RNA, 19 nt, Homo sapiens
  misc_RNA (1)...(19): siRNA sense strand
ccagcuguaauaccauuua

SEQ ID NO: 2113950 - RNA, 19 nt, Homo sapiens
  misc_RNA (1)...(19): siRNA sense strand
caucagagagcucauacug

SEQ ID NO: 2113951 - RNA, 19 nt, Homo sapiens
  misc_RNA (1)...(19): siRNA sense strand
cgacaucagagagcucaua

SEQ ID NO: 2113952 - RNA, 19 nt, Homo sapiens
  misc_RNA (1)...(19): siRNA sense strand
cuacaucagaggauccaua

SEQ ID NO: 2113953 - RNA, 19 nt, Homo sapiens
  misc_RNA (1)...(19): siRNA sense strand
agagaaauccugugaaugc

SEQ ID NO: 2113954 - RNA, 19 nt, Homo sapiens
  misc_RNA (1)...(19): siRNA sense strand
ugggaaggcuuucauucga

SEQ ID NO: 2113955 - RNA, 19 nt, Homo sapiens
  misc_RNA (1)...(19): siRNA sense strand
cagaggauccauacugaug

SEQ ID NO: 2113956 - RNA, 19 nt, Homo sapiens
  misc_RNA (1)...(19): siRNA sense strand
gaugccagguggagagaca

SEQ ID NO: 2113957 - RNA, 19 nt, Homo sapiens
  misc_RNA (1)...(19): siRNA sense strand
caucagaggauccauacug

SEQ ID NO: 2113958 - RNA, 19 nt, Homo sapiens
  misc_RNA (1)...(19): siRNA sense strand
ugcaggaaauguaagaaug

SEQ ID NO: 2113959 - RNA, 19 nt, Homo sapiens
  misc_RNA (1)...(19): siRNA sense strand
ggagagaccccauaagugu

SEQ ID NO: 2113960 - RNA, 19 nt, Homo sapiens
  misc_RNA (1)...(19): siRNA sense strand
gugaaagacgcuaugaaug

SEQ ID NO: 2113961 - RNA, 19 nt, Homo sapiens
  misc_RNA (1)...(19): siRNA sense strand
gagaaaccccauaaaugua

SEQ ID NO: 2113962 - RNA, 19 nt, Homo sapiens
  misc_RNA (1)...(19): siRNA sense strand
gcauuaauacuggagagaa

SEQ ID NO: 2113963 - RNA, 19 nt, Homo sapiens
  misc_RNA (1)...(19): siRNA sense strand
gaauguggagaauguagga

SEQ ID NO: 2113964 - RNA, 19 nt, Homo sapiens
  misc_RNA (1)...(19): siRNA sense strand
guaccagucauguccuauu

SEQ ID NO: 2113965 - RNA, 19 nt, Homo sapiens
  misc_RNA (1)...(19): siRNA sense strand
ucagaacucacacaucaug

SEQ ID NO: 2113966 - RNA, 19 nt, Homo sapiens
  misc_RNA (1)...(19): siRNA sense strand
caucuuauucgacaucaga

SEQ ID NO: 2113967 - RNA, 19 nt, Homo sapiens
  misc_RNA (1)...(19): siRNA sense strand
gaauucauacuggugagaa

SEQ ID NO: 2113968 - RNA, 19 nt, Homo sapiens
  misc_RNA (1)...(19): siRNA sense strand
aauccauacuggugaaaga

SEQ ID NO: 2113969 - RNA, 19 nt, Homo sapiens
  misc_RNA (1)...(19): siRNA sense strand
caucagauaauccauacug

SEQ ID NO: 2113970 - RNA, 19 nt, Homo sapiens
  misc_RNA (1)...(19): siRNA sense strand
cagcuuaaucuacaucaga

SEQ ID NO: 2113971 - RNA, 19 nt, Homo sapiens
  misc_RNA (1)...(19): siRNA sense strand
aauaguggaucagacuuga

SEQ ID NO: 2113972 - RNA, 19 nt, Homo sapiens
  misc_RNA (1)...(19): siRNA sense strand
gaaggccagaguuaucaga

SEQ ID NO: 2113973 - RNA, 19 nt, Homo sapiens
  misc_RNA (1)...(19): siRNA sense strand
gaggauccauacugaugag

SEQ ID NO: 2113974 - RNA, 19 nt, Homo sapiens
  misc_RNA (1)...(19): siRNA sense strand
ggaaggagacaaaagaaug

SEQ ID NO: 2113975 - RNA, 19 nt, Homo sapiens
  misc_RNA (1)...(19): siRNA sense strand
uaccagucauguccuauuc

SEQ ID NO: 2113976 - RNA, 19 nt, Homo sapiens
  misc_RNA (1)...(19): siRNA sense strand
gcuucauacuggagagaaa

SEQ ID NO: 2113977 - RNA, 19 nt, Homo sapiens
  misc_RNA (1)...(19): siRNA sense strand
agaaugguguccagauugg

SEQ ID NO: 2113978 - RNA, 19 nt, Homo sapiens
  misc_RNA (1)...(19): siRNA sense strand
ucacacaucaugagagaag

SEQ ID NO: 2113979 - RNA, 19 nt, Homo sapiens
  misc_RNA (1)...(19): siRNA sense strand
ccaugaauguaaggaaugu

SEQ ID NO: 2113980 - RNA, 19 nt, Homo sapiens
  misc_RNA (1)...(19): siRNA sense strand
gaucaccacaacaggagaa

SEQ ID NO: 2113981 - RNA, 19 nt, Homo sapiens
  misc_RNA (1)...(19): siRNA sense strand
ccacugcacagcuuaaucu

SEQ ID NO: 2113982 - RNA, 19 nt, Homo sapiens
  misc_RNA (1)...(19): siRNA sense strand
gagagaaauccugugaaug

SEQ ID NO: 2113983 - RNA, 19 nt, Homo sapiens
  misc_RNA (1)...(19): siRNA sense strand
gaugcaucuuggugagaaa

SEQ ID NO: 2113984 - RNA, 19 nt, Homo sapiens
  misc_RNA (1)...(19): siRNA sense strand
uuaagaggaaggagacaaa

SEQ ID NO: 2113985 - RNA, 19 nt, Homo sapiens
  misc_RNA (1)...(19): siRNA sense strand
ccagaguuaucagagaaau

SEQ ID NO: 2113986 - RNA, 19 nt, Homo sapiens
  misc_RNA (1)...(19): siRNA sense strand
ggaaauagauaaacgcaua

SEQ ID NO: 2113987 - RNA, 19 nt, Homo sapiens
  misc_RNA (1)...(19): siRNA sense strand
gaacauccuugaacuuaua

SEQ ID NO: 2113988 - RNA, 19 nt, Homo sapiens
  misc_RNA (1)...(19): siRNA sense strand
gaaacgaucugcaguagaa

SEQ ID NO: 2113989 - RNA, 19 nt, Homo sapiens
  misc_RNA (1)...(19): siRNA sense strand
gagaauggcugguaucaaa

SEQ ID NO: 2113990 - RNA, 19 nt, Homo sapiens
  misc_RNA (1)...(19): siRNA sense strand
gcaguaagauucugagauu

SEQ ID NO: 2113991 - RNA, 19 nt, Homo sapiens
  misc_RNA (1)...(19): siRNA sense strand
gaaggaaacuuaucuuauc

SEQ ID NO: 2113992 - RNA, 19 nt, Homo sapiens
  misc_RNA (1)...(19): siRNA sense strand
gaagacagacuacaagaua

SEQ ID NO: 2113993 - RNA, 19 nt, Homo sapiens
  misc_RNA (1)...(19): siRNA sense strand
gaagauugguuacggcaua

SEQ ID NO: 2113994 - RNA, 19 nt, Homo sapiens
  misc_RNA (1)...(19): siRNA sense strand
gaacaugaucucuucuuua

SEQ ID NO: 2113995 - RNA, 19 nt, Homo sapiens
  misc_RNA (1)...(19): siRNA sense strand
ggacucaucuacuuguuaa

SEQ ID NO: 2113996 - RNA, 19 nt, Homo sapiens
  misc_RNA (1)...(19): siRNA sense strand
gcuaagaacucuguguaua

SEQ ID NO: 2113997 - RNA, 19 nt, Homo sapiens
  misc_RNA (1)...(19): siRNA sense strand
gaucauaacccaacaaaug

SEQ ID NO: 2113998 - RNA, 19 nt, Homo sapiens
  misc_RNA (1)...(19): siRNA sense strand
uagaauagcuacccuugua

SEQ ID NO: 2113999 - RNA, 19 nt, Homo sapiens
  misc_RNA (1)...(19): siRNA sense strand
ucagaaagcucaagucaau

SEQ ID NO: 2114000 - RNA, 19 nt, Homo sapiens
  misc_RNA (1)...(19): siRNA sense strand
ggugagaaguuauuauuug

SEQ ID NO: 2114001 - RNA, 19 nt, Homo sapiens
  misc_RNA (1)...(19): siRNA sense strand
gagaaacuauugaagcauu

SEQ ID NO: 2114002 - RNA, 19 nt, Homo sapiens
  misc_RNA (1)...(19): siRNA sense strand
ggacuuccauuauucuuug

SEQ ID NO: 2114003 - RNA, 19 nt, Homo sapiens
  misc_RNA (1)...(19): siRNA sense strand
gagaaugaguguaauuguu

SEQ ID NO: 2114004 - RNA, 19 nt, Homo sapiens
  misc_RNA (1)...(19): siRNA sense strand
ugagaaaccuauaacauug

SEQ ID NO: 2114005 - RNA, 19 nt, Homo sapiens
  misc_RNA (1)...(19): siRNA sense strand
gaagacaggcugcaagaaa

SEQ ID NO: 2114006 - RNA, 19 nt, Homo sapiens
  misc_RNA (1)...(19): siRNA sense strand
uaaaggagcugagucauca

SEQ ID NO: 2114007 - RNA, 19 nt, Homo sapiens
  misc_RNA (1)...(19): siRNA sense strand
gcguguaccugacuuuaua

SEQ ID NO: 2114008 - RNA, 19 nt, Homo sapiens
  misc_RNA (1)...(19): siRNA sense strand
gguacaaacugcuucauau

SEQ ID NO: 2114009 - RNA, 19 nt, Homo sapiens
  misc_RNA (1)...(19): siRNA sense strand
gcauaggaaucauggguaa

SEQ ID NO: 2114010 - RNA, 19 nt, Homo sapiens
  misc_RNA (1)...(19): siRNA sense strand
uuacacaccucagaaauuu

SEQ ID NO: 2114011 - RNA, 19 nt, Homo sapiens
  misc_RNA (1)...(19): siRNA sense strand
aaauggagcuccuguuuau

SEQ ID NO: 2114012 - RNA, 19 nt, Homo sapiens
  misc_RNA (1)...(19): siRNA sense strand
gaugguuccugucacguua

SEQ ID NO: 2114013 - RNA, 19 nt, Homo sapiens
  misc_RNA (1)...(19): siRNA sense strand
ggaaauggccagauguuug

SEQ ID NO: 2114014 - RNA, 19 nt, Homo sapiens
  misc_RNA (1)...(19): siRNA sense strand
aaacuaaccugaagacaca

SEQ ID NO: 2114015 - RNA, 19 nt, Homo sapiens
  misc_RNA (1)...(19): siRNA sense strand
gaaauuaaugguagacuug

SEQ ID NO: 2114016 - RNA, 19 nt, Homo sapiens
  misc_RNA (1)...(19): siRNA sense strand
uguagacccucauguguua

SEQ ID NO: 2114017 - RNA, 19 nt, Homo sapiens
  misc_RNA (1)...(19): siRNA sense strand
cgagugugcugaacaauug

SEQ ID NO: 2114018 - RNA, 19 nt, Homo sapiens
  misc_RNA (1)...(19): siRNA sense strand
gaagcagacuuauacagau

SEQ ID NO: 2114019 - RNA, 19 nt, Homo sapiens
  misc_RNA (1)...(19): siRNA sense strand
ggacuuggaucaaccaucu

SEQ ID NO: 2114020 - RNA, 19 nt, Homo sapiens
  misc_RNA (1)...(19): siRNA sense strand
agagaaagaccugauauua

SEQ ID NO: 2114021 - RNA, 19 nt, Homo sapiens
  misc_RNA (1)...(19): siRNA sense strand
gguauacacuggaauggaa

SEQ ID NO: 2114022 - RNA, 19 nt, Homo sapiens
  misc_RNA (1)...(19): siRNA sense strand
guaaauggagcuccuguuu

SEQ ID NO: 2114023 - RNA, 19 nt, Homo sapiens
  misc_RNA (1)...(19): siRNA sense strand
guaccugacuuuauacaau

SEQ ID NO: 2114024 - RNA, 19 nt, Homo sapiens
  misc_RNA (1)...(19): siRNA sense strand
gcaaccagaagcagacuua

SEQ ID NO: 2114025 - RNA, 19 nt, Homo sapiens
  misc_RNA (1)...(19): siRNA sense strand
gaagacacauguggcaguu

SEQ ID NO: 2114026 - RNA, 19 nt, Homo sapiens
  misc_RNA (1)...(19): siRNA sense strand
ggaacgaguuauaggaaga

SEQ ID NO: 2114027 - RNA, 19 nt, Homo sapiens
  misc_RNA (1)...(19): siRNA sense strand
gcagaaagcaaaaguaaua

SEQ ID NO: 2114028 - RNA, 19 nt, Homo sapiens
  misc_RNA (1)...(19): siRNA sense strand
caucaauucucccuaaaug

SEQ ID NO: 2114029 - RNA, 19 nt, Homo sapiens
  misc_RNA (1)...(19): siRNA sense strand
uacaaacaguugccaauuu

SEQ ID NO: 2114030 - RNA, 19 nt, Homo sapiens
  misc_RNA (1)...(19): siRNA sense strand
gggaugaaccuugguauaa

SEQ ID NO: 2114031 - RNA, 19 nt, Homo sapiens
  misc_RNA (1)...(19): siRNA sense strand
uagcuacccuuguacagua

SEQ ID NO: 2114032 - RNA, 19 nt, Homo sapiens
  misc_RNA (1)...(19): siRNA sense strand
ggauugguauuguguuuau

SEQ ID NO: 2114033 - RNA, 19 nt, Homo sapiens
  misc_RNA (1)...(19): siRNA sense strand
gaguacguguuuacagaua

SEQ ID NO: 2114034 - RNA, 19 nt, Homo sapiens
  misc_RNA (1)...(19): siRNA sense strand
gcagggauaugaagauugg

SEQ ID NO: 2114035 - RNA, 19 nt, Homo sapiens
  misc_RNA (1)...(19): siRNA sense strand
aaacagugacuaugcaaua

SEQ ID NO: 2114036 - RNA, 19 nt, Homo sapiens
  misc_RNA (1)...(19): siRNA sense strand
caagauaaaguucgagaaa

SEQ ID NO: 2114037 - RNA, 19 nt, Homo sapiens
  misc_RNA (1)...(19): siRNA sense strand
caacuuaucccaucuuaca

SEQ ID NO: 2114038 - RNA, 19 nt, Homo sapiens
  misc_RNA (1)...(19): siRNA sense strand
acacuggaauggaaacuaa

SEQ ID NO: 2114039 - RNA, 19 nt, Homo sapiens
  misc_RNA (1)...(19): siRNA sense strand
cggcauaacucagauaaug

SEQ ID NO: 2114040 - RNA, 19 nt, Homo sapiens
  misc_RNA (1)...(19): siRNA sense strand
caacagguuuccucagaau

SEQ ID NO: 2114041 - RNA, 19 nt, Homo sapiens
  misc_RNA (1)...(19): siRNA sense strand
cagcaaacauuguaugaca

SEQ ID NO: 2114042 - RNA, 19 nt, Homo sapiens
  misc_RNA (1)...(19): siRNA sense strand
cagcuugccagaagaauua

SEQ ID NO: 2114043 - RNA, 19 nt, Homo sapiens
  misc_RNA (1)...(19): siRNA sense strand
guagaugaauuugcuuuga

SEQ ID NO: 2114044 - RNA, 19 nt, Homo sapiens
  misc_RNA (1)...(19): siRNA sense strand
gaagaaacuauggagguua

SEQ ID NO: 2114045 - RNA, 19 nt, Homo sapiens
  misc_RNA (1)...(19): siRNA sense strand
caugaucucuucuuuaaag

SEQ ID NO: 2114046 - RNA, 19 nt, Homo sapiens
  misc_RNA (1)...(19): siRNA sense strand
agaaauagcaguaagauuc

SEQ ID NO: 2114047 - RNA, 19 nt, Homo sapiens
  misc_RNA (1)...(19): siRNA sense strand
agaaagaccugauauuacu

SEQ ID NO: 2114048 - RNA, 19 nt, Homo sapiens
  misc_RNA (1)...(19): siRNA sense strand
gaacaucaaagaaauagca

SEQ ID NO: 2114049 - RNA, 19 nt, Homo sapiens
  misc_RNA (1)...(19): siRNA sense strand
aaccgccucuuaaguauua

SEQ ID NO: 2114050 - RNA, 19 nt, Homo sapiens
  misc_RNA (1)...(19): siRNA sense strand
gauaaacgcauauuugaag

SEQ ID NO: 2114051 - RNA, 19 nt, Homo sapiens
  misc_RNA (1)...(19): siRNA sense strand
ucaauucucccuaaaugua

SEQ ID NO: 2114052 - RNA, 19 nt, Homo sapiens
  misc_RNA (1)...(19): siRNA sense strand
gaaacuaagauggcauuaa

SEQ ID NO: 2114053 - RNA, 19 nt, Homo sapiens
  misc_RNA (1)...(19): siRNA sense strand
acaauggacucaucuacuu

SEQ ID NO: 2114054 - RNA, 19 nt, Homo sapiens
  misc_RNA (1)...(19): siRNA sense strand
gaaguuugcagaaauuguu

SEQ ID NO: 2114055 - RNA, 19 nt, Homo sapiens
  misc_RNA (1)...(19): siRNA sense strand
ggagcugagucaucaauuc

SEQ ID NO: 2114056 - RNA, 19 nt, Homo sapiens
  misc_RNA (1)...(19): siRNA sense strand
cagaaggaaacuuaucuua

SEQ ID NO: 2114057 - RNA, 19 nt, Homo sapiens
  misc_RNA (1)...(19): siRNA sense strand
uuucgggaauguucaauua

SEQ ID NO: 2114058 - RNA, 19 nt, Homo sapiens
  misc_RNA (1)...(19): siRNA sense strand
gccaacagguuuccucaga

SEQ ID NO: 2114059 - RNA, 19 nt, Homo sapiens
  misc_RNA (1)...(19): siRNA sense strand
gcacuuuggucuucacagu

SEQ ID NO: 2114060 - RNA, 19 nt, Homo sapiens
  misc_RNA (1)...(19): siRNA sense strand
auacaucucugcuuggaaa

SEQ ID NO: 2114061 - RNA, 19 nt, Homo sapiens
  misc_RNA (1)...(19): siRNA sense strand
uuaaguuccucuccaaauu

SEQ ID NO: 2114062 - RNA, 19 nt, Homo sapiens
  misc_RNA (1)...(19): siRNA sense strand
ggaguacuaugcaucuuca

SEQ ID NO: 2114063 - RNA, 19 nt, Homo sapiens
  misc_RNA (1)...(19): siRNA sense strand
ugaagaaucagaucagaaa

SEQ ID NO: 2114064 - RNA, 19 nt, Homo sapiens
  misc_RNA (1)...(19): siRNA sense strand
aagaaacuauggagguuaa

SEQ ID NO: 2114065 - RNA, 19 nt, Homo sapiens
  misc_RNA (1)...(19): siRNA sense strand
gggcuucagucaugccuuu

SEQ ID NO: 2114066 - RNA, 19 nt, Homo sapiens
  misc_RNA (1)...(19): siRNA sense strand
uagaguacguguuuacaga

SEQ ID NO: 2114067 - RNA, 19 nt, Homo sapiens
  misc_RNA (1)...(19): siRNA sense strand
gcaauagccagauuuaagu

SEQ ID NO: 2114068 - RNA, 19 nt, Homo sapiens
  misc_RNA (1)...(19): siRNA sense strand
gcuaaugacguaagcauga

SEQ ID NO: 2114069 - RNA, 19 nt, Homo sapiens
  misc_RNA (1)...(19): siRNA sense strand
gaaaucagacagcgagugu

SEQ ID NO: 2114070 - RNA, 19 nt, Homo sapiens
  misc_RNA (1)...(19): siRNA sense strand
gagaaagaccugauauuac

SEQ ID NO: 2114071 - RNA, 19 nt, Homo sapiens
  misc_RNA (1)...(19): siRNA sense strand
guacaaacugcuucauauu

SEQ ID NO: 2114072 - RNA, 19 nt, Homo sapiens
  misc_RNA (1)...(19): siRNA sense strand
caucgcaguuggaguacua

SEQ ID NO: 2114073 - RNA, 19 nt, Homo sapiens
  misc_RNA (1)...(19): siRNA sense strand
ggcaugaaauaccaagaaa

SEQ ID NO: 2114074 - RNA, 19 nt, Homo sapiens
  misc_RNA (1)...(19): siRNA sense strand
caucaaagaaauagcagua

SEQ ID NO: 2114075 - RNA, 19 nt, Homo sapiens
  misc_RNA (1)...(19): siRNA sense strand
guaaagauggcucuggaaa

SEQ ID NO: 2114076 - RNA, 19 nt, Homo sapiens
  misc_RNA (1)...(19): siRNA sense strand
aaaauaagcccacccuuua

SEQ ID NO: 2114077 - RNA, 19 nt, Homo sapiens
  misc_RNA (1)...(19): siRNA sense strand
aagaaugugugcuuuauca

SEQ ID NO: 2114078 - RNA, 19 nt, Homo sapiens
  misc_RNA (1)...(19): siRNA sense strand
auguauagguggagaaaua

SEQ ID NO: 2114079 - RNA, 19 nt, Homo sapiens
  misc_RNA (1)...(19): siRNA sense strand
ucagcacuaucuugaagua

SEQ ID NO: 2114080 - RNA, 19 nt, Homo sapiens
  misc_RNA (1)...(19): siRNA sense strand
gaucagaaagcucaaguca

SEQ ID NO: 2114081 - RNA, 19 nt, Homo sapiens
  misc_RNA (1)...(19): siRNA sense strand
uccagaaacagcauuauua

SEQ ID NO: 2114082 - RNA, 19 nt, Homo sapiens
  misc_RNA (1)...(19): siRNA sense strand
gauuuaaguuccucuccaa

SEQ ID NO: 2114083 - RNA, 19 nt, Homo sapiens
  misc_RNA (1)...(19): siRNA sense strand
cuacguagccaacagguuu

SEQ ID NO: 2114084 - RNA, 19 nt, Homo sapiens
  misc_RNA (1)...(19): siRNA sense strand
cagaagaguggcaaacuuu

SEQ ID NO: 2114085 - RNA, 19 nt, Homo sapiens
  misc_RNA (1)...(19): siRNA sense strand
caaagaaauagcaguaaga

SEQ ID NO: 2114086 - RNA, 19 nt, Homo sapiens
  misc_RNA (1)...(19): siRNA sense strand
ggagaaaccuuaugaaugu

SEQ ID NO: 2114087 - RNA, 19 nt, Homo sapiens
  misc_RNA (1)...(19): siRNA sense strand
gagaaacccuucaaaugua

SEQ ID NO: 2114088 - RNA, 19 nt, Homo sapiens
  misc_RNA (1)...(19): siRNA sense strand
ggagaaaccuuaugaaagu

SEQ ID NO: 2114089 - RNA, 19 nt, Homo sapiens
  misc_RNA (1)...(19): siRNA sense strand
caucagaucuugucccuaa

SEQ ID NO: 2114090 - RNA, 19 nt, Homo sapiens
  misc_RNA (1)...(19): siRNA sense strand
gaacaucaaagaacucaua

SEQ ID NO: 2114091 - RNA, 19 nt, Homo sapiens
  misc_RNA (1)...(19): siRNA sense strand
ggaaaucucuacugggaaa

SEQ ID NO: 2114092 - RNA, 19 nt, Homo sapiens
  misc_RNA (1)...(19): siRNA sense strand
gcucauaucuuaaucaaca

SEQ ID NO: 2114093 - RNA, 19 nt, Homo sapiens
  misc_RNA (1)...(19): siRNA sense strand
guacguaccuuaguaaaga

SEQ ID NO: 2114094 - RNA, 19 nt, Homo sapiens
  misc_RNA (1)...(19): siRNA sense strand
ggaaaggccuucaguugug

SEQ ID NO: 2114095 - RNA, 19 nt, Homo sapiens
  misc_RNA (1)...(19): siRNA sense strand
agagaagccuggaaauaua

SEQ ID NO: 2114096 - RNA, 19 nt, Homo sapiens
  misc_RNA (1)...(19): siRNA sense strand
gaaggaaucuuugauaggu

SEQ ID NO: 2114097 - RNA, 19 nt, Homo sapiens
  misc_RNA (1)...(19): siRNA sense strand
auacagagaugucauguug

SEQ ID NO: 2114098 - RNA, 19 nt, Homo sapiens
  misc_RNA (1)...(19): siRNA sense strand
gagaaacccuaugaaugua

SEQ ID NO: 2114099 - RNA, 19 nt, Homo sapiens
  misc_RNA (1)...(19): siRNA sense strand
gagaaacccuaugaaugua

SEQ ID NO: 2114100 - RNA, 19 nt, Homo sapiens
  misc_RNA (1)...(19): siRNA sense strand
caacuuaaucgacaucaua

SEQ ID NO: 2114101 - RNA, 19 nt, Homo sapiens
  misc_RNA (1)...(19): siRNA sense strand
gagagaaacccuucaaaug

SEQ ID NO: 2114102 - RNA, 19 nt, Homo sapiens
  misc_RNA (1)...(19): siRNA sense strand
gagaaacccuaugaaugua

SEQ ID NO: 2114103 - RNA, 19 nt, Homo sapiens
  misc_RNA (1)...(19): siRNA sense strand
gagaaggaaucuuugauag

SEQ ID NO: 2114104 - RNA, 19 nt, Homo sapiens
  misc_RNA (1)...(19): siRNA sense strand
acagaaaguuccuaccaua

SEQ ID NO: 2114105 - RNA, 19 nt, Homo sapiens
  misc_RNA (1)...(19): siRNA sense strand
ggagagagaccauuugaau

SEQ ID NO: 2114106 - RNA, 19 nt, Homo sapiens
  misc_RNA (1)...(19): siRNA sense strand
caacaucagagaauucaua

SEQ ID NO: 2114107 - RNA, 19 nt, Homo sapiens
  misc_RNA (1)...(19): siRNA sense strand
caucaaaugugggaaguuu

SEQ ID NO: 2114108 - RNA, 19 nt, Homo sapiens
  misc_RNA (1)...(19): siRNA sense strand
gggaaagccuucagugaug

SEQ ID NO: 2114109 - RNA, 19 nt, Homo sapiens
  misc_RNA (1)...(19): siRNA sense strand
ucagaaggauuuauacaga

SEQ ID NO: 2114110 - RNA, 19 nt, Homo sapiens
  misc_RNA (1)...(19): siRNA sense strand
caucaaagaacucauauug

SEQ ID NO: 2114111 - RNA, 19 nt, Homo sapiens
  misc_RNA (1)...(19): siRNA sense strand
cagaguacguaccuuagua

SEQ ID NO: 2114112 - RNA, 19 nt, Homo sapiens
  misc_RNA (1)...(19): siRNA sense strand
gagagaaacccuaugaaug

SEQ ID NO: 2114113 - RNA, 19 nt, Homo sapiens
  misc_RNA (1)...(19): siRNA sense strand
gagagaaacccuaugaaug

SEQ ID NO: 2114114 - RNA, 19 nt, Homo sapiens
  misc_RNA (1)...(19): siRNA sense strand
gagagaaacccuaugaaug

SEQ ID NO: 2114115 - RNA, 19 nt, Homo sapiens
  misc_RNA (1)...(19): siRNA sense strand
ggaauuaucuccaaaaugg

SEQ ID NO: 2114116 - RNA, 19 nt, Homo sapiens
  misc_RNA (1)...(19): siRNA sense strand
gcucuuaaguuuccacuca

SEQ ID NO: 2114117 - RNA, 19 nt, Homo sapiens
  misc_RNA (1)...(19): siRNA sense strand
gagaaaccauaugaaugua

SEQ ID NO: 2114118 - RNA, 19 nt, Homo sapiens
  misc_RNA (1)...(19): siRNA sense strand
gcucacaccugaaucaaca

SEQ ID NO: 2114119 - RNA, 19 nt, Homo sapiens
  misc_RNA (1)...(19): siRNA sense strand
ggaaggccuuuagccguua

SEQ ID NO: 2114120 - RNA, 19 nt, Homo sapiens
  misc_RNA (1)...(19): siRNA sense strand
ggaaauauaagggugaauu

SEQ ID NO: 2114121 - RNA, 19 nt, Homo sapiens
  misc_RNA (1)...(19): siRNA sense strand
gaaucaacaucagagaauu

SEQ ID NO: 2114122 - RNA, 19 nt, Homo sapiens
  misc_RNA (1)...(19): siRNA sense strand
ggagagaaacccuaugaau

SEQ ID NO: 2114123 - RNA, 19 nt, Homo sapiens
  misc_RNA (1)...(19): siRNA sense strand
ggagagaaacccuaugaau

SEQ ID NO: 2114124 - RNA, 19 nt, Homo sapiens
  misc_RNA (1)...(19): siRNA sense strand
ggagagaaacccuaugaau

SEQ ID NO: 2114125 - RNA, 19 nt, Homo sapiens
  misc_RNA (1)...(19): siRNA sense strand
ggagagaaacccuucaaau

SEQ ID NO: 2114126 - RNA, 19 nt, Homo sapiens
  misc_RNA (1)...(19): siRNA sense strand
gagaagccuggaaauauaa

SEQ ID NO: 2114127 - RNA, 19 nt, Homo sapiens
  misc_RNA (1)...(19): siRNA sense strand
cgacaucagagaauucaua

SEQ ID NO: 2114128 - RNA, 19 nt, Homo sapiens
  misc_RNA (1)...(19): siRNA sense strand
aauaaagccuucagacaga

SEQ ID NO: 2114129 - RNA, 19 nt, Homo sapiens
  misc_RNA (1)...(19): siRNA sense strand
ugacagcuguuaaggaaau

SEQ ID NO: 2114130 - RNA, 19 nt, Homo sapiens
  misc_RNA (1)...(19): siRNA sense strand
gggagaaaccuuaugaaug

SEQ ID NO: 2114131 - RNA, 19 nt, Homo sapiens
  misc_RNA (1)...(19): siRNA sense strand
gaagaauucaaccagagua

SEQ ID NO: 2114132 - RNA, 19 nt, Homo sapiens
  misc_RNA (1)...(19): siRNA sense strand
uaacgaaugugggaauaau

SEQ ID NO: 2114133 - RNA, 19 nt, Homo sapiens
  misc_RNA (1)...(19): siRNA sense strand
aguuguggcucauaucuua

SEQ ID NO: 2114134 - RNA, 19 nt, Homo sapiens
  misc_RNA (1)...(19): siRNA sense strand
gcauagcccuuacucuaca

SEQ ID NO: 2114135 - RNA, 19 nt, Homo sapiens
  misc_RNA (1)...(19): siRNA sense strand
gaaacccuaugaauguaau

SEQ ID NO: 2114136 - RNA, 19 nt, Homo sapiens
  misc_RNA (1)...(19): siRNA sense strand
gaacaucagagaauucaca

SEQ ID NO: 2114137 - RNA, 19 nt, Homo sapiens
  misc_RNA (1)...(19): siRNA sense strand
ggugaugccuuuagcuguu

SEQ ID NO: 2114138 - RNA, 19 nt, Homo sapiens
  misc_RNA (1)...(19): siRNA sense strand
gaacuacaggaacuuggua

SEQ ID NO: 2114139 - RNA, 19 nt, Homo sapiens
  misc_RNA (1)...(19): siRNA sense strand
ugaauguggugaugccuuu

SEQ ID NO: 2114140 - RNA, 19 nt, Homo sapiens
  misc_RNA (1)...(19): siRNA sense strand
ugagaaggaaucuuugaua

SEQ ID NO: 2114141 - RNA, 19 nt, Homo sapiens
  misc_RNA (1)...(19): siRNA sense strand
cagagaagccuggaaauau

SEQ ID NO: 2114142 - RNA, 19 nt, Homo sapiens
  misc_RNA (1)...(19): siRNA sense strand
gagaaaccuuaugaaugua

SEQ ID NO: 2114143 - RNA, 19 nt, Homo sapiens
  misc_RNA (1)...(19): siRNA sense strand
gaaaguuccuaccauacag

SEQ ID NO: 2114144 - RNA, 19 nt, Homo sapiens
  misc_RNA (1)...(19): siRNA sense strand
agagaaacccuaugaaugu

SEQ ID NO: 2114145 - RNA, 19 nt, Homo sapiens
  misc_RNA (1)...(19): siRNA sense strand
gaauguaacaaauguggaa

SEQ ID NO: 2114146 - RNA, 19 nt, Homo sapiens
  misc_RNA (1)...(19): siRNA sense strand
agagaaacccuaugaaugu

SEQ ID NO: 2114147 - RNA, 19 nt, Homo sapiens
  misc_RNA (1)...(19): siRNA sense strand
agagaaacccuucaaaugu

SEQ ID NO: 2114148 - RNA, 19 nt, Homo sapiens
  misc_RNA (1)...(19): siRNA sense strand
agagaaacccuaugaaugu

SEQ ID NO: 2114149 - RNA, 19 nt, Homo sapiens
  misc_RNA (1)...(19): siRNA sense strand
gauucacacuggagagaaa

SEQ ID NO: 2114150 - RNA, 19 nt, Homo sapiens
  misc_RNA (1)...(19): siRNA sense strand
ugagaaaccauaugaaugu

SEQ ID NO: 2114151 - RNA, 19 nt, Homo sapiens
  misc_RNA (1)...(19): siRNA sense strand
gaaaauuaccccauggaua

SEQ ID NO: 2114152 - RNA, 19 nt, Homo sapiens
  misc_RNA (1)...(19): siRNA sense strand
caacaucagaccacucauu

SEQ ID NO: 2114153 - RNA, 19 nt, Homo sapiens
  misc_RNA (1)...(19): siRNA sense strand
ggacugacucacaacuuaa

SEQ ID NO: 2114154 - RNA, 19 nt, Homo sapiens
  misc_RNA (1)...(19): siRNA sense strand
aggacugacucacaacuua

SEQ ID NO: 2114155 - RNA, 19 nt, Homo sapiens
  misc_RNA (1)...(19): siRNA sense strand
gagaaaagcccuaugaaug

SEQ ID NO: 2114156 - RNA, 19 nt, Homo sapiens
  misc_RNA (1)...(19): siRNA sense strand
gagaugucauguuggagaa

SEQ ID NO: 2114157 - RNA, 19 nt, Homo sapiens
  misc_RNA (1)...(19): siRNA sense strand
gaaaggcuagcaagucaug

SEQ ID NO: 2114158 - RNA, 19 nt, Homo sapiens
  misc_RNA (1)...(19): siRNA sense strand
caucucagaaggauuuaua

SEQ ID NO: 2114159 - RNA, 19 nt, Homo sapiens
  misc_RNA (1)...(19): siRNA sense strand
agacagagugcucaccuua

SEQ ID NO: 2114160 - RNA, 19 nt, Homo sapiens
  misc_RNA (1)...(19): siRNA sense strand
gguaaugaaugugaagaau

SEQ ID NO: 2114161 - RNA, 19 nt, Homo sapiens
  misc_RNA (1)...(19): siRNA sense strand
gauagguaaugaaugugaa

SEQ ID NO: 2114162 - RNA, 19 nt, Homo sapiens
  misc_RNA (1)...(19): siRNA sense strand
ucagagaagccuggaaaua

SEQ ID NO: 2114163 - RNA, 19 nt, Homo sapiens
  misc_RNA (1)...(19): siRNA sense strand
gggaagaccuuuggcuauc

SEQ ID NO: 2114164 - RNA, 19 nt, Homo sapiens
  misc_RNA (1)...(19): siRNA sense strand
gagaauucauaccggagaa

SEQ ID NO: 2114165 - RNA, 19 nt, Homo sapiens
  misc_RNA (1)...(19): siRNA sense strand
acagagaugucauguugga

SEQ ID NO: 2114166 - RNA, 19 nt, Homo sapiens
  misc_RNA (1)...(19): siRNA sense strand
ucagagauguggcgcuaga

SEQ ID NO: 2114167 - RNA, 19 nt, Homo sapiens
  misc_RNA (1)...(19): siRNA sense strand
agugacagcuguuaaggaa

SEQ ID NO: 2114168 - RNA, 19 nt, Homo sapiens
  misc_RNA (1)...(19): siRNA sense strand
acagagugcucaccuuaau

SEQ ID NO: 2114169 - RNA, 19 nt, Homo sapiens
  misc_RNA (1)...(19): siRNA sense strand
guaauaaagccuucagaca

SEQ ID NO: 2114170 - RNA, 19 nt, Homo sapiens
  misc_RNA (1)...(19): siRNA sense strand
ugaaauaucccaggagaug

SEQ ID NO: 2114171 - RNA, 19 nt, Homo sapiens
  misc_RNA (1)...(19): siRNA sense strand
gaaacccuaugaauguagu

SEQ ID NO: 2114172 - RNA, 19 nt, Homo sapiens
  misc_RNA (1)...(19): siRNA sense strand
gugcucaccuuaaucaaca

SEQ ID NO: 2114173 - RNA, 19 nt, Homo sapiens
  misc_RNA (1)...(19): siRNA sense strand
gaagccaucucagaaggau

SEQ ID NO: 2114174 - RNA, 19 nt, Homo sapiens
  misc_RNA (1)...(19): siRNA sense strand
ucaaagcucuuaaguuucc

SEQ ID NO: 2114175 - RNA, 19 nt, Homo sapiens
  misc_RNA (1)...(19): siRNA sense strand
gggagaaaccuuaugaaag

SEQ ID NO: 2114176 - RNA, 19 nt, Homo sapiens
  misc_RNA (1)...(19): siRNA sense strand
ccauacagcaaguacauaa

SEQ ID NO: 2114177 - RNA, 19 nt, Homo sapiens
  misc_RNA (1)...(19): siRNA sense strand
uggaaaggcuagcaaguca

SEQ ID NO: 2114178 - RNA, 19 nt, Homo sapiens
  misc_RNA (1)...(19): siRNA sense strand
caucaaagaauucauacug

SEQ ID NO: 2114179 - RNA, 19 nt, Homo sapiens
  misc_RNA (1)...(19): siRNA sense strand
gugaugccuuuagcuguua

SEQ ID NO: 2114180 - RNA, 19 nt, Homo sapiens
  misc_RNA (1)...(19): siRNA sense strand
gacaucagagaauucauaa

SEQ ID NO: 2114181 - RNA, 19 nt, Homo sapiens
  misc_RNA (1)...(19): siRNA sense strand
guggaaaggccuucaguug

SEQ ID NO: 2114182 - RNA, 19 nt, Homo sapiens
  misc_RNA (1)...(19): siRNA sense strand
ggugagaaaccauaugaau

SEQ ID NO: 2114183 - RNA, 19 nt, Homo sapiens
  misc_RNA (1)...(19): siRNA sense strand
cguuaugccuuccuuguug

SEQ ID NO: 2114184 - RNA, 19 nt, Homo sapiens
  misc_RNA (1)...(19): siRNA sense strand
cagugaugcuuuaguucua

SEQ ID NO: 2114185 - RNA, 19 nt, Homo sapiens
  misc_RNA (1)...(19): siRNA sense strand
cuucagugaugcuuuaguu

SEQ ID NO: 2114186 - RNA, 19 nt, Homo sapiens
  misc_RNA (1)...(19): siRNA sense strand
gcaauaagcuccuuguaua

SEQ ID NO: 2114187 - RNA, 19 nt, Homo sapiens
  misc_RNA (1)...(19): siRNA sense strand
agaaauggcugaugaaaua

SEQ ID NO: 2114188 - RNA, 19 nt, Homo sapiens
  misc_RNA (1)...(19): siRNA sense strand
ggaagaaacuauucagauu

SEQ ID NO: 2114189 - RNA, 19 nt, Homo sapiens
  misc_RNA (1)...(19): siRNA sense strand
gcaaauaucuccuuguauc

SEQ ID NO: 2114190 - RNA, 19 nt, Homo sapiens
  misc_RNA (1)...(19): siRNA sense strand
gaggagauguuguucauuu

SEQ ID NO: 2114191 - RNA, 19 nt, Homo sapiens
  misc_RNA (1)...(19): siRNA sense strand
gaacaaacccugcuggaaa

SEQ ID NO: 2114192 - RNA, 19 nt, Homo sapiens
  misc_RNA (1)...(19): siRNA sense strand
gaagaaaucuauccuuaca

SEQ ID NO: 2114193 - RNA, 19 nt, Homo sapiens
  misc_RNA (1)...(19): siRNA sense strand
caaguaggaugucucuuua

SEQ ID NO: 2114194 - RNA, 19 nt, Homo sapiens
  misc_RNA (1)...(19): siRNA sense strand
ggacuuaucuugggaaugu

SEQ ID NO: 2114195 - RNA, 19 nt, Homo sapiens
  misc_RNA (1)...(19): siRNA sense strand
guagagaaguugcauguga

SEQ ID NO: 2114196 - RNA, 19 nt, Homo sapiens
  misc_RNA (1)...(19): siRNA sense strand
caagauuacugcucuauau

SEQ ID NO: 2114197 - RNA, 19 nt, Homo sapiens
  misc_RNA (1)...(19): siRNA sense strand
ggugaagucugcuguauug

SEQ ID NO: 2114198 - RNA, 19 nt, Homo sapiens
  misc_RNA (1)...(19): siRNA sense strand
gaaaggagauauucauggu

SEQ ID NO: 2114199 - RNA, 19 nt, Homo sapiens
  misc_RNA (1)...(19): siRNA sense strand
gaaauccuauuccauuaug

SEQ ID NO: 2114200 - RNA, 19 nt, Homo sapiens
  misc_RNA (1)...(19): siRNA sense strand
uauauuagcuguugucuag

SEQ ID NO: 2114201 - RNA, 19 nt, Homo sapiens
  misc_RNA (1)...(19): siRNA sense strand
uaaaugagacugaugauga

SEQ ID NO: 2114202 - RNA, 19 nt, Homo sapiens
  misc_RNA (1)...(19): siRNA sense strand
cacaauaucuuauccauuc

SEQ ID NO: 2114203 - RNA, 19 nt, Homo sapiens
  misc_RNA (1)...(19): siRNA sense strand
caagcaagcuguggaauau

SEQ ID NO: 2114204 - RNA, 19 nt, Homo sapiens
  misc_RNA (1)...(19): siRNA sense strand
ggagaaauccagggacuua

SEQ ID NO: 2114205 - RNA, 19 nt, Homo sapiens
  misc_RNA (1)...(19): siRNA sense strand
cauggugccuuccuaauaa

SEQ ID NO: 2114206 - RNA, 19 nt, Homo sapiens
  misc_RNA (1)...(19): siRNA sense strand
guagaaauccuauuccauu

SEQ ID NO: 2114207 - RNA, 19 nt, Homo sapiens
  misc_RNA (1)...(19): siRNA sense strand
gaaagcauacuaaaugaga

SEQ ID NO: 2114208 - RNA, 19 nt, Homo sapiens
  misc_RNA (1)...(19): siRNA sense strand
ccagagaaauucacauaau

SEQ ID NO: 2114209 - RNA, 19 nt, Homo sapiens
  misc_RNA (1)...(19): siRNA sense strand
gcugaguucuaucaaauuu

SEQ ID NO: 2114210 - RNA, 19 nt, Homo sapiens
  misc_RNA (1)...(19): siRNA sense strand
gcagguaguucucaugugu

SEQ ID NO: 2114211 - RNA, 19 nt, Homo sapiens
  misc_RNA (1)...(19): siRNA sense strand
gaaaccauccuugaaagua

SEQ ID NO: 2114212 - RNA, 19 nt, Homo sapiens
  misc_RNA (1)...(19): siRNA sense strand
aagaagagcugaauaaguc

SEQ ID NO: 2114213 - RNA, 19 nt, Homo sapiens
  misc_RNA (1)...(19): siRNA sense strand
ucacagagcaguucauuga

SEQ ID NO: 2114214 - RNA, 19 nt, Homo sapiens
  misc_RNA (1)...(19): siRNA sense strand
gaaucuagaugucuguuca

SEQ ID NO: 2114215 - RNA, 19 nt, Homo sapiens
  misc_RNA (1)...(19): siRNA sense strand
ucacggaacucucccagaa

SEQ ID NO: 2114216 - RNA, 19 nt, Homo sapiens
  misc_RNA (1)...(19): siRNA sense strand
gauucucacuccuaugaua

SEQ ID NO: 2114217 - RNA, 19 nt, Homo sapiens
  misc_RNA (1)...(19): siRNA sense strand
gcacuuugguuuccguuau

SEQ ID NO: 2114218 - RNA, 19 nt, Homo sapiens
  misc_RNA (1)...(19): siRNA sense strand
gggaagguauucauguaaa

SEQ ID NO: 2114219 - RNA, 19 nt, Homo sapiens
  misc_RNA (1)...(19): siRNA sense strand
aaagagaacaccaauauga

SEQ ID NO: 2114220 - RNA, 19 nt, Homo sapiens
  misc_RNA (1)...(19): siRNA sense strand
ugaaagagaacaccaauau

SEQ ID NO: 2114221 - RNA, 19 nt, Homo sapiens
  misc_RNA (1)...(19): siRNA sense strand
gcgaagaagagcugaauaa

SEQ ID NO: 2114222 - RNA, 19 nt, Homo sapiens
  misc_RNA (1)...(19): siRNA sense strand
gagaacaccaauaugauaa

SEQ ID NO: 2114223 - RNA, 19 nt, Homo sapiens
  misc_RNA (1)...(19): siRNA sense strand
agaaugcacuguggaauuu

SEQ ID NO: 2114224 - RNA, 19 nt, Homo sapiens
  misc_RNA (1)...(19): siRNA sense strand
ucuagaagcuucacuuuca

SEQ ID NO: 2114225 - RNA, 19 nt, Homo sapiens
  misc_RNA (1)...(19): siRNA sense strand
caacccaacccaaguuaua

SEQ ID NO: 2114226 - RNA, 19 nt, Homo sapiens
  misc_RNA (1)...(19): siRNA sense strand
gagcaauacauguuacuaa

SEQ ID NO: 2114227 - RNA, 19 nt, Homo sapiens
  misc_RNA (1)...(19): siRNA sense strand
uaaauagcauggcagcauu

SEQ ID NO: 2114228 - RNA, 19 nt, Homo sapiens
  misc_RNA (1)...(19): siRNA sense strand
ucauugagcuguuguguca

SEQ ID NO: 2114229 - RNA, 19 nt, Homo sapiens
  misc_RNA (1)...(19): siRNA sense strand
agaaagcaauggaucauau

SEQ ID NO: 2114230 - RNA, 19 nt, Homo sapiens
  misc_RNA (1)...(19): siRNA sense strand
gaaagaucaucccaucaca

SEQ ID NO: 2114231 - RNA, 19 nt, Homo sapiens
  misc_RNA (1)...(19): siRNA sense strand
cugaagcucugaagucuuu

SEQ ID NO: 2114232 - RNA, 19 nt, Homo sapiens
  misc_RNA (1)...(19): siRNA sense strand
gaagaagagcugaauaagu

SEQ ID NO: 2114233 - RNA, 19 nt, Homo sapiens
  misc_RNA (1)...(19): siRNA sense strand
gagaaggcuuguuaucaau

SEQ ID NO: 2114234 - RNA, 19 nt, Homo sapiens
  misc_RNA (1)...(19): siRNA sense strand
agagaaggcuuguuaucaa

SEQ ID NO: 2114235 - RNA, 19 nt, Homo sapiens
  misc_RNA (1)...(19): siRNA sense strand
ggguacaucucauggauug

SEQ ID NO: 2114236 - RNA, 19 nt, Homo sapiens
  misc_RNA (1)...(19): siRNA sense strand
caagagacgccaagaaaug

SEQ ID NO: 2114237 - RNA, 19 nt, Homo sapiens
  misc_RNA (1)...(19): siRNA sense strand
gaagucaccgcuuaucuau

SEQ ID NO: 2114238 - RNA, 19 nt, Homo sapiens
  misc_RNA (1)...(19): siRNA sense strand
cugcaaauaucuccuugua

SEQ ID NO: 2114239 - RNA, 19 nt, Homo sapiens
  misc_RNA (1)...(19): siRNA sense strand
ggaagguauucauguaaau

SEQ ID NO: 2114240 - RNA, 19 nt, Homo sapiens
  misc_RNA (1)...(19): siRNA sense strand
gguggagaauucagacuuu

SEQ ID NO: 2114241 - RNA, 19 nt, Homo sapiens
  misc_RNA (1)...(19): siRNA sense strand
ugaggauccuacauuguua

SEQ ID NO: 2114242 - RNA, 19 nt, Homo sapiens
  misc_RNA (1)...(19): siRNA sense strand
ggauuggcuuuaauauuug

SEQ ID NO: 2114243 - RNA, 19 nt, Homo sapiens
  misc_RNA (1)...(19): siRNA sense strand
aagcaaacuucaagaggua

SEQ ID NO: 2114244 - RNA, 19 nt, Homo sapiens
  misc_RNA (1)...(19): siRNA sense strand
agucaccgcuuaucuauug

SEQ ID NO: 2114245 - RNA, 19 nt, Homo sapiens
  misc_RNA (1)...(19): siRNA sense strand
gaauaucaacagcgaauug

SEQ ID NO: 2114246 - RNA, 19 nt, Homo sapiens
  misc_RNA (1)...(19): siRNA sense strand
gguaacacaucaaggugaa

SEQ ID NO: 2114247 - RNA, 19 nt, Homo sapiens
  misc_RNA (1)...(19): siRNA sense strand
gacaaggaguuugauauuc

SEQ ID NO: 2114248 - RNA, 19 nt, Homo sapiens
  misc_RNA (1)...(19): siRNA sense strand
gauuacugcucuauauguu

SEQ ID NO: 2114249 - RNA, 19 nt, Homo sapiens
  misc_RNA (1)...(19): siRNA sense strand
gaaagcaauggaucauauu

SEQ ID NO: 2114250 - RNA, 19 nt, Homo sapiens
  misc_RNA (1)...(19): siRNA sense strand
gcugcaggcuggaggcaua

SEQ ID NO: 2114251 - RNA, 19 nt, Homo sapiens
  misc_RNA (1)...(19): siRNA sense strand
acuaacagaugaacaaguu

SEQ ID NO: 2114252 - RNA, 19 nt, Homo sapiens
  misc_RNA (1)...(19): siRNA sense strand
gagaaccugugaaucuaga

SEQ ID NO: 2114253 - RNA, 19 nt, Homo sapiens
  misc_RNA (1)...(19): siRNA sense strand
gcgaaaggcuauuguugca

SEQ ID NO: 2114254 - RNA, 19 nt, Homo sapiens
  misc_RNA (1)...(19): siRNA sense strand
gcaaaagcaucuucaccua

SEQ ID NO: 2114255 - RNA, 19 nt, Homo sapiens
  misc_RNA (1)...(19): siRNA sense strand
cauaucaaguuuacagaug

SEQ ID NO: 2114256 - RNA, 19 nt, Homo sapiens
  misc_RNA (1)...(19): siRNA sense strand
ugaaggauguugaagauac

SEQ ID NO: 2114257 - RNA, 19 nt, Homo sapiens
  misc_RNA (1)...(19): siRNA sense strand
gaaagagaacaccaauaug

SEQ ID NO: 2114258 - RNA, 19 nt, Homo sapiens
  misc_RNA (1)...(19): siRNA sense strand
acagaggcaugaaugaauu

SEQ ID NO: 2114259 - RNA, 19 nt, Homo sapiens
  misc_RNA (1)...(19): siRNA sense strand
gagagaaggcuuguuauca

SEQ ID NO: 2114260 - RNA, 19 nt, Homo sapiens
  misc_RNA (1)...(19): siRNA sense strand
caauacauguuacuaagca

SEQ ID NO: 2114261 - RNA, 19 nt, Homo sapiens
  misc_RNA (1)...(19): siRNA sense strand
gugagaaccugugaaucua

SEQ ID NO: 2114262 - RNA, 19 nt, Homo sapiens
  misc_RNA (1)...(19): siRNA sense strand
gaucaucuccugaaacaag

SEQ ID NO: 2114263 - RNA, 19 nt, Homo sapiens
  misc_RNA (1)...(19): siRNA sense strand
ugacaucccugaagaucug

SEQ ID NO: 2114264 - RNA, 19 nt, Homo sapiens
  misc_RNA (1)...(19): siRNA sense strand
ucucauggauuggcuuuaa

SEQ ID NO: 2114265 - RNA, 19 nt, Homo sapiens
  misc_RNA (1)...(19): siRNA sense strand
acaaguaggaugucucuuu

SEQ ID NO: 2114266 - RNA, 19 nt, Homo sapiens
  misc_RNA (1)...(19): siRNA sense strand
caacagcgaauuguggaua

SEQ ID NO: 2114267 - RNA, 19 nt, Homo sapiens
  misc_RNA (1)...(19): siRNA sense strand
ugacaaggaguuugauauu

SEQ ID NO: 2114268 - RNA, 19 nt, Homo sapiens
  misc_RNA (1)...(19): siRNA sense strand
cuaaauguauuggcacuga

SEQ ID NO: 2114269 - RNA, 19 nt, Homo sapiens
  misc_RNA (1)...(19): siRNA sense strand
aaaugagacugaugaugaa

SEQ ID NO: 2114270 - RNA, 19 nt, Homo sapiens
  misc_RNA (1)...(19): siRNA sense strand
gcaaacacaagaggaauug

SEQ ID NO: 2114271 - RNA, 19 nt, Homo sapiens
  misc_RNA (1)...(19): siRNA sense strand
guauugagccucugcauuc

SEQ ID NO: 2114272 - RNA, 19 nt, Homo sapiens
  misc_RNA (1)...(19): siRNA sense strand
aaaccauccuugaaaguau

SEQ ID NO: 2114273 - RNA, 19 nt, Homo sapiens
  misc_RNA (1)...(19): siRNA sense strand
uggaaagcauacuaaauga

SEQ ID NO: 2114274 - RNA, 19 nt, Homo sapiens
  misc_RNA (1)...(19): siRNA sense strand
guggagaauucagacuuua

SEQ ID NO: 2114275 - RNA, 19 nt, Homo sapiens
  misc_RNA (1)...(19): siRNA sense strand
ugaaaguuaugguggagaa

SEQ ID NO: 2114276 - RNA, 19 nt, Homo sapiens
  misc_RNA (1)...(19): siRNA sense strand
ggacuuugcuacauuuuga

SEQ ID NO: 2114277 - RNA, 19 nt, Homo sapiens
  misc_RNA (1)...(19): siRNA sense strand
cugaggagcuggagagaga

SEQ ID NO: 2114278 - RNA, 19 nt, Homo sapiens
  misc_RNA (1)...(19): siRNA sense strand
gacaaaaucuguuuaugug

SEQ ID NO: 2114279 - RNA, 19 nt, Homo sapiens
  misc_RNA (1)...(19): siRNA sense strand
gaaguugcaugugauugau

SEQ ID NO: 2114280 - RNA, 19 nt, Homo sapiens
  misc_RNA (1)...(19): siRNA sense strand
caucaacuuuaccuggaua

SEQ ID NO: 2114281 - RNA, 19 nt, Homo sapiens
  misc_RNA (1)...(19): siRNA sense strand
gucugcagcugacaaagua

SEQ ID NO: 2114282 - RNA, 19 nt, Homo sapiens
  misc_RNA (1)...(19): siRNA sense strand
agagaacaccaauaugaua

SEQ ID NO: 2114283 - RNA, 19 nt, Homo sapiens
  misc_RNA (1)...(19): siRNA sense strand
gaucugguucccuugguua

SEQ ID NO: 2114284 - RNA, 19 nt, Homo sapiens
  misc_RNA (1)...(19): siRNA sense strand
caacagaggcaugaaugaa

SEQ ID NO: 2114285 - RNA, 19 nt, Homo sapiens
  misc_RNA (1)...(19): siRNA sense strand
aaaagcaucuucaccuaua

SEQ ID NO: 2114286 - RNA, 19 nt, Homo sapiens
  misc_RNA (1)...(19): siRNA sense strand
gcaaagaacaugccaauua

SEQ ID NO: 2114287 - RNA, 19 nt, Homo sapiens
  misc_RNA (1)...(19): siRNA sense strand
ugaaacagcugcacacuga

SEQ ID NO: 2114288 - RNA, 19 nt, Homo sapiens
  misc_RNA (1)...(19): siRNA sense strand
ggacacagauggcacaaag

SEQ ID NO: 2114289 - RNA, 19 nt, Homo sapiens
  misc_RNA (1)...(19): siRNA sense strand
caacaggcauuccaaagga

SEQ ID NO: 2114290 - RNA, 19 nt, Homo sapiens
  misc_RNA (1)...(19): siRNA sense strand
gaagaaauccaccaucuca

SEQ ID NO: 2114291 - RNA, 19 nt, Homo sapiens
  misc_RNA (1)...(19): siRNA sense strand
gcacaaaggccaccaagau

SEQ ID NO: 2114292 - RNA, 19 nt, Homo sapiens
  misc_RNA (1)...(19): siRNA sense strand
gagaagaaauccaccaucu

SEQ ID NO: 2114293 - RNA, 19 nt, Homo sapiens
  misc_RNA (1)...(19): siRNA sense strand
caaagaacaugccaauuac

SEQ ID NO: 2114294 - RNA, 19 nt, Homo sapiens
  misc_RNA (1)...(19): siRNA sense strand
gcacaaguccgacaaguuc

SEQ ID NO: 2114295 - RNA, 19 nt, Homo sapiens
  misc_RNA (1)...(19): siRNA sense strand
ccaaggaggugguguucaa

SEQ ID NO: 2114296 - RNA, 19 nt, Homo sapiens
  misc_RNA (1)...(19): siRNA sense strand
gaggagauguacaacaaug

SEQ ID NO: 2114297 - RNA, 19 nt, Homo sapiens
  misc_RNA (1)...(19): siRNA sense strand
ggaagaggcacauaggaaa

SEQ ID NO: 2114298 - RNA, 19 nt, Homo sapiens
  misc_RNA (1)...(19): siRNA sense strand
gaacauccgcucccacuuc

SEQ ID NO: 2114299 - RNA, 19 nt, Homo sapiens
  misc_RNA (1)...(19): siRNA sense strand
acacugaccugcagaagga

SEQ ID NO: 2114300 - RNA, 19 nt, Homo sapiens
  misc_RNA (1)...(19): siRNA sense strand
cagcacgucuucaucauug

SEQ ID NO: 2114301 - RNA, 19 nt, Homo sapiens
  misc_RNA (1)...(19): siRNA sense strand
ugaagaaacucaucaucau

SEQ ID NO: 2114302 - RNA, 19 nt, Homo sapiens
  misc_RNA (1)...(19): siRNA sense strand
gcacagaggaccuaaacug

SEQ ID NO: 2114303 - RNA, 19 nt, Homo sapiens
  misc_RNA (1)...(19): siRNA sense strand
gcaacacccucuccagcaa

SEQ ID NO: 2114304 - RNA, 19 nt, Homo sapiens
  misc_RNA (1)...(19): siRNA sense strand
gcaagaggccugucagcuu

SEQ ID NO: 2114305 - RNA, 19 nt, Homo sapiens
  misc_RNA (1)...(19): siRNA sense strand
ccucaauacucaagucauu

SEQ ID NO: 2114306 - RNA, 19 nt, Homo sapiens
  misc_RNA (1)...(19): siRNA sense strand
gaagaaacucaucaucaug

SEQ ID NO: 2114307 - RNA, 19 nt, Homo sapiens
  misc_RNA (1)...(19): siRNA sense strand
gcacauaggaaaugacauc

SEQ ID NO: 2114308 - RNA, 19 nt, Homo sapiens
  misc_RNA (1)...(19): siRNA sense strand
gcgagcagcugcgcaaguu

SEQ ID NO: 2114309 - RNA, 19 nt, Homo sapiens
  misc_RNA (1)...(19): siRNA sense strand
gaaccucaauacucaaguc

SEQ ID NO: 2114310 - RNA, 19 nt, Homo sapiens
  misc_RNA (1)...(19): siRNA sense strand
ccugucagcuucccagaaa

SEQ ID NO: 2114311 - RNA, 19 nt, Homo sapiens
  misc_RNA (1)...(19): siRNA sense strand
caaaggagaaccucaauac

SEQ ID NO: 2114312 - RNA, 19 nt, Homo sapiens
  misc_RNA (1)...(19): siRNA sense strand
ccaacaggguggaagagaa

SEQ ID NO: 2114313 - RNA, 19 nt, Homo sapiens
  misc_RNA (1)...(19): siRNA sense strand
cagaggaccuaaacugcaa

SEQ ID NO: 2114314 - RNA, 19 nt, Homo sapiens
  misc_RNA (1)...(19): siRNA sense strand
agaagcagguggacacgaa

SEQ ID NO: 2114315 - RNA, 19 nt, Homo sapiens
  misc_RNA (1)...(19): siRNA sense strand
gaagaggcacauaggaaau

SEQ ID NO: 2114316 - RNA, 19 nt, Homo sapiens
  misc_RNA (1)...(19): siRNA sense strand
ugaaggaugcccuggagua

SEQ ID NO: 2114317 - RNA, 19 nt, Homo sapiens
  misc_RNA (1)...(19): siRNA sense strand
aggagaaccucaauacuca

SEQ ID NO: 2114318 - RNA, 19 nt, Homo sapiens
  misc_RNA (1)...(19): siRNA sense strand
ggacauaagggagauagug

SEQ ID NO: 2114319 - RNA, 19 nt, Homo sapiens
  misc_RNA (1)...(19): siRNA sense strand
aggaggagauguacaacaa

SEQ ID NO: 2114320 - RNA, 19 nt, Homo sapiens
  misc_RNA (1)...(19): siRNA sense strand
gaaggaugcccuggaguau

SEQ ID NO: 2114321 - RNA, 19 nt, Homo sapiens
  misc_RNA (1)...(19): siRNA sense strand
ccaaaggagaaccucaaua

SEQ ID NO: 2114322 - RNA, 19 nt, Homo sapiens
  misc_RNA (1)...(19): siRNA sense strand
gcgagaaggucugccugaa

SEQ ID NO: 2114323 - RNA, 19 nt, Homo sapiens
  misc_RNA (1)...(19): siRNA sense strand
ccacgaaggagaaggagaa

SEQ ID NO: 2114324 - RNA, 19 nt, Homo sapiens
  misc_RNA (1)...(19): siRNA sense strand
ggccagagcaggagagaga

SEQ ID NO: 2114325 - RNA, 19 nt, Homo sapiens
  misc_RNA (1)...(19): siRNA sense strand
gccagaagccagagccuuu

SEQ ID NO: 2114326 - RNA, 19 nt, Homo sapiens
  misc_RNA (1)...(19): siRNA sense strand
caaauccgacgucuucaga

SEQ ID NO: 2114327 - RNA, 19 nt, Homo sapiens
  misc_RNA (1)...(19): siRNA sense strand
gaaccacauuccgcaaauc

SEQ ID NO: 2114328 - RNA, 19 nt, Homo sapiens
  misc_RNA (1)...(19): siRNA sense strand
ucuccacccugcucccuua

SEQ ID NO: 2114329 - RNA, 19 nt, Homo sapiens
  misc_RNA (1)...(19): siRNA sense strand
gagcagcugcgcaaguuug

SEQ ID NO: 2114330 - RNA, 19 nt, Homo sapiens
  misc_RNA (1)...(19): siRNA sense strand
ggaaguaugggccuuugug

SEQ ID NO: 2114331 - RNA, 19 nt, Homo sapiens
  misc_RNA (1)...(19): siRNA sense strand
ucaaggaccuggccgaaaa

SEQ ID NO: 2114332 - RNA, 19 nt, Homo sapiens
  misc_RNA (1)...(19): siRNA sense strand
ggacuacgagaucauguuc

SEQ ID NO: 2114333 - RNA, 19 nt, Homo sapiens
  misc_RNA (1)...(19): siRNA sense strand
ccgcaaauccgacgucuuc

SEQ ID NO: 2114334 - RNA, 19 nt, Homo sapiens
  misc_RNA (1)...(19): siRNA sense strand
ggucaccacggaagaacua

SEQ ID NO: 2114335 - RNA, 19 nt, Homo sapiens
  misc_RNA (1)...(19): siRNA sense strand
ccaccuacgugagauacaa

SEQ ID NO: 2114336 - RNA, 19 nt, Homo sapiens
  misc_RNA (1)...(19): siRNA sense strand
ggaacccacucccucuaca

SEQ ID NO: 2114337 - RNA, 19 nt, Homo sapiens
  misc_RNA (1)...(19): siRNA sense strand
ccaaguccuucuucuccaa

SEQ ID NO: 2114338 - RNA, 19 nt, Homo sapiens
  misc_RNA (1)...(19): siRNA sense strand
ucccugaccuccaagaaga

SEQ ID NO: 2114339 - RNA, 19 nt, Homo sapiens
  misc_RNA (1)...(19): siRNA sense strand
gaacgcagccaaggcauac

SEQ ID NO: 2114340 - RNA, 19 nt, Homo sapiens
  misc_RNA (1)...(19): siRNA sense strand
gagauagugcagagacuga

SEQ ID NO: 2114341 - RNA, 19 nt, Homo sapiens
  misc_RNA (1)...(19): siRNA sense strand
gcaucucgguguuggaagu

SEQ ID NO: 2114342 - RNA, 19 nt, Homo sapiens
  misc_RNA (1)...(19): siRNA sense strand
gcuacuaccaggauuacuu

SEQ ID NO: 2114343 - RNA, 19 nt, Homo sapiens
  misc_RNA (1)...(19): siRNA sense strand
gagagacacgggacaguca

SEQ ID NO: 2114344 - RNA, 19 nt, Homo sapiens
  misc_RNA (1)...(19): siRNA sense strand
cggaagaacuacaaaucca

SEQ ID NO: 2114345 - RNA, 19 nt, Homo sapiens
  misc_RNA (1)...(19): siRNA sense strand
ggaugcagcaggcaaagau

SEQ ID NO: 2114346 - RNA, 19 nt, Homo sapiens
  misc_RNA (1)...(19): siRNA sense strand
gcaggaugcagcaggcaaa

SEQ ID NO: 2114347 - RNA, 19 nt, Homo sapiens
  misc_RNA (1)...(19): siRNA sense strand
ggagaccuacgacaugaau

SEQ ID NO: 2114348 - RNA, 19 nt, Homo sapiens
  misc_RNA (1)...(19): siRNA sense strand
uggccgagguugaggacua

SEQ ID NO: 2114349 - RNA, 19 nt, Homo sapiens
  misc_RNA (1)...(19): siRNA sense strand
ccagacuccuccacacuca

SEQ ID NO: 2114350 - RNA, 19 nt, Homo sapiens
  misc_RNA (1)...(19): siRNA sense strand
gaauuuccaaugaguuugu

SEQ ID NO: 2114351 - RNA, 19 nt, Homo sapiens
  misc_RNA (1)...(19): siRNA sense strand
cgacuccaccggcaaauuc

SEQ ID NO: 2114352 - RNA, 19 nt, Homo sapiens
  misc_RNA (1)...(19): siRNA sense strand
ccggagaccuacgacauga

SEQ ID NO: 2114353 - RNA, 19 nt, Homo sapiens
  misc_RNA (1)...(19): siRNA sense strand
aggaugcccuggaguaugu

SEQ ID NO: 2114354 - RNA, 19 nt, Homo sapiens
  misc_RNA (1)...(19): siRNA sense strand
gcagcggcuuucccgagaa

SEQ ID NO: 2114355 - RNA, 19 nt, Homo sapiens
  misc_RNA (1)...(19): siRNA sense strand
aggaugaccugaagaaacu

SEQ ID NO: 2114356 - RNA, 19 nt, Homo sapiens
  misc_RNA (1)...(19): siRNA sense strand
gaggaugaccugaagaaac

SEQ ID NO: 2114357 - RNA, 19 nt, Homo sapiens
  misc_RNA (1)...(19): siRNA sense strand
agaaaccccuuacacagua

SEQ ID NO: 2114358 - RNA, 19 nt, Homo sapiens
  misc_RNA (1)...(19): siRNA sense strand
gagaccacaucuuccuaca

SEQ ID NO: 2114359 - RNA, 19 nt, Homo sapiens
  misc_RNA (1)...(19): siRNA sense strand
caaggugggcauccucuau

SEQ ID NO: 2114360 - RNA, 19 nt, Homo sapiens
  misc_RNA (1)...(19): siRNA sense strand
gaagcuaaggagcagcaaa

SEQ ID NO: 2114361 - RNA, 19 nt, Homo sapiens
  misc_RNA (1)...(19): siRNA sense strand
ggagaagaaggagcucuga

SEQ ID NO: 2114362 - RNA, 19 nt, Homo sapiens
  misc_RNA (1)...(19): siRNA sense strand
gcauuaagcgggagaagcu

SEQ ID NO: 2114363 - RNA, 19 nt, Homo sapiens
  misc_RNA (1)...(19): siRNA sense strand
aaggguggcucuagugaca

SEQ ID NO: 2114364 - RNA, 19 nt, Homo sapiens
  misc_RNA (1)...(19): siRNA sense strand
aauccgacgucuucagaga

SEQ ID NO: 2114365 - RNA, 19 nt, Homo sapiens
  misc_RNA (1)...(19): siRNA sense strand
cggaagaggcacauaggaa

SEQ ID NO: 2114366 - RNA, 19 nt, Homo sapiens
  misc_RNA (1)...(19): siRNA sense strand
ccaguggcugugagcauua

SEQ ID NO: 2114367 - RNA, 19 nt, Homo sapiens
  misc_RNA (1)...(19): siRNA sense strand
gcagagcuucuucgacauc

SEQ ID NO: 2114368 - RNA, 19 nt, Homo sapiens
  misc_RNA (1)...(19): siRNA sense strand
gcacuuccgcaaugagauc

SEQ ID NO: 2114369 - RNA, 19 nt, Homo sapiens
  misc_RNA (1)...(19): siRNA sense strand
cacaaaggccaccaagaug

SEQ ID NO: 2114370 - RNA, 19 nt, Homo sapiens
  misc_RNA (1)...(19): siRNA sense strand
gcugugacccgauccaaag

SEQ ID NO: 2114371 - RNA, 19 nt, Homo sapiens
  misc_RNA (1)...(19): siRNA sense strand
caaggcauacgaagugcaa

SEQ ID NO: 2114372 - RNA, 19 nt, Homo sapiens
  misc_RNA (1)...(19): siRNA sense strand
cugaagaaacucaucauca

SEQ ID NO: 2114373 - RNA, 19 nt, Homo sapiens
  misc_RNA (1)...(19): siRNA sense strand
ccaaggguggcucuaguga

SEQ ID NO: 2114374 - RNA, 19 nt, Homo sapiens
  misc_RNA (1)...(19): siRNA sense strand
gcgcacaaguccgacaagu

SEQ ID NO: 2114375 - RNA, 19 nt, Homo sapiens
  misc_RNA (1)...(19): siRNA sense strand
aagaacaugccaauuacuu

SEQ ID NO: 2114376 - RNA, 19 nt, Homo sapiens
  misc_RNA (1)...(19): siRNA sense strand
ggccgugggugugucagaa

SEQ ID NO: 2114377 - RNA, 19 nt, Homo sapiens
  misc_RNA (1)...(19): siRNA sense strand
guaccaggacuacgagauc

SEQ ID NO: 2114378 - RNA, 19 nt, Homo sapiens
  misc_RNA (1)...(19): siRNA sense strand
gaagcuggaagaccacaag

SEQ ID NO: 2114379 - RNA, 19 nt, Homo sapiens
  misc_RNA (1)...(19): siRNA sense strand
agaaacucaucaucaugga

SEQ ID NO: 2114380 - RNA, 19 nt, Homo sapiens
  misc_RNA (1)...(19): siRNA sense strand
gggagacgguggacaugac

SEQ ID NO: 2114381 - RNA, 19 nt, Homo sapiens
  misc_RNA (1)...(19): siRNA sense strand
cacaaccccugcacugaua

SEQ ID NO: 2114382 - RNA, 19 nt, Homo sapiens
  misc_RNA (1)...(19): siRNA sense strand
agaggcacauaggaaauga

SEQ ID NO: 2114383 - RNA, 19 nt, Homo sapiens
  misc_RNA (1)...(19): siRNA sense strand
agaaggagaagcaggacaa

SEQ ID NO: 2114384 - RNA, 19 nt, Homo sapiens
  misc_RNA (1)...(19): siRNA sense strand
ugaacgcagccaaggcaua

SEQ ID NO: 2114385 - RNA, 19 nt, Homo sapiens
  misc_RNA (1)...(19): siRNA sense strand
gcagccgacuaguggagau

SEQ ID NO: 2114386 - RNA, 19 nt, Homo sapiens
  misc_RNA (1)...(19): siRNA sense strand
ccaagaagcccaaagugaa

SEQ ID NO: 2114387 - RNA, 19 nt, Homo sapiens
  misc_RNA (1)...(19): siRNA sense strand
gccaagaagcccaaaguga

SEQ ID NO: 2114388 - RNA, 19 nt, Homo sapiens
  misc_RNA (1)...(19): siRNA sense strand
ccaaagugaagaagaagga

SEQ ID NO: 2114389 - RNA, 19 nt, Homo sapiens
  misc_RNA (1)...(19): siRNA sense strand
caagaagcccaaagugaag

SEQ ID NO: 2114390 - RNA, 19 nt, Homo sapiens
  misc_RNA (1)...(19): siRNA sense strand
gaaggagaagggcaagaag

SEQ ID NO: 2114391 - RNA, 19 nt, Homo sapiens
  misc_RNA (1)...(19): siRNA sense strand
gaaggagaagggcaagaag

SEQ ID NO: 2114392 - RNA, 19 nt, Homo sapiens
  misc_RNA (1)...(19): siRNA sense strand
agcagcagcuccagcgauu

SEQ ID NO: 2114393 - RNA, 19 nt, Homo sapiens
  misc_RNA (1)...(19): siRNA sense strand
agaaggagaagggcaagaa

SEQ ID NO: 2114394 - RNA, 19 nt, Homo sapiens
  misc_RNA (1)...(19): siRNA sense strand
agaaggagaagggcaagaa

SEQ ID NO: 2114395 - RNA, 19 nt, Homo sapiens
  misc_RNA (1)...(19): siRNA sense strand
gcgauucggacacggaugu

SEQ ID NO: 2114396 - RNA, 19 nt, Homo sapiens
  misc_RNA (1)...(19): siRNA sense strand
agcccaaagugaagaagaa

SEQ ID NO: 2114397 - RNA, 19 nt, Homo sapiens
  misc_RNA (1)...(19): siRNA sense strand
ccaagcagcacgagagcau

SEQ ID NO: 2114398 - RNA, 19 nt, Homo sapiens
  misc_RNA (1)...(19): siRNA sense strand
aggagaagggcaagaagaa

SEQ ID NO: 2114399 - RNA, 19 nt, Homo sapiens
  misc_RNA (1)...(19): siRNA sense strand
ggagaagggcaagaagaag

SEQ ID NO: 2114400 - RNA, 19 nt, Homo sapiens
  misc_RNA (1)...(19): siRNA sense strand
caaggacaccacagcucuu

SEQ ID NO: 2114401 - RNA, 19 nt, Homo sapiens
  misc_RNA (1)...(19): siRNA sense strand
caagcucaguccccacaaa

SEQ ID NO: 2114402 - RNA, 19 nt, Homo sapiens
  misc_RNA (1)...(19): siRNA sense strand
ggcaaagccuggccuuaca

SEQ ID NO: 2114403 - RNA, 19 nt, Homo sapiens
  misc_RNA (1)...(19): siRNA sense strand
gagcugaggcuggcacuga

SEQ ID NO: 2114404 - RNA, 19 nt, Homo sapiens
  misc_RNA (1)...(19): siRNA sense strand
gggcaaagccuggccuuac

SEQ ID NO: 2114405 - RNA, 19 nt, Homo sapiens
  misc_RNA (1)...(19): siRNA sense strand
ccaccucaccugcaucuuc

SEQ ID NO: 2114406 - RNA, 19 nt, Homo sapiens
  misc_RNA (1)...(19): siRNA sense strand
gaaccaugaacuccuacga

SEQ ID NO: 2114407 - RNA, 19 nt, Homo sapiens
  misc_RNA (1)...(19): siRNA sense strand
gguuggagcagcuguuuca

SEQ ID NO: 2114408 - RNA, 19 nt, Homo sapiens
  misc_RNA (1)...(19): siRNA sense strand
cuggaaccaugaacuccua

SEQ ID NO: 2114409 - RNA, 19 nt, Homo sapiens
  misc_RNA (1)...(19): siRNA sense strand
gagaggaggaagaacucaa

SEQ ID NO: 2114410 - RNA, 19 nt, Homo sapiens
  misc_RNA (1)...(19): siRNA sense strand
caccucaccugcaucuucu

SEQ ID NO: 2114411 - RNA, 19 nt, Homo sapiens
  misc_RNA (1)...(19): siRNA sense strand
gaggaggaagaacucaaug

SEQ ID NO: 2114412 - RNA, 19 nt, Homo sapiens
  misc_RNA (1)...(19): siRNA sense strand
cagcuccaggccuuacuaa

SEQ ID NO: 2114413 - RNA, 19 nt, Homo sapiens
  misc_RNA (1)...(19): siRNA sense strand
ggcaaagccuggccuuaca

SEQ ID NO: 2114414 - RNA, 19 nt, Homo sapiens
  misc_RNA (1)...(19): siRNA sense strand
gagcugaggcuggcacuga

SEQ ID NO: 2114415 - RNA, 19 nt, Homo sapiens
  misc_RNA (1)...(19): siRNA sense strand
gggcaaagccuggccuuac

SEQ ID NO: 2114416 - RNA, 19 nt, Homo sapiens
  misc_RNA (1)...(19): siRNA sense strand
ccaccucaccugcaucuuc

SEQ ID NO: 2114417 - RNA, 19 nt, Homo sapiens
  misc_RNA (1)...(19): siRNA sense strand
gaaccaugaacuccuacga

SEQ ID NO: 2114418 - RNA, 19 nt, Homo sapiens
  misc_RNA (1)...(19): siRNA sense strand
gguuggagcagcuguuuca

SEQ ID NO: 2114419 - RNA, 19 nt, Homo sapiens
  misc_RNA (1)...(19): siRNA sense strand
cuggaaccaugaacuccua

SEQ ID NO: 2114420 - RNA, 19 nt, Homo sapiens
  misc_RNA (1)...(19): siRNA sense strand
gagaggaggaagaacucaa

SEQ ID NO: 2114421 - RNA, 19 nt, Homo sapiens
  misc_RNA (1)...(19): siRNA sense strand
caccucaccugcaucuucu

SEQ ID NO: 2114422 - RNA, 19 nt, Homo sapiens
  misc_RNA (1)...(19): siRNA sense strand
gaggaggaagaacucaaug

SEQ ID NO: 2114423 - RNA, 19 nt, Homo sapiens
  misc_RNA (1)...(19): siRNA sense strand
cagcuccaggccuuacuaa

SEQ ID NO: 2114424 - RNA, 19 nt, Homo sapiens
  misc_RNA (1)...(19): siRNA sense strand
caaacagccuuucaaauua

SEQ ID NO: 2114425 - RNA, 19 nt, Homo sapiens
  misc_RNA (1)...(19): siRNA sense strand
caacguauguggacaguua

SEQ ID NO: 2114426 - RNA, 19 nt, Homo sapiens
  misc_RNA (1)...(19): siRNA sense strand
gaaacuggauuacuuugua

SEQ ID NO: 2114427 - RNA, 19 nt, Homo sapiens
  misc_RNA (1)...(19): siRNA sense strand
gaaagcaucucagaguuaa

SEQ ID NO: 2114428 - RNA, 19 nt, Homo sapiens
  misc_RNA (1)...(19): siRNA sense strand
gaagagaagaaacacauua

SEQ ID NO: 2114429 - RNA, 19 nt, Homo sapiens
  misc_RNA (1)...(19): siRNA sense strand
gggaugaagucucugauaa

SEQ ID NO: 2114430 - RNA, 19 nt, Homo sapiens
  misc_RNA (1)...(19): siRNA sense strand
gauaaggacuguaaugauc

SEQ ID NO: 2114431 - RNA, 19 nt, Homo sapiens
  misc_RNA (1)...(19): siRNA sense strand
ggaaacugcucaucaagga

SEQ ID NO: 2114432 - RNA, 19 nt, Homo sapiens
  misc_RNA (1)...(19): siRNA sense strand
uuacagcaauccaguauuu

SEQ ID NO: 2114433 - RNA, 19 nt, Homo sapiens
  misc_RNA (1)...(19): siRNA sense strand
agaggcaucuucugcauua

SEQ ID NO: 2114434 - RNA, 19 nt, Homo sapiens
  misc_RNA (1)...(19): siRNA sense strand
acaaacagccuuucaaauu

SEQ ID NO: 2114435 - RNA, 19 nt, Homo sapiens
  misc_RNA (1)...(19): siRNA sense strand
uuagcgaacuucagauuua

SEQ ID NO: 2114436 - RNA, 19 nt, Homo sapiens
  misc_RNA (1)...(19): siRNA sense strand
gacaguauaugaucucaga

SEQ ID NO: 2114437 - RNA, 19 nt, Homo sapiens
  misc_RNA (1)...(19): siRNA sense strand
cgaggaggcuguuauugaa

SEQ ID NO: 2114438 - RNA, 19 nt, Homo sapiens
  misc_RNA (1)...(19): siRNA sense strand
ggagucguguccugugaua

SEQ ID NO: 2114439 - RNA, 19 nt, Homo sapiens
  misc_RNA (1)...(19): siRNA sense strand
gagaaaagcuggaguucaa

SEQ ID NO: 2114440 - RNA, 19 nt, Homo sapiens
  misc_RNA (1)...(19): siRNA sense strand
gccuggagauuuauuaauu

SEQ ID NO: 2114441 - RNA, 19 nt, Homo sapiens
  misc_RNA (1)...(19): siRNA sense strand
ggaucuaccugucagcauu

SEQ ID NO: 2114442 - RNA, 19 nt, Homo sapiens
  misc_RNA (1)...(19): siRNA sense strand
caauaacaguggccagaaa

SEQ ID NO: 2114443 - RNA, 19 nt, Homo sapiens
  misc_RNA (1)...(19): siRNA sense strand
acacagggcuuccgaguca

SEQ ID NO: 2114444 - RNA, 19 nt, Homo sapiens
  misc_RNA (1)...(19): siRNA sense strand
ggacgagaguuaugaccuu

SEQ ID NO: 2114445 - RNA, 19 nt, Homo sapiens
  misc_RNA (1)...(19): siRNA sense strand
gggaugaucuauacucugu

SEQ ID NO: 2114446 - RNA, 19 nt, Homo sapiens
  misc_RNA (1)...(19): siRNA sense strand
gaaaauugguucuuuggaa

SEQ ID NO: 2114447 - RNA, 19 nt, Homo sapiens
  misc_RNA (1)...(19): siRNA sense strand
uaagaaagccagaccuaaa

SEQ ID NO: 2114448 - RNA, 19 nt, Homo sapiens
  misc_RNA (1)...(19): siRNA sense strand
ggauccaucuucucauuug

SEQ ID NO: 2114449 - RNA, 19 nt, Homo sapiens
  misc_RNA (1)...(19): siRNA sense strand
acaagaagcuggaaaauga

SEQ ID NO: 2114450 - RNA, 19 nt, Homo sapiens
  misc_RNA (1)...(19): siRNA sense strand
ggaaagcccuugacgucau

SEQ ID NO: 2114451 - RNA, 19 nt, Homo sapiens
  misc_RNA (1)...(19): siRNA sense strand
gcuuaguucugccaagaua

SEQ ID NO: 2114452 - RNA, 19 nt, Homo sapiens
  misc_RNA (1)...(19): siRNA sense strand
gagaagaacaggagauuag

SEQ ID NO: 2114453 - RNA, 19 nt, Homo sapiens
  misc_RNA (1)...(19): siRNA sense strand
gagaaggaaguuaccauuu

SEQ ID NO: 2114454 - RNA, 19 nt, Homo sapiens
  misc_RNA (1)...(19): siRNA sense strand
ucaggaaguucacagcuuu

SEQ ID NO: 2114455 - RNA, 19 nt, Homo sapiens
  misc_RNA (1)...(19): siRNA sense strand
gauccauucucuacccuaa

SEQ ID NO: 2114456 - RNA, 19 nt, Homo sapiens
  misc_RNA (1)...(19): siRNA sense strand
ccuggugccuggagauuua

SEQ ID NO: 2114457 - RNA, 19 nt, Homo sapiens
  misc_RNA (1)...(19): siRNA sense strand
cagaggagguggugaggaa

SEQ ID NO: 2114458 - RNA, 19 nt, Homo sapiens
  misc_RNA (1)...(19): siRNA sense strand
ggacagcuuugaagugaag

SEQ ID NO: 2114459 - RNA, 19 nt, Homo sapiens
  misc_RNA (1)...(19): siRNA sense strand
gaugaagucucugauaaag

SEQ ID NO: 2114460 - RNA, 19 nt, Homo sapiens
  misc_RNA (1)...(19): siRNA sense strand
caaauuaccaguuucuguu

SEQ ID NO: 2114461 - RNA, 19 nt, Homo sapiens
  misc_RNA (1)...(19): siRNA sense strand
ugaaagcaucucagaguua

SEQ ID NO: 2114462 - RNA, 19 nt, Homo sapiens
  misc_RNA (1)...(19): siRNA sense strand
gacgagaguuaugaccuua

SEQ ID NO: 2114463 - RNA, 19 nt, Homo sapiens
  misc_RNA (1)...(19): siRNA sense strand
ugacaagacaggcaccuua

SEQ ID NO: 2114464 - RNA, 19 nt, Homo sapiens
  misc_RNA (1)...(19): siRNA sense strand
ccauaucuuugacaguaua

SEQ ID NO: 2114465 - RNA, 19 nt, Homo sapiens
  misc_RNA (1)...(19): siRNA sense strand
aauagcaccuucacaaguu

SEQ ID NO: 2114466 - RNA, 19 nt, Homo sapiens
  misc_RNA (1)...(19): siRNA sense strand
ggacgugcagcucucguua

SEQ ID NO: 2114467 - RNA, 19 nt, Homo sapiens
  misc_RNA (1)...(19): siRNA sense strand
ggaugaagucucugauaaa

SEQ ID NO: 2114468 - RNA, 19 nt, Homo sapiens
  misc_RNA (1)...(19): siRNA sense strand
gacaacggaugaauuccaa

SEQ ID NO: 2114469 - RNA, 19 nt, Homo sapiens
  misc_RNA (1)...(19): siRNA sense strand
ugagagcaaugaagaacaa

SEQ ID NO: 2114470 - RNA, 19 nt, Homo sapiens
  misc_RNA (1)...(19): siRNA sense strand
ggaacaaucaacuguauca

SEQ ID NO: 2114471 - RNA, 19 nt, Homo sapiens
  misc_RNA (1)...(19): siRNA sense strand
ggagaaaguauuccaguca

SEQ ID NO: 2114472 - RNA, 19 nt, Homo sapiens
  misc_RNA (1)...(19): siRNA sense strand
gcagcugugugguggauga

SEQ ID NO: 2114473 - RNA, 19 nt, Homo sapiens
  misc_RNA (1)...(19): siRNA sense strand
gcauuacggucucuguaug

SEQ ID NO: 2114474 - RNA, 19 nt, Homo sapiens
  misc_RNA (1)...(19): siRNA sense strand
cuaauacuaucgauguuga

SEQ ID NO: 2114475 - RNA, 19 nt, Homo sapiens
  misc_RNA (1)...(19): siRNA sense strand
ugacagaugaggaguauau

SEQ ID NO: 2114476 - RNA, 19 nt, Homo sapiens
  misc_RNA (1)...(19): siRNA sense strand
guuaaaccuugucugcuuu

SEQ ID NO: 2114477 - RNA, 19 nt, Homo sapiens
  misc_RNA (1)...(19): siRNA sense strand
gaugaucuauacucugugu

SEQ ID NO: 2114478 - RNA, 19 nt, Homo sapiens
  misc_RNA (1)...(19): siRNA sense strand
gcucugaccacaggcauua

SEQ ID NO: 2114479 - RNA, 19 nt, Homo sapiens
  misc_RNA (1)...(19): siRNA sense strand
gaaggaaguuaccauuuug

SEQ ID NO: 2114480 - RNA, 19 nt, Homo sapiens
  misc_RNA (1)...(19): siRNA sense strand
ggacguuaguagaagagaa

SEQ ID NO: 2114481 - RNA, 19 nt, Homo sapiens
  misc_RNA (1)...(19): siRNA sense strand
caucggcacugcaaagaau

SEQ ID NO: 2114482 - RNA, 19 nt, Homo sapiens
  misc_RNA (1)...(19): siRNA sense strand
gaucuaccugucagcauua

SEQ ID NO: 2114483 - RNA, 19 nt, Homo sapiens
  misc_RNA (1)...(19): siRNA sense strand
gcucuuguguucucuaaag

SEQ ID NO: 2114484 - RNA, 19 nt, Homo sapiens
  misc_RNA (1)...(19): siRNA sense strand
gugcguaccucaccuuauc

SEQ ID NO: 2114485 - RNA, 19 nt, Homo sapiens
  misc_RNA (1)...(19): siRNA sense strand
ggaauggcuuucaggaagu

SEQ ID NO: 2114486 - RNA, 19 nt, Homo sapiens
  misc_RNA (1)...(19): siRNA sense strand
ucaaggagguucuaaaucc

SEQ ID NO: 2114487 - RNA, 19 nt, Homo sapiens
  misc_RNA (1)...(19): siRNA sense strand
guugcaagcugucacaugu

SEQ ID NO: 2114488 - RNA, 19 nt, Homo sapiens
  misc_RNA (1)...(19): siRNA sense strand
caaugaagaacaacucuga

SEQ ID NO: 2114489 - RNA, 19 nt, Homo sapiens
  misc_RNA (1)...(19): siRNA sense strand
gcagaggagugucuuacag

SEQ ID NO: 2114490 - RNA, 19 nt, Homo sapiens
  misc_RNA (1)...(19): siRNA sense strand
uaaaagauguuucggcuau

SEQ ID NO: 2114491 - RNA, 19 nt, Homo sapiens
  misc_RNA (1)...(19): siRNA sense strand
gauaaaggcagagaaggaa

SEQ ID NO: 2114492 - RNA, 19 nt, Homo sapiens
  misc_RNA (1)...(19): siRNA sense strand
gaaggacaguuccagaaaa

SEQ ID NO: 2114493 - RNA, 19 nt, Homo sapiens
  misc_RNA (1)...(19): siRNA sense strand
gaggacaacggaugaauuc

SEQ ID NO: 2114494 - RNA, 19 nt, Homo sapiens
  misc_RNA (1)...(19): siRNA sense strand
gaaagcccuugacgucauc

SEQ ID NO: 2114495 - RNA, 19 nt, Homo sapiens
  misc_RNA (1)...(19): siRNA sense strand
agagggacuuggcaaauga

SEQ ID NO: 2114496 - RNA, 19 nt, Homo sapiens
  misc_RNA (1)...(19): siRNA sense strand
gaaaguaauagcaccuuca

SEQ ID NO: 2114497 - RNA, 19 nt, Homo sapiens
  misc_RNA (1)...(19): siRNA sense strand
gggagacgguagaaucaga

SEQ ID NO: 2114498 - RNA, 19 nt, Homo sapiens
  misc_RNA (1)...(19): siRNA sense strand
ucauagcacuggccuacaa

SEQ ID NO: 2114499 - RNA, 19 nt, Homo sapiens
  misc_RNA (1)...(19): siRNA sense strand
gugaagacuauaaggaaua

SEQ ID NO: 2114500 - RNA, 19 nt, Homo sapiens
  misc_RNA (1)...(19): siRNA sense strand
acccuaagcuggugccuuu

SEQ ID NO: 2114501 - RNA, 19 nt, Homo sapiens
  misc_RNA (1)...(19): siRNA sense strand
guucagaagguuccuauug

SEQ ID NO: 2114502 - RNA, 19 nt, Homo sapiens
  misc_RNA (1)...(19): siRNA sense strand
gcucaucucagcccggaua

SEQ ID NO: 2114503 - RNA, 19 nt, Homo sapiens
  misc_RNA (1)...(19): siRNA sense strand
gacaagacaggcaccuuaa

SEQ ID NO: 2114504 - RNA, 19 nt, Homo sapiens
  misc_RNA (1)...(19): siRNA sense strand
gugaugccguucugauuga

SEQ ID NO: 2114505 - RNA, 19 nt, Homo sapiens
  misc_RNA (1)...(19): siRNA sense strand
guagguauguguggugaug

SEQ ID NO: 2114506 - RNA, 19 nt, Homo sapiens
  misc_RNA (1)...(19): siRNA sense strand
aaacagccuuucaaauuac

SEQ ID NO: 2114507 - RNA, 19 nt, Homo sapiens
  misc_RNA (1)...(19): siRNA sense strand
gaagguuccuauugcuaca

SEQ ID NO: 2114508 - RNA, 19 nt, Homo sapiens
  misc_RNA (1)...(19): siRNA sense strand
gcacguaugggcacauugu

SEQ ID NO: 2114509 - RNA, 19 nt, Homo sapiens
  misc_RNA (1)...(19): siRNA sense strand
agacaaacagccuuucaaa

SEQ ID NO: 2114510 - RNA, 19 nt, Homo sapiens
  misc_RNA (1)...(19): siRNA sense strand
ggaaucaggacaauuacau

SEQ ID NO: 2114511 - RNA, 19 nt, Homo sapiens
  misc_RNA (1)...(19): siRNA sense strand
aaucuggaaugguuucuga

SEQ ID NO: 2114512 - RNA, 19 nt, Homo sapiens
  misc_RNA (1)...(19): siRNA sense strand
agacaguacccacuaguuu

SEQ ID NO: 2114513 - RNA, 19 nt, Homo sapiens
  misc_RNA (1)...(19): siRNA sense strand
gaauggcuuucaggaaguu

SEQ ID NO: 2114514 - RNA, 19 nt, Homo sapiens
  misc_RNA (1)...(19): siRNA sense strand
cgagaguuaugaccuuaga

SEQ ID NO: 2114515 - RNA, 19 nt, Homo sapiens
  misc_RNA (1)...(19): siRNA sense strand
caugacagaugaggaguau

SEQ ID NO: 2114516 - RNA, 19 nt, Homo sapiens
  misc_RNA (1)...(19): siRNA sense strand
gaagaacaggagauuagga

SEQ ID NO: 2114517 - RNA, 19 nt, Homo sapiens
  misc_RNA (1)...(19): siRNA sense strand
caacggacgagaguuauga

SEQ ID NO: 2114518 - RNA, 19 nt, Homo sapiens
  misc_RNA (1)...(19): siRNA sense strand
cagagggacuuggcaaaug

SEQ ID NO: 2114519 - RNA, 19 nt, Homo sapiens
  misc_RNA (1)...(19): siRNA sense strand
gaaucaggacaauuacauu

SEQ ID NO: 2114520 - RNA, 19 nt, Homo sapiens
  misc_RNA (1)...(19): siRNA sense strand
ggauaaggacuguaaugau

SEQ ID NO: 2114521 - RNA, 19 nt, Homo sapiens
  misc_RNA (1)...(19): siRNA sense strand
cgacuggcauucaugaaag

SEQ ID NO: 2114522 - RNA, 19 nt, Homo sapiens
  misc_RNA (1)...(19): siRNA sense strand
ccauugggaugaucuauac

SEQ ID NO: 2114523 - RNA, 19 nt, Homo sapiens
  misc_RNA (1)...(19): siRNA sense strand
ucagaaacuggauuacuuu

SEQ ID NO: 2114524 - RNA, 19 nt, Homo sapiens
  misc_RNA (1)...(19): siRNA sense strand
gcgccaagcucuaugacaa

SEQ ID NO: 2114525 - RNA, 19 nt, Homo sapiens
  misc_RNA (1)...(19): siRNA sense strand
gaaaucagaaacagccaaa

SEQ ID NO: 2114526 - RNA, 19 nt, Homo sapiens
  misc_RNA (1)...(19): siRNA sense strand
gagcuggcccugacacuga

SEQ ID NO: 2114527 - RNA, 19 nt, Homo sapiens
  misc_RNA (1)...(19): siRNA sense strand
caacaccgccuccucacuu

SEQ ID NO: 2114528 - RNA, 19 nt, Homo sapiens
  misc_RNA (1)...(19): siRNA sense strand
ggucaccgcugaugcugau

SEQ ID NO: 2114529 - RNA, 19 nt, Homo sapiens
  misc_RNA (1)...(19): siRNA sense strand
gccaagcucuaugacaaga

SEQ ID NO: 2114530 - RNA, 19 nt, Homo sapiens
  misc_RNA (1)...(19): siRNA sense strand
gcaagacgcacaaguucuc

SEQ ID NO: 2114531 - RNA, 19 nt, Homo sapiens
  misc_RNA (1)...(19): siRNA sense strand
gggcaagacgcacaaguuc

SEQ ID NO: 2114532 - RNA, 19 nt, Homo sapiens
  misc_RNA (1)...(19): siRNA sense strand
agaccgagcuggaaaucag

SEQ ID NO: 2114533 - RNA, 19 nt, Homo sapiens
  misc_RNA (1)...(19): siRNA sense strand
gagcuggaaaucagaaaca

SEQ ID NO: 2114534 - RNA, 19 nt, Homo sapiens
  misc_RNA (1)...(19): siRNA sense strand
caacauccucucccagcuu

SEQ ID NO: 2114535 - RNA, 19 nt, Homo sapiens
  misc_RNA (1)...(19): siRNA sense strand
aagugucgcuucugcugaa

SEQ ID NO: 2114536 - RNA, 19 nt, Homo sapiens
  misc_RNA (1)...(19): siRNA sense strand
ugucccagcuaaacagugu

SEQ ID NO: 2114537 - RNA, 19 nt, Homo sapiens
  misc_RNA (1)...(19): siRNA sense strand
gagacugguccaacgcuau

SEQ ID NO: 2114538 - RNA, 19 nt, Homo sapiens
  misc_RNA (1)...(19): siRNA sense strand
caagagcgaccccuacuau

SEQ ID NO: 2114539 - RNA, 19 nt, Homo sapiens
  misc_RNA (1)...(19): siRNA sense strand
uggccucugucccagcuaa

SEQ ID NO: 2114540 - RNA, 19 nt, Homo sapiens
  misc_RNA (1)...(19): siRNA sense strand
gcucaggcaggaaugauac

SEQ ID NO: 2114541 - RNA, 19 nt, Homo sapiens
  misc_RNA (1)...(19): siRNA sense strand
ggaggucaccgcugaugcu

SEQ ID NO: 2114542 - RNA, 19 nt, Homo sapiens
  misc_RNA (1)...(19): siRNA sense strand
ggagcucaggcaggaauga

SEQ ID NO: 2114543 - RNA, 19 nt, Homo sapiens
  misc_RNA (1)...(19): siRNA sense strand
cgggcaagacgcacaaguu

SEQ ID NO: 2114544 - RNA, 19 nt, Homo sapiens
  misc_RNA (1)...(19): siRNA sense strand
caaaagaaaucucgccauu

SEQ ID NO: 2114545 - RNA, 19 nt, Homo sapiens
  misc_RNA (1)...(19): siRNA sense strand
aaagaaaucucgccauugc

SEQ ID NO: 2114546 - RNA, 19 nt, Homo sapiens
  misc_RNA (1)...(19): siRNA sense strand
gccaguguuucaccuguuu

SEQ ID NO: 2114547 - RNA, 19 nt, Homo sapiens
  misc_RNA (1)...(19): siRNA sense strand
gagaacagaaagcacagaa

SEQ ID NO: 2114548 - RNA, 19 nt, Homo sapiens
  misc_RNA (1)...(19): siRNA sense strand
uugcgaauguuuccaagaa

SEQ ID NO: 2114549 - RNA, 19 nt, Homo sapiens
  misc_RNA (1)...(19): siRNA sense strand
gaugggagccuggccuuug

SEQ ID NO: 2114550 - RNA, 19 nt, Homo sapiens
  misc_RNA (1)...(19): siRNA sense strand
ccaagaagcagcucagcau

SEQ ID NO: 2114551 - RNA, 19 nt, Homo sapiens
  misc_RNA (1)...(19): siRNA sense strand
ggaauggguaaaucacuca

SEQ ID NO: 2114552 - RNA, 19 nt, Homo sapiens
  misc_RNA (1)...(19): siRNA sense strand
gcacguuggaggaaaucaa

SEQ ID NO: 2114553 - RNA, 19 nt, Homo sapiens
  misc_RNA (1)...(19): siRNA sense strand
acaaagaauccaaggacuu

SEQ ID NO: 2114554 - RNA, 19 nt, Homo sapiens
  misc_RNA (1)...(19): siRNA sense strand
gcucagcaugggagagaaa

SEQ ID NO: 2114555 - RNA, 19 nt, Homo sapiens
  misc_RNA (1)...(19): siRNA sense strand
gagccuggccuuugagaac

SEQ ID NO: 2114556 - RNA, 19 nt, Homo sapiens
  misc_RNA (1)...(19): siRNA sense strand
ggccaguguuucaccuguu

SEQ ID NO: 2114557 - RNA, 19 nt, Homo sapiens
  misc_RNA (1)...(19): siRNA sense strand
gaucuggagggaagacugu

SEQ ID NO: 2114558 - RNA, 19 nt, Homo sapiens
  misc_RNA (1)...(19): siRNA sense strand
uggaggaaaucaaaagaaa

SEQ ID NO: 2114559 - RNA, 19 nt, Homo sapiens
  misc_RNA (1)...(19): siRNA sense strand
ucaccuguuuaucggaguu

SEQ ID NO: 2114560 - RNA, 19 nt, Homo sapiens
  misc_RNA (1)...(19): siRNA sense strand
gucacccucuugcgaaugu

SEQ ID NO: 2114561 - RNA, 19 nt, Homo sapiens
  misc_RNA (1)...(19): siRNA sense strand
gaggaaaucaaaagaaauc

SEQ ID NO: 2114562 - RNA, 19 nt, Homo sapiens
  misc_RNA (1)...(19): siRNA sense strand
cacguuggaggaaaucaaa

SEQ ID NO: 2114563 - RNA, 19 nt, Homo sapiens
  misc_RNA (1)...(19): siRNA sense strand
gcauguaccagguucagua

SEQ ID NO: 2114564 - RNA, 19 nt, Homo sapiens
  misc_RNA (1)...(19): siRNA sense strand
gcugagggcccauuucuug

SEQ ID NO: 2114565 - RNA, 19 nt, Homo sapiens
  misc_RNA (1)...(19): siRNA sense strand
agaccuuccuggugaauga

SEQ ID NO: 2114566 - RNA, 19 nt, Homo sapiens
  misc_RNA (1)...(19): siRNA sense strand
ucacuuguaucgccuccaa

SEQ ID NO: 2114567 - RNA, 19 nt, Homo sapiens
  misc_RNA (1)...(19): siRNA sense strand
gccagauggugaaccuaaa

SEQ ID NO: 2114568 - RNA, 19 nt, Homo sapiens
  misc_RNA (1)...(19): siRNA sense strand
ggccagauggugaaccuaa

SEQ ID NO: 2114569 - RNA, 19 nt, Homo sapiens
  misc_RNA (1)...(19): siRNA sense strand
gacccgcgaggacgacuua

SEQ ID NO: 2114570 - RNA, 19 nt, Homo sapiens
  misc_RNA (1)...(19): siRNA sense strand
gcuggagaguaccguguga

SEQ ID NO: 2114571 - RNA, 19 nt, Homo sapiens
  misc_RNA (1)...(19): siRNA sense strand
ggaccuucgugcagcuuca

SEQ ID NO: 2114572 - RNA, 19 nt, Homo sapiens
  misc_RNA (1)...(19): siRNA sense strand
gaccaggugccaacgauuc

SEQ ID NO: 2114573 - RNA, 19 nt, Homo sapiens
  misc_RNA (1)...(19): siRNA sense strand
gauccgcuauaagguguau

SEQ ID NO: 2114574 - RNA, 19 nt, Homo sapiens
  misc_RNA (1)...(19): siRNA sense strand
ccaaccgccugcauaaacu

SEQ ID NO: 2114575 - RNA, 19 nt, Homo sapiens
  misc_RNA (1)...(19): siRNA sense strand
cagguucaguacaacaguu

SEQ ID NO: 2114576 - RNA, 19 nt, Homo sapiens
  misc_RNA (1)...(19): siRNA sense strand
ccuccaaccgccugcauaa

SEQ ID NO: 2114577 - RNA, 19 nt, Homo sapiens
  misc_RNA (1)...(19): siRNA sense strand
cagaccaggugccaacgau

SEQ ID NO: 2114578 - RNA, 19 nt, Homo sapiens
  misc_RNA (1)...(19): siRNA sense strand
gaguggaugcuggagagua

SEQ ID NO: 2114579 - RNA, 19 nt, Homo sapiens
  misc_RNA (1)...(19): siRNA sense strand
gccgagacuucgccaacau

SEQ ID NO: 2114580 - RNA, 19 nt, Homo sapiens
  misc_RNA (1)...(19): siRNA sense strand
acaaugcugugcgccaaga

SEQ ID NO: 2114581 - RNA, 19 nt, Homo sapiens
  misc_RNA (1)...(19): siRNA sense strand
cgagacuucgccaacauga

SEQ ID NO: 2114582 - RNA, 19 nt, Homo sapiens
  misc_RNA (1)...(19): siRNA sense strand
ggacuacggggcacuauuc

SEQ ID NO: 2114583 - RNA, 19 nt, Homo sapiens
  misc_RNA (1)...(19): siRNA sense strand
caccugauccuuggaaaca

SEQ ID NO: 2114584 - RNA, 19 nt, Homo sapiens
  misc_RNA (1)...(19): siRNA sense strand
gcucaugauccgcuauaag

SEQ ID NO: 2114585 - RNA, 19 nt, Homo sapiens
  misc_RNA (1)...(19): siRNA sense strand
gcucaccgacaacuucauc

SEQ ID NO: 2114586 - RNA, 19 nt, Homo sapiens
  misc_RNA (1)...(19): siRNA sense strand
cuucaucguucugcucaug

SEQ ID NO: 2114587 - RNA, 19 nt, Homo sapiens
  misc_RNA (1)...(19): siRNA sense strand
gguccucgucuucaucguu

SEQ ID NO: 2114588 - RNA, 19 nt, Homo sapiens
  misc_RNA (1)...(19): siRNA sense strand
gcgaguggugggcugugua

SEQ ID NO: 2114589 - RNA, 19 nt, Homo sapiens
  misc_RNA (1)...(19): siRNA sense strand
uauuccagagccacaguua

SEQ ID NO: 2114590 - RNA, 19 nt, Homo sapiens
  misc_RNA (1)...(19): siRNA sense strand
gaagagcgguuggcuagug

SEQ ID NO: 2114591 - RNA, 19 nt, Homo sapiens
  misc_RNA (1)...(19): siRNA sense strand
gaacacgccuugggugaug

SEQ ID NO: 2114592 - RNA, 19 nt, Homo sapiens
  misc_RNA (1)...(19): siRNA sense strand
ugaaagaugugcccucaug

SEQ ID NO: 2114593 - RNA, 19 nt, Homo sapiens
  misc_RNA (1)...(19): siRNA sense strand
aggagaacaucaccaguua

SEQ ID NO: 2114594 - RNA, 19 nt, Homo sapiens
  misc_RNA (1)...(19): siRNA sense strand
ccagagcccuccuaccauu

SEQ ID NO: 2114595 - RNA, 19 nt, Homo sapiens
  misc_RNA (1)...(19): siRNA sense strand
gcaguggcaugaaagaugu

SEQ ID NO: 2114596 - RNA, 19 nt, Homo sapiens
  misc_RNA (1)...(19): siRNA sense strand
cacuagagaugcagaacua

SEQ ID NO: 2114597 - RNA, 19 nt, Homo sapiens
  misc_RNA (1)...(19): siRNA sense strand
ggauggcaguggcaugaaa

SEQ ID NO: 2114598 - RNA, 19 nt, Homo sapiens
  misc_RNA (1)...(19): siRNA sense strand
caucaucacucccaucaag

SEQ ID NO: 2114599 - RNA, 19 nt, Homo sapiens
  misc_RNA (1)...(19): siRNA sense strand
gaggagaacaucaccaguu

SEQ ID NO: 2114600 - RNA, 19 nt, Homo sapiens
  misc_RNA (1)...(19): siRNA sense strand
gcaacagcaugcccaguca

SEQ ID NO: 2114601 - RNA, 19 nt, Homo sapiens
  misc_RNA (1)...(19): siRNA sense strand
gagagucgccagcugcuuu

SEQ ID NO: 2114602 - RNA, 19 nt, Homo sapiens
  misc_RNA (1)...(19): siRNA sense strand
gcgcaaagccgcacuagag

SEQ ID NO: 2114603 - RNA, 19 nt, Homo sapiens
  misc_RNA (1)...(19): siRNA sense strand
ucacggagacgcagaagaa

SEQ ID NO: 2114604 - RNA, 19 nt, Homo sapiens
  misc_RNA (1)...(19): siRNA sense strand
cagcaggaguccaaagaga

SEQ ID NO: 2114605 - RNA, 19 nt, Homo sapiens
  misc_RNA (1)...(19): siRNA sense strand
gaggagaugaugacacuga

SEQ ID NO: 2114606 - RNA, 19 nt, Homo sapiens
  misc_RNA (1)...(19): siRNA sense strand
ggccugaccuggagaucaa

SEQ ID NO: 2114607 - RNA, 19 nt, Homo sapiens
  misc_RNA (1)...(19): siRNA sense strand
gcagaaaggcugggcauuc

SEQ ID NO: 2114608 - RNA, 19 nt, Homo sapiens
  misc_RNA (1)...(19): siRNA sense strand
ucaagucccuagagaagga

SEQ ID NO: 2114609 - RNA, 19 nt, Homo sapiens
  misc_RNA (1)...(19): siRNA sense strand
gcagcccucuucucacaga

SEQ ID NO: 2114610 - RNA, 19 nt, Homo sapiens
  misc_RNA (1)...(19): siRNA sense strand
gaaaagugccugacucaug

SEQ ID NO: 2114611 - RNA, 19 nt, Homo sapiens
  misc_RNA (1)...(19): siRNA sense strand
aaaagugccugacucauga

SEQ ID NO: 2114612 - RNA, 19 nt, Homo sapiens
  misc_RNA (1)...(19): siRNA sense strand
caaagccgcacuagagaug

SEQ ID NO: 2114613 - RNA, 19 nt, Homo sapiens
  misc_RNA (1)...(19): siRNA sense strand
agaaagugcuggccuacuc

SEQ ID NO: 2114614 - RNA, 19 nt, Homo sapiens
  misc_RNA (1)...(19): siRNA sense strand
gaacuaccggcagcagaaa

SEQ ID NO: 2114615 - RNA, 19 nt, Homo sapiens
  misc_RNA (1)...(19): siRNA sense strand
cagaagaaacggcugcuau

SEQ ID NO: 2114616 - RNA, 19 nt, Homo sapiens
  misc_RNA (1)...(19): siRNA sense strand
ccaguuaccuccagcucau

SEQ ID NO: 2114617 - RNA, 19 nt, Homo sapiens
  misc_RNA (1)...(19): siRNA sense strand
gaggauggcaguggcauga

SEQ ID NO: 2114618 - RNA, 19 nt, Homo sapiens
  misc_RNA (1)...(19): siRNA sense strand
agacagagcguccucaagu

SEQ ID NO: 2114619 - RNA, 19 nt, Homo sapiens
  misc_RNA (1)...(19): siRNA sense strand
gaaagugcuggccuacuca

SEQ ID NO: 2114620 - RNA, 19 nt, Homo sapiens
  misc_RNA (1)...(19): siRNA sense strand
gaaugagugugagcagaca

SEQ ID NO: 2114621 - RNA, 19 nt, Homo sapiens
  misc_RNA (1)...(19): siRNA sense strand
agagaaggaugugcuggaa

SEQ ID NO: 2114622 - RNA, 19 nt, Homo sapiens
  misc_RNA (1)...(19): siRNA sense strand
guaugcagcccucuucuca

SEQ ID NO: 2114623 - RNA, 19 nt, Homo sapiens
  misc_RNA (1)...(19): siRNA sense strand
ccacugaagcgcuccaugu

SEQ ID NO: 2114624 - RNA, 19 nt, Homo sapiens
  misc_RNA (1)...(19): siRNA sense strand
gacaaaaccuccaccaucu

SEQ ID NO: 2114625 - RNA, 19 nt, Homo sapiens
  misc_RNA (1)...(19): siRNA sense strand
gacagagcguccucaaguc

SEQ ID NO: 2114626 - RNA, 19 nt, Homo sapiens
  misc_RNA (1)...(19): siRNA sense strand
gcccucuucucacagauga

SEQ ID NO: 2114627 - RNA, 19 nt, Homo sapiens
  misc_RNA (1)...(19): siRNA sense strand
gcaaagccgcacuagagau

SEQ ID NO: 2114628 - RNA, 19 nt, Homo sapiens
  misc_RNA (1)...(19): siRNA sense strand
acaugaggcuacugcagaa

SEQ ID NO: 2114629 - RNA, 19 nt, Homo sapiens
  misc_RNA (1)...(19): siRNA sense strand
cgccagccaucaacaguau

SEQ ID NO: 2114630 - RNA, 19 nt, Homo sapiens
  misc_RNA (1)...(19): siRNA sense strand
gcccuccugucacuucuga

SEQ ID NO: 2114631 - RNA, 19 nt, Homo sapiens
  misc_RNA (1)...(19): siRNA sense strand
cagaaaggcugggcauucg

SEQ ID NO: 2114632 - RNA, 19 nt, Homo sapiens
  misc_RNA (1)...(19): siRNA sense strand
caaguaugcagcccucuuc

SEQ ID NO: 2114633 - RNA, 19 nt, Homo sapiens
  misc_RNA (1)...(19): siRNA sense strand
gcaggaguccaaagagaag

SEQ ID NO: 2114634 - RNA, 19 nt, Homo sapiens
  misc_RNA (1)...(19): siRNA sense strand
ggcaguggcaugaaagaug

SEQ ID NO: 2114635 - RNA, 19 nt, Homo sapiens
  misc_RNA (1)...(19): siRNA sense strand
gucgccagcugcuuuccua

SEQ ID NO: 2114636 - RNA, 19 nt, Homo sapiens
  misc_RNA (1)...(19): siRNA sense strand
uucaaaggcuggaaugagu

SEQ ID NO: 2114637 - RNA, 19 nt, Homo sapiens
  misc_RNA (1)...(19): siRNA sense strand
guccucaagucccuagaga

SEQ ID NO: 2114638 - RNA, 19 nt, Homo sapiens
  misc_RNA (1)...(19): siRNA sense strand
ucaagagccuccguuugca

SEQ ID NO: 2114639 - RNA, 19 nt, Homo sapiens
  misc_RNA (1)...(19): siRNA sense strand
ggaaggcgggaaccuacga

SEQ ID NO: 2114640 - RNA, 19 nt, Homo sapiens
  misc_RNA (1)...(19): siRNA sense strand
gaaggcgggaaccuacgaa

SEQ ID NO: 2114641 - RNA, 19 nt, Homo sapiens
  misc_RNA (1)...(19): siRNA sense strand
cagcggcaguucccaaugc

SEQ ID NO: 2114642 - RNA, 19 nt, Homo sapiens
  misc_RNA (1)...(19): siRNA sense strand
ugaagcuccuccggacauu

SEQ ID NO: 2114643 - RNA, 19 nt, Homo sapiens
  misc_RNA (1)...(19): siRNA sense strand
gaccagacgaggagaacau

SEQ ID NO: 2114644 - RNA, 19 nt, Homo sapiens
  misc_RNA (1)...(19): siRNA sense strand
ugaggcuacugcagaaagu

SEQ ID NO: 2114645 - RNA, 19 nt, Homo sapiens
  misc_RNA (1)...(19): siRNA sense strand
ccaggccauucucauguuc

SEQ ID NO: 2114646 - RNA, 19 nt, Homo sapiens
  misc_RNA (1)...(19): siRNA sense strand
gaagaaacggcugcuaucc

SEQ ID NO: 2114647 - RNA, 19 nt, Homo sapiens
  misc_RNA (1)...(19): siRNA sense strand
gcuggaaggcgggaaccua

SEQ ID NO: 2114648 - RNA, 19 nt, Homo sapiens
  misc_RNA (1)...(19): siRNA sense strand
gagcuacgaggagaugaug

SEQ ID NO: 2114649 - RNA, 19 nt, Homo sapiens
  misc_RNA (1)...(19): siRNA sense strand
gugcuggccuacucaaucg

SEQ ID NO: 2114650 - RNA, 19 nt, Homo sapiens
  misc_RNA (1)...(19): siRNA sense strand
agaacuaccggcagcagaa

SEQ ID NO: 2114651 - RNA, 19 nt, Homo sapiens
  misc_RNA (1)...(19): siRNA sense strand
caaagugugcacccaacug

SEQ ID NO: 2114652 - RNA, 19 nt, Homo sapiens
  misc_RNA (1)...(19): siRNA sense strand
ccucaagucccuagagaag

SEQ ID NO: 2114653 - RNA, 19 nt, Homo sapiens
  misc_RNA (1)...(19): siRNA sense strand
acgaggagaugaugacacu

SEQ ID NO: 2114654 - RNA, 19 nt, Homo sapiens
  misc_RNA (1)...(19): siRNA sense strand
gaugagcuacgaggagaug

SEQ ID NO: 2114655 - RNA, 19 nt, Homo sapiens
  misc_RNA (1)...(19): siRNA sense strand
ggcagcaggaguccaaaga

SEQ ID NO: 2114656 - RNA, 19 nt, Homo sapiens
  misc_RNA (1)...(19): siRNA sense strand
gccagcugcuuuccuaugc

SEQ ID NO: 2114657 - RNA, 19 nt, Homo sapiens
  misc_RNA (1)...(19): siRNA sense strand
caaaggcuggaaugagugu

SEQ ID NO: 2114658 - RNA, 19 nt, Homo sapiens
  misc_RNA (1)...(19): siRNA sense strand
cccaggccauucucauguu

SEQ ID NO: 2114659 - RNA, 19 nt, Homo sapiens
  misc_RNA (1)...(19): siRNA sense strand
gcacuagagaugcagaacu

SEQ ID NO: 2114660 - RNA, 19 nt, Homo sapiens
  misc_RNA (1)...(19): siRNA sense strand
ccagccaucaacaguauug

SEQ ID NO: 2114661 - RNA, 19 nt, Homo sapiens
  misc_RNA (1)...(19): siRNA sense strand
ugggagcaaugcaaacaca

SEQ ID NO: 2114662 - RNA, 19 nt, Homo sapiens
  misc_RNA (1)...(19): siRNA sense strand
cagaggccaagucggagua

SEQ ID NO: 2114663 - RNA, 19 nt, Homo sapiens
  misc_RNA (1)...(19): siRNA sense strand
agaagaaacggcugcuauc

SEQ ID NO: 2114664 - RNA, 19 nt, Homo sapiens
  misc_RNA (1)...(19): siRNA sense strand
ucucagaacgucaccaaag

SEQ ID NO: 2114665 - RNA, 19 nt, Homo sapiens
  misc_RNA (1)...(19): siRNA sense strand
ucaacaguauugggagcaa

SEQ ID NO: 2114666 - RNA, 19 nt, Homo sapiens
  misc_RNA (1)...(19): siRNA sense strand
caaaaccuccaccaucuga

SEQ ID NO: 2114667 - RNA, 19 nt, Homo sapiens
  misc_RNA (1)...(19): siRNA sense strand
ccaucaaggccuacagugu

SEQ ID NO: 2114668 - RNA, 19 nt, Homo sapiens
  misc_RNA (1)...(19): siRNA sense strand
augcagcccucuucucaca

SEQ ID NO: 2114669 - RNA, 19 nt, Homo sapiens
  misc_RNA (1)...(19): siRNA sense strand
gaacaccuuccaggaggau

SEQ ID NO: 2114670 - RNA, 19 nt, Homo sapiens
  misc_RNA (1)...(19): siRNA sense strand
ccuacucaaucgagagcaa

SEQ ID NO: 2114671 - RNA, 19 nt, Homo sapiens
  misc_RNA (1)...(19): siRNA sense strand
gagccuccguuugcacaag

SEQ ID NO: 2114672 - RNA, 19 nt, Homo sapiens
  misc_RNA (1)...(19): siRNA sense strand
gcaacacagaggccaaguc

SEQ ID NO: 2114673 - RNA, 19 nt, Homo sapiens
  misc_RNA (1)...(19): siRNA sense strand
gcaccuggagucucagaac

SEQ ID NO: 2114674 - RNA, 19 nt, Homo sapiens
  misc_RNA (1)...(19): siRNA sense strand
gaaccacccugcucucuug

SEQ ID NO: 2114675 - RNA, 19 nt, Homo sapiens
  misc_RNA (1)...(19): siRNA sense strand
gaccagagcucagugcuuu

SEQ ID NO: 2114676 - RNA, 19 nt, Homo sapiens
  misc_RNA (1)...(19): siRNA sense strand
gagccaagccuuacagaua

SEQ ID NO: 2114677 - RNA, 19 nt, Homo sapiens
  misc_RNA (1)...(19): siRNA sense strand
gcauagaagucacaugguu

SEQ ID NO: 2114678 - RNA, 19 nt, Homo sapiens
  misc_RNA (1)...(19): siRNA sense strand
ccaaggagauuuguucuga

SEQ ID NO: 2114679 - RNA, 19 nt, Homo sapiens
  misc_RNA (1)...(19): siRNA sense strand
ugacagcgguugccuggua

SEQ ID NO: 2114680 - RNA, 19 nt, Homo sapiens
  misc_RNA (1)...(19): siRNA sense strand
gagcuggccuucccacuga

SEQ ID NO: 2114681 - RNA, 19 nt, Homo sapiens
  misc_RNA (1)...(19): siRNA sense strand
cagcugcccucuccagaua

SEQ ID NO: 2114682 - RNA, 19 nt, Homo sapiens
  misc_RNA (1)...(19): siRNA sense strand
gagaagaggcuguggauuc

SEQ ID NO: 2114683 - RNA, 19 nt, Homo sapiens
  misc_RNA (1)...(19): siRNA sense strand
cagaagagccucauagaug

SEQ ID NO: 2114684 - RNA, 19 nt, Homo sapiens
  misc_RNA (1)...(19): siRNA sense strand
gaucaaggccacccagaaa

SEQ ID NO: 2114685 - RNA, 19 nt, Homo sapiens
  misc_RNA (1)...(19): siRNA sense strand
ccucauagaugcccauguu

SEQ ID NO: 2114686 - RNA, 19 nt, Homo sapiens
  misc_RNA (1)...(19): siRNA sense strand
ggagauuuguucugauuuc

SEQ ID NO: 2114687 - RNA, 19 nt, Homo sapiens
  misc_RNA (1)...(19): siRNA sense strand
ggaccucaaucacugaaga

SEQ ID NO: 2114688 - RNA, 19 nt, Homo sapiens
  misc_RNA (1)...(19): siRNA sense strand
ccgaagaggugaagugugu

SEQ ID NO: 2114689 - RNA, 19 nt, Homo sapiens
  misc_RNA (1)...(19): siRNA sense strand
uggaagggcucgaaaguuc

SEQ ID NO: 2114690 - RNA, 19 nt, Homo sapiens
  misc_RNA (1)...(19): siRNA sense strand
gcccaaccuuccugaaauu

SEQ ID NO: 2114691 - RNA, 19 nt, Homo sapiens
  misc_RNA (1)...(19): siRNA sense strand
gacacgugcugguauguga

SEQ ID NO: 2114692 - RNA, 19 nt, Homo sapiens
  misc_RNA (1)...(19): siRNA sense strand
cuacaaaggccacaucuuc

SEQ ID NO: 2114693 - RNA, 19 nt, Homo sapiens
  misc_RNA (1)...(19): siRNA sense strand
gaaaacagccugcauugug

SEQ ID NO: 2114694 - RNA, 19 nt, Homo sapiens
  misc_RNA (1)...(19): siRNA sense strand
cauagaagucacaugguua

SEQ ID NO: 2114695 - RNA, 19 nt, Homo sapiens
  misc_RNA (1)...(19): siRNA sense strand
ccuagucucucugacauuu

SEQ ID NO: 2114696 - RNA, 19 nt, Homo sapiens
  misc_RNA (1)...(19): siRNA sense strand
aaaguaagccuguccuaga

SEQ ID NO: 2114697 - RNA, 19 nt, Homo sapiens
  misc_RNA (1)...(19): siRNA sense strand
gucuacauguuuccaauuu

SEQ ID NO: 2114698 - RNA, 19 nt, Homo sapiens
  misc_RNA (1)...(19): siRNA sense strand
gcgguugccugguacauca

SEQ ID NO: 2114699 - RNA, 19 nt, Homo sapiens
  misc_RNA (1)...(19): siRNA sense strand
gaagaggugaaguguguga

SEQ ID NO: 2114700 - RNA, 19 nt, Homo sapiens
  misc_RNA (1)...(19): siRNA sense strand
aaggagauuuguucugauu

SEQ ID NO: 2114701 - RNA, 19 nt, Homo sapiens
  misc_RNA (1)...(19): siRNA sense strand
gcucgaaaguuccauugca

SEQ ID NO: 2114702 - RNA, 19 nt, Homo sapiens
  misc_RNA (1)...(19): siRNA sense strand
gcagaagagccucauagau

SEQ ID NO: 2114703 - RNA, 19 nt, Homo sapiens
  misc_RNA (1)...(19): siRNA sense strand
agaagaggcuguggauuca

SEQ ID NO: 2114704 - RNA, 19 nt, Homo sapiens
  misc_RNA (1)...(19): siRNA sense strand
gcgaaacccucacauucca

SEQ ID NO: 2114705 - RNA, 19 nt, Homo sapiens
  misc_RNA (1)...(19): siRNA sense strand
gaagcuauuguguccauga

SEQ ID NO: 2114706 - RNA, 19 nt, Homo sapiens
  misc_RNA (1)...(19): siRNA sense strand
agacagaacgggccuaugu

SEQ ID NO: 2114707 - RNA, 19 nt, Homo sapiens
  misc_RNA (1)...(19): siRNA sense strand
gagcagaagagccucauag

SEQ ID NO: 2114708 - RNA, 19 nt, Homo sapiens
  misc_RNA (1)...(19): siRNA sense strand
ccacaaguccucacagaca

SEQ ID NO: 2114709 - RNA, 19 nt, Homo sapiens
  misc_RNA (1)...(19): siRNA sense strand
uuacaacuuucucugauca

SEQ ID NO: 2114710 - RNA, 19 nt, Homo sapiens
  misc_RNA (1)...(19): siRNA sense strand
ugccggcucuuacaacuuu

SEQ ID NO: 2114711 - RNA, 19 nt, Homo sapiens
  misc_RNA (1)...(19): siRNA sense strand
ccacaucccugagcacagu

SEQ ID NO: 2114712 - RNA, 19 nt, Homo sapiens
  misc_RNA (1)...(19): siRNA sense strand
ccaagggccucugcaggaa

SEQ ID NO: 2114713 - RNA, 19 nt, Homo sapiens
  misc_RNA (1)...(19): siRNA sense strand
cagcgaaacccucacauuc

SEQ ID NO: 2114714 - RNA, 19 nt, Homo sapiens
  misc_RNA (1)...(19): siRNA sense strand
gaaucucagccaccaguuu

SEQ ID NO: 2114715 - RNA, 19 nt, Homo sapiens
  misc_RNA (1)...(19): siRNA sense strand
gaacucuacccuccagaau

SEQ ID NO: 2114716 - RNA, 19 nt, Homo sapiens
  misc_RNA (1)...(19): siRNA sense strand
cagcgccucuucuuugaga

SEQ ID NO: 2114717 - RNA, 19 nt, Homo sapiens
  misc_RNA (1)...(19): siRNA sense strand
cccaugacauucccaaguu

SEQ ID NO: 2114718 - RNA, 19 nt, Homo sapiens
  misc_RNA (1)...(19): siRNA sense strand
gagcaauccugggaaacug

SEQ ID NO: 2114719 - RNA, 19 nt, Homo sapiens
  misc_RNA (1)...(19): siRNA sense strand
ccaagaaccaagaagagaa

SEQ ID NO: 2114720 - RNA, 19 nt, Homo sapiens
  misc_RNA (1)...(19): siRNA sense strand
gauuuguucugauuucaca

SEQ ID NO: 2114721 - RNA, 19 nt, Homo sapiens
  misc_RNA (1)...(19): siRNA sense strand
guacaucaacgacaugaag

SEQ ID NO: 2114722 - RNA, 19 nt, Homo sapiens
  misc_RNA (1)...(19): siRNA sense strand
gaggcucucuagacauuca

SEQ ID NO: 2114723 - RNA, 19 nt, Homo sapiens
  misc_RNA (1)...(19): siRNA sense strand
aggaggcucucuagacauu

SEQ ID NO: 2114724 - RNA, 19 nt, Homo sapiens
  misc_RNA (1)...(19): siRNA sense strand
guucugauuucacaguuuc

SEQ ID NO: 2114725 - RNA, 19 nt, Homo sapiens
  misc_RNA (1)...(19): siRNA sense strand
gagauuuguucugauuuca

SEQ ID NO: 2114726 - RNA, 19 nt, Homo sapiens
  misc_RNA (1)...(19): siRNA sense strand
ggccagggucuacauguuu

SEQ ID NO: 2114727 - RNA, 19 nt, Homo sapiens
  misc_RNA (1)...(19): siRNA sense strand
cucaaucacugaagaaauc

SEQ ID NO: 2114728 - RNA, 19 nt, Homo sapiens
  misc_RNA (1)...(19): siRNA sense strand
gcgagagcccaaccaauau

SEQ ID NO: 2114729 - RNA, 19 nt, Homo sapiens
  misc_RNA (1)...(19): siRNA sense strand
gaagucacaugguuauacc

SEQ ID NO: 2114730 - RNA, 19 nt, Homo sapiens
  misc_RNA (1)...(19): siRNA sense strand
aggaagggcuggagaugga

SEQ ID NO: 2114731 - RNA, 19 nt, Homo sapiens
  misc_RNA (1)...(19): siRNA sense strand
ggaacucuacccuccagaa

SEQ ID NO: 2114732 - RNA, 19 nt, Homo sapiens
  misc_RNA (1)...(19): siRNA sense strand
ccacgacgguuaacaucca

SEQ ID NO: 2114733 - RNA, 19 nt, Homo sapiens
  misc_RNA (1)...(19): siRNA sense strand
agcgagagcccaaccaaua

SEQ ID NO: 2114734 - RNA, 19 nt, Homo sapiens
  misc_RNA (1)...(19): siRNA sense strand
gaggacaucuacgaguuca

SEQ ID NO: 2114735 - RNA, 19 nt, Homo sapiens
  misc_RNA (1)...(19): siRNA sense strand
ggaggaggaggaagaggaa

SEQ ID NO: 2114736 - RNA, 19 nt, Homo sapiens
  misc_RNA (1)...(19): siRNA sense strand
ggacccuuaugucauguuc

SEQ ID NO: 2114737 - RNA, 19 nt, Homo sapiens
  misc_RNA (1)...(19): siRNA sense strand
gcagcaucguggaggacua

SEQ ID NO: 2114738 - RNA, 19 nt, Homo sapiens
  misc_RNA (1)...(19): siRNA sense strand
gcuccugccugccuuugga

SEQ ID NO: 2114739 - RNA, 19 nt, Homo sapiens
  misc_RNA (1)...(19): siRNA sense strand
gacuugacgccaccucaua

SEQ ID NO: 2114740 - RNA, 19 nt, Homo sapiens
  misc_RNA (1)...(19): siRNA sense strand
gcuaugccacgacgguuaa

SEQ ID NO: 2114741 - RNA, 19 nt, Homo sapiens
  misc_RNA (1)...(19): siRNA sense strand
ggccagaggaggaugaaga

SEQ ID NO: 2114742 - RNA, 19 nt, Homo sapiens
  misc_RNA (1)...(19): siRNA sense strand
gggagaucguggagacaga

SEQ ID NO: 2114743 - RNA, 19 nt, Homo sapiens
  misc_RNA (1)...(19): siRNA sense strand
ccaauaucccacugacaaa

SEQ ID NO: 2114744 - RNA, 19 nt, Homo sapiens
  misc_RNA (1)...(19): siRNA sense strand
caaggagauuuguucugau

SEQ ID NO: 2114745 - RNA, 19 nt, Homo sapiens
  misc_RNA (1)...(19): siRNA sense strand
gcccugccuuccagccaua

SEQ ID NO: 2114746 - RNA, 19 nt, Homo sapiens
  misc_RNA (1)...(19): siRNA sense strand
uaugucauguucccacaga

SEQ ID NO: 2114747 - RNA, 19 nt, Homo sapiens
  misc_RNA (1)...(19): siRNA sense strand
caacauugaggacaucuac

SEQ ID NO: 2114748 - RNA, 19 nt, Homo sapiens
  misc_RNA (1)...(19): siRNA sense strand
gaugguggaggaagcuauu

SEQ ID NO: 2114749 - RNA, 19 nt, Homo sapiens
  misc_RNA (1)...(19): siRNA sense strand
caccuucguuggagcagaa

SEQ ID NO: 2114750 - RNA, 19 nt, Homo sapiens
  misc_RNA (1)...(19): siRNA sense strand
uccaagcccucccaacuuc

SEQ ID NO: 2114751 - RNA, 19 nt, Homo sapiens
  misc_RNA (1)...(19): siRNA sense strand
gucaacccauccagccuuu

SEQ ID NO: 2114752 - RNA, 19 nt, Homo sapiens
  misc_RNA (1)...(19): siRNA sense strand
gccagggucuacauguuuc

SEQ ID NO: 2114753 - RNA, 19 nt, Homo sapiens
  misc_RNA (1)...(19): siRNA sense strand
gcaggugggcacgcuguuu

SEQ ID NO: 2114754 - RNA, 19 nt, Homo sapiens
  misc_RNA (1)...(19): siRNA sense strand
gagcgaggauuuugacauc

SEQ ID NO: 2114755 - RNA, 19 nt, Homo sapiens
  misc_RNA (1)...(19): siRNA sense strand
uugaggacaucuacgaguu

SEQ ID NO: 2114756 - RNA, 19 nt, Homo sapiens
  misc_RNA (1)...(19): siRNA sense strand
ccauccagccuuugucuug

SEQ ID NO: 2114757 - RNA, 19 nt, Homo sapiens
  misc_RNA (1)...(19): siRNA sense strand
cuacauguuuccaauuugc

SEQ ID NO: 2114758 - RNA, 19 nt, Homo sapiens
  misc_RNA (1)...(19): siRNA sense strand
gcgagcggauccagcagau

SEQ ID NO: 2114759 - RNA, 19 nt, Homo sapiens
  misc_RNA (1)...(19): siRNA sense strand
gguucaaggugucugaucu

SEQ ID NO: 2114760 - RNA, 19 nt, Homo sapiens
  misc_RNA (1)...(19): siRNA sense strand
ccucucacguugccagguu

SEQ ID NO: 2114761 - RNA, 19 nt, Homo sapiens
  misc_RNA (1)...(19): siRNA sense strand
gaagaagggguaucauuca

SEQ ID NO: 2114762 - RNA, 19 nt, Homo sapiens
  misc_RNA (1)...(19): siRNA sense strand
agucugagccggugaagga

SEQ ID NO: 2114763 - RNA, 19 nt, Homo sapiens
  misc_RNA (1)...(19): siRNA sense strand
ccacgucacgggcaucuuc

SEQ ID NO: 2114764 - RNA, 19 nt, Homo sapiens
  misc_RNA (1)...(19): siRNA sense strand
ccacaccuuugcccaagca

SEQ ID NO: 2114765 - RNA, 19 nt, Homo sapiens
  misc_RNA (1)...(19): siRNA sense strand
cagcgaggccuucgagauc

SEQ ID NO: 2114766 - RNA, 19 nt, Homo sapiens
  misc_RNA (1)...(19): siRNA sense strand
gccaagaaccaagaagaga

SEQ ID NO: 2114767 - RNA, 19 nt, Homo sapiens
  misc_RNA (1)...(19): siRNA sense strand
ggagcagaagagccucaua

SEQ ID NO: 2114768 - RNA, 19 nt, Homo sapiens
  misc_RNA (1)...(19): siRNA sense strand
ggguaucauucacagacuu

SEQ ID NO: 2114769 - RNA, 19 nt, Homo sapiens
  misc_RNA (1)...(19): siRNA sense strand
gcgaggauuuugacaucua

SEQ ID NO: 2114770 - RNA, 19 nt, Homo sapiens
  misc_RNA (1)...(19): siRNA sense strand
acucuacccuccagaaucu

SEQ ID NO: 2114771 - RNA, 19 nt, Homo sapiens
  misc_RNA (1)...(19): siRNA sense strand
ggucuacauguuuccaauu

SEQ ID NO: 2114772 - RNA, 19 nt, Homo sapiens
  misc_RNA (1)...(19): siRNA sense strand
caacccauccagccuuugu

SEQ ID NO: 2114773 - RNA, 19 nt, Homo sapiens
  misc_RNA (1)...(19): siRNA sense strand
gacccugucugcagucaac

SEQ ID NO: 2114774 - RNA, 19 nt, Homo sapiens
  misc_RNA (1)...(19): siRNA sense strand
ggacccagcucgaguagua

SEQ ID NO: 2114775 - RNA, 19 nt, Homo sapiens
  misc_RNA (1)...(19): siRNA sense strand
caagauuccugaugaguuc

SEQ ID NO: 2114776 - RNA, 19 nt, Homo sapiens
  misc_RNA (1)...(19): siRNA sense strand
gugccaagauuccugauga

SEQ ID NO: 2114777 - RNA, 19 nt, Homo sapiens
  misc_RNA (1)...(19): siRNA sense strand
gagcgucgucuauaucuuu

SEQ ID NO: 2114778 - RNA, 19 nt, Homo sapiens
  misc_RNA (1)...(19): siRNA sense strand
cugaugaguucgacaauga

SEQ ID NO: 2114779 - RNA, 19 nt, Homo sapiens
  misc_RNA (1)...(19): siRNA sense strand
gaaauugucaucuuuacgu

SEQ ID NO: 2114780 - RNA, 19 nt, Homo sapiens
  misc_RNA (1)...(19): siRNA sense strand
guucgacaaugauccaauu

SEQ ID NO: 2114781 - RNA, 19 nt, Homo sapiens
  misc_RNA (1)...(19): siRNA sense strand
caaagauuauagacagaug

SEQ ID NO: 2114782 - RNA, 19 nt, Homo sapiens
  misc_RNA (1)...(19): siRNA sense strand
aaggauauuucaugucuga

SEQ ID NO: 2114783 - RNA, 19 nt, Homo sapiens
  misc_RNA (1)...(19): siRNA sense strand
cgacaaugauccaauucug

SEQ ID NO: 2114784 - RNA, 19 nt, Homo sapiens
  misc_RNA (1)...(19): siRNA sense strand
gauuauagacagaugauca

SEQ ID NO: 2114785 - RNA, 19 nt, Homo sapiens
  misc_RNA (1)...(19): siRNA sense strand
gcucagagggucccagcua

SEQ ID NO: 2114786 - RNA, 19 nt, Homo sapiens
  misc_RNA (1)...(19): siRNA sense strand
ggacaccauguaaaggaua

SEQ ID NO: 2114787 - RNA, 19 nt, Homo sapiens
  misc_RNA (1)...(19): siRNA sense strand
ucaagaccauugcacugaa

SEQ ID NO: 2114788 - RNA, 19 nt, Homo sapiens
  misc_RNA (1)...(19): siRNA sense strand
caagaccauugcacugaau

SEQ ID NO: 2114789 - RNA, 19 nt, Homo sapiens
  misc_RNA (1)...(19): siRNA sense strand
uaagugugaucccuuccuu

SEQ ID NO: 2114790 - RNA, 19 nt, Homo sapiens
  misc_RNA (1)...(19): siRNA sense strand
acuaugcccuggaggauga

SEQ ID NO: 2114791 - RNA, 19 nt, Homo sapiens
  misc_RNA (1)...(19): siRNA sense strand
cgaaaauggugccaagauu

SEQ ID NO: 2114792 - RNA, 19 nt, Homo sapiens
  misc_RNA (1)...(19): siRNA sense strand
gacaccauguaaaggauau

SEQ ID NO: 2114793 - RNA, 19 nt, Homo sapiens
  misc_RNA (1)...(19): siRNA sense strand
ccaagauuccugaugaguu

SEQ ID NO: 2114794 - RNA, 19 nt, Homo sapiens
  misc_RNA (1)...(19): siRNA sense strand
ccaggagacuagucagaag

SEQ ID NO: 2114795 - RNA, 19 nt, Homo sapiens
  misc_RNA (1)...(19): siRNA sense strand
gcguuuccacucauugaua

SEQ ID NO: 2114796 - RNA, 19 nt, Homo sapiens
  misc_RNA (1)...(19): siRNA sense strand
cgccggacauacaaauauu

SEQ ID NO: 2114797 - RNA, 19 nt, Homo sapiens
  misc_RNA (1)...(19): siRNA sense strand
gucuauaucuuuggaaaca

SEQ ID NO: 2114798 - RNA, 19 nt, Homo sapiens
  misc_RNA (1)...(19): siRNA sense strand
caaacgcgccugcggcaau

SEQ ID NO: 2114799 - RNA, 19 nt, Homo sapiens
  misc_RNA (1)...(19): siRNA sense strand
gagacuagucagaagcaaa

SEQ ID NO: 2114800 - RNA, 19 nt, Homo sapiens
  misc_RNA (1)...(19): siRNA sense strand
gcccaggcaucgagaccuu

SEQ ID NO: 2114801 - RNA, 19 nt, Homo sapiens
  misc_RNA (1)...(19): siRNA sense strand
caacaagcagaaccucuuc

SEQ ID NO: 2114802 - RNA, 19 nt, Homo sapiens
  misc_RNA (1)...(19): siRNA sense strand
uggccgagcucuccaaguc

SEQ ID NO: 2114803 - RNA, 19 nt, Homo sapiens
  misc_RNA (1)...(19): siRNA sense strand
ccaacaagcagaaccucuu

SEQ ID NO: 2114804 - RNA, 19 nt, Homo sapiens
  misc_RNA (1)...(19): siRNA sense strand
gaaaauggugccaagauuc

SEQ ID NO: 2114805 - RNA, 19 nt, Homo sapiens
  misc_RNA (1)...(19): siRNA sense strand
ggacugugagcgucgucua

SEQ ID NO: 2114806 - RNA, 19 nt, Homo sapiens
  misc_RNA (1)...(19): siRNA sense strand
gcuggcggcuuucaaacag

SEQ ID NO: 2114807 - RNA, 19 nt, Homo sapiens
  misc_RNA (1)...(19): siRNA sense strand
ggacgccacaagauacaug

SEQ ID NO: 2114808 - RNA, 19 nt, Homo sapiens
  misc_RNA (1)...(19): siRNA sense strand
gcacuaugcccuggaggau

SEQ ID NO: 2114809 - RNA, 19 nt, Homo sapiens
  misc_RNA (1)...(19): siRNA sense strand
ggagacuagucagaagcaa

SEQ ID NO: 2114810 - RNA, 19 nt, Homo sapiens
  misc_RNA (1)...(19): siRNA sense strand
ccaaguccaacaagcagaa

SEQ ID NO: 2114811 - RNA, 19 nt, Homo sapiens
  misc_RNA (1)...(19): siRNA sense strand
ugacuuugaaucccaguug

SEQ ID NO: 2114812 - RNA, 19 nt, Homo sapiens
  misc_RNA (1)...(19): siRNA sense strand
ccauguaaaggauauuuca

SEQ ID NO: 2114813 - RNA, 19 nt, Homo sapiens
  misc_RNA (1)...(19): siRNA sense strand
aaacaacccgguggacgaa

SEQ ID NO: 2114814 - RNA, 19 nt, Homo sapiens
  misc_RNA (1)...(19): siRNA sense strand
gccaggagacuagucagaa

SEQ ID NO: 2114815 - RNA, 19 nt, Homo sapiens
  misc_RNA (1)...(19): siRNA sense strand
caauucugguacagcaguu

SEQ ID NO: 2114816 - RNA, 19 nt, Homo sapiens
  misc_RNA (1)...(19): siRNA sense strand
gacuuugaaucccaguugu

SEQ ID NO: 2114817 - RNA, 19 nt, Homo sapiens
  misc_RNA (1)...(19): siRNA sense strand
guaaaggauauuucauguc

SEQ ID NO: 2114818 - RNA, 19 nt, Homo sapiens
  misc_RNA (1)...(19): siRNA sense strand
ggagcuggugggacuguga

SEQ ID NO: 2114819 - RNA, 19 nt, Homo sapiens
  misc_RNA (1)...(19): siRNA sense strand
cuuguggccucgcuccaaa

SEQ ID NO: 2114820 - RNA, 19 nt, Homo sapiens
  misc_RNA (1)...(19): siRNA sense strand
ugacugcguuuccacucau

SEQ ID NO: 2114821 - RNA, 19 nt, Homo sapiens
  misc_RNA (1)...(19): siRNA sense strand
caccagcccuugccuucuc

SEQ ID NO: 2114822 - RNA, 19 nt, Homo sapiens
  misc_RNA (1)...(19): siRNA sense strand
cgucgucuauaucuuugga

SEQ ID NO: 2114823 - RNA, 19 nt, Homo sapiens
  misc_RNA (1)...(19): siRNA sense strand
ccugaugaguucgacaaug

SEQ ID NO: 2114824 - RNA, 19 nt, Homo sapiens
  misc_RNA (1)...(19): siRNA sense strand
caaugauccaauucuggua

SEQ ID NO: 2114825 - RNA, 19 nt, Homo sapiens
  misc_RNA (1)...(19): siRNA sense strand
ucgucuauaucuuuggaaa

SEQ ID NO: 2114826 - RNA, 19 nt, Homo sapiens
  misc_RNA (1)...(19): siRNA sense strand
gccggacauacaaauauuu

SEQ ID NO: 2114827 - RNA, 19 nt, Homo sapiens
  misc_RNA (1)...(19): siRNA sense strand
aaacgcgccugcggcaauc

SEQ ID NO: 2114828 - RNA, 19 nt, Homo sapiens
  misc_RNA (1)...(19): siRNA sense strand
ggacggcaacucugaugac

SEQ ID NO: 2114829 - RNA, 19 nt, Homo sapiens
  misc_RNA (1)...(19): siRNA sense strand
gcagcuugccccuuuauau

SEQ ID NO: 2114830 - RNA, 19 nt, Homo sapiens
  misc_RNA (1)...(19): siRNA sense strand
cguuuccacucauugauag

SEQ ID NO: 2114831 - RNA, 19 nt, Homo sapiens
  misc_RNA (1)...(19): siRNA sense strand
cagaucaggccgcagagau

SEQ ID NO: 2114832 - RNA, 19 nt, Homo sapiens
  misc_RNA (1)...(19): siRNA sense strand
caagcagaaccucuuccuu

SEQ ID NO: 2114833 - RNA, 19 nt, Homo sapiens
  misc_RNA (1)...(19): siRNA sense strand
caccauguaaaggauauuu

SEQ ID NO: 2114834 - RNA, 19 nt, Homo sapiens
  misc_RNA (1)...(19): siRNA sense strand
caucuccuaccgccuauuc

SEQ ID NO: 2114835 - RNA, 19 nt, Homo sapiens
  misc_RNA (1)...(19): siRNA sense strand
cccauggcuucaucuccua

SEQ ID NO: 2114836 - RNA, 19 nt, Homo sapiens
  misc_RNA (1)...(19): siRNA sense strand
gacugcguuuccacucauu

SEQ ID NO: 2114837 - RNA, 19 nt, Homo sapiens
  misc_RNA (1)...(19): siRNA sense strand
uuccuucgcugcguccuuu

SEQ ID NO: 2114838 - RNA, 19 nt, Homo sapiens
  misc_RNA (1)...(19): siRNA sense strand
gagaaagucugaaagaauu

SEQ ID NO: 2114839 - RNA, 19 nt, Homo sapiens
  misc_RNA (1)...(19): siRNA sense strand
gaaguuuccugaugucaaa

SEQ ID NO: 2114840 - RNA, 19 nt, Homo sapiens
  misc_RNA (1)...(19): siRNA sense strand
gcaacuaaacugaagaaua

SEQ ID NO: 2114841 - RNA, 19 nt, Homo sapiens
  misc_RNA (1)...(19): siRNA sense strand
caaccugcauacccaauua

SEQ ID NO: 2114842 - RNA, 19 nt, Homo sapiens
  misc_RNA (1)...(19): siRNA sense strand
gaaagcaacuaaacugaag

SEQ ID NO: 2114843 - RNA, 19 nt, Homo sapiens
  misc_RNA (1)...(19): siRNA sense strand
gaaggauuauguucaagaa

SEQ ID NO: 2114844 - RNA, 19 nt, Homo sapiens
  misc_RNA (1)...(19): siRNA sense strand
gagaugaguuggaauggaa

SEQ ID NO: 2114845 - RNA, 19 nt, Homo sapiens
  misc_RNA (1)...(19): siRNA sense strand
gcaugaaccugacaagaga

SEQ ID NO: 2114846 - RNA, 19 nt, Homo sapiens
  misc_RNA (1)...(19): siRNA sense strand
gacaagagaugaguuggaa

SEQ ID NO: 2114847 - RNA, 19 nt, Homo sapiens
  misc_RNA (1)...(19): siRNA sense strand
uaucaaggcucaguuuauu

SEQ ID NO: 2114848 - RNA, 19 nt, Homo sapiens
  misc_RNA (1)...(19): siRNA sense strand
uggaagagcuggaggauca

SEQ ID NO: 2114849 - RNA, 19 nt, Homo sapiens
  misc_RNA (1)...(19): siRNA sense strand
gaagauguauugcugucau

SEQ ID NO: 2114850 - RNA, 19 nt, Homo sapiens
  misc_RNA (1)...(19): siRNA sense strand
ggaaagcaacuaaacugaa

SEQ ID NO: 2114851 - RNA, 19 nt, Homo sapiens
  misc_RNA (1)...(19): siRNA sense strand
cuaagaagccgauugaaga

SEQ ID NO: 2114852 - RNA, 19 nt, Homo sapiens
  misc_RNA (1)...(19): siRNA sense strand
gauauuuguuuaccuggaa

SEQ ID NO: 2114853 - RNA, 19 nt, Homo sapiens
  misc_RNA (1)...(19): siRNA sense strand
gauaucaaggcucaguuua

SEQ ID NO: 2114854 - RNA, 19 nt, Homo sapiens
  misc_RNA (1)...(19): siRNA sense strand
ggauuauguucaagaaguu

SEQ ID NO: 2114855 - RNA, 19 nt, Homo sapiens
  misc_RNA (1)...(19): siRNA sense strand
gagacuggcugaguggaaa

SEQ ID NO: 2114856 - RNA, 19 nt, Homo sapiens
  misc_RNA (1)...(19): siRNA sense strand
gaagccgauugaagaugua

SEQ ID NO: 2114857 - RNA, 19 nt, Homo sapiens
  misc_RNA (1)...(19): siRNA sense strand
gaauggaaacugucugaau

SEQ ID NO: 2114858 - RNA, 19 nt, Homo sapiens
  misc_RNA (1)...(19): siRNA sense strand
gaaucuggagcaauuauga

SEQ ID NO: 2114859 - RNA, 19 nt, Homo sapiens
  misc_RNA (1)...(19): siRNA sense strand
ggaaggauuauguucaaga

SEQ ID NO: 2114860 - RNA, 19 nt, Homo sapiens
  misc_RNA (1)...(19): siRNA sense strand
uagagaaagucugaaagaa

SEQ ID NO: 2114861 - RNA, 19 nt, Homo sapiens
  misc_RNA (1)...(19): siRNA sense strand
ucaguggacuugccaggaa

SEQ ID NO: 2114862 - RNA, 19 nt, Homo sapiens
  misc_RNA (1)...(19): siRNA sense strand
uaucaaagccauuucaaca

SEQ ID NO: 2114863 - RNA, 19 nt, Homo sapiens
  misc_RNA (1)...(19): siRNA sense strand
caagagaugaguuggaaug

SEQ ID NO: 2114864 - RNA, 19 nt, Homo sapiens
  misc_RNA (1)...(19): siRNA sense strand
ggagggacagcgauucuga

SEQ ID NO: 2114865 - RNA, 19 nt, Homo sapiens
  misc_RNA (1)...(19): siRNA sense strand
ucaaagccauuucaacaac

SEQ ID NO: 2114866 - RNA, 19 nt, Homo sapiens
  misc_RNA (1)...(19): siRNA sense strand
aauggaaacugucugaauc

SEQ ID NO: 2114867 - RNA, 19 nt, Homo sapiens
  misc_RNA (1)...(19): siRNA sense strand
gucugaaucuggagcaauu

SEQ ID NO: 2114868 - RNA, 19 nt, Homo sapiens
  misc_RNA (1)...(19): siRNA sense strand
agaagccgauugaagaugu

SEQ ID NO: 2114869 - RNA, 19 nt, Homo sapiens
  misc_RNA (1)...(19): siRNA sense strand
guauugcugucaucagugu

SEQ ID NO: 2114870 - RNA, 19 nt, Homo sapiens
  misc_RNA (1)...(19): siRNA sense strand
gaucaugaagacgaguuua

SEQ ID NO: 2114871 - RNA, 19 nt, Homo sapiens
  misc_RNA (1)...(19): siRNA sense strand
ugggucaucuugcaccuuu

SEQ ID NO: 2114872 - RNA, 19 nt, Homo sapiens
  misc_RNA (1)...(19): siRNA sense strand
cuagagaaagucugaaaga

SEQ ID NO: 2114873 - RNA, 19 nt, Homo sapiens
  misc_RNA (1)...(19): siRNA sense strand
caucuugcaccuuuacaaa

SEQ ID NO: 2114874 - RNA, 19 nt, Homo sapiens
  misc_RNA (1)...(19): siRNA sense strand
agagaaagucugaaagaau

SEQ ID NO: 2114875 - RNA, 19 nt, Homo sapiens
  misc_RNA (1)...(19): siRNA sense strand
ggaagaggaggcagaagag

SEQ ID NO: 2114876 - RNA, 19 nt, Homo sapiens
  misc_RNA (1)...(19): siRNA sense strand
ucaagaaguuaccaaagcu

SEQ ID NO: 2114877 - RNA, 19 nt, Homo sapiens
  misc_RNA (1)...(19): siRNA sense strand
gcuggaggaucaugaagac

SEQ ID NO: 2114878 - RNA, 19 nt, Homo sapiens
  misc_RNA (1)...(19): siRNA sense strand
aggauuauguucaagaagu

SEQ ID NO: 2114879 - RNA, 19 nt, Homo sapiens
  misc_RNA (1)...(19): siRNA sense strand
agggaaggauuauguucaa

SEQ ID NO: 2114880 - RNA, 19 nt, Homo sapiens
  misc_RNA (1)...(19): siRNA sense strand
uaagaagccgauugaagau

SEQ ID NO: 2114881 - RNA, 19 nt, Homo sapiens
  misc_RNA (1)...(19): siRNA sense strand
caugaagacgaguuuaaug

SEQ ID NO: 2114882 - RNA, 19 nt, Homo sapiens
  misc_RNA (1)...(19): siRNA sense strand
ggcaugaaccugacaagag

SEQ ID NO: 2114883 - RNA, 19 nt, Homo sapiens
  misc_RNA (1)...(19): siRNA sense strand
guggaaagcaacuaaacug

SEQ ID NO: 2114884 - RNA, 19 nt, Homo sapiens
  misc_RNA (1)...(19): siRNA sense strand
ggagauaucaaggcucagu

SEQ ID NO: 2114885 - RNA, 19 nt, Homo sapiens
  misc_RNA (1)...(19): siRNA sense strand
guuuccugaugucaaauuu

SEQ ID NO: 2114886 - RNA, 19 nt, Homo sapiens
  misc_RNA (1)...(19): siRNA sense strand
guggcacucuguccucaug

SEQ ID NO: 2114887 - RNA, 19 nt, Homo sapiens
  misc_RNA (1)...(19): siRNA sense strand
ugauggaccuggaggaaaa

SEQ ID NO: 2114888 - RNA, 19 nt, Homo sapiens
  misc_RNA (1)...(19): siRNA sense strand
uggaagaggaggcagaaga

SEQ ID NO: 2114889 - RNA, 19 nt, Homo sapiens
  misc_RNA (1)...(19): siRNA sense strand
gccgauugaagauguauug

SEQ ID NO: 2114890 - RNA, 19 nt, Homo sapiens
  misc_RNA (1)...(19): siRNA sense strand
ggaucaugaagacgaguuu

SEQ ID NO: 2114891 - RNA, 19 nt, Homo sapiens
  misc_RNA (1)...(19): siRNA sense strand
ucuugcaccuuuacaaaca

SEQ ID NO: 2114892 - RNA, 19 nt, Homo sapiens
  misc_RNA (1)...(19): siRNA sense strand
ggagaucucagggaaggau

SEQ ID NO: 2114893 - RNA, 19 nt, Homo sapiens
  misc_RNA (1)...(19): siRNA sense strand
ccuaagaagccgauugaag

SEQ ID NO: 2114894 - RNA, 19 nt, Homo sapiens
  misc_RNA (1)...(19): siRNA sense strand
augaagacgaguuuaauga

SEQ ID NO: 2114895 - RNA, 19 nt, Homo sapiens
  misc_RNA (1)...(19): siRNA sense strand
gggcuugugggucaucuug

SEQ ID NO: 2114896 - RNA, 19 nt, Homo sapiens
  misc_RNA (1)...(19): siRNA sense strand
ucucagggaaggauuaugu

SEQ ID NO: 2114897 - RNA, 19 nt, Homo sapiens
  misc_RNA (1)...(19): siRNA sense strand
ggaauggaaacugucugaa

SEQ ID NO: 2114898 - RNA, 19 nt, Homo sapiens
  misc_RNA (1)...(19): siRNA sense strand
agagaugaguuggaaugga

SEQ ID NO: 2114899 - RNA, 19 nt, Homo sapiens
  misc_RNA (1)...(19): siRNA sense strand
ugacaagagaugaguugga

SEQ ID NO: 2114900 - RNA, 19 nt, Homo sapiens
  misc_RNA (1)...(19): siRNA sense strand
gcuugugggucaucuugca

SEQ ID NO: 2114901 - RNA, 19 nt, Homo sapiens
  misc_RNA (1)...(19): siRNA sense strand
uggaaagcaacuaaacuga

SEQ ID NO: 2114902 - RNA, 19 nt, Homo sapiens
  misc_RNA (1)...(19): siRNA sense strand
gaagagcuggaggaucaug

SEQ ID NO: 2114903 - RNA, 19 nt, Homo sapiens
  misc_RNA (1)...(19): siRNA sense strand
gaaccugacaagagaugag

SEQ ID NO: 2114904 - RNA, 19 nt, Homo sapiens
  misc_RNA (1)...(19): siRNA sense strand
ucaaggcucaguuuauugg

SEQ ID NO: 2114905 - RNA, 19 nt, Homo sapiens
  misc_RNA (1)...(19): siRNA sense strand
agauaucaaggcucaguuu

SEQ ID NO: 2114906 - RNA, 19 nt, Homo sapiens
  misc_RNA (1)...(19): siRNA sense strand
gccuagagaaagucugaaa

SEQ ID NO: 2114907 - RNA, 19 nt, Homo sapiens
  misc_RNA (1)...(19): siRNA sense strand
cuggagcaauuaugaugga

SEQ ID NO: 2114908 - RNA, 19 nt, Homo sapiens
  misc_RNA (1)...(19): siRNA sense strand
gagauaucaaggcucaguu

SEQ ID NO: 2114909 - RNA, 19 nt, Homo sapiens
  misc_RNA (1)...(19): siRNA sense strand
cagggaaggauuauguuca

SEQ ID NO: 2114910 - RNA, 19 nt, Homo sapiens
  misc_RNA (1)...(19): siRNA sense strand
gaucucagggaaggauuau

SEQ ID NO: 2114911 - RNA, 19 nt, Homo sapiens
  misc_RNA (1)...(19): siRNA sense strand
gaaagucugaaagaauugg

SEQ ID NO: 2114912 - RNA, 19 nt, Homo sapiens
  misc_RNA (1)...(19): siRNA sense strand
agucaguggugaaaacaua

SEQ ID NO: 2114913 - RNA, 19 nt, Homo sapiens
  misc_RNA (1)...(19): siRNA sense strand
gugccuagagaaagucuga

SEQ ID NO: 2114914 - RNA, 19 nt, Homo sapiens
  misc_RNA (1)...(19): siRNA sense strand
gaggagggacagcgauucu

SEQ ID NO: 2114915 - RNA, 19 nt, Homo sapiens
  misc_RNA (1)...(19): siRNA sense strand
gguguuugguggcaugaac

SEQ ID NO: 2114916 - RNA, 19 nt, Homo sapiens
  misc_RNA (1)...(19): siRNA sense strand
uauugguccucugguguuu

SEQ ID NO: 2114917 - RNA, 19 nt, Homo sapiens
  misc_RNA (1)...(19): siRNA sense strand
gggaaggauuauguucaag

SEQ ID NO: 2114918 - RNA, 19 nt, Homo sapiens
  misc_RNA (1)...(19): siRNA sense strand
ucaugaagacgaguuuaau

SEQ ID NO: 2114919 - RNA, 19 nt, Homo sapiens
  misc_RNA (1)...(19): siRNA sense strand
ggugaaaacauaugaagau

SEQ ID NO: 2114920 - RNA, 19 nt, Homo sapiens
  misc_RNA (1)...(19): siRNA sense strand
uggaauggaaacugucuga

SEQ ID NO: 2114921 - RNA, 19 nt, Homo sapiens
  misc_RNA (1)...(19): siRNA sense strand
gggucaucuugcaccuuua

SEQ ID NO: 2114922 - RNA, 19 nt, Homo sapiens
  misc_RNA (1)...(19): siRNA sense strand
ugaagacgaguuuaaugag

SEQ ID NO: 2114923 - RNA, 19 nt, Homo sapiens
  misc_RNA (1)...(19): siRNA sense strand
gaacauugccaaauucaua

SEQ ID NO: 2114924 - RNA, 19 nt, Homo sapiens
  misc_RNA (1)...(19): siRNA sense strand
gagaaacccuuugaaugua

SEQ ID NO: 2114925 - RNA, 19 nt, Homo sapiens
  misc_RNA (1)...(19): siRNA sense strand
gagaaacccuuugaaugua

SEQ ID NO: 2114926 - RNA, 19 nt, Homo sapiens
  misc_RNA (1)...(19): siRNA sense strand
gagaaacccuuugaaugua

SEQ ID NO: 2114927 - RNA, 19 nt, Homo sapiens
  misc_RNA (1)...(19): siRNA sense strand
gagaaacccuuugaaugua

SEQ ID NO: 2114928 - RNA, 19 nt, Homo sapiens
  misc_RNA (1)...(19): siRNA sense strand
gagaaacccuuuguaugua

SEQ ID NO: 2114929 - RNA, 19 nt, Homo sapiens
  misc_RNA (1)...(19): siRNA sense strand
gaaaguaucuccagaaaau

SEQ ID NO: 2114930 - RNA, 19 nt, Homo sapiens
  misc_RNA (1)...(19): siRNA sense strand
ggaaaggcguuuacucuuc

SEQ ID NO: 2114931 - RNA, 19 nt, Homo sapiens
  misc_RNA (1)...(19): siRNA sense strand
caacaucgaaguauucaua

SEQ ID NO: 2114932 - RNA, 19 nt, Homo sapiens
  misc_RNA (1)...(19): siRNA sense strand
gggaaauacuuuagucgua

SEQ ID NO: 2114933 - RNA, 19 nt, Homo sapiens
  misc_RNA (1)...(19): siRNA sense strand
guacaacucuuggcauuga

SEQ ID NO: 2114934 - RNA, 19 nt, Homo sapiens
  misc_RNA (1)...(19): siRNA sense strand
gcaaauaaguacaacucuu

SEQ ID NO: 2114935 - RNA, 19 nt, Homo sapiens
  misc_RNA (1)...(19): siRNA sense strand
gggaaguccuuuaaucgua

SEQ ID NO: 2114936 - RNA, 19 nt, Homo sapiens
  misc_RNA (1)...(19): siRNA sense strand
gggaaguccuuuaaucgua

SEQ ID NO: 2114937 - RNA, 19 nt, Homo sapiens
  misc_RNA (1)...(19): siRNA sense strand
ccaaacagguuauaaagca

SEQ ID NO: 2114938 - RNA, 19 nt, Homo sapiens
  misc_RNA (1)...(19): siRNA sense strand
cgacuucacauacaauuua

SEQ ID NO: 2114939 - RNA, 19 nt, Homo sapiens
  misc_RNA (1)...(19): siRNA sense strand
guacagggaugugauguug

SEQ ID NO: 2114940 - RNA, 19 nt, Homo sapiens
  misc_RNA (1)...(19): siRNA sense strand
gagaagcccuaugaaugua

SEQ ID NO: 2114941 - RNA, 19 nt, Homo sapiens
  misc_RNA (1)...(19): siRNA sense strand
gagauggccuuuagauauc

SEQ ID NO: 2114942 - RNA, 19 nt, Homo sapiens
  misc_RNA (1)...(19): siRNA sense strand
gagagaaacccuuugaaug

SEQ ID NO: 2114943 - RNA, 19 nt, Homo sapiens
  misc_RNA (1)...(19): siRNA sense strand
caucagaaauuucauacug

SEQ ID NO: 2114944 - RNA, 19 nt, Homo sapiens
  misc_RNA (1)...(19): siRNA sense strand
cgucgugguucaaaucuua

SEQ ID NO: 2114945 - RNA, 19 nt, Homo sapiens
  misc_RNA (1)...(19): siRNA sense strand
uaaggaauguggaaagguu

SEQ ID NO: 2114946 - RNA, 19 nt, Homo sapiens
  misc_RNA (1)...(19): siRNA sense strand
aaugauaccucugaaguaa

SEQ ID NO: 2114947 - RNA, 19 nt, Homo sapiens
  misc_RNA (1)...(19): siRNA sense strand
caucagaaauugcauacug

SEQ ID NO: 2114948 - RNA, 19 nt, Homo sapiens
  misc_RNA (1)...(19): siRNA sense strand
caucagaaauugcauacug

SEQ ID NO: 2114949 - RNA, 19 nt, Homo sapiens
  misc_RNA (1)...(19): siRNA sense strand
gaaaggcguuuacucuucu

SEQ ID NO: 2114950 - RNA, 19 nt, Homo sapiens
  misc_RNA (1)...(19): siRNA sense strand
gaaaugacucagaauauag

SEQ ID NO: 2114951 - RNA, 19 nt, Homo sapiens
  misc_RNA (1)...(19): siRNA sense strand
caaauaaguacaacucuug

SEQ ID NO: 2114952 - RNA, 19 nt, Homo sapiens
  misc_RNA (1)...(19): siRNA sense strand
ccucaugcuucucuuauuu

SEQ ID NO: 2114953 - RNA, 19 nt, Homo sapiens
  misc_RNA (1)...(19): siRNA sense strand
ggagagaaacccuuugaau

SEQ ID NO: 2114954 - RNA, 19 nt, Homo sapiens
  misc_RNA (1)...(19): siRNA sense strand
ugagaaacccuuuguaugu

SEQ ID NO: 2114955 - RNA, 19 nt, Homo sapiens
  misc_RNA (1)...(19): siRNA sense strand
ugagaaacccuuugaaugu

SEQ ID NO: 2114956 - RNA, 19 nt, Homo sapiens
  misc_RNA (1)...(19): siRNA sense strand
ugagaaacccuuugaaugu

SEQ ID NO: 2114957 - RNA, 19 nt, Homo sapiens
  misc_RNA (1)...(19): siRNA sense strand
ugagaaacccuuugaaugu

SEQ ID NO: 2114958 - RNA, 19 nt, Homo sapiens
  misc_RNA (1)...(19): siRNA sense strand
cgauaucauuaccaacuua

SEQ ID NO: 2114959 - RNA, 19 nt, Homo sapiens
  misc_RNA (1)...(19): siRNA sense strand
caacaucagaguauucauu

SEQ ID NO: 2114960 - RNA, 19 nt, Homo sapiens
  misc_RNA (1)...(19): siRNA sense strand
ugagauggccuuuagauau

SEQ ID NO: 2114961 - RNA, 19 nt, Homo sapiens
  misc_RNA (1)...(19): siRNA sense strand
gaaacccuuugaauguaaa

SEQ ID NO: 2114962 - RNA, 19 nt, Homo sapiens
  misc_RNA (1)...(19): siRNA sense strand
gaaugugggaaauacuuua

SEQ ID NO: 2114963 - RNA, 19 nt, Homo sapiens
  misc_RNA (1)...(19): siRNA sense strand
gaaacaagcagacgguauc

SEQ ID NO: 2114964 - RNA, 19 nt, Homo sapiens
  misc_RNA (1)...(19): siRNA sense strand
aagaaacccuuugaaugua

SEQ ID NO: 2114965 - RNA, 19 nt, Homo sapiens
  misc_RNA (1)...(19): siRNA sense strand
agauaucauugccaacuua

SEQ ID NO: 2114966 - RNA, 19 nt, Homo sapiens
  misc_RNA (1)...(19): siRNA sense strand
agaaacccuuugaauguaa

SEQ ID NO: 2114967 - RNA, 19 nt, Homo sapiens
  misc_RNA (1)...(19): siRNA sense strand
agaaacccuuugaauguaa

SEQ ID NO: 2114968 - RNA, 19 nt, Homo sapiens
  misc_RNA (1)...(19): siRNA sense strand
agaaacccuuugaauguaa

SEQ ID NO: 2114969 - RNA, 19 nt, Homo sapiens
  misc_RNA (1)...(19): siRNA sense strand
agaaacccuuugaauguaa

SEQ ID NO: 2114970 - RNA, 19 nt, Homo sapiens
  misc_RNA (1)...(19): siRNA sense strand
gaguauucaugcugguaua

SEQ ID NO: 2114971 - RNA, 19 nt, Homo sapiens
  misc_RNA (1)...(19): siRNA sense strand
ucagggauguggccauuga

SEQ ID NO: 2114972 - RNA, 19 nt, Homo sapiens
  misc_RNA (1)...(19): siRNA sense strand
agaaacccuuugaauguaa

SEQ ID NO: 2114973 - RNA, 19 nt, Homo sapiens
  misc_RNA (1)...(19): siRNA sense strand
agaaacccuuuguauguaa

SEQ ID NO: 2114974 - RNA, 19 nt, Homo sapiens
  misc_RNA (1)...(19): siRNA sense strand
gaaagagcccuggaugguu

SEQ ID NO: 2114975 - RNA, 19 nt, Homo sapiens
  misc_RNA (1)...(19): siRNA sense strand
gagaaacccuuugaaugca

SEQ ID NO: 2114976 - RNA, 19 nt, Homo sapiens
  misc_RNA (1)...(19): siRNA sense strand
agagaaacccuuugaaugu

SEQ ID NO: 2114977 - RNA, 19 nt, Homo sapiens
  misc_RNA (1)...(19): siRNA sense strand
gggauggccuuucgauauc

SEQ ID NO: 2114978 - RNA, 19 nt, Homo sapiens
  misc_RNA (1)...(19): siRNA sense strand
caacuuauucgacaucaga

SEQ ID NO: 2114979 - RNA, 19 nt, Homo sapiens
  misc_RNA (1)...(19): siRNA sense strand
gugagaagcccuaugaaug

SEQ ID NO: 2114980 - RNA, 19 nt, Homo sapiens
  misc_RNA (1)...(19): siRNA sense strand
gaaauacuuuagucguagu

SEQ ID NO: 2114981 - RNA, 19 nt, Homo sapiens
  misc_RNA (1)...(19): siRNA sense strand
ugagaaaccuuuuguaugu

SEQ ID NO: 2114982 - RNA, 19 nt, Homo sapiens
  misc_RNA (1)...(19): siRNA sense strand
gaaugugggaaguccuuua

SEQ ID NO: 2114983 - RNA, 19 nt, Homo sapiens
  misc_RNA (1)...(19): siRNA sense strand
gaaugugggaaguccuuua

SEQ ID NO: 2114984 - RNA, 19 nt, Homo sapiens
  misc_RNA (1)...(19): siRNA sense strand
gaauguaacgaauguggaa

SEQ ID NO: 2114985 - RNA, 19 nt, Homo sapiens
  misc_RNA (1)...(19): siRNA sense strand
ugagaaaccuuuugaaugu

SEQ ID NO: 2114986 - RNA, 19 nt, Homo sapiens
  misc_RNA (1)...(19): siRNA sense strand
cgacaucagaaauuucaua

SEQ ID NO: 2114987 - RNA, 19 nt, Homo sapiens
  misc_RNA (1)...(19): siRNA sense strand
gaaguuccauuucuaaacc

SEQ ID NO: 2114988 - RNA, 19 nt, Homo sapiens
  misc_RNA (1)...(19): siRNA sense strand
gggaugugauguuggagaa

SEQ ID NO: 2114989 - RNA, 19 nt, Homo sapiens
  misc_RNA (1)...(19): siRNA sense strand
ugauaccucugaaguaaau

SEQ ID NO: 2114990 - RNA, 19 nt, Homo sapiens
  misc_RNA (1)...(19): siRNA sense strand
ggaaugugggaaauacuuu

SEQ ID NO: 2114991 - RNA, 19 nt, Homo sapiens
  misc_RNA (1)...(19): siRNA sense strand
gaacuacagccaccugauc

SEQ ID NO: 2114992 - RNA, 19 nt, Homo sapiens
  misc_RNA (1)...(19): siRNA sense strand
caacaucagaguauucaug

SEQ ID NO: 2114993 - RNA, 19 nt, Homo sapiens
  misc_RNA (1)...(19): siRNA sense strand
caaaucuuauucagcauca

SEQ ID NO: 2114994 - RNA, 19 nt, Homo sapiens
  misc_RNA (1)...(19): siRNA sense strand
acagggauaucaagaagga

SEQ ID NO: 2114995 - RNA, 19 nt, Homo sapiens
  misc_RNA (1)...(19): siRNA sense strand
cgacuucauaugcaacuua

SEQ ID NO: 2114996 - RNA, 19 nt, Homo sapiens
  misc_RNA (1)...(19): siRNA sense strand
cgacaucagaagauucaua

SEQ ID NO: 2114997 - RNA, 19 nt, Homo sapiens
  misc_RNA (1)...(19): siRNA sense strand
gaguauucauucuggugua

SEQ ID NO: 2114998 - RNA, 19 nt, Homo sapiens
  misc_RNA (1)...(19): siRNA sense strand
cagcaucagaguauucaua

SEQ ID NO: 2114999 - RNA, 19 nt, Homo sapiens
  misc_RNA (1)...(19): siRNA sense strand
guaaggaaugugggaaaua

SEQ ID NO: 2115000 - RNA, 19 nt, Homo sapiens
  misc_RNA (1)...(19): siRNA sense strand
gcauugaggccuuuuauuu

SEQ ID NO: 2115001 - RNA, 19 nt, Homo sapiens
  misc_RNA (1)...(19): siRNA sense strand
uaucauugccaacuuauug

SEQ ID NO: 2115002 - RNA, 19 nt, Homo sapiens
  misc_RNA (1)...(19): siRNA sense strand
caaacagguuauaaagcaa

SEQ ID NO: 2115003 - RNA, 19 nt, Homo sapiens
  misc_RNA (1)...(19): siRNA sense strand
gugagaaacccuuugaaug

SEQ ID NO: 2115004 - RNA, 19 nt, Homo sapiens
  misc_RNA (1)...(19): siRNA sense strand
gugagaaacccuuugaaug

SEQ ID NO: 2115005 - RNA, 19 nt, Homo sapiens
  misc_RNA (1)...(19): siRNA sense strand
ugagaagcccuaugaaugu

SEQ ID NO: 2115006 - RNA, 19 nt, Homo sapiens
  misc_RNA (1)...(19): siRNA sense strand
gugagaaacccuuugaaug

SEQ ID NO: 2115007 - RNA, 19 nt, Homo sapiens
  misc_RNA (1)...(19): siRNA sense strand
gugagaaacccuuugaaug

SEQ ID NO: 2115008 - RNA, 19 nt, Homo sapiens
  misc_RNA (1)...(19): siRNA sense strand
uaaggaaugugggaaauac

SEQ ID NO: 2115009 - RNA, 19 nt, Homo sapiens
  misc_RNA (1)...(19): siRNA sense strand
gcagacgguauccagauuu

SEQ ID NO: 2115010 - RNA, 19 nt, Homo sapiens
  misc_RNA (1)...(19): siRNA sense strand
gaucagaggaccuuguaca

SEQ ID NO: 2115011 - RNA, 19 nt, Homo sapiens
  misc_RNA (1)...(19): siRNA sense strand
agacuuuaccuacaacuuu

SEQ ID NO: 2115012 - RNA, 19 nt, Homo sapiens
  misc_RNA (1)...(19): siRNA sense strand
gauucauacuggugagaaa

SEQ ID NO: 2115013 - RNA, 19 nt, Homo sapiens
  misc_RNA (1)...(19): siRNA sense strand
cuacagggauaucaagaag

SEQ ID NO: 2115014 - RNA, 19 nt, Homo sapiens
  misc_RNA (1)...(19): siRNA sense strand
auauggaccugagaaagua

SEQ ID NO: 2115015 - RNA, 19 nt, Homo sapiens
  misc_RNA (1)...(19): siRNA sense strand
ugagaaacccuuugaaugc

SEQ ID NO: 2115016 - RNA, 19 nt, Homo sapiens
  misc_RNA (1)...(19): siRNA sense strand
cguuuacucuucugacaaa

SEQ ID NO: 2115017 - RNA, 19 nt, Homo sapiens
  misc_RNA (1)...(19): siRNA sense strand
gaauguaaagaauguggaa

SEQ ID NO: 2115018 - RNA, 19 nt, Homo sapiens
  misc_RNA (1)...(19): siRNA sense strand
gacuuuaccuacaacuuuc

SEQ ID NO: 2115019 - RNA, 19 nt, Homo sapiens
  misc_RNA (1)...(19): siRNA sense strand
ggugagaaacccuuugaau

SEQ ID NO: 2115020 - RNA, 19 nt, Homo sapiens
  misc_RNA (1)...(19): siRNA sense strand
cgacaucagaaauugcaua

SEQ ID NO: 2115021 - RNA, 19 nt, Homo sapiens
  misc_RNA (1)...(19): siRNA sense strand
ggugagaaacccuuugaau

SEQ ID NO: 2115022 - RNA, 19 nt, Homo sapiens
  misc_RNA (1)...(19): siRNA sense strand
cgacaucagaaauugcaua

SEQ ID NO: 2115023 - RNA, 19 nt, Homo sapiens
  misc_RNA (1)...(19): siRNA sense strand
ugaacaagcugaagaaaua

SEQ ID NO: 2115024 - RNA, 19 nt, Homo sapiens
  misc_RNA (1)...(19): siRNA sense strand
gaaaguaugucccugauga

SEQ ID NO: 2115025 - RNA, 19 nt, Homo sapiens
  misc_RNA (1)...(19): siRNA sense strand
gaccaagccuuuaaauaua

SEQ ID NO: 2115026 - RNA, 19 nt, Homo sapiens
  misc_RNA (1)...(19): siRNA sense strand
gcaaagcuguguacaauug

SEQ ID NO: 2115027 - RNA, 19 nt, Homo sapiens
  misc_RNA (1)...(19): siRNA sense strand
gcaaguaguuguaacauug

SEQ ID NO: 2115028 - RNA, 19 nt, Homo sapiens
  misc_RNA (1)...(19): siRNA sense strand
ggaaacaacuggaagaaau

SEQ ID NO: 2115029 - RNA, 19 nt, Homo sapiens
  misc_RNA (1)...(19): siRNA sense strand
ggaccaagccuuuaaauau

SEQ ID NO: 2115030 - RNA, 19 nt, Homo sapiens
  misc_RNA (1)...(19): siRNA sense strand
gaacauguaucuggccaua

SEQ ID NO: 2115031 - RNA, 19 nt, Homo sapiens
  misc_RNA (1)...(19): siRNA sense strand
ucaaaggucucuguuguua

SEQ ID NO: 2115032 - RNA, 19 nt, Homo sapiens
  misc_RNA (1)...(19): siRNA sense strand
ucuaagcucugaaucauua

SEQ ID NO: 2115033 - RNA, 19 nt, Homo sapiens
  misc_RNA (1)...(19): siRNA sense strand
gaaaugagaagcuaucuug

SEQ ID NO: 2115034 - RNA, 19 nt, Homo sapiens
  misc_RNA (1)...(19): siRNA sense strand
gaacaaugaugauagagau

SEQ ID NO: 2115035 - RNA, 19 nt, Homo sapiens
  misc_RNA (1)...(19): siRNA sense strand
gagcaagauucaucagaua

SEQ ID NO: 2115036 - RNA, 19 nt, Homo sapiens
  misc_RNA (1)...(19): siRNA sense strand
gcaaauagugugaguguuu

SEQ ID NO: 2115037 - RNA, 19 nt, Homo sapiens
  misc_RNA (1)...(19): siRNA sense strand
gaaaauggccgauauauug

SEQ ID NO: 2115038 - RNA, 19 nt, Homo sapiens
  misc_RNA (1)...(19): siRNA sense strand
gagaagagaggaaguauug

SEQ ID NO: 2115039 - RNA, 19 nt, Homo sapiens
  misc_RNA (1)...(19): siRNA sense strand
gaaauaagaguuuggcuau

SEQ ID NO: 2115040 - RNA, 19 nt, Homo sapiens
  misc_RNA (1)...(19): siRNA sense strand
gaaagcaucuuguccacau

SEQ ID NO: 2115041 - RNA, 19 nt, Homo sapiens
  misc_RNA (1)...(19): siRNA sense strand
gaacagcaccuugaauauu

SEQ ID NO: 2115042 - RNA, 19 nt, Homo sapiens
  misc_RNA (1)...(19): siRNA sense strand
ugaaauagguaacccugua

SEQ ID NO: 2115043 - RNA, 19 nt, Homo sapiens
  misc_RNA (1)...(19): siRNA sense strand
gcaaaccacaggucucuua

SEQ ID NO: 2115044 - RNA, 19 nt, Homo sapiens
  misc_RNA (1)...(19): siRNA sense strand
gacaaugguuggacucuuu

SEQ ID NO: 2115045 - RNA, 19 nt, Homo sapiens
  misc_RNA (1)...(19): siRNA sense strand
ccucagaaaucaucucuuu

SEQ ID NO: 2115046 - RNA, 19 nt, Homo sapiens
  misc_RNA (1)...(19): siRNA sense strand
gagaagcuaucuugauguu

SEQ ID NO: 2115047 - RNA, 19 nt, Homo sapiens
  misc_RNA (1)...(19): siRNA sense strand
gaggaaguauuguucguuu

SEQ ID NO: 2115048 - RNA, 19 nt, Homo sapiens
  misc_RNA (1)...(19): siRNA sense strand
gggcaaagcuguguacaau

SEQ ID NO: 2115049 - RNA, 19 nt, Homo sapiens
  misc_RNA (1)...(19): siRNA sense strand
gagaagaugugaccagcaa

SEQ ID NO: 2115050 - RNA, 19 nt, Homo sapiens
  misc_RNA (1)...(19): siRNA sense strand
ccaagaaucuguaacaagu

SEQ ID NO: 2115051 - RNA, 19 nt, Homo sapiens
  misc_RNA (1)...(19): siRNA sense strand
agagcaaacugauauagua

SEQ ID NO: 2115052 - RNA, 19 nt, Homo sapiens
  misc_RNA (1)...(19): siRNA sense strand
gagauggccuuacacgauu

SEQ ID NO: 2115053 - RNA, 19 nt, Homo sapiens
  misc_RNA (1)...(19): siRNA sense strand
gaacagcuaaauacuauga

SEQ ID NO: 2115054 - RNA, 19 nt, Homo sapiens
  misc_RNA (1)...(19): siRNA sense strand
gaaaccaaguuguucucua

SEQ ID NO: 2115055 - RNA, 19 nt, Homo sapiens
  misc_RNA (1)...(19): siRNA sense strand
acugaaagcuaaugacaua

SEQ ID NO: 2115056 - RNA, 19 nt, Homo sapiens
  misc_RNA (1)...(19): siRNA sense strand
gaugaacaaugaugauaga

SEQ ID NO: 2115057 - RNA, 19 nt, Homo sapiens
  misc_RNA (1)...(19): siRNA sense strand
cuaaucagauguucucaaa

SEQ ID NO: 2115058 - RNA, 19 nt, Homo sapiens
  misc_RNA (1)...(19): siRNA sense strand
gaagagagagugagaguca

SEQ ID NO: 2115059 - RNA, 19 nt, Homo sapiens
  misc_RNA (1)...(19): siRNA sense strand
aaaggucucuguuguuauu

SEQ ID NO: 2115060 - RNA, 19 nt, Homo sapiens
  misc_RNA (1)...(19): siRNA sense strand
gcucagcaaugucaccuuu

SEQ ID NO: 2115061 - RNA, 19 nt, Homo sapiens
  misc_RNA (1)...(19): siRNA sense strand
ccacaaguaccuaaugaua

SEQ ID NO: 2115062 - RNA, 19 nt, Homo sapiens
  misc_RNA (1)...(19): siRNA sense strand
gaaaauacuugucaccaaa

SEQ ID NO: 2115063 - RNA, 19 nt, Homo sapiens
  misc_RNA (1)...(19): siRNA sense strand
aagcuucccugcuguguua

SEQ ID NO: 2115064 - RNA, 19 nt, Homo sapiens
  misc_RNA (1)...(19): siRNA sense strand
ccucugcaauugaauauaa

SEQ ID NO: 2115065 - RNA, 19 nt, Homo sapiens
  misc_RNA (1)...(19): siRNA sense strand
gcagaaguuuccaaccaaa

SEQ ID NO: 2115066 - RNA, 19 nt, Homo sapiens
  misc_RNA (1)...(19): siRNA sense strand
ugaccaaacucaaaugaug

SEQ ID NO: 2115067 - RNA, 19 nt, Homo sapiens
  misc_RNA (1)...(19): siRNA sense strand
gaauacauuuggugcuuug

SEQ ID NO: 2115068 - RNA, 19 nt, Homo sapiens
  misc_RNA (1)...(19): siRNA sense strand
aacaguaggucaacagaua

SEQ ID NO: 2115069 - RNA, 19 nt, Homo sapiens
  misc_RNA (1)...(19): siRNA sense strand
gaagagaggaaguauuguu

SEQ ID NO: 2115070 - RNA, 19 nt, Homo sapiens
  misc_RNA (1)...(19): siRNA sense strand
gaaaggaaucguucuggaa

SEQ ID NO: 2115071 - RNA, 19 nt, Homo sapiens
  misc_RNA (1)...(19): siRNA sense strand
gacuagaucuucagacaug

SEQ ID NO: 2115072 - RNA, 19 nt, Homo sapiens
  misc_RNA (1)...(19): siRNA sense strand
uaacuacauugcuaucuga

SEQ ID NO: 2115073 - RNA, 19 nt, Homo sapiens
  misc_RNA (1)...(19): siRNA sense strand
ccaguugggucagcuguua

SEQ ID NO: 2115074 - RNA, 19 nt, Homo sapiens
  misc_RNA (1)...(19): siRNA sense strand
caagaacagcuaaauacua

SEQ ID NO: 2115075 - RNA, 19 nt, Homo sapiens
  misc_RNA (1)...(19): siRNA sense strand
ggaaacacuuagcagcaaa

SEQ ID NO: 2115076 - RNA, 19 nt, Homo sapiens
  misc_RNA (1)...(19): siRNA sense strand
gaccacaguuccugcauug

SEQ ID NO: 2115077 - RNA, 19 nt, Homo sapiens
  misc_RNA (1)...(19): siRNA sense strand
uaaccgauuuggaucaauu

SEQ ID NO: 2115078 - RNA, 19 nt, Homo sapiens
  misc_RNA (1)...(19): siRNA sense strand
ccaaguaguuuagcauuau

SEQ ID NO: 2115079 - RNA, 19 nt, Homo sapiens
  misc_RNA (1)...(19): siRNA sense strand
cagcagagccacccuguaa

SEQ ID NO: 2115080 - RNA, 19 nt, Homo sapiens
  misc_RNA (1)...(19): siRNA sense strand
gauaaaccaccaaguaguu

SEQ ID NO: 2115081 - RNA, 19 nt, Homo sapiens
  misc_RNA (1)...(19): siRNA sense strand
aaacagaccugcccauaac

SEQ ID NO: 2115082 - RNA, 19 nt, Homo sapiens
  misc_RNA (1)...(19): siRNA sense strand
gaugaacuccugcuuaaug

SEQ ID NO: 2115083 - RNA, 19 nt, Homo sapiens
  misc_RNA (1)...(19): siRNA sense strand
acaauucacuggaaaggaa

SEQ ID NO: 2115084 - RNA, 19 nt, Homo sapiens
  misc_RNA (1)...(19): siRNA sense strand
ggaaaccaaaggcaaagua

SEQ ID NO: 2115085 - RNA, 19 nt, Homo sapiens
  misc_RNA (1)...(19): siRNA sense strand
gauauccgccuuucugauu

SEQ ID NO: 2115086 - RNA, 19 nt, Homo sapiens
  misc_RNA (1)...(19): siRNA sense strand
caacccagcucauggagau

SEQ ID NO: 2115087 - RNA, 19 nt, Homo sapiens
  misc_RNA (1)...(19): siRNA sense strand
caacaacuaauacauguga

SEQ ID NO: 2115088 - RNA, 19 nt, Homo sapiens
  misc_RNA (1)...(19): siRNA sense strand
ccucaaaccauuucuuuaa

SEQ ID NO: 2115089 - RNA, 19 nt, Homo sapiens
  misc_RNA (1)...(19): siRNA sense strand
gaauuuacaucccaaacag

SEQ ID NO: 2115090 - RNA, 19 nt, Homo sapiens
  misc_RNA (1)...(19): siRNA sense strand
caaacagaccugcccauaa

SEQ ID NO: 2115091 - RNA, 19 nt, Homo sapiens
  misc_RNA (1)...(19): siRNA sense strand
uggccgauauauugaauua

SEQ ID NO: 2115092 - RNA, 19 nt, Homo sapiens
  misc_RNA (1)...(19): siRNA sense strand
caugaaagccguaaggauu

SEQ ID NO: 2115093 - RNA, 19 nt, Homo sapiens
  misc_RNA (1)...(19): siRNA sense strand
ugacagcuguaccuuugua

SEQ ID NO: 2115094 - RNA, 19 nt, Homo sapiens
  misc_RNA (1)...(19): siRNA sense strand
caggaacuauuacugauga

SEQ ID NO: 2115095 - RNA, 19 nt, Homo sapiens
  misc_RNA (1)...(19): siRNA sense strand
gagccacccuguaaugaug

SEQ ID NO: 2115096 - RNA, 19 nt, Homo sapiens
  misc_RNA (1)...(19): siRNA sense strand
aaucagauguucucaaauc

SEQ ID NO: 2115097 - RNA, 19 nt, Homo sapiens
  misc_RNA (1)...(19): siRNA sense strand
uggcaugaauccaccaaua

SEQ ID NO: 2115098 - RNA, 19 nt, Homo sapiens
  misc_RNA (1)...(19): siRNA sense strand
gcaauuaacaccaggaaca

SEQ ID NO: 2115099 - RNA, 19 nt, Homo sapiens
  misc_RNA (1)...(19): siRNA sense strand
ggagauggccuuacacgau

SEQ ID NO: 2115100 - RNA, 19 nt, Homo sapiens
  misc_RNA (1)...(19): siRNA sense strand
acaacaagcacuacaagua

SEQ ID NO: 2115101 - RNA, 19 nt, Homo sapiens
  misc_RNA (1)...(19): siRNA sense strand
gcccauaacauaagccaua

SEQ ID NO: 2115102 - RNA, 19 nt, Homo sapiens
  misc_RNA (1)...(19): siRNA sense strand
cagcauacacuaucacaaa

SEQ ID NO: 2115103 - RNA, 19 nt, Homo sapiens
  misc_RNA (1)...(19): siRNA sense strand
ucagucagaucccuccuaa

SEQ ID NO: 2115104 - RNA, 19 nt, Homo sapiens
  misc_RNA (1)...(19): siRNA sense strand
acacaugccuaaaugauca

SEQ ID NO: 2115105 - RNA, 19 nt, Homo sapiens
  misc_RNA (1)...(19): siRNA sense strand
gcaugaauccaccaauaaa

SEQ ID NO: 2115106 - RNA, 19 nt, Homo sapiens
  misc_RNA (1)...(19): siRNA sense strand
gaguuuggcuauucauaau

SEQ ID NO: 2115107 - RNA, 19 nt, Homo sapiens
  misc_RNA (1)...(19): siRNA sense strand
caaauucacagauucaaga

SEQ ID NO: 2115108 - RNA, 19 nt, Homo sapiens
  misc_RNA (1)...(19): siRNA sense strand
caccaagcaucaccaguuu

SEQ ID NO: 2115109 - RNA, 19 nt, Homo sapiens
  misc_RNA (1)...(19): siRNA sense strand
ucaaaucacagauaccuaa

SEQ ID NO: 2115110 - RNA, 19 nt, Homo sapiens
  misc_RNA (1)...(19): siRNA sense strand
gaucaagagguuauuaaug

SEQ ID NO: 2115111 - RNA, 19 nt, Homo sapiens
  misc_RNA (1)...(19): siRNA sense strand
aaacaggaacuauuacuga

SEQ ID NO: 2115112 - RNA, 19 nt, Homo sapiens
  misc_RNA (1)...(19): siRNA sense strand
caggauaaaccaccaagua

SEQ ID NO: 2115113 - RNA, 19 nt, Homo sapiens
  misc_RNA (1)...(19): siRNA sense strand
ccaacagccucaaaccauu

SEQ ID NO: 2115114 - RNA, 19 nt, Homo sapiens
  misc_RNA (1)...(19): siRNA sense strand
uaauucagcuccaacuaau

SEQ ID NO: 2115115 - RNA, 19 nt, Homo sapiens
  misc_RNA (1)...(19): siRNA sense strand
ggaaucagccugguggaaa

SEQ ID NO: 2115116 - RNA, 19 nt, Homo sapiens
  misc_RNA (1)...(19): siRNA sense strand
ccagagagaaauagaguuu

SEQ ID NO: 2115117 - RNA, 19 nt, Homo sapiens
  misc_RNA (1)...(19): siRNA sense strand
gacugaauauucccaagaa

SEQ ID NO: 2115118 - RNA, 19 nt, Homo sapiens
  misc_RNA (1)...(19): siRNA sense strand
aaucacagauaccuaaaga

SEQ ID NO: 2115119 - RNA, 19 nt, Homo sapiens
  misc_RNA (1)...(19): siRNA sense strand
gaacaagcugaagaaauaa

SEQ ID NO: 2115120 - RNA, 19 nt, Homo sapiens
  misc_RNA (1)...(19): siRNA sense strand
ggacagcucuuugcuuugc

SEQ ID NO: 2115121 - RNA, 19 nt, Homo sapiens
  misc_RNA (1)...(19): siRNA sense strand
gcgucuaacucaacacaaa

SEQ ID NO: 2115122 - RNA, 19 nt, Homo sapiens
  misc_RNA (1)...(19): siRNA sense strand
cagauguucucaaauccua

SEQ ID NO: 2115123 - RNA, 19 nt, Homo sapiens
  misc_RNA (1)...(19): siRNA sense strand
gcacagaacucacguuggu

SEQ ID NO: 2115124 - RNA, 19 nt, Homo sapiens
  misc_RNA (1)...(19): siRNA sense strand
caacagaagugacugagau

SEQ ID NO: 2115125 - RNA, 19 nt, Homo sapiens
  misc_RNA (1)...(19): siRNA sense strand
gcacaugcuugcugucuca

SEQ ID NO: 2115126 - RNA, 19 nt, Homo sapiens
  misc_RNA (1)...(19): siRNA sense strand
ggcaagcgcuucacacaga

SEQ ID NO: 2115127 - RNA, 19 nt, Homo sapiens
  misc_RNA (1)...(19): siRNA sense strand
ugaagaagaugaugaagag

SEQ ID NO: 2115128 - RNA, 19 nt, Homo sapiens
  misc_RNA (1)...(19): siRNA sense strand
ucacuggucucuacaacaa

SEQ ID NO: 2115129 - RNA, 19 nt, Homo sapiens
  misc_RNA (1)...(19): siRNA sense strand
caacaagagucccuacuac

SEQ ID NO: 2115130 - RNA, 19 nt, Homo sapiens
  misc_RNA (1)...(19): siRNA sense strand
gcacugaccacacagaaug

SEQ ID NO: 2115131 - RNA, 19 nt, Homo sapiens
  misc_RNA (1)...(19): siRNA sense strand
guggagaugucaacaccua

SEQ ID NO: 2115132 - RNA, 19 nt, Homo sapiens
  misc_RNA (1)...(19): siRNA sense strand
ugauggagaugucaacaga

SEQ ID NO: 2115133 - RNA, 19 nt, Homo sapiens
  misc_RNA (1)...(19): siRNA sense strand
cggcagagaugauggagau

SEQ ID NO: 2115134 - RNA, 19 nt, Homo sapiens
  misc_RNA (1)...(19): siRNA sense strand
augaagagauggaggauga

SEQ ID NO: 2115135 - RNA, 19 nt, Homo sapiens
  misc_RNA (1)...(19): siRNA sense strand
caaaccagauccaauacca

SEQ ID NO: 2115136 - RNA, 19 nt, Homo sapiens
  misc_RNA (1)...(19): siRNA sense strand
ggaugaagaagaugaugaa

SEQ ID NO: 2115137 - RNA, 19 nt, Homo sapiens
  misc_RNA (1)...(19): siRNA sense strand
ucagcaacaugaccaaguu

SEQ ID NO: 2115138 - RNA, 19 nt, Homo sapiens
  misc_RNA (1)...(19): siRNA sense strand
ggcaagacguucagcaaca

SEQ ID NO: 2115139 - RNA, 19 nt, Homo sapiens
  misc_RNA (1)...(19): siRNA sense strand
ugaggaggaugaagaagau

SEQ ID NO: 2115140 - RNA, 19 nt, Homo sapiens
  misc_RNA (1)...(19): siRNA sense strand
cugcaaaccagauccaaua

SEQ ID NO: 2115141 - RNA, 19 nt, Homo sapiens
  misc_RNA (1)...(19): siRNA sense strand
gcuacagccucccagauca

SEQ ID NO: 2115142 - RNA, 19 nt, Homo sapiens
  misc_RNA (1)...(19): siRNA sense strand
agaagaugaugaagagaug

SEQ ID NO: 2115143 - RNA, 19 nt, Homo sapiens
  misc_RNA (1)...(19): siRNA sense strand
gcaagacguucagcaacau

SEQ ID NO: 2115144 - RNA, 19 nt, Homo sapiens
  misc_RNA (1)...(19): siRNA sense strand
uggcagaggucggugauga

SEQ ID NO: 2115145 - RNA, 19 nt, Homo sapiens
  misc_RNA (1)...(19): siRNA sense strand
ggagaugucaacagaagug

SEQ ID NO: 2115146 - RNA, 19 nt, Homo sapiens
  misc_RNA (1)...(19): siRNA sense strand
gaguguggcagccucuaua

SEQ ID NO: 2115147 - RNA, 19 nt, Homo sapiens
  misc_RNA (1)...(19): siRNA sense strand
gcaaccaccugcggacaca

SEQ ID NO: 2115148 - RNA, 19 nt, Homo sapiens
  misc_RNA (1)...(19): siRNA sense strand
caucagggcacccacuuug

SEQ ID NO: 2115149 - RNA, 19 nt, Homo sapiens
  misc_RNA (1)...(19): siRNA sense strand
gauggagcccuaugagugu

SEQ ID NO: 2115150 - RNA, 19 nt, Homo sapiens
  misc_RNA (1)...(19): siRNA sense strand
gagaccaucgccaucauug

SEQ ID NO: 2115151 - RNA, 19 nt, Homo sapiens
  misc_RNA (1)...(19): siRNA sense strand
guggguggcucaucgaaag

SEQ ID NO: 2115152 - RNA, 19 nt, Homo sapiens
  misc_RNA (1)...(19): siRNA sense strand
acaacaagagucccuacua

SEQ ID NO: 2115153 - RNA, 19 nt, Homo sapiens
  misc_RNA (1)...(19): siRNA sense strand
ggagaugucaacaccuaug

SEQ ID NO: 2115154 - RNA, 19 nt, Homo sapiens
  misc_RNA (1)...(19): siRNA sense strand
gcagagaugauggagaugu

SEQ ID NO: 2115155 - RNA, 19 nt, Homo sapiens
  misc_RNA (1)...(19): siRNA sense strand
ggagaccaucgccaucauu

SEQ ID NO: 2115156 - RNA, 19 nt, Homo sapiens
  misc_RNA (1)...(19): siRNA sense strand
agaagugacugagaugaca

SEQ ID NO: 2115157 - RNA, 19 nt, Homo sapiens
  misc_RNA (1)...(19): siRNA sense strand
gcagaggucggugaugaug

SEQ ID NO: 2115158 - RNA, 19 nt, Homo sapiens
  misc_RNA (1)...(19): siRNA sense strand
ccacacugccaacccauug

SEQ ID NO: 2115159 - RNA, 19 nt, Homo sapiens
  misc_RNA (1)...(19): siRNA sense strand
gccaccagcugacccauac

SEQ ID NO: 2115160 - RNA, 19 nt, Homo sapiens
  misc_RNA (1)...(19): siRNA sense strand
ugaccaaguuccucuacca

SEQ ID NO: 2115161 - RNA, 19 nt, Homo sapiens
  misc_RNA (1)...(19): siRNA sense strand
cagcaucaccaguucaugu

SEQ ID NO: 2115162 - RNA, 19 nt, Homo sapiens
  misc_RNA (1)...(19): siRNA sense strand
ccucaucccucuucuucca

SEQ ID NO: 2115163 - RNA, 19 nt, Homo sapiens
  misc_RNA (1)...(19): siRNA sense strand
ggaggaagaggacgaugag

SEQ ID NO: 2115164 - RNA, 19 nt, Homo sapiens
  misc_RNA (1)...(19): siRNA sense strand
ucaagauggagcccuauga

SEQ ID NO: 2115165 - RNA, 19 nt, Homo sapiens
  misc_RNA (1)...(19): siRNA sense strand
uggcugagguggccgagau

SEQ ID NO: 2115166 - RNA, 19 nt, Homo sapiens
  misc_RNA (1)...(19): siRNA sense strand
gcaucagggcacccacuuu

SEQ ID NO: 2115167 - RNA, 19 nt, Homo sapiens
  misc_RNA (1)...(19): siRNA sense strand
gaccaucgccaucauugag

SEQ ID NO: 2115168 - RNA, 19 nt, Homo sapiens
  misc_RNA (1)...(19): siRNA sense strand
ggaagcccgcuaccucugu

SEQ ID NO: 2115169 - RNA, 19 nt, Homo sapiens
  misc_RNA (1)...(19): siRNA sense strand
gagaugccaacacagaugu

SEQ ID NO: 2115170 - RNA, 19 nt, Homo sapiens
  misc_RNA (1)...(19): siRNA sense strand
cacuuugacucccuagaga

SEQ ID NO: 2115171 - RNA, 19 nt, Homo sapiens
  misc_RNA (1)...(19): siRNA sense strand
gagaaagaggagcgcaaug

SEQ ID NO: 2115172 - RNA, 19 nt, Homo sapiens
  misc_RNA (1)...(19): siRNA sense strand
cagagaugauggagauguc

SEQ ID NO: 2115173 - RNA, 19 nt, Homo sapiens
  misc_RNA (1)...(19): siRNA sense strand
gggagaccaucgccaucau

SEQ ID NO: 2115174 - RNA, 19 nt, Homo sapiens
  misc_RNA (1)...(19): siRNA sense strand
gccgagaugccaacacaga

SEQ ID NO: 2115175 - RNA, 19 nt, Homo sapiens
  misc_RNA (1)...(19): siRNA sense strand
guucaugugcucugagugu

SEQ ID NO: 2115176 - RNA, 19 nt, Homo sapiens
  misc_RNA (1)...(19): siRNA sense strand
acaagagucccuacuacug

SEQ ID NO: 2115177 - RNA, 19 nt, Homo sapiens
  misc_RNA (1)...(19): siRNA sense strand
cgaugaggaggaugaagaa

SEQ ID NO: 2115178 - RNA, 19 nt, Homo sapiens
  misc_RNA (1)...(19): siRNA sense strand
gagccucaacagacuauca

SEQ ID NO: 2115179 - RNA, 19 nt, Homo sapiens
  misc_RNA (1)...(19): siRNA sense strand
gagaugucaacaccuaugu

SEQ ID NO: 2115180 - RNA, 19 nt, Homo sapiens
  misc_RNA (1)...(19): siRNA sense strand
acaccuaugucggcagaga

SEQ ID NO: 2115181 - RNA, 19 nt, Homo sapiens
  misc_RNA (1)...(19): siRNA sense strand
auaacacacuggaggaagu

SEQ ID NO: 2115182 - RNA, 19 nt, Homo sapiens
  misc_RNA (1)...(19): siRNA sense strand
gugcacgucccuaccaaug

SEQ ID NO: 2115183 - RNA, 19 nt, Homo sapiens
  misc_RNA (1)...(19): siRNA sense strand
gaagaagaugaugaagaga

SEQ ID NO: 2115184 - RNA, 19 nt, Homo sapiens
  misc_RNA (1)...(19): siRNA sense strand
caagauggagcccuaugag

SEQ ID NO: 2115185 - RNA, 19 nt, Homo sapiens
  misc_RNA (1)...(19): siRNA sense strand
cgagaugccaacacagaug

SEQ ID NO: 2115186 - RNA, 19 nt, Homo sapiens
  misc_RNA (1)...(19): siRNA sense strand
caccagugccaccuccuuu

SEQ ID NO: 2115187 - RNA, 19 nt, Homo sapiens
  misc_RNA (1)...(19): siRNA sense strand
caucacuggucucuacaac

SEQ ID NO: 2115188 - RNA, 19 nt, Homo sapiens
  misc_RNA (1)...(19): siRNA sense strand
gagaugauggagaugucaa

SEQ ID NO: 2115189 - RNA, 19 nt, Homo sapiens
  misc_RNA (1)...(19): siRNA sense strand
ggaggaugaagaagaugau

SEQ ID NO: 2115190 - RNA, 19 nt, Homo sapiens
  misc_RNA (1)...(19): siRNA sense strand
ggacgaugaggaggaugaa

SEQ ID NO: 2115191 - RNA, 19 nt, Homo sapiens
  misc_RNA (1)...(19): siRNA sense strand
gcggcaagacguucagcaa

SEQ ID NO: 2115192 - RNA, 19 nt, Homo sapiens
  misc_RNA (1)...(19): siRNA sense strand
uguggcagccucuauaaca

SEQ ID NO: 2115193 - RNA, 19 nt, Homo sapiens
  misc_RNA (1)...(19): siRNA sense strand
acuggucucuacaacaaga

SEQ ID NO: 2115194 - RNA, 19 nt, Homo sapiens
  misc_RNA (1)...(19): siRNA sense strand
aagaagaugaugaagagau

SEQ ID NO: 2115195 - RNA, 19 nt, Homo sapiens
  misc_RNA (1)...(19): siRNA sense strand
agaaagaggagcgcaaugg

SEQ ID NO: 2115196 - RNA, 19 nt, Homo sapiens
  misc_RNA (1)...(19): siRNA sense strand
aggaggcacugaccacaca

SEQ ID NO: 2115197 - RNA, 19 nt, Homo sapiens
  misc_RNA (1)...(19): siRNA sense strand
ggacugccaggagcuguuc

SEQ ID NO: 2115198 - RNA, 19 nt, Homo sapiens
  misc_RNA (1)...(19): siRNA sense strand
agacuaucaugugcacaga

SEQ ID NO: 2115199 - RNA, 19 nt, Homo sapiens
  misc_RNA (1)...(19): siRNA sense strand
ggacuuguggccgcugguu

SEQ ID NO: 2115200 - RNA, 19 nt, Homo sapiens
  misc_RNA (1)...(19): siRNA sense strand
gauggagaugucaacagaa

SEQ ID NO: 2115201 - RNA, 19 nt, Homo sapiens
  misc_RNA (1)...(19): siRNA sense strand
gguuggaggaggaggaaga

SEQ ID NO: 2115202 - RNA, 19 nt, Homo sapiens
  misc_RNA (1)...(19): siRNA sense strand
uugacucccuagagaaaga

SEQ ID NO: 2115203 - RNA, 19 nt, Homo sapiens
  misc_RNA (1)...(19): siRNA sense strand
ccacuuugacucccuagag

SEQ ID NO: 2115204 - RNA, 19 nt, Homo sapiens
  misc_RNA (1)...(19): siRNA sense strand
guggcaagggcuucaagaa

SEQ ID NO: 2115205 - RNA, 19 nt, Homo sapiens
  misc_RNA (1)...(19): siRNA sense strand
gggugcacgucccuaccaa

SEQ ID NO: 2115206 - RNA, 19 nt, Homo sapiens
  misc_RNA (1)...(19): siRNA sense strand
gcaauuacaugguggucua

SEQ ID NO: 2115207 - RNA, 19 nt, Homo sapiens
  misc_RNA (1)...(19): siRNA sense strand
gagaaugacugucggauca

SEQ ID NO: 2115208 - RNA, 19 nt, Homo sapiens
  misc_RNA (1)...(19): siRNA sense strand
gaugaugucuggcuauaug

SEQ ID NO: 2115209 - RNA, 19 nt, Homo sapiens
  misc_RNA (1)...(19): siRNA sense strand
gcaacgagacgcagaauug

SEQ ID NO: 2115210 - RNA, 19 nt, Homo sapiens
  misc_RNA (1)...(19): siRNA sense strand
gcaaagcgagaucguauga

SEQ ID NO: 2115211 - RNA, 19 nt, Homo sapiens
  misc_RNA (1)...(19): siRNA sense strand
gcagcgagaucuccuucuu

SEQ ID NO: 2115212 - RNA, 19 nt, Homo sapiens
  misc_RNA (1)...(19): siRNA sense strand
ggaaggaguuacaaauguc

SEQ ID NO: 2115213 - RNA, 19 nt, Homo sapiens
  misc_RNA (1)...(19): siRNA sense strand
gaacugcaaugcccacacu

SEQ ID NO: 2115214 - RNA, 19 nt, Homo sapiens
  misc_RNA (1)...(19): siRNA sense strand
ggacacagagugcacguau

SEQ ID NO: 2115215 - RNA, 19 nt, Homo sapiens
  misc_RNA (1)...(19): siRNA sense strand
ggcacaggcugcacgagua

SEQ ID NO: 2115216 - RNA, 19 nt, Homo sapiens
  misc_RNA (1)...(19): siRNA sense strand
cgaaggugcuugcauugga

SEQ ID NO: 2115217 - RNA, 19 nt, Homo sapiens
  misc_RNA (1)...(19): siRNA sense strand
ccacaaguaugcaguagag

SEQ ID NO: 2115218 - RNA, 19 nt, Homo sapiens
  misc_RNA (1)...(19): siRNA sense strand
ugacagaggguccuaguga

SEQ ID NO: 2115219 - RNA, 19 nt, Homo sapiens
  misc_RNA (1)...(19): siRNA sense strand
ugggugaccucguccuaua

SEQ ID NO: 2115220 - RNA, 19 nt, Homo sapiens
  misc_RNA (1)...(19): siRNA sense strand
ugcgugaacugccagaaua

SEQ ID NO: 2115221 - RNA, 19 nt, Homo sapiens
  misc_RNA (1)...(19): siRNA sense strand
gacagaggguccuagugaa

SEQ ID NO: 2115222 - RNA, 19 nt, Homo sapiens
  misc_RNA (1)...(19): siRNA sense strand
ccucuggccucuuccguuu

SEQ ID NO: 2115223 - RNA, 19 nt, Homo sapiens
  misc_RNA (1)...(19): siRNA sense strand
gcaccaaaugccaguguaa

SEQ ID NO: 2115224 - RNA, 19 nt, Homo sapiens
  misc_RNA (1)...(19): siRNA sense strand
acacagagugcacguauga

SEQ ID NO: 2115225 - RNA, 19 nt, Homo sapiens
  misc_RNA (1)...(19): siRNA sense strand
gaaauagccacaucugcau

SEQ ID NO: 2115226 - RNA, 19 nt, Homo sapiens
  misc_RNA (1)...(19): siRNA sense strand
gggcaaagcgagaucguau

SEQ ID NO: 2115227 - RNA, 19 nt, Homo sapiens
  misc_RNA (1)...(19): siRNA sense strand
cgagaucuccuucuucuuc

SEQ ID NO: 2115228 - RNA, 19 nt, Homo sapiens
  misc_RNA (1)...(19): siRNA sense strand
gccaggaccucaacaaugc

SEQ ID NO: 2115229 - RNA, 19 nt, Homo sapiens
  misc_RNA (1)...(19): siRNA sense strand
ggagcgagccuuccacaca

SEQ ID NO: 2115230 - RNA, 19 nt, Homo sapiens
  misc_RNA (1)...(19): siRNA sense strand
ccuccugccuggacucuaa

SEQ ID NO: 2115231 - RNA, 19 nt, Homo sapiens
  misc_RNA (1)...(19): siRNA sense strand
gcacguaugacuaccuguu

SEQ ID NO: 2115232 - RNA, 19 nt, Homo sapiens
  misc_RNA (1)...(19): siRNA sense strand
gacgggaagugcaccaaau

SEQ ID NO: 2115233 - RNA, 19 nt, Homo sapiens
  misc_RNA (1)...(19): siRNA sense strand
gaaugugcguggcucaucu

SEQ ID NO: 2115234 - RNA, 19 nt, Homo sapiens
  misc_RNA (1)...(19): siRNA sense strand
ggucgguacucacauguag

SEQ ID NO: 2115235 - RNA, 19 nt, Homo sapiens
  misc_RNA (1)...(19): siRNA sense strand
ggaccacaaguaugcagua

SEQ ID NO: 2115236 - RNA, 19 nt, Homo sapiens
  misc_RNA (1)...(19): siRNA sense strand
gcuauaccauggacaacau

SEQ ID NO: 2115237 - RNA, 19 nt, Homo sapiens
  misc_RNA (1)...(19): siRNA sense strand
ggacuuuaccugcgugugu

SEQ ID NO: 2115238 - RNA, 19 nt, Homo sapiens
  misc_RNA (1)...(19): siRNA sense strand
ccacaccugcuuccuguuu

SEQ ID NO: 2115239 - RNA, 19 nt, Homo sapiens
  misc_RNA (1)...(19): siRNA sense strand
gaagcuuccucaggcaaga

SEQ ID NO: 2115240 - RNA, 19 nt, Homo sapiens
  misc_RNA (1)...(19): siRNA sense strand
ggucagcccucgucacacu

SEQ ID NO: 2115241 - RNA, 19 nt, Homo sapiens
  misc_RNA (1)...(19): siRNA sense strand
gccacucucugcugaaugu

SEQ ID NO: 2115242 - RNA, 19 nt, Homo sapiens
  misc_RNA (1)...(19): siRNA sense strand
ccacgccucagcccuguua

SEQ ID NO: 2115243 - RNA, 19 nt, Homo sapiens
  misc_RNA (1)...(19): siRNA sense strand
gaaaagugcuacgaagaug

SEQ ID NO: 2115244 - RNA, 19 nt, Homo sapiens
  misc_RNA (1)...(19): siRNA sense strand
gccagcgacugaccuguga

SEQ ID NO: 2115245 - RNA, 19 nt, Homo sapiens
  misc_RNA (1)...(19): siRNA sense strand
ccaagugccgggaaucauu

SEQ ID NO: 2115246 - RNA, 19 nt, Homo sapiens
  misc_RNA (1)...(19): siRNA sense strand
agggagagccaaagaagua

SEQ ID NO: 2115247 - RNA, 19 nt, Homo sapiens
  misc_RNA (1)...(19): siRNA sense strand
gagaucguaugaggaaugu

SEQ ID NO: 2115248 - RNA, 19 nt, Homo sapiens
  misc_RNA (1)...(19): siRNA sense strand
gcuacguccuggcguuuga

SEQ ID NO: 2115249 - RNA, 19 nt, Homo sapiens
  misc_RNA (1)...(19): siRNA sense strand
ccuguuugcugccuacuug

SEQ ID NO: 2115250 - RNA, 19 nt, Homo sapiens
  misc_RNA (1)...(19): siRNA sense strand
caagugccgggaaucauuu

SEQ ID NO: 2115251 - RNA, 19 nt, Homo sapiens
  misc_RNA (1)...(19): siRNA sense strand
ggcuguccaugucagaaua

SEQ ID NO: 2115252 - RNA, 19 nt, Homo sapiens
  misc_RNA (1)...(19): siRNA sense strand
aggaaggaguuacaaaugu

SEQ ID NO: 2115253 - RNA, 19 nt, Homo sapiens
  misc_RNA (1)...(19): siRNA sense strand
gcacgaccaucacccuaac

SEQ ID NO: 2115254 - RNA, 19 nt, Homo sapiens
  misc_RNA (1)...(19): siRNA sense strand
gagcugggcccaucacucu

SEQ ID NO: 2115255 - RNA, 19 nt, Homo sapiens
  misc_RNA (1)...(19): siRNA sense strand
ccacugccgcugccacuuu

SEQ ID NO: 2115256 - RNA, 19 nt, Homo sapiens
  misc_RNA (1)...(19): siRNA sense strand
gaccuaggcuggacaucag

SEQ ID NO: 2115257 - RNA, 19 nt, Homo sapiens
  misc_RNA (1)...(19): siRNA sense strand
uggaugaugucuggcuaua

SEQ ID NO: 2115258 - RNA, 19 nt, Homo sapiens
  misc_RNA (1)...(19): siRNA sense strand
ggucuaccguggcuucauc

SEQ ID NO: 2115259 - RNA, 19 nt, Homo sapiens
  misc_RNA (1)...(19): siRNA sense strand
ggacuacugcuccauguac

SEQ ID NO: 2115260 - RNA, 19 nt, Homo sapiens
  misc_RNA (1)...(19): siRNA sense strand
ggacgggaagugcaccaaa

SEQ ID NO: 2115261 - RNA, 19 nt, Homo sapiens
  misc_RNA (1)...(19): siRNA sense strand
ccaaggagccugccaagcu

SEQ ID NO: 2115262 - RNA, 19 nt, Homo sapiens
  misc_RNA (1)...(19): siRNA sense strand
ggccggugguuccugcuuu

SEQ ID NO: 2115263 - RNA, 19 nt, Homo sapiens
  misc_RNA (1)...(19): siRNA sense strand
acauugaccuguuugucuu

SEQ ID NO: 2115264 - RNA, 19 nt, Homo sapiens
  misc_RNA (1)...(19): siRNA sense strand
gcaacuacagcgucaaugg

SEQ ID NO: 2115265 - RNA, 19 nt, Homo sapiens
  misc_RNA (1)...(19): siRNA sense strand
ccaggaaggaguuacaaau

SEQ ID NO: 2115266 - RNA, 19 nt, Homo sapiens
  misc_RNA (1)...(19): siRNA sense strand
ggagugcucagccuacugu

SEQ ID NO: 2115267 - RNA, 19 nt, Homo sapiens
  misc_RNA (1)...(19): siRNA sense strand
acacuggcguccauacugu

SEQ ID NO: 2115268 - RNA, 19 nt, Homo sapiens
  misc_RNA (1)...(19): siRNA sense strand
caggaaggaguuacaaaug

SEQ ID NO: 2115269 - RNA, 19 nt, Homo sapiens
  misc_RNA (1)...(19): siRNA sense strand
ggaggacuguggccauggu

SEQ ID NO: 2115270 - RNA, 19 nt, Homo sapiens
  misc_RNA (1)...(19): siRNA sense strand
gggacuugauggcguacaa

SEQ ID NO: 2115271 - RNA, 19 nt, Homo sapiens
  misc_RNA (1)...(19): siRNA sense strand
ggccaggaccucaacaaug

SEQ ID NO: 2115272 - RNA, 19 nt, Homo sapiens
  misc_RNA (1)...(19): siRNA sense strand
ucaccaacguguccucagu

SEQ ID NO: 2115273 - RNA, 19 nt, Homo sapiens
  misc_RNA (1)...(19): siRNA sense strand
ugcaggagaugaccaagau

SEQ ID NO: 2115274 - RNA, 19 nt, Homo sapiens
  misc_RNA (1)...(19): siRNA sense strand
cgucgagacugcuacaagu

SEQ ID NO: 2115275 - RNA, 19 nt, Homo sapiens
  misc_RNA (1)...(19): siRNA sense strand
gucgggagccgccuguaua

SEQ ID NO: 2115276 - RNA, 19 nt, Homo sapiens
  misc_RNA (1)...(19): siRNA sense strand
ucagugaugccaacuacaa

SEQ ID NO: 2115277 - RNA, 19 nt, Homo sapiens
  misc_RNA (1)...(19): siRNA sense strand
caagggagagccaaagaag

SEQ ID NO: 2115278 - RNA, 19 nt, Homo sapiens
  misc_RNA (1)...(19): siRNA sense strand
ccacguggaucggcaugug

SEQ ID NO: 2115279 - RNA, 19 nt, Homo sapiens
  misc_RNA (1)...(19): siRNA sense strand
gaacuccacugagcuuuuc

SEQ ID NO: 2115280 - RNA, 19 nt, Homo sapiens
  misc_RNA (1)...(19): siRNA sense strand
aaucucaccucaccugaag

SEQ ID NO: 2115281 - RNA, 19 nt, Homo sapiens
  misc_RNA (1)...(19): siRNA sense strand
ggcccacauugaccuguuu

SEQ ID NO: 2115282 - RNA, 19 nt, Homo sapiens
  misc_RNA (1)...(19): siRNA sense strand
ggacgcggcaguucaagag

SEQ ID NO: 2115283 - RNA, 19 nt, Homo sapiens
  misc_RNA (1)...(19): siRNA sense strand
cugcaccucuucagugaug

SEQ ID NO: 2115284 - RNA, 19 nt, Homo sapiens
  misc_RNA (1)...(19): siRNA sense strand
ugaccuguuugucuucuuc

SEQ ID NO: 2115285 - RNA, 19 nt, Homo sapiens
  misc_RNA (1)...(19): siRNA sense strand
gcaggaccaggcccacauu

SEQ ID NO: 2115286 - RNA, 19 nt, Homo sapiens
  misc_RNA (1)...(19): siRNA sense strand
gaccacaaguaugcaguag

SEQ ID NO: 2115287 - RNA, 19 nt, Homo sapiens
  misc_RNA (1)...(19): siRNA sense strand
augacuaccuguucgugua

SEQ ID NO: 2115288 - RNA, 19 nt, Homo sapiens
  misc_RNA (1)...(19): siRNA sense strand
ccaagggagagccaaagaa

SEQ ID NO: 2115289 - RNA, 19 nt, Homo sapiens
  misc_RNA (1)...(19): siRNA sense strand
gggagccgccuguauaucu

SEQ ID NO: 2115290 - RNA, 19 nt, Homo sapiens
  misc_RNA (1)...(19): siRNA sense strand
caaguaugcaguagagauc

SEQ ID NO: 2115291 - RNA, 19 nt, Homo sapiens
  misc_RNA (1)...(19): siRNA sense strand
acauguagcugcggugcuu

SEQ ID NO: 2115292 - RNA, 19 nt, Homo sapiens
  misc_RNA (1)...(19): siRNA sense strand
cagagugcacguaugacua

SEQ ID NO: 2115293 - RNA, 19 nt, Homo sapiens
  misc_RNA (1)...(19): siRNA sense strand
acacagagacgggcacaug

SEQ ID NO: 2115294 - RNA, 19 nt, Homo sapiens
  misc_RNA (1)...(19): siRNA sense strand
uaacagcuauggggagaaa

SEQ ID NO: 2115295 - RNA, 19 nt, Homo sapiens
  misc_RNA (1)...(19): siRNA sense strand
cagaggagauugaaaacug

SEQ ID NO: 2115296 - RNA, 19 nt, Homo sapiens
  misc_RNA (1)...(19): siRNA sense strand
gcaacucagugcgccuugu

SEQ ID NO: 2115297 - RNA, 19 nt, Homo sapiens
  misc_RNA (1)...(19): siRNA sense strand
gacacagagugcacguaug

SEQ ID NO: 2115298 - RNA, 19 nt, Homo sapiens
  misc_RNA (1)...(19): siRNA sense strand
gaagaguccagaggagugu

SEQ ID NO: 2115299 - RNA, 19 nt, Homo sapiens
  misc_RNA (1)...(19): siRNA sense strand
ccaaaugccaguguaaugg

SEQ ID NO: 2115300 - RNA, 19 nt, Homo sapiens
  misc_RNA (1)...(19): siRNA sense strand
gaaugacugucggaucaac

SEQ ID NO: 2115301 - RNA, 19 nt, Homo sapiens
  misc_RNA (1)...(19): siRNA sense strand
guccucaccugaagcuugu

SEQ ID NO: 2115302 - RNA, 19 nt, Homo sapiens
  misc_RNA (1)...(19): siRNA sense strand
acaaccugcugggcuuuaa

SEQ ID NO: 2115303 - RNA, 19 nt, Homo sapiens
  misc_RNA (1)...(19): siRNA sense strand
gcgugaacugccagaauaa

SEQ ID NO: 2115304 - RNA, 19 nt, Homo sapiens
  misc_RNA (1)...(19): siRNA sense strand
ucugugugcuccucuggaa

SEQ ID NO: 2115305 - RNA, 19 nt, Homo sapiens
  misc_RNA (1)...(19): siRNA sense strand
ggaccaggcccacauugac

SEQ ID NO: 2115306 - RNA, 19 nt, Homo sapiens
  misc_RNA (1)...(19): siRNA sense strand
caacaaauauccaccaaua

SEQ ID NO: 2115307 - RNA, 19 nt, Homo sapiens
  misc_RNA (1)...(19): siRNA sense strand
gaaaggccauugagaauau

SEQ ID NO: 2115308 - RNA, 19 nt, Homo sapiens
  misc_RNA (1)...(19): siRNA sense strand
ggacaguucuggaaguaua

SEQ ID NO: 2115309 - RNA, 19 nt, Homo sapiens
  misc_RNA (1)...(19): siRNA sense strand
gaagggagcuagaggcaaa

SEQ ID NO: 2115310 - RNA, 19 nt, Homo sapiens
  misc_RNA (1)...(19): siRNA sense strand
gcaagaagguguaaucauc

SEQ ID NO: 2115311 - RNA, 19 nt, Homo sapiens
  misc_RNA (1)...(19): siRNA sense strand
ggacacagcucucuauugg

SEQ ID NO: 2115312 - RNA, 19 nt, Homo sapiens
  misc_RNA (1)...(19): siRNA sense strand
gaagaacuuuggauucauu

SEQ ID NO: 2115313 - RNA, 19 nt, Homo sapiens
  misc_RNA (1)...(19): siRNA sense strand
gggaaucgcuggagaaaga

SEQ ID NO: 2115314 - RNA, 19 nt, Homo sapiens
  misc_RNA (1)...(19): siRNA sense strand
ucagggagguggaacauua

SEQ ID NO: 2115315 - RNA, 19 nt, Homo sapiens
  misc_RNA (1)...(19): siRNA sense strand
caacagacuuaacucuaua

SEQ ID NO: 2115316 - RNA, 19 nt, Homo sapiens
  misc_RNA (1)...(19): siRNA sense strand
caagaaaucuguacugaag

SEQ ID NO: 2115317 - RNA, 19 nt, Homo sapiens
  misc_RNA (1)...(19): siRNA sense strand
gcaacagacuuaacucuau

SEQ ID NO: 2115318 - RNA, 19 nt, Homo sapiens
  misc_RNA (1)...(19): siRNA sense strand
ugaaggagaugauggcuuu

SEQ ID NO: 2115319 - RNA, 19 nt, Homo sapiens
  misc_RNA (1)...(19): siRNA sense strand
gaaaccaaguuguucaaga

SEQ ID NO: 2115320 - RNA, 19 nt, Homo sapiens
  misc_RNA (1)...(19): siRNA sense strand
ucagggauaugccuuauuu

SEQ ID NO: 2115321 - RNA, 19 nt, Homo sapiens
  misc_RNA (1)...(19): siRNA sense strand
gagaagaaacaaagucaua

SEQ ID NO: 2115322 - RNA, 19 nt, Homo sapiens
  misc_RNA (1)...(19): siRNA sense strand
gaagagcacauccgaguuu

SEQ ID NO: 2115323 - RNA, 19 nt, Homo sapiens
  misc_RNA (1)...(19): siRNA sense strand
ggauaugccuuauuugugu

SEQ ID NO: 2115324 - RNA, 19 nt, Homo sapiens
  misc_RNA (1)...(19): siRNA sense strand
gaagaagcuugcaaagaga

SEQ ID NO: 2115325 - RNA, 19 nt, Homo sapiens
  misc_RNA (1)...(19): siRNA sense strand
gaaguaagcgccucaugaa

SEQ ID NO: 2115326 - RNA, 19 nt, Homo sapiens
  misc_RNA (1)...(19): siRNA sense strand
gggauacauuucagaauaa

SEQ ID NO: 2115327 - RNA, 19 nt, Homo sapiens
  misc_RNA (1)...(19): siRNA sense strand
ugacgacacuggcacauuu

SEQ ID NO: 2115328 - RNA, 19 nt, Homo sapiens
  misc_RNA (1)...(19): siRNA sense strand
ugaagaagcuugcaaagag

SEQ ID NO: 2115329 - RNA, 19 nt, Homo sapiens
  misc_RNA (1)...(19): siRNA sense strand
gggaagugcugaauuugaa

SEQ ID NO: 2115330 - RNA, 19 nt, Homo sapiens
  misc_RNA (1)...(19): siRNA sense strand
gaaaggagaacguggaaga

SEQ ID NO: 2115331 - RNA, 19 nt, Homo sapiens
  misc_RNA (1)...(19): siRNA sense strand
ggaaacagaggacuaaaug

SEQ ID NO: 2115332 - RNA, 19 nt, Homo sapiens
  misc_RNA (1)...(19): siRNA sense strand
caugggaagugcugaauuu

SEQ ID NO: 2115333 - RNA, 19 nt, Homo sapiens
  misc_RNA (1)...(19): siRNA sense strand
guaugcagauguuguguuu

SEQ ID NO: 2115334 - RNA, 19 nt, Homo sapiens
  misc_RNA (1)...(19): siRNA sense strand
ccauagaggccgacaaaua

SEQ ID NO: 2115335 - RNA, 19 nt, Homo sapiens
  misc_RNA (1)...(19): siRNA sense strand
ggauggaccugcugauuca

SEQ ID NO: 2115336 - RNA, 19 nt, Homo sapiens
  misc_RNA (1)...(19): siRNA sense strand
gaagagcaaugccucaaag

SEQ ID NO: 2115337 - RNA, 19 nt, Homo sapiens
  misc_RNA (1)...(19): siRNA sense strand
ggaaaggccauugagaaua

SEQ ID NO: 2115338 - RNA, 19 nt, Homo sapiens
  misc_RNA (1)...(19): siRNA sense strand
gagcaaugccucaaagaaa

SEQ ID NO: 2115339 - RNA, 19 nt, Homo sapiens
  misc_RNA (1)...(19): siRNA sense strand
caacuagcauucagccaaa

SEQ ID NO: 2115340 - RNA, 19 nt, Homo sapiens
  misc_RNA (1)...(19): siRNA sense strand
aaacacagcugagagaaau

SEQ ID NO: 2115341 - RNA, 19 nt, Homo sapiens
  misc_RNA (1)...(19): siRNA sense strand
aaauggaauugacggauua

SEQ ID NO: 2115342 - RNA, 19 nt, Homo sapiens
  misc_RNA (1)...(19): siRNA sense strand
gaucuucccuauauugaau

SEQ ID NO: 2115343 - RNA, 19 nt, Homo sapiens
  misc_RNA (1)...(19): siRNA sense strand
ugggauacauuucagaaua

SEQ ID NO: 2115344 - RNA, 19 nt, Homo sapiens
  misc_RNA (1)...(19): siRNA sense strand
aaaccaaguuguucaagaa

SEQ ID NO: 2115345 - RNA, 19 nt, Homo sapiens
  misc_RNA (1)...(19): siRNA sense strand
agacuuaacucuauagauc

SEQ ID NO: 2115346 - RNA, 19 nt, Homo sapiens
  misc_RNA (1)...(19): siRNA sense strand
caaauggcauguccaagga

SEQ ID NO: 2115347 - RNA, 19 nt, Homo sapiens
  misc_RNA (1)...(19): siRNA sense strand
ucaagcagaucuuuggaaa

SEQ ID NO: 2115348 - RNA, 19 nt, Homo sapiens
  misc_RNA (1)...(19): siRNA sense strand
gagauaucauuucagauug

SEQ ID NO: 2115349 - RNA, 19 nt, Homo sapiens
  misc_RNA (1)...(19): siRNA sense strand
ggaaguauaggaccugaaa

SEQ ID NO: 2115350 - RNA, 19 nt, Homo sapiens
  misc_RNA (1)...(19): siRNA sense strand
cagcuuggccgaauucaua
